United States Patent Application Publication US 2007/0072175 A1 - sequence listing, part 17

SEQ ID NO: 45659 - DNA, 898 bp, Homo Sapiens
atgaagaaggtcaagaagaaaaggtcagaggccagacgccaccgagactccacctcccagcatgctagctccaattccacctctcagcagcctagccctgaatccacaccacagcagcctagtcctgaatccacaccacagcagcctagccctgaatccacaccacagcattccagccttgaaaccacctcccggcagccagcattccaagcccttccagcacccgaaatccgccgctcctcttgctgccttttatctccagatgctaacgtgaaggcagcccctcaatccaggaaagcagggcctctgattcgcgccggcccgcattcctgctcctgtgccacttgcccctgcagctccgcttgctggcgtcgtctggggctatgccatagccgcatcttcgatgtccttctgcctcgggactggcagatggcgccagggagaggactccccaacctgctcaccttctacagaaaatcttcaagaaaaccctccagtcatcgtaacgcgtgtcctccaagccctcggaactgtggctgtggctctgggggctctaggagctgcctactacatcactgaatccttgtgaacaagcccctaggcccacagtctggcagacctccaccagccccaggagttgataggtgatggcgctgggagaagatgttcagaatatctcaaaagccaagtccagaagtttgatgtccttccctgtccagagagtgaagaaccatctgacgacagtgacatctttcctttttggggaaagatgcttctagaattttctttcctaaagtttggtgaacctctcccttggcatcttcctcagctgaagatccagtttccatcaaagggacctctcttgtcaccaaaatttaaaaaaagaaaaaaaaaacga

SEQ ID NO: 45660 - DNA, 423 bp, Homo Sapiens
gtgctgcagaacccccagaccatcatgcacattcaggaccccgcgagccagcggctgacgtggaacaagtccccaaagagcgtccttgtcatcaagaagatgagagatgccagcctactgcagccgttcaaggagctctgcacgcacctcatggaggcacgcggggcaggggggaagggggcctggggtgcacatggagagaacatgatcgtgtatgtggaaaagaaagtgctagaagaccctgccatcgccagcgatgaaagctttggggcagtgaagaagaaattctgtacctttcgagaagattatgatgacatttccaatcagatagacttcatcatctgcctggggggagacgggacgctgctgtacgcttcctcgcttttccagggaacgcagctgttgttctccggagtcggctga

SEQ ID NO: 45661 - DNA, 906 bp, Homo Sapiens
atggaatttgttcttttggggttttctgatattcccaatctccactggatgctttttagtatatttttacttatgtatttgatgatcctgatgtgcaatggcatcataatactactaataaaaattcaccccgctctccagactcccatgtatttttttcttagcaatttttcccttttggaaatctgttatgtaacaatcattatcccaagaatgctcatggacatttggactcagaaaggaaatatttctttgtttgcttgtgctacacaaatgtgtttttttcttatgcttggaggcacggagtgtctccttctgacagtgatggcctatgaccgctacgtggctatttgtaagcctttgcagtatcctctagtgatgaaccacaaagtctgcattcagctgataatagcttcctggaccatcacaattcctgtagtaattggggaaacatgccaaattttccttttgcccttttgcggaactaacacaattaatcatttcttttgtgacatcccgccaatactcaagcttgcttgtggaaacatatttgtgaatgagataacagtccatgtagtagcggtggtgtttatcacggtgccatttctgttgattgttgtctcttatggcaaaattatctccaacattttgaaattgtcatcagccagaggaaaggctaaagccttctccacctgctcatctcacctaatagttgtaatcttattctttggagcaggtactatcacttatttacagcccaaaccacatcagtttcaaaggatggggaaactgatttctcttttctacaccattctgattccaactttgaatcctattatatataccctgaggaacaaagatatcatggtggcattgagaaaattactagctaagttattaacatga

SEQ ID NO: 45662 - DNA, 3408 bp, Homo Sapiens
ctggagccgctgagcccccgctgcggccgggagctgcatgggggagcgccggcagcgcttgggaagatgccccggccggagctgcccctgccggagggctgggaggaggcgcgcgacttcgacggcaaggtctactacatagaccacacgaaccgcaccaccagctggatcgacccgcgggacaggtacaccaaaccgctcacctttgctgactgcattagtgatgagttgccgctaggatgggaagaggcatatgacccacaggttggagattacttcatagaccacaacaccaaaaccactcagattgaggatcctcgagtacaatggcggcgggagcaggaacatatgctgaaggattacctggtggtggcccaggaggctctgagtgcacaaaaggagatctaccaggtgaagcagcagcgcctggagcttgcacagcaggagtaccagcaactgcatgccgtctgggagcataagctgggctcccaggtcagcttggtctctggttcatcatccagctccaagtatgaccctgagatcctgaaagctgaaattgccactgcaaaatcccgggtcaacaagctgaagagagagatggttcacctccagcacgagctgcagttcaaagagcgtggctttcagaccctgaagaaaatcgataagaaaatgtctgatgctcagggcagctacaaactggatgaagctcaggctgtcttgagagaaacaaaagccatcaaaaaggctattacctgtggggaaaaggaaaagcaagatctcattaagagccttgccatgttgaaggacggcttccgcactgacagggggtctcactcagacctgtggtccagcagcagctctctggagagttcgagtttcccgctaccgaaacagtacctggatgtgagctcccagacagacatctcgggaagcttcggcatcaacagcaacaatcagttggcagagaaggtcagattgcgccttcgatatgaagaggctaagagaaggatcgccaacctgaagatccagctggccaagcttgacagtgaggcctggcctggggtgctggactcagagagggaccggctgatccttatcaacgagaaggaggagctgctgaaggagatgcgcttcatcagcccccgcaagtggacccagggggaggtggagcagctggagatggcccggaagcggctggaaaaggacctgcaggcagcccgggacacccagagcaaggcgctgacggagaggttaaagttaaacagtaagaggaaccagcttgtgagagaactggaggaagccacccggcaggtggcaactctgcactcccagctgaaaagtctctcaagcagcatgcagtccctgtcctcaggcagcagccccggatccctcacgtccagccggggctccctggttgcatccagcctggactcctccacttcagccagcttcactgacctctactatgacccctttgagcagctggactcagagctgcagagcaaggtggagttcctgctcctggagggggccaccggcttccggccctcaggctgcatcaccaccatccacgaggatgaggtggccaagacccagaaggcagagggaggtggccgcctgcaggctctgcgttccctgtctggcaccccaaagtccatgacctccctatccccacgttcctctctctcctccccctccccaccctgttcccctctcatggctgaccccctcctggctggtgatgccttcctcaactccttggagtttgaagacccggagctgagtgccactctttgtgaactgagccttggtaacagcgcccaggaaagataccggctggaggaaccaggaacggagggcaagcagctgggccaagctgtgaatacggcccaggggtgtggcctgaaagtggcctgtgtctcagccgccgtatcggacgagtcagtggctggagacagtggtgtgtacgaggcttccgtgcagagactgggtgcttcagaagctgctgcatttgacagtgacgaatcggaagcagtgggtgcgacccgaattcagattgccctgaagtatgatgagaagaataagcaatttgcaatattaatcatccagctgagtaacctttctgctctgttgcagcaacaagaccagaaagtgaatatccgcgtggctgtccttccttgctctgaaagcacaacctgcctgttccggacccggcctctggacgcctcagacactctagtgttcaatgaggtgttctgggtatccatgtcctatccagcccttcaccagaagaccttaagagtcgatgtctgtaccaccgacaggagccatctggaagagtgcctgggaggcgcccagatcagcctggcggaggtctgccggtctggggagaggtcgactcgctggtacaaccttctcagctacaaatacttgaagaaacagagcagggagctcaagccagtgggagtcatggcccctgcctcagggcctgccagcacggacgctgtgtctgctctgttggaacagacagcagtggagctggagaagaggcaggagggcaggagcagcacacagacactggaagacagctggaggtatgaggagaccagtgagaatgaggcagtagccgaggaagaggaggaggaggtggaggaggaggagggagaagaggatgttttcaccgagaaagcctcacctgatatggatgggtacccagcattaaaggtggacaaagagaccaacacggagaccccggccccatcccccacagtggtgcgacctaaggaccggagagtgggcaccccgtcccaggggccatttcttcgagggagcaccatcatccgctctaagaccttctccccaggaccccagagccagtacgtgtgccggctgaatcggagtgatagtgacagctccactctgtccaaaaagccaccttttgttcgaaactccctggagcgacgcagcgtccggatgaagcggccttcctcggtcaagtcgctgcgctccgagcgtctgatccgtacctcgctggacctggagttagacctgcaggcgacaagaacctggcacagccaattgacccaggagatctcggtgctgaaggagctcaaggagcagctggaacaagccaagagccacggggagaaggagctgccacagtggttgcgtgaggacgagcgtttccgcctgctgctgaggatgctggagaagcggcagatggaccgagcggagcacaagggtgagcttcagacagacaagatgatgagggcagctgccaaggatgtgcacaggctccgaggccagagctgtaaggaacccccagaagttcagtctttcagggagaagatggcatttttcacccggcctcggatgaatatcccagctctctctgcagatgacgtctaa

SEQ ID NO: 45663 - DNA, 2183 bp, Homo Sapiens
ggatttttagaccgtggagactgcgctgccctgccctgcacctaccctcactctccgtgttctcactaaggtggaaattgccttccctcactactgacgagaccatgtgtaaaagcgtgaccacagatgagtggaagaaagtcttctatgagaagatggaggaggcaaagccggctgacagctgggacctcatcatagaccccaacctcaagcacaatgtgctgagccctggttggaagcagtacctggaattgcatgcttcaggcaggttccactgctcctggtgctggcacacctggcagtcgccctacgtggtcatcctcttccacatgttcctggaccgcgcccagcgggcgggctcggtgcgcatgcgcgtcttcaagcagctgtgctatgagtgcggcacggcgcggctggacgagtccagcatgctggaggagaacatcgagggcctggtggacaacctcatcaccagcctgcgcgagcagtgctacggcgagcgtggcggccagtaccgcatccacgtggccagccgccaggacaaccggcggcaccgcggagagttctgcgaggcctgccaggagggcatcgtgcactggaagcccagcgagaagctgctggaggaggaggcgaccacctacaccttctcccgggcgcccagccccaccaagtcgcaggaccagacgggctcaggctggaacttctgctctatcccctggtgcttgttttgggccacggtcctgctgctgatcatctacctgcagttctctttccgtagctccgtataagattccgtggttgggcccagagcctgtcgagggtgccagttagctgatgcgagggtagaggagagacgtgggttgagaatagtgtaaacttctagcgctggtgatgtcactgactcagtggggatcttggacaaattatacagtttttccatctataaaactcagggtttgggcaagatcattggtttatcatagtgaaacccaggaccccaaagttctgcgtaggtgcctcagggacttttggatttggaaagtaggctaagctagtgggtgtctccaactcctgatctaaacacccatcctccaactcctacctcctcctcttgcttcgatcagaacagctttactttagatagggttccatttaagatttttgtaccaaaaaaaaaaaaaaaaaaagtttaactacttttaaaaagtttgaaaattagaggactgggtgatctcaaaagggctttccacagtaatgagctcgaccttgctcttattagtccctcacccctgcccctcatgatctcccactttctctagctgcagccttaaattagcttctttgcccaccctgtgagcctcatccgtgattctgccttcacacacgcagcagaggtttcccttgaagtgcaagaggtgggagatcaggctgttcctttgctgccaggtacacagggtctcttttttttgtttctcagattccagcttctttccactcagggcagattctggggtctgcctgcctgaaagatggtggttggggtggggtctcatagagttaggcttctcacccactgcgtattaactggcagagaatttaggggaggttcagaagacagagttttagaagcaaagcacaaaatctctgggaggcattataatggagggtcttcagagttcggggaccaagtctagcagattctcagcagtgctgatggccagaattcaggagcaggggcctggcctcctgggttctttgctgaaattatagttgaatggctttctcacattggccaagcatgaggcctcttgccaaagatcagctgtccccctaaagccacagggatggggtatcttcagcaagagagagggcgttaaagatgtaaaatgctttgtccatggggaagtgcacagatatgtgggagaaccttacaaggctctaaaatgagatgtgatatggcttgaaatgggaggagacactttctgacagtggggggtctggaatggaattggtggggacaggcagcaagctgcacttttgaggggcctcatttaccccacctctgttaaaaacttgactactctcctctttaatagaaagtcaccatcatctgtagtgatggaggaagggggtcacttatataaagatgggacactttaataaagacaggatatcttccataa

SEQ ID NO: 45664 - DNA, 714 bp, Homo Sapiens
atgacgactctgctgggaaacctcctcatcatggtcactgtcacctgtgaatcttgccttcacatgcccatgtattttttgctccataatttatctattgccgatatctgcttctactccatcacagagcccaaggttctggtggaccttctgtctgagagaaagaccatctccttcaatggttgcttcactcagatgtttctcttccaccttattggaggggtggatgcattttctctatcagtgatggcattggatcaatatgtggccatttccaagtccctgcactatgcgaccatcatgagtagagaccgttgcattgggctcacagtggctgcctggttggggggctttgtccactccattgtgcagattaccctgttgctcccactccctttctgtggaccaaatgttcttgacactttctactgtgatgttccccaggttctcaaactcgcccatacagacattttcatacttgagctgttgatgatttccaacaatggactgctcaccacactgtggtttttcctgctcctggtgtcctacatgggcaggaggaaagtcatctccacctgcacctcccacatcactgtggtgaccctgcattttgtgccctgcatctatgtctatgcccggcctttcactgccctccccacggataaggccatctctgtcaccttcactgtcatctcccctctgctcaacccttga

SEQ ID NO: 45665 - DNA, 660 bp, Homo Sapiens
atggctgtccctcccatgtacactgatcttgacaaatgtaccagggatgtcttcaccaagcggtatagattaggattaataaagcttcatttgaaaacaaaatatgggaatagactggatgttacaagctcaggctcagccaatcctgaggccatcaaagtgacaggtagtctggaaaccaagaacagatggatcaaatgtggcctgacatttacagagaagtggaacactgacaagacattaggtgcagagttactggagaagatgagctttttacatggactaaagttgacctgtgattcagcctcctcacctaacactgggggcaaaatgctaaaatcaagacagggtacaagtgagtacatcaacctgggctgcaacgtggattttgacatctccaggactttcatccaaggtgctctcatgctgagttacaaggactggctggctggataccaaatacattttgagatcaaagagtcccaggtgaccatgacttttgttggcttcaagactgatgaattccagcatcacactaatataaatgacagttttggcacctccacttaccagaaggtgagcaagactttggagatcactgtcaatcatgcatggacattaggaaacaataacacttgctttggaacagcagccaagtag

SEQ ID NO: 45666 - DNA, 2879 bp, Homo Sapiens
ggggcaagcccaagccgcagagggggccgccaccgcctcctgcctcctcttcgtctcctccccctcccccgtctgacgctgcctcctcgggaagggtgtttggagggcagcggccgccccaagccggagccccgcagcgcttcttatgatcagctcggtgtgtgtctcctcctaccgcgggcgcaagtcggggaacaagcctccgtccaaaacatgtctgaaggaggagatggccaagggcgaggcgtcggagaagatcatcatcaacgtgggcggcacgcgacatgagacctaccgcagcaccctgcgcaccctaccgggaacccgcctcgcctggctggccgaccccgacggcgggggccggcccgagaccgatggcggcggtgtgggtagcagcggcagcagcggcggcgggggctgcgagttcttcttcgacaggcacccgggcgtcttcgcctacgtgctcaactactaccgcaccggcaagctgcactgccccgcggacgtgtgcgggccgctcttcgaagaggagctcaccttctggggcatcgacgagaccgacgtggaaccctgctgctggatgacctaccggcagcaccgcgacgccgaggaggcgctcgacatcttcgagagcccggacggaggcggcagcggcgcggggcccagcgacgaggccggcgacgatgagcgggagctggccctgcagcgactgggcccccacgagggaggcgcgggccatggcgccgggtctgggggctgccgcggctggcagccccgcatgtgggcgctcttcgaggatccctactcctcccgggccgctagggtagtggcctttgcctctctcttcttcatcctggtctccatcaccactttctgcctggagacccatgaggcctttaatatcgaccgcaacgtgacagagatcctccgcgtagggaacatcaccagcgtgcacttccggcgggaggtagagacagagcccatcctgacctacatcgagggcgtatgtgtgctgtggttcacactggagttcctggtgcgcatcgtgtgctgccccgacacgctggacttcgtcaagaacctgctcaacatcatcgactttgtggccatcctgcccttctacctggaggtggggctgagcggcctgtcatccaaggcggcccgcgacgtgctgggcttcctgcgcgtggtgcgcttcgtgcgcatcctgcgtatcttcaagctcacacgccacttcgtggggctacgcgtgctgggccacaccctgagggccagcaccaatgagttcctgctgcttatcatcttcctggccctgggtgtgctcatctttgccaccatgatctactacgctgagcgcattggggccaggccctccgaccctcggggtaatgaccacaccgacttcaagaacatccccattggcttctggtgggctgtggtcaccatgacgacactgggctacggagacatgtaccccaagacgtggtcaggcatgctggtaggggcactgtgtgcactggctggcgtgctcaccatcgccatgccggtgcctgtcatcgtcaacaacttcggcatgtactactccctggccatggccaagcagaagctgcccaagaaacggaagaagcacgtgccacggccggcgcagctggagtcacccatgtactgcaagtctgaggagacttccccccgggacagcacctgcagtgataccagcccccctgcccgggaagagggtatgatcgagaggaaacgggcagactctaagcagaatggcgatgccaacgcagtgctgtctgatgaggagggagctggcctcacccaacccctggcctcctccccgacccccgaggagcgccgggccctgcgacgctccaccactcgagacagaaacaagaaggcagctgcctgcttcctgctcagcactggggactatgcctgcgccgatggtagtgtccggaaaggcacattcgtcctccgtgaccttccccttcagcattcacctgaggctgcatgccctccaactgctgggactctgttcctgccacattgaggaagggggctgggcacgacatggcatcatactcaggagccttcttcaccagctccttgggacaatggaatatcccagggtggtgacagcagatggagctacttgggggagagctcaagttggtcaggcaacagctggggtgatggcctgtgagccacaggccacatcaggaactttccccactgcctccatgcaaggctgcagagctatggtccctttctccactgcactggagctttgaagacctaagaggctagtggttcctggagctagtggttacctgaacagagacctgccaagacgccctctcgtccaactatgcccaggctgaagtcctcaccctctcttaaagcggcaccaacgtgagagagacaggcagacagacagaaagccagaggcttagggaaactctggaacccagacaagaatcttttcgctgggaaagactcagatatccttgtttgcacaggactggtggaaaatctcccatgcgaccctcggggcccagagccatctgggtctgatgttctgttccattgtacatcgaagagatatatatgcacatatagtatctatattcatacatattatactcttgtgtgtagtgcacgtgctattggtggtttgtcttctttgttaggctgtgtctccctaagcccttgccccacccagagtttcccgtccccttcactgatttctgttgtttctgctgactgtgtgggtggaatgtcccaagaaaagtgcatctgggaattgccagtccagctgggtagtcccaggctcctgtcttggggatgtttcccctgtcagcaagtaacctggtgaa

SEQ ID NO: 45667 - DNA, 942 bp, Homo Sapiens
aaagctgcaatctcaaataaaattaccagttgtgtttttcagttgttacaggaagcaagtgtcaaaactgctttcaccagaaaatgtggggaaacagacgcttttgctgctcccgagtgtgaaatgattccaactgaatgggtttgcagaagaatagcaactgattcttttttcaaaagaaatcctgatgacaaggaaggatataagttttacccacctaaagtggagatgtttttcaaggatgatgccagtaatgacccagagtcatctgaggaacagctaattgctccaaaattttgctttggtgaacttctcataggccaaactgaagtggatatcatgtcatatactacactcttttttgaaatactggagaaatcttggttgccccagaactgtatgctggttgatatgaagatcaaatttggtgttgatgtaacccctaaagaaattgttcttgctgatgttattgataatgattcctggagactctggccatcagtagatggaagccaacagaaagacaaacagcctcatcaggacctcaaagaagtaactcctgaagggctcaagatggttaaaaacttagagtgggttgcagagagagaagagttgcttttgaaattagaaataacatctgtgcataaaggaccagataaaactctgcggattaaaggtgagtgtgaaggggatggcattcccactgtgtttgtggcagtggcaggcagaagaaatggtttgggaccagtgacgtctgggaacactgcatatccagttatcagctgtcctccgcaagcagactggggagctcaggatgtgtggtcttctcctcgactacccagtggtctcagctgctcaaccaccctttctccagaaggatcagctcagtttgctgcacagatatttgggttaaacaatcatttgctgtggggcagactgtga

SEQ ID NO: 45668 - DNA, 611 bp, Homo Sapiens
atgaaggtccatatgcttgtaggtgtgctggtcatggtgggcttcacagtaggaaaggttcctgttcccgacatccggacgtgccacttctgcctcgtagaagacccttctgtaggatgcatttcaggctcagagaagtgtaccatcagcagctcatccctgtgcatggtgatcaccatctattatgatgtcaaggttcgcttcatcgttcgaggctgtggacagtacatttcctaccgctgccaagaaaaacgcaacacctactttgcagagtactggtatcaggcccagtgctgtcagtacgattattgcaactcctggtcaagcccccaactccagagctctctgccggagccccatgacaggcccctggccctgcctctgtctgactcccagattcagtggttctaccaggccctgaacctctccctgcccctccccaatttccatgctgggacggagcctgatggcctggaccccatggtcacactgtccctgaacctgggcttgtcttttgctgagctgcgccgcatgtacttgttcctcaatagttcaggacttttggttcttccccaggctggactcttgacacctcacccttcctgaattcc

SEQ ID NO: 45669 - DNA, 600 bp, Homo Sapiens
atggcagcggccggggccccggatggcatggaggaacctggcatggacaccgaagctaagaccgtggcgaccgaggcgctggcacggcccctcaactgcttggaggccgaagccacggcaggagcgggggcagggacggtggccgaggactccggcaccgcgcgaggcagcctgcagcctgcaccagcccaggcccctggagaccccgtgtcccaggcttctgtcagcaacggcgaagactcgggcggcagcgcagacagcgagctggtggacctgaggatcatctggaacaagaccaagcacgacgtgaagttccccctggacagcacaggctccgaactgaaacagaagatccacattacaggtctcccgcctgccatacagaaagtcatgtataagggactcgtccctgaggataagacattgagagaaataaaagtgaccagtggggccaagatcatggtggttggctccaccatcaatgatgttttagcagtaaacacacccaaagatgctgcgcagcaggatgcaaaggccaaagacaacaagaaggagcctctctgcaggcagaaacaacacaggaaagcgttggataaagga

SEQ ID NO: 45670 - DNA, 1406 bp, Homo Sapiens
gagcaagatggctgtggagctgggcgtgctgctcgtccggccccggcccggaaccgggctgggtagagtgatgcggaccctcctgctggtgctgtggctggcgacgcgcggaagcgcgctctactttcacatcggagagacggagaagaagtgctttattgaggagatcccggacgagaccatggtcataggaaactaccggacgcagctgtatgacaagcagcgggaggagtaccagccggccaccccggggcttggcatgtttgtggaggtgaaggacccagaggacaaggtcatcctggcccggcagtatggctccgagggcaggttcactttcacttcccatacccctggtgagcaccagatctgtcttcactccaattccaccaagttctccctctttgctggaggcatgctgagagttcacctggacatccaggtaggtgaacatgccaatgactatgcagaaattgctgctaaagacaagttgagtgagttgcagctacgagtgcgacagctggtggaacaagtggagcagatccagaaagagcagaactaccagcggtggcgagaggagcgcttccggcagaccagtgagagcaccaaccagcgggtgctgtggtggtccattctgcagaccctcatcctcgtggccatcggtgtctggcagatgcggcacctcaagagcttctttgaagccaagaagcttgtgtagctgtcccaggcgtcacaacccatcctcccaggctgggggagaaaggacctcctggaactgacttcttctgtcaggaggactggtttccagccatacctgttctggaagggagaggggctggaggcacccacaggcacaagctgaaggcagcagcttggctaatactgagcaggtagtggggcaaattcctgccctctctctctggcctctgggccgtttggtagtaatcacccaagggctggtaaagcccctcctcttggcacctcagaatcacagtgttactgatcagggatgtgaggctgctgttgggggtggggggaggggaatgggcaggcaagccagtcttctgtcttcctttgctaacttagggttttgagcaggttggggtatggtgcctgtcatacccacctgccaccctgggaacctcactgttctctctttcagcctagacctgctgatccagggtgtgtgtgagttgagggtgggtggaggggtttgcagtgtgggaatgtggccctgcagttgacctgagctgcttcacatggttgtccattctggggcttaaagaactgggaccagaccaagtagaggccttggtgctggttggggtggggcctgcagagtcttagttactgatttcattttcaataaatgtaggtttgttacatgagtttcccaataaaaaaaaaaa

SEQ ID NO: 45671 - DNA, 1298 bp, Homo Sapiens
tcgcgcccgcttttctctcgggtgatccggccgagtggccctgggttagcagctgctgcatttccccggctggctgcggtcactggtggcagtgctcaggcgcccgccgcccttgaccttcggccccgcgagctctaaccctacagcgcaggaagatcggccgccgcggccaggctctgatgctggtgtctggtagaagaaggttactcacagttctgctgcaggctcagaagtggccctttcaaccctccagagacatgagactagtgcagttccgggcaccccacctggtggggcctcacttgggcctggagacagggaatggtggaggggttatcaacctcaatgcctttgaccccacactcccgaagacgatgacgcagttcctagagcagggagaggccaccctctcagtggcaagaagagccctggctgcccagttgccagtcctaccacggtcggaggtaaccttcctggctccagtcacacgaccagataaggtggtgtgtgtgggcatgaattatgtggaccactgcaaagaacagaacgtgcccgtgcccaaggagcccatcatcttcagcaagtttgccagctccatcgtggggccctatgatgaggtggtcctcccaccacagagccaggaggtagattgggaagtggagctggccgtggtcattggaaagaaaggcaagcacatcaaggccacagatgctatggcccacgtggccggcttcactgtggctcatgacgtgagtgctcgtgactggcaaatgagacgtaatgggaaacaatggctgctgggaaaaaccttcgacaccttctgccctctgggccctgccttggtgaccaaggacagtgtagcagatccacacaacttaaagatctgctgccgagtgaatggggaagtggtccagagcggcaacaccaaccagatggtattcaagacagaggacctgatagcctgggtctcccagtttgttaccttttacccaggggatgtcatcctaactgggacccccccaggtgtcggtgtattcaggaaacctcctgtctttctcaagaagggggatgaagtccagtgtgagattgaagaactaggtgtcatcatcaacaaggtggtgtgatggctcctgcacaggccctgcacataggatgagggcatctgctcccactcagcctagcccagggaaaggcccagtgacaggtgtggacaggtgccagccctgcaagccgcctcttctcggtagaagggagaaggacagagctctcttcaataaattcgtcaggtcaaagcagca

SEQ ID NO: 45672 - DNA, 306 bp, Homo Sapiens
atgcaccaaggaaaggccatttgtggggacatagcaagaaggcagctgtctgcaagccaggaggagaaccctcaccagaaacctcacagaaatcggccaacaccctcatctcgggcttccagcttcagaacaacgagaaaacaaatttctgttgtgtcctggttcccatttgtaattggcaccctaatgaaaccgttttctgtagccctggaaatggctgaaaatgaggggagggaaataaagtgctataattcagagcatggagcacaccttcctggttcacctgagctggattcggagaggtag

SEQ ID NO: 45673 - DNA, 1922 bp, Homo Sapiens
caggtgttggtgcctgccgtgaacgcattctgacctgggccgtatctgtctcccaagactttgtgcctatggttggggacagagtgaggtcgttgccttgacgacgacagcatgcggcccgtggtcctcctaagtgtgagcttgcggcggaccgaggcccacctgcctccctgcctgcttcgccctggactcgtgactgcgtccgcagaagaaatcacaacagcgctggaattgctagtttgctaggcagcatcttttggacctgcgaaccatatgcatttcacctcaaatttgtttccaagttgaaaacctttgggtctttctatgcgaacggattgaagaaacgcaaaaagtttctacggactttaaattaaaatggaaaaatatgaaaacctgggtttggttggagaagggagttatggaatggtgatgaagtgtaggaataaagatactggaagaattgtggccataaagaagttcttagaaagtgacgatgacaaaatggttaaaaagattgcaatgcgagaaatcaagttactaaagcaacttaggcatgaaaacttggtgaatctcttggaagtgtgtaagaaaaaaaaacgatggtacctagtctttgaatttgttgaccacacaattcttgatgacttggagctctttccaaatggactagactaccaagtagttcaaaagtatttgtttcagattattaatggaattggattttgtcacagtcacaatatcatacacagagatataaagccagagaatatattagtctcccagtctggcgttgtcaagctatgcgattttggatttgcgcgaacattggcagctcctggggaggtttatactgattatgtggcaacccgatggtacagagctccagaactattggttggtgatgtcaagtatggcaaggctgttgatgtgtgggccattggttgtctggtaactgaaatgttcatgggggaacccctatttcctggagattctgatattgatcagctatatcatattatgatgtgtttaggtaatctaattccaaggcatcaggagctttttaataaaaatcctgtgtttgctggagtaaggttgcctgaaatcaaggaaagagaacctcttgaaagacgctatcctaagctctctgaagtggtgatagatttagcaaagaaatgcttacatattgaccccgacaaaagacccttctgtgctgagctcctacaccatgatttctttcaaatggatggatttgctgagaggttttcccaagaactacagttaaaagtacagaaagatgccagaaatgtttctttatctaaaaaatcccaaaacagaaagaaggaaaaagaaaaagatgattccttagttgaagaaagaaaaacacttgtggtacaggataccaatgctgatcccaaaattaaggattataaactatttaaaataaaaggctcaaaaattgatggagaaaaagctgaaaaaggcaatagagcttcaaatgccagctgtctccatgacagtaggacaagccacaacaaaatagtgccttcaacaagcctcaaagactgcagcaatgtcagcgtggaccacacaaggaatccaagcgtggcaattcccccacttacacacaatctttctgcagttgctcccagcattaattctggaatggggactgagactataccaattcagggttacagagtggatgagaaaactaagaagtgttctattccatttgttaaaccgaacagacattccccatcaggcatttataacattaatgtgaccacattagtatcaggacctcccctgtcagatgattcaggggctgatttgcctcaaatggaacaccagcactgagaaccattttggttctgaactggatgatgctcttgcacttgagatgacatcttcttgcagcaaga

SEQ ID NO: 45674 - DNA, 480 bp, Homo Sapiens
atggagtccaggccctcggggagacagcacgccagtgagggagatggagaccaatcacccacccagtgtgcggggatgagaagctcgggaaggtctgaccagccttacgtcttgaaagggaatcccctgcttctgcgtgtcaggtgttactcggggtgcgccagtggaagcgggaggcagttgcagctttcagtcttccaggatctcaaccagttctctcactgcagagtctggagaagcccagccctcattgtgaagggagagccaccgtggtgctcacagcaagacacccagagtcccttccagacagggacacccctggagcgaccctgtttcagaatgaagttatctgggtgggaactcaccaagaatgcacagagggcgctgggctccaagcttcagcatatcctttcactggactccacacaggcctgcggagcaggtggacccaccattctcagaccccccagggccccatag

SEQ ID NO: 45675 - DNA, 1011 bp, Homo Sapiens
ctgaaagcaaaatcagaggggaagcttgcaaaacagatttgcaaagttgtgttggatcattttgaaaaacagtattccaaagaactcggagatgcctggaatacagtaagggagatactaacatctccatcatgctggcaatatgctgtcctgcttaaccgattcaattatccttttgaactggaaaaggatttacatttgaagggctatcacacactctctcagggatctttacccaactatcctaaatcagtgaagtgttaccttagcagaactccgggccgaatcccttcagaaagacaccaaattggaaacctgaaaaaatattatctcctaaatgctgcttctcttctcccagtgttggctctggaattaagggatggggagaaggttctggatctctgtgctgctcctggagggaaatcaatagctctgctgcagtgtgcttgtccaggttatcttcattgtaatgaatatgatagtctgagattgaggtggctaaggcagacgttggaatctttcatcccacagcctttgataaatgtaattaaagtgtctgaattggatggcagaaaaatgggagatgcccagcctgaaatgtttgacaaggtgttagtggatgctccgtgttcaaatgatcgaagctggttgttttcttctgactctcagaaggcatcctgtaggataagtcaaaggaggaatttgcctcttctacagatagagctgttaaggtctgcaattaaggccttacgtcctggagggatacttgtatactctacatgcacgctttccaaggcagaaaatcaagatgtgatcagtgaaattttaaactcccacggtaacatcatgcctatggacattaaaggaatagcaaggacttgctcccacgacttcacatttgctcccactggccaggaatgtgggctcttagtgattccagataagggcaaagcctggggcccaatgtatgtagccaaattgaagaaatcatggagcacaggaaaatggtga

SEQ ID NO: 45676 - DNA, 954 bp, Homo Sapiens
atggagtctcgctctggcatccaggctggagtgcggtgtcgcgatctcggctcactgcaacctccgcctctcgcgttaaagcagttctccagcctcagtctcccaagcagctgggattataggcgcctgccaccacgctgtggcttcctttttgaagtcagcgagaccacgaacccaccggcaggaaccaactccagacacactttgaccgtgaagttggacggactagcgaagatccggactgctcgggaagctccatccgaatgtgtctgccccccagggccccctggacggcgcggcaagcctgggagaagaggcgaccctgccacaccctcccccatgggtccttcagcacaaccggtggtgatgcctctccctgtcttttgttcccagggtgcaccaggagactttggcccccggggagaccaaggacaagatggagctgctgggcctccggggccccctggacctcctggggcccggggccctcctggcgacactgggaaagatggccccaggggagcacaaggcccagcgggccccaaaggagagcccggacaagacggcgagatggtcaaggagggaggggcccactggccacccgagggtctgaccggcaagccccaggtgtcctctcctcagggcgacgatgggacaccaagccagcctggaccaccagggcccaagggcgagccagggagcatggggcctcggggagagaacggtgtggacggtgccccaggaccgaagggggagcctggccaccgaggcacggatggagctgcagggccccggggtgacgtccgggatcctggcctcggctctgtctcctcatgctcccagaggctggcttcttcctccaaaaaaaatggatctgagcccccgcctggctgtgcaggtgggtgccccaggcctcaagggcgagcagggagacacagtggtgatcgactatga

SEQ ID NO: 45677 - DNA, 459 bp, Homo Sapiens
atgaggagccggagtaactccggggtccggctggacggctacgctcgactggtgcaacagaccatcctgtgccatcagaatccagtgactggcttgcttccagccagctatgatcagaaagatgcttgggtccgagataatgtgtacagcatcttggctgtgtggggtttgggcctggcctatcggaagaatgcagaccgggatgaggataaggcaaaggcctatgaattggagcagagtgtagtgaagctgatgagaggactactgcactgcatgatcagacaggtggataaagtagaatccttcaaatatagtcagagtactaaggatagcctccatgcaaagtacaacaccaaaacctgtgccactgtagtgggtgatgatcaatggggacacctgcagttggatgctacctctgtgtacctgctcttcttagcccaaatgactgcctcaggtcag

SEQ ID NO: 45678 - DNA, 438 bp, Homo Sapiens
agctagccagacccgggccctgagctcccagctggaggaagcccgggctgcccagagggagctggaggcccaggtgtcctccctgagccggcaggtgacgcagctgcagggacagtgggagcaacgccttgaggagtcgtcccaggccaagaccatccacacagcctctgagaccaacgggatgggaccccctgagggtgggcctcaggaggcccaactgaggaaggaggtggccgccctgcgagagcagctggagcaggcccacagccacaggccgagtggtaaggaggaggctctgtgccagctgcaggaggaaaaccggaggctgagccgggagcaggagcggctagaagcagagctggcccaggagcaggagagcaagcagcggctggagggtgagcggcgggagacggagagcaactgggaggcccagctcgc

SEQ ID NO: 45679 - DNA, 1682 bp, Homo Sapiens
ggagcaggggtgaagggtgaaaagcgtcattcgaggtccgggtccggcttgcggggtcagcgaactggagaggcgccatgggctggatcacagaagatcttattagacggaatgctgaacacaacgactgtgtcattttttccctggaggaactctcgttgcatcagcaagaaatagaaagactagaacacattgataaatggtgccgggatttaaaaattctctatcttcaaaataatcttattgggaaaattgaaaatgttagcaaactcaagaaacttgaatatttgaatttagctttaaacaacattgaaaaaatagaaaacttggaaggatgtgaagagctggcaaaacttgacctgactgtgaatttcattggagagctgagcagcattaaaaacttgcagcacaatatccatctgaaggagctctttctcatggggaacccatgtgcttcctttgaccactatagggagttcgtggtagcaactcttccacaattaaagtggttggatggtaaagaaatagagccttcagaaaggattaaggcattgcaggactattcagtaattgaaccacaaatcagagagcaggaaaaagatcactgtcttaaacgagccaaactcaaggaagaggctcagaggaaacaccaagaagaggataaaaatgaagacaagagaagtaacgcaggctttgatggacgttggtacacagacatcaatgctactctttcctctttagagagcaaagaccacctacaggcaccagacacagaggaacacaacacaaagaaattagacaacagtgaagatgacttggaattctggaataagccctgtttgtttactcctgaatcaagattggaaactcttagacacatggaaaaacaacggaagaaacaggaaaaattaagtgaaaaaaagaagaaagtgaaaccacccaggactttgatcactgaagatgggaaagccctaaatgtgaatgagcccaaaattgacttctctttgaaagataacgaaaagcagatcatcctggaccttgctgtctataggtatatggatacctctttaatcgatgttgatgtgcaaccaacttacgtgcgagtaatgatcaaaggaaagccatttcagcttgtccttcctgcagaagtgaaacccgatagtagttctgctaaaagatctcagacaacgggtcatttggtcatctgcatgcccaaggtaggagaagtaatcacaggtggtcagcgagcattcaaatctatgaaaactacctcggacaggagcagagaacaaacaaatacaagaagcaagcacatggagaaactagaagtagaccctagcaagcactcattccctgatgtgactaacatagttcaagagaaaaaacacacacccagaagacgacctgaacccaaaattataccaagtgaggaagacccaacctttgaagacaaccctgaagtgcctccgctgatttgaaacatctggctgcgttgccattggctgagacccaccaggtccagttttggttggtgtagagaccatatgcatattattcctgggataaacacagagttatttgtcaatatcgctgctccagtgttttaactcttactttgcatagtaatatccttaagatagcttaaaattaaaatgtatgtcttaaatgctataactcatcat

SEQ ID NO: 45680 - DNA, 2035 bp, Homo Sapiens
cgcagagggccggggctacggggcagcgccccgggcgatgaggggccggcgttgaccgggaagagcgggcaccgcggcagtggctccgaggggacccgcgatggcagcgccctgagaggaggctccaggcagggcgggctgcgctggcagcggccgctgaggtgctggccggccggctggctggcgacgggggcagaagcgacgagaggcgcgctcggcacccgcacccccgtgcccccgcctcagttgtctaaacttcgggctctcttccacccgctctgcgcgcccagagtcaacaacttcttcacccccctccgcccccgcccttccctccgtcagccccgggagctcgccgcgcgccggggaccaggaacctccagcgctgagatgtggccgtgaggcgttggcgggcggcgaggagaagctcggcggcgtcccggggccggagggccgtggggccggggcgcaggggcgcgagcaccccgcgcctctcccccgcctcctcctgccgtctccgccgctgcccgtgccttgcaagcagcagccggagctgccaagcgtcagggccgcggagatgtcgtcgtcgtcgccgccggcgggggctgccagcgccgccatctcggcctcggagaaagtggacggcttcacccggaaatcggtccgcaaggcgcagaggcagaagcgctcccagggctcgtcgcagtttcgcagccagggcagccaggcagagctgcacccgctgccccagctcaaagatgccacttcaaatgaacaacaagagcttttctgtcagaagttgcagcagtgttgtatactgtttgatttcatggactctgtttcagacttgaagagcaaagaaattaaaagagcaacactgaatgaactggttgagtatgtttcaactaatcgtggtgtaattgttgaatcagcgtattctgatatagtaaaaatgatcagtgctaacatcttccgtacacttcctccaagtgataatccagattttgatccagaagaggatgaacccacgcttgaggcctcttggcctcacatacagttggtatatgaattcttcttgagatttttggagagccctgatttccagcctagcattgcaaaacgatacattgatcagaaattcgtacaacagctcctggagctttttgatagtgaagatcccagagaacgtgacttcctgaagactgttctgcaccgaatttatgggaaatttcttggattaagagcattcatcagaaaacaaattaacaacattttcctcaggtttatatatgaaacagaacatttcaatggtgttgctgaacttcttgaaatattaggaagtattatcaatggctttgcattgccactgaaagcagaacataaacaatttctaatgaaggttcttattcctatgcatactgcaaaaggattagctttgtttcatgctcagctagcatattgtgttgtacagttcctggagaaagatacaacactaacagagccagtgatcagaggactgctgaaattttggccaaaaacctgcagtcagaaagaggtgatgtttttaggagaaattgaagaaatcttagatgtcattgaaccaacacagttcaaaaaaattgaagagccacttttcaagcagatatccaagtgtgtatccagttctcattttcaggttgcagaaagggcattgtacttctggaataacgaatatattcttagtttgattgaggagaacattgataaaattctgccaattatgtttgccagtttgtacaaaatttccaaagaacactggaatccgaccattgtagcactggtatacaatgtgctgaaaaccctaatggaaatgaatggcaagcttttcgatgaccttactagctcatacaaagctgaaagacagagagagaaaaagaaggaattggaacgtgaagaattatggaaaaaattagaggagctaaagctaaagaaagctctagaaaaacagaatagtgcttacaacatgcacagtattctcagcaatacaagtgccgaataa

SEQ ID NO: 45681 - DNA, 561 bp, Homo Sapiens
atgagtgccaacgaggaccaggagatggaactagaagcattacgctctatttatggaggagatgaaagtttccgggaattaagtccagtttcttttcaacatggtgaaaatggtgatcccaaagccttcttaatagagatttcctggacagaaacatatccccaaacacctccaattctatctatgaacgctttttttaacaacaccatatcatcagctgtaaagcagagtatattagccaagctacaggaagcagcagaagctaatcttggaaccgctatgacctatacattgtttgaatatgccaaagacaataaagagcagttcatggagaatcacaatcccatcaattccgcaacatcgataagcaatatcatctcaattgaaactcctaatacagccccatcaagtaagaaaaaagacaagaaagaacaactttcaaaagcccagaagcgtaagctggcagacaaaacagatcacaaaggagaacttcctcgaggctggaactgggttgatgttgtgaagcatttaagcaaaactggctctaaggatgatgagtag

SEQ ID NO: 45682 - DNA, 399 bp, Homo Sapiens
ttgtctgctaaattccaggctgtaagactggaaagtacttaccagaatcgaacacgctatatggtagtggtttcaactaatggtagacaagacactgaagaaagcatcgtcctaggaatggatttctcctctaatgacagtgggttcagtgtatcgacggataacagagttcacatattcaaacctgtatctgtgcaggcaatgtggtctgcactacagagcttacacaaggcttgtgaagtcgccagagcgcataactactacccaggcagcctatttctcacttgggtgagttattatgagagccatatcaactcagatcaatcctcagtcaatgaatggaatgcaatgcaagatgtacagtcccaccggcccgactctccagctctcttcaccgac

SEQ ID NO: 45683 - DNA, 2948 bp, Homo Sapiens
agaatggagcttgcttgatatttcactagataaagaatttaaggcgagtatctatctttgttctccttggcaactgagagtctgcccttggaaacatcaggcaccatggggaagcgggataatcgggtagcctatatgaatcctatagcaatggccagatggagaggcccaactcaatctgtgggcccaacaatccaagattatctaaatcgaccaagacccacctgggaagaagtaaagaaacaattagaaaataaaaaaacaggttcaaaagcattagctgaatttgaagaaaaaatgaatgaaaattggaagaaagaacttgaaaaaagcagagagaaattattaagtggaaatgagagctcatctaaaaaaagagaaagaaagaaaaagagaaagaagaaatcttgtcggtcttcatcttcttcatcaagctctgattcttcaagcagttcttcagattctgaggatgaggaaaagaaacaaggaaaaaggagaaagaaaaagaagaaccgttcatacaaatcatcccaaagctctacgcatgaatcagaatcagagagcaaggagtctgtaaaaaagaaaaagaagtcaaaggatgaaacagagaaagaaaaggatgtaagaagcctcagcaaaaaaagaaagaaaagttaccctgatgataaacctttatcatctgagtcctcatctgaatcagattatgaagaggatgtgcaagcaaaaaagaagagaaggtgtgaagagcgagaacaagcaaaggaaaaagtaaagaagaagaagaagaaacagcacaagaaacatagtaagaagaagaaaaagaagtctggatcaagtcacaagtcaaggtaacatcaagaaaaaaagcaagaatgagtttgccgagttcccctgtgttagtagaattatttctggactttgagttgcctatcaaatcccactgtgccagtaaggggcatagtggctgctggcaacttcaatatacatttttgtttgtttgcttgtccttccttctaatggttaattcctctgagagctaaaattctgttgtcataccagtgaataaaatgtttgaaattaaagtaaaatgtgttagataatgaataactttgacaaaaaaaagtgtatctaaggttaaatgtatctaattcgaatacatctttgaaatatcaccatcaatgaaacataaatgtaatttccagacaattgtagttggtatttttgatgcaaggacttaatattgatgtctcaaattccttgcttttgtaaataagtttagttcattttccttttttctttaatgaatctttgtttacatggggaaagagcatgtggggtgggaagggcaagtgtttgctaatcactgtggctagctgaatagtgtgcctttgactcttacacatcctatttttgccagagcagcagccgtccttttcttactttatgaaattctggggtgttgtatgctgcttcaagtgaacaagaaggacaggagtttacagcataagtaagcccccatatctatgaaatttacctcttcttcagcactgtttactatacagtactgaataatatttagtattacaatattacatgatttgaaataactttatacccattttgtatgggaaccattctaaacagaccctgatgttgtttgattaagaaatattctgaaattttttttgcatgttttatactgttaagttttaattatctgaccatattctatataactgatgatccttttttaagatatgatttatgcttaggatataagtttcaagtttttagtttcttagccttgctatattaatttcattactgtgtttaattgcacccttgccaaaatatttagcatgtgaaaaggttttttttaaaaaatatgtaatgccttcatattgaagctggttactgtacgcaagttgagtgccagacctctagtacgccgtatgttacatgaaactactgccaaaatcttagtaagattgttgttgaaaagattgttgtcttaagcattaatattgaatttatatagaagttaaatgtagatgataatgacatcattgatcttcctgtgtccgtattttcctacaatttggtgccttgtatctgttgctgattcacttttaccactagtgtaaaaataagtgaaaaaatatttttactttacatttttatatatcagagtaacataaattataaatttgtgtctcaaaaccacctgtgatggaggatgtgctaattgtaatgtcataggtacaaagtattttggcatgatgaaaagctcaatagctattgtttttcaatagcagattttatctcggctaccttcaatcacaagtaaaattataaagataaaaaacatctacataaacatgttggctgccaaattttttgcattggaaatactggaatctctcattaaagttcttggaacattatagtgatgccatgttagattaccttggagcttcataactttagctttttcctaaaaatatatgtttatgctgataaaaactattacatttatgggatattttgtatccatatagagtttttcagaattgttcattaaaatgctttttataagcttatattatttgtagaatatggcaaaagcatttacagctcatcatgtatctatctgctcctgttcacttccaaacctcttgtagttaggcaatgccatttgactacttcaagcagagggattgtaaacagaagtgattttctatttccatgttggactgtaaaaagttctgcatgaccctccagttttcttttgcctgtcatggtgacctgaaagcaagatgttccaaatggcatacttacaagacggatgcaacctgggtccttaggtcgctgtttagaagggacctgactggagtgctgatggacttgcagtaaactttttaagtgtaagaaataaactgttatgtgtt

SEQ ID NO: 45684 - DNA, 450 bp, Homo Sapiens
ggtgagccccttccaaaaagactgaagtccagcgtggttgcccttgacgttgaccagcccggggccaattacagaagaggctatgaccttcccaagtaccatatggtcagaggcatcacatcactgttaccgcaggactgtgtgtatccgtcgcaggcgctgcctcccaaaccaaggttcctgagctccagcgaggtcgattctccaaatgtgctgactgttcagaagccctatggtggctccgggccactttacacttgtgtgcctgctggtagtccagcatccagctcgacgttagaaggtcttggtggatgtcagtgcttactccccatgaaattaaattttacttcatcctttgagaagcgaatggtgaaagctactgaaataagctgtgattgtactgtacataaaacatatgaggaatctgcaaggaacactacagttgtgtaa

SEQ ID NO: 45685 - DNA, 981 bp, Homo Sapiens
gtgagctgcggagcctggaatatggtcggggaaatggaaacgaaggagaagccgaagcccaccccagattacctgatgcagctgatgaacgacaagaagctcatgagcagcctgcccaacttctgcgggatcttcaaccacctcgagcggctgctggacgaagaaattagcagagtacggaaagacatgtacaatgacacattaaatggcagtacagagaaaaggagtgcagaattgcctgatgctgtgggacctattgttcagttacaagagaaactttatgtgcctgtaaaagaatacccagattttaattttgttgggagaatccttggacctagaggacttacagccaaacaacttgaagcagaaaccggatgtaaaatcatggtccgaggcaaaggctcaatgagggataaaaaaaaggaggagcaaaatagaggcaagcccaattgggagcatctaaatgaagatttacatgtactaatcactgtggaagatgctcagaacagagcagaaatcaaattgaagagagcagttgaagaagtgaagaaattattggtacctgcagcagaaggagaagacagcctgaagaagatgcagctgatggagcttgcgattctgaatggcacctacagagatgccaacattaaatcaccagcccttgccttttctcttgcagcaacagcccaggctgctccaaggatcattactgggcctgcgccggttctcccaccagctgccctgcgtactcctacgccagctggccctaccataatgcctttgatcagacaaatacagaccgctgtcatgccaaacggaactcctcacccaactgctgcaatagttcctccagggcccgaagctggtttaatctatacaccctatgagtacccctacacattggcaccagctacatcaatccttgagtatcctattgaacctagtggtgtattaggtatggctttcccaacgaaaggctaa

SEQ ID NO: 45686 - DNA, 2446 bp, Homo Sapiens
cgaccagcctgtggcgtggttggggctccggaagggcgcgcgcgagcgcttttttgggaggacaccacaggtggacgcctcagctgatcgtcctccctcccggggaccctgccccgagtcgccgagtagccgcagagtcgcctccgtcgccccgccgcccctgtgtttcggacatggccgcacgccttctccgagggtccctacgcgtcctgggcggccaccgtgcgccgcgccagctgcccgccgcgcgatgttctcattccggaggggaagaacgtctagaaactccttctgctaaaaaattaacagatataggaattcgaagaatcttttctccagagcatgacattttccggaaaagtgtaaggaagtttttccaagaagaagtgattcctcatcactcagaatgggagaaagctggagaagtaagtagggaggtttgggaaaaagctggaaaacaaggactgcttggtgtcaatattgcagagcatcttggtggaattggaggggatctgtactccgcagctattgtctgggaggagcaagcttattcaaattgttcaggcccaggttttagtattcattcaggtattgtcatgtcctatattacaaaccatggctcagaagaacagattaagcactttattccccagatgactgcaggcaaatgtattggtgcaatagcaatgacagagcctggagctggaagtgacttacagggaataaaaacaaatgctaaaaaggatggaagtgactggattctcaatggaagcaaggtgttcatcagtaatgggtcattaagtgatgttgtgattgtagttgcggtcacaaatcatgaagctccctcccctgcccatggtattagcctttttctggtggaaaatggaatgaaaggatttatcaagggacgaaagctacataaaatgggattaaaagcccaggataccgcagaactattctttgaagatatacggttgccagctagtgccctacttggagaagagaataaaggcttctattacatcatgaaagagcttccacaggaaaggctgttaattgctgatgtggcaatttcagctagtgaattcatgtttgaagaaaccaggaactatgttaaacaaagaaaagcttttggcaaaacagttgctcacctacagacagtgcaacataaattagcagaattaaaaacacatatatgtgtaacccgagcatttgtggacaactgtctccagctgcatgaagcgaaacgtttggactccgccactgcttgcatggcgaaatattgggcatctgagttacaaaatagtgtagcttacgactgtgtacagctccatggaggttggggatacatgtgggagtacccaattgcaaaagcttatgtggatgccagagttcagccaatctatggtggtacaaatgaaataatgaaggagctgattgcaagagagattgtctttgacaagtagacatctgcccacatcctggagtcctattacagctaatctcgttttaaatctgctcaagataaaatgtaacttggaaagcgaggaaacactaaacatgtttttacctgctctctctatagagaaggaaataaaatataaatataagattaacacagtggaaggacaaatctttgaagccaaaattctagttttccaatataaggtttaacttacagttttttatgtagccaaaggtaaacggttttctgaatcttgcctaggtgtttcatttatctctaaaattctaaaaagcataaatcattcaaatcttcaaaccaaggcagaaataattttatgtcgctatagtataaaaacattaataagatagcacattgacttttaaagggaaaagtaaatataacttagcatgtaaactcatttcggctaccatttgctccaaattccctagaacagtggtttttaccactgtactccaaccccgtttttaagcaatggaactctttcttcaaacaaaagcttatgcagaacatctctgtgaaacgctgctgagtgagaactgctttcattgaagctggaagccatcataccttactgccttgaaacccctaggactcagctaagtatttgcctaaccctgaccagggaatgccttggttctgtcaattgctgacatctgagaacacagaataatccatcatttttaatttcaagatattggtacattttataggtatcaaagcaatggcttttcttttgcaacagttaatgtatttattaacttaataattactttatgtcttctataaaccaggctgttaatacaatgatgacaaacaaaactggcaagatcactaaaaaataagtgaataaacaaataagtagtaaaataaggtaagaagtaaatatgtaaaagagataatttcaagcataagtgcaatgtaaataataaagtaagcatttaaaattcaaaagtgaggaaa

SEQ ID NO: 45687 - DNA, 921 bp, Homo Sapiens
atgtattcatttatggcaggatccatattcatcacaatatttggcaatcttgccatgataatttccatttcctacttcaagcagcttcacacaccaaccaacttcctcatcctctccatggccatcactgatttcctcctgggattcaccatcatgccatatagtatgatcagatcggtggagaactgctggtattttgggcttacattttgcaagatttattatagttttgacctgatgcttagcataacatccatttttcatctttgctcagtggccattgatagattttatgctatatgttacccattactttattccaccaaaataactattccagtcattaaaagattgctacttctatgttggtcggtccctggagcatttgccttcggggtggtcttctcagaggcctatgcagatggaatagagggctatgacatcttggttgcttgttccagttcctgcccagtgatgttcaacaagctatgggggaccaccttgtttatggcaggtttcttcactcctgggtctatgatggtggggatttatggcaaaatttttgcagtatccagaaaacatgctcatgccatcaataacttgcgagaaaatcaaaataatcaagtgaagaaagacaaaaaagctgccaaaactttaggaatagtgataggagttttcttattatgttggtttccttgtttcttcacaattttattggatccctttttgaacttctctactcctgtagttttgtttgatgccttgacatggtttggctattttaactccacatgtaatccgttaatatatggtttcttctatccctggtttcgcagagcactgaagtacattttgctaggtaaaattttcagctcatgtttccataatactattttgtgtatgcaaaaagaaagtgagtag

SEQ ID NO: 45688 - DNA, 1023 bp, Homo Sapiens
atgctccgggccgcgctgcccgcgctcctgctgccgttgctgggcctcgccgctgctgccgtcgcggactgtccttcatctacttggattcagttccaagacagttgttacatttttctccaagaagccatcaaagtagaaagcatagaggatgtcagaaatcagtgtactgaccatggagcggacatgataagcatacataatgaagaagaaaatgcttttatactggatactttgaaaaagcaatggaaaggcccagatgatatcctactaggcatgttttatgacacagatgatgcgagtttcaagtggtttgataattcaaatatgacatttgataagtggacagaccaagatgatgatgaggatttagttgacacctgtgcttttctgcacatcaagacaggtgaatggaaaaaaggaaattgtgaagtttcttctgtggaaggaacactatgcaaaacagctatcccatacaaaaggaaatatttatcagataaccacattttaatatcagcattggtgattgctagcacggtaattttgacagttttgggagcaatcatttggttcctgtacaaaaaacattctgattctcgtttcaccacagttttttcaaccgcaccccaatcaccttataatgaagactgtgttttggtagttggagaagaaaatgaatatcctgttcaatttgactaagtttttggtaatcttgcactaagacatcaacaaaatgccctggcagagataacttgggaaagattttaatataaaacttgacattggatattagagctttaatggtattccttattccagtaacatttttatgtactcatctgctgtgaaaagtctttaggttcattaaaaaaacaggttttagaaatgatcttagatctaatatagtgattttaagcatcccgtcaaaggcagaatctgtcacttgaatgaaggaaagcttaaagcccaagcagataaaaataaaagcccagcctatttgtcttgcctgctgtatcttcccta

SEQ ID NO: 45689 - DNA, 834 bp, Homo Sapiens
atggacactaaccgcccgggcgcgttcgtgctgagcagtgccccgctggccgcgctgcacaacatggccgagatgaagacgtcgctgttcccctacgcgctgcagggtccggccggcttcaaggcgcccgcgctggggggcctgggcgcgcagctcccgctcgggaccccgcacggcatcagcgacatcctgggccggcccgtgggcgcggcgggcgggggcctcctgggggggctgccccggctcaacgggctcgcgtcgtccgccggcgtttacttcgggcccgcggccgctgtggcgcgcggctaccccaagcccctggccgagctgccggggcgcccgcccatcttctggcccggcgtggtgcagggcgcgccctggagggacccgcgtctggctggcccggccccggccggcggcgtcctggacaaggacgggaagaagaagcactcgcgcccgaccttctcgggccagcagatcttcgcgctggagaaaaccttcgagcagaccaagtacctggcgggcccggagcgcgcgcgtctcgcctactcgctgggcatgaccgagagccaggtgaaggtctggttccagaaccgccggaccaagtggcgcaagcggcacgcggtggagatggcgtcggccaagaagaagcaggactcggacgccgagaagctgaaggtgggcggctcggacgcggaggacgacgacgaatacaaccggcccctggaccccaactcggacgacgagaagatcacgcggctgctcaagaagcacaaaccctcgaacttggcgctggtcagcccgtgcggcggcggcgcgggggacgccttgtga

SEQ ID NO: 45690 - DNA, 609 bp, Homo Sapiens
atggcagaaggtgaagaggaaggaggtgatgttctgattagtgttggccatgccaatgtgttaggatatactcttcgagaatttttacagcttttgcaacatatcactattggaacagtgctacaaatcaaggtttaccgagattttattaacattcctgaagaatggcaagaaatatatgatttaatccctgaggccaaattcccagtaacaagcacaccaaagaaaattgagctggcaaaagatgaatctttcacaagcagtgatgataatgaaaatgtagatttagataaaagacttcaatattatagatatccgtggtcaactgtgcatcaccctgcaaggagaccaatatccatctccagagactggcatggatataagaagaagaaccatactattagtgtaggaaaagacattaattgtgacgtgatgattcacagagacgacaagaaagaagtgagggccccttctccatactggataatggtgaagcaagacaatgaaagctcttcctcctctacctcctctacctcagatgcattttggctggaagattgtgcccaagttgaagagggtaaagcccaactggtatcaaaggttggttag

SEQ ID NO: 45691 - DNA, 474 bp, Homo Sapiens
atgctggttctcggtatcggaagaggctttcagtgctggttctcggtatcggaagaggctttcagctctcaatggaggtctaagctggttctggagtccctgagtggagcgtggtgggagggtatgaaggcaagtgggacggttgctgagacccgctttgcgcccagactgagccagagagaggcccagggccaaaatgcgcttcgggatcgggcaggcctggggtggggctggagtcaggtacctgagtctccgggtaagatgccgtgcaagctcggagatgaattggttagggctggcctgggagtctttagaatccgagctcagccccgcctcgcgttacctagcagaaggcacttcacatctgtgtgttctgtcttgttctcacctctgaaagggggactcttcccagagccctatgttgtcctgttccggcaggccgcaaacgtttctgggtcctctaggagtaaataa

SEQ ID NO: 45692 - DNA, 1958 bp, Homo Sapiens
aaaggcagggatgaggtaagtgtacgcttccaaaagcttgtgagttggggaatccatgaagagagactggggaggtggttttgttgaaagaacaaccagcacctcaattcctggggcttctgggacaccagatctatggtccaggagatggagagaggtgagcactatgaggatttcacctacaacccagagatggaggatgaatgttcctagcaatttcaagtaagtaggagaagaaagcaaaggttctctgagagcccatgactcttcttaagaagacttagtaataataacaacaatagtaataataatattgatcattcatcaagcacttgccaagagtcaggtgctgagcaactgacaaagcaaacgcccatattaatcctacttaaggttcacaattaccctttggttcaggcactattattttttccattttccaaaggagcaaattaagactcagagatattaaatgacagagccgggttctaacacaggccaagctgcatgcaacacctatgctttcagtttctatactccatcaatttgcttgtcttggcttctggaccttcacaaagccactctctcagtctgtacttgttagggtcctccagagaaatagaaccaatatatacatatatgtactccgcaacttaggatggggttacatcccgataaatgtatcacaatgtcaaaaaaattgtaagttgaaccattataagtcaagaatcctctgtacacacacacacacacacacacatacagagaatgagagagagagcgagagagagacagagagagagagagagagagagagagattggctcaaagaattatgtagtttgagaattcccaagatctacagcttggaagctgaagacccaggaaagccaatgtgtatatccagtcttagtctgaagacctgagaaccagaagaaccaatggtgtaagtcccagtctgagggcagcagaagaccaatgttccagctcaagaagtcaggcaggaggatttcccttttactcagcctttctgttctacctaggtctctaattgcttggatgagcaccccacccccacactagggagggcaatattctttatacagtctgattcaaatattaatctcatccagaaatatagacatacccagaataatgtttggccaaaagtctgagatccccgtggcccagtcaacttgacacataaagttaaccatcacacagtcgtcttacaaaatatacactggaaggcagatatactgtgatatgctccccctatagttcactgaaatacagcagatatttgttgcccatagcagagaaatgcaatctgctaatcaaatacaaaactttgtttttctcaatctgaatttatcagtgtttgagggagtctcatttaactgaaagcttccaagaatttaaaatgaggcagattgctcattctgacacttggattcatgtttagttttctctgtccactgcatgcttgcataggcagcaagaggtctcaccatcactcttcatgctggatgatgatctgctgataaggcctcacatttcatccccattttcccagtgtcaatagcccctcaatctcccaaccttaagagatgtgaaaaagaattatactttatagatgcctctgtggacagcaaggaagaaaggggtatacccagctgggagatcttggtgctgccttagaaacacctgatgtggcttcatgaggtgacttctgttttggaggtgaagtggaagacagcagcagtggaaaatgatgatgggtagagatatgtagggccaatgagttggagacattttagagtatgccataactgagaaactatggatatagagggaaactaaccaatttttaaaggaagatttccaattaaaatcagtgtgaacacccaacccattaccatgttgtctaaataaacttcactggtttctgttttagc

SEQ ID NO: 45693 - DNA, 87 bp, Homo Sapiens
atggtgtgtctgaagctccctggaggctcctgcatggcagcgctgacagtgacactgatggtgctgagcttcccactggctttggct

SEQ ID NO: 45694 - DNA, 5256 bp, Homo Sapiens
gccggttccgggtccgagcgcgcccccgggctcgggtcgtcatgagcctggactgcaccagccatatcgcgctgggtgccgcttcgccagcgcccgaggaaacttacgatcatctttcggaagtcccggtcacgcgggagcagttaaaccactatcggaatgtggctcaaaatgctcgaagtgaacttgcagcaactttggtcaaatttgaatgtgctcagtctgagcttcaagacctccgatccaagatgctttctaaagaagtctcctgtcaagaactgaaagctgaaatggagagctacaaggaaaacaatgccagaaaatcatctctccttacctctttgagagacagagttcaggaactagaagaagaatcagcagcactttccacttctaaaatcagaacagaaatcacagctcacgctgcaatcaaggagaaccaggaattaaagaagaaagttgtagagttaaatgaaaaattacaaaagtgttcaaaagaaaatgaggagaataagaaacaagtttcaaagaattgcaggaaacatgaggaatttctgactcaactgcgtgactgcttggatccagatgagaggaatgacaaggcatcagatgaagatttaattttaaagcttagagacctgcgcaaagaaaatgaattcgtgaaaggacaaattgttattcttgaagagactataaatgtccatgagatggaagcaaaagctagcagagaaacgatcatgaggctggcttcagaagtcaacagagagcagaaaaaagctgcctcctgtactgaagagaaagagaagctgaaccaggacctgctcagtgctgtagaagcaaaagaagctcttgaaagggaagttaagatcttccaagaaaggctgcttgctggccagcaggtctgggatgcctcaaagcaggaagtgagcctcctgaagaaaagctcttctgagttggagaagagtttgaaggccagtcaggatgcagtcacaacctcacaaagccagtacttctcatttagggagaaaatcgcagccctccttaggggcagattgagcatgactgggtccactgaggacaccattttggagaagattcgagaaatggacagccgggaagaaagcagggaccggatggtctcccagcttgaagcccaaatatctgagcttgttgaacagttgggaaaggagtctgggtttcaccagaaagctctccagagggcccagaaagcagagaatatgttggagactcttcagggtcagctgacacacctggaggcagagctggtttctggaggtgttttgcgagacaacttgaattttgagaaacaaaaatatcttaaatttctggatcagctttctcagaaaatgaagttggaccagatggctgccgaacttggctttgacatgcggctggacgtggttttagctcgaacagagcagctggttcgtcttgagagcaatgcagtcattgagaacaagaccattgcccacaatttgcagagaaagctaaagacacagaaagagagactggagagcaaagaattacacatgagcctcctccggcagaaaatagcccagctggaggaggagaagcaggcacgcacggccttggtggttgagagggacaacgcgcatcttaccatcaggaacttgcagaagaaggtggagaggctgcagaaagagctgaacacgtgtcgagacttgcacaccgagctcaaagccaaactggccgacaccaatgaactgaaggcaagtgcttggcttcattttattaaaactttggaacagactaaagccattgaagatctaaacaaatccagagaccaactggagaagatgaaggagaaagctgagaaaaagctcatgtctgtcaagtcagaactggataccacagaacatgaggctaaggagaataaagaaagggccagaaacatgatagaagtggtaaccagtgaaatgaagacactaaaaaaatctctggaagaagcagaaaagagagaaaagcagctggcagacttcagggaggtggtgtcgcagatgctaggcttgaacgtgaccagccttgctcttcctgattatgaaatcatcaagtgtcttgaaagattggtccattcacatcagcatcactttgttacctgtgcctgcctcaaagatgtgactactgggcaagagaggcacccacaaggccatttacagcttcttcattgaacactgtatctcttgagagaggtggccataagacatggcacacaattcccaatttcacaaattcctcatgtctttgagatttgatcagtttgtgaatattttatgctttgatgatatagtgagaatgcatcacttgcaaaaacgatctcaaaagtgtcagccttagataaacgttcagcattaaaaacgcctattatttcatttactagcattttaggatccagaagaattccaccagattgcatgagttagattgggaaatgggagtgggagataatattgggaggtatctattttaagtcaggggctttactagccgatttagttctcacaataaccatgtggagaagctgtgacatttttaatttacaacctttctggggctcagacataaagttacctatccaaggttgcagttgggtagtggtgggaccaggatggacaactcattggccctgcctcaaaagccatacctcttctcctgctatgcagaatctgtttctcctgaatctctgtgatgctggtgggaattgtttgcatagaggaaggacaataaccctgccatcgtgagttaatgtccgggctggtcacagtggttcatgcctgtaatcccagcactttgggagtccaaggcaggcatatcatttgaggtcaggagtttaagaccagcctggctaacatagtgagaccctgtttctactaaaaatacaaaaataagccaggtgtggtggtgcatgactgtaatcccaactactcagcaggagaagcacttgaacccaggagacggaggcggcagtgagccaagattgtgccactgcactccagcctgggcgacagagtgaaactacatctcagaaaaaaaaaaaaaaaaaaaaaaaaaaagttaatgtccaaaaatgacagatttacaagtgtaagctatatgatttcttcaaaaagcaaaagcaatatacctaattcatttggatcaaacttacataggtctcaggtcctgtaagaaacttgcctgttctaactgttgctaccagattatatctggtggtaattgttaatgtttcagcagggctggtctcagtcctttaaaatggaaagctttatttggagcccaaccctataagatgaagaaatcctatatagtcttattcaccaatatatccaatacacccacagcaatggtacctttttaagatcaggattttattatgaattcctgtcactttctgttttccatttaaatttctattttacaaatttttcagggaatcatattcttaacttcactgagaaaaatgtgttactcttttggacaatttatcttatttctatcatataagatgtatttttttattgtccttaaaagaagctctagcatgaaattaaaggaaagggaaagaaatagatctggtgcacccgaacattaggagaaaatgaaaaatatacaaccaaccgttcgtgagtcatcaaaaagtcaaagtcagcctggccaacatggcaaaactccgtctctgcaaaaaatacaaaaatgagcccggtatgttggcatatgcctgtaatcccagctactcgagaggctgagacacgaaaattgcttgaacctgggaggcggaggttgcaatgagccgagatcgcgctactgcactccagcctgggcaacagagagagaccttgtctcaaaaaacaacaacaacaaaaagtcaaagtcataataagcaaattattggcttctttcttctagactaaaagaaattaaagagatgaaacaatcaattgcaagggtcaaaactagattggatcttggtttgaatgaaaaaaagcataaaatattcttgcaataattgtaaaaatttgaatgtggactaagtcctagattatattaaaatatttttaattttttaagcttgacaaatgcactgattgttatactttaaataactaaaaatctgagaatccacagtgctacagacaataagtgataaaatgggaaaaaatagtgaagatcttcttttaggaaaactaccaataaatgtagaatggatgattccaaaaaaaaaaaaaaaaagaagaaagagagaaagaaagaaacagaaaaacctaaaagaaagcgaatgaatttgacacctgttggttggatgacagaccacacagagggagagtgaccaggctttgcttgtggagcgggcatccctgcctagctatctccttcatgtgcaaggacagtataagtagtattttgcatgtgagtaaacacacctgcgcagccctggctgaggtcactaggctggccagaggcaggacaggcagtcttgaatttcctctaggggaggcctgcagttttccccaccaaccccttttcacatgctccaaagatgtagtagtgtctgctgttttggatcgaaaatcaccttgagtggaggaagtgacttcactgggtctctggaggctctcggagcttgagtggctctgccccaccctgaatcatgcacccataaatgcagttatgggtggatgtgggtgtatgagagtggagattgtttttgtacattctctttgttttcattttccaaatataatctttaataaacttgatttagtttcttgggaaatttattttctacgctattcaaagatattttaaataatattttaaaaacatgaaatttttttttcatttttgatttgatatcattaattttatatcaggattcatgtaagagactaaaaatgatccatagtggttagtactgtaatttctgtttattacatgaaattacattccatttatccaaatatatgtttatataatatttccactgtgtgactctagtgatctttaacatacacagaatgatctacagtgatctttaacatactcagaaatatgaaaaatgtttgaatatgatctttagggacttctaatgaaaagggtatatgaaatgggaacaataaattctgtacatgtatacagtccatatacacattaagtgtttgtcatttggacaaattgaaaacttttaataaagccattttcttctttgttaaaatgcca

SEQ ID NO: 45695 - DNA, 294 bp, Homo Sapiens
gactggcacccccatctccatttttctctttgtccactgttattaaagcagaagtctcttcctacacacgcacatccctgatatccatcctggggactagaatattctacataaaggtgaggatctctcaatttcctttgtccaaatttcagtctatatattctcaagtcagctccccagggatgaagatctacattgaccccttcacttacgaggatcccaacgaagctgtccgggagtttgccaaggagattgatgtatcttttgtgaaaattgaagaggtcatcggagcag

SEQ ID NO: 45696 - DNA, 1995 bp, Homo Sapiens
cttttcaggttcactaagaatctttccccagacaaaatcaacctgagcaccctgaaaggggagggtcagctgaccaacctggagctggatgaagaggttctacagaatgtactggagctgcccacctggttagccatcactcgggtctactgcaacagggcctccatccggatccagtggacaaagttgaagacacaccctatttgcttgtgtctggataaggtagaggtggagatgaagacatgtgaggatcctcggccccccaatggacagtctcccattgcccttgcttcaggacagagtgaatatggctttgccgaaaaggtggtggaagggatgttcatcattgtcaattctatcaccatcaagattcactccaaggccttccacgcttcttttgaattgtggcagctccagggctatagtgtcaaccccaactggcagcagagtgaccttcgccttacccgcatcactgacccctgccgaggagaggttttaacatttaaggaaataacttggcaaacactccgaattgaggcagatgctacagacaatggtgatcaggacccagtcaccactccattgaggcttattacgaaccaaggcaggatccaaatagccctcaaaagaagaaccaaagattgcaatgtgatatcctccaagctgatgttcctgttggatgacctgctctgggtgctgactgactcacagctcaaggctatgatgaagtatgcagagtcactgagtgaagccatggagaagtcagcccatcaaagaaagagcctggcccctgaacctgtgcagatcactccaccagcccccagtgcccagcagtcctgggcccaggcatttggtggcagccagggcaacagcaacagcagcagcagccgcctcagccagtactttgagaaatttgatgtgaaagagtcctcctaccatctgctcatctcccgcctggacctgcacatttgtgatgatagccagtcccgagagccaggtgtctctgccaacagactcatgggtggtgccatgcagcttaccttccgcaagatggcgtttgactattaccctttccattgggcaggtgatagctgcaaacattgggtacgccactgtgaggccatggagacccgaggccagtgggcccagaagctggtgatggaatttcagagcaaaatggagaagtggcatgaagagacgggtctgaaaccaccctggcaccttggagtagactctctctttcggagaaaagcagattctctttccagtcctcgaaagaaccctcttgagagaagcccctctcagggcagacagcctgcctttcagcctccagcatggaaccgcttacgctctagctgcatggtggtacgggtggatgacctggacatccaccaggtttccaccgctggacagccaagtaaaaagccatctacactcctttcctgcagtcggaaacttcacaacctccctacccaggtctctgccattcatattgagttcacagagtattacttcccagataatcaggagcttccagttccttgtcctaatctctacattcagttaaatggtctgacatttactatggatcctgtcagtttgctctggggaaacctcttttgcctggatttataccgcagcttggagcagttcaaagctatctacaagctggaagattcaagtcagaaagatgaacacttggacatccgactagatgcattctggttgaaggtgagctttccactggaaaagagagagcgggcagagttgcatcgtccccaggcccttgtcttctctgcgtcaggcatgattgccaccaatacacgtcatgctccacattgtagttgttcagacctccagagtctcttccggggttttgctgctgctgagttctttcattccaattatgatcactttcctaaggttccaggtggctttagccttctgcacatgctttttttgcatcatgcctttcagatggattcctgcctgcct

SEQ ID NO: 45697 - DNA, 459 bp, Homo Sapiens
atggaacccgaggaggaacctggcggtgctgccgtgagggaagtttatgaggaggctggagtcaaaggaaaactaggcagacttctgggcatatttgagcagaaccaagaccgaaagcacagaacatatgtttatgttctaacagtcactgaaatattagaagattgggaagattctgttaatattggaaggaagagagagtggttcaaagtagaagatgctatcaaagttctccagtgtcataaacctgtacatgcagagtatctggaaaagctaaagctgggttgttccccagccaatggaaattctacagtcccttcccttgataataatgccttgtttgtaaccgctgcacagacctctgggttgccatctagtgtaagaagagagggtaggcctctcccaccatgtgcagtctcatggggagaggcttctttcgtttcctcgtcaaacatctga

SEQ ID NO: 45698 - DNA, 2760 bp, Homo Sapiens
tcccttccaacatctctttttcatgtactaactgtgcttttccctcttgtgtctaatagaagcttaatatgtaaactagacaaggtagatgacaaatggttaatgacttttttttgttttctttagatacatccagaaagtgcccagaagaaacttcctgctggaaaaaatgaaaaagcagtatttataacattagaatctggataatttgttaacatggcagaaaataatgaaaatattagtaaaaatgtagatgtaaggcccaaaactagtcggagcagaagtgccgacagaaaagacggttatgtgtggagtggaaagaagttatcttggtcaaaaaagagtgagagttattcagatgctgagacagtgaatggtatagagaaaaccgaagtgtctttaaggaaccaagaaaggaagcacagctgttcatccattgagttggacttagatcattcctgtgggcatcgatttttaggccgatctcttaaacagaaactgcaagatgccgtggggcagtgttttccaataaagaattgtagtagtcggcactcttcagggcttccgtctaaaaggaaaattcatatcagtgaactcatgttagataagtgtcctttcccacctcgatcagatttagcctttaggtggcattttattaaacgacacactgctcctataaattccaaatcagatgaatgggtaagcacagacttgtctcagactgaattgagggatggtcagctaaaacgaagaaatatggaagaaaatataaactgtttctcacataccaatgttcagccctgtgtcataaccaccgacaatgctttgtgtagagaaggtcctatgactggctctgtgatgaacctggtttcaaataacagtatagaagatagtgatatggattccgatgatgaaattctaacactttgcacaagttccagaaaaagaaacaaacccaaatgggatttggatgatgaaatcctgcagttggaaacacctcctaaataccacacgcagattgattatgtccactgtcttgtaccagacctccttcagatcaataacaacccatgttactggggagtgatggataaatacgcagccgaagcactactggaaggaaaaccagagggtacctttttacttcgagactcagcacaggaagactatttattctctgttagttttagacgctatagtcgttctcttcatgctagaattgaacagtggaatcacaactttagctttgatgcacatgacccctgtgtcttccattctcctgacattactgggctcctagaacattataaggacccaagcgcctgtatgttctttgaaccacttctatccactcccttaattcggactttccctttttccctgcagcatatatgcagaacagttatttgtaactgtacaacttatgatggcatcgatgcccttccaattccttcttctatgaaattatatctgaaggaatatcattataaatcaaaagttagagtactcaggattgatgcaccagaacagcaatgctagtaacaggatgggaacatgggaatgataatatatattttttcttttaatattttatttttctttttatgccactttggatttttctacaaaggcagtggtgtccaaaataaaatctctgccctaaattttactaataaatccatttttctagtgatacacaaattgtttaaggttatacactcgagcttaaatagatatttttaaccaggtgtttggtttttgtttttaccgtgtaggttgtatacttacattttttctttccttaatttatacatgatcctttttccttaatttatacatgatccaggcacatttgaaatttggtaggcattgcaaacacatttgaatattgtgtatttcatactattctttaaaagtaatcttatgtcctttcctacatgtaaaatattttgttaatctatgccattagtagtattatatataaaatatagttccccgtcccccttttcattgagtttgatattcttcagtaaagctgaatgttgtaattcaccattcatactaatgttattgacttttgtaacttactaatagggatgttaaaagtaacaaaaccaagtcaaacttggtgtatttttattttaaatattaactctaaagcaggattactaaatttgattaatctggtcaatgagaatcaaatggaaacatatcattctggaggtgcacttactcttctacaatgtggccggatcatttgtcattcctgaataggtctttctctcaacctgcaagagctaaaccatcttcaaaacataaatcttgttcctttctcattggaagctttgaaaataatgataacactattagtagctagtagttactaaagtgctaaagtaattgtggggtttttctgtattagcttatgaactgttgcttctacttagcccttttatagaaactctgagctgttactttggggaaattccacaatgtattagcagccacaaatttccactggtaaccaaagagtacctaagtagtttttcattattttaagttgaatttgaataaagattccagaaataaacatggagctcagtattcaggaagcttaatactgtttttgatctacaagatccaaataattatccctatcttcagaattaacttagtctgtaatgtggcttcaaaaaaagaaagccttttgacagctacatgacttacaccatacagaacagtactggacaaaaggggtga

SEQ ID NO: 45699 - DNA, 666 bp, Homo Sapiens
atggaggaaccaaggccttcgaagcgacttcgctccatggcccctaatcaagcctcaggtgggcctcctccagagccaggctgctgtgttgcggaccctgaaggctccgtggaagcagatgggcccgcacagccagcccaacccgcaaaacccatcgcttacgtgaaacccttcagacggcagcccccagctcgcccagagtcaccccctcctgcagagagaggccggcgccggggaggaagccggcggccagggcgaggccgtggcagaagggctgggccccgcggggacgctggccagagacagggggcagaaggcttgatggcaccggacgtgcacatccaactggaccaccatggagagccaggccaccagggggaaccggaaatcacggagaccgcagccttctccctttctgaaacaggtcctccgcctggaactgtgcaggaaggccctggccccgacgtggcgcaacctgagctggggtttcaggagccgcccgctgctcctgggcctcaggctgttgactggcaacccgtcttgaccctctatccctgcatcgggtttagggctctgggtgactcagcggttttacaagtcattcaaaccccccagggcacctacgtgcaaggggtcccagtgttcctcaccgacattgcgtattga

SEQ ID NO: 45700 - DNA, 1008 bp, Homo Sapiens
atggggtttcatcatgttggccaggctggtatctcagaattcctcctcctgggactctcagaggatccagaactgcagcccgtcctccctgggctgtccctgtccatgtacctggtcacggtgctgaggaacctgctcatcatcctggctgtcagctctgactcccacctccacacccccatgtgcttcttcctctccaacctgtgctgggctgacatcggtttcacctcggccatggttcccaagatgattgtggacatgcagtcgcatagcagagtcatctcttatgcgggctgcctgacacagatgtctttctttgtcctttttgcatgtatagaagacatgctcctgacagtgatggcctatgaccgatttgtggccatctgtcaccccctgcactacccagtcatcatgaatcctcaccttggtgtcttcttagttttggtgtcctttttcctcagcctgttggattcccagctgcacagttggattgtgttacaattcaccttcttcaagaatgtggaaatctccaattttgtctgtgacccatctcaacttctcaaccttgcctgttctgacagtgtcatcaatagcatattcatatatttagatagtattatgtttggttttcttcccatttcagggatccttttgtcttacgctaacaatgtcccctccattctaagaatttcatcatcagataggaagtctaaagccttctccacctgtggctctcacctggcagttgtttgcttattttatggaacaggcattggcgtgtacctgacttcagctgtgtcaccaccccccaggaatggtgtggtggcatcagtgatgtacgctgtggtcacccccatgctgaaccctttcatctacagcctgagaaatagggacattcaaagtgccctgtggaggctgcgcagcagaacagtcgaatctcatgatctgttatctcaagatctgctccatcctttttcttgtgtgggtgagaaaggtcaaccacattaa

SEQ ID NO: 45701 - DNA, 288 bp, Homo Sapiens
atgctcggcgcccgggtcgcggcccacctggacgcactgggccccctggtcccctacgtgccgccgccgctgctgccctctatgttctacgtgggcctgttcttcgtcaatgtgctgatcctgtactacgccttcctcatggagtacatcgtcctcaacgtgggcctcgtcttcctgttcgaggacatggaccaggcgctcgtggacctcggcgtgctctccgaccccggctcgggcctttacgatgctgactcggagctcgacgtctttgatgggtacttggagtag

SEQ ID NO: 45702 - DNA, 375 bp, Homo Sapiens
atgagttgcacaattgagaaggcacttgctgatgctaaaactcttgttgaaagattaagagatcacgacgatgcagcagaaactctgattgagcaaaccacagctctcaataagcgagtagaagccacgaagcagtatcagaaagaaattcaagagcttaatgaagtcgcacatcggccacggtccacgttagttatgggaatccagcaagaaaacagacaaatcagagaattgcaacaagaaagaaaagaattgcgtacatccctggaagaacatcagtcggccttggaacttacgatgagcaagtatcgagaacaaatggttagattgctaatggctagcaaaaaagatgatccgggaaaaataatgaagtta

SEQ ID NO: 45703 - DNA, 459 bp, Homo Sapiens
atgttccatgagaacttggtgagggttgtggagaggttggctggtgcttctccgtcttcatacagatgtccagacaggggaccagaagtctcaggtctgagctctacctggaagcccctcacgtctgtagccatcaaacctccagataagacgagccctgaagcattttggttgcatcagaaaacagatggaaggccagtcttcacagatgcatatacttcatcctggcttccacccacagaggttgcatctgtgcagaaattcatcccagagcaccaggcaggtgggtgtcaactcctgctgagatttcgctgtatcaggaaactcatgcatctggtgcagatgtcccggagtggctctgacagtccagggctgggcagtggagacactgatgacagccttgagcagagtggttttagtagaaatggcagagacaaaagccaggctagaggagtttaa

SEQ ID NO: 45704 - DNA, 1506 bp, Homo Sapiens
atggaagctggtagcccatttttgctcagctctgatggccagaatgtcgtggggatacaagtcacagaaagagccaaggtcaacatttgggaagaaaaagaaaatgatggatcatttacaaaccaaatgaccccagaaaagcacttaaattctttggggaatttggttaaatcattggatgctgagcaggacaccacaaccccaaaatccttctggaacaagggagagaacttgaaagagctgcccagtcctcagaagttctcagatcttaggcttttgcaggaaagttttcagaagaattacagccagcttttctggggcctcccctctcggcacagagaatccctggtggctaatgcctgggtcactgaccggtcttgcactttgcagtctcctcctttcttcaatcaaatttccaatgtctgcccaattcaaagggagactacaatgtccccactgcttttccaggcccagcccctgtcccatctggggcctgagtcccaaccctttatttcatccacaccccaattctggcccacacctatggctcaggctgaggctcaggcccatcttcaatcctctttcccagtcccatctcctacttttccatccccgattaagaacactggagtagcttgccctgtgtcacaaaataaagtgcaagctctctccctatctgaaactcagcaccctgaatggcctttgttgaggaagcaactagaaggtgggttggctttaccctctagggtccaaaaatctcaggacgtctttagtgtctccactcctaaccttccccaggaaagcttgacatccattctgcctgagaactttccagtcagtcctgaactctggagacaactggagcaacacatggggcaacctggaaggatccaagagtctctggatctgatgcagcttcaggatgaatctccagggacaagtcaggccaagggcaagcccaggccctggcagtcctccatgtccacaggtgaaagcagcaaggagacacagaaggtgaagctccagctagagagggacccgtgcccacatctggggcaaattctgggtgagaccccacaaaatctatccaggggcatggaaagcttcccagggaaggttctgggggcgacctctgaggagtcggaaaggaacttgaggaagcccttgaggagtgactcgggaagtgatttattaagatgcacagagaggaatcatatagaaaacaccctgaaagcccacatgggcaggaagttgggccagatcaacaagggcttgatccccgtggtgcgtcgatcctggcttgctgtcaaccaggcttttcccatgtccaacatccacgtgaaaaccaacaatctagctcccctgaaaagtgggaaagcctgtgtgaacacagtgcaggtgctttccttccttgagccgtgtactcagcaggtgctgggagcccatattgtgaggttttgggccaaacacaggtggggtctacccctcagggtcctcaagcctatt

SEQ ID NO: 45705 - DNA, 930 bp, Homo Sapiens
atgttcagtcctgcagataacatctttataatcctaataactggagaattcatactaggaatattggggaatggatacattgcactagtcaactggattgactggattaagaagaaaaagatttccacagttgactacatccttaccaatttagttatcgccagaatttgtttgatcagtgtaatggttgtaaatggcattgtaatagtactgaacccagatgtttatacaaaaaataaacaacagatagtcatttttaccttctggacatttgccaactacttaaatatgtggattaccacctgccttaatgtcttctattttctgaagatagccagttcctctcatccactttttctctggctgaagtggaaaattgatatggtggtgcactggatcctgctgggatgctttgccatttccttgttggtcagccttatagcagcaatagtactgagttgtgattataggtttcatgcaattgccaaacataaaagaaacattactgaaatgttccatgtgagtaaaataccatactttgaacccttgactctctttaacctgtttgcaattgtcccatttattgtgtcactgatatcatttttccttttagtaagatctttatggagacataccaagcaaataaaactctatgctaccggcagtagagaccccagcacagaagttcatgtgagagccattaaaactatgacttcatttatcttcttttttttcctatactatatttcttctattttgatgacctttagctatcttatgacaaaatacaagttagctgtggagtttggagagattgcagcaattctctaccccttgggtcactcacttattttaattgttttaaataataaactgaggcagacatttgtcagaatgctgacatgtagaaaaattgcctgcatgatatga

SEQ ID NO: 45706 - DNA, 366 bp, Homo Sapiens
ggaagaggtgatttattatatggttgttacactcggccacaaataaacacagaaatagtccagaatgtcacaggtccagggcagaggtccaacatgggcattttgtttatgagcaaggtgggtctcagaggtgatcggcgatcagagggcgatgaagttctagatccattgagacaagctctagacagtggcatgcagtcccacaacttgtaccagcatccccagcgtctggcattccatgtttctgctcctgtggcctccacagtgcaacaagctagcggtttacttggacctctgcctcatctttcttcttttgcgcttcagcctgcgcattcgcttcttcctccacttggctctcatggcgca

SEQ ID NO: 45707 - DNA, 771 bp, Homo Sapiens
agccggccccgcagccccagcgccttccctgctccctggtggggacagcagccaggaggacccggccctgccaagcgcctccgattggaggagcccgcgggccccgaaccccgcgcggcacccagcctggaagacccggcgggggacccggccgtggacgcgctcacctccatagtggtcctggccgcgggctgtgccctgcgtgtgcccctggacgacgtcgacctggtgctggagcccgcaccaacgtcgatcctgcgagtgtctctcggtggacacaccctcatcctgatcccagaggtcctcctgagctccgtcgacgaacgctcaggagcgcagcacgactcgtctgccgggctggaagtggacgttttcctgggcgctgtcagggaggacgtcgtcgtcgagctggaattctgcgcatctgtcccagagatcgccgcccaggaagaggcctacgaggaggacgcggaccccgagttcccggagctccggatggactccccaaccggctcagccgctgggctctacccctcctctagaagtatgttcatcccctaccgggagggccccatcccagaaccctgtgctctggcccccaaccccagttcagagagacgttctccacgccccatctttgacctggaattccgccttctggagcctgtccccagctcacctctccaacctctacctccctctccgtgcgtggggagtccaggtccccacgcgcgctcgccgctcccggaacgccctccgtgcaaggcccgg

SEQ ID NO: 45708 - DNA, 630 bp, Homo Sapiens
atgggagaaatactcaatgaaatagatagcataaataaaaaatcaaaatttcaggaaacaatagacacacttatagaaatgctaaatgttctggaaagtctcagcaatagaattcaacaagcagaagaaagaacttcagagcttgaagacaagttctttgaattaaccaaatccaacaaagacaaagaagaaagaataagaaaaattgaacaaagcctccatgaggtctgggttcacgttaaactaccaaccctaagaataattggcattcctgaggaagaagaggaacctagaagtttggaaaacatatttgggagaaaaattgaggaaaacttccctagccttgctagagacctaggcatccaaatacaagaagcacaaagaacacctgggaaattcattgcacaaagatcatcacctagacacattgtcatcagattacctaaagttaagatgaaggaaagaatcttaagaactgtgagtcaaaagcgccaggaaacctataaaggaaaacctatcagattaacagcagatttctcagcagaaatcctacaagctagaagacattggggacctatcttcagcctcctcaaacaaaacaattatcagccaagaatttgtatccagtga

SEQ ID NO: 45709 - DNA, 897 bp, Homo Sapiens
atgctgcccctgctcgccgcgctcctggccgccgcctgcccgctgccgcccgtccgcggcggggccgcggacgcgcccggcctcctcggggtgccctccaatgcttcagtcaacgcgtcctccgcggagcccatcgccccgcggctgctggcctcggcggcccccgggccccccgagcgcccgggcccggaggaggcggcggcggcggcggcgtgcaacatcagcgtgcagcggcagatgctgagctcgctgctcgtgcgctggggccgcccgcggggcttccagtgcgacctactgctcttctccaccaacgcgcacggccgcgctttcttcgccgccgccttccaccgcgtcgggccgccgctgctcatcgagcacctggggctggcggcgggcggcgcgcagcaggacctgcgcctctgcgtgggctgcggctgggtgcgcggtcgccgcaccggccgcctccggcccgccgccgcccccagcgccgccgccgccaccgccggggcgcccaccgcgctgccagcctaccccgcggccgagccgcccgggccgctgtggctgcagggcgagccgctgcatttctgctgcctagacttcagcctggaggagctgcagggcgagccgggctggcggctgaaccgtaagcccattgagtccacgctggtggcctgcttcatgaccctggtcatcgtggtgtggagcgtggccgccctcatctggccggtgcccatcatcgccggcttcctgcccaacggcatggaacagcgccggaccaccgccagcaccaccgcagccacccccgccgcagtgcccgcagggaccaccgcagccgccgccgccgccgccgctgccgccgccgccgcggccgtcacttcgggggtggcgaccaagtga

SEQ ID NO: 45710 - DNA, 486 bp, Homo Sapiens
atgggtcaccgccccaacctggggcagccgccccatcccaacgcagttgctgccgctctccatgcctccctgtgcccagctaaccgggggacttgtcccctgggaaaacctgggtacccaggctgcctttggtttcagcccctactcctcttcccgggctgcctgtgctccccggacggcccctttccccgggctgtgttcacatcggctgggaagggtcccttgcagacagatcttggacgaggtcgcgtcccccctcgtgaccagcaaactcctaaaagcggcccttgccccagagcccctgtagcctccaaccggcagtcaggaggcagcgccgtctcagcgccgcttagtggcgccaggcgtgcctggaaatccgctttcgcagcgccccctcgtagccgcctccggccgcagaaaggcgttccctggacagagaagcgggcgcgcgggggcgggcgcgcggggccttgccggagaacctga

SEQ ID NO: 45711 - DNA, 2200 bp, Homo Sapiens
ttataataaggaattgcctgtgcatatctgtaatgtaatatctcctgagaagatttatgttcagtggttgttaactgaaaacttacttaatagtttagaagaaaagatgatagctgcttatgaaaactcaaaatgggaacctgttaaatgggaaaatgatatgcactgtgctgttaagatccaagataaaaatcagtggcgaagaggccagatcatcagaatggttacagacacattggtagaggtcttgctgtatgatgtgggtgttgaactagtagtgaatgttgactgtttaagaaaacttgaagaaaatctaaagacaatgggaagactctctttggaatgttctctggttgacataagaccagctggtgggagtgacaagtggacagcaacagcttgtgactgtctttcattgtacctgactggagctgtagcaactataatcttacaggtggatagtgaggaaaacaacacaacatggccattacctgtgaaaattttctgcagagatgaaaaaggagagcgtgttgatgtttctaaatatttgattaaaaagggtttggctttgagagaaaggagaattaataacttagataacagccattcattatctgagaagtctctggaagtccccctggaacaggaagattcagtagttactaactgtattaaaactaactttgaccctgacaagaaaactgctgacataatcagtgaacagaaagtgtctgaatttcaggagaaaattctagaaccaagaaccactagagggtataagccaccagctattcctaacatgaacgtatttgaggcaacagtcagctgtgttggtgatgatggaactatatttgtagtacctaaactatcagaatttgagctaataaaaatgacaaatgaaattcaaagtaatttaaaatgccttggtcttttggagccttatttctggaaaaaaggagaagcatgtgcagtaagaggatccgatactctgtggtatcgtggcaaggtgatggaggttgtaggtggcgctgtcagagtacaatatttagatcatggattcactgaaaagattccgcagtgccatctttaccctattttgctgtatcctgatataccccagttttgtattccttgtcagctccataataccacacctgttgggaatgtctggcaaccagatgcaatagaagttcttcaacaactgctttcaaagagacaggtggacattcacattatgaaaccaagatcagatcatgataaaaagtatgaagaggaacaatgggaaataaggtttgaggaattgctttcggctgaaacagacactcctcttttaccaccatatttgtcttcatctctgccttccccaggagaactctatgctgttcaagttaagcacgttgtctcacctaatgaagtgtatatttgccttgattctatagaaacttctaaccagtctaaccagcatagtgacacagatgatagtggagtcagcggggaatcagaatccgagagccttgatgaagcactgcagagggttaataagaaggtagaggcgcttcctcctctgacggattttagaacagaaatgccttgccttgcagaatatgatgatggcttatggtatagagcgaagattgttgccattaaagaatttaatcctttatctatcttagtacaatttgttgattatggatcaactgcaaagctgacattaaacagactgtgccaaattccttctcatcttatgcggtatccagctcgagccataaaggttctcttggcagggtttaaacctcccttaagggatctaggggagacaagaataccatattgtcccaaatggagcatggaggcactgtgggctatgatagactgtcttcaaggaaaacaactctatgctgtgtccatggctccagcaccagaacagatagtgacattatatgacgatgaacagcatccagttcatatgccgttggtagaaatggggcttgcagataaagatgaataagtgcctaagtgtatacagtgagagcatctatagaagcctagaagaattctgttatgtttagactatgtcttatctttagactatttcaggcttaattttcctaacttgttcagcactagtgctttacctctcatttttaattgaactgttaggaattgtgtggggaaaaaaagtaaataaatgttcgcttcc

SEQ ID NO: 45712 - DNA, 1786 bp, Homo Sapiens
tcatatgggcctaaaaccttggttctgagcccctgagccctgaaagggaaagtagtgacttcatgtatctgtgtctgtggttcattttcttcaggtgtatggagaaaacaccatggaaacagggaacctcacgtgggtatcagactttgtcttcctggggctctcgcagactcgggagctccagcgtttcctgtttctaatgttcctgtttgtctacatcaccactgttatgggaaacatccttatcatcatcacagtgacctctgattcccagctccacacacccatgtactttctgctccgaaacctggctgtcctagacctctgtttctcttcagtcactgctcccaaaatgctagtggacctcctctctgagaagaaaaccatctcttaccagggctgcatgggtcagatcttcttcttccactttttgggaggtgccatggtcttcttcctctcagtgatggcctttgaccgcctcattgccatctcccggcccctccgctatgtcaccgtcatgaacactcagctctgggtggggctggtggtagccacctgggtgggaggctttgtccactctattgtccagctggctctgatgctcccactgcccttctgtggccccaacattttggataacttctactgtgatgttccccaagtactgagacttgcctgcactgacacctcactgctggagttcctcaagatctccaacagtgggctgctggatgtcgtctggttcttcctcctcctgatgtcctacttattcatcctggtgatgctgaggtcacatccaggggaggcaagaaggaaggcagcttccacctgcaccacccacatcatcgtggtttccatgatcttcgttccaagcatttacctctatgcccggcccttcactccattccctatggacaagcttgtgtccatcggccacacagtcatgacccccatgctcaaccccatgatctataccctgaggaaccaggacatgcaggcagcagtgagaagattagggagacaccggctggtttgagagtgacaatggtaggtttcttctctttggctttgttttccctttgtgaagtggagagggagctactacctttgctctcttcatagtgtgttgaggttcatcatagcagggaatgaattttgaaactaagcaacttcgtgttttaggaaaaaagaaagtatcctctttggtggttaaggtttgtgataaagagttttaacacactcgcaacaatgagaattgttcacatggcccctgaaaaccacaccttccttttcaccttcttggtggacagtttcctgttgacagcatttcccctgtgcgaacatttctattttccgtattttgagctctcttcccaatatttccttttggtgtgagtctgggttgttgggaacagcacagaatttggagtcttaagctctaaattagaggccctgacccatcattgaccaaactgatgacttcgagtaagccacccagcttttcttggcctcatgatttctccctcaccaatttgcttaaattagtatgtgcccctaaaatattctatgtttgttatgagattcaaataaaaaaattttgtgataaaacaacaagtaaatcatataactatatgttatcttccaagcttttaaaaatgattgtattttattttcaaatatgaaattattatgagtattcaagctttttctctctatatttacattttaatataatatacaaattttgaataaaagatcatgggcaatgcatgcacattatgaaact

SEQ ID NO: 45713 - DNA, 3132 bp, Homo Sapiens
agctcttgcggcggccatcgccttcgacttaagggtgttgcttggccgccgcctggtagtccggcgattcatttcttgctcggcctcctggagctgtggtctgtgtgggcttccacctcagacacctgcgctggctcagcggggccggaacatggctgtgtcgggtctggatcatctcaaaaatggctacagaagaagattttgtcaaccttccagggcacgtgacattaacacagagcaaggccagaatgttctggaaatcttacaagactgttttgaagaaaaaagtcttgccaatgattttagcacaaattctacaaaatcagtgcttaattcaacacgcaaaataaaagacacttgtattcagtcaccaagcaaagagtgccagaaatcacatccaaagtcagttccactttcttcaaggaagaaagaagcctctctgcagtttgttgtagaaccaagtgaagccaccaacagatcagttcaggcccatgaagttcgtcagaaaattctggcaactgatgttagttccaaaaatacacctgacttgaaaaaaatgtgaagtagaaacataaatgatcatcacagtgaagctgatgaagaattttacttatctgttggctcaccttctgttcttttggatgcaaaaacatctgtatcgcaaaatgttattccatctagtgcccaaaagagagagacttacacttttgaaaattcagtaaatatgctgccttcaagtacagaggtttcacttaaaaccaaaaaaagattaaactttgaagataaagttattttaaagaaaatagaaatagatagaaatagataataaagtatcagataaagaggataaaacatcagaaggacaagaaagaaaaccatcaggatcatctcagaatagaatacgacattcagaatatgaaattcaatgacaagctaaaaaaagtttttcaacattgtttttagaaacagtaaaacgaaaaagtgaatccagtcccattgttaggcatggaggaattgttccacctcattcgtgtcctcccgatgatatgaagttgatagaggatgaatttataattgataagtcagatcaaagttttgccagtagatcttgggattactataccaagaaaggcggggcctctgaaacaacgcaccatatccccggctgagagcactgcactccttcaagatagaaagtcaagagaaaagcatcataatatattagctaagactttggcaaatgacaaacattcccataaacctcacctagtagagacatctcagccctctgataaaacagtactggatacaagttatgctttgacaggtgaaacagaaaatgactgtagatctacaaaatatgaaatgtattccaagaatgcagaaaaatcatctggaagcaaaaggactataaaacaaaaacagagaagaaaatttatggctaaaccagctgaagaacagctcgatgtgggacagactaaagatgaaaacatacatatgtcacatattacccaagacaaatttcaaagaaattcagacagaaatatggaagagcgtgaagagatgggaaatgattgtgcttccaaaatacagatgccacctgtgggaagcaagaaaagtagcactagaaaagataaggaagaatctaaaaagaagcgcttttctagtgagtccaagaacaaacttgtgtctgaagaagtgacttcaactgtcacgagaagtcgaagaatttccaggcatccgtctaattggtgggtggtaaaatcagaggagagtcctgtttatagcaattcttcaataagaaatgaattaccactgcatcacaacagtaggcaaaaatctgctaagaaaacaaatcagtcatctaagaatattgggaaaaaaactattccacttaaaaggcagaagacagcaactaaagacagccaaagagtacagaagtttttaaatgctaaaggttctggaggtatcattggtcatgatgaaatttccagttgtttcctgagtgagccattggaaagtgatgaggcagacttggctaagaggaaaaatctggattgttctagatctacaggaagctcaaagaatgaagataatattatgactgcacagaatgttcccctaaagcctcagaccagtggatatacatgtaatacaccaacagagtcaaacttggattctggagagcataagacttcagttttagaggaaagtggaccttccaggctcaataataattatttaatgtctggaaagaataataatgatgtggatgatgaggaagttcctggaagttcagatgactcaaaacgaactaaagtgataccaaagaacagaatccatcacaaactagtattgccctccaacacaccaaatgttcgcaggaccaagagaacacgtttgaaacctttggagtactggcgaggacagcaaatagattatcaaggaaggccatcaggaggattcgtgattagtggaatactatctccaggcaaaatatcgtctaaaaggaaggcaagagaaaatattggaaaagttaaaaaatctaataagaaaaggatctgtcttgataacgatgaaagaaagactagcttaatggtaaatctaggtatacctcttggagatcctttgcagccagcaatggtaaaggacccagaaacaagagagattattctcatggatcttgtaaggccacaagatacatatcaattttttgttaagcatggtgagttgaaggtatataacacattggatacaccctttttttctactgggaaattgatattaagaccacaagaagaaaagggaaagcagcatgttggccaggatatattgtttttttatgttaactttggtgacctttcgtgtactttacacgaaataccttatataataagtactggggattcgttctatgttccttcaggtaactattataacatcaaaaatctcctgaatgaggaaagtgttcttctttttactcagataaaaagatgaaagatcaaccaaccttaaatatatgtgtgtatatatgtatatgtgaaaaagtttgtatagttgggacatttgtctttgtaattacttgtgatgttttaaaataaaaaaattattcatttttgtgaaaaaaagaca

SEQ ID NO: 45714 - DNA, 1111 bp, Homo Sapiens
agcggccgctgccctgacccgacgggtatcagccggctctccccctccacccaggacgacatgaacgaccgaggccagggagtcctctccttgggcctctgcatccccccatccttggctctggggtaggcccagggaggagacacccccaacccctatccggtctgtcctggagaaaagagactgcccttccatgcccctgagtgaggggcctggggcccaggctgcctgtgttccccaagggcaagggtctctctgttgaggaggaggggcctgtcagccacaacttctttcctcctgagcgccccatctccctctctgcaccctgcaattcccacccctccgtatttatttccctggtcccgccgacagtccctccttgtctgtctccgggattcaggcctccctccctgacatggagagtaacctgtctggcctggtgcctgctgccgggctggtgcctgcgctgccacctgctgtgaccctggggctgacagctgcctacaccaccctgtatgccctgctcttcttctccgtctatgcccagctctggctggtgcttctgtatgggcacaagcgtctcagctatcagacggtgttcctggccctctgtctgctctgggccgccttgcgtaccaccctcttctccttctacttccgagatactccccgcgccaaccgcctggggcccttgcccttctggcttctctactgctgccccgtctgcctgcagttcttcaccttgacgcttatgaacctctactttgcccaggtggtgttcaaggccaaggtgaagcgtcggccggagatgagccgaggcttgctcgctgtccgaggggcctttgtgggggcctcgctgctctttctgctggtgaacgtgctgtgtgctgtgctctcccatcggcgccgggcacagccctgggccctgctgcttgtccgcgtcctggtgagcgactccctgttcgtcatctgcgcgctgtctcttgctgcctgcctctgcctcgtcgccgggcgccctccactagcatctacctggaggccaaggtagggctgcagcactgatgcccaggtgtcttttgggtctctcggcagcggttctcagggtgtagag

SEQ ID NO: 45715 - DNA, 414 bp, Homo Sapiens
aggctgctcactggcccgtctcctctcatgactgctgctctgggaaccacctctctgctctccatcgctaccactctagcctgtggcctgctcctggttgaagaagccatcaatgaaaatgaataccactctggaaatcttgggtggtctgacctgatattttcgcatagtggccacagatattttaggcccccaagaggtagtcttactctttcaattttactggctccactgtttgaggaacttggaacaatttccccagggactggtctggaggtactgttgaataacaccacggtgttttttcctctccaccaagggcccgttgatgtctcaagaccagacataaaacttttggtgctcaagtcactcagaatgagagtcctgctttccctcagcactcttgccctttga

SEQ ID NO: 45716 - DNA, 828 bp, Homo Sapiens
gagcgctagtcccaggagctcggaatgttcgtggaacttaataacctgcttaacaccacccccgacagggcggagcaggggaaactgactctactctgtgatgccaagacagatgggagtttccttgtacaccactttctctccttctatctcaaagctaattgtaaagtctgctttgtggcactcatccagtccttcagccactacagtatcgtgggacagaagctgggtgtcagcctgaccatggcgcgggagcgtgggcagcttgtgttccttgagggactcaagtctgcagtggacgtcgtcttccaggctcaaaaggagccacaccccctgcagtttctcagggaggctaatgctgggaacttgaaaccattgtttgagtttgtacgggaggccctgaagccagtagacagtggagaggctcggtggacgtacccggtgctgttggtggacgacctcagtgtgctcctgagcctgggcatgggggcggtggctgtgctagacttcattcactactgcagagccaccgtgtgctgggaactaaagggaaacatggtggtccttgtgcacgacagtggagatgcggaggatgaggagaatgacatcctgctgaatggcctcagtcatcagagccatctgatactgcgggctgagggcctggccactggcttctgcagggatgtgcacgggcagctgaggatcctgtggaggagaccatcgcagcccgcagtccaccgggatcagagcttcacttaccagtataagatacaggacaaaagcgtgtccttttgccaaaggaatgtctcctgctgttctgtgacctga

SEQ ID NO: 45717 - DNA, 1167 bp, Homo Sapiens
ctcaagtcactccctaaaaagacagtggaaataaatttgaataaacaaaacaggcttgctgaaaataaaatcaggactcctaacctgctccagtcagcctgcttccacgaggcctgtcagtcagtgccccacttgtgactgagtgtgcagtgcccagcatgtaccaggtggttgcattcttggcaatggtcatgggaacccacacctacagccactggcccagctgctgccccagcaaagggcaggacacctctgaggagctgctgaggtggagcactgtgcctgtgcctcccctagagcctgctaggcccaaccgccacccagagtcctgtagggccagtgaagatggacccctcaacagcagggccatctccccctggagatatgagttggacagagacttgaaccggctcccccaggacctgtaccacgcccgttgcctgtgcccgcactgcgtcagcctacagacaggctcccacatggacccccggggcaactcggagctgctctaccacaaccagactgtcttctaccggcggccatgccatggcgagaagggcacccacaagggctactgcctggagcgcaggctgtaccgtgtttccttagcttgtgtgtgtgtgcggccccgtgtgatgggctagccggacctgctggaggctggtccctttttgggaaacctggagccaggtgtacaaccacttgccatgaagggccaggatgcccagatgcttggcccctgtgaagtgctgtctggagcagcaggatcccgggacaggatggggggctttggggaaagcctgcacttctgcacattttgaaaagagcagctgctgcttagggccgccggaagctggtgtcctgtcattttctctcaggaaaggttttcaaagttctgcccatttctggaggccaccactcctgtctcttcctcttttcccatcccctgctaccctggcccagcacaggcactttctagatatttcccccttgctggagaagaaagagcccctggttttatttgtttgtttactcatcactcagtgagcatctactttgggtgcattctagtgtagttactagtcttttgacatggatgattctgaggaggaagctgttattgaatgtatagagatttatccaaataaatatctttatttaaaaatg

SEQ ID NO: 45718 - DNA, 345 bp, Homo Sapiens
cgggggaagggtacgcgctattcattcagagaggttctgcagttccccgtgggcggtgtcaacgggctgctcagcaagggcaacgatgccgagagggtcgggggctgcacgctagcgtacctgccggcggttctggagtacctggcctccgacaccctggagttggcgggcaacgcccggaacaagaagaagacccgcatcatcccgcgccacctgcagctggccatccgcaacgacaaggagctcgacaagctgctggcccgagtgacaatggctggggttttgcccaacatccaagctgtgctgctgtcccaaaggattgggagccactaccacaaagtccag

SEQ ID NO: 45719 - DNA, 1182 bp, Homo Sapiens
atgggggacaccttcatccgtcacatcgccctgctgggctttgagaagcgcttcgtacccagccagcactatgtgagtagctggtacatgttcctggtgaaatggcaggacctgtcggagaaggtggtctaccggcgcttcaccgagatctacgagttccataaaaccttaaaagaaatgttccctattgaggcaggggcgatcaatccagagaacaggatcatcccccacctcccagctcccaagtggtttgacgggcagcgggccgccgagaaccaccagggcacacttaccgagtactgcggcacgctcatgagcctgcccaccaagatctcccgctgtccccacctccttgacttcttcaaggtgcgccctgatgacctcaagctccccacggacaaccagacaaaaaagccagagacatacttgatgcccaaagatggcaagagtaccgcgacagacatcaccggccccatcatcctgcagacgtaccgcgccattgccaactacgagaagacctcgggctccgagatggctctgtccacgggggacgtggtggaggtcgtggagaagagcgagagcggttggtggttctgtcagatgaaagcaaagcgaggctggatcccagcatccttcctcgagcccctggacagtcctgacgagacggaagaccctgagcccaactatgcaggtgagccatacgtcgccatcaaggcctacactgctgtggagggggacgaggtgtccctgctcgagggtgaagctgttgaggtaattcacaagctcctggacggctggtgggtcatcaggaaagacgacgtcacaggctacttcccgtccatgtacctgcaaaagtcagggcaagacgtgtcccaggcccaacgccagatcaagcggggggcgccgccccgcaggtcgtccatccgcaacgtgcacagcatccaccagcggtcgcggaagcgcctcagccaggacgcctatcgccgcaacagcgtccgttttctgcagcagcgacgccgccaggcgcggccgggaccgcagagccccgggagcccgctcgaggaggagcggcagacgcagcgctctaaaccgcagccggcggtgcccccgcggccgagcgccgacctcatcctgaaccgctgcagcgagagcaccaagcggaagctggcgtctgccgtctga

SEQ ID NO: 45720 - DNA, 573 bp, Homo Sapiens
tatctggtcacggtgctgaggaacctgctcagcatcctggctgtcagctctgactcccccttccacacccccatgtacttcttcctctccaacctgtgctgggctgacatcggtttcacctcggccacggttcccaagatgattgtggacatgcagtcgcatagcagagtcatctctcacgcaggctgcctgacacagatgtatttcttggtcctttttgcatgtatagaaggcatgctcctgactgtgatggcctatgacggctttgtagccatctgtcgccctctgcactacccagtcatcgtgaatcctcacctctgtgtcttcttcgttttggtgtcctccttagcctgttggattcccagctgcacagttggattgtgttacaattcaccatcatcaagaatgtggaattctctcattttgtctgtgacccctctcaacttctcaaacttgcctgttctgacagcgtcatcaatagcatattcatatatttcgatagtactacgtttggttttcttcccatttcagggatctttttgtcttactataaaattgtcccctccattctaa

SEQ ID NO: 45721 - DNA, 741 bp, Homo Sapiens
cgaagagatgagaccatccaggtgaaaggaaacggctacgtgcagagtcctagattcccgaacagctaccccaggaacctgctcctgacatggcggcttcactctcaggagaatacacggatacagctagtgtttgacaatcagtttggattagaggaagcagaaaatgatatctgtaggtatgattttgtggaagttgaagatatatccgaaaccagtaccattattagaggacgatggtgtggacacaaggaagttcctccaaggataaaatcaagaacgaaccaaattaaaatcacattcaagtccgatgactactttgtggctaaacctggattcaagatttattattctttgctgggggtatcctataactctccatcagtaacggatcccactctgattgcggatgctctggacaaaaaaattgcagaatttgatacagtggaagatctgctcaagtacttcaatccagagtcatggcaagaagatcttgagaatatgtatctggacacccctcggtatcgaggcaggtcataccatgaccggaagtcaaaagttgacctggataggctcaatgatgatgccaagcgttacagttgcactcccaggaattactcggtcaatataagagaagagctgaagttggccaatgtggtcttctttccacgttgcctcctcgtgcagcgctgtggaggaaattgtggctgtggaactgtcaactggaggtcctgcacatgc

SEQ ID NO: 45722 - DNA, 207 bp, Homo Sapiens
atgtttttactgctgttctcaagttcattgtcttattttcctgtattccttcagttggtagtttttcaaaaatgtcttcaacgtgactgctgttcttcaaaccatcaggcagttcccaaaatgaagctgttgtacatgtatcaaacaaaatggtactctggaaatgttttccactaccaactttctttctcactgttaaatttctag

SEQ ID NO: 45723 - DNA, 474 bp, Homo Sapiens
aggcacagacaccaaggacagagacgctggctaggccgccctccccactgttaccaacatgaagctgctcgcagcaactgtgctactcctcaccatctgcagccttgaaggagctttggttcggagacaggcaaaggagccatgtgtggagagcctggtttctcagtacttccagaccgtgactgactatggcaaggacctgatggagaaggtcaagagcccagagcttcaggccgaggccaagtcttactttgaaaagtcaaaggagcagctgacacccctgatcaagaaggctggaacggaactggttaacttcttgagctatttcgtggaacttggaacacagcctgccacccagtgaagtgtccagaccattgtcttccaaccccagctggcctctagaacacccactggccagtcctagagctcctgtccctacccactctttgctacaataaatgctgaatgaatcca

SEQ ID NO: 45724 - DNA, 1954 bp, Homo Sapiens
aagttccctgagagctaccggccaggggtcgggaggctatgggagctcagggcaggcacctcccatgctcccgcgggagccaccaggacatgaaggagccgggacactccctgagtcctctgggagcccttaagccacactgagaacacagaccctgggagaagcagccagcagtgaggaatcctggaaccccttcccagggagagccttcccatgacccccatgaagagatcagtgcaaacacaggtgtcagagcccttcatggagtcctggggtgaggagtccctgccggagctacccgcagagcagtccctgacggagtactctgacctcgaggaggctccctcggcgcacactctctatgtgggccatctgaacccccagttctcagtgccggtgcttgcctgcctgctgcgagacaccctggagcggctggagatgccggtggcgcgggagcacattgaagtggtgaggcggccgcggaaggcctatgcactggtgcaggtgactgtccacagggacaccctggcctccctcccctggcgcctgcagacggccctggaggagcacctaatcctcaaggagctggcagcccgtgggaaggacctgctattgagtgaggcccaagggcccttcagccacagagaggagaaggaggaggaggaggaggacagtggcctgagccctggccccagtccaggctctggtgtcccgctgcccacctggcctacacacacgctgcctgataggccccaggcccagcagctgcagagctgccagggccggcccagcggcgtgtgctccgacagtgccattgtgcaccagcagatcgtgggcaaggaccagctcttccagggtgccttcctgggcagcgagacccgcaatatggagttcaagcggggtagcggcgagtacctcagcctggccttcaagcaccacgtgcggcgctacgtgtgcgccttcctcaacagcgagggcggcagcctgctcgtgggagtagaggacagcggcctggtgcagggcatccgctgcagccaccgtgacgaggaccgcgcacgcctgctggtggactccatcctgcagggcttcaagcctcagatctttcccgatgcctacactctcaccttcatccctgtgatcagtacctcggagaccagcgtccccctcaaggtgatccgcctgaccgtgcacacccccaaggcccagagccagccgcaactctaccagacagaccagggggaggtgtttctgcggcgcgacgggagcatccagggcccgctgtctgccagcgccatccaggagtggtgcaggcagaggtggctggtggagctgggcaagctggaagagaagatgaaggcgctgatgatggagaaggagcagctccagcagcagctgcagcagcacgggcctgtgtcctgcacctgctgtgtcctgtgagggccctggggagcaggcaggacggcacggcactctccacctgagacccagggatttcctgtttgagtgtaaggccaaccagtaaagcccatgcgggctgctgagaggcggacagggactccttcaacatggcacatgagcaggcacccatgtggcttcaaccctgacagacccatctgtgtagccaagaaactgctctcagccctgtccccaaatgaccttactttcagaaagaatgtgtaaaaccctgcccagagctcccctagggctaagctataagggattgtccttctccctaaaatgctcatttggcccaggctgaggtctgtgactccagttggctacacagtgccagaaaggaatctgtcatctcaggaaagcccctcaaagatggcgaggcatatttgatgactgtggttacagggcaagaggccaccctgcagcccccacccctgacttgctggaacttgtgactgtcaaagctccattaataaattacatgcacctgggacaagaa

SEQ ID NO: 45725 - DNA, 2483 bp, Homo Sapiens
actgtccgccgccgtgtccgcggctgcgccagacagtgtagaacctgcggcctcgatgtccttctcccgtgccctattgtgggctcggctcccggcggggcgccaggctggccaccgggcagccatctgctctgcccttcgtccccactttgggccctttcccggggttctggggcaagtttctgtccttgccaccgcctcctcctctgcctccggtggctccaaaataccaaacacgtccttgttcgtgcccctgactgtgaaacctcagggccccagcgccgacggcgacgtcggggccgagctaacccggcctctggacaagaatgaagtaaagaaggtcttagacaaattttacaagaggaaagaaattcagaaactgggtgctgattatggacttgatgctcgtctcttccaccaagctttcataagctttagaaattatattatgcagtctcattccctggatgtggacattcacattgttttgaatgatatttgcttcggtgcaggcaagtctcatgcggatgatttattcccatttttcttgagacatgccaaacaaatatttcctgtgttggactgtaaggatgatctacgtaaaatcagtgacttaagaataccacctaactggtacccagatgctagagccatgcagcggaagataatatttcattcaggccccacaaacagtggaaagacttatcacgcaatccagaaatacttctcagcaaagtctggagtgtattgtggccctctaaaattactggcacatgagatcttcgaaaagagtaatgctgctggtgtgccatgtgacttggtgacaggtgaagagcgtgtgacagttcagccaaatgggaaacaggcttcacatgtttcttgtacagttgagatgtgcagtgttacaactccttatgaagtggctgtaattgatgaaattcaaatgattagagatccagccagaggatgggcctggaccagagcacttctaggactgtgtgctgaagaggttcatttgtgtggagaacctgctgctattgacctggtgatggagcttatgtacacaacgggggaggaagtggaggttcgagactataagaggcttacccccatttctgtgctggaccatgcactagaatctttagataaccttcggcctggggactgcattgtctgttttagcaagaatgatatttattctgtgagtcggcagattgaaattcggggattagaatcagctgttatatatggcagtctcccacctgggaccaaacttgctcaagcaaaaaagtttaatgatcccaatgacccatgcaaaatcttggttgctacagatgcaattggcatgggacttaatttgagcataaggagaattattttttactcccttataaagcccagtatcaatgaaaagggagagagagaactagaaccaatcacaacctctcaagccctgcagattgctggcagagctggcagattcagctcacggtttaaagaaggagaggttacaacaatgaatcatgaagatctcagtttattaaaggaaattttgaagaggcctgtggatcctataagggtaagagctggtcttcatccaactgctgagcagattgaaatgtttgcctaccatctccctgatgcaacactgtccaatctcattgatatttttgtagacttttcacaagttgatgggcagtattttgtctgcaatatggatgattttaaattttctgcagagttgatccagcatattccactaagtctgcgagtgaggtatgttttctgcacagctcctatcaacaagaagcagccttttgtgtgttcttcactgttacagtttgccaggcagtatagcaggaatgagcccctgacctttgcatggttacgccgatacatcaaatggcctttacttccacctaagaatattaaagacctcatggatcttgaagctgtccacgatgtcttggatctttacttgtggctaagctaccgatttatggatatgtttccagatgccagccttattcgagatctccagaaagaactagatggtattatccaagatggtgtgcacaatatcactaaattgattaaaatgtctgagacgcataagctgttgaatttggagggctttccatcagggagccagtcacgattgtcaggaaccttaaagagccaagctagaaggacacgcggcaccaaagctctagggagtaaagctactgagccacccagccccgatgcaggagagctgtcccttgcttccagattggtgcagcaaggactcctcactccagacatgctgaaacagctagaaaaagagtggatgacacaacaaactgaacacaacaaagaaaaaacagagtctgggactcatccaaaagggacgagaagaaagaagaaggaacctgattcggactagttttctgttcctgtttttttttttttatttaattttgcaaataaaaatttattttgaa

SEQ ID NO: 45726 - DNA, 591 bp, Homo Sapiens
ctactggggcaggcgggctttattctgggtgctggagagctgtgggccccactcctcccgtagaatgccaccagggtgaggggctgggcctcggcaggggtgagtgctcagagcaggaaggggatgatgggcatgcgcaggggcgggtagtcccagaactcctttagggagctgtggtgcttgcccttggcctagatcgtcatctgggtaaagcccaccagggagaacagggccactgggagacactgtgtcatgatggcaaaactgatccaggaccccatctggtaggtgtagttggggcaggacaccagcaggaaaagccacgtgaaagggttcttggtgaggtatgggatcttctgggtgttggactcagcgggccgccggtcccacagggccatgtggatggagaagtcgccaagcacaggcagatcacaaagatggcgagtgccagtttcacctgctgagctctgtaagtagggggtgtgtagagagggtggttgatgtaataggccatccacccaggaaacacagcttctcccctgtctttgcgtgcagaatctccacctcttagtgcttcatggctgtctccca

SEQ ID NO: 45727 - DNA, 744 bp, Homo Sapiens
cttcacaccccagccatatacgtggccatccaggccgtgctgtccctgtacgcctctggccatagcggcattgtgatggactccggtgatggggtcaccaacactgtgcccatctatgaagggtacctcccccacaccatcctgtgtctggacctgactggccggaacctgactgactacctcatgaagatcctcacccagtgtggctacagcttcaccaccacagtcatgcaggaaattgtgtgtgacatcaagaaaaggctgtgctacatccccctggactttgagcaggagatggccatggtgggctccagctcctccctggagaagagctacaagctgcccaatggccaggtcatcaccattagcaacaagtggttctgctgccccgaggcactcttccaaacttccttcgtgggcatggaatcctgtggcatccacgaaactaccttcaactccatcatgaagtcggatgtggacatctacaaagacctgtatgccaacacagtgctgtctggcagcaccaccatgtaccctagcatcaccaacaggatgcagaaggagattaccgccctggcgcccagcgcaatgaagatcaagatcattgctcctcctgagtgcaagtactctgtgtggatcagaggctccatcctggcctcgctgtccaccttccagcagatgtggatcagcaagcaggagtacagtgagtccagcccctccatcgtccaccgcaaatgcttctag

SEQ ID NO: 45728 - DNA, 798 bp, Homo Sapiens
aggatacactttcaggaagactggaagataataaccctgtttataggcggcaatgacctctgtgatttctgcaatgatctggtccactattctccccagaacttcacagacaacattggaaaggccctggacatcctccatgctgaggttcctcgggcatttgtgaacctggtgacggtgcttgagatcgtcaacctgagggagctgtaccaggagaaaaaagtctactgcccaaggatgatcctcaggtctctgtgtccctgtgtcctgaagtttgatgataactcaacagaacttgctaccctcatcgaattcaacaagaagtttcaggagaagacccaccaactgattgagagtgggcgatatgacacaagggaagattttactgtggttgtgcagccgttctttgaaaacgtggacatgccaaagacctcggaaggattgcctgacaactctttcttcgctcctgactgtttccacttcagcagcaagtctcactcccgagcagccagtgctctctggaacaatatgctggagcctgttggccagaagacgactcgtcataagtttgaaaacaagatcaatatcacatgtccgaaccaggtccagccgtttctgaggacctacaagaacagcatgcagggtcatgggacctggctgccatgcagggacagagccccttctgccttgcaccctacctcagtgcatgccctgagacctgcagacatccaagttgtggctgctctgggggattctctgaccgtaaggactcttgggccccaggtggtttggggataa

SEQ ID NO: 45729 - DNA, 219 bp, Homo Sapiens
atggcgcgggaggcaccagctctgtggcctgtgtccagcagctgcgggtctgaaggaatagccagagaggagcacctgaaccccatgggcttggacttcctggggccccgctgggatttcttcgctgctctagctggcaggacacatcccggcctcttccacccattcccccatgtggctgaagacattccaacaatggggtgggcccataatagttag

SEQ ID NO: 45730 - DNA, 2226 bp, Homo Sapiens
atgctggggtccctggtgttgaggagaaaagcactggcgccacggctactcctccggctgctcaggtccccaacgctccggggccatggaggtgcttccggccggaatgtgactactgggagtctcggggagccgcagtggctgagggtagccaccggggggcgccctggaacatcgccggccttgttctccggacgtggggcagccaccggggggcgccagggaggacgcttcgataccaaatgcctcgcggctgccacttggggacgccttcctggtcccgaagaaacactcccaggacaggacagctggaacggggtccccagcagggccggactgggcatgtgcgccctggccgcagcgctggtggttcattgctacagcaagagtccgtccaacaaggatgcagccctgttggaagctgcccgtgccaacaatatgcaagaagtcagcaggctgttgtcagaaggtgcagatgtcaatgcaaagcacagacttggctggacagcactcatggtggcagccatcaaccgaaacaacagtgtggtacaggtcctgcttgctgctggggctgatccaaaccttggagatgatttcagcagtgtttacaagactgccaaggaacagggaatccattctttggaagatgggggacaggacggtgcaagccggcacatcacaaaccagtggacaagtgccctggagttcaggagatggctaggactccccgctggcgtcctgatcacccgagaggatgacttcaacaacaggctgaacaaccgcgccagtttcaagggctgcacggccttgcactatgctgttcttgctgatgactaccgcactgtcaaggagctgcttgatggaggagccaaccccctgcagaggaatgaaatgggacacacacccttggattatgcccgagaaggggaagtgatgaagcttctgaggacttctgaagccaagtaccaagagaagcagcggaagcgtgaggctgaggagcggcgccgcttccccctggagcagcgactaaaggagcacatcattggccaggagagcgccatcgccacagtgggtgctgcgatccggaggaaggagaatggctggtacgatgaagaacaccctctggtcttcctcttcttgggatcatctggaataggaaaaacagagctggccaagcagacagccaaatatatgcacaaagatgctaaaaagggcttcatcaggctggacatgtccgagttccaggagcgacacgaggtggccaagtttattgggtctccaccaggctacgttggccatgaggagggtggccagctgaccaagaagttgaagcagtgccccaatgctgtggtgctctttgatgaagtagacaaggcccatccagatgtgctcaccatcatgctgcagctgtttgatgagggccggctgacagatggaaaagggaagaccattgattgcaaggacgccatcttcatcatgacctccaatgtggccagcgacgagatcgcacagcacgcgctgcagctgaggcaggaagctttggagatgagccgtaaccgtattgccgaaaacctgggggatgtccagataagtgacaagatcaccatctcaaagaacttcaaggagaatgtgattcgccctatcctgaaagctcacttccggagggatgagtttctgggacggatcaatgagatcgtctacttcctccccttctgccactcggagctcatccaactcgtcaacaaggaactaaacttctgggccaagagagccaagcaaaggcacaacatcacgctgctctgggaccgcgaggtggcagatgtgctggtcgacggctacaatgtgcactatggcgcccgctccatcaaacatgaggtagaacgccgtgtggtgaaccagctggcagcagcctatgagcaggacctgctgccagggggctgtactttgcgcatcacggtggaggactcagacaagcagctactcaaaagcccagaactgccctcaccccaggctgagaagcgcctccccaagctgcgtctggagatcatcgacaaggacagcaagactcgcagactggacatccgggcaccactgcaccctgagaaggtgtgcaacaccatctagcagccacctgcctgctcctatgtgccctcaccatccaataaaggccccttggctgtggcatggcaactgacttaccttcccctcatgccgctcccatctcta

SEQ ID NO: 45731 - DNA, 1713 bp, Homo Sapiens
gaccggcccttctcggtgcccctcttccctagggagatgcgatgagccggtgcccccgcgtcctcatcgtcgccccgggcacggtgcccgtccagtgcccgtggtggggagggagcactccgcggtccctccgtgacgcccctcgcttggccccccccacagctggcgtccctcggccatgccccaggggacccagccagggggtgggctctagagcgagtggggtggagaggagaaaggacggggccttgggcgcctctgagatgctcccaagtgccagggagggccgagcgaggcgcaggcaaccgggcagcaggcatgatgccctcgcctagtgactccagccgctcgctgaccagccggcccagcaccaggggccttacccacctccgcctccaccgaccctggctgcaggccctgcttacgctggggctggtccaagtgctcctgggcatcctggtggtcaccttcagcatggtggcctcttccgtcaccaccaccgagagcatcaagaggtcctgcccgtcttgggctgggttctcgaacctgctcttcagcgtctgtgggctcaccatttgtgccgctataatctgtacactctctgctattgtctgctgcatccaaatcttctccctggacctcgtgcatacgctgacttcagggacctttataccaaagtgcttgaggaagaagctgcttctgtttcctctgcagatacagggctctgctctgaagcctgcctcttccgcctagcccgctgcccttcccccaagttgctacgtgcccggtcagccgagaaacggcgccctgtgcccaccttccaaaaagttcccctgccctcgggccctgcacctgcccactccctgggggacctaaagggcagctggccaggtcggggcctggtcactcgtttcctccagatatccaggaaagccccagaccccagtgggactggagctcatggacataagcaggtgccccggagcctgtggggccggcctggccgagagagcctccaccttcgcagctgcggagatctgagctctagctcttccctgcggcgtctcctgtctggccgcaggctggagcgtggtacccgcccccacagcctcagcctcaacgggggcagccgggagactgggctctgacctaggcttcttgtcacactgaacacatccagccacaggcaccagctggttgggaccagcagcccccagcatcctcttgcactggctggcacaaaaagaaacctgctgtataccccccaaagtgtccctttccctcctacctctggggtctcttgctgcttgcctctgctgctctggactgggagagcttctgtcctgtgctgcatgggtatttagactgtgggggagatgccccttcttatagcactggaggaggaaaacaaattcttgtccccctcagaatgagagtggctctttctgatttgcaagggcactatggtcagggcaaaggcatggcccaggtgtttaagtacagggtgacgtgtgcctatgcaatggggtggtaaggcaggcacgaagagtccaaaaaatctaggtggcctctcagctctgccacctctagctgcatgaccttgggcaagctatgtaaccccaattgcctgctccattaaagactgtgaaggtagaatgtttgtaaagctcttaacagtatgtaagccttcaataaatttcagttttccccttg

SEQ ID NO: 45732 - DNA, 2281 bp, Homo Sapiens
gtgcacctagctcaggaagccttcctttctagtctctacagctgtttccctcttttcccatctcattcttccctcttcatttctggcctatcttttaacatctccatccctttgatgcctcatccatctcctcttcaccgtcttgtctttgcctgttcccttttctgcttcctgctcctcttaaggctgggttttcctcctgcgtctcctctgtgcgcctgtgagtgtcccctgtctgctcatcctctctccctctgtccacctgtttctctttcttccagcgtttctccatctcacgcgctgcctctgtcattttctctctttcttcgtctttctctctctctcattgttctgagacatagcagtgcctggcccagcggggacaacatgtttcacagacaaatcatccaacaaaagagaggaggaacgtgcttcagctggctgtccccatgccttctgctcccgcttctggaagggaagacagggcagggaccatgtccagctgcagaaaatcccagtgtttttctgtggcattgcctggtaaaggctgaacgtggctttcgtgagagctaatctgcctgcccaaccagattgtgctgtggctaaaattgctgtgagctcgacagtgcctgaagactggagaaaactgagccatgtcttggatgctcttgcggggcctaggggagtgccaggccagaaggagaactgcctgtggactctcagtaggaaagcagctaacgaggtgatgagtgagtgtcgcctggaagtctgggggccattccatgtgggtcacatcgcctgaccagagggttgggtgcctggacagggctgagcttgggactccttccagggcctggcctcagctgctgggcctgccgagcatgccccacaagcacccacgcacacatacaagtatggaggcagagtggaagtttgacttttgcagatctcgtacagcctggagtagagaagagaattgggaactctcaatgttgtgtgaccctaggcaagtcccttccctgccttgtgcctcagtttccctttacataccatgaggatgttcccagtgttggtgttttaatgcctgcagacaagctaagctcatcatctggttcccggaagagatcctccttttgtggaaaggccacagccactctgccaccctgaggctcccactcctccttctctggaaccctctcccttgcctgtaggtcacgggaatgtcaagagcacccagggaagtgcctgctgccagtcatcactcactgattatgtgacagcagaggagccaagaagctgctgggaatcgagacacccccccattcagtccccaccatctctgtcttcatgaggttccctgggagaagctcctatgtctgggaatggaaatgtctccacctggatagggacaaacaggagctgggggctgcatcttaagacttcttgtcccattagtgctgacctctggagacggctcctgaattgtgcccactcccccacctcctcaccacacacatgctctgggccgtgcgaggctcagcttgtcacggacaagctaaaatgaggtggcctgaatgccccttatcatagacagcttatctcctgtggtcactcacctgacagactccagagagccactcagcgggcctctcccagccgcctgcttctcagctctgactctcccttgccttaaggggacactggattccagtgaccctcctattggtcagagttgggctgagcacagagaaggggtagaatgctcctgggaactcggaaagctctgggatgccagcttttcccacatgttctcactcacccctctgtaatacagattctgcagccctgccccccacacacacactcctacacctctgctctcaaagtgaagaagtaggctaatatctgtggtacatttatttacctactccctgagactgcagctcccttagtcagtgttgtgtcctccactcaggctggggctccctgaggatggggctgtgtctcccctcagactggggttccccaaggacagggctgtgtctctccttaggctggggtccctgagggtggggctgtgtctccctgcagattggggctccctgaggatggggctgtgtctccctgaagactggggctccctgaggacagggctgtgtctcccctcaggctggggctccttgaggatgggacactttaaagaagagaaattgacaggttgaccctgggggatctttgggtcaataaaacattctatagaccctcagtggtcagactagga

SEQ ID NO: 45733 - DNA, 5736 bp, Homo Sapiens
atgtgggtggccaagtggctgactgggctgctctaccatctctcgctcttcatcaccaggtcttgggaagttgacttccaccccaggcaagaagccctggtgaggacactgacctcctacgaagtagtgatccccgagcgggtcaatgagtttggagaagtgttccctcagagccaccacttcagccggcagaaacgcagctccgaggcgctggaacccatgccgttccgaacccactatcgcttcactgcctacgggcagctcttccagctgaacctgaccgccgatgcatcctttctggccgccggctacaccgaggtgcacttgggaaccccggagcgcggggcctgggagagcgacgcagggccctcggacctgcgccactgcttctaccgcggccaggtcaactcacaggaggattacaaggccgtcgtcagcttatgcggaggcctgacgggaacatttaaaggacagaacggtgaatatttcttagaacctataatgaaggcagatgggaatgaatatgaagatggtcacaacaagccacatcttatatacagacaagacttaaataactcttttctgcagactctgaagtattgcagtgtgtcagaaagtcaaataaaggaaaccagtttaccctttcatacctacagcaacatgaatgaagatcttaatgtaatgaaagaaagagttttaggacacacatcaaaaaatgtaccattgaaagatgaaagaagacattccaggaaaaaacgtcttatatcatatccaagatacattgaaattatggttacagctgatgctaaagtggtttctgctcatggatcgaatttgcaaaactatatactgactctaatgtcaattgttgcaacaatctacaaagatccaagtattggaaatttgatacacatagtagtggtaaaattagttatgattcaccgtgaggaggaaggaccagtcattaattttgatggtgctaccacattaaagaacttttgttcatggcaacaaactcagaatgaccttgatgatgttcacccttcccaccatgacactgctgttcttatcactagggaagacatttgttcatctaaagagaaatgtaacatgttaggtttatcatatttaggtaccatatgtgatcctttacaaagctgctttattaatgaagaaaaaggactcatttctgcttttactatagcccatgagcttgggcacacacttggtgttcaacatgatgataatcctagatgtaaagaaatgaaagttacaaagtatcatgtaatggcccctgctttaagttttcacatgagtccttggagctggtcaaactgtagtcggaaatatgttactgaattcctagatactggttacggggaatgtcttcttgacaaaccagatgaagaaatatataatctgccttcagaacttcctggatcacgatatgatggaaacaagcagtgtgagcttgcgtttggtcctgggtcacaaatgtgtccccatatagagaatatatgcatgcatctgtggtgcacaagcacagaaaagcttcacaaaggctgtttcactcaacacgtgccaccagcagatggaacagactgcggtcctggaatgcattgccgtcatgggctatgtgtaaacaaagaaacggaaacacgtcctgtaaatggtgaatggggaccatgggaaccttacagttcttgttcaagaacatgtggaggcggaatcgaaagtgcaaccaggcgctgtaatcgtcctgagccaagaaacggaggaaattactgtgtgggccgcaggatgaaatttcgatcatgtaatactgattcatgtccaaaaggcacacaagactttcgagagaagcagtgctctgattttaatggtaaacatttggacatcagtggcattccctctaatgtgaggtggcttccaagatacagtggcattggcacaaaggatcgttgtaaactctattgtcaggttgctggaaccaattatttctacctattgaaggatatggttgaagatggtactccttgtggaactgaaactcatgacatctgtgttcaaggccagtgtatggcagctggttgtgatcacgtgttaaactccagtgccaagatagacaaatgtggagtgtgtggtggggacaactcttcatgcaagacaataacaggtgtcttcaacagttctcattatggttataatgttgttgtaaagattcccgcaggagcaacaaacgttgacattcgtcagtacagctattctggacaaccagatgacagttaccttgcattatctgacgctgaagggaattttcttttcaatggaaattttcttctaagtacgtcaaaaaaagaaatcaatgtgcaaggaacaagaactgttattgaatacagtggatcaaataacgcagttgaaagaattaatagtactaatcgacaagagaaagaacttattttgcaggtgttgtgtgtgggtaatttatacaaccctgatgtacattattccttcaatatccctttggaagagaggagtgacatgttcacatgggacccctatggaccatgggaaggctgtaccaaaatgtgtcaaggtcttcagcgaagaaacataacttgcatacataagagtgatcatagtgttgtgtctgataaagaatgtgaccacttgccacttccatcatttgttactcaaagttgcaatacagactgtgaactaaggtggcatgttattggcaaaagtgaatgttcatcccaatgtggtcaaggatatagaaccttggacatccattgcatgaagtattccattcatgaaggacagactgttcaagttgatgaccactactgtggtgaccagcttaaacctcctacccaagaactatgccatggtaactgtgtcttcacaagatggcattattcagaatggtctcagtgttccaggagttgtggaggaggggaaaggtctcgagaatcttattgtatgaataactttggccatcgtcttgctgacaatgaatgccaagaactgtcccgagtgacgagagagaattgcaatgaattttcctgtcccagttgggctgctagtgaatggagcgagtgccttgttacatgtggtaaaggaacaaagcagcggcaggtatggtgtcagctgaatgtagatcacttgagtgatggcttctgtaattcaagtaccaaacctgaatctctgagtccatgtgaacttcatacatgtgcttcctggcaagtaggaccatggggtccttgcacaaccacatgtggacatgggtatcagatgcgagatgttaaatgtgtcaatgagctagctagtgcagtgttagaggacacagaatgccatgaagctagtcgccccagtgacagacagagctgtgtacttacaccttgctcatttatttctaaacttgagaccgctttattaccaactgttctcataaaaaagatggcacaatggcgacatggttcttggaccccatgctccgtatcttgtggaagaggtactcaagcccgctatgtaagctgtcgtgatgctcttgatagaatagcagatgaatcatattgtgcccacttaccccgacctgctgaaatatgggactgttttaccccttgtggagagtggcaagcaggggattggtcaccctgttcagcttcctgtggccatggaaaaacaactcgacaagttttatgcatgaactaccatcagccaattgatgagaattactgtgatcctgaagttcgccctttgatggaacaggaatgtagcctggcagcctgccctcctgcacacagccactttcctagttcccctgtgcagccaagctattatctaagcacgaatttgccattaactcaaaaacttgaagataatgaaaatcaggtggtccatccatcagtcagaggaaaccagtggagaaccggaccatggggatcatgctccagcagttgttctggaggtcttcagcatagggctgtggtctgccaggatgaaaatggacaaagtgctagttactgcgatgcagcctccaagcctccagagttacagcaatgtggtccagggccttgtccacagtggaactacggaaattggggagaatgttcacaaacatgtggaggaggaataaaatcaagacttgtaatatgtcaatttcccaatggccaaatattagaagatcacaactgtgaaattgtaaacaagccacctagcgtaatacagtgtcatatgcatgcttgccctgctgatgtgtcatggcatcaggaaccatggacatcgtgctcagcttcttgtggtaaaggtagaaagtaccgtgaagtgttttgcattgaccaattccaaaggaaattagaagacacaaattgcagtcaagtacagaaacctccaactcacaaagcctgtagatctgtcagatgcccttcatggaaagccaatagctggaatgagtgctctgtgacctgtggctctggagttcagcagagggatgtatactgcagactgaaaggtgttggtcaggtggttgaagaaatgtgtgatcagtccacccgaccttgttctcagaggcgatgttggagtcaggactgtgtgcagcacaaggggatggaaagagggaggctgaattgttcaacatcatgtgagagaaaagattcacatcaacgaatggagtgcacagataaccaaatcagacaagtgaatgaaatagtctataattcttcaaccatatctcttacatccaagaattgcaggaaccctccttgcaattacattgtggtaacagcagactcatcacagtgtgcaaacaactgtggatttagttacagacaaaggattacatattgcaccgagatcccatctactaagaaacataagctccatcgacttcggcctatagtttatcaagaatgccctgtggtgccttcctctcaggtttaccaatgcattaacagctgtttgcatttggccacttggaaagttggaaaatggagcaagtgctcagtgacttgtggaattgggataatgaagagacaagtgaaatgcattaccaaacatggtttgtccagtgacttatgtttaaaccatttaaaaccaggtgctcaaaagaaatgttatgccaatgactgtaaatcatttaccacctgcaaagaaattcaagtgaaaaaccacattagaaaggatggtgactattaccttaacattaagggaagaataataaagatttattgtgcagacatgtacttggagaaccctaaggaatatttaacactggtccaaggtgaagaaaacttttctgaagtgtatggctttagactaaaaaatccatatcaatgtccttttaatgggagtagaagggaagactgtgaatgtgacaatggacacttagctgctggatacactgttttcagcaaaataagaattgatctcacttccatgcaaattaaaactacggaccttcttttttccaaaacaatatttggaaatgcagttccatttgccacagctggagattgctacagtgctttcagatgcccacagggacagtttagcattaatttgtcaggaactgggatgaagatatccagcacagcaaagtggctcactcaggggagttatacctctgtcagcatacgaagatcagaggatggaactagatttttcggcaaatgtggagggtactgtggaaagtgtcttcctcacatgactactggtctcccaattcaagtcatatga

SEQ ID NO: 45734 - DNA, 1839 bp, Homo Sapiens
agcaacggggtgcggcagggtggggaacgcgggagcggggccagctcccaggaaagctggtctgcgagcggcccctgcccggctcccaggtccctgcgcgaccccgcccttcccgagaccccagccgggctgccgcccgcgtcccggaagctccagcctgaaccatgtttttcacttgtggcccaaatgaggccatggtggtctccgggttctgccgaagccccccagtcatggtggctggagggcgtgtctttgtcctgccctgcatccaacagatccagaggatctctctcaacacactgaccctcaatgtcaagagtgaaaaggtttacactcgccatggggtccccatctcagtcactggcattgcccaggtaaaaatccaggggcagaacaaggagatgttggcggccgcctgtcagatgttcctggggaagacggaggctgagattgcccacattgccctggagacgttagagggccaccagagggccatcatggcccacatgactgtggaggagatctataaggacaggcagaaattctcagaacaggttttcaaagtggcctcctcagacctggtcaacatgggcatcagtgtggttagctacactctgaaggacattcacgatgaccaggactatttgcactctttggggaaggctcgaacagctcaagtccaaaaagatgcacggattggagaagcagaggccaagagagatgctgggatccgggaagctaaagccaagcaggaaaaggtgtctgctcagtacctgagtgagatcgagatggccaaggcacagagagattacgaactgaagaaggccgcctatgacatcgaggtcaacacccgccgagcacaggctgacctggcctatcagcttcaggtggccaagactaagcagcagattgaggagcagcgggtgcaggtgcaggtggtggagcgggcccagcaggtggcagtgcaggagcaggagatcgcccggcgggagaaggagctggaggcccgggtgcggaagccagcggaagcggagcgctacaagctggagcgcctagccgaggcagagaagtcccaactaattatgcaggcggaggcagaagccgcgtctgtgcggatgcgtggggaagctgaggcctttgccataggggcccgagcccgagccgaggctgagcagatggccaagaaggcagaagccttccagctgtaccaagaggctgctcagctggacatgctgctagagaagctgccccaggtggcagaggagatcagtggtcccttgacttcagccaataagatcacactggtgtccagcggcagtgggaccatgggggcagccaaagtgactggggaagtactggacattctaactcgcctgccagagagtgtggaaagactcacaggcgtgagcatctcccaggtgaatcacaagcctttgagaacagcctgagccttcagccctcacagatgcccagcctcatagctgaagttgcctgaatgatcctcctgttgcatgtaacccactggcctccctgagcatgtccattgacagtgaggtcccacccctcatctctccttgccaaatagtttgtgccttgtcttgaagggggttgctccccttgccaacctcacactgctatgattgccaactccagcggtcccatgtcagccttctgatgatcccactccaccccacctcaacttatttaacttcctaattaaatcagactgtttgagcctgttgtctagaatattttcctgaccaagactgagggatgggctggaggttttcaactttgctacccaaataaattgctgtaagtaagtactaataaaacaga

SEQ ID NO: 45735 - DNA, 880 bp, Homo Sapiens
tgaaaatctactctatcagctgctgtggttgccaccattctcaggaccctcgccatgaaagcccttatgctgctcaccctgtctgttctgctctgctgggtctcagctgacattcgctgtcactcctgctacaaggtccctgtgctgggctgtgtggaccggcagtcctgccgcctggagccaggacagcaatgcctgacaacacatgcataccttggtaagatgtgggttttctccaatctgcgctgtggcacaccagaagagccctgtcaggaggccttcaaccaaaccaaccgtaagctgggtctgacatataacaccacctgctgcaacaaggacaactgcaacagcgcaggaccccggcccactccagccctgggccttgtcttccttacctccttggctggccttggcctctggctgctgcactgagactcattccattggctgcccctcctcccacctgccttggcctgagcctctctccctgtgtctctgtatcccctggctttacagaatcgtctctccctagctcccatttctttaattaaacactgttccgagtggtctcctcatccatccttcccacctcacacccttcactctcctttttctgggtcccttcccacttccttccaggacctccattggctcctagaagggctccccactttgcttcctatactctgctgtcccctacttgaggagggattgggatctgggcctgaaatggggcttctgtgttgtccccagtgaaggctcccacaaggacctgatgacctcactgtacagagctgactccccaaatccaggctcccatatgtaccccatcccccatactcacctctttccattttgagtaataaatgtctgagtctga

SEQ ID NO: 45736 - DNA, 3292 bp, Homo Sapiens
atggctgcgcccgtgggaccggtgaagttctggcgacccggtacagaggggccaggtgtaagcatctctgaagagagacaaagtctggctgaaaactctgggacaacggttgtttacaacccttatgctgccctttccatagagcagcagaggcagaagctgccggtattcaagcttaggaatcatattttatacttgatagaaaattatcagacagtggtgattgttggtgaaacaggatgtgggaagagcacacagattcctcagtaccttgcagaagccggctggacagctgaaggaagagtggtaggagtgacccagcctcgaagagtggctgctgttacagttgcagggagagtagctgaagaaaggggtgcagtgctgggccacgaggtgggctactgcatccgctttgatgactgcaccgaccagctggccacgagaattaagtttcttactgatggaatgctggtcagggaaatgatggttgatccgttgttaacaaaatatagtgtcatcatgctggatgaagcccacgagaggaccttgtacactgacattgccattggcttgctaaaaaagattcagaaaaagcgaggggatcttcgattgattgtagcttcagccactctggatgcagacaaattccgggatttctttaatcaaaatgaaaccagtgatccagcaagggatacatgtgtgatccttacagtggaagggagaacatttccggtggatatcttttatctacaaagtcctgttccagattatatcaaatcaactgtcgaaactgtggtgaaaattcaccagacagagggagacggagacgttttagcatttcttactggccaggaagaggtagaaactgttgtgtcgatgctcatcgagcaggctcgagcactagctcgcactgggatgaagagacacctccgagttctccccatgtatgcaggactgccttcctttgagcaaatgaaagtgtttgaaagggtgtcacgcagtgtcagaaaggtgatagtggccaccaatgtggcagaaacctctatcacaatcagcggcattgtgtatgtgatcgactgtggctttgtgaaactccgagcctacaatcccaggacagctattgaatgcttggtggtggtgccagtctcccaggcatcagctaatcagcgagcaggacgtggtggtcgtagtcgctcgggaaaatgttatcgcctttatacagaggaagcctttgacaagttgcctcagtctacggttcctgagatgcagcgtagtaatttggcacctgtcatcctgcagctgaaagcactaggaattgacaatgtcctcaggttccacttcatgtcgccccctccagcacagtcgatggttcaagccttggagttactgtatgctctgggaggtctggacaaagactgtcgcctaactgaaccgcttggcatgagaattgcagagtttcctttgaatcccatgtttgccaaaatgctgcttgaatcaggaaacttcggctgttctcaggaaattctaagcatcgctgccatgatgcagatccagaatatctttgtggtccccccaaaccagaagtctcacgcaattcgagtgcaccgtaaatttgctgtggaggagggcgaccacctcactatgctcaatatatatgaagcatttatcaaacacaataaggactctaaatggtgtcaggaacatttcctgaattacaagggtcttgtcagagctgcgactgtaagagaacaattgaaaaagcttcttgtcaagtttcaagtgcccaggaagtctagtgaaggtgacccggatctggttctgaggtgcattgtctccggcttcttcgccaatgcagcgaggtttcattctactggagcttataggaccatccgtgatgaccatgagctgcacatacaccctgcgtcagtcctctatgcagagaagccgcctcgctgggtcatctataacgaagttatacagacctccaagtactacatgagagatgtgactgccattgaatcggcctggctgttggagctggctccacacttttatcaacaaggaacgcacctgtctctgaaagccaaaagggccaaggtccaggacccgtgagaggagcccacagctacagctgcagggactgctggcgtcctctcctccatgctgctgcccctggtcccaggtggggtgagctggcaccagctcctgtggaatgtttggttgctctgaagtgggctgcggcctgttcattagtcctttcttcccgctgcccacagcatttgcatccttgctgggatcctggaggactttgtgcatgggcaggcatccttctgtgctgcagcgggcagagtgggagttggctcactcagcacgctcactaacccagcatgccacttccagcaggcatgcagtcctggcccagctctatgggaaacaaggaggaaagttagccactgaaggccaaaacaccatgtggggtggacagagggtttgctgggctggctttgctttccctgctggggccacagctgtgttaaccaatgaggtctgctgccaggtgtgaacaagcatgtctctacgaatgaacgaaacattggggatctctgccgaaaccaccaaagggcatgtctgatgggcacagggtctcccaaacccagtggcttctgtctgtcctcagcccttgtccctgtttatctgcagccaggagacttgcaagggattggtgattgacagagaggactcgtgcgctgttttgtgttagcagaggatttgtgtttcacaggtaggcttagcgtcctctcagagtgtagtgccaggtcctggtgccacgctagctgagcactcaggagagttcatcagctcagatcccacagggcctcctctttagcaggaattcacaacagtttggatgccctaaacttctgtagctcaggaacatcactggtgtatttgtttttttgtttgtttgcttgggttcttgcaagagcgcgtggggacagttcttccagcaggcactggttttgttgccccagggctgctttgctgtgatgatgattgcatttcaacacatgccagatgcagattttttcccccttactgtttcaatgacctttattttaaaaacacatagcttgaaaatttatttttatactgatattagtttggatgtgccacttttggcaccaaacgtgtatgtcatttttatttccattttataaacatgtaaataatagtgataacttgttaataatagtaaacctttatacctaaagtaaatgtcttccctcccaca

SEQ ID NO: 45737 - DNA, 902 bp, Homo Sapiens
gctcaccatggtgggccccgcgccgcggcggcggctgcggccgctggcagcgctggccctggtcctggcgctggccccggggctgcccacagcccgggccgggcagacaccgcgccctgccgagcgggggcccccagtgcggcttttcaccgaggaggagctggcccgctatggcggggaggaggaagatcagcccatctacttggcagtgaagggagtggtgtttgatgtcacctccggaaaggagttttatggacgaggagccccctacaatgccttgacggggaaggactccactagaggggtagccaagatgtccttggatcctgcagacctcacccatgacactacgggtctcacggccaaggaactggaggccctggatgaggtcttcaccaaagtgtacaaagccaaataccccatcgtcggctacactgcccggagaattctcaatgaggatggcagccctaacctggacttcaagcctgaagaccagccccattttgacatcaaggatgagttctgatgttccccctgcaggagcaggttcttgggagcgtgaggcaggaagacactaggtgctgaatctcctgcaaaactggctgcctggaggccctgagccacccagatctgaataaaacagatgcttaccctggaagagcaaatgcctcctgttgtccttggtcaggggttctgtctacctggggacccctgtctgcacaccagggatcaataagagccaaagtgggacacctcctagatgtcagtatcagctggctgggcagtggaattttgagcgacctttactttatacttttctgtgcttgacagattttcagccatgaccatgttcactttataatcaaaacaaaaataaaggtcccatttttacaaaaggagaa

SEQ ID NO: 45738 - DNA, 1238 bp, Homo Sapiens
ctgagaatatctaacatgttgttactaatcaatgtcattctgaccttgtgggtttcctgtgctaatggacaagtgaaaccttgtgattttccagacattaaacatggaggtctatttcatgagaatatgcgtagaccatactttccagtagctgtaggaaaatattactcctattactgtgatgaacattttgagactccttcaggaagttactgggattacattcattgcacacaaaatgggtggtcaccagcagtaccatgtctcagaaaatgttattttccttatttggaaaatggatataatcaaaattatggaagaaagtttgtacagggtaactctacagaagttgcctgccatcctggctacggtcttccaaaagcgcagaccacagttacatgtacggagaaaggctggtctcctactcccagatgcatccgtgtcagaacatgctcaaaatcagatatagaaattgaaaatggattcatttccgaatcttcctctatttatattttaaataaagaaatacaatataaatgtaaaccaggatatgcaacagcagatggaaattcttcaggatcaattacatgtttgcaaaatggatggtcagcacaaccaatttgcattaattcttcagaaaagtgtgggcctcctccacctattagcaatggtgataccacctcctttctactaaaagtgtatgtgccacagtcaagagtcgagtaccaatgccagccctactatgaacttcagggttctaattatgtaacatgtagtaatggagagtggtcggaaccaccaagatgcatacatccatgtataataactgaagaaaacatgaataaaaataacataaagttaaaaggaagaagtgacagaaaatattatgcaaaaacaggggataccattgaatttatgtgtaaattgggatataatgcaaatacatcaattctatcatttcaagcagtgtgtcgggaagggatagtggaataccccagatgcgaataaggcagcattgttaccctaaatgtatgtccaacttccacttttccacttctcactcttatggtctcaaagcttgcaaagatagcttctgatattgttgtaatttctactttatttcaaagaaaattaatataatagtttcaatttgcaacttaatatattctcaaaaatatattaaaacaaactaaattattgcttatgcttgtactaaaataataaaaactactcttata

SEQ ID NO: 45739 - DNA, 873 bp, Homo Sapiens
cgccaggaggagccgcgcgctgctggtgctgttgccgccgctgctctagctgccgtcagtcaggctgcgcccgcgtcttcagggcccagtccctcggacccatcgccgcttctagaccctactgcggtctcggatattgccggacgtatctgttttgtgttccagttggcagatgcactacctgaacactcccctgccaaaacctctgctgtgagcaatacaaaacctggccaacctcctcaaggctggccaggctccaacccttggaataatccgagtgctccatcttcagtgccatctggactcccaccaagtgcaacaccctccactgtgccttttggaccagcaccaacaggaatgtatccctccgtgcctcccaccggaccacctccaggacccccagcaccctttcctccttccggaccatcatgtcccccacctggtggtccttatccagccccaactgtgccgggccctggccccacagggccatatcctacaccaaatatgccctttccagagctacccagaccatatggtgcacccacagatccagctgcagctggtcctttaggtccatggggatccatgtcttctggaccttgggcgccaggaatgggagggcagtatcctacccctaatatgccatatccatctccaggcccatatcccgctcctcctcctccccaagcccctggggcagcaccacctgttccatggggcaccgttccaccaggagcctggggaccaccagcaccatatcctgcccctacaggatcgtatcccacaccaggactctatcctactcccagtaatcctttccaagtgccttcaggaccttctggtgctccaccaatgcctggtggcccccat

SEQ ID NO: 45740 - DNA, 408 bp, Homo Sapiens
acaaacacaaagggaaagaggagaggcacccgatatatgttctctaggtcttttagaaaagatggagttgttcctttggccatgcatatgcgaatctataagaaaggtgataatgtagacatcaagggaatgggtactgttcaaaaaggaatgccccacaagtgttaccatggcagaactgaaggagtctacaatgttaaccagcatgctgctggcattgttgtacacaagttgagggcaagattcttgccaagagaattaatgtgtgtattgagcacattaagcactctaattaatgtgtgtattgagcacataaagcactctaagagccaagacagcttcctgaagcacgtgaaagaaaatgatcagaaagaagccaaagagaaaggtacctgggttcaactgtaa

SEQ ID NO: 45741 - DNA, 1359 bp, Homo Sapiens
gtggagacaccgcctcagggctcggtgcacagtggacatttggggagcgttgtgggtgacccccacacaggcactgggaatgcaggggagagggggccaagggggaaaggggccagagtgttggctttggattcaggagggatggattccagtcctagcttgccacttattaggactcctgagagcagcctccatgaggccctggaccagtgcatgaccgccctggacctcttcctcaccaaccagttctcagaagcactcagctacctcaagcccagaaccaaggaaagcatgtaccactcactgacatatgccaccatcctggagatgcaggccatgatgacctttgaccctcaggacatcctgcttgccggcaacatgatgaaggaggcacagatgctgtgtcagaggcaccggaggaagtcttctgtaacagattccttcagcagcctggtgaaccgccccacgctgggccaattcactgaagaggaaatccacgctgaggtctgctatgcagagtgcctgctgcagcgagcagccctgaccttcctgcagggttcctcacacggaggggcagtcaggcccagagccttgcatgatccctctcacgcctgcagctgcccacctgggccaggccgtcagcatcttttcctcctgcaggacgagaacatggtgagcttcatcaaaggcggcatcaaagttcgaaacagctaccagacctacaaggagctggacagccttgttcagtcctcacaatactgcaagggtgagaaccacccgcactttgaaggaggagtgaagcttggtgtaggggccttcaacctgacactgtccatgcttcctactaggatcctgaggctgttggagtttgtggggttttcaggaaacaaggactatgggctgctgcagctggaggagggagcgtcagggcacagcttccgctctgtgctctgtgtcatgctcctgctgtgctaccacaccttcctcaccttcgtgctcggtactgggaacgtcaacatcgaggaggccgagaagctcttgaagccctacctgaaccggtaccctaagggtgccatcttcctgttctttgcagggaggattgaagtcattaaaggcaacattgatgcagtgagtgatgggggtccgggccggggctggggatccctcggggtctcccagaccagcaggaagtcaggcacatgtgacatactcagggacaggatagactggggggggggggggccaagagagaaccaaccagagagcaggggcaggagaggcccttctggcagagcagcctgggaagacaagggaggaggaggcatttgtggtgcctgggattttgactgggagatatag

SEQ ID NO: 45742 - DNA, 222 bp, Homo Sapiens
aagggagacagttctgctgaagaactgcaattggccacccagctgacaggaccagtcatgcccatccagaatgtctatgagaaggagaaagctcaagtcaccactgaggagaagaatttcagagcctttgctagttgctgcatggcccgtgccaatgcctggctcctccacatatggacaaaaagagacatggaagctacagaacaggatgttgaaaagaaa

SEQ ID NO: 45743 - DNA, 3081 bp, Homo Sapiens
atgagctgcctggggatcttcatccccaagaagcaccgggcgcgcttcgacgaggtggtgtctcagggcctcctgggcaagctgtgccgcgcacgccgggcccagggcgcgcagcgactgcgccggagccgcagcgaggagcggccggagcgcctcctggtggggccggagaggttaaggggagagggacacgggacatctccaacctctgcgccccagggccccctctccatcatgctgctcgccccttctttttcccccaggactgtccgagtctacaaaggcaacaagagcttcggcttcacacttcgcggccacgggcctgtctggatcgagtctgtcctgcctgggagcccagctgacaatgctgccctcaagtcaggtgaccggatcctcttcctcaatggactggacatgaggaactgctcccacgacaaggtggtgtccatgctgcagggcagtggtgccatgcccacgctggtggtggaggaagggctcgtcccatttgccagtgactccgattctctggactcacccaacccgtcgtcggcgctcacctccctgcagtgggtggcggagatcctgccgtccagcatccgggtccaagggaggaccttcagccagcagctggagcacctactcacacctcctgagcgctatggggtctgccgggccctcgagagcttcttccagcacaggaacatcgacaccctcatcgttgacgtctaccctgtgctggacacccctgccaagcaggtcctgtggcagttcatctaccagctgctgacctatgaggagcaggagctctgtcaggagaaaatcgcatgcttcctgggctacacggccatgacagagccggagcctgagctggacctggagtccgagcccacgcctgagccccagccgcggagctccctgcgggcttcctccatgtgccgccgcagcctccggtcccagggcctggaggccggcctcagctgcggtcccagcgagtgccctgagatgcctcttcccctgatcccaggcgagcgccaggcaggcgacggcacgtccctccctgagacccccaaccccaagatgatgtcagccgtctatgcagagcttgagtctcgactgaacagcagcttcaaagggaagatggggaccgtgtccaaatcccgggcttcccctccaggccccagcccagcagtcaccacagggcccaggaccctgtccggcgtctcatggcccagcgagcgactcttgccctccccctgctaccacccgctgtgttcggggggtctggcctcccccagcagctctgagtcccacccctacgccagcctggacagcagcagggcaccctccccacagccaggccccgggcccatctgccccgacagccccccaagcccggaccccacccgcccgcccagccgcaggaagctcttcaccttctcccaccctgtgcgaagccgcgatactgaccgcttcctggacgtgctgagcgagcagctgggcccccgggtcaccatcgtggatgatttcctgaccccggagaacgactacgaggagatgagcttccatgatgaccagggcagcttcgtaaccaatgagcggagcagcgccagcgactgcatcagcagcagtgaagaaggcagctccctgacctactcctccatctctgaccacatccccccacccccgctcagccccccaccaccgccacccctgcctttccatgacgctaagcccagctcccgcagctctgatggttcccggggccctgctcaggcgctggccaagcccctcacccaactcagccacccagtccctccaccacccccaccgcccctgcccccacccgtgccctgtgcaccccccatgctgtcccggggcctgggccaccggcgcagtgagaccagccacatgagcgtcaagcgcttgcggtgggaacaggtggagaactcagaaggcaccatctggggtcagctcggggaagactctgactacgataagctgagtgacatggtgaaatacctcgacctggagctccacttcggcacccagaaacctgctaaaccggtgccggggccggagcccttccggaagaaggaggtggtggagatcctgtcccataagaaggcctacaacacctccatcctcttggcacacctgaagctgagccccgcggagctgcgccaggtgctgatgagcatggagccccggcgcctggagcccgcacatctcgcgcagctgctgctcttcgcgcccgacgccgacgaggagcagcgctaccaggccttccgcgaggcgcccggccgcctcagcgagccggaccagttcgtcctgcagatgctgtcagttcccgaatacaagacacgcctgcgcagcctccacttccaggccaccctccaggagaagacagaggagatccgaggcagccttgaatgcttgcgccaggcctccctggagctcaaaaacagtcggaagctcgccaagatcctggagtttgtgttggccatgggcaactatctcaacgatggacagcccaaaaccaacaagactacgggcttcaagatcaactttctgacagagctgaactccaccaagacagtggatgggaagtccaccttcctgcacatccttgccaaatcgctgagccagcacttccctgaactcctgggctttgctcaggacctgcccaccgtgcccctggctgccaaagtgaaccaacgggccctgaccagtgacctggctgacctccatggcactatcagcgagatacaggatgcctgccagagcatttccccctctagcgaggacaagtttgcaatggtcatgtcggcatcctctgagcagccttccttcctggagacggcccagccagcacttcgggcgctcgacgggctgcagcgcgaggccatggaggagctgggcaaggcgctggccttctttggggaggattccaaggccaccacctctgaggctttcttcggcatctttgcagagttcatgagcaaattcgagcgagcgctgagtgacctgcaggccggggagggcctgcgcagctccgggatggtttcacccctggcctggtga

SEQ ID NO: 45744 - DNA, 339 bp, Homo Sapiens
atgtctgtggaagtctccgaggcagcctctgtggaggagcagaaggaaatggaagatacagtgactagtccagagaaagttgaagcagcaaaattaaaagcaagatatcctcatctgggacaaatgcctggaggttcagatttcttaaggaaacgattgcagaaagggcaaaaatattttgattctggggattacaacatggctaaagcaaaaatgaagaacgagcaacttcctactgcagctctggataagatggaggtcacgggtgaccacattcccactccagaggaccttcctcaacagaaaccatccattgttgctagcaagctggctggttga

SEQ ID NO: 45745 - DNA, 2129 bp, Homo Sapiens
ctaggatctgtgactgccacccctccccccacccgggctcggcgggggagcgactcatggagctgccgtaagttttaccaacagactgcagtttcttcactaccaaaatgacatcattttccacctctgctcagtgttcaacatctgacagtgcttgcaggatctctcctggacaaatcaatcaggtacgaccaaaactgccgcttttgaagattttgcatgcagcaggtgcgcaaggtgaaatgttcactgttaaagaggtcatgcactatttaggtcagtacataatggtgaagcaactttatgatcagcaggagcagcatatggtatattgtggtggagatcttttgggagaactactgggacgtcagagcttctccgtgaaagacccaagccctctctatgatatgctaagaaagaatcttgtcactttagccactgctactacagatgctgctcagactctcgctctcgcacaggatcacagtatggatattccaagtcaagaccaactgaagcaaagtgcagaggaaagttccacttccagaaaaagaactacagaagacgatatccccacactgcctacctcagagcataaatgcatacattctagagaagatgaagacttaattgaaaatttagcccaagatgaaacatctaggctggaccttggatttgaggagtgggatgtagctggcctgccttggtggtttttaggaaacttgagaagcaactatacacctagaagtaatggctcaactgatttacagacaaatcaggatgtgggtactgccattgtttcagatactacagatgacttgtggtttttgaatgagtcagtatcagagcagttaggtgttggaataaaagttgaagctgctgatactgaacaaacaagtgaagaagtagggaaagtaagtgacaaaaaggtgattgaagtgggaaaaaatgatgacctggaggactctaagtccttaagtgatgataccgatgtagaggttacctctgaggatgagtggcagtgtactgaatgcaagaaatttaactctccaagcaagaggtactgttttcgttgttgggccttgaggaaggattggtattcagattgttcaaagttaacccattctctctccacgtctgatatcactgccatacctgaaaaggaaaatgaaggaaatgatgtccctgattgtcgaagaaccatttcggctcctgtcgttagacctaaagatgcgtatataaagaaagaaaactccaaactttttgatccctgcaactcagtggaattcttggatttggctcacagttctgaaagccaagagaccatctcaagcatgggagaacagttagataacctttctgaacagagaacagatacagaaaacatggaggattgccagaatctcttgaagccatgtagcttatgtgagaaaagaccacgagacgggaacattattcatggaaggacgggccatcttgtcacttgttttcactgtgccagaagactaaagaaggctggggcttcatgccctatttgcaagaaagagattcagctggttattaaggtttttatagcataatggtagtacgaacataaaaatgcatttattccgttcacttaccacattatttgaaaatcaatcctttatttaattttatttccaacctgtcagagaatgttcttaggcatcaaaatccaaggtagctgtaagaaaaatactggagctaacaatgaagaacagaagtaatctgattagtcaaattattaagtgccatggattactttatgcagcagtcaggtacatagttaggtgaacccaaaagaaaaactcttgaaaacaagagatttcttccatgcacatttacaatattgaggtataattaacatgataaagtgtttccttctaacgagttgtagaaatctgagtaaccacccaaaaaagcaatagaatgtttctgtcaccccaaaacactcccttctgcccctcttcagacagtccttcagctatttcatggctctcaccctagttttttttttttttgcacttttttttttccgggggtataggggaggtgtggggcgacagggtctgtcttgttctgtctcccaggctgaagtgcagtgcagt

SEQ ID NO: 45746 - DNA, 1882 bp, Homo Sapiens
gactgcgttcagaccctgcaggctgggctggcctgcccaggacctgagaaggggcagctccggtggcaatgtctgagcccctagctgtgctggtccgggctggcctctctaagacagtgcaggccacgtgatccatcctcctagaggcagtgagcaggtgagggacccctaccacagccaggaggaaaaagctaggcgtccactttccgcagccatgctcaaacagagtgagaggagacggtcctggagctacaggccctggaacacgacggagaatgagggcagccaacaccgcaggagcatttgctccctgggtgcccgttccggctcccaggccagcatccacggctggacagagggcaactataactactacatcgaggaagacgaagacggcgaggaggaggaccagtggaaggacgacctggcagaagaggaccagcaggcaggggaggtcaccaccgccaagcccgagggccccagcgaccctccggccctgctgtccacgctgaatgtgaacgtgggtggccacagctaccagctggactactgcgagctggccggcttccccaagacgcgcctaggtcgcctggccacctccaccagccgcagccgccagctaagcctgtgcgacgactacgaggagcagacagacgaatacttcttcgaccgcgacccggccgtcttccagctggtctacaatttctacctgtccggggtgctgctggtgctcgacgggctgtgtccgcgccgcttcctggaggagctgggctactggggcgtgcggctcaagtacacgccacgctgctgccgcatctgcttcgaggagcggcgcgacgagctgagcgaacggctcaagatccagcacgagctgcgcgcgcaggcgcaggtcgaggaggcggaggaactcttccgcgacatgcgcttctacggcccgcagcggcgccgcctctggaacctcatggagaagccattctcctcggtggccgccaaggccatcggggtggcctccagcaccttcgtgctcgtctccgtggtggcgctggcgctcaacaccgtggaggagatgcagcagcactcggggcagggcgagggcggcccagacctgcggcccatcctggagcacgtggagatgctgtgcatgggcttcttcacgctcgagtacctgctgcgcctagcctccacgcccgacctgaggcgcttcgcgcgcagcgccctcaacctggtggacctggtggccatcctgccgctctaccttcagctgctgctcgagtgcttcacgggcgagggccaccaacgcggccagacggtgggcagcgtgggtaaggtgggtcaggtgttgcgcgtcatgcgcctcatgcgcatcttccgcatcctcaagctggcgcgccactccaccggactgcgtgccttcggcttcacgctgcgccagtgctaccagcaggtgggctgcctgctgctcttcatcgccatgggcatcttcactttctctgcggctgtctactctgtggagcacgatgtgcccagcaccaacttcactaccatcccccactcctggtggtgggccgcggtgagcatctccaccgtgggctacggagacatgtacccagagacccacctgggcaggttttttgccttcctctgcattgcttttgggatcattctcaacgggatgcccatttccatcctctacaacaagttttctgattactacagcaagctgaaggcttatgagtataccaccatacgcagggagaggggagaggtgaacttcatgcagagagccagaaagaagatagctgagtgtttgcttggaagcaacccacagctcaccccaagacaagagaattagtattttataggacatgtggctggtagattc

SEQ ID NO: 45747 - DNA, 1908 bp, Homo Sapiens
actgcgcgcgcgccaagcgcggccagacagacacctcgctgccaagttaattcagcaaggaccaggtgtacctgaacggcatcctgtgcattctgggacatcgccagaccatcgatttcccgctgctgacctcactgggcaaggtgtcctatgaggatgtggaccacctgcggccccatggggtgctggataatacccggatgccccaccttatgcaggacttggcacgctaccggcagcagctgaagcacatcatggccaccaaccggctggatgtggcggagctgggtcgcctgctgcccgactgatgtaggttgagggctgcagacagaggccctggacagaagctccagataggcccccagaacatgaagctgtttgctctgtgcttccacggtctgggtgtttcttggggggtgttgggagggcaggagcattccttgagaaggagtggcaacatcaaagggtttgtgtcccttgctagcctccctggggcctggggatctgcagcagcatgtctggcaaactgagtcgccctcctgcctccagctctgtgttgagcagagggaaggcatgggggcaggaagggagctgagcattgatggggatgagggtggtttgggaatagaaacttgttcttgcataagatggctttggttgtcccggtactccagtctctcccttccctcacctgtccccttggtgctccttcagcattcgtgctgtctgcttctcactgggtcctggtgggggtcgggatcccttctcctggggtgattgatggcctgagcttggggtactacctggggtagtagagacccagttggtctggggtgtgctttccaacattttgcctctctcactggtcatgtatttattccatatttatatgatctacttcctgtggctgggagcagcagctcctgaaggttccatggcagggaacaagacactccttctggaaggcaccgattttcctagccccactcccattacacgcacacacacacacacacatacagagtgattcaggccttgtgaatcaagcccaagagctcccttggccctgtccccactccctccactggcctctgcttttcctgtctttgcccacaccctcacagctggtctctggcacaggctggcatagcctaggagcagctgcagttgtccctgagggacaggccctagagtttggtggcccaagtcctaaacccctcctggaccaggtgaggtgcagagcgccttttgtgtaagttactggtcagaatcctcactgagctcccagtccagagggaagccagacaattaaaacagtaataacaaaaaaaaaaaagaaaaaagaaaaaaagggataagaagcctgacatataaatagcatgaattgataagaacaaacaacccgacagaacgatgcaggaaaatgctaaaagtgtttaaatcctagacttgaaaagaaaaaatcgccaacaaaatgtgaaataaaaatgctcagtttaattagttaagaattcaactacattcaaatgaaaataaaagccatttgtcatccttagaaagaaaaatgataaaaacaggagtaaaatcctgtgcgtgaggccaaaggaaattggacactcttgtccctcacatggaggagggcaaagtactaaaacctttccgaaaaatatctattaaagtaaaaacaggcacactctaaataagtcatcccacttttgcgaatctgttctgtggaaaatgcatgttcttcctaacctttgctaagcatttaaacacactcatatatattatgacgtataaatgtttgtgcagtgatatctattatggcactgttcattgtggcaaaaatccggaagcaaccttatgtccattaaaggtgagaggattgaataaattatgcatatctgc

SEQ ID NO: 45748 - DNA, 864 bp, Homo Sapiens
ttgctgccggagaagtgtgctctgatgtggctacatttggggacgcgggctccccagaggcccaagcgagaaagccgggggttcccaggctgggggtgcaggacgggccaggcactgccctgcagggcccgcccccctgcccctgcaccctcacacccatcttcctctctcagcctgaccccagggcctgggagcccccggcagaccggccctccttgccaaacagtggctgccctttatggactcggcgcctggcagagccactgtggaggaggagttggctgtcatggtcaggggaggcagcccttgggttgtcaaggttggtggtcaacgttgaacccatatctgctggaatctcccggtctgttccacacacgatcatgcgggaagctctgggacccgaaggctgttctgatctcgggggtcacaagttctcacagcagcctggggtcaccagggaccagacccggcgttagcctctgtaaggagctgcctggctgctgggctgagctttgttgcaggcccaggaagatgaccaagaaggacagagcagagccccatctaccactgctgggagggcccgagggagcacgtgcacagcagagccccatcctccactccctgggctcgaagaggcttcctcggtgtggatggcagctgttaacgagcagtggtggtgcagctggaggcctctgtcccatggggcacagacgggagaaggatggcggacgggtgtgcacgcttgggaggacgggcgggcggcataggcctgagcaggtggcatgggcgcacgagaagggtgtgtctgagacaggatgtttatcccaaatgccaggagtggacgaggcggacgagtggcagtga

SEQ ID NO: 45749 - DNA, 485 bp, Homo Sapiens
cggccggagccggagcggatcctggagccggagcggagcggagcggagcggagccggggcggagcgggccgagcgggccgagccagcagccgagctgggggcgcgggcgggcggcatgtaccgggcccgggcggcgcgggcggggccggagcccggcagcccggggcgctttgggatcctcagcaccgggcagctccgggacctgcttcaggatgagcccaagctggaccggatcgtgcggctcagcaggaagttccagggcctgcagctggagcgtgaggcctgcctggcctccaactacgcgctggccaaggagaacctggccctgcggccccgcctggagatgggccgggctgccctggccatcaaataccaggagcttcgtgaggtggccgagaactgcgcggacaagctgcagcgactggaggaaagcatgcatcgctggagtccccactgcgcgctgggctggctgcaggctgagctag

SEQ ID NO: 45750 - DNA, 1585 bp, Homo Sapiens
agtcacacagctgcctggtaggtgactggaggccttgatcggttctcattgagattttgctgctgtgaccccaaccctgcctccctccccaccctgcgatggcagaagaaactcaacacaacaaattggctgcagccaagaaaaagttaaaagaatattggcagaaaaacagccctagagttccagcaggagcgaacaggaacaggaaaacaaatggcagtatccctgagaaagccacttctggtggttgccagccacctagggattcagcaacaggtttccacagggaaggccctacatcatctgctaccctgaaagatctggagagcccgtgccaagaacgagcagtagtcctggattcaaggtccgtagaaatcagtcaactgaagaacaccatcaaatctctgaaacaacagaagaaacaagtggaacatcagctggaagaagtaacgtgatttcgtttcctcgcaacatgactgctggcctggggatgaaggctcacccttcagattccaccccatccccacagggcccctgataacctggtcccatgggtgggcctgtcctggggcattggtggcattctgggggcatgtctcttgctgtgccatctctgcctccccctggtaagagctctgtcttcctcttcctacaggaaaagaaagcaaacaacaagaaacagaaagccaaaagggtgctagaggttcaaatccagacattgaacatacagaaagaggaactaaatacggacctgtaccacatgaaacgttctctcagatactttgaagaaaagtccaaggatctggctgtccgcctgcaacattcattgcagcgtaaaggagagttagagagtgttctctctaatgtcatggccacacagaagaagaaggcaaaccagttgtccagccgcagcaaagcacgtacggagtggaagttagagcagtccatgcgggaggaggcactactgaaagtgcagctgacacagttgaaggagtcttttcaacaagtccaattagaaagagatgagtattctgaacatctaaaaggagagagggcccggtggcagcagaggatgagaaaaatgtcgcaggagatttgcacattaaagaaagagaagcagcaagatatgcgtcgggtagagaagctggagaggagcttgtccaaactcaaaaaccagatggctgaacccttgcccccggagcccccagcagtgccctctgaggtggagctgcagcacctgaggaaggaactagagagagtggcaggagagctccaggcccaggtcaaaaagaatcagcgcataagtctcctgaaccagcgacaagaagagaggattcaggagcaggaagagaggcttcggaagcaggaggagaggattcaggagcagcacaagagccttcagcagctggccaagccacagagcgtcttcgaggagccgaacaatgagaacaagaacgcactgcagttggagcagcaagtaaaggagctacaggagaagcttggcgagggtcttcctgcaggtggagctgaagagccaagaggctcagagtctgcagcagcagccagaccattacctgggtcacct

SEQ ID NO: 45751 - DNA, 1714 bp, Homo Sapiens
atggatggattttatgaccagcaagtgccttacatggtcaccaatagtcagcgtgggagaaattgtaacgagaaaccaacaaatgtcaggaaaagaaaattcattaacagagatctggctcatgattcagaagaactctttcaagatctaagtcaattacaggaaacatggcttgcagaagctcaggtacctgacaatgatgagcagtttgtaccagactatcaggctgaaagtttggcttttcatggcctgccactgaaaatcaagaaagaaccccacagtccatgttcagaaatcagctctgcctgcagtcaagaacagccctttaaattcagctatggagaaaagtgcctgtacaatgtcagtgcctatgatcagaagccacaagtgggaatgaggccctccaacccccccacaccatccagcacgccagtgtccccactgcatcatgcatctccaaactcaactcatacaccgaaacctgaccgggccttcccagctcacctccctccatcgcagtccataccagatagcagctaccccatggaccacagatttcgccgccagctttctgaaccctgtaactcctttcctcctttgccgacgatgccaagggaaggacgtcctatgtaccaacgccagatgtctgagccaaacatccccttcccaccacaaggctttaagcaggagtaccacgacccagtgtatgaacacaacaccatggttggcagtgcggccagccaaagctttccccctcctctgatgattaaacaggaacccagagattttgcatatgactcagaagtgcctagctgccactccatttatatgaggcaagaaggcttcctggctcatcccagcagaacagaagttaagttgtccaccactgaaattccgtgctgtatgtttgaaaagggccccaggcagttttatgatgacacctgtgttgtcccagaaaaattcgatggagacatcaaacaagagccaggaatgtatcgggaaggacccacataccaacggcgaggatcacttcagctctggcagtttttggtagctcttctggatgacccttcaaattctcattttattgcctggactggtcgaggcatggaatttaaactgattgagcctgaagaggtggcccgacgttggggcattcagaaaaacaggccagctatgaactatgataaacttagccgttcactccgctattactatgagaaaggaattatgcaaaaggtggctggagagagatatgtctacaagtttgtgtgtgatccagaagcccttttctccatggcctttccagataatcagcgtccactgctgaagacagacatggaacgtcacatcaacgaggaggacacagtgcctctttctcactttgatgagagcatggcctacatgccggaagggggctgctgcaacccccacccctacaacgaaggctacgtgtattaacacaagtgacagtcaagcagggcgtttttgcgcttttccttttttctgcaagatacagagaattgctgaatctttgttttatttctgttgtttgtattttatttttaaataataatacacaaaaaggggcttttcctgttgcattattctatggtctgccatggactgtgcactttatttgagggtgggtgggagtaatctaaacatttattctgtgtaacaggaagctaatgggtgaatgggcagagggatt

SEQ ID NO: 45752 - DNA, 231 bp, Homo Sapiens
atggctcgtggacagcagaaaattcagtctcagcagaataatgccaaaaagcaagctggacaaaagaagaaacaaggacatgaccaaaaggctgctgccaaagctgccttaatatatacctgcactgtctgtaggacacgaatgccagaccctaagaccttcaagcagcactttgagagcaagcatcctaagacttcacttcctccagaattagctgatgttcaggcataa

SEQ ID NO: 45753 - DNA, 1692 bp, Homo Sapiens
tggtgtgggggccccatcccccatggtcaagatccagctgcaggagcaagggaccgatgggggtgcttttgccagcatctcctgtgcccacgtcatcgccagcgcagggacaccagaggaggaagaagaggaggtgggcgccgcgacatttggggcaggctgggccctgcagaggaaggtcctctatggagggagaaaagcaaaggagttggacaaggtcgaggacggtgcccgggcctggaatggcagtgccgagggtccaggcaaggtggagcgtgaggacaggggccctgggacatcggggatcccagtgagaagccagggggcagagggactgctggccaggatccaccatggagaccgaggagggagccgcaccgcgctgcccattccctgccagaccttccccgcctgccaccgcaatggagacttcacgggaggctaccgcctggggcgctccgcctccacctccggagtccggcaggtcgtgctccacacaccccggccctgcagccagcccagggatgccctgagccagccccaccccgcgctgccgctgcctctgcccctgccgccccagccggcccgcgagcgtgacgggaagctgctggaggtgatcgagcgcaagcgctgcgtgtgcaaggagatcaaggcgcgccaccgcccggaccgaggcctctgcaagcaggagagcatgcccatcctccccagctggcggcggggacccgagccccgcaagtccggcaccccgccctgccgccggcagcacacggtcctctgggacaccgccatctgaggcgggcgggggggtaccggggcgcctggactggggagggggcgggcacgcctggctctcccgggagcctcgccttgagagacattgaaagactacgtgggagagtgccagggagaacccctgccctccaacctaccccccgggatggggagagtctgccaggcccattgggcttaggatgccaacagcgctgctgagaaacggaggaggaggagggtttgcttgaggttggggcgagagtcgctctggctgttcttcccgctgggcgttgtacacccctcctcctgaaccaagccagaggtcagcatggggaagggaggaaggaagggatgggaggaagaggggggtgggtgagctgaaagagagggactagagtgccagatggaggagctcttttctagagagccgggagttggggagggggtatttattttgttatttatttcagtctggagggcgattctgggcctttctgacctactcctgagctaggagtggagaatcagggccaagtttgcactctccccaatgccaatgcctaaaggccccgccgtccatgccaccccacagccaaggaggggtctgcatggggagtggaccgagagaagaaggggcccagggaagcagagggcccaagaccattcacagtatttacaatttgccagaatttggtagtcagtgtggcctgctctgaatcaggcatcttatttagttctggggtgagggtctagtgccagggatgggcaggatgatgggggaggaggagggaaattttagcgggtggagggggtgggcagggtatttatttaaattaaaaaacaaaacagaagagatgtcaggaacttttttttaattcctttcttttcagaataatatattaaaagactcatgatcct

SEQ ID NO: 45754 - DNA, 240 bp, Homo Sapiens
atgttcgttgagttggtgtacgacaaacggaatgttgaaggattaacaggtgccagagaaataattctgaatgagttaacaaagcgagtgcaccggatctttccggatgcagaagtgaaggttaagccgatgcaggcgaacggcttaaacagcgatgccagcaaaagcgatcgggaaaaactgaaccgcatgctggaggaaatgtttgaagagtccgatatgtggttggtttcagaataa

SEQ ID NO: 45755 - DNA, 5029 bp, Homo Sapiens
tgctgatcgctcgtgccggtgcggccgttaaccgcccttgccggagccctaggctcaaaagcagccccttacccttcctgggcttcccccaacccctttcccggtctgccctggggcatgagcagcgatggccggctgcatccctgaggagaaaacttaccggcgcttcctggagctattcctgggcgagtttcgcggaccgtgcggcggcggcgagccggagccggaacccgaacccgaacccgaacccgaacccgagtccgagcccgagcccgaacctgaactggtagaagctgaggcggccgaggcttcggtagaggaacccggggaggaggcggccacggtagccgcgacggaggagggggaccaggagcaagacccggagcccgaggaggaggcggcggttgagggtgaggaggaggaggagggcgcggcgacggcggcggcagccccggggcactcggccgtgccgccgccgccgccccagctgccgcctttgcccccgctcccgcgaccgctgtcagagcgcatcacccgcgaggaggtggagggcgaaagcctggacctgtgcctgcagcagctctacaaatataattgcccttcctttttggctgctgctttagccagagccacatcagatgaagtccttcagagtgatctttctgcacattatatcccaaaggaaacggatggcacagaagggactgtggagattgagacagtgaaattggcccgttctgtcttcagcaaactacacgagatttgctgcagctgggtgaaagacttccccctccgcaggagaccccagctttattatgagacatcaatccatgccatcaaaaacatgcgcaggaaaatggaggacaaacatgtctgcattcctgactttaatatgctcttcaacctagaggaccaggaagaacaagcttactttgcagtgtttgatggccatgggggagtagatgctgctatttatgcctccattcacctccacgttaacttagtccgccaggagatgttcccccatgatcctgctgaggccctgtgcagggccttccgggtcactgatgagcggtttgtgcagaaagcagccagggagagcttaagatgtgggaccacaggagtggtgactttcatcagaggcaacatgctacatgtggcctgggtgggtgattcccaggttatgcttgtgagaaagggccaagctgttgaactaatgaagccacacaaaccagacagagaggatgaaaagcagagaattgaggcccttggaggttgcgtagtctggtttggtgcctggagggtgaatggaagtctgtcggtttccagagctattggagatgctgaacataagccatatatctgtggggatgcagattctgcctccactgttctggatgggaccgaagactacctcattctggcctgtgatggcttctatgacaccgtgaaccctgatgaggcagtgaaagttgtgtccgaccacctgaaagagaataatggagacagcagcatggttgcccacaaattagtggcatcagctcgtgatgctgggtcaagtgataacatcacggttattgtggtattcctgagggacatgaacaaagctgtaaatgttagtgaggaatcagattggacagagaactcttttcaaggagggcaagaagatggtggggatgataaggagaatcatggagagtgcaaacgcccttggcctcagcaccagtgctcagcaccagccgacctaggctatgatgggcgtgtggattcattcactgatagaactagcctgagcccagggtcccaaatcaacgtgctggaagacccaggctacctagatctcacacaaatagaagcaagcaaacctcacagtgcccagtttttgctaccagttgagatgtttggtcctggtgcaccaaagaaagcaaatcttattaatgagttaatgatggagaaaaaatcagttcagtcatcattgcctgaatggagtggtgctggagagtttcccactgctttcaatttgggttcaacaggggagcagatatacagaatgcagagcttgtctcctgtctgttcagggttggaaaatgaacagttcaaatccccgggaaacagagtttctagattgtctcatttacgccaccactactcaaagaagtggcacagattcaggtttaatccaaagttttattcatttctctctgctcaagagccttcccacaaaataggcactagcctgtcctcacttactggaagtgggaagagaaataggataagaagttctctgccatggaggcaaaatagttggaaagggtacagtgaaaacatgaggaagctcagaaagactcatgatattccatgcccagatcttccttggagctataaaatagaataatttttctttcaagtaggttagctagctctcccccaataaaaataccactatcagagtagaaacaaggtagacatttctaaaacatatgtgcttcattatgaatccatggatggctcaattcttaaatgtaaatagatctctaggaaactcaaagtacagtgttttcaatctaaaaagaagtattggcagtttcacttgcaaaattacacagctggtccctgtgatgtgtctcgacaccaatacacaacccccttcccaccatccttcatgtcactagatacacaacccccttcccaccatcccttcagtcactagtggaagctttcaagttagttatttcagtcaggatatacagtgttgaaatctcaatgcagttgaaatctggtctgatgtgcctaatttatctgtggaaaatttaatgctgaattacatttggttgggaaatgtccctcaaaatcctgggcactatgaaggaaccccctgccccctcacctttttgggtaggtaaaagactaaaagccatatggattttaactgataacaatgaaagtggtaaatcagtgtaaaagtgtcatattctcagacttgtgaggcggtttatagtcagaaagatttacggatttttttcctgtaacataaaagattgtgaactttttttaattaaaaaatatttcctagggctgtagttatttgggagtttcataacctgttatggtgcttttggtggaaatttttattatttagcattttaggagaccgctgtcaactggttttaatctatgatgctaatgtgttttccactgtaccctcatctcaggaataaaactgctttaacggagatgatgtcaggtacaaatacactatagagtcaaaataccatttacaaagaaaatcaaaagcatttctatattttgtctttttttagttcagacagcaaaggcatgtactactataaaatacaaagtgattttagagaatgaaaaatgctacttttatcttctctaaaattatttcccccaaggtagtgaagtaattggaatgaaggaggctgaaagtattgtctaaagtgagcccagaggccactgagaatgcagattactgacagccaggtctgtttagttgtaattggaagacacatgagtgtcctgcttacatgtagcttcagactgcagagacaggacgtgtgcttttcatttcaatatttagttatatttgatattttgaaactgtctgctttttgctatttctgcagtttcaagttagttagaagcatgttgtcaactaaagacaacaaactatcagattcattcattcagtgaagcagcctctgattctctaagagtcacgaatgtcttagtgttaccctcccctagtcaacagcagaccagcctggccaatgcctatgggtggcccctctggagtgctcactaacaagggtgagtgctctcgctaagaagtgtcccccgcctaatcatgtgtttataggatagtacacgttccccaggcccataacagaggactaaaatctctgaattttaaagacacagatgactggcatattttggataccagtatagctatatcaaatagacaaaaacagcttcactttagcaatgatcagattgttaatctacagattttattttttaaaatttggatgtaagtagagactttcagtatttgttttctcttgattttgaagtcatttcttcttctcacgtctgtgacaaatggttgaaaaggagtcaacatggccccaactatagtgccggaaccttttcatcattctgaggctttgccccacacatggtcctcactcatatctgtcaccttctgaagcctagatcttgttaacccatcaggtgcagtgtcagtttcaaatcaaattatctaagaaaacaagaaaacaaaggcagcagactattggtacacattatagtccaaagtgcttagcgaagtaaaaaaaaaagctttttaaaatttctattgttgtctattggtaatgtttttgatcagaataaagagggtaaagggaaaaagttactacacatgctaggctttctcagtggggaaaaaaatggctggatagaactgggacaaacacagacccatctttaggggtctggattttgtaggtccgactacacagcagtgttaactcatttctcatgccattagctctctacaaaataaagcaaagtagttctagtgtggtcgttataaaccaatattgtgaaaaatagcaactattcatttgttcacaacatgcgtatttatagagtagttaggtaccatttgtaaggtaaatcctttaaaattctataatacatactaaaatagtggttattggtctgatatatgctgctcttggttctataaactagataaaagcagtgctttgtgaaatgcagtgttctctcttaacgccactggtgataggaagtagttcccttcagttcaaatcctgtgcccttatttgctgcttgctgacgtaagcaataagtaaccctctaactaatggtatctacatatttctgtaacttgtatttaatgatggtgtacctggtgattgtaaaaatattagacagatataaaagtatctatataatatctataaactgttaatgctgaggt

SEQ ID NO: 45756 - DNA, 333 bp, Homo Sapiens
gaaattgctaatgccaactctcatcagcagatccagaagctgatcaaagatgggctgatcatccacaagcctgtgattgtccattcccaggctcaatgctggaaaaacaccttggcctgccggaagggcaggcacatgggcataggtaagcagaagcgtacagccaatgcccaaataccagagaaggtcacatggatgaggaaaatactgcaccggctgctcagaagataccgtgaatcgaagaagattgatggccacatgtatcacagcctgtacctgaaggtaaaggggaatgtattcaaaaacaagtggattgtcatggaacacatcaac

SEQ ID NO: 45757 - DNA, 820 bp, Homo Sapiens
aatcttcaggatcaatgtcagcaaaatctggtaatgcaggtcttgaaactggtccttaactgccttaactttgacttcattggcagttcagcagatgaatctgcagatgatctttgcacggtgcagattccaacaacttggagaacaaatactttgaaaattgaaatgaaatttttttggtattttgcactttcatgtttagttcagtttgcttcgacaagaaggtccttatttaacagtcctgaacgtgccaagtaccttggtaatttaattaagggagtaaaaaggatacttgaaaaccctcagggtttgtctgatccaggtaattatcatgaattttgtcgatttttggctcgtttaaagacaaattatcagctgggagaattagttatggtgaaggaatatcctgaagttattagattgattgctaattttaccattactagcctacagcactgggaatttgctcctaacagtgttcattatttattaactctgtggcaaaggatggtagcatctgttccttttgtgaaatcaactgaaccccacctattagacacttatgcaccagaaatcacgaaggcctttatcacttctcggttggactctgttgccatagttgtgagagatcacttagatgatccactggatgatactgccactgtgtttcagcagttggagcagttgtgcacggtcagcagatgtgaatatgaaaagacatgtgctcttcttgtgcagttattcgaccaaaatgcacagaattaccaaaaacttctgcatccatattctggtgtaactgtggacatcaccattcaggaag

SEQ ID NO: 45758 - DNA, 372 bp, Homo Sapiens
gagaagaaaaagaaggttcctgctgtgccagaaacttttaagaaagagcaaaagaatttcacagagctgaagatcaaaatgcctaagaaggaaaatatgcttcaaaaggcaaggaggaagcttatctatgaaaaagctaagcactatcacaaggactataggcagatgcccataactgagattcaaatggctaggctggcaaaaaaagctggcaactgctatatactggcagaacccaaattggcatttgtcatcagggtcagaggtatcaatggtgtgagtccaaaagtgttgcaactcttttgcctttgccagattttcaacagaaactttgttaagctcaaggcctcaatgaatatgctgaggctttag

SEQ ID NO: 45759 - DNA, 906 bp, Homo Sapiens
atggagcaaaggaaaaatgtgactgagtttgtccttgtggggctcactcagagcccccagggacagaaaatattatttcttgtgttcttgctcatctacgttgtgacaatggtaggcaacatattcattgttgtgactgtggtggtcagcccaactggatgccccatgtacttcttccttggctacttatcatttatggatgctgttcattctactacagttaccccaaatatgattatagacttactctatgagaagaaaaccatttcgttccaagctattacccagatttttataggacacctatttgggggtgctgagattttactccttgttgtcatggcctatgatggctacgtgaccatctgcaaacccctgcattatttgaccatcatgaaccaacgggtgtgcattctactgctgctgttggcctgggctggaggtttcttgcatgctgtagttcaacttctttttgtttacaaccttcccttctgtggccccaatgtcattgaccatttcatctgtgacatgtaccctttattaaaacttgcctgcactgacacctatgttactggcctcactgtggttgccaatgatggggcaatctgtgtggtcatctttatgctcttactcttctcctatggggtcattctgcactccctgaagaatcttagtcaggaagggaggcacaaagccttatccacctgtggctcccatatcactgtggtgatcctcttctttgtcccttgtattttcatgtatgtgagacctcctttgaccttacccattgataaatccttgactgtgttttacactgttatcacacctatgttgaaccctctaatctatactttaagaaatgcagagatgaaaaatgctatgaagaagctctggactagaaaaaga

SEQ ID NO: 45760 - DNA, 1499 bp, Homo Sapiens
agatactcgggacgctgaggcgggaggatcacatgagcccaggaggttgaggctgcagtgaggtatgatcgcgccactgcactcctgcctgggcaactgagcatgaaccctcctcaaagctaatggcgcttcaaaattctgcagtgcaaagaagttgctggggttgcggagcggagaaccgccaggaggctggagcccagccaggcagcctcctcgggcacacggtgaaggcgccggaactacagctacctccgcggcgccgcttcggccgccatatctgggtacacgggaaccgcagaggacaaactctcacccgcgttttcgatttctgcgctttcttcgagtgaggcaagacctagcagaggcccaagcccgtccctccctgccaggagcagcctcatgcggaccgagccgctgtgcggggcatcccctctgctggtgcccggcgacccctactctgtggtggttctgctgcagggctacgcggagccagagggtgtgggcgatgccgtgcgcgccgacggctccgtgaccctggtcctaccccagacccggggcccggcctccagccaccgagagtccccgcgcgggagtggcggcgcagaggccgccctggaggaggcggcccgtggccccatcctggtggacaccgggggcccctgggctcgggaggcgctgctgggggcgctggcggggcagggcgtggccccgggagacgtgacgctagtggtggggacccacgggcactcggatcacatcgggaacttggggctgttcccaggcgcggctctgctggtctcgcacgacttctgccttcccggaggccgctacctgccccacgggctgggtgaggggcagcccctgcgcctgggcccggggctcgaggtgtgggccacgccgggccacgggggccagcgcgacgtgagcgtggtggtggccggcacggctctgggcaccgtggtggtggcgggagatgtgtttgagcgagatggggacgaggattcgtggcaggcactgagtgaagaccccgcagcccaggagcggagccggaagagggtcctggtcgttgccgacgtggtcgtacctggtcacgggcccccctttcgagtgttaagggaagcctcgcagcccgagacggagggtggagggaacagccagcaggagccggtggtcggagacgaggagcccgccctgcactaatcagcctcgagagggactgcactcttgtcagggaagccctaacagcgaagagctgctggagacagagtcagagcagtcaagggtgggagcttccagcccttccaggaggccagttttctagtgaagacagagtgcacctgacactgccatcacatcgtcagtatcactgcctgtctctgccaccaaactaagatcaaaggaggggctcagctccctgtgcattctccctgggcctcagtaaaatgggagaaggttcgtgggaggggcctccaaaataaaaatggaaactgcattgaaaa

SEQ ID NO: 45761 - DNA, 846 bp, Homo Sapiens
ccgggcggcctcacatcggcggcgcctgccagcgtggacaagaaggtcatcgcagtgaaggttttgggaacagtaaaatggttcaatgtaaggaacggatatggtttcatcaacaggaatgacaccaaggaagatgtatttgtacaccagactgccataaagaataaccccaggaagtaccttcgcagtgtaggagatgaagagactgtggagtttgatgttgttgaaggagaagagggtgcggaggcagcaaatgttacagatcctggtggtgttcgagttcaaggcggtaaatatgcagcagatcgtaaccattatagacgctatccacgtcataggggtcctccacgcaattaccagcaaaattaccagaacagtgagagtggggaaaagaccgagggatcggagaatgctcccgaaggccaggcccaacaatgccggccctaccgcaggcaaaggttcccaccttactacatgcggagaccctatgggtgtcgaccacagtattccagccctcctgtgcagggagaagtgatggagggtgctgacaaccagggtgcaggagaacaaggtagaccagtgaggcagtgtatcggggatatagaccacgattccgcaggggccctccttgccagacagcctagagagtacggcaatgaagaagataatcaaggagatgagacccagggtcagcagccacctcaacgtcggtaccgcagcaacttcaattaccaacgcagatgcccagaaaaccctaaatcacaagatggcaaagagacaaaatcagccaatccaccagctgagaattcgtctgctcccgaggctgagcagggcggggctgagtaa

SEQ ID NO: 45762 - DNA, 1879 bp, Homo Sapiens
gccaacgatacgcctgctgcagcaggaggagttacgagccgggccgcgcgctgcctaaatacctaaaccaggtttagcgcctgctcatataaagctctcctaactcgtcttccggtgggaatttcttcacgtgggccggagtcggagactgagtttagctttactgaggagctctaaatttaggcgggtatgagtgatttcagtgaagaattaaaagggcctgtgacagatgatgaagaagtggaaacatctgtgctcagtggtgcaggaatgcattttccttggcttcaaacatacgtagaaactgtggccattggagggaaaaggaggaaggattttgctcagacaacaagtgcttgtttaagttttatccaagaagctctgctgaagcaccaatggcagcaagctgcagaatacatgtacagttattttcagaccttggaagattcagatagctacaaaaggcaggctgcacctgagattatttggaagctcggaagtgaaattctattttatcatcccaaaagcaacatggagagtttcaatacttttgctaaccggatgaaaaatattggcgtcatgaattatttaaagatctccttacaacatgcattataccttctgcatcatggaatgcttaaagatgctaagagaaatctgagtgaggcagagacatggagacatggtgaaaatacgtcttcccgggaaatattaatcaaccttattcaggcctataaagggcttttacagtattatacctggtctgaaaagaagatggaattgtcaaagcttgataaggatgattatgcttacaatgcagtagcccaggatgtgttcaaccacagctggaagacatctgcaaatatttctgcattgattaaaattcctggagtttgggacccttttgtgaagagttatgtagaaatgctggaattctatggggatcgagatggagcccaagaggtactcaccaattatgcatatgatgaaaagtttccatcaaatccaaatgcccatatctacttatacaactttctaaagagacagaaggcaccaagatcaaaattgataagtgtgcttaagattttgtatcagattgtaccatctcataaattgatgttggaattccatacattacttagaaaatcagaaaaagaagaacaccgtaaactggggttggaggtattatttggagtcttagattttgccggatgcactaagaatataactgcttggaaatacttggcaaaatatctgaaaaatatcttaatgggaaaccaccttgcgtgggttcaagaagagtggaactccaggaaaaactggtggccaggctttcatttcagctacttttgggcaaaaagtgattggaaggaagatacagctttggcctgtgagaaagcttttgtggctggtttactgttaggaaaaggttgtagatatttccggtatattttaaagcaagatcaccaaatcttagggaagaaaattaagcggatgaagagatctgtgaaaaaatacagtattgtaaatccaagactctgatactgaattttagttatttcacagttgtagctacacagtaagtagcttggtagatagttattgaatgtatttatgtagtgtattaagaagcttatattactacaaaaaacttatttttatatatttttatatttttgtattatttatagctagagaaacaatattactgcctttgctctttgtaactatgtctgttttcttttttgtaatgttaaatgttacatttgttaaggaataattcttcaaatgacaaactaattacagaatatagctctacagcagttattgtttgcaaatactttgcctcttgctattgtgtaataaactgtaacttgta

SEQ ID NO: 45763 - DNA, 1766 bp, Homo Sapiens
actgactcttggaaagaagaggggggcctgggagatccaggttggaaggatcttgtttcgctctcccattggcccccaacactggcctcatggcccccttactggctccaggcatccccctcacccccaccaacgagccagctgggcctgttcccctctccactcccctctactccctccctgtaacctccggtctcccgcagaaagaaagaaaaaaaaaaaagcttggattaagtgatgagctgcccgcctctaaaaggaccaggaggcgtatcaagcctgagtgccggaaaacccacggcaatcttcagcagccaccacgtggggcagagaacgcgagcagtacctgcaggacccacagccggtcgggctctggcgccagcctcgacggcggccccgccatctccgcccggctgcccgcggcctcacctcctccgggggctcggttagcctcctggcgctgcaaggctgcctgcgcgcggttcgctccgggggagggaggaggagggaggcggcgaggagccgacggctccacctgatggagaagcgcggagagtccctagacctcggagtgcgctgcaagaggggagaggagagagaccgccgcccctgctggaagccttcgcgtccgggggcggcgcgcgggggaaggggtctctggacagtcggtggaggcggcagccctacagagacagccgaaagccagcaacttggaaaaccgcccgaattctgggtttctgcacatccaggctggctccaggtctcttgtgcccaccgtgcaagccggcgggatgccagcaggtggcatcctctccagcgtttcttcgccaggcgtggagtccggaggccgaatccatcagtccccagccccctccccaagcctccggtgccaagtgctgggtcctgtgagcccctgccgccccccacctccgccagcggggcgagccggagctgggtgacccagaccctcgcggaggcgggagcctacagaggatgccggccggccccaggttctgctgctggctggccaagaagtgacaggagggcaaggctcccccggaaagcgtccaagccctgctctcctgctcttccaagccttgctgcgtgttgcccccagggttttctgagatctgggacgaagagagtgatgtgcaaggttctgggtcccggtgcaggagtgaggggtacggctgtcgagtgctcggagcaggctggcgtttgggcacactgcagacctcagctcaccgccactttctcctgaccttcctcgtggctgtcagcccaatgtctatcatgtgttattccctcggtttgttcaaaggcctgttttggatacttaaagacatgtggaataactatgagaattcctgttcctggaaagtttgtcctctagttggaaagaggtatatacaggtggattacgagaccttaaccctgctccctgcagttggtctttccattgcagagggaaagggctcagagaaccagatattcaactttcagaagcatcccctgaagggcaggttgtctgctcccctgattcattgaggatcaggcctcatggagggagtctgccctatgaaggtggggacagcgcccctctagttcacagccgtctccacagctcttacccaggtaggcagtaggctctcactacgtactgctgaatgaatggtaaagttttacctagtgccccacattctatttcctgttttctgaatccaatttaacttattcttccctctgttattaaaccattgtcaaac

SEQ ID NO: 45764 - DNA, 948 bp, Homo Sapiens
atggagccagaagctgggaccaataggaccgctgttgctgagttcattctactgggcctagtgcaaacagaagagatgcagccagttgtctttgtgctcctcctctttgcctatctggtcacaactgggggcaacctcagcatcctggcagccgtcttggtggagcccaaactccacgcccccatgtacttcttcctggggaacctgtcagtgctggatgtcggatgtatcactgtcactgttcctgcaatgttgggtcgtctcttgtcccacaagtccacaatttcctatgacgcctgcctctcccagctcttcttcttccaccttctggctgggatggactgcttcctgctgaccgccatggcctatgaccgactcctggccatctgccagcccctcacctacagcacccgcatgagtcagacagtccagaggatgttggtggctgcgtccttggcttgtgccttcaccaacgcactgacccacactgtggccatgtccacgctcaacttctgtggccccaatgaggtcaatcacttctactgtgacctcccacagctcttccagctctcctgctccagcacccaactcaatgagctgctgctctttgctgtgggtttcatcatggcaggcacacctttggttctcatcatcactgcctacagccacgtggcagctgcagttctacgaatccgttcagtggagggccgaaagaaggccttctccacgtgtggctcccacctcaccgtggtttgtcttttctttggaagaggtatcttcaactacatgagactgggttcagaggaggcttcagacaaggataaaggggttggagttttcaacactgttatcaaccctatgctgaaccctcttatctacagcctcagaaaccctgatgttcagggtgctctgtggcaaatatttttggggaggagatcactgacctga

SEQ ID NO: 45765 - DNA, 1747 bp, Homo Sapiens
atgtctctcccaagattccaaagagtaaactttgggccatatgataattacattccagtcagtgaattaagcaaaaaatcatggaatcagcaacactttgccctgttatttcccaaaccacaacggccaggaaccaaaaggagatcaaaaccttctcaaatacgggacaacacggtttctataattgatgaagaacaattaagaggagatcgtagacaaccattatggatgtaccgttctttaatgagaatttctgagagaccatctgtttatttagctgccaggaggcagcctctcaaaccaactcgtactgtcgaggtggattctaaagcagcagaaattggtaagaaaggtgaagacaagacaacacagaaggacacaacagattcggaatcagaattaaaacaaggaaaaaaagattcaaagaaaggcaaggatatagagaaaggaaaagaagaaaagctagatgcaaagaaagatagcaaaaaaggtaaaaaggatgcagagaagggcaaagactcagcaacagaatctgaagatgaaaaaggaggtgcaaagaaagataacaaaaaagataaaaaggattcaaacaaaggcaaagactcggcaacagaatctgaaggtgaaaaaggaggtacagagaaagatagcaaaaaaggtaaaaaggattcaaagaagggcaaggattcagccatagaattacaagctgtaaaagcagatgaaaagaaggatgaggatggaaaaaaagatgcaaacaaaggtgatgaatcgaaggatgccaagaaagatgcaaaggagattaaaaaaggtaagaaagataagaagaagcccagtagtacagacagtgactcaaaggatgatgtcaagaaagagtctaagaaggacgccacgaaagatgccaagaaagttgccaagaaagatactgagaaagaatctgctgattcaaagaaggatgcaaagaaaaatgctaagaaggatgcaaagaaggatgcaaagaagaatgcaaagaaggatgaaaagaaggatgcaaagaagaagggcaagtaggccttggataagaatttgaaccgaaagaataattcaaaagcatatttgatgaaacaatagtggtagtctgcagctgaatttgtgagaaaacaagaggcctcaaagaattaaataatttttaaaaggtggtaaagaaggatacaaaggagaactcagcagagatttataaaaatatataagaaagatgttaagaaaaattaaggggggatccattgaaagacttgaagaatacatatacttatattcggggatatgaaggattcaatgaatgatctctagaaagatttaaagaagaatattcagataaggatgttgaagataatgacactaaatctatggacacacacacacacacacacacacacacacacacacacacacacacacacacacagtttaatgaaggcttaaagaatccaaggagacagatgttgtatctatagatttaaaataatctcaagctgcatccacagatacaaaaaaatataggagccatgaaatgaagttaaacaccttgtagaaagcctactttcaagtaaatatagcattcctttggcaaaaagaaaaaaaaagtaaaagaaaagaaaaaaaatgtattaccacccgatgagcctacatctttctttctgaagtttaaacaaccacagtcatgtttatggttgttggatgtgccacttccaatccaaaagaagcacacttg

SEQ ID NO: 45766 - DNA, 1019 bp, Homo Sapiens
ctcagtgctttcttttctgtcctcctccaggatggggtcaaccgtcatcctttccctcgtcctggctgttctccaaggtgtctttgccgaggtgcagctgttgcagtctgcagcagaggtgaaaagacccggggagtctctgaggatctcctgtaagacttctggatacagctttaccagctactggatccactgggtgcgccagatgcccgggaaagaactggagtggatggggagcatctatcctgggaactctgataccagatacagcccatccttccaaggccacgtcaccatctcagccgacagctccagcagcaccgcctacctgcagtggagcagcctgaaggcctcggacgccgccatgtattattgtgtgagagggaccatctaaaaccttccgcggtgcaggtgcagagtgagctgccagacacaccctccccaggggcctctctattcatccggggaggaaacactggctgtttgtgtcctcaggagcaaaaaccagagaacaacatgggagcgttcctaacccctaaggcaactggatgggagacctgacccatccagttctctgagggggctcttgtgtgttctacaaggttgttcatggtgtatattacatggttaacatcaaaaggctgcctaataggcacctcttcaatataatagtcttttaattagtgaaaattttacacagttcatcattgcttgcttgccttcctcccttctgtccgctcttactccctccttcttttattttctacttacttttccaaaatcatttaacccctttttgtaccattaataagttatcttgtttttgttgttgttttccttttaacaatatgcactgaataattcatctttgtgccaattcgtaaatattttgatataacaaagacttctgtcataaatagatttcctgtgagtaatcttgcaaatattttagaacctgtttggttaagaataaattaaaataaatagacaaatttttaaagacatacaacctatcaaaa

SEQ ID NO: 45767 - DNA, 447 bp, Homo Sapiens
atgacggaaacggaggggtcatctccagcagggtccgaatcctcagatggaaccacaggccaccaggccagcacaggggcctccgggagggtccgccctgctccacggccgcaggggtgtgtgtgcatcagtgagtgtgcctgtgtgcatgcatgccaacaggcacacatgcatgtgtccacacaaggacgtgtgtgcatgtgttgtgcatgtgtgtgcatgactgtgcatatatgtgcacgtgtgtgcgagtgtgcgtgtgcatgtgtatatgtgcgcatgagtgtgcatgagtgcaagtgtgcatgtgtgtatgtgtgcaagcgtgtgtgcacatgtgcttgtgtgtgcatgtgtgtgcaagtgtgcatgtgtgcgagtgtgcatatgtgcattgtgtgcgtgagtgtgcgtgtggtccgtgtacacatctgtccatacatgtga

SEQ ID NO: 45768 - DNA, 777 bp, Homo Sapiens
aggatcagacaagggtgctgagagccgggactcacaaccaaaggagaaatgagcaatccgcggtctttggaagaggagaaatatgatatgtcaggtgcccgcctggccctaatactgtgtgtcaccaaagcccgggaaggttccgaagaagacctggatgctctggaacacatgtttcggcagctgagattcgaaagcaccatgaaaagagaccccactgccgagcaattccaggaagagctggaaaaattccagcaggccatcgattcccgggaagatcccgtcagttgtgccttcgtggtactcatggctcacgggagggaaggcttcctcaagggagaagatggggagatggtcaagctggagaatctcttcgaggccctgaacaacaagaactgccaggccctgcgagctaagcccaaggtgtacatcatacaggcctgtcgaggagaacaaagggaccccggtgaaacagtaggtggagatgagattgtgatggtcatcaaagacagcccacaaaccatcccaacatacacagatgccttgcacgtttattccacggtagagggatacatcgcctaccgacatgatcagaaaggctcatgctttatccagaccctggtggatgtgttcacgaagaggaaaggacatatcttggaacttctgacagaggtgacccggcggatggcagaagcagagctggttcaagaaggaaaagcaaggaaaacgaaccctgaaatccaaagcaccctccggaaacggctgtatctgcagtag

SEQ ID NO: 45769 - DNA, 1563 bp, Homo Sapiens
tggagctgatgatagttttcgcatcgacccagaatccggagatctgatagcaaccaggcggttggacagggaacgccgctccaaatattcactgctagttcgtgctgatgatggtcttcagtcctcggatatgagaattaatatcactgtcagtgatgtgaatgaccatacacccaaattttccagacccgtgtactcttttgacattcctgaggacacaatccctggttctttggtagcagccattttagccacggatgatgactctggtgtgaatggagaaattacatatattgtgaatgaagatgatgaagatggcatctttttcctgaatcctattactggggtctttaatttgactcgattattagattatgaagtacagcaatattatatcctcactgttcgagcagaagatggtgggggacaatttactaccatcagagtttatttcaatattctagatgtaaatgataatccacctattttcagcttgaattcatacagcacatctttaatggagaatctacctgtgggatctactgttcttgtgtttaatgttactgatgcagatgatggcatcaactctcaattgacttatagcattgcttcaggtgatagccttgggcagtttactgttgacaagaatggtgtactcaaagtcctaaaagctttggatcgggaaagtcagtccttctacaacttggttgttcaagtgcatgacctgccacagattccagcctccagattcacaagcactgctcaagtctccattattttgttggatgtaaatgataacccaccgacatttctttcccctaaattgacatacattccagaaaatacacctattgatactgttgttttcaaagctcaagcaactgacccagatagtggcccaaacagctatattgagtacactctgctgaaccctttgggaaacaagttcagtattgggaccattgatggtgaagtgaggctcactggagaactggacagagaagaagtttctaattatactctaacagtggtggctacagacaaaggtcaaccatctctctcttcatctacagaggttgtagttatggtacttgacatcaatgataacaaccccatctttgcacaagctttgtataaagtggagattaatgaaaacacacttactggaacagatataatacaagtgttcgcagcagatggagatgaaggcacaaatggacaggttcgctatggcattgttaatggtaataccaatcaggaatttcggatagactctgtcacaggtgccatcactgtcgctaaacctttggatagagaaaagacccctacctaccatttaactgttcaggcaacagatcgaggcagcacacccagaactgatacctccacggtcagcattgttctactggatattaatgactttgttcctgtatttgagctatctccatattctgtaaatgtccctgagaatttagggacactacccagaacaattcttcaggtcaagtctggatcgggaaacaaaagagcgctttgtcttaatgattacagctacagattcag

SEQ ID NO: 45770 - DNA, 396 bp, Homo Sapiens
atggcggacgtggtcgtgggtaaagacaagggcggggagcagcggctcatctcgctgcctctatcccgcatccgggtcatcatgaagagctcccccgaggtgtccagcatcaaccaggaggcgttggtgctcacggccaaggccacggagctctttgttcaatgcctagccacctattcctacagacacggcagtggaaaggaaaagaaagtactgacttacagtgatttagcaaacactgcacagcaatcagaaacttttcagtttcttgcagatatattaccaaagaagattttagctagtaaatacctgaaaatgcttaaagaggaaaagagggaagaagatgaggagaatgacaatgataatgaaagtgaccatgatgaagctgactcctaa

SEQ ID NO: 45771 - DNA, 7690 bp, Homo Sapiens
gaggaggagctggagggggcgcggcttcctctcggtcgctccctggcgccgggcctctttctctgcctggcccagggctggcggccggcgggggtcgcggcggcggcagtgggggcgctggcgggccgcgggtggcgggggccgggccgcggctccgggtgttaggagacaagatggcggcggctctcagaaggccggtctcctcctctccgccgtcctccgccccgccgctcgccgcctcctcctctcgggtctcctcctcctcgtttgctgcctcctcctcctcctgcagcagcaccagcgaccgccgaagcgccggctcgctcacccggagctccggaggtggatagacggggcagctgcaggctccggcgaccgaggccgagctggggccggggcggggacggcggcggcggcggcggcgacggcggcggcgccgggtggggatggggtcgcagacgctgcagatcctccgacagggggtgtgggccgcgctcagcgggggctggtactacgacccgcaccaggccaccttcgtgaacgcgctgcacctctacctgtggctctttctgctgggcctgcccttcaccctctacatggcccttccttctaccatgattatagtagcagtttattgtcctgtgatagctgctgttttcattgttctgaagatggtcaactatcgactacacagagcacttgatgctggagaagttgtagataggactgcaaatgagttcacggatcagcgaaccaaagctgaacaaggcaactgttcaaccaggagaaaagacagcaatggaccgagtgatcctggtggagggattgaaatgtctgagttcatccgagaggccacacccccagttggttgcagttccagaaattcttatgccggtctagatccaagcaaccagattggatctggttcctcgcgtcttggaacagcagcaactattaaaggagatacagacactgctaagacttctgatgatatcagtttaagtctgggccaaagttctagtctttgtaaggaaggaagtgaagaacaagatttggcagctgatcggaagctctttcgtcttgtctccaatgactccttcatctctattcagccttccttatcctcttgtggacaggacttgccaagggacttcagtgacaaagtgaacctgccaagtcataaccaccaccaccatgttgatcagtctctgtccagcgcctgtgacacagaagtagcttctcttgtacctttacactcacactcttatagaaaagaccaccggccgcgaggtgtaccacggacttctagctctgctgtggcttttccagacacttcactgaatgattttcccctttatcagcaaagacgtggattagatccagttagtgagttagaatcttccaagcctctttctggatccaaagaatccttggtggaaaattctggtttatctggggaatttcagcttgctggtgacttgaaaatcaatacttctcagccacccacaaaaagtgggaagagcaaacctttgaaagcagagaaaagcatggacagcttgaggagcctgagcacacggagtagtgggtcaacagaaagctactgcagtggaacggaccgggacactaacagtactgtcagcagctataaaagtgagcagaccagctcaactcacatagagagcatcctgtcagagcatgaggagtctcctaaagcaggaacaaaaagtgggaggaagaaagagtgctgtgcaggcccagaggagaagaatagctgtgccagtgacaaaaggactagcagtgaaaagattgctatggaagcgagtaccaacagtggggttcacgaggccaaggaccccaccccctctgatgagatgcacaaccagagaggtctcagcacctctgcatctgaagaagccaataaaaatccccatgcaaatgaatttacttcccaaggggacagaccacctgggaacactgcagaaaacaaagaagagaagagtgataagtcagctgtttctgtggattccaaagtgcgtaaagatgttggtggaaagcaaaaggaaggggatgttcgacctaaatcttctagcgtaatccatcggacagcttctgcccacaagtcaggcaggagacgcacaggaaaaaaacgggctagcagttttgattcaagccggcatagggactatgtttgctttcgaggtgtttctggtaccaagccacacagtgctatattttgtcatgacgaagactctagtgatcagagtgacttgagtagagcatcaagtgttcagtctgctcaccagttcagcagtgatagctcttctagcaccacttctcattcctgtcagtctcctgagggcagatacagtgctctaaagaccaaacacactcataaagaaaggggcacagactctgaacacacacacaaagctcatttggttcctgaaggaaccagcaaaaagcgtgcaacacgacggacttctagcacaaatagtgccaagactcgtgcccgagtgttgagcctggacagtggcacagtagcatgtttgaatgactcaaacaggttaatggcacctgaaagtataaagcccttaaccacttcaaaatcagatcttgaggccaaagagggagaggtgctagatgagctatctttattaggacgggcttcccagttagagacagtcactcgatctaggaatagcttgccaaaccaggttgcatttcctgaaggggaagagcaagatgcagtcagtggagcagcacaagccagcgaggaggcagtgtcatttcgccgtgaacgcagcacatttaggcgccaggcagtacggcgccggcacaatgcagggagtaaccctacccctcctacattgctcatcggatcacccctaagccttcaagatggtcagcaaggccagcagtccacagcccaggtcaaagtccagtcccgccccccttcccaggctgcagtgctcagtgctagtgcctccttgctggtgagaaatgggagtgtccacttagaagcatcacatgacaatgcatctgctgtaggcggtagcagtttgcacgatgaacttggtaagttctcttctacgctgtatgagactggtggctgtgatatgtcacttgtgaattttgaaccagcagcaagaagagcatccaatatctgtgacacagattctcatgtatccagttctacctcagttcgattttatccacatgatgtgctctctctcccacagattcgattgaatagactattgaccattgatacagatttgttggagcaacaggacattgatctaagccctgacttggcagctacttacggcccaacagaagaagctgcccaaaaggttaaacactattatcgcttttggatcctaccccagctgtggattggcattaactttgacagactcacacttttggccctgtttgatagaaatcgtgagatcctggaaaatgtgttagctgtcatcctggctattctcgtggcctttttgggatctattcttctcatacaaggattcttcagagatatctgggtcttccagttctgcctcgtcatagccagctgtcaatactcactgcttaagagtgttcaaccagattcttcttctcccagacatggtcataatcgtatcattgcctacagtagaccagtttatttctgcatatgttgcggtcttatttggctcttggattatggtagcagaaacctgactgcaaccaagttcaaattatatggaataactttcaccaatccactggtgtttatatcagccagggatttagttatagtgtttacactctgtttcccaatagtgtttttcattggtctcctgcctcaggtgaatacatttgtaatgtacctttgtgaacaattggatattcatatttttggtggtaatgccactacaagcctgcttgcagcactttacagttttatctgtagcattgttgcagtagccttattgtatggattatgttatggggctttaaaggattcttgggatggccagcatattccagtacttttctccattttttgtggtttattagtggcagtgtcttaccatctcagccgacaaagcagtgatccatctgtacttttctctttagtgcaatccaagatttttccaaaaacggaagagaaaaatccagaagaccctctatctgaagtaaaagatccactgcctgaaaaacttagaaattctgttagtgagcgattacagtctgacctggtagtatgcattgtaattggtgtgctgtattttgctattcatgtaagcacagtcttcacagtattgcagcctgccctcaagtatgtgttgtatacattggttggctttgtgggttttgtaacccattatgtgctgcctcaagttagaaaacagctaccatggcactgtttctctcatcctctgctaaagacactagagtataatcagtatgaagttcgaaatgcagccactatgatgtggtttgagaaacttcatgtgtggcttctttttgtggagaagaatataatctatccattgattgttctcaatgaactgagcagcagtgcagagacaattgctagtccaaagaaactgaatacagaattaggtgctttaatgatcactgttgctggtttgaagttgctacgatcctcttttagcagccctacatatcagtatgttacagtcatctttactgtgctgtttttcaaatttgactatgaagctttttcagagaccatgctgttggatctcttctttatgtccatactcttcaacaagctttgggaactactttataaattgcagtttgtgtatacctatattgccccatggcagatcacatggggttctgctttccatgcttttgctcagccttttgcagtgcctcattcagccatgctgtttattcaggctgctgtctcggccttcttctctactccactgaacccctttctgggaagtgcaatattcatcacttcatatgtccgacctgtgaaattctgggagagagactataacacaaaacgagtggatcattcaaataccagattggcttcccagcttgatagaaatccaggatcagatgacaacaatctgaattccatcttttatgagcatttaactagatccctacagcacagcctctgtggtgatttgctactaggacggtggggaaactacagtacaggggactgtttcatccttgcctctgactatctcaatgcattagtacaccttatagagataggcaatggtctggtcacttttcagctgcggggacttgaattcagaggtacctactgtcaacaacgggaagtggaggccattactgaaggtgtagaggaagatgaaggattttgctgttgtgaacctggccatattcctcacatgctttcatttaatgctgcatttagccagcgatggctagcttgggaagtgatagtcacaaagtacattctggagggttatagcatcactgataacagtgctgcttctatgcttcaagtctttgatcttcggaaagtactcaccacttactatgtcaagggtatcatttattatgttacgacctcgtctaagctagaggagtggctagctaatgagacaatgcaggaaggacttcgtctgtgtgctgatcgcaattatgtcgatgtggacccgacctttaatccaaacattgatgaagactatgaccaccgactggcaggcatatctagggagagtttctgtgtgatttacctcaactggatagagtactgctcttcccgaagagcaaagcctgtggatgtggacaaagattcatccctagtgactctctgttatggactctgtgttctgggacggagagctttggggactgcatcccatcatatgtccagtaatttagagtcattcctctatggattgcatgccctatttaaaggagatttccgtatttcttcaattcgagatgaatggatctttgctgacatggaattgctaagaaaagtagtagtccctgggatccgtatgtccattaaacttcatcaggatcattttacttctccagatgaatatgatgaccctactgtgctctatgaagccatagtatctcatgagaagaacctcgtaatagcccatgaaggggaccctgcatggcggagtgcagtacttgccaactctccctccttgcttgctctgcggcatgtcatggatgatggcaccaatgaatataaaatcatcatgctcaacagacgctacctgagcttcagggtcattaaagtgaataaggaatgtgtccgaggtctttgggcagggcaacagcaggagcttgtttttctacgtaaccgtaacccagagagaggtagcatccaaaatgcaaagcaagccctgagaaacatgataaactcatcttgtgatcaacctattggctacccaatctttgtctcacccctgacaacttcttactctgacagccacgaacagcttaaagacattcttgggggtcctatcagcttgggaaatatcaggaacttcatagtgtcaacctggcacaggcttaggaaaggttgcggagctggatgtaacagtggtggcaatattgaagattctgatactggaggtgggacttcctgcactggtaacaatgcaacaactgccaacaatccccacagcaacgtgacccagggaagcattggaaatcctgggcagggatcaggaactggactccacccacctgtcacatcttatcctccaacactaggcactagccacagctctcactctgtgcagtcgggcctggtcagacagtctcctgcccgggcctcagtagccagccagtcttcctactgctatagcagccggcattcatccctccggatgtccaccactgggtttgtgccttgtcggcgctcttctactagtcagatatcgcttcgaaacttgccatcatccatccaatcccgactgtcgatggtgaaccaaatggaaccctcaggtcagagcggcctggcctgtgtgcagcacggcctgccttcctccagcagctccagccaaagcatcccagcctgcaaacatcacactctcgtgggctttcttgcgacagagggaggtcagagcagtgccactgatgcacagccaggcaacaccttaagtcctgccaacaattcacactccagaaaggcagaagtgatttacagagtccaaattgtggatcccagtcaaattctggaagggatcaacctgtctaaaaggaaagagctacagtggcctgatgaaggaatccggttaaaagctgggagaaatagctggaaagactggagtccgcaggagggcatggaaggccatgtgattcaccgatgggtgccttgcagcagagatccaggtaccagatcccacatcgacaaggcagtgcttctggtccagattgatgataaatatgtgactgtaattgaaactggggtactagaacttggggctgaagtgtgagccagtgtttattataaagacatttctttttccctctcaattccaaggcattggaaaaagagaggaacaagcagaagatgcctgcaggtatcactttgatcctatgtgggagcgactgaaaatagaatgagcttggttaagcacctctcctttgcccttcaccctgactcctgtcactgtctccatccccaaataaagctgaaatatttttttaagtt

SEQ ID NO: 45772 - DNA, 735 bp, Homo Sapiens
gtgggattccgtcttctgtttgccgcagaggcttctacccatgtcagccgccaaagcagacagaatcgtgagtgtggaggctcggacctccagctccatcaccctgagctgggcagccccaagggcccagaccggcagacttccatctactgggtccaggggcatggccagcgggaacacaagcacgtcacactgctggctcgtggtggagggcttcagcctgggaccctctacaccacctctgtgtgggccaagaagaaaggagtaggtggccccagggacgtcctgagcatgtctacaggtaagaggggccacctttccactgcccagcaacatgtgcgtgtgtgtgcacgtgcacttgtgtgtgcatgtgtgtttgcgtgtgtgtgcgcgtgcgtgcgtgtgcacatttgtaaaaagtgccaggctgtgcactttattctcattagagccacaaacaaactttatcaaatgactctctcctttccacattcccaaactagtccctggcctggtcacaccggctcagaccaccagctccctcaccctgagggccccgcaggcccagactccaagacctgcccctactggctctgctgggccagtgactcctcagacatcagggtgcctgtggagggcctggctgcagggacgcagtaccccagcatgtgggcccagaagcatgaggtcaacagccccagccagacgctcacagaggccacgggcgaggggtga

SEQ ID NO: 45773 - DNA, 324 bp, Homo Sapiens
atgtggaaaggaaagaaggccaaggggaagaaggtggctccggcccctgctgtcttgaagaagcaggaggccaagaaagtggtcaaccccctgtttgagaaaaggcctaagaattttggcattagacaggacatccagcccaaaagagacctcgcccgctttgtgaaatggccccgctatagcaggttgcagcggcagagagtcatcctctataagcgactgaaaatgcctcctgcgattaaccagttcacccaggacctggaccaccaaacagctactcagctgcttaagctgccccacaagtacagaccagagacaaagcaa

SEQ ID NO: 45774 - DNA, 2527 bp, Homo Sapiens
caggcctggaggagaaatgacatctctcagccctctcagctgcaccggaccaccaacagttgtgattcaatgggcatgaattgctgtgtgatgctggggaggtgtttgtgattcttgacaaagtcatttgaatccatcacttcaagagagtgaaaggagccccgtctgatctgttggtgttgtaggaagaaacatgagtcagcaaaacaccagtggggactgcctgtttgacggtgtcaacgagctgatgaaaaccctacagtttgcagtccacatccccaccttcgtcctgggcctgctcctcaacctgctggccatccatggcttcagcaccttccttaagaacaggtggcccgattatgctgccacctccatctacatgatcaacctggcagtctttgacctgctgctggtgctctccctcccattcaagatggtcctgtcccaggtacagtcccccttcccgtccctgtgcaccctggtggagtgcctttacttcgtcagcatgtacggaagcgtcttcaccatctgcttcatcagcatggaccggttcttggccatccgttacccgctactggtgagccacctccggtcccccaggaagatctttgggatctgctgcaccatctgggtcctggtgtggaccggaagcatccctatctacagtttccatgggaaagtggaaaaatacatgtgcttccacaacatgtctgatgatacctggagcgccaaggtcttcttcccgctggaggtgtttggcttcctccttcccatgggcatcatgggcttctgctgctccaggagcatccacatcctgctgggccgccgagaccacacccaggactgggtgcagcagaaagcctgcatctacagcatcgcagccagcctggctgtcttcgtggtctccttcctcccagtccacctggggttcttcctgcagttcctggtgagaaacagctttatcgtagagtgcagagccaagcagagcatcagcttcttcttgcaattgtccatgtgtttctccaacgtcaactgctgcctggatgttttctgctactactttgtcatcaaagaattccgcatgaacatcagggcccaccggccttccagggtccagctggtcctgcaggacaccacgatctcccggggctaacggaaggacatcctgttcaggggaagaaagccctggccctgaattctggtaacggatatcgcgttccagggttttgatgtggtgggatgatccgcaccatcttcactgatgtgcttccctttgatgcccattgagtgccagctttgctcattataccccaaagaccttttttccactgcccagacagcttataccacccagtgttcagggatctctgaagaacccacagaccaggtgaattactgatttctaagtccaaaaactatagagcagaagaattgagaaagagaatgagaccatgtcaacaaggctgtttccaactctccccattttcctgttcgactgggaggttctggaaagaaagagagagagagaaaagaggtggatggagggaagggtgaggaagagagcgtcaatgaaggggtggaagtggatgtggaggagtgaccagaccagaccagaccagaccagagggatcggaggctcaggccccctgagctgggcctctaagaaccacagccacagagtcaggctctgcagacccagaggtaaggctgcctggctgccccaaaccccagacactcctctccttgcctgcaggctgccctctcccatggccaccctagacagagacccacccgtgatactctgagggagccagactttcacatgcaacggggcatttggggctggttcgggtcagtgtctacgggtggtggatttagtgaccaccctcctcccacttctttctctgcacgaggagttgggagcctgcctggtggagttgagtgatgcccgtcatgtgcacttgggtctaccaatgtgcttaaggccagatgggcttcctaagagacaagggtgggtggacctaaccaactatcatccccagcgatgttcaaacataaaatcttatctatgtgcagcatgactctctccaggtgacagaaagggctctagacagctgagaggacctgatcatgtagggagggacggggaggggagccaggacccaggagctgcatggctgtaagaggaaggtccttggagggtatcagcagtctcagtgtgatgtgacaactatggacctgtgggtgtgccctggggacccctgacccatcccaaaacactgtggaaagaagggcctcttctccgtggggacccgtgtctgtgggagcgggcacaggtccatgctgcaggccactacggctgctcggcaggagggccgagagtttggacccacatagctgcaacccaagctggcccataatcagcagtggggcccagcagcacaggaggggcggacggttagctttggaaaaaatgacttgattaatctgattcgccaaataaatagattcatgtgatgccttgtga

SEQ ID NO: 45775 - DNA, 1150 bp, Homo Sapiens
cacatcttctggattttttagcttgcaaaaaaaatgagcaccaaacctgatatgattcaaaagtgtttgtggcttgagatccttatgggtatattcattgctggcaccctatccctggactgtaacttactgaacgttcacctgagaagagtcacctggcaaaatctgagacatctgagtagtatgagcaattcatttcctgtagaatgtctacgagaaaacatagcttttgagttgccccaagagtttctgcaatacacccaacctatgaagagggacatcaagaaggccttctatgaaatgtccctacaggccttcaacatcttcagccaacacaccttcaaatattggaaagagagacacctcaaacaaatccaaataggacttgatcagcaagcagagtacctgaaccaatgcttggaggaagacaagaatgaaaatgaagacatgaaagaaatgaaagagaatgagatgaaaccctcagaagccagggtcccccagctgagcagcctggaactgaggagatatttccacaggatagacaatttcctgaaagaaaagaaatacagtgactgtgcctgggagattgtccgagtggaaatcagaagatgtttgtattacttttacaaatttacagctctattcaggaggaaataagaatcatctaccttcaagcaagaattaacagagattgtggctacgcaaatgcaccaaaaaagggtgaaatatatctgaaatgtacctggttctgcccttggaagccatttcctgctcatgccactaacagcatgctgccaaactgttcagattcaagattattccaagcgcagggcccaaatgttatagccaaagaaagtcttatgataaaagtgaggcaaatttcagccaagaagttagaagagatgtttaaaagaacaagaacaaattgtggatcatggtatatgcaggctatcagcagaaggatcagacaataaaatgagttagtgcaaaccatttagtaaaaataactatcagcagagttgttccagattaaaaatagtactacaagcttgtaaaggagttaggacatgcaagctactgagcataaaatatatacttgctatttttcatgactttctctaataaagtctttgcctgttctctctaataa

SEQ ID NO: 45776 - DNA, 397 bp, Homo Sapiens
agtgctgactcgcggtggtttcccagggtgttcaggggctacgcggagaggaagcgccggaaacgggagaatgattccgcgtctgtaatccagaggaacttccgcaaacacctgcgcatggtcggcagccggagggtgaaggcccagagtaagaccccgtgcggcggggggttatacccttgggttgcttggcagccagaaggtagcttaatgggggttccccagccccttggcttttggatgggcctggggcccctgagcagctctttgtctccgcagctcatttcctccaaggtgcccaaggctgagtacatccccactatcatccgccgggatgacccctccatcatccccatcctctacgaccatgagcacgcaaccttcgaggacatccttg

SEQ ID NO: 45777 - DNA, 1746 bp, Homo Sapiens
agacatgacaaaagaaaactagaagaaggccagaaaccagctcataaatggataaggcattctttcagaaaaattttgcaatggccacccatttacacagctgccagggaacagactccattcagacatctttatacttccaaaacccatcttaaaaaagcagaatataaaaagtccaaagatgaaaaaggaggaacacctttgaagaaagattccaagaaaaaaggaggttcatatgcaacaaatccagaatccaagcaaatagtagaagagaaaactaaaagacaaaatgaggcagataaaactcccttaaaatcatcacatgaaaatgaacaatccaagaagtcaaaatccagttcagaaactaatccagaatcccaaaattctaagacagtctcaaaaaattgttcacaaaaagataagaaagattcaaagaattccaagaagacaaacactgaattcctacatacaaagaacaatccaaagaaagatttgaagaggtcaaagactagtaatgatcccatatcagagatttgctcagaaaatagtttaaatgttgatttcctcatgttagtgggacagtctgatgatgaatccataaattttgatgcatggttaaggaattactcacagaataattcaaagaattattctttgaagtatacaaagtatacaaagaaggacacaaaaaagaatgcaaagaaaagctctgatgctgaatctgaagactcaaaggatgctaagaaagattcaaagaaagttaagaaaaatgtcaagaaagatgacaagaaaaaggatgtaaagaaggacacagagtctactgatgctgaatctggagactcaaaggatgaaaggaaagatacaaagaaggataagaaaaaattaaagaaagatgacaagaaaaaggacacaaagaagtacccagagtctactgatactgaatcaggagatgcaaaggatgcaagaaatgattcaagaaatttgaagaaagcttcaaagaatgatgacaagaaaaaggatgcaaagaaaattacattctctactgattctgaatctgaactggagtcaaaggagagtcagaaagatgaaaaaaaggataaaaaagattcaaagacagataataaaaagtctgtcaagaatgatgaagagtctactgatgctgactctgaaccgaagggagattcaaaaaagggtaaaaaggatgaaaagaaggggaagaaagattcaaagaaagatgacaaaaagaaggatgcaaagaaaaatgcagaatctactgaaatggaatctgatttggagttaaagaaggacaagaaacactcaaaggaaaagaaaggttcaaagaaagatatcaagaaggatgcaagaaaggacacagagtctactgatgctgaatttgatgaatcttccaagacaggctttaaaacatctacaaaaatcaaaggttcagatactgaatctgaagagtcactatataaacctggggctaagaagaaaattgatgaatcagatggcacatctgcaaattcaaagatggaaggactggaatcaaagagaggattcagaatgtcatccaaaaagactacattcaatgaaaaaggggaaaaagcaagtacaggtagagttcctccatcaagagaaaaaccaccactccctgcttgtgagccttctctaccatcaccaaaggtcagacgtctttgttggtgcaagatgcctcctccacctccaaaaccaagatatgctcctttg

SEQ ID NO: 45778 - DNA, 1599 bp, Homo Sapiens
taaaaacttgagcccacagtgtagacacactggttccaaagacccctcaggatgtgcctcccttctcagatctgggctttccctgttcctaagcatcacctggggggatcactctgggtcctcatctccagccacatgttcactcctcacgtgggcctccctaactgtccccctcagggcaagcccttcctccccacttccagaaagctgctcgttccctggccatcccacacctctgacctcgtgccacttccggggcctgttggctttaacaacttagtttcctccctacctcgcaaccccctctgtctagagtgctcacctccctcccagcctctgtctcatactattttttctttcctctcagtaccaagcgctgggacaagccagtctgtactcaatgcctgtgggataatagacggaggaatctggagtttggttgggtgattagctttggaattgatgggtcccagggagctatctaaagttttcagtcacatgagggcatgctcacagatctgtgaaaagatctgttggctcagagaactaagagatgaataaatgttagtccaatggcctcatcatgagatgagaggtcaagagttttgagtttccagagggagaagctactattctaggcagcttgtatgaactaactcgtttattcctcacagccattgtaggaaataatctaacctcataaaccccattttagagatgaggaaacaggcttagagaatttgacgtaaactcaagaccgaaaatctaggaacaagaaaagcctggatttgaaccaagctatctgatgccagtgttttaactctcaaccattgtactactttacctcctcatgaccttttttttttttttcttgtgagatggagtctcgctctgtcgcccaggctctggagtgcagtggcacgatctcagctcactgcaagctccgcctcccgggttcacgccattctcctgcctcagcctcccgagtagctgggactacaggcgcccaccaccatgcctggctaattttttgtatttttagtagagacggggtttcaccgtgttggccaggatggtctcgatctcctgacctcgtgatccccccccctcggcctcccaaagtgcccatgacctttttattgttgggcagtgaaagccatggtgaaatgaagaatgtcctactgtcatgtgatgtgatcagaaaacatactgcccagagtcccctgcccccacccccaaaaccagtacttgatccatcctttgactgttgtggcgattggcacaaaggttgggcacagtagtagttaggctcatgggctctggagccaacctacctggatgctacacatcccagctctgcccctcgctagtttggtggcaagcaacttaacctctctgccttaatttctccagcagcacaatgggaataataatagatctcgccttgtggctcctttgcagattacatgcgttaattatgtaaagtcaagcattagaatggtggctgtccaccatgagtacaacacaaatgctcgttcttaatgattcaacaaacatggaatttcattaaatctgaaataaaggtattttgagaaattg

SEQ ID NO: 45779 - DNA, 2430 bp, Homo Sapiens
atggaggctgcccgcgccttgcgcctcctgctcgtggtgtgcggctgcctcgcgctcccgccgctggagcccgtgtgcccggagcgctgcgactgccagcatccccagcatctcctgtgcaccaacagggggctccgcgtagtgcccaagaccagctcgccgagcccccacgacgtgctcacctacagcctcggcggcaacttcataaccaacatcacggccttcgacttccaccgtctggggcagctcagacggctggacctgcagtacaaccagatccgctctctgcaccccaagaccttcgagaagctctcgcggctggaagagctgtacctggggaacaacctcttgcaggcgctcgccccgggcacgctggccccgctgcgcaagctgcgcatcctctacgccaacgggaacgagatcagccgcctaagccgcggctccttcgagggcctggagagtctagtcaagctgcggctggacgggaacgccctgggggcgctgccggacgcggtcttcgctcccttgggcaacctgctctacctacatctggagtccaaccggatccgctttctgggcaagaacgccttcgcccagctaggcaagctgcgcttcctcaacctctctgccaacgagctacagccctccctgcgccacgcggccaccttcgcaccgctgcgctccctctcctccctcatcctctcggccaacaacctgcagcacctcgggccgcgcatcttccagcacctgccacgtctcggcctgctctcgctcaggggcaaccagctcacgcacctcgcgcctgaggccttttggggcttggaggccctgcgcgagctgcgcctggagggtaatcggctgagccagctgccaactgcgctgctggagcctctgcacagcctggaggcgctggacctgagcggcaatgagctgtccgccctgcacccggccaccttcggccacctgggccggctgcgcgagctcagcctgcgcaacaacgcgctcagcgccctatccggggacatcttcgccgccagcccagccctttatcggctggatctagacggcaacggctggacctgcgactgccggctgcgaggcctgaagcgctggatgggcgactggcactcgcagggccggctcctcactgtcttcgtgcagtgtcgccaccccccggccctgcgaggcaaatacctggattacctggatgaccagcagctgcaaaatggatcctgcgcggatccctcgccctcagcttccctgaccgctgaccgcaggcggcagcccctacccacggccgcaggggaggagatgacgccacctgcaggtctcgcggaggagctgccgccgcagccgcagctccagcagcaggggcgatttctagctggggtggcctgggatggggccgccagggagctggtaggcaaccgcagcgccctaaggctgagtcggcggggcccgggcctccagcagcccagcccctccgtcgctgccgccgcgggcccggctccacagtccctagacctgcacaagaagccccagcggggccgtccgactcgggcagatcccgccctcgcggagcccaccccaacggcctctcctggctctgcgccatcgcccgccggcgacccctggcagcgcgcgacgaagcatcgtctgggcacggagcaccaggagcgtgccgcccagtccgacggtggggccgggctgccgccgctggtgtccgacccatgcgacttcaacaagttcattctgtgcaacctgacggtggaggcggtgggcgcagacagcgcctcggtgcgctgggccgtgcgcgagcaccgcagtccccggccgctgggcggcgcgcgcttccgcctgctctttgaccgctttggccagcagcccaagttccaccgcttcgtctacctgcctgagagcagcgactcggccacgctgcgcgagctgcgcggggacaccccctacctggtgtgcgtggagggcgtgcttgggggccgtgtctgccctgtggctccccgggaccactgcgcggggctggtcaccctaccggaggccgggagccggggcggcgtcgactaccagctgctgaccttggccctgctgacggtcaacgcgctgctggtgctcctggccttggcggcctgggcgtctcgctggctgcgtaggaaactgcgggctaggcggaagggcggggccccggtccacgttcggcacatgtactccacccgacggcccctgcgctccatgggcaccggcgtgtccgccgacttctcgggattccagtcgcaccggccacgcaccaccgtgtgcgcgctcagtgaggcggacctcatcgaattcccctgcgaccgcttcatggacagtgcgggcggcggcgcgggcggcagcctgagacgggaggaccgtctcctgcagcgatttgccgactag

SEQ ID NO: 45780 - DNA, 1233 bp, Homo Sapiens
cgcctcctgtgcctgcaggcccttctccttctggggctgaaccccgtctctgcctccctccaggaccagcactgcgagagcctgtccctggccagcaacatctcaggactgcagtgcaacgcatccgtggacctcattggcacctgctggccccgcagccctgcggggcagctagtggttcggccctgccctgcctttttctatggtgtccgctacaataccacaaacaatggctaccgggagtgcctggccaatggcagctgggccgcccgcgtgaattactccgagtgccaggagatcctcaatgaggagaaaaaaagcaaggtgcactaccatgtcgcagtcatcatcaactacctgggccactgtatctccctggtggccctcctggtggcctttgtcctctttctgcggctcaggagcatccggtgcctgcgaaacatcatccactggaacctcatctccgccttcatcctgcgcaacgccacctggttcgtggtccagctaaccatgagccccgaggtccaccagagcaacgtgggctggtgcaggttggtgacagccgcctacaactacttccatgtgaccaacttcttctggatgttcggcgagggctgctacctgcacacagccatcgtgctcacctactccactgaccggctgcgcaaatggatgttcatctgcattggctggggtgtgcccttccccatcattgtggcctgggccattgggaagctgtactacgacaatgagaagtgctggtttggcaaaaggcctggggtgtacaccgactacatctaccagggccccatgatcctggtcctgctgatcaatttcatcttccttttcaacatcgtccgcatcctcatgaccaagctccgggcatccaccacgtctgagaccattcagtacaggaaggctgtgaaagccactctggtgctgctgcccctcctgggcatcacctacatgctgttcttcgtcaatcccggggaggatgaggtctcccgggtcgtcttcatctacttcaactccttcctggaatccttccagggcttctttgtgtctgtgttctactgtttcctcaatagtgaggtccgttctgccatccggaagaggtggcaccggtggcaggacaagcactcgatccgtgcccgagtggcccgtgccatgtccatccccacctccccaacccgtgtcagctttcacagcatcaagcagtccacagcagtctga

SEQ ID NO: 45781 - DNA, 1486 bp, Homo Sapiens
gttcacaattgacatattactgttaatacatggttttcaatcacattttatagtatcttcacttttctttaaggattttatcctggaacattacagtgaagatggctatttatatgaagatgaaatcacagatcttatggatctgagacaagcttgtcggacgcccagccgggatgaggccagggtggaactgctgatgacatacttcatccagctgggctttgttgagaatcgattattcccacccacatggcagatgggattcctgttcacctggtatgactccctcactggggttctggtcagccagcagaacctgctgctggagaaggccagtgtcctgttcaacactggggtcctctacacccagattgggacccagcgctatcggcacacgcaggctgggctgcagagtgccatagatgcctttcagagagctgcaggggttttaaactacctgaaagagacatttacccataatccaagttacgatatgatccctgccatgctcagcgtgcttgtcaaaatgatgcttgcacaaacccaagaaagcgtgtttgagaaaatcagccttcctgggatctggaatgaattcttcatgctggtgaaggtggctcaggaggctgccaaggtgggagaggtctgccgacagctgcacgcagccatgagccaggtgctggtgaaagagaacatcccctactcctgggccagcttggcctgcgtgaaggcccaccactatgcggccctggcccactacttcactgccatcctcctcatcgaccaccaggtgaagccaggcacggatctggaccaccaggagaagtgcctgtcccagctctacgaccacatgccagaggggctgacacccttggccacactgaagaatgatcagcagcgccaacagctggggaagtcccacctgtgcagagccatggctcatcacgaggagtcagtgcaggaggccagcctctgcaagaagctgcagagcattgaggtgctacagaaggtgctgtgtgcagcacaggaacgctcccggctcatgtacgcccagcaccaggaggatgatgacctgctgaacctgatcgacgcccccagtgttgttggacagcaggcaaaattccctttagctttcaagtgtctgatccagccttcaaatcctacacctaatgatgctctcttccaaagggccccttatctgtgtttttggctaacaagcagtacgcctcctcgaagcatccgcttcactgcagaagaaggggacttggggttctccttaagagggaatgcccccattgaggttcacttcctggatccttactgctcttcctcggtggcaggagcccgggaaggagattatattgtctccattcagcttgtggattgtaagtggctgacggtgagtgaggttatgaagctgctgaagagctttggtgaggacaagatcgagatgaaagccgtgagcctcctggactccacgtcatccgtg

SEQ ID NO: 45782 - DNA, 348 bp, Homo Sapiens
atgacaaagaaaagagggaacaatggtcgtgctaaaaagggccgtggccacatgcagcctattcgctgcaggaactgtgcccgatgcatacccaaggacaaggccattaagaaattcatcattcacaacatagtggaggccgcagcagtcagggacatttctgaagcaagcgtcttcgatgcctatgtgcttcccaagctgtatgtgaagctacattactttttgagttgtgcagttcacagcaaagtagtcaggaatcaatcttgtgtagcccgcaaggaccaaacacccccaccccgattgagacctgcgggtgctgctctacaacccccaccaaagcccatgtaa

SEQ ID NO: 45783 - DNA, 959 bp, Homo Sapiens
ccgggcgcgagcccggatccaggtggtcagtcccggtacgcaaccacggcgagaacccggccctgctaagggagaagggaagccgtttcccgcgggcttcatacagacacggtgctaagacagcccgagtcgcggaccagtccaacaggcaggcagatcagtgggcagcccgcgtgcgcgaggaccccgatggcggcgccgggtggcgggaaggaggaagtttcaaagccagcttgacgtggttgtggccgttgggcgagatgaagctacactgtgaggtggaggtgatcagccggcacttgcccgccttggggcttaggaaccggggcaagggcgtccgagccgtgttgagcctctgtcagcagacttccaggagtcagccgccggtccgagccttcctgctcatctccaccctgaaggacaagcgcgggacccgctatgagctaagggagaacattgagcaattcttcaccaaatttgtagatgaggggaaagccactgttcggttaaaggagcctcctgtggatatctgtctaagtaaggattccatatggctctcatatcattccattccatctctgccaagatttggataccgcaaaaatttgtgtttgtggaagattctgtctgaactctttcattcaaggaactactaccatgaatctgcattctgttgcccacactgtggtcttagtagataatttgggtggtactgaagcacctattatctcttatttctgttctctaggctgttatgttaattcctctgatatgttaaagtaatgggtgagaccagaaaaagaaatttcaataacagatcagtttggggtgcatgtatgattttgcagcgtcaaattggagtaagggaagatttctgtatacttgctggagaggaggaatgtgtatagttactcatttagatgactccaaaacttttattaaaaccaattttagtttta

SEQ ID NO: 45784 - DNA, 1077 bp, Homo Sapiens
atggagtcggccgacttctacgaggcggagccgcggcccccgatgagcagccacctgcagagccccccgcacgcgcccagcagcgccgccttcggctttccccggggcgcgggccccgcgcagcctcccgccccacctgccgccccggagccgctgggcggcatctgcgagcacgagacgtccatcgacatcagcgcctacatcgacccggccgccttcaacgacgagttcctggccgacctgttccagcacagccggcagcaggagaaggccaaggcggccgtgggccccacgggcggcggcggcggcggcgactttgactacccgggcgcgcccgcgggccccggcggcgccgtcatgcccgggggagcgcacgggcccccgcccggctacggctgcgcggccgccggctacctggacggcaggctggagcccctgtacgagcgcgtcggggcgccggcgctgcggccgctggtgatcaagcaggagccccgcgaggaggatgaagccaagcagctggcgctggccggcctcttcccttaccagccgccgccgccgccgccgccctcgcacccgcacccgcacccgccgcccgcgcacctggccgccccgcacctgcagttccagatcgcgcactgcggccagaccaccatgcacctgcagcccggtcaccccacgccgccgcccacgcccgtgcccagcccgcaccccgcgcccgcgctcggtgccgccggcctgccgggccctggcagcgcgctcaaggggctgggcgccgcgcaccccgacctccgcgcgagtggcggcagcggcgcgggcaaggccaagaagtcggtggacaagaacagcaacgagtaccgggtgcggcgcgagcgcaacaacatcgcggtgcgcaagagccgcgacaaggccaagcagcgcaacgtggagacgcagcagaaggtgctggagctgaccagtgacaatgaccgcctgcgcaagcgggtggaacagctgagccgcgaactggacacgctgcggggcatcttccgccagctgccagagagctccttggtcaaggccatgggcaactgcgcgtga

SEQ ID NO: 45785 - DNA, 933 bp, Homo Sapiens
agcgcagaggagcgctttctcctgctgggtttctccgactggccttccctgcagccggtcctcttcgcccttgtcctcctgtgctacctcctgaccttgacgggcaactcggcgctggtgctgctggcggtgcgcgacccgcgcctgcacacgcccatgtactacttcctctgccacctggccttggtagacgcgggcttcactactagcgtggtgccgccgctgctggccaacctgcgcggaccagcgctctggctgccgcgcagccactgcacggcccagctgtgcgcatcgctggctctgggttccgccgaatgcgtcctcctggcggtgatggctctggaccgcgcggccgcagtgtgccgcccgctgcgctatgcggggctcgtctccccgcgcctatgtcgcacgctggccagcgcctcctggctaagcggcctcaccaactcggttgcgcaaaccgcgctcctggctgagcggccgctgtgcgcgccccgcctgctggaccacttcatctgtgagctgccggcgttgctcaagctggcctgcggaggcgacggagacactaccgagaaccagatgttcgccgcccgcgtggtcatcctgctgctgccgtttgccgtcatcctggcctcctacggtgccgtggcccgagctgtctgttgcatgcggttcagcggaggccggaggagggcggtgggcacgtgtgggtcccacctgacagccgtctgcctgttctacggctcggccatctacacctacctgcagcccgcgcagcgctacaaccaggcacggggcaagttcgtatcgctcttctacaccgtggtcacacctgctctcaacccgctcatctacaccctcaggaataagaaagtgaagggggcagcgaggaggctgctgcggagtctggggagaggccaggctgggcagtga

SEQ ID NO: 45786 - DNA, 1600 bp, Homo Sapiens
atgtcacttgcacacacagctgcagagtacatgctctcagatgccctgctgcctgaccgcaggggaccccgcctcaaaggactgcgtctggaactgcccctggaccggatagtcaagttcgtagctgtgggctcccccttgttgctgatgtccctggcattcgcccaggagttctcctctgggtctccgatcagctgcttctctcccagtaacttcagcatccggcaggcagcctacgtggacagctcctgctgggactcactgcttcaccataagcaggacgggcctggccaggacaaaatgaaatctctctggccccacaaggccctcccctactccctgctggccctggccttgctcatgtacctgccggtgctgctgtggcagtatgcagctgtgccagccctcagctccgatctgctgttcatcatcagcgaactggacaaatcttataatcgctccatccgcctcgtgcagcacatgctgaagatccggcagaagagttccgacccctatgtgttctggaatgagctggagaaggctcggaaagaacgatactttgaattccctttgctagagcggtacctggcatgtaagcagcgttcacattcgctagtggctacctacctcctgaggaactccctcttgctcatcttcacctccgccacttacctataccttggtcatttccatctggatgtcttcttccaggaagaattcagctgctccatcaagacagggctgctaagtgatgagacccatgtccccaatctgatcacatgcaggctgacatcactgtccattttccagattgttagcctctccagtgtagcaatatacaccatattggttccagtgataatatacaacctcacacggctatgtcggtgggacaaacgacttttatctgtctatgagatgctcccagcttttgatctcctcagcagaaagatgctaggatgtcccatcaatgacctcaatgtgatccttcttttcctccgagctaacatctctgagctcatctcttttagctggctgagtgtcttatgtgtgttgaaggatacaaccacccagaagcacaatattgacacagtagttgattttatgactttattggctggcttagaaccctcaaaacccaaacacctcaccaactcggcatgtgatgaacacccatagttaagaaaccatggagcaagaaagcttgtggaaagtctctctccttcctcataagacatgcacactaatacacatacacaccaaaaaattacacattttaaaactgctaagcttggatttaactgaatcatatatcttttatcatgttatcctaaaagtgagaagacataaccaagacatggaaataaatgtgaaagctggagccgaagagtcaaagagctaaaaaattaagtctagaacattctatgaggatagtataaataaaaagaaatacagtctagacatgctgcaaggaaagaagattctaaagtccgtttatggaggcaattccatatcctttcttgaacgcacattcagcttaccccagagagcaagtgaggcaatctggcaaaagattaataaagatgtaaacccctggaaa

SEQ ID NO: 45787 - DNA, 414 bp, Homo Sapiens
atggctacaaacttcctagtacatgagaagatctggttcgacaagttcaaatatgacgacgcagaaaggagattctacgagcagatgaatgggcctgtggccggtgcctcccgccaagagaacgacgccagcgtgatcctccgtgacatcgcgagagccagagagaacatccagaaatccctggccggaaactcaggccccggggcctccagcggccccagcggagaccacagcgagctcgtcgtccggatcaccagtctgaaagtggagaaccagagcctgcgcagcccggctgaacgtgctggagaagaactcgcctggccaccgggccacggccccacagacccagcacatgtctcccatgcgccaagtggagcccctggccaagaagccattcacaccagcagaggatga

SEQ ID NO: 45788 - DNA, 123 bp, Homo Sapiens
atgccatgggagatgatggctgtgctctcggagagtgtgactgagcctcccgagggctgcaccaagagagggcgagagagtcagtccagcaatcagaaggcaagtggcttagaagacaagtag

SEQ ID NO: 45789 - DNA, 1067 bp, Homo Sapiens
ttacttgagaataccagttcatatttaattactactaatcacagtagcactgaacatggctctagtgagtgggcctcagtcagttcaggcagctaaagggagggggatttcctcctagtcctctccctagagctaaatatgcatctgggaaaaattaggctctggagcacagaggtatttttctagaggaaaaagaactgaactcccagcactaggtaaaactgcaaaaagaaaaacacctgtgcccaggcactagctacaaggccacaccagaaaaggaaagctgggtcctggaagcttcaggacaggaactcttccttggtcaagttttccccagcacctagcacataggaaggtgcttgatgagtgagtgttaaatgaacctgtgagtgctcaggatgatttcctgataattgggttcaggaatctactgggaggagcttaaacctagaagttccctttttgaaagtctcaaatatggttccctaacttagagaagacagatgatgtgggaaggaggcctgaggagaggatgcaggctggcagaagggagcagggtgcatgcgagcccagaccctgacacccttccaaggcaaggcaaggacatcagcacctcacgcccatttacaggcccctcacatgagccactgctccttctctttgatgaagtgctccgcccagcggcgtgtcagctccaggtacaggctgggctggtgaggcaggtagtccaaatacaggcgggtgggtgtcttcttgggaatggccttctcaatctgggtgccctcgtgccactcattgaaggaggtaatggaaacgatctcgggcctcactgtcagggccgcctgcagggccgtctcatagtacttgccattgaccctgttgcgcgtattgtggttgttggcatcacaaaagttcttcacagctttccagttctgatgggaagaaccaaaggagaaaccattggaggcaaagtaggtgtacatgccgtcaaatccggcggccaggatatcgtgggtgtggccctcctccaccagcagcgctatgaagaccccatcgtagggcgtgtt

SEQ ID NO: 45790 - DNA, 672 bp, Homo Sapiens
atgcgggcgccactctgcctgctcctgctcgtcgcccacgccgtggacatgctcgccctgaaccgaaggaagaagcaagtgggcactggcctggggggcaactgcacaggctgtatcatctgctcagaggagaacggctgttccacctgccagcagaggctcttcctgttcatccgccgggaaggcatccgccagtacggcaagtgcctgcacgactgtccccctgggtacttcggcatccgcggccaggaggtcaacaggtgcaaaaaatgtggggccacttgtgagagctgcttcagccaggacttctgcatccggtgcaagaggcagttttacttgtacaaggggaagtgtctgcccacctgcccgccgggcactttggcccaccagaacacacgggagtgccagggggagtgtgaactgggtccctggggcggctggagcccctgcacacacaatggaaagacctgcggctcggcttggggcctggagagccgggtacgagaggctggccgggctgggcatgaggaggcagccacctgccaggtgctttctgagtcaaggaaatgtcccatccagaggccctgcccaggagagaggagccccggccagaagaagggcaggaaggaccggcgcccacgcaaggacaggaagctggaccgcaggctggac

SEQ ID NO: 45791 - DNA, 1592 bp, Homo Sapiens
agtgctccctatgaattgctgagggagagatacagcatagaaaaaaacaaggtgatgcggatggcgaggaagctcagtgtattggaagtccttctgatcatcttctgcttaattgtggtgaccatagatatcctcttgctgcttcttgtgttggaggaaacttcagatacttcatttactccagagtgcccagagattccccagtcggaaaggatagactgcacacctgaccaggaggtgaccgaggatatctgcagatggcaatataagtgctgctggtcgcctgtggcagatgccaatgtccctaggtgcttcttcccctggaactggggctatgaagccagcaatggccatacaaatacaagcacaggatttactgcccagttgaaaaggttgccatcaccatctctgtttggaaatgatgtcgccaccacccttttcacagctgaatatcagacatccaatcggtttcattttaagatcactgactttaataacatacgctatgaagtttcccatgaaaatattaacctggttgatgggattgctgatgcctccaatttgagctattacgtggaggttactgataaacctttcagcatcaaaataatgaggacaagcaacagaagagtcttgttggacacgagcatcgggcccctccagtttgcccagcagtacctgcaactgtctttccgactgcccagtgccaatgtgtatgggctgggagagcatgtgcaccagcagtaccgccacaatatgacctggaagacttggcccatcttcacccgggacgctacccccaccgagggcatgattaatctgtatggagctcatacattcttcttgtgccttgaagatgccaggggctcctcttttggagtatttctgatgaacagtaatgccatggaggttacccttcagccagctcctgcgatcacttatcgcacgattggaggcattcttgacttttacgtattcctaggaaacactccagaacaagtggttcaggaatacttggagcttgttggacggccattcttccctccctattggagtcttgggttccagcttagtcgcagggactatggtggcatcaataaattgaaagaagttgtaagccgaaatcgtttagctgagataccatatgatgtccagtactctgacatagactacatggatggaaagaaggatttcactgttgatgaagtcgcttactctggtctcccagattttgtcaaggagttacatgacaatggacagaaatatcttattattatgaatcctggcatctccaaaaactctaactacgagccctataataatggaagcctaaagagagtgtggatcttggggagcaatggctttgctgttggggagggatatccgggaccgacagtctttcccgattataccaatccagtatgcactgagtggtggacagatcaggtcgctaaatttcatgatcatctggagtttgatggagtgtggattgtaagttattattcctgactcaaatttcctttggaaacagataacgccaaattttcagatgagttttgaccttgatgtcaaataaatgtcaataaaaaata

SEQ ID NO: 45792 - DNA, 480 bp, Homo Sapiens
atggagcaggactggcaacctggagaggaagtcactcctggtcctgagccctgttcaaagggccaggctcccctctaccccattgtccatgtgacagagctcaaacacacagaccccaactttccctccaactccaatgctgtcggcacctcaagtggctggaacaggattggcacgggctgcagccatacctgggactggaggttctcctgcacccagcaggcccttttgcccctactaggagcctgggaatggagcattgacacagaagcaggaggaggaaggagagagcagagccagaaaccctgcagcaacggagggcctgcagcagctggagagggccgagtcctcccaagcccctgctttccatggagcacttgccaggcagccattcacaaagtgtgtcgttggcagggatgcaccagaccagctctcctggcaccatccctggccacactcaaggaacacagttatccctga

SEQ ID NO: 45793 - DNA, 246 bp, Homo Sapiens
acaggaccacgtgcctgggagattccgacaggctgtccttccgccccccaccgagacggcatgcgggcgcgtgtttccacggatctagtccgtcttatctgcaccaaactgccattccagtcactcactgggatcattaaaccaccacttgcagttttccagggctttctttgttctactaggaagtatatgcccccaaattatgaaattccatttcaaacagaattaacagaatttaaaaaataa

SEQ ID NO: 45794 - DNA, 651 bp, Homo Sapiens
attgagcgcgcgcggtcccgggatctccgacgaggccctggacccccgggcggcgaagctgcggcgcggcgccccctggaggccgcgggacccctggccggtccgcgcaggcgcagcggggtcgcagggcgcggcgggttccagcgcggggatggcgctgtccgcggaggaccgggcgctggtgcgcgccctgtggaagaagctgggcagcaacgtcggcgtctacacgacagaggccctggaaaggaccttcctggctttccccgccacgaagacctacttctcccacctggacctgagccccggctcctcacaagtcagagcccacggccagaaggtggcggacgcgctgagcctcgccgtggagcgcctggacgacctaccccacgcgctgtccgcgctgagccacctgcacgcgtgccagctgcgagtggacccggccagcttccagctcctgggccactgcctgctggtaaccctcgcccggcactaccccggagacttcagccccgcgctgcaggcgtcgctggacaagttcctgagccacgttatctcggcgctggtttccgagtaccgctgaactgtgggtgggtggccgcgggatccccaggcgaccttccccgtgtttgagtaaagcctctcccaggagca

SEQ ID NO: 45795 - DNA, 318 bp, Homo Sapiens
atgtctatatatttccccattcactgccccgactatctgagatcggccaagatgactgaggtgatgatgaacacccagcccatggaggagatcggcctcagcccccgcaaggatggcctttcctaccagatcttcccagacccgtcagattttgaccgctgctgcaaactgaaggaccgtctgccctccatagtggtggaacccacagaaggggaggtggagagcggggagctccggtggccccctgaggagttcctggtccaggaggatgagcaagataactgcgaagagacagcgaaagaaaataaagagcagtag

SEQ ID NO: 45796 - DNA, 417 bp, Homo Sapiens
atgaaccctcgcgccatccccgggccaggtccctatactgccagccactcccccttccttcacctccaccctctacccccaccccaagcagaccgatcctcccccatcccctccctcccgcccttctcttctcgtcatttcattattgatccaccttttcctaggccaatcctggggcttggaaggggtgggggaagccaggttggggtgaggagagtagataagggacagttatactttagtgtggtggcggtggttgctttgggatgggagaaaaaggattatcaagcaaagttattccttagaaaggacttggggttgtctctgattcttgtaaggggacccaaggtggatgaagggtcagagcgttgccccttccccattagtactggggcaagaacggagttgcttctataa

SEQ ID NO: 45797 - DNA, 552 bp, Homo Sapiens
gagcgagatcccaccaaaatcaaatggtgtgatgctggtgctgattatgttgtggtccactggcatcttcaataccatgagaaggctggagatgtcttagaagagggagccaaaagggtcatcatctctgccctttctgctgacacccccttgttcatgataggcatgaatcatgagaagtacaaaaacagcctcaagatcatcagcaaagcctcctgtaccaccaacttcttagcccccctggccaaggtcatccgtgacaactttggcatcatagaagaacttataaccacagtccatgccatcactgcccagaagaccctggatggctcctctgggaaactgtggcatgatggccatgtggctctccaggacatcatccctacatctactagtggtgccaaggctgtgggccaggttactcccgagctgaatgggaagctcattggcatggccttccatgtctccactgccaaattgttggtcatggacctgacttgccatctggagaaagctgccaaatatgatgacatcaagaaggtggtaaagcag

SEQ ID NO: 45798 - DNA, 587 bp, Homo Sapiens
tggggtgcagctgagctagacatgggacggcgagacgcccagctcctggcagcgctcctcgtcctggggctatgtgccctggcggggagtgagaaaccctccccctgccagtgctccaggctgagcccccataacaggacgaactgcggcttccctggaatcaccagtgaccagtgttttgacaatggatgctgtttcgactccagtgtcactggggtcccctggtgtttccaccccctcccaaagcaagagtcggatcagtgcgtcatggaggtctcagaccgaagaaactgtggctacccgggcatcagccccgaggaatgcgcctctcggaagtgctgcttctccaacttcatctttgaagtgccctggtgcttcttcccgaagtctgtggaagactgccattactaagagaggctggttccagaggatgcatctggctcaccgggtgttccgaaaccaaagaagaaacttcgccttatcagcttcatacttcatgaaatcctgggttttcttaaccatcttttcctcattttcaatggtttaacatataatttctttaaataaaacccttaaaatctgctaaa

SEQ ID NO: 45799 - DNA, 1821 bp, Homo Sapiens
ggaatcccagcttcaccctgtcaactgcttaggaatccgggcttttgctgatatgcatgcatgtaccgaccttctgaacaaggccaacacctatgcaggcaagtggagaagccgaggacgggctcagggaaccggagacggagaaggcgctgtcctcttcactgcacgcgccctggaccagtgctggccttgatcatgcagctcttccaggcccactgcttcttcctgtccactaggccacagctgccctccaggcccactatgcacacatcttcccctccaaggtttgttctgcccctgccctgactcccagccctgcgggggtcctgaccccacctcacctggctcagactctgatgctgccctggctgccccaccactgcctctgcccgagagtcacgtgaggctgagagtaggggcaggggcagcagtggtgccagttggggggcggtccagtgggaggagcctcagcctcgtgggctgttccgtgggactgatgactgcatgatcttctgggcacctcacggatcttcaactgcaggtgaaacggatgctggtggtgggtgcagggccactgggagccgctgcatggtcccagaggctggactggggcaggtgccaactgaagctgctggggcagcatgggcaggatgttctgcacacaaaccttggagaagaaaatgtgtgcatagcgggtccactgctgccctgccctgactcccagccctgcctgaccccacctcaccctgctcaggctctggtgcaactctgggtgccttgcccctgcctctgccccagagttggggcctcgacagcctggctggaaggggacaccccagccctgcctcaacacctgggtccctccataactaccacaggcagatgggcgaccccaaagaagatcccaggactcacagtaccccctgagaacatggacagtatgtgggggtagccatggaggtcaggatggttatcttctcccgggtaaagccatttaatcctttcagtttgggatggaataaggcctgctttttttaatttttttttgagacggagtcttgctctgtcgcccaggctggagtgcagtggtgcgatcttggctcactgcaaccttttcctgcctggttcacgcaattctcctgcctcagccttccgggtagctgagattacaggtacacgctaccacgtccggctaatttttgtatttttagtacagacggggcttcaccatcttggccaggctgatttcgatctcctgacatcgtgatccgcctgcctccacctcccaaagtgctgggattacaggtgtgagccaccaggcctggccaaggcctgctcctcttatatatacccactatccctgcagctgtaccgggggaaagcttggcagtttccctcctccgagcccctgtacatatcatgaagtgtgggaccttcagagcttttcacttttcggaaaatagctcctgctggggctacaggatggagtgtgaagagggccttgggccacagggaggtgcctgtcgactatggggagttcatgcaccccttctttccccagaggggctggactcaggtgagtatgggggtggaagctcctgcacttcgacacaggcagcgggagggttttctccccattccctctgctatcccaacttgagttgtactttttaagaaagtgattcaccctgcctttgcccccttccccagaacagaacacgttgatcacggggatattttttattgtgccagaaagttgccatgaccgtcattaaacctgtttaacaccaaataataaggaaaataaaataaaaaattcgg

SEQ ID NO: 45800 - DNA, 892 bp, Homo Sapiens
cagctacgacgccatgaatatcttgcccaagaagagctggcacgtccggaacaaggacaatgtcgcccgcgtgcggcgtgacgaggcccaggcccgggaggaggagaaggagcgtgagcggagggtgctgctggctcagcaagaggcccgtacagaattcctacggaagaaagccagacatcagaactcactgcctgagcttgaagcagcagaggcgggagccccaggttctggccctgtggacctgtttcgggagctgctggaggaagggaaaggagtgatcagaggcaataaagagtacgaggaagaaaagcgacaggagaaagagaggcaagagaaagctctgggcatcctgacatacctgggccagagtgcagcggaggcacagactcaacccccttggtaccagctacccccagggcgagggggccccccgcccggcccagccccagatgagaagatcaagagccgtctggaccctctgcgggagatgcagaagcatctggggaagaagagacagcacggcggtgatgaaggcagtcgcagcagaaaggaaaaggaggggtctgagaagcagcgacccaaggagcctccatccctggaccagcttcgagctgaacgtctgcggagggaagcagctgagaggtctcgggcagaggccctgctggcccgggtccaaggccgggcactacaggagggtcagccggaagaagacgagacggatgaccggcggcggcggtacaactcccaattcaacccccagctggcccggcgcccccgccagcaggaccctcaccttactcactgactcctgagggggtacaggagaggccgctgctgccagccgtcatataaaactatttattcataaatattttccaaaatgaaaata

SEQ ID NO: 45801 - DNA, 643 bp, Homo Sapiens
ctttctgtgtgcttaggtgcccgagctactgagggtctaagtccgggcagccgaagagtgtggtaggtaacggtcctcagcgcaagggtcatttcgtcgctgggaagggacggccctcgcccgcggtgatggtggttagcaagatgaacaaagatgcgcagatgagagcagcgattaaccaaaagttgatagaaactggagaaagagaacgcctcaaagagttgctgagagctaaattaattgaatgtggctggaaggatcagttgaaggcacactgtaaagaggtaattaaagaaaaaggactagaacacgttactgttgatgacttggtggctgaaatcactccaaaaggcagagccctggtacctgacagtgtaaagaaggagctcctacaaagaataagaacattccttgctcagcatgccagcctttaagattgaattagattgtgttgttgtggttttatttctgaaagtaaaacttgccataaattagaaaacaatttcccaaaataaaatccttttttgtatgatggtatacagttttcagtaatgatgtatacattgtattgatttttttccctaaatgtgttattttaataaatatctcatgaatgagtttgaagtttgcttggattttgaaa

SEQ ID NO: 45802 - DNA, 933 bp, Homo Sapiens
atggctggcaacaatttcactgaggttaccgtcttcatcctctctggatttgcaaatcaccctgaattacaagtcagtcttttcttgatgtttctcttcatttatctattcactgttttgggaaacctgggactgatcacgttaatcagaatggattctcagcttcacacccctatgtactttttcctgagcaatttagcatttattgacatattttactcctctactgtaacacctaaggcattggtgaatttccaatccaatcggagatccatctcctttgttggctgctttgttcaaatgtacttttttgttggattggtgtgttgtgagtgtttccttctgggatcaatggcctacaatcgctacatagcaatctgcaatcccttactgtattcagtagtcatgtcccaaaaagtgtccaactggctgggagtaatgccatatgtgataggcttcacaagctcgctgatatctgtctgggtgataagcagtttggcgttctgtgattccagcatcaatcattttttttgtgacaccacagctcttttagcactctcctgtgtagatacattcggcacagaaatggtgagctttgtcttagctggattcactcttcttagctctctccttatcatcacagtcacttatatcatcatcatctcagccatcctgaggatccagtcagcagcaggcaggcagaaggccttctccacctgcgcatcccacctcatggctgtaactatcttttatgggtctctgattttcacctatttgcaacctgataacacatcatcgctgacccaggcgcaggtggcatctgtattctatacgattgtcattcccatgctgaatccactcatctacagtctgaggaacaaagatgtgaaaaatgctcttctgagagtcatacatagaaaactttttccatga

SEQ ID NO: 45803 - DNA, 954 bp, Homo Sapiens
cagctgaggatttatttcatgacattacccagcaacaactccacttccccagtctttgaattcttcctcatttgtttccccagtttccagagctggcagcactggctgtctctgcccctcagcctcctcttcctcctggccatgggggccaatgccacccttctgatcaccatctatctggaagcctctctgcaccagcccctgtactacctgctcagcctcctctccctgctggacatcgtactctgcctcaccgtcatccccaaggtcctggccatcttctggtttgacctcagatcaatcagcttccctgcctgcttccttcaggtgttcatcatgaacagttttctgactatggagtcctgcacattcatgatcatggcctatgaccgctatgtggccatctgcaagcccctacagtactcatccatcatcactgatcaatttgtcgctagggctgccatctttgttgtggccaggaatggccttcttactatgcctatccccatactttcttctcgactcagatactgtgcaggacacatcatcaagaactgcatctgtactaacgtgtctgtgtctaaactctcttgtgatgacatcaccttgaatcagagctaccagtttgttataggttggaccctgctgggctctgacctcatccttattgttctctcttacttttttatcttgaaaactgtgctaaggattaagggtgagggagatatggccaaagctctaggtacttgtggttcccacttcatcctcatcctcttcttcaccacagtcctgctggttctggtcatcactaacctggccaggaagagaattcctccggatgtccccatcctgctcaacatcctgcaccaccttattcccccagctctgaaccccattgtttatggtgtgagaaccaaggagatcaagcagggaatccagaacctgctgaggagg

SEQ ID NO: 45804 - DNA, 3320 bp, Homo Sapiens
gccttcgcctgctggaaaagcagtaggatcggccagtggcgacagcaggagctgagcctaagccctggcggggctttgggctgtagattcctgtctgactaaagggacctcaaaaaggagggaaaatggcttctgagtctgaaactctgaatcccagtgctaggataatgaccttttatccaactatggaagagttccgaaacttcagtagatacattgcctacattgaatcccaaggagctcatcgggcagggctagccaaggttgttcctccaaaagagtggaagccacgagcatcctatgatgacattgatgatttggtcattcctgcccccattcaacagctggtgacggggcagtctggcctctttactcagtacaacatacagaagaaagccatgactgttcgagagttccgcaagatagccaatagcgataagtactgtaccccacgctatagtgagtttgaagagctcgagcggaaatactggaaaaatcttacattcaatcctccaatctatggtgcagatgtgaatggtaccctctatgaaaagcatgttgatgagtggaatattggccggctgagaacaatcctggacttggtggaaaaggagagtgggatcaccattgagggtgtgaacaccccatacctgtactttggcatgtggaagacatcctttgcttggcacactgaagacatggacctctacagcatcaactacctgcactttggagaaccaaagtcctggtactctgttccacctgagcatggaaagcggttggaacgcctcgccaaaggctttttcccaggaagtgctcaaagctgtgaggcatttctccgccacaagatgaccctgatttccccgttaatgctgaagaaatatggaattccctttgacaaggtgactcaagaggctggagagtttatgatcactttcccttatggttaccatgccggctttaaccatggttttaactgtgcggagtctaccaattttgctacccgtcggtggattgagtacggcaagcaagctgtgctgtgctcctgtagaaaggacatggtgaagatctccatggatgtgtttgtgagaaagttccagccagaaaggtacaaactttggaaagctgggaaggacaacacagttattgaccatactctgcccacgccagaagcagctgagtttcttaaggagagtgaactgcctccaagagctggcaacgaggaggagtgcccagaggaggacatggaaggggtggaggatggagaggaaggagacctgaagacaagcctggccaagcaccgaatagggacaaagaggcaccgagtttgtcttgaaataccacaggaggtgagtcagagtgagctcttccccaaggaggatctgagttctgagcagtatgagatgacggagtgcccggcagccctcgcccctgtgaggcccacccatagctctgtgcggcaagttgaggatggtcttaccttcccagattattctgactccactgaagtcaaatttgaagagcttaaaaatgtcaaactagaagaggaggatgaggaggaagaacaagcagcagctgccttggatctttctgtgaatcctgcgtctgtagggggacgccttgtcttctcaggctccaaaaagaaatcatcttctagcctgggctctggctcttcacgggattctatctcttctgattcagaaactagtgagcctctctcctgccgagcccaagggcaaacgggagttctcactgtgcacagttatgccaaaggggatggcagggtcactgtgggagagccatgcacgaggaagaaaggaagcgccgctagaagtttcagtgagcgggagctggcagaggttgcagatgaatacatgttttccctagaagagaataagaagtccaagggacgccgtcagcctttaagcaagctcccccgccatcacccacttgtgctgcaggagtgtgtcagtgatgatgagacatctgaacagctgacccctgaggaagaggctgaggagacagaggcctgggccaagcctctgagccaactgtggcagaaccgacctccaaactttgaggctgagaaggaattcaatgagaccatggcccaacaggcccctcactgcgctgtctgtatgatcttccagacttatcatcaggttgaatttggaggctttaatcagaactgtggaaatgcttcagatttagccccccagaagcagaggaccaagccattgattccagaaatgtgcttcacttcgactggctgcagcacggacatcaacctttctactccttatcttgaggaggatggcaccagcatactcgtttcctgcaagaagtgcagcgtccgggtccatgccagttgctatggggtcccccctgcaaaggcttctgaagactggatgtgttctcggtgttcagccaatgccctagaggaggactgctgtttatgctcattacgaggaggggccctgcagagagcaaatgatgacaggtgggtccacgtttcatgtgctgtggcaattctggaagcaaggtttgtcaacattgcagaaagaagtccggtggatgtgagcaaaatccccctgccccgcttcaaactgaaatgtatcttctgtaagaagcggaggaaaagaactgctggctgctgtgtgcagtgttctcacggccgctgcccaactgccttccatgtgagctgcgcccaggctgccggtgtgatgatgcagcctgacgactggccttttgtggtcttcattacctgctttcggcacaagattcctaatttggagcgtgccaagggggccttgcaaagcatcactgcaggccagaaagtcattagcaagcataagaacgggcgcttctaccagtgtgaagtggtcaggctcaccaccgagaccttctatgaagtcaactttgatgatggctccttcagcgacaatctttatcctgaggacatagtgagccaggactgtctccagtttggtcctcctgctgaaggggaagtggtccaagtgagatggacagacggccaagtctatggagccaagtttgtggcctcccaccctatccaaatgtaccaggtggagtttgaggatggctcacaacttgtggttaagagagatgatgtatacacactggatgaagagcttcccaagagagtcaaatctagactgtcagtagcctcagacatgcgcttcaatgagattttcacagagaaagaggttaagcaagaaaagaaacggcaacgagttatcaactcaagataccgggaagattatattgagcctgcactataccgggccatcatggagtag

SEQ ID NO: 45805 - DNA, 579 bp, Homo Sapiens
aaggaggaggttcctgctgtgccagaaacccttaagaaaaagcaatgggatttcgtagagctgaagatcaagcacctgagaaagaattttgcccaaaagatgcttcaaaaggcaaggaggaagcttatttgtgaaaaaaagcactattacaaggaatatagacagatgtacagcacagaaattcgaggtaggatggcaagaaaagaacccaaaacgatgtttgtcatcaggatcggaggtatcagtgatgtgagcccaaagatccgaaaggtgttgcagcttcttcaccttcatcaaatcttcagtggaacctttatgaagctcaacaaggcttcgtttaacattctgaggattgtaggaccatatattacatgggggtacccaaatctgaagtcagtaaatgaacttatctacaaggatggttattgcaaaatcaataagaagcaaattgctttgacaggtaacctgattgctcgatctcttggcatcatcttcatggaggatctgattcatgagatctatactgttggaaaatgctttgaagcagacaacttcctgtggcccttcaaattatcctct

SEQ ID NO: 45806 - DNA, 2878 bp, Homo Sapiens
tgatctctgagtctcattcatgagaatgaggccaggttgaagtgtggaagtgtggccaggttcaggggctggccaccactgctaagggttcaggggagggtgaaggaggccaactgatgctctcccaagaccaccagaggtggaaactgctggagagccagcccccggttctcagtgactccagcttctacggacttttcaggtgagggaggcagggggcctgggtaatggtgatgcagggttccccagacagcatccaggaactgctacacttatttcaattaaagcgtcaggtgtcccatgagagcaacagttcccagtcagtgcccacaaggcaccacagagccccttgccctaaaaccttggagggactatcaggcccctctgcctcacccccagccccggcatgtccctgcctgtctacttcctattgtaacttccaagccagccttcctttaaaggaaaaggagcttagaaaccaacattctagaagatgcacttgggcctgggttaaccaattcagatgccctaagagccagtcagtccagagactgggctggtcaagggttatgggtgacctacacagtgggctggttggtggcctccagataactaagcgtgagctgacagaaggttccagactcctggactttctctggctctgagttaagtgagaatccttgttctctgtggcacaagaagaggttggacagagacagtcccaaccctggaatgtggggctggtggcccgagaggccactcactctgccggctgggagggccctcggggactgagagcgtgaccctctcaggtactgcccccgggtgggagccaccggatgatccagacacgggctctgagtgttcacatccagaggtctccccatctccacgcttcgtggcagcgaagacccagacgaaccagtcggggaaaaaagctccggcctccgtggtccgatgtgccaccctcttacaccgcacccctccagccacccaaacccagacgttccgcactccaaattcgggatctccggcgagcaaggcaaccgcagcagaaagcgctttcagtcggagagtagaaggcaaagcacaaaaccactttgaagagacgaacagcagttcgcagaactccagcgaaactgcaagtcccctgatttccaaccctttccctctcctacagaaaccctacacctgcggcgcctgtgggatccagttccagttctacaacaacctgttggagcacatgcagtcccatgcagctgacaatgaaaacaacattgcctccaaccagtcccgatcgccacctgctgttgtagaagagaagtggaaacctcaggcccagaggaacagtgccaataacaccactaccagtggtttaacacccaacagcatgatccccgaaaaggagcggcagaacatcgcagagcggctgttgagggtcatgtgtgccgacctgggtgcactgagcgtggtcagcgggaaggagttcctgaagttggcccagaccttagtagacagtggtgcccgctatggggccttctcggtcactgaaatcctgggcaacttcaacacgctggcgctgaagcacctgccacgcatgtacaaccaggtgaaggtgaaagtgacctgtgccttgggcagcaatgcctgcctaggcatcggtgtcacctgccactcccagagtgttggccctgactcctgctacatcctcacagcctaccaggccgagggcaaccacatcaagagctatgtgcttggtgtgaagggtgcggacattcgcgacagcggtgaccttgtgcaccactgggtgcagaacgtgctgtcggagttcgtgatgtcggagatcaggacagtgtacgtgacggattgccgggtgagcacgtccgccttctccaaggccggcatgtgccttcgctgctcagcctgtgccttgaactcggtggtgcagagcgtgctgagcaagcggacactgcaggcccgcagcatgcacgaggtcatcgagctgctcaacgtgtgcgaggacctggcgggctccacgggcctggccaaggagaccttcgggtcgctggaggagacgtctccaccaccctgctggaactcggtgacggactcactgttgctggtgcatgagcgctatgagcagatctgcgagttctacagccgggccaagaagatgaacctcatccagagcctcaacaagcacctgctcagcaacctggcggccatcctgacgccggtgaagcaggcagtcatcgagctgagcaacgagagccagcccaccctgcagctggtgctgcccacctacgtcaggctggagaagctgttcacggccaaggccaacgacgcaggcactgtcagcaagctctgccacctcttcctggaggcgctcaaggagaacttcaaggtgcacccggcccacaaggtggccatgatcctggacccgcagcagaagctgcggcctgtgccaccctaccagcacgaggagatcatcggcaaggtctgtgagctcatcaacgaggtgaaggagtcctgggccgaggaggccgacttcgagcccgctgccaagaagccccgctctgctgccgtcgagaaccccgcagctcaggaagatgatcggctaggcaaaaatgaagtgtacgattacctgcaggagcccctcttccaggctacccctgatctcttccagtactggtcgtgcgttacccaaaagcacacaaaactcgccaagctcgccttctggctcctggcggttccggccgtgggcgccagaagcgggtgtgtaaatatgtgtgaacaagcgcttctaatcaaacggaggcggctgctcagtccagaagatatgaataaactcatgtttctgaaatccaacatgctttaa

SEQ ID NO: 45807 - DNA, 1872 bp, Homo Sapiens
gacggcgagaccccgccccatccccgactgcctgaaccgcgccaggagacggaccgcaagtccagcgtacccacagacgactcaggcgggagacgagcggtgtcatggccgccgacagtgacgatggcgcagtttcagctcccgcagcttccgacggtggtgtcagcaaaagcacaacatctggggaggagctagtagtccaggttcccgtagtggatgtgcaaagcaacaacttcaaggagatgtggccatccctcctgctagccataaagacagctaatttcgtggctgtggacacggagctgagtgggcttggggacaggaagagtttgctgaaccagtgcattgaggaacgttacaaggccgtgtgtcatgctgccaggacccgttctatcctttccctgggcctcgcctgcttcaagcggcagccagacaagggtgaacattcctatctggctcaagtgttcaatctcactctgctgtgcatggaggagtatgtcatagaaccaaagtctgtgcagttcctgatacagcatggcttcaacttcaaccagcagtatgcccaaggcatcccctaccataagggcaatgacaagggtgatgagagccagagccagtcagtacggaccctattcctggagctaatccgagcccgccggcccctggtgctacacaatggccttatagacttggtgttcctgtaccagaacttctatgcacacctccctgagagtctgggaaccttcaccgctgacctgtgtgagatgttcccagcaggcatttatgacaccaaatatgctgctgagtttcatgcccgtttcgtggcctcctacttagaatatgccttccggaaatgtgaacgggaaaatgggaagcagcgggcagctggcagcccacaccttaccctggagttctgcaactatccttccagcatgagggaccatattgattaccgctgctgcctgcccccagcaacccaccgtcctcatcccaccagcatctgtgacaacttctcggcttatggctggtgccccctgggaccacagtgtcctcagtctcacgatattgaccttatcattgacactgatgaggctgcggcagaggacaagcggcgacggcgacgacgtagggaaaaacggaagagggctttattgaacctaccggggacacagacctctggggaagctaaggatggtcctcccaagaagcaggtctgtggggatagcatcaagcctgaagaaaccgagcaggaggtggctgccgatgaaactaggaacctgcctcactccaagcaaggcaacaaaaatgacttagagatggggattaaggcagcaaggcctgaaatagctgatagagctacctcagaagtgccagggagccaagccagtcctaacccagtgcctggggatggattgcaccgggctggttttgatgcctttatgacaggttatgtgatggcctatgtggaagtgagccagggaccgcagccctgcagctctggaccctggctccctgaatgccacaataaggtatatttgagtggcaaagctgtacccctcacagtggccaagagccagttctctcgttcctccaaagcccacaatcagaagatgaagctcacttggggcagtagctgatgcaacttccaccttgctctcaggtggaacagaggtattttgggtctctctagcctgaaatgtcatcctcaactgctactgagtttaggggagggggaatgtcttgacagacatcactgcattgccctggaccgcctcctttatcccagtgtttgaggtacaagtaagaaggctgaccagcacctgtaacactgactttatttttaagtctgaaaatgtcttgggaaagttttac

SEQ ID NO: 45808 - DNA, 757 bp, Homo Sapiens
gccacccggtccgccgcgtccccgccgccgccgccgcgtcccccgccggggccgaccgagccgagccgggccggagcggcgggcgcggccgggccgccatggaccacaagccgctgctgcaggagcggccgcccgcctacaacctggaggccggccagggcgactacgcgtgcggcccgcacggctacggcgccatccccgccgcgcccccgccgccgccctacccctacctcgtcacagggatacccacccaccatcccagggtctacaacatccacagccggaccgtcacccgctatcctgccaactctatcgtggtcgtaggaggctgtcctgtctgcagggttggggtgctggaggactgcttcaccttcctgggcatcttcctggccatcatcctcttcccctttgggttcatttgctgttttgccttgaggaagcgacgatgccccaactgtggagccaccttcgcttaaagggaacaccaggcccggctttcctacacccagctctctttttctaatgtaaatgttgtgtacaataattttatttgattaagcttcaggactgttttgtaaagcgaggtgggaccgatgtggcacacgccagctgcggtttcccggagcgtggagaggcagtgctgctgctcccgcccgaggctcatgacaactcaataaagcactgcttttattttttgcagtcttcaatttgagaaaggtgagaaataatgttttcaataaatgagattcataccatt

SEQ ID NO: 45809 - DNA, 1372 bp, Homo Sapiens
cacactgggcctccactttgccctctttccttctcttctcctcacagcagtgcctggtcaaacccagcaacccttggccagaacttactcacccatcccactgacaccatgaagcctgtgctgcctctccagttcctggtggtgttctgcctagcactgcagctggtgcctgggagtcccaagcagcgtgttctgaagtatatcttggaacctccaccctgcatatcagcacctgaaaactgtactcacctgtgtacaatgcaggaagattgcgagaaaggatttcagtgctgttcctccttctgtgggatagtctgttcatcagaaacatttcaaaagcgcaacagaatcaaacacaagggctcagaagtcatcatgcctgccaactgaggcatatttcctagatcattttgcctctacgatgttttttcttggtccacctttaggaaggtattgagaagcaagaaactggaggcccaatatctaacctgcaaatcgtttttgagtttggcaataaaggctaatctaccataaaactcttgaagcttaagctttaggtcaacacttgcaagagccccttccaaagctcagcacagtttcctcctgggatgaggagaggaatcagaaaccccactttggcatagagacaagcagcactgttccagtccagggatgctgtgtgtgccctggtggtggtcttaaggacctaccacatcaacatctggacaaccctcactgattacctgcccttggttgcactcatcaggctaattgatcccatatttaacctcaaggagaaatatcaaccagacactgcatggcaacctccttggggccagccttcaaggcttcatggccatatcatgaacccaggacaggcacagtgggggtggtgaggacctgatagagttggatcagtgactaagaggctgcaataaggtgccatgaaatcaaaatcaaagggctagaactctccaaggtcttgcccccggcatgtagcaccacctgagccagaaactgcagaggacatgacagtgtggcattactgataagttatggaaatggaaataatctttcctaaactaccaataataactttaaatttttgatcaaccatgctagagcaaagattgaattatccttctgttctctctacagaaatgatataaaaactatagtcataagaagagacaatcaaaaataatcagccataaaatattaaaaaggtattataaaggtatttaaaataataataataaagtgttattttcctgggattcatgatatttgatatattcgtaagcttttgttaagtttgtaatttgttgcaatttctttttcatttcaaataaatattcacttacgtgtctaa

SEQ ID NO: 45810 - DNA, 411 bp, Homo Sapiens
ccaaaaaataaattggaaaaattttggagatttcctacagtttggaaaacagatgaactacatagcctaggaatattgaaaacattgctcacctgggccctgcggccagcagaattggccccgctctatggctgctggggcctgcgcactggaatcgccgtggcctgcgcaccccaccatgccagtttgaacctccatggcctcaaccagattcggaatgtcaaaaagcagagtgtctatttgatgaatttgaggaaatcgggaactttgggccacccaggctctgtagatgagaccacctatgaaagactagcggaggaatcactggactctttagcagagttttttgaagaccttgcagacaagccatacacgaggactatgatgtttcctttgggagtggtgtcttaa

SEQ ID NO: 45811 - DNA, 1354 bp, Homo Sapiens
tgcagcggcgcgccgggcttcgcgctccggtacttcctatttaacagacattgtgtggtgggctggcacaatcgcaatggctgttggccagattggaaacttcctggcttacacggcggtccccacggtcctggtaacccccctgggcgcccttggagtaccgttcgggtccattttagcttcctatctcctgaaggaaaagctcaacatcttgggcaagttggggtgcctgctaagctgtgcaggctccgtcgtgctgattatccactccccaaagtctgagagtgtgacaactcaggctgagctggaggaaaagctgaccaatccagtgtttgtgggctacctgtgcatcgtgctgctcatgctgctgctgctcatcttctggatcgcgccggcccatgggcccaccaacatcatggtctacatcagcatctgctccttgctgggcagtttcaccgtgccttccaccaagggcatcgggctggcggcccaagacatcttgcataacaacccgtccagtcagagagccctctgcctgtgcctggtactcctggccgtgctcggctgcagcatcatcgtccagttcaggtacatcaacaaggcgctggagtgcttcgactcctcggtgttcggggccatctactacgtcgtgtttaccacgctggtcctgctggcctcagccatcctcttccgggagtggagcaacgtgggcctggtggacttcttggggatggcctgtggattcacgaccgtctccgtggggattgtccttatacaggtgttcaaagagttcaatttcaaccttggggagatgaacaaatctaatatgaaaacagactagattgcaataggagcttggatggttcgaggaataggcattggaggtggtttctggccgtgattggatgtgaagtagaagaggtcctcgatcatggtgttagaattgactggatagtaacaggtggtctggtggatagcggggagcatggctcagcaccagagcagaggcccagccagccctctgcagcccaaacgtccccaacggttgcctggcaccatctctctctgatgagacgaatctcattttcatttccattaacctggaagctttcatgaatattctcttcttttaaaacattttaacattatttaaacagaaaaagatgggctctttctggttagttgttacatgatagcagagatatttttacttagattactttgggaatgagagattgttgtcttgaactctggcactgtacagtgaatgtgtctgtagttgtgttagtttgcattaagcatgtataacattcaagtatgtcatccaaataagaggcatatacattgaattgtt

SEQ ID NO: 45812 - DNA, 741 bp, Homo Sapiens
atggattctgaattaatgcatagtatagtaggaagctatcataaacctccagaaagagtatttgttccctcattcacccagaatgaaccatctcagaattgccatcctgcgaacttagaagttacctctcctaagatacttcatagcccaaatagccaagctcttattttagccttaaaaactcttcaggaaaaaattcattgtttagagctggagagaacacaagctgaagatgacctgaacattctttccagagaagcagcacagtataagaaggccttagagaatgaaacaaatgagagaaatctagcacatcaggagctgataaagcagaaaaaagatgtaagtatacagttaagctcagcccagtctcgttgcactcttctagagaagcaactagaatatacaaagagaatggttctcaatgtagagcgagaaaagaacatgatcctagaacaacaggcccagcttcagagggaaaaagaacaagatcagatgaagctgtatgcaaaacttgacaagcttgatgtcttagaaaaagagtgttttagacttacaacaactcagaaaactgctgaggacaagattaaacatttagaagaaaaacttaaggaagaagaacatcagcgtaagctatttcaagacaaagcttctgagcttcaaactggacttgaaatcagtaaaattatgtcttcagtttcaaatttaaagcactccaaggaaaagaagaaatcttcaaag

SEQ ID NO: 45813 - DNA, 714 bp, Homo Sapiens
tggtcagcaaagcctgagtcctgtcctctcgctctcctcctcggacagcatgagcttcaccactcgctccaccttctccaccaactactggtccctgggctctgtccagatgccaagctagcccggctggtcagcagcaaggccagcgtctatgaaggtgctggggcctctggttccctgatctccatgtcccactccaccagcttcgggggcggcatggtgtccagagctctggctgtggggatggctgagagtctggcaggaatggaaggcatccagaacaagaaggagaccaggcaaagcctgaatgaccacctgatctcctacctggacagagtgaggagcctggagaccaagaaccagaggctggagagcaaaatctgtgagcaattggagaagaagggaccccaggtcagagactgggggcattacttcaagaccatagaggacctgagggctcagatctttgcaaatactgtggacaatgcccacatcgttctgcagattgacaatgcccatcttgctgctgatgactttagagtcaagtatgagacagagctggccatgctccaatctgtagagagctacctccatgggctctgcaaggtcattgatgacacgaatgtcactcggctgcagctggagcagatcaaggctctcaaggaggagctgctcttcatgaagaagaaccacaaagaggaaataaaaggccta

SEQ ID NO: 45814 - DNA, 3648 bp, Homo Sapiens
gtgctgctgctgctggccatactgtggacgcaggctgccgccctcattaatctcaagtactcggtagaagaggagcagcgcgccgggacggtgattgccaacgtggccaaagacgcgcgagaggcgggcttcgcgctggacccccggcaggcttcagcctttcgcgtggtgtccaactcggctccacacctagtggacatcaatcccagctctggcctgctggtcaccaagcagaagattgaccgtgatctgctgtgccgccagagccccaagtgcatcatctcgctcgaggtcatgtccagctcaatggaaatctgcgtgataaaggtggagatcaaggacctgaacgacaatgcgcccagtttcccggcagcacagatcgagctggagatctcggaggcagccagccctggcacgcgcatcccgctggacagcgcttacgatccagactcaggaagctttggcgtgcagacttacgagctcacgcccaacgagctgttcggcctggagatcaagacgcgcggcgacggctcccgctttgccgaactcgtggtggaaaagagcctggaccgcgagacgcagtcgcactacagcttccgaatcactgcgctagacggtggcgacccgccgcgcctgggcaccgttggccttagtatcaaggtgaccgactccaatgacaacaacccggtgtttagcgagtccacctacgcggtgagcgtgccagaaaactcgcctcccaacacacccgtcatccgcctcaacgccagcgatccagacgagggcaccaacggccaggtggtctactccttctatggctacgtcaacgaccgcacgcgcgagctctttcagatcgacccgcacagtggcctggtcactgtcactggcgctttagactacgaagaggggcacgtgtacgaactggacgtgcaggctaaggacttggggcccaattccatcccggcacactgcaaggtcaccgtcagcgtgctggacaccaatgacaatccgccggtcatcaacctgctgtcagtcaacagtgagcttgtggaggtcagcgagagcgcccccccgggctacgtgatcgccttggtgcgggtgtctgatcgcgactcaggcctcaatggacgtgtgcagtgccgtttgctgggcaatgtgccctttcgactgcaggaatatgagagcttctccactattctggtggacggacggctggaccgcgagcagcacgaccaatacaacctcacaattcaggcacgcgacggcggcgtgcccatgctgcagagtgccaagtcctttaccgtgctcatcactgacgaaaatgacaaccacccgcacttttccaagccctactaccaggtcattgtgcaggagaacaacacgcctggcgcctatctgctctctgtgtctgctcgcgaccccgacctgggtctcaacggcagtgtctcctaccagatcgtgccgtcgcaggtgcgggacatgcctgtcttcacctatgtctccatcaatcccaactcaggcgacatctacgcgctgcgatcctttaaccacgagcagaccaaggcgttcgaattcaaggtgctggccaaggacggcggccttccctcactgcaaagcaacgctacggtgcgggtcatcatcctcgacgtcaacgacaacaccccggtcatcacagccccacctctgattaacggcactgccgaggtctacataccccgcaactctggcataggctacctggtgactgttgtcaaggcagaagactacgatgagggcgaaaatggccgagtcacctacgacatgaccgagggcgaccgcggcttctttgaaatagaccaggtcaatggcgaagtcagaaccacccgcaccttcggggagagctccaagtcctcctatgagcttatcgtggtggctcacgaccacggcaagacatctctctctgcctctgctctcgtcctaatctacttgtcccctgctctcgatgcccaagagtcaatgggctctgtgaacttgtccttgattttcattattgccctgggctccattgcgggcatcctctttgtaactatgatcttcgtggcaatcaagtgcaagcgagacaacaaagagatccggacctacaactgcagaattgctgagtactcctatgggcatcaaaagaaatcaagcaagaagaaaaaaatcagtaagaatgacatccgcctggtaccccgggatgtggaggagacagacaagatgaacgttgtcagttgctcttccctgacctcctccctcaactattttgactaccaccagcagacgctgcccctgggctgccgccgctctgagagcactttcctgaatgtggagaaccagaatacccgcaacaccagtgctaaccacatctaccatcactctttcaacagccaggggccccagcagcctgacctgattatcaacggtgtgcctctgcctgagactgaaaactattcttttgactccaactacgtgaatagccgagcccatttaatcaagagcagctccaccttcaaggacttagagggcaacagcctgaaggatagtggacatgaggagagtgaccaaactgacagtgagcatgatgtccagcggagcctgtattgtgatactgctgtcaacgatgtgctgaacaccagtgtgacctccatgggatctcagatgcctgatcatgatcagaatgaaggatttcattgccgggaagaatgccggattcttggccactctgacaggtgctggatgccccggaaccccatgcccatccgttccaagtcccctgagcatgtgaggaacatcatcgcgctgtctattgaagctactgctgctgatgtcgaggcttatgacgactgcggccccaccaaacggactttcgcaacctttgggaaagatgtcagcgaccacccggctgaggagaggcctaccctgaaaggcaagaggactgtcgatgtgaccatctgcagccccaaggtcaacagcgttatccgggaggcaggcaatggctgtgaggcgattagccctgtcacctcccccctccacctcaagagctctctgcccaccaagccttccgtgtcttacaccattgccctggctcccccagcccgtgatctggagcagtatgtcaacaatgtcaacaatggccctactcgtccctctgaagctgagccccgtggagctgatagcgagaaagtcatgcatgaggtcagccccattctgaaggaaggtcgcaacaaagagtcccctggtgtgaagcgtctgaaggatatcgttctctaaaccagtctccaggaagaagagaaagaaaccacactggctagtgaagaagcaggagcttcttgttttaattgctcaccaatggttggttcttgagtggctatatttcagagcttttcctaaatgtattgtttataggtgattatcattctgtgacagtcccttgtttcaacaggcagcaggggtgttcagttggagcaaattagctttggcttgagttgttcatggggccttgatgttggggaaacagagacaaattcagttgtgaaaagtattatgtattaagtgtttgaatttatatatttttctatgtcaaaattataatataaattaccattgtttgtggaggattacatttaaaaaagc

SEQ ID NO: 45815 - DNA, 3679 bp, Homo Sapiens
ggagagcgccaggcgccgcgaccagagggcccagagaagcggccggagcccgcctacctcggccccctcagcttcccgggctggcaggcggctagaggcgtctgaggaagtgtttaaaatgaagaagtttaatttccgaaaagttttggatggcttaactgcctcctcccctggcagtggtagcagcagtggcagtaacagtggtggtggggctggaagtggttccgtacatccggcggggactgcaggggttctcagagaggaaattcaggaaactttgacttcggagtatttccagatttgcaagacagttcggcatggttttcctcatcagcccacagcattagcctttgatccagttcagaaaatcttggctattgggacgagaacaggtgctatacgaatactcgggagacctggtgttgattgctattgccaacatgaaagtggtgcagctgtcctacagctccaatttttgatcaatgagggtgccttggtcagtgcaagttcagatgatacacttcatttgtggaaccttagacaaaaaaggccagccatactccattctcttaaatttaaccgggaacgaattacttactgtcatctacctttccagagtaaatggctttatgttggaacagaaagaggaaatacacatattgtaaatattgaatctttcattctttctggatatgttatcatgtggaacaaggcaattgaactatccactaagactcatccaggtccagttgtacatttaagcgatagcccaagagatgaaggcaaactgctaataggttatgaaaatggtactgtagtattctgggacttgaaatctaaaagagcagaactgagagtttattatgatgaggctattcattcaattgattggcatcatgagggcaaacagttcatgtgcagccattcagatggtagtttgactttatggaacctgaaaagcccaagtcgccctttccagaccacaattccacatggaaaaagtcaaagagaaggaagaaaatctgaatcttgtaaaccaattcttaaagtagaatacaagacctgcaaaaacagcgaaccattcataatattctctggtgggctgtcctatgacaaagcttgtagaagaccaagtttaaccatcatgcatggaaaagcaattacagtacttgaaatggatcatcctattgttgaatttctaactttatgtgaaacgccctatccaaatgaatttcaagaaccctatgctgtcgtggtacttctggagaaagatctcattgtagttgatctgacacaaagcaattttccaatctttgaaaatccatatcccatggacattcatgaatcaccagttacatgcacagcatactttgcagattgtcctccggatttgattctagtactgtattctataggagtcaagcataaaaaacaaggatacagtaataaggagtggccaatcagtggaggagcttggaaccttggagcacaaacatatccagaaattattattactggtcatgcagatggatcaataaaattttgggatgcttctgcaataactctgcagatgctgtacaagctaaaaacttcaaaagtgtttgaaaaacagaaggtaggagaaggaaaacaaacatgtgaaattgtagaggaagacccatttgccattcagatgatttactggtgtccagagagcagaatattctgtgtatcaggagtctctgcatatgtcataatttataaattcagcagacatgaaattacaacagaaatagtgtcattagaggtacgacttcagtatgatgttgaagatattattacccctgaaccagaaacaagtcctccgtttccagatctctcagcccagcttccttcttcaaggagtctttctgggagcactaacactgttgctagtgaaggagtaacaaaggacagtattccatgcctcaatgtgaagacacggccagtgcgaatgcctccaggatatcaagcagaacttgttattcaattggtgtgggtagatggtgaacctccacaacagattactagtcttgctgtaagctcagcatatggaatagttgcatttgggaactgcaatgggttggctgtggtggattttatacagaagacagtactgttaagcatggggaccattgacctatatagatcaagtgacttataccagcgacaaccacggtctcctcgaaaaaacaaacagttcattgcagacaacttttgcatgcgtggcctgtctaacttttatcctgatttaacgaaacggatccgtacttcctatcagagtttaactgaactgaatgacagtccagttcccctagaacttgagcgctgcaagtctcctacctcagaccatgtaaatggacactgcacaagtccaacttctcagagttgcagttctggaaaacgtctttctagtgccgatgtttcaaaagtaaatcgctggggtcctggaagaccaccatttcgaaaggcccagtcagcagcctgcatggagatttctttaccagttacaacagaagaaaaccgagaaaattcctataatcgttctagaagctctagtatctccagtattgacaaagattctaaagaagcaattacagcactatacttcatggactcctttgcacggaaaaatgactctaccatctctccttgtctgttcgttggaaccagtctgggaatggtgttaatcatctccttaaacctaccattagcagatgaacaaaggtttacagagccagtcatggtattgccaagtggtacattcctctcattgaaaggagctgtgctaacattctcctgtatggaccgaatgggtggattaatgcaaccgccatatgaagtttggagggatccaaacaacatagatgaaaatgaaaaatcttggagaaggaaagtggtaatgaactcatcttctgcatcccaagaaataggagatcatcagtatacaataatctgctcagaaaaacaagccaaagtcttctcactgccttctcagacttgcctttatgttcataacatcacggagacatcttttatactgcaagcaaatgtggtggtcatgtgtagcagtgcctgcttggcatgcttttgtgctaacggacatatcatgataatgagcctacctagtcttcgcccaatgttggatgttaattatttgccactgacagacatgaggatagcacgaacattttgttttaccaatgaaggacaggcattatacctcgtctctcctactgaaattcagcggttaacatacagccaagaaatgtgtgataatctacaggacatgctaggagatttgtttactcccatagagacaccagaagctcaaaacagaggctttctcaagggactgtttggtggaagcggacaaacatttgacagagaagagctctttggggaagcttcggcaggaaaagcatcccgcagccttgcgcaacacattcctggaccaggtagtatagaagggatgaaaggcgctgctggaggggtgatgggagagctgacccgtgcacggattgcacttgatgaaagaggacagaggctaggagagctggaagagaaaactgcaggcatgatgaccagtgcagaagcattttccaaacatgcacatgagttaatgctgaaatacaaggataagaaatggtaccaattctga

SEQ ID NO: 45816 - DNA, 1126 bp, Homo Sapiens
gtttggtcaattactggcagtgaatgtcttcctggaggaaacctatttggaattataatcctattctattgtgccatcattggtggtaaacttttggggcttattaagttacctacattgcctccactgccttctcttcttggcatgctgcttgcagggtttctcatcagaaatatcccagtcatcaacgataatgtgcagatcaagcacaagtggtcttcctctttgagaagcatagccctgtctatcattctggttcgtgctggccttggtctggattcaaaggccctgaagaagttaaagggcgtttgtgtaagactgtccatgggtccctgtattgtggaggcgtgcacatctgctcttcttgcccattacctgctgggtttaccatggcaatggggatttatactgggttttgttttaggtgctgtatctccagctgttgtggtgccttcaatgctccttttgcagggaggaggctatggtgttgagaagggtgtcccaaccttgctcatggcagctggcagcttcgatgacattctggccatcactggcttcaacacatgcttgggcatagccttttccacaggctctactgtctttaatgtcctcagaggagttttggaggtggtaattggtgtggcaactggatctgttcttggatttttcattcagtactttccaagccgtgaccaggacaaacttgtgtgtaagagaacattccttgtgttggggttgtctgtgctagctgtgttcagcagtgtgcattttggtttccctggatcaggaggactgtgcacgttggtcatggctttccttgcaggcatgggatggaccagcgaaaaggcagaggttgaaaagataattgcagttgcctgggacatttttcagccccttctttttggactaattggagcagaggtatctattgcatctctcagaccagaaactgtaggaagcgcggattctattactggaaactttgggactgaaaggccaaagcttctgggcccaccatcaacgcagctccgctttcatttctttcacatacaactttccacataagatttcatgcggaaaaaaaaaaaaaactcacaaaggttttatactgataacagtatattaa

SEQ ID NO: 45817 - DNA, 1155 bp, Homo Sapiens
atgatgtggcaatgccatctatcttcctctgagtgccgctgctaccgccttaatggtttttcccttttcaagcgtctgccgattcctctctcatcaggtttacggacgctggagcagagtgtcggggagtggctggagtcgattgggctgcagcagtatgagagcaagttgcttctgaatggctttgacgatgtccacttcctggggtctaatgtgatggaagagcaggacctgcgggacatcggcatcagcgacccacagcaccggcggaagctgctccaggcggcacgctccctacccaaggtgaaggctctgggttatgacgggaacagcccccctagcgtgccctcctggctggactccctggggctgcaggactacgtccattccttcttgtcaagtggttacagctccattgacaccgtgaagaacctctgggagctagagctcgtcaatgtcctgaaggtccagctgctcggccatcgcaagcgcatcatcgcctccctcgcagacagaccgtacgaggagccgccccagaagccccccagattctcccagctgagggaggagcaccgtgaggccaagctgaccctgcggcccccgagcctggcagccccctacgccccagtgcagagttggcaacaccagccagagaaactcatcttcgagtcctgtggttatgaagccaattatctgggctccatgctgatcaaagatctgcgagggacagaatccacgcaagacgcctgtgccaagatgcggaaatctacggagcacatgaagaagatccccaccatcatcctgtccatcacatacaaaggtgtcaagttcatcgatgcctccaacaagaacgtcattgcagagcacgagatccggaacatttcctgtgcggcccaggacccggaggacctctgtacctttgcctacatcaccaaggacctgcagaccagccaccactattgccatgtgttcagcaccgtggatgtgaacctgacctacgagatcatcctgacgctggggcaggccttcgaagtggcctatcagttggccctgcaggcccagaagtccagggcgacgggcgcctctgcagctgagatgattgaaacaaaatcttccaaaccggtgcctaagcctcgggtcggcgtgaggaaatcc

SEQ ID NO: 45818 - DNA, 653 bp, Homo Sapiens
atctacaccaacccataattattctttacgatgatccaccttttataatgtagatgtttaaaataaaaaccaaaggaatgaccaatgagagccacagtccctaggaagaactgtaaatgaagacgaatccacatggcacaggatttctcccaacatcctcaaacgggaatcatccgaaggcatcgattctacagcccaaagcctttgtccacaactcccaggggtcagagcttccttctttcgcgccaggccaaagttgctacgtgggatccgatgttgtcgccagactttcagccaaaatcagccttcaaattaacctggaccgcccaacctccgtgcctttccgttacgccgtctcaagggcaaacattccaccctaactcgccagagggtgaactgcccccagatctaactgaaaacacttgcccttctcaagcctaacgagctgggcctgcagcgcttttctgccaccactgactacgatgacatagcaaagaaaaaaatatacctatgaaatccttcgagatcttcactctcaagatccctgggaagcgcacatacaccaccacatggaagctgacgggaaaggaagagtcggtgttttagcaagaaaagagggtgccctaacggcaggagctacgctagatactggc

SEQ ID NO: 45819 - DNA, 547 bp, Homo Sapiens
gctgcaggaaaggtaggacctgatggctccaggccctcggaggctcagaggcgcagggctgagccatgggaacgaagcgcgaggccatcctgaaggtgctggagaacctgacaccggaggagctcaagaagttcaagatgaagctggggacggtgccgctgcgcgagggctttgagcgcatcccgcggggcgcgctcgggcagctagatatcgtggacctcaccgacaagctggtcgcctcctactacgaggactacgcagccgagctcgtcgtggccgtgctgcgcgacatgcgcatgttggaggaggccgcacggctgcagcgggctgcgtgagggccactctgagctggaggcgggtcaaggcaaaaggagtaatgcaacgcctgtgaagccagccccacgcgcgcaccagtcgcgtaagacaacagcagtgtctccacctcggggaccaaggacgcctccgtgcctccagaccccgcctcctccagcccctgcacctgtcatttattcttccactgcccaataaatattcatggcagacttta

SEQ ID NO: 45820 - DNA, 1263 bp, Homo Sapiens
aggccagatgtggtgagggctaggaaaagagtttgttgggaaccctgggttatcggcctcgtcatcttcatatccctgattgtcctggcagtgtgcattggactcactgttcattatgtgagatataatcaaaagaagacctacaattactatagcacattgtcatttacaactgacaaactatatgctgagtttggcagagaggcttctaacaattttacagaaatgagccagagacttgaatcaatggtgaaaaatgcattttataaatctccattaagggaagaatttgtcaagtctcaggttatcaagttcagtcaacagaagcatggagtgttggctcatatgctgttgatttgtagatttcactctactgaggatcctgaaactgtagataaaattgttcaacttgttttacatgaaaagctgcaagatgctgtaggaccccctaaagtagatcctcactcagttaaaattaaaaaaatcaacaagacagaaacagacagctatctaaaccattgctgcggaacacgaagaagtaaaactctaggtcagagtctcaggatcgttggtgggacagaagtagaagagggtgaatggccctggcaggctagcctgcagtgggatgggagtcatcgctgtggagcaaccttaattaatgccacatggcttgtgagtgctgctcactgttttacaacatataagaaccctgccagatggactgcttcctttggagtaacaataaaaccttcgaaaatgaaacggggtctccggagaataattgtccatgaaaaatacaaacacccatcacatgactatgatatttctcttgcagagctttctagccctgttccctacacaaatgcagtacatagagtttgtctccctgatgcatcctatgagtttcaaccaggtgatgtgatgtttgtgacaggatttggagcactgaaaaatgatggttacagtcaaaatcatcttcgacaagcacaggtgactctcatagacgctacaacttgcaatgaacctcaagcttacaatgacgccataactcctagaatgttatgtgctggctccttagaaggaaaaacagatgcatgccagggtgactctggaggaccactggttagttcagatgctagagatatctggtaccttgctggaatagtgagctggggagatgaatgtgcgaaacccaacaagcctggtgtttatactagagttacggccttgcgggactggattacttcaaaaactggtatctaa

SEQ ID NO: 45821 - DNA, 2796 bp, Homo Sapiens
atgagccagagcccggcgttcgggccccggaggggcagttctccccggggcgctgccggagccgctgcgcggcgcaacgagagccaggactatctgctcatggactcggagctgggagaagacggctgcccgcaagccccgctgccttgctacggctactacccctgcttccggggatctgacaacagactggctcaccggcggcagacagttctccgtgagaaggggagaaggttagctaatcgaggaccagcatacatgtttagtgatcgctccacaagcctatctatagaggaggaacgctttttggatgcagctgaatatggtaacatcccagtggtgcggaagatgttagaagaatgccactcactcaacgttaactgtgtggattacatgggccagaatgccctacagttggcagtggccaatgagcatctggaaattacagaacttcttctcaagaaagaaaacctctctcgagttggggatgctttgcttctagctattagtaaaggttatgttcggattgtggaagcaattctcagtcatccggcttttgctgaaggcaagaggttagcaaccagccctagccagtctgaactccagcaagatgatttttatgcctatgatgaagatgggacacggttctcccatgatgtgactccaatcattctggctgcccactgccaggaatatgaaattgtgcataccctcctgcggaagggtgctaggattgaacggcctcatgattatttctgcaagtgcaatgactgcaaccagaaacagaagcatgactcgtttagccactccagatctaggattaatgcctataaaggcctggcaagtccggcttacctgtcattgtctagtgaagatccagtcatgacggctttagaacttagcaatgaactggcagttctggccaatattgagaaagagttcaagaatgactacaaaaaactgtcaatgcagtgcaaagactttgttgttggactccttgatctgtgcagaaacactgaagaagtcgaggccattctgaatggggatgttgaaacgctccagagtggtgatcacggtcgcccaaatctcagccgtttaaaacttgccattaaatatgaagtaaaaaaatttgtagctcatccaaactgccaacagcaacttctctccatttggtatgagaatctttctggtttacgacagcagacaatggcggtcaagttccttgtggtccttgctgttgccattggactgcccttcctggctctcatttactggtttgctccatgcagcaagatggggaagataatgcgtggaccattcatgaagtttgtagcacacgcagcctccttcaccatttttctgggactgctagtcatgaatgcagctgacagatttgaaggcacaaaactccttcctaatgaaaccagcacagataatgcaaaacagctgttcaggatgaaaacatcctgcttctcatggatggagatgctcattatatcctgggtaataggcatgatatgggctgaatgtaaagaaatctggactcagggccccaaggaatatttgtttgagttgtggaacatgcttgattttggtatgttagcaattttcgcagcatcattcattgcgagattcatggcattttggcatgcttccaaagcccagagcatcattgacgcaaatgatactttgaaggacttgacgaaagtaacattgggagacaatgtgaaatactacaatttggccaggataaagtgggacccctctgatcctcaaataatatctgaaggtctttatgcaattgctgtagttttaagtttctctaggatagcttatattttaccagcaaatgaaagctttggacctctgcagatatcacttggaagaacagtcaaagacatcttcaagttcatggtcatattcattatggtgtttgtggcctttatgattggaatgttcaatctctactcctactacattggtgcaaaacaaaatgaagccttcacaacagttgaagagagttttaagacactgttctgggctatatttggactttctgaagtgaaatcagtggtcatcaactataaccacaaattcattgaaaacattggttacgttctttatggagtctataatgttacgatggtcattgttttgctaaatatgttaattgccatgatcaacagttcattccaggaaattgaggatgacgctgatgtggagtggaaatttgcaagggccaaactctggttttcctactttgaggagggcagaacacttcctgtacccttcaatctggtgccgagtccaaagtccctgttttatctcttactgaagcttaaaaaatggatttctgagctgttccagggccataaaaaaggtttccaggaagatgcagagatgaacaagataaatgaagaaaagaaacttggaattttaggaagtcatgaagacctttcaaaattatcacttgacaaaaaacaggttgggcacaataaacaaccaagtataaggagctcagaagatttccatctaaatagtttcaataatcctccaagacaatatcagaaaataatgaaaaggctcattaaaagatatgtactgcaggcccagatagataaggagagtgatgaagtgaacgaaggggaactgaaggaaattaagcaggacatctcaagtctccgctatgaactccttgaagaaaaatctcagaatacagaagacctagcagaacttattagagaacttggagagaaattatccatggaaccaaatcaagaggaaaccaatagataa

SEQ ID NO: 45822 - DNA, 2791 bp, Homo Sapiens
tgaaataggagccaaggtatgctatgagccaaggattatgagtaatccagttttgtgcactttaagccatttgaaaaacagaaaagcaaaacaacaaaataatttttaagaaattgaatatagggtgttatgctctgaatgtgtccccctaaaattaatcaccaatgtcataagattaggaagtagggctttaaggtagtgattcagtcatgaagggagagtgttcacgaatgagtttaggatccttacacaaggactggatggagtgggcttcccctgttttgcccttccaccttctgccatgtgaggacacagtgcatctcctcctgaagacacagtgcacaagataccatcttggatgcagagaccagaccctcaccagacaccaatcctgctggcaccttgatcttggacttctagcctatggaactgtaagattggggaagatgccaggtgatagaatccaccctgcctctgacagcatccaatctggagcaaaggcttatttcaaccctcccccaagctcccaatacaagcccaaattctggaacaggtcctttccaacacctccttcagagaagctccctggctccaggcagtgcttgctcccctcactgcagcaggaagcctaacttgcgaactgcaggtgtgctccaggtggtcactggatgcaaggcattgacagatggatcccatcgatacccccactgcaaaaccatagtgcagtgaatagaagacacttctctgcaccccaaaagctccatgctgattgtgagaaggaaatgctggatggaggggttcctggaactactgtgagggtttcttttgatttctcctgcttagaaatggtgagagaactttggatgtggaacgtggaggaggaggaacacgaagtggggatctccacttggggtggtcagcactgcgggtgcccagcaaagtcactgcctggtccacatcccggaggggtctctgcgcctcagtcggcatcgcagctgatggtgaaacttttggtgtggcagaagagtgtccacaaacttcggaagatcgctgctcagagtgaggaatggagttgtgttttgaataaaatatccacgcatccttttgtgagcaaggagcatgatggtacttagacctaccatttctcgttatggtggttgcggttacagtggggctggggtgtttacctggagcctggacatccactgggacatgatacccactgggaattttttgtgtcaatctggtctctgatgtccacctggggattgggtatccacctaaggcctgatgtttacctggagccagatgtgcacctgagacctgatgtctatctgtggccttatgttcccctggggaccgatgcacacctgaaggataggtattcatctggggcctgatacccaccagtagtatgggtgtcaaccttggggctagtgttcagctggcgtccactgtctacttggggcctggtgtacacatggggcctgggcatccacctgagacttgatgtttaatatggtctggagttcttttggggcctgttgtaccctggagcctgggtgtacacctggagcctgatgtcccaggtgaacaactgggtcccaggtgatcttcaggccctaggtgaaaactccaggctctaagtggacaaccaggctccaggctgatgtttactggggccagatgtctaccaggccccaggtgaaatccccaggctccaaatggacaacatagccccaggttccaggtagacattggaatccaaatcaacaccaggccccagatggacacccaggcctgtggtggacatcagactgcagaaggtcatctggctcgaggtggacatcaagccccaggtggatacctagtccccaggtggatatcaggccccactttgacaccagtccctgggtagataccttggcctcaggtggatatccagtctctagctaagcatcaggctccagggggacccaggccctagctgactggggactagtgttcatatggggccacatgtccatctgggccctaggtgtcaacttgtagcctgatgtcaacctggaagctggtgttcaccagagaggactaaagtcctcctggtgcctggtgtccaacttgggactttgtgtccacctggagaccgatgtccacttgggaccagatgtccagctggagcaagatgtccacctgcagcctaaaacttcacctaaggcctgatgttccccagggcctacagagcctatgtatctacctagggacttgtgtccaggtggggcctgaattccacctggggcctggaattaacctgggacctgatgtccacctgagacgtgggtgttcctctggagtctgatatctatctggggcccgggtgtcctcctgtggtctgatgtccacttgtaggctggtgtccacctggggcctgggtgtccacctaggaacctgatgtatacctgaagtccagtgtctacgtgggtactgatgtctaccaggaaagtgatataaacctggggcctgatagccacctgggccctgagtgtccacatatgttctgatttctcttttggccttagtgtagggcctgagtgccacctgcttcctgatgttcaccaggaacctaggtattcacttggggcttgctccctgggggcctctgcccttttggccgcgttgtctcctggcttttagggtggtgggattctcggctctgattgcagcaggtggattcacttagctctcctccccttttagcattactgtcttctgtaataaacctctcactttg

SEQ ID NO: 45823 - DNA, 955 bp, Homo Sapiens
gcagcgcgggagcacagtggagcgcagatcgcggacccgagcgggcatgtccccgcgcgcgggagcctccgtttgcggccgggcccgggcggctgtgaacttagcagcgggctcctgcggccccgtcactgccatgtagtcgctggcggggctccctgcagcccgggagcggcagtgccagtgagcctgagcccaggagcccgcgtcttccccgggaggcgctgagtgcgcgccgcgcccccgccgctcgggaggcactttgggccagacagggaaatgggggagaaagtttcggaggcgccagagccggtgccccgcggctgcagtggccacggcagccggactccagcctctgcgctggtcgccgcgtcctctccgggtgcttcctcggccgagtcctcctcgggctcagaaactctgtcggaggaaggggagcccggcggcttctccagagagcatcagccgccgccgccgccgccgttgggaggcaccctgggcgcccgggcgcccgccgcgtgggctccggcaagcgtgctgctggagcgcggagtccttgcgctgccgccgccgcttcccggaggagctgtgccgcccgcgccccggggcagcagcgcgtcccaggaggagcaggacgaggagcttgaccacatattatcccctccacccatgccgtttcggaaatgcagcaacccagatgtggcttctggccctggaaaatcactgaagtataaaagacagctgagtgaggatggaagacagctaaggcgagggagcctgggaggagccctgactgggaggtaccttcttccaaacccggtggcgggacaggcctggccggcctctgcagagacgtccaacctcgtgcgcatgcgcagccaggccctgggccagtcggcgccctcgctcaccgccagcctgaaggagctgagtctccccagaagaggaagtttgtaag

SEQ ID NO: 45824 - DNA, 342 bp, Homo Sapiens
tggtccaagtaccttctcttcatgatacggatgtgcggaccatcctcctgcttcaagcctggccgcacaggtggggccactcccgtcgctgtcaccatcgctggcagagaagctgggagttcgctccttcttcaggttccgggcggcaggcagggcgactgtcctcttgtctgccagccgcggttctgccccaaccgagccccgcatctcaccaccggggaggatattcggcagcccgggcagtcgcagatcggaggatgcacctgcaggatccccttggacataagcgtcttcagacttttccctgcgagcagagccgaggcagaccctgtgagggagcgg

SEQ ID NO: 45825 - DNA, 930 bp, Homo Sapiens
ataccattctctgtctcatggggcgtcctcctgctggcaggcctgtgctgcctggtccccagctccctggttgaggatccccaggaagatgctgcccaaaagacggatacatcccaccatgatcaaggggactgggaggaccttgcttgccagaagatctcctataacgtcaccgacctcgcctttgatttgtacaaagagctggctgatctatcacaaaccagcaatgtcttagtcaccccaacaagcgtggctatggcctttgcaatgctctccctggggaccaaggctgacactcgcacagagatcctggaaggcctgaatgtcaacctcacagagacgcctgaggccaagatccacgaatgcttccagcaagttctccaagccctcagcaggccagacacccggctccagctgaccaccggcagtagcctgtttgttaacaagagtatgaagctagtggacacgtttttggaggataccaagaagctgtaccactcagaagcctcttccatcaacttcagggacaccgaggaggccaaagagcagatcaacaattatgtggagaaaagaactggaagaaaagtagtggatttggtcaaacacctgaaaaaagacacaagtcttgccctggtggattacatttcctttcacggcaagtggaaagataaattcaaggctgagcgcattatggtagagggcttccatgtggatgataagaccatcatcagagtgcctatgataaaccacctgggtagatttgacatccaccgggacagggagttatccagctgggtgctggcacagcactatgtggggaacgccactgccttcttcatcctgcccgatccaaagaagatgtggcagttggaagaaaaattgacctacagccaccttgaaaatatccagagagcctttgacataaggtga

SEQ ID NO: 45826 - DNA, 2959 bp, Homo Sapiens
atgaagacagaaacagtgccatcgttccaggagactccagctggatccagctgtcacctcaataacctgttgagtaggcggaaggtgatggctgtgggggtcttgcttgctggctcctggtcatacaccttctggtcagcatgtggctgctgtgccttctgtctgcattgctagtggtgctgggaggatggctgggctccagtgtctctggagtggcttcgagtccactgctcctggaaggcttcatcccattggccacctgtcctctattccctgagacagaaagacaactggaacaggagatcaactgcaccatccagatgtgattatttgagattttatattatcctggtaccattctgagagccaggagccagcctttgcagaggaaatggaggcagccatgaaagagttggtccaggagcttcagaggaggatgagcatgatggaccatcatgctcttgctcagagtgttctgactctctgtcgtttttcacctgcagagctacattcaggcaaaggagaccactacagggaagaatggtccagttgagccttcccacctctgggaggcttactgccgggctactgccccacatcctgctgtgcacagccccagtgctgaagtcacctatacatgtggtattgtgaatttgttgcttcaagggctggtgcccaagtcccacttggagactcatactggatgccatgtagtggttgaactcatcatatgcagtgtagtcttaccattgatcagcaggctgtcagatcctgactggatccaccttgtcctcatggttatcttttccaaggccagagatccaacaccctgcccagccagtggccctgaacagccctcagtgcccacgtctctgccacttattgctgaggtacagcagcttccagaagggagggctccttctccagtagcagccccagggttcctaagtaaacagtgagccagagattcctgcaggcccctcctcagaggttgaaggtggccacgaagctgtagagggagatttgggtggaatgtctgaaaaaaaaaaaagtaggaaacaactcatctcatttcctatagccaaatacttgaggccccctgttcttatgtggagactcagagctggagtctccgctgtctgaagtaggctaagaaaccatcatgctcatgactccaggccactttctgtctgacaggattcaggatgccctgtgtgccctagagggttcccaggctctggaacccaaaggtggtgagggatctgaaggagtagaggctgagggtccagggacagaaacagagacagtcctgcctgtctccacactgaacttctgcccagagatacagattgacatagcagacaaggagatagaacaaggagaagttaccacctctgttacagctttgctggaggggctggaaaagacctgctcctcacggccctcatgcttagagaaggatctcaccaatgatgtgacctaccttgatcctagtctgctaccagttctgctttcctcctcttcacctggtcctctcagctcagccatcttcagctttgaacccctaagcagtccagatggcccagttgtcatccagaaccttcatatcactggcaccattacagcccaagagctcagtggcaccggattgcaaccatgcacacgctatactgtgaagtgtgagacatcccttgatggtgaaaacagcagcctgcagcagctggcctaccacactgtgaatcaccgctattgggagttcttgaatctgcaggccatcaggagaagaaaccagatcaagttcattaaaaatgtgaagggttctaaaaagctctttccagatcttccatttaacatagacagtgacagagtagaagcccgaaagagcctcctattcctgaagcaattgtgtgccattccggagatcgctaacagtgaggaggtgcaggagtttcttgctgtgaacacagatgctcacatttcctttgtcaagaaaccatttatggtctctagaatagagaagatggtggtgagtgccattgtggacaacttgaagacagcatttccttgctctgaatcccagggcccaacagaggagctgagtgaggccgagactgaaagcaagtcccaaacagaaggcaagaaggctaggaagtccaggctgaggttctcatccagtaaaatttcgccagcattaagtgtgactgaagcacaagacacgattctttattgtctccaggaaggcaatgtggagtccaagaccctatccatgtctgggatggaatcttttattgaaaaacagacaaagttactggaggtgcagccaacagaagccccagaaaaagatcctgaacaacttcccaaaggacatgtggacagttgcttgtcagatgcagctgtgccagcccaagatcccagcaacagcgattcaggaacagagacagagttagctgacacagccctgaatctgcttctcttgctactaacagaacagtggaaatggctgtgtattgaaaacatgcagaagtttcttcgtcttatctttggtaccctagttcaaaggtggctagaggtgcaggtagctaatttaacaagtccacagtgctgggtgcagtacctctggcttcttcaggagtccatctggcctggtggagttttgcctaagtttccacggcctgtaaggacccaggagcagaaactggctgctgagaaacaggctttgcagagcctaatgggagtcttcccagatctcatagtagaaattcttggggtgaacaaatgccagctgaatttagtcttggagtcactacaacaaccactcatcaacaggcatttgatttactgccttggggacattatcctggaattcttggatctcagtgcctctgttgaggagtccgctgctaccacctctgcttaagataccccaggcagccctaagaggatgggtgtctcctcatag

SEQ ID NO: 45827 - DNA, 141 bp, Homo Sapiens
aggaacagtaagaggaccttgtgcatgaataatttgtttccacactacagacagaagaatcccagacttcttagagaacccagtgactttttgcaccttaaatctgtgaaatcctcatgttttcttctgccgtatccatag

SEQ ID NO: 45828 - DNA, 681 bp, Homo Sapiens
caaggcggcacggagtggcccctggaaggacagcgcctacaggcagtgtctgtaccttcagctggaacacgtggagcaagagctgcggctggtggggccccgaggcttctcccagccccacagccatgcctaggccctcaggcagctgcagaccctgaagggcggcctgggggtacagccgggcacctgggcccctgcacatgccaggtgctgggattcgctgctttctttgcactggtcttgaagagagtggacgatgaggaggatactgtggccccgctgccaggacatctgttgggcccagacccctatgccttgttccgagcacgaagaaacagcagcagggatgtctaccagccacctctcaccgctgccattgagaagatgaaaaccacccacctcaaggaacagaaagcatttgccctcatcagagaaatcctggcatacttgggcttcctgtggatgctactgctcgtggcctacgggcagagggaccccagcgcctaccacctcaacagacacctccagcacagcttcaccaggggcttttcaggtgtgctcggcttccgagagttcttcaagtgggccaacaccaccctcgtgagtaacctgtatggtcaccccccagcagccgcaggcatatctcaacggatgccgtgcaccatattccctggatgctga

SEQ ID NO: 45829 - DNA, 990 bp, Homo Sapiens
atggaactccacatcctggagcaccggctgcaagttgccagcgtcgccaacgagagtataccgctgttcacctacggcctgatcaaacttgccttcctgtcctccaagaccaggtgcaagttcttcagtctgactgagacgccagaggattacactatcattgtcgatgaggaaggattcctagagctgccctcctcggagcacctgagtgtggcagatgccacctggctggccctgaacgtggtgtccggcggtggcagcttctccagctcccagcccatcggcgtgaccaagatcgccaagtcagtcatcgccccactggctgaccagaacatatccgtgttcatgctgtccacgtatcagacagacttcatcctggtgcgcgagcgggacctgccctttgtcacccacacattgtcatcagagttcaccatcctgcgggtcgtcaatggcgagaccgtggcagccgagaacctcggcatcaccaatggcttcgtgaagcccaagctggtccagaggccagtcatccacccactgtccagcccgagcaacaggttctgtgtcaccagcctggaccctgacacgctgcctgctgttgccacactcctcatggatgtcatgttctactccaatggagtgaaggaccccatggccactggggatgactgcggccacatccgcttcttctccttctccctcatcgagggctacatctccctggtgatggacgtgcagacgcagcagaggtttcctagtaacttgctgttcacaagcgcatccggagagctctggaagatggtccggattggaggacagcccctggggtttgatgagtgtggcatcgtggcccagatctcagagcccttggctgctgcagacatcccagcctactacatcagtactttcaagtttgatcatgcacttgtccccgaagagaacatcaatggtgtcatcagtgccctgaaggtcagccaagcagagaagcactag

SEQ ID NO: 45830 - DNA, 507 bp, Homo Sapiens
atggctcctgggcagcaggctatgggatctggaacactgcaatccagtcagccatcagagtgcagcactggattgcttacaggaaatcctggctacagcgactgggtcccccctcagtctttcagcaacctgggaccgaaccggtggcacaatgaacggatcaccttgtcaactggcaaaagtgtatggcttttcaacatcacagccgacccatatgagagggtggacctatctaacaggtatccaggaatcgtgaagaagctcctacggaggctctcacagttcaacaaaactgcagtgccggtcaggtatccccccaaagaccccagaagtaaccctaggctcaatggaggggtctggggaccatggtataaagaggaaaccaagaaaaagaagccaagcaaaaatcaggctgagaaaaagcaaaagaaaagcaaaaaaaagaagaagaaacagcagaaagcagtctcaggttcaacttgccattcaggtgttacttgtggataa

SEQ ID NO: 45831 - DNA, 1187 bp, Homo Sapiens
attgactacatgctgaaagcactatggcatggaatatatatgcccaaagaaaaacgagctagattctctgaattgtggcgtgccatcatggacattgatcctgatggaaaacctcaaacaaataaagacattttttcagagtttagttcagcaggtttgactgatattacaaaggatccagactttaatgaaatctatgatgaagacgtgaatgaagatccaacatatgatcccaacagccctgaagaaacagctgtatttatgaaatatgctgaaaatattatgctaaagttaacattcagtaccacacaaattcaacagtatgaaaatgtctttatatttgaaacaggctattggcttactaatgctataaaatataatcaggattatcttgatatctgtacctaccagagactacagcaaagattatatcttcaaaaaaagattattcaaaaacactttgagaagaaaaaagatatcagaagagggataggatacctaaagttaatatgttttctgattccatttctactgagtttaaagaagaaaatgaaagttccatatttaagtagtctgcttcagcctttttcagatgacaaggtcaagacagagcgagaattgcctccatttatttatggaagagattttaaatgccagaattttcactacaaagagaatcaatattttcatgttcatggaggaattgaatttgatatcagcaccccttcaattgagaatgccttggaagattttcaggtttaaatgatcattccttagacaatttatcatttcacaactcttttatcctattctccaaccaaaaagagcctctgttggtacaggcactcgacagctctccaaatgattattctcacaactcaataattttttcatacattattttaacatcaatgaattaagtgcagatatatgtaaggtactgtgttggatatctgagataaaattataaataagctaggtacatctatcaccctcacagaatttaaagacttctaatggactatatttgtcccagaacaggtaaccaaagagtgcagtagaaatctctggacactcagtacacattcttccattttcctcaaagaatcaggattagaacagagatcctttaaaattttggaacagtaattcttcacctggaatttagtataaaaattctacatttc

SEQ ID NO: 45832 - DNA, 351 bp, Homo Sapiens
actgaatgcttcctgcccccaagcagcgccagtgaacaccgcaggatggagcatggcagcgggcttacccagacccccagctctgaagagatcagtcctactaagtttcctggactgtaccgcactggccagccctcacgtccccatggcatcctccataagcctcctgatatagtgcctgatgatgagaaagaccatgggaagaaaaaaggaaaatttaagaaaaaggaaaagaggactgacggctatgcagcctttcaggaatatagctctggagatgaggcagaaagtccttccaaaatgaagaggctcaagggaatccatgttttcaagaagcccagcttttctaaa

SEQ ID NO: 45833 - DNA, 837 bp, Homo Sapiens
ggcacggaaagtagccactctccttaccctagtcctcggcactcatccaccaggtcccactcggcccgctccaagaagagagcgctgtccttgtccccgctgtccgatggcatcgggatagatttcaataccatcatccgcacgtcgcccacgtccttggtggcctacatcaacgggtcgagggcttcgccggccaacctgtccccgcagccggaggtctacgggcatttcctgggcgtgcgcggcagctgcattccccagccgcgcccggtgcccggcagccagaagggcgtgctggtggcccctggaggcctggcgctgccggcctacggcgaggacggggccctggagcacgagcgcatgcaacagctggagcacggcggcctgcagccaggcctggtcaaccacatggtggtgcagcatggcctgccgggccccgacagccagtcggccggcctgttcaagaccgaacgcctggaggagttcccgggcagcaccgtagacctaccttaccatgcccatgcgcaccttcaccacccggagctcgggccccacgcccagcagctggccttgccccaggccaccctggacgacgacggggagatggacggcatcgggggcaagcattgctgccgctggatcgactgcagcgccctgtacgaccagcaggaggagctcgtgcggcacatcgagaaggtccacatcgaccagcgcaaaggggaggacttcacttgcttctgggccggttgccctcgaagatacaagcccttcaacgcccgctataaactgctgatccacatgagagtccactctggggagaagcccaacaagtgtacg

SEQ ID NO: 45834 - DNA, 2700 bp, Homo Sapiens
cgaggctccgtgccccgccccccgggtgccccgcccctttgcgcggctggcgcggccagcaggccaggctcccctcggcaaacctgtctaattggggcggggagcggagcttcctcctctgagggccgtgccgcgctgccagatttgttcttccgcccctgcctccgcggctcggaggcgagcggaaggtgccccggggccgaggcccgtgacggggcgggcgggagccccggcagtccggggtcgccggcgagggccatgtcgctgttgggggacccgctacaggccctgccgccctcggccgcccccacggggccgctgctcgcccctccggccggcgcgaccctcaaccgcctgcgggagccgctgctgcggaggctcagcgagctcctggatcaggcgcccgagggccggggctggaggagactggcggagctggcggggagtcgcgggcgcctccgcctcagttgcctagacctggagcagtgttctcttaaggtactggagcctgaaggaagccccagcctgtgtctgctgaagttaatgggtgaaaaaggttgcacagtcacagaattgagtgatttcctgcaggctatggaacacactgaagttcttcagcttctcagccccccaggaataaagattactgtaaacccagagtcaaaggcagtcttggctggacagtttgtgaaactgtgttgccgggcaactggacatccttttgttcaatatcagtggttcaaaatgaataaagagattccaaatggaaatacatcagagcttatttttaatgcagtgcatgtaaaagatgcaggcttttatgtctgtcgagttaataacaatttcacctttgaattcagccagtggtcacagctggatgtttgcgacatcccagagagcttccagagaagtgttgatggcgtctctgaatccaagttgcaaatctgtgttgaaccaacttcccaaaagctgatgccaggcagcacattggttttacagtgtgttgctgttggaagccctattcctcactaccagtggttcaaaaatgaattaccattaacacatgagaccaaaaagctatacatggtgccttatgtggatttggaacaccaaggaacctactggtgtcatgtatataatgatcgagacagtcaagatagcaagaaggtagaaatcatcatagatgaattaaataatcttggtcatcctgataataaagagcaaacaactgaccagcctttggcgaaggacaaggttgcccttttgataggaaatatgaattaccgggagcaccccaagctcaaagctcctttggtggatgtgtacgaattgactaacttactgagacagctggacttcaaagtggtttcactgttggatcttactgaatatgagatgcgtaatgctgtggatgagtttttactccttttagacaagggagtatatgggttattatattatgcaggacatggttatgaaaattttgggaacagcttcatggtccccgttgatgctccaaatccatataggtctgaaaattgtctgtgtgtacaaaatatactgaaattgatgcaagaaaaagaaactggacttaatgtgttcttattggatatgtgtaggaaaagaaatgactacgatgataccattccaatcttggatgcactaaaagtcaccgccaatattgtgtttggatatgccacgtgtcaaggagcagaagcttttgaaatccagcattctggattggcaaatggaatctttatgaaatttttaaaagacagattattagaagataagaaaatcactgtgttactggatgaagttgcagaagatatgggtaagtgtcaccttaccaaaggcaaacaggctctagagattcgaagtagtttatctgagaagagagcacttactgatccaatacagggaacagaatattctgctgaatctcttgtgcggaatctacagtgggccaaggctcatgaacttccagaaagtatgtgtcttaagtttgactgtggtgttcagattcaattaggatttgcagctgagttttccaatgtcatgatcatctatacaagtatagtttacaaaccaccggagataataatgtgtgatgcctacgttactgattttccacttgatctagatattgatccaaaagatgcaaataaaggcacacctgaagaaactggcagctacttggtatcaaaggatcttcccaagcattgcctctataccagactcagttcactgcaaaaattaaaggaacatctagtcttcacagtatgtttatcatatcagtactcaggattggaagatactgtagaggacaagcaggaagtgaatgttgggaaacctctcattgctaaattagacatgcatcgaggtttgggaaggaagacttgctttcaaacttgtcttatgtctaatggtccttaccagagttctgcagccacctcaggaggagcagggcattatcactcattgcaagacccattccatggtgtttaccattcacatcctggtaatccaagtaatgttacaccagcagatagctgtcattgcagccggactccagatgcatttatttcaagtttcgctcaccatgcttcatgtcattttagtagaagtaatgtgccagtagagacaactgatgaaataccatttagtttctctgacaggctcagaatttctgaaaaatga

SEQ ID NO: 45835 - DNA, 468 bp, Homo Sapiens
atggtcagctcctgttgtggctccgtgtgctctgaccagggctgcagccaagacctctgtcaggagacctgctgccgccccagctgctgtcagaccacctgttgcaggaccacctgctaccgccccagctgttgtgtgtccagctgctgcaggccccagtgctgccagtctgtgtgctgccaacccacctgctgtcgccccacctgctgtgagacgacctgctgccaccctaggtgctgcatctccagctgctgccgccccagctgctgtatgtccagctgctgcaagccccagtgctgccagtctgtgtgctgccagcccacctgctgccgccccagctgctgccgcccctgctgctgcctgcgtccagtctgtggccgagtctcctgccacaccacttgctatcgcccaacctgtgtcatctccacctgtccccgccccttgtgctgtgcctcctcttgctgctga

SEQ ID NO: 45836 - DNA, 495 bp, Homo Sapiens
atgcaactgtcatccctagtgccaaaagggaacggaaagcgattacccttgacctcaaattggaagtgttacgactttgaagcgggtgagaagctcagtcagatcgcaaaggccttagatcttgctatctctacagtggcgaccattcgagatagtaaagaaaaaatcaaagcgagttcacaaatagctactcctctgagagcctctcggttgactcgccatcgaagtgcagtgatggagagcatggagcagctgctgagcttgtggctggaagaccagagccagccaaatgcgaccttgagcgccgccatcgttcaggagaaggctgagtttgatgacttacagcgtgaacatggcgaaggttctcaaacggagaggtttcatgcaagtcaagggtggcttgtgagattcaaggagtgccactgtttgccccacttcaagatgaacagcgcagctcccagcaacaaggacatgtacacagaaatgctgaaaagc

SEQ ID NO: 45837 - DNA, 678 bp, Homo Sapiens
atgggaaacgtggtcatcatcatcactgtctgtgttgataaatgtctgcagtcccccatttattttttcctgggccacctctgtgtcctggagatcctgatcacatccaccgctgtcccttttatgctctgggggttgctgcttccaagcacccagatcatgtctttgacagcctgtgctgcacagctatatttatacctttctttgggtaccttggagttggcattaatgggagtgatggctgtggaccgttatgtggctgtgtgtaaccctttgaggtacaacatcattatgaacagcagcaccttcatttgggtgataattgtgtcatgggttttggggtttctttctgaaatctggccagtttatgccacttttcagcttactttctgcaaatcaagtgtgttagatcatttttattgtgaccgaggacaattgctcaaggtatcctgtgaggacactcttttcagagagtttattctttttctaatggctgttttcattatcattggttctttgatccctacgattgtctcctacacctacatcatctccaccaacctcaagattccgtcagcctctggctggaggaaatccttttccacctgtgcctcccacttcacctatgttgtgattggctatggcagctgcttgtttctctacgtgaaacccaagtaa

SEQ ID NO: 45838 - DNA, 378 bp, Homo Sapiens
atggctcccgcagaaaaggatggcgagaagaaaaacggccattctgcaatcagcgaggtggtgacccgagaagacaccatcaacattcaccagcgcgtccacggagtgggcttcatgaagcgtgccccttgggcactcagagagattcggaaatttgacatgaaggagatggcaactccagatgtgtgcattgacaccaggctcaacaaagctgtctgggccaaaggaataaggaatgtcccctaccgcatccgtgcgtggttatccagaaaatgtaatgaggatgaagattcaccaaataagttctatactttggttacctatgtacctgttaccatgttcaaaaatctacagacagtcaatgtggatgagaactaa

SEQ ID NO: 45839 - DNA, 993 bp, Homo Sapiens
atggcaaccaaggagtcaagagacgccaaagcacagttggccctctcctcatcggccaatcagagcaaggaagtgcctgaaaacccaaactatgctctcaaatgtactcttgtgggacacacggaagcagtgtcatcagttaagtttagtcctaatggagaatggctagcaagttcttctgctgataggctaatcataatttggggagcatatgatggaaaatatgagaaaacactctatggtcataatttggaaatatcggatgttgcctggtcatcagattccagtcgtcttgtttctgcctcagatgataaaactctaaaattatgggatgtgagatctggaaaatgtttgaaaacactgaaggggcacagtaattatgtcttttgttgtaacttcaatccgccatccaaccttataatctcgggatcttttgatgagactgtaaaaatatgggaggtgaaaacaggaaagtgtctcaagactttgtctgctcattctgacccagtttctgctgttcattttaattgtagtgggtccttgatagtgtcaggtagctatgatggcctctgtagaatctgggatgctgcatcaggtcagtgtttaaaaacgctcgttgatgacgataaccctcctgtctcttttgtaaaattttctccaaatggtaaatacattctcactgcaactttggacaacactcttaaactatgggattatagcagaggcaggtgcctgaaaacatacactggtcataagaatgagaaatattgcatatttgccaatttttcagttactggtggaaagtggattgtgtctggttccgaggataacctggtttacatttggaaccttcagactaaagagattgtgcagaaattacaaggccatacagatgttgtgatctcagcagcttgtcatcctacagaaaacctcatcgcatcagcagcattagaaaatgacaaaacaattaaactgtggatgagtaaccactaa

SEQ ID NO: 45840 - DNA, 929 bp, Homo Sapiens
ctcagagcatggcccgggggccgctggccgcccgcggactgcggctgctgctgccgctcctgccgctcctgccgctcctgccgctgccgcaggtggcgctgggcttcgcggacggcagctgcgacccctcggaccagtgcccgccccaggcccgctggagcagcctgtggcacgtggggctcatcctgctggcggtcctcctgcttctgctgtgtggtgtcacagctggttgtgtccggttctgctgcctccggaagcaggcacaggcccagccacatctgccaccagcacggcagccctgcgacgtggcagtcatccctatggacagtgacagccctgtacacagcactgtgacctcctacagctccgtgcagtacccactgggcatgcggttgcccctgccctttggggagctggacctggactccatggctcctcctgcctacagcctgtacaccccggagcctccaccctcctacgatgaagctgtcaagatggccaagcccagagaggaaggaccagcactctcccagaaacccagccctctccttggggcctcgggcctagagaccactccagtgccccaggagtcgggccccaatactcaactaccaccttgtagccctggtgccccttgaaggaggtaggagaacggaccagagcttggagaactaatgcttggagccaagggccccagcccaccccaccgtcccacacattgctgtggccccaacctcggtgccatgttacaccggcccctggcgtcacccactaggcaggctgctgctttcagcctcagcccctggcccagccccagcaggccctcagcctggaagaggccccttgggcctaagcctcgggtgggagctcagggccacctgtgacgtctgcatcttcttggagagagaataaagtttgtatttaagtgg

SEQ ID NO: 45841 - DNA, 2414 bp, Homo Sapiens
gaacccaggcatcctgggctccagctgaaaccattgcatgtggctttccccatccctggccccgtgactcagtccctctgaagggagcagccctcttttttggcaatcaccagggaggtggggggaggaggaggggagctaggtggtgacatcacagtcgaaggttataaaagcttccagccaaacggcattgaagttgaagatacaacctgacagcacagcctgagatcttggggatccctcagcctaacacccacagacgtcagctggtggattcccgctgcatcaaggcctacccactgtctccatgctgggctctccctgccttctgtggctcctggccgtgaccttcttggttcccagagctcagcccttggcccctcaagactttgaagaagaggaggcagatgagactgagacggcgtggccgcctttgccggctgtcccctgcgactacgaccactgccgacacctgcaggtgccctgcaaggagctacagagggtcgggccggcggcctgcctgtgcccaggactctccagccccgcccagccgcccgacccgccgcgcatgggagaagtgcgcattgcggccgaagagggccgcgcagtggtccactggtgtgcccccttctccccggtcctccactactggctgctgctttgggacggcagcgaggctgcgcagaaggggcccccgctgaacgctacggtccgcagagccgaactgaaggggctgaagccagggggcatttatgtcgtttgcgtagtggccgctaacgaggccggggcaagccgcgtgccccaggctggaggagagggcctcgagggggccgacatccctgccttcgggccttgcagccgccttgcggtgccgcccaacccccgcactctggtccacgcggccgtcggggtgggcacggccctggccctgctaagctgtgccgccctggtgtggcacttctgcctgcgcgatcgctggggctgcccgcgccgagccgccgcccgagccgcaggggcgctctgaaaggggcctgggggcatctcgggcacagacagccccacctggggcgctcagcctggcccccgggaaagaggaaaacccgctgcctccagggagggctggacggcgagctgggagccagccccaggctccagggccacggcggagtcatggttctcaggactgagcgcttgtttaggtccggtacttggcgctttgtttcctggctgaggtctgggaaggaatagaaaggggcccccaatttttttttaagcggccagataataaataatgtaacctttgcggtttaagaggataaaatggaggatattattatgtgggtatttatatgacctttgtaaccatttaaaaatgtaaaaacgacctgacttagtaatgcgaacctatagtagcagctactccagaggctgaaatgggaggatctcttgagcccaggagttggagtccagtccagccagggcaacacagccagacgcccttgttttttattttgttttgttttggttttttgttttttgaggagtttccctctgtcacacaagctggagggcaatggcgccatctcagctcactgcaacgtccacctcctgggttcaagcgattctcctgcctcagcatcctaattagttgggattacaggcgcccaccaccatgcccggctaatttttgtgtttttttagtagagacggggtttcaccatgttgtcaggctggtctcaaactcctgacctcaggtactccacccgccttggtctctcaaagtgctgggattacaggcataagccactgtgcccaggcagacccccttctttaaagatgtaaaacccggccgggcgcggtggctcacgcctgtaatcccagcactttgggaggctgaggcgggcagatcacgaagtcaggagatcgagaccatcctggctaacacggtgaaaccccgtctctactaaaaatacaaaaattagccgggcatggtggtgggtacctgtagtcccagctactccggaggctgaggcaggagaatggcgtgaacccgggaggcggatcttgcagtgagcggagattgcaccactgcactccagcctgggtgacagagcaagactccctctcaaaagaaaaagaaaaaagatgtaaaaaccattcttagtttgtgggccttacaaatcaggccactggcccattgcttgtagttagttgatccatgtcatgcaccctaaaaatggctctgtcactgtgagtggcttcagtaggattttgagaataagtttatattcttgctaggtaaaacaaaacaaaaacgacagtaataccaaggaatctccccccccttttaccctccatttgtgtttattgcatatccactataacaacattaaaggacctttaaaaggaagtaa

SEQ ID NO: 45842 - DNA, 1155 bp, Homo Sapiens
atggcagcccagaatggaaacaccagtttcacacccaactttaatccaccccaagaccatgcctcctccctctcctttaacttcagttatggtgattatgacctccctatggatgaggatgaggacatgaccaagacccggaccttcttcgcagccaagatcgtcattggcattgcactggcaggcatcatgctggtctgcggcatcggtaactttgtctttatcgctgccctcacccgctataagaagttgcgcaacctcaccaatctgctcattgccaacctggccatctccgacttcctggtggccatcatctgctgccccttcgagatggactactacgtggtacggcagctctcctgggagcatggccacgtgctctgtgcctccgtcaactacctgcgcaccgtctccctctacgtctccaccaatgccttgctggccattgccattgacagatatctcgccatcgttcaccccttgaaaccacggatgaattatcaaacggcctccttcctgatcgccttggtctggatggtgtccattctcattgccatcccatcggcttactttgcaacagaaacggtcctctttattgtcaagagccaggagaagatcttctgtggccagatctggcctgtggatcagcagctctactacaagtcctacttcctcttcatctttggtgtcgagttcgtgggccctgtggtcaccatgaccctgtgctatgccaggatctcccgggagctctggttcaaggcagtccctgggttccagacggagcagattcgcaagcggctgcgctgccgcaggaagacggtcctggtgctcatgtgcattctcacggcctatgtgctgtgctgggcacccttctacggtttcaccatcgttcgtgacttcttccccactgtgttcgtgaaggaaaagcactacctcactgccttctacgtggtcgagtgcatcgccatgagcaacagcatgatcaacaccgtgtgcttcgtgacggtcaagaacaacaccatgaagtacttcaagaagatgatgctgctgcactggcgtccctcccagcgggggagcaagtccagtgctgaccttgacctcagaaccaacggggtgcccaccacagaagaggtggactgtatcaggctgaagtga

SEQ ID NO: 45843 - DNA, 168 bp, Homo Sapiens
tacaagtgtaaagaatgtggtgaagccttcagtcagagctcaactcttacaaaacatataaaggtctacactggagagaaaccctacacctgtaaagactgtaggaaagccttcagccagagttcatctcttacccagcatcagagggttcatactggaaagaaacca

SEQ ID NO: 45844 - DNA, 549 bp, Homo Sapiens
atgatgaggaggagtccatctgggttaaagagcccacgtgtgagccaaggcaggaaaccccgggatccagaaagccttctgtttttgcgatgctgcctgggatcggagccgcacaacctgtcctcattgctctctccggaggccgggcaggaacctctgccaaagcttctacctcagccgctggcaggccatgcggcctggggcattcacggagttccaacgagtctgttactggctggggagtgctggggccagggcatggccgtgcccgctgatcctcctcctgcctctccatatcggacttctcctcgaccaccacctggaccactgccacgatatcgtccacagcagcaccttctcctccccctagggcgcctccacgctctgtgccctggctgtcctctccagcagagcctccaatttgaacggggtacactgtccgctccacgtctgtggtcatggatgaagctggaaaccatcatactaagcaaactatcacaaggacagaaaaccaaacaccgcatgttctcactgataagtgagagttga

SEQ ID NO: 45845 - DNA, 629 bp, Homo Sapiens
acagcaaccagaaaacatctgctcacttccttcaaaatgggaaagatcaccttctacgaggacagggccttccagggccgcagctacgaatgcaccactgactgccccaacctacaaccctatttcagccgctgcaactccatcagggtggagagcggctgctggatgatctatgagcgccccaactaccagggccaccagtacttcctgcggcgtggggagtaccctgactaccagcaatggatgggcctcagcgactccatccgctcctgctgcctcatccccccgcactctggcgcttacagaatgaagatctacgacagagatgaattgaggggacaaatgtcagagctcacagacgactgtatctctgttcaggaccgcttccacctcactgaaattcactccctcaatgtgctggagggcagctggatcctctatgagatgcccaactacagggggaggcagtatctgctgaggccgggggagtacaggaggtttcttgattggggggctccaaatgccaaagttggctctcttagacgagtcatggatttgtactgaagtatttacgttttccacttttctcctttaaaatctaataaaatatttagcttgtgtttctggca

SEQ ID NO: 45846 - DNA, 431 bp, Homo Sapiens
gaccacgcctcctccaagtcccagcgagcccgtgtacaacctgtcccgactccagccgcctcttcagctcgccatggatcccaactgctcctgtgccgccagtgactcctgcacctgcgccggctcctgcaagtgcaaagagtgcaaatgcacctcctgcaagaaaagctgctgctcctgctgtcctgtgggctgtgccaagtgtgcccagggctgcatctgcaaaggggcgtcggacaagtgcagctgctgtgcctgatgctgggacagccctgcccccagatgtaaataacgcgacctctacaaacctggattttttatgtacaaccctgaccctgacgtttgctacattcctttttctatgaaataatgtgaatgataataaaacagctttgacttgaaaaaaaaaaaaaaaagagaatagtattaaa

SEQ ID NO: 45847 - DNA, 858 bp, Homo Sapiens
gggaccggcagacaggcgtcctacacccctgccagcggcaccatggctttcctctggctcctctcctgctgggccctcctgggtaccaccttcggctgcggggtccccgccatccaccctgtgctcagcggcctgtccaggatcgtgaatggggaggacgccgtccccggctcctggccctggcaggtgtccctgcaggacaaaaccggcttccacttctgcgggggctccctcatcagcgaggactgggtggtcaccgctgcccactgcggggtcaggacctccgacgtggtcgtggctggggagtttgaccagggctctgacgaggagaacatccaggtcctgaagatcgccaaggtcttcaagaaccccaagttcagcattctgaccgtgaacaatgacatcaccctgctgaagctggccacacctgcccgcttctcccagacagtgtccgccgtgtgcctgcccagcgccgacgacgacttccccgcggggacactgtgtgccaccacaggctggggcaagaccaagtacaacgccaacaagacccctgacaagctgcagcaggcagccctgcccctcctgtccaatgccgaatgcaagaagtcctggggcaggaggatcaccgacgtgatgatctgtgccggggccagtggcgtctcctcctgcatgggtgactctggaggccccctggtctgccagaaggacggagcctggaccctggtgggcattgtgtcctggggcagccgcacctgctctaccaccacgcccgctgtgtacgcccgtgtcgccaagctcataccctgggtgcagaagatcctggccgccaactgagcccgcagctcctgccacccctgc

SEQ ID NO: 45848 - DNA, 1190 bp, Homo Sapiens
ggagcccagcgccgccgccatgtcctccggggctagcgcgagcgccctgcagcgcttggtagagcagctcaagttggaggctggcgtggagaggatcaaggtctctcaggcagctgcagagcttcaacagtactgtatgcagaatgcctgcaaggatgccctgctggtgggtgttccagctggaagtaaccccttccgggagcctagatcctgtgctttactctgaagactcgagagaagtttgctgaggaatgccttcaagcacaaagtgatgaatgactgccttcaagtctcaagaaaacacttttccctaacttttagagatatttcagccctttcctgtggcctggtcctatagccaaaatcacagatattcatgagtttctacttgagtgagaaaactgggtgaaggaatagaattttaaatagtaataactgcttgttttttttgtgcaagtacttttatacataagataaacaaaaaccttaccaccaaacataccaaaatgcacctctttcataagtgagttactaagatttctatacctggaatatcatgtatgtttcatttactggatgtttacattttaggaaggaaaatagttttgtttatttaaacaactgaatacttataaactgttgttcctggaagttatttattccataaaaaatttgttcttttgtcatgaatttataattcctaaatgaagaccagaaagtacaaattgctgggaggaagaataggctttattaatcaactgatgtcttgatttttctaaatgggaagattgctttatttttaacactaattatgggagcagattcttagcaaacttctttggaaaagttaatgttatgatgtgcattaggctgccccatcgtgtatataaatgaagcagatttgatttttgtattcttacgtttctctgctttgtagttgtggctgtacttaaagaaatacagaatttcatatatttaaaaatgtttaaaatgtgacccacagaacattgtaaatgattaaaaactaacatgaaaatattacaacctaaaagaattcttaacttcacaagtgttttacttcgacgatgtgcctttgatttaatttgggacacttttttagaaggatacattattcgtgtttgcaacggtctttgaagagcttggaaataaaatttctgcttaattaatca

SEQ ID NO: 45849 - DNA, 513 bp, Homo Sapiens
atgaaaacaatggcaacaagaaaaaggtgtaaactttccagaacaggcccagaatttgaaaatgtgataaagaggttattgtgcgcccgaacttttcacacaagaattggaggagatttaacacatggaataataaacagaggaaggcgggctaatgcagagcagatgggcctgcagggcagtgctcagcatttcaacatctttcccctggacctttggacccaaggtaagaaaactgaagttcagaaaagggaggggactgactcaatcccagctgctggcagatctgggactgcaaaccagccttccattgctccacacaggtgtctcttctcacgtggaatcacagcattggatggactgaaaagaggaagaggctgcaatggagcagcacacctggtgcgtggggatgcctggaaaacaaaattaggagagccctgggtcagcattgctctggcactggctgggccgggggccatcctgattctagaattatcttggttcctgggatag

SEQ ID NO: 45850 - DNA, 2954 bp, Homo Sapiens
tgggccgcagccctccccgccccgccgaccgcggtcacacactctcggagcctccccgtgagcgggagcgcggcgcacggcgatgcgccgaggcgggcgctgaggcggcgccgcgcgagcagcagcagaggcggcggcggcccccagcccagcccggcgccgccgccgagcccgggccccaaggtgcggcggcgccccaagttcccgccatgagcagccggctcggggggctccgcggccccggggactcccgccccgccgggcgcgaccgcagcgccccgcggccccgacgcgcttaacgttgtcgcttgccggtcccgccaccgccgcctccgccgccgctcgcgtcctcgccgccaccgcctcggccgctgcagctccgccggcagcatgtctcgaaggaagatttcgtccgagtccttcagctccctgggctccgactacctggagaccagcccggaggaggagggggagtgccccctgtctaggctctgctggaatggcagccggagcccgcccgggccgctggagcccagcccggccgcagctgccgctgccgccgccccggccccgaccccggctgcttctgccgccgccgccgctgccactgccggggccaggagggtgcagcgccggaggcgggtcaacctggactcgctgggcgagagcatcagccgcctgacggcgccctcgcctcagacgatacagcagactctcaagaggacactgcagtattatgaacatcaagttattggttacagggatgcagaaaagaatttccacaatatctctaacagatgctcctatgcagaccactccaacaaagaagaaattgaagatgtctcaggaattcttcagtgtactgctaatatactcggtttgaagtttgaggaaattcaaaaaagatttggtgaagagttctttaatatatgctttcatgagaatgagagagtccttcgagctgtaggtggcactttgcaggacttttttaacggctttgatgctttgttggaacacattagaacttcttttggaaaacaggccactctggagtcaccatctttcctatgcaaagagctccctgaaggtactctcatgctccactacttccaccctcaccatattgtggggtttgcaatgctggggatgattaaggctgcaggaaagaagatctatcggctggatgtggaagtggaacaggttgcaaatgagaagctatgctctgatgtttcaaacccaggcaattgtagctgtcttactttccttatcaaagaatgtgaaaatactaatatcatgaagaaccttccacagggaacctcccaagttcctgcggacctcagaattagcatcaacaccttctgtagagccttccctttccacttgatgtttgatcccagcatgtcagtccttcagttgggggaaggtctaaggaagcagcttcgatgtgacactcacaaagtgctcaagtttgaggactgcttcgagattgtatctccaaaggttaatgccacctttgaaagggtcctgctgcgactgtctaccccgtttgtgattagaaccaagcctgaggcttctggctctgaaaataaagacaaggtgatggaagtcaaaggacaaatgatccatgttccagaatcaaattccattttatttttgggctctccatgtgtggacaagttggatgaactcatgggccgagggctacatctctcagacatccctatccatgatgccacccgagatgtcattttggttggtgagcaggcaaaggcccaagatgggttgaagaaaaggatggataaattaaaggcaactttagaaagaactcaccaggccctggaagaagagaaaaagaagacagtggatcttctatattctattttccctggtgatgtagcccagcaattatggcaagggcagcaagtacaggccagaaagtttgatgatgtcaccatgctcttttcagacattgttggcttcacagccatatgtgcccagtgtactcccatgcaagtaatcagcatgctgaatgaactgtacaccagatttgaccaccagtgtggatttttggatatttataaggtggaaacaataggtgatgcctactgtgttgcagcagggctccacagaaaaagcctctgccatgctaaacccattgctctgatggccttgaagatgatggaactttcagaagaggtgctgacacctgatggaagaccgattcagatgaggataggaattcactcaggctccgtgctggctggagttgttggggtgcgaatgccacgttattgcctgtttggaaataatgtcacactggcaagcaaattcgagtcgggaagtcaccctcggcgcatcaatgtcagcccaaccacttaccaattattaaaacgagaagaaagtttcacattcattccgcggtctcgtgaagagcttccagacaactttccaaaggaaattcctgggatctgctatttcctggaggtaaggactggtccaaagccaccaaagccttctctttcttcgtcgagaataaaaaaggtttcctacaacatcggcaccatgttcctccgggagacaagcctctgagacctgctacagatcaaagactcctccaaaaagcacaagcccagaacatgggtcaccaatggggggtggaaagagattgtgtctctttcattgctttgttgagaacaagcagcaaaatttctgtattatgtcaggcaataatcctactaaaaggtggaggtgaccgctgtcaataaaaagccggaggatgagggaaataagatgtgtccattcatatgagtggttttggtcatatatatacacatatattttaattacaagtgtgggtcccctttcagaactaaccaataaatagattccatgttttcttgtttatcacacatacaagtatctttccctatatatttgtaccacttttgagagcc

SEQ ID NO: 45851 - DNA, 528 bp, Homo Sapiens
atgggagtgtccagtgtgagcctctgccctgcccgccagtgccctgcagacacccaggcaagatccctgggcagtgctgccctgtctgcgatggtgagctgtgagtaccaggacaccagtatcagagccaggagaccttcagactccaagagcggggcctctgtgtccgctgctcctgccaggctggcgaggtctcctgtgaggagcaggagtgcccagtcaccccctgtgccctgcctgcctctggccgccagctctgcccagcctgtgagctggatggagaggagtttgctgagggagtccagtgggagcctgatggtcggccctgcaccgcctgcgtctgtcaagatggggtacccaagtgcggggctgtgctctgccccccagccccctgccagcaccccacccagccccctggtgcctgctgccccagctgtgacagctgcacctaccacagccaagtgtatgccaatgggcagaacttcacggatgcagacagcccttgccatgcctgccactgtcaggtaa

SEQ ID NO: 45852 - DNA, 648 bp, Homo Sapiens
atggcctgcaccgtggtgctcatcaccggctgttcctcaggtattggcctgcacttggcaatacatctggctttggacccatcccagagcttcaaagtgtatgccacgttgagggacctgaaaacacagggccggctgtgggaggcggcccgggccctggcatgccctcagggatccctggagaggttgcagctggatgtaaggaactcaagctccctggccgctgcccgggaacgcgtgaccgagggccgtgtggatgtgctggtgtgtgacacaggcctgggcctgctggggccgctgggggaggacgctgtggcctctgtactggatgtgaatgtagtaggtactgtgcgggtgctgcaggacttcctgccagacatgaagcggccgggttcgggacgcgtgttggtgactgggagcatgggaggattgatggggctgcctttcaatgacgtttattgcgccagcaagttcgcgctcgaaggcttatgcgagagtctggcggttctgctgctgccctttggggtccacagcgtgagcctgatcgagtgcggccctgtggacaccgccttcatgcagaaggtgttgggcggtcccgaccaggtgatggaccgcacgaacacccggaccttccgcctcttgcactaa

SEQ ID NO: 45853 - DNA, 1917 bp, Homo Sapiens
gtgtggaaccagaacggcaaaagcccctccatcaccttcgagtacacgctgctgcagccgccacacgagagccgcccccagcccatctactatggcttctccgagagcgctgagagccagggcctggacggggccgggctgatgggcttcatcccgcacaacggctccctctacggccaggcctcctcagagcggctgggcctggacaaccggctgttcggccacccgggcctggacatggagctgggccccagccagggccaggagaccaacgaggtgtgcgagcaggccggcggcggggcctgcgaggggccccccaggggcaagggcttccgagaccgcaacgtcacggggactcctctcaccggggacaaggatgacgaagaggttgacacccacttcgcctcccaggagttcttctcggctaacgccatctctgaccagctgctgggcgcaggctctgacttgaaggacttcaccctcaatgagactgtgaacagcatctttgcacagggcgccccaaggagctccctggccgagagcttcttcgtggattatgaggagaacgagggggctggcccttacctgctcaacgggtcctacctggagctgagcagcgacagggttgccaacagctcctccgaggccccattccccaacgttagcaccagcctgctcacctcggccgggaacaggactcacaaggccaggaccaggcccaaggcgcgcaagcaaggcgtgagtcccgcggacatgtaccggtggaagctctcgtcccacgagccctgcagtgccacctgcaccacaggggtcatgtctgcgtacgccatgtgtgtccgctatgatggcgtcgaggtggatgacagctactgtgacgccctgacccgtcccgagcctgtccacgagttctgcgctgggagggagtgccagcccaggtgggagacgagcagctggagcgagtgttcgcgcacctgcggagagggctaccagttccgcgtcgtgcgctgctggaagatgctctcgcccggcttcgacagctccgtgtacagcgacctgtgcgaggcagccgaggccgtgcggcccgaggaacgcaagacctgccggaaccccgcctgcgggccccagtgggagatgtcggagtggtccgagtgcactgccaagtgtggggagcgcagtgtggtgaccagggacatccgctgctcggaggatgagaagctgtgtgaccccaacaccaggcctgtaggggagaagaactgcacgggcccgccctgtgaccggcagtggaccgtctccgactggggaccgtgcagtggaagctgcgggcaaggccgcaccatcaggcacgtgtactgcaagaccagcgacggacgggtagtacctgagtcccagtgccagatggagaccaagcctctggccatccacccctgtggggacaaaaactgtcccgcccactggctggcccaggactgggagcggtgcaacaccacctgcgggcgcggggtcaagaagcggctggtgctctgcatggagctggccaacgggaagccgcagacgcgcagtggccccgagtgcgggctcgccaagaagcctcccgaggagagcacgtgtttcgagaggccctgcttcaagtggtacaccagcccctggtcagagtgcaccaagacctgcggggtgggcgtgaggatgcgagacgtcaagtgctaccaggggaccgacatcgtccgtggttgcgatccgttggtgaagcccgttggcagacaggcctgtgatctgcagccctgccccacggagcccccagatgacagctgccaggaccagccaggcaccaactgtgccctggccatcaaagtgaacctctgcgggcactggtactacagcaaggcgtgctgccgctcctgcaggcccccccactcctag

SEQ ID NO: 45854 - DNA, 399 bp, Homo Sapiens
atggcaggtgtgtgcctcagtgtccttgctgccagggtgtcagccctgcttcaccactggccgtttgtctctgtcccctccactggcctcttgaagcacagagaccctccgggtactttccttcctctgggcttccactcatgctattccctgctccctttttctacctggagacccccattcctcctcctcctctgctgccctcacctccacctgggccctcccagctcccgggagatggctgaaccccactccccacccgctagtcatcctcttcagcggtcctcccaggtcctcagcatggcagcctccacagcccctgggtgtcacccccggtttcgtgtctcggactccagacctgcccctcccaggctggcccagatggatcctctacagtga

SEQ ID NO: 45855 - DNA, 447 bp, Homo Sapiens
atgccatccagactgaggaagacccggaaacttaggggccacgtgagccaccgccacggccgcataggcaagcaccggaagcaccccggcggccgcggtaatgctggtggtctgcatcaccaccggatcaacttcgacaaataccacccaggctactttgggaaagttggtatgaagcattaccacttaaagaggaaccagagcttctgcccaactgtcaaccttgacaaattgtggactttggtcagtgaacagacacgggtgaatgctgctaaaaacaagactggggctgctcccatcattgatgtggtgcgatctggctactacaaagttctgggaaagggaaagctccccaagcaggctgtcaccgtgcaggccaaattcttcagcagaagagctgaggagaagattaagagtgttgggggggcctgtgtcctggtggcttga

SEQ ID NO: 45856 - DNA, 696 bp, Homo Sapiens
ttgggacagatgggctgcctggagctgatcaccaaagggctggcagctgccagctaccactccctctacctgtcccaccagctggctgacttcaaggtccaggacctcgcccgctactacctccagatctgggcagccatagagagctttgggaccaatattgttaacatctactacccggacgatacggcagtgagcagggactcagagctccaggcctgggtcagggagatcttccaggagggttttccaagccaaatgctctcagagggggtcccctccaccctgggccactgtgctgggctcatccggtgtttcacgacgatcatcgtcacctgctcagcccaacatgctgccatcaacagcggccaggtgggcgggtgttttatgtttcaagttggatgggtctggagtgctccaggacccctacgtgggctgggcttgggtggactaagtcccctgggagggagacttaagctggaacagaatcgttgtgggctgaaaatgcagccggccaaggtcccagcctttcggtctcccctcctggacacctacccagaggagcacttcaccgagaaggccccgcggcagagccgcctggcccagatctcggcggacgtcctggagtggagccggggcctggcgctgccctactcctacctgaaccccgcggccgcagagaacggaatcgcggtg

SEQ ID NO: 45857 - DNA, 396 bp, Homo Sapiens
cagaggttctggttctgtggtgatctggactgtcccgactgggtgctggcagagatcagcacgctggccaagatgtcctctgtgaagttgcggctgctctgcagccaggtactaaaggagctgctgggacaggggattgattataagaagatcctgaaactcacggctgatgccaagtttgagtcaggcgatgtgaaggccacagtggcagtgctgagtttcatgctctccggaactgccaagcacagtgtcgatggcgaatccttggccagtgaactgcagcagctggggctgcccaaagagcacgcggccagcctgtgccgctgttatgaggagaagcaaagccccttgcagaagcacttgcgggtctgcagcctacgcagtaagtatgaggcc

SEQ ID NO: 45858 - DNA, 516 bp, Homo Sapiens
atggctctgcttctgctgagcctggggctgagcctcatcgcagcccaggagttcgatccccacaccgttatgcagaggaactacaacgtggccagggtttcaggggtctggtattctattttcatggcctcagatgacctgaatcggattaaagaaaatggagacctgagggtcttcgtccggaatattgaacacttgaagaacggcagcctaatatttgatttcgaatacatggtgcagggggagtgtgtggctgtggtcgtggtctgcgagaagacagagaagaatggggaatactccatcaactatgagggccagaacacagtggccgtctcggagactgactacaggctgttcatcaccttccacctccagaacttcaggaacgggaccgagacccacacgctggcgctctatggtacctccgctctggaaccctccttcctgagcagatttgaagaaacctgcgaaaagtacggacttggctcacaaaatatcatcgacttgaccaacaaa

SEQ ID NO: 45859 - DNA, 435 bp, Homo Sapiens
atgtccccttcgtctacaccgtcctcctgtctacaccagcaccgctgccccatctataccaccacccgtctatacaatccacccatctgtctacaccatcgcctctcctctgtctacaccatccttctgtcaacaccggcaccactgccgtatctatatccacccatctacaccatcacctcccctgtgtctacaccatcctcccatccacaccagcaccaccaccccacctacaccatcccaccatctacgccattgccaaatctacacagacgacctcactcccatccacgccttcacacgcaccgtccacaccaccatctcccccgtgtccgcacggcggccccgctccatcggcccgagaacagcgacggtggctttgtcccacgcgtcgggtctggcccggggtgcccgaggagctcagggaccgtgtag

SEQ ID NO: 45860 - DNA, 2557 bp, Homo Sapiens
tacagaactctaatacaccagtacaatggaaagattcctaaattcaaaagccagaaggctgggttcctgttcccaccctgccttttaccttctgtgtgttcctgatgaagacacttcatgctccactatttacttacctctgaaacgaagggctgacccagatcagttgttctctgacctgcttggagggactcagaggctgtggagcaacagatttgggaatgaggaatcgttccctggaagagtcagagcgctcgtagacacattctgctggattgcacgagctcctcccctgggaaatccactaagactagaggaaagaattgcttggaggattcagaggctgaagagtggacagacggctttaattgagaaaaagaagcagaaaattgaggaagatgtgaggcatcaatgccagcagacgacatgtgacaggtgctagccacatggatcacactaaatttctgtcatttatatagataaaaaagaatttccaaagagctcctccataattcagcattaaccagctttaaatcatcacctttctttaccttttcaaagcacttttatctagctagctttcactttcagagtggccaattcaggtgaggattctcaatcctgttctgcagctgaggaactcatgctcaaaagggctaagagtttattctcttacatccaaacaccttgcttttccaaatcttgtgctcactttacctacacattttgatttttccaggctgatgacaagttagacatgcagactcctcaggctcattcataatctgtatagacattacaggtcatgcaaatttaagaaaaggctaaaaggtgcccgtttgcacccaacatgttggataatgccccggtaaagtggaaaatcagtttccacagcctcgctctgtaggtttccttggaattgtaaaagcataggactctgcctcatatttatttctatacggcaatgaggatataaaggagcagaccgaaaagagaaaggaattttaaaagccatggaaagctgccctaaatgtggttggatatagagaggagagtgctgaaggcaaacagctgtgccctctttgcctttttgctgaggaaggggatttaagccaaaagaacacacgtaaacgtggatttcttaaagttctcactgtaattatgtagccttgggagatgaggaattgtaaagtagatgctggcttaaacaaatgataaatccttgaggtgatgggcaccccattttccctgatgtgattattacacatagcattcctgtatcaaaatatcccatgtaacccataaatatatatacctaccagtatatttctgtggctaatctgaaagccacctgcacccttgtgaagacacccacagagacttctgcctcccctcctaccctctggcctcaagagctccctgggctctcctgttgcaggagggagagggagagcttctttaggttcctggtaaggatctctgaagacaattccttaggcttggataattcccagacatttgctaaaaagcagcatcctccaaagctttaatttggatcacaggaaaatgatgctcccgcctcagattcaaacacagttttatctcacactgcaagctccctggcatgggcaaagtcctcgatgcctttcctggtggtttccaacatcaaggacatacttgttcctcctcctagctctctccctcagccaagtccttccttacaatgaattgtcctgcagaactccctcttaagcttggcttctgggacagaaaacctactttctgaaagggtatggggactgtcagagcatgaactggactcaagctcccaattacagagcagacacaaggctctgcctgcaccaggccatccctggatttctgcagctccaggactctcttccagcatctagatgcagctactctcattccagctttgtgtcctgtttgatgcaaaatctttattccttcctgtttcaatccctgttgcatattctgtgtgacaaagcaagaagctggaaatcgagttctgagctttatacccagctctgccacaaatgtgccatgaccttgaataagtcacatgacttatctggacctggattctctcatctgtaaaagaggaagctgagctatactacttttaaaatgtctccagctttaattttattagaatatcagctgcttcctcctctggtttctcatggcaggttgtgcattcttctctggagacaccaaatttcattggagtatctctccttacaaatgtatttccccactagattggcccctcaagaacaaggattgtattttagttacctctgttatctctgtacctggggaggagtgagaaaaggagagcaggaaaggcaatggtatagtaccaacatttgttgagcttctattatgaggaattgtctatgctacacattgtacataaagtatgtatgattcacagtataaacattataatctggaatcaacctaaatgttcattagcagatgaatggataaagaaaatgtggtatatagacgcaacacaatactatacagccat

SEQ ID NO: 45861 - DNA, 1614 bp, Homo Sapiens
acgccccatcccgctcgctccacgctgcggcagccccggcggccccaggtgcgcggcccccgccatcccgccccgccgccctgcgccatggaggagggccctctgccgggcgggctgcccagccccgaggatgcgatggtgacggagctcttaagccccgagggtccgttcgcttcggagaacatcggcctgaaggcccccgtgaagtacgaggaggacgagttccacgtcttcaaagaagcgtacctgggcccggcggaccccaaggaacccgtcctgcacgcgttcaaccccgcgctgggcgccgactgcaagggccaggtcaaggcgaagctcgcggggggcgacagcgacggcggggagctcctcggggagtaccccgggatcccagagctcagcgcgctggaggacgtcgcgctcctgcaggccccgcagccgcccgcctgcaacgtgcacttcctgtcctcgctgctacccgcgcaccgcagcccggcggtgttgcccctgggcgcctgggtcctggaaggagcctcccacccgggcgtccgcatgatcccagttgaaatcaaggaagcaggtggtactactacaagtaataatccggaagaagcaactttgcagaatcttcttgctcaggaatcctgttgcaagttcccatcgtcccaggaactagaggatgcctcctgctgttctcttaagaaagattccaacccaatggtgatatgccaattgaaagggggcacacaaatgctatgtatagacaattctagaacaagagaactaaaagcactccatttggttcctcagtatcaagatcaaaataattatctacagtcagatgtccctaaaccaatgactgctttagtagggagatttttgccagcatcaacaaaattaaatctcattacacaacaacttgagggagccttaccatcggtagtcaacgggtctgctttcccctcgggatcaactcttccaggaccaccaaaaataactttggctgggtactgtgactgctttgccagtggggacttttgcaacaactgcaattgtaataattgttgcaacaacttgcatcatgatattgaacggtttaaagccattaaggcatgtcttggtagaaatccagaagctttccagccaaaaattgggaagggccaattgggcaatgtcaagccccagcacaacaaagggtgcaactgcaggaggtcaggctgcctgaagaattactgcgagtgctatgaggcccaaattatgtgttcttctatttgcaaatgcattggttgcaaaaattatgaagaaagcccagaacgaaagacactaatgagcatgccaaactacatgcagactggaggtttggaaggcagccattacctgccaccaacgaaattttcaggacttccaagattcagtcacgataggcggccttcctcatgcatctcctgggaggtggtggaggccacatgcgcctgcctgcttgctcagggagaagaggccgagaaagaacactgctccaagtgcctggcagagcagatgatcctggaggaatttggaaggtgcttatcacagattctccacactgagtttaaatctaagggattgaaaatggagtag

SEQ ID NO: 45862 - DNA, 1161 bp, Homo Sapiens
gcgcggccgctgtcccggatgctgcgccggctcctaaggtccaaccggagctgcagctcacgggttccggtgatgccgccccgcccgggcgagtccccgcaagctgcctcacaggagctgtccaggtggaggcagttctcgcgggagcacgaggcccccttctccgccttcctcacagacagcttcggcgggcagcacagctacctgcggatctccctcccggagaagtgcaacctcagatgtcagtactgcatgccggaggaaggggtcccgctgacccccaaggccaacctgctgaccacagaagagatgttgaccacaaaagagatcctgaccctcgcctggctttttgtgaaggaaggcgtcgaaaagatctggctcatgggcggagagccgctcatccagccggacgaggtggacattgtggcccagctccagcgactggaagggctgaggaccattggtgtcaccaccaatggcatcaacctggcccggctgctgccccagcttcagagggctggtctcagcgccatcaacatcagcctggacacactggtgcctgccaagtttgagttcattgtccgcaggaaaggcttccacaaggtcatggagggcatccacaaggccaatgagccaggctacaaccctgtgaaggtgaactgtgtggtgacgcgaggccttaacgaggatgaactcctggactttgcggccttgatcaagggcctccccctggacgtggccttcatagagtacatgccctttgatggcaacaagtggaacttcaagaagatggtctataaggagatgctagaaactgtatggcagctgtggccagagttggagaagctgtcagagcaggaatccaggacagccaaggcctttaaaatccctggcttccaaggccagatcagcttcatcatgtccatgtctgagcatttctgtgggacctgcaaccacctgcaaatcacagctgacgggaacctcaaggtctgcctctttggaaactctgaggtatctctacgggatcactgttctggggcctccaagcaggagctgctgagaatcattggcgctgccgtgggcaggaagaagcagcagcatgcaggcatgttcagtatttcccagatgaagaactggcccatgatcctcatcggtgggtga

SEQ ID NO: 45863 - DNA, 1650 bp, Homo Sapiens
gaggcgctgcgggccgccgtggccgagctgcgcgccggcgccgtggtggccgtccccaccgatacgctgtacggcctggcctgcgcggcgagctgctcggcggctctgcgcgctgtgtaccgcctcaagggtcgcagcgaggccaagcctctggccgtatgcctcggccgcgtggccgacgtctacagatactgccgtgtgagagtacctgaggggctcctgaaagacctactgccaggaccagtgaccctggtgatggaacgctcggaggagctcaacaaggacctaaacccttttacgcctcttgtaggcattcggattcctgatcatgcttttatgcaagacttggctcagatgtttgagggtccgcttgctctcactagtgccaacctcagctcccaggccagttctctgaatgtcgaggagttccaggatctctggcctcagttgtccttggttattgatgggggacaaattggggatggccagagccccgagtgtcgccttggctcaactgtggttgatttgtctgtgcccggaaagtttggcatcattcgtccaggctgtgccctggaaagtactacagccatcctccaacagaagtacggactgctcccctcacatgcgtcctacctgtgaaactctgggaagcaggaaggcccaagacctggtgctggatactatgtgtctgtccactgacgactgtcaaggcctcatttgcagaggccaccggagctagggcactagcctgacttttaaggcagtgtgtctttctgagcactgtagaccaagcccttggagctgctggtttagccttgcacctggggaaaggatgtatttatttgtattttcatatatcagccaaaagctgaatggaaaagttaagaacattcctaggtggccttattctaataagtttcttctgtctgttttgtttttcaattgaaaagtaattaaataacagatttagaatctagtgagagcctcctctctggtgggtggtggcatttaaggttcaaaccagccagaagtgctggtgctgtttaaaaagtctcaggtggctgcgtgtggtggctcatgcctgtaatcccaacattctgggaggcccaggcgggagaactgcttgagcccaggagttcagaatcagcctgggcaacatagcaatactccgtctcataaaaattaataaataaaaagtctcaggtgaccaaaggctcctgaagctagaaccaggtttggataaagattgaagagccacaggccactcttccctctgagccattgggcctagtggtgtcatgtattgtaattgctcgcagggagagcagtctttttggtgtaatagtgggatgtctgcttagttggcaggggttcagtccaaatggaagaatattgggaaataaacctccactatcctttatagccagggacttttttcttatttattcataaaataaattatagttaattatacccataacacctttatttaaatccagtgttctccgcagccttttgtctatttatatgtgtaccaagtgttaaacataattattattgggcatttgaactttgtttttctttaaagaaatgctgctattaaacatatttgtaaatgtcaaatgcaaaaaaaaaaaaaaaagatgaaaa

SEQ ID NO: 45864 - DNA, 2161 bp, Homo Sapiens
gaaagctggtgtggagggagaagcgagtgtggtccggagaaagaaggcgtggagaagagggagggagcgagagcgagagaataaatatataaataaatacgagaacgaaatccactccgcagtctccgggctcggaaactttggccccgagcgccagagcgccagagcgcgagagcgcggcgctcgccactctgaggctggcggcctcgattccggccgcgttcccccggcccccctccgccgcggggcctggtctccgggttctgccaggcgcatcagcccgcacaacttctggccgaggccagccggcagaggcggacttggggttggagtgtttgtttgtttgaacttcctcgtcgtcgccaccttccctccccccaacctccaccccacctcacccccctccccagcttctggacgcgtttgactgcagccaggggtggggggtgggggtagggagtgtgtgtggaggggagggagaagaggttaaaaaaaagaagacgaagaagacggaaagaaagagatcgcagcaggggtgaagggagcggacgggaagcgatttttgccgactttggattcgtccccggcgtgcgcaagaatggcggcccttcccggcacggtaccgagaatgatgcggccggctccggggcagaactacccccgcacgggattccctttggaagtgtccaccccgcttggccaaggccgggtcaatcagctgggaggggtcttcatcaatgggcgacccctgcctaaccacatccgccacaagatagtggagatggcccaccatggcatccggccctgtgtcatctcccgacagctgcgtgtctcccacggctgcgtctccaagattctttgccgctaccaggagaccgggtccatccggcctggggccatcggcggcagcaagcccagacaggtggcgactccggatgtagagaaaaagattgaggagtacaagagggaaaacccaggcatgttcagctgggagatccgggacaggctgctgaaggatgggcactgtgaccgaagcactgtgccctcaggtttagtgagttcgattagccgcgtgctcagaatcaagttcgggaagaaagaggaggaggatgaagcggacaagaaggaggacgacggcgaaaagaaggccaaacacagcatcgacggcatcctgggcgacaaagggaaccggctggacgagggctcggatgtggagtcggaacctgacctcccactgaagcgcaagcagcgacgcagtcggaccacattcacggccgagcagctggaggagctggagaaggcctttgagaggacccactacccagacatatacacccgcgaggagctggcgcagaggaccaagctgacagaggcgcgtgtgcaggtctggttcagtaaccgccgcgcccgttggcgtaagcaggcaggagccaaccagctggcggcgttcaaccaccttctgccaggaggcttcccacccaccggcatgcccacgctgcccccctaccagctgccggactccacctaccccaccaccaccatctcccaagatgggggcagcactgtgcaccggcctcagcccctgccaccgtccaccatgcaccagggcgggctggctgcagcggctgcagccgccgacaccagctctgcctacggagcccgccacagcttctccagctactctgacagcttcatgaatccggcggcgccctccaaccacatgaacccggtcagcaacggcctgtctcctcaggtgatgagcatcttgggcaaccccagtgcggtgcccccgcagccacaggctgacttctccatctccccgctgcatggcggcctggactcggccacctccatctcagccagctgcagccagcgggccgactccatcaagccaggagacagcctgcccacctcccaggcctactgcccacccacctacagcaccaccggctacagcgtggaccccgtggccggctatcagtacggccagtacggccagagtgagtgcctggtgccctgggcgtcccccgtccccattccttctcccacccccagggcctcctgcttgtttatggagagctacaaggtggtgtcagggtggggaatgtccatttcacagatggaaaaattgaagtccagccagatggaacagttcacctaa

SEQ ID NO: 45865 - DNA, 1993 bp, Homo Sapiens
gccgccccaccttgccagacttagctgaccagccagcaaggacgcccgctgcctcccacctgccctcctgccctccttcaccagccaagcccagcctgagccagcacctgcctttatgaccatgttcaagggactgagcaaaggctcccaggggaaggggtcccccaaggactccccagccaaggggtcccccaaaggctcccccagcaagcacagctgaatgccacccaggagctgaccctgctcatctcccacatgcaagccagcgccgaccaggtggagcgggacatcctggagacgcagaagaggctgcagcaggaccggctgaacagtgagcagagccaggccctgcagcaccagcaggagacgggcagcagcctgaaggaggccgaggtgctgctcaaggacctcttcctggacgtggacaaggcccggcggctcaagcacccgcaggctgaggagactgagaaggacatcgagcagctgcacgagcgggtgacccaggagtgtgcggagtactgtgccctgtacgagaagatggtgctgccgccccgacgtgggatccaaggtcgactgggcacacgtgctggagcagaaacagaagctggtctgcgcaggccagtatgggccgggcatggcggagctggaggaacagatcgcggagctcaacatcgtgcagaaggagatcaacgaccaaggagagcagctgcggagcctggtggggccggatgccgccaccatccggagccaataccgagacctactgagggcggcgtcgtggcgcgggcagagcctgggcagcctgtacacgcactgcagggctgcacgtggcagctgagcgccctggcggagcagcagcgccgcatcctgcagcaggactggagcgacctcatggccgaccctgcgggcgtgcggcgggaatacgagcacttcaagcagcacgagctgctgagccaggagcagagcgtaaaccagctggaggaggacggcaagcgcatggtggagctgcggcaccccgcggtggggcccatccaggcccaccaggaggccctgaagatggagtggcagaacttcctgaacctgtgcatctgccaggagacccagctccagcacgtggaggactacagccggattctgtgtccatcttcctctcctcattgactctgcatgaaggggatttctggtggagtaagggtagcaggctcttgccgcacgtgcagagagagaggaacttccagtgcccgctatggagccacagcccacagcatggggaagtccccatccagaggcagtgctgcagctagaggtagctccagagtcctccgggccctgcaccgatacagccaaagaccagcaaagcgacaagctgccagacctcatgccacctgctgtagccactgggctcagccctggagctgagagcatcgctggagatagacgtggcagagaagaggttgcgagcatggccccagccagcagctcccacgctgcccctagtcctgggcatggagcgagccttggtgtcagagaccagggtgtgcagtctgagctcctctaccttactaaagagaggcctcttttatttaccagagccacagccctgctgcctcaggaccttttcattctgccggtgctggggctgtctatctgcaagctggaggtgttgagagcaggaaaaggaggctgtgaggaagggttcgggcagctcctcctgctctcagaggtggcctcctcctccaggcatggaggtctgtccactactgggcttctgggctatttgcccctgatttgctccctggtacgggctcttcttaacaggcaggcaaggggtgcggggaccaggtgagggcttcaaagggtacagtaccaaatcttccaaactcagcacttgtgccctggggtctccaaactgtcttctgccctagaatttattcatactgttaaattaccagtttatgcaaatgatatgtaaataaagctcaattttttgaaa

SEQ ID NO: 45866 - DNA, 2038 bp, Homo Sapiens
aaacaaacttgaagatctcacagacctaatagacacggcctttcctctctgcctctggctttatgtctctttcatcctcctctgcctttcccctgcccttgatcccttctgcaggtcttggctggtttcaggaaacgggtcccatcccatggactcccactctggggagcctgcgctcctgccctgtgggacctgtgacatggttttccgctcctcagctctgttagccacccatactcagcgcttctgcattggccacccgacccaagagatgacatttggagcacaggcatcagttgccactgaaccccagcgggccgcggtgcagtggctgcggctatccctacaggaaatgcggccctggataacagaggtccccagggtgttcgcggggccctggacacgttccgaggcgcggcctcagagtcccatgtccgaggcggtgggaagccccagcgagcggctgcgggcgctgttcaggactcgcgcgaggcgcgtggcggagatggaagcgcagagccgggccctgcagctacgcggcgaggaactgagccgacgcctccaagttgtggcctgtacgcggggcgggatgtcccgcctcttcggcctggagcaggagattcgagaactacaagctgaggccgggaggacgcggggagctctagaggtgttgggggcccgcattcaggagctgcaggcggagccagggaacccgctgagctcccggcgagaggcagaactttattctccagtgcaaaaggccaacccgggaactctggctgccgaaatccgggcgctgcgggaggcctacattcgagacgggggccgggaccccggcgtgctgggccagatatggcagttgcaggtggaggcgtctgcactggagctgcagcggtcgcagacccgcagaggaagggcaggtgccacctcaggggagcttccagtagtggaggctgaaaaccggcgcttggaggcagaaatcttggccttgcaaatgcagaggggtcgggcacccttggggccccaggatctgcgactcctgggggatgccagcctacaaccgaaggggaggagagatcccccactcctcccgccaccggtggcaccaccgctgccaccacttccaggcttctcggagccacagcttcctggaacaatgaccagaaacctgggcctggactcacacttcctcctgcccacatcggacatgctgggccctgcaccctatgatcctggggctggcctggtcattttctatgatttcctgcggggccttgaggcttcctggatttgggtgcaactaaggactggcttggcacgcgatggacgggatacaggaaggaccacagcgttgcccccagccctttgcctgcccccacctcctgctcccgggcccatgggcaactgtgccatccttgccagcaggcagcctgtgcccagactaccaccctcatcatcagtatctttggtctgtgagctgcaggtctggcaggggctagcatgggctagggcaccacagccaaaggcttgggtctcacttggactatttgaccaagatcagcgggtgctaagtggccgctggcgcctcccacttcgggcccttcctctggaccccagccttagccttgggcagctgaatgggattcctcaggcaggtcaggctgagctctttctgcggctggtgaatgcaagagatgcagctgtacagacactggcagagatcaatccagcaagtgtccatgagtaccagtacccacctccggtgagggcccagctgcagctagggacaccacagctacacataccggtgtggctggtatggctaacggccagcctttattgaccactgtgtgccagtcattaccaatgctttcttgtttgatcctcacatctctatgaagtcctactatgtaacagataaggaaatcaaagcaggagcaggttaacttggttcacagtgtccagcacatcttcactggaagccagcttcctcacccccgcagttggctttgctgatcccccacctcgtacagaagag

SEQ ID NO: 45867 - DNA, 999 bp, Homo Sapiens
atggaacccttggccagcaacatccaggtcctgctgcaggcggccgagttcctggagcgccgtgagagagaggccgagcatggttatgcgtccctgtgcccgcatcgcagtccaggccccatccacaggaggaagaagcgacccccccaggctcctggcgcgcaggacagcgggcggtcagtgcacaatgaactggagaagcgcaggagggcccagttgaagcggtgcctggagcggctgaagcagcagatgcccctgggggccgactgtgcccggtacaccacgctgagcctgctgcgccgtgccaggatgcacatccagaagctggaggatcaggagcagcgggcccgacagctcaaggagaggctgcgcagcaagcagcagagcctgcagcggcagctggagcagctccgggggctggcaggggcggccgagcgggagcggctgcgggcggacagtctggactcctcaggcctctcctctgagcgctcagactcagaccaagaggagctggaggtggatgtggagagcctggtgtttgggggtgaggccgagctgctgcggggcttcgtcgccggccaggagcacagctactcgcacggcggcggcgcctggctatgatgttcctcacccagggcgggcctctgccctctactcgtgccaggcccacttgccaggcaggagccctccccaagccttcagggctgctcggagtcacctgttggaatggactaaaaggacccttgtgtgggaacaggtgctccccaaacaccctgctgctggctgccaggcaggccctctggaagggaaggggcaggactcatcaggacctccctggacccctgcagggcaggcagcttgggcccgagcccaagcatttggctctgctgcccccaaggggacaggaagcctcttgggcctcttcccttcctggacaaggccccctgcctttgcctcacataaactgtacagtattttcattaaaagcctctttcataa

SEQ ID NO: 45868 - DNA, 1005 bp, Homo Sapiens
atgaatgaagacctgaaggtcaatttaagcgggctgcctcgggattatttagatgccgctgctgcggagaacatctcggctgctgtctcctcccgggttcctgccgtagagccagagcctgagctcgtagtcaacccctgggacattgtcttgtgtacctcgggaaccctcatctcctgtgaaaatgccattgtggtccttatcatcttccacaaccccagcctgcgagcacccatgttcctgctaataggcagcctggctcttgcagacctgctggccggcattggactcatcaccaattttgtttttgcctacctgcttcagtcagaagccaccaagctggtcacgatcggcctcattgtcgcctctttctctgcctctgtctgcagcttgctggctatcactgttgaccgctacctctcactgtactacgctctgacgtaccattcggagaggacggtcacgtttacctatgtcatgctcgtcatgctctgggggacctccatctgcctggggctgctgcccgtcatgggctggaactgcctccgagacgagtccacctgcagcgtggtcagaccgctcaccaagaacaacgcggccatcctctcggtgtccttcctcttcatgtttgcgctcatgcttcagctctacatccagatctgtaagattgtgatgaggcacgcccatcagatagccctgcagcaccacttcctggccacgtcgcactatgtgaccacccggaaaggggtctccaccctggctatcatcctggggacgtttgctgcttgctggatgcctttcaccctctattccttgatagcggattacacctacccctccatctatacctacgccaccctcctgcccgccacctacaattccatcatcaaccctgtcatatatgctttcagaaaccaagagatccagaaagcgctctgtctcatttgctgcggctgcatcccgtccagtctcgcccagagagcgcgctcgcccagtgatgtgtag

SEQ ID NO: 45869 - DNA, 1174 bp, Homo Sapiens
gccctccacaaagctcctgggcccctcctcccttcaaggattgcgaagaactggtcgcaaatcctcctaagccaccagcatctcggtcttcagctcacaccagccttgagcccagcctgcggccaggggaccacgcacgtcccacccacccagcgactccccagccgctgcccactcttcctcactcatggggaacagcaaaagtggggccctgtccaaggagatcctggaggagctgcagctgaacaccaagttctcggaggaggagctgtgctcctggtaccagtccttcctgaaggactgtcccaccggccgcatcacccagcagcagttccagagcatctacgccaagttcttccccgacaccgaccccaaggcctacgcccagcatgtgttccgcagcttcgattccaacctcgacggcaccctggacttcaaggagtacgtcatcgccctgcacatgaccaccgcgggcaagaccaaccagaagctggagtgggccttctccctctacgacgtggacggtaacgggaccatcagcaagaatgaagtgctggagatcgtcatggctattttcaaaatgatcactcccgaggacgtgaagctccttccagacgatgaaaacacgccggaaaagcgagccgagaagatctggaagtactttggaaagaatgatgatgataaacttacagagaaagaattcattgaggggacactggccaataaggaaattctgcgactgatccagtttgagcctcaaaaagtgaaggaaaagatgaagaacgcctgatgccaactgttcagctgtcctccctccacctaccactcacatgacacccgtgagcgcctgtgcacacacacacacatgcacacacacgcgcgcgcacacacacacacacacatccaccccagggccaagagaaaggcctgcacacaagcccacagcacagctccctgccaaactgaagcatctgtagtgacccactggttccttcttcctgggtcttcagcattccctcccatcatgcccggtcccacccctccctctgtccaccagcccatggccctgtgctaatcccaggattaggccataggagtcctaagtgtcaccccgctgtaagctcctttgtggagtgctgggtaagcagtttccaataaacgcaagctgagctgg

SEQ ID NO: 45870 - DNA, 441 bp, Homo Sapiens
tcaaccagtgaggctgccctgaacaaaaaaaacaaaaagaaaaaaaaaaaaggaaagaaagaaactgataaaaagaggcattccagcccctatgttattgatggaaaaagaaaaagaagaaaagcaatctcgcagtacatgttacttaaaaaattccggacaagactacccttgttttatgttttcagtattctgaaaataccagtgtgtggcagttctcgcagatgttacctaaaactgctgaacttgaccggcagaatgttctgccgttttctgctccctcgacacttgattggagggctgtcgacctctcctcccgtgggggcttccccagtgcctatcttctctgatagtcatggagaggttacactaattcattggagatgtaagttgttggttttgttttgttttgtttttagaaaaatatatataaatatataa

SEQ ID NO: 45871 - DNA, 522 bp, Homo Sapiens
cctgagcagtgttctctgtgctgagcggcgggactgagctgttgagttagagccaacatgagtgagcgacaaggtgctggggcaaccaatggaaaagacaagacatctggtgaaaatgatggacagaagaaagttcaagaagaatttgacattgacatggatgcaccagagacagaacgtgcagcggtggccattcagtctcagttcagaaaattccagaagaagaaggctgggtctcagtcctagtgggagaaccccctcctagtccacctgaaaacaccaaattcaaccatcatctgtcaagaaattaaaagaacaacaccctagagagaagtcatccacacacaatccacacacgcatagcaaacctccaatgcatgtacagaaacctgtgatatttatacccttgtaggaaggtatagacaatggaattgtgagtagcttaatctctatgtttctctccattttcattcctcctgcaactattttccttgatgttgtaataaaatgaagttacgatga

SEQ ID NO: 45872 - DNA, 270 bp, Homo Sapiens
atgtgccaccgagagaccatgatcaaaaatgcagacatgtcggaagagatgcaacaggactcggtggagtgcgctattcaggcactggagaaatataacatagagaaggatattgcagctcatcttaagaaggaatttgacaagaagaacaatcccacctggcattgtatcgtggggaggaacttcggtagttacatgacacgtgaaatcaaacacttcatctacttctacctggaccaagtggccattctcttgttcaaatctggttaa

SEQ ID NO: 45873 - DNA, 1008 bp, Homo Sapiens
ggccccatgttcaccgagctgaggtccaagctgagccccccgcgtggccgcgccggggccgtgcgcgcgggcttcggggagcgccgggatgtggacgccactgcccacttcagcttctgccggaccctcctggagcacacggtgtcagctgagagcatcccctgccacttgcctcggacacctggcaccagcctcacgtggcatgactcccgcagccagagggcggccagcagcaggccaatcaagctcctgcagcagcccggcacagacaccccccagggccggctgtactctgaccactatggcctgtaccatacaagcccctcgctgggtggcctgacccggcccgtggtcctgtggagtcagcaggacgtctgcaagtggctcaagaagcactgtccccacaactacctcgtctacgtggaggccttctcccagcatgccatcaccggccgggcactgctgcggctgaatgcggagaagctgcagcggatggggctggcccaggaggcccagaggcaggaggtgctgcagcaggtgctccgcctgcaggtgcgtgaggaggggcggagcctgcagctgctcagccaagcttccttcgggaaaatgtcctagctgctgctgaggcttgaacccagaccccagcactgtgatgggagtccacggctagggaggaggccaagctggccccgcagcgcctcttggaccctgcgggatgccggggcggccaggctggcccaacggacagacaggaccaggatcacacctccaggcgcctctggttggacattccaggtcgtgccctggggctgggtgggtagggggctgcttgagtgtggccccacctcctgggacctgagcccaagccctcccctggtgcagctggcagcatgtggggcagctgcctggagccagaaccggtttggatgtcccccctagactcccagggagtctgtttatttacattcccctctccacgtgatgtcggtcccccatcgcctgctgagt

SEQ ID NO: 45874 - DNA, 5131 bp, Homo Sapiens
attataagaggtatacagaacagaagcagcatttggatgccggataatattattgtattttccttcatgttctcctgcgtagtttctgatgaagaacaatcagtagtatacgttccaggaatttctgctgaaggaaatgtcagatcaagacacaagctgatgagtccaaaagctgatgttaaacttaagacttccagggtgactgatgcttcaatctccatggagtccttaaaaggcacaggagattcagtagatgaacagaattcctgcaggggagaaataaagagtgcatcattgaaggatttatgtcttgaagacaaaagacgcattgcaaacttaattaaagaactggccagagtaagtgaggaaaaggaagtgacagaggaaagactgaaagctgagcaggagtcatttgagaagaagatcaggcagttggaagaacagaatgaactgatcatcaaagaaagggaagatatccttttgaaatatagagaatgccaagaacttctaagcctgtatcagaaatatttatcagaacaacaggagaagctcaccatgtctctctcagaacttggtgctgctagaatgcaggaacagcaggtatccagtagaaaaagcactctccagtgttcatctgtggaactggatggttcctacttgagcatagccagaccacagacctactatcaaaccaagcaaagacctaagtctgcagtccaggattcagcttcagaatcccttatagcatttaggaataattctttgaaaccagtaacccttcatcatcccaaagatgatctagataagataccatcagagaccacaacatgtaattgtgaatctccagggagaaaacctgcagtcccaacagagaaaatgccacaagaagaattgcacatgaaggaatgtccacatcttaagcctactcctagtcaatgctgtggtcatagacttgctgcagatcgtgttcatgacagccatcctacaaacatgacccctcaacatcctaagacacatccagaatcatgcagttattgtcggctttcttgggcatctctggtgcatggtggtggggcactgcaacccattgaaactttgaaaaagcagatctcagaagatagaaagcagcaactgatgcttcagaaaatggaactggaaattgaaaaggagcgccttcagcatctgctggcccagcaggagacaaagcttcttctaaaacagcagcagcttcaccagtctcgactggattacaattgtttattgaagtcaaactgtgatggctggctgcttggaacatcatcatctattaaaaagcaccaagaccccccaaacagtggagagaataggaaggagaggaagacagttgggtttcattcgcatatgaaagatgatgcccagtggtcatgtcaaaagaaagatacatgtagaccccaaagagggacagtgacaggagttagaaaagatgcgtctacatctcctatgccaacaggaagcctaaaggattttgtcaccacagcctcaccatcattacagcacaccacctcccggtatgagacatctttgttggatttggttcagtctctgagcccaaactctgcgcccaaacctcagcgctatccctccagagaagctggggcctggaatcatggtactttccgactcagtcctctaaaatcaacccggaagaagatggggatgcacagaacccctgaagagttggaggagaatcagattctggaagatatatttttcatttgacatattgcaaaattttcttaggaaatttgtgggtttcctcacatactgatctaggattttaaattatttcattgcaaagtaattgtgtctctcctttcacggggacttgtctcactagcatcctgttacgtattgaatatagaaatcattctaacaacccaggttattttcaatcagaccaggcattcgataacacactaagggggtaggaatggaagatggtatcttttatatgctaaacagattagaaaattaacataggatactttctgcgtggtggaaaccattgcatattcagcctcatttcaagagtgtttccttctcaaacttctgctagaaaatgctgactcacttttatatacaagaaaaacctttccactgaaaaatccctctgatttaaaagtaacccctttgaaacataagcagtttcagaaaggcagactctctcatctttctcatcctgttctctcactactacatttctgtaagtggtcctttaattctgaagttggagttggtgcccctgccatcacaaacaacacgagagccaattgtgagtcagtctcagtagccatcagcctggcagctgcccatcccataaccaaagagctcaatgggctggagggtgagacccagccaatccttgggagcaagcagcactaaatcacatcagggagtgattagtcctggggaaattcagtggaggcacaagcctgaagcactcttctaccaatgtttgggtgaccacccctccaatatcccagaatgaataagaacaatccctaggtatttttatttacccaagtgttcagcttattcaccccacccccccaccccccatcacacgtgctcctgtgaactttccatggttatgtctacggaaaatgccactagagagagagtgatgcaagctgctgcaaagctgatgggcttcctctggccctcccttttcctccacgaggattaaaggatacaagctgaccaggcctcacaggtgctctgctcgtggccccaaagaaccatctctacttgccagagtatgttccaccacccaagcagggtctccctactttttctcactggcctcgttttgacccagagaaagcctatggaagttatgcagtgcagacctcatcctgtctgctgtcttttctcccacagagctcttgagatgggtccttcagcttgcagtggtccctagtagcctctcaagctaatggggatgatgatcctggtttagccagagttcaaaactctccagtcattgaaagcaaggggagggtgtgttcccagatgtgtattacttgggaattttatttgatctggagggtgtggctttttttctctcctttttaccaaccccaactaaactgggagtaagacttagtcagtgttggtagacaaagtcataccacccagggcagcctgcatgcagcgagtctgcgtggcttccctgaattactcttttaattaaaactagattatttcaatctagaaaagccttgttgagcagcctccttatccagatagatccaaagctcatgtctcttcaggctgagactggcgctgtcacctccacccagccttctttcacttggggttttttattctttggagtagaaaagaatggagcccactaatattatatttttcttctgaaataaatataaagtcaagactaactagttataatcattcccttaaaaagttggaaaatcattacagattaaaatttctttataaagttcacctctgagagtaaccaaatcggtttcatcccatatcaaaaagcctttggagtgtggagctttctgtggtatggcagaaatgggtggatggcaaactaagagccctcagccattttttcagttaaagttaggttgccagaactttcttttccttgccccctgtgtcatgactagcttaagtgtacttgactcccatagactactcccatgcccacagtcacccattccagactccagtgtccttaaaactctggagtgagaggatgccagaggatcaagaaaaggatcacagtttcttgaagaagcttgtttgcctttagaagaatcgtaaacagagtctaaactaaaggctttttgggggtcacagccacagagtggagttttattgcttctttgcctctccatgaatggccaatttggaaaagcagagatgggctttcagcagaatatcaaccaatacatttttcacatgcaaaactcatcaccagttgcctttttctaacttaatggacattttgttggtgttggtgcaagggcaataggatgtaaatttgtatataatctaatgtcttcattattaattgaatagtacatgttaacattttaatctatttaaatttactttgaaatatatacatacatatgaatgaaaggttgttacagagcctcaaagctgttgcagactatcccaagagaaaggatctggcacaaaggaatctgcctttcctccgtctcaagtctcccacccttgactggttgggatttgctcgtccagcctctagacacttcccaaagcaagactggacacatgccgagggcgttgcggatagtgcctcaccattgcccaccctgctgcccaactcctgtgagagaaaaaccaatcaatgtttacaaaatggaaaaggacacagcatgtcctttgaactccctaagtaaggcccacagttcttgatgcagagaaccaaagtgaatcatagaaaagcttttgctaacagtccgctttccaggaggcaaacttgtgtttatccaaacctgatccccatgatggggacttttctagagcaccccaaatgtcatggggagagagggactctttctgctccctcagagctactcttcacttgtccctgcttccggcaccaagttcataatagagatcttctggccagagaatcaggggagaggagaggcctgatggggcagagctggacgaagtctgctaagagagatggaggctgtggcggactccttccaactcacgatttatcctcagctcagagtgtattttgaatatgagcaaatgtttattcaatcttcaagaagtatcaagtccatccaggcgcggtggcttacacctgtaatcccaggctttgggaggccgaggcagccggatcatgaggtcaggagatcgagaccatcctggctaacacggtgaaaccccatctctgtattttgtatttgtaaaaatacaaaaaattacctgagcgtggtggcacgcacctgtagtcccggctactcaggaggctgaggcaggagaatcacttgaacccgggaggcggaggttgcagtgagccaagatcatgccgctgcactccagcctgggtgacagagcaagactccatctc

SEQ ID NO: 45875 - DNA, 469 bp, Homo Sapiens
ggccttttgccatgtctgggcgtggcaagcagggaggcaaagctcgcgccaaggccaagacccgctcttctcgggccgggcttcagtttcccgtaggccgagtgcatcgcctgctccgcaaaggcaactatgcggagcgggtcggtgctggagcgccggtgtacctggcggcggtgctggagtacctgaccgccgagatcctggagctggctggcaacgcggcccgcgacaacaagaagactcgcatcatcccgcgtcacctccagctggccatccgcaacgatgaggagctcaacaagcttctgggcaaagtcaccatcgcacagggtggcgtcctgcccaacatccaggccgtgctactgcccaagaagaccgagagccaccacaaggcgaagggcaagtagaagcctggattagtttgcagcaactcaatcccaaaggaaccaaaggctcttttcagagccaccta

SEQ ID NO: 45876 - DNA, 443 bp, Homo Sapiens
agctgtcggaaggtggcgagcctgaggcgaacaatggcggagctgggcgaagccgatgaagcggagttgcagcgcctggtggccgccgagcagcagaaggcgcagtttactgcacaggtgcatcacttcatggagttatgttgggataaatgtgtggagaagccagggaatcgcctagactctcgcactgaaaattgtctctccagctgtgtagaccgcttcattgacaccactcttgccatcaccagtcggtttgcccagattgtacagaaaggagggcagtaggccatcccccaggagaatgacagaagcaaaggacttgttactaagcagatttaagggtcagtgggggaaggctatcaacccattgtcagatcagcatcaggctgttatcaagtctgttggtgctaaaaagtaaaagatgaaatgttcaaagagtgaaa

SEQ ID NO: 45877 - DNA, 365 bp, Homo Sapiens
atggactggacctggagggtcttctgcttgctggctgtagctccaggtgctcactcccaggtgcagctggtgcagtctggggctgaggtgaagaagcctggggcctcagtgaaggtttcctgcaaggcatctggatacaccttcaccagctactatatgcactgggtgcgacaggcccctggacaagggcttgagtggatgggaataatcaaccctagtggtggtagcacaagctacgcacagaagttccagggcagagtcaccatgaccagggacacgtccacgagcacagtctacatggagctgagcagcctgagatctgaggacacggccgtgtattactgtgcgagagacacagtgtgaga

SEQ ID NO: 45878 - DNA, 3094 bp, Homo Sapiens
tttgactggccgtagagtctgcgcagttggtgaatggcgttggtggcgggaaagttgagtctctcctgcgccgagccttcggggcgatgtgtagtgccttccatagggctgagtctgggaccgagctccttgcccgacttgaaggtagaagttccttgaaagaaatagaaccaaatctgtttgctgatgaagattcacctgtgcatggtgatattcttgaatttcatggcccagaaggaacaggaaaaacagaaatgctttatcacctaacagcacgatgtatacttcccaaatcagaaggtggcctggaagtagaagtcttatttattgatacagattaccactttgatatgctccggctagttacaattcttgagcacagactatcccaaagctctgaagaaataatcaaatactgcctgggaagattttttttggtgtactgcagtagtagcacccacttacttcttacactttactcactagaaagtatgttttgtagtcacccatctctctgccttttgattttggatagcctgtcagctttttactggatagaccgcgtcaatggaggagaaagtgtgaacttacaggagtctactctgaggaaatgttctcagtgcttagagaagcttgtaaatgactatcgcctggttctttttgcaacgacacaaactataatgcagaaagcctcgagctcatcagaagaaccttctcatgcctctcgacgactgtgtgatgtggacatagactacagaccttatctctgtaaggcatggcagcaactggtgaagcacaggatgtttttctccaaacaagatgattctcaaagcagcaaccaattttcattagtttcacgttgtttaaaaagtaacagtttaaaaaaacatttttttattattggagaaagtggggttgaattttgttgatatacatcataaaatagtcttttgcagggtactacgcaagccttaaaatttttcttaagacagagtcttgctctgtctcccaggctggagtgcagtggcacaatcatggctcactgcagccttgaactcctggcctcaagggatcctcctatgtgtgcctcctagagtgcagggattacaggcgtgagccactgctcgtggccaaaagttttctttttttttttttttctttttgaaacagtcttactctgtctcccaggctgctggagtgcagtggcacaatctcggcccgctgcagcctctgcctcttgggttcaagtgattcttccacctcagcctcccaggtagctgggattacaggcacccaccaccacgcctggctaatttttgtatttttaatagagacggggtttcaccatgttggccaggctggtctcgaactcctgacctcaagtgatccacccacctcggcctcccaaagtgctaggattacaggcccgtgcccagccctaaagttttaaactctaggggaattaacagtatttctttacagaatggatttgttaaactagcacagtaaaagtaaagactattctgtttctaggctgttgaatcaaagtgattttagcaattaaactttgtattaatttaccaccaatatttcttcacaaaggaacttttaaaagattatctcagaaagtaaatctgagaggtaagaagtaataatgagtaaatggtaagtacttgagtaaatctaaagaaatattgatagtaaggcaatcctaagcaaaaagaacaaagctggaggcatcacgctacccagcttcaaactatactacaaggctacagtaaccaaaacagcatagtactggcacaaaaacacacgtagactgatggaacagaatagagaatttagaaatgagaccacacacctataatttttttgatcttcgatgaacctgacaaaaacaagcaatgggcaatggattctctattcaataaatcgtgctgggataactggccagccatatggaaaagattgaaaatggacgccttccttatgccatatacaaaaattaactcaagatggattaaagacttaatgtaaaacccaaaacagtaaaaatcctggaagacaacccaggcagtaccattcaggacataggcacaggcaaagatttcatgacgaagacgccaaaaacaattgcaacagaagcaaaaattcacaaatgggatctaattaaactaaagagctgcacagcaaaagaaactatcaagagagtaaacagacagcttacagaatgggagaaaattgttgcaaactatgcatctgagaaaggtctgaaatccagcatctatacgtaatttaaacaaatttagaagaaaaaaccaccccattaaaaagtgggcaaaggacatgaacagacacttttcaaaagaagacatctgtggccaacaatcctatggaaaaaagcccagcatcactgatcattagagaaatgcaaatcgaaacaacaacgagataccatctcacaccagtccaaatggctattataaaaatgtcagaaaataacagatgctggtgaggttgtggagaaaaagatatgcttatacactgttggtggaaatgtaaattaaattagttcagccattgtggaagacagtgtggggataaagacagagataccattcaacccagcaatctcattactgggtatatacccaaaggaatagaaatcattgttataaagacacatgcacgcgtatgttcgttgcagcactgcccatcagtgacagactggattaaaaaaatgtggtacatacacaccagggaatactatacagccataaaaaggaacaagactgactgggcgtggtggctcatgcctgtgatcctagcactttgcgaggccgaggtgggtggattgcccgcgctcaggaggtcaagaccagcctgggcaacacggtgaaaccccatctctattaaaatacaaaaaattagctgggcatggtggtgcgtgcctgtagtgccagctactcaggaggccgaggcaggagaattgctggaacccaggaggtggaggttgcagtgagctgagatcgcgccattgcactcccgcctgggcgactccatctctaaaaaataaaaaataaaatataaggaa

SEQ ID NO: 45879 - DNA, 5901 bp, Homo Sapiens
attttcttcatggaagcgatgtccccccagcaggagactctagggggacagccggggcgctcctcttccctgacaggagtgtctcggctcgcgggaggcagctgcaccaagaagaaaatgaaaacactagcagaaaggaggaggagcgctccatctcttatcctggataaagccctacaaaaacggcctactaccagggacagtccttctgctagtgttgacacatgcacatttctgtcatcattagtgtgctccaataggactctgctgattgatggccgggcagaactcaaaagaggcctccagaggcaggagcggcatcttttcctattcaatgatctgtttgttgtggccaaaatcaaatataacaataactttaagataaaaaataaaattaaattaactgatatgtggacagcaagctgtgtggatgaagtgggagaaggcaacaccaatgccatgaaatcctttgttttgggctggcccacagtgaactttgtggccactttcagttctccagaacaaaaggacaaatggctctctctccttcagagatacatcaatctagagaaagaaaaggactacccgaagagcattcccctcaaaatcttcgccaaggacattgggaattgtgcctactctaaaactataacagtaatgaattcagatacagcgaatgaagttatcaacatgtcattaccaatgctagggataactggctctgagagagattaccagttgtgggtcaattctggcaaagaagaggctccatacccactcattgggcatgaatatccatatggaattaaaatgagccatcttcgagactctgcactcctgacaccgggatcaaaggactctaccacccctttcaacctccaggagcccttccttatggaacagctcccccgagagatgcagtgccagttcatcctgaagcccagccgcctggctgcagcccagcaactgagtgattcaggtcataagacatttaaaaggagaagatctatcataaactgggccttctggcgaggttctagcactcacctggacaacttgccctcatcgccaacatcacctatgccaggacagctctttggaatttctctgccaaatatttgtgagaatgacaatctgcccaaacctgtcttggatatgcttttctttcttaatcaaaaaggacctctcaccaaaggtatcttcaggcaatcagccaatgtgaaatcctgcagagaactaaaagagaaattgaattctggagtcgaagtacacctagactgtgaatctatttttgtgatagcatctgtcttaaaggattttctgcgaaatattccaggaagtattttttcatcagatctctatgatcactgggtctctgtaatggatcaaggaaatgatgaagagaaaataaatactgttcaaaggctattagaccagcttccgagagccaatgttgttctcctaaggtatctttttggggtgttacacaacattgagcaacattcctcatccaatcagatgactgcatttaatttagctgtgtgtgtcgctccaagtattctttggcctcctgcttcctccagcccagaactagaaaacgaatttacaaaaaaggtttccctgcttatacaatttctgattgagaattgccttaggatatttggagaagaaatcacttccctcttcagagaggtttcagtgagatgtgacactagagagaatgcctcagatatttcttgctttcaactgaatgactcctcctatgacagcttggaaaatgagctaaatgaggatgttgatgcaccatgcagtgacttggtaaagaaacttggccaggggagcagaagcatggactctgtcttaaccctcagtgactatgatcttgaccagcccgaggtggaaggccttttaaccctaagcgactttgacttggcccattctaaagatgaagatgttcaaatgaaacggcctcttgaatccaagccggtgaacattttagtgtacacaaagatcccactgcgggatcatgccagggccccatctgccatgtgcacacccagctacctgtccacagctgcagcaaatgctgcaaaaagcctgaggcgacaccggcgttgctcagagcccagcatcgactatctggattcaaagctttcctacctcagggagttttatcagaaaaagctacgcaagtccagctgtgatgcaattctttctcaaaaagatgaagactatctgaagcagaatcaacccctccaggaggaaggaaagacatgttttaaacagagtttagtcacaggcactgatgtcagcaagaaaaatgccactactcaaaacactaagaagaaaagcttgtctggtagtgaaggaaatcacgtgaaacttttccctaagtctaagccagtggccatttctgtggcatcttatagtcctatgtcctcacaggatcattccaagaaccagccctttgatgtgaatacatctggatactccccaccacacacagcagatgccctcaagggtccaaggacacatcggcgctgctcagagcccaacatagaagaccagaaccgcaagctgacctatctcaggggaatttattcaaagaaacaacataaaaccagctgtgaagctggtctcttgcatggagaggaggattatctcaaacggcataagtctttgcaaatggaggggcagaagctcattaatcagagtttagtcatggggattgaggtgggcaagagtagtgccacaaaccaaaacactgagaaggttttacccccaagattaaacctttgcccaaggaccagctattccagcttatcctccccaggcacttccccatccggctcatcagtaagctcccaagacagtgctttttctcagatttctgaacactctgtgtttacacccactgagacttcctctccaatagattgcacttttcaggctcagagaaaacgggaagacctttctcctgactttagcaatgccagccatgtttccggaatgcccggtccctcatcagggcaggcttgcagccgcccagcctatacaaagaaggacaccatggagtggcattcacaaatgcattctgtaactcttcatcccagcacatggttgagaaatggtgtggccagtttgaaaaactggtccctcaaaaagaaagcaaaggcagccagaccagaggaagagaaaatagcttctccaaaaggacccttagagccacccccacatgcttctggtgttccagaagccaactcactgcaagaggaacaaaaagacttgcccttaagggcagctgaaggactgtcccctgtgcagtcagcccaaaggtgtagttcttctcccttccaggactcagagagacactgtagctctccattcagcctggtggagagcagacttaagctgtgcatgaagtcacatgaggaaatagagcctggtagtcagagctcttctggttctctgccttgggaaagagcctcagccagctcttggactctagaggatgcgaccagcccagactcagggcctacagtggtctgcgacattgaggacaggtatttaaccaaagacatttaagcatagtaagaatctgatgtccacaagaacaggaactgggttaataataatagacaataattattatgacccctttgtataagatacctgggagaggtagcataaggattatcattgctaatacttaggacaacgaaataattctctttattgagactacttgacaaatactttatgctaaaaattttgtcacctaagtgtttgggaggctttttcttattaaaggttgggattggtcctgtcatgtggttttagagatactaacagagggctagagaaagcatcttctgcagaggaagcacttatgggaacagtctgtgagattgatgtcctgagaagaccaagatatcaggaatgaggaataggggcctgaggagagaggggaagggtacagagaaaccatctacattccatggaatgtttttaataagtaggcaagaaaaatgccactaatcaaagcattaagtgtgtccagtaatgaagaacatcatataaaatctttccctaaatctaagccagtggccatttttgtgggatcttactaatcacgtgtccttacagaatcattccaagaaccagcccattgctacagctagagtggagaaaaacagagtgactcaaaagccatgggtaccatgatatcagttttgttggttgtatttgtcggtttgttttttcattcatgttgaagtgctttgcaaggcttcaggaaacagagttgtgaggagaaagaagaaaatggctgcccatttcagtaccctttcaaaggtatctctgcctaggaacattcttcagaaatgcaacttcttctatttagaaggtgacctcctgacagcgttcactctcaatatggaggaaaagaccacaacaactgtcctttctcaattacacaaatgctgttaaaatgtgatcaaaccatggcatcactttgctgaaatgtttctgcacagtcctgcctcttagattacagtcagccagaaaaacatacttataaatcatcccttttctgatttttgtagtttggcaattgagagagcaatattgaggttggccggttataaggagtcccacaatagaatacccaacaaagtggctgccaggccttctcagacagccatttgctttgggttttgcttccagacgttgttccatatttttgccccaaatgtttcatggcttataccccattggtttattttatatccatggacctttctttctctgctttcttgacttaaaggttgcagcagtacatctcgtcacctaggaatagattatcaggccttgccaactagtatgcagggatggcactaaaaatggatgtgcatcttctttcacattaactactaacctataagaagttgctctgagcccatttatttaaactctttagttcaccatcagatggacctttctctcacaagctagcttattccaaattatttgtcttattaatcaccagaaaatggtcatatcaaatgttctttcttttttgttctaaaggttgcattttcagttataggggaaaaaatattttctctaagatagaagaagttatttcagtattagctataggtgctacctacctcttggggacatggccctgtttgcgctaaccattacaatgatcttttagaactctgtatccaaagagctacttcgtgacactggccatctgagtcacagatgtgaagtcgatttcactttataactaaccagtcctacatattaagacttctaagtgtccatatgcatcttttttggtataatatataaagtcagcagggactcccctttcccttagggcatactactgtcagtcagaactgcaagatgtgaatgaagctcttaacggcttggagtgtctttctggaagaaattgccttttttttttttttcatgttagcaggtaaaaaatcattcacccaatttgaagcatagaagaaaatagttgctgaggttttttaataaccattcctactatctgtgttcccttagatactcctgtaattcttaatgtgaatagtttgttaatattgctgtaaagtattatattgtatgatttgaagacagactatatgtcattttattatactccatcaatctataatatattagactgatgctttatctaaaatgctttgagtttgtataatatatcttgacaaattttactaccatatgttatgtaataaatgtgtatttttgtacttgcagaaactgctgctaacttttaaagttgtttggttttcaaggcactgataatggatatgtatgaagtccatgctgtctgttaaataaaatgccattctgcag

SEQ ID NO: 45880 - DNA, 723 bp, Homo Sapiens
atgctgccagggtccctgaagagggaagacacgcggaaacaggtaaaaatcattttgcttttattttgcattcaacaagcaagttattacggaacagcagttatgggccaggcatacctcccagagctgggaacacagtggggacctccctggctctctcttaccggtgttacaacaggttgtagacagacccctgtcttgagcatcctccttgccaggcctgctgagtcttctgagagtagggtaggttattggatgcccaggagggaagaaggagccagggaggtcagccccaaggttctgcaaggccctcaacaggcctggactgaggaggtctggacagcatggccctgtcctgagcctctgtgcataataactgctgtccctaacctccaccccaccctcagccttccaattcccgggcctggggccctactcctgtgctccagagactcctggagctccttgaggcagcacacagtcctgctctggaggcgcccatctcccactcatgctgggatgctccagcccgtcccagagcaggttgtggctggagggtgctggcagaggagggacaatggcccggctcctggaggcaagtgttggctgcagggaacggagtctagtccttgccacagcccttgttaccccttaggtaaccttaaggggatttcaaagaactctggctctgcaaccctgctaagttttttatggaacatgtaa

SEQ ID NO: 45881 - DNA, 747 bp, Homo Sapiens
gaggatgacgcagagccctggggtcaacctcaagtaccgctgagaccttccgtcaatgtgctgactgatctggatagcaagcaactggagtggccctctgaaagaacaggatcctgcattcctcttcatagcttgagagctcatagacacccctacgggccaccacctgctgttgcagaagagtccctagcaacagcagaagtaaacagctctgatgcactggcaggctggaggcaggagggacaggatgctattaatgtgtcctgggaagtctctggcggccctcctgcactgatagtagggggcacaaaggtcaacaatgggggcactgagagaggcagtaataacgcaaggttgcatgtagctttgccacaaggtaaagggttctttccacccaggggcccacaagtgagaggcccttcacatattcccacccttagatcagggatagtaatggaggtgccgcccggaaatacacgaatagcctgcagaggaaagctggctcatgtttctttcccactcaggggcccatgccaccccatgcataattggccaaggcctatcccgttgtcttccagtactccaggtttaccttcttgctctactgttcattgtttcatccctcctcgacctccgattttcaatccctttctcactatgcctcttccttttgctcctcctccgatatttggtcctccactgccttcttattttgcccatttccattctgggggaatgccagctcct

SEQ ID NO: 45882 - DNA, 1176 bp, Homo Sapiens
atgtacagcatgatgatggagaccgacctgcactcgcccggcggcgcccaggcccccacgaacctctcgggccccgccggggcgggcggcggcgggggcggaggcgggggcggcggcggcggcgggggcgccaaggccaaccaggaccgggtcaaacggcccatgaacgccttcatggtgtggtcccgcgggcagcggcgcaagatggcccaggagaaccccaagatgcacaactcggagatcagcaagcgcctgggggccgagtggaaggtcatgtccgaggccgagaagcggccgttcatcgacgaggccaagcggctgcgcgcgctgcacatgaaggagcacccggattacaagtaccggccgcgccgcaagaccaagacgctgctcaagaaggacaagtactcgctggccggcgggctcctggcggccggcgcgggtggcggcggcgcggctgtggccatgggcgtgggcgtgggcgtgggcgcggcggccgtgggccagcgcctggagagcccaggcggcgcggcgggcggcggctacgcgcacgtcaacggctgggccaacggcgcctaccccggctcggtggcggcggcggcggcggccgcggccatgatgcaggaggcgcagctggcctacgggcagcacccgggcgcgggcggcgcgcacccgcacgcgcaccccgcgcacccgcacccgcaccacccgcacgcgcacccgcacaacccgcagcccatgcaccgctacgacatgggcgcgctgcagtacagccccatctccaactcgcagggctacatgagcgcgtcgccctcgggctacggcggcctcccctacggcgccgcggccgccgccgccgccgctgcgggcggcgcgcaccagaactcggccgtggcggcggcggcggcggcggcggccgcgtcgtcgggcgccctgggcgcgctgggctctctggtgaagtcggagcccagcggcagcccgcccgccccagcgcactcgcgggcgccgtgccccggggacctgcgcgagatgatcagcatgtacttgcccgccggcgaggggggcgacccggcggcggcagcagcggccgcggcgcagagccggctgcactcgctgccgcagcactaccagggcgcgggcgcgggcgtgaacggcacggtgcccctgacgcacatctag

SEQ ID NO: 45883 - DNA, 708 bp, Homo Sapiens
gtcttgaggtacaacattcactgggtttcatatgggagaaaaacactaaaatcaaacacatggatagacagtcagaacaatgtccatcatatacatagtaaaattaatacaactgcaaacatgcatgagtggagtccatttggaatagcctgcagtgaagatgtatgccttagggcccacataactcatgtttgggagaaaatgtataactttattcaatatgaaaatgtcttcagaaataactcagtccatgctgtgcagatgcagtcctgtactgtagagacaaagaataagaatcatcaaagtggaataacctctgcccctgctccaaattctggttcacacggcagtagtactactggagagaaaagccatacatgtcccaaatgtgggaaagcctttatttatctgtcatttcttgtgagacatatgaaaattcacactagaaagaaatcttatgaatatgacaaaagtggcaaaggctttagatattccctacaccttaataaacatttaagaaagaacattctggacaagccctatgaatgcaaggaatgtgggaaacttcagcaagcctcaaaacatgcacatataaggagtcatgctggaaagaaaccctataaatgtgacaaatgtggaaaagactttgcaaagtcatcaattaaaagccaccttaagagatacaatagtgagaagccctgtgagtga

SEQ ID NO: 45884 - DNA, 2768 bp, Homo Sapiens
aggtatctgagagcaagcagcaatagaaatttcctgcttaccatgagaccatttttaaaaagggccattttggtcctaagttatgtgcttgtcattttgtacttccgtctgtggataatgggaggatctatgcccctcttttcagagcaggataatccagcttcattttcgccttacattcttacgagattcctcacctattcctacctcttggccttcaatgtgtggcttctgcttgcacccgtgaccctgtgctatgactggcaggtcggcagtattcctctggtagagaccatatgggacatgcggaacttagccaccatctttctggcggttgtgatggccttattgagcctgcactgcttagcagcctttaagagactggagcacaaggaggttttagtcggcttgttgttcctggtgttcccgttcattccagccagcaacctcttcttcagggtgggttttgtggtggcggagagagtcctttacatgcctagcatgggctactgcatcctttttgtgcatggactgagcaagctctgcacttggctgaatcgatgtggggccaccaccctgattgtgtccactgtgttgctgctgttgcttttctcttggaaaactgtgaaacagaatgaaatttggctgtcaagagagtccctattcaggtctggagttcaaactctgccccacaatgccaaggttcactacaactatgccaatttcctgaaggaccaaggtcggaacaaggaagcgatctaccactacagaacagctctcaagttgtatccacgccatgcaagtgcgctcaacaaccttggaacactgacgagagacacagcagaggcaaagatgtactatcagagggctctccagctccatccacagcataaccgggctcttttcaatctggggaatctcctcaagtcccaggagaaaaaggaagaagctatcaccttactgaaggattccatcaaatatggtccagagtttgcagatgcatattcaagcttagcttcgttattggctgagcaggagcggtttaaagaagctgaagaaatataccaaactggaataaagaactgtccagacagctcagatttacacaacaactatggggttttcttagttgatactggcttaccagaaaaggcagtggcccattaccagcaggccatcaaacttagccccagtcatcacgtggccatggtgaacttgggaagactctacaggtcactgggagagaacagcatggctgaagaatggtacaagcgcgccctgcaggtggcacacaaagctgagatattgtcacctttgggagcactgtattacaacactggccgatacgaagaggctttgcagatttaccaggaagctgcagcacttcagccttctcagagggagctccgcttggcactggctcaggttttggccgtgatgggtcagacaaaagaagctgaaaagatgaccaatcacattgtgtcagaggagaccggatgccttgaatgctatcgcctcttgtcagccatctatagcaagcaggagaaccacgacaaggcacttgatgctatagacaaggctctccagctgaaaccaaaggacccaaaagtcatttctgaactttttttcacaaaaggaaaccaattaagagagcagaaccttctcgacaaagcttttgagagctatagagtggctgtgcaactaaacccagaccaagcacaggcctggatgaacatgggtggcatccaacacatcaagggaaaatatgtgtctgcaagagcttattatgagagagccttacagctggttccagacagcaaactgctgaaggaaaatcttgccaaattggatcgcctagaaaaacgattacaagaagttcgagaaaaggatcaaacatagcaccaccgtctgacccaacctcataggataatgtggtgcctctgaaaggggagtgatggaagccttgctttcacatcagcaggggcacaactaatgagattttctctcattccgagttcagggtgacacattttgggacatctgctggtagcccagtgctgaaggacttgcttttccatgaagaagacgaaaacagcaaacaagggcaagaaggtctgagagggaaggagaatgacatttacacattttacagatttttgtttggtttaactccagatttctcttgatatatctctgtgcttttgagacctggagatctaattctgtttagacattttttgtcccagaaatacagaagcttgaaatgctatgaaggcagagcttctattctttatgggatgaaatatttcaaaagaggataaatcctctgtggtaagccatttggaaaatcctaccaagaattggcttatttaattttccagaaccaggaatgagtatctaatagcttttgtagaaccttccagaatatgtggggaaaaagggctattgctaagtgagctttatctaatatcctcctaagagttttactagtgcttttttgaggaattacagggaagctcctggaattgtacatggatatctttatccctagggggaaatcaaggagctgggcacccctaattctttatggaagtgtttaaaactattttaattttattacaagtattactagagtggtggttctactctaagatttcaaaagtgcatttaaaatcatacatgttcccgcctgcaaatatattgttattttggtggagaaaaaaatagtatattctacataaaaaattaaagatattaactaagagaaa

SEQ ID NO: 45885 - DNA, 264 bp, Homo Sapiens
ggcacctgcgaggtgattgcggctcaccgctgctgcaaccggaaccgcatcgaggagcgctcccagacggtgaaatgctcctgtttttctggccaggtggccggcaccacgcgggcaaagccctcctgcgtggacgcctccatcgtcctgcagagatggtggtgtcagatggagccctgcctgccgggggaggagtgtaaggtgctcccggacctgtcgggatggagctgcagcagtggacacaaagtcaaaaccaccaaggta

SEQ ID NO: 45886 - DNA, 576 bp, Homo Sapiens
atgacaatggatgatgacagttctacaacagatgcctctcaactaggaacctgtgcagactatattggaggaagtcattatgttatacagcctcatgatgatactgaggagagcatgagtgatcaagaggacacaaatggttcaaaagtaagtttcagagaacaagatatgtatcttccaataacaaacgtggctaggataatgaaaaatgccatacctcaaacaggaaagattgcaaaagatgtcaaagaatgtgttcaagaatgtgtaagtgagctcatcagctttataacatctgaagcaagtgaaaggtgccatcaagagaaacagaaaacaatcaatggagaagacattctgtttgccatgtgcctagacagttacgtggaacctctgaaattatatcttcaaaaattcagagaggctatgaaaggagaaaagggagttggtggagcagtcacagctacagatggactaagtgaagagcttacagaagaggcatttactaaccagttaccagctggcttaataaccacagatggtcagcaacaaaatgttatggtttacacaacagatttc

SEQ ID NO: 45887 - DNA, 672 bp, Homo Sapiens
ggtgctgcaaagttggtggtagctgtggcagtgtttttactgacattttatgttatttctcaagtatttgaaataaaaatggatgcaagtttaggaaatctatttgcaagatcagcattggacacagctgcacgttctacaaagcctcccagatataagtgtgggatctcaaaagcttgccctgagaagcattttgcttttaaaatggcaagtggagcagccaacgtggtgggacccaaaatctgcctggaagataatgttttaatgagtggtgttaagaataatgttggaagagggatcaatgttgccttggcaaatggaaaaacaggagaagtattagacactaaatattttgacatgtggggaggagatgtggcaccatttattgagtttctgaaggccatacaagatggaacaatagttttaatgggaacatacgatgatggagcaaccaaactcaatgatgaggcacggcggctcattgctgatttggggagcacatctattactaatcttggttttagagacaactgggtcttctgtggtgggaagggcattaagacaaaaagcccttttgaacagcacataaagaacaataaggatacaaacaaatatgaaggatggcctgaagttgtagaaatggaaggatgcatcccccagaagcaagactaa

SEQ ID NO: 45888 - DNA, 1131 bp, Homo Sapiens
atgtcagctgaaacaccaatcacattgaatatcgatcctcaggatctgcaggtccaaacattcaccgtggagaagctactggagcctctcataatccaggttaccacacttgtaaactgtccccagaacccttccagcaggaaaaaaggacgttcgaaaagagccagtgtccttctagcttctgtggaggaagcaacttggaatttattagacaagggagagaagattgcccaggaagctacagttttaaaggatgagcttacggcttcacttgaggaagttcgcaaagaaagtgaagctctgaaagtatcagctgagagatttacagatgacccctgttttctcccaaaaagggaggctgtggttcaagctgcccgtgccttgctggctgcggtgacgagactccttatccttgcggacatgattgatgtcatgtgcctcttgcaacatgtgtcagcttttcaaaggacatttgagtctctcaaaaatgttgccaacaaatctgacctccagaaaacctaccagaagcttgggaaggagctggaaaatttggattatttagccttcaaacgtcagcaggacttaaaatctccaaatcagagagatgaaattgcaggagcccgagcttcactgaaggagaactctcccctcttgcattcaatttgttcagcttgtttggagcattctgatgttgcttccctcaaagcaagcaaggacacagtttgtgaagaaattcagaatgctctcaatgtaatttcaaatgcttcacaagggatccagaatatgacaaccccaccagaacctcaggcagcaaccctgggaagtgcccttgatgagctggagaatttaattgtcctgaatccactcacagtaactgaggaggaaatacgaccatcactagagaaacgccttgaagccattatcagtggggctgctctgctggcggattcttcatgtacgagggacttacaccgagagcggattatcgcagaatgcaacgccattcgccaggctcttcaggatctgctttcagagtacatgaacaacctctgtaatcaaaagtctgacctgggcctcactggagtaaaaatcaaattgttggaggaatgcattattttctggagtctctag

SEQ ID NO: 45889 - DNA, 1128 bp, Homo Sapiens
aaggctattattaccaccactgagtggcttaaataatcctgtcaacagcaatcgcccatttccaaagccatggtgaaacatctctgtgctaatttcttttgttttgtttcctaattttttttttttggcaggtggtgggaaataatctttgtcttctttggagtaaaccttcaacaccggattttttcttttaattatggatgtaaaccccaatatccccataatttacattgggtctcgaccaattgcctaattataagaggatatatttaggctcttatttcatccacacaaaaacttgtgtaacaggtagttggaaacatctgaggcaccactttgattctgttttggatggtcatgttttttctcctccgtttccccagcatgtctgccaccatcctcatgcactgcttccaagtgcctgggagcctttatgagcgtccctaaacctaaaagaatccagaggcggggctcggatgaaccctcgagataagcaagtgagccgcttctcccctctaaaggatgtttacacgtgggtggcactcgctggaatccagcgctcgggcagccctgggaggacgcgctcagctgcgaggaggatggagagcaatacatcatcatctttggagaatttagcgacggcgcctgtgaaccagatccaagaaacaatttctgataattgtgtggtgattttctcaaaaacatcctgttcttactgtacaatggcaaaaaagcttttccatgacatgaatgttaactataaagtggtggaactggacctgcttgaatatggaaaccagttccaagatgctctttacaaaatgactggtgaaagaactgttccaagaatatttgtcaatggtacttttattggaggtgcaactgacactcataggcttcacaaagaaggaaaattgctcccactagttcatcagtgttatttaaaaaaaagtaagaggaaagaatttcagtgatgtttatactaataagtttgctagtacagtgtcagttatttaaagtggtaatgcccgataatgtcttttaaatgtttgaggatgttttaaatacatgcattgtcttcacgaagaagatgtaaaaataatgaacaataaattgcggtggaaacct

SEQ ID NO: 45890 - DNA, 2207 bp, Homo Sapiens
cagctaccatggcccaagggctagaagtggccctcacagacctccagagctccagaaataatgtgcggcaccacacggaggagatcactgtggaccacctgcttgttcgccggggccaggccttcaacctcaccctgtacttcaggaaccggagcttccagccaggcctggacaacatcatcttcgtggttgaaactggaccgctgccagacctggccttggggactcgggctgtgttcagcctggcacgccatcacagccccagcccctggattgcctggctggagaccaatggggccacctccacagaggtgagcttgtgcgctcctcccacggcggccgtgggtcggtacctcttgaaaatccacatcgactccttccaggggtctgtgacggcctaccagctaggggagttcatcctgcttttcaatccctggtgcccagaggatgctgtctacttggacagtgaaccccagaggcaggagtatgtcatgaatgattatggcttcatctaccaaggcagcaagaactggatccgcccatgtccctggaactatggacagtttgaagacaaaatcatagacatctgcctgaagctgctagacaagagcctgcacttccagactgacccagccacagactgtgctctgcggggaagccccgtctacgtcagcagagtggtgtgtgccatgatcaacagcaatgatgataatggggtgctcaatggaaactggagtgagaattacacagacggcgccaaccctgcggagtggacgggcagcgtggccatcctgaagcagtggaacgccacaggctgccagcccgtgcgctacgggcaatgctgggtctttgctgccgtcatgtgcacagtgatgaggtgtctggggatccctacccgtgtgatcaccaacttcgactctggccacgatacagatggaaacctgatcatagatgagtattatgacaacacaggcaggattttggggaataagaagaaggatactatctggaacttccatgtctggaatgagtgctggatggcccggaaggatctgccccctgcatatggaggctggcaggtgctggacgccacacctcaggagatgagcaacggcgtctactgctgtggccctgcctctgtcagagccatcaaagaaggagaagtggacctgaactatgacacgccctttgtgttttcgatggtgaatgctgactgcatgtcctggctcgtccagggagggaaggagcagaagcttcaccaggacacgagttctgttggcaattttatcagcacaaagagcatccagagtgacgagcgggatgacatcacagagaactacaagtatgaagaaggatccctccaggagaggcaggtgtttctgaaggctctgcagaagctgaaggctagaagcttccatggctcccaaagaggagcagagttgcaaccttccaggcccacatcactgagccaggacagccctcggagcctgcatacaccttcccttcgacccagtgatgtggtgcaagtctccctgaaattcaagctgctcgacccgcccaacatgggccaggatatatgctttgtcctgctggccctcaacatgtcctcccagttcaaggacctcaaagtgaacctgagtgcccagtctctgctgcacgatggcagccccctgtccccattctggcaggacacagcgttcatcacactctctcctaaagaagcaaagacctacccctgcaaaatctcctattcccagtacagccagtacctgtcaacagacaagctgatccgcatcagtgccctgggtgaagagaaaagcagtcctgagaaaatcctggtgaacaagatcatcaccttatcttatccaagcatcacgattaatgtaggcaggagagcagccgttgtgaaccagccactctccatacaggtgatattttcaaaccccctctcggagcaggttgaggactgtgtgctgactgtggaaggaagtggcctcttcaagaaacagcagaaagtcttccttggagtcctcaaaccccaacaccaagcaagcatcattctggagaccgtccccttcaagagtggacaaaggcagatccaagctaatatgagaagcaacaagtttaaggacattaagggttacaggaatgtttatgtagactttgcattataaattctggaacaacgcgccagacgtgtgaatttc

SEQ ID NO: 45891 - DNA, 336 bp, Homo Sapiens
aggatcatttttttggtggcagcagctacaggtgcccagtgtgaggtgcagctggtggagtctgggggaggcttggtacagcctggggggtccctgagactgtcctgtccagactctggattcaccttcagtaaccactacatgagctgggtccgccaggctccagggaagggactggagtggatttcatacattagtggtgatagtggttacacaaactacgcagactctgtgaagggccgattcaccatctccagggacaacgccaataactcaccgtatctgcaaatgaacagcttgagagctgaggacacggctgtgtattactgtgtgaaa

SEQ ID NO: 45892 - DNA, 792 bp, Homo Sapiens
tctctttctctagtgtgtgggcaacctgtatactccagccgcgttgtaggtggccaggatgctgctgcagggcgctggccttggcaggtcagcctacactttgaccacaactttatctgtggaggttccctcgtcagtgagaggttgatactgacagcagcacactgcatacaaccgacctggactactttttcatatactgtgtggctaggatcgattacagtaggtgactcaaggaaacgtgtgaagtactacgtgtccaaaatcgtcatccatcccaagtaccaagatacaacggcagacgtcgccttgttgaaactgtcctctcaagtcaccttcacttctgccatcctgcctatttgcttgcccagtgtcacaaagcagttggcaattccacccttttgttgggtgaccggatggggaaaagttaaggaaagttcagtgattagtccagccccctgcagggttccacagctccatgggtctcatggcccagttttaaagaattctccaccccttattactactctcttctttatgcctcttttcactatgctcattacctttcatttcttccttggtgattctggagggcctctgtcgtgtcacattgatggtgtatggatccagacaggagtagtaagctggggattagaatgtggtaaatctcttcctggagtctacaccaatgtaatctactaccaaaaatggattaatgccactatttcaagagccaacaatctagacttctctgacttcttgttccctattgtcctactctctctggctctc

SEQ ID NO: 45893 - DNA, 171 bp, Homo Sapiens
atgtttgtgaatgaagctgtatgcagatgggcaaaaaagggggtatgtgtatcaacaattcctcaccaaaggaaccagatctctttagaaaaatggattccattgttagagcaggaaaaggacaagatgaatttagaacatcttgtaacagaatttaagaggtgctcataa

SEQ ID NO: 45894 - DNA, 231 bp, Homo Sapiens
atggctcccacaaagaagggtggcaagaagaaaaagggccgttctgccatcaacgaagtggtgacccgagaatacaccatcaatattcacaagcacatccatggagtgggcttcaagaagcgtgcccctgcactcaaagagattcaggaatttgccatgaaggagacgggaactccagatgtgtgcattgataccaggctcaacaaagctgtctgggccaaaggaataagg

SEQ ID NO: 45895 - DNA, 939 bp, Homo Sapiens
atggcatgggagaatcagaccttcaactctgacttcctcctcctgggaatcttcaatcatagccccacccacaccttcctcttctttctggtcctggccatcttttcagtggccttcatgggaaactccatcatggttctcctcatctacctggatacccagctccacacccccatgtacttcctcctcagccaactgtccctcatggacctcatgctcatctgcaccactgtacccaagatggccttcaactacttgtctggcagcaagtccatttctatggctggctgtgccacacaaattttcttctatatatcattgcttggctccgaatgctttctgttggctgttatgtcttatgaccgctacactgccatttgccaccctctaagatacaccaatctcatgagacccaaaatttgtggacttatgactgccttctcctggatcctgggctctacagatggaatcattgatgctgtagcgacattttccttctcctactgtgggtctcgggaaatagcccacttctgctgtgacttcccttccctactaatcctctcatgcaatgacacatcaatatttgaagaggttattttcatctgctgtatagtaatgcttgttttccctgttgcaatcatcatcacttcctatgctcgagttattctggctgtcattcacatgggatctggagagggacgtcgcaaagcttttactacttgttcctctcacctcatggtggtgggaatgtactatggagcaggtttgttcatgtgcattcagcccacatctcatcattctcctatgcaggacaagatggtgtctgtattctacaccatcgtcactcccatgctgaatcctctcatttatagcctccgcaacaaggaagtgaccagagcattaatgaaaatcttaggaaagggcaagtctggagattga

SEQ ID NO: 45896 - DNA, 195 bp, Homo Sapiens
gccaaggcctccaaggagactcatgtaatggattaccgggtcttggtgcatgagcgagatgaggcagcctatgcggagctcagggccatggtgctggacctgagggccttctatgctgagctttatcatatcatcagcagcaacttggagaaaactgtccacccaaagggtgaagagaagccatctatgtactga

SEQ ID NO: 45897 - DNA, 2146 bp, Homo Sapiens
gcgtagctgaggaaggggaagagaagtccagccgccaagcccagccttccccggcgcgcagccccgacggggccgcggcaggcgcggcgagagcgctgacggagccatgagagagtacaaagtggtggtgctgggctcgggcggcgtgggcaagtccgcgctcaccgtgcagttcgtgacgggctccttcatcgagaagtacgacccgaccatcgaagacttttaccgcaaggagattgaggtggactcgtcgccgtcggtgctggagatcctggatacggcgggcaccgagcagttcgcgtccatgcgggacctgtacatcaagaacggccagggcttcatcctggtctacagcctcgtcaaccagcagagcttccaggacatcaagcccatgcgggaccagatcatccgcgtgaagcggtacgagcgcgtgcccatgatcctggtgggcaacaaggtggacctggagggtgagcgcgaggtctcgtacggggagggcaaggccctggctgaggagtggagctgccccttcatggagacgtcggccaaaaacaaagcctcggtagacgagctatttgccgagatcgtgcggcagatgaactacgcggcgcagcccaacggcgatgagggctgctgctcggcctgcgtgatcctctgaggcggccaccgcgcgccggccgcgctctgcgcacaaaagccaaacgcatccgactctctaaatgtgatttatttcttgctttgagattggagaccactttgcattggccagggtgtcttgggagcccggctggcctccgcggccggcgtcccctgcctccaccctgtgcccgagggggtgtccggtcctgcccatccgatactctggtggaaatgtggctctttgcagcatgtacgtttctccctgattttggttgatgcatatttccccgtttaagtagccgttagggcgcagtatcggcagcttgacacccaccaagcaaaagtttcagcctggaaaaaaaatgggggggaagggtggatgaaaaggagggagagaaggtggaaatggtttttttttttttttttctattttctttctttttttttttttttttttttggtcaacagccgtttttctagttccaagttttaaatacatggaaggaagtccgggagaaccatatgaaggagcaggaggagaggaagaaactttttttccttcttttccaggagtagctggaaattaagatcgggttccttttctgccagcttggaagggcaaccccatgactgattgcgattctgaggatgtctatgcaaagttggattcttgttacagtgtatccaatctgaagtattgcacatctgaactgggactgttaacactgatgccaatacagtgtggggtgccagaaagtgtctgctgatatttgtggaaaaaaaatctattttgtttacctactgtatcaaaggggagtctgggggagaatggtagtattttttttttttatcagctgtgaaaaaaatgttacagatctgcacattttcgtgtgtactatggtgtgtgtgtgtatgtgtgtggtgtgtgtgtgttttaagtttagccttttgtttttgttttttggttggcagtaaccgattttaatgactagcttttaaaaatacagtacaaagactttgtaaatgtgattcagggcccccagcacccctgtgtctgcagagtgccttcaaaactcagctgttccagccggtgccaacctgtgaacttcccaccatatcccagaatctgctattccccaaaccacttcccagtttcctttcagtaatctttctgaaggagccaggacaatagggcctgttgtttagtgaatttctttattattttcagcctttaaaatgtaatttccatctcttgcaatgaatttgtttcccttttttttgcttcattttgtttaaattttcaggtatttagctcccctttcatattatttttaaattttttaattacctgttgtagggtgttcctccagaagcaaagagcaaaattttactgttgtgatgtaccaattctaactaattgtaatttttaatttcatgcgtttaatcattgtctcttcattttaagacttttaatacaaatgtcatttttaaagaaacaaacccaaaa

SEQ ID NO: 45898 - DNA, 1875 bp, Homo Sapiens
caggccagagtcccagctgtcctggactctgctgtggggaagggctgatgcaggtgtggagtcaaatgtgggtgcctcctgcagccgggtgccaggaggggtggaggggccaccctgggctttgtccgggagcctggtcttcccgtccttgggctgacaggtgctgctgcctctgagccctccctgctaagagctgtgtgctgggtaaggctggtggccctttgggctccctgtccaggatttgcgctctggagggtagggcttgctgggctggggactggaggggaacgtggagctccttctgcctcctttcctgccccatgacagcaggcagatcccaggagagaagagctcaggagatgggaagaggatctgtccaggggttagacctcaagggtgacttggagttctttacggcacccatgctttctttgaggagttttgtgtttgtgggtgtggggtcggggctcacctcctcccacatccctgcccagaggtgggcagagtgggggcagtgccttgctccccctgctcactctctgctgacctccggctccctgtgctgccccaggaccatgaatggcacctacaacacctgtggctccagcgacctcacctggcccccagcgatcaagctgggcttctacgcctacttgggcgtcctgctggtgctaggcctgctgctcaacagcctggcgctctgggtgttctgctgccgcatgcagcagtggacggagacccgcatctacatgaccaacctggcggtggccgacctctgcctgctgtgcaccttgcccttcgtgctgcactccctgcgagacacctcagacacgccgctgtgccagctctcccagggcatctacctgaccaacaggtacatgagcatcagcctggtcacggccatcgccgtggaccgctatgtggccgtgcggcacccgctgcgtgcccgcgggctgcggtcccccaggcaggctgcggccgtgtgcgcggtcctctgggtgctggtcatcggctccctggtggctcgctggctcctggggattcaggagggcggcttctgcttcaggagcacccggcacaatttcaactccatggcgttcccgctgctgggattctacctgcccctggccgtggtggtcttctgctccctgaaggtggtgactgccctggcccagaggccacccaccgacgtggggcaggcagaggccacccgcaaggctgcccgcatggtctgggccaacctcctggtgttcgtggtctgcttcctgcccctgcacgtggggctgacagtgcgcctcgcagtgggctggaacgcctgtgccctcctggagacgatccgtcgcgccctgtacataaccagcaagctctcagatgccaactgctgcctggacgccatctgctactactacatggccaaggagttccaggaggcgtctgcactggccgtggctcccagtgctaaggcccacaaaagccaggactctctgtgcgtgaccctcgcctaagaggcgtgctgtgggcgctgtgggccaggtctcgggggctccgggaggtgctgcctgccaggggaagctggaaccagtagcaaggagcccgagatcagccctgaactcactgtgtattctcttggagccttgggtgggcagggacggcccaggtacctgctctcttgggaagagagagggacagggacaagggcaagaggactgaggccagagcaaggccaatgtcagagacccccgggatggggcctcacacttgccacccccagaaccagctcacctggccagagtgggttcctgctggccagggtgcagccttgatgacacctgccgctgcccctcggggctggaataaaactccccacccagagtc

SEQ ID NO: 45899 - DNA, 1365 bp, Homo Sapiens
atgctgaaacagatactgtcggagatgtacatagatcctgatctactggcagagctcagcgaagaacagaaacagatcctgttcttcaagatgagagaggaacagatccgacgatggaaagaaagagaagcagctatggaaagaaaggagtccctgccagtgaaacccagaccaaagaaagagaatggcaaatcggttcattggaaacttggagctgataaggaagtctgggtatgggtgatgggcgaacaccatctagataaaccctatgatgtgctctgtaatgaaattattgctgagagggcccggctgaaagcagaacaggaggcagaagagcccagaaaaactcactctgaagaattcaccaatagcttgaaaacaaaatcacagtaccatgatctgcaggctccggataaccagcagactaaagacatctggaagaaagtggcagaaaaggaggaactggagcaaggatcgaggccagcaccaaccctggaagaagagaaaatccgatcactctccagttcttcaagaaatattcaacaaatgttggcagattcaatcaatcgtatgaaggcatatgcatttcaccagaagaaagaatctatgaagaaaaaacaagatgaagaaataaatcaaatagaagaagagagaacgaagcagatttgtaagagctggaaagaagactcggaatggcaggcatctctgcgaaaatccaaagcagctgatgagaagagacgctccttggctaaacaagcacgagaagactacaagaggttatccctcggggcccagaaaggaagaggcggtgagaggctgcaaagccccttgcgtgttccgcagaaaccagaaagacctccccttccacccaagcctcagttcctaaactcaggggcatatcctcaaaaacctcttagaaatcagggagtggtgaggacactgtccagctctgcccaagaggacatcatccggtggtttaaagaggagcagctaccacttcgagcgggctaccagaaaacctcagacaccatagccccctggttccatggaattctcacactcaagaaagcaaatgaacttcttctgagcacaggcatgcccggcagttttctcatccgagtcagtgaaaggatcaaaggctatgccctgtcctatctgtcggaggacggctgtaaacatttcctcatcgatgcctctgcagacgcctacagcttcctgggcgtggaccagctacagcatgccaccttggcggatttggtggaatatcacaaggaggaacccatcacttccctggggaaggagctccttctctatccctgtggtcagcaggaccagctgcctgactacctggagctgtttgagtga

SEQ ID NO: 45900 - DNA, 1271 bp, Homo Sapiens
gggagggagagaggcgcgcgggtgaaaggcgcattgatgcagcctgcggcggcctcggagcgcggcggagccagacgctgaccacgttcctctcctcggtctcctccgcctccagctccgcgctgcccggcagccgggagccatgcgaccccagggccccgccgcctccccgcagcggctccgcggcctcctgctgctcctgctgctgcagctgcccgcgccgtcgagcgcctctgagatccccaaggggaagcaaaaggcgcagctccggcagagggaggtggtggacctgtataatggaatgtgcttacaagggccagcaggagtgcctggtcgagacgggagccctggggccaatggcattccgggtacacctgggatcccaggtcgggatggattcaaaggagaaaagggggaatgtctgagggaaagctttgaggagtcctggacacccaactacaagcagtgttcatggagttcattgaattatggcatagatcttgggaaaattgcggagtgtacatttacaaagatgcgttcaaatagtgctctaagagttttgttcagtggctcacttcggctaaaatgcagaaatgcatgctgtcagcgttggtatttcacattcaatggagctgaatgttcaggacctcttcccattgaagctataatttatttggaccaaggaagccctgaaatgaattcaacaattaatattcatcgcacttcttctgtggaaggactttgtgaaggaattggtgctggattagtggatgttgctatctgggttggtacttgttcagattacccaaaaggagatgcttctactggatggaattcagtttctcgcatcattattgaagaactaccaaaataaatgctttaattttcatttgctacctctttttttattatgccttggaatggttcacttaaatgacattttaaataagtttatgtatacatctgaatgaaaagcaaagctaaatatgtttacagaccaaagtgtgatttcacactgtttttaaatctagcattattcattttgcttcaatcaaaagtggtttcaatattttttttagttggttagaatactttcttcatagtcacattctctcaacctataatttggaatattgttgtggtcttttgttttttctcttagtatagcatttttaaaaaaatataaaagctaccaatctttgtacaatttgtaaatgttaagaattttttttatatctgttaaataaaaattatttccaacaaccttaata

SEQ ID NO: 45901 - DNA, 198 bp, Homo Sapiens
atggtcagagggcccaaatggcagggatacccagtgatgtcaggaggaatagtacagacagaaggtgctaagcagacaattcaactgccatgttttgccaccccctgtgagcagggattaggtgttcaggccagtatcttgggcatgggggagcctttggccagaagaggtataaagctcagaagtttttcagtctga

SEQ ID NO: 45902 - DNA, 969 bp, Homo Sapiens
atggatccaaccatctcaaccttggacacagaactgacaccaatcaacggaactgaggagactctttgctacaagcagaccttgagcctcacggtgctgacgtgcatcgtttcccttgtcgggctgacaggaaacgcagttgtgctctggctcctgggctgccgcatgcgcaggaacgccttctccatctacatcctcaacttggccgcagcagacttcctcttcctcagcggccgccttatatattccctgttaagcttcatcagtatcccccataccatctctaaaatcctctatcctgtgatgatgttttcctactttgcaggcctgagctttctgagtgccgtgagcaccgagcgctgcctgtccgtcctgtggcccatctggtaccgctgccaccgccccacacacctgtcagcggtggtgtgtgtcctgctctgggccctgtccctgctgcggagcatcctggagtggatgttatgtggcttcctgttcagtggtgctgattctgcttggtgtcaaacatcagatttcatcacagtcgcgtggctgatttttttatgtgtggttctctgtgggtccagcctggtcctgctgatcaggattctctgtggatcccggaagataccgctgaccaggctgtacgtgaccatcctgctcacagtactggtcttcctcctctgtggcctgccctttggcattcagtttttcctatttttatggatccacgtggacagggaagtcttattttgtcatgttcatctagtttctattttcctgtccgctcttaacagcagtgccaaccccatcatttacttcttcgtgggctcctttaggcagcgtcaaaataggcagaacctgaagctggttctccagagggctctgcaggacgcgtctgaggtggatgaaggtggagggcagcttcctgaggaaatcctggagctgtcgggaagcagattggagcagtga

SEQ ID NO: 45903 - DNA, 942 bp, Homo Sapiens
atgtccattatcaacacatcatatgttgaaatcaccaccttcttcttggttgggatgccagggctagaatatgcacacatctggatctctatccccatctgcagcatgtatcttattgctattctaggaaatggcaccattctttttatcatcaagacagagccctccttgcatgggcccatgtactattttctttccatgttggctatgtcagacttgggtttgtctttatcatctctgcccactgtgttaagcatcttcctgttcaatgcccctgaaacttcttctagtgcctgctttgcccaggaattcttcattcatggattctcagtactggagtcctcagtcctcctgatcatgtcatttgatagattcctagccatccacaatcctctgagatacacctcaatcctgacaactgtcagagttgcccaaatagggatagtattctcctttaagagcatgctcctggttcttcccttccctttcactttaagaagcttgagatattgcaagaaaaaccaattatcccattcctactgtctccaccaggatgtcatgaagttggcctgttctgacaacagaattgatgttatctatggcttttttggagcactctgccttatggtagactttattctcattgctgtgtcttacaccctgatcctcaagactgtaccgggaattgcatccaaaaaggaggagcttaaggctctcaatacttgtgtttcacacatctgtgcagtgatcatcttctacctgcccatcatcaacctggccgttgtccaccgctttgccgggcatgtctctcccctcattaatgttctcatggcaaatgttctcctacttgtacctccgctgatgaaaccaattgtttattgtgtaaaaactaaacagattagagtgagagttgtagcaaaattgtgtcaatggaagatttaa

SEQ ID NO: 45904 - DNA, 1204 bp, Homo Sapiens
agaacagacagacctactgacacaggggagggctctgtgagtaccacacagtggggagggggtgggggccaccatgtcatcatatcagaaggaactggagaaatacagagacatagatgaagatgagatcctaaggaccttgagccccgaggagctagagcagctggactgcgaactacaggagatggatcctgagaacatgctcctgccagctggactaagacaacgtgaccagacaaagaagagcccaacggggccactggaccgagaggcccttttgcagtacttggagcaacaggcactagaagtcaaagagcgtgatgacttggtgcccttcacaggcgagaagaaggggaaaccctatattcagcccaagagggaaatcccagcagaggagcagatcaccctggagcctgagctggaggaggcactggcacatgccacagatgctgaaatgtgtgacattgcagcaattctggacatgtacacactgatgagtaacaagcaatactatgatgccctctgcagtggagaaatctgcaacactgaaggcattagcagtgtggtacagcctgacaagtataagccagtgccggatgaacccccaaatcccacaaacattgaggagatactaaagagggtccgaagcaatgacaaggagctggaggaggtgaacttgaataatatacaggacatcccaatacccatgctaagtgagctgtgtgaggcaatgaaggcaaatacctatgtgcggagcttcagtctggtagccacgaggagtggtgaccccattgccaatgcagtggctgacatgttgcgtgagaatcgtagcctccagagcctaaacatcgaatccaacttcattagcagcacaggactcatggctgtgctgaaggcagttcgggaaaatgccacactcactgagctccgtgtagacaatcagcgccagtggcctggtgatgcagtggagatggagatggccaccgtgctagagcagtgtccctctattgtccgctttggctaccactttacacagcaggggccacgagctcgggcagcccaggccatgacccgaaacaatgaactacgtcgccagcaaaagaagagataacactgcatttccctttaccaactagcgctgggagcactggacacttaaatcctcatctgtcctcctttcctgtaaataaaagcccttctatcc

SEQ ID NO: 45905 - DNA, 277 bp, Homo Sapiens
gcgcaggcgccgagaggcgcacgggagacctcaggcccagactccactccccagctgtgaaaggactgctggccagacccccaagctagcccgccaggcctccatagagctgcccagcatggctgcgtccagtaccaagagttggtgggagacgggtgaagtacaggctcagtctgcggccaagactccatcctgcaaggatattgtggctggagacatgagcaagaaaagcctctgggagcagaagggaggctccaagacctcatcaacaattaag

SEQ ID NO: 45906 - DNA, 1338 bp, Homo Sapiens
agcctcttggaacttgcagcccacagcctgctgagcaatgaggcttcagttccactggtgttggaacagctcacagtgaaccttttcccgccactactcactgctgcatttgccaaggggcacagaaaggctctgaaggccttggtgcaggcctggcccttccggtttctccatctgggctctctgatagtgcagtggcccaaccaagacagcctgcaagctgtggtggatgggctggaggccttttctgcccacagggcttgtcccaggagaggcgaggcgggctggtgctggggcctggggagcagcccagggctgctgccactcatcttacctgggctccccagcatctcatcacacccctctccccgcaggaagtcagaactgaggatgctggatttcaccctggactctgagcaagtcttttactgtggcttcttcaagttagataagttcctctccgacctcctgacgaaagtggaacagagccacggggccctgcatctctgctgtaggaagttgcacattgagaagatggccgtcgacagtctgctgaggatcctgaagacactcaggctggatttcatccaggagctggaggtgttttactggtgtagagacttcttggtattggcagagccaaacctatctgccatacagctgggaaggatcttcaacctgcgcagcttcaagctcttctactacaagtgggccttctcctcatgggtcaggcggccctccagctacttcttctcccagctcaccatgctgggccacctccggaagctgcacctgtctcactcctacctcgtaggcaaactacattacatactcagctgtctgtgggtcccactacattccctggagatctgcaactgcaagcttctggacactgacatcacctacttgtcccggagccatcataccacctgcctgaagaagctggatctgagcgtcaacgacttgtcctacatgatccctgggcccttgggtaccctgctgagggcagtctcagggacactgcagcacctagacctgaaacactgctggctgaaggatgcccacctcagtgccctcctgcccgccctgtgccgctgctcccacctcagttccctgagcctctccgacaaccccatctccagtgcctgcctcctgagcctgctggagcacaccatggggctgatggagctgaagcaggtactctatcccatcccagttgactgctgcatctacctgcatggcgtctgccggggtcctgtgaacgaggacaagctgtgccagttgcaggccgagatacagaagcagctgcaagccatgcagcaggctgacatgcagtgg

SEQ ID NO: 45907 - DNA, 1009 bp, Homo Sapiens
cactgcgcccccgaccctagctcagggactgcagaactcaagataccatcccgtttctcctggctgaggaagggaagggaacatccacatcttctgtactcgtccattctgtgtccccggggcctggagtaaagacaccttcaaatgcagagactcttcagattcagctttcctggaaactgatcttcaatgcactaagagaaggagactctcaaaccaaaaatgacctggaggcaccatgtcaggcttctgtttacggtcagtttggcattacagatcatcaatttgggaaacagctatcaaagagagaaacataacggcggtagagaggaagtcaccaaggttgccactcagaagcaccgacagtcaccgctcaactggacctccagtcatttcggagaggtgactgggagcgccgagggctgggggccggaggagccgctcccatactcctgggctttcggagagggtgcgtccgcgcggccgcgctgctgcaggaacggcggtacctgcgtgctgggcagcttctgcgtgtgcccggcccacttcaccggccgctactgcgagcatgaccagaggcgcagtgaatgcggcgccctggagcacggagcctggaccctccgcgcctgccacctctgcaggtgcatcttcggggccctgcactgcctccccctccagacgcctgaccgctgtgacccgaaagacttcctggcctcccacgctcacgggccgagcgccgggggcgcgcccagcctgctactcttgctgccctgcgcactcctgcaccgcctcctgcgcccggatgcgcccgcgcaccctcggtccctggtcccttccgtcctccagcgggagcggcgcccctgcggaaggccgggacttgggcatcgcctttaattttctatgttgtaaataatagatgtgtttagtttaccgtaagctgaagcactgggtgaatatttttattgggtaataaatattttcatgaaagcgcctttggctccagatcctt

SEQ ID NO: 45908 - DNA, 1281 bp, Homo Sapiens
aaacaatgtcctccaccgagagaaacgtaaaggacacttgatcacacaatccctggaataatatccaggaaacacttgctggagccactcgcagcacccttccctggcagcacacttggggacagcgaggagatgagcgcatctctgaattacaaatctttttccaaagagcagcagaccatggataacttagagaagcaactcatctgtcccatctgcttagagatgttcacgaaacctgtggtgattctcccttgtcagcacaacctgtgtaggaaatgtgccagtgatattttccaggcctctaacccgtatttgcccacaagaggaggtaccaccatggcatcagggggccgattccgctgcccatcctgtagacatgaagtggttttggatagacatggggtatatggacttcagaggaacctgctggtggaaaatatcattgacatctacaagcaggagtccaccaggccagaaaagaaatccgaccagcccatgtgcgaggaacatgaagaggagcgcatcaacatctactgtctgaactgcgaagtacccacctgctctctgtgcaaggtgtttggtgcacacaaagactgccaggtggctcccctcactcatgtgttccagagacagaagtctgagctcagtgatggcatcgccatcctcgtgggcagcaacgatcgagtccagggagtgatcagccagctggaagacacctgcaaaactatcgagattggatttgaggctcctcccctccagggacaggctgcagctccagcgagtggcagtggagctgattctgagccagctcgccatatcttctccttttcctggttgaactccctaaatgaatgatattcattccaactgctgcccctctgtctgcctggctgagatgcatgtgggcagcaggaagcccaagtgaaattaatattatgcagatgatgaaagggacctctgaacaggatttctgcaaaaatagccccaaactgcaattccatatgacttatctaacatcttggggggaaagaatattttgagaaaatagttgcagaaagcactggaaataataaacttgatcttatacaaatcttctattgtgtggaaaatgttgtgaagggtgtgtaggtgtggtacatgtgtatgtcactaacaagtggcaaatggtgaaaaaagtggtcactatgcttttgtctctcataggcactgactttttgttattatattatggtagctttcatttcctttactctttaacagtgcaggtggtcagtgaaa

SEQ ID NO: 45909 - DNA, 533 bp, Homo Sapiens
tgctcagttcatccctagaggcagctgctccaggaacagaggtgccatgcagccccgggtactccttgttgttgccctcctggcgctcctggcctctgcccgagcttcagaggccgaggatgcctcccttctcagcttcatgcagggttacatgaagcacgccaccaagaccgccaaggatgcactgagcagcgtgcaggagtcccaggtggcccagcaggccaggggctgggtgaccgatggcttcagttccctgaaagactactggagcaccgttaaggacaagttctctgagttctgggatttggaccctgaggtcagaccaacttcagccgtggctgcctgagacctcaataccccaagtccacctgcctatccatcctgcgagctccttgggtcctgcaatctccagggctgcccctgtaggttgcttaaaagggacagtattctcagtgctctcctaccccacctcatgcctggcccccctccaggcatgctggcctcccaataaagctggacaagaagctgctatg

SEQ ID NO: 45910 - DNA, 396 bp, Homo Sapiens
agattcctcctaaagcccaagatagtaaaaaagaggaccaagaaattcatctggcaccagtcagacggacaggtccaagttaagtgtaactggtggagaccaagaggtattgatgacaaggtgcagagaagatttaagggccagatgttgatgcccaactttggttatggaggcaacaagaaaacaaaacacatgctgcctagtgccttccggaagttcctggtccacactgtcaaggagccacaagtgctgctgatgtgtagcaaatcttgctgcactgacattgttcaccatgtctcttccaagaactccaaaactgtcttggaaagagcagcccatctggccatcagggtaaacaatcccaatgccaggctgtgcagcaaagaaaatgaatag

SEQ ID NO: 45911 - DNA, 506 bp, Homo Sapiens
actttctaactctgtaggacacagcaaatcaaaatagaggtcctgggagggatccactaatttagtgagttagacaaagaatgatttatggcagtaaccacattcaggagaaatattcctataaaaactcagcaaatatggaaaactgagcacatgaagcaaaaatatttaaagattttcagaaatttggaaaacctaaattacattttaagacataggatgtcatgatctattttgtgctgatatagtagaatacctgagactgggtagcttataataaacagaaatgtattggctcacagttctggaagctggaagctcaatatcaaggtgttggcatcttgcaagggcctccttgctgtgccatcatatggcagaacgcacagagaaggagagaaccactccattaatcccaccatgagggcagggctcctgtggcctaacgacctcttaaaagtctccctctaaatactgatggaatgccaattaagactcaatgtgagttt

SEQ ID NO: 45912 - DNA, 391 bp, Homo Sapiens
gagaagcactgctgcctatgcactccatttacagggttatagagtggaaagtcccacaatctttttcttctctattttcagaaaaacgttgacctcttggcgagaatgcaaagaagggaacgcttgcttatacgctgttggtgaactgtcacccctacaactcagcttgcaaccagccctggccaccagtttccccacactgagctgaatatcggacatgcccatctcagacattccagcccattctgaaattccacatcgattcacctgacaaagtctgaagttccagggcaatttatctggaaaagcttacctggaatcacgtgtcatttcaaccaacaactgttgaagaggacgtggcattaaaaccaagggtatcaattatttataa

SEQ ID NO: 45913 - DNA, 1922 bp, Homo Sapiens
tctggagccaagtaatggtgatactgatgcttccttttctttgccgcgctcggattctgagtttcacaagaatgtacctgggtgccccttagcgggatatgaatagcttcttcggaaccccagcggccagctggtgcctcctggaaagtgacgtctcatctgcaccggacaaggaggcggggagggagcgcagagcactcagcgtccagcagcgcggcgggccagcctggagcggaagcctggagtggagcaggcagtccgcgggggacagacgtcggctgggattgagccggcagactgcgaaaagtagctggagccggagcagggacagaacctgttgctgcagacgggcttggtggattctggttcctgccgccgacagggctcgccgggagaggttcatcatgaatgagaaatgggacacaaactcttcagaaaactggcatcccatctggaatgtcaatgacacaaagcatcatctgtactcagatattaatattacctatgtgaactactatcttcaccagcctcaagtggcagcaatcttcattatttcctactttctgatcttctttttgtgcatgatgggaaatactgtggtttgctttattgtaatgaggaacaaacatatgcacacagtcactaatctcttcatcttaaacctggccataagtgatttactagttggcatattctgcatgcctataacactgctggacaatattatagcaggatggccatttggaaacacgatgtgcaagatcagtggattggtccagggaatatctgtcgcagcttcagtctttacgttagttgcaattgctgtagataggttccagtgtgtggtctacccttttaaaccaaagctcactatcaagacagcgtttgtcattattatgatcatctgggtcctagccatcaccattatgtctccatctgcagtaatgttacatgtgcaagaagaaaaatattaccgagtgagactcaactcccagaataaaaccagtccagtctactggtgccgggaagactggccaaatcaggaaatgaggaagatctacaccactgtgctgtttgccaacatctacctggctcccctctccctcattgtcatcatgtatggaaggattggaatttcactcttcagggctgcagttcctcacacaggcaggaagaaccaggagcagtggcacgtggtgtccaggaagaagcagaagatcattaagatgctcctgattgtggccctgctttttattctctcatggctgcccctgtggactctaatgatgctctcagactacgctgacctttctccaaatgaactgcagatcatcaacatctacatctacccttttgcacactggctggcattcggcaacagcagtgtcaatcccatcatttatggtttcttcaacgagaatttccgccgtggtttccaagaagctttccagctccagctctgccaaaaaagagcaaagcctatggaagcttatgccctaaaagctaaaagccatgtgctcataaacacatctaatcagcttgtccaggaatctacatttcaaaaccctcatggggaaaccttgctttataggaaaagtgctgaaaaaccccaacaggaattagtgatggaagaattaaaagaaactactaacagcagtgagatttaaaaagagctagtgtgataatcctaactctactacgcattatatatttaaatccattgctttttgtggctttgcacttcaaatttttcaaagaatgttctaaataaaacatttactgaaagccctctctggcaaaaaaattaaaaataaacaaaaatggtcataagatcataaacaatcttatgttgtataaaaatacgtagagtgacttagacatgtttgcatgaataaatatatttctagagaacagtttacaaa

SEQ ID NO: 45914 - DNA, 354 bp, Homo Sapiens
atggtccagcgtttgacataccaatgtaggctttcctacaatacagcgtccaacaaaactagactgccccgaacccctggtaatagaattgtttacctttataccaagaaggttgggaaagcaccaagatctgcaagtggcatgtgcccaggaagacttcgaggggttcgtgctgtaagacctaaagttcttatgaaattgtcaaaaagaaagaaacatgtcagcagggcctatggtggttccatgtgtgctaaatgtgttcgtggcaggatcaagcgtgctttccttatcggggagcagaaaatcgttgtgaaagtgttgaaggcacaagtacaaagtcacaaagctaaataa

SEQ ID NO: 45915 - DNA, 1356 bp, Homo Sapiens
gaatttgttacggccctggctgacctccgagcagaggctagctgtcccatctgtctggactacttgaaagacccagtgaccatcagctgtgggcataacttctgtctctcctgcatcattatgtcctggaaggatctacatgatagtttcccctgccccttttgccacttttgctgtccagaaaggaaatttataagcaatccccagctgggtagtttgactgaaattgctaagcaactccagataagaagcaagaagaggaagaggcaggaagagaagcatgtgtgtaagaagcataatcaggttttgactttcttctgtcagaaagacctagagcttttatgtccaaggtgcagtttgtccactgatcaccagcatcactgtgtttggcccataaagaaggctgcctcctatcataggaaaaaactggaggaatacaatgcaccgtggaaggagagagtggaactaattgaaaaagtcataactatgcaaaccaggaaatcactggaactgaagaaaaaggtaaaacatagggcagaagaagtcaagtctgaatttgagcaacttaggttatttctccaaaatgagcaagagactgttcttaggcaattacaagatgaagagatggatattttagcacaactaaatgaaagcctaacaaaattttcagattatacctcctcattaaaatatctactaaaggagatagagagcatatatgtgaagtcagaactggaattactggcaaatgttaaggatatctatcacagatatgagaatttaaaattccctgagctgtttttattcaaattaaaaaaatatggttaccatctgcctccacaatattctggcctagacaaaattatcaagcgatttcaagtagatgtaattctagatcctgaaacagcacatcgtaaacttatagtctcagaagatagaaaaactgtgcgctatggaaatacaacacaaaatgtacctcataacccaagaagattttatctcctcccagctgttctgggttctaagggatatagttgtggcaggcagtactgggaagtagaagtgaaagacaagcctgaatggattcttggtgtctgtaatgactgtcttcccagaaggaggaagagtcaaccaattttagtacaggatggattatggggaatttggcgatctagtcagaataattatattgtattgggccacagggaaattattctgctgccacaagtaattcctagtaagattggcatttttttagactatgaaatgaatgaagtttccttttataatttgaatgatagatctcttctctatacttttaatgataattttacaggagcactttggccttatttt

SEQ ID NO: 45916 - DNA, 861 bp, Homo Sapiens
tggaagatttgatggacatggacatgagcctcctgaggccctagaactatcttttcggttgtgaactgaaggccaacaaagattatcactttaaggtggataatgatgaaaatgagcaccagttatctttaagaatggtcagaacggtcagtttaggggctggtgcaaaggatgaattgcacattgttgaagcagaggccatgaattacgaaggcagcccaattaaagtaacactggcaactttgaaaatgtctgtacagccaacggtttcccttgggggatttgaaataacataaccagtggtcttacagttgaagtgtggttcagggccagtgcatattagtggacagcacttagtagctgtggtagaagatgcagagtcagaagatgaagaggaggaggatgtgaaactcttaagtatatctggaaagcggtctgctactggaggtggtagcaaggttccacagaaaaaagtaaaacttgctgctgatgaagatgatgatgatgatgatgataatgatgatgatgaagatgatgatgattttgatgatgagggaactgaagagaaagcaccagtgaagcaatctatacaagacactctagccaaaaaaggacaaaaattaaatcagaatggaaaagactcaaaaccatcattaacaccaagatcaaaaggacaagactccttcaaaaaacaggaaaaactcctaaaacaccaaaaggacctagttctgtagaagacatcagagcaaaaatgcaagcaagtatagaaaaagtgcattgaacagtcctgggcactactggtaaattaagcccaaagatggggagaaaggaaaaggagagaccaatatagtccatactgag

SEQ ID NO: 45917 - DNA, 452 bp, Homo Sapiens
gcaaccagagggagatgatcacctgaaccactgctccaaaccatgggcagtaaatgctgtaaaggtggtccagatgaagatgcagtagaaagacagaggcggcagaagggcctggatgattcagtgctggtggaggacgttggtgcagagacggatccgtcagcggcggcaggccctgttgagggtctacgtcatccaggagcaggcgacggtcaagctccagtcctgcatccgcatgtggcagtgccggcaatgttaccgccaaatgtgcaatgctctctgcttgttccaggtcccagagagcagccttgccttccagactgatggctttttacaggtccaatatgcaatcccttcaaagcagccagagttccacattgaaatcctatcaatctgaaaggcctggggcatggagaacaggctgcactaccctaataaatgtctgaccaggt

SEQ ID NO: 45918 - DNA, 951 bp, Homo Sapiens
atggagctctggaacttcaccttgggaagtggcttcattttggtggggattctgaatgacagtgggtctcctgaactgctctgtgctacaattacaatcctatacttgttggccctgatcagcaatggcctactgctcctggctatcaccatggaagcccggctccacatgcccatgtacctcctgcttgggcagctctctctcatggacctcctgttcacatctgttgtcactcccaaggcccttgcggactttctgcgcagagaaaacaccatctcctttggaggctgtgcccttcagatgttcctggcactgacaatgggtggtgctgaggacctcctactggccttcatggcctatgacaggtatgtggccatttgtcatcctctgacatacatgaccctcatgagctcaagagcctgctggctcatggtggccacgtcctggatcctggcatccctaagtgccctaatatataccgtgtataccatgcactatcccttctgcagggcccaggagatcaggcatcttctctgtgagatcccacacttgctgaaggtggcctgtgctgatacctccagatatgagctcatggtatatgtgatgggtgtgaccttcctgattccctctcttgctgctatactggcctcctatacacaaattctactcactgtgctccatatgccatcaaatgaggggaggaagaaagcccttgtcacctgctcttcccacctgactgtggttgggatgttctatggagctgccacattcatgtatgtcttgcccagttccttccacagcaccagacaagacaacatcatctctgttttctacacaattgtcactccagccctgaatccactcatctacagcctgaggaataaggaggtcatgcgggccttgaggagggtcctgggaaaatacatgctgccagcacactccacgctctag

SEQ ID NO: 45919 - DNA, 120 bp, Homo Sapiens
atgcccagatgtgaggggcagatgaagggaatgttgctggaaaggtgccttttaaggctgctgagaatttctggactgtgtcctgatggacgcagcaccatcaaagcccagaatttctga

SEQ ID NO: 45920 - DNA, 348 bp, Homo Sapiens
atggatggagaggagaaaacctgtggtggctgtgaaggccctgatgcgatgtatgtgaaattgatatcatctgatggccatgaatttattgtaaaaagagaacatgcattaacatcaggcacaataaaaaccacattgggtggcccaggtcagtctgctgtgaatgaaaccaatgaggtcaattttagagagataccttcgcgtgtgctatcaaaagtatgcacgtattttatgtataaggttcgctaccctaacagctccaccgaggttccagagctcccaattgcacctgaaattgcactagaactgttaatggatgtgagcttcctagattgtgaaataaaataa

SEQ ID NO: 45921 - DNA, 457 bp, Homo Sapiens
agtggggtgtagaaacaggcctgttaaggagaggccaccgggacttcagtgtctcctccatcccaggagcgcagtggccactatggggtctgggctgccccttgtcctcctcttgaccctccttggcagctcacatggaacagggccgggtatgactttgcaactgaagctgaaggagtcttttctgacaagttcctcctatgagtccagcttcctggaattgcttgaaaagctctgcctcctcctccatctcccttcagggaccagcgtcaccctccaccatgcaagatctcaacaccatgttgtctgcaacacatgacagccattgaagcctgtgtccttcttggcccgggcttttgggccggggatgcaggaggcaggccccgactctgtctttcagcaggcccccaccctcctgagtggcaataaataaaattcggtatgctgaattcaataa

SEQ ID NO: 45922 - DNA, 761 bp, Homo Sapiens
ggcagcaggaccagcatgcaccaccgaaacgactcccagaggctggggaaagctggctgcccgccagagccgtcgttgcaaatggcaaatactaatttcctctccaccttatcccctgaacactgcagacctttggcgggggaatgcatgaacaagctcaaatgcggcgctgctgaagcagagataatgaatctccccgagcgcgtggggactttttccgctatcccggctttagggggcatctcattacctccaggggtcatcgtcatgacagcccttcactcccccgcagcagcctcagcagccgtcacagacagtgcgtttcaaattgccaatctggcagactgcccgcagaatcattcctcctcctcctcgtcctcctcagggggagctggcggagccaacccagccaagaagaagaggaaaaggtgtggggtctgcgtgccctgcaagaggctcatcaactgtggcgtctgcagcagttgcaggaaccgcaaaacgggacaccagatctgcaaatttagaaaatgtgaagagctaaagaaaaaacctggcacttcactagagagaacacctgttcccagcgctgaagcattccgatggttcttttaaagcagtagtatatcttattttcaaggcatttggaaatgaagggcaaactaatgtcttgttttaagaaactgcttagtccaccactgaagaaaatatccagaaattattttcattttatgtatagggctttcttcaaaaaaaaaaaaaaa

SEQ ID NO: 45923 - DNA, 726 bp, Homo Sapiens
atgccaattaaggatgacataagctggcccccgagtgctgtgtgttcagtgtcactaattctccatcttcctggcagatttgggcatgtgagtgtggcacacctcctgttggatcacggggctgatgtcaatgcccagaaccggctgggggccagtgtgctcactgtggcttctcggggcggccacctgggtgtggtgaagctgctcctggaagccggtgcctttgtggaccatcaccacccttcaggcgagcaactggggttgggcggcagcagggatgagcccttggacatcacagccctgatggctgccatccagcacgggcacgaggccgtggtgcgtctactgatggagtggggcgcggaccccaaccacgcagcccggaccgtgggctggagcccgctgatgctggccgcactcactgggcggcttggagtggcccagcagctggtggagaagggcgccaaccctgaccacctcagcgtgctggagaagaccgccttcgaggttgcactggactgcaagcacagggaccttgtagactacctggacccgctgaccaccgtcaggcccaaaacaggtcaggctgcatgccccccgtggcttcacagaggaccccaaattgtgtttatgtggcttaagctgaggattgctctactggaaggacacgcagaactcagagtccagccctgcagaccactgagactgaggaagtggtgtgcttaa

SEQ ID NO: 45924 - DNA, 402 bp, Homo Sapiens
atgggcagagcggaagcggcgggccggcgtcacggcgccgggtgggggccgcgctgcggggcggtgacgggagtcgctgacggcgcctacgtgtcaccgtggaaaccaaacagtaaacagaggactcgcgagctcctggcacccaggcccgtatggataatcccttacatcgagcagatgagcaaggccatgctccagctgaaggctctggagtcttcagacctcaccgaggtcgtggtttacagctcctattggtacaagctccaaaccaagtggatgctccagtccatggctgagtggcactgccagcaccaggagcaagggatgctcaaacttgcagaagccatgaatgccctcaaactagacccttggatgaagcgaaccagcttccggccaatgtga

SEQ ID NO: 45925 - DNA, 357 bp, Homo Sapiens
atgaagaaacaaggagtaagcccaaagccgctgcaatcttcccgccccagcccgtctaagcggccctgcggggcctcccccgcccgggagcgggaggtggaaaagtcggccctaggcggcgggaaactgccggggggcgccaggaggtcctccccggggaggatcccaaatctgaaaaagcgaaaaggcttggagctaaaggtggtggccaaggcccttctcggccccttccagttcgtctgtaattccctggcgcagctccgggaagaggtgcacgaactgcaggcgcggtggttccccagcagaaccactctgcatcgccgtctttgtggcaattctacattggtaagatgtagt

SEQ ID NO: 45926 - DNA, 360 bp, Homo Sapiens
atgatatcagagggctttcttacctcaagcccttctggcttaaggacaaggttatttctttcatttctgtctgcaaactgtggtagtgtattcgatttcaaggattctgggatgaattcttcaatgataagaacctgctattattgtccctgctttacagctccagggattggcagcctcattcttcaaaagttgcacacctttagggccttgggaggtacaggcaccagcaaggagtcagaaggaatgaaagctggagagatgcggcccacactggaaagacaggaggaaaggagagagaaagcgcctcggccaggcacagtggctcatgcctgtaatcccagcactttgggaggctga

SEQ ID NO: 45927 - DNA, 798 bp, Homo Sapiens
gacgcctatctgcggaaactgggcttgtatcggaaactggtcgccaaggacgggtcgtgcctgttccgggccgtggcggagcaggtattgcactctcagtctcgccatgttgaagtcagaatggcctgtattcactgtcttcgagagaacagagagaaatttgaagcgattataggaggatcatttgaaggatatttaaagcgcttggaaaatccacaggaatgggtaggacaaatggaaataagtgccctttctcttatgtacaggaaagattttataactaatctggaacctaatgtttctccttcacaagtaactgaaaataattttcctgaaaaggtgttactgtgtttttcaaatggaaatcattatgatattgtgtatcccgtaaagtataaagaaagctctgctatgtgtcagtctctcctttatgaattgctgtatgagaaggtatttaaaactgatgttagtaaaattgtgatggaactagacacgttggaagtagctgatgaagacaacagtgaaatatcagattcagaggatgacagctgcaagagtaaaactgctgttgctgctgctgatgtgaatggatttaaacctttgtcaggcaacgagcagctgaagaacaatgggaactctactagcctgcctttggctagaaaggttcttaagtcactcaatcctgcagtctatagaaatgtggaatatgaaatttggctggagtctaaacaagctcagcaaaaacgtgattattccattgctgctggcttacaatatgaagttggagacaaatgtcaa

SEQ ID NO: 45928 - DNA, 366 bp, Homo Sapiens
atggccccccggcccctcctgctgctgctgctgctcctcgggggctccgccgcgcgccccgcgccccccagggcccggcgacactcagacgggacgttcaccagcgagctcagccgcctgcgggagggcgcgcggctccagcggctgctacagggcctggtggggaagcgcagcgagcaggacgcagagaacagcatggcctggaccaggctcagcgcgggtctgctctgcccgtcagggtccaacatgcccatcctgcaggcctggatgcccctggacgggacctggtctccctggctgccccctgggcctatggtttcagaaccagctggcgctgctgcagaaggaaccttgcggcccagatga

SEQ ID NO: 45929 - DNA, 630 bp, Homo Sapiens
atgctttccagtcaactatgctgcgtgcacagcctcccacccaccgccaacccagctgccctctgctcactcgctcaacagatgtttactaacatcaggtccccctgctctggcccccagggcagccccgggcttccgagaaggacccatatccacctctggcctcactctgcccatatgtactttctggtgacttcttccttgctccctttcccactaatccaaccaggatgttccagaaccagatttaagacgctttgctctctgagacacacaagtgcacccacagaggagggacatggtcctgtgcggagaccctgtggcatgcactgtctgagccatctgccccatcccagaggaagacctcagggtcaccccacccacatgagaccagccctgcagcaagctctcctgtcccacccatctctcctcctcccttggagaagctctcctgactctgctgtccaggtaggcccctctatgattctcaggaggatcccaatggctgggcacctctgcttcccacactggccacagctgctggacagcagggactgttgcacttacacctgtatcaatacacctgtgctcaatagtcacatggtgcaggaaggagtgtgtggccagtaa

SEQ ID NO: 45930 - DNA, 3188 bp, Homo Sapiens
agtccttccatctgggaggccaaggcggcttcgcgttctgagaatagacagaacctctgttactctgtgaccggcaggcaccgggagatccgtagctcagacgccaggacatcccggaagctgggaaatgggactgttgacattcagggatgtggccgtagaattctctttggaggagtgggaacacctggaaccagctcagaagaatttgtatcaggatgtgatgttagaaaactacagaaacctggtctctctgggtcttgttgtctctaagccggacctgatcacctttttggaacaaaggaaagagccttggaatgtgaagagtgaggagacagtagccatccagccagatgtgttttcgcattataacaaggacctgttgacagagcactgcacagaagcttcattccaaaaagtgatatcgaggagacatgggagctgtgatcttgagaatttacatttaagaaaaaggtggaaaagggaggagtgtgaagggcacaatggatgttatgatgaaaagacttttaaatatgatcaatttgatgaatcctctgttgaaagtttgtttcaccagcaaatactttcttcttgtgccaaaagctataactttgatcaatataggaaggtctttactcattcatcattgcttaatcaacaagaggaaatagatatttggggaaaacatcacatatatgataaaacttcagtgttatttaggcaggtctctactctaaatagttaccgaaatgtttttattggagagaaaaattatcattgcaataattctgaaaaaaccttgaaccaaagctcaagccctaaaaatcatcaggaaaattattttctagaaaaacaatacaaatgtaaagaatttgaggaagtctttcttcagagtatgcatgggcaagagaaacaagaacagtcttacaaatgtaataaatgtgtagaagtttgtacccagtcattaaaacatattcaacatcagaccatccatatcagagaaaactcatatagctataacaaatatgataaagatcttagtcagtcatcaaatcttagaaagcagataatccataatgaagagaaaccatacaaatgtgaaaaatgtggggatagcttaaaccatagtttgcaccttactcaacatcagatcattcctaccgaagagaaaccctgtaaatggaaagaatgtggcaaggtctttaaccttaactgtagtttataccttactaaacagcagcaaattgatactggagaaaacctttacaaatgtaaagcatgtagcaaatcttttactcgttcctccaatcttattgtgcatcagagaattcacactggagagaaaccatacaaatgtaaagaatgtggcaaagcctttcgctgtagttcataccttactaaacataagcgaattcatactggagagaaaccttataaatgtaaagaatgtggaaaagcttttaaccgtagttcatgccttactcaacatcagacaactcatacaggagaaaaactttacaaatgtaaagtatgtagcaaatcttatgctcgttcttcaaatcttattatgcatcagagagttcatactggagagaagccttataaatgtaaagaatgtggcaaagtctttagccgtagttcttgccttactcaacatcggaaaattcatactggagaaaatctttacaaatgcaaagtatgtgctaaaccttttacttgtttctcaaatcttattgtgcatgagagaattcatactggagagaaaccctataaatgtaaagaatgtggcaaagcctttccttatagttcacaccttattcgacatcatcgaattcatactggagaaaaaccatacaaatgtaaagcatgtagcaaatcttttagtgactcctcaggtcttactgtgcatcggcgaactcatactggagagaaaccctatacatgtaaagaatgtggcaaagcctttagttatagttcagatgttattcagcatcggagaattcatactggccagagaccctacaaatgtgaagaatgtggcaaagccttcaactataggtcatacctcactacacatcagagaagtcatactggagagagaccctacaaatgtgaagaatgtggcaaagccttcaactctaggtcatacctcactacacatcggagaagacatactggagagagaccctacaaatgtgatgaatgtggtaaagccttcagctataggtcatacctcactacacatcggagaagtcatagtggagagagaccctacaaatgtgaagaatgtggcaaagcctttaactctaggtcatacctcattgcacatcagagaagtcatactagagaaaaactttaaaaatgtaaaacatggagcagattttttacttgttacccatgtcttattgtgcatcagataatttatatgggagtgaaaccctacaaatgttaagaatgtggcataacctttaactattttcaagccttacacaatagcagagaatataaactgaaaaaatccatacaaatattaaaaatgtggcaaattattttaaactgtgctcaacccttactcaagataatccatactagagaaacactatagatgtaaaaatgtgaaaagttttattcaaaatatcaaacttatgagtcacctaggggttcatagaaaaaggaagtttgcagatgcaataaatgtgaggaagtatttaataaaaaatgaagtctaaatgtgtcagagaatttatgtgagaaaggactaaagcacagacactttcagcctttatactaaataagagtattttttgtacagaataatctaaaggcaaaataattagataatttatttgcttatatgttttaaagtagcaagaacattgatgttttgacaggtatatttcatagatacttcatttgtatttacagtatttgaggtttttggaaagcaaatattatttatataattcagctttcaaatctgttgctgcttttccttaatccgtggtgttcatgtgaaaatatgtgttctgtttttttttctgcatcagaacaatgtgaggtcattctacgttaatatcattaatatcagcatttttcatggaagtttaatgccaaatgtaaaacacatgaaaatttttaaaaatatgctctttgtgtttgaataaagtagtaatgcatgtaaacatata

SEQ ID NO: 45931 - DNA, 2454 bp, Homo Sapiens
atgatggatgggccacgttccgatgtgggccgttggggtggcaaccccttgcagccccctaccacgccatctccagagccagagccagagccagacggacgctctcgcagaggaggaggccgttccttctgggctcgctgctgtggctgctgttcatgccgaaatgcggcagatgacgactggggacctgaaccctctgactccaggggtcgagggtccagctctggcactcgaagacctggctcccggggctcagactcccgccggcctgtatcccggggcagcggtgtcaatgcagctggagatggcaccatccgagagggcatgctagtagtgaacggtgtggacttgctgagctcgcgctcggaccagaaccgccgagagcaccacacagacgagtatgagtacgacgagctgatagtgcgccgcgggcagcctttccatatgctcctcctcctgtcccggacctatgaatcctctgatcgcatcacccttgagttactcatcggaaacaaccccgaggtgggcaagggcacgcacgtgatcatcccagtgggcaaggggggcagtggaggctggaaagcccaggtggtcaaggccagtgggcagaatctgaacctgcgggtccacacttcccccaacgccatcatcggcaagtttcagttcacagtccgcacacaatcagacgctggggagttccagttgccctttgacccccgcaatgagatctacatcctcttcaacccctggtgcccagaggacattgtgtacgtggaccatgaggattggcggcaggagtatgttcttaatgagtctgggagaatttactacgggaccgaagcacagattggtgagcggacctggaactacggccagtttgaccacggggtgctggatgcctgcttatacatcctggaccggcgggggatgccatatggaggccgtggagacccagtcaatgtctcccgggtcatctctgccatggtgaactccctggatgacaatggagtcctgattgggaactggtctggtgattactcccgaggcaccaacccatcagcgtgggtgggcagcgtggagatcctgcttagctacctacgcacgggatattccgtcccctatggccagtgctgggtctttgctggcgtgaccaccacagtgctgcgctgcctgggtctggccacccgtactgtcaccaacttcaactccgcccacgacacagacacatcccttaccatggacatctacttcgacgagaacatgaagcccctggagcacctgaaccatgattctgtctggaacttccatgtgtggaacgactgctggatgaagaggccggatctgccctcgggctttgatgggtggcaggtggtggatgccacaccccaagagactagcagtggcatcttctgctgcggcccctgctctgtggagtccatcaagaatggcctggtctacatgaagtacgacacgcctttcatttttgctgaggtgaatagtgacaaggtgtactggcagcggcaggatgatggcagcttcaagattgtttatgtggaggagaaggccatcggcacactcattgtcacaaaggccatcagctccaacatgcgggaggacatcacctacctctataagcacccagaaggctcagacgcagagcggaaggcagtagagacagcagcagcccacggcagcaaacccaatgtgtatgccaaccggggctcagcggaggatgtggccatgcaggtggaggcacaggacgcggtgatggggcaggatctgatggtctctgtgatgctgatcaatcacagcagcagccgccgcacagtgaaactgcacctctacctctcagtcactttctatactggtgtcagtggtaccatcttcaaggagaccaagaaggaagtggagctggcaccaggggcctcggaccgtgtgaccatgccagtggcctacaaggaataccggccccatcttgtggaccagggggccatgctgctcaatgtctcaggccacgtcaaggagagcgggcaggtgctggccaagcagcacaccttccgtctgcgcaccccagacctctccctcacgttactgggagcagcagtggttggccaggagtgtgaagtacagattgtcttcaagaacccccttcccgtcaccctcaccaatgtcgtcttccggctcgaaggctctgggttacagaggcccaagatcctcaacgttggggacattggaggcaatgaaacagtgacactgcgccagtcgtttgtgcctgtgcgaccaggcccccgccagctcattgccagcttggacagcccacagctctcccaggtgcacggtgtcatccaggtggatgtggccccagcccctggggatgggggcttcttctcagacgctggaggtgacagtcacttaggagagaccatccctatggcatctcgaggtggagcttag

SEQ ID NO: 45932 - DNA, 2329 bp, Homo Sapiens
gcagggagatgttttaaagatgaatccgaatttggaagacttccattatgattacattgacttgctaaaggaaccagcaaaaaataagcagacaatattcaatgaagaaaggaataaggggcaggtgcaggtggcagatcttttgggcatcaatggaacaggggaagagcgactaccacaagacctgaaggtgtccactgacaaggagggtggcgtccaggacctgctcctgcctgaagacatgctctcaggggaagaatatgagtgtgtctcacctgatgacatctccttgcctcctctcccaggaagccctgagtcccctcttgcaccatctgacatggaggtggaagagcctgtcagctcctccctcagccttcacataagcagctatggggtgcaggctgggaccagcagcccaggggatgcccaggaatctgttcttccaccacctgttgcctttgcggatgcatgcaatgataagagagaaacattttcaagtcattttgagaggccttacctccagttcaaagctgagcccccactaacctccagaggattcgtggaaaagagtactgccttacacagaatcagtgctgaacatccagagagcatgatgagtgaagtgcatgagagagctttacagcagcaccctcaggctcagggtggtttgctagaaacacgggagaaaatgcatgctgataataacttcactaaaacccaagataggctgcatgcttcctctgatgcattctcgggcctcaggtttcaatcaggcaccagcaggggctatcagaggcaaatggttcctcgagaagagattaaaagcacatcagcaaagagcagcgtggtcagcctagctgaccaggcacctaatttctccaggctcctgtctaatgtaactgtcatggaaggttctccagtgactttggaagttgaagtaacaggatttccagagcctacactgacatggtacaagaagggccagaaattgtctgcagatgggcacttacaggttttacacaaggagacaaggcattcggtgttcattccaaaggtatgcaaggcagacgcaggcctctatgtggctcgggcccaaaactctagcggcgctctctcttccaatgtcatcctccacgtgacaggtaactgcaggctgccaatcacaagagtaaactggataaccctgtgtgtcgtctatgttagtgtgtccctaatgtactggctcctcacacaataactgtggtgttggcaccaatggacatcattctcatgtgcctaaagaaaagtgccgccgtttatcttcctgcacctcctgcaaagcatctcccaccaagtgtatctccagtctgatcaccatacttgtttggctaataccactgctaggtgaaataatcaaattttctggagcgtttaatatatttgagaagcttggtaaattatctgtagtggataagaacagatttttgtactctagaaacagatgttttcaacataatatgcagcaaaattattctatgcctattccctcctaatttaagggcgtgcagatgaaggctgacatcggcatagaaatgtgctaaatttcaaatatggttgttcaataatatatttttaattgtattttaaaacatccctttgtagggaatatcagtagaactattgaattgatgttgtatttttgcattagctgtcctttaattttgctttccatgtcttgatcttgttaccgaaatgcattctgtgtaatttcaacgtagactacgttcctgagtctgatgatgtcattgtaaataatcattcctcatgttgctctcacgggtttgacattggaggatagatgtgccatcaactttaaatagagtttccatcttttgtcagctctgcatgtcatacagcaagatggaacacaggttgcaagaaagaaccaacgttattcctgacattctattgatgtgttttgagcagcaatgtgtaaccaggtgtttctgcttctaatcttgattctgctgatgaccatttttatactttatggcaaagcctcattgcctcagtttcctgtctggaaaatgagttcatcatctacctcttgggcaattgagagttttcattttgtgtcttttaaacatctggaaaatggaaaacactgagggctaaggataatgatattgtttaatgtaatttgtcatcagaccggcctcctgctcactatttctttttttttagatgctgtttttttagaatattaaattaaaggagtgctgttaatatgtaatcttcaactagttccatggaggaaagtgatgttttatgaattagagcttaaattcct

SEQ ID NO: 45933 - DNA, 387 bp, Homo Sapiens
atgtgggaaagggaacgcgagctgcccagctgcccgggagaccaggttaccttcctttaccccggaaggcagcctgccctgctacagcattgcctcatgctccgatcaccacacacatcaatggcaggaggagagggtcaggataactcgggacggactcctcccaggagctccctgggcgaaggcggtcccatcggggaagcgggattccctcctccagtagggaagaagcaccctcagcaaggagactgccgaggcgtggggacgctctgctctgcgtttgtggaaaccaggcactcgcctggcacagggtctcgcaccccggtctcggtgcagccttgtgtggttctggtgcttgggagggcgtgttccccacgtgcctactga

SEQ ID NO: 45934 - DNA, 2053 bp, Homo Sapiens
ccatagtcttagctactcaggaggctgaggagggaggattatctgagccctggcggttgaggctataatgagccatgattgtgccactgcactccagccttggcaacacagtgtgagaccctgtctcaaaaacaataaaaacccaaaacaaaagaaccaagaaattactggacctgaggcctggcctttagctgctgccctgcccttgtgacctggtcactcgggatcccctgggcctaaacacacagcctattgtctacctcaagaaggctccccactgcttggctggcaattggggtgggctttgcaggccccacctgtcctggccccacggcgctggtgctgcaggcccccaccactgcttgttccgagctccccagcctcctgcagagttgcctgcacctgatggcgatgaatcaggaaggcaggcgtgtcctgggccacagagcagtcatggctgtcagccaccagggggctccatttgcaactttggatgtggctttggcctctttgtccaaagtgaccttggggcccccagacaagagacagggagactggagcccagccccaccctcccgcacatacctggcccatccctgccctatcctggaagatgggggccaccacacgtgcaagggacacgggataggaacctttggccttgttatcagacattttaaaactaagtgcaaacgtgattatcaggtgcagtttttacagcagcaagaaacctgtgcttacagaaagaaacacgtgctagcaacccacctatgcggaaagccacacagagccattgttttctgcactctcaggtgacggctcacatttgccccagggaaggtcacagctgcctgaacttttaaaactcccagacacgcactgcctgtgcaggatccggagcccagcagcactgccagggccttgaagtgcttcttcagagacctttcttcatagactacttttttttctttaagcagcaaaaggagaaaattgtcatcaaaggatattccagattcttgacagcattctcgtcatctctgaggacatcaccatcatctcaggatgaggggcatgaagctgctgggggcgctgctggcactggcggccctactgcagggggccgtgtccctgaagatcgcagccttcaacatccagacatttggggagaccaagatgtccaatgccaccctcgtcagctacattgtgcagatcctgagccgctatgacatcgccctggtccaggaggtcagagacagccacctgactgccgtggggaagctgctggacaacctcaatcaggatgcaccagacacctatcactacgtggtcagtgagccactgggacggaacagctataaggagcgctacctgttcgtgtacaggcctgaccaggtgtctgcggtggacagctactactacgatgatggctgcgagccctgcgggaacgacaccttcaaccgagagccagccattgtcaggttcttctcccggttcacagaggtcagggagtttgccattgttcccctgcatgcggccccgggggacgcagtagccgagatcgacgctctctatgacgtctacctggatgtccaagagaaatggggcttggaggacgtcatgttgatgggcgacttcaatgcgggctgcagctatgtgagaccctcccagtggtcatccatccgcctgtggacaagccccaccttccagtggctgatccccgacagcgctgacaccacagctacacccacgcactgtgcctatgacaggatcgtggttgcagggatgctgctccgaggcgccgttgttcccgactcggctcttccctttaacttccaggctgcctatggcctgagtgaccaactggcccaagccatcagtgaccactatccagtggaggtgatgctgaagtgagcagcccctccccacaccagttgaactgcaggaagagaggacccatcctgccacaggacccagaaaaaaagcccaacacacactcgggttaagaaatacctttaaatttaggtaaataaagctcaaggaggtggggctgtca

SEQ ID NO: 45935 - DNA, 1408 bp, Homo Sapiens
gtttgagttcatttatagtcagagggttttaatttacttgtgaagttcacactattgaaactaattgcaatgcttgactttattttctttagagtccaagaaagagaaaaacaaggcatagcacaaatccccctctagagtgtcatgttggttgggtaatggattccagagaccgtgggccaggaacatcctctgtcagcacttcaaatgcttcaccttcagaaggcgcaccactagcaggaagttatggatgtactcctcattcattcccaaagttccagcatccttctcatgaacttttgaaggaaaatggctttacccaacaagtgtaccacaagtatcgtcgaagatgcctaagtgagagaaaacgcttgggaattggtcagtcccaagaaatgaataccctctttcgtttctggtcctttttcctcagagatcacttcaataaaaaaatgtatgaggaatttagacaacttgcttgggaagatgcaaaagaaaattacaggtatgggttagaatgtctgttcaggttttatagttatggactggaaaaaaaattcaggcgagaaatttttcaggatttccaagaagaaaccaaaaaagactacgaatctggtcagctgtatggactagaaaagttttgggcttatttgaaatattctcaatctaagacacagtctattgacccaaaacttcaggaatacctctgtagttttaagaggttagaagacttccgtgttgatgaggctgatccgatagagtaatacctaattatatcaccatgagatggcaaaacggaatgtcagatctgtagacttttgacaggaaagaatcaccatgatcgattacttctgctcatcataaacatctagttcctaagcaggatatgagaatctgccttcctgtgacctctcctgggctcagtgacactccagtcgccgccccaccccacatcaatgccacttccaagtttgacttgcatcttacaaaccatatttctgtttactttttttctgccctgggacatttttaataacttttagataacaacttcaacaaaaatttacctcccaccaagagaagttgtctttattgtgagaagttgtctttattcccaagaaggggaataacttactctttaagtcagttttattacaggtaaatttgtaccagctttttcctctacttgtgttaagacctgtctccaatagacattccaattgaggattgtggaaatagcaaattacattggtgtctgcccaccactgaaggcaaaaagctggtttatctaggccacaggcagagcccgcaggggaggcaggtaacttctcggaccaccagattatcttgatcttcagccagctttattgttgttctacattttaataaacactacatgtttatttta

SEQ ID NO: 45936 - DNA, 2989 bp, Homo Sapiens
acaaaagcaaaatgggaaaatggcaaacagatccttttcaattagctgctgcatttatctcttcccccaaaagagaatcttctgctgcttctgcttcttcatctgcacaacggggatgtagccatcatacatgcctgcaaggctgtagtgagatcctggacatgaaagcattctgaaaactgaaaagtacaatgcacctgtgtttctgcctaagctctctaagcgtgacagcaggagcgcccgggtctccatcccggagagatgtgtccacactccgccgccactgctctcttcatcagcaacttgcttctgcagtcgctgcccaaagtttcgcggagcacccggcgacctggccgtcggtcaatcctgagaagcccagggattcggggcgcggagactgggggctgggccccgggaatcccaaagacgtccccgcggccaggaagggagtgacaggtgcgacgcgcggtcgcgggcggcgggagagcggaccacggaaaccgcgtgtgggcgcgcgagggaggcggcggccacgcgctctccttaggccgctccctgagacgcccccgcgacgtccctagccccgcgctctggaacccgcgaccctcgcgccgctttcggccccgcggcgccccagatcccacggcctcccggagcggcgcagctgggtcgggctcacgctcgcagcgccggaagggttgaggaccgccgggggcaccgtgcgcacggggttcttcccgcgcgaaccggggctgtcggggggtgggcgcacgcgcacccgggcgcgccgccgtaaccccttcctccccgcgcggcccccgcactcccacccacccaccactcaccgtcgatgtctcccagggtcagctcgtcgcccagctccgtgagggtctccatggtctccagaccacccagctcgccgctgtcgtccatcgcccggctcagcgcagaagccccccctgccgtcccgctcagggagacgcgggggcggtgccgtcgccaccgcccatgacacccgacaacccccgcccggcaccgcctcaccgacgggtgccacccgccgccatgtttgcgttgcgcccgggcgccgcacagaaagggcggggcgggattcccccgccccagcccgcgccccctgcggccccgcctccaggccgcgcgcccccctgtttgttgtcaatgggaccaggctcatctcagccaatgggcgagcgaagcggtgcgtggggtgatggcgcgtcatcgatcagcagctcagatttgcatagtgaggtccctccccccgcggcctcggagcgaatgcctggagtagccgtccggtcatcatcttaaccttctccgccttgtttaaaggagccgctgccttctccgttggatctgcgccacacgcaagtccgtccactggcctgggagtgaagggttaacaggccaccctccacctgcgaccgctggccgcctccaggcctggctgggagcacattacgtcatcttcccagctgcctacccccgccctgcccgcctgagaaagccagcggagtcaaacctggaccccagcgctcgggacgggagtccgggtcatccaagtcccgcttctcccagcctccttacaaaggcgggcacggaggcttgacaaggttgcagattgtcccagggcggtcaggattttacgtcttctgctttgcacccgccgtgacctcgcgcttactccagtggtcctcaatctctggcacctcggaaccactgaggacctgaaaaccacgccagtgcccaggcccaccgacggcctcctgagaggggggccccgggcacgagttttttgaaaaagttccaccgggattctgaagtgcagcccacccactccttcaagcacctcactgccccatcttgcagctggtcgtgttgtaaacttctaggaatttatccaaaggaataaaaattacaagtgcttaaagaagtgctgtaactaggaagaagtgagaataaggaaatgaatatgtaaattacatccacacgatggaataccatgggatcattaaaaattacgcacacaaatgtatatttattagcaagaaaaggcgttcacaatatattgataaaagggaaaagttgaagtttcctgccagtttgtgagaggcagctgttgcttagtgatcaataattaagaacacacaggctgtgtggaggcagacacatggatccactaattcactgtgaccttgggttaattgttctaagcctcagtttagtcatctctaaaatggggataaaatagcatccctcatagctgtggttaagtgagattatttgcacattcaattgacaatatttattgaacatctctgtggcagggaaacaaatggttcctgccctctgagagcttccagtctagcaaaaaaaaaaatcagaaatcccacacccgtattaaacataaaaataaattacagatgatggtacaagtgatcaaggaaaggtaatggatgtgatgaaactaacaagggccctgacttgtgctgtcaagaagcctctgaagaagtgacatttaagatgaaacctaaaattatgagagaactgcagctgttacagccaaaggggaaatgatgacatggacaaaggcctcgaggcaggaggagctgctggcagccagctctcggcataagctttggcatacagtaagtgccttgcatactgctgtattgcaattgaaaaaataaggatctggccaggcgcggtggctcacaccggtaattccagcactttaggaggccgaggtgtgcagatcatttgaggtcaggagttggagaccagcctgaccaacatggtgaaaccccgtctctactaaaaatacaaaaattagccgggtgtggtggcgcatgcctgtaatcccagctaaccggtaggagaactgccggaacctgggagatagaggctgcagtgagctgagatcatgtcgctgcactccagcctgggagacagagcaagactctgtctc

SEQ ID NO: 45937 - DNA, 678 bp, Homo Sapiens
gctattttggacatgacatattttgaggagaacaagctagtagatgaagattttcctgaagactcttcttcacagaaagtaaaagagctgattagttttctttcagaaccagaaattttagtaaaggaaaataatatgcatccaaaacactgcaatttgcttggggatgagctactggaatgtctctcttggagacgaggagccctgctgtatatgtattgtcattctcttaccaaaagaagagagtggctcttaagaaaatccagtttgcttaaaaagtaccttcttgatggaatcagttacttgctacagatgctaaattatcgatgtcctatccagttaaatgaaggagtttctttccaagatctagacacagctaaattactgagtgcaggaatatttagtgacattcatctgctggctatgatgtacagtggagaaatgtgttactggggatcgaagtattgtgctgatcagcaaccagaaaatcatgaagtggatactagtgtgtctggagcgggctgcactacatacaaggaacccttggatttccgagaagtaggagaaaaaatcttgaaaaagtatgtatctgtgtgtgaaggacccctgaaagaacaagaatggaatacaacgaatgcaaaacaaattttaaacttctttcatcatcgctgtaactag

SEQ ID NO: 45938 - DNA, 3120 bp, Homo Sapiens
agaagcggcaggagcagcgttggcaccggcgaaccatggctgggattttctatttcgccctattttcgtgtctcttcgggatttgcgacgctgtcacaggttccagggtataccccgcgaatgaagttaccttattggattccagatctgttcagggagaacttgggtggatagcaagccctctggaaggagggtgggaggaagtgagtatcatggatgaaaaaaatacaccaatccgaacctaccaagtgtgcaatgtgatggaacccagccagaataactggctacgaactgattggatcacccgagaaggggctcagagggtgtatattgagattaaattcaccttgagggactgcaatagtcttccgggcgtcatggggacttgcaaggagacgtttaacctgtactactatgaatcagacaacgacaaagagcgtttcatcagagagaaccagtttgtcaaaattgacaccattgctgctgatgagagcttcacccaagtggacattggtgacagaatcatgaagctgaacaccgagatccgggatgtagggccattaagcaaaaaggggttttacctggcttttcaggatgtgggggcctgcatcgccctggtatcagtccgtgtgttctataaaaagtgtccactcacagtccgcaatctggcccagtttcctgacaccatcacaggggctgatacgtcttccctggtggaagttcgaggctcctgtgtcaacaactcagaagagaaagatgtgccaaaaatgtactgtggggcagatggtgaatggctggtacccattggcaactgcctatgcaacgctgggcatgaggagcggagcggagaatgccaagcttgcaaaattggatattacaaggctctctccacggatgccacctgtgccaagtgcccaccccacagctactctgtctgggaaggagccacctcgtgcacctgtgaccgaggctttttcagagctgacaacgatgctgcctctatgccctgcacccgtccaccatctgctcccctgaacttgatttcaaatgtcaacgagacatctgtgaacttggaatggagtagccctcagaatacaggtggccgccaggacatttcctataatgtggtatgcaagaaatgtggagctggtgaccccagcaagtgccgaccctgtggaagtggggtccactacaccccacagcagaatggcttgaagaccaccaaagtctccatcactgacctcctagctcataccaattacacctttgaaatctgggctgtgaatggagtgtccaaatataaccctaacccagaccaatcagtttctgtcactgtgaccaccaaccaagcagcaccatcatccattgctttggtccaggctaaagaagtcacaagatacagtgtggcactggcttggctggaaccagatcggcccaatggggtaatcctggaatatgaagtcaagtattatgagaaggatcagaatgagcgaagctatcgtatagttcggacagctgccaggaacacagatatcaaaggcctgaaccctctcacttcctatgttttccacgtgcgagccaggacagcagctggctatggagacttcagtgagcccttggaggttacaaccaacacagtgccttcccggatcattggagatggggctaactccacagtccttctggtctctgtctcgggcagtgtggtgctggtggtaattctcattgcagcttttgtcatcagccggagacggagtaaatacagtaaagccaaacaagaagcggatgaagagaaacatttgaatcaaggtgtaagaacatatgtggacccctttacgtacgaagatcccaaccaagcagtgcgagagtttgccaaagaaattgacgcatcctgcattaagattgaaaaagttataggagttggtgaatttggtgaggtatgcagtgggcgtctcaaagtgcctggcaagagagagatctgtgtggctatcaagactctgaaagctggttatacagacaaacagaggagagacttcctgagtgaggccagcatcatgggacagtttgaccatccgaacatcattcacttggaaggcgtggtcactaaatgtaaaccagtaatgatcataacagagtacatggagaatggctccttggatgcattcctcaggaaaaatgatggcagatttacagtcattcagctggtgggcatgcttcgtggcattgggtctgggatgaagtatttatctgatatgagctatgtgcatcgtgatctggccgcacggaacatcctggtgaacagcaacttggtctgcaaagtgtctgattttggcatgtcccgagtgcttgaggatgatccggaagcagcttacaccaccaggggtggcaagattcctatccggtggactgcgccagaagcaattgcctatcgtaaattcacatcagcaagtgatgtatggagctatggaatcgttatgtgggaagtgatgtcgtacggggagaggccctattgggatatgtccaatcaagatgtgattaaagccattgaggaaggctatcggttaccccctccaatggactgccccattgcgctccaccagctgatgctagactgctggcagaaggagaggagcgacaggcctaaatttgggcagattgtcaacatgttggacaaactcatccgcaaccccaacagcttgaagaggacagggacggagagctccagacctaacactgccttgttggatccaagctcccctgaattctctgctgtggtatcagtgggcgattggctccaggccattaaaatggaccggtataaggataacttcacagctgctggttataccacactagaggctgtggtgcacgtgaaccaggaggacctggcaagaattggtatcacagccatcacgcaccagaataagattttgagcagtgtccaggcaatgcgaacccaaatgcagcagatgcacggcagaatggttcccgtctgagccagtactgaataaactcaaaactcttgaaattagtttacctcatccatgcactttaattgaagaactgcactttttttacttcgtcttcgccctctgaaattaaagaaatgaaaaaaaaaaa

SEQ ID NO: 45939 - DNA, 336 bp, Homo Sapiens
atgaaagaaacaatcatgaaccaaaaactcaccaaacggcaagcagaagtgcacactggtcggaaaggaactgctcacaggaaaaaggtggttcacacgacagcagaggataaaaaatttcagttctccttaaagaaattaggggtaaacaatatccctggtattgaagaggtgaatatgtttacacaccaaggaacagtgattcactttaacaaccctgaagttcaggcatcgctggcagcaaacactttcaccatgacaggccatgctgagacaaagcagctgacagaaatgctactcagcatcgatcataaaccagtgctgcagatggtctga

SEQ ID NO: 45940 - DNA, 1338 bp, Homo Sapiens
gcggcactgggagcgccttccggagagacgcagtcggctgccaccccgggatgggtcgctggtgccagaccgtcgcgcgcgggcagcgcccccggacgtctgccccctcccgcgccggtgccctgctgctgctgcttctgttgctgaggtctgcaggttgctggggcgcaggggaagccccgggggcgctgtccactgctgatcccgccgaccagagcgtccagtgtgtccccaaggccacctgtccttccagccggcctcgccttctctggcagaccccgaccacccagacactgccctcgaccaccatggagacccaattcccagtttctgaaggcaaagtcgacccataccgctcctgtggcttttcctacgagcaggaccccaccctcagggacccagaagccgtggctcggcggtggccctggatggtcagcgtgcgggccaatggcacacacatctgtgccggcaccatcattgcctcccagtgggtgctgactgtggcccactgcctgatctggcgtgatgttatctactcagtgagggtggggagtccgtggattgaccagatgacgcagaccgcctccgatgtcccggtgctccaggtcatcatgcatagcaggtaccgggcccagcggttctggtcctgggtgggccaggccaacgacatcggcctcctcaagctcaagcaggaactcaagtacagcaattacgtgcggcccatctgcctgcctggcacggactatgtgttgaaggaccattcccgctgcactgtgacgggctggggactttccaaggctgacggcatgtggcctcagttccggaccattcaggagaaggaagtcatcatcctgaacaacaaagagtgtgacaatttctaccacaacttcaccaaaatccccactctggttcagatcatcaagtcccagatgatgtgtgcggaggacacccacagggagaagttctgctatgagctaactggagagcccttggtctgctccatggagggcacgtggtacctggtgggattggtgagctggggtgcaggctgccagaagagcgaggccccacccatctacctacaggtctcctcctaccaacactggatctgggactgcctcaacgggcaggccctggccctgccagccccatccaggaccctgctcctggcactcccactgcccctcagcctccttgctgccctctgactctgtgtgccctccctcacttgtgggccccccttgcctccgtgcccaggttgctgtgggtgcagctgtcacagccctgagagtcagggtggagatgaggtgctcaattaaacattactgttttccatgc

SEQ ID NO: 45941 - DNA, 2600 bp, Homo Sapiens
ctcgtcgccgccgccattttagctgttggttccggccgcaccgtgtgggctgtagtagcgggaggggtgggggtcctccagagttaagtggctgtcctcgactgtgcccatacagcagccagctttcttccttaataactgcccgttcgaagagtgcgaggatgtccaagcggcaccggttggacctaggggaggattacccctctggcaagaagcgtgcggggaccgatgggaaggatcgagatcgagaccgggatcgtgaagatcggtctaaagatcgagaccgagaacgtgatagaggagatagagagcgagagagggagaaagaaaaggagaaggagttgcgagcttcaacaaatgctatgcttatcagtgctggattaccacctttgaaagcttcccattcagctcactcaacccactcagcacattcaacgcattcaacacattctgctcattcaacgcatgccggacatgcaggtcacacgtcacttccacagtgcattaatccgttcaccaacttaccccatactcctcgatactatgatattctaaagaaacgtcttcagctccctgtttgggaatacaaggataggtttacagatattctggttagacatcagtcctttgtactggttggtgagactgggtctggtaaaacaacacagattccacagtggtgtgtggagtacatgcgatcattaccaggacccaagagaggagttgcctgtacccaacccaggagagtggctgcaatgagtgtggctcagagagttgctgatgagatggatgtgatgttgggccaggaagttggttactccattcgatttgaagactgcagtagtgcaaaaaccattcttaagtatatgactgatgggatgttacttcgtgaagctatgaatgatcccctcctggagcgttatggtgtaataattcttgatgaggctcatgagaggacactggctacagatattctaatgggtgttctgaaggaagttgtaagacagagatcagatttaaaggttatagttatgagcgctactctagatgcaggaaaattccagatttactttgataactgtcctctcctaactattcctgggcgtacacatcctgttgagatcttctatactccagaaccagagagagattatcttgaagcagcaattcgaacagttatccagattcatatgtgtgaagaggaagagggagatcttcttcttttcttaactggtcaagaggaaattgatgaagcctgtaagagaataaagcgtgaagttgatgatttgggccctgaagttggtgacattaaaatcattccattgtattctacacttccacctcagcagcagcaacgcatttttgagcctccacctcccaaaaaacagaatggagcaattggaagaaaggtagttgtgtcaactaacatagcagagacgtctttgacaatagatggtgtggtgtttgtgattgatcctggatttgcgaaacagaaggtctacaatcctcgaatcagagttgagtcccttttggtgacagctattagtaaagcttcagctcagcaaagggctggtcgagctggacgtaccagacctggaaaatgcttcagactttacacagagaaagcttataaaacagaaatgcaggataacacctatcctgagattttgcgttctaatttaggatcagttgtgttacaattgaagaaacttggtattgatgacttggtacattttgattttatggatccaccagctcctgaaactctgatgagagccctggaacttttgaattacctggctgctttaaatgatgatggagatctgactgaattgggatccatgatggcagagtttcctctagatccacagctcgcaaaaatggttattgcaagttgtgactacaactgttctaatgaggtcctatctattactgctatgttgtcagtcccacagtgttttgttcgccccacggaggccaagaaagccgcagatgaggccaagatgagatttgcccacatagatggagatcatctgacactgctgaacgtctaccatgcttttaaacaaaatcatgaatcggttcagtggtgttatgacaacttcattaactacaggtccctgatgtccgcagacaatgtacgccagcagctatctcgaattatggacagatttaatttgcctcgtcgaagtactgactttacaagcagggactattatattaatataagaaaagctttggttactgggtattttatgcaggtggcacatttagaacgaacagggcattacttaactgtgaaagataaccaggtggttcagttgcatccctctactgttcttgaccacaaacctgaatgggtgctttataatgagtttgttctaacaacaaagaattacatccggacatgtacagatatcaagccagaatggttggtgaaaattgcccctcaatattatgacatgagcaatttcccacagtgtgaagcaaagagacagttggaccgcatcattcaaacttcaatccaaggaatattcacagtactgaattcagtgcttagaactgaagttattgagaggacagctttaaaagatgaatga

SEQ ID NO: 45942 - DNA, 1934 bp, Homo Sapiens
agttacgcagctgtcttccaggtgactggatgtgttgatcagcgctcgctgggatttggctgacgtggccccagccccgcctccctccccaccccacaatggcagaagaaactggacagagtaaattagctgcagccaagaaaaagttcaaagaatattggcagagaaaccgccctggtgttccagcagcagcgaagaggaacacgaaagcaaatggcagtagccctgagacggccgcttctggtggttgccactcatctgaggcttcctcctccgcctcctcctctctgcatgcgcgtcagagcccgtgccaagaacaagcagcagtcctgaactcgaggtccataaaaatcagtcgactgaatgacaccatcaaatctttgaaacaacagaagaaacaagtggaacatcagctggaagaagaaaagaaagcaaacaatgagaaacagaaagctgaaagggagctagagggtcaaatccagagattgaacacagagaaaaagaaactaaatacggacctgtatcacatgaaacattctctcagatactttgaagaagagtccaaggatctggccggccgcctgcaacgttcatcgcagcgtataggagagttagagtggtctctctgtgctgtcgccgccacacagaagaagaagccggatgggttctcgagccgcagtaaagcacttctcaagcggcagttagagcagtccatacgggagcagatactgctgaaaggacacgtgacacagttgaaggagtcgcttaaagaagtccagctggagagagatcaatatgctgaacaaataaaaggagagagggcccagtggcagcagaggatgaggaaaatgtcgcaggaggtttgcacattgaaggaggagaagaagcatgatacgcatcgggtagaggagctggagaggagcttgtccagactcaaaaaccagatggctgagccactgcccccggatgccccagcagtgtcctctgaggtggagctgcaagacctgaggaaggagctggagagagtggcaggagagctccaggctcaggtggaaaacaatcagtgcatcagtctcctgaaccgtgggcaaaaggagaggcttcgcgagcaggaggagaggcttcaggagcagcaggagaggcttcgggaacgggagaagaggcttcagcagctggccgagccacagagcgacttggaggagctgaagcacgagaacaagagcgcactgcagttggagcagcaagtaaaggagctgcaggagaagctgggccaggtgatggagacgctcacctcggccgagaaggagccagaggcagcagtcccagcctcagggactgggggcgagtctagcggccttatggacctcctggaggagaaggcggacctgagggagcatgtggagaaactggaacttggattcatccagtaccggagagagagatgccatcagaaagtacatcgccttctaacagagccaggggacagtgccaaagatgcgtcaccgggaggaggccatcatcaggctggcccaggacaaggaggagaggaaggtgaagctgctggagctgcaggagatggtgttgcggcttgtggcagctacagcgaggggcacggcaaattcctggccgctgcccggaaccctgctgctgaacccagtccaggagccccagccccccaggagctcggggctgccgacaagcatggtgatccccgcctccctctctccaaagatctttgtgaggcgagcctcaccaacagcgtggagcctgcacaaggagaagccagggagggttcttcccaggacaaccctactgcacagccagtcgtgcagctccttggtgagatgcaggaccaccaggagcacccaggcttgggcagcaactgctgtgtgccatgcttttgctgggcttggctgccgagaagaaggagataa

SEQ ID NO: 45943 - DNA, 2141 bp, Homo Sapiens
ttctaggaaacaagagttggatagtagtcatcctccaaagcaatcaggaagacccccggaccctgggcgtccagctcaacctggtctcagtaaaagtagaactacagacactttcaggtcagagcagaaattgcctgggaggagtccttccactattagcttgaaagaatcaaagtccagaactgatttaaaggaagagcacaagtctagtatgatgcctggcttcctctcagaggttaacgctttaagtgctgtttcctctgttgtaaataaattcaacccttttgatttgatatcagactctgaggcatcccaggaagaaaccaccaagaaacaaaaagtggttcagaaggagcaaggaaaacctgaaggaatcataaaacctcctttacaacaacagccacccaagccgattcctaagcagcaaggacctggtagggatccgcttcagcaggatggcactcccaaatcaatatcttctcaacaaccagaaaaaattaaatcacaacctccaggtacaggaaagccaattcagggtcctacccagactcctcagacagaccatgcaaaattgccacttcaacgagatgcatccaggcctcagactaaacaggcagacatagtaaggggagaatcagttaaaccctcactgccaagcccatccaaaccacctattcagcaaccaactcctggaaaacctccagcacagcagcctggacatgaaaaatcacagcctgggcctgcaaagcccccagctcagccctcagggctaacaaagccattggctcaacaaccagggacagtgaaacccccagtccagccaccagggacaacaaagcctccagctcagcctcttggtcctgctaagcctccagctcagcagactgggtcagagaagccttcatcggagcagcctgggccaaaggctttagctcagcctcctggagttggaaagactccagctcaacagccagggccagcaaagcctccaacccagcaggtggggacaccaaaacccctagctcaacaacctgggctacagtctccagctaaggcacctgggcctacaaagactccatcagcaaagcccccatctcaacagcctggctcaacaaaacccccacctcaacagcctggcccagcaaagccctcacctcaacagcctggctcaacaaaacccccatctcaacagcctggctcagcaaaaccctcagctcaacagcctagcccagcaaagccctcggctcagcaatctacaaaaccagtaagccaaacaggatctggaaaacctctgcagccaccaacagtgtctccatctgcaaaacagcctccttcacaaggcctccctaaaaccatctgtcctctttgcaataccactgaacttctgttgcatgttccagaaaaggccaattttaacacatgcactgagtgtcaaaccactgtctgtagtctctgtggttttaatcccaatcctcatttaacggaggtaaaagagtggctctgtttgaactgtcaaatgaaaagagctctaggcggggatctggctccagttccgtcatcaccccagcccaaactgaagactgcacctgttaccactacatcagcagtgagcaaatcatccccacagccacagcagacttccccaaagaaggatgctgcaccaaaacaggatctctccaaggcacctgagcctaaaaagccaccaccactagtgaaacaaccaacccttcatggctctccttcagccaaggccaagcagccccctgaggcagattctttgtccaagccagcccctcccaaagaaccttctgtcccatctgagcaggacaaggcccctgttgctgatgataaaccaaagcagcccaagatggtaaagccaaccactgaccttgtatcttcatcatcagcaacaacaaaacctgatattccaagctccaaagtacagtcacaagctgaagagaaaacaacccctcctctaaaaacagactctgccaaaccctcacagagttttccaccaacaggggaaaaagtcagcccatttgattctaaagccatacctcgacctgcatcagattcaaaaattatttcacatcctggtcccagttcagagagcaaaggtcaaaaacaagttgaccccgtac

SEQ ID NO: 45944 - DNA, 864 bp, Homo Sapiens
atggcgctcgggctgctcatcgccgtgccgctgctgctgcaggcggcgccccgaggcgccgcgcactatgagatgatgggcacctgccgcatgatctgcgacccttacactgccgcgcccggcggggagcccccgggtgcaaaggcgcagccacccggacccagcaccgccgccctggaagtcatgcaggacctcagcgccaaccctcctcctcctttcatccagggacccaagggcgacccggggcgaccgggcaagccagggccgcgggggccccctggagagccgggcccgcctggacccaggggccctccgggagagaagggcgactcggggcggcccgggctgccagggctgcaactgacggcgggcacggccagcggcgtcggggtggtgggcggcggggccggggtaggtggcgattccgagggtgaagtgaccagtgcgctgagcgccaccttcagcggccccaagatcgccttctatgtgggtctcaagagcccccacgaaggctatgaggtgctgaagttcgatgacgtggtcaccaacctcggcaatcactatgaccccaccacgggcaagttcagctgccaggtacgcggcatctacttcttcacctaccacatcctcatgcgcggcggcgacggcaccagcatgtgggcggacctctgcaagaacgggcaggtccgggccagcgccattgcacaggacgccgaccagaactacgactacgccagtaacagcgtggtgctgcacttggattcaggggacgaagtgtatgtgaagctggatggcgggaaggctcacggaggcaataataacaagtacagcacgttctcgggctttcttctgtacccggattag

SEQ ID NO: 45945 - DNA, 267 bp, Homo Sapiens
catttcttggagcagattaaacacgagtgctatttctgcaatgggacagagcggatgcggtttgtgcagagactcatccacaccggaaggagtatgcgcgcttccatagggacgtcggaaagttccgggcggtggcggagctggagcggagaagagtccaggaatgcaaacagccagaagaacctcttgggctgcttgcggggtctgttggacacctactgcagacacaactacggggtttttgagagcttctccatgcacaggcga

SEQ ID NO: 45946 - DNA, 618 bp, Homo Sapiens
aagctgctcacatccccttacagtgatctaaaccacctggtgtctgccactatgactagagtcaccatctgcctgcactttcctggccagctaaatgctgaccagaaactgtccatgaacatagccccattttcccacctgcacttcttcttacctggctttgcctcactgaccggctggggcagccagcaatatagccttgacacggctgagctcacccagcagatgtttgacaccaagaacgtgatggctgcctgcaaccctcaccatggctgctacctagtggtggccattttcaggggctgcatggccatggaggaagcagatgagcaaatgcttagtgtccaaaacaagtacagcagctactttgctgattggatcccccacagtgtgaaaatagccgtctgtgacatcttacccccaaggctaaaaatgcccaccaccttcactggcaataacattactatccaggagttgttcaggtgtatttcagagcagttcacagccatgtttaggtgcaaggccttcctgaacccatatgtgagtgagggcatggatgaaatagagttcattgaggctgagagcaacatgaacaacctggtatctgagtaccaatag

SEQ ID NO: 45947 - DNA, 777 bp, Homo Sapiens
gccgagtggcaggtggcggaggccacagcgctggtgcacacgctggacggctggtccgtggtgcagacaatggtcgtgtccaccaaaacgccggacaggaagctcatctttggcaaagggaactttgagcacctgacagaaaagatccgagggtctccagacatcacgtgcgtcttcctgaacgtggagaggatggctgccccgaccaagaaagaactggaagccgcctggggcgtggaggtgtttgaccgcttcacggtcgtcctgcacatcttccgctgtaacgcccgcacgaaggaggcccggcttcaggtggccctggcggagatgccgctgcacaggtcgaacttgaaaagggacgtcgcccacctgtaccgaggagtcggctcgcgctacatcatggggtcaggagaatccttcatgcagctgcagcagcgtctcctgagagagaaggaggccaagatcaggaaggccttggacaggcttcgcaagaagaggcacctgctccgccggcagcggacgaggcgggagttccccgtgatctccgtggtggggtacaccaactgcggaaagaccacgctgatcaaggcactgacgggcgatgccgccatccagccacgggaccagctgtttgccacgctggacgtcacggcccacgcgggcacgctgccctcacgcatgaccgtcctgtacgtggacaccatcggcttcctctcccagctgccgcacggcctcatcgagtccttctccgccaccctggaagacgtggcccactcg

SEQ ID NO: 45948 - DNA, 732 bp, Homo Sapiens
atgggccagacggcaggcgaccttggctggcggctcagcctgttgctgcttcccttgctcctggttcaagctggtgtctggggattcccaaggcccccagggaggccccagctgagcctgcaggagctgcggagggagttcacagtcagcctgcatctcgccaggaagctgctctccgaggttcggggccaggcccaccgctttgcggaatctcacctgccaggagtgaacctgtacctcctgcccctgggagagcagctccctgatgtttccctgaccttccaggcctggcgccgcctctctgacccggagcgtctctgcttcatctccaccacgcttcagcccttccatgccccgctgggagggctggggacccagggccgctggaccaacatggagaggatgcagctgtgggccatgaggctggacctccgcgatctgcagcggcacctccgcttccaggtgctggctgcaggattcaacctcccggaggaggaggaggaggaagaggaggaggaggaggaggagaggaaggggctgctcccaggggcactgggcagcgccttacagggcccggcccaggtgtcctggccccagctcctctccacctaccgcctgctgcactccttggagctcgtcttatctcgggccgtgcgggagttgctgctgctgtccaaggctgggcactcagtctggcccttggggttcccaacattgagcccccagccctga

SEQ ID NO: 45949 - DNA, 4222 bp, Homo Sapiens
ttgttaactttgtcaaagatcaggttgttgtaggtttttggctttatttctaggttctctactttgtttcatttgtctatgtgtctgtttctataccagtaccatgctgtttttgttactgtactcttctagtatagtttgaagttaggtagagtgacacttccagcttttttttttttttcttaaggttggcttggctatttgggctcttttttggttccatatgaactttaaaagtttttatttttctaattctctgaagaatgtcagtagttcaatgggaatagcattgaatctatgaattacttagggccatatgcccatattcatgatactgattcttcctctccatgagcatggaatatttctccatctgttttgtgtccactctgatttctctgagcagttgtttgtggttctccttgaagaggtccttcactttctttcttagctgtattcctaggtatttttttctctttgtagcaaatgtgaatgaaagttcattcatgatttgtctccctgcttgcctgttgtttgtgcatgggaatgctagctacttttgcacattgattttatatcctgagattttgctactgttgcttatcaccttaagaagctttgggcctgagacaatgaggttttctagatgtaggatcaggtcatctgcaaacaaagataatttgacttcctctctttctattagaatactctttatttcttcctctggcctgattttcctggccaaggcttctgatactatattgaatggtagtggtgaaagagggcattcttttcttgtgccagttttcaggtggaacgtttctagcttttgcacattcagtatgatattggctgtgggtttgttgtatatggctcttattattttcaggtatgtttcttcacttcctagtttattgagaattttaaacctgaaagaatgctgaattttattggatgctttttctgcatttattgagataatcatgtggtttttgtatttagttctctttatgtgatgagtcacatttattgatttgcatatgttgaatcaaccttgcatcctggggacaaagccaactccattgttgcggatgaactttttaatgtgctgctggatttgttttgccagtattttattgaggatttttgcacagtgtttaccaaagacattggcatgatgtgttgttgttgttgttgttgttgtagtatctatgttaggttttggtatctggatgatgctggcctgatagaatgagttagagagaacttctttgtcttcaattttttttggatggttttaggagaaaaggtaccatctcctctttgtacctctgctcaaattcagcttgcttggtaggctagtttttactgcctcagtttcagaacacattattgatctattcagggttcagtcttgtggagggtttattttgcaaggaaattgtctatttcttctagattttctggtttatgtgcatacatatgtttatagtgttctctgattgttgttcatatttccatgggatcagtgatgatatctcccttattatttctaattgtgtttggttctcctttcttttcttatttatttgcctagctagtgttccatctagtttattaatttttttcataaaaacagctcctggatttgttgacttttttttttggaagagttttcagtgtctctatctccctcagctctactttgatcttggttatttcttgttttctgctacctttctggttagttttcacttggttttctagttcttttcatcaagatgttaggctgttaattttagatcttttagtttctcttttttttcttcttgtggcagagtctcactctgtcacccaggctggagtacagtggcatgatctccgctcactgcaacctccacttctcagttttaagtgatttctgctgtctcagcttcctgagtagctgggattacagatgtgcatcacaaaaaccagctaatttttgaattttttttgtagaggtggggttttgttgtgtggtccagactggtcttgaacatctggccttaagtgatttgcctaccccagcctcccaaagtgctggaactacaggcatgagccaccacacccagccctttctatctttttgatgtggacattagtgctataaatttccctcttttcttggtttccagtgattattttattctatcttggtgagtcatcagggaaataatcttaaatttacaatcaacatatagtttaaatccatataattgtgtgagaagaaccctttgttatttgaaggtgatgtttgaaagattttctaactgtgccttttagttagtcttaaatttctaattgtagttaaaaacatgccattgtcatttctgacattttaagtatatggtttagaagtggttagtatagttctattgttttgcagtaggttttagataatttgtgtcttacaaaagtaaaagtgaatactcattacttatgaaagaagttagttagcttgccttaggtagatagcaagagaagagtccctggaaagtccctggtcagtgcctcatccctgcataacatataaagaagcctggaaaaaatcaagctgcagacactaacaagggaactagcatatgttgttgtgcttggggacatgcccgtggctgcacagatagaaaaacctctggcccatttggataaaaacttgtagaaacctccagctcactcagataaaggaacaagaacgacctagcatagaaatgcctttgtttggccaggcacggtggatcatgcctgtaattccaacaatgtcggaggcagctgtgggcggatcatctgaggtcgggagtttgagaccagcatgaccaagatggacaaactctgtctttactaaaaatacaaaactagccaggcatggtgctgcatgcctataatcccagctacttgggaggctgaggcaggagaatcgctagaacccaggaggcggaggtttctgtgagccgagatcgcaccattgcactccaggctgggcaacaagagcaaaactgcaaaaaaaaataaaaataaataaaaaaagaaagtacatctcaaaaaaaagaaagacaagaaaaagaaaaaaaagaagcacttttgtctttgtacagtcagtgggctcccaggaaaatgttccttctctttttgttggcatgggcactgtgggatctggtgcattccggtcgacactctcgtttatttggactgtaagtctgacctctatgaataattacttcagcccctgagtgctcccgggccaagctccttggccaaactttcaccttagcttctgataagtcttgggccaagctaagcagcatctatcaatcatcccttcagctcctgattgatcccgggccaaaggcctgggccaagctgagccacacgtttttcaagacagcctgtgaactaggcacatatccttcccttcccagtccataaaaaccctggacccagcctcgtagagggcaccactttcagacacctatctctgctggcaaagagctttcttctcttgcttcttaaactttcactccaacctcacctttgtgttcacgctccttaatctccttagaggtagaacaaagaactctggatgttatctcagactacgagagactgttacatcttggtgcactgctgagactacgacacttggtttctttgagtttgactaaatattttacatgagtgtaattatacagctttcctttttgactgtcttattttacttaacagaatgttttgaagatttgtccttattgtagtacttttcaagatttccttatttttaaggctgaatgctatcccagtgattgtacgtgccctgtttgctgaatctactcatccttaagggtacatttgcttccaggtaacatgtttgtgagtaatactacaatgtgcatatatctattccatgttctgctttgtctgtttgggatatttttcatacactgattcagtaccatgtgtattcccttgcttttgttgtctcatccgttgatgctacgtcccccaaattattgccacgaccagttgtaatgaagcttcacccttctgtattgtgctaggaattttacagctataggttttacattatagtcttcattcattttttaaaattgacacatgtaattgtgcatattttggggaaacaattatatatatgtgttgtataacaataaaaatcagtacttct

SEQ ID NO: 45950 - DNA, 1166 bp, Homo Sapiens
tttgcagcccgcggcgctttcccctccgcggttcctccccgagccgcccccagtgcccaagcttccgcggctccgccgaccaggggccgcgccgactgggaactcgccaggggcgtagtcccctgcaaggcctgggggccggcgaggccgcagaggcgggatgggcctgagcccgggcgccgagggggagtacgcgctccgcctccctaggattcccccacccctccccaaacccgcctcgcgaaccgccagtaccgggcccaaggaccagccgcctgcgctcagacgttcagctgtgccccactcaggtctaaatagcatttccccccttgaattagaagaatccgtgggattcgcagcgttggtccagctcccagccaagcagcctccgccgggcacattagaacagggcagaagcatccagcaaggggagaaggctgtagttagcttggagaccacacccagccagaaagcagactggagttcaattccaaagcctgagaatgaaggcaagttaataaagcaagcagctgagggaaaaccaagacccagacctggagacctgattgagatttttcgaattggctatgagcactgggccatctatgtagaagatgattgcgtggtccatctggctcccccaagtgaggagtttgaggtgggcagcattacttccatctttagcaatcgggccgtggtgaaatacagtcgtctggaggatgtgctgcatggctgctcctggaaggtcaataacaagctagatgggacgtacctgcccttgccggtggacaagatcatccagcgtacaaaaaagatggtcaacaagatcgtgcagtacagcctgattgaagggaactgtgagcactttgtcaatggcctcagatatggcgtaccccggagccagcaggtagagcacgccctgatggaaggagcgaaggctgctggagcagttatttcagctgtagtggatagcataaagcccaaaccaataactgcctgaaggtgatgaaaactccagctagaggaagagttactgacacaagcaaaaagaacatgcttccttcccttgccttctctcaatggctccgattaagaaaattgtgaacttctggaagaatctacaatgtatccaattacccttccagaaatacatccaatatatacga

SEQ ID NO: 45951 - DNA, 633 bp, Homo Sapiens
gaaagccagaaggacgacgcccacaaggaggaaaccagccccaacgtaccccacctcctccaggaaagccagaaggacgacccccacaaggaggcaaccagtcccaaggtcccccacctcgtccaggaaagccagaaggaccacccccacaaggaggaaaccagtcccaaggtcccccacctcgtccgggaaagccagaaggacaacccccacaaggaggaaaccagtcccaaggtcccccacctcgtccgggaaagccagaaggaccacccccacaaggaggaaaccagtcccaaggtcccccacctcgtccaggaaagccagaaggaccacccccacaaggaggaaaccagtcccaaggtcccccacctcgtccaggaaagccagaaggaccaccttcacaaggaggcaacaaacctcaaggtcccccacatccaggaaagccacaaggaccacccccacaagaaggtaacaaacctcaacgtccccctcctccaggaaggccacaaggaccacccccaccaggaggcaatccccagcagcctctgccacctcccgctggaaagccccagggaccacctccacctcctcaagggggcagaccacacagacctccccagggacagcctcccc

SEQ ID NO: 45952 - DNA, 1620 bp, Homo Sapiens
gtgcgtcgatcctggcttgctgtcaaccaggcttttcccgtctccaacacccacgtgaaaaccagcaatctagcagccccgaaaagcaggaaagcctgtgtgaacacagcccaggtgctttccttccttgagccgtgtactcagcaggtgctgggagcccatattgtgaggttttgggccaaacacaggtggggtctacccctcagggtcctcaagcccattcagtgctttcaactggaaaaggtttcatccttgtcccttatacagcttgctggtccctcctcagacacctgcgaatctggggctggctcaaaagttgaggtggccacgttccttggagagccaccaatggcaagtctgagaaagcaggtgctgaccaaaccatctgttcacatgccagagaggcttcaggcctcctcacctgcatgtaagcagttccagagggccccgcgagggatcccatcttcgaatgatcatgggtccttgaaggctcctacagctggacaggagggcaggtggccatctaagcccctcacatacagcctcacaggcagcacccagcagagcaggagcttaggagcccaatcttcaagggctggagagaccagggaggcagtgccacaacccacagtccccttgggaacctgtatgagagcaaacctccaagccacaagtgaggatgtgcgtggtttcaaggctccaggcgccagcaaaagctctctactccctagaatgtctgtctcccaagacccaagaaagctgtgtctcatggaggaggctgttagtgaatttgagcctggaaaggccacgaagtcagagacccagcctcaagtttctgccactgttgtgctccttccagatgggcaagcatctgttgtgccccatgcttcagagaatttggcttctcaagtgccccagggccatctccagagcatgcctactgggaacatgcaggcttcccaggagctatgtgacctcatgtcagccagaaggagtaacatggggcacaaggagcccaggaacccaaactgtcaaggctcatgcaagagccaaagcccaatgtttccccctactcacaagagggagaactctaggaagcccaacttagaaaaacatgaagaaatgtttcaaggattgaggactcctcaacttaccccaggcaggaaaacagaagacacccgtcagaatgaaggcgtccagctactgccatcaaagaaacagcctccttcaataagccactttggagaaaacatcaagcaattttttcagacgattttttcaaagaaagaaaggaagccagcaccagtcactgctgagagccaaaaaacagtaaaaaacagatcatgcgtgtacggcagcagtgctgaagctgagaggctcatgacagcagttggacagatactggaggagaacatgtcactttgccatgcgcgccatgcctcgaaggtaaatcagcaaagacagcagtttcaagccccagtctgtgggtttccctgcaaccacagacacccgttctactcagaacacagcagaatgctgagctatgcagccagcagtcaacaagccactctcaagaaccagagtcgtcccaacagagacagacaaatcagagatcagtag

SEQ ID NO: 45953 - DNA, 1239 bp, Homo Sapiens
aacctctcctcctccccttccgcgctgggactgcctgtggcttcccccgcgcctcccagccctgggccaaccaccaaccagttcgtgcagccgtcctggcgcatcgcgctctggtccctggcgtatggtgtggtggtggcagtggcagttttgggaaatctcatcgtcatctggatcatcctggcccacaagcgcatgaggactgtcaccaactacttccttgtgaacctggctttctccgacgcctccatggccgccttcaacacgttggtcaatttcatctacgcgcttcatagcgagtggtactttggcgccaactactgccgcttccagaacttctttcctatcacagctgtgttcgccagcatctactccatgacggccattgcggtggacaggtatatggctattattgatcccttgaaacccagactgtctgctacagcaaccaagattgtcattggaagtatttggattctagcatttctacttgccttccctcagtgtctttattccaaaaccaaagtcatgccaggccgtactctctgctttgtgcaatggccagaaggtcccaaacaacatttcacttaccatattatcgtcattatactggtgtactgtttcccattgctcatcatgggtattacatacaccattgttggaattactctctggggaggagaaatcccaggagatacctgtgacaagtatcatgagcagctaaaggccaaaagaaaggttgtcaaaatgatgattattgttgtcatgacatttgctatctgctggctgccctatcatatttacttcattctcactgcaatctatcaacaactaaatagatggaaatacatccagcaggtctacctggctagcttttggctggcaatgagctcaaccatgtacaatcccatcatctactgctgtctgaataaaagatttcgagctggcttcaagagagcatttcgctggtgtcctttcatcaaagtttccagctatgatgagctagagctcaagaccaccaggtttcatccaaaccggcaaagcagtatgtacaccgtgaccagaatggagtccatgacagtcgtgtttgaccccaacgatgcagacaccaccaggtccagtcggaagaaaagagcaacgccaagagacccaagtttcaatggctgctctcgcaggaattccaaatctgcctccgccacttcaagtttcataagctcaccctatacctctgtggatgaa

SEQ ID NO: 45954 - DNA, 476 bp, Homo Sapiens
aagacaacgtgacaaaagcagctgttaacctccgacgggagggtgtgaccatcttcaccctgggcatagagggcgccagcgacacccatttttcctatgcagcttgcaaagagatgaaagctgacatcatgtttctggtggacagttctggaagtataggacctgaaaacttcagcaaaatgaaaacatttatgaaaaacctggtgagcaagtctcagattggaccagatcgggtgcaaattggtgtagtccagttcagcgacatcaataaggaagagtttcagctcaacagattcatgtcccaaagcgacatttcaaatgcaatagaccaaatggctcacattggacaaaccaccctgactggtagtgccctgagctttgtgtctcagtacttcagccccaccaagggcgcccggcccaacatcagaaagtttctcatcctcatcacggatggtgaagctcaggacatagtaaag

SEQ ID NO: 45955 - DNA, 432 bp, Homo Sapiens
ctttggatcatggagatactcattatcacagttcacaccatcacttccatcgtgaaaaatccagatggtaataggaaactgtggtatgttagtcataccacagttggtgctgtccagattatcattgctgcaaacactgacaccaccaaggctatggggaaggtcattcctgtgctgaatgggaagctcattgatatggttttctgtatctccaacatgtctgtcatggacctgacctgcattctggagaaagtatacaagtatagcgacatcaataaagtgttgagtcaggcattggaaggccccttagaggacaccctggcctacgctaaagaccaagttatctcctgtgactttaacagtgacacccattcctccatctttgatgcttgggctagcattgatctccatgaccatattgttaagttcatt

SEQ ID NO: 45956 - DNA, 585 bp, Homo Sapiens
tggggctggatctgggcacagcaatttgcagggcactgctgggcaggagtccctgatggccaagctgctgggctctgtatctcccacaagctgcagcggaggccccatggagcaggagcagaagcacacgttggagaactgaacttgaaggacaggacttacagcattgaggtcacacaggcaagtggaggctcactgtcctcgctcagccggctcctgggcctcatgaggccatcatctctcaggcaatacctggactctgtgcccttgccaccctgccaggagcaacagccaaaggctagtgccgagctagaccacaaggcctgctacctgtgccacagcttgctgatgctggccggggtagttgttagctgccaggacatcactccagaccagtggggcgagctgcagctgctgtgcatgcagttggaccgccacatcagcacgcagatccgggagagcccccaggccatgcaccgcaccatgctcaaggacctggctacccagacctacatccgttggcaggagctgctgacccactgccagccccaggcccagtatttcagcccctggaaagacatctaa

SEQ ID NO: 45957 - DNA, 1920 bp, Homo Sapiens
atgaactgtgttccggatgttatcactgccagcaaagctggagtcagttcagccctccctccagcagatgtctctgcgagtataggaagctctcctggggtagccagcaacctgacagaacctagttattcaagtagtacctgtggaagccacactgtacccagtcttcatgcagggctcccatctcaggaatatgccccaggatacaacggatcatatttgcattctacttatagtagccagccagcacctgcacttccttcacctcatccgtctcctttgcatagctctgggctactacagcccccaccaccacctcctccgccaccagccttggtcccaggctacaatgggacttctaacctctccagttacagctatccgtctgctagctatcctcctcagactgctgtggggtctgggtacagccctgggggggcaccgcctccgccttcagcgtacctgccttcaggaattcctgctcccacccccctaccccccaccactgttcctggctacacctaccagggccatggtttgacacctattgcaccgtcggctctgacaaacagttcagcaagttctctcaaaaggaaagctttctacatggcagggcaaggagatatggactccagttatggaaattacagctatggccaacagagatctacacagagtcctatgtacagaatgcccgacaacagcatttcaaacacaaatcgggggaatggctttgacagaagtgctgaaacatcatccttagcatttaagccaacgaagcagctaatgtcctctgaacagcaaaggaaattcagcagccagtccagtagggctctgacccctccttcctacagtactgctaaaaattcattgggatcaagatccagtgaatcctttgggaagtacacatcgccagtaatgagtgagcatggggacgagcacaggcagctcctctctcacccaatgcaaggccctggactccgtgcagctacctcatccaaccactctgtggacgagcaactgaagaatactgacacgcacctcatcgacctggtaaccaatgagattatcacccaaggacctccagtggactggaatgacattgctggtctcgacctggtgaaggctgtcattaaagaggaggttttatggccagtgttgaggtcagacgcgttcagtggactgacggccttacctcggagcatccttttatttggacctcgggggacaggcaaaacattattgggcagatgcatcgctagtcagctgggggccacatttttcaaaattgccggttctggactagtcgccaagtggttaggagaagcagagaaaattatccatgcctcttttcttgtggccaggtgtcgccagccctcggtgatttttgttagtgacattgacatgcttctctcctctcaagtgaatgaggaacatagtccagtcagtcggatgagaaccgaatttctgatgcaactggacactgtactaacttcggctgaggaccaaatcgtagtaatttgtgccaccagtaaaccagaagaaatagatgaatcccttcggaggtacttcatgaaacgacttttaatcccacttcctgacagcacagcgaggcaccagataatagtacaactgctctcacagcacaattactgtctcaatgacaaggagtttgcactgctcgtccagcgcacagaaggcttttctggactagatgtggctcatttgtgtcaggaagcagtggtgggccccctccatgccatgccagccacagacctttcagccattatgcccagccagttgaggcccgttacatatcaagactttgaaaatgctttctgcaagattcagcctagcatatctcaaaaggagcttgatatgtatgttgaatggaacaaaatgtttggttgcagtcagtga

SEQ ID NO: 45958 - DNA, 663 bp, Homo Sapiens
atgggccagctatttacagaccacttgtttggtggaactgagatcttccttctggtggtgatggcctatgatcgctacgtggccatctgtaagccactgcactatttaaccatcatgaatcgacaggtttccatccttctgttggtggtggccatgactggaggtttccttcattctgtgtttcaaattgctgttctgtacagtctccctttctgtggccccaatgtcattgaccactttttctgtgacatgtacccattattggaactggcgtgcactgacacctactctataggcctcactgtagttttcagtggtggagcaatgtgtatggtcatcttcgcccttctactaatctcctatggagtcagcctaaactcccttaaaacttatagtcaggaagggaggcgtaaagccctgtctacctgcagctcgcacatcaccgtggttgtcctcttttttgttccctgtattttcatgtatgttagacctgtctcaaacttccctattgataaattcgttactgtgttttatacatttatcacacccatgctgaatccttttttatacacgttgagaaattcagagatgataaatgctataaaacacctgttgtgtaagaagctaactatagttagaataagagtgtccctcctcatgtag

SEQ ID NO: 45959 - DNA, 597 bp, Homo Sapiens
atggagaaactggggccccaactctccagtggagcctggaaccaggggcccctgcctagtcgtgacccaaatgccccagtgctcccgggccccccaggctctcccaacagccccacctacctcgggaggaggcatcacccagaagatcttggactcggggcctgggttgccagaatagtaaggggctggcgggagagagggagaggggttggccctgggaggctcggctggcccagcatcccccctccttgctccccccacagccccatcccgcgtacagcagagcagggcgaggcagggctggaagccattgctggagccctgcagccgcagctggtagtccatctgtgcgtcgatgtcctgcagagatggcagcgccgggctgtgtgggtggctgtggtaccagcccaccagggacaggccccgcaggaacaggctctggtagatctggggacagaggcgcagctcagcgggcacaggggcctgaacggctctagtgagcttatgtggctggccagccctgaacgaattcctgctgtgtatcaggcctggggacacagtgatgaccaagacaggccctgcccccaccgccactga

SEQ ID NO: 45960 - DNA, 2358 bp, Homo Sapiens
atggcggaccttgattcgcctccgaagctgtcaggggtgcagcagccgtctgagggggtgggaggtggccgctgctccgaaatctccgctgagctcattcgctccctgacagagctgcaggagctggaggctgtatacgaacggctctgcggcgaggagaaagtggtggagagagagctggatgctcttttggaacagcaaaacaccattgaaagtaagatggtcactctccaccgaatgggtcctaatctgcagctgattgagggagatgcaaagcagctggctggaatgatcacctttacctgcaacctggctgagaatgtgtccagcaaagttcgtcagcttgacctggccaagaaccgcctctatcaggccattcagagagctgatgacatcttggacctgaagttctgcatggatggagttcagactgctttgaggagtgaagattatgagcaggctgcagcacatactcatcgctacttgtgcctggacaagtcggtcattgagctcagccgacagggcaaagaggggagcatgattgatgccaacctgaaattgctgcaggaagctgagcaacgtctcaaagccattgtggcagagaagtttgccattgccaccaaggaaggtgatctgccccaggtggagcgcttcttcaagatcttcccactgctgggtttgcatgaggagggattaagaaagttctcggagtacctttgcaagcaggtggccagtaaagctgaggagaatctgctcatggtgctggggacagacatgagtgatcggagagctgcagtcatctttgcagatacacttactcttctgtttgaagggattgcccgcattgtggagacccaccagccaatagtggagacctattatgggccagggagactctataccctgatcaaatatctgcaggtggaatgtgacagacaggtggagaaggtggtagacaagttcatcaagcaaagggactaccaccagcagttccggcatgttcagaacaacctgatgagaaattctacaacagaaaaaatcgaaccaagagaactggaccccatcctgactgaggtcaccctgatgaatgcccgcagtgagctatacttacgcttcctcaagaagaggattagctctgattttgaggtgggagactccatggcctcagaggaagtaaagcaagagcaccagaagtgtctggacaaactcctcaataactgccttttgagctgtaccatgcaggagctaattggcttatatgttaccatggaggagtacttcatgagggagactgtcaataaggctgtggctctggacacctatgagaagggccagctgacatccagcatggtggatgatgtcttctacattgttaagaagtgcattgggcgggctctgtccagctccagcattgactgtctctgtgccatgatcaacctcgccaccacagagctggagtctgacttcagggatgttctgtgtaataagctgcggatgggctttcctgccaccaccttccaggacatccagcgcggggtgacaagtgccgtgaacatcatgcacagcagcctccagcaaggcaaatttgacacaaaaggcatcgagagtactgacgaggcgaagatgtccttcctggtgactctgaacaacgtggaagtctgcagtgaaaacatctccactctgaagaagacactggagagtgactgcaccaagctcttcagccagggcattggaggggagcaggcccaggccaagtttgacagctgcctttctgacttggccgccgtgtccaacaaattccgagacctcttgcaggaagggctgacggagctcaacagcacagccatcaagccacaggtgcagccttggatcaacagctttttctccgtctcccacaacatcgaggaggaagaattcaatgactatgaggccaacgacccttgggtacaacagttcatccttaacctggagcagcaaatggcagagttcaaggccagcctgtccccggtcatctacgacagcctaaccggcctcatgactagccttgttgccgtcgagttggagaaagtggtgctgaaatccacctttaaccggctgggtggtctgcagtttgacaaggagctgaggtcgctcattgcctaccttaccacggtgaccacctggaccatccgagacaagtttgcccggctctcccagatggccaccatcctcaatctggagcgggtgaccgagatcctcgattactggggacccaattccggcccattgacgtggcgcctcacccctgctgaagtgcgccaggtgctggccctgcggatagacttccgcagtgaagatatcaagaggctgcgcctgtag

SEQ ID NO: 45961 - DNA, 891 bp, Homo Sapiens
atgggacactggcgcattgcggtgttcaagtcccacagaaccgaggtgagttgggtgttgaaggaagcacggcggtcccaacagtgcgggcagcgccaactacggcttcgcgctcgaactttgaggactctcatctggatgcacaaagaagaaatcattcagttcttctcagtgttggaaatccaagagttggcctcgcaggagttagctgaggctctcggaaagcccaaggagaggacagggcacagagacatggaggtgttcaagagcagccaggaggaagttaggtcggactcaggtccccctagactcatatccgtgctgccccggacccctgtgactggcccgggcttccgggagctaccctggcatcgtgaagcaggcaggcgcaggatgcggggccacgaggagcatagcggcctctgcaccacggagctgcttggtgtgtgggggaacctcagctactgtctctccggaatgtatgaccacaaatatggcgacagtgagttcacagggcatagcaccaccggccactgcctctgcatgaggggcccatgcaaagcgaccaagagcgacatttacaacctcttctctccttccaacctggtgagagtccacattgagatgggcccagatggaagagtgaccggcaaagcagatgttgagtttgctactcgggaagaagcagtggcagctacctccagagacagggtcagcatgtggcacagatacatagaactattcctgaatttgacaacaggggctagcaatggggcgtacagcagtcggatgcgaggcatgggcttgaccacctacagtgacctgaagagccagtcagtgagcggctgtgatgggtctggccacagcgggcagaacagcatgggtgaatag

SEQ ID NO: 45962 - DNA, 1863 bp, Homo Sapiens
aggctctgtggtaggtgaacctcggcggccggcgtgggctgagggagccgccactgagggtgcgggcgccgcggccggctctgccagccgttctctggagcagcgaggcggttggttgtgcgagcgagtgccgaggactttggctggaaacttttcgccgcgcccggggcgaggccctggaagggccaggccagcgaatgctgagccggcggcccgctgccctcccccgcggccgcgcgggtcgccgtgcggatggccgagggttggcgatggtgcttcgtgcgccgaactccgggtttgctccggggaccgttacttcctcgctcattctctgggaaccctcgtgccttagctggaccaattattgtggagccacatgtcacagcagtatggggaaagaatgtttcattaaagtgtttaattgaagtaaatgaaaccataacacagatttcatgggagaagatacatggcaaaagttcacagactgttgcagttcaccatccccaatatggattctctgttcaaggagaatatcagggaagagtcttgtttaaaaattactcacttaatgatgcaacaattactctgcataacataggattctctgattctggaaaatacatctgcaaagctgttacattcccgcttggaaatgcccagtcctctacaactgtaactgtgttagttgaacccactgtgagcctgataaaagggccagattctttaattgatggaggaaatgaaacagtagcagccatttgcatcgcagccactggaaaacccgttgcacatattgactgggaaggtgatcttggtgaaatggaatccactacaacttcttttccaaatgaaacggcaacgattatcagccagtacaagctatttccaaccagatttgctagaggaaggcgaattacttgtgttgtaaaacatccagccttggaaaaggacatccgatactctttcatattagacatacagtatgctcctgaagtttcggtaacaggatatgatggaaattggtttgtaggaagaaaaggtgttaatctcaaatgtaatgctgatgcaaatccaccacccttcaaatctgtgtggagcaggttggatggacaatggcctgatggtttattggcttcagacaatactcttcattttgtccatccattgactttcaattattctggtgtttatatctgtaaagtgaccaattcccttggtcaaagaagtgaccaaaaagtcatctacatttcagatgttccatttaagcagacctcttccatagctgtagctggagcggtaattggagctgttcttgcccttttcatcattgctatctttgtgactgtgctgctgactcctcgaaaaaaaagaccatcctatcttgacaaagtgattgaccttccacccacacataaaccacctcctctgtatgaagaacgatccccacctttgcctcagaaagacctatttcagcctgaacacttgcctttgcagactcagttcaaagaaagagaagttggcaatcttcagcactctaatggactaaatagcaggagttttgactatgaagatgagaatccagttggggaagatggcattcagcagatgtaccccctttacaatcaaatgtgctaccaagaccggagccctggcaaacatcatcaaaataacgaccctaagagagtctacatcgacccacgagaacattatgtgtgatttttctctttttccaatgggcgttctaacaaatgtttattcttagattggggagagaagctaaggccaatagttattttactgtctctcatataagaacagtcccactctaagggtattggaagtcttaatgaatgacgtaaagcc

SEQ ID NO: 45963 - DNA, 578 bp, Homo Sapiens
cttttccttccctgtgcccaggccttgctcagtgcccatgacacgatagctcagaaagattttgaaccccttctccctccactgccagacaatatccctgagagtgaggaagcaatgaggattgtttgtttagtgaaaaaccaacagcccctgggagccaccatcaagcgccacgagatgacaggggacatcttggtggccaggatcatccacggtgggctggcggagagaagtgggttgctatatgctggagacaaactggtagaagtgaatggagtttcagttgagggactggaccctgaacaagtgatccatattctgggttcttcggatggcaccattaggcaccttctgatagcgtcattatgcacctgccatcaggtgtacgtccgtgccatgactgagtactggccccaggaggatcccgacatcccctgcatggacgctggattgcctttccagaagggggacatcctccagattgtggaccagaatgatgccctctggtggcaggcccgaaaaatctcagaccctgctacctgcgctgggcttgtcccttctaaccaccttctgaagag

SEQ ID NO: 45964 - DNA, 1194 bp, Homo Sapiens
gtcagcagccccgacagccgacagtcacagcagctctgacaagagcgttcctggagcccagctcctctccacagaggacaagcaggcagcagagaccatgggccccccctcagccgctccccgtggagggcacaggccctggcaggggctcctgatcacagcctcacttttaaccttctggcacccgcccaccactgtccagttcactattgaagccctgccgtccagtgctgcagagggaaaggatgttcttctactggcctgcaatatttcagaaactattcaagcctattattggcacaaggggaaaacggcagaagggagccctctcattgctggttatataacagacattcaagcaaatatcccaggggccgcatacagtggtcgagagacagtataccccaatggatccctgctgttccaaaacatcaccctggaggacgcaggatcctacaccctacgaaccataaatgccagttacgactctgaccaagcaactggccagctccacgtacaccaaaacaacgtcccaggccttcctgtgggggccgtcgctggcatcgtgactggggtcctggttggggtggctctggtggccgccctggtgtgttttctgcttctctccaggactggaagggccagcatccagcgtgacctcagggagcagccgcccccagcctccacccctggccatggtccctctcacagatccaccttctcggcccctctacccagccccagaacagccactcccatctatgaggaattgctatactctgatgcaaacatttactgccagatcgaccacaaagcagatgtggtctcttaggttcctctgggagctgctcttgtgggttgatggagcgtccccaaagctcccagccctggggacggggaaggacatggagcctgagccagagaaccagctctgagtcctgaggagacacaggcctggggacagggagggatgggagtccctgctgaatatctggagaccctgacaggttgccctgggctctgggtgggccgggacaaaggcctctcatcaccacaggaagcgggggcttgcaaggaaagtgaatgggcctgtggcccacccggggtcaccaggaaaggatctgaataaagaggacccttcctctcattggctctttttctgctcacgggaacttagcagaaactcacctgaaa

SEQ ID NO: 45965 - DNA, 3738 bp, Homo Sapiens
ggcgaacggctgccggtcaggtgtccttgtccccttgagttgcgcgggtcgtgttcgagggcatggacgacaggtaccctgcgcttcagcgggcccagctgcgtctggatttcatccacgccaactccaccactcacagtttcctttttggagcactggctgaattgctggacaatgcaagagatgcaggggctgaaagacttgatgtcttttcagtggataatgaaaaactgcaggggggattcatgttgtgtttcctggatgatggatgtggcatgagccctgaggaagcttcagacatcatttactttggacgatccaaaaaacggctgtcaaccttgaagttcatagggcaatacggcaatggtcttaaaagtgggtccatgagaattggaaaagactttattctttttacgaagaaggaagaaacgatgacctgtgtgtttttttctcagacattctgtgaagaagaaagtcttagtgaggttgtagttccaatgccctcatggttaataagaaccagagaatctgtcacagatgatccccagaaatttgcaatggaattatctataatttataaatactccccatttaaaactgaagcagaattgatgcagcagtttgatgtgatctatggaaaatgtggtactttgctggttatttataacttgaagcttctgcttaatggagaaccagagttggatgttaaaactgacaaagaagatatactgatggctggagctctggaggatttcccagcgaggtggtcattcagagcctacacatctgttctgtattttaacccatggatgagaatattcattcaagccaagagagttaaaactaaacatctttgctattgcctctacagacccagaaagtatctttatgtcacatcttcttttaaaggagcatttaaagatgaagttaaaaaggcagaagaagcagtaaagattgctgaatccatattgaaagaagcacaaatcaaagtaaaccagtgtgacagaacctctttatcttctgccaaggatgtattacagagagctttggaagatgtagaagcaaagcaaaagaatcttaaagagaaacaaagagaattaaaaacagcaagaacgctctccctgttctatggagtgaacgtagaaaaccgaagccaagctggaatgttcatttacagtaataaccgtttgatcaaaatgcatgaaaaagtgggctcacagttgaaactgaagtccttacttggcgcaggcgtggttggaattgttaatatacccttggaggtcatggaaccatcccataataaacaggaatttctcaatgtccaagagtataatcatctactaaaagtcatgggacagtacttggtccagtactgtaaggacaccggcatcaataatagaaatttaacattgttttgcaatgaatttggataccagaatgacatcgatgtggagaaacctttaaattcttttcaatatcaaagaagacaagccatgggtatcccattcatcatacaatgtgatctttgtcttaaatggagagtcttgccttcctctactaattatcaggaaaaagaattttttgacatttggatttgtgctaataatcccaaccgcttggaaaacagttgtcatcaggtagaatgtctaccttccatcccactgggcaccatgagcacaatatcaccatcaaaaaatgagaaagagaagcaacttagagagtcggtcataaagtatcaaaatagactggcagaacagcagccacagcctcaatttataccagtggacgaaatcactgtcacttccacctgcctaacttcagcacataaggaaaataccaaaacccagaaaatcaggcttttgggcgatgacttgaagcatgaatctctttcatcctttgagctttcagcgagccgtagaggacagaaaagaaacatagaagagacagactctgatgtagagtatatttcagaaacaaaaattatgaaaaagtctatggaggagaaaatgaactctcaacagcagagaattccagtagctctgccagaaaatgtcaaactagctgagagatcccagagaagtcagattgctaatattaccactgtctggagagctcaaccaactgaagggtgcctgaagaatgcccaggccgcttcttgggaaatgaaaaggaagcagagtctgaactttgtagaggaatgtaaggtattgactgaagatgagaacacgagtgattcagatataatcctggtttcagataaaagcaacactgatgtttcattgaaacaagaaaaaaaggaaattcctcttttaaaccaagaaaaacaggagctgtgcaatgatgttctagcaatgaaaagaagctcttcattacctagctggaaaagcttgctcaatgtgccgatggaagatgtgaatctaagttctggacacatagccagagtttctgtgagtggcagttgtaaagttgcttcttcgccagcgtcttctcaaagcacacctgtcaaggaaacagtgagaaaactgaagtctaagttaagggagattcttctgtatttttttcctgagcatcagctaccatcagaattggaagaacctgcattaagttgtgagctggagcagtgcccagagcagatgaacaaaaagctgaaaatgtgtttcaaccagatacagaatacttacatggtccaatatgaaaaaaaaataaagaggaaattgcagtccattatctatgattcaaatacaagaggaatacataatgaaatctctctggggcaatgtgaaaataaaagaaaaatctctgaggataagctgaagaatcttcgtataaaactggcactattgttgcagaaactccaactgggtggtccagaaggtgacctggagcagactgacacttatttagaagctttgcttaaagaagataatcttctcttccagaacaatttaaataaagtaactatagatgcaagacatagactccctttagaaaaaaatgaaaagacttcggaaaattaagtcagagatggtattaccttttaaaaaatgctaataagaaaattggaagattcttttaaaaatttttcttttttgttgttgttactgtaaagtctattctgtttaacaataagaaataagaaataatttttttcaaataagaaaattgtgtactctagaaatggagaccgatttacaatttatgtattccctaatccaattatctaaatcttccttttctttcagaaatattaataatatctagagttctctaattttcatgtgagctactgaaaaaaatgaaaatgtcactcaagcttaacttttgttattccttaaaagattgttattgtaattttgttattccttaaaaacatttaaaagcagattttttcaaaatcgatatgtgaaggactacagaatcacctcctcttgaagatattgaaaaagaaagacattatgccctttctccactatagccaacactcagtcaagcagaaaatacaaatccccccaaaactttgagacatagcttatataattttattatttagtcatagtaaaagaataaatctcctaagcataatatgtatacatattacacatatgtaaaaattgttgttttacatttacatatacgtaaagaagtatgtttttacacttttcttgataagtgttttttttttgtttagaaatgtctgaaactttagacaaaaacagtaaaacatttaatattcatttg

SEQ ID NO: 45966 - DNA, 375 bp, Homo Sapiens
tacaaatacaaagaaggttaccgtaagcaactgggccaccacatgggtttccgcaccctacaagatgaccccaagtcagtatgggctatacatgctgccaagatccagagtgacagagaatataagaaagcttatgagaagtctaaaggaattcacaacacaccgttggacatgatgtcaattgttcaagccaagaaatgccaggtcctggttagcgacattgattatcgcaattatctgcaccagtggacgtgtctgccagatcagaacgatgtgatccaggccaagaaagcctacgacctgcagagcgataacttgtacaagtcagacctggaatggctgaagggtattggatggttgccagagggttctgtg

SEQ ID NO: 45967 - DNA, 1050 bp, Homo Sapiens
atggcctcaaagcctgagaagagtgtggcatcgtctgtctttatcacccttgcacccctgtgccacgatttagctgtggttgaggaagggggcaggcggtttgtgaggcctgatggcctcccctgggaggctcctgcccccatgaaggcacccggagctggcttagcgggaaagcccagcccctgggcaccccctggcagggctgcagccacagtgccagctgcacctctgcagctctccaatggaggatgctcaccccctcctcctgtcctggatggtaaggacgcacttcctgacctggacctcgtcccaccccctccactgccccctccggtgctcctgtcttctgaagaagaggctcctgctccaatgggggcctcactcattgcagacttagagcagttgcacctgccctcgcccccaccccgaccacaggccccagtggagggaccttttgagagagagtcgtccacagacatctgtgccttctgccacaaaaccgtgccgcaagagctggctgtggaggccataaagaggcagtaccatgcccagtgcttcacgtggcacacctgccaccgccagctagctgggcagagcttctaccaggatgggcgacccctctgcgaaccctgctaccaggacacgctggagaagtgcggcaagtgtggccaggtggtccgggagcacatcatcagggccctgggccaggccttccacccctcctgcttcatgtgtgtgacctgtgcccggtgcatccaggatgagagctctgccctgggcagccaaaacgagatgtactgcctagacgaattctacaagaaattcgctcccgtatgcagcatctgtgagaatcccattattcctcgggatgggaaagatgccttcaaaatcaagtgcatgggaagaaacttccatgtaaattgctacaggtgtgaggactgcaggatcctcctgtctgtggagcccaggaaccaaggctgctaccccctggacaaccatctcttctgcaagcagtgccacgtgaagcagagtgctgctgggtgctgctga

SEQ ID NO: 45968 - DNA, 985 bp, Homo Sapiens
ttctaggtctttttgccattcctccaggacatccaccataaggaaaggagaccctggaccaacattctctaagatgtttatatggaccagtggccggacctcttcatcttatagacatgatgaaaaaagaaatatttaccagaaaatcagggaccatgacctcctggacaaaaggaaaacagtcacagcactgaaggcaggagaggaccgagctattctcctgggactggctatgatggtgtgctccatcatgatgtattttctgctgggaatcacactcctgcgctcatacatgcagagcgtgtggaccgaagagtctcaatgcaccttgctgaatgcgtccatcacggaaacatttaattgctccttcagctgtggtccagactgctggaaactttctcagtacccctgcctccaggtgtacgttaacctgacttcttccggggaaaagctcctcctctaccacacagaagagacaataaaaatcaatcagaagtgctcctatatacctaaatgtggaaaaaattttgaagaatccatgtccctggtgaatgttgtcatggaaaacttcaggaagtatcaacacttctcctgctattctgacccagaaggaaaccagaagagtgttatcctaacaaaactctacagttccaacgtgctgttccattcactcttctggccaacctgtatgatggctgggggtgtggcaattgttgccatggtgaaacttacacagtacctctccctactatgtgagaggatccaacggatcaatagataaatgcaaaaatggataaaataatttttgttaaagctcaaatactgttttctttcattcttcaccaaagaaccttaagtttgtaacgtgcagtctgttatgagttccctaatatattcttatatgtagagcaataatgcaaaagctgttctatatgcaaacatgatgtctttattattcaggagaataaataactgttttgtgttg

SEQ ID NO: 45969 - DNA, 819 bp, Homo Sapiens
aggccccatcttcccttcatacctggaatggagttttctgggacaggattggagacagacacagatgtcagcacagttaaagagggagatagagttattggcataagaaactttaaatgtatggctgaagaatgtgtcactgatcagaagaacctgtggcagattccagaaaagttctccctacaagaagctgctgtcctccatttatcttatggcactgctatttttgctcttgagcatcggcatacccaacctggagaaattgttttagtgatggcagcagctggagccacaggccttgtagtgatagatgtggcaacaaatgctcttcaggccaaggtaatagctgctgctggaagtggcgagaagtgcaacctggtgatgcagaggggcacacagttcagcgtgaactatagtcagagcagcctgaaggatgcagtgaggaagctggtgggcaagggtgggatgaatgtggccatcaacatggtgggaggagacgtcttcctggaggctctccacagcctggcatgggagggcaggattgcagtggtgggatttgctggagggagcattgtttcggtgccagccaaccttctgctcctgaagaaggtctctgtgatgggcctgtactatggtcaatacaaagaaatgaactttcccgtcttctccaggagcctgtcttcagtgcttcagtactgccaacaagggcgcatccaaccatatgttggaatggttttcaagctggaggaggtcagtgatgccttccttcatgtgatacaggggaaatccatgggcaaggtgcttcttgctgttaaataa

SEQ ID NO: 45970 - DNA, 654 bp, Homo Sapiens
atgccacagaacgaatatattgaattacactgtaaacgctatggatatcgtttggattaccatgagaaaaagagaaagaaggaaagtcgagaggctgaacgttcaaagaaggcaaagaaaatgggtctgaaggctaagctttaccataaaccgtgccatgctgagaaaatacaaatgaaaaagactatcaagatgcatgaaaagagaaacaccaaacacaagaataatgaaaagactccacggggatcagtacctgcctatctgctggacagagaggcacaatctcgagctacagtactttccaatatgattaaacagaaacgaaaagagaaggtgggaaaatgggaagtccctctgcctgaagtatgtgcccaaggagaaacaaaagtattaaaagttattcgaacaggaaagagaaagaagaaggcatggaagaggatggttactaaagtctgctttgttggagatggctttataagaaaaccacctaaatatgaaagactcatcaggccaatgggcttgcatttcaagaaagcccatgtaacacatcctgaactgaaagccaccttttgcaccaatacttggtgtaaagaagaatccctcattcccactgtatacaactttgggtgttattaccaaaggtactgtcattga

SEQ ID NO: 45971 - DNA, 681 bp, Homo Sapiens
atgaaagaagggaaagtgcatcaaacctgtgcgtttcacagtagaagctccgtcctcacattagtaaacaccaatgatcctgcctctaattctctgtctgtaaaaggttcttttgaaccccaggaaaagtgcctcaagaacctcttgggggcctttatattctgtcatgcttacctagctgatcgggacatggagtgtctgtctcagtacccaagcctcagtcagctaaaggagctgcatctgattcatatcctaatgtggaccaccaatcttgagccccttggagttctgctagagaaagttgctgctactcttgagaccctcacgttaaaggactgtcagatccaggactcccaactcagggtcctcctgcctgccctgagccactgctcccagctcaccaccttctactttcaaggaaacgagacttccatgaatgctctgaaagaccttctgtgtcacacaggtgggctgagcaagttaggcctggagttgtatccttcccgtctggagagtcttgacaacaggggtcatgccaattgggagatccttgccccaattcgggctgagctgatgtgtacactcagggaagtcaggcagcccaagaggatcttttttggtcccgtcccctgcccttcctgtggctcatggccatctgagaaagtggacctccatctttgc

SEQ ID NO: 45972 - DNA, 309 bp, Homo Sapiens
atgaccacagccacccctctgggggataccaccttcttctcactgaacatgaccaccaggggagaagacttcctgtataagagttctggagccattgttgctgccgttgtggtggttgtcatcatcatcttcaccgtggttctgatcctgctgaagatgtacaacaggaaaatgaggacgaggcgggaactagagcccaagggccccaagccaaccgccccttctgccgtgggcccaaacagcaacggcagccaacacccagcaactgtgaccttcagtcctgttgacgtccaggtggagacgcgatga

SEQ ID NO: 45973 - DNA, 357 bp, Homo Sapiens
actatggtgcctcgtcgcctggggcccaaaagagctagcagaatccacaaatttctcaatctctctaaagatgattttgccaagtatgttgtaagaaagcccttaaacaaagaatgtaagaaacctaggaccaaagcacccaagattcagcatcttgttaatccatgtgtcctgcaacacaaacagtggcgtattgctctgaagaagcagggtactaagaaaaataaggaagagactgcagaatatgctaaacttttggccaagagaatgaaggaggctaaagagaagcgccaagaacaaattgcaaagagacacagactttcttctctgcgaccttctacttctaagcctgaatcc

SEQ ID NO: 45974 - DNA, 138 bp, Homo Sapiens
cctgatctcaacatgagttcttctaggggacccattccagttaaaagaggtccctcttcaagaagtcgagtccctcctctgaaaaaatctgctctttctgctatggtaagaagcaatagttggatgggaggccaaggt

SEQ ID NO: 45975 - DNA, 975 bp, Homo Sapiens
atgtctttcttctttgtagacttaagacccatgaacaggtcagcaacacacatcgtgacagagtttattctcctgggattccctggttgctggaagattcagattttcctcttctcattgtttttggtgatttatgtcttgaccttgctgggaaatggagccatcatctatgcagtgagatgcaacccactactacacacccccatgtactttctgctgggaaattttgccttccttgagatctggtatgtgtcctccactattcctaacatgctagtcaacattctctccaagaccaaggccatctcattttctgggtgcttcctccagttctatttcttcttttcactgggaacaactgaatgtctctttctggcagtaatggcttatgatcgatacctggccatctgccacccactgcagtaccctgccatcatgactgtaaggttctgtggtaagctggtgtctttctgttggcttattggattccttggatacccaattcccattttctacatctcccaactccccttctgtggtcctaatatcattgatcacttcctgtgtgacatggacccattgatggctctatcctgtgccccagctcccataactgaatgtattttctatactcagagctcccttgtcctctttttcactagtatgtacattcttcgatcctatatcctgttactaacagctgtttttcaggtcccttctgcagctggtcggagaaaagccttctctacctgtggttctcatttggttgtggtatctcttttctatgggacagtcatggtaatgtatgtaagtcctacatatgggatcccaactttattgcagaagatcctcacactggtatattcagtaacgactcctctttttaatcctctgatctatactcttcgtaataaggacatgaaactcgctctgagaaatgtcctgtttggaatgagaattcgtcaaaattcgtga

SEQ ID NO: 45976 - DNA, 396 bp, Homo Sapiens
atggaccagaaccgtgatggcttcatcgacaaagaggacttgagggacacctttgccgcgctgggccgcatcaatgtcaagaacgaggaactggaggccatggtgaaggaggcccccggacccatcaacttcacggtgttcctgaccatgtttggggagaagctgaagggcacggacccagaggagaccattctccacgccttcaaagtgttcgacactgaagggaaaggtttcgtcaaggccgatgtcatcaaagaaaaacttatgacccaggcagaccgcttcagtgaggaggaggtcaagcagatgtttgcagcatttcccccagatgtgtgcggcaacctggactacagaaacctgtgctacgtcatcactcacggtgaagagaaggattag

SEQ ID NO: 45977 - DNA, 1754 bp, Homo Sapiens
gggagcgggagcgccccagcggccggcgggcgggcgggcgagcggacgagcggcgcggagccggcccgaggcgcgcgccgagggagccccgtccccggtcgtgggggcaccgcccgcaggctctgcggggtgggcagctcccgggcctgccatgagctctccgccgcccgcccgcagtggcttttaccgccaggaggtgaccaagacggcctgggaggtgcgcgccgtgtaccgggacctgcagcccgtgggctcgggcgcctacggcgcggtgtgctcggccgtggacggccgcaccggcgctaaggtggccatcaagaagctgtatcggcctttccagtccgagctgttcgccaagcgcgcctaccgcgagctgcgcctgctcaagcacatgcgccacgagaacgtgatcgggctgctggacgtattcactcctgatgagaccctggatgacttcacggacttttacctggtgatgccgttcatgggcaccgacctgggcaagctcatgaaacatgagaagctaggcgaggaccggatccagttcctcgtgtaccagatgctgaaggggctgaggtatatccacgctgccggcatcatccacagagacctgaagcccggcaacctggctgtgaacgaagactgtgagctgaagatcctggacttcggcctggccaggcaggcagacagtgagatgactgggtacgtggtgacccggtggtaccgggctcccgaggtcatcttgaattggatgcgctacacgcagacggtggacatctggtctgtgggctgcatcatggcggagatgatcacaggcaagacgctgttcaagggcagcgaccacctggaccagctgaaggagatcatgaaggtgacggggacgcctccggctgagtttgtgcagcggctgcagagcgatgaggccaagaactacatgaagggcctccccgaattggagaagaaggattttgcctctatcctgaccaatgcaagccctctggctgtgaacctcctggagaagatgctggtgctggacgcggagcagcgggtgacggcaggcgaggcgctggcccatccctacttcgagtccctgcacgacacggaagatgagccccaggtccagaagtatgatgactcctttgacgacgttgaccgcacactggatgaatggaagcgtgttacttacaaagaggtgctcagcttcaagcctccccggcagctgggggccagggtctccaaggagacgcctctgtgaagatctctgggctccggggtggcagtgaggaccaccttcaccttccacctgagaggggactctcgttgccaccttgaccttggctggggcttgcatcccaaggcatccatcagagcagacgcccgggttccatggaccctcctccccacggccatgcctctgctcttgggcgcccatcatggaggagcacctgaactttctggacaagacctctggccgacctggggatggcctctgatccctggagcagtggcccacttgcccggtgctctcagaaacctcagagctggtggggctccagatcaggccttggcctctgagccctgcctgctctgggccatgcagaggaaggacagagggtgggcgcagggcaccaactcagggacatcccctctcctgggcgacgtcagtggaccttcctgcacccccagcctggaatgtaaatcagctgtgtggtgcccgcgtggctggaaggaaatagacccttttgtagctccct

SEQ ID NO: 45978 - DNA, 749 bp, Homo Sapiens
atggtctcagctctgcggggagcacccctgatcagggtgcactcaagccctgtttcttctccttctgtgagtggaccacggaggctggtgagctgcctgtcatcccaaagctcagctctgagccagagtggtggtggctccacctctgccgccggcatagaagccaggagcagggctctcagaaggcggtggtgcccagctgggatcatgttgttggccctggtctgtctgctcagctgcctgctaccctccagtgaggccaagctctacggtcgttgtgaactggccagagtgctacatgacttcgggctggacggataccggggatacagcctggctgactgggtctgccttgcttatttcacaagcggtttcaacgcagctgctttggactacgaggctgatgggagcaccaacaacgggatcttccagatcaacagccggaggtggtgcagcaacctcaccccgaacgtccccaacgtgtgccggatgtactgctcagatttgttgaatcctaatctcaaggataccgttatctgtgccatgaagataacccaagagcctcagggtctgggttactgggaggcctggaggcatcactgccagggaaaagacctcactgaatgggtggatggctgtgacttctaggatggacggaaccatgcacagcaggctgggaaatgtggtttggttcctgacctaggcttgggaagacaagccagcgaataaaggatggttgaacgtgaata

SEQ ID NO: 45979 - DNA, 471 bp, Homo Sapiens
gtggagagatatcctgggcagaggctagtgaggccggggtcctgccggggcgcccgaggagaatcccagccccatcgccccggcccggttcctgcccatcacctcacctcagctggcaccggcaagttctctgccgccgccttcagctccaataccgagtccgtctgcctgtcggtcagcggcgccgtcgtgtccggtctccgatcccagagagccagcttttccctagcgtcccgctccgccgccgcctcaggcagcagcaacagcgccgcctccgccatcgccgccgccctcgcggccttcagcagcagcgagatggaggggaccccgacagagagacctgggccacttccgggagaaccggagcttccaacactgcaccggcggcggggcgggacggaatgccctgaccccggaaacggttccgcagtgtggggggcgggaccgaggccagtaccgacgtggctttaa

SEQ ID NO: 45980 - DNA, 789 bp, Homo Sapiens
atgggaagatgggtgaaccagtcctacacagatggcttcttcctcttgggcatcttttcccacagccagactgaccttgtcctcttctctgcagttatggtggtcttcacagtggccctctgtgggaatgtcctcctcatcttcctcatctacctggacgctggacttcacacccccatgtacttcttcctcagccagctctccctcatggacctcatgttggtctgtaacattgtgccaaagatggcagccaacttcctgtctggcaggaagtccatctcctttgtgggctgtggcatacaaattggcttttttgtctctcttgtgggatctgaggggctcttgctgggactcatggcttatgaccgctacgtggccgttagccacccacttcactatcccatcctcatgaatcagagggtctgtctccagattactgggagctcctgggcctttgggataatagatggagtgattcagatggtggcagccatgggcttaccttactgtggctcaaggagcgtggatcactttttctgtgaggtacaagctttattgaagctggcctgtgcagacacttccctttttgacaccctcctctttgcttgctgtgtcttcatgcttctccttcccttctccatcatcatggcctcctatgcttgcatcaggggctgtgctccgaatacgctctgctcaggcctggaaaaaagccctggccacctgctcctcccacctaacagctgtcaccctcttctatggggcagccatgttcatgtacctgaggcctag

SEQ ID NO: 45981 - DNA, 426 bp, Homo Sapiens
ctgtcatcatcacggcagggcactgtgacctttgaagatgtggctgtgaacttttcccaggaggaatggagtctccttagtgaggctcagagatgcctttatcatgacgtgatgctggagaacctgacacttatatcttctctaggttgttggtatggagcaaaagacgagacaccttctaagcagaccctttctatacaacaggagtccccactcaggacacattggacaggtgtatgtaccaagaaggtccacctctggggaatgtgtggccctctcctgggagatatcttacaccagggaacacaacacaatcagaaattgaatgggtttggggcatatgaaaaaaaattggatgacgatgcaaaccatcatcaagaccagaagcagcacattggagagaaatcgtacagaagcaatgccaag

SEQ ID NO: 45982 - DNA, 1386 bp, Homo Sapiens
atggtgctgctggctgggacccagccacagggtggcggggtgcgctgcatgaccccgccaccgccgtccccactcctaggcacccaggtcgaggaggaccgtgctgactgcaaagagttccaggacttctccagtctgcccgacacctgcagcatcgcctgggacgactctttctaccctttccaggaggaggaggagcatggtgttgagggcttggagagcgtcctggaggagggcgtcctggaggaggtcgtattggaggtggggctgctgcagacgttggtgcggcgggggaccggccttgatgtcgcctgctaccacggctttgtgaccctggtggccttagctgagtgccaccacatcgaagtcaactggcaggacagggaggggaacgcaaccctaatcatagctgcacaggcaggagggcatgctatcatcaccaactacttgttgaactacgtcctgggtcttgaccttaggatggacgcgttcgggttgaaagccgccatgcagggtggaaccagtggcatccgagccctgctggcaggggcgggtgtccacgcgagggcccccgccgtgggatgctgccagaggagtagccacttacacgtccgcctcattcagaggctcctggagcgcccctgccagcagcggttggggaaaaagtaccagcttgagctgcctccgctccacgagagggcgccaatgatcgagggctcgaagaactgcctgcagagggtcagggactgcgagctgtccgcgctgacgcggcgctccacctgtggcccggaggaccggggcgccctggaccacatggtcaggatgaccaccagcctcagccccgccgtggccctcgcgtgccagactgtgtgcccccagagctccctgggcgtggggaagaggcgactggcggtgcaggaaatccagacggctcaggaaattctggcgacgcggcggggggtggggaggcaggcgcaggaggcaggagaagcggagggcgcagagacaagcggccctacccagaggccgcgggttcccgggagggctccccaagagccggcctcccacctgtccccagggtcctggggctctgccgaccccgccccacggaaggccagtctcctgcccctgcagcgcctgcggcggagcagcttatggcccggcgtggtggtgccccggatccgcctctgcaaggcgcccgcgcccaccttccagccccagaggccggcgtggaagggcagcaccaaggacagtggccacctgcggatacccaagtggccttacaaggtggccacggagaagaaaccggaggctgaggaggccgagaagaagcgccaggccaaggtgcaggagaagggcccgccgccctggaagaagaggacgtga

SEQ ID NO: 45983 - DNA, 714 bp, Homo Sapiens
atggcggagtatctggcttccatcttcggcactgggaaagacaaagtcagctgttcattttatttcagaattggagcatgttgtcatggagacaggtgctctcggttgcacaataaacggacgtttagacagaccattgccctcttgaacatttacggtaaccctcaaaactcttccctgtctgctgatggtttgcgctgtgccatgagcgatgttgagatgcaggaacactatgatgaattttttgaggagttttttacagaaatggaggagaagtatggggaagttgaagagatgaacgtctgtgacaaccagggagaccacctggtggggaacgtgacgtgtacgtcctttcgccgtgaggaagatgcggaaaaggctgtgattgacttgtataaccgttggtttaacggacagccaatccacgccgagctgtcgcctgtgaccgacttcagagaagcctgctgcagtcagtatgagatgggagaatgcacacaaggcagcttctgcaacttcatgcatttgaagctcatttccagagagctgaggcgggagctgtatgggtgccatccgaagaagcatagatcaagatcccagtcccgggagcgtagttctcggtctagagaccatggcggtggcggtggtggaggcggcggcaggcgggagcgtgacaggaggtggttgagggatcatgaaagatcagggcaattctga

SEQ ID NO: 45984 - DNA, 1518 bp, Homo Sapiens
atgaccagctccctgtacttcatcacttttggcatgggtgccagcccattcacaaacatagaggctgtgaaggtcttctgtcaaaacatgtgtgtctctattctgttgaactacttctacattttctccttctttggctcctgtctggtctttgctggccaactagagcaaaaccgctaccacagcatcttttgctgtaagatcccttctgcagaatacctggatcgcaaacctgtgtggttccagacagtgatgagtgatgggcatcaacagacgtcccatcatgagacgaacccctaccagcaccacttcattcagcacttcctccgtgaacattataatgaatggattaccaatatatatgtgaagccatttgttgtcatcctctatctcatttatgcctccttctccttcatggggtgcttacagatcagtgacggagccaacatcatcaatctactagccagtgattcgccaagtgtttcctatgccatggttcagcagaaatatttcagcaactatagccctgtgataggattctacgtctatgagcccctagagtactggaacagcagcgtccaggatgacctaagaagactctgtagtggattcactgcagtgtcctgggtggagcagtactaccagttcctgaaagtcagcaacgtcagtgccaataacaaaagtgacttcatcagtgtcctgcaaagctcatttttaaaaaagccagaattccagcattttcgaaatgatatcatcttctccaaggcaggggatgaaagcaatatcattgcttctcgcttgtatctggtggccaggactagcagagacaagcagaaagaaatcacagaagtgttggaaaagctgaggcccctatccctctcaaagagcatccgattcatcgtgttcaacccctcctttgtcttcatggaccattacagcttgtctgtcacagtgcctgttctgattgcaggctttggtgttctcctggtgttaatcctgacttttttcctagtgatccaccctctgggaaacttctggctaattcttagcgtcacctcaattgagctgggcgttctgggcttaatgacattatggaacgtcgacatggattgcatttctatcttgtgccttatctacaccttgaatttcgccattgaccactgtgcaccactgcttttcacatttgtattagcaactgagcacacccgaacacaatgtataaaaagctccttgcaagaccatgggacagccattttgcaaaatgttacttcttttcttattgggttagtcccccttctatttgtgccttcgaacctgaccttcacactgttcaaatgcttgctgctcactgggggttgcacacttctgcactgttttgttattttacctgtgttcctaacgtttttccccccttccaaaaagcaccacaagaaaaagaaacgtgccaagcgaaaggagagagaggaaattgaatgcatagaaattcaagagaacccggatcacgtcaccacagtatga

SEQ ID NO: 45985 - DNA, 1050 bp, Homo Sapiens
gtcatgatcgacaatgaatctggtgtgattaaagctggttttgctggtgatcagatccacaaatactgctttccaaagtatgtgggcctacccatgcatattcgtatcatggcaggagcccttgaaggtgacatcttcattggcttcaaagccaaggagcaccaagggctgctctcaatctgctatctcacggagcatggcattgtcaaggactggaacgacatggaacacatctggcaatatgtctattctaaggaccagctgcagactttctcagaggagcatctcgtgctcctcactgaggcacctttaaacccacaaagacaccaggaatgccaacgttttcttcaagagcttcaatgtgcctgctattttcatctccatgtagctgtgctcagcctttatgccacaggcaggaccacgggggtggtgctggattctggggatggcatcacccatgctgtgcccatctatcagggctttgccatgccccactccatcatgcgaattgacatcgcaagctggaacatctctcgcttcctgcacctctacctgcataaggagggctatgatttccactcatcgtttgagatttccactcatgagtttgagattgtcaaggccataaaagaaagaccctcctacctatccataaacccccagaaggaagagacactagagacagagaaggctcagtactacctgcctgatggcagcaccattgagattggtccttcccaattccgggcccctgagctgctcttcaggccagacttgatcagggaggagagtgaaggcatccacaaggtcctggtgttcgccatccagaagtcagacatggacctgcagttcacacttttctccaacatcgtcctcttgggaggctctaccttgttcaaaggttttggtgacaggctactgagtgaagtgaagatcaggatatttgcacctcaggagagactgtattccacgtggattgagggctctatccttgcctccatgacctttaagaagatgtgggtctccaagaaggaatatgaggaagacggt

SEQ ID NO: 45986 - DNA, 1691 bp, Homo Sapiens
atggtggcatccactgtggccaatggacccaggagcccctgggacgccatcagcctcatcatcatgctccggatctggagggtgaagagggtcattgatgcctacgtcctgccagtgaagctggagatggagatggttatccagcagtacgagaaggccaaggtcatccaagacgagcagctggagaggctgacgcagatctgtcaggagcaagggtttgagatccggcagctgcgcgcgcacctggcgcagcaggacctggacctggctgccgagcgcgaagcggcgctccaggccccgcacgtgctcagccagccgcgcagccgcttcaaagtgttggaggccggcacgtgggacgaggagacggcggccgagagcgtcgtggaggagctgcagccctcgcaagaagccacgatgaaggacgacatgaacagctacatcagtcagtattacaatgggcccagcagtgacagcggtgtcccagagccagctgtgtgtatggtcaccacggccgcaatagacattcaccagcccaacatctcctcggacctcttctctctggacatgcccctcaaactcggcggtaatggcaccagcgccacctcggagagtgcctcccgcagctcagtcacccgggcccagagtgacagcagccagacgctgggctcctccatggactgcagcactgcccgcgaggagccgtcctctgagcccggcccttctcccccgccgctgccatcccagcagcaggtggaggaggccacagtccaggacctgctgtcctccctgtcggaggacccctgcccttcccagaaggccttggacccagcccccctcgcccggcccagcccagcgggctcggcccaaaccagccccgagctggaacacagggtaagtctgttcaaccagaagaaccaggagggcttcactgtctttcagatcaggcctgtcatccacttccagcccactgtgcccatgctggaggacaagttcagatctttggaatccaaagagcaaaagctgcacagggtccctgaggcctagagcctgccatgggctgggtgagatgaggggagacagccatctcaaagctctcctgggaccctggaggctgccaagggccacacgcggggcccaggagcccacctggcctccctcagggtgctgcctgcctccagggaggcgacgccaggccaggaggccacaagcttcagacctcaaagcccagagctggcgcctcttctcgccctgctcaggggagggtggtgctcgtggctgggttttctttttaaccatttttacaaaaaccagcctgtggcccagcttcagcagggtagagtgtgggggggccagctcagcctcttgcgttgccttcgttcctgacgcccaccctggactctagggaacagcactgtgagcaggggctgtccagccccacccctaagccgtctttcccaggaatcctgggtggagtccaacacaatcacacggagaccaccatctgagcctatgtcatttgtcctcattctcattccagcatgagcgtttctgagtctcttcaagacgaatctagttttcaccttcacaggatataaagggatcaacctagaggtgggtgggagggtcctagagggcaggggaacaaccattttccaaccttggctttaataataaaaaccagctgcactgag

SEQ ID NO: 45987 - DNA, 1095 bp, Homo Sapiens
atgatgttaccaagcccggtcacctccacccctttctcagtcaaagacattttgaatctggagcagcagcaccagcacttccatggtgcgcacttgcaggcggacttggagcaccacttccactctgcgccctgcatgctggccgccgctgaggggacgcaattttctgacggaggggaggaggacgaggaagacgagggcgagaaattgtcctatttgaactcactagccgcagcagacggccacggggattcagggctgtgtccccagggctatgtccacacggtcctgcgagactcgtgcagcgagcccaaggaacatgaagaggagcccgaggtcgtgagggaccggagccaaaaaagctgccagctgaagaagtctctagagacggccggagactgcaaggcggcggaggagagcgagaggccgaagccacgcagccgccggaagccccgggtcctcttctcgcaagcccaggtcttcgagctggaacgcaggttcaagcagcagcggtacctgtcggcacccgagcgcgagcacctcgccagcagcctgaagctcacatccactcaggtgaaaatctggttccagaatcgcaggtacaagtgcaagagacagcggcaggacaagtctctggagcttggcgcacacgcgcccccgccgccgccgcgccgcgtggctgtcccggtgctggtgcgggacggcaagccgtgcgtcacgcccagcgcgcaggcctacggcgcgccctacagcgtgggcgccagcgcctactcctacaacagcttccccgcctacggctatgggaactcggccgcggccgccgccgccgccgccgccgccgccgcagcagcggcggcctacagcagcagctatggctgtgcgtacccggcgggcggcggcggcggcggcggcgggacctccgcggcgaccactgccatgcagcccgcctgcagcgcggccggaggcggcccctttgtgaacgtgagcaacctaggaggcttcggcagcggcggcagcgcacagccgttgcaccagggtactgcagccggggccgcgtgcgctcagggcaccttgcagggcatccgggcctggtag

SEQ ID NO: 45988 - DNA, 2472 bp, Homo Sapiens
gacttccggcggcttgtgggagtgctggttctgtcctccttgcgggtgcggagatggttgtcttggttacgggtcctaacggtcccctgccttgaaatcccttgttgagggcctgcaaccttgtgcttccgaccggagacgcctttggtccctcggtgtctgcactggctgctggtcaaggcttcagtgtggagtaattgacactttcgagaatattaaaatcaaattagagaagaaaactgatccataataataaaaatgtctcgaaaaatttcaaaggagtcaaaaaaagtgaacatctctagttctctggaatctgaagatattagtttagaaacaacagttcctacggatgatatttcctcatcagaagagcgagagggcaaagtcagaatcaccaggcagctaattgaacgaaaagaactacttcataatattcagttactaaaaattgagctatcccagaaaactatgatgatcgacaatttgaaagtggattatcttacaaagattgaagaattggaggagaaacttaatgatgcacttcaccagaagcagctactaacattgagattagacaaccaattggcttttcaacagaaagatgccagcaaatatcaagaattaatgaaacaagaaatggaaaccattttgttgagacagaaacaactagaagagacaaatcttcagctaagagaaaaagctggagatgttcgtcgaaacctgcgtgactttgagttgacagaagagcaatatattaaattaaaagcttttcctgaagatcagctttctattcctgaatatgtatctgttcgcttctatgagctagtgaatccattaagaaaggaaatctgtgaactacaagtgaaaaagaatatcctagcagaagaattaagtacaaacaaaaaccaactgaagcagctgacagagacatatgaggaagatcgaaaaaactactctgaagttcaaattagatgtcaacgtttggccttagaattagcagacacaaaacagttaattcagcaaggtgactaccgtcaagagaactatgataaagtcaagagtgaacgtgatgcacttgaacaggaagtaattgagcttaggagaaaacatgaaatacttgaagcctctcacatgattcaaacaaaagaacgaagtgaattatcaaaagaggtagtcaccttagagcaaactgttactttactgcaaaaggataaagaatatcttaatcgccaaaacatggagcttagtgttcgctgtgctcatgaagaggatcgccttgaaagacttcaagctcaactggaagaaagcaaaaaggctagagaagagatgtatgaaaaatatgtagcatccaggcaagaccattataaaacagaatatgaaaataaactacatgatgaactagaacaaatcagattgaaaaccaaccaagaaattgatcaacttcgaaatgcctctagggaaatgtatgaacgagaaaacagaaatctccgagaagcaagggataatgctgtggctgaaaaggaacgagcagtgatggctgaaaaggatgctttagaaaaacacgatcagctcttagacaggtacagagaactacaacttagtacagaaagcaaagtaacagaatttctccatcaaagtaaattaaaatcttttgaaagtgagcgtgttcaacttctgcaagaggaaacagcaagaaatctcacacagtgtcaattggaatgtgaaaaatatcagaaaaaattggaggttttaaccaaagaattttatagtctccaagcctcttctgaaaaacgcattactgaacttcaagcacagaactcagagcatcaagcaaggctagacatttatgagaaactggaaaaagagcttgatgaaataataatgcaaactgcagaaattgaaaatgaagatgaggctgaaagggttcttttttcctacggctatggtgctaatgttcccacaacagccaaaagacgactaaagcaaagtgttcacttggcaagaagagtgcttcaattagaaaaacaaaactcgctgattaaaagatctggaacatcgaaaggaccaagtaacacagctttcacaagagccaattcgctattaaaccagactcaacagccttacaggtatctcattgaatcagtgcgtcagagagattctaagattgattcactgacggaatctattgcacaacttgagaaagatgtcagcaacttaaataaagaaaagtcagctttactacagacgaagaatcaaatggcattagatttagaacaacttctaaatcatcgtgaggaattggcagcaatgaaacagattctcgttaagatgcatagtaaacattctgagaacagcttacttctcactaaaacagaaccaaaacatgtgacagaaaatcagaaatcaaagactttgaatgtgcctaaagagcatgaagacaatatatttacacctaaaccaacactcttt

SEQ ID NO: 45989 - DNA, 1941 bp, Homo Sapiens
attccaggcctctgctttctgctgagcctctttggagctgtgactcagaaaaccaaaacttcctgtgctaagtgccccccaaatgcttcctgtgtcaataacactcactgcacctgcaaccatggatatacttctggatctgggcagaaactattcacattccccttggagacatgtaacgacattaatgaatgtacaccaccctatagtgtatattgtggatttaacgctgtgtgttacaatgtcgaaggaagtttctactgtcaatgtgtcccaggatatagactgcattctgggaatgaacaattcagtaattccaatgagaacacctgtcaggacaccacctcctcaaagacaaccgagggcaggaaagagctgcaaaagattgtggacaaatttgagtcacttctcaccaatcagactttatggagaacagaagggagacaagaaatctcatccacagctaccactattctccgggatgtggaatcgaaagttctagaaactgccttgaaagatccagaacaaaaagtcctgaaaatccaaaacgatagtgtagctattgaaactcaagcgattacagacaattgctctgaagaaagaaagacattcaacttgaacgtccaaatgaactcaatggacatccgttgcagtgacatcatccagggagacacacaaggtcccagtgccattgcctttatctcatattcttctcttggaaacatcataaatgcaactttttttgaagagatggataagaaagatcaagtgtatctgaactctcaggttgtgagtgctgctattggacccaaaaggaacgtgtctctctccaagtctgtgacgctgactttccagcacgtgaagatgacccccagtaccaaaaaggtcttctgtgtctactggaagagcacagggcagggcagccagtggtccagggatggctgcttcctgatacacgtgaacaagagtcacaccatgtgtaattgcagtcacctgtccagcttcgctgtcctgatggccctgaccagccaggaggaggatcccgtgctgactgtcatcacctacgtggggctgagcgtctctctgctgtgcctcctcctggcggccctcacttttctcctgtgtaaagccatccggaacaccagcacctcactgcatctgcagctctcgctctgcctcttcctggcccacctcctcttcctcgtggggattgatcgaactgaacccaaggtgctgtgctccatcatcgccggtgctttgcactatctctacctggccgccttcacctggatgctgctggagggtgtgcacctcttcctcactgcacggaacctgacagtggtcaactactcaagcatcaatagactcatgaagtggatcatgttcccagtcggctatggcgttcccgctgtgactgtggccatttctgcagcctcctggcctcacctttatggaactgctgatcgatgctggctccacctggaccagggattcatgtggagtttccttggcccagtctgtgccattttctctgcgaatttagtattgtttatcttggtcttttggattttgaaaagaaaactttcctccctcaatagtgaagtgtcaaccatccagaacacaaggatgctggctttcaaagcaacagctcagctcttcatcctgggctgcacatggtgtctgggcttgctacaggtgggtccagctgcccaggtcatggcctacctcttcaccatcatcaacagcctccaaggcttcttcatcttcttggtctactgcctcctcagccagcaggtccagaaacaatatcaaaagtggtttagagagatcgtaaaatcaaaatctgagtctgagacatacacactttccagcaagatgggtcctgactcaaaacccagtgagggggatgtttttccaggacaagtgaagagaaaatattaa

SEQ ID NO: 45990 - DNA, 291 bp, Homo Sapiens
agatgcctgaaatgtgcagatgccccgtgtcagaagagctgtccaactaatcttgatattaaatcattcatcacaagtattgcaaacaagaactattatggagctgctaagatgatattttctgacaacccacttggtctgacttgtggaatggtatgtccaacctctgatctttgtgtaggtggatgcaatttatatgccactgaagagggacccattaatattggtggattgcagcaatttgctactgagactttgatcctggctttctctttaatgaatcatttgtaa

SEQ ID NO: 45991 - DNA, 687 bp, Homo Sapiens
ccggcgctgcgggctctgattgcgggcgcctactgggccctgtgcgctgtaggcctggtgggcaacgtgctagtccgggtgaggtcccagcagtggcgccgccactggctgctcaattgcttcctcctcaatctggcagccactgacctgcagtttgtgctaacgctgcccttttgggccgtggacacggcgcgcgactttagctggcccttcgggggtgccatctgcaaggtgatgctgacgctcaccgtgctcaacatgtatgccagcatcttcctcctcagtgccatgagcgtggcacgctattgcattgtgactggcgcgctgcctccgagccatcggggcgcatcacgggccagctgtgtgtgctgcctgctctgggctatggccgtcctggctacggcgcccaccgccctgttcgccacggcagctagggtggggggaaagcactcgtgcctgctgcgcttccccgccggcggccccaaatggcaggtgctctaccacctgcagaagatcgcagtagccttcgtgctgccgctggccacgctgggcacctgttcgctgctgctgcgcttcctgcgactgtggtgcgcacgctggccgtcgagggtcaggcgccgactgcgttcccgagtcacctgtgcgctggcctgcgtgctactggccttcgtgctctgctggctgccc

SEQ ID NO: 45992 - DNA, 840 bp, Homo Sapiens
atggcgccgattccaaagactgtggggcggatcaagctagactgctctctacggcccagctgcccactggaggtcgctgctgcacccaaactttgcaaggaattcggtccagaggattacggcgaagaggacatagtggattttcttcgacggcttgtggagagtgatccccagggcctgcaccggatccatgtggatgggagcagcgggcggctgcagctgtggcaccatgattacctcctgggccacttggatgatgaagggaaatcaactggacagagtgacaggggcaagggggctgagggactgggcacctactgtggtctccgcaagtccttcctgtatcctccccaagagtctgagccctgccctcaaagcccctctgcctctgccaccttccccagtgtctcagacagcctgcttcaggtggccatgccccagaagctcctggtgacagaagaggaagccaatcgcctggctgaggagctggtggctgaggaggagcgcatgaaacagaaagcagagaaaaagcgactcaagaagaagcgtcaaaaggaacggaagcgacaggagcgtttggagcagtactgtggggagcccaaggccagcactacctcagatggagatgagagccccccatccagccctggaaacccagttcagggacagtgtggtgaagaagaggactcactggatctatctagcacttttgtgtctctggctttgcgcaaggttggggattggcccctcagtgcccgcagagagaagggactgaaccaggagccccaaggcaggggtctggccctccagaagatgggtcaagaggaagagagccctcca

SEQ ID NO: 45993 - DNA, 306 bp, Homo Sapiens
cagcgaggtaaacaattgtcactgggctttggggtcagtcagtaacaggaaacagaccagaagaaagagatcccttcctcctttttcctccaacttgctggcactatctagctccccctcttggcagaaccgaaaagggagcagctggtaaaacagaagtgtatttccagagtgtcagccacagtctcacaaagctaaaacacaataaagcaaggttgaagctgagaggcaataacttaatcatcagcccagtactcagttgttttccaataatagttctagttgaattgatgcaccatatttatt

SEQ ID NO: 45994 - DNA, 1548 bp, Homo Sapiens
ggcttacatttcaagtggccattaggggcccctatgctggcagcaatatatgcaatgagtatggttttaaaaatgctgcctgccctgggtatggcgtgtccacccaaatgccgctgcgagaagctgctcttctactgcgactctcagggcttccactcagtgccaaacgccacagacaagggctctctgggcctgtccctgaggcacaatcacatcacagagctcgaaagagatcaatttgccagcttcagtcaacttacttggctccacttagatcacaatcaaatttcaacagtaaaagaagatgcttttcaaggactatataaacttaaggaattaatcttaagttccaacaaaatattttacttgccaaacacaacttttacccaactgattaacctgcaaaatttggacctgtcttttaatcagctgtcatctctgcacccagagctcttctatggccttcggaagctgcagaccttgcatttacgttccaactccctgcggactatcccagtacgcctgttctgggactgtcgtagtctggagtttctggatttgagcacaaatcgtttgcgaagtttggctcgcaatggatttgcaggattaattaaactgagagagcttcacctagagcacaaccagctgacgaagattaattttgctcatttcctacggctaagcagtctgcacacgctcttcttacaatggaacaaaatcagcaacttgacatgtgggatggagtggacctggggcactttagaaaagctagacctgactggaaatgaaatcaaagccatcgacttgacagtgtttgaaacgatgcccaatcttaaaatactcctcatggataacaacaagttaaacagccttgattccaagatcttaaactccctgagatccctcacaaccgttggtctctctggcaatctgtgggaatgcagcgcccgaatatgtgctctggcctcctggctgggcagtttccaaggtcggtgggaacactccatcctatgccacagtcctgaccacacccaaggagaggatattctagatgcagtccatggatttcagctctgctggaatttgtcaaccactgtcactgtcatggctacaacttatagagatccaaccactgaatatacaaaaagaataagctcatcaagttaccatgtgggagacaaagaaatcccaactactgcaggcatagcagttactaccgaggaacactttcctgaaccagacaatgccatcttcactcagcgggtaattacgggaacaatggctttattgttttctttcttttttattatttttatagtgttcatctccaggaagtgctgccctcccactttaagaagaattaggcagtgctcaatggttcagaaccacaggcagctccgatcccaaacacgactccatatgtcaaacatgtcagaccaaggaccgtataatgaatatgaacccacccatgaaggacccttcatcatcattaatggttatggacagtgcaagtgtcagcagctgccatacaaagaatgtgaagtataa

SEQ ID NO: 45995 - DNA, 516 bp, Homo Sapiens
aggtggagtccagaggcctccccgtcctgctggctgagggcctgggcctcaaacagctgcttcattatgagcgccgacttctgctccagctgcatgacgcgcccactcttctcggtcacctcctgggtgaggcgtcggttctgctccttcagcataaggatagtctgctgctgccaccccgggaaggaggtgaacgtcagggcagggcagaggggcccggaggaggacgtaggtagggcccggctggcaccggccgcagccagcaactcccccacgcaccgggccacctcctgtaccttaggcagtagccgccccagtgggtgggggctccccgcaggcccaaagtcggcgctggctctgctctggcccaggcggcactggcggtcctgcactggttgcagccgctgctggtaccagtcgcgaccccgccatcatctccaaaccctgcagcagcaccaccttctcctgctccagccttcatctgcttcagcaggccgcagtccacgccgctggtga

SEQ ID NO: 45996 - DNA, 1491 bp, Homo Sapiens
ttgccgtgaagggctgtgcggttcccgtgcgcgccggagcctgctgtggcctcttatgcactccaccacccccatcagctccctcttctccttcaccagccccgcagtgaagagactgctaggctggaagcaaggagatgaagaggaaaagtgggcagagaaggcagtggactctctagtgaagaagttaaagaagaagaagggagccatggacgagctggagagggctctcagctgcccggggcagcccagcaaatgcgtcacgattccccgctccctggacgggcggctgcaggtgtcccaccgcaagggcctgccccatgtgatttactgtcgcgtgtggcgctggccggatctgcagtcccaccacgagctgaagccgctggagtgctgtgagttcccatttggctccaagcagaaagaagtgtgcattaacccttaccactaccgccgggtggagactccagtactgcctcctgtgctcgtgccaagacacagtgaatataacccccagctcagcctcctggccaagttccgcagcgcctccctgcacagtgagccactcatgccacacaacgccacctatcctgactctttccagcagcctccgtgctctgcactccctccctcacccagccacgcgttctcccagtccccgtgcacggccagctaccctcactccccaggaagtccttctgagccagagagtccctatcaacactcagttgacacaccacccctgccttatcatgccacagaagcctctgagacccagagtggccaacctgtagatgccacagctgatagacatgtagtgctatcgataccaaatggagactttcgaccagtttgttacgaggagccccagcactggtgctcggtcgcctactatgaactgaacaaccgagttggggagacattccaggcttcctcccgaagtgtgctcatagatgggttcaccgacccttcaaataacaggaacagattctgtcttggacttctttctaatgtaaacagaaactcaacgatagaaaataccaggagacatataggaaagggtgtgcacttgtactacgtcgggggagaggtgtatgccgagtgcgtgagtgacagcagcatctttgtgcagagccggaactgcaactatcaacacggcttccacccagctaccgtctgcaagatccccagcggctgcagcctcaaggtcttcaacaaccagctcttcgctcagctcctggcccagtcagttcaccacggctttgaagtcgtgtatgaactgaccaagatgtgtactatccggatgagttttgttaagggttggggtgctgagtatcatcgccaggatgtcaccagcaccccctgctggattgagattcatcttcatgggccactgcagtggctggacaaagttctgactcagatgggctctccacataaccccatttcttcagtgtcttaacagtcatgtcttaagctgcatttccataggat

SEQ ID NO: 45997 - DNA, 860 bp, Homo Sapiens
gtagggccgggcgataatggcggcgtcgaggctggagctaaacctggtgcggctgctatcccgctgcgaggcgatggcagcggagaaacgggacccggacgagtggcgcctggagaagtacgtgggagccctagaggacatgttgcaggccctgaaggtccacgcgagcaaaccggcctctgaggtgatcaatgaatattcctggaaggtggattttctgaaggggatgctgcaagccgagaagctgacctcctcctcagagaaagcactggccaaccagttcctggcccctggccgtgtgccaaccacagccagagagcgagtgcccgccacaaagacggtgcatctgcagtcacgggcgcggtacaccagcgagatgcggagtgagctactaggcacggatgccggaaacgggaaaccaacactcgccttttttgcttggcctgttttgctttcagagcctgagatggacgtaaggaagagaactggagtggcagggtcccagccagtgagtgagaagcagttggcagctgagctagacctcgtcctgcagcgacatcagaacctccaggaaaagctggcggaagagatgctaggactggcccggagcctcaagaccaataccctggccgcccagagtgtcatcaagaaggacaaccagaccctgtcacactcactgaaaatggcggaccagaacctggagaaactgaagacggagtcagagcgtctggagcagcacacgcagaagtcagtcaactggctgctctgggccatgctcattatcgtctgcttcatcttcattagcatgatcctcttcattcgaatcatgcctaaactcaaataaagacccccgcccacct

SEQ ID NO: 45998 - DNA, 3114 bp, Homo Sapiens
attgaaccctctgcattccacaggcaaggtttacctaaagcaccagggtggactgagaagaattctcatcatagttgggagccattggatgccccagagggtaagctgcaaggctctaggtgtgacaacagcagttgcagcaagctccctccacaagaaggaagaggcattgctcaagaacagctgttccaagaaaagaaggatcctgctaacccctccccggtgatgcctggaatagccacctctgagaggggtgatgaacacagcctaggctgtagtccttcaaattcatcagctcagcccagccttcccctgtatagaacctgccaccccataatgcctgttgcttcttcatttgtgcttcactgtcctgatcctgtgcagaaaactaaccaatgcctccaaggccaaagcctcaaaacttcattgactttaaaagtggacagaggcagtgaggagacctataggccagagtttcccagcacaaaggggcttgtccgttctctggctgagcagttccagaggatgcagggtgtctccatgagggatagtacaggtttcaaggatagaagtttgtcaggtagtctaaggaagaactcttccccttctgattctaagcctcctttctcacagggtcaagagaaaggccactggccatgggcaaagcaacaatcctctctggagggtggggatagaccactttcctgggaagagtccactgaacattcttctcttgccttaaactctgggctgcctaatggtgaaacttctagcggaggacagcccaggttggcagagccagacatataccaagagaagctgtcccaagtgagagatgttaggtctaaggatctgggcagcagtactgacttggggacttccttgcctttggattcctgggtgaatatcacaaggttctgtgattctcagcttaagcatggggcacctaggccaggaatgaagtcctcccctcatgattcccatacgtgtgtaacctatccagagagaaatcacatccttttgcatccacattggaaccaagacacagagcaggagacctcagaattggagtctctgtatcaggccagtcttcaggcttctcaagctggctgttctggatgggggcagcaggataccgcctggcacccacttagccaaacaggctctgcagatggcatggggaggaggttgcactcagcccatgatcctggtctctcaaagacttcaacagcagaaatggagcatggtctccatgaagccagaacagtgcgtacttctcaggattcatcaaacgtgaggaagcctttggaaaccgggcaccgttgttccagctcctcttccctccctgtcatccatgacccttctgtgtttctcctcggtccccaactctaccttccccaaccacagttcctgtccccagatgtcctgatgcccaccatggcaggggagcccaatagactcccaggaacttcaaggagtgtccagcagtttctggctatgtgtgacaggggtgaaacttcccaaggggccaagtacacaggaaggactttgaactaccagagcctcccccatcgctccagaacagacaactcctgggcaccctggtcagagaccaaccagcatattgggaccagattcctgactactccagggtgcaatcctcaactaacctacactgccacactaccagaaagaagcaagggccttcaggttcctcacactcagtcctggagtgatcttttccattcaccctcccaccctcccattgttcatcctgtgtacccaccatctagcagtcttcatgtacccctgaggtcagcttggaattcagatcctgttccagggtcccgaacccctggtcctcgaagagtagatatgcccccagatgatgactggaggcaaagcagttatgcctcccactctggacacaggagaacagtgggagaggggtttctgtttgttctatcagatgctcccagaagagagcagatcagggctagagtcctgcagcacagtcaatggtaaaggttattcctttcctttcctggagctacacctttctttgtaaaactgtactgtgggccgggcgcggtggctcacacctgtaatcccagcactttgggaggctgaggcgggtggatcacgaggtcaggagattgagaccatcctggccaacatggtgaaaccccgtctctaccaaaatacaaaaaattagccaggcgtgacggtgcgtgcctgtagtcccaactactcggaaggctgaggcaggagaattgcttgaacccgggaggcagaggttgcagtgagccgagatcgcaccactgcactccagcttggcaatagagtgagactccatctcaaaaaacaaaacaaaacaacaacaaaataaactactgtggcagcgttggtaccctgcatcactgccatggttgtgctattctcatctcaacatagaattggtgggttctcctaagggtgtcaggaacctctaaaaagatgtgattctttgggaggggatatttgaaattccaacttccattccccctagcaaaaggaagcagctgctgtttaagggttttatctgagccactttaaagatgaatccatggtattactctggatactagccattccttaggattttaaggtcacattttattcctggatgctttatgtccccacctccacctgagccctcatcctctgttccctactatactcccaacttctactctttgttttatccacctatccctattacctgaccctttgtcttccctgtctcccatccttggggggacatgtagccctgtggtcatggttctgatgacatcatcagggcagcccccctgcccaggtattatggcctgtcagcattccctgtgccctccaaaccttaggcctagaatgcggagctgccaacataacattcacccttttgaacagatggagtcaggcacactaacacagccttctgtcctcaataacacagccattattgccacttgctcagtcgtcaatgtaaaccctcagagtcagctgaactattttaggccaaacatactgtttttgtaaagtatttttcattaataaatctataagacagttctattt

SEQ ID NO: 45999 - DNA, 1701 bp, Homo Sapiens
agggaagatggcttcgtttcggaagctaacgctttctgaaaaagtgccgccaaatcatcccagtcggaaaaaggttaacttcctagatatgtctctagacgacattataatctataaagagttagaagggacaaatgctgaagaagaaaagaataaaagacagaaccatagtaaaaaggaatcgccttcaagacagcaatcaaaagctcatagacatcgccatcggagaggctactcaagatgcagaagcaactctgaggaaggaaatcatgataaaaaaccatcccaaaaaccttctggattcaagtctggacaacaccctttaaatgggcagcctttaattgagcaggagaagtgcagtgacaattatgaggcccaagcagagaagaatcaaggccagtcagaggggaaccagcatcaatcagaaggaaatccggacaaatcagaagaatcccagggccaaccagaagaaaatcatcattctgagcgatcccgaaaccacttagagagatctctttctcagtcagacagatctcaagggcagctaaagagacatcatccccaatatgagagatctcatggccaatacaagagatctcatggtcaatctgagagatctcatggccactcagagagatctcatggtcactcagagagatctcatggtcactcagagagatctcatggtcactcaaagagatctcgtagccagggagatcttgtggacactcagagtgatctcatagccactcagagagatctcatagccactcagaaagatctcatagccactcagagagatctcatagccactcagagagatctcatagtcactcagagagatctcgtggccactgagagagatctcataaatcagtcagggagatctcatggccaatcagaaagacatcagagatactcaacaggtaaaaatacaataactacttaatcatcagaacaatgtgttgaattctgtggaaatagaaaagcatatatctatattctaatggctaaatatgtatttgttgaaacatgtatattgggacaaagacataaatattagaatggaggtaatacatacatagtatcaatattgtttcaacttgatgtcctctaagctatcatccagttacccaagatgtcccattaagttgttcccggtaggtctgctttccctggaagagccgtatgtactcagcctttcctattgggccttccccacaattagaatattttgacttagtgtcctgtcccccttggacgttccaacttgacttagtgtccagtgccccttggacattccaacctggtaggtaagctaatctaacaactaactgccaaattgataatatataatctatgataatgaatatctcttttgtgtctccttcctaagccatcctcagagagtccttagcagacaaatggtagatgtatctttgggcagctgaacttttctgctttcctcaaatcagaccatatgagaggatatattctatgcatagatgtaatgctaaccttctgaatatattttgaatacatttatatattcactgttgccttataaaactgttagggtaggtctgtctaccctagcaaaagaaacacagaaatttaaatgtactgggagttatgttgttaaaaacacaagatatgttaactgcagtttgtttggttattcaataaaagttttagttttaa

SEQ ID NO: 46000 - DNA, 645 bp, Homo Sapiens
atggatgactcggagacaggtttcaatctgaaagtcgtcctggtcagtttcaagcagtgtctcgatgagaaggaagaggtcttgctggacccctacattgccagctggaagggcctggtcaggtttctgaacagcctgggcaccatcttctcattcatctccaaggacgtggtctccaagctgcggatcatggagcgcctcaggggcggcccgcagagcgagcactaccgcagcctgcaggccatggtggcccacgagctgagcaaccggctggtggacctggagcgccgctcccaccacccggagtctggctgccggacggtgctgcgcctgcaccgcgccctgcactggctgcagctgttcctggagggcctgcgtaccagccccgaggacgcacgcacctccgcgctctgcgccgactcctacaacgcctcgctggccgcctaccacccctgggtcgtgcgccgcgccgtcaccgtggccttctgcacgctgcccacacgcgaggtcttcctggaggccatgaacgtggggcccccggagcaggccgtgcagatgctaggcgaggccctccccttcatccagcgtgtctacaacgtctcccagaagctctacgccgagcactccctgctggacctgccctag

SEQ ID NO: 46001 - DNA, 447 bp, Homo Sapiens
atgaaggtcatgtacatgttgaagggccagagcccggtgcagggcaccatccactttgagcagaaggaaaatgaaccatttatggtgtcagaatgcattacaggattgactgaacgccagcacagattccatgttcatcagtttggagataatacaccaggctgtaccagggcagttccttactttaatcctttaaccaaaaaccacagtgggccagatcaagagaggcaggttggagacctgggtaatgtggccgctggcaaagatgtcgccaacatgtctgttgaagattctctggtctcactctcaggacactattccatcactgcccacacaatggtgcatgacaaaccagatgacttgggcaaaggtgaaaatgaagaaagtacaaacacaggaaatgctagaagttgtttggtttgtggtgtaattgggattgcccaataa

SEQ ID NO: 46002 - DNA, 2505 bp, Homo Sapiens
ggcgccgccggaccgcgccccaccccgcgcgcccgagcagggcgactgtcattagcttcctggacgggacccggggcgggatcctggtgtcctgaaaggggcccgggcgaccctaagaggaagaacttttgggggcggggtccccggtcccgcgtcccctgggcagccgctattgtctacgcgcctcgctgggcggcgcggggggcgtgatcgcggcggccccgggctctgggtgcggagacccaggcggggctgggcccagggcggcggcgggagaagccggggaagccgaagagcctggggaggaggagctgcgagcgcgggagacgagcaggagccgcgcgggccgcggcgagcgcgatgccggcggcggcgggggacgggctcctgggggagccggcggcgcctgggggcggcggcggcgcggaggacgcggccaggcccgcggcggcctgcgagggaagtttcctgcctgcctgggtgagcggcgtgccccgcgagcggctccgcgacttccagcaccacaagcgcgtgggcaactacctcatcggcagcaggaagctgggcgagggctcctttgccaaggtgcgcgaggggctgcacgtgctgaccggggagaaggtggccataaaagtcattgataagaagagagccaaaaaggacacctatgtcaccaaaaacctgcggcgagagggtcagatccagcagatgatccgccaccccaatatcactcagctccttgatattttagaaacggaaaacagctactacctggtcatggagctgtgccctgggggcaacctgatgcacaagatctatgagaagaagcggctggaggagtccgaagcccgcagatacatccgacagctcatctctgccgtagagcacctgcaccgggccggggtggtccacagagacttgaagatagagaatttgctactagatgaagacaataatatcaagctgattgactttggtttgagcaactgcgcagggatcctgggttactcggatccgttcagcacacagtgtggcagccctgcctacgctgcacctgaactgctcgccaggaagaaatacggccccaaaatcgatgtctggtccataggtgtgaacatgtatgccatgttgaccgggacgctgcctttcacggtggagcctttcagcctgagggctttgtaccagaagatggtagacaaagaaatgaaccccctccccactcagctctccacaggtgccatcagtttcctgcgctctctcctggaaccggatcctgtgaagaggccaaatattcagcaggcactggcgaatcgctggcttaatgagaattacacgggcaaagtgccctgtaatgtcacctatcccaacaggatttctctggaagatctgagcccgagcgtcgtgctgcacatgaccgagaagctgggttacaagaacagcgacgtgatcaacactgtgctctccaaccgcgcctgccacatcctggccatctacttcctcttaaacaagaaactggagcgctatttgtcagggaaatctgacatccaggacagcctctgctacaagacccggctctaccagatagaaaagtacagggcccccaaggagtcctatgaggcctctctggacacctggacacgagatcttgaattccatgccgtgcaggataaaaagcccaaagaacaagaaaaaagaggggattttcttcatcgaccattctccaagaagttggacaagaacctgccctcgcacaaacagccctcaggctcgcttatgacacagattcagaacaccaaagccctcctgaaggaccggaaggcctccaagtccagcttccccgacaaagattcctttggctgccgcaatattttccgcaaaacctcagattccaattgtgtggcttcttcttccatggagttcatccccgtgccaccgcccaggaccccgaggattgtgaagaaaccggagccccatcagccagggcccggaagcactggcatcccccacaaggaagaccccctgatgctggacatggtgcgctccttcgagtctgtggatcgcgacgaccacgtagaagtgctgtctccctctcatcactacaggattctgaactccccggtcagcttggctcgcagaaattccagcgagaggacgctgtccccgggtctgccatccggaagcatgtcgcctctccatactcctttgcatccaactctggtctcttttgctcacgaagataagaacagccccccaaaagaggagggcctgtgttgcccacctccggttcccagcaatggccccatgcagcctctggggagccccaattgtgtgaaaagccgaggccggttccctatgatgggcatcggacagatgttaaggaagcgccatcagagtctgcagccatctgcagataggcccctggaggccagcctgcccccactgcagcccctagcccctgtgaaccttgcctttgacatggccgatggggtcaagacccagtgctaa

SEQ ID NO: 46003 - DNA, 825 bp, Homo Sapiens
atgggagcagtaagctgtcggcaggggcagcacacccagcagggggaacacacccgggtggctgtccctcacaagcagggtggcaacatccggggtccctgggcccgaggctggaagagcctctggacaggtttgggaaccatcaggtcagatctggaagaactctgggaactacgggggcaccactatctgcaccaggaatccctaaagccagccccagtactggtagagaagcctctgccagagtggccagtgcctcagttcatcaacctctttctaccagagtttcccattaggcccattagggggcagcagcagctgaagattttaggcctcgtggctaaaggctcctttggaactgtcctcaaggtgctagattgcacccagaaagctgtatttgcagtgaaggtggtgcccaaggtaaaggtcctacagagggataccgtgaggcagtgcaaagaggaggttagcatccagcgacagatcaaccatccctttgtacacagcttgggggacagctggcagggaaaacggcaccttttcattatgtgtagctactgcagcacagatctgtactccctttggtcggctgttggctgctttcctgaggcttccatccgtctctttgctgccgagttggtgctggtactgtgttatctccatgacttgggcatcatgcatcgagatgtgaagatggagaatattcttctagatgaacgaggccatctgaaactgacagactttggtctgtcccgccacgtgccccagggagctcaagcctacactatctgtggcactcttcagtacatgggtgagagaggttaa

SEQ ID NO: 46004 - DNA, 1524 bp, Homo Sapiens
ttcatgcagcgccacttcggcgcgctcctgcagctgggcgtcaacaagttctcgctgcggatgttcggcagccagaaggccgtggagcgcgagcaggagcgcgtccagtcagcggggtcctggatcatccacccgtacagcgacttcaggttctactgggacttcaccatgctgctgttcatggtgggaaacctcatcatcatcccagtgggcatcaccttcttcaaggacgagaccaccgccctgtggatcgtgttcaacgtggtctcggacaccttcttcctcatggacctggtgttgaacttccgcaccggcattgtgatcgaggacaacacggagatcatcctggaccaagagaagatcaagaagtacgtgcgcacgtggttcatggtggacttcgtgtcctccatccccgtggactacatcttcctcatcgtggagaagggcatcgactccgaggtctacaagacggcgtgcgccctgcggatcgtgcgcttcaccaagatcctcagcctcctgcggctgctgcgcctctcgcgcctgatccgctacatccaccagtgggaggagatcttccacatgacctatgacctggccagcgcggtgatgcggttctgcaacctcatcagtatgatgctgctgctctgccactgggatggctgcctgcagttcctggtggccatgctgcaggacttcccgtgcaactgctgggtgtccatcaatggcatggtgaaccactggtggagcgaactgtattccttcgcactcttcaaggccatgagccacatgctgtgcattgggtatggccggcaggcgcccgagagcatgacggacatctggctgaccatgctcagcatgattgtgagtgccacctgctacgccatgttcatcggccacgccactgccctcatccagtcgctggactcctcgcggcgccagtacagacgtaagcaggtggagcagtacatgtccttccacaagctgccggccgacttccgccagaagatccacgactactacgagcaccgttaccagggcaagatgttcgacgaggacagcatcctgggcgagctcaacgggcccctgcgggaggagattgtcaacttcaactgccggaagctggtgacctccatgccgctgttcgccaatgctgaccccaacttcgtcacggccatgctgaccaagctcaagttcgaggtcttccagccgggtgactacctcatccgcgaaggcaccatcgggaagatgtacttcatccagcacggcgtggtcagcgtgctcgctaagggcaacaaggagatgaagctgttcgatggctcctacttcggggagatctgcctgctcacccggggccaccgcatggcgagcgtgcgggccaacacctattgccgcctcctttcgctgagcgtggacaacttcaacgaggtgctggaggagtaccccatgatgcggcgcgccttcgagacggtggccatcgaccgcctggaccgcatcggcaagaagaattccatcctcctgcacaag

SEQ ID NO: 46005 - DNA, 267 bp, Homo Sapiens
atgatcgcaggagagcacagactggaccctgctacgatctctcttggagtggatcagactgatgatcaccaacaaccaactcattcccggataaggaagaagagagtgtcacctacttcagtgtggtttcaaccctacttctgcatcttaaagacactgtatgtgctcaatctcgtttattccctcctaatcaagtgtacaacgttggacactgtgcaggatgatgccacttcatcttggatgctaatctgccatgttgacttctga

SEQ ID NO: 46006 - DNA, 1917 bp, Homo Sapiens
acatgtcaaagagacacacactaaattagcagggagtgttataaaaactttggagtgcaagctcacagctgtcttaataagaagagaaggcttcaatggaaccttttgtggtcctggtgctgtgtctctcttttatgcttctcttttcactctggagacagagctgtaggagaaggaagctccctcctggccccactcctcttcctattattggaaatatgctacagatagatgttaaggacatctgcaaatctttcaccaatttctcaaaagtctatggtcctgtgttcaccgtgtattttggcatgaatcccatagtggtgtttcatggatatgaggcagtgaaggaagccctgattgataatggagaggagttttctggaagaggcaattccccaatatctcaaagaattactaaaggacttggaatcatttccagcaatggaaagagatggaaggagatccggcgtttctccctcacaaccttgcggaattttgggatggggaagaggagcattgaggaccgtgttcaagaggaagctcactgccttgtggaggagttgagaaaaaccaaggcttcaccctgtgatcccactttcatcctgggctgtgctccctgcaatgtgatctgctccgttgttttccagaaacgatttgattataaagatcagaattttctcaccctgatgaaaagattcaatgaaaacttcaggattctgaactccccatggatccaggtctgcaataatttccctctactcattgattgtttcccaggaactcacaacaaagtgcttaaaaatgttgctcttacacgaagttacattagggagaaagtaaaagaacaccaagcatcactggatgttaacaatcctcgggactttatcgattgcttcctgatcaaaatggagcaggaaaaggacaaccaaaagtcagaattcaatattgaaaacttggttggcactgtagctgatctatttgttgctggaacagagacaacaagcaccactctgagatatggactcctgctcctgctgaagcacccagaggtcacagctaaagtccaggaagagattgatcatgtaattggcagacacaggagcccctgcatgcaggataggagccacatgccttacactgatgctgtagtgcacgagatccagagatacagtgaccttgtccccaccggtgtgccccatgcagtgaccactgatactaagttcagaaactacctcatccccaagggcacaaccataatggcattactgacttccgtgctacatgatgacaaagaatttcctaatccaaatatctttgaccctggccactttctagataagaatggcaactttaagaaaagtgactacttcatgcctttctcagcaggaaaacgaatttgtgcaggagaaggacttgcccgcatggagctatttttatttctaaccacaattttacagaactttaacctgaaatctgttgatgatttaaagaacctcaatactactgcagttaccaaagggattgtttctctgccaccctcataccagatctgcttcatccctgtctgaagaatgctagcccatctggctgccgatctgctatcacctgcaactctttttttatcaaggacattcccactattatgtcttctctgacctctcatcaaatcttcccattcactcaatatcccataagcatccaaactccattaaggagagttgttcaggtcactgcacaaatatatctgcaattattcatactctgtaacacttgtattaattgctgcatatgctaatacttttctaatgctgactttttaatatgttatcactgtaaaacacagaaaagtgattaatgaatgataatttagatccatttcttttgtgaatgtgctaaataaaaagtgttattaattgc

SEQ ID NO: 46007 - DNA, 201 bp, Homo Sapiens
cctcagggcatgcttcctccagaggttgtcatcatcaacagtacagctgtacgtgtcatctggacatctccttcaaacccaaatggtgttgtcactgagtattctatctatgtaaataataagctctacaagactggaatgaatgtgcctgggtcgtttattctgagagacctgtctcccttcactatctatgacattcag

SEQ ID NO: 46008 - DNA, 1824 bp, Homo Sapiens
ggggaggccagctgggaggggagggggccgtgggggcggctcggctgaaccagccccggctgggcagcagcggggacgccgggggccggggccagggctttccgggcttaggtgaggccgccgtgggccccatcttccggcggtcgccggagtttgtggtgattgttgctgccgccgccacccccccggctgccatctcctcctcctgggccgccgcctcctcctcttcctcctcctcctgggccgggctgatcccctccccgctgccgcctcctcctgggctgggcccgcggtgtctcgtcccctcgcggagccgctcctgccgccgccgccgccgcctcctcattcatcctcgtgcaccataggcggcacaggcaccaagatgtccaaccgagtggtctgccgagaagccagtcacgccgggagctggtacacagcctcaggaccgcagctgaatgcacagctagaaggttggctttcacaagtacagtctacaaaaagacctgctagagccattattgccccccatgcaggatatacgtactgtgggtcttgtgctgcccatgcttataaacaagtggatccgtctattacccggagaattttcatccttgggccttctcatcatgtgcccctctctcgatgtgcactttccagtgtggatatatataggacacccctgtatgaccttcgtattgaccaaaagatttacggagaactatggaagacaggaatgtttgaacgcatgtctctgcagacagatgaagatgaacgcagtattgaaatgcatttgccttatacagctaaagccatggaaagccataaggatgagtttaccattattcctttactggttggagctctgagtcaaaagaacaggaattcggaacttttcagtaaatatctagcggatcctagtaatctctttgtggtttcttctgatttctgccattggggtcaaaggttccgtcacagttactatgatgaatcccagggggagatttgtagatccattgaacatctagataaaatgggtatgagtattatagaacaattagaccctgtatcttttagcaattacttgaagaaataccataatactatatgtggaagacatcccattggggtgttattaaatgctatcacagagctccagaagaatggaatgaatatgagtttttcgtttttgaattatgcccagtcgagccagtgtagaaactggcaagacagttcagtgagttatgcagctggagcactcacggtccactgaagctctgaatcctcagggatgccacctgcacattctcatactctgtccgggctcccagcctagcctttaccacgatactggtcctggtttggggggattctgaaacctcaaactaatagaactttcttctctttttttctagtaggtgtagtccttccttaatttcaactcattaaaaaatgctttatagtttagggcagtggaaggaaggctggcatcaaaatattttgatcaaaaaagatgacaatgtaaaggctcagttatggcagacagttttttgaaagtaacttgtaaagcatttaccatatcctaaatttgcactctttgcagacttgtgcacatatattccgctttcagaatagttttgcaaattgtacacaaacaaacaaaaaggtggaagctttttaataaagaaattgcatttataaatgatctgtattagaatataataaatctccagttatagtcaattactacccatgttgtacaacagataccttctattttagttgctaataaagggctacacaactcaaaataaataaataaataaa

SEQ ID NO: 46009 - DNA, 759 bp, Homo Sapiens
atgccttcttcccaaaacacccaggttctgccccaaagcattccagctcctccttcaggctgtggctcttccatagaaaatctggtctcttccctggggctctggctcttccctgaagtcatcaggcacctgccctgcattgtggttcttccccagagcatcctttcccgtcccccaactacctacccaaaagcctccagaatcaaccgcaggaccacccaggctcctcccccaggaccacccaggctcctcccctgctctggctccaccccaggaccacccagactcctcccccaggctctggctccaccccagggtcacccaggcttctcctccaggttctggttccaccccaggaccacccaggctcctcccccaggaccacccaggcccctcccccaggctctggttccaccccaggaccacccaggctcctcccccaggaccacccaggctcctcccctgctctggctccaccccaggaccacccagactcctcccccaggaccacccaggccgcccctcccccaggctctggctccactccaggaccacccagactcctcccccaggaccacccaggaccctcccccaggctctggctccaccccagggtcacccaggctcctcccccaggctctggctccaccccaggaccacccaggctcctcccccaggctctggctcctccccaggaccacccaggctcctccgccaggctctggttccaccccagaaccaccaaggctcctcccctag

SEQ ID NO: 46010 - DNA, 513 bp, Homo Sapiens
atgctggtcatcgagcagtgtaagaactccagagctgtaaccatttttatcagaggaggaaataagatgatcattgaggaggtgaaacgatcccttcacgatgctttgtgtgtcatcagcaacctcatccgcgataatcgtgtggcatacagaggagggtttgctgagatatcctgtgctctggcagttagccaagaggtggataagtgccccaccttagaccagtacaccataagagcgtttgccgacgctctggagtcgcccatggccctttctgaaaacagtggcatgaatcccatccagactacgacaaaagtccgagccagacaagtgaaggagatgaaccctgctctcggtactgactgtttgcacaaggggacaaatgatatgaagcgacaacatgtcatagaaatcttgattggcaaaaagcaacagacatctttcgcaacacaaatggttagaatgattttgaagattgacgacattcataagcctggagaatctgaagaataa

SEQ ID NO: 46011 - DNA, 675 bp, Homo Sapiens
aaaaagcaaaggaatttcacagagctaaagatccagtgcctgagtaagaagtttgcccagaagatgcttcaaacagcaaggaggaagcttatctatgaaaaagtgaagcactgtcataaggaatataggaaaatgtacagaactgaaattcgaatggcaaggatggcaacaaaagctggcaacttctatgtacctgcagaacccaaattggcatttgtcatcaggatcagaggtatcaatggtgtgagcccaaaggtccgaaaggtgttgcagctttttctcctttatcaaatcttcaatggagcttttgtgaagctgaacaaggcttcaattaatatgctgaggattgtagagccatatattgcaaggtacccaaatctgaagtcagtaaatgaactaatctacaagtgtggttatggcaaaatcaataagagtgaagctttgacagataatgctttgacagctcgatctcttggtaaatatgggatcatctgcagggaggatctgattcatgagatctatactgttggaaaatgcttcaaagaagcaaataactttctgtggcccttcagtatctctccacgaggtgggatgaagaaaaagaccacccattttgtagaaggtggagatgctggcaaaagggaggtccagatcaacaggcttattagaagaatg

SEQ ID NO: 46012 - DNA, 441 bp, Homo Sapiens
atgcggccactccaaggaggccgggaggattgtgggaggccaagacacccaggaaggacgctggccgtggcaggttggcctgtggttgacctcagtggggcatgtatgtgggggctccctcatccacccacgctgggtgctcacagccgcccactgcttcctgagggtgactccggggggccgctggtctgccccatcaatgatacgtggatccaggccggcattgtgagctggggattcggctgtgcccggcctttccggcctggtgtctacacccaggtgctaagctacacagactggattcagagaaccctggctgaatctcactcaggcatgtctggggcccgcccaggtgccccaggatcccactcaggcacctccagatcccacccagtgctgctgcttgagctgttgaccgtatgcttgcttgggtccctgtga

SEQ ID NO: 46013 - DNA, 474 bp, Homo Sapiens
atgcggcagggcccctacctgcccctggagctggggttggagcagctgtttcaggagctggctggagaggtgaggagggggattggactgagggggtatcccgctgcggcctccccttggggaccccccttcccccaccccagcatctcaggtgtctcattttgcttgctttttcctccctccgggcttaaatctcctgaccttttcttgaaatgctcacagctcctccctgcctcagggccttgggctcagtccataccctctcccaggaccaccctctccctcctgacacctccagccaggctcaggtctcatctaaggtgcccagccctggaagctctccctgaccacccccctgccccaggccggtctgctggccccccaccagcaaccacagcccagtgcttcccccgtcacagccctggccctgtggggacaggtctgtctcccccactcctggagctagggctctga

SEQ ID NO: 46014 - DNA, 551 bp, Homo Sapiens
ttgccaagtgcgagccccctccagacatcaggaatgggaagcacagcggtggagatcaagaattctacacatatgcctcctctgtcacctacagctgcaacccctacttctcactcataggcaacgtctccatctcctgcaccgtggagaatgaaacaataggtgtctggagcccaaaccctcctatctgtgaaaaaattgtctgtcgtcgaccacagattccaaaggcaatctttgtttctggatttggacccctctatacttacaaagactctattatggttaactgtgaggaaggttatatcctcagaggcagcagtttaatctattgtgaaacgaataatgagtggtatccttctgttccctcttgcatatccactctgtgtctgaaaccagaaatagtgaatggaaggctgtctgtggataaggatcagtatgttgagtctgaaaatgttaccattgaatgtgattctggctatggtgtggttggtctcaaaagtatcacttgctcagagaagagaacctggtacccagaagtgcccaggtgtgag

SEQ ID NO: 46015 - DNA, 531 bp, Homo Sapiens
gtactgctgggccggaaggtggaggtcgtacgctgtgagggcatcatcatttctggccatttctacagatacaagttgaagtacctggtcttcctccgcaagcagatgaacaccaacccttcccgaggcccctaccacttccgggcctctagccgcaccttccggctgacccgaggcatgttgccccacaagacaaagcaaggccgggccgccctggagcgcctcaaggtgtttgacggcatcccaccgccctatgacatgaaaaagcggatggtggttcctgctgccctcaaggtcatgcatctgaagcctacaagaaactttgcctacgtggggcgcctggctcacgaggtttgctgtaagtacctggcagtggcatctaccctgaaggagaagaggaaggagaaagccaagatccactatcggaagaagaaacagctcatgaggctatggaaaccgggtgaaaagaacgtggagaagaaaactgacaaatacacagaagctctcaagacccatggactcctgatctga

SEQ ID NO: 46016 - DNA, 3614 bp, Homo Sapiens
ttaacaagtgatcgctgctgtctaggattttgtttcttttcgggggaaccttgacttcctttcccaggcaatccctcctgtgctgaactccagaggaaccaggagtcttggggtcttctctggggcagccccaacccccacccccaggctccagccgcgaggactctgtgcacccctcgggccaggcaacagaacttgttccgtggatatttggagcctccacctgccaaacccgagtgattccttttaccaccccccgccccccacccaggatcattcttcccctcctccagctgttgcagcttgagggggaaaaacaagccagccggtggattttctttatttttatttttcgccccgccggggaacgggtgaagtgcttcttctgcatgattttggctgaagaatgctctgcatttccttgatttctatggagacctcagagctggttttgcttctgctgacacctcatctagcaccttctctacctcccagggtctttgcctctatctgtggtttggcattgtacctgggtacaggaagcctttgatgaacttaaaaggagagcctggagaatcatcctgatagactttgagtagaaatggctggacatacttcaaaccacatcttaacatggttcgagccatcactagaaggcaagtgctaacagtaaaggcttatttgcattttatttacatttaatggactgagcattggccaatttccatggcagaaaaatatatttcattttctaggcacaacttctggctgtcagacacttgctgcctttgaatcttgcagcaacatcactaaccacatcccagacatatttccaaatttcaacatctacccccaaaacataggtgtctgagagactccagcattttcggacttcttagtcttgagagtgccaggctatttatctcgaccagccaagctctggagagcaatgttgaatccctgagaagagagagcatggggcgtgctgatttaaaaacagaaaatgcaaagttggactgaaaatatccttagtcttccaagcaatctgcttaagggttccaaacttaccttaatttggtgagaaaagaagctgccctatttttctttcttcttcttctacaactggaaccagccatttccgaaaaccaccaccatggaggttgcaatggtgagtgcggagagctcagggtgcaacagtcacatgccttatggttatgctgcccaggcccgggcccgggagcgggagaggcttgctcactccagggcagctgcagcagctgctgttgcagcggccacagctgctgtcgaaggtagcgggggttctggtgggggctcccaccaccaccaccagtcacgcggggcctgtacctcccatgaccctcagagcagccggggtagtcggaggaggaggcgacagcggtctgagaagaagaaagcccactaccggcagagcagcttccctcattgctctgacctgatgcccagtggctctgaggagaagatcctgagggagctgagtgaggaggaggaagatgaggaggaggaggaagaggaggaagaggagggaaggttttactatagtgaagatgaccatggtgatgagtgttcctacacggatctgctgcctcaggatgagggcggtggcggctacagttcagtccgctacagtgactgttgtgaacgtgtggtgataaatgtgtcaggcctacgctttgagacccaaatgaaaactctggcccagtttccagagactttgttgggagaccctgaaaagaggactcagtactttgaccctttgcgcaatgagtatttttttgacaggaaccgccccagctttgatgccatcttgtattattatcaatcaggaggccgcctgaagaggccagtcaatgtcccctttgatatcttcactgaggaggtgaagttctatcagttgggggaggaggccctgttgaagtttcgggaggacgagggctttgtgagagaagaggaagacagggccctccccgagaatgaatttaaaaagcagatttggctcctctttgaatatccagagagctccagtcctgcaaggggcatagccattgtgtccgtcctggtcatcttaatctccattgtcatcttttgcctggaaaccttgcctgagtttagggacgacagggatctcgtcatggcactgagtgctggcgggcatggtgggttgttgaatgatacttcagcaccccatctggagaactcagggcacacaatattcaatgaccccttcttcatcgtggaaacagtctgtattgtatggttttcctttgagtttgtggttcgctgctttgcttgtcccagccaagcactcttcttcaaaaacatcatgaacatcattgacattgtctccattttgccttacttcatcacactgggcactgacctggcccagcaacaggggggtggcaatggtcagcagcagcaggccatgtcctttgccatcctcagaatcattcgtctggtccgagtattccggatcttcaaactctccaggcactccaaaggcctgcagatcctgggccacaccctcagagccagcatgcgggaactgggccttctgatcttcttcctcttcattggggtcatcctcttttctagtgctgtgtattttgcagaggcggatgaacctactacccatttccaaagcatcccagatgcattttggtgggctgtggtgaccatgacaactgtgggctatggggacatgaagcccatcactgtagggggcaagattgtcgggtccctgtgtgccattgcgggtgtcttaaccattgctttgccagtgccagtgattgtctctaactttaactatttctaccacagagagactgaaaatgaggaacagacacagctaacgcagaatgcagtcagttgtccatacctcccctctaatttgctcaagaaatttcggagctctacttcttcttccctgggggacaagtcagagtatctagagatggaagaaggagttaaggaatctctgtgtgcaaaggaggagaagtgtcagggaaagggggatgacagtgagacagataaaaacaactgttctaatgcaaaggctgtggagactgatgtgtgaatctttttccacctgccactgctcccccctcagcatctccaaatatatttatgcatagagagtgcagttatgaaaatgaaatatgcaaatgatccaatgcatacagtagtacactatttaatggttatacatggcataattgttactaaacttgtattacatatcaaataaatgatacatcttggagaagagggaggaataggagcaaatctatctttatatttttattagaatgcaagaattttgcacattaactggaaaagatgttaacagtaaagatggagagagagagtgtgtgcgtgtgtgtgtatatgtgtgtgtgtgtgaagtaaattgtcaatgttagtaattgtgcagtgaagggaaaagttggcattttgaagtatttactatgtaagaactaatgaatctgagcagtcatttatcagtgctttaacagcatatcgtatgtctttggattctgtagttgttttttaaaaattgtaagaaatactgtgta

SEQ ID NO: 46017 - DNA, 2067 bp, Homo Sapiens
gcagcctgtgattggctgaagctcagctacttgtcacaagaatatactctcagttgcagttaatttacatactaagttaggttgcagttccctacatagcaactcagagtagggaggaaattttaggccaaatttaatttaaattatgttggagcatgaccaaagttggtcatgaccagaagctgaacacagatatggaagctaacacaatatccagtggagagagattgtggtagagtacatggggcgaaatggttgatttctgcatttttgttggtgacgccatcaggatttgctgaagaaccaaacgtgtgacaggaaaggacaacacaaggagctgccagctttggaaaccagttctactctcagtattaccttcgcaaaagatagagctttgtaaatttctagattcctcgttcttattatcctagactatttaaccagaatctccagggtcgtggtcctggaaacaatacgtttaaaactcttcccaaggatccttcagcagccaacttgactttggctaaggagtccgccagctctgggctcacttgggttgtttgcaaggaagagcccatgcccagagtataaattgggagaacagcgctgtgcaaagagcgtgggttggtgagctagtggatggcgagattaatctcactctgatccctaaagcagggtgcagtaatactctaaatgcctcaaatgggttgggaaccatggaaggaatcccggaggagcccgatcttaacgaagcttttctcaggcctttggtaggaggacagaaacgaagttgaatgaaaaagacagtggagtgggactgagaaatgacaacggcccaccacagacctctctctttcaaggcctgtgtcgtcaggacgcaggccagaagaagccacgacgaggcgcaggcgcgactccacgagggccacgcccctcctagagaaggaccgacccgttttccgcccgcagcggagcttgggtttccgggaggacctgattgtgcaagggaccaaaccggatagaggtcgcgcgccctctttcgtctgccttccggttcactaatacgcaagttcgcagaagtgcgggaacgcgccgtccctctgcgcaggcgcagtcggcggtcggcgtggggcgctatgccggggcggcacgtttctcgagtccgggcattgtacaagcgcgtcttgcagctgcaccgtgttctgcccccggacctcaaatccctgggcgaccagtacgtgaaagacgaatttaggagacataagaccgttggttctgacgaggcacagcgtttcttgcaagaatgggaggcaagttatgcaacagcgttattgcaacaggctaacgaaaacagacaaaattcaactggaaaagcatgttttggcaccttcctcccagaagaaaaacttaatgactttcgtgatgaacaaattggacagttgcaggagctgatgcaagaagccacaaaacccaataggcaatttagtatttctgagtctatgaaaccaaaattttagtctatacaacaaagcttaataagacatgcaaaaatttagaacccctactttaactgtcattggtttttgaaatatatttaagctttgaaaacacctgttattaatgaaatactcttttattttggatattatgattgcagtatatggatcaagatcactagtgacaattgaaaaaaactattggaataatagcacttgtatgaaattcagttttggaactaaacagcaaatttctagaattttgctgaaaatgttttaaaatgctattctcatccagccatattagtcttctggcttttctttagcttcatcaaataagcatgttgtgataatgatagatgtacaattccaacaaggttattattttttaaatacattgtcattctgaacattttatcacttctagtttaataatacatacatgatttttcttctgaatgtctcttctccctgcatcactgttcattcacaatgaaaggttaggaagaagctttaaaattcactattttactatcaatcatttgtataataaactatacaaagtataata

SEQ ID NO: 46018 - DNA, 372 bp, Homo Sapiens
gaggcctcaagagaagggttagctatgtcatccttgattaaaaaggtgatcaggactgcaaaagcccccagggtccttgggccatatggccaaggtgtgttagtcaacaggaccatttacatttcaggacagctagtcatggactcttcaaatgcacagcttgtggcaggagaggtagccaaagcagctaaacaagctcttacaaaaatgggtgaagttctgaagactgcaggctgtgacttcactaatgtggtaacaattttgctggtggacataaatgacttcagtactgtcagtgtaatttacaaacagtacttcaggactaattttccaggtagagctgcttaccaggttgttactttggccaaagga

SEQ ID NO: 46019 - DNA, 2486 bp, Homo Sapiens
tggttcctcattgggtggtatgctgacaattggttcaagatctacgacccttctatcaactgcacagtggatgagatgactgaggcggtggagggccacatcacaactgagattgtcatgctgaatcctgccaatacccgcagcatttccaacatgacatcccaggaatttgtggagaaactaaccaagcgactgaaaagacaccctgaggagacaggaggcttccaggaggcaccgctggcctatgatgccatctgggccttggcactggccctgaacaagacatctggaggaggcggccgttctggtgtgcgcctggaggacttcaactacaacaaccagaccattaccgaccaaatctaccgggcaatgaactcttcgtcctttgagggtgtctctggccatgtggtgtttgatgccagcggctctcggatggcatggacgcttatcgagcagcttcagggtggcagctacaagaagattggctactatgacagcaccaaggatgatctttcctggtccaaaacagataaatggattggagggtcccccccagctgaccagaccctggtcatcaagacattccgcttcctgtcacagaaactctttatctccgtctcagttctctccagcctgggcattgtcctagctgttgtctgtctgtcctttaacatctacaactcacatgtccgttatatccagaactcacagcccaacctgaacaacctgactgctgtgggctgctcactggctttagctgctgtcttccccctggggctcgatggttaccacattgggaggaaccagtttcctttcgtctgccaggcccgcctctggctcctgggcctgggctttagtctgggctacggttccatgttcaccaagatttggtgggtccacacggtcttcacaaagaaggaagaaaagaaggagtggaggaagactctggaaccctggaagctgtatgccacagtgggcctgctggtgggcatggatgtcctcactctcgccatctggcagatcgtggaccctctgcaccggaccattgagacatttgccaaggaggaacctaaggaagatattgacgtctctattctgccccagctggagcattgcagctccaggaagatgaatacatggcttgctgtgatgggagtcgagtgcatttgctttataagtgagggtagggtgagggaggacaggccagtagggggagggaaagggagaggggaagggcaggggactcaggaagcagggggtccccatccccagctgggaagaacatgctatccaatctcatctcttgtaaatacatgtccccctgtgagttctgggctgatttgggtctctcatacctctgggaaacagacctttttctctcttactgcttcatgtaattttgtatcacctcttcacaatttagttcgtacctggcttgaagctgctcactgctcacacgctgcctcctcagcagcctcactgcatctttctcttcccatgcaacaccctcttctagttaccacggcaacccctgcagctcctctgcctttgtgctctgttcctgtccagcaggggtctcccaacaagtgctctttccaccccaaaggggcctctccttttctccactgtcataatctctttccatcttacttgcccttctatactttctcacatgtggctccccctgaattttgcttcctttgggagctcattcttttcgccaaggctcacatgctccttgcctctgctctgtgcactcacgctcagcacacatgcatcctcccctctcctgcgtgtgcccactgaacatgctcatgtgtacacacgcttttcccgtatgctttcttcatgttcagtcacatgtgctctcgggtgccctgcattcacagctacgtgtgcccctctcatggtcatgggtctgcccttgagcgtgtttgggtaggcatgtgcaatttgtctagcatgctgagtcatgtctttcctatttgcacacgtccatgtttatccatgtactttccctgtgtaccctccatgtaccttgtgtactttcttcccttaaatcatggtattcttctgacagagccatatgtaccctaccctgcacattgttatgcacttttccccaattcatgtttggtggggccatccacaccctctccttgtcacagaatctccatttctgctcagattccccccatctccattgcattcatgtactaccctcagtctacactcacaatcatcttctcccaagactgctcccttttgttttgtgtttttttgaggggaattaaggaaaaataagtgggggcaggtttggagagctgcttccagtggatagttgatgagaatcctgaccaaaggaaggcacccttgactgttgggatagacagatggacctatggggtgggaggtggtgtccctttcacactgtggtgtctcttggggaaggatctccccgaatctcaataaaccagtgaacagtg

SEQ ID NO: 46020 - DNA, 1687 bp, Homo Sapiens
aatccccacttccgaccctctcaggccttttccgcttctcttttacctccccaggtccgcccgtctgcgcccctcacaggaagccggagggtcgctctgatcccgaatctcccacaggcgtgaacctgctctgctgtgtatctttgcggggtggcctgcgctgaggcctgccgcgcgcggtgagtccgcgcagacctgaccctgcgtctcgcagctcggttgaggccgccgccgccttctcgggatgccgcggccggggtccgcgcagcgctgggcggccgtcgcgggccgttgggggtgcaggctgctcgcactgctgctactggtgcctggacccggcggcgcctctgagatcaccttcgagcttcctgacaacgccaagcagtgcttctacgaggacatcgctcagggcaccaagtgcaccctggagttccaggtgattactggtggtcactatgatgtagattgtcgattagaagatcctgatggtaaagtgttatacaaagagatgaagaaacagtatgatagttttaccttcacagcctccaaaaatgggacatacaaattttgcttcagcaatgaattttctactttcacacataaaactgtatattttgattttcaagttggagaagacccacctttgtttcctagtgagaaccgagtcagtgctcttacccagatggaatctgcctgtgtttcaattcacgaagctctgaagtctgtcatcgattatcagactcatttccgtttaagagaagctcaaggccgaagccgagcagaggatctaaatacaagagtggcctattgattgaaaagaaatgctgagaaatacataaagttttcctcttctgccttggatatttataatgggtatcgggaagtctaaaataaattcctgccctctttctctctcttggggtaaaaggcacagtgtggatacaagtccaggatatcatgagtcagattccaagaagtctgaagatctatccttgtgtaatgttgctgagcacagcaatacaacagaggggccaacaggaaagcaggagggagctcagagcgtggaagagatgtttgaagaagaagctgaagaagaggtgttcctcaaatttgtgatattgcatgcagaagatgacacagatgaagccctcagagtccagaatctgctacaagatgactttggtatcaaacccggaataatctttgctgagatgccatgtggcagacagcatttacagaatttagatgatgctgtaaatgggtctgcatggacaatcttattactgactgaaaactttttaagagatacttggtgtaatttccagttctatacgtccctaatgaactccgttaacaggcagcataaatacaactctgttatacccatgcggcccctgaacaatccccttccccgagaaaggactccctttgccctccaaaccatcaatgccttagaggaagaaagtcgtggatttcctacacaagtagaaagaatttttcaggagtctgtgtataagacacaacaaactatatggaaagagacaagaaatatggtacaaagacaatttattgcctgagatgaaacatataacatgtggctggctcttgttttgtaaaccaaatgattaatcttcacttgagaaagcagtttctaggaaatgtttaaataaaagagagtcttcacctt

SEQ ID NO: 46021 - DNA, 918 bp, Homo Sapiens
atgagcttccttagaattaccccttcgacgcatagttctgtttcatctggacttttgaggcttagtatctttctactacttagctttcctgactcaaacggaaaagccatttggacagctcacctgaatataacatttcaggttggaaatgagatcacatcggaattaggagagagtggagtgttcgggaatcattctcctctggaaagggtgtctggtgtggtggcacttcctgaaggatggaatcagaatgcctgtcatcctttgaccaatttcagcaggcccaaacaggcagactcatggctggccctcatcgaacgtggaggctgtacttttacacataaaatcaacgtggcagcagagaagggagcaaatggggtgatcatctacaactatcaaggtacgggcagtaaagtatttcccatgtctcaccaggggacggaaaatatagtcgcggtgatgataagcaacctgaaaggcatggaaattttgcactcgattcagaaaggagtctatgtgacagtcatcattgaagtggggagaatgcacatgcagtgggtgagccattacatcatgtatctatttaccttcctggctgccacaattgcctacttttacttagattgcgtctggagacttacacctagagtgcccaattctttcaccaggaggcgaagtcaaataaagacagatgtgaagaaagctattgaccagcttcaactgcgagttctcaaagaaggggatgaggaattagacctaaatgaagacaactgtgttgtttgctttgacacatacaaaccccaagatgtagtacgcattttaacttgcaaacattttttccataaggcatgcattgacccctggcttttagcccataggacatgtcccatgtgcaagtgtgacatcctgaaaacttaa

SEQ ID NO: 46022 - DNA, 345 bp, Homo Sapiens
aaattaaaagctgctgaaactgtaattggattgcggatgggaaccaacgaagccagccaggcaggtatgtcagcttacgggactaggcatctttatgatcccaacatgcaaactgacaaacgttttgaccagaccacagtttgtctgcagatggtcactaacaaagcagacagccaggcagggatgttagcaccaggcaccagaagggccatctactatcagaagctaacattacagccagtagaccacttgacaatttctctacagatgggtaccaacaaagtggcttcccagaaaagaatgggtgtgcacgggcttggggggcaagtatatggtcgcaaatac

SEQ ID NO: 46023 - DNA, 432 bp, Homo Sapiens
atgggcaagtgtcgtggacctcatactgctaggagtctctgtagtcaccaacaagatcagaagtggcatgataaacagtacaagaaagcccatttgggcacagccctgaaggccaacccttttggaggtgcttctcatgcaaaaggaattgtgctgggaaaagtaggagttgaagccaaaaagccaaattctgccattaggaagtgtgtcagggtccagtggatcaaggatggcaagaaaatcacagcctttgtattcagtgatggttgcttgaaccttattgtggaaaaccataaagctctggttgctggatttggtcaaaaaggtcatgctgttggtgatatttctggagttcgctttcaggttgtcaaagtagcctgtgtctttcttttggccctatacaaaggcaagaaggaaagaccaagatcataa

SEQ ID NO: 46024 - DNA, 1245 bp, Homo Sapiens
acttcttcagaagaatgtgtgactgtgatatttgatgcggaagacggtgagcccattgaattcagctctcaccagactggggttgtcactgttaccagaaatgagatttccatcaattcaactcctgctggacccaaggcagaacatactgagcttttacctcagggaattgcttgtttacagccaagagctgctgcaagagactatactttctttaaaaggtctgaagaggacactgagaaaaacattccaaaagataatgtagataatgttcccagggtgtccactgaatctttcagctccaggacagtgacacaaaatcctcagcagcaaaagctggtcaaaccaacacacaatatatcatgccagagtaattccaggtcttcggcacccatgggcatctatcaaaagcaaaatctgacaaaaatacctcccaggggcaagtcttcacctcagaaatcaaaactaatggagcccgaagccaccacactactcccttcatctggcctggtgactcttgaaaaatcaccagccttagctcctgggaaactctcacgattcatgaagactgagagcggcccctctttgaattacgatcagatccacacattccaaaacattccgcccaacttccgcacagctccaggacccagcaggagggactgggtccagtgccccaagagtcagactccagggtcacggtcaaggcctgccattgagtctagtgacagtggagagccccccacgagggatgaacactgtggctctgggccggaggcaggggtgaaatccccttcccctccgccccctccaggcaggtccgtctccctgctggccaggcccagctatgactattcaccagcaccttcatccaccaagtccgaaaccagggtccccagtgaaacagcaaggaccccattcaaatccccgctgctgaaaggaatttctgctccagttatttcttctaatccggccacgacagaagtgcagaggaagaaaccttctgtggccttcaaaaagcctatcttcactcaccctatgccctccccagaagcagtcattcaaacccgatgccctgctcatgccccctccagctccttcaccgtaatggctctggggcctccaaaggtctctccgaagagaggtgtccccaaaacctctcctcgccaaacacttgggaccccacaaagggacataggattacagactcccaggatctctccttcaacccatgagccactggaa

SEQ ID NO: 46025 - DNA, 522 bp, Homo Sapiens
gttcggttggtgcgcctgggtcgggtgccgtacgccgagctactggggctgcaggaccgctggctgcggcggctgcaggccgagccaggcattgaggccccgtcggggactgaggcgggcgcgctcctgctctgcgagcccgcggggcccgtgtatacggccgggctgcgcggcggcctgacgcccgaggaaactgcgcggctacgggccttgggcgccgaggtgcgcgtcacaggccgcggtggcctggccaccttccacggcccgggccagctgctttgccacccggtactcgacctgcggcgtctcggcctgcgcttgcgcatgcacgtagcgtcgctggaggcgtgcgccgtgcgcctgcgagctccagggcctgcaggacgcccgcgcgcggcccccgccctacactggcgtctggctagacgatcgcaagatctgcgcgatcggagtccgctgtggaaggcacatcacatcccacggcctggctctcaactgctctaccgacctcacgtggtttga

SEQ ID NO: 46026 - DNA, 563 bp, Homo Sapiens
gccagctgccggtctttcgggggctccgtaactttctatccgtccgcgtcagcgccttgccaccctcatctccaatatggcctggtccgacccccagtggcactaacgtgggatcctcagggcgctctcccagcaaagcagtggccgcccgggcggcgggatccactgtccggcagaggaaaaatgccagctgtgggacaaggagtgcaggccgcacaacctcggcaggcaccggggggatgtggcgattctacacagaagattcacctgggctcaaagttggccctgttccagtattggttatgagtcttctgttcatcgcttctgtatttatgttgcacatttggggcaagtacactcgttcgtagattcagttacatccatctgtcatctgaagaaggaggaaaaaacccaacatttcttggaccaaaagtatagtgactatctgttcatgagagaaattttctgtaagcttgctgttttacaggggatttatcaataattgattttgaggaatcagtttttttctatggctaataaactttttaattcacttatactga

SEQ ID NO: 46027 - DNA, 1470 bp, Homo Sapiens
gccctgcatgaattccccaatgacatcttcacaaacgaggatagaagacaaggtgcggtggtcctccatgtgctctgtgccatatacatgttctatgcgctggccattgtgtgtgatgacttcttcgtcccttccttggaaaagatctgtgaggtacgtgcctcacattcttgtgaagatgtggctggggccacattcatggcagcgggaagttcggccccagagctgttcacatcggtcataggggtcttcatcaccaaaggcgatgtgggagttggcaccatcgtgggctcagcggtattcaacatcctgtgcatcattggtgtctgtgggctctttgctgggcaggttgtggctctttcctcctggtgcctgctgagggattctatttactacacgctgtctgtgatcgcgctcatcgtggtgagtcactctggccatttcagctcccatcagtgccttttaagcaccaggggtggtgtgaggctcctccacatggagttcactcgaggaacttttggtatgaaggaagaaatgcccatgacccgtgtgggcaaggcagcttggtgcacaaaaggagaggcacgtcactcacctccacccatcccattgcacctagccgggagagctgtcctgccaaggccagcctggtggatgccaaggcctgaagaagctttcaggacctcagccaccagggtggtgtcctcctctcccaactgctgcctccaacaaggacttggttgttccagaaactgtttcaccccacccattatcagagcaggtggtccaagcccaaagaattcagcctatttgctggaccttccagaagcttctggctgtttcagggaagagtacactagtttgattcacatggactgtcaagtgtgtgaggctcagtatacattgaaatgggcgttcacctggccgctgagtttcgtcttatacttcactgtacccaactgcaacaagccgcgctgggagaaatggttcatggtgacgtttgcttcctccacgctgtggatcgcagccttctcctacatgatggtgtggatggtcacaatcattggttacaccctggggattcctgacgtcatcatggggatcaccttcctggctgctgggaccagcgtgcctgactgcatggccagcctcattgtggccagacaagggatgggggacatggctgtgtccaactccattgggagcaacgtgtttgacatcctgattggcctcggtctcccctgggctctgcagaccctggctgtggattacggatcctacgctgctgcctcctcctggtgccctctgaacctgttctgtgccctgcaggtgttcggcgtccacctgaacaagtggcagctggacaagaagctgggctgtgggtgcctcctcctgtatggtgtgttcctgtgcttctccatcatgactgagttcaacgtgttcacctttgtgaacctgcccatgtgcggg

SEQ ID NO: 46028 - DNA, 1500 bp, Homo Sapiens
gggccggtccccggccgcctcgggccgctgctctgcctgctgctccccgcgtcctgcgcctggtcaggagtggcgggtgaggaggagctgcaggtgattcagcctgagaagtctgtatcagttgcagctggagagtcggccgctctgcagtgcactgtgacctccctgaaccctgtggggcccatccaacggttcagaggagctggaccaggccggaaattaatctaccatcaaaaagaaggccacttcccccgggtaacaactgtttcagatctcacaaagagaaccaacatggacttttccatctgcatcagtaacatcaccccagcagatgccggcacctactactgtgtgaagttccagaaagggagccctgacgtggagttgaagtctggagcaggcactgagctgtctgtgcgtgccaaaccctctgcccccgtggtatcgggccccgcagcgagggccacacctgaccacacagtgagcttcacctgcgagtctcatggcttctcacccagagacatcagcctgaaatggttcaaaaatgggaatcagctctcagacttccagaccaacgtggaccccgcaagagagagcgtgtcctacagcatccacagcacagccaatgtggtgctgacccgcggggacattcactctcaagtcatctgcgaggtggcccacgtcaccttgcggggggactcttttcgtgggactgccaacttgtctgagactatccaagttccacccaccttggaggttactcaacagcccatgagggcagagaaccaggtgaatatcacctgccaggtgacgaaattctacccccagagactacagttgacctggttggagaacggcaatgtgtcccggacagaaacggcctcaactcttacagagaacaaggatggcacctacaactggatgagctggctcctggtgaatgtatctgcccacagggatgatgtgaagctcacctgccaggtggagcatgacgggcagtcagcggtcagcaaaagccatgacctgaaggtctcagcccacctgaaggagcagagctcaaataccgccgctgagaacactggacctaatgaacagaacatctatattgtggtgggcgtggtgtgcaccttgctggtggccctactgatggaggctctctacctcgtccgaatcagacagaagaaagcccagggctccacttcttctacaaggttgcatgaacccgagaagaatgccagaaaaataacccaggacacaaatgatatcacatatgcggacctgaacctgcccaaggggaagaagcctgctccccgggccgcggagcccaacaaccacacagagtatgccagcattcagaccagcctgcagcctgcgtcggaggacaccctcacctatgctgacctggacatggtgcacctcaaccggacccccaagcagctggcccccaagcccgagctgtccttctcagagtatgccagcatccaggtcccgaggaagtga

SEQ ID NO: 46029 - DNA, 9556 bp, Homo Sapiens
gatattgacattaagaaagtaaatggagttcctcagtatgcgtttctgcaatactgtgatattgctagcgtttgtaaagctattaagaagatggatggggaatatcttggaaataatcgcctcaagctgggttttggaaagagcatgcctacaaactgcgtgtggctagatgggctttcttcgaatgtgtcagatcagtatttaacacgacatttctgccgatatgggcctgtggtaaaggtggtgtttgaccgcttaaaaggcatggccctggttctctacaatgaaattgaatatgcacaagcagctgtaaaagagaccaaagggaggaaaatcggtgggaataaaattaaggtggattttgcaaatcgggaaagtcagctggctttttatcactgcatggagaaatctggtcaagacatcagagacttttatgaaatgttagccgaaagaagtgatgaggaaacaaaagaactaatatctttgttattttttggcagagaggaacgaagggcatcctacgactataaccaagatcgtacatattatgagagtgttcgaactccaggcacttatcctgaggattccaggcgggactatccagctcgagggagagagttttattcagaatgggaaacttaccaaggagactactatgaatcacgatactacgatgatcctcgggaatacagggattacaggaatgatccttatgaacaagatattagggaatatagttacaggcaaagggaacgagaaagagaacgtgaaagatttgagtctgaccgggacagagaccatgagaggaggccgattgaacgaagtcaaagtcctgttcacttgcgacgtccacagagtcctggagcgtctccctctcaggcagagaggttgccgagtgattctgagaggaggctttacagccgatcctcagaccggagtggaagctgtagctcactctcccctccaagatatgagaaactggacaagtctcgtttggagcgctatacaaaaaatgaaaagacagataaagaacgaacttttgatccggagagagtggagagagagagacgcttaatacggaaggaaaaagtggaaaaggacaaaactgacaagcagaaacgcaaaggaaaggttcactcccctagttctcagtcttcagaaacggaccaagaaaatgagcgagagcaaagccctgaaaagcccaggagttgtaataaactgagcagagagaaagctgacaaagagggaatagcgaaaaaccgcctggaactcatgccttgcgtggttttgactcgagtgaaagagaaagagggaaaggtcattgaccacactcctgtggaaaagttgaaagccaagcttgataatgacactgtcaaatcttctgccctggaccagaaacttcaggtctctcagacggagcctgcaaaatctgacttgtctaaactggaatcagttagaatgaaagtaccaaaggaaaaggggctttcaagccatgttgaagtggtggagaaggaaggcaggcttaaagccaggaagcacctcaagcctgagcagcctgtagatggggtaagtgctgtggatctggagaagctggaagccaggaaaaggcgctttgcagattccaatttaaaagcagaaaagcaaaaaccagaggtcaagaaaagcagtccagagatggaggatgctcgcgtgctttcaaaaaagcagcctgacgtgtcctctagagaggtcattctgctgagggaaggagaggctgaaagaaagcctgtgaggaaagaaattcttaaaagagaatctaaaaaaatcaaactggacagacttaatactgttgccagccccaaagactgtcaggagcttgccagtatttctgttgggtctggctcaaggcccagctcagacctacaagcaagactgggagaaccagcaggtgaatctgtggaaaatcaagaagtccaatcaaaaaagcccattccctcaaaaccacagctcaaacagctgcaggtattagatgatcaaggaccagagagagaagacgttaggaaaaactattgcagtcttcgtgatgaaacacctgaacgtaaatcaggccaagagaaatcacattcagtaaatactgaagaaaaaattggcattgacatcgatcacacgcagagttaccgaaaacaaatggaacagagtcgtaggaaacagcagatggaaatggaaatagccaagtctgagaagtttggcagtcctaaaaaagatgtagatgaatatgaaagacgtagcctcgttcacgaggtaggcaaaccccctcaagatgtcactgatgactctcctcctagcaaaaagaaaaggatggatcatgtcgattttgatatctgcaccaagcgagaacggaattacagaagttcacgccaaatcagcgaagattctgaaaggactggtggttctcccagtgtccgacatggttccttccatgaagatgaggatcccataggctcccctaggctactgtcagtaaaagggtctcctaaagtagatgaaaaagtcctcccctattctaacataacagtcagggaagagtctttaaaatttaatccttatgattctagcaggagagaacagatggcagatatggccaaaataaaactatctgtcttgaattctgaagatgaactaaatcgttgggactctcagatgaaacaggatgctggcagatttgatgtgagtttcccaaacagcataattaagagagatagccttcgaaaaaggtctgtacgagatctggaacctggtgaggtgccttctgattctgacgaagatggtgaacacaaatcccactcacccagagcctctgcattatatgaaagttctcgattgtcttttttattgagggacagagaagacaagctacgtgagcgagatgaaagactctctagttctttagaaaggaacaaattttactcttttgcattggataagacaatcacaccagacactaaagctttgcttgaaagagctaaatccctctcttcatctcgtgaagaaaattggtcttttcttgattgggactcccgatttgcaaattttcgaaacaacaaagataaagaaaaggttgactctgctccaagacctattccatcctggtacatgaaaaagaagaaaattaggactgattcagaagggaaaatggatgataagaaagaggaccataaagaagaagagcaagagaggcaggaattgtttgcttctcgttttttacacagctcaatctttgaacaagattccaagcgattgcagcatctagagagaaaagaggaagattctgacttcatttctggtaggatctatgggaagcagacatctgagggagcaaacagcacaactgattccattcaagaaccagtagttctgttccatagcagatttatggagctcacacggatgcaacagaaagaaaaagaaaaagacaaacccaaagaggttgagaaacaggaagatacagagaatcatcccaagaccccagaatctgctcctgagaataaagattcagaactgaaaactccaccttccgttgggcctccaagtgtcacagtcgtaactctagaatcagccccatcagcactagagaagaccactggtgacaaaacggtagaggcgcctttggtaacagaagagaagactgtggagccagctaccgtctcagaagaagcaaagcctgcatctgaacctgctcctgcccctgtggaacagctggaacaagtagacctgcccccaggagcagaccccgataaagaagctgccatgatgcctgcgggtgttgaggaaggttcatcaggtgaccagccgccttatctggatgccaagcctccaactcccggggcctcgttttcccaggcagagagcaacgtagatccagagcctgacagtacccagccactttcaaaaccagctcagaagtctgaggaagccaatgagccaaaggccgaaaagccagacgccactgcagatgctgagcctgatgcaaaccagaaagccgaagctgctcctgagtctcagcccccagcttctgaagatttagaggttgatcctccagttgctgcaaaggataaaaagccaaacaaaagcaagcgttcaaagacccctgttcaggcagctgcagtgagtatcgtggagaagcccgtcacaaggaagagtgagaggatagaccgggaaaaactcaagcggtccaattctcctcggggagaagcacagaagcttttggaattgaagatggaggcagagaagattacaaggactgcttctaaaaactctgctgcagaccttgaacatcccgaaccaagtttgcctctcagccgaacaaggcgccggaatgtaaggagcgtctatgcaaccatgggtgaccatgaaaaccgctctcctgtcaaagagcccgttgagcaaccaagagtgaccagaaagagattggagcgagagcttcaggaggctgcagcggttcccaccacccctcggaggggaaggcctccaaagacacgccggcgagccgatgaagaggaggagaacgaggccaaggaacctgcagaaacactcaagccacctgagggatggcggtcgccaaggtcccagaaaactgcagctggtggtggaccccaagggaaaaagggaaaaaatgaaccgaaggtggatgctacacgtcctgaggccaccactgaggtgggcccccaaataggcgtgaaagagagctccatggaacccaaggctgctgaggaggaggcagggagtgaacagaaacgtgacagaaaagatgctggcacagacaaaaacccccctgaaaccgcccctgttgaagttgtagagaaaaaaccggcccctgaaaaaaactccaaatcaaagagaggaagatctcgaaactccaggttagcagtggacaaatctgcaagtctgaaaaatgtggatgctgctgtcagtcccaggggggctgcagcacaggcaggggagagggaatctggggtggtggcagtctcccctgagaaaagtgagagtccccaaaaggaggatggtttatcatcccagttgaaaagtgatccagttgatccagacaaggaaccagagaaagaagacgtgtctgcctctgggccgtccccagaagccacccagttagccaagcagatggagctggagcaggccgtggaacacatcgcaaagctcgctgaggcctctgcctctgctgcctataaggcagatgcaccagagggccttgccccagaggacagggacaagcctgcacaccaagcaagtgaaacagagctggctgcggccatcggctccatcatcaatgacatttctggggagccagaaaacttcccagcacctccaccttatcctggagaatcccagacagatctgcaaccccccgcaggtgcacaggcgctgcagccttctgaggaaggaatggagacagatgaggctgtatctggcatcctggaaactgaggctgctacagaatcttctaggcctccagtcaatgctcctgacccctcagccggcccaacagataccaaggaagccagaggaaatagcagtgaaacctcacactcagtgccagaagccaaagggtctaaagaagtggaagtcactcttgttcggaaagacaaagggcgccagaaaacaacccgatcacgccgcaagcgaaacacaaacaagaaagtggtggctcctgtagagagccatgtccctgaatccgaccaagctcaaggtgagagtcctgctgcaaatgaggggacaacagtacagcaccccgaagccccacaggaagaaaagcagagtgagaaaccccattccactcctcctcagtcatgtacttctgacctaagcaagattccctccacagagaattcgtcccaagaaatcagtgttgaggaaaggactccaaccaaagcatctgtgcccccagaccttcccccacctccccagccagcaccggtggatgaggagcctcaagccaggttcagggtgcattccatcattgaaagtgacccggtgaccccacccagcgatccaagcatccccatacccacactgccttctgtaactgcagcaaagctctcacctcctgtcgcctctggggggatcccacaccagagcccccctactaaagtgacagagtggatcacaaggcaggaggagccacgggctcagtctactccatctccagctcttcccccagacacaaaggcctctgatgttgacaccagctccagcaccctgaggaagattctcatgaaccccaagtatgtgtctgccacaagtgtcacttccccaagtgtcaccacagccattgcagagcctgtcagtgctgccccttgcctacatgaggccccgcccccgccagttgactctaaaaagcctttagaagaaaaaacagcacctccagtgacaaacaactctgagatacaagcctcggaggtgctggtagctgctgacaaggaaaaggtggctccagtcattgctcccaaaattacctctgttattagccggatgcctgtcagcattgacctggaaaattcacagaagataaccttggcaaaaccagctcctcaaaccctcactggtctggtgagcgcactcactggcctggtgaacgtctccctggtcccggtgaatgccctgaaaggccccgtgaagggctcagtgaccacactgaaaagtttggtgagcacccctgctgggcccgtgaacgtcctgaaagggcctgtgaatgttcttacggggccagtgaatgttctcaccactccagtgaacgccacggtgggcacagtgaatgccgccccaggcacagtcaatgctgctgcgagtgcagtgaatgccacagcaagtgcagtgaccgtcacagcgggtgcggttactgctgcatctggtggtgtaacggccacaacaggcacggtgacaatggcaggggcagtgattgcgccgtcaacaaagtgcaaacagagagcgagtgctaatgaaaacagtcggttccacccagggtccatgcctgtgatcgacgatcgtccggcagacgcgggctcaggggcggggctgcgtgtgaacacttctgaaggggttgtgctcctgagttactcagggcagaagaccgaaggcccacagcggatcagcgccaagatcagccagatccccccggccagtgcaatggacattgaatttcagcagtcagtgtccaagtcccaggtcaaacctgattctgtcacagcatcgcagcctccatccaaaggccctcaagctcctgcaggctatgcgaacgtggccacccattccacgttggtactgaccgcccagacatataatgcctctcctgtgatttcgtctgtgaaggccgataggccatccttggagaagcccgagcccattcacctctcggtgtccacgcctgtcacccagggaggcacagtgaaggttctcacccaggggatcaacacaccccctgtgctggttcacaaccagctggtcctcaccccaagcattgtcaccacaaacaagaagcttgctgaccccgtcacccttaaaatcgagaccaaggtccttcagccggccaacctggggtccacgctcacgccccaccaccctcctgctctgcccagcaaactgcctacagaagtcaaccatgtcccctcggggcccagcatcccagcagatcgaactgtctcccatttggcagctgcaaagctagatgctcattctcctcgaccaagtggacccgggccatcctcattcccaagggcaagccaccccagcagtactgcatctacggcgctctccaccaacgccacagtcatgctggctgcaggcatcccagtgccccagttcatctccagcatccacccagagcagtctgtcatcatgccaccccacagcatcacccagactgtgtccctgagccacctctcccagggcgaggtgagaatgaacactcccacgctgcccagtatcacctacagcatccggccagaagcgcttcactctcctcgggctccgctgcagccccagcaaatagaggtcagggccccacagcgtgccagcaccccgcagccagccccagctggtgtgcctgcactggcctcccagcaccctcccgaggagggaaggcattattacctttgtcgctcgagcccagcccctgtgcagtcagaggtactagtcatgcagtctgagtaccgactgccctttactgtgccccgggatgtgaggatcatgcatccacatgtgaacgcagcaaccagcacccaaggccccgatggtcatggtgaggcccgtatcctcacagttacccccagtaaccaactccaggggctgcctctgacccctcctgtggtggtgacccatggggtgcagattgtgcactccagcggggagctgtttcaagagtaccggtacggcgacatccgcacctaccaccccccggcccagctcacacacactcagtttcccgccgcttcctctgttggcctgccttcccggaccaagacagctgctcagggccctcctcctgaaggtgagcccctgcagcctcctcagcctgtgcagtccacacagcctgcccagcctgcaccaccctgcccgccctcccagctcggtcagcccggccagccaccaagcagcaagatgcctcaagtgtcccaggaggcaaaggggacccagacgggagtagagcagcctcgcctcccagctggacctgcaaacaggccacctgagcctcacacccaggttcagagggcacaagcagaaacaggcccgacttccttcccctcccctgtgtctgtctccatgaagcctgaccttccagtctctcttcccactcagactgccccaaaacagccgttgtttgtcccaacaacctctggccccagcaccccaccaggactggttctgccacacactgaattccagccagcccccaaacaagattcctctccacacctgacttcccagagacccgtggatatggttcaacttctgaagaagtaccccatcgtgtggcagggcctgctggccctcaagaatgacacagctgctgtgcagctccacttcgtctctggcaacaacgtcctggcccatcggtccctgcccctttctgaaggagggcccccactaaggatcgcccagaggatgcggctggaggcaacgcagctggaaggggttgcccgaaggatgacggtggagacagattactgtctgctgctggctctgccctgtggccgtgaccaagaggatgttgtgagccagaccgagtccctcaaggctgccttcatcacttacctgcaggccaagcaggcggcagggatcatcaacgttcccaaccctggctccaatcagcctgcctacgtgctgcagatcttcccgccctgtgagttctctgagagtcacctgtcccgcctggcccctgacctccttgccagcatctccaacatctctccccacctcatgattgtcattgcctccgtgtgagccactgagtggttatcacctcagtgaatcttcccagggctctgcagtaaaaacaaaggacaacccagcc

SEQ ID NO: 46030 - DNA, 1757 bp, Homo Sapiens
ggtgatggcttcacagggagatacatgagtcaacatttatcgaatgatggatgcactttaagtgcagttcattatatatgttatacctcactgaagtggaaacaaattggataaatcttcttgacagagacacattttctaaatctgatccaatttgtgtcttatatgtacaaggagttggaaataaagaatggagagagtttggaagaactgaagtaattgataatactttaaatcctgattttgtaagaaagtttattctggactacttttttgaagaaagagagaatcttcgttttgacttgtatgatgttgattcaaagagccccaacttatccaaacatgactttctgggacaagtgttttgtacattgggagagatcgttggttcacagggaagtcgcctggaaaaaccaatagtaggaattccagggaagaaatgtggtacaatcatacttacagcagaggaattaaactgttgcagggatgccgttttgatgcaattttgtgcgaacaaattggacaagaaggacttctttggaaaatcagatcctttccttgtattttatcgaagtaatgaagatggcagttttacaatttgtcacaagacagaagttgtcaaaaacactctaaatccagtatggcaagcattcaagatctcagtcagagcattatgtaatggagactatgacagaacaatcaaagtagaggtgtatgactgggaccgagatggaagtcatgatttcattggagaatttacaacaagctatagggaactttctagagggcagtcacaattcaacgtatatgaggtggtgaatcccaaaaagaaaggaaaaaagaaaaaatatactaattctggaacagtaactttactctctttcttggtagaaacagaagtttcattccttgactacattaagggagggacgcaaatcaatttcacagtggctattgattttacagcatcaaacggcaaccctgctcagcccacttccctccactacatgaatccttaccaactgaatgcctatggtatggcactaaaagcagtgggagaaattgttcaagattatgacagtgataaaatgtttccagctctaggatttggtgcaaaactgcctccagatggaaggatatctcacgaatttgctttgaatgggaatcctcaaaacccctactgtgatggcattgagggggtcatggaggcttattacaggagtctgaaatctgtacaactatatgggcccaccaactttgctcctgtaattaatcatgtagcaagatatgcttcttctgtaaaggatggctcccagtattttgtgcttctgattgttacagatggtgttatctcagatatggcccagactaaggagtccatagttaatgcctcaaaacttccaatgtcaataattatagtaggtgttggaccagcagaatttgatgcaatggtcgaattggatggagatgatgtaagagtctcctctagaggaaaatatgctgaaagagacattgtgcagtttgtgccattcagggattatattgacagaagtggaaaccacatactgagcatggctagattggctaaagatgtcctagctgagatccctgagcagtttctctcctatatgagagcccgaggaatcaagccatcacctgcgcctcccccatacaccccacctacacatgtgttacagactcaaatatgactgtgctctgaaatgctaatgtcaactacaaatcaaaagtgctgagtt

SEQ ID NO: 46031 - DNA, 2259 bp, Homo Sapiens
atgtacactggtccctgtaaggtcctccacctctcatctgggcttttaccaaatagcggtaggtttggtattgttctcagcgatgaataccaggttgtaacatctttatggtgccagctgtatacaacccatgcacctcaacaggcctctggaatgcttcttctgaattatcttgtcatcccatcaaaggcccaagttaacaaaccaggctacatccctaacctaggagaatgttcccactatagatccaagattcacctaaaagctggagataaacttcaaagccctgaagggaaacccaagactggaaggatccaagagaaatgcgaaggaccttgtatttcttcttccaactgcagccagccctgtgctaaggactttcatggagaaataggatttacatgtaatcaaaaaaagtggcaaaaatcagctgaaacatgtacaagcctttctgtggaaaaactctttaaggactcaactggtgcatctcgcctttctgtagcagcaccatctatacctctgcatattctagactttcgagctccagagaccattgagagtgtagctcaaggaatccgtaagaactgcccctttgattatgcctgcatcactgacatggtgaaatcatcagaaacaacatctggaaatattgcatttatagtggagttattaaaaaatatttctacagacttgtctgataatgttactcgagagaaaatgaagagctatagtgaagtggccaaccacatcctcgacacagcagccatttcaaactgggctttcattcccaacaaaaatgccagctcggatttgttgcagtcagtgaatttgtttgccagacaactccacatccacaataattctgagaacattgtgaatgaactcttcattcagacaaaagggtttcacatcaaccataatacctcagagaaaagcctcaatttctccatgagcatgaacaataccacagaagatatcttaggaatggtacagattcccaggcaagagctaaggaagctgtggccaaatgcatcccaagccattagcatagctttcccaaccttgggggctatcctgagagaagcccacttgcaaaatgtgagtcttcccagacaggtaaatggtctggtgctatcagtggttttaccagaaaggttgcaagaaatcatactcaccttcgaaaagatcaataaaacccgcaatgccagagcccagtgtgttggctggcactccaagaaaaggagatgggatgagaaagcgtgccaaatgatgttggatatcaggaacgaagtgaaatgccgctgtaactacaccagtgtggtgatgtctttttccattctcatgtcctccaaatcgatgaccgacaaagttctggactacatcacctgcattgggctcagcgtctcaatcctaagcttggttctttgcctgatcattgaagccacagtgtggtcccgggtggttgtgacggagatatcatacatgcgtcacgtgtgcatcgtgaatatagcagtgtcccttctgactgccaatgtgtggtttatcataggctctcactttaacattaaggcccaggactacaacatgtgtgttgcagtgacatttttcagccactttttctacctctctctgtttttctggatgctcttcaaagcattgctcatcatttatggaatattggtcattttccgtaggatgatgaagtcccgaatgatggtcattggctttgccattggctatgggtgcccattgatcattgctgtcactacagttgctatcacagagccagagaaaggctacatgagacctgaggcctgttggcttaactgggacaataccaaagcccttttagcatttgccatcccggcgttcgtcattgtggctgtaaatctgattgtggttttggttgttgctgtcaacactcagaggccctctattggcagttccaagtctcaggatgtggtcataattatgaggatcagcaaaaatgttgccatcctcactccactgctgggactgacctggggttttggaatagccactctcatagaaggcacttccttgacgttccatataatttttgccttgctcaatgctttccagggttttttcatcctgctgtttggaaccattatggatcacaagataagagatgctttgaggatgaggatgtcttcactgaaggggaaatcgagggcagctgagaatgcatcactaggcccaaccaatggatctaaattaatgaatcgtcaaggatga

SEQ ID NO: 46032 - DNA, 974 bp, Homo Sapiens
gtctctctgggctctgtgtctaaggagccctagggcactgggtgtgagtcacttaggtgggcctgtgtggaggggtgtctggggaggacattgaacaggctgggctgaaagggcgttcggctgtcgggggaggtctctgggaagacaggttcctcacagcaaagcctgtggtgaaggtctcagaggcctctcaggggaagtctcaaggtctccagtaaggggaacgaggtctggagggaggaggttgtggatcctcaggcagggttgttgagggaggggggtctccaggtccccagaagcagggacctcaggcaggagtaccaggggaggagtgtggaggaagcgggctcctcagctgggggcctcggggtaggaaaggcctgggcccatcctgcccttgtggcccccggctgcagcctcagtggcatgggggtgaagcggagcctccagagtgggggcattctgctcagcctcgtggccaacgtcctcatggtgctctccacggccaccaactactggacccgccaacaagagggccacagtggcctgtggcaggaatgcaaccacggcatctgctccagcatcccctgccagaccacgctggcggtgactgtggcgtgcatggtgctggcggtgggtgtcggcgtggtgggcatggtgatgggactgcggattcggtgcgacgagggcgagtcgctgcggggccagaccacgagcgccttcctcttcctcggcggactgctgctgctgaccgccttgataggctacaccgtgaagaatgcgtggaagaacaacgtcttcttctcttggtcctatttttctgggtggctggccttacccttctcaattctcgcgggcttctgctttctgctggcagacatgatcatgcagagcaccgacgccatcagtggattccccgtgtgtctgtgactgcagcctgcctggggcagaataaaggaacggctttttttagc

SEQ ID NO: 46033 - DNA, 2184 bp, Homo Sapiens
atgagcaatcagtaccaggaggagggctgctccgagaggcccgagtgcaaaagtaaatctccaactttgctctcctcctactgcatcgacagcatcctgggccggaggagcccgtgcaaaatgcggttgctgggagccgcgcagagcttgcctgctccgctgaccagccgcgccgacccggaaaaggccgtgcaaggctcccctaagagcagcagcgccccgttcgaggccgagctgcacctgccgcccaagctgcggcgcctgtacggcccgggcgggggccgcctccttcagggtgcggcagcggcggcggcggcggcggcggcggcggcggcagcggccgccacggccacggcgggtccacgcggggaggcccctccgccgccaccgccaaccgcgcggcccggggaacggccggacggcgcaggggccgccgcggcagccgcggccgcggccgccgcggcctgggacacgctcaagatcagccaggcgccgcaggtgagcatcagccgcagcaagtcgtaccgcgagaacggggcgcccttcgtgccgccgccgcccgcgctggacgagctgggcggcccggggggcgtcacgcacccggaggagcgcctcggcgtggccggcggcccgggcagcgccccggctgcgggtggtggcaccggcaccgaggacgacgaggaggagctgctggaggacgaagaagatgaggacgaggaagaggaactgctggaggacgacgaggaggagctgctggaggacgacgcccgcgcgctgctcaaggagccccggcgctgtcctgtggccgccactggcgccgtggccgcagcagctgccgctgcagtggccacagagggcggggagctgtcacccaaggaggagctgctgctgcacccggaagacgctgagggcaaggacggcgaggacagcgtgtgcctctctgcgggcagcgactcggaggaggggctgctgaaacgcaaacagaggcgctaccgcaccacgttcaccagctaccagctggaggaactggagcgggccttccagaagacgcactacccggacgtcttcaccagggaggaactggccatgaggctggacttgaccgaggcccgagtccaggtctggttccagaaccgtcgggccaagtggcgcaagcgggagaaggcaggcgcgcagacccacccccctgggctgcccttcccggggccgctctccgccacccacccgctcagcccctacctggacgccagccccttccctccgcaccacccggcgctcgactccgcttggactgccgctgccgccgccgccgccgccgccttcccgagcctacctccgcctccgggctcggccagcctgccgcccagcggggcgccgctgggcctgagcactttcctcggagcggcagtgttccgacacccagctttcatcagcccggcattcggcaggctcttttccacaatggcccccctgaccagcgcgtcgaccgcggccgcgctcctgagacagcccacacccgccgtggagggcgcagtggcatcgggcgccctggccgacccggccacggcggccgcagacagacgcgcctctagcatagccgcgctgaggctcaaggccaaggagcacgcggcgcagctcacgcagctcaacatcctgccgggcaccagcacgggcaaggaggtgtgctaaaggctgccctccacacccgcgccccgcgcgcgccccgaaaggtcacctcactcagcaccactcaagaccaaatggaaacagaggaccagcacactcccgagacggcactgagagagcgcagccgccttcacagcagtctggatgcgggcatggcagccctcggcgctccgggacgtggcacctcctcggctggctgtccacccgcccctgcccctgcccctgctactgccaacctcgctccaactccaacatccactctctcttgttcttactttcctgaaaatatcggggaggttttctcccccagacgcctgatattgaagtaaaaaatttaaaaagcccaacctcttcctcctgacaccccacttagcctttcttttctttctttctttctttcttttttttttttaaatagcattttggcgctcgaagttgatctccccagcgagggccccagcgtgaagccagggcccgggaagcaaatgcgagcctgta

SEQ ID NO: 46034 - DNA, 2466 bp, Homo Sapiens
atgcggcaaaccctaccgctgctgctgctgacggtgctgcgccccagctgggcagaccctccccaggagaaggtcccgctcttccgggtcactcagcagggcccctgggggagcagtggcagcaacgccaccgactcgccctgcgaggggctgcccgccgcggatgcgacggccttgaccctggcgaaccgcaacctggagcgcctgcccggctgcctaccgcgcacactgcgcagcctcgacgccagccacaacctgctgcgcgccctgagcacttccgagctcggccacctggagcagctgcaggtgctgaccctgcgccacaaccgcatcgccgcgctgcgctggggcccgggtgggccggcggggctgcacaccctggacctcagctacaaccagctggccgctctgccgccgtgcaccgggcccgcgctgagcagcctccgcgccctggcgctcgccgggaatccgctgcgggcgctgcagccccgggccttcgcctgcttccccgcgctgcagctcctcaacctctcctgcaccgcgctgggtcgcggagcccaggggggcatcgccgaggcggcgttcgctggagaggatggcgcgcccctggtcacgctcgaagtcctggatctcagcggcacgttccttgaacgggttgagtcagggtggatcagagacctgccgaagctcacatccctctacctgaggaagatgcctcggctgacgaccctggagggggacattttcaagatgacccccaacctgcagcagctggactgtcaggactccccagcacttgcttctgtcgccacacacatctttcaagatactccacatctacaggtccttctgttccagaactgcaacttgagttccttccctccttggaccctggattcctcccaggtcctatcgatcaacctctttggcaaccccctcacttgcagttgtgacttgtcttggctcctcacggatgcaaagagaactgtcctaagcagggcagcagacactatgtgcgcgccagctgcgggatccagcggccccttctcagcctccctgtcactctcccagctgcccggagtgtgccagtccgaccaaagcaccactctcggggcttcacacccaccttgcttcaaccgctccacctacgcacagggtaccaccgtcgcgcccagcgcagcccccgccacccggcctgcgggagaccagcagagtgtctccaaggcccctaacgtgggctctcgcacgatagctgcatggccgcacagcgatgcacgggaggggactgccccctccacgaccaactctgtagcaggtcacagcaactccagcgttttccccagggctgccagcaccaccaggacccagcaccgaggagaacatgcccccgagcttgtccttgagcctgatatctcagctgcctccaccccactggccagcaagctcctgggccccttccctacctcgtgggaccgcagcataagctcgcctcagcccggccagaggacacacgccacaccccaagcccccaacccgagtctttccgagggcgagattccagtcttgctgctggacgactacagtgaggaggaggaagggaggaaggaggaggtgggaacgcctcaccaggacgtcccctgtgattaccatccctgcaagcacctgcagaccccgtgcgcggagctgcagaggcggtggcggtgccggtgccccggcctcagcggggaagacaccatcccagacccgcccaggctgcagggggtgacggagaccacggacacgtcggcgctggtccactggtgtgcccccaactcggtagtgcatgggtaccagatccgctactctgcggagggctgggcggggaaccagtcggtggtgggggtcatctacgccacggcccggcagcaccctctgtacgggctgtcgccgggcaccacctaccgcgtgtgcgtgctggcggccaacagggcgggcttgagccagccacggtcttcgggctggaggagcccgtgcgccgccttcaccaccaagcccagcttcgcgctcctgctctctgggctgtgcgccgccagcggcctgttgctcgccagcaccgtggtgctgtccgcatgtctctgcaggcggggccagacgctgggcctgcagcgctgcgacacgcacctggtggcctacaaaaacccggcctttgatgattacccgctggggctccagaccgtcagttagcccagcttctgggataacgcgtctcatcgaactggatctgagcgcaaaaaggaagacacagacggtcaaaaacgaccccatccgctcctagggtttctaattcccgtgaagccagaatgccttgagcacacatggaacttgccacactgagtgtctgggtccaaggaactgctgccctcccttccttctacttaactctgttcccagaaacctgatggtcaatgccagatcgctccccactgc

SEQ ID NO: 46035 - DNA, 1032 bp, Homo Sapiens
atgtctcgggaacccaccccacctctacctggagatatgtctactggtcccatagcagaaagctggtgttacacacaggttaaagtagtaaaattttcctatatgtggaccattaataacttcagtttttgtcgagaggaaatgggtgaagtgttaaaaagttcaacattttcatctggcccaagtgacaaaatgaaatggtgcctgagggtaaacccaaagggattagatgatgaaagtaaagactacttgtccttatatttgcttttagtcagctgccccaaaagtgaagttcgagcaaaattcaaattttcccttctgaatgctaaaagggaagaaacaaaagcaatggaaagccaaagagcatatcgatttgtgcaagggaaggactggggttttaaaaaattcattagaagggactttttgcttgatgaagctaatggtcttttaccagatgacaagcttacattattttgtgaggtgagtgtggtccaagattcagtaaacatatcaggacatactaatacaaatactttgaaggtgcctgagtgtcgtctagcagaagatttaggtaatctctgggaaaacacaagatttacagactgcagttttttcgtgagaggacaagaatttaaagctcataaatctgtgcttgcagctcgatctccagtttttaacgccatgtttgaacatgaaatggaagaaagcaaaaagaatcgagtggaaataaatgatttagaccctgaagtttttaaagaaatgatgagattcatttacacagggagagcaccaaaccttgacaaaatggctgacaacttgttggcagctgcagacaaatatgcactggaacggctgaaggtcatgtgcgaagaagctttgtgtagtaacctctcagtagagaatgttgcagatacccttgtccttgcagatttgcacagtgcagaacagttgaaagcacaagccatagactttattaataggtgcagtgtacttcgacaacttgggtgtaaagatgggaaaaactggaacagc

SEQ ID NO: 46036 - DNA, 788 bp, Homo Sapiens
gcctctctctggagtcggctagccggggctcggggagcggggtgcgcagggctcggggccacgccttgccacctgcagcgcccgggtgggccgcgggggcctcggcgggacgcgctcggccctgtcgcaggagctaacgcagggggaatccttgcaggtgggagcatttcagagcgcacaagccatggtggccaaacagcggatccggatggctaacgagaagcacagcaaaaacatcacccagagggggaacgtagccaaaaccctggaggccgcaagaggagaaatatcctgtgggaccatggctgttggcactgtttgtttttgttgtctgtggctcaggctatctttcagatcattcagagcataaggatgggcatgtgagaaagccagggatttgacaccacctccctcccactggaggcgggaggacaacggaagcggtcagccagtttctgcgggaaacaagcaggccacacggaatagaaaaaaacgctcccccacttgttccctgatcacttcatcgtggatgtcagaccaaattgccttctcacaggacatcttggtgcatccgcgttctcaagcggaaaggacattttgcttttctgttggcaggattagtagccacgcgggtcgtccgcagcagtgctgtttttttggtttttcccttggtttcactaatgcgtgcatgtggccctctgaacgatcactggtttactttctatggatacaatctctcctccattgagaattgattttacaaataaatgtcttcgttcaaccttata

SEQ ID NO: 46037 - DNA, 824 bp, Homo Sapiens
ggggtgggcgggctggcccatggctgagacctctctcccagagctggggggagaggacaaagccacgccttgccccagcatcctggagctggaggagctcctgcgggcagggaagtcttcttgcagccgtgtggacgaagtttggcccaaccttttcataggagatgcggccacggcaaacaaccgctttgagctgtggaagctgggcatcacccacgtgctgaacgccgcccacaagggcctctactgtcagggcggccctgacttctacggcagcagtgtgagctacctgggggtgccagcccacgacctccctgattttgacatcagtgcctacttctcctctgcggctgacttcatccaccgtgccctcaacacgcctgggggccgcgtgctggtacactgtgccatgggggtaagccgctctgccacacttgtcctggccttcctcatgatctgtgagaacatgacgctggtagaggccatccagacggtgcaggcccaccgcaatatctgccctaactcaggcttcctccggcagctccaggttctggacaaccgactggggcgggagacggggcggttctgatctggcaggcagccaggatccctgacccttggcccaaccccaccagcctggccctgggaacagcaggctctgctgtttctagtgaccctgagatgtaaacagcaagtgggggctgaggcagaggcagggatagctgggtggtgacctcttagcgggtggatttccctgacccaattcagagattctttatgcaaaagtgagttcagtccatctctataataaaatattcatcgtc

SEQ ID NO: 46038 - DNA, 649 bp, Homo Sapiens
caggtctctggacactatgggcacacgactcctcccagctctgtttcttgtcctcctggtattgggatttgaggtccaggggacccaacagccccagcaagatgagatgcctagcccgaccttcctcacccaggtgaaggaatctctctccagttactgggagtcagcaaagacagccgcccagaacctgtacgagaagacatacctgcccgctgtagatgagaaactcagggacttgtacagcaaaagcacagcagccatgagcacttacacaggcatttttactgaccaagttctttctgtgctgaagggagaggagtaacagccagaccccccatcagtggacaaggggagagtcccctactcccctgatcccccaggttcagactgagctcccccttcccagtagctcttgcatcctcctcccaactctagcctgaattcttttcaataaaaaatacaattcaagttgcttctcatggatggcactgcttttctgaggactcaagggccaagatggaggggctgactcagtccagccaacatttaatgagcacctactttatgtatggagctctaacccatgggtccatgggaataaagcagtgaatagtaacaataaataatcgtaacagcaattagagactaa

SEQ ID NO: 46039 - DNA, 318 bp, Homo Sapiens
atggttctgtgctacactatggtcgtgggcctcaacaagggccacaagttgaccaagaatttgagcaagcccagacacagtcgtagccttgggcgcccgaccaaacacaccaagtgtgtgcggggcatgatccaagaggtatgtggcttcaccccatacgagcggtgcaccatggagttactgaaggtctccaaggacaaacaagccctcaagttcatcaagaaaagggtggggacacacatccacaccaagaggaagcgggaggagctgagcaatgtcctggccatcacgaggaaagttgctgctatgaaagactga

SEQ ID NO: 46040 - DNA, 612 bp, Homo Sapiens
agggaaggaccttccctccctcgccctgccctgccccggactgaactcagcacggtttccccaggggactctaccaggccatcccccgccgtcctccccgcccgcgcaccgggcaacaggtgctgcgggcgccgccgcttgccgggaaatgcgagctacctggccagagtggctctgggggcttctgagcagtggctctttctcctcccttctgcccctggcatagcagttgaagtcccagtatccaatgcctcagctctccccttctttcccccctcccaggactcacagaaaccctctgtacccagtcatgggccaaagacaccgtcatgcaagggggtgaaggctccacactcgtcccggccccgggcgtggaagcaggacctcgagcagtctctggcagcagcctatgtgccggtcgttgtggactctaaggggcagaatccggacaagctcaggttcaatttctacacctcccagtactccaactccctgaaccccttctacactttgcagaagcctacctgtggctacctgtaccgccgggacactgaccacacccgcaagcgctttgatgtgcctcctgccaacttggtcttgtggcgctcctag

SEQ ID NO: 46041 - DNA, 2846 bp, Homo Sapiens
ttttggttaatgttgggtgtgtttctgcggtttgtgaggtgagaggcgctggagctatgggtccgaaccgcggtgtctgaacccagaaggtgaagagtccttcttgctgcacagaggcagatcttaggccccgtaacggcgcccgccgctcccggcagtgctttccccgcgtactcgggatggcggcggccgcgctgaggctcccggctcagggcatcatctggctgcaaagaagagaacacactgtgtttgagggaggaggaaggaggatcagagtttaaactcctgccataatgcagggcactgtggcatttgaagatgtggctgtgaacttttcccaggaggagtggagtctccttagtgaggttcagagatgcctttaccatgacgtgatgctggagaactgggtacttatatcctccctgggttgttggtgtggatcagaagatgaggaggcaccttctaagaagagcatttctatacaaagagtgtctcaggtcagcactcctggggcaggtgtgtctcccaagaaggcccactcttgtgaaatgtgtggcgcgatcttgggagacattttgcacttggcagatcatcaggggacacatcacaagcagaaactgcacaggtgtgaggcatgggggaataaattgtatgatagttcaaaccgtccgcaccagaatcagtaccttggagagaaaccctatagaagcagtgttgaggaagcattgtttgtgaagaggtgtaagttccatgtgtcagaggagtcatctatcttcattcagagtggaaaggactttttgcccagctcaggattactgctgcaggaggccactcacactggggagaagtcaaacagcaaacctgagtgtgagtctccctttcagtggggagatactcattacagctgtggagaatgcatgaaacattctagcaccaaacacgtatttgttcaacagcagagacttccctctagagaggaatgttattgctgggaatgtgggaaatcctttagcaaatatgatagcgtcagtaatcatcagagagttcacactgggaaaagaccttatgaatgtggagaatgtgggaaatcttttagtcataagggcagccttgttcagcatcagcgagttcacactgggaaaagaccttatgaatgtggagaatgtgggaaatcttttagtcataagggcagccttgttcagcatcagcgagttcatactggagaaagaccttatgagtgtggagaatgtgggaaatcttttagtcaaaatggtactctcattaaacatcaacgagttcacactggagaaagaccttatgagtgtgaagaatgtgggaaatgttttactcagaagggcaatctcattcaacatcaacgaggtcacactagtgaaagaccttatgagtgtgaagaatgtggaaaatgttttagtcaaaagggcaccctaactgaacatcatcgagttcacactagagaacgaccttatgagtgtggagaatgtgggaaatcttttagtcgaaagggacaccttaggaaccatcagcgaggtcacactggagaaagaccttacgagtgtggagaatgtgggaaatcttttagtcgaaagggcaacctcattcagcatcagcgaagccacactggagaaaggccttatgagtgtagagagtgtaggaaattatttaggggcaagtcccacctcattgaacaccagagagttcacactggagaaaggccatatgaatgtaatgaatgtgggaaatcatttcaagacagctctgggtttcgtgttcatcagagagttcacactggagaaaaaccgtttgagtgtagtgaatgtgggaagtcatttcctcaaagctgttccctccttcgacatcggagagttcatactggagaaaggccttatgaatgtggagaatgtggaaagtcatttcatcagagctcttccctccttcgacatcagaaaactcacactgcagaaagaccttatgagtgcagagaatgtgggaaattcttctccagtctccttgaacacaggagagttcacactggagaaaggccttatgaatgcagggaatgtggaaaaacatttactcgaaggtctgcgcattttaaacatcagagacttcatactcgaggaaagccttacgagtgcagcgaatgtgggaaatcctttgctgaaaccttcagtcttactgaacacaggagagtacacactggagaaaggccttatgagtgcagtgaatgtggaaaatcatttcatcgaagctcttctctccttcgacatcagagagttcacacagaaagaagtccttacaagtgaaaagaaatttgggaaattctttagctaaacctctgtgcatcttcttgatcagagggttcttactggatcaggaccttatgagtgtgacaaacgtgggatattctttatgcagaagtcttgttttattacatacagaagagctcccactgcagaagggcctcttgagtgcgatgaatgtgagaaagccttctgccttctgtcattggataacagattgttctcataaggaaaacactgtacacgtacaggaaatattatttcttgtaaaacataacactggaggagatgccttatgacggagccatctgcctaaattgacataccttcagcatctgcataaactcaattatgttggagctgtgtggcatttttcaccctgccgggttcccttgccagacatgatgtcggttatctggcaaaagccattttatgtcggccacgaggcaggtgttcactgtgcatcattcattcaccccatgatgttctggaagtaaaccttggttgtctttcgttggccagagg

SEQ ID NO: 46042 - DNA, 1080 bp, Homo Sapiens
atgtcgtacagtatatacaagagcacagttaacatccccttgagtcatggtgttgttcattctttttgtcataatatgaactgtaactttatgcatatcttcaagtttgttctagatttcaacatgaagaatgtcactgaagttaccttatttgtactgaagggcttcacagacaatcttgaactgcagactatcttcttcttcctgtttctagcaatctacctcttcactctcatgggaaatttaggactgattttagtggtcattagggattcccagctccacaaacccatgtactattttctgagtatgttgtcttctgtggatgcctgctattcctcagttattaccccaaatatgttagtagattttacgacaaagaataaagtcatttcattccttggatgtgtagcacaggtgtttcttgcttgtagttttggaaccacagaatgctttctcttggctgcaatggcttatgatcgctatgtagccatctacaaccctctcctgtattcagtgagcatgtcacccagagtctacatgccactcatcaatgcttcctatgttgctggcattttacatgctactatacatacagtggctacatttagcctatccttctgtggagccaatgaaattaggcgtgtcttttgtgatatccctcctctccttgctatttcttattctgacactcacacaaaccagcttctactcttctactttgtgggctctatcgagctggtcactatcctgattgttctgatctcctatggtttgattctgttggccattctgaagatgtattctgctgaagggaggagaaaagtcttctccacatgtggagctcacctaactggagtgtcaatttattatgggacaatcctcttcatgtatgtgagaccaagttccagctatgcttcggaccatgacatgatagtgtcaatattttacaccattgtgattcccttgctgaatcccgtcatctacagtttgaggaacaaagatgtaaaagactcaatgaaaaaaatgtttgggaaaaatcaggttatcaataaagtatattttcatactaaaaaataa

SEQ ID NO: 46043 - DNA, 672 bp, Homo Sapiens
atgtatttttatgtgggccacaaaaataaactgccctttgatggaagtcctaagataacttattcaaccccccctgtggcaaacctctacacttgcattaataacatccaacatacgggagaatgtgctgtgggacttttgggaccacgggggataggtgtgaccatttataacaccacccaacccagacagaaaagagctctgggtctaatactggcagggatgggtgcggccataggaatgatcgccccatggggagggttcacttatcatgatgtcaccctcagaaatctctccagacaaatagacaacatagctaagagtaccagagatagcatctctaaactcaaggcctccatagattctctagcaaatgtagtcatgaacaacagattggccttagattacctcttagcagagcagggtggagtctgtgcagtgatcagtaaatcctgttgcatttatgtcaataacagtggggcgatagaggaggatataaaaaagatctatgatgaggttacgtggctccataactttggaaaaggtgattcagcagggtccatttgggaggctgtgaagtctgccctcccctccctcacatggtttgtccctttactgggaccagctgcacttaatagcctgctttctcctctttggcccttgtctctataa

SEQ ID NO: 46044 - DNA, 930 bp, Homo Sapiens
atggcaaatctcacaatcgtgactgaatttatccttatggggttttctaccaataaaaatatgtgcattttgcattcgattctcttcttgttgatttatttgtgtgccctgatggggaatgtcctcattatcatgatcacaactttggaccatcatctccacacccccgtgtatttcttcttgaagaatctatctttcttggatctctgccttatttcagtcacggctcccaaatctatcgccaattctttgatacacaacaactccatttcattccttggctgtgtttcccaggtctttttgttgctttcttcagcatctgcagagctgctcctcctcacggtgatgtcctttgaccgctatactgctatatgtcaccctctgcactatgatgtcatcatggacaggagcacctgtgtccaaagagccactgtgtcttggctgtatgggggtctgattgctgtgatgcacacagctggcaccttctccttatcctactgtgggtccaacatggtccatcagttcttctgtgacattccccagttattagctatttcttgctcagaaaatttaataagagaaattgcactcatccttattaatgtagttttggatttctgctgttttattgtcatcatcattacctatgtccacgtcttctctacagtcaagaagatcccttccacagaaggccagtcaaaagcctactctatttgccttccacacttgctggttgtgttatttctttccactggattcattgcttatctgaagccagcttcagagtctccttctattttggatgctgtaatttctgtgttctacactatgctgcccccaacctttaatcccattatatacagtttgagaaacaaggccataaaggtggctctggggatgttgataaagggaaagctcaccaaaaagtaa

SEQ ID NO: 46045 - DNA, 1131 bp, Homo Sapiens
atgcatctactcaaggttggcacttggagaaacaacactgcctcttcctggcttatgaagttcagtgttctttggcttgttagtcagaactgttgcagagcaagtgttgtttggatggcttatatgaacatatcatttcatgttgggaatcatgtgttgtcagagttgggagagactggagtctttggaagaagctccactttgaagagagtggcaggagttatagtgccaccagagggaaaaatccaaaatgcatgtaatcccaataccattttcagccgatcaaagtactcagagacctggcttgcacttattgaacggggaggttgtaccttcacacagaaaattaaagtggcaactgagaagggagccagtggagtgatcatctataacgttccaggtactggcaaccaggtgttccccatgtttcatcaggcatttgaagatgtcgttgtggttatgattggtaacttaaaaggcacggaaattttccatttaattaagaagggagttctcattacagccgtggttgaggtggggagaaagcacatcatctggatgaatcactatttggtctcttttgtgattgtcacaactgctaccttagcatatttcatcttttatcacattcatagactttgtttagcaaggattcagaaccggagatggcagcgattaacaacagatcttcagaacacatttggacaactccaacttcgagtagtaaaagagggggatgaagaaataaatccaaatggggatagctgcgtaatttgctttgaacgctataagcctaatgacatagttcgtattctgacttgtaaacattttttccacaagaattgcattgacccctggattttaccccatgggacatgccccatttgcaaatgtgatattcttaaagttttggggattcaagtggttgttgaaaatggaacagaacctttgcaagttctaatgtcaaatgaactgcctgaaaccttatcacctagtgaagaggagacaaataatgaagtttctcctgcaggaacctcagataaagtaatccatgtggaggagaaccctacttctcagaataatgacatccagcctcattcagtagtggaagatgttcatccttcaccttga

SEQ ID NO: 46046 - DNA, 975 bp, Homo Sapiens
atgggaatgtccaacctgacaagactctctgaatttattctcttgggactctcctctcggtctgaagaccagaggccactctttgccctctttcttatcatatacctggtcactttgatgggaaatctgctcatcatcttggctatccactctgatcctcgacttcaaaaccctatgtattttttcctaagcatcttgtcctttgctgatatttgctacacaacagtcatagtcccaaagatgctcgtgaacttcttatcagagaaaaagaccatttcctatgctgaatgtctggcacagatgtatttcttcctggtttttggaaacatagatagttatctcctggcggctatggccatcaaccgctgtgtagccatttgtaacccattccattatgtcactgttatgaaccgcagatgctgtgtgttgctactagcattccccatcactttctcctatttccactctctcctacatgtcctcctggtgaatcggctcaccttttgtacatcaaatgttatccatcattttttttgtgatgtcaaccctgtgctgaaactgtcctgctcctccacctttgtcaatgaaattgtggccatgacagaagggctggcctctgtgatggctccatttgtctgtatcatcatctcttatctaagaattctcatcgctgttctcaagattccctcagcagctggaaaacacaaagccttctccacctgcagctcccatctcactgtggtgattctgttttatgggagtattagctatgtctatttgcagcctttgtccagctatactgtcaaggaccgaatagcaacaatcaactacactgtgttgacatcagtgttgaacccatttatctacagtttaagaaacaaagacatgaaacggggcttacagaaattgataaacaagattaagtctcaaatgagtaggttctctacaaagaccaataaaatctgtggaccctga

SEQ ID NO: 46047 - DNA, 807 bp, Homo Sapiens
atgagacaggctaccatggatttcagcaccccttctgtgtttgatcagcaaagaggtgactcatctgaggaagttgacctgaccatggtttatcaagcagcctctaatggagatgtcaatgctctgactgcagtgattcgggaagacccttctatcctagaatgctgtgacagtgaaggatgcacgcccttgatgcatgcggtttctggacgtcaagcggacacagtgaagctgctgttgaagatgggagccaatattaacatgcaggatgcttatggccgcacaagtttatgcctggccacctacctgggctggcttgaaggctgtgtgagtctactcagaaacggtgccaagcacaatatcccagataaaaatggccgcctgccactgcatgctgccactgctgagcccgatatgaggctcctcacggtcctgttgcaacagtcgaacatcagcgagattaatcaccaggacaatgagggaatgacaccactccactgggcggctttccacaaccagcctcaacacacacaaatgctgctgaagaagggggcagaccccacccttgtggataaagactttaaaaccgctctccactgggcagtccagagtggaaataggattctgtgctccatcattctgagccatcaccaggggccgtccataatcaactatgatgatgagagtgggaagacatgtgtacatatcgcagcggcagcgggcttcagcgatattattcatgagctggcaagagtccctgagtgtaacctgcaggctctggatgtggatgacaggtatccatggtaa

SEQ ID NO: 46048 - DNA, 827 bp, Homo Sapiens
gctttccaaaatggcgcgggtgctgaaggctgcagccgcgaatgccgtagggcttttttccagacttcaagctcccattccaacagtaagagcttcttccacatcacagcccttggatcaagtgacaggttctgtgtggaacctgggtcgactcaaccatgtagccatagcagtgccagatttggaaaaggctgcagcattttataagaatattctgggggcccaggtaagtgaagcggtccctcttcctgaacatggagtatctgttgtttttgtcaacctgggaaataccaagatggaactgcttcatccattgggacgtgacagtccaattgcaggttttctgcagaaaaacaaggctggaggaatgcatcacatctgcatcgaggtggataatattaatgcagctgtgatggatttgaaaaaaaagaagatccgcagtctaagtgaagaggtcaaaataggagcacatggaaaaccagtgatttttctccatcctaaagactgtggtggagtccttgtggaactggagcaagcttgatttatatttgcaagcaactaaattaattgacctgaaaaagcctatcaaatactatcaaaatgtactatgacattgagtccttcactgcttccatcatgtaaaagttcacagttaaagactgaattacagaaagattaaaatatatacatatataaatacataaatatgtatattatttagattaacaaacatatttgttaatttgaatttgaagaaaatcttgattactaattacttagggaacattattaaaatcatatagaaataaattattcctcttctacaa

SEQ ID NO: 46049 - DNA, 1529 bp, Homo Sapiens
aatggaagagctcgaaaaggatcctcgcatcgcacagaagatcaagcgatttaggaataaacaagcccagatgaagcacatttttacggagcctgatgaagacttgttcaatccagactatgtagaagttgatcgcatcttggaggtggcccacaccaaggatgcagaaacaggggaggaggtaacacattacctggtgaagtggtgctcactaccatatgaagaaagcacgtgggagctagaggaagatgtagatcctgcaaaagttaaagaatttgaatctcttcaagttctccctgaaattaagcatgtggagcggcctgcttcagactcctggcagaaacttgagaagtctcgcgagtataagaacagtaaccagctccgggagtaccagctggaagggatgaactggcttctttttaactggtataacagaaaaaactgtattttggctgatgagatgggcctagggaaaaccatccagtccatcacattcctttcagaaatatttctgagaggaatccacggcccttttctcattatcgcccctctctccaccatcactaactgggagcgggagttccggacatggacagagatgaatgccattgtgtaccacggcagccagatcagcaggcagatgatccagcagtatgaaatggtgtacagagacgcccagggaaaccccctttcaggagtcttcaagttccacgtcgtcatcacaacatttgaaatgatcctagcagactgcccagagttgaagaagattcactgctggggccggtggaaggacatcctgactcatggccgattcaagtggcatctgaacgagaaggacatggagatgatttgccgtgccctcctggtgtactgtgtcaagcattataagggggacgagaagatcaagagtttcatttgggaactgatcacacctaccaaagatgggcaagcccagaccctccagaaccactcaggcttatctgccccagtccccagagggaggaaggggaagaagacgaagaaccagttgctaatcccagagctaaaggatgcagattggctagccacctgcaaccccgaggtggtcttgcatgatgatggctataagaaacacctcaaacagcactgcaacaaagtacttttgcgagtccggatgctgtactacctaaaagctgaaatactgggagaagcagctgagaaagcatttgaaggatctcctgccagggagctggatgtacctctgcctgacatcgactacatggagatcccagtggactggtgggatgctgaagccgataagtcacttctcattggcgtgttcaagcatggttatgaaaggtacaatgccatgcgagcagacccagcactttgcttcctggagaaagttgggatgcccgatgagaagtccctttctgcagaacagggtgttacagatgggacctcagacattcctgaaaggcaacacagataaagaagacaatgctgaggacaaagtagatggcctccagaaacaaacggtgagtcaaatg

SEQ ID NO: 46050 - DNA, 4570 bp, Homo Sapiens
gcggccgccgcccccggctgcgcgctgagccgccggccccccgagcgccacggccggagctgcggcggcggcatcatggccccgaccctgctccagaagctcttcaacaaaaggggcagcagcggcagctccgcggcggcgtctgcccagggcagggctcctaaggaaggacccgcctttagttggtcatgttcggagtttgacctgaatgagattcgcctgatagtttaccaggactgtgacaggagaggcagacaagtcttgtttgactctaaagctgttcaaaagattgaggaggtgacagctcagaaaacagaggatgttcctattaaaatatcagccaagtgctgccagggaagcagcagtgtcagcagcagtagcagcagcagcatctcttcccacagttcttctgggggatcttcacatcatgctaaggaacagcttccaaagtaccagtacacaagaccagcttccgatgtcaacatgttaggggaaatgatgtttggctcagttgccatgagttacaaaggctccaccttaaagatacactacatacgttctcctccacaactgatgattagtaaagtcttctctgctagaatgggcagcttctgtggaagtacaaataacttgcaagacagctttgagtacatcaaccaagatcctaatttgggaaaactgaacacaaatcaaaatagtttgggtccttgtcgtactggaagtaacctagcacacagcacaccagttgatatgccaagcagaggacagaatgaagacagggacagtggcattgctcgatcagcctcactaagcagtcttttgatcacacctttcccatctccaagctcctctacatcttcttccagcagttaccagcgccgctggcttcgaagtcagacaacaagtttggaaaatggcatcatcccaagaaggtcaactgatgagacattcagcttggctgaagaaacctgtagctctaatccagctatggttaggaggaagaaaattgccataagcatcatcttttccctatgtgagaaagaagaagcacaaaggaatttccaggacttcttcttttctcattttcccctgtttgaatctcacatgaacaggctgaagagtgcaattgaaaaggctatgatctcctgtaggaaaatagcagaatcaagtctccgagtccagttttatgtcagccgtttgatggaagctctgggagaattcagaggaactatctggaacttatattctgttccaaggatagctgaacctgtatggcttactatgatgtccggcactttggaaaaaaaccagctctgccagcgctttctcaaggagtttacacttctgatagaacagataaataaaaaccagttttttgctgccttactgactgcggtgttaacctaccacctggcctgggtcccaactgtcatgcctgtggatcaccctcccatcaaagccttctcagagaaacgtacctcccagtcagtgaacatgctggccaaaacacatccgtataatcctctttgggcacagctgggtgatctttacggagccataggctctccagtgagactgactcgcaccgtagtggtagggaagcagaaggacttagtccagcgaatactttatgtcctgacctactttctccgttgctctgagctacaagagaaccagctgacctggagtggcaatcatggtgaaggtgaccaagttttaaatgggagcaagatcataacagccttggagaaaggagaggtggaggagtctgagtatgtggtcattacggtgaggaacgagcccgctcttgtaccccccatcctaccaccaacagcagcagagagacacaacccctggccgacagggtttcctgagtgcccagagggcactgacagtagagacctgggtcttaaacctgacaaagaagctaacaggaggccagagcagggttctgaggcttgcagcgcagggtgcctggggccagcatcagacgcttcctggaaacctcagaatgcattttgtggggatgagaaaaataaagaggcaccgcaagatggctcttcaagacttcccagctgtgaagttttgggggcaggaatgaagatggaccagcaagctgtctgtgagctgttgaaagtggagatgcctacaagactgccagaccggtcagtggcctggccttgccctgacagacatctccgggagaaaccttccttagaaaaggtcactttccagattggaagctttgcatctccagagtctgactttgaaagccgcatgaaaaaaatggaggaacgggtgaaggcctgtggcccctccttggaggccagtgaggctgctgatgtggctcaggacccgcaggtttctaggagcccttttaaacctggctttcaggagaatgtttgctgtcctcagaatcggctttcagagggggatgaaggcgagtctgacaagggttttgcagaggacagaggcagcagaaacgacatggcagcagatattgctgggcagctcagccacgctgctgacttgggcacagcctcccacggtgcaggaggaacgggagggaggaggctggaggccactagaggtttgtatgtgaaggctgcggaaggacctgtgctggagcctgttgcccccaggtgtgtccagcggggccctggcctcgtggctggtgcgaatatcccctgtggggatgacaacaagaaggccaacttcaggactgaaggagacattccccgaaatgaaagctcagatagcgccctgggagacagtgacgacgaagcctgcgcttcagccatgctagatctgggtcacggtggtgacaggactggagggtccttggaagtggagctgcctctgccaaggtctcagagcatcagcacccagaatgtaaggaactttggccgctcacttctggcgggctactgccccacatacatgcctgatcttgtgcttcatgggaccggcagtgatgagaagctgaagcagtgcctggtggccgaccttgtccacacagtccatcatccagtcctggatgagccaatagctgaagctgtctgtattatcgcagacacggataaatggagtgtgcaggtagctacaagtcagaggaaagtgacggacaacatgaaactaggccaggatgtcctggtctctagtcaggtgtccagtttgcttcagtccattttacagctctataagcttcacctccctgctgatttttgcatcatgcatcttgaagatagactacaggagatgtaccttaaaagtaaaatgctatctgaatatctccggggacacacacgagtccatgtgaaagaattaggtgtcgtactggggattgaatccaacgacctgcctctgttgactgctattgccagtactcattctccttatgtggctcaaatactcttataagctaaagctcaggacagttcttccttggaagaaaaaaatcaaattctcaactgaaggagaaaggaataagctctctgtgatgtcaaaagcatgagaagagcaaacagaaacagtcattccacctttttgttttgtgtttttgctgtcaagctgatgcttcattgaagacttaggtttacttgacataatagcatttgtgattgtcgtgaacactttaggccatttgttacccatgaatcaacaaagaaactgacctttttggtaggaggaaacataagcactaaacactaagctgttgcaacagattgccttgtgctgtttgggcagaataaagacaagtgacttgagcggggtggtcagcagtgtacataatattccagtaggaaactgcttccaagtttaagcatgagctccccaaactggagaaaacatattttgctattctgagacaacaatcagaatacagactttggattccaggtcacagtttgctttttagacaaggtaaagcaaagaaagccacattgtgccatcttcagctccagtggctttagcagtgactgtttgacataaaacatgtaagaattgcttgttgggaagagtgctttagggacccactgttttcatttcttcttggagtttaccttgtttcagatgcagccatgggtaggtcagagatggattgttggtgcaataaacccaagaatcaatgtagcctcttaatcccatcaagatgtagtttgtagcagcaaagtgtacagtctgaaaccgtatgttttatccttatattttagagctttcagcagcctttttaagagaggccacttaccaaagttatttctataagctcaagagtgtttcggttggtaagttcttccagctgaagccactttttccttatagttaatacaaatgactatttttactttaaaaggcacagctgtcctggtgggaaatgaaacctgcagcagttcaggatgactaatgaaagcaattagcttgaacatttagaaaaaattcatatatgatctaaatttttatattatcatttctgtgccttctaattcctgcatccttttcaaaacatctttccagacattaacttacacattgtataaaaccgaccaaaatgatttcctaaagttcatgc

SEQ ID NO: 46051 - DNA, 621 bp, Homo Sapiens
atgccggctcattactcttctctcatggatcctgacaccaaactcatcggaaacatagcactgttacctatcagaagtcaattcaaaggacctgcccccagagagacaaaagatacagatattgtggatgaagccaactattacttcaaggccaatgtcttcttcaaaaactatgaaattaagaatgaagctgataggaccttgatatatttaactctctacatttctgaatgtctgaaaaaactccaaaagtgcaattccaaaagtcaaggtgagaaagaaatgtatacactgggaatcattagttttcccattcctggagagcctggttttccacttcacgcaatttataccaaacctgcaaacaaacaggaagatgaagtgatgagagcctatttacaacagctaaggcaagagactggactgagactttgtgaggaagttttcgaccctaagaatgataaacccagcacgtggtggacttgctttgtgaagagacagttcatgaacaagagtctttcaggacctggacagcgaagggagcccgggcagccgccatctccagagccctgggcagcattttccagcaagatgtacacaatcttttgcctttattcgtaa

SEQ ID NO: 46052 - DNA, 237 bp, Homo Sapiens
atgctccgaggtggtacaggagtcaatgaaggtctgggcgatgacagcaaggatggcgtccacattgtccgacacccgtacatcaaagatgagctgtgggttcttcaaggcattcacccagaaccgcagcagcagactgggggcgcagggcaggcgggtggggcagcaggaaaggcacctgttggtcttccagatgtgcagggtccctgggtcctcgatgccgtgcttctctgctag

SEQ ID NO: 46053 - DNA, 1074 bp, Homo Sapiens
atgaattgggtaaataagagtgtcccacaggagttcattctgttagttttctcagatcaaccatggctagagattccaccctttgtgatgtttctgttttcctatatcttgacaatctttggcaatctgacaataattcttgtgtcacatgtggatttcaaactccacacccctatgtacttttttcttagcaatctctcactcctggacctttgctataccacaagtacagttccacaaatgctggtaaacatatgcaacaccaggaaagtaatcagttatggtggctgtgtggcccagcttttcattttcctggccttgggttccacagaatgtcttctcctggccgtcatgtgctttgataggtttgtagctatttgtcggcctctccattactcaattatcatgcaccagaggctctgcttccagttggcagctgcatcctggattagtggctttagcaattcagtattacagtccacctggacacttaagatgccactgtgtggtcacaaagaagtggatcacttcttctgtgaagtccctgctctgctcaagttgtcctgtgttgacacaacagcaaatgaggctgaactattcttcatcagtgtgctattccttctaatacccgtgacactcatccttatatcgtatgcttttattgtccaagcagtgttgagaatccagtctgctgaaggtcaacgaaaggcatttgggacatgtggctcccatctaattgtggtgtcacttttttatggtacagctatctccatgtacctgcaaccaccttcacccagctccaaagaccggggaaagatggtttctctcttctgtggaatcattgcacccatgctgaatccccttatatatacacttaggaacaaagaggtaaaggaagcctttaaaaggttggttgcaaagagtcttcttaatcaagaaataagaaatatgcaaatgataagctttgctaaagacacagtgcttacttaccttactaacttctccgcaagttgtcctatttttgtcattactatagaaaactattgtaatctccctcaaagaaaatttccttga

SEQ ID NO: 46054 - DNA, 1483 bp, Homo Sapiens
agggcggcctggccactgagccggggtgcagtggcagcgggagagtacctggcgatggcgatatgagcggtgcgggggtggcggctgggacgcggccccccagctcgccgaccccgggctctcggcgccggcgccagcgcccctctgtgggcgtccagtccttgaggccgcagagcccgcagctcaggcagagcgacccgcagaaacggaacctggacctggagaagagcctacagttcctgcagcagcagcactcggagatgctggccaagctccatgaggagatcgagcatctgaagcgggaaaacaaggatctccgttacaagctcataatgaatcagacatcacagaagaaagatggcccctcaggaaaccacctttccagggcctctgctcccttgggcgctcgctgggtctgcatcaacggagtgtgggtagagccgggaggacccagccctgccaggctgaaggagggctcctcacggacacacaggccaggaggcaagcatgggcgtcttgcgggcggtagcgccgacactgtgcgctctcctgcagacagcctctccacgtcaagcttccagtctgtcaagtccatctctaattcagccaactctcaaggcaaggccaggccccagcccggctccttcaacaagcaagattcaaaagctgacgtcccccagaaggcggacctggaagaggagcccctacttcacaacagcaagctggacaaggttcctggggtacaagggcaggccagaaaggagaaagcagaggcctctaacgcaggagctgcctgtatggggaacagccagcaccagggcaggcagatgggggcggcggcacaccccccaatgatcctgccccttcccctgcgaaagcccaccacacttaggcagtgcgaagtgctcatccgcgagctgtggaataccaacctcctgcagacccaagagctgcagcacctcaagtccctcctggaagggagccagaggccccaggcagtcccggaggaagctagctttcccagggaccaagaagccacgcatttccccaaggtctccaccaagagcctctccaagaaatgcctgcttctgagcccacctgtggcggagcgtgccatcctgcccgcactgaagcagaccccgaagaacaactttgccgagaggcagaagaggctgcaggcaatgcagaaacggcgcctgcatcgctcggtgctttgagctacccgcatctggtcagtgccaggcccaccaacctgcagctggagattggctctctatagcatttcctgacacttccgctacttttaggcctggctaaattccaagatagataacactcaagatagataaagtacttgatctccaaactgacaaactgtttattttctagctgttattttgctatttggcatttacataaaagcacacgatgaagcaggtatcgccttacctgttgaaactgaaaataaagcttgtttatttcc

SEQ ID NO: 46055 - DNA, 998 bp, Homo Sapiens
ggcgaggctgcaccagcgcctggcaccatgaggacgcctgggcctctgcccgtgctgctgctgctcctggcgggagcccccgccgcgcggcccactcccccgacctgctactcccgcatgcgggccctgagccaggagatcacccgcgacttcaacctcctgcaggtctcggagccctcggagccatgtgtgagatacctgcccaggctgtacctggacatacacaattactgtgtgctggacaagctgcgggactttgtggcctcgcccccgtgttggaaagtggcccaggtagattccttgaaggacaaagcacggaagctgtacaccatcatgaactcgttctgcaggagagatttggtattcctgttggatgactgcaatgccttggaatacccaatcccagtgactacggtcctgccagatcgtcagcgctaagggaactgagaccagagaaagaacccaagagaactacagttatgtcagctacccagacttaatgggccagagccatgaccctcacaggtcttgtgttagttgtatctgaaactgttatgtatctctctaccttctggaaaacagggctggtattcctacccaggaacctcctttgagcatagagttagcaaccatgcttctcattcccttgactcatgtcttgccaggatggttagatacacagcatgttgatttggtcactaaaaagaagaaaaggactaacaagcttcacttttatgaacaactattttgagaacttgcacaatagtatgtttttattactggtttaatggagtaatggtacttttattctttcttgatagaaacctgcttacatttaaccaagcttctattatgcctttttctaacacagactttcttcactgtctttcatttaaaaagaaattaatgctcttaagatatatattttacgtagtgctgacaggacccactctttcattgaaaggtgatgaaaatcaaataaagaatctcttcacatg

SEQ ID NO: 46056 - DNA, 228 bp, Homo Sapiens
atgcctgaactgaaatcttgtgaagtaggagttaggaagtacaatgcaaacaacaaaaggcaaagggtaacccatcacacacttagacaactatgcattatgtcattatcccgtaggcaagggcgagtcataaaggcaaaaataaacacacacacatacaccaagatcaaagtcaaaagccaacggggagaaagtatgtccaagaaacatcaccaaggactaatataa

SEQ ID NO: 46057 - DNA, 1703 bp, Homo Sapiens
ggggcgggcgtagaggctgaggcaccgcccagagctcgctgagacagagactgagaacgcccccggccagattccccccggagagacccgggtagggacagggacagagagacgcctctaggggcagaggccctgggaggcaaagacccccaggagagatttacccaccccagacggaaagcgcggctcagagtcggacgaggggagactgtcagaggacaacgccccctaggtctcctgggagaccccgaagcgaccccgggggcagcccgggccgtgtccgggcgagggtgacctatccttggttgagagcgatggggacacaagccctgcagggcttcctctttctcctcttcctcccgctgctgcagccgcgtggggcctcggctgggagcctgcacagtccaggcctgtccgaatgcttccaggtgaatggggctgactaccgcggccaccagaaccgcactggcccgcgcggggcgggccgcccgtgcctcttctgggaccagacgcagcaacacagctacagcagcgccagcgacccccacggccgctgggggctgggcgcgcacaacttctgccgtaacccagacggtgacgtgcagccgtggtgctacgtggctgagacagaggagggcatctactggcgctactgcgacatcccctcctgtcacatgccaggctacctgggatgctttgtggactcaggggcacccccagccctcagcggccccagcggcacctccacgaagctcacggtccaggtgtgcctacgcttctgccgcatgaaggggtaccagctggcgggcgtggaggccggttacgcctgcttctgtggctctgaaagcgacctggcccggggacgcctggcccccgccaccgactgtgaccagatctgtttcggccaccctggacagctgtgtggcggcgatgggcggctgggcgtctatgaagtgtcggtgggctcctgccaggggaactggacagcgcctcagggcgtcatctactccccggacttcccggacgagtacgggccggaccggaactgcagctgggccctgggcccgccaggcgccgcgctggagctcaccttccgcctcttcgagctggccgacccgcgcgaccggctggagctgcgcgacgcggcttcgggcagcctgctccgcgccttcgatggcgcccgcccaccgccgtccgggccgctgcgcctgggcactgccgcgctgctgctcaccttccgaagcgacgcgcgcggccacgcgcaaggcttcgcgctcacctaccgcgggctgcaggacgccgctgaggacccagaggcccccgagggctcggcccagacccccgcggcgcccctcgacggggccaacgtgagctgcagccccaggcctggggctccgccggccgcgattggggcccgggtcttctcgacggtgacggctgtctcggtgctgctgctgctgctcctggggctgctgcgtccgctgcgccgacggagctgtctgctggctccgggaaaagggcccccggcgctgggggcttccaggggccccaggagaagctgggctgtgtggtaccaacagccccgaggggtggccttgccctgctcccccggggacccccaggctgagggttctgccgcgggctaccggcctctgagtgcctccagccagagctccctgcgctcgctcatctccgctctctga

SEQ ID NO: 46058 - DNA, 2508 bp, Homo Sapiens
caacccgcgaggccccacactttctgcgccagctgggagtgcgcgccctgcagagccagtgggtgggcggttctagctcttcccaccctcactgcgggcctctgctgtcacacgcccggggtggcgaaacggtcgccacctgagtctccattctgctgcagtggcccctgcgttaaagctctctcgtggtgcggctgccgaggctgcggtagctcctgcgcccccgtgctggtggcgcagcctctgcttgctgccgacctggcggaagggtgcgggagcgcacgctacgggcagcgtcggtctgcgtccttcctcctcctattccgacccccgcatcccacgcccccgcctcgctctacgcctcctccctggctgcaggcagaccgcttcacacagccgcagtgccctgtgtgtggacagcctgtgggagactcgcacgcccacactcaccccgcctggctgcacccctgcccagcatgtcggcgctcgagtggtacgcccacaagtctctaggcgatggtatcttctggattcaagaacgtttctacgagtcgggcaaccgtgccaacatctggctggtgcgcggctccgagcaggacgtggtgatcgatacaggcctggggctgcgcagcctcccggagtacctgtactcctccggcctcttgcaggaccgagaggccaaagaggacgcggcgcgccggccactgcttgccgtggccacccacgtgcacttcgaccactccggcggcctctaccagttcgaccgcgtggcagtgcaccacgccgaggccgaggcgctggctcgcggggacaactttgagaccgtgacctggctttccgatagcgaggtggtgcggacgcccagccccggctggagggccagacagttccgggtacaggcggtgcagcccaccctcatcctgcaggatggggatgtgatcaaccttggtgacagacagctcactgttatgcacatgccaggtcactccaggggcagtatttgcttacatgacaaagaccgaaagattctcttcagtggagacgtcgtgtatgatggatcactgattgactggctcccatacagcaggataagtgactatgttggaacttgtgaacgtctaatagaattagtggacagaggtctggtagagaaggtgcttcctgggcacttcaatacctttggtgctgaaaggctttttcgattggcttctaactatatttcaaaagctgggatatgtcacaaagtttctacttttgccatgcgatctcttgcaagtttagctctacgtgtaacaaattctaggacctcgccctagtatctatactgataatatattttgattaattatatacattaattcattctgtgctatttaactgattaatagtgagcatttcatgaagtgcttttataccactattatatatcagagaaagattgagaatgaataagccaaaaagaaaattgttagtttaaattgttttctttcttccaagaaagaagccacttaaataagcttatactttgccaaagctgtcatcttgtaatatatgctctagaaatgacataaaggtttatggggaagcaaagagagattttgtggcaagagaactgcccttgcctctgtttttcttgttttattcccttgatgacctagggaaaaaaaggcatgtagagtattatgtttatactttaaacttgatatttttagtgtattatttaaagataaaggttcttgggtttaaaatacattagaacttaatgcagacatataaagtaacattgagaatgacaactaaaacattccattgttatggtcctgaattttttatgcttcatttcatgtatttattctttgtataattatagcatacatgttatgtaatataacttatgaaaagtacagtgaattttgctttattgcaaagctttaaatataaatttcagagtgcttcagtaaaaagctactatatattgttgtttgttattgtgtaggtaatattttcaattatgaaagtgaaatgcaaatgtctgttatctaactacaaattgtcagatttcttaaaaggacactgtcaggcaaatttgaaaatatacacattgagaataattttttattattatatcctattttaatattaacagctattatgaacaaaatttttcctgttaaatagcgacttcagtattgtgttatgttttacagcgttaaaacaactatgaagatctgcagctattcttttacttaacatgcatatgtactacagagggatttttaaattaattgcaaaatgtgcattagctattgacttagagtgaattgccttttgtatcctgattcacaacacctattcctgttcagtattctttgtcttgaatagagaagtctatgttcgtaaagtcatataaaaggttataccactatttagtaaaaagttttagtttggtgctgttaataataatttgctaaaaggccttttagaatatttcataaagggttttaaaca

SEQ ID NO: 46059 - DNA, 1122 bp, Homo Sapiens
atggtgatgagtttccgggtgtctgagctccaggtgcttcttggctttgctggccggaacaagagtggacggaagcacgagctcctggccaaggctctgcacctcctgaagtccagctgtgcccctagtgtccagatgaagatcaaagagctttaccgacgacgctttccccggaagaccctggggccctctgatctctcccttctctctttgccccctggcacctctcctgtaggctcccctggtcctctagctcccattcccccaacgctgttggcccctggcaccctgctgggccccaagcgtgaggtggacatgcacccccctctgccccagcctgtgcaccctgatgtcaccatgaaaccattgcccttctatgaagtctatggggagctcatccggcccaccacccttgcatccacttctagccagcggtttgaggaagcgcactttacctttgccctcacaccccagcaagtgcagcagattcttacatccagagaggttctgccaggagccaaatgtgattataccatacaggtgcagctaaggttctgtctctgtgagaccagctgcccccaggaagattattttccccccaacctctttgtcaaggtcaatgggaaactgtgccccctgccgggttaccttcccccaaccaagaatggggccgagcccaagaggcccagccgccccatcaacatcacacccctggctcgactctcagccactgttcccaacaccattgtggtcaattggtcatctgagttcggacggaattactccttgtctgtgtacctggtgaggcagttgactgcaggaacccttctacaaaaactcagagcaaagggtatccggaacccagaccactcgcgggcactgatcaaggagaaattgactgctgaccctgacagtgaggtggccactacaagtctccgggtgtcactcatgtgcccggtggggaagatgcgcctgactgtcccttgtcgtgccctcacctgcgcccacctgcagagcttcgatgctgccctttatctacagatgaatgagaagaagcctacatggacatgtcctgtgtgtgacaagaaggctccctatgaatctcttatcattgatgggtag

SEQ ID NO: 46060 - DNA, 294 bp, Homo Sapiens
atggggctgcctactctggagttcagcgattcctacttggacagcccggatttcagggagcgcttgcagtgtcaggagattgaactggagcgaaccaacaagttcatcaaggagctcattaaggagggctctccgctcactggggcgttgaggacagtgcagaaattttcccagtcattacaagatttccaatttgaatgtattgataatgctgaaacagatgatgaaattagtattagtcagtcactaaaagaatttgcaagactactcattgcagcagaagaagaaaggtga

SEQ ID NO: 46061 - DNA, 1093 bp, Homo Sapiens
gctgcccgcacgccccgacgggagctgcgcccagcctcccctctggagtcggcgctccaggctgctgcccggccggtggccaaggccccagcaccaccgtccctcctgcagggcatccagcacctacccttccactgggcggctcctggttctggtcccggctggctcactcaggctgcctttggaccagattcttgaacttttccaccaaggatgttgctgctgtttgtagcgtcggatcctggaaaatcgctgtgttggggagcagcaggctctcccttgctcccccagggcctgggaaaatcaacccacctctgccccccgaccccagggctgtaacctggtgtctggtagccccactgtgataaaccgaagcccagcacagtttgggactcgccccgagttgacttatgcagcccccagaacagaggctgaaacccggcgcatcctggtgaagccacacccagccggcctggtcccaggccccgggcacggggtcccctccactcccatctgcttccctttcagagccggggctgagtcggcagggacgcaggctcagggccctggattcccgctttctggacacttgcgtgcatgcccagcaccagctcgcccttctgagaaagcaatccctcctcagaggggagaagccgtggctgtgatgggcaggaagtggtcaggacccactgccgagcaccaactccccatgccaccaccaggggtgcgcctggactcctggaaaggggtcgcgtcagggtgcagcccatcaaaggcttcccaagaggcaagaggcaaggagaagtgtcctactttaaacggccagcctcagtggtcggccctgttcactctgccacctcagagagagtgaacccagcagaggtgtgacgggaggctggggagagaccccagcaccttgagcacacaggagccaggaggagcccaacagagcagcaggggctggggtcttctcctgaagcctgactccatgggaccccaaagaagcagatggaaaactgaaaaagaaaacccctcaagtgagccactggaaagaaagcaaaacaagagaaaataaatgagttgtttgacataa

SEQ ID NO: 46062 - DNA, 2557 bp, Homo Sapiens
aactcctctgtctctgctctcaggcttgttcacaaaaccctccatctcagcgcacccaagctccctggtgcatgcaggagccagggtgagcctgcgctgtcactcagaactggcctttgatgaatttatcttatacaaagaggggcacatacagcattcccagcagcttgaccaggggatggaggctgggatccattacgtcgaggctgtcttttccatgggtcctgtaacgcctgcccatgcaggagcctacagatgctgtggttgtttcagtcactcccgctatgagtggtcggctcccagtgaccccctggacattgtgatcacaggaaaatacaaaaagccttctctctccacccaggtggaccccatgatgaggctgggagagaagttgaccctcttctgcagctctgaaatctcatttgaccagtaccatctgttcagacacggggttgctcatggacagtggctcagtggagggcagagacacagggaagcattccaggccaacttttctgtgggccgtgcaacgccagtccctggcgggacctatagatgctatggttccttcaatgactctccctataagcccccagtgacccgctgcaactttacaccacaggaaacactaagagtactcctctgtcattcacagaatccacccctgaatctgacaccaccatggcaaacacagagcccacggaaggccaacggacggatgaagaggagcctgcagcagaagagacacaggagatcatatatgcccagttaaaccaccaggccctctcacagacaggattccctcctgcctcccagtgtccccactacctctcggaggatcctagtatctacatcactgtccaccaagcccaggctgaggccagagctgcccccagtctttggcacaaagggcattaatacgcaaggacctggatctattcctaggaggattttttttccacggacattcttcctccttctggtaccatcttgacacctcgaagctggcaacagcagtgtctgaatgcttgtgggattatcttaaaattccagcactgctgaacagacaactagccattctacaattctattttgagcatccaaccatttaaggtgatttgactctacccacacactcatcctggatatctcattaatatcatctgagttatcctgaaactctacagacatgcttctggaaagccgatgtatatgctcagccagtttaatctctaaattactcaataaggtttttttaaaaaaatttttttaaagttctggggtacatgctcaggatgtgcaggtttgttacgtaggtaaacgtgtgccatggtggtttgctgcacctatcaaaccgtcacctaggtattaagcccagcaggcattagctctcttccctaatgctctccataccccctgccctcctctgacaggccccagtgaatgtgttcccctccctgtgtccatgtgttctcattgttcagctcccacttataagtgaaaacatgcggtgtctggttttctgttcctgcattagtttgctgaggataatgtcttctagcttcattcatgtctctgcaaatgatatgatctcattcctttttatgactgcgtagtattccgtggtgtatatgtacaactttatttttatccagtctatcattgatgggcatttgggttgattccacgtctttgctgttactcaacaaaattttgcagagatgaagtgtattctatatctgagtcatctaatatggtagccactagccaaatatggctttttaacttagaattagaatagatcaaattccatgaagtttaaaattcagttcctcagccacatggccacaatttgagttctcagagccacgtgtggctgctggctgtgggagagaatagcatgaacacaaaatgttttccttgtcagaggaagttctagctgttctagattaaaggtgcaaatttgaagatgcagagcctattttctcatgcagtgcaggctcctggaagagacctaatgtaacaaaacgataatatttcacatcaatggtgacatgtctttatcttacgaaatgcggggaacaagcagagttctcttgtggagtgtcttatcacctcttatcctcatgcaaatttctgccatagagattttctcccaaactttgagaaggtcacctctgtcaggcctctgagcccaagctaagccatcctatcccctgtgacctgcacgtacacatccagatggcctgaagcaactgaagattcacaaaagaagtgaaaatagccttaactgatgacattccaccactgtgacttgttcccgccccactaactgataccatatattctgccccgcccaagaaggtactttgtaatattcctcgcccccttaccccccaccgccctgcccccgctcgcccgccttaagaaggtactttgtaatattctcccccacaactttagaaggtactttgtaatattctcccccacaactttagaaggtactttgtaatattctcccccacaactttagaaggtactttgtaatattctcccc

SEQ ID NO: 46063 - DNA, 1149 bp, Homo Sapiens
atggaccccaaaagatctcaaaaggaaagtgtcctcattacaggaggaagtggctattttggttttcgcctgggctgtgccctgaaccaaaatggagtccatgtgattctgtttgacatcagcagccctgctcaaaccattccagaaggaatcaagtttatacaaggagacatccgccacctgtctgacgtagagaaagccttccaggatgcagacgtcacttgtgtgttccatattgcctcttatggtatgtcagggcgggagcaactcaatcgaaacctgatcaaagaagtcaacgtcaggggcacagacaacatcctccaggtttgccaaaggagaagggtgcccaggttagtttacaccagcactttcaatgtcatctttggaggtcaagttatcagaaatggggatgaatctctgccctacctgcctcttcacctccaccctgatcactactctcggacaaagtcaattgcagagcagaaggtgctggaggcgaatgctacacccctggacagaggcgacggtgtcttaagaacctgcgctctgaggccagctggcatctatgggcctggagaacaaagacaccttcccaggatagtcagctacatcgagaagggtctgttcaagtttgtctacggggaccccaggagcctggttgagtttgtccacgtggataacttggtgcaggctcacattctggcctcagaagccctgagagctgacaagggccatattgcctctgggcagccctacttcatctcagatggcagacccgtgaacaactttgagttcttccggcctctggttgagggcctgggctacacattcccgtctacccgcctgccattgaccttggtctactgctttgcttttctaacagagatggttcacttcattttgggtcgactctacaacttccagcccttcctcactcgcactgaagtttacaaaactggtgtcacacattattttagcttagagaaagccaagaaagagctaggttataaggctcagccatttgacctccaggaagcagtggaatggtttaaagcccatggtcatggcagaagttctggaagtcgtgactcggagtgttttgtttgggatgggctattggtcttcctcctgattatagcagttctcatg

SEQ ID NO: 46064 - DNA, 3729 bp, Homo Sapiens
cggcgaacagacgttctttctcctccatgcagttacacaaaaggagggctacggaaactaaaagtttcggggcctctggctcggtgcgtggagaaaagagaaaacctggagacgggatatgaagatcaatgatgcagactgatggttttgatgaagctgggcatttataactagattcattaaggaatacaaagaaaatacttaaagggatcaataatggtgtcttctggttgcagaatgcgaagtctgtggtttatcattgtaatcagcttcttaccaaatacagaaggtttcagcagagcagctttaccatttgggctggtgaggcgagaattatcctgtgaaggttattctatagatctgcgatgcccgggcagtgatgtcatcatgattgagagcgctaactatggtcggacggatgacaagatttgtgatgctgacccatttcagatggagaatacagactgctacctccccgatgccttcaaaattatgactcaaaggtgcaacaatcgaacacagtgtatagtagttactgggtcagatgtgtttcctgatccatgtcctggaacatacaaataccttgaagtccaatatgaatgtgtcccttacatttttgtgtgtcctgggaccttgaaagcaattgtggactcaccatgtatatatgaagctgaacaaaaggcgggtgcttggtgcaaggaccctcttcaggctgcagataaaatttatttcatgccctggactccctatcgtaccgatactttaatagaatatgcttctttagaagatttccaaaatagtcgccaaacaacaacatataaacttccaaatcgagtagatggtactggatttgtggtgtatgatggtgctgtcttctttaacaaagaaagaacgaggaatattgtgaaatttgacttgaggactagaattaagagtggcgaggccataattaactatgccaactaccatgatacctcaccatacagatggggaggaaagactgatatcgacctagcagttgatgaaaatggtttatgggtcatttacgccactgaacagaacaatggaatgatagttattagccagctgaatccatacactcttcgatttgaagcaacgtgggagactgtatacgacaaacgtgccgcatcaaatgcttttatgatatgcggagtcctctatgtggttaggtcagtttatcaagacaatgaaagtgaaacaggcaagaactcaattgattacatttataatacccgattaaaccgaggagaatatgtagatgttcccttccccaaccagtatcagtatattgctgcagtggattacaatccaagagataaccaactttacgtgtggaacaataacttcattttacgatattctctggagtttggtccacctgatcctgcccaagtgcctaccacagctgtgacaataacttcttcagctgagctgttcaaaaccataatatcaaccacaagcactacttcacagaaaggccccatgagcacaactgtagctggatcacaggaaggaagcaaagggacaaaaccacctccagcagtttctacaaccaaaattccacctataacaaatatttttcccctgccagagagattctgtgaagcattagactccaaggggataaagtggcctcagacacaaaggggaatgatggttgaacgaccatgccctaagggaacaagaggaactgcctcatatctctgcatgatttccactggaacatggaaccctaagggccccgatcttagcaactgtacctcacactgggtgaatcagctggctcagaagatcagaagcggagaaaatgctgctagtcttgccaatgaactggctaaacataccaaagggccagtgtttgctggggatgtaagttcttcagtgagattgatggagcagttggtggacatccttgatgcacagctgcaggaactgaaacctagtgaaaaagattcagctggacggagttataacaaggcaattgttgacacagtggacaaccttctgagacccgaagctttggaatcatggaaacatatgaattcttctgaacaagcacatactgcaacaatgttactcgatacattggaagaaggagcttttgtcctagctgacaatcttttagaaccaacaagggtctcaatgcccacagaaaatattgtcctggaagttgccgtactcagtacagaaggacagatccaagactttaaatttcctctgggcatcaaaggagcaggcagctcaatccaactgtccgcaaataccgtcaaacagaacagcaggaatgggcttgcaaagttggtgttcatcatttaccggagcctgggacagttccttagtacagaaaatgcaaccattaaactgggtgctgattttattggtcgtaatagcaccattgcagtgaactctcacgtcatttcagtttcaatcaataaagagtccagccgagtatacctgactgatcctgtgctttttaccctgccacacattgatcctgacaattatttcaatgcaaactgctccttctggaactactcagagagaactatgatgggatattggtctacccagggctgcaagctggttgacactaataaaactcgaacaacgtgtgcatgcagccacctaaccaattttgcaattctcatggcccacagggaaattgcatataaagatggcgttcatgaattacttcttacagtcatcacctgggtgggaattgtcatttcccttgtttgcctggctatctgcatcttcaccttctgctttttccgtggcctacagagtgaccgaaatactattcacaagaacctttgtatcaaccttttcattgctgaatttattttcctaataggcattgataagacaaaatatgcgattgcatgcccaatatttgcaggacttctacactttttctttttggcagcttttgcttggatgtgcctagaaggtgtgcagctctacctaatgttagttgaagtttttgaaagtgaatattcaaggaaaaaatattactatgttgctggttacttgtttcctgccacagtggttggagtttcagctgctattgactataagagctatggaacagaaaaagcttgctggcttcatgttgataactactttatatggagcttcattggacctgttaccttcattattctgctaaatattatcttcttggtgatcacattgtgcaaaatggtgaagcattcaaacactttgaaaccagattctagcaggttggaaaacattaagtcttgggtgcttggcgctttcgctcttctgtgtcttcttggcctcacctggtcctttgggttgctttttattaatgaggagactattgtgatggcatatctcttcactatatttaatgctttccagggagtgttcattttcatctttcactgtgctctccaaaagaaagtacgaaaagaatatggcaagtgcttcagacactcatactgctgtggaggcctcccaactgagagtccccacagttcagtgaaggcatcaaccaccagaaccagtgctcgctattcctctggcacacagagtcgtataagaagaatgtggaatgatactgtgagaaaacaatcagaatcttcttttatctcaggtgacatcaatagcacttcaacacttaatcaaggactgacatcacatggtctgagagcccatcttcaagatttatatcatttagaggta

SEQ ID NO: 46065 - DNA, 705 bp, Homo Sapiens
atgaagctgagcatctccttcccagccactgacagccggaaactcattgaagaggaactcaaacttcgtactttttatgagaagcctatggccacagaagtagctgctgattctctgggtgaagaatggaaggattatgtggcccaaatcagtggtgagaactacaaacaaggtttccccatgaagaagggtgtcatgacccatggccgtgtccgcctgctactgagtaaggtcctcttacagaccaaggagaactggagaaagaaagaaagaaaatcagtttgtgattgcattgtggatgccaatcttagcattctcaacttggttattgtaaaaaagggagagaaagatattcctggacagactgatactacggtgcctcattgcctggggctccaaagagctagcagaatcctcaaacttttcaatctctctaaagaaaatgatgtccaccagtatgttgtaagaaagcccttaaacaaagaaggtaagaaacctaggaccaaagcacccaagattcagcatcttgttactccacatgtcctgcagcacaatcggcggtgtattgctctgaagaagcagcgtactaagaaaaataaggaagaggctgcagaatacactaaacttttggccaagagcatgaaggaggctaaagagaagccccagaaacaaattgccaagagatgcagactttcctctctgtga

SEQ ID NO: 46066 - DNA, 3214 bp, Homo Sapiens
gagctcaatccctgggcagggaaaagggggtcctcggggctccccgctcgctgtcctttttctggacaggcagttccttggccacctggtagggccgcgttgcctggcaacggcggggtccttcttggctcggcggcgctcggggcctgaggggagaaaaccgccgcggagggcgctgggggtggcggcggcggtccgggaggtggtcgcgcgactgcgtggagcgccagggcgtccgacctctgcacctgagagaagatgaacacggccgaccaggcccgggtggggcccgcggacgacgggcctgcgccgtctggggaggaggagggagaggggggcggcgaggcgggcgggaaggagccagcagcggacgcggccccggggcccagcgctgcattccgcctcatggtgactcggcgggagccggccgtgaagctgcagtatgcggtgagcggcctggaaccgctggcttggtccgaggaccaccgcgtgtctgtgtccacggcccgcagcatcgctgtgctggagctcatctgcgacgtgcacaacccgggccaggacctggttatccaccgcacctcggtgcccgcaccgctcaacagctgtctcctcaaagttggctcaaaaacagaagttgctgagtgcaaggagaaattcgccgcctccaaggaccccacggtcagtcagactttcatgttggatagggtgttcaaccctgaggggaaggctttaccaccaatgagaggattcaagtacaccagctggtctcccatgggttgcgatgctaatggcaggtgcctcttggcagcactgaccatggacaatcgcctgaccatccaggcaaatctcaacagactgcagtgggtccagctggttgacctgactgagatctatggagaacgtctttatgagaccagttacaggctctctaaaaatgaggccccggaaggaaatctcggggattttgctgagtttcagaggagacacagcatgcagaccccagtcagaatggagtggtcgggcatctgtaccacccagcaggtcaagcataacaacgaatgccgggacgttggcagtgtgctcctggctgtcctctttgaaaacggtaatatcgccgtgtggcagtttcagctgccgtttgtaggaaaagaatccatctcttcatgcaacacaattgagtcaggaatcacctctcccagtgtattgttttggtgggaatatgagcacaataatcgaaaaatgagtggccttattgtggggagtgcttttggacccataaaaattcttcctgtcaatctcaaagcagtcaaaggctatttcactttaaggcagcctgttatcttgtggaaagaaatggaccagttacctgtgcacagtatcaaatgtgtgccactttatcatccttaccagaagtgtagttgcagcttagtagtggctgcaagaggctcttatgtattttggtgtcttcttctgatctccaaagcagggctgaatgttcacaattcccatgtcacaggccttcactcactgccaattgtctccatgactgcagacaaacagaatggaacagtctatacttgctccagtgacggaaaggtgaggcagctgattcccattttcacagatgttgcattgaagtttgaacaccagttgattaaactctcagatgtgtttggctcagtgaggactcacgggatagcagtgagcccctgcggtgcatacctggccatcatcaccactgagggcatgatcaacggcctccaccctgttaacaaaaactaccaggtccaatttgttactctcaaaacctttgaagaggcagctgctcagctcctggaatcttcagttcaaaacctttttaagcaggtagatttaatagacctagtacgctggaagattttaaaagataaacatatccctcaatttttacaagaagctttggaaaaaaagattgaaagcagtggagtcacctatttttggcgttttaagcttttcctcctgaggattttatatcagtcaatgcagaaaaccccttcagaagccttgtggaaacccacccatgaggactcaaaaatcttactagtggattcgcctgggatgggcaatgctgacgatgaacagcaggaagaaggcacttcttccaaacaggtggtgaagcaaggcctgcaggagaggagcaaggaaggagatgtagaggagcccactgatgactcgctccccacgactggagatgctggaggccgtgagccaatggaagagaaactcctggaaatccaagggaaaatcgaagctgtggagatgcacttgaccagggaacacatgaagcgagtcttaggagaagtgtatctgcacacctggatcacagaaaacactagcatccccacccgcggactctgtaactttttaatgtctgatgaagagtatgatgacagaactgcacgggtgctgattggacatatctcaaagaagatgaacaaacagactttccctgagcactgtagtttgtgtaaagagatcttgccattcacagatcgcaaacaggcagtctgttccaatggccacatttggctccggtgcttcttaacctaccagtcctgccagagtttgatatatagaaggtgtttgctccatgacagcattgcccggcatccagctccagaagatcccgactggattaagaggttactgcaaagcccctgccctttctgtgattctcctgtcttctaaataatcagtgacgggaagatggaagggcatgatgaactctgccatagaaaacttcctccagcctgaagagaaggatgcactggaggaagccggaccctcacgagtggagagaagtccttggtgattgtaaagagggcccctggagctcatttctgaatcgcactctccatttccagagactaaaggatgtcctttgaaatggctggactcagagagttggagtcgttttgagatgagcattagccccagctttgtaaccaatgaggaacacttacttatttttaagtatcttgacagaagcaatttgaacacagtgtcccgtcatttctagaaacagaatggtctcttctagagagcttggataaggaccttgctgggttgagttaggttttaatccttgctttggtttggaactgccttcgggctccagaacttaaattgcttggtccgtggcatctgatgtaccaacagagattaaaagtgtaaa

SEQ ID NO: 46067 - DNA, 1177 bp, Homo Sapiens
atatgaggaatataaggaagttgaggaacatccacctctgtcttccagtcctgttgaacatgaaggagttttaaagggacagaaatcctatcgatgtgatgaatgtggcaaagctttttattggagttcgcacctcattggtcatcggagaatccacactggagagaaaccctatgagtgtaatgagtgtgggaagaccttcaggcaaacctcccagctcattgttcatctcagaacccacacaggggaaaagccctatgaatgcagtgagtgtggaaaggcctataggcacagctcccatctcattcaacaccagagactccataatggggagaaaccctataaatgtaatgaatgtgcaaaagcttttaatcagagctccaaactcttcgaccaccagagaacccatactggggagaaaccttatgaatgtaaggagtgtggggcggcctttagtcggagtaaaaatcttgttcgacatcagtttctgcacactggtaagaaaccttataagtgtaatgaatgtgggagagcattctgttccaatagaaatctcattgaccatcagagaacccacactggggagaagccttataaatgtaatgaatgtggcaaagccttcagtcggagtaaatgtcttattcgacatcagagcctccacactggggaaaagccatacaaatgtagtgaatgtgggaaagccttcaatcagatctctcaacttgttgaacatgagcgaattcatactggagaaaaaccatttaagtgtagtgagtgtggtaaggcattcggtctgagtaaatgtcttattcggcaccagaggcttcacacaagtgaaaagccctataaatgcaatgagtgtggaaaatccttcaatcaaaactcatacctcattatacaccagagaattcacactggtgagaaaccctatgaatgtaatgagtgtgggaaggtcttcagttataattctagtcttatggtacatcagagaacccatactggggaaaaaccctataaatgcaatagttgtgggaaagcctttagtgacagctcacagcttactgtgcaccagagagtccacactggagagccttatgaatgtattgagtgtgggaaagcctttagtcagcgttccacttttaatcaccaccagcgaactcatgctggagagaagccc

SEQ ID NO: 46068 - DNA, 1209 bp, Homo Sapiens
atggacctggagcagcagcggcagcttgtgagcaccctggagaagaagcagcgcaagtttgaccagcttctggcagaggagaaggcagctgtacttcgggcagtggaggaacgtgagcgggccgaggcagagggccgggagcgtgaggctcgggccctgtcactgacacgggcactggaggaggagcaggaggcacgtgaggagctggagcggcagaaccgggccctgcgggctgagctggaggcactgctgagcagcaaggatgacgtcggcaagagcgtgcatgagctggaacgagcctgccgggtagcagaacaggcagccaatgatctgcgagcacaggtgacagaactggaggatgagctgacagcggccgaggatgccaagctgcgtctggaggtgactgtgcaggctctcaagactcagcatgagcgtgacctgcagggccgtgatgaggctggtgaagagaggcggaggcagctggccaagcagctgagagatgcagaggtggagcgggatgaggagcggaagcagcgcactctggccgtggctgcccgcaagaagctggagggagagctggaggagctgaaggctcagatggcctctgccggccagggcaaggaggaggcggtgaagcagcttcgcaagatgcaggcccagatgaaggagctatggcgggaggtggaggagacacgcacctcccgggaggagatcttctcccagaatcgggaaagtgaaaagcgcctcaagggcctggaggctgaggtgctgcggctgcaggaggaactggccgcctcggaccgtgctcggcggcaggcccagcaggaccgggatgagatggcagatgaggtggccaatggtaaccttagcaaggcagccattctggaggagaagcgtcagctggaggggcgcctggggcagttggaggaagagctggaggaggagcagagcaactcggagctgctcaatgaccgctaccgcaagctgctcctgcaggtagagtcactgaccacagagctgtcagctgagcgcagtttctcagccaaggcagagagcgggcggcagcagctggaacggcagatccaggagctacggggacgcctgggtgaggaggatgctggggcccgtgcccgccacaagatgaccattgctgcccttgagtctaagttggcccaggctgaggagcagctagagcaagagaccaggtag

SEQ ID NO: 46069 - DNA, 408 bp, Homo Sapiens
ttttttttacaccagcaaggaacatttgaaaaggaaattggaaaaataattccatttaccatagcatttaagagagctgaggctgtggagccagatggctgcgttcagagctggcgctgctgtttaccatgtgaccttggacaagcttctcgcttcattcataccacagtttgttcggctattaggtggaggagctgtaagggggagaggaactttgctgaaaggcacatcctccctgcagagcttgaagaacaatctaaccatgctggcatggggcccatcctacctgcaatgccaagtgttgatgggaaccattttcagcatcctgctggtgactgtcatccttatggcattttgtgtctacaagcccattcggcgtcggtgacagccagacaagttcttcaatga

SEQ ID NO: 46070 - DNA, 393 bp, Homo Sapiens
actgggcctgagaagacactcaccatgctgaaaagagaggagacctccagcatcatggacctgaccatcaggtacctctacaggcactttgaggaccaccaggaggagaagcactttgaggtgatcatcacctattttctgatggacccctctccctcaagttttttcctttcccttcaggtgtacaatgagcagatccaggacctcctggagcccaaggagccccttgccatctgtgaggatctgggcaaaggggtagtgatagaaggacttattttccaccaggcgggattgggcttaggggagatgctgaccagggggacccataactgcatgcggcattccactgatgccagtgcaactccctcccactcccatgccatcttccaggtg

SEQ ID NO: 46071 - DNA, 1335 bp, Homo Sapiens
agggttgtttaccagcaggacagagcccgggcgcaggcggcggatggagcggaacggctaggggtcttgagaagcaatggccacagaagcccctgtgaatatagcaccacctgagtgtagcactgttgtcagcacagcagttgacagcctcatttggcagccaaactcactaaatatgcacatgataaggcccaagtccgccaagggacggacaagaccgagtctgcagaaatcccagggcgtggaggtgtgcgctcatcatataccatctccgcctccagccattccctatgagttgccaagcagccaaaaaccaggagcctgtgcacccaaatctccaaaccagggagcttctgatgagatccctgagctgcagcagcaagtacccactggggcttcctcttctctcaataagtatccagtccttccttccatcaacagaaagaacctggaggaggaggctgtggaaaccgttgccaaaaaggccagctcactgcaactgagcagtatccgggctctttaccaagacgagacgggcaccatgaagacaagtgaagaagattccagagctcgagcttgtgccgtggagaggaaattcatcgtccgaaccaagaaacagggctcttccagggctggaaatctggaggaaccatcggaccaagaaccaaggttgctgcttgctgttagatcaccaacaggccaaaggtttgtacgccatttccggccaacagatgatttgcaaaccattgttgctgtggccgaacagaaaaacaaaacctcctaccgacactgcagcattgaaacaatggaggtgcccaggaggcgattttctgacctcaccaaatctctgcaagagtgcagaatcccccacaagtctgtgctgggcatctcactggaagatggggaagggtggccctgagtccacagccacccagctgaggtcctgggtctctgagcaaaggagcatgcttgggcgttgtggcctcttaggcagcctgtttcaagtgccatgtggacctggtgcagctgggaagcttgggactctcgtctgcactgcgtgtcctctgaagcagtgaagtctgtgcctatgccgagcgcgctaagaagtctcccttccagctgttccattctctccaccaccagcgtaactggcaagttaccaaggttgttcctgaaacagcagtgatcatgacttctcctttccagagttttgggtccttctgaattaatggtccttttcgaacaccggcttgcctttacagtgaactgtgattctctcgaagccaatgctttcctgtctgtatttgatgcaggattaaacacttcccagagagg

SEQ ID NO: 46072 - DNA, 402 bp, Homo Sapiens
ggacggcgaaggagactcgtttgggccacgaggcaaagcgaggccctgcgagccttcttggagcggaacccgtacccgggcatccccaccagagaacggctggcccagtccatcggaattccggagcccagcgtcaagatttggtttcagaatgagaggtcactccagctgaggcagcactggaggaaatctcggccctgtcctgggagatgcggcctgcaagaaggcaggcaaaagcggaccaccttcaccggatcccagaccgccctgctcctctgtgcctttgagaaggatcgctttcgaggcatcgccaccagggaagagctggccagagagaagggcctcccagagtccaggactgagatctggtttcagaatcgaagggccaggcacccgggacag

SEQ ID NO: 46073 - DNA, 447 bp, Homo Sapiens
atgcccccagttaaaagacacagaatggcaagctggataaagagtcaagacctatcagtgtgttgtattcaagagactcatctcatatgcaaagacacatataggctcaaaataaagggatggcagaaaatttaccaaacaaatggaaagcagaaaaaagcagaggttgcaatactagtttctgacaaaacagactttaaaccaacaaagatcaaaaaacacaaagaagggcattacataatggtaaaggattcaattcaacaagaagagctaactattctaaatatatatgcacccaataccggagcacccagactcataaaacaagttcttagagaccgacaaagagacttagattcccacacaataacagtgggagactttaacatgccgctttcaatattagatcatcaagacagaaaattaacaagaatattcaggacttga

SEQ ID NO: 46074 - DNA, 402 bp, Homo Sapiens
agcagcggcagcgcggtaggacctcgcgcagcgtccgcgggctccggggcgggggcgccagcggcgaagccccctccccggggaggcgggacctgggggagctcccgagccggggagcggcggcggccgggaacgatgcatcagaagctgctgaagagcgcgcattacatcgagctgggcagctaccagtactggccggtcctggtgccccgtggcatccgcctgtacacctacgagcagatccccgggtccctcaaggacaacccgtacatcaccgacggctaccgggcctacctgccgtccaggctgtgtatcaaaaggtctgtatgctttgctctgtgggctatcatcttttttcctgccatcggtcagaaaaaacatgtcgaagatggatggcattag

SEQ ID NO: 46075 - DNA, 1493 bp, Homo Sapiens
tagatcttcacagactggatgttaagcaagtggaaaggcagaacagcctccactcgcggtgcacggggaagagtgggcggcggacgtggttttgggcctgggacccaggtgttcctctaggcccagggcgggcatcgctgcccatccgtcccacaggtggttctgaggcgtctctcaacagccatatggcggacaccagaacccgggtgtaacagtgacccgtttctgtgtgggtccccactcccagggagggcaggagagcgccgggggcgtaacccccctcccccacgctggcaccagagtgtgagcagaatcggcttaaggcagctcccagtccccatcgcccccaaggtcgaaagaatcgggacaggaaatgggtcgggggaccgagtttgggccggaatgttcagagcgtgtccgtcctgctctttaaaggccctctctccatcccagaaccaaagccgagcgcccccagcgctcgctgcggtctcgcgcccgggtaacggccgatggccgcccccgtcccagccgcagccggggaggaaatcccgcgcctcggaagaggcgcttcgggctcgggcgggttccggaagccgaggggccgggagtaggtgggcgcataggggctcctgggaggcgggaccaagacgcgcgttaccgggaggccaggcccggcgctgcaccctccgcggcccggggcctgaggccgggctcccgcgacttcccggcccaaagcagcgcagcgcccgggcggcccagccccgcagcggccacagcagcatagccgggcgagcggatccagaggcccggggttccttcttgtgcgagtcggcgcggacgactgctagtccagccgttgggcgccgcctggatcccggcgcctggcccttaaagagacccggtcgcatttcatctcagcaagaggagaaatactcgaagggagaggttcgccgctggcagccagaagccttaccactgctaggacgctggcagaacgcacccataacttggcaacactcggaggatggatggcaaataataccagcgactgaagggttaattaatgattgcagattaattgaacaccttctgtaatcagacacctggcacacactcatgatgtcacttattcctcccaacaaccctgcaaatagataactgtctctcccattctccgagcttgtcctcagagaattaggtaacttgttcaaaatggtcagaagcaacagatataactccttgctctactctttccccccttctcactactgcacttgactagtctttttaaaacataaattttttggccaggcacggtggctcacgcctgtaatcccagcactttgggaggccaaggaaggcagatcacctgaggccagaagttcgagaccagccttggccaacatggcgaaaccccatcgctactaaaaatgcaaaaattagctgggtgtggtggggggcacccgtattcccagctactcaggaggctgagg

SEQ ID NO: 46076 - DNA, 1083 bp, Homo Sapiens
aacttcactcttgacccagctgatttctttttgaattgttgtgattgttgttcacctgtacccgggcagaaaggagaacctggagagactggacagccaggtcctaaaggagaggctggaaatttggggatcccagggccaccaggagttgttgggccccaaggccctagaggctacaaaggagagaaaggtgaacctggccctaagggagataaaggaaacattggtttgggaggagtgaaaggacaaaaaggctccaagggagacacatgtgggaattgtaccaaaggagaaaaaggagaccaaggggctatgggctcacctggcctgcacggagggcctggcgccaagggagagaagggggagatgggggagaagggggagatgggggataagggctgctgtggagattctggggagaggggaggaaaaggacagaaaggtgaggggggtatgaaaggggaaaaaggtagcaaaggagacagtggaatggaaggcaaaagcggccgtaatggtctgcctggggccaaaggtgatccagggattaaaggagaaaaaggagagttaggtcctcctggtctcctgggacctactgggccgaagggtgacattggcaacaaaggggtccgaggccccactgggaagaagggctctcggggctttaaaggctccaagggtgagttggctagagtgccccggtcggctttcagcgctggtttgtcaaagccatttcctcctcctaacatccccatcaaatttgaaaagattctctataatgaccaagggaattacagtcctgtcactgggaagtttaactgctctattcctgggacatatgttttttcctaccatattacggtgagggggcgacctgctcgaatcagtctggtggcccagaataagaagcagttcaagtccagagaaactctctatggtcaggaaatagaccaggcctctctcctcgtcatcttgaaattaagtgcaggagaccaagtctggcttgaggtgtcaaaagattggaatggggtgtatgtcagtgctgaggatgacagcatttttactgggttccttttgtacccagag

SEQ ID NO: 46077 - DNA, 1098 bp, Homo Sapiens
atggtaatcatgtccagccacccaaaaacctatcaacagaggtttgttttcccatactttgacctctggggcaatgtggtcattgacaagagctatctagaaaacttgccatcagattcacctattgtcaccatggctttcccaactctccaagccatccttgcccagggtatccaggaaaataattttgcagagagcttagtgatgacgaccactgtcagccataatgtgactatgccattcagcatttcaatgacttttaagaacaacagcccttcaggcggcgaaacaacatgtgtcttctggaacttcaggctttccaacaacggggggtgggacagcagtgggtgctatgttgaagaaggtgatggggacaatgtcacctgtatctgtgactacctaacatcattctccattctcaagtcccctgactccccagatcctggttctctcctgggaatactactggatattatttcttatgttggggtgggcttttccatcttcagcttggcggcctgtctagttgtggaaactgtggtgtggaaatcagtgaccaagaaccagacttcctatatgcgccacatctgcatagtgaatgttgctgcctcccttctggtcgccaacacctggttcattgtggtcgctgccatccaggacaatcactacatactctgcaagacagcctgtgtggctgccaccttcttcatccacttcttctacctcagcatcttcttctggatgctgacactgggcctcatgttgttctatcgcctggttttcattctgcacgaaacaagcagggctgccctacctgccatcttggtcatcatgctgggagccacccagccctgggaagtctatatgaggaagaatgtctgttggctcaactgggaggacaccaaggccctgctggcttttgccatcccagcactgatcattgtggtggtgaacataaccatcactattgtggtcatcaccaagatcctgaggccttccattggagacaagccatgcaagcaggagaagagcagcctgtttcagatcagcaagagcactggggtcctcacgccactctggggcctcacttggggtttt

SEQ ID NO: 46078 - DNA, 1062 bp, Homo Sapiens
ggcgttctcaaggccttggcggagtgcggcatccctgtggacatggtgggaggcacgtccatcggggccttcgtgggtgccctgtactctgaggagcggaactacagccagatgcggatccgggccaagcagtgggccgagggcatgacgtccttgatgaaggccgcgctggacctcacctaccccatcacgtccatgttctccggagccggcttcaacagcagcatcttcagcgtcttcaaggaccagcagatcgaggacctgtggattccttatttcgccatcaccaccgacatcacagcctcggccatgcgggtccacaccgacggctccctgtggtggtacgtgcgtgccagcatgtccctgtccggttacatgccccctctctgtgacccgaaggacggacacctgctgatggacgggggctacatcaacaacctcccagcggatgtggcccggtccatgggggcaaaagtggtgatcgccattgacgtgggcagccgagatgagacggacctcaccaactatggggatgcgctgtctgggtggtggctgctgtggaaacgctggaaccccttggccacgaaagtcaaggtgttgaacatggcagagattcagacgcgcctggcctacgtgtgttgcgtgcggcagctggaggtggtgaagagcagtgactactgcgagtacctgcgcccccccatcgacagctacagcaccctggacttcggcaagttcaacgagatctgcgaagtgggctaccagcacgggcgcacggtgtttgacatctggggccgcagcggcgtgctggagaagatgctccgcgaccagcaggggccgagcaagaagcccgcgagtgcggtcctcacctgtcccaacgcctccttcacggaccttgccgaaattgtgtctcgcattgagcccgccaagcccgccatggtggatgggaaaggctgtgggggccctcggaaggggacagccctcagcaaggtggtctctagcctcggtgagggcctccagctagagcatgggggctgcagagaaggcctcagagcctcttctgcc

SEQ ID NO: 46079 - DNA, 471 bp, Homo Sapiens
atgaaggtaatactttgtcttgagccaggggcaactaggatgcacaaaccccctctgcaaacagccagtgtacacaccctgcaaggaaggcgcgccacaggctgcaaagggagacacaggttcctccagcagcagtgggccatgggcaccgagcggggacacggggacgctgtagtggctctggggcctcaccctgcacttgcgtccgtccacggtctcctcctcaaagccttctccgaccttgaagttgatctcagtggtgcgcaccgtggtggatgtcttgatgtagaactgatccccgtcctggcggatctccacgtgcggcttggacgcagccgctacggccactttcctcagcatggcgttcacacctgcgcagggtgcaccacaggcttgggtcacggggcctcgccgccagtctcgggaccggtcgggcactggtcataccctaactttagaaaggggccttaa

SEQ ID NO: 46080 - DNA, 776 bp, Homo Sapiens
atgcgtgcgagccggtccccaccgtccccgcggcgttgtcaccatcatcatgaggccactggagcagcctcaggcgctgctgccggggggccgggcgcggggtgcgtcgggctctgcaggttggcactcacacccagcgcgcaggatggcaatagcacatttcaaacctacaagaaagaagtgtgcctcccccgtcattcgatgcaccctggcccctgggccatctgctgtgaatgccagaccagattcgggggccgcctgcctgtgtccagggtggaagcagcactgccttactgggtccctctgtccctgagaccccgaaagcagcacccctgctggatgcatgctgctggcacaactgctggcggatctgcggtgatgagtgcctgttgtccaagttccagcagctccaggccccctaccaggaccagctaccggctcctgcagcgcgtctgctgcccctcggcctcctgaccctcctccaggccatcccgagggtcatcatggccattcgccagtgttttggggtttgaagttggaatcttcagctactgtcaagaacagccacaaaaatgtgtcacgatcaagatctttgagagtccaccaatcaggaggcgtctgtgacagtcgctgtcttctcagaacagaatccacacccaggattcaacccaaatgatttctcatcaggtgattcttggttgtagcaaagttcatgtgaatgtgggtgagtttctgttatgaatgtggtcaataaatgttatttgtgaaactctaaa

SEQ ID NO: 46081 - DNA, 1303 bp, Homo Sapiens
ggggaaaagggggggaaagaaagaaagagaaaaaggagggcgagtggcgagcaggggcctcggccgccacccacacgccccgaagcgtgctcgtcccccgcgcggggctcccggccgccgccctcggccatcggctgctccccggtggcccaggcctcggactccgcggccggcccggcgcggcccagcgccctcagggatcatggcccaggtagcagtgtccaccctgcctgttgaagaagagtcctcctcagagaccaggatggtggtgacattcctcgtgtctgccctcgaatccatgtgtaaagaactggccaagtccaaggcagaagtggcctgcatcgcagtgtacgaaacagacgtgtttgtcgtcggaaccgagagaggatgcgcttttgttaatgccaggacggattttcagaaagattttgcaaaatactgcgttgcagagggactgtgtgaggtgaaacctccctgccctgtgaacgggatgcaggtccactcgggcgaaacggaaatactcaggaaggcagtggaggactatttctgcttttgttatggtaaagccttagggacaacagtgatggtgcctgttccctatgagaagatgctgcgagaccagtcggctgtggtagtgcaggggcttccggaaggcgttgcctttcaacaccctgagaattacgaccttgcaaccctgaaatggattttggagaacaaagcagggatttcattcatcataaataggtgacacactctgcacccccgccccttcagttcatttaaagatgaaaccaatagcctaattttaattcactcgtgcatcccgcctgctgcgtttcagagctgactgttcagatgtgtcatgcttttttcattggtccgtgctgggtaatggtgttgcttttcttgcagacccttcctaggaccagagagtcagctgggtaagtgacagcttctcaggtttggtggctcttctgagctgctgaaccacttcttcttcattaaaacttgaattgggggccgggcgtgatggctcacacctgtaatcccagcactttgggaggctgaggcaggtggatcacaaaggtcaggagatcgcgaccatcctggctaacacggtgaagcccagtctgtactaaaaatacaaaaaaaaattagccgggcgtggtggcgggcgcctgtagtcccagctactcgggtgtctgaggcaggagaatggcgtgaacccgggaggtggagcttgcagtgagcggagatcgcgccactgcactccagcctgggcgactgagcaagactccgtctc

SEQ ID NO: 46082 - DNA, 1635 bp, Homo Sapiens
ttgacattcagcgatgttgccatagacttctctcaggaggagtgggaatatttaaactcggatcagagggatttgtacagagatgtgatgttggagaattatactaacttggtctcattggactttaatttcacaactgaaagcaacaagttatcttcagaaaaaagaaattatgaagtaaatgcgtaccatcaggagacatggaaaagaaataaaaccttcaaccttatgaggtttattttcagaactgacccacagtacacaattgaatttgggagacaacagagacctaaagtgggatgttttagtcaaatgatattcaaaaaacataaatcccttcctctacataagagaaataacacaagagagaaatcatatgagtgtaaggaatataagaagggctttagaaaatatttgcaccttactgaacatctgagagaccatactggtgtgataccctatgaatgtaatgaatgtggaaaagcatttgtagttttccagcattttattagacatcgaaaaatccacactgatttgaaaccctatgaatgcaatggatgtgagaaggcctttaggttttattcacagcttattcagcatcagataattcatactggtatgaaaccctatgaatgtaagcaatgcgggaaggcttttagacgtcattctcaccttacagaacatcagaaaattcatgttggcttgaaaccctttgaatgtaaggaatgtggggaaacgtttagattatatcgacatatgtgtctgcatcagaaaattcatcatggtgtgaaaccctacaaatgtaaagaatgtggaaaggcttttggtcatcgttcaagtctttaccaacataagaaaattcattctggtgagaaaccatataaatgtgaacaatgtgaaaaggcctttgttcgcagctatctacttgttgaacatcaaagaagtcatactggtgagaaacctcatgaatgcatggaatgtggaaaggcttttggtaagggctcaagccttcttaaacataagagaattcatagtagtgagaaactctatgattgtaaggattgtggaaaggccttttgtagaggctctcaacttacacagcatcagagaattcatactggtgagaagccacatgaatgtaaagaatgtgggaagacttttaagcttcattcatatcttattcaacatcagataattcatactgatttgaagccatatgaatgtaagcaatgtgggaaagccttcagtcgtgttggagaccttaagacacatcaatcaattcatgctggggagaaaccctatgaatgtaaggaatgtggaaaaacctttagacttaattctcaactaatttatcatcagacaattcatactggtttgaaaccctatgtatgtaaagaatgtaagaaggcctttcgttctatctcaggtctttctcaacataagagaattcatactggtgaaaaaccctatgaatgtaaagaatgtgataaggcctttaatcgcagtgatcgacttactcaacatgagacaattcatactggtgtgaaaccacagaaatgcaaagaatgtggtaaggcctttagtcattgctatcaacttagtcaacatcaaagatttcaccatggtgagagactc

SEQ ID NO: 46083 - DNA, 1721 bp, Homo Sapiens
aggacaaaagatcgcagtggactgtgtgattgacctgacaagagctgagggagaaaatagacctattgccactcttgacttaactttagaacctgtcactccttcccagagggagccaaccagtcttcagacatgtgccagcctctctggcaaagcggtgatggaagggcaggtggacagaagctctcagcctacagcacggagactcattaacagtgatcctgtagatttggacctagtggaagaaaacacctttgtaggtcccccacccgctacatccatcagtggaggctctgtttatccaacagagcctaattgtagctcagccacattcacaggtaacctcagcttcttggcaagtctacagctgtcttcagatgttagctccctctccccaacaagcaataatagtagcagcagcagcagcaatcaaaaagtacccttgccatgcccacagcaagatgtgtctcgcccaccacaagccttgccttgcccactgagagcctcaccttgtccaccacgagccttgtcatgcccatcacaaaccatgcagtgcaaactaccagctctaactcaaccacctcaagaagtgccatgccctcggcagaatatcccaagcccacctcaagactcgttatggcatcctcaacactcaccaagcccacctcaagactctctgggcctacctcaagatgtgccaggcccgcctcaaagcatattacatccacaagatgtggcatacctgcaagacatgccacagtcaccaggagatgtgccacggtcaccaggaaccatgccaccatcaccagatgtgccacagtcaacaggagacatgctagggtcaccaggagatgtgccacagtcaccaagttatgtttcaccgtcaccagatgcaccacagtcaccagggggcatgccacacttaccgggagatgtgttacattcacctggagacatgccacactcatcaggggacgtgacacactcacctagagacatccctcacttaccaggagacaggcctgactttacccagaatgatgtacagaactgtgacatgcctatggatatctcagctgcgtcccctccaagctgctctcccagcccacagtctgaaactcccttagagaaagttccttggctctctgtcatggaaaccccagccagaaaagaaatatcactgtcagagcctgccaaacctgggtctgcccacgtacaatcacgaacaccacaaggtgggttgtacaacagaccatgcctgcatagactgaagtacttcttacgacctccggttcatcatctgttctttcagacgctaataccggataaagacacgagagaacaagggtcaaaaattagaacccatccctcatcgaagactaagaatggtaacaaataccattgaagagaattttcccctggggactgtgcagtttttgatggactttgtgtcaccccagcattacccaccaagagaaatcgtggctcacatcatccagaaaatcttgctcagtggctctgagactgtggatgtcctaaaggaggcctacatgcttctcatgaaaattcaacgggctacatccagccaatgccaagacagtggagtgggactggaaactgctcacctatgtcatggaggaagaggtaacaacaattataagattatatcttctgtaggggaagttttaactataaagaaaagtgataccaggtgccatggc

SEQ ID NO: 46084 - DNA, 207 bp, Homo Sapiens
atgtctacaaaacaactgctttgcaggaaaatccctgaccccctaagaatgatctctctcactgttccagacagtccattttataaggaagtgacatacctcctcatcagcactcccctcagtatacccaataatacaatcttaactccattattgagagtcaaaagacttgagacgttcaacttatttgagcctacatttccttaa

SEQ ID NO: 46085 - DNA, 639 bp, Homo Sapiens
ctgcggctgactgtggaggctggcgtcaatggcctgtgccgggtgttggacgagctgaccctggccaggactgacctggagatggagatggaaggcctgaaggaggagctggcctacctgaggaagaaccacgaggaggagatgcttgctctgcgaggtcagaccggtggagaagtgaacgtggagacggatgccgcacctggcgtggacctgagctgcatcctgaatgagatgcgcaaccagtacgagcagatggcaaagcacaaccacagagatgctgggcctgcatttctctatattgtctggcccatcagtaccccaactgggatcaaaatccaggcacctctcaaaaaacatgcccagagacctggagggacaggagtgaccacctccattgactctttttctctctctcacttgcagaaagcgtccctggagaacagcctggaggaaaccaaaggctgccactgcatgcagctgtcccagatccagggactgattggcagtgtggaggagcagctggcccagctacgctgtgagatggagcagcagagccgggagtaccagatcttgctggacatgaagacacggctggagcaggagatcgccacctaccgctgcctgctggagggcgaggac

SEQ ID NO: 46086 - DNA, 1626 bp, Homo Sapiens
atggcttcccaggagtttgaggttgaagctattgttgacaaaagacaggataaaaatgggaatacacagtatttggttcggtggaaaggttatgacaaacaggatgacacttgggaaccagagcagcacctcatgaactgtgaaaaatgtgtacatgattttaatagacgacagactgaaaaacagaaaaaactgacatggactacaaccagtagaattttttcaaacaatgccagaagaagaacttccagatctacaaaagcaaactattctaagaactctcctaaaactccagtgactgataaacaccacaggtccaaaaactgcaagttatttgctgccagcaagaacgttaggagaaaggcagcttcaactctctccgacacaaagaatatggagataataaattcaactattgagacccttgcacctgacagcccctttgaccacaagaaaactgtgagtggctttcagaaacttgagaaactggaccctattgcagcagatcagcaggacacggtggtcttcaaggtgacagaagggaaactcctccgggaccctttgtcacatcctggtgcagaacagactggaatacagaacaagactcagatgcacccactaatgtcgcagatgtctggctcagttactgcttctatggccacaggttcagctacccgaaagggtatagtggtattaatagacccattagcagccaatgggacaacagacatgcatacctcagttccaagagtgaaaggtgggcaaagaaatattactgatgacagcagaggccagccttttatcaagaagatgcacttcaccataaggctaacagaaagtgccatcacatacagagacattgtagtgaagaaagaggatggattcacccagatagtgctatcaactagatcgacagaaaaaaatgcactgaatacagaagtaattaaagaaatggttaatgctctgaatagcgctgctgcagatgacagcaagctcgtgctgttcagtgcagctggaagtgtcttttgctgcggtcttgattttgggtactttgtgaggcacttaaggaatgacagaaacacagcaagccttgaaatggtggacaccatcaagaactttgtgaatacttttattcaatttaaaaagcctattgttgtatcagtcaatggccctgccattggactaggtgcatccatcctgcctctttgtgatctcgtgtgggctaatgaaaaggcttggttccaaaccccttatacgacctttggacagagtccagatggctgttcttctattacattccccaaaatgatgggtaaagcatctgccaatgaaatgttaattgctgggcgaaagctgacagcacgggaggcatgcgccaaaggcctggtctctcaggtatttttgactggaactttcacccaagaggttatgattcaaattaaggagcttgcctcatacaatgcaattgtactggaagaatgtaaggccctcgttcgctgtaatattaagttggagttggaacaggccaatgagagagagtgtgaggtgctgaggaagatctggagctcagcccaagggatagaatccatgttaaagtatgttgaaaataaaattgatgagttttaa

SEQ ID NO: 46087 - DNA, 2949 bp, Homo Sapiens
gtatatttaaagttggagttcgttgctaaagatggcagacccagatgtcctcactgaagttccagcagcattgaagcggttagccaagtatgtgatccggggattttatggcattgagcatgccttggccttggacatcttgatcaggaactcctgtgtgaaagaggaggatatgctggagctgctcaagtttgatcggaagcaacttcgatcagttttgaataatttaaagggagacaagtttatcaaatgcagaatgagggtagagactgctgcagacgggaaaaccactcgccataactactacttcatcaattatcgtactcttgttaatgtggtaaaatataaactggaccacatgagaagaagaattgagaccgatgagagagattcgaccaaccgggcttccttcaaatgtcctgtctgtagtagtactttcacagacttagaagctaatcagctctttgatcctatgacaggaactttccgctgtactttttgccatacagaggtagaagaggatgaatcagcaatgcccaaaaaagatgcacgcacacttttggcaaggtttaatgaacaaattgagcccatttatgcattgcttcgggagacagaggatgtgaacttggcctatgaaatacttgagccagaacccacagaaatcccagccctgaaacagagcaaggaccatgcagcaactactgctggagctgctagcctagcaggtgggcaccaccgggaagcatgggccaccaaaggtccttcctatgaagacttatacactcagaatgttgtcattaacatggatgaccaagaagatcttcatcgagcctcactggaagggaaatctgccaaagagaggcctatttggttgagagaaagcactgtccaaggggcatatggttctgaagatatgaaagaagggggcatagatatggacgcatttcaggagcgtgaggaaggccatgctgggcctgatgacaacgaagaggtcatgcgagcactgctcattcacgagaaaaagacttcctctgccatggctggttcagtgggggcagctgctccagtgaccgctgccaatggcagtgactcagaaagcgagaccagtgagtcagatgatgattctccaccccgtccggcagctgtggctgtgcataaacgagaagaggatgaagaggaagatgacgagtttgaagaagtagcagatgaccccattgtcatggtggctggccgtccgttctcctacagtgaagtgagccaacggccagagctagtggcccagatgacaccagaagaaaaggaagcatatatagcaatgggacaacgcatgtttgaggacctctttgagtgagctttccctaattctttctcctttctctaatgctcagttcaaaaaggaatgtctcatctttgaagaaaagtatttaagtggctttctgcccctcttgatgtaagcaactgtccatccttgtgcaaagattgatggtagagagtttgacttttatgccagaaactttcccagcaaggtagggtgctgagaatcctacccttccttgctgtcactacagtattaatattttactgtattttcttttcttttttttttttttttggagatgaagtctcactcttgtaccccaggctggagtgcaatggcgtgatctcggctcactgcaacctctgcctcctgggttcaagcgattctcctgcctcagcctcccgagtagctgggattacaggtgcctgccaccatgcctggctaatttttgtatttttagtagaggcagggtttcaccatgttagccaggatgatctcgatctcctgacctcatgatccacccgcctcggcctcccaaagtgctgtattttcttatctgatttttttcttgccttattaagacataattttctcccttctgaaatgagtgagggaagttcataaggtaaatccttcccatccatctgtttactacaataggttacaataattcactgatcacatccattttatctgttctagccaggcattccaaacaatttcttatactgctgcccaccaaagcagcttgccaacagtcaaatcactgattgggggaaaaaatcctgaaattttgcttagaatttgagcatttcctcaaaattgagatggatcaatatgtaaggggaggtgggagcgtgtgtggaagggggagagatatacttgagtcttatgattaatgtctaaaccagaatttgtgtctttagaactgaccagactggtagattttattgtattgcttaatgtcttttggtttggatttaggatgatagaaaacagaagtataattggtaaacccttaggaagaaattagaaaaacatggacgtaagacaagaagtctctgtgaagggttgaagagtgacaagcattggtaacagtgccttagaactgtgtcagttagtctgatttggaaatcctttatgtaaagctgagactggtcctggttttgttccctttgggtacagacctcttgtcagtgctataaattgtttaatgaggccattccagcagaaatcaacagaataattgattactcttctctctctctgtcactctccctctttctaaacatcattgaaggctgtctctcttttaatttttgtcagacacagtattttagggtgcatccagtataccattgagcattgtaacctcaggaaacagtttattttgggttctgatatgtagcatggtattttccctaaggcagaactttaaaaataaagaactttcacacaagggtctgtaacaattgtatatcttacaatatttttccttgcattgtaatttttaagtatttatcattttatagtacacatgtaaagaatatatgagccttgtatggagtgatgtttcatttacctgggttgtgttaatgactgaatgttgacaataaatctgttttatactg

SEQ ID NO: 46088 - DNA, 471 bp, Homo Sapiens
ctgtgcaaatctaaactcttattcctgggagagcagagcgtagggaagacatccatcatcagccgcttcatgtacaacagcttcggctgcgcctgccaggcaactgttggaattgacttcttgtctaagaccatgtacttggaggaccaaatagttcagctgcagctatgggacacagctggccaggagcgctttcacagcctaattcctagctacattcgtgattcaactattgcagtggttgtctatgacattacaaacatcaattcttttaaggagacagataagtgggtagaacacgtgcgagcagaaagaggtgacgatgttgtcatcatgttgttgggtaacaagattgatttggataacaaaagacaagtcactgcagaacagggtgaagaaaaatccagaaacctcaatgtgatgtttattgagaccagtgccaaaaccggttacaacgtgaaaaaggtaata

SEQ ID NO: 46089 - DNA, 1359 bp, Homo Sapiens
atggacgagtcgtcgctgctggacctgctggagtgctccgtgtgtctggagcgcctggacaccacggccaaggtgctgccatgccaacacactttctgccgccgctgcctggagagcatcgtgtgctcgcgccacgagctgcgctgccccgagtgccgcatcctggtgggctgcggcgtggacgaactgcccgccaacatcttgctggtgcgactgctggacggcatccagacaatgcaatgggtgggaaggggaggacacagaaagcccctgagaagccccggcctgccccggcagatccactgtggggcattgggaaggggcatgcccggtgaccacatgctgtctgttgcttgcagaatccctctgcttccctatggcaaggccctctacagctacgaggggaaggaacctggtgacctcaagttcaacaagggggacatcatcgtcctgcggcgcaaggtggatgaacagtggtaccacggcgagctgcacggcacacagggcttcctcccagccagctatatccagtgcatccagcccttgccacacgccccgccccagggaaaagcactttatgatttcgagatgaaggacaaagaccaagacaaggactgtctgaccttcaccaaggacgagattctgacggtgctcaggagagtggatgagaactgggcggaaggcatgctgggagacaagatcgggatcttcccgctcctgtacgtggagctcaatgactccgccaagcagctcattgagatggacaagccatgcccagccgctgcatccagctgcaatgcctccctgccctctgactccggcgctgtggccagcgtggccccaagtcccactttaagcagctcaggggcggtcagtgcctttcagcggcgtgtggatggcaagaagaacaccaagaaacgccactccttcaccgcgctcagtgtgacgcacagatcctcccaggctgccagccacaggcattccatggaaattagtgctccagtgttgatcagctccagcgatccccgagccgcggccaggattggagaccttgctcatctgtcgtgcgctgctcccacccaggtaacatcccgcgggccagggcaggcatccctgggttctctggggttctatcctcagctccgagggctcccactgacactggccccatgctttgcccgcaggtacctggcgctctacgcctacaagccccagaagagtgacgagctggagctgcacaagggagagatgtaccgggtcctcgagaagtgtcaggatggctggttcaagggggcgtctctgaggaccggggtctctggggtgttccccggaaactacgtgacacccgtttccaggtga

SEQ ID NO: 46090 - DNA, 1557 bp, Homo Sapiens
atgtgggactgggcaccaacaacatctctacaagaggtgaacaagacggtcctggtctttgccctcacgcagcacacggaccagggtggtagaccagagtgtgccctcagtgttatttccactaataacgacgtttcctcctctgtccttcgcagaaccaaatctgtttcttccatgtctgagtttgaaagtttgctcgactgttccccttaccttgctggcggagatgcccggggcaagaagctgcctaacaaccctgcctttggctttgtgagctccgagccaggggatccagagaaagacaccaaggagaagcctgggctctcgtcgagggactgcaaccacctgggtgccctggcctgccaggaccccccagggaggcagatgcagcgcagctacacggctcctgacaagacgggcatccgagtctactatagtcccccggtggcccggcgcctcggagtccctgtggttcatgacaaagagggcaagatcattatcgagcccggcttcctcttcaccacagccaagcccaaagagtcggccgaggctgatgggctggctgagagctcctatggtcggtggctctgcaacttctcacggcagcgcctggacggaggctcagcgggcagcccctcggcggccgggcctggcttcccagcggccctgcatgactttgagatgtcaggcaacatgagtgatgacatgaaggagatcaccaactgtgtgcgccaggccatgcgctccggctcactggagaggaaagtgaagagcacatccagccagacggtgggcctggccagtgtgggcacacagaccatccgcacggtcagcgtgggcctgcagaccgacccaccccgcagcagcctccatggcaaggcctggtcaccccgcagctcttcgctcgtgtctgtgcgcagcaagcagatctcctcctccctggacaaggtccattcgcgcatcgagcggccctgctgctcccccaagtatggctcaccaaagctccagaggcggtctgtgtccaagctggacagcagcaaggaccgcagcctgtggaacctgcaccagggcaagcagaacggctcggcctgggcccgctccaccaccacgcgggacagccctgtattgagaaacatcaacgatggactctccagcctcttcagtgtggtggagcactcagggagcacggagtctgtctggaaactaggcatgtctgagacgcgggccaagcccgagcctcccaagtacggcattgtgcaggaattcttccgtaatgtgtgtggccgggcaccgagccccacctcatcagcaggagaggagggcaccaagaagccagagcccctctccccagccagctaccatcagccagagggtgtggccaggatcctgaacaagaaggcagccaagttgggcagcagtgaggaggtcagactcaccatgctcccccaggtggggaaggatggtgtcctccgggacggagatggagccgtggtccttcccaatgaggtaggtgggtgggatctgtcctttctcttagtaggtggagttagtatataa

SEQ ID NO: 46091 - DNA, 603 bp, Homo Sapiens
tcggggaccttgtctgtcaccattgatggccccaccaaggtgcagctggactgttgggagtgtcctgagggccacgtggtcactgacactcccatggcccctggcaactacctcattgccatcaagtacggtggcccccagcacatcgtgggcagccccttcaaggccaaggtcactggtccgaggctgtccggaggccacagccttcacgaaacatccacggttctggtggagactgtgaccaagtcctcctcaagccggggctccagctacaactccatccccaagttctcctcagatgccagcaaggtggtgactcggggccctgggctgtcccaggccttcgtgggccagaagaactccttcaccgtggactgcagcaaagcaggcaggtggcggggggagggcgtctcccggggcaccaacatgatgatggtgggcgtgcacggccccaagaccccctgtgaggaggtgtacgtgaagcacatggggaaccgggtgtacaatgtcacctacactgtcaaggagaaagactacatccttatcgtcaagtggggtgacgaaagtgtccctggaagccccttcaaagtcaaggtcccttga

SEQ ID NO: 46092 - DNA, 1218 bp, Homo Sapiens
gattttctcaaaaaaaagaaaaaaaaaaagagaagaaaaaagttgaattcacagaagcagagtagaatgatggttgccagggtggggaagtgggcagatgccaaaggacacagaatgtcatttttagagaagaagaataagttcaggagatccatgggacaacaaggtacctatagttaataacaacatatcatacacttggaaatcactaagagagtagattgtttaagtgttctcaccccaaaaagtaagtctgggaggtgatatgttatttagcttgatttagccatttcataatgtatacatacctcaatcacatcatgttgtataccctcttgtacataatttttgccaattcaataaattcaacaactccaaaaaacaagacattctctttacaaaaataattattaaaaataaaattcagaattctattttatttatttatttatttttgaaacagagtctcgctctgtcacccaggctggctgaagtacagtggttcaatctcggctgactgcaacctctgtctcccaggtgcaaacgattctcctgcctcagcctcccaagtagctgggattgcagctacttgggaagctgaggcaggagaatcgcttgaacctgggaggtgggctccccaggcttaaagcaaaacctccatcttgtctgtctccactctcatcccaggcaatcgcggtcatttccacagcctcaaccactgtctacctgggatgcctcccatgcccgggtcgccagcccaaacctgccttcctagccccagacccatctgtcctggcacacattgccccctgggtcccaacaacctcagccaatgagaccaatgccaacttcctgtccttgcctgacactgtcagccctgagatcagacttgaccattcacctccagtacctgataggtctgtcagtcctttggaacatatcccacgaacattccccaaaccaggcaccggactccacacatcaacaccgtcacgtgagtcaccagcatccctggcagggacccctgtcccagcctccaactcatctccttcctgtcccttgagttctgtgtcacattccagaggccacaagaagaaaaatgaccaccttaatgaaattaaaagaattgagaagacatttctctatggtccaaaatctttccaactaagaaacacatatcaagatccagcctgctggccctgtggttaaatgttcctg

SEQ ID NO: 46093 - DNA, 318 bp, Homo Sapiens
gaatctctctgtgtcaccgctggagtgcagtggtgtgatctcggccactgcaacctccacctcccaggttcaagcgattctcctgcctcagcctctcgagtggctggaattacaggcacacaccaccacgcctggctaatttttgtatttttagtagagacggggtttcaccatgttggccaggatgggctcgatctcttgacttctgatccacccacctcagcctcccacagtgctgggattacagacgtgagccaccatgcctggccaagtttattaaaagggatattaattttttttttttttgagatggagtct

SEQ ID NO: 46094 - DNA, 255 bp, Homo Sapiens
aatgttcagctagtgagtcataaagatatacaagattccctaacagtgtctaatgaagtgcaaacagcaaaagaatctacaaagattgtaaaagctgcagaaaatgaataccagactgccattagtgagaattatcagacaatgtcggacactactttcaaagccttacatcgacaattgctacttacacgcactaagattgattggaacaagatccttagctacgaggttggcaaagagatgcagaatgcataa

SEQ ID NO: 46095 - DNA, 1753 bp, Homo Sapiens
gttttggcgtctgtttgctgcggtaggaacatggcggatcggctcacgcagcttcaggacgctgtgaattcgcttgcagatcagttttgtaatgccattggagtattgcagcaatgtggtcctcctgcctctttcaataatattcagacagcaattaacaaagaccagccagctaaccctacagaagagtatgcccagctttttgcagcactgattgcacgaacagcaaaagacattgatgttttgatagattccttacccagtgaagaatctacagctgctttacaggctgctagcttgtataagctagaagaagaaaaccatgaagctgctacatgtctggaggatgttgtttatcgaggagacatgcttctggagaagatacaaagcgcacttgctgatattgcacagtcacagctgaagacaagaagtggtacccatagccagtctcttccagactcatagcatcagtggataccatgtggctgagaaaagaactgtttgagtgccattaagaattctgcatcagacttagatacaagccttaccaacaattacagaaacattaaacactatgacacattacctttttagctatttttaatagtcttctattttcactcttgataagcttataaaatcatgattgaatcagctttaaagcatcataccatcattttttaactgagtgaaattattaaggcatgtaatacattaatgaacataatataaggaaacatatgtaaaattctgttatgacataatttatgtctccattttgttgtattggccagtacttttacaaatcaaaacatctctcaagccaaaggagaagacagtaagaacagacataagggacattttagtttgggctagtgtcctgcctcttagaggtggcattgtgtaaatctgagctttgagcaagaaagttttggaaattgtgttgcttttaagaaatagagttagtgtggctggataagaaagtcacatttatgcaaatgtttcttctgctagaacctcatacctgttctagttcatctccacgtttattttaccaagagatcctctgtcaagagaatttcctggctgttgtgaaagaatttttctacatcctgaactatttttcctatttcttttcaccttgctttttttcatccttaatttgcttgtcatcacaatgaagtatgttttttgaatcatcaattctttctcattctccatttatctgaaggttcttttgcccttattaacctctcaacttttattgctgtattctagtcagaccagaacatacttccactacatcagttacttggcatcatttcacctcagtttattattgccaaataataatttgtgtcagcattttcaactatggttattcatccaacccttggatctctttgagtctactgataatctccactggaaaggtggaattgaaatgtggtccacattttaactagctatttcctggggctgtatttttcagaatatgctgagctacatttgctgcaatctgttgctattcagagtttaagtttcaggagaaaacaggaacaatagaacactctgcctgttatttttgttgtaatcaagcttttccacagttcttgaaaagtactatgtttcaaatttcaggaacaccagcgttagctgtaaaagttgcagcaatttattggctagtcatagaaaatttttgaacttttaactgtattttaattgatgtttattaaaaacactttgctatcag

SEQ ID NO: 46096 - DNA, 531 bp, Homo Sapiens
atgtcagtgtttcttacagctcaaatttgtatagttgttttaaaatgcggtctctttcttcttcccctggtacttttttctttctgtctactgaagttagttcttatacatggtcttatattttggctgtttttccctgaacattcatacaggttgaatattccttatctgaaatacttgggactggaagtgtttttgattttggattttggaatatttttttttggagatagtgttttactcttgttgcccaggctggagtgcaatggcgcaatcttggctcgctgcaacctccgcctcccgggtacaagcgattctcctgtttcagcctcccaagtagctcggattacaggcatgcgccaccacgcctggctaatttttttgtatttagtagagatgggttttcaccatgttagccaggctggttgtgaactcctgacctcaggtgatccacctgccttggcctcccaaaatgccgggattacaggtgggcaccaccatgcccagccggattttggaatattttcataa

SEQ ID NO: 46097 - DNA, 192 bp, Homo Sapiens
ggaaattttggcggtggtaactatggtggtggtgggaactataatgattttggaaattatagtggacaacagcaatcaaattatggacccatgaaagggggcagttttggtggaagaagctcgggcggtccctatggtggtggttatggatctggtggtggaagtggtggatatggtagcagaaggttctaa

SEQ ID NO: 46098 - DNA, 1676 bp, Homo Sapiens
tcaggttgtctttgcaaatgacacaatcctgtatctagaaaactccattgtatcagcccaaaagcttcttaagcaacttcagcaaagtctcaggatacaaaatcaatgtggaaaatcgcaggcattgctgtacaccaacaacagacaagcagagagccaaatcatgaatgaactcccattcacaattactgcaaagagagtaagatacctaggaatacagctagcaagggaagtgaaggacctcttcaaggagaactacaaactactgcttaggaaaatcagagaggacacaaacaaatggaaaaaaattccatgctcatggataggaagaatcaatatcataaaaatggccatactgaccaaagtaatttatagattcaatgctattcccataaaattactgatgcttagcacttttgagtgactagaccaactagcttcattaaacatgatgttttttgaaaacatattaagtgtgagcattactagcaacatagtggtagaaaagaaaattgaaccaatgaatggctaatactgacatattcagtagtaacaataaaacaataaaagtgactctattttagccctttgttttgcagtggaaaacactgaagttgtggcatatgaaaaaggtgcttttcaattgcgacaaaagcaaaaattgacaaatgggatctaattaaactaaatagcttctgcacagcaaaagaaactatcaactgagtaaacagacaacttacagaatgggagataatttttgcaaactatatgtgtgacaaaggtctaatatccagcagctataaggaacttaaacaaatttacaagaaaaaagcaacccctaaaaatgtgggcaaaggacatgaacagatacttttcaaaatagacatacatgtggccaaaaatcatatgaaaaagagctcaatatcactgatcattagagaaatgtaaattaaaactgcaatgagacatcatctcacaccagtcagaatggctattattaaaaagttaaaaaataataggtgctggcaagttgttgagaaagaggaatgcttattcatcattggtgggagtgtaaattagtttagtcattgtggaagacagtgtggcaattcctcaaagacctaaagacagaaataccatttgacccagcagtcttattactgggtatatacctaaaggaatacaatcattctattataaagacacatgccacatatatgttccttgcagcactatacacaatagcaaagttatggaatcaacctaaatgtccatcaatgacagactagataaagaaaatgtggtacatatacaccatggaatactatgcagccattaagaacaagattatgtcctgtgccaagatatggatggaactgggggacattaatcttagaaaactaacacagaaaaagaaaaccaaatactgcatgttctcataagtgggagctaaatcatgagaacacatggacacatagaggggagtaacacacattaggtccttttggagggtggaagttaggagcagggagagggtcaggaaaaataactaatgggtactagcttaatacctcagtgattaaataatctgtacaacaaaaccccgtgacacgagttaacctatgtaacaaacctgcatttgtacccctaaacttaaaataaaagttaaaaaaggt

SEQ ID NO: 46099 - DNA, 1663 bp, Homo Sapiens
atgtcacaacatcaacaagcatgtggcatttgcaggcaggaagatccaccagaagatatgaagcaggaccgggacattcaggcagtggcgacctccctcctgccactgacagaagccaacctacgcatgtttcaacgtgcccaggacgaccttatccctgctgtggaccggcagtttgcctgctcctcctgcgaccacgtctggtggcgccgcgtgccccagcggaaggaggtatcccggtgccggaaatgccggaagcgctacgagccagtgccagctgacaagatgtggggcctggctgagttccactgcccgaagtgtcggcacaacttccggggctgggcacagatggggtccccgtccccctgctacgggtgcggcttccccgtgtatccaacacggatcctccccccgcgctgggaccgggacccggatcgccgcagcacccacactcactcctgctcagctgccgactgctacaaccggcgagagccccacgtgcctgggacatcctgtgctcaccccaagagccggaagcagaaccacctgcccaaagtgctccaccccagcaaccctcacattagcagtggctccactgtggccacctgcttgagccagggtggcctcctggaagacctggacaacctcatcctggaggacctgaaggaggaggaggaggaagaggaggaggtggaggacgaggagggcgggcccagggagtgacccctgccaggtgcagatacaaaccagacacggtctgtggctactttgtgttattataagatatgagctcaaaccgagatatgaatgaccttggggagccatctgaggccaagatattgacgggggggattcctgggtcccattttcagcgcccagggtcacagatccacagtgggaagttctgtgggacacattggcactgagccacaaagaaggtgtggccagaacaacttgggctcctgctgaccaatgtcctctagggcctaggggacagaggaacacagagtcacagcttcaggggccgaatgagcatggcggccttcctgagagaatatgccccaccacgaaactcagcccagtagacaccatcctggtagcggcttcggtagtggccgccgtggtgccacacaccgttgaggttggagtgggcacaggcatggtaccaccagcctccccgctggtacagggcacagttacctgaggggagagagagagtccatgtcctctcaccagaataaaagcctctacctgcacctcacagtgcaaggcttttgccaggcatcccctggcccctcccattcttattgaatacaagccctgatcttccatctcctcagcaaaaaaataggagccctggccccccaactttcttcagagtaatagccttaattccttccctatctccttaccaaagtacaagtcacatctttcccaccttttctgcaaactaggagtctaccgttcattcctttatcaaagaaaagtatctacttcctttctagaataagagtactagctctcaccctctgccctttacttgaacaggagtcttgattctttttttgcctcatcagagaaggaatctggactccccatccccccaccaggataaaagtcctgacctttgttctcttgacggaataaaagcttgcttatcctt

SEQ ID NO: 46100 - DNA, 717 bp, Homo Sapiens
atgctacaggccaggaaccagagcccatcatctcagaggcccctggatgtccttcgaaggaaccaggaccctcagagcccagcatccatctctgtcatcatcttcatcacacccaaagaagagccagccttgcaggagggtttacatctccaggaagatgggctgccagcaactgcagaggatgcagccacctgcttaactgtgctgtccagccagccagccagctgcagggcctcttgctgcttaagagctgatgggccgggcatgttggctcacacctgtgagcacagtactgggaaatgggagcacagtactgaaatgggagcacagtactgggaaatgggagcacagtactgggaaatgggggctcacagcactgcaaaatgggagcacagtattgggaaatgggagcacagtactgggaagtgggagcacagtactgagaagtgggagcacagtactgagaaatgggagtacactactgagaaatgggagcacagtactgggaaatgggcatacagtactgagaaatgggagcacacagtactgggaaatgggagcacagtactgggaaatgggagcccacagtactgggaaaggggagttcacagtactcggaaatgggagcatagtactgggaaatgggagcacagtactgggaaatgggagcatagtactgggaaaccccagacctggattctgagtttttcagcctag

SEQ ID NO: 46101 - DNA, 1524 bp, Homo Sapiens
gcggcagcggcgggtgcgggcaggaggcggcggcagcagcgggaccgagcagcagcggctatgcatccaagtgcggctgggcagccgcggcacccctgaggcccgggaggggctccgggaacacagcgcggaggggacgctagtcgcggaggggacgctagtcccggagtgcgaggaagaggtgtagtgtccagagcggcggcggcggagctgcgcacggagctgaggagggggcttcggagcgggactgggacggggggggcggctggcgcgagcagccctgggggtggggggcggggtgggcgccggcggcgcgatgctgggcgtcctggagctgctgctgctgggggctgcgtggctggcgggcccggcccgcgggcagaatgagacggagcccatcgtgctggagggcaagtgcctggtggtgtgcgactccaaccccacgtccgaccccacgggcactgccctgggcatctctgtgcgctctggcagcgccaaggtggctttctctgccatcaggagcaccaaccacgagccgtccgagatgagtaatcgcaccatgatcatctacttcgaccaggtactagtgaacattgggaacaactttgattcagaacgcagcactttcatcgccccgcgcaaagggatctacagttttaacttccacgtggtaaaagtctacaacagacaaaccatacaggtgagcctcatgctaaacgggtggccggtgatttcagccttcgctggtgaccaggacgtgacccgggaggccgccagcaacggagtcctaatccaaatggagaaaggcgaccgagcatacctcaagctggagcggggaaacttgatggggggctggaagtactcgaccttctccggattcctggtgtttcctctctgactggctcgtagccggaagggaggcagggagagggcgaaggcaggaaggggagtgagaaagaggctgaaattaagagggcgagaaagcagcacgacttgaaacttcctacatgttctctaactgtatctgggtaaaaaggtgcgcgccagctgtgggacaactttgtccatttccttattaggagaaataaatttcgcttagctctgcgcactcccatttccaaaaataaactcgcctcccccattccagttgcagtaatcaagaaagagactgccttgtcattgtttcttatcccccaacttcatgttccctgcaatttatttaaagaaactttgtatttcactacataatctgaaatctttctccctagccccctctgaatccttctgcctactgaaatctgatatattacacacccccaaccttttttttttcagtttggaaaggggtaaagttttgttgttgttgttgttttgttttggatggggaaggtagttttaatttggcaagtgttgctcttcttaaaacactgctcaaattaattagctgaagatacttagtatcctcggctgcttgttagcagagaaaggactcaccttagtggtgactggtttaaaaaatataaa

SEQ ID NO: 46102 - DNA, 2154 bp, Homo Sapiens
agaaggcctgggggcgaggaacaagacctcggagtatttcaaggggagacctagttccctgccctgccccgggcccagggcgccgcggtctgaactctgctcggctggaggactcgtctccgagctccgtcagaaatggggaacttgcagtcggagccatccgcgggcgggggctcccgaaaagtgcagccctcggaccgcgcccccgactcccgccggacgtccctggtggagcccgagatgacctcccaggccatgcgcctgactcgtgggctgggtgtctggttccctggcagcgccacacccccgggactcatggtaccccgggagccccaggcctcaccctcgaccctgcccctcaccttagaacggccctctccagtgatgccccctcctgaagaggcggccgcggtctctgcaccacccccggcccccgcggggactctgctgcccggcccgtctaaatggcaaaagcccgcgggcactccagttccccggatccgccgcctgctggaggcgagccatcgcggccagggcgaccctccgagcctccgcccgctgaagccgccgccgccgccccggcaactatccgtgaaggacactgtcccgagggccccatcccaatttccgccgcccctggagacttggaagccgccaccaccattaccttctgaacggcagccggcggaccgcagaatcactcctgctctggccacacccgcctcacccccgacagaaagccaggctgggccccgcaaccagggccagacggccggcagggctcgcggaggggcgcctccccatgcgggcgaaggcgaaatggcccagcctgcggattccgagtccggtctgagcctgctgtgtaaaatcaccttcaagtcgaggccctctttggcccctccggcagcctcgagttccttagcagccaaagcttcgctggggggcggcggaggcggcggcctctttgctgcctcaggtgccatctcttacgccgaggtcctgaagcaagggcccctgcctcctggagccgctcgccccttgggagaggtttctcgaggggcacaggaagccgagggaggtgatggagacggcgaagggtgctctggtcctccctcggcgcctgcgtcccaagcccgggccctaccgccgccaccctacaccaccttcccaggctcgaagcccaaattcgactgggttagcgctcccgacggccctgaacgccacttccgcttcaacggggctggcggaggcatcggggcgccgcgacggcgtgcggccgcactctctgggccttggggctcccctccgccaccaccagagcagatacactcagctcccgggccccggaggcccgcacctgccctgctggcgccgcctacgttcatcttcccagcacccaccaatggcgagcccatgcgcccggggcctccaggcctgcaggagttaccaccgctgccaccgcccacaccgccgcccacactgcagccaccagcgctccagccaacgccgctgccggtggctcccccgctcaccccgggtctgggccacaaggagtcagccctggctcccaccgcagcccctgctctgcccccagccttagccgccgaccaggccccggccccatccccggctccagctcccaccgtggctgagccctcgccgcctgtgtccgcgcccgcacccgcggctgcgcccatcaagacccgcacgcgcaggaacaagggttcccgtgcagcccggggcgcgacccgtaaggatggcttgcatggagatggtcctcgcgaacgagctacagctaccgtgcctgacagcagtggtggagggggtggtggcagcggggcctctcagactggggcagctaacacccgcgctgcgcgccactggctgcccttccaggtgcttaactcctgtccctgcaagtgttactgccaccaccagccacgccatcgccgcctgccacgcaacgtctctgcctggctgagcacatccaccaaccacctgggcgagccaccctgggttgccaccatcaagctgtccggctctctggtggccaagctggagcactacgacttgcaggccacccattccaactgagtgtagtcggctcaacaccctccaccttcccctccatgccaataaaataaccaatccaga

SEQ ID NO: 46103 - DNA, 1985 bp, Homo Sapiens
atgttttattcaatagatttgtctcctgtaaagtgtaggagccccttgcagacaccaagttcggggcagttttcttctagccctattcaggctagtgcaaaaaaatacagcttgggaagcataactagtccttcgcctatttcttcacccactttctcaccaattgaatttcagataggagagactccactctcagaacaaaggaagtttactgttcattctcctgatgcttcatctggaacaaattctaatgggataactaatccgtgtatcagaagtccttatatagatggctgctcgccaattaaaaattggtctcctatgagacttcagatgtatagtggtggtactcagtatcggacctcagtgattcagataccttttactcttgagactcaaggtgaagatgaggaagataaagagaatattccttccacagatgtctcatcacccgccatggatgctgctggaatacacctacggcagtttagtaatgaggcttctacccatggtacacatttggttgtgactgccatgtctgttacacaaaatcagtccagtgcttctgagaaagaattagcactgttgcaggatgttgaaagggagaaagacaataacactgtggatatggttgatcctatagagatagcagatgagaccacttggattaaggagccggttgataatggcagtttacccatgactgattttgtaagtggcattgccttcagtattgaaaactctcatatgtgcatgtcacctcttgctgaaagcagtgtcattccttgtgaaagcagtaacattcagatggatagtggctataatacgcagaattgtggaagcaatattatggatacagttggggcagaaagttactgcaaagaaagtgatgcacaaacatgtgaagttgagagtaaatctcaagcatttaatatgaagcaagaccacacaacacagaggtgttggatgaaaacagcaagcccttttcaatgcagcagtccatagaatgcctctgtcagaatcaaagactaagcttaagagttcctcgcatatatcgttgtgcacaggatcaacatgatggtgactgggaaaaaattacttcaagtaacatgcttagctttccctccttaatgtgaaaaatcaagggcttactgacataggaacaacagaaatgctcctggaacttcaagttgctgaattataagtttattttttatcaataaatatttttatacttacattgagtgatgtgtttaacaacaaattgtgacagagctgagtgctcctatcttacagggtcaatgaactacttattaagccttactggtagcactgaatttagcagttctgagaacatgtgaaactatgttaaaactgaaggcactatatatttttacataaaagcttgaacatacagatgaattataacctatgtgaagaaatcttagatataaaactaacttttcaaagatacaaaagaaattaaacaggtttcctgaaattttagttcttggtctgttcacctctgtggggaaaattcttagttccagtgataactgttctagttactacttttaagtatgtaaatactagaaaggtagtactagtgacatcatcacgtgtattgttatctatggggcaaatgtgtggtgcccagaataaaatatacctcatgcctagggtagggacatcctttccagctcaaacgtgggtagggatgtgggagaataagaatgtgggagaaccaagagaaaaagtggggctgggagagtggagttcccgtagggcataggcctgtgaagtaacactggggcagatatgtatgttatatacaactatttttttaaaaaacttatatccatgttgggagtagatgggtatataacagtttggaaatactatctttggagaatgtatttttgtatttataaatcaacttttaaaaactgtctcattcaaaagggaataaagacctgtgttatcaa

SEQ ID NO: 46104 - DNA, 2545 bp, Homo Sapiens
cacagggagccggctaaaacagactactcccccgtgcagtcgttccctctaccctaataaggctttggcgcctctcccagaactcggtcctggggaatgctctttgcctggtccagccccgacaaacgtggtctgagaacagcggagcgcggaaaccgcggagcatgactcctccgaagctgcgagcgtcgctgtcgccgtcgctgctgctgctgctgagtggttgcctcctcgcggctgctcggagggagaaaggggcggctagcaacgtggcggagccggtccccgggcccactggcggctcctcgggtcgcttcctcagccccgagcagcacgcgtgcagctggcagctcctgctgcccgccccggaggccgcagcgggcagcgagctggcgctgcgctgccagagcccggacggggcgcgccaccagtgcgcctaccgcgggcatccggagcgctgcgcagcctacgccgctcgccgcgcgcacttctggaagcaggtgctgggagggctgcgcaagaagcggaggccctgtcacgaccccgcgccgctccaggcccgcttgtgcgcgggcaagaagggccacggcgccgagctgcggctagtgccccgcgcgtccccgcccgcacgccccaccgtcgcgggattcgcgggggagtccaagccccgggcccggaaccgggggcggacccgggagcgtgcgtccggcccagccgctgggaccccgcctccccaaagcgcaccgcccaaagaaaacccctcagagaggaagaccaacgagggcaagaggaaggcggccttggtccccaacgaggagcgacccatggggaccgggcccgaccccgacgggctggacgggaacgcggagctcacggagacctactgcgctgagaagtggcactccctctgcaacttctttgtcaatttctggaacggctgagactgcctgccggcttagggagggttgatgggggaggcgtggggaagggaaagctaagggcgtcttagaccggggggtactgtgatagagattggggagaagtccaggttctcgaatgggggtgggggcaagggtaagggtgagatgcttgggatgagagtgtaaggggtatggagaatctctgggatagcagagaagttaaaaattttgaaaagtctcagtcctgattaagagcaggaaaaataatggaaacagaaataggcgtactttaaatgtgcaaaaactggagactggggagagaaatcgatgcagagggaggctgagaataagggggagatagagtgactaaagtgatgtgagtcccatgtggggagggggatgcaatgtttattgtttaacatttctattaaatgcagccatgagcaattgccaacctgagccaggttgaatcaatgtcttctcacttaatcagctaacaagactgcagactttttttccgtttctgaattggtataaacttggatgcggcgtggtgggtgtcatagataacctctatagggacagaagcctcacaggtcaaaactggctccaaggaaagttttgcagaatgatttcctttccattcttttagaagagctacctttttttttttttttccctgacagggtctggcttgcccaggctggagtgcggtggctagtcacaggtgtaataataggcactgcagtctccaactcctggcctcaagggatcctcacatcttagcctccagaatagctaggagtaggagtagctgggactacaagcatgcacagctgcacttggcttagaagtgctactttatttttatttttgagacagggtcttgtgtcatccagactggagcagtggtgcaattatggctcactgcggcctcgacattccagtctcaagtgatcctctgcctcagcctccggagtagccaggactacaggggtgtgccactagaagtgctactttttaacgaaatggtgactaatgttctggaactttcccattaaccttctgcatttagaaggaattatagatgttgagtgctccagtaaacagtgattctctttatatctgatttttttttttaaacagctaaaatgtaagtatgtatctcagagtcattttgaccattatggaagttgtatctctctgtttcatgtaactaattattaatatatttcatttttagtgtgatgtaatgagagactgtgtgtgtatgttaggtgctcaataaaaactgtatggttagatttaaagaagtggcaaggcaatggaaattctacctgcatttgatctacttccaagtacaccttgaattaagttcttaaacacatcttgaattgctgggaaaagacagaaactaagaagttgacataaagcaagagtcacaaactggcagccacctggccttatcattgttctatttgatttgcaccctggttctctttctttttcccttcctccccaccttcctcccatccattgttgaatctgtggatgcagagcccacggatgtggaggggcaactatatatatgtttttccattatatatataaatgtgtgtgtgtgt

SEQ ID NO: 46105 - DNA, 366 bp, Homo Sapiens
atgggtggaaaactgccccagcaagataccaggttatttactgtggtatcgaaagctctaagagaatggaagtggttcttttgcccggctggaaatagcagtgggaagacaagtctatccagaccaagcctgtccatacaacactggcaatcagttgatgagggaattaagtcagatgggagacgtcaatctgtcgcccaggttggagtgcagtggtggcgatctcagctcactgcaacctccacctcccaggttcaagcaattctctctgcctcagcctctagagcagctgggattacaggctctcgccaccatgcccggttaatttttgtattttttagtagagatggggtttcaccatgttag

SEQ ID NO: 46106 - DNA, 1958 bp, Homo Sapiens
cagtgtggcagtggaggccgtcagattactgatacttatccttaagaacatggaaggggtgctgatggacgtggactgtgagagcgtctaccccattgtgtaggcctctaattgaggcctggcctctgctgtgggtgaatttctgtactggaaacttttctaccctgagtgcgagataagaacgatgggtggaagagagcaacgccagagcccaggtgcccagaggactttcttccagcttctgctgtccttctttgtggagagcaagctccacgaccacgctgcttacttagtagacaacctgtgggactgtgcagggactcagctgaaggactgggagggtctgacaagcctgctgctggagaaggaccagagcacgtgccacatggagccagggccagggaccttccacctcctagggtgaaaccaggagagattgcttgcttcacttaatcggctcccagacacctgccactcgtgaatgcatctgataaactcactcacactgaggccttggggactgaggccctggcggatcacgggtgcccaggggctcggaggccgcctcctctgggaagcctgcccaggttccgctggactcccacaggcaatacccctgggccttcctcgcggcccctgttggccccaattcccccaccccctgcaaggtctgtgcctctcctgcagccccgccaccaactagggcgagaggagctcgcccccacccaaacgtattggttcgatgaaggaagggcccatggttctgccactggccctggacacccagtgctggtttcccgtggaagtccccctggactgagtggcggctgggtgctctagtgatttgcgacctggggcctctgactcccatcatgttgggaaagtcgttgaacctcaccggtgaaacgggcacagtgaagtcatttccccgaagtctcaggactctgtgtaaggctggggacaggggcttgttggggcctaagggcaccttgggaactgcaggagcccgttctgcctccataagacactcactcctggcagggtcccctctccgggcacagcccagatccacccccatcatccctctccatctgtggctccctgcccctcacagaggattcatcactctgttcagaatccccaggactccctagggaaggaggtcccagcctggcctcccaagaccgtgcttgcccaattccaggacttcctcacatggctcctacctccagcacagaagcggcactaaaccaggtggtcaatcagggagcaccaccgaggttctgaatggtccagggatgagcagtgatgcctcaagctaagccaatcaaagccttccctgggattgtctcaaggagtccgcagtgagattctgggtctcagtactgggaaagggtgaggctgaggctgcctgctgtcctgggggcctcaccctgccaccaacaggaagccacacagagggaagcagaaatgagacgcagccagtgagggcagggtacaaaggtgagatcccggagagacagatgctgggacatcatccttgggtactggttccaacagtgcctgcagatggagccaccctcggagagtccacaacagcagccaatccattctatgcgtgtctgagctactttaagtcgggtttttgactgtttgaatgagagtctcatcttggctaggcaccatggcgcaacaactggggaggtggaggtaggaagattgcttgaggccaagagtcccagagcagcctgggcaacctatcaagacgctgtctttacgaaaagaaaaaaaactagctaggtgtggtggtgcgtgcctgtggtcccagctactggggaggctgaggtgggaggattgcttgagcccaggaagtggaggctgcagtgacctatgatggcaccactgtactccagcctgggtgacagagcaagaccctgtctaaaaaaaaaaaaaaaaaa

SEQ ID NO: 46107 - DNA, 231 bp, Homo Sapiens
attgaccacattgctggagatgaggatcatacagacggagtagtagcttgtgctgctggactaataggggacttatatacagcatttgggaaggatgtactgaaactagtagaagctaggccactgatccatgaattgttaactgaacggcggagatcgaagacgaacaaagcaaaaacccttgctacacgggcaacaaaagaattcaagaaactgaaggaccaagcttga

SEQ ID NO: 46108 - DNA, 1302 bp, Homo Sapiens
gattggcatcctactaatttgacccttagtgatgagacttgtcagagatccaagaatctgaaagttgatgataaatgtccatctgtatcaccatcaatgcctgaaaatcagtcagcaaccaaagaactgggacagatgaacttaacagaacgagaaaagatggacactggagttgtacttctctcagggaatgatactctccatgacctgtgccaatcacagctaccagaaaacaaagagagcaaagaagaacaagacttggagctgacatcagaggaagagcaagaaagacttaaaggatgcgaaaataagcagccacagaaaacgtctcaagaaccagaaatggctaaggattgtgatagagaggatatacctatatatccagtacttcctcatgtgcaaaaatctgaggaaatgtggattgaacaaggcaaattagagtggaaaaaccaattaaaactcgtcataaatgagttaaagcagaggtttggtgaaatttatgaaaaatacaaaattccggcttgtcctgaggaagagccactacttgataactctacaagaggaacagatgtgaaggatattccctttaatttgacaaataacatacctggttgtgaggaagaagatgcatctgaaatatctgtctcagtggtattcgagacatttcctgaacaaaaagaacccagtctcaaaaatatcatccatccatactatcatccgtactctgggtcccaggaacatgtttgccagtcatcttctaagcttcatttacatgaaaataaattagactgcgacaatgataacaaactaggcattggacatatttttagtacagataacaactttcataatgatgcaagcactaagaaagcaaggaacccagaagtggttacggttgaaatgaaagaagaccaagagtttgatttgcaaatgacaaaaaatatgaaccaaaatagtgacagtggcagtacaaataactataaaagcctgaaacctaaattagaaaatctgagttctttaccaccagattctgacagaacatcagaagtatatctacatgaagaattacagcaagacatgcaaaagtttaagaatgaggtcaacacattagaagaagagttcctggctttgaagaaagaaaatgttcaacttcataaagaggttgaagaagaaatggagaagcacagaagtaatagcacagaattatcaggaaccctaactgatggtactactgttggcaatgatgatgatggactaaatcagcagattcctaggaaggaaaatgaagagcatgacaggtaa

SEQ ID NO: 46109 - DNA, 1421 bp, Homo Sapiens
agacagcccagtagctgtgagtcggtctgacaaagccatattgaagtacggagtacggtttcaaagcagtcagaaaaagaacgggaatgctgttcaggaaattcttcaggcatgggcagggacttggctgcagttctgcagttggaaaatctgactggggcagcttctgagcgcaggctgggcctgcacacactcagcgggccgagtggccacctccttcagagctgctcagcacgccctgggatcgcgggcggttttcatcggccggtttgtgaaacggacaagagaggagacattactgccgggagtgttgagtgaagggaccaggtggagatggatgcctcaggagcagtacactcaccaccggagcaccatgcctggctctgtggggccacaggtatacaaggtggggatttatggctggcggaaacgatgcctgtatttctttgtcctgctcctcatgattttaatactggtgaacttggccatgaccatctggattctcaaagtcatgaacttcacaattgatggaatgggaaacctgaggatcacagaaaaaggtctaaagctagaaggagactctgaattcttacaacctctctacgccaaagaaatccagtcccgaccaggtaatgccctgtacttcaagtctgccagaaatgttacagtgaacattctcaatgaccagactaaagtgctaactcagcttataacaggtccaaaagccgtagaagcttatggtaaaaaatttgaggtaaaaactgtttctggaaaattgctcttctctgcagacaataatgaagtggtagtaggagctgaaagattacgagttttaggagcggagggcacagtgttccctaaatctatagaaacacctaatgtcagggcagaccccttcaaagaactaaggttggagtccccaacccggtctctagtgatggaggccccaaaaggagtggaaatcaatgcagaagctggcaatatggaagccacctgcaggacagagctgagactggaatccaaagatggagagattaagttagatgctgcgaaaatcaggctacctagactgcctcatggatcctacacgcctacaggaacgaggcagaaggtcttcgagatctgcgtctgcgccaatgggagattattcctgtctcaggcaggagctgggtccacttgtcagataaacacaagtgtctgcctctgaaagactatccatagtggacattgttggcagcataaaggccttttttggctttagacactggctgccagctatttttactagaacacagaaagcctatcaaagaccttgtgtgtatgtgtacgtgtgtgtgcgtgcttgagtgtgttcgcgtgtgtgggtggatataaatatatataaatatatataaataaatatatatatcctctgtataaaa

SEQ ID NO: 46110 - DNA, 1897 bp, Homo Sapiens
gcaaacgattaactggagaaagtttaatagagtgatatctctggaggtacaggcagggcaatgagatggtgcagtgccctaggactagcaaggatggggacctgttatcccccagcctgagggacaagaggaggcactggctttgcaggaggcctggtgagagatggaactggaggtggggctgctggcaggagctgtggcctcagaaagagggttccagccactgcctcacttgtgaccaaaccaggagggagcaggggtggtggggatcagatacctccctctcctcccacccccctgtctcctgccaatgcttaaccagagggcaaggggcccagggccccatgcagggagaggaagttgtggggaaaggcagaataacaagcagagaaactaattttttaaaaaggtttttaaaatgttgtgggtgaaataaaacacgagctatcagttaatctgtataaccaatgccaagtttcattacctctcttgtccaacttcctcatcaagaaaatgagcatagccacatctttttttgccttaaggggagaggcagaattctaacaatcataagacatgattcctgatgtgtgcgtgatccccactgaatctgagagtcaagcactgttgcctcggtcatacaacatgtatgtgttgatcctgactttgcaccaggtcctattctcaccccagtggagaagttaaggctcagagagttaaggagtttgcctaaggtcacacagcacagaagagtcagtaaattcatttgctggcgggacacggtggctcactcctgtaatcccagtactttgggaggccaaggtgggaggatggcttgagcccaggggttcaagaccagcatgggcaaaatagcaagaccctatctctacacaaataattttttttacttaaaaaaaaaaaagaatcagtgaaggattggacccaggtttgtgtgagagcagagcctgaacgttagctctggggccatgtatttttccaacagcaaatatttgtgggctcctagtctgtgccaaacctgtgctgggtgatgctgggggcatggtggtgacaagcagccctggtccctgtcctcaggagctcacatctggtcgaagatgataagcaaataaatgcatgaatgagtggatacagagaaagatatttgccaaataaagcagagtgacagggaagagaggggtggggagagaagccctccctggagtggtgaaattggaactgatccctgatgatgagatgaatcaccaggtagagagagcagcaagtgccaagccctggaggcaggaatgagctgcgcccattgctatagcagcagaggaggcaaagtagccaggacagggtaggttgggggagaggagaagacgaggccagagagctgaggggctggaggaggcaagggtggcaggtgttttctaaagtacccttggcttctaagttccccctccctcactctggagcagccacagatgagtctctggaacccatctgtgtcctcgtacctcaaggcctttgcgctgctgttccctctgcctgtaacacccttcctccaggtgtctcccttacgtccttcagacctttgttcaaatgtcacctccttggcaggccacagtggttcacgtatgtaatcccaggactttgggaggctgaggcaggtggatcccttgaggccaggagttcaagaccagcttggccaacatggtgaaaccctgtctttactaaaaatacaaaaattagctgggcttggtggcacatgcctgtcatcccagctactcgggaggctgaggcgggagaatcgcttgaatccaggaggtgggggttgcagtgagctgagattgtgccactgcattccagcctgggtgacacagcaagactctgtctc

SEQ ID NO: 46111 - DNA, 372 bp, Homo Sapiens
aagaaaaaaaaaaaaaaaacaggaaaaaaactcaacatggaaaatgtccccaaggaaaacaaagttgtggagaaggccccagtgcagaatgaagcccccgctttaggaggtggtgaataccaggagcctggaggaaatgttaaaggggtttgggctccacctgccccgggttttggagaggatgtgcccaataggcttgtcgataacattgatatgatagatggagatggagatgatatggaacggttcatggaggagatgagagagctaaggaggaaaattagggaacttcagttgaggtacagtctgcgcattcttataggggaccctcctcaccatgatcatcatgatgagttttgccttatgccttga

SEQ ID NO: 46112 - DNA, 2174 bp, Homo Sapiens
gaattctgcgtcttcctttaggctgcggcgagacaatccccagagccccgcggcccggcctcggggcagccatggactcgcaggaattgaagactttgattaattactattgtcaagagagatatttccatcatgtattactggttgccagtgaaggaattaagaggtatggaagtgatccagtcttcaggttttatcatgcctatggcacattaatggaaggtaaaactcaagaagctcttcgagaatttgaggctattaaaaataaacaagatgtatcactttgttctctacttgcactgatatatgcccataaaatgagtcctaatccagatagagaagctattctggaatcagatgccagagtgaaggaacaacgtaaaggagctggagagaaagccttataccatgcaggcttatttttatggcacattggtcgccatgataaagcaagggaatatattgacagaatgatcaaaatatcagatggtagtaaacagggacacgttttgaaagcatggcttgatattacaagaggaaaagagccttacactaaaaaagcactgaagtattttgaagagggactccaagatgggaatgatacttttgctctgctgggtaaggcacaatgccttgagatgcgccagaattattcaggtgccctggagactgtgaaccagataatcgtgaattttccgagcttccttcctgcttttgttaagaaaatgaaattacaactagccttgcaggattgggaccagacagttgagacagcacaaaggttgctgctccaagatagccaaaatgtggaagcactgagaatgcaggcactctactatgtgtgtagagagggggatatagagaaggcttccaccaagctggaaaacttgggaaatacattggatgccatggaaccacagaatgctcaacttttctataacattacactcgccttcagcagaacttgtggacgtagtcaacttattcttcaaaaaattcaaacgttacttgagagagcttttagtttaaaccctcagcaatcagaatttgctacagaacttggataccaaatgattttacaaggaagagttaaagaggcactgaagtggtataagaccgccatgacacttgatgagactagtgtgtctgccctagttggatttatccaatgtcagttgatagaagggcaattacaggatgcagatcagcagctagaatttttaaatgaaatccagcaatccattggaaaatctgcggaattaatctatttacatgcagttcttgccatgaagaaaaataaacgacaagaagaagttattaatttgttaaatgatgtcctggacactcacttttcacaattagaaggtttgcctcttggcatacagtattttgaaaagctaaatcctgatttcttgttagaaattgttatggagtatctgagcttctgtccaatgcagcctgcaagtcctgggcaacctctttgtccacttctcaggcgttgcatctcagtcctggagactgtagtaagaactgttccaggtcttctgcaaacagtcttcctaatagcaaaagtgaaatatttgtcaggtgatattgaagcagctttcaataaccttcagcactgcttagaacacaatccctcttatgctgatgctcatctgctgctagctcaggtttacttgtctcaagaaaaagtcaaattgtgttctcagtctcttgaactttgtctgagctatgattttaaggtgagagactatcctttataccatttgataaaagctcagtcacaaaagaaaatgggagaaatagcagacgcaattaaaacactgcatatggcaatgagtttaccaggaatgaaaagaattggagcttccacaaaatcaaaagacagaaaaactgaagttgatacaagccatcgtttatcgatctttcttgaattgatagacgttcaccgcttaaatggagagcagcatgaggcaaccaaagttttacaagatgccatccatgaattttctggaacatctgaagaagtgcgggttaccattgctaatgcagaccttgctctagcccaaggagatattgaacgggctttaagcatccttcagaatgttacagccgaacagccttattttatagaggccagagaaaaaatggcagatatttatctgaagcac

SEQ ID NO: 46113 - DNA, 561 bp, Homo Sapiens
atgcgggtgcactgcgccatcatcccctccgacatgctgcacatcagcaccaactgccgcacggccgaggagatggtgctcacgctgctggactacctcttccaccgcgaggtgcaggctgtgtccagcctctcggggcagggcaagcacgggaagaagcagctggacccgctcaccatctatggcatccggtgtcaccttttctataaatttggcatcacagaatctgactggtaccgaatcaagcagagcatcgactccaagtgccgcacggcgtggcggcgcaagcagtggggccagagcctggtggtcaagagcttctcgtggagaatgcccaactcatcctcctactgcccctcagagccgatgatgagcaccccacctcctgccagagagctcctgcagccacagctgcagccgcaggccctgcactacgcgctggccaacgtgcagcaggtgcagatccaccagatcggagaagacggacaggtgcaagtaggacacctccacatcgccaaggtgccacagggggagcaagtccagatcacgcaggacagcgag

SEQ ID NO: 46114 - DNA, 1023 bp, Homo Sapiens
gacatatggccagagcatgaaataaaagattcacttcaaaaagtaattctgagaaaatgtaaaaactgtgaccttaatagtttatatttaaagaaatacagccaaagtgtgaataactacaagagacagaaaagcagttataatttctttcatcaatgtttgtcaactacccagagcaaagcctgtcaatgtaataaatttggaaagctttccaggtgtgctcaatcctcagtgaacataagaaaacttttagcagagagaactgctacaaatgtaaataatgtggcagaaactgtaggtagttctcagattttactatacaaaatacatactggagagagatgctacagacgtgaagaatgtgacaaagactgtaaaaagacctcaaaccttcctgaatataagagagttcatactggaggaaagccctacaaatgtgaagaatgtagcaaaaccttaacctgctcctcaacccttattaaacacaagaaaaatcattctggaaataaatcctacaaatgcgaagaatgtggaaaagtctttaaatgcttctcagacctttaccttgctaaacataagataatttatactggagagaaaccctataaatgtgaagaatgtaacaaaatctataggtggttctcagaccttcctaaacataagataattcatactgaagagaaacccttacatatgcaatgtggaaaagcttttacatggttctcagcccttagtaaacataagagaatttatactgtagagataccctacctcaaaaaaaaagacaacgcctttacctgctccacaaactttactgaccacaagataattcatatagaggagagaccttacaaatttgaacaatgtggcaaaacctttaagtgcttttcagacgttagtaatcataagagaatgcacactggactgaaaccctacaaatgtgaaaaatgtggccaggcattgatttcattccaacacctcattagacataagagaattcatagtagagagaagctccataag

SEQ ID NO: 46115 - DNA, 459 bp, Homo Sapiens
atgcccagcttgtgtggggtttcccttgaagatcagtctcaaggttgctgcttgaccggtgagcagcaggattcagacctagatgtgtctgactctgggatcctttcacctaaccctgacgctttcccagcaagcctggatgacctggcttccctccaccctgtgcccatgccctgccccttttccatcttggagtttctgaagccccagtgggctgtccactctgtgcttctttgggtcacttatgatgccagcctccctcccggcccacccgccaatcccaggccactgctaataggggtgtctttggcaggggaacaaagagcgttttggggctgccaggtggctgctctgagtgctccagtgttggccagagtggcttggcttccagaaacttcttgctgcctccttgcaggaggaggtcctggccatgctaggactgtgagctgctccccctga

SEQ ID NO: 46116 - DNA, 660 bp, Homo Sapiens
caggcagcagtgaggggcagccccaccctcccagagccactcctaggtgccaggtgcttgaggaggtagggacactgtggttttacaggtggagagcctgtcagggccaagcgctcagtaaaaagcaggtccatctcttgtgagcctcgccttgctccctctctgtgtgggagggttcccgagaactgcaccccgactcccagaggggctactggacattctcagtgggacgaggatagggaaccaaggaacactatatgcatggaagagctcagaaatacactctcggcacggcgggaccccgagtctctgacaaagtaccgggcagggacagggcgggggtcagggagcctgaacccacactgcctctcctgcaagggggctcaggagtccatagccttttggagggagttgggtctctctgggagtgggggcagaggctggattctgcccacaggagacggccagacagctattgtactgctggctccaagcccaagggtccacccttagcaaggcattcattcctcagtcccagcctgctcaggagttcccccacgctatcccctaagcctggagaggaatttcctgtttgcttgtcttgctcagggtggtggctgaccacagagaacagtgcaatagcatccagtgaaagaatga

SEQ ID NO: 46117 - DNA, 954 bp, Homo Sapiens
atggggatggtgagacataccaatgagagcaacctagcaggtttcatccttttagggttttctgattatcctcagttacagaaggttctatttgtgctcatattgattctgtatttactaactattttggggaataccaccatcattctggtttctcgtctggaacccaagcttcatatgccgatgtatttcttcctttctcatctctccttcctgtaccgctgcttcaccagcagtgttattccccagctcctggtaaacctgtgggaacccatgaaaactatcgcctatggtggctgtttggttcacctttacaactcccatgccctgggatccactgagtgcgtcctcccggctgtgatgtcctgtgaccgctatgtggctgtctgccgtcctctccattacactgtcttaatgcatatccatctctgcatggccttggcatctatggcatggctcagtggaatagccaccaccctggtacagtccaccctcaccctgcagctgcccttctgtgggcatcgccaagtggatcatttcatctgcgaggtccctgtgctcatcaagctggcttgtgtgggcaccacgtttaacgaggctgagctttttgtggctagtatccttttccttatagtgcctgtctcattcatcctggtctcctctggctacattgcccacgcagtgttgaggattaagtcagctaccaggagacagaaagcattcgggacctgcttctcccacctgacagtggtcaccatcttttatggaaccatcatcttcatgtatctgcagccagccaagagtagatccagggaccagggcaagtttgtttctctcttctacactgtggtaacccgcatgcttaaccctcttatttataccttgaggatcaaggaggtgaaaggggcattaaagaaagttctagcaaaggctctgggagtaaatattttatga

SEQ ID NO: 46118 - DNA, 612 bp, Homo Sapiens
atggcagaggtgcaggtcctggtgcttgatggtcgaggccatctcctgggccgcctggcgaccatcgtggctaaacaggtactgctgggccggaaggtggtggtcgtacgctgcaaaggcatcaacatttctggcaatttctacagaaacaagttgaagtacttggctttcctccgcaagcggatgaacaccaaccctttccgacgcccctaccacttccgggcccccagccccatcttctggctgactgtgcgaagtatgctgccccacaagaccaagcgaggccaggccgctctggaccgcctcaaggtgtttgactgcatcccaccgccttacgacaagaaaaagcggatggtggttcctgctgccctcaaggttgtgcgtctgaagcctacaagaaagtttgcctatctggggcacctggctcacgaggttggctggaagtaccacgcagtgacagccaccctggaggagaagaggaaagagaaagccaaaatccactaccggaagaagaaagagctcataagcctacggaaacaggccaagaggaacatggagaagaaaactgacaaatacacagaggtcctcaagacccacggactcctggtctga

SEQ ID NO: 46119 - DNA, 582 bp, Homo Sapiens
cgaggatgctacagcggatggatgtcctgcccaaggcgagctgtcccgctcgggcagagggctggggccttggggacccgggactcatgcagaagagggcacctgcctcacttgagcaatagttgctcccactctcccaccccctgcgcctctcagaaagccacagagatgggcgtgcggctgatggtggatgccgagcagacctacttccagccggccatcagtcgcctgacgctggagatgcagcggaagttcaatgtggagaagctgctcatcttcaacacataccagtgctacctcaaggatgcctatgacaatgtgaccctggacatggagctggctcaccgtgagggctggtgttttggggccaagccggtgcggggcgcatacctggcccaggagcgagcctgtgcagcagagatcggatatgaggaccccatcaaccccatgtacgaggccaccaacaccatgtaccacaggtgcctggactacgtgctggaggagctgaagcacaacgccaaggccaaggtgatggtggcctcccacaatgaggacacagtgcgcttcgcactgcgcaggtag

SEQ ID NO: 46120 - DNA, 606 bp, Homo Sapiens
gaggaattaaaaggcctacaagtccagattgccagctctgggttgactgtggaggtagatgcccccaaatctcaggaccattccaagatcatggcagacatccaggcccaatataacgagctgtctcggaagaacagagaggagctggacaagtactggtctcagcagattgaggagagcagcacagtggtcaccacgcagtccaccgaggttggagctgcagagatgacactcacaaagctgagacgtacagtccagtctttggagatcgacctggactccatgagaaatctgaaggccagcttggagaacagcctgagggaggtggaggcccgctatgccctgcagatggaacagctcaatgggatcctgctgcacctggagtcagagctggcacagacccgggcagagggacagcaccaggcccaggagtatgaggccctgctgaacattaaggtcaagctggaggctgagatagccacctacaacaacctgctggaagatggcaagaacttcaatcttcttaatgccctggacagcagcacctccatgcaaaccatccaaaagaccaacagccgctggatagtggatggcaaagttgtgtct

SEQ ID NO: 46121 - DNA, 453 bp, Homo Sapiens
atgaacgacagccttcgcaccgacgtcttcgtgcggttccagccagagagcatcgcctgtgcctgcatttatcttgctgcccggacgctggagatccctttgcccaatcgtccccattggtttcttttgtttggagcaactgaagaagaaattcaggaaatctgcttaaagatcttgcagctttatgctcggaaaaaggttgatctcacacacctggagggtgaagtggaaaaaagaaagcacgctatcgaagagggcccaagcccggggcctgttgcctgggggcacacaggtgctggatggtacctcggggttctctcctgcccccaagctgggctgaggtgcaatggcgtgatcttggctcactgcaacctccacctcctgggttcaagcgattctcctacctcagcctcccaagtggctgggatgacaggcgtgcgccaccacacccgg

SEQ ID NO: 46122 - DNA, 948 bp, Homo Sapiens
atggaaacccctgcctccttcctccttgtgggtatcccaggactgcaatcttcacatctttggctggctatctcactgagtgccatgtacatcatagccctgttaggaaacaccatcatcgtgactgcaatctggatggattccactcggcatgagcccatgtattgctttctgtgtgttctggctgctgtggacattgttatggcctcctcggtggtacccaagatggtgagcatcttctgctcaggagacagctcaatcagctttagtgcttgtttcactcagatgttttttgtccacttagccacagctgtggagacggggctgctgctgaccatggcttttgaccgctatgtagccatctgcaagcctctacactacaagagaattctcacgcctcaagtgatgctgggaatgagtatggccatcaccatcagagctatcatagccataactccactgagttggatggtgagtcatctacctttctgtggctccaatgtggttgtccactcctactgtgagcacatagctttggccaggttagcatgtgctgaccccgtgcccagcagtctctacagtctgattggttcctctcttatggtgggctctgatgtggccttcattgctgcctcctatatcttaattctcaaggcagtatttggtctctcctcaaagactgctcagttgaaagcattaagcacatgtggctcccatgtgggggttatggctttgtactatctacctgggatggcatccatctatgcggcctggttggggcaggatgtagtgcccttgcacacccaagtcctgctagctgacctgtacgtgatcatcccagccaccttaaatcccatcatctatggcatgaggaccaaacaactgcgggagagaatatggagttatctgatgcatgtcctctttgaccattccaacctgggttcatga

SEQ ID NO: 46123 - DNA, 1314 bp, Homo Sapiens
cattccttgcccagttacacagcactactggacctcagtcacaacaacctgagccgcctgcgggccgagtggacccccacgcgcctgacccaactgcactccctgctgctgagccacaaccacctgaacttcatctcctctgaggccttttccccggtacccaacctgcgctacctggacctctcctccaaccagctgcgtacactggatgagttcctgttcagtgacctgcaagtactggaggtgctgctgctctacaataaccacatcatggcggtggaccggtgcgccttcgatgacatggcccagctgcagaaactctacttgagccagaaccagatctctcgcttccctctggaactggtcaaggaaggagccaagctacccaaactaacgctcctggatctctcttctaacaagctgaagaacttgccattgcctgacctgcagaagctgccggcctggatcaagaatgggctgtacctacataacaaccccctgaactgcgactgtgagctctaccagctgttttcacactggcagtatcggcagctgagctccgtgatggactttcaagaggatctgtactgcatgaactccaagaagctgcacaatgtcttcaacctgagtttcctcaactgtggcgagtacaaggagcgtgcctgggaggcccacctgggtgacaccttgatcatcaagtgtgacaccaagcagcaagggatgaccaaggtgtgggtgacaccaagtaatgaacgggtgctagatgaggtgaccaatggcacagtgagtgtgtctaaggatggcagtcttcttttccagcaggtgcaggtcgaggacggtggtgtgtatacctgctatgccatgggagagactttcaatgagacactgtctgtggaattgaaagtgcacaatttcaccttgcacggacaccatgacaccctcaacacagcctataccaccctagtgggctgtatccttagtgtggtcctggtcctcatatacctatacctcaccccttgccgctgctggtgccggggtgtagagaagccttccagccatcaaggagacagcctcagctcttccatgcttagtaccacacccaaccatgatcctatggctggtggggacaaagatgatggttttgaccggcgggtggctttcctggaacctgctggacctgggcagggtcaaaacggcaagctcaagccaggcaacaccctgccagtgcctgaggccacaggcaagggccaacggaggatgtcggatccagaatcagtcagctcggtcttctctgatacgcccattgtggtgtga

SEQ ID NO: 46124 - DNA, 1612 bp, Homo Sapiens
aggagacgccgccgccttcatgctgccggcgggctgctcgcgccggctggtggccgagctgcagggcgccctggacgcctgcgcacagcgacaattgcaattggagcagagcctgcgcgtttgccgtcggctgctgcatgcctgggaaccaactgggacccgggctttgaagccacctccagggccagaaactaatggagaggacccccttccagcatgcacacccagtccacaagacctcaaagagttggagtttctgacccaggcactggagaaggctgtacgagttcgaagaggcatcactaaggccggagagagagacaaggcccccagcctgaaatctaggtccattgtcacctcttctggcacgacagcctccgccccaccgcattccccaggccaagctggtggccatgcttcagacacgagacccaccaagggcctccgccagaccacggtgcctgccaagggccaccctgagcgccggctgctgtcagtgggggatgggacccgtgttgggatgggagcccgaacccccaggcctggggcgggcctcagggaccagcaaatggccccatccgctgctcctcaggccccagaagccttcacactcaaggagaaggggcacctgctgcggctgcctgcggcattcaggaaagcagcttcccagaactcgagcctgtgggcccagctcagttccacacagaccagtgattccacggatgccgccgctgccaaaacccagttcctccagaacatgcagacagcttcaggcgggccccagcccaggctcagtgctgtggaggtggaggcggaggcggggcgcctgcggaaggcctgctcgctgctgagactgcgcatgagggaggagctctcggcagcccccatggactggatgcaggagtaccgctgcctgctcacgctggaggggctgcaggccatggtgggccagtgtctgcacaggctgcaggagctgcgtgcagcggtggcggaacagccaccaagaccatgtcctgtggggaggccccccggagcctcgccgtcctgtgggggtagagcggagcctgcatggagcccccagctgcttgtctactccagcacccaggagctgcagaccctggcggccctcaagctgcgagtggctgtgctggaccagcagatccacttggaaaaggtcctgatggctgaactcctccccctggtaagcgctgcacagccgcaggggccgccctggctggccctgtgccgggctgtgcacagcctgctctgcgagggaggagcacgtgtccttaccatcctgcgggatgaacctgcagtctgagcctttcccatgctgccctcggcctgttcagatggggattgggggtgtcttccctggcactgtgctcggggacccagagatgcctgtgcttccctgggaaacctggtgaactggaccaggtggcctcactggctcttctcaggacaactaagcctgctggtcagggctggctttcagccttcctaaggctcctggactccagaggccagcggggagcctttcctggctccctctgttttctctcactgtagaccaaagagccgcttgtgtgatattaaagccactttagaa

SEQ ID NO: 46125 - DNA, 480 bp, Homo Sapiens
aagaaccagattgccatttatgaactcctttttaaggagggagtcatggtggccaagaaggatgtccacatgcctaagcacccagagctggcagacaagaacgtgcccaaccttcatgtcatgaaggccatgcagtctctcaagtctcaaggctacatgaaggaacagtttgcctggagacatttctactggtaccttaccaatgagggtatccagtatctccgggattaccttcatctgccccccgagactgtacctgctaccctacgccatagctgtccagagaccggcaggcctcagcctaaaggtctggagggggaagctgacagacatacctacagatggagtgctgacagacatacctacagatggagtgctgtgccacttagtgccgacaagaaagctgaggctggggctgggtcagcagccaaattccagttgagaggatttggtcgtggacgtggtcagccacctcagtaa

SEQ ID NO: 46126 - DNA, 2223 bp, Homo Sapiens
gtctcgtttggtattcactttcgcgactcaggtgaactaacctgcgagaagctggttgtgcgctgaggcgaccagcgccggaaggcacggtggcgactcacgctgttctcgccgctcagaggcgggtctgaggctcggtggcggcgcccagggtggcccgggccctttcctcggtcattgtctcccctccagctctactcacaggctccgatggcggcggccgccctgagggaccccgctcaggttcctgtggctgcagacttgcttacagaccatgaggagcagggctatgtgacctttgaggatgtggctgtctacttctcccaggaggaatggagattgcttgatgacgctcagaggctcctctaccgcaatgtgatgctggagaactttacacttctggcctctctgggttgttggcatggagccgaggctgaggaggctcctgagcagattgcttctgtaggactgctcagttcaaacattcagcaacaccagaagcagcactgtggagagaaacccttaaaaagacaagagggcagggtcccagttttgaggagttgcaaagttcacctatcagagaagtccttgcaaagcagggaggttgggaaggccctcctgatcagctcaggtgttctcaagcaccaggtgactcacacaggagagaagtcacataggagctccaaaagtagggaggcctttcatgctggaaaaaggcattacaaatgcagtgaatgtgggaaagcctttggtcagaaatatttacttgttcagcaccagagactacatgctgggaaaaagacgtatgaatgcagtgaatgtgggaagttatttagagatatgtccaacctttttatacaccaaatagttcacactggagaaaggccttacgggtgtagtaactgtggaaaatcctttagccgtaatgctcacctcattgaacaccagagagttcacactggagaaaagccttttacatgcagtgaatgtggaaaagctttcaggcataattccacacttgttcagcatcacaaaatccacactggagtaaggccttatgagtgcagtgaatgtggaaaattgtttagtttcaactccagcctcatgaaacatcagagaattcacactggagaaagaccttataagtgcagtgaatgtggaaaattctatagccacaagtccaaccttatcaaacattggcgtgttcatactggagaaaggccttacaagtgcagcgactgtgggaaattttttacccaatgctcaagcctcatgcaacatcaaaaagttcacactggagaaaagccttttaagtgcaatgaatgtgggagattctttagagagaattccaccctagttagacatcagagggttcacactggagcaaagccttatgagtgcagggaatgtgggaaattttttagccaaagctcaaccctcatgcaacatcgaaaagttcacattggagaaaagccttttaagtgcaatgaatgtgggagattgtttagagagaattccagccttgttaaacatcagagggttcacactggagcaaagccttatgagtgcagggaatgtgggaagttttttcgccacaactccagtctttttaaacatcgaaggattcacactggagaaatgcagtgattgtgtgaaatcctttagccagcgtttcaacctcattcaacaccagaaagttcacagtggaaaaaatcttgaaggtaacagatggaaatccgttagccacacctccagtctcattcaacactggacagtttacaatgtggacaatgtagtgaatatggaaaaaggtttcagccaaaggcctaaccctattcaacaccagaaagtttacactggagaaaggccttagggtgacaggttatgtactgtctctgaatcaatatgacctcacttaaaacagaaactctgaggatggcctttatgagggagctggcaattgaacatcattcatctaaatatgcacactggaggcaagatgagaattcctgacagattgtccttcctgagaagacagccctctgccttggagctccagagagagggagccctgtattcttggctgtacccgtcgaatggagttttgatctcgctgagtttggagttgggggaggaaaggagtggtcttggttcaaatgtgactcacttttgctgttcttgtgaatgttagatcttctttaataaatatttatttcccataca

SEQ ID NO: 46127 - DNA, 1277 bp, Homo Sapiens
acagacatcagctcgggtcaaccgcgggcctcgagcccgagtggctgagggctgttaccttcaaacctttgaatcccacgttttccccttgacttcctgtcaccgttagagaaaagtggacagcgtctcggtcacagagttggagaaatagtgcagggactcttcagggagagcgttttcctcatcaaagcaaactgcaaaatcgcttctgccggcgtggacctgatgagagtcggtcgtcgtgagggacaccctctgttccctaacgtcccccgctgcttatttttaaacgctcggttggcgggaacccctgtgccagctgaaactccttcagtttggccgcctaggaaacaccgagagtcacctacatgggctggctgggcaataaaaacgggaaaaaatgtaaaagacacagtctccgccttcgaagcttacacccccggggcaagacctacaggaaaatagataatcccattattctctgataaaagccgagctgcttgccatgagctctgggagcagacggggaggccttgttgagaaagccttcacctgggagtgacaattgcgctgaatcttaagcataagtaagttctccagtttagggaagagagggaagggcattgcaaggagaggaagcaaagaggaagaggacctggtttgagtaattgggtatgaaaacagatattgcagcaagaactttgttgaaaaacctttaaccactgtttagttcggatgagaacattcccaggctcctacgtgtgatacgcaaagtattttccaaatcagtgtttatgctaagaagatgagcagttgagctggacaattataagataacttcatctttctcctgtaaggacacttaaatatcagaaacctaagagaaacgggttattgtcgtaattcactaagttattatagccaacattttgctaaattggaaattgccaataatttcaagttgtctacataagagcaatctaataggaattttgtgatacagtttctcagagaaactctgagaaaattctcaggcaaaaaacaaaaacgtcatcagtcctgatttattatcaaaattttctcctataagctctgctcagaagaagtcattctgtagtccaagttagggctaatgaggagccatactcttacatcaaaatagaagctgtccttttctaaagaaagactctggtattttgctgtagtttccactcaccttcctttggacacattattttcatattacatataaaaatatgtatactatatgaaaaata

SEQ ID NO: 46128 - DNA, 537 bp, Homo Sapiens
aacaacttcagcacagaaataaataccacttctgttttagtaggacctcttgtttccaatttggagataacccatacctcaaacctcacctgtgtaaaatttagcaattctatagacacaaccaactcccaatgcatcaggtgggtaactcctcccacacaaatagtctgcctaccctcaggaatattttttgtttgtggtacctcagcctatcattgtttgaatggctcttcaggatctatgtggttcctctcattcttagcgcccccaatcatctacactgaacaagatttatacaattatgtcatacctaagtcccataacaaaagagtacccattctttcttttgttattggagcaggagtgctagacggactaggtgctggcattggtggtatcaaaacctctactcagttctactataaactatctcaagaactaaatggtgacatggattgggtcaccaactcactggtcaccttgcaagatcaacttaactccctagcagcagtagtccctcaaaatcgaagagcttta

SEQ ID NO: 46129 - DNA, 2389 bp, Homo Sapiens
atggctgcagtccgtatgctgagaacctggagcaggaatgcggggaagctgatttgtgttcgctattttcaaacatgtggtaatgttcatgttttgaagccaaattatgtgtgtttctttggttatccttcattcaagtatagtcatccacatcacttcctgaaaacaactgctgctctccgtggacaggttgttcagttcaagctctcagacattggagaagggattagagaagtaactgttaaagaatggtatgtaaaagaaggagatacagtgtctcagtttgatagcatctgtgaagttcaaagtgataaagcttctgttaccatcactagtcgttatgatggagtcattaaaaaactctattataatctagacgatattgcctatgtggggaagccattagtagacatagaaacggaagctttaaaagattcagaagaagatgttgttgaaactcctgcagtgtctcatgatgaacatacacaccaagagataaagggccgaaaaacactggcaactcctgcagttcgccgtctggcaatggaaaacaatattaagctgagtgaagttgttggctcaggaaaagatggcagaatacttaaagaagatatcctcaactatttggaaaagcagacaggagctatattgcctccttcacccaaagttgaaattatgccacctccaccaaagccaaaagacatgactgttcctatactagtatcaaaacctccggtattcacaggcaaagacaaaacagaacccataaaaggctttcaaaaagcaatggtcaagactatgtctgcagccctgaagatacctcattttggttattgtgatgagattgaccttactgaactggttaagctccgagaagaattaaaacccattgcatttgctcgtggaattaaactctcctttatgcctttcttcttaaaggctgcttccttgggattactacagtttcctatccttaacgcttctgtggatgaaaactgccagaatataacatataaggcttctcataacattgggatagcaatggatactgagcagggtttgattgtccctaatgtgaaaaatgttcagatctgctctatatttgacatcgccactgaactgaaccgcctccagaaattgggctctgtgagtcagctcagcaccactgatcttacaggaggaacatttactctttccaacattggatcaattggtggtacctttgccaaaccagtgataatgccacctgaagtagccattggggcccttggatcaattaaggccattccccgatttaaccagaaaggagaagtatataaggcacagataatgaatgtgagctggtcagctgatcacagagttattgatggtgctacaatgtcacgcttctccaatttgtggaaatcctatttagaaaacccagcttttatgctactagatctgaaatgaagactgataagacattcttgaactttttgagcttccaaagagtatgtaaaccctagctgtgccagcacatgttcatctttacaatttatattgtaaatgatttgtatcgtatgattaaggatctaaggcacaatatttgtcactgttctattagactttttactgaaaatgaataatggtgtaatggttctcctggggctgtcacattttataggtcagagtgtgacttcttaatatggtgctgatgtttttgtgtcaatggcttgaaactggcaagattaacaaaattaggccgggcatggtggctcacgcctgtaatcccagcactttgggaggcccaggtgggcggatcacctgaggttagaagtttgagaccagcctggccaacatggtgaaacctggcctctactaaaaatacaaaaattagccgggtgtggtggtgggtacctataatcccagctacttgggaggctgaggcaggagaatcgcttgaacctgggaggtggaggttgcagtgagctgagatcgtgctattgcactccagcctgggcgacagagcaagacgccatctcaaaaacaaaaaaacaaaattcatgttactaaaagacaggtagccatatacagacagtatatgccctattttttttaactgactcttaatgaaactttaattttacttaattaagaaatggaatttatatacaaaaatattttccatttccgttattatgctaattgttgtatgaaataagtgcaattatacttctcttttgagatatccaagagtatattcttgctctgtatagagaatatcatctgatagtgtcttatttatattaattaatgtctttgaaaagggaaaagtataaactggccttaaaattgtccaattatagttttataaccagtctattaaaggtgtttgtttaaaatggatata

SEQ ID NO: 46130 - DNA, 107 bp, Homo Sapiens
gcaccacaacaaccctgtggcactgaatggcggtagaagatggcagcctgaaatgatcttgaaggaagccattgaaaaccatcagaacatgattaagcagtttaaag

SEQ ID NO: 46131 - DNA, 717 bp, Homo Sapiens
atgagcagcggctacagcagcctggaggaggacgccgaggacttcttcttcaccgccaggacctccttcttcaggagagcgccccagggcaagccccgctccggccaacaagatgttgagaaagagaaggaaacccacagttacctcagcaaagaggagatcaaagagaaagttcataaatacaacttagcagtcacagacaagttgaagatgaccttgaattcaaatgggatttacactggcttcattaaagtacagatggaactctgcaaacctccacagacttctccaaattctggaaaactctctcccagtagcaatggctgtatgaatacacttcatatcagcagcacaaacactgtcggggaagtgatcgaggccctgctcaaaaagtttctcgtgactgagagccctgccaagtttgcactttataagcgttgtcacagggaagaccaagtctacgcctgcaagctctcagaccgggaacatccactctacctgcgtttggtagcagggcccagaacagacacacttagttttgttcttcgtgaacatgaaattggagagtgggaagccttcagccttccagaactacagaatttcttgcgcatcttggacaaggaagaagatgaacagctgcagaacctgaagaggcgctacacagcctacaggcagaagctggaagaagccctccgtgaggtgtggaagcctgattaa

SEQ ID NO: 46132 - DNA, 987 bp, Homo Sapiens
atgagaccaagcagcaatgttacagaatttgtcctcctgggcctcactcaagatcctgatgtgaaaaaaacattatttgtcatgtttttactcatatacattgtgacaatggtgggaaacctcctcatttgggtgactactattggcagcccctccttgggctccctaatgtacttcttccttgcctacttgtcacttatggatgccatatattccactgccatgtcacccaaattgatgatagacttactctgtgataaaatcgctatttccttgtcagcttgcatgggtcagctcttcatagaacacttacttggtggtgcagaggtcttccttttggtggtgatggcctatgatcgctatgtggctatctctaagccgctgcactatttgaacatcatgaatcgactggtttgcatccttctgttggtggtggccatgattggaggttttgtgcactctgtggttcaaattgtctttctgtacagtctaccaatctgtggccccaatgttattgaccactctgtctgtgacatgtacccattgttggaactgttgtgccttgacacctactttataggactcactgtggttgccaatggtggaataatttgtatggtcatctttacctttctgctaatctcctgtggagtcatcctaaacttccttaaaacttacagtcaggaagagaggcataaagccctgcctacctgcatctcccacatcattgtggttgccctcgtttttgttccctgtatttttatgtatgttagacccgtttccaactttccctttgataaattaatgactgtgttttattcaattatcacactcatgttgaatcctttaatatactcgttgagacaatcagagatgaaaaatgctatgaaaaatctctggtgtgaaaagttaagtatagttagaaaaagagtatctcccacactgaacatatttattcctagttctaaggcaacaaataggcggtaa

SEQ ID NO: 46133 - DNA, 768 bp, Homo Sapiens
atggaaaatccccaagacattttctcaagtaatggtggctgtctaagtgatatagttatagaaaaatacctggttgaatccaaggagtctgtgtctcatgttcagcttgcttgcagcatgcaggactgtgctttccctttggatggaactgaactttgtatatggaacactaaggatccttctcatcagcttctaatcctacgaggacaccatcagccaattactgctatggcttttggaaataaagtgaacccacttctaatctgctcagcatcactggattatgttataatgtggaacctggatgaatgtagagagaaagtacttcaagggctggtccctcgagggactgtcatgggctcgcttttgggaaaggtgctgtgtttacagttgagcctggatgatcatgttgttgccgtgtgtgctggaaacaaaatattcatgctggatattgagcagcgattttctgtgacatacatagaacgtcctgatgttaataaccgccacaaagtcccaccaccgaccttcctgcacacattctctcagactcaggctgttcgggccgagctgcagggccacctgggcccggtgactgcggtggagttctgtccctggcgagcaggcaccctcatctcggcgtctgaggacagaggctttaaggtctgggaccattgtacaggatcattaatatacagttcatctgtgttatcagcatatcctcttctcagtttattcattgatgcagaaagcaggcagctggtcaccggg

SEQ ID NO: 46134 - DNA, 1974 bp, Homo Sapiens
gtcacgggcgcccggcccgttaaaacgctgctggctggagccacctccctccctgcagcccgcaacgggaatggagtaaagggagacccgtcgacctggccacggggatcagcgatggaattaaagcaatctttgtccacccatctggaagccgagaagcctctgaggcgctatggggcggtggaggagacggcttggaaaacggagagactggggagaaatcagctggacatcatctccatggcggagacaaccatgatgccagaggagattgagctggagatggcaaaaattcagcgtctccgggaagtcttggtccgccgggagtctgagctcaggttcatgatggatgacatccagctctgcaaggacatcatggacttgaagcaggagctgcagaacttggtcgccatcccagaaaaagaaaaaaccaaactgcagaagcagagagaggatgagctaatccagaagatccacaaactggtgcagaagagagacttcctggtggacgatgcggaggtcgagcggttaagggagcaagaagaagacaaggaaatggctgatttcctgagaatcaagttaaaacctctagacaaagtaaccaaatctccagccagctcccgggcagagaagaaagcagagcccccacctagcaagcccacggtggccaagacggggctggcactgatcaaggattgttgcggggccacccagtgcaacatcatgtagcccccacgtggggtgccctgggccatggggacccccccccaccctcttgtctttatagcccccatttcaccggggcccaagagctctccaaggcagaaggggttgaaggcaagcccgtgactgtcaccagaggccatgggcacggcaggcgggcctggccaccctgtacagagtgtagcagtagggagtctctcaccgtcgcatggtcctccccagagcatgccgaacccaggagtctgtctcactgtttatccaaacaccaggaaaggtcctccctcaaaaaagcatatctccacttctctctagctgtatctaacccaccgtgtgaatgaactgggagaggggcatgctccccagctgtgtgtagtcgtgacttctcaacaatctagcaccatgtcggacacgttccccatccaccctcctagctctgctctcagagctaggcacatgggcacaggtcccctcccgtctgtcctctcccagcaactgtgccctggagggctccacatggcccccgtgtctctcgggcaccacccatatagcagtcccagagggcccatctgtaaagatcgagcttgtgtgtggtgtcgtggtcacatctcccgcttccccccatcctgtgtctgggcacagttcacatcaggacagcgtccattgtgctctcagtctgcctcaggtgtgtgcctggagggggcctggactggcatggatccagtgtgcagaagagccagcagggaaccggaagctctgatgtcaaggccagagcagttgagaatgggacccagagtagatgctgacctgggcactccaccattccggggccaccacagagatgccagcaggatgccactttgccagcccgacacacggacctttgtaaagaacagcaacaggcaggagaggcagcgtgtgaccagattgtgtcccgtcattgggtggcatatgttaactagctgccaaacaacttcaacccgtgtaattcatgtacatttgcaacagccagcccggtacagcctgtgtgacttctctgtatgtgtgtgtgtgtcgtgaccagcctaagtagttagcataactcaagatgctgatgtgcagtcacccatcagagaaaataaaaatggaaaccacgttcacagcattttaaaagtttttactttttttcttgattatggaagtaatccatgtacatagtaaatcattttaaaagtacaaaaagtatgaagaagtttgtcttaaaaaaaaaaaaaa

SEQ ID NO: 46135 - DNA, 606 bp, Homo Sapiens
acaccagccacccgacttaacagattcaagaacaaagaaaaagacagcacagaaatgaggcatcacagaatagaagtcaatgtggagctgaggaaagctaagaggagaaatataagctcatttcctgatgatgctacttctccgctgcagaagaactgcaacaaccaggatactgtaaattggtctgttgatgacattgtcaaaggtataaataacaacaatgtggaaaacaacataatccaggctggtttgattccaacatttctgtccttcttgggaagaactgattgtagtcccattcagtttgaatctgcttgggcactcactaacattgcttctggggcattagaacagaccaaggctgtggtagacggaggtgccatcccagcattcatttttctgttggcatctccccatgctcacatcagtgaacaagctgtatgggctgtaggaaacattgcaggtgatggttccattttccgagacttggttatcaactgcggtgcagttgacgcactgttggctcttcttgcagttcctgatatgtcatctttagcatgcgattacttacgtaatcttatgtggacactttcaaacctttgccgc

SEQ ID NO: 46136 - DNA, 213 bp, Homo Sapiens
atggagcaagcaagggatcacttacacctgagatggactacagaacagcacatgcccgaggtggaagttcaagtcaaatacagaacagctgcactgagcaaccaagagtgtcaattgtacctgaggcattctcagcagcagcaagtgcttgtggtggatttccaggccaaactgagacaggtattcataactgagacaccaagatgtggtaaa

SEQ ID NO: 46137 - DNA, 567 bp, Homo Sapiens
tgttttagagcactttgctgcaagggaccaccacctgcacgaccagaatatgacctggtttgcataggcctcacaggttctggcaaaaccagtctgttgtccaaactctgcagtgaaagccccgataacgtcgtgtcgaccacaggttttagtattaaagcagtgccattccagaatgccatcttgaatgtaaaagaacttggaggggctgataacatccggaaatactggagccgctactaccaaggatctcaaggggtaatatttgtattagacagtgcctcttcagaggatgatttagaagctgctagaaatgagctgcactcagctcttcagcatccacagttatgcactttaccctttttaatattggccaatcatcaagacaagccagcagctcgctcagtacaagagatcaaaaaatattttgaacttgaaccacttgcacgtggaaaacgctggattctacagccctgctcactggatgacatggatgcactgaaagacagcttctctcagctgattaatttgttagaagaaaaagaccatgaagctgtaagaatgtga

SEQ ID NO: 46138 - DNA, 1557 bp, Homo Sapiens
atggccagaccttccccactatgcctcctactcctcctgaccctcctaacccccatagtgcccagtaactccctcctaactgaacccccgttccgatggaggttctacctgcatgagacttggacccaaggcaaccggctctccactgtcacactggcaacggtggactgccaacctcacggttgtcaggcccaagtaacttttaacttcacttcctttaaaagtgttctgcggggctggtccaatcccaccatctgctttgtctatgatcaaacacacagcaactgccgcgactattgggtggacacaaacggaggatgcccctatgcctattgtcgtatgcatgtgacccagctccataccgccaagaaactccaacacacctatcgcctgacatctgatggaaggacaacttacttcctgaccatcccagacccatgggattctcggtgggtcagtggagtcactggtcgactgtaccggtggcccaccgactcctacccagttggcaaactccggatattcctgacttatatacgagttatcccccaggttttgtctaatttaaaggaccaagcagacaacattaagcatcaggaagaggtcatcaatactttggtgcagtcccatccgaaggctgacatggtcacctatgatgacaaggctgaggcaggaccgttttcatggataaccctagtccgccacggggctcgccttgttaatatggcaggcctagttaatctctcccactgtttcctttgcaccgccctcagccaaccaccactagtagctgtacccctaccccaggcttttaacacctctggtaaccacactgcccacccttccggcgtcttctctgagcaggtccctcttttccgagaccccctccagccccagttccccttctgctacaccactcctaactcatcctggtgcaaccagacctattctggctccctatctaacctctctgcaccggcaggtggctacttctggtgtaacttcacccttacaaaacatcttaatatttcctctaacaataccctttctagaaacttatgcctccccatctctctggtgcctcgactcactctgtacagcgaggctgaactctcttcccttgtcaacccgcctatgcgtcagaagcgggccgttttcccaccgctggtaataggtgtctccttgacctcctcacttgttgcctccgggctgggcacaggtgctattgtacatttcataagctcttcccaagatctctctattaagctccagatggccatcgaagcctcagtagaaaccagcctcctcacccttgataaaatccgggacggtctccatcgaccctcctcaactcccaactatggaggagggtggtggcaatcccctttaaccacttggattatccctttcataagccccatcctaatcatttgccttttacttctcatagccccctgtgtcctcaagttcatcaaaaaccgcatcagcgaagtctcccgggtgacggtcaaccaaatgttactacacccttactcccgtcttccgacctccgaagac

SEQ ID NO: 46139 - DNA, 582 bp, Homo Sapiens
atgttcagttcgagcgccaagatcgtgaaacccaacggcgagaagccggaggagttcgagtccggcatctcccaggctcttctggagctggagatgaactcagaactcaaggctcagctcagagagctgaatattacggcagccaaggaaattgaagttggtggtggtcggaaagctatcataatacttgttcccgttactcaactgaaatctttccagaaaatccaaatccggctagtaagtgaattggagaaaaagttcagtgggaagcatgtcgtctttatcgctcagaggagaattctgcctaagccaactcgaaaaagctgtacaaaaaataagcaaaagcgtcccaggagcagcactgtgacagctgtgcacgatgccatccttgaggacttggtcttcccaagtgaaattgtgggcaagaaaatccgcgtcaaactagatggcagccggctcataaaggttcatttggacaaagcacaacagaacaatgtggaacacaaggttgaaactttttctggtgtctataagaagctcatgggcaaggatgttaattgtgaattcccagagtttcaatag

SEQ ID NO: 46140 - DNA, 429 bp, Homo Sapiens
atggggaaagagaagcggttgtctgttcacctcatccttgccactccgccttatacctcaccatcggagaacttaccatcccccaaatatatcctgctggcactacaccttcgtaactgctgttcccactgcccccacaacactccaatctccaccttcctgccaaccttgagatattgtatgcatatatacatatttcctttgtttaaaatacaaatagcatactatgcatgctgttctgcactttgctttttttttatacttgcaattagagctgcctcatttcattttacagctgtatactattccattgaatggataaaccataatttatttaatcagtccctcactgacagacgtttccattgtttcctgtcttttgctataaataatgctgtaatgaatattcttgtgcatatttcacattaa

SEQ ID NO: 46141 - DNA, 258 bp, Homo Sapiens
atgctgagacggaaaccaacacgcctagagctaaagcttgatgacattgaagagtttgagaacattcgaaaggacctggagacccgtaagaaacagaaggaagatgtggaagttgtaggaggcagtgatggagaaggagccattgggcttagcagtgatcccaagagccgggaacaaatgatcaatgatcggattggttataaaccccaacccaagcccaataatcgttcatctcaatttggaagtcttgaattttag

SEQ ID NO: 46142 - DNA, 297 bp, Homo Sapiens
acaggaattatttccctctatgattgtatttttaagaggcgcctagattatgatcagaagttgcaccgagatgacagagaacatgcaaaaagcctgggacttcatgttaacgaagaggaacaggagaggccggttggagtgctgacgtcttctgtctatgggaagcgcatcaatcagcccattgagcccctaaaccgggactttggccgtgccaaccatgtgcaggctgacttctacaggaagaacgacatccccagcctcaaggaacccggctttgggcacattgctccatcctga

SEQ ID NO: 46143 - DNA, 2415 bp, Homo Sapiens
gggcctgcctgacacttgggcgctccttcagtctcgatgttgatggcaggacaaaggggcgcctggaccatgggtgatgtggtcgagaagagtttggaagggcccctggcaccttctacagatgagccctcccagaaaacaggagacttggtcgagatcttaaatggggaaaaggtcaaatttgacgacgcgggactctccttaattcttcagaatggcctggaaaccctgcgaatggaaaacgctctgacagatgtcatcttgtgtgtggacattcaggaattctcctgccaccgcgtggtgcttgccgcagccagcaactatttcagggccatgttctgcaacgatttaaaggaaaagtatgagaaaaggatcattattaaaggggttgatgctgagaccatgcacactctgttggactacacgtacaccagcaaggcgctgatcaccaagcagaatgtccagcgggtcctggaggctgctaacctcttccagttcctgcggatggtggatgcctgtgccagcttcctcactgaagccttgaacccagaaaactgcgttggaatactgaggctggctgacacacactcgctggacagtctaaagaagcaggttcagagttacatcattcaaaactttgtgcagattctgaactctgaggagtttcttgacctgcccgtggacactctgcaccacatcttgaagagtgatgacctttacgtgaccgaggaggctcaggtgtttgagaccgtgatgagctgggtccggcacaagccatcagaacgactctgcttactcccctatgtcctcgagaacgtgcgcttaccgcttctggacccgtggtactttgtggagacggtggaagcagatcctctcatcaggcagtgcccagaggtcttcccgctgctccaggaagccaggatgtaccacctttctggcaatgagatcatttcggaacgcaccaagcccaggatgcatgagttccagtctgaggtgttcatgatcattggcggctgcacgaaggatgaacggtttgtggcagaggtgacctgcctggaccccctgaggcgcagccgcctggaggtggccaagctcccgctaacagagcatgagctggagagtgagaataagaagtgggtggagtttgcatgcgtgacattgaaaaatgaggtctacatctcaggtggcaaagaaacacagcatgatgtttggaaatataattcttcgatcaacaagtggattcagattgagtatttaaacataggccgctggaggcataagatggtggtgttgggtggcaaggtctatgtgatcggaggctttgacggcttacagagaatcaacaatgtggagacctacgacccctttcacaactgctggtcagaggccgcacccctccttgtccatgtcagttcctttgcagccaccagccataagaagaagctgtatgtgatcgggggagggcccaatgggaaactggccacagacaagactcagtgttatgacccttccaccaacaagtggagtttgaaggcggccatgcccgtggaggctaaatgcatcaatgcagtgagtttccgggaccgcatctatgtcgttggtggggccatgagagcgctgtacgcctacagcccgctggaagacagctggtgcctggtgacccagctcagccacgagcgggccagctgcggtatcgcgccctgcaacaaccggctctacatcaccggcgggcgggacgagaagaacgaggttatcgccacggtgctgtgctgggaccccgaggcccagaaactgacagaggagtgcgtcctgccccggggcgtgtcgcaccacggcagcgtcaccatcaggaagtcgtacacccacatccgcaggatcgtgcccggagcagtgtctgtctgacggcaggatggggagctggagagcccccccgaccctcagcgtacccgcctcacctctcaccctcctccagtcccacttcaggcagcaggctcgagtttgaggccatacatcaggggatccccttgactcactttgggggaaccttggaagtcacagtttggggtcacttgagaccggccaggaatgtttgcatgacctacctcaggaggggaggcgaggaagagtaatatttagcattcaggacccacccaccctatgccggcttctgtgccaggcacttccttttatcggttcatttaacctggtgactggctcttatcacttctagtttacaggtgagggaaccaagtttcacagaggctaagtggcgtgcccctgatcactcagatagcaagtagctaccccaggagtctaaaatccaggtctttcatctccgaagtcaatgctctttccaccatgctgcctatctcagagcaggaaaaacaaacaaaaaacaacaacaaaacctggctc

SEQ ID NO: 46144 - DNA, 930 bp, Homo Sapiens
atggccagtacaagtaatgtgactgagttgattttcactggccttttccaggatccagctgtgcagagtgtatgctttgtggtgtttctccccgtgtaccttgccacggtggtgggcaatggcctcatcgttctgacggtcagtatcagcaagagtctggattctcccatgtacttcttccttagctgcctgtccttggtggagatcagttattcctccactatcgcccctaaattcatcatagacttacttgccaagattaaaaccatctctctggaaggctgtctgactcagatattcttcttccacttctttggggttgctgagatccttttgattgtggtgatggcctatgattgctacgtggccatttgcaagcctcttcattatatgaacattatcagtcgtcaactgtgtcaccttctggtggctggttcctggctggggggcttttgtcactccataattcagattctcgttatcatccaattgcccttctgtggtcccaatgtgattgaccactatttctgtgacctccagcctttattcaagcttgcctgcactgacaccttcatggagggggttattgtgttggccaacagtggattattctctgtcttctccttcctcatcttggtgtcctcttatattgtcattctggtcaacttgaggaaccattctgcagaggggaggcacaaagccctctccacctgtgcttctcacatcacagtggtcatcttgttttttggacctgctatcttcctctacatgcgaccttcttccactttcactgaagataaacttgtggctgtattctacacggtcatcacccccatgctgaaccccatcatttacacactcaggaatgcagaggtgaaaatcgccataagaagattgtggagcaaaaaggagaatccagggagggagtga

SEQ ID NO: 46145 - DNA, 921 bp, Homo Sapiens
gagaaccacacagtgataagggagtttgttttccagggtttctccagctttcatgaacacaagcttaccctctttgtggtatttcttaccttgtgtcttttaaccctggctggcaatgtcataattgtgacaattatcagcattgatcgtcaccttcacacccccatgtacttctttgttagtatgctttccacttcagagactgtctacacattagtcattgtaccacggatgctctccagtctcttaagtctaagccaacctatctctttgggtggctgtgccacccagatgttttttttattaccttggccatcaacatgctttctgctcacagcaatggggtatgatcgctatgtggccatctgtaaccctttgaggtacatgatcatcatgaacaagaaagtgtgtgtccagctggtatgtgggtcctgcagtgttgggctgcttgtggccatagttcagatttcatctgtgttcaggctgcctttttgtgataaacaggtggcccattatttctgtgatatccacccagttatgaaactttcctgtgttgataccactctacatgacctaattaattttgttgttagttccctggttattgtggtgccgctgggtttggtcttcatctcctacatcctcatcatctctaccatcctcaaggtcacctctcctgagggccggaaaaaggcttttgcaacttgtgcctcccacctcactgtggttatcatccactatggctgtgcctccattgcctacctcaagcccaagtcagagaacaccagggatcaggaccagctaatttcagtgacatacaccgtctttactccactacttaatcctgttgtgtacactttgaggaacaaggaggtcaagaatgcccttcaccgtgctattggcaaaaaaccttttgcctag

SEQ ID NO: 46146 - DNA, 1156 bp, Homo Sapiens
cccgcgtacagcacctacatcccgccaccgtcaccgccaccaccatgcccaagagaaaggctgaaggggatgctaaaggaggtaaagccaaggtgaaggacgaaccacagagaaggtctgcaaggttgtctgctaaacctgctcctccaaagccagagcccaagcctaaaaagacccctgcaaagaaggcagagaaggtacccaaagggaaaaagggaaaagctgatgctggtaaggaggggaatagccctgcagaaagtggagatgccaaaacagaccaggcccagaaagctgaaggtgctggagaggccaagtgaagtgtgtgcatttttgataactgtgtacttccagtgactgtacagtttgaaagaccattttttaaatcaagttttataaaaatgcagaattttgttttacttttatttttcttttaaagctatgttgttagcacacagaacacttcattgtttgttgggggaggggcatatgtcactaacagaatgtctccaaagctggattgatgtggagaaagcacctttcccttctagtcttgagagacttcctcttggctcccaggaggagggattccctgactttgacacacatggccaccttggcacaaaagccttgtggtgtggaaaaacaaatttgtttttatgtcctcttctccctttccatctttcagcatagacttaactcctttaatcccaggcatctgttgggacctgacccctagtcattggttaccagtgtgtcaggcaatctggactttccagtgatgccactgagatggcacctgtcaaaagagcagtggttccatttctagattgtggatcttcagataaattctgccattttcatttcacttcctgaaagtcagagtcggcttgtgaaaagttgttaaacaacatgctaaatgtgaaatgtcaaccctcactctaaactttccctgttcagagcatgagatgaagacttctttgggttttatagcggctttctgatttttcgtagtccattgaagaagggagtttgaaagttgttgtatactgttaacaattgtctgcccatgtcctgcctgaaataccatgattgtttatggaaagtatctttaataaagctggatacagtttggcttggaaaaaaataaaaaataaaa

SEQ ID NO: 46147 - DNA, 811 bp, Homo Sapiens
ggatgctgggagaagtatgtgagatggaaaagttgtttcatggcatccaagaagtgaatgatcctcaaggtgtagcagaggaatttgtaggagagagggatgattgacgtcttcgtatagccctccatccatcccagttagcatggagggattttagatagggctaccattggctgggtagtggagtgttgaccaatcacagctcaggggcgtgattgtctcgtcctgggatcgcgagaggggtatatacagggaggccaggcagcctggagttagtcgaccgttgcgagacgttgagctgcggaagatgagtccaaagccgagagcctcgggacctccggccaaggccacggaggcaggaaagaggaagtcctcctctcagccgagccccagtgacccgaagaagaagactaccaaggtggccaagaagggaaaagcagttcgtagagggagacgcgggaagaaaggggctgcgacaaagatggcggccgtgacggcacctgaggcggagagcgcgccagcggcacccggccccagcgaccagcccagccaggagctccctcagcacgagctgccgccggaggagccagtgagcgaggggacccagcacgaccccctgagtcaggagagcgaggtggaagaaccactgagtcaggagagcgaggtggaagaaccactgactgtgtggatggccagcttttcccctgtctccgagagcaccgactaagttcaggcccagccgccagacctcagagatctcaccagcggggtgcttgccattctgaagataataaaatgaatgtgttgcaaa

SEQ ID NO: 46148 - DNA, 1293 bp, Homo Sapiens
atgtctgacaaactgccctacaaagtcgcagcctggggacgcaaggccctggacattgcagagaacaagatgccaggcctgatgcgcatatgggagcggtactccgcctccaagccactgaacggcgcccgcatccctggctgtctgcacaggaccgtggagactgccgtcctaatgagcctcatcaccctgggtactgaggtgcagtggtccagctgcaacatcttctctacccaggaccatgcggctgctgccattgccaaagctggcatttcagccagcactggcattccagtgcatgcctggaagggcgaaacagacgaggagtacctgtggtgcattgagcagatgatgtacctcaaggacgggccccttaacatgattctggaagacggggaccttaccaacctcatccacagcgagtactcgcagctcctgctgagcttccgaggtatatccaaagagaccacaatcggggtccacaacctgtacaagatgatggtcaatgggattctgaaggtgcctgccatcgatgtcaatgactccgccaccaagagcaagtttgacaacctctatggctgtgagcccctcataggtggtatcaagcaggccacagacgtgatgattgccggcaaggtagcggtggtagcaggctatggcgataagggcaagagctgtgcccaggccctgcggggtttcagggccagcgtcatcatcaccaagactgaccccatcaaggcactgcaggctgccatggagggctatgaggtgactaccatggatgaggcctgtcaggagggcgacgtctttgtcaccaccacaggttgtgttgacatcatccttggccagcactttgagcagacgaaggatgataccattgtgtgtaacactggatactttgatgtggaaatggatgtcaagtggctcaacaagaacactgtggagaaggtgaacgtcaagctgcaggtggacccgtaccggctgaagaatgggcggggcatcatcctgctggctgagggtcggctggttaacctggcttgtgccatgggtcaccctagcttcgtgaggagtaactccttcaccagccaggtgatggcgcagatcaagctgtggacccacccagacaagtaccccgttggggttcacttcctgcccaagaagctggatgagtcagtggctgaagcccacctgggcaagttgaacatgaagttgaccaagctgactgagaagcaggcccagtacctgggcatgtcttgttactgccccttcaagccagatcactaccgctactga

SEQ ID NO: 46149 - DNA, 501 bp, Homo Sapiens
ctttttacagaacttggaatccattttgatcacatatggcaaaaaactttgacagtgttaaacccaatgaagccagtagatggcagcattatgaatgaaacggacctcactggacccattcttttttgcgtagccctgggagccaccttgcttctggcaggaaaagttcagtttggttatgtgtatggcatgagtgccattggctgccttgtgattcatgccttgctgaacctgatgagctcttcaggggtgtcgtacggctgtgtggccagcgtgctgggttactgcctgctccccatggtcatcctgtctggttgcgccatgttcttttcactgcagggcatctttggaatcatgtcatccctggtcatcattggctggtgtagtctctcagcttccaagatcttcattgcagccttgcacatggaaggacagcagcttcttgttgcctacccttgtgccatactttatggactttttgccctcctaacaattttctaa

SEQ ID NO: 46150 - DNA, 2919 bp, Homo Sapiens
cagatttctgcctggcagattaaccaacggcaagagaggctgatctgtctacattctgagtactgcccttggcaagacacctagaacagaccctggacccaagtctaccgtactaccatacccctactccagcccaccccagacagtattctggggttcacctgaggtcagcagtgtgaagatgaccagtgcctttttagcatgacgactttggaccatgtgattgccacccaccagtcagaatgggtctccttcaatgaagagccaccctttcctgcccactcgcaggggggcacggaagagcacctcccaggactgtcatcttccccagaccagtccgagagctcctccggggagaaccatgtggtggatggaggctctcaagaccattcccactcggagcaggatgactcctctgaaaagatgggcctcatctctgaagcagcttccccacctgggagccctgagcagcccccacctgacctggcctcggccatcagcaactgggttcagtttgaagatgacacaccctgggccagcacatctccacctcatcaggaaacagctgagacagccctaccattgaccatgccctgctggacatgcccttcctttgactccctggggagatgccctctgacttctgagagcagctggaccacccattctgaagacaccagcagtcctagctttggatgttcgtatacagatctgcagctcatcaatgctgaggagcagacgagtggccaggcttctggggctgactcaactgacaattcctcctcgcttcaagaagatgaagaagtagagatggaggccatcagctggcaggccagcagtccagccatgaatgggcaccctgcccctccagtgacctctgctcgttttcccagctgggtcacctttgatgacaatgaagtcagctgccctttaccaccagtcacctctcctctgaagccaaatacaccaccaagtgcatctgtgatcccagatgtaccttataattcaatgggatcatttaagaagagggaccgtcccaagagcactttgatgaacttctccaaagttcagaagctggatatttcctctttaaaccgcacgccttctgtaactgaggcttcaccttggagggcaaccaaccctttcctgaatgagactctgcaggatgtacagccctcccctatcaaccctttcagtgctttctttgaggagcaggagaggcgctcccaaaacagttccatttccagtaccacgggcaaaagccaaagagattccctcattgtcatctaccaggatgccatcagttttgatgattcaagcaaaacccagtcacactctgatgctgttgaaaaactcaaacaactccaaattgatgaccctgatcactttggcagtgcaactctacctgatgatgacccagtagcctggattgaactagatgctcacccgcctggatcagcacggtcccagcctcgtgacgggtggccaatgatgttgaggatccctgagaagaaaaacatcatgtcctccaggcactggggaccgatcttcgtcaaactgacagacactggttacctgcagctgtattatgagcagggcctagaaaaaccattccgtgagttcaagctggagatctgtcatgagatttcagaaccccggcttcaaaactatgatgagaatggcagaatccacagcttgcggatagaccgtgtcacctataaagagaagaagaaataccagcccaaacctgctgtggcccacacagcagagagggaacaggtgattaagctgggcaccaccaattacgatgacttcctgagtttcatccatgcagttcaggaccgtctcatggatctgccagtgttgtcaatggacttgagcacagttggcctcaactaccttgaagaggagattacagtggatgtcagagatgaattctctggcattgtgagcaaaggagacaaccagattctccagcaccatgtcttgacacggatccacatcctgagtttcctgtctgggctcgcagagtgccgcctgggcctcaatgacatcctcgtcaaagggaatgaaatagttttgaggcaggacatcatgcccaccaccaccacaaagtggatcaagctccatgagtgccgtttccatgggtgtgtggatgaggatgttttccacaactcacgggtcattctgttcaaccctttggatgcgtgccggtttgagctaatgcggttcaggacagtgtttgctgagaagaccttgcctttcacactcaggacggccacaagtgtcaatggggcagaggtggaggtgcagagctggctgaggatgtcaactggcttctccgccaatcgtgaccccctcactcaggttccctgtgagaatgtgatgatccgttaccctgtgcccagtgagtgggtgaaaaacttccgcagggaaagtgtcctgggggaaaagtctttgaaagccaaagtgaaccggggggcaagttttggctccactagtgtttctggctctgagcctgtcatgagagtaactctgggaactgccaagtacgagcatgccttcaactccattgtgtggaggataaaccgactgccggacaaaaactcagcttccggtcacccacactgtttcttttgccaccttgaactcggctctgaccgggaagtgccttccagatttgccaatcacgtgaatgtcgagttcagcatgcccacaacttctgcctccaaagccagcgtgagatctatctctgtagaagacaagactgacgtcaggaagtgggtcaattattctgcacactacagctaccaggtagccttgggaagcatctggctaatgcttccaactccatttgttcaccccactaccctccccctcttattccttttagccatgcttactatgttcgcctggtaa

SEQ ID NO: 46151 - DNA, 843 bp, Homo Sapiens
atggctaaattacatattccagtaatggtggatgaagttgttcattgtttgtcaccacaaaaaggacagatttttctagatatgacatttggttcgggagggcacacaaaagccattctgcagaaggagtcagatattgttctctatgccttggacagagacccaacagcttatgcattagctgaacatctttcagagttgtatcctaaacaaatccgagctatgctgggccagttcagccaggcagaagccttattaatgaaagctggagtgcagccaggaacttttgatggagttcttatggatcttgggtgttcctccatgcaacttgatactcctgaaagaggttcttcccttcggaaagatggccctttggacataagaatggatggtggcaggaacatttcctccctctgctatttatacacggaaagacttactacagcaatctactatattgccaccaagactttccaggctcttcgcatatttgtgaacaatgagctcaatgaactctacacgggactgaagacagctcagaagtttctgagacttggtggtcgtcttgttgccctctccttccattcactagaggatcgcatcgtcaaaagatttttgcttggaataagcatgacagaaagatttaacctaagtgttagacaacaagtgatgaaaacatctcaattgggttcagatcatgaaaacacggaagaagtctctatgagaagagctcctttaatgtgggaactgatacacaagaaggtatttagtccacaagatcaggatgtacaagataaccccagagggcgctcagccaagcttagagcagctatcaaattataa

SEQ ID NO: 46152 - DNA, 2484 bp, Homo Sapiens
gtttttcagaatctccttgagacattagctccaggcttaaaggcaattctgaaaaaggatatctatcagaaaaaaggacactatttcataagggttggtgatgctgagttcgaatacaattcaaattttaggttatacttatctacagaaatagacaacccccattttcttccatcagtttataactttgttactatgatcaacttcactgtaacattccaaggtttgcaagatcaactcttgtctactgtggtaactcatgaagttcctcatttagaagatcaacgttccaagttactggagagtatttcccttgatgccataactcttgaagaactagaggaaaaaacattaaatttactgcagaaagcactaggatccatattagatgatgacaaaattgtagataccttaagaaaatccaaaatgacatcaaacgaaatttcaaagcgcatcgaagcaacaaaaaaagctgaaagtgaaatccaagcaatacgtaaaaactatctccccattgcgacccgaggcgccctgctctacttcctagtagctgatctcacacaaatcaactacatgtaccagttctccctagactggtttcatcaggtttttgtttcatcagtagtttccaaaagcaaagaacaagaacataataagcatattaaaagtgcaatagacatgttgacaaaaagtatttttaaggtggtttcttcagctctatttaatgaagataaactttgcttctcttttcggctttgcactgtaatcatgcaaaacaatgctaatggaaatctaatacaggatgacattggattcctaccagaagaagaatggaacatctttttatattctggcatattgataaatattaaaagtgaaagtcaacatcttcagtggctgtcagattccaggtggaggcagtgccaatatgtcagcactcacctggaaccattttcacttctgtgcaaatcccttttatcaaacgtatcacaatgggatacttttaagaacagtaaagcagtttattctctgatcagcacacctttctcttcagaaaatgcttcattggaggaaaatacaaaaccaccagaggaaattcttagaccagaaagtttaaacaattcagtgagaaagtttataactgaaaaaatgggaaataagtatcttcaaagaactggagttaatttgaaagatgcatataaaggatccaatgccagaactccgctgatacttattcaaactcatgggatcgaccttaccaatatcctcctgagatttgcacaagagttaaaaggaacaacacatcatgtgaccataatttctctgggccgtgaccaagcagctaaagctgaagacctcattttaaaggcactaacaaaaacacaacaatgggtcttcctccagaactgccatcttgcaacatcatttatgccaaggctttgcacaattgtagaatcttttaatagtccaaacgtgacaatagaccctgagtttcggctatggttaagctcaaaatcatacagttcttttccaattcctgttcttaaaaagggtttaaagattgccgtggaatctccccagggattgaaaagtaacttacttcagacatttggatgtactgggagtggagaggtaacagaagagatatttgaaaatcctgactgtggacaatggtggaaaaaacttttatttagcctatgttttttcaatgctgtaatcaatgaaagaaaaaattacggaatattgggctggaatattgcttataaatttaattcttcagacttgggggttgccattaaggtgttggaaaattccctgagaggacagcccagcatttcgtggcaagcactgcgctacctgattggagaagtgatttacggtggccgggtgattgataattgggacaagcgatgcttgaagaccctactctacaaattttgtaatcctgaagtgctgaaagatgacttcagtttctccagtgatgggatatgtctgccagttccaggatctgcaagcataaaggactacatacacattatccagtccttacctgatgatgaccttcccgaggtcttaggaatacacccagaggccatcaggagctgctgggagacccagggcgaaaagtttattgaaaatctgattgccatgcaaccaaaaactaccactgccaacctcatgatcagatcacgacccccttatccattgtgtcttacctttttgaagcaagaaattaaacgatttgataagttattatttgtcatacataaatccttaaaagatcttcagcttgctataaaaggagagatcatcctcacccaagaattggaggaaatatttaactcttttcttaatatgagagtgcctacattgtggcagaaacacgcctacagatcttgtaagccactgagttcctggattgatgatctcatccagcgactgaatttcttcaatacttgggccaaagtggcttatactgcaata

SEQ ID NO: 46153 - DNA, 276 bp, Homo Sapiens
gctggccttagggcccagatctgcatgggaaaagtgtggagccagggagcggaaggtggggagcctgcccaggagggtccttgcagcagcgacctcctgctctggtctctcctggccaccccaccagcccaagggaggcccagtcctgtcagctcctacctggcaccagctctgaatgccttactggtctccagccttcagtggagctctctccaacctaatctcaaggtagcagcctcaaccctgaccctgtcactgctctgttcggctccctag

SEQ ID NO: 46154 - DNA, 576 bp, Homo Sapiens
agcattcggagagaagaatcaacctgcactgccatccacacagatatcatggacgactggctggactgtgccttcacctgtggtgtgcactgccgtggtcacgggaagtactcgtgtcttcgggtgtttgtgaacctcacccattcagctcagaaagctctcctacattataatgaagaggctgtccagataaatcccaagtgcttttacacacctaagtgccaccaagatagaaatgatttgctcaacagtgctctggacataaaagaattcttcgatcacaaaaatggaacccccttttcatgcttctacagtccagccagccaatctgaagatgtcattcttataaaaaagtatgaccaaatggctatcttccactgtttattttggccttcactgactctgctaggtggtgccctgattgttggcatggtgagattaacacaacacctgtccttactgtgtgaaaaatatagcactgtagtcagagatgaggtaggtggaaaagtaccttatatagaacagcatcagttcaaactgtgcagtaggaggaggagcaaaggaaggagcagagaa

SEQ ID NO: 46155 - DNA, 570 bp, Homo Sapiens
atggccttgccctttgttttactgatggccctggtggtgctcaactgcaagtcaatctgttctctgggctgtgatctgcctcagacccacagcctgagtaacaggaggactttgatgataatggcacaaatgggaagaatctctcctttctcctgcctgaaggacagacatgactttggatttcctcaggaggagtttgatggcaaccagttccagaaggctcaagccatctctgtcctccatgagatgatccagcagaccttcaatctcttcagcacaaaggactcatctgctacttgggatgagacacttctagacaaattctacactgaactttaccagcagctgaatgacctggaagcctgtatgatgcaggaggttggagtggaagacactcctctgatgaatgtggactctatcctgactgtgagaaaatactttcaaagaatcaccctctatctgacagagaagaaatacagcccttgtgcatgggaggttgtcagagcagaaatcatgagatccttctctttatcagcaaacttgcaagaaagattaaggaggaaggaatga

SEQ ID NO: 46156 - DNA, 4328 bp, Homo Sapiens
tgtttagataatatcatgaactgataaatgcagttgccacgttgattccctagggcctggcttaccgactgaggtcataagatattatgccttctctttagacttggtcagtggagaggaaatgggcaaagaaccagcctatggaggtgacaaggccttagggccaaaagtcttgagggtgaaggtttagggcctgcgcagcttccctgccatgccccgcaaggtctcgcattcgcaaggcttgtgacagtgggagcctcattacggactctcctaaagtccatggtgtcctcttttcgcatttgcgccccgtgggtgatgcccgatgccgcccttcccatcgctctcttccccttcaagcgtatcgcaactgcaaaaacacccagcacagacactccattttctatcttaatgcatttaactagcacaacctacaggttgttccatcccagagactacccttttctccatagacgtgaccatcaaccaaccagcggtcagaatcagtcagcctctgtcatgttcctaggtccttggcgaactggctgggcggggtcccagcagcctaggagtacagtggagcaatgcctgacgtaagtcaacaaagatcacgtgagacgaatcagtcgcctagattggctacaactaagtggttgggagcggggaggtcgcggcggctgcgtggggttcgcccgtgacacaattacaactttgtgctggtgctggcaaagtttgtgattttaagaaattctgctgtgctctccagcactgcgagcttctgccttccctgtagtttcccagatgtgatccaggtagccgagttccgctgcccgtgcttcggtagcttaagtctttgcctcagcttttttccttgcagccgctgaggaggcgataaaattggcgtcacagtctcaagcagcgattgaaggcgtcttttcaactactcgattaaggttgggtatcgtcgtgggacttggaaatttgttgtttccatgaaatcctgcgcagtgtcgctcactaccgccgctgttgccttcggtgatgaggcaaagaaaatggcggaaggaaaagcgagccgcgagagtgaagaggagtctgttagcctgacagtcgaggaaagggaggcgcttggtggcatggacaggtacgcacctccattcgtgaggcttcatgaagatggcgccagaacgaagaccctactaggcaaggtaaaagcaaccaacgaatctttaatcttaaaagctgaaggaaaagtggagtctgacttcttttgccaattaggtcacttcaacctcttgttggaagattattcaaaaggtattgttattcttcagagatattacagtttacaggctgactactggaaggttggtacaaatttatatggccttggtttggtctacttctactacaatgcatttcattggtaagttgacttatttcaagatgtcctttatgttgaccccagcttttgtcgagccaaggaaattcatttacgacttgggctcatgttcaaagtgaacacagactacaagtctagtttaaaggtaggtggttgagccttgattgactgtaatccatgtactttgtccaatgctgaaagtaagtatttttatgcccatttgtatgaaacccaggtaagtgttttaactgcaaaggaggcatatgaacaacttttgcagacagaaaaccttcctgcacaagtaaaagcaactgtattgcaacagttaggtacatgaaaacttaatatggatctagtaggagacaaagccacaaaggaaagctatgctattcagtatctccaaaagtctttggaggcagatcctaattctggccaatcgtggtattttcttggaaggtgagatgaaatactcgtgttattcaagtattgggaaagttcaggatgcctttatatcttacaggcaatctattgataaatcagaagcaagtgcagatacatggtgttcaataggtgtgttgtatcagcagcaaaatcagcctatggatgctttacaggcatatatttgtgctgtacaattggaccatgggcatgccgcagcctggatggacctaggtactctctatgaatcctgcaatcaacctcaagatgccattaaatgctacctaaatgcagctagaagcaaacgttgtagtaatacctctacgcttgctgcaagaattaaatttctacagaatggttctgataactggaatggtggccagagtctttcacatcatccagtacagcaagtttattcgttgtgtttgacaccacagaaattacagcacttggaacaactgcgagcaaatagagataatttaaatccagcacagaagcatcagctggaacagttagaaagtcagtttgtcttaatgcagcaaatgagacacaaagaagttgctcaggtacgaactactggaattcataacggggccataactgattcatcactgcctacaaactctgtctctaatcgacaaccacatggtgctctgaccagagtatctagcgtctctcagcctggagttcgccctgcttgtgttgaaaaacttttgtccagtggagctttttctgcaggctgtattccttgtggcacatcaaaaattctaggaagtacagacactatcttgctaggcagtaattgtatagcaggaagtgaaagtaatggaaatgtgccttacctgcagcaaaatacacacactctacctcataatcatacagacctgaacagcagcacagaagagccatggagaaaacagctatctaactccgctcaggggcttcataaaagtcagagttcatgtttgtcaggacctaatgaagaacaacctctgttttccactgggtcagcccagtatcaccaggcaactagcactggtattaagaaggcgaatgaacatctcactctgcctagtaattcagtaccacagggggatgctgacagtcacctctcctgtcatactgctacctcaggtggacaacaaggcattatgtttaccaaagagagcaagccttcaaaaaatagatccttggtgcctgaaacaagcaggcatactggagacacatctaatggctgtgctgatgtcaagggactttctaatcatgttcatcagttgatagcagatgctgtttccagtcctaaccatggagattcaccaaatttattaattgcagacaatcctcagctctctgctttgttgattggaaaagccaatggcaatgtgggtactggaacctgtgacaaagtgaataatattcacccagctgttcatacaaagactgatcattctgttgcctcttcaccctcttcagccatttccacagcaacaccttctcctaaatccactgagcagagaagcataaacagtgttaccagccttaacagtcctcacagtggattacacacagtcaatggagaggggctggggaagtcacagagctctacaaaagtagacctgcctttagctagccacagatctacttctcagatcttaccatcaatgtcagtgtctatatgccccagttcaacagaagttctgaaagcatgcaggaatccaggtaaaaatggcttgtctaatagctgcattttgttagataaatgtccacctccaagaccaccaacttcaccatacccacccttgccaaaggacaagttgaatccacccacacctagtatttacttggaaaataaacgtgatgctttctttcctccattacatcaattttgtacaaatccaaaaaaccctgttacagtaatacgtggccttgctggagctcttaaattagatcttggacttttctctaccaaaactttggtagaagctaacaatgaacatatggtagaagtgaggacacagttgctgcaaccagcagatgaaaactgggatcccactggaacaaagaaaatctggcgttgtgaaagcaatagatctcatactacaattgccaaatacgcacaataccaggcttcctccttccaggaatcattgagagctggaatgcaatggtgtgatctcagctcactgcagcctccgcctcctgggttcaagcgattctcccacctcagcctcccgaatagctggaattacaggcacctgccatcatgcccaactaatttttgtatttttgtagagacagggtttcaccatgttggccaggcttgtcttgaactcctgacctcaggtggtctgcttgcctcagcatcccaaagtgctgggattacaggtgtgagccaccatgcccggtaaacttttaaaaatgtaagcaaaattacagtatgtaaaacacacattgctaatggagaaataaagttcctactttacatcta

SEQ ID NO: 46157 - DNA, 2650 bp, Homo Sapiens
gctgccttagagcttctagggtaacaaagacgtccctcaggaggatcctgagacttacttccagaacagagcttcagggcgaccacagggcacggcacctgtactactgccacttgaaggagcgcgtgctgaggtcacagtgcgctcaccgggaggaagcctacttcctgctggctgcctgcgcgctgcaggctgacctgggcgagcaccgggagtcggcccatgccgggaggtacttcgagccacactcctacttcccacagtggatcatcaccaagagggggattgactacatcctccggcacatgcctaccctgcaccgtgagcgccagggcctgagccccaaggaggccatgctgtgcttcatccaggaggcctgccggctggaggacgtgcccgtgcacttcttcaggctgcacaaggataagaaggaaggtcgtcccaccgtgatcctgggactggccctcaggggagtgcacatctaccaggaggtggaccgtgctccgcagctgctgtacgacctcccctggccccacgttgggaagctggcatttctgggaaagaagctggagatccagctggatgggctgcccgcagcacagaagctggtttactacacggggtgcacctggcggtccaggcacctgctgcacctgctgcgcgccagccaccagctccacctccgcgtgcggcccactctgcaacagctgcggcagcgggaggaggcagaagagaagcagcactaccgggagtcctatatcagcgatgagctggagctggacctggccagcaggagcttcccgggcagtggggtcagcagccagcactgcccccactgcctctcacgccactccgccgacagccacggcagttcctacacgtcaggcatcaaggccaactcctggctcagggaatccagagagatgtctgtggacgtgcccttggaggtccacgggctccatgagaaggagccgtcctccagccccaggaccagccgcagccaccccagcacacgtggtgacagccaagccactcgtcaggagccctgcacccaggtcaggaccagaggccagagcgccgaggccgtgcaccagatccaggaaatgacagccggggtcagtgaggagcagcacagccatggcctggacgacatgcagctgcaccagctggccctgcacccagcgcccacctcactcagccataccttccaccgcgccctggactgcaggctggcaggcccctgcgagaccagggccactctccccagcaagaggtccagcaactgtctcgccctggacctgttcggagaggctccaccacaggagtttgtggtgtaggcaccacccacccagcagtaccgtccgcaccgccaggctcagcccctgcccaccccacttccacatggccctcgtcccttcctgcccgccagatgctgcctgcacttccgcagccagcacgctccacaggttcacctgtaagaggtgtggagctggctctgacatcaacctgggaggtaacaaacaggtcccgcacctcatgcctgtctgccatacacccgggagctctttccctcagggtctcagggagccagttcaaggtctggctgtcaagtgtccagagagccatggtgttggcccctgaggcagcctgtcacccatcctaatctgggagagaaggtgacacagctgggcccagaccctggagagacagctctgcagtttcccacactgtcagctccccaagagacagtcctgatgggcacaggctgccagagctcccaagccggagttcacagtcatcactgtgcaggacccaggttcctcccagacctgaacccctctctgcaactcctgtttgcaagcgctgggcctgccagacagaggcccctcttgtggtgcaagcccagctctgtcacctgagatccagccagagaccctcctccaccatccacagtcaatggctgtgctttcccttccaagccagggcttccaaagaccccactgccccggagctgaagccgactctgctcccatctcagccatgaggcctcaggacccactctgctcacaggtggcttccttaagccattgccctggctggggttgggctggtgcagcccagctggcggaggggcgaagctttggtgacagacggagagtgggggactagctgtgcatggcacctgctctgatccggtgggctccacgggtagtgcgacctcggttctgtgggctctggaaggccaccagggtagggtctccccagggctcctccccctgcacaacactcctgcacacgtgcaaacctgctgtcctctgcatttagaggaatggcccgtgcatccctgctagtctcaggcccatcccagagcactgagaggccacaatcgttcagccctgtgccctgaacaccactgcccccttcactgtctgtgtgtggtgaagaccacgccacaccaccctccagctcactggagacaagcatgagcttgagccccatggcctggtgcagggctgcgtgcattgaggccgcctctttgacgggtccatccagggggaccctctcctttctgtgaaagggaatcgtgtgtgtgccccaggcacgtgtaataaagaacccgagcagatgcctcctgcttgaaccaggacca

SEQ ID NO: 46158 - DNA, 795 bp, Homo Sapiens
actattactgaatttgtcctccttggcttctatgacatccctgaactgcatttcttgttttttattgtattcactgctgtctatgtcttcatcatcatagggaatatgctgattattgtagcagtggttagctcccagaggctccacaaacccatgtatattttcttggcgaatctgtccttcctggatattctctacacctccgcagtgatgccaaaaatgctggagggcttcctgcaagaagcaactatctctgtggctggttgcttgctccagttctttatcttcggctctctagccacagctgaatgcttactgctggctgtcatggcatatgaccgctacctggcaatttgctacccactccactacccactcctgatggggcccagacggtacatggggctggtggtcacaacctggctctctggatttgtggtagatggactggttgtggccctggtggcccagctgaggttctgtggccccaaccacattgaccagttttactgtgactttatgcttttcgtgggcctggcttgctcggatcccagagtggctcaggtgacaactctcattctgagaagggctttctccacatgctcctcccacctagctgtagtgaccacattctatggaacgctcatgatcttttatgttgcaccctctgctgtccattcccagctcctctccaaggtcttctccctgctctacactgtggtcacccctctcttcaatcctgtgatctataccatgaggaacaaggaggtgcatcaggcacttcggaagattctc

SEQ ID NO: 46159 - DNA, 965 bp, Homo Sapiens
aagtccagaaattaagagacctgataaagggaagccaggaaaatcgagatgcatatttgtggtacacttcagttctcagtaacaacacactgactaagaagagggaatacgtttttgggaaaaaccttaatctgggtgcaaacccagtttcttcaagaaaaatagcctgtagtatgactcataatgagtttgaatacgtttcagaatcaagtattagtgataaaaattatgccagtaataacactgatgaaattaatataagtgagaagttgccttttgatagtaatcaggaaaacactcatactgggaagaaatctgttgtatataaccaaagtgggaagtcaccaagtcatagtgaggaccttattaaggaacaggaaattcaagctttagcccacttggaagctaatgaacatggaaatcccttccttgagaaggtagccaccatcacacaagagacagctcaaacaagagagaaaccctgtgattataaggagcatggggaaaatgtcagtgccacatcagctcccagagttcatcaagaaattcacacaaggaagaatcactctgaagttaacgagtgtgagaagtcaaccttcttcaaacatcagaaagttaatacaggggtgaaaacccagggagctaatgaaaatgagaatttcagtcacaagtcacatctcagtctgcctcatagaactcacacagtagagaaaacttttgaatgtagtcatggcaagaaatctttttgccaggagtcccacttcactgagcatcacaggacatgcacaagagagaaaccatcaaaatcaaacttcagtcatcatcagagaactcacacaggggagaaaccatatgaatgtaaggaatgtaggaaatccttccatgtgaaaccaaacctcactaaacatcagaaaacacatataggggagaaacctttcaaatgtactgcgtgtggaagaactttc

SEQ ID NO: 46160 - DNA, 1112 bp, Homo Sapiens
cccgctgcccgggcgcgacgcgctgcggctcagcgacgcggcttctagaaccgggtgattgaactaaaccttcgccgcaccgagtttgcagtacggccgtcacccgcaccgctgcctgcttgcggttggagaaatcaaggccctaccgggcctccgtagtcacctctctatagtgggcgtggccgaggccggggtgaccctgccggagcctccgctgccagcgacatgttcaaggtaattcagaggtccgtggggccagccagcctgagcttgctcaccttcaaagtctatgcagcaccaaaaaaggactcacctcccaaaaattccgtgaaggttgatgagctttcactctactcagttcctgagggtcaatcgaagtatgtggaggaggcaaggagccagcttgaagaaagcatctcacagctccgacactattgcgagccatacacaacctggtgtcaggaaacgtactcccaaactaagcccaagatgcaaagtttggttcaatgggggttagacagctatgactatctccaaaatgcacctcctggattttttccgagacttggtgttattggttttgctggccttattggactccttttggctagaggttcaaaaataaagaagctagtgtatccgcctggtttcatgggattagctgcctccctctattatccacaacaagccatcgtgtttgcccaggtcagtggggagagattatatgactggggtttacgaggatatatagtcatagaagatttgtggaaggagaactttcaaaagccaggaaatgtgaagaattcacctggaactaagtagaaaactccatgctctgccatcttaatcaggttataggtaaacattggaaactccatagaataaatcagtatttctacagaaaaatggcatagaagtcagtattgaatgtattaaattggctttcttcttcaggaaaaactagaccagacctctgttatcttctgtgaaatcatcctacaagcaaactaacctggaatcccttcacctagagataatgtacaagccttagaactcctcattctcatgttgctatttatgtacctaattaaaacccaagttaaaaaaaaaaa

SEQ ID NO: 46161 - DNA, 1422 bp, Homo Sapiens
atggaagtgcagttagggctgggaagggtctaccctcggccgccgtccaagacctaccgaggagctttccagaatctgttccagagcgtgcgcgaagtgatccagaacccgggccccaggcacccagaggccgcgagcgcagcacctcccggcgccagtgaggatggttctccccaagcccatcgtagaggccccacaggctacctggtcctggatgaggaacagcaaccttcacagccgcagtcggccctggagtgccaccccgagagaggttgcgtcccagagcctggagccgccgtggccgccagcaaggggctgccgcagcagctgccagcacctccggacgaggatgactcagctgccccatccacgttgtccctgctgggccccactttccccggcttaagcagctgctccgctgaccttaaagacatcctgagcgaggccagcaccatgcaactccttcagcaacagcagcaggaagcagtatccgaaggcagcagcagcgggagagcgagggaggcctcgggggctcccacttcctccaaggacaattacttagggggcacttcgaccatttctgacaacgccaaggagttgtgtaaggcagtgtcggtgtccatgggcctgggtgtggaggcgttggagcatctgagtccaggggaacagcttcggggggattgcatgtacgccccacttttgggagttccacccgctgtgcgtcccactccttgtgccccattggccgaatgcaaaggttctctgctagacgacagcgcaggcaagagcactgaagatactgctgagtattcccctttcaagggaggttacaccaaagggctagaaggcgagagcctaggctgctctggcagcgctgcagcagggagctccgggacacttgaactgccgtctaccctgtctctctacaagtccggagcactggacgaggcagctgcgtaccagagtcgcgactactacaactttccactggctctggccggaccgccgccccctccgccgcctccccatccccacgctcgcatcaagctggagaacccgctggactacggcagcgcctgggcggctgcggcggcgcagtgccgctatggggacctggcgagcctgcatggcgcgggtgcagcgggacccggttctgggtcaccctcagccgccgcttcctcatcctggcacactctcttcacagccgaagaaggccagttgtatggaccgtctgtagccccctacggctacactcggccccctcaggggctggcgggccaggaaagcgacttcaccgcacctgatgtgtggtaccctggcggcatggtgagcagagtgccctatcccagtcccacttgtgtcaaaagcgaaatgggcccctggatggatagctactccggaccttacggggacatgcggtaa

SEQ ID NO: 46162 - DNA, 1664 bp, Homo Sapiens
caagagctccagcaaagactttcactgtagcttgacttgacctgagattaactagggaatcttgagaataaagatgagctctgaaaattgtttcgtagcagagaacagctctttgcatccggagagtggacaagaaaatgatgccaccagtccccatttctcaacacgtcatgaagggtccttccaagttcctgtcctgtgtgctgtaatgaatgtggtcttcatcaccattttaatcatagctctcattgccttatcagtgggccaatacaattgtccaggccaatacacattctcaatgccatcagacagccatgtttcttcatgctctgaggactgggttggctaccagaggaaatgctactttatttctactgtgaagaggagctggacttcagcccaaaatgcttgttctgaacatggtgctactcttgctgtcattgattctgaaaaggacatgaactttctaaaacgatacgcaggtagagaggaacactgggttggactgaaaaaggaacctggtcacccatggaagtggtcaaatggcaaagaatttaacaactggttcaacgttacagggtctgacaagtgtgtttttctgaaaaacacagaggtcagcagcatggaatgtgagaagaatttatactggatatgtaacaaaccttacaaataataaggaaacatgttcacttattgactattatagaatggaactcaaggaaatctgtgtcagtggatgctgctctgtggtccgaagtcttccatagagactttgtgaaaaaaaattttatagtgtcttgggaattttcttccaaacagaactatggaaaaaaaggaagaaattccaggaaaatctgcactgtgggcttttattgccatgagctagaagcatcacaggttgaccaataaccatgcccaagaatgagaagaatgactatgcaacctttggatgcactttatattattttgaatccagaaataatgaaataactaggcgtggacttactatttattgctgaatgactaccaacagtgagagcccttcatgcatttgcactattggaaggagttagatgttggtactagatactgaatgtaaacaaaggaattatggctggtaacataggtttttagtctaattgaatcccttaaactcagggagcatttataaatggacaaatgcttatgaaactaagatttgtaatatttctctctttttagagaaatttgccaatttactttgttatttttccccaaaaagaatgggatgatcatgtatttatttttttacttcctcagctgtagacaggtccttttcgatggtacatatttctttgcctttataatcttttatacagtgtcttacagagaaaagacataagcaaagactatgaggaatatttgcaagacatagaatagtgttggaaaatgtgcaatatgtgatgtggcaaatctctattaggaaatattctgtaatcttcagacctagaataatactagtcttataataggtttgtgactttcctaaatcaattctattacgtgcaatacttcaatacttcatttaaaatatttttatgtgcaataaaatgtatttgtttgtattttgtgttcagtacaattataagctgtttttatatatgtgaaataaaagtagaataaac

SEQ ID NO: 46163 - DNA, 2223 bp, Homo Sapiens
agagtaacaggcaggaagaaagctttctgtactacaccagagggttggggctgtggatttagctactctcacctgaggctactgagcaagctgtcatgcaccatgagacaaagcccaagctgtcccaccaggcagtaagtgtggagaggttcaggcacatggcatagctgctatttcgcacaattttcactacaccagtggtgaccaaatagaagaggttcatccatacacagaacctggtgaagagctggaggcagaaagaagtgtctatgtggagacgcaactgaaacaaaggtggcacagcaactgttccaatcccgtgtctttcctcatggcttcccaggagtttgaggttgaagctattgttgacaaaagacaggataaaaatgggaatacacagtatttggttcggtggaaaggttatgacaaacaggatgacacttgggaaccagagcagcacctcatgaactgtgaaaaatgtgtacatgattttaatagacgacagactgaaaaacagaaaaaactgacatggactacaaccagtagaattttttcaaacaatgccagaagaagaacttccagatctacaaaagcaaactattctaagaactctcctaaaactccagtgactgataaacaccacaggtccaaaaactgcaagttatttgctgccagcaagaacgttaggagaaaggcagcttcaactctctccgacacaaagaatatggagataataaattcaactattgagacccttgcacctgacagcccctttgaccacaagaaaactgtgagtggctttcagaaacttgagaaactggaccctattgcagcagatcagcaggacacggtggtcttcaaggtgacagaagggaaactcctccgggaccctttgtcacatcctggtgcagaacagactggaatacagaacaagactcagatgcacccactaatgtcgcagatgtctggctcagttactgcttctatggccacaggttcagctacccgaaagggtatagtggtattaatagacccattagcagccaatgggacaacagacatgcatacctcagttccaagagtgaaaggtgggcaaagaaatattactgatgacagcagaggccagccttttatcaagaagatgcacttcaccataaggctaacagaaagtgccatcacatacagagacattgtagtgaagaaagaggatggattcacccagatagtgctatcaactagatcgacagaaaaaaatgcactgaatacagaagtaattaaagaaatggttaatgctctgaatagcgctgctgcagatgacagcaagctcgtgctgttcagtgcagctggaagtgtcttttgctgcggtcttgattttgggtactttgtgaggcacttaaggaatgacagaaacacagcaagccttgaaatggtggacaccatcaagaactttgtgaatacttttattcaatttaaaaagcctattgttgtatcagtcaatggccctgccattggactaggtgcatccatcctgcctctttgtgatctcgtgtgggctaatgaaaaggcttggttccaaaccccttatacgacctttggacagagtccagatggctgttcttctattacattccccaaaatgatgggtaaagcatctgccaatgaaatgttaattgctgggcgaaagctgacagcacgggaggcatgcgccaaaggcctggtctctcaggtatttttgactggaactttcacccaagaggttatgattcaaattaaggagcttgcctcatacaatgcaattgtactggaagaatgtaaggccctcgttcgctgtaatattaagttggagttggaacaggccaatgagagagagtgtgaggtgctgaggaagatctggagctcagcccaagggatagaatccatgttaaagtatgttgaaaataaaattgatgagttttaattgtcagtctgtctgctcaggacacaagaactaaggggcaacaaatgcatcatgagttgcaagatgccctaatccatcttcatagcccaaaacaatttcacccatagctaaggcttggaaacagaactgcaaatgtccaagctatgtatttaaattatcacatcatttttaagcactgtagctttacaaggagtaacaaaacagcctctttgcccaaatgtgattattttaggcacacctaagcccaaatataaaaacagactgtt

SEQ ID NO: 46164 - DNA, 177 bp, Homo Sapiens
atgactttgaggggtttaagacttcagtggaggaaacaactgaagatgagagcaagaccctgtctcttagaaaaaagaaaaaaaatagtgagctacatttctttccttctcagtgacctgaagggtactctagctattgacagtctttactctcttcagtttgctggaggtaactga

SEQ ID NO: 46165 - DNA, 281 bp, Homo Sapiens
ttccaggataatcgtatccacacatcgaaatataatattctcaccttcttgccaattaatttatttgaacagttccaaagagtggcaaatgcctattttctttgccttctgattttacagctaattccagaaatttcctccttgacctggtttaccaccattgtgcctttggtcctggtgataactatgacagctgtcaaagatgccacagatgactattttcgccacaagagtgataatcaagtgaataatcggcagtctgaagtgctcatcaacagcaa

SEQ ID NO: 46166 - DNA, 276 bp, Homo Sapiens
taacttacatatgtgaatttttctcttccttagatacgcgcaaaattgtttctgaaggagaactagatcagttggctcagattcggccattaatattcaattttcatgagcagacagccatcaaggattgtttgaaaatccttgaggaaaaaacagcagcgtatgatatcatgcaggaatttatggctttagaacttaagaatctgcctggtgagttcaactctgggaatcaaccaagcaacagagaaaaaaacagataccgagatattcttccat

SEQ ID NO: 46167 - DNA, 1419 bp, Homo Sapiens
gaggaggagaagaggctcgagcaggagaggcgagagcagcggctgaagcgcgagcaggaggagaggcgcgatcagctgctgaagcgcgaggaggagaggcgccagcagcggctgaagcgcgagcaggaagagaggctcgagcagcgactgaagcgcgaggaggtggagagactcgagcaggaggagaggcgcgagcagcggctgaagcgcgaggagccggaggaagagaggcgccagcagctgctgaagagcgaggagcaggaggagaggcgccagcagcaactaaggcgcgagcagcaggaaaggcgcgagcagcggctgaagcgcgaggaggaggaagagaggctcgagcagcggctgaagcgcgagcatgaggaagagaggcgcgagcaggagctagctgaggaggagcaggaacaggcccgggagcggattaagagccgcatcccgaaaaaattccgcgaggaggaacagctgcgccaggagagggaggaacagcagctgagccgccaagagcgtgacagaaaattccgtttagaggaacagaaagtgcgccgccaggaacaagagagaaaattcatggaggacgaacagcagctgcgccgccaggagggccaacaacagctgcgccaggagcgcgacagaaaattccgcgaagacgaacagctgctccaggaaagggaagaacagcagctgcaccgccaagagcgtgacagaaaattcctcgaggaggaaccgcagctgcgccgccaggagcgcgaacaacagctgcgtcacgaccgcgacagaaaattccgtgaagaggaacagctgctccaggaaggggaggaacagcagctgcgccgccaagagcgtgacagaaaattccgcgaagaggaacagcagctccgccgtcaggaacgagagagaaaattcctccaggaggaacagcagctgcgccgccaggaactggagagaaaattccgtgaggaggaacagctgcgccaagaaacggagcaagagcagctgcgccgccaagaacgctacagaaaaatcctagaggaagagcagctccgtccggaaagggaagaacagcagctgcgccgccaggagcgcgacagaaaattccgcgaggaggaacagctccgccaggagagggaggaacagcagctgcgcagccaagagtctgacagaaaattccgcgaggaggaacagctacgccaggagagggaagaacagcagctgcgcccccaacagcgtgacggaaagtatcgctgggaagaagagcagctccaacttgaggaacaagagcagaggctgcggcaggagcgagaccggcagtaccgggcggaggagcagtttgccacgcaggagaagagtcgtcgtgaggaacaagaactatggcaagaagaggagcagaaacgtcgccaggaacgggaa

SEQ ID NO: 46168 - DNA, 285 bp, Homo Sapiens
aacatccagatgacccagtctccatctgccatgtctgcatctgtaggagacagagtcaccatcacttgtcgggcgaggcagggcattagcaattatttagcctggtttcagcagaaaccagggaaagtccctaagcacctgatctatgctgcatccagtttgcaaagtggggtcccatcaaggttcagcggcagtggatctgggacagaattcactctcacaatcagcagcctgcagcctgaagattttgcaacttattactgtctacagcataatagttaccct

SEQ ID NO: 46169 - DNA, 1068 bp, Homo Sapiens
atggccagaggagtgatccagctcctagaagatgaggagagaccgaagaattttccccggcccggggctagggtctggcgctggggcgctcctgggacctgcgggatcaccactacactctggcgcgccgagcgcggtgagctaggacgccaaggcacaggtggggctggagtccagcgcggaggcgcggggggcgggacgcggggccggggagcggccagggaccgcggcagcgccgcagtgccagcccggcgctggcgactgcctgccccagcccctcagtggcggcttgctctcttctctcgctccgaaccagacacagccgctgtcgctgccatgtggcgcgccgcagactcccgagaacagccctggctgtcagcgggcaccagccgcttcctgtgcccatcgcgtagactggaggggcgcaccacggccaccgagccagaggcgcttcaggaagcaagagaagtccccgcgcgctccgggacccggcgcagctcatgttgggatcgcgcacaaaccgactctgcggcccagcccgaaatgctgccgccaaggagcaacggcaccgcgtacccggggcagttagcgctgtaccagcagctggcgcaggggaatgccgtggggggctcggcgggggcaccgccactggggcccgtgcaggtggtcaccgcctgcctgctggccctactcatcatctggaccttgctgggcaacgtgctggtgtccgcagccatcgtgcggagccgccacctgcgcgccaagatgaccaacgtcttcatcgtgtctctacctgtgtcagacctcttcgtggcgctgctggtcatgtcctggaaggcagtcgccgaggtggccggttactggccctttgaagcgttctgcgacgtctgggtggccttcgacatcatgtgctccaccgcctccatcctgaacctgcccttccgctacgagcgcaagatgacccagcgcatggccttggtcatggtccgcccggcctggaccttgtccagcctcatctccttcattccggtccagctcaactggcacagggaccaggcggtctcttga

SEQ ID NO: 46170 - DNA, 2087 bp, Homo Sapiens
gacccgcccgcccgcccctatgaccaacatgagctggagcttcctgacgcggctgctggaggagatccacaaccactccaccttcgtgggcaaggtgtggctcacggtgctggtggtcttccgcatcgtgctgacggctgtgggcggcgaggccatctactcggacgagcaggccaagttcacttgcaacacgcggcagccaggctgcgacaacgtctgctatgacgccttcgcgcccctgtcgcacgtgcgcttctgggtcttccagattgtggtcatctccacgccctcggtcatgtacctgggctacgccgtgcaccgcctggcccgtgcgtctgagcaggagcggcgccgcgccctccgccgccgcccggggccacgccgcgcgccccgagcgcacctgccgcccccgcacgccggctggcctgagcccgccgacctgggcgaggaggagcccatgctgggcctgggcgaggaggaggaggaggaggagacgggggcagccgagggcgccggcgaggaagcggaggaggcaggcgcggaggaggcgtgcactaaggcggtcggcgctgacggcaaggcggcagggaccccgggcccgaccgggcaacacgatgggcggaggcgcatccagcgggagggcctgatgcgcgtgtacgtggcccagctggtggccagggcagctttcgaggtggccttcctggtgggccagtacctgctgtacggcttcgaggtgcgaccgttctttccctgcagccgccagccctgcccgcacgtggtggactgcttcgtgtcgcgccctactgaaaagacggtcttcctgctggttatgtacgtggtcagctgcctgtgcctgctgctcaacctctgtgagatggcccacctgggcttgggcagcgcgcaggacgcggtgcgcggccgccgcggccccccggcctccgcccccgcccccgcgccgcggcccccgccctgcgccttccctgcggcggccgctggcttggcctgcccgcccgactacagcctggtggtgcgggcggccgagcgcgctcgggcgcatgaccagaacctggcaaacctggccctgcaggcgctgcgcgacggggcagcggctggggaccgcgaccgggacagttcgccgtgcgtcggcctccctgcggcctcccgggggccccccagagcaggcgcccccgcgtcccggacgggcagtgctacctctgcgggcactgtcggggagcagggccggcccggcacccacgagcggccaggagccaagcccagggctggctccgagaagggcagtgccagcagcagggacgggaagaccaccgtgtggatctgagggcgctggcttgcgagctgggccagggaggaggagggttggggggctccggtggaaacctgcgaccccttctcctcagccttctccttagccggtggcctcaggcagactctgcccagaggggcagccaggctgctcagggaaggggctgaaagcggcagaggagtgccctggcttggtcaccactggggccaaggtggggtggagagaggcctaggagccagaaagggccctctgctgtggtctgaaccccagggggagtggggcattgactccacccctgtcctgagctggaataggtcctctgggatgccagctctcccctttgtgcttccctgcagcaacccatggagggcccagggtgcctggtatgggcatcagttggtgggggtgcgggggtgcgtgtccccattccctgcaacagcaaatggggctccttcttcagccctccccttcccagccccaaactgagacagactgggagctgggagcctggggtggacaggaccataccctctttgagcttctgcgatgccggccttccgttcctctgggaggcttgaagttctgcaaagatgttgatatgccttgcagcttggacccaatgggtggtggtcagggcctgggggcttggccatgctgggggaatggggctctgggttcctgcctgtggcctgtctgtcctcctccctaattcagacccagcctcaagaggaaagggagtaaaataaaactaacttgtttataa

SEQ ID NO: 46171 - DNA, 1575 bp, Homo Sapiens
gctttaaggtgggagagaactggacaggaactgcgggttatctaccagtgcttcgtgtggtgtggaaccccagagaccaggaaaagcaaggcaaagtcctgcatctgccatgtgtgtggcacccatctgaacagactccactcttgcctttcctgtgtcttctttggctgcttcacggagaaacacattcacgagcacgcagagacgaaacaacacaacttagcagtagacctgtattacggaggtatatactgctttatgtgtaaggactatgtatatgacaaagacattgagcaaattgccaaagaagagcaaggagaagctttgaaattacaagcctccacctcaacagaggtttctcaccagcagtgttcagtgccaggccttggtgagaaattcccaacctgggaaacaaccaaaccagaattagaactgctggggcacaacccgaggagaagaagaatcacctccagctttacgatcggtttaagaggactcatcaatcttggcaacacgtgctttatgaactgcattgtccaggccctcacccacacgccgatactgagagatttctttctctctgacaggcaccgatgtgagatgccgagtcccgagttgtgtctggtctgtgagatgtcgtcgctgtttcgggagttgtattctggaaacccgtctcctcatgtgccctataagttactgcacctggtgtggatacatgcccgccatttagcagggtacaggcaacaggatgcccacgagttcctcattgcagcgttagatgtcctgcacaggcactgcaaaggtgatgatgtcgggaaggcggccaacaatcccaaccactgtaactgcatcatagaccaaatcttcacaggtggcctgcagtctgatgtcacctgtcaagcctgccatggcgtctccaccacgatagacccatgctgggacattagtttggacttgcctggctcttgcacctccttctggcccatgagcccagggagggagagcagtgtgaacggggaaagccacataccaggaatcaccaccctcacggactgcttgcggaggtttacgaggccagagcacttaggaagcagtgccaaaatcaaatgtggtagttgccaaagctaccaggaatctaccaaacagctcacaatgaataaattacctgtcgttgcctgttttcatttcaaacggtttgaacattcagcgaaacagaggcgcaagatcactacatacatttcctttcctctggagctggatatgacgccgtttatggcctcaagtaaagagagcagaatgaatggacaattgcagctgccaaccaatagtggaaacaacgaaaataagtattccttgtttgctgtggttaatcaccaaggaaccttggagagtggccactataccagcttcatccggcaccacaaggaccagtggttcaagtgtgatgatgccgtcatcactaaggccagtattaaggacgtactggacagtgaagggtatttactgttctatcacaaacaggtgctagaacatgagtcagaaaaagtgaaagaaatgaacacacaagcctactga

SEQ ID NO: 46172 - DNA, 2373 bp, Homo Sapiens
atgaggtcagtgcagatcttcctctcccaatgccgtttgctccttctactagttccgacaatgctccttaagtctcttggcgaagatgtaatttttcaccctgaaggggagtttgactcgtatgaagtcaccattcctgagaagctgagcttccggggagaggtgcagggtgtggtcagtcccgtgtcctacctactgcagttaaaaggcaagaagcacgtcctccatttgtggcccaagagacttctgttgccccgacatctgcgcgttttctccttcacagaacatggggaactgctggaggatcatccttacataccaaaggactgcaactacatgggctccgtgaaagagtctctggactctaaagctactataagcacatgcatggggggtctccgaggtgtatttaacattgatgccaaacattaccaaattgagcccctcaaggcctctcccagttttgaacatgtcgtctatctcctgaagaaagagcagtttgggaatcaggtttgtggcttaagtgatgatgaaatagaatggcagatggccccttatgagaataaggcgaggctaagggactttcctggatcctataaacacccaaagtacttggaattgatcctactctttgatcaaagtaggtataggtttgtgaacaacaatctttctcaagtcatacatgatgccattcttttgactgggattatggacacctactttcaagatgttcgtatgaggatacacttaaaggctcttgaagtatggacagattttaacaaaatacgcgttggatatccagagttagctgaagttttaggcagatttgtaatatataaaaaaagtgtattaaatgctcgcctgtcatcagattgggcacatttatatcttcaaagaaaatataatgatgctcttgcatggtcgtttggaaaagtgtgttctctagaatatgctggatcagtgagtactttactagatacaaatatccttgcccctgctacctggtctgctcatgagctgggtcatgctgtaggaatgtcacatgatgaacaatactgccaatgtaggggtaggcttaattgcatcatgggctcaggacgcactgggtttagcaattgcagttatatctctttttttaaacatatctcttcgggagcaacatgtctaaataatatcccaggactaggttatgtgcttaagagatgtggaaacaaaattgtggaggacaatgaggaatgtgactgtggttccacagaggagtgtcagaaagatcggtgttgccaatcaaattgtaagttgcaaccaggtgccaactgtagcattggactttgctgtcatgattgtcggtttcgtccatctggatacgtgtgtaggcaggaaggaaatgaatgtgaccttgcagagtactgcgacgggaattcaagttcctgcccaaatgacgtttataagcaggatggaaccccttgcaagtatgaaggccgttgtttcaggaaggggtgcagatccagatatatgcagtgccaaagcatttttggacctgatgccatggaggctcctagtgagtgctatgatgcagttaacttaataggtgatcaatttggtaactgtgagattacaggaattcgaaattttaaaaagtgtgaaagtgcaaattcaatatgtggcaggctacagtgtataaatgttgaaaccatccctgatttgccagagcatacgactataatttctactcatttacaggcagaaaatctcatgtgctggggcacaggctatcatctatccatgaaacccatgggaatacctgacctaggtatgataaatgatggcacctcctgtggagaaggccgggtatgttttaaaaaaaattgcgtcaatagctcagtcctgcagtttgactgtttgcctgagaaatgcaatacccggggtgtttgcaacaacagaaaaaactgccactgcatgtatgggtgggcacctccattctgtgaggaagtggggtatggaggaagcattgacagtgggcctccaggactgctcagaggggcgattccctcgtcaatttgggttgtgtccatcataatgtttcgccttattttattaatcctttcagtggtttttgtgtttttccggcaagtgataggaaaccacttaaaacccaaacaggaaaaaatgccactatccaaagcaaaaactgaacaggaagaatctaaaacaaaaactgtacaggaagaatctaaaacaaaaactggacaggaagaatctgaagcaaaaactggacaggaagaatctaaagcaaaaactggacaggaagaatctaaagcaaacattgaaagtaaacgacccaaagcaaagagtgtcaagaaacaaaaaaagtaa

SEQ ID NO: 46173 - DNA, 876 bp, Homo Sapiens
atgtcagccctcaactggaagccgtttgtgtacggggggctggcctccatcactgctgagtgcggtacatttccaattgatttaaccaagacacggctccagattcaaggccagacgaatgatgcaaaatttaaggaaattagataccgaggaatgttgcacgcattagtgaggataggcagagaagaagggctgaaagcactctactcggggattgcccccgcgatgttacgccaggcatcctatggcaccatcaagataggcacttaccagagcttgaagcgactattcattgaacgcccagaagatgaaactctaccgataaatgtgatatgtggaattctgtctggagtcatatcttcaaccattgctaatccaactgatgttttgaaaattcggatgcaagcgcaaagcaacaccattcaaggaggaatgataggcaacttcatgaacatttaccagcaagaggggacaagaggactgtggaagggtgtgtcccttactgcgcagagggctgctattgttgttggtgtggagctgccggtctatgacatcaccaagaagcatcttattctctcaggcctgatgggagacactgtgtatacccacttcctctcaagcttcacctgtggtctggcaggggccctggcctcaaaccctgttgatgttgtgaggacacgtatgatgaatcagagagtgcttcgagatggcagatgttctggctacacaggaaccctggattgcttgttacagacatggaagaatgaagggttttttgctctctataaaggcttttggccaaattggttgagacttggtccttggaatatcattttctttgtgacatacgagcagttgaagaaattggatttgtga

SEQ ID NO: 46174 - DNA, 2653 bp, Homo Sapiens
gaggaggaaggaggaggtcaccgtccagctgtctctcccctgtccccacatgtcttctaagctgttggagccggccggcgctcacttgtcttcaggaagctcggagcctttggtggagccggggagaggaagggtgggtgcaagagtgaaaggcgagaggggactgcaagcatccgggtcggctcctggccggagcaagatggctgagggcgagcggcagccgccgccagattcttcagaggaggcccctccagccactcagaacttcatcattccaaaaaaggagatccacacagttccagacatgggcaaatggaagcgttctcaggcatacgctgactacatcggattcatccttaccctcaacgaaggtgtgaaggggaagaagctgaccttcgagtacagagtctccgaggccattgagaaactagtcgctcttctcaacacgctggacaggtggattgatgagactcctccagtggaccagccctctcggtttgggaataaggcatacaggacctggtatgccaaacttgatgaggaagcagaaaacttggtggccacagtggtccctacccatctggcagctgctgtgcctgaggtggctgtttacctaaaggagtcagtggggaactccacgcgcattgactacggcacagggcatgaggcagccttcgctgctttcctctgctgtctctgcaagattggggtgctccgggtggatgaccaaatagctattgtcttcaaggtgttcaatcggtaccttgaggttatgcggaaactccagaaaacatacaggatggagccagccggcagccagggagtgtggggtctggatgacttccagtttctgcccttcatctggggcagttcgcagctgatagaccacccatacctggagcccagacactttgtggatgagaaggccgtgaatgagaaccacaaggactacatgttcctggagtgtatcctgtttattaccgagatgaagactggcccatttgcagagcactccaaccagctgtggaacatcagcgccgtcccttcctggtccaaagtgaaccagggtctcatccgcatgtataaggccgagtgcctggagaagttccctgtgatccagcacttcaagttcgggagcctgctgcccatccatcctgtcacgtcgggctaggaggggccaagccgaagagccacccaggccacagttcctgtgcctgccttccccaccccagcagtggcccctccccatcccctccctctgttcgtcccgtttgatgagaggctgtttactggggtggggtggcgagatgggcttgagggggctcagagcataaggcttcagggcccaagttgggagaagtgaccaaagtgtagccagttttctgagttcccgtgtgctagactggccagaagagagggtctggggcctggtcactcggccactctctcctgtttctggcctcttctcccttcactcccgtccagtctggttttgagagcaggggctgttctgcagcaccgcagggaagggaggagagatacctgctgcttccattgcttttcccttcctggagtcgatgcctttctaagggttggagctgctccttgcaggggcgggtcagtttcccaggccatgccggggtggccatctatggtagggctggaagctgaggctggccgccagctgtgggctggggtggggtgggtggggtcgggtggtggagaggccttagctgtcctggctggtgcccctcccaggctccttttcaccctgccccctgggcctgaggccccctgtgtccaagcctccccctggctcttcagttctctagcccttggctctgctgggtttcctgactgtagccacatctctcccgctccctaagggtaacctagccaatggaagctgccctttgggtaggtgctgggctcctgggagggcccagatgatggggtgaggcatgtctttccagaactttccctggcagggaggggatggcagaaactcagggaggggcttggggcccattgtatctggagagcctggattcctcttggcagtcttaggcccggccacttctgctacctttgcgctgctgtgagcctcaccctgggcccctgggccctgcttctctgctcccctgggtgatgggtgggcccagaaggtggcagtcccacaccttgtcctcccacctccctgaactgtccattgcttttatagggtgaggtaagagacagcctcccaagcccaggctttggcactcagaatgggcccagtgggggctgggcaggcccattgagggccaccgccgaggtttctcctagggctgttcctgggcctggctcttacaggctcgtcccccaggcctgcccttctccactgccccctcctgtgtctgggtccacacacccttcaggaagggggagcactgagaagcacagcacaggggctcagcctgggatccggtgatggtctgggcagaggctgggtcaggagtcccaaaggtcagtgacagtttctcagaagaggcccagcgtccacctctctcccagggccagacagcccttcctggctcccccatccccctatgggctcccagccccttgcaccctcattgctgttcagattaaagcctctgttttgcacctgtca

SEQ ID NO: 46175 - DNA, 138 bp, Homo Sapiens
caggatccacctctgatgttcagtgaagagtaccagaaaagtctgctagagcagtaccatctgggtctggatcaaaaacgcagaaaatacgtggttggagagctcatctggaattttgccgatttcatgactaaccag

SEQ ID NO: 46176 - DNA, 4712 bp, Homo Sapiens
cccctttctccccctctgttaagtccctccccctcgccattcaaaagggctggctcggcactggctccttgcagtcggcgaactgtctgggcgggaggagccgtgagcagtagctgcactcagctgcccgcgcggcaaagaggaaggcaagccaaacagagtgcgcagagtggcagtgccagcggcgacacaggcagcacaggcagcccgggctgcctgaatagcctcagaaacaacctcagcgactccggctgctctgcggactgcgagctgtggcggtagagcccgctacagcagtcgcagtctccgtggagcgggcggaagccttttttctccctttcgtttacctcttcattctactctaaaggcatcgttattagggaaaatcctgttgtgaataagaaggattccacagatcacataccagagcggttttgcctcagctgctctcaactttgtaatcttgtgaagaagctgacaagcttgggctgattgcagtgcactatgaggactgaatgacagtgggttttaattcagatatttcaagtgttgtgcgggttaatacaacaaactgtcacaagtgtttgttgtccgggacgtacattttcgcggtcctgctagtatgcgtggtgttccactctggcgcccaggagaaaaactacaccatccgagaagaaattccagaaaacgtcctgataggcaacttgttgaaagaccttaacttgtcgctgattccaaacaagtccttgacaactactatgcagttcaagctagtgtacaagaccggagatgtgccactgattcgaattgaagaggatactggtgagatcttcactaccggcgctcgcattgatcgtgagaaattatgtgctggtatcccaagggatgagcattgcttttatgaagtggaggttgccattttgccggatgaaatatttagactggttaagatacgttttctgatagaagatataaatgataatgcaccattgttcccagcaacagttatcaacatatcaattccagagaactcggctataaactctaaatatactctcccagcggctgttgatcctgacgtaggcataaacggagttcaaaactacgaactaattaagagtcaaaacatttttggcctcgatgtcattgaaacaccagaaggagacaagatgccacaactgattgttcaaaaggagttagatagggaagagaaggatacctatgtgatgaaagtaaaggttgaagatggtggctttcctcaaagatccagtactgctattttgcaagtaagtgttactgatacaaatgacaaccacccagtctttaaggagacagagattgaagtcagtataccagaaaatgctcctgtaggcacttcagtgacacagctccatgccacagatgctgacataggtgaaaatgccaagatccacttctctttcagcaatctagtctccaacattgccaggagattatttcacctcaatgccaccactggacttatcacaatcaaagaaccactggatagggaagaaacaccaaaccacaagttactggttttggcaagtgatggtggattgatgccagcaagagcaatggtgctggtaaatgttacagatgtcaatgataatgtcccatccattgacataagatacatcgtcaatcctgtcaatgacacagttgttctttcagaaaatattccactcaacaccaaaattgctctcataactgtgacggataaggatgcggaccataatggcagggtgacatgcttcacagatcatgaaattcctttcagattaaggccagtattcagtaatcagttcctcctggagaatgcagcatatcttgactatgagtccacaaaagaatatgccattaaattactggctgcagatgctggcaaacctcctttgaatcagtcagcaatgctcttcatcaaagtgaaagatgaaaatgacaatgctccagttttcacccagtctttcgtaactgtttctattcctgagaataactctcctggcatccagttgatgaaagtaagtgcaacggatgcagacagtgggcctaatgctgagatcaattacctgctaggccctgatgctccacctgaattcagcctggatcgtcgtacaggcatgctgactgtagtgaagaaactagatagagaaaaagaggataaatatttattcacaattctggcaaaagataatggggtaccacccttaaccagcaatgtcacagtctttgtaagcattattgatcagaatgacaatagcccagttttcactcacaatgaatacaaattctatgtcccagaaaaccttccaaggcatggtacagtaggactaatcactgtaactgatcctgattatggagacaattctgcagttacgctctccattttagatgagaatgatgacttcaccattgattcacaaactggtgtcatccgaccaaatatttcatttgatagagaaaaacaagaatcttacactttctatgtaaaggctgaggatggtggtagagtatcacgttcttcaagtgccaaagtaaccataaatgtggttgatgtcaatgacaacaaaccagttttcattgtccctccttacaactattcttatgaattggttctaccgtccactaatccaggcacagtggtctttcaggtaattgctgttgacaatgacactggcatgaatgcagaggttcgttacagcattgtaggaggaaacacaagagatctgtttgcaatcgaccaagaaacaggcaacataacattgatggagaaatgtgatgttacagaccttggtttacacagagtgttggtcaaagctaatgacttaggacagcctgattctctcttcagtgttgtaattgtcaatctgttcgtgaatgagtcagtgaccaatgctacactgattaatgaactggtgcgcaaaagcattgaagcaccagtgaccccaaatactgagatagctgatgtatcctcaccaactagtgactatgtcaagatcctggttgcagctgttgctggcaccataactgtcgttgtagttattttcatcactgctgtagtaagatgtcgccaggcaccacaccttaaggctgctcagaaaaacatgcagaattctgaatgggctaccccaaacccagaaaacaggcagatgataatgatgaagaaaaagaaaaagaagaagaagcattcccctaagaacctgctgcttaatgttgtcactattgaagaaactaaggcagatgatgttgacagtgatggaaacagagtcacactagaccttcctattgatctagaagagcaaacaatgggaaagtacaattgggtaactacacctactactttcaagcctgacagccctgatttggcccgacactacaaatctgcctctccacagcctgccttccaaattcagcctgaaactcccctgaatttgaagcaccacatcatccaagaactgcctctcgataacacctttgtggcctgtgactctatctccaattgttcctcaagcagttcagatccctacagcgtttctgactgtggctatccagtgacaaccttcgaggtacctgtgtccgtacacaccagaccgactgattccaggacatgaactattgaaatctgcagtgagatgtaactttctaggaacaacaaaattccattccccttccaaaaaatttcaatgattgtgatttcaaaattaggctaagatcattaattttgtaatctagatttcccattataaaagcaagcaaaaatcatcttaaaaatgatgtcctagtgaaccttgtgctttctttagctgtaatctggcaatggaaatttaaaatttatggaagagacagtgcagcgcaataacagagtactctcatgctgtttctctgtttgctctgaatcaacagccatgatgtaatataaggctgtcttggtgtatacacttatggttaatatatcagtcatgaaacatgcaattacttgccctgtctgattgttgaataattaaaacattatctccaggagtttggaagtgagctgaactagccaaactactctctgaaaggtatccagggcaagagacatttttaagaccccaaacaaacaaaaaacaaaaccaaaacactctggttcagtgttttgaaaatattgactaacataatattgctgagaaaatcatttttattacccaccactctgcttaaaagttgagtgggccgggcgcggtggctcacgcctgtaattccagcactttgggaggccgaggcgggtggatcacgaggtcaggatattgagaccatcctggctaacatggtgaaaccccatctccactaaaaatacaaaaaattagctgggcgtggtggcgggcgcctgtagtcccagctactcgggaggctgaggcaggagaatggcgtgaacccgggaggcggagcttgcagtgagccgagatggcgccactgcactccagcctgggtgacagagcaagactctgtctcaaaaagaaaaaaatgttcagtgatagaaaataattttactaggtttttatgttgattgtactcatgctgttccactccttttaattattaaaaagttatttttggctgggtgtggtggctcatacctgtaatcccagcactttgggaggccgaggcgggtggatcacctgaggtcaggagttcaagaccagtctggccaacat

SEQ ID NO: 46177 - DNA, 1281 bp, Homo Sapiens
atgaagagacatgagatggtagctaaacatttagttatgttttattattttgcccaacacctttggccagagcagaacataagagattctttccagaaagtgaccctaagaagatatagaaaatgtggatatgagaatttacagttaagaaaaggctgtaaaagtgtggttgagtgtaaacagcacaaaggagattatagtggacttaaccaatgtttgaaaactaccttgagcaaaatatttcaatgtaataaatatgtagaagttttccataaaatttcaaattcaaatagacacaagatgagacatactgaaaataaacattttaaatgtaaagaatgtcgcaaaacattttgcatgctttcacacctaactcaacataaaagaatccaaactagagtgaatttctacaaatgtgaagcatatggaagagcctttaactggtcctcaacccttaataaacataagagaattcatactggagaaaaaccttacaaatgtaaagaatgtggcaaagcctttaaccagacctcacaccttattagacataagagaattcatactgaagagaaaccctacaaatgtgaagaatgtggcaaagcctttaaccagtcatcgacccttactacacataatataattcatactggggaaattccctacaaatgtgagaaatgtgttagagcttttaaccaagcctcaaagcttactgaacataagttaattcataccggagagaaacgttatgaatgtgaagaatgcggcaaagcttttaaccgatcctcaaaacttactgaacataagtacattcatactggagagaagctgtacaaatgtgaagaatgtggtaaagcctttaaccagtcctcaacccttactacacataagagaattcatagtggagagaagccctacaaatgtgaagaatgtggcaaagcttttaaacaattttcaaatcttactgaccataaaaaaattcatactggagagaaaccctacaaatgtgaggaatgtggcaaagcttttaaccaactctcaaaccttactagacataaggtaattcatactggagagaaaccctacaaatgtggagaatgtggcaaagcctttaaccagtcctcagcccttaatacacataagataatccatactggagagaatccccacaaatgtagagaatctggcaaagttttccacctatcctcaaaacttagtacatgtaagaaaattcatactggagagaaactctacaaatgtgaagaatgtggcaaagcctttaac

SEQ ID NO: 46178 - DNA, 171 bp, Homo Sapiens
aagttgtttctggacagtctatggaaagctcttgctggccacggaggaagtaggcagctgacacaaagttctgcaattgcctgtgccaaactgtgtaaagcaagtacttacatcaactgggaagataacgctgtcattttcctacttgttcagtccatggtggttgatctt

SEQ ID NO: 46179 - DNA, 594 bp, Homo Sapiens
gctgcactgccagaggacatggggcctgtgcctgttggaatctacggaaacattgatcgctttgggattctgcagtccccctcctgggagtcagccccacaggaaggcctttgtcctcctttccctgtgccttctcctgggctgagacctgagctggatgggacagagccagtcctttctggaggtcgactccctgacggatggctccaggccctgtgcaggtcctcagctctgcctgggttgccttacagtgagaagaggctgccccctgtcagctcccgggaggcagagcaaatgcagcaggagatgagacgcaagagcaagtggatggcaatgctgggaaaatgggagacatatcagaacagcaaaaagctgatgaagcgagtgtataagggcattcccatgaacgtccgggccgaggtgtggtcagtcctcctgaacattcaggaaatcaaggcgaaaaaccccagacaataccgggtcatgaaggagaagggcaagaggtcatctgagcacatccaccagatcgacctggctgtgagccagacactaaggaaccacatgttcttcagggatcgatatggaaccaagtaa

SEQ ID NO: 46180 - DNA, 2796 bp, Homo Sapiens
atgccgggcccgctagggctgctctgcttcctcgccctggggctgctcggctcggccgggcccagcggcgcggcgccgcctctctgcgcggcgccctgcagctgcgacggcgaccgtcgggtggactgctccgggaaggggctgacggccgtgcccgaggggctcagcgccttcacccaagcgctacaattggcgggcaacgacctttcttttatccacccaaaggccttgtctgggttgaaagaactcaaagttctaacgctccagaataatcagttgaaaacagtacccagtgaagccattcgagggctgagtgctttgcagtctttgcgtttagatgccaaccatattacctcagtccccgaggacagttttgaaggacttgttcagttacggcatctgtggctggatgacaacagcttgacggaggtgcctgtgcaccccctcagcaatctgcccaccctacaggcgctgaccctggctctcaacaagatctcaagcatccctgactttgcatttaccaacctttcaagcctggtagttctgcatcttcataacaataaaattagaagcctgagtcaacactgttttgatggactagataacctggagaccttagacttgaattataataacttgggggaatttcctcaggctattaaagcccttcctagccttaaagagctaggatttcatagtaattctatttctgttatccctgatggagcatttgatggtaatccactcttaagaactatacatttgtatgataatcctctgtcttttgtggggaactcagcatttcacaatttatctgatcttcattccctagtcattcgtggtgcaagcatggtgcagcagttccccaatcttacaggaactgtccacctggaaagtctgactttgacaggtacaaagataagcagcatacctaataatttgtgtcaagaacaaaagatgcttaggactttggacttgtcttacaataatataagagaccttccaagttttaatggttgccatgctctggaagaaatttctttacagcgtaatcaaatctaccaaataaaggaaggcacctttcaaggcctgatatctctaaggattctagatctgagtagaaacctgatacatgaaattcacagtagagcttttgccacacttgggccaataactaacctagatgtaagtttcaatgaattaacttcctttcctacggaaggcctgaatgggctaaatcaactgaaacttgtgggcaacttcaagctgaaagaagccttagcagcaaaagactttgttaacctcaggtctttatcagtaccatatgcttatcagtgctgtgcattttggggttgtgactcttatgcaaatttaaacacagaagataacagcctccaggaccacagtgtggcacaggagaaaggcaagtgcatgagtactgctgatgcagcaaatgtcacaagcactcttgaaaatgaagaacatagtcaaataattatccattgtacaccttcaacaggtgcttttaagccctgtgaatatttactgggaagctggatgattcgtcttactgtgtggttcattttcttggttgcattatttttcaacctgcttgttattttaacaacatttgcatcttgtacatcactgccttcgtccaaattgtttataggcttgatttctgtgtctaacttattcatgggaatctatactggcatcctaacttttcttgatgctgtgtcctggggcagattcgctgaatttggcatttggtgggaaactggcagtggctgcaaagtagctgggtttcttgcagttttctcctcagaaagtgccatatttttattaatgctagcaactgtcgaaagaagcttatctgcaaaagatataatgaaaaatgggaagagcaatcatctcaaacagttccgggttgctgcccttttggctttcctaggtgctacagtagcaggctgttttccccttttccatagaggggaatattctgcatcacccctttgtttgccatttcctacaggtgaaacgccatcattaggattcactgtaacgttagtgctattaaactcactagcatttttattaatggccgttatctacactaaactatactgcaacttggaaaaagaggacctctcagaaaactcacaatctagcatgattaagcatgtcgcttggctaatcttcaccaattgcatctttttctgccctgtggcgtttttttcatttgcaccattgatcactgcaatctctatcagccccgaaataatgaagtctgttactctgatattttttccattgcctgcttgcctgaatccagtcctgtatgttttcttcaacccaaagtttaaagaagactggaagttactgaagcgacgtgttaccaagaaaagtggatcagtttcagtttccatcagtagccaaggtggttgtctggaacaggatttctactacgactgtggcatgtactcacatttgcagggcaacctgactgtttgcgactgctgcgaatcgtttcttttaacaaagccagtatcatgcaaacacttgataaaatcacacagctgtcctgcattggcagtggcttcttgccaaagacctgagggctactggtccgactgtggcacacagtcggcccactctgattatgcagatgaagaagattcctttgtctcagacagttctgaccaggtgcaggcctgtggacgagcctgcttctaccagagtagaggattccctttggtgcgctatgcttacaatctaccaagagttaaagactga

SEQ ID NO: 46181 - DNA, 2248 bp, Homo Sapiens
ggcagccgcagaagcggcagcggcggcggcgcggcgcaggcaccggcccggggagaggcaccatgagcggatcacagaacaatgacaaaagacaatttctgctggagcgactgctggatgcagtgaaacagtgccagatccgctttggagggagaaaggagattgcctcggattccgacagcagggtcacctgtctgtgtgcccagtttgaagccgtcctgcagcatggcttgaagaggagtcgaggattggcactcacagcggcagcgatcaagcaggcagcgggctttgccagcaaaaccgaaacagagcccgtgttctggtactacgtgaaggaggtcctcaacaagcacgagctgcagcgcttctactccctgcgccacatcgcctcagacgtgggccggggtcgcgcctggctgcgctgtgccctcaacgaacactccctggagcgctacctgcacatgctcctggccgaccgctgcaggctgagcactttttatgaagactggtcttttgtgatggatgaagaaaggtccagtatgcttcctaccatggcagcaggtctgaactccatactctttgcgattaacatcgacaacaaggatttgaacgggcagagtaagtttgctcccaccgtttcagacctcttaaaggagtcaacgcagaacgtgacctccttgctgaaggagtccacgcaaggagtgagcagcctgttcagggagatcacagcctcctctgccgtctccatcctcatcaaacctgaacaggagaccgaccccttgcctgtcgtgtccaggaatgtcagtgctgatgccaaatgcaaaaaggagcggaagaagaaaaagaaagtgaccaacataatctcatttgatgatgaggaagatgagcagaactctggggacgtgtttaaaaagacacctggggcaggggagagctcagaggacaactccgaccgctcctctgtcaatatcatgtccgcctttgaaagccccttcgggcctaactccaatggaagtcagagcagcaactcatggaaaattgattccctgtctttgaacggggagtttgggtaccagaagcttgatgtgaaaagcatcgatgatgaagatgtggatgaaaacgaagatgacgtgtatggaaactcatcaggaaggaagcacaggggccactcggagtcgcccgagaagtaagtttgtgtgtaaggtggagtctcaccgtcccccaggctggagtgccgtggcgtgatctcagctcactgcaacctccacctcccgggttcaagctattctcctgcctcagcctcccgagtagctgggattacaggcacctgtcaccacacccagctaatttttgtatttttagtagagatggggtttcaccatattggccaggctggtctcaaactcctgacctcaagtgatctgcctgccttggcctcccaaattgctaggtttacaggcatgagccaccacgcccagccttcccttgcacttttaatgagggggttaagttcactgttttctctttctatggtattgggtaaaataggtctgcaagctttatatttgcccagggtatcattcattcttcaggtgttgatttaggagtgttatttggaaggagtattatttgctcttcccctgagaactgaaagaggggaaaggagtacatttgagggcacttaatacaaagttaatgtcagaatgtgtgccttgaaattcttgctttatacatacatctgtcattttcatttcacagggttcacagggtttcacagtctgatgagactgtgcctgttattgttttttatttttactctggattttccttgcatctgacttgccactagcacaggaagctcaggacgaaggcagcgttaggagaatagttgtggtatggtgacttctgtgtttatctgcaggggtgtgaatagccgtaacttgcctgcacctgctgccttaacagtggagttggccaggcgcagtggctcacacctgtaatcccagcactttgggacaccaaggtgggtggatcacctgaggtcaggagttctagaccagcctgaccaacatggtgaaaccccttctctacgtataaaaaaatacaaaattagccaggcatggtggtgcatgcctgtaactccagatacttgggatgctgaggcaggagaatcgcttgaatatgagaggcggagccaagatgatgccattgcactccagcctgggcaacaagagagaaggtccttctc

SEQ ID NO: 46182 - DNA, 426 bp, Homo Sapiens
tgtgggaagcctaaggtggtggggaagatctatggtggccgggacgcagcagctggccagtggccatggcaggccagcctgctctactggggctcgcacctctgtggagctgtcctcatcgactcctgctggctggtatcaactacccactgctttctcaacaaatcccaggccccgaagaactatcaggttctgttgggaaacatccaactgtatcatcaaacccagcacacccagaagatgtctgtgcaccggatcatcacccatccagactttgagaagctccacccctttgggagtgacattgccatgttgcagctgcacctgcctatgaacttcacttcctacattgtccctgtctgcctcccatcccgggacatgcagctgcccagtaacgtgtcctgttggataaccggctggggaatg

SEQ ID NO: 46183 - DNA, 138 bp, Homo Sapiens
atgataaatatcacagcaactcaattcaagaaaaggacatactatttgagtttttggttttttcttttccgcctcaccgtgcttcttgttcactacttcttccagctttttctcatcccaattatccatagtatctaa

SEQ ID NO: 46184 - DNA, 1823 bp, Homo Sapiens
tccatcattttccacctacctcacctctcaaggactatggggatccacagggtattaaacgaatgagatcaagaactggtgtccggtttgttcaagagactgatgatatgactcagcttcatggttttcatcagtctcttcgagacctcagcagtgaacaaattcgccttggagatgatttcaacagggagctttccagaaggagccggtcagatgccgaaacaaaaagggctttggaagaattgactgaaaaacttaatgaagcccagaaacaagaagtggtttcagatcgggtggagcggcggcttcaggaactggagagagagatgcgcacagaaagggagctggtggaaagacgccaggatcaactgggactcatgtccctgcagctacaggaggcactaaagaaacaagaagctaaagcagatgagcatgagggggcaataaaaaataagctaagacaaactgaaactgagaagaatcaacttgaacaggaattggagctatctcgaaggttattgaatcaatcagaaggcagccgagaaacacttttgcatcaggtagaagaactgcgtacacaacttacgaaagcagaaggtgatcgaaagggtttacagcatcaagtatctcagatttccaagcaacagtcaaactatcaggatgaacaaggggaggactggagatttaggagaggggttgagcgggaaaaacaggacctggagaagcaaatgtcagatttgagagtgcagctgaacttcagcgcaatggcatctgagttagaggaagtgaaacggtgcatggagagaaaagacaaggagaaagcacatttggcatcacaagtagaggtgactttgctctttttaagtcatattcgaaatattttaattttatctcatggaattgcttaatgaaattttaatataaagatgtgttattttatgaactccagtgtgagcattgataatataaagttatattaatgactgatttacttatatgtagaaattcctatgggttcatttctctttcattcaggaccccaaagccaggaacctggatgattttcctttattattttacagagaaatcctttactatttttaaatttgaaaatatttttgttctaatagcaattgaaccctttctacagacagaagggaccttttttgtttgagagaacagtgaattattatttattttgcgggtgaaactggcagaatgcatagtgaaaaggtgttaccaataattcttctttggaaccataaaggttttcagacctctagttgttctgcatgaggtggaattgcaatgcctccattaatttagagttgtgtagcaatcatggatgatatggtaaccgtgaatggagtataactaggcagctaccatttcctgcttttatctagcatagatgaggtaattatcagtatatattaaaaatcaaaggaaaagacctcataaaaggaaatggtttaattgaaattacaattatgcaaattagattaaacatggatgacacatttggaaatagatatgtatcaatcctccctgtatctgtttttgtaagtgaagttgtgttctaatttcaagtatttccaaaattaaaatgaaaggtagaaaattagtgttaaaagcacctaattttatataacccaaaggaaatatttaatgttactcatctgtgtttctctttcatcttgtcagcacatcaatagaaaatgtcttttaaatttggttcaagatttggattgtaaagataatgaaatattgacatactctttacaaagccctctacatgtttaataaagacttacttgaaattg

SEQ ID NO: 46185 - DNA, 1075 bp, Homo Sapiens
ggtcaggaaagctcaggcaagcccaccctcaggcactacagctagactccgagcttactgggcagtcatctgattcgaccaacatcagttcgcagggcttaagcccagtcccttacggcggcctggggagggaccaggcccaagtatataaagctccctgagggtccgcgttggctttgcgcctgtgagtgtgattcaagaacgtcccagtgcccttggctcctttcggagtgtgaccccgtgcttgcacgggacacgttacccagctcgggtgagaagggtatcttccgggaacctcgcctttaatagcacaacgagcgcagagtccactggatctgcgagaagaaaccgcgctaactagtttgtccctacggccgcctcgtagtcactgccgcggcgccttgagtctccgggccgccttgccatggctgcccgtggtgtcatcgctccagttggcgagagtttgcgctacgctgagtacttgcagccctcggccaaacggccagacgccgacgtcgaccagcagagactggtaagaagtttgatagctgtaggactgggtgttgcagctcttgcatttgcaggtcgctacgcatttcggatctggaaacctctagaacaagttatcacagaaactgcaaagaagatttcaactcctagcttttcatcctactataaaggaggatttgaacagaaaatgagtaggcgagaagctggtcttattttaggtgtaagcccatctgctggcaaggctaagattagaacagctcataggagagtcatgattttgaatcacccagataaaggtggatctccttacgtagcagccaaaataaatgaagcaaaagacttgctagaaacaaccaccaaacattgatgcttaaggaccacactgaaggaaaaaaaaagaggggacttcgaaaaaaaaaaaagccctgcaaaatattctaaaacatggtcttcttaattttctatatggattgaccacagtcttatcttccaccattaagctgtataacaataaaatgttaatagtcttgctttttattatcttttaaagatctccttaaattct

SEQ ID NO: 46186 - DNA, 156 bp, Homo Sapiens
atggtggcctactggagacaggctggactcagctacatccgatactcccagatctgtgcaaaagtagtgagagatgcactgaagacagaattcaaagcaaatgccaaaaagacttctggcaacagcgtaaaaattgtgaaagtaaagaaggaataa

SEQ ID NO: 46187 - DNA, 375 bp, Homo Sapiens
atggctcctgcaaagaagggtgatgagaagaagaagggtcattccgccatcaacgagatggtgacccgagaataccccatcaacattcataagtgcattcatggagtgggcttcaagaagcgttcccctcaggcactcaaagagctccggaaacttgccctgaaggagatgggaactccagatgcacactttgataccaggctcaacaaagctgtctgggccaaaggaataagcaacgtctcatactgtatccatgttcggttgtccagaaaatgtaatgaagataaagatttaccaaacaagctctatacttcggttgcctacgtacctgttaccactttaaaaaaatctacagtcggtgtgaatgtgaactaa

SEQ ID NO: 46188 - DNA, 1017 bp, Homo Sapiens
atggctggcagtcacccctacttcaacctgcctgactccacacacccatcgccgccctccgctccacccagcctccgctggcaccagcgctgccagccctctggtgccaccaatggcctgctggtggccctgctgggtgggggcctgcctgctggcttcgtgggccccctttctcgtatggcttaccagggttccaacctgccctcgctggagctgctcatctgtcgatgcctcttccacctccctattgccctgctacttaaactgcgtggcgacccccttctgggacctcctgacatccgaggctgggcctgcttctgtgccctgctcaacgtcctcagcattggatgtgcctacagtgcagttcaggtggtgcccgctggcaacgctgccactgttcgcaaaggttcttccaccgtatgctccgctgtcctcaccctctgccttgagagccagggtctcggtggctacgagtggtgtggactgttgggcagcatcctaggactaatcatcattctgggacctggactctggacactacaggaggggaccacaggtgtctacaccaccctgggctatgtgcaggctttcctgggaggcctggcgctgtccctggggcttctggtctatcgttctctgcactttccctcctgcctcccaacagtggccttcctatctggcttggtggggctgctgggctgtgtgccaggcctctttgtgctgcagacccccgtgttgcccagtgacctcctgagttggagttgtgtgggggcagaggggatcctcgccttggtctccttcacatgtgtgggctatgcggtcaccaaggcccaccctgccctggtgtgcgctgtcctgcattccgaggtggttgtggcccttatactgcagtattatatgctccatgagactgtggcactttctgacatcatgggggcaggggttgtgctgggcagcattgccatcattacagcccggaacctcagctgtgagaggacagggaaggtggaggagtga

SEQ ID NO: 46189 - DNA, 1451 bp, Homo Sapiens
actgcctggaaacgggctgggcctgcctcggacgccgccggtgtcgcggattctctttccgcccgctccatggcggtggatgcctgactggaagcccgagtgggatgcggctgacgcggaagcggctctgctcgtttcttatcgccctgtactgcctattctccctctacgctgcctaccacgtcttcttcgggcgccgccgccaggcgccggccgggtccccgcggggcctcaggaagggggcggcccccgcgcgggagagacgcggccgagaacagtccactttggaaagtgaagaatggaatccttgggaaggagatgaaaaaaatgagcaacaacacagatttaaaactagccttcaaatattagataaatccacgaaaggaaaaacagatctcagtgtacaaatctggggcaaagctgccattggcttgtatctctgggagcatatttttgaaggcttacttgatcccagcgatgtgactgctcaatggagagaaggaaagtcaatcgtaggaagaacacagtacagcttcatcactggtccagctgtaataccagggtacttctccgttgatgtgaataatgtggtactcattttaaatggaagagaaaaagcaaagatcttttatgccacccagtggttactttatgcacaaaatttagtgcaaattcaaaaactccagcatcttgctgttgttttgctcggaaatgaacattgtgataatgagtggataaacccattcctcaaaagaaatggaggcttcgtggagctgcttttcataatatatgacagcccctggattaatgacgtggatgtttttcagtggcctttaggagtagcaacatacaggaattttcctgtggtggaggcaagttggtcaatgctgcatgatgagaggccatatttatgtaatttcttaggaacgatttatgaaaattcatccagacaggcactaatgaacattttgaaaaaagatgggaacgataagctttgttgggtttcagcaagagaacactggcagcctcaggaaacaaatgaaagtcttaagaattaccaagatgccttgcttcagagtgatctcacattgtgcccggtcggagtaaacacagaatgctatcgaatctatgaggcttgctcctatggctccattcctgtggtggaagacgtgatgacagctggcaactgtgggaatacatctgtgcaccacggtgctcctctgcagttactcaagtccatgggtgctccctttatctttatcaagaactggaaggaactccctgctgttttagaaaaagagaaaactataattttacaagaaaaaattgaaagaagaaaaatgttacttcagtggtatcagcacttcaagacagagcttaaaatgaaatttactaatattttagaaagctcatttttaatgaataataaaagttaattatctttttgagct

SEQ ID NO: 46190 - DNA, 291 bp, Homo Sapiens
atgagtgatgttgagaaaggcaataagatttttgttcagaagtttgcccagtgccataccgtggaaaagggaggcaagcgcaagactgagacaaatctccatggcctctttgggcagaatacaggtcaggctgttggattctcttacatggaccccaataagaacaaaggcatcacttggggagagggtatactgatggagtatttggagaatcccaagaagtgcatccttggaacaaaaatgatctttgccagcattaagaagaaggcagaaaaggcaggcttgatagct

SEQ ID NO: 46191 - DNA, 1400 bp, Homo Sapiens
gccgcggcgcgcacggcagctgtcccgcctgccacaatgcgcggcgaagctgcggccgcgacttggcgaggtggtccctaacgttgccgctcggcatccttagaaccggccgcccctgacgccgcgcggggaccccagtcgcccgcgcgccccatgcgctcactcttcggtgcccggccgggccggcgcctcgcagacgcggagccgcgcgggtgacggcacaggcggctgcgcgcccagcccagcccagcccagcccgaggagagggcgcgccgcgcccccgccccccgcccgctctcccgaggccgtgggtgcggatgcgcggctgacgactcgcagcaagagcaccgccgccggccccagcccgcagcatggcagccgccgcctatgtggaccacttcgccgccgagtgcctcgtgtccatgtcgagccgcgcggtcgtgcacgggccgcgggaggggccggagtcccggcccgagggcgcggccgtggccgccacccccacgctgccccgcgtcgaggagcgccgcgacggtaaggacagcgcctcgctcttcgtggtggcgcggatcctagcggacctcaaccagcaagcgccggcgcccgccccggcggagcgcagggagggcgccgcggcccggaaggcgaggaccccctgccgcctgccgccgcccgcccccgagcccacctcccccggcgccgaaggcgcggcggccgcgccccccagcccggcgtggagcgagccggagcccgaggcggggctggagcccgagcgggagccggggcccgcggggagcggcgagcccggcctcagacaaagggtccggcggggccgaagtcgcgccgacctcgagtccccgcagaggaagcacaagtgccactacgcgggctgcgagaaagtttacgggaaatcttcgcacctcaaggcgcacctgagaactcacacaggtgagaggcccttcgcctgcagctggcaggactgcaacaagaagttcgcgcgctccgacgagctggcgcggcactaccgcacacacacgggcgagaagaagttcagctgccccatctgcgagaagcgcttcatgcgcagcgaccacctgaccaagcacgcgcgccgccacgccaacttccacccgggaatgctgcagcggcgcggcgggggctcgcggaccggctccctcagcgactacagccgctccgacgccagcagccccaccatcagcccggccagctcgccctgagcccgccacagccatgagcagccgctcccaccccctcgtgagtccctggcctttccttttgtaataagaaagaagagagagaacttgatgcaaagtccacgaaaaaacaatttttttcacctcaggtgtcaaagtaaatttgttaaaaaaacaaaaaaaaca

SEQ ID NO: 46192 - DNA, 759 bp, Homo Sapiens
atggaagattcaatggacatggcaatgagccccctgaggcctcagaattatctttttggttgtgaactaaaggccggcaaagatgatcactttaaggtggataatggtgaaaatgattaccagttatctttaagaatggtaagtttagggccctgtggaaaagatgaattgtgcattgttgaagtagaggcagagagttatgaaggcagtcgaattaagacactggcaactttgaaaatgcctgtacagccaacagtttcccttgggggctttgaaataacaccacccatggtcttacagttgaagtgtggttcagggcccgtgcatattagtaggaggaagatgcagaatcaggaagtggaggacaatgtaaaactcctaactatatctggaaagcaatcttcccctggaggtggtagcagccttccacagaaaaaagtaaaacaaaaagattcagtgaagaaatctgtagaagatattccagccaaaaatgcacaaaagtcaaatcagaatggagactcaaaaccatcaaagctaagatcaaaaggtcaagaatcattcaaaaaagaaaaaacttgtaaaacaccagaaagacctagttctgtagaagatattaaagcaaaaatgcaagcaagaataggaaaagatgattttcttcccaaagtggaagccaagttcatcaattatgtgaaaaattgcttccaggtgactgatcagaagactattcaagatctctggcagtggaggaagtctctttaa

SEQ ID NO: 46193 - DNA, 924 bp, Homo Sapiens
atgctcaatttcaccgatgtgacagagttcattcttttggggctaacgagccgtcgagaatggcaagttctcttcttcatcatctttcttgtggtctacatcatcaccatggtgggcaatatcggcatgatggtgttaatcaaggtcagtcctcagcttaacaaccccatgtactttttcctcagtcacttgtcatttgttgatgtgtggttttcttccaatgtcacccctaaaatgttggaaaacctgttatcagataaaaaaacaattacttatgctggttgtttagtacagtgtttcttcttcattgctcttgtccatgtggaaatttttattcttgctgcgatggcctttgatagatacatggcaattgggaatcctctgctttatggcagtaaaatgtcaagggttgtctgtattcgactgattactttcccttacatttatggttttctgacgagtctggcagcaacattatggacttacggcttgtacttctgtggaaaaattgagatcaaccatttctactgtgcagatccacctctcatcaaaatggcctgtgctgggacctttgtaaaagaatatacaatgatcatacttgccggcattaacttcacatattccctgactgtaattatcatctcttacttattcatcctcattgccattctgcgaatgcgctcagcagaaggaaggcagaaggccttttccacatgtgggtcccatctgacagctgtcattatattctatggtactctgatcttcatgtatctcagacgtcccacagaggagtctgtggagcaggggaagatggtggctgtgttctataccacagtgatccccatgttgaatcccatgatctacagtctgaggaacaaggatgtgaaaaaggccatgatgaaagtgatcagcagatcatgttaa

SEQ ID NO: 46194 - DNA, 838 bp, Homo Sapiens
ccttgtgtcttgcagaatgtggccccgtcccagagcaccacccgagacatcaggagcccatcgtgggctagggaagatcctccgggacctaacggcccaggtcttccacccttggccacctccccaggtgatgcctgaagctcaagggactgtgtccaccctcaggccctgcccgtggctctggatcggcggtccccatcagaggcctgggctgagtcctcaggggtcgacgcaggtcctctgggcagcatggggtggtgccgggtggaccccacggtggcctgtgttcgccacgtggccgtgggtcagttcctcgctggaggagacccttccccagacacctgccgggcacccagccaaacccttgaggcctgggaaggtctctggatgccaccctacaccccgcccagactcctctccctgtggttcctggacagaacattccgtcaccacgaaacgaagtttgcccaggccctgccttcaccctgggaaaacccagccgggcatgggaaggaggaatgctgcccgcctgcccgcccagaccagagtcgccccacatgccaggccaggcccgcatcctcctggggcacacgggagccccaggcttcccggcaggaaaagccccccaccgcagaagggctggtctctggtggggagttgctgctgggtggggtgaccacagggcggggttcaggctggggtatttttaatgatgtagttgcatctggtcaccgccccctgccacccccgattctttcctgccctccccaccttgtgacccagactgtggcttgaattaagaatgttttcagataagtacacgcctttgaggttaaaa

SEQ ID NO: 46195 - DNA, 744 bp, Homo Sapiens
atgaatggtgattctcgtgctgcggtggtgacctcaccacccccgaccacagcccctcacaaggagaggtacttcgaccgagtagatgagaacaacccagagtacttgagggagaggaacatggcaccagaccttcgccaggacttcaacatgatggagcaaaagaagagggtgtccatgattctgcaaagccctgctttctgtgaagaattggaatcaatgatacaggagcaatttaagaaggggaagaaccccacaggcctattggcattacagcagattgcagattttatgaccacgaatgtaccaaatgtctacccagcagctccgcaaggagggatggctgccttaaacatgagtcttggtatggtgactcctgtgaacgatcttagaggatctgattctattgcgtatgacaaaggagagaagttattacggtgtaaattggcagcgttttatagactagcagatctctttgggtggtctcagcttatctacaatcatatcacaaccagagtgaactccgagcaggaacacttcctcattgtcccttttgggcttctttacagtgaagtgactgcatccagtttggttaagatcaatctacaaggagatatagtagatcgtggaagcactaatctgggagtgaatcaggccggcttcaccttacactctgcaatttatgctgcacgcccggacgtgaagtgcgtcgtgcacattcacaccccagcaggggctgcggtg

SEQ ID NO: 46196 - DNA, 1236 bp, Homo Sapiens
aaagaaaataatattcgttgtttaactacgattggacattttggttttgaatgtttgcccaatcagttggtgagcagatctatccgacaaggattcacttttaatattctctgtgtgggggagactggaattggaaaatcgacactgatagacacattgtttaatactaacttgaaagataacaaatcctcacatttttactcaaatgttggacttcaaattcagacatatgaacttcaggaaagcaatgttcagttgaaattgactgttgtggagacagtagggtatggtgatcaaatagacaaagaagccagctaccaaccaatagttgactacatagatgcccaatttgaggcctatcttcaagaagaactgaagattaaacgttccttgtttgagtaccatgattctcgcgtccacgtgtgtctttacttcatttcacctacaggacattccctgaagtctcttgatctattaacaatgaagaaccttgacagtaaggtgaatattataccactgattgccaaagcagacactatttctaaaaatgatttacagacgtttaagaataagataatgagtgaattgattagcaatggcatccagatatatcagctcccaacagatgaagaaactgctgctcaagcgaactcctcagttagtgggctgttaccctttgctgtggtagggagtacagatgaagtgaaagttggaaaaaggatggtcagaggccgtcactacccttggggagttttgcaagtggaaaatgaaaatcactgtgacttcgttaagctccgagatatgcttctttgtaccaatatggaaaatctaaaagaaaaaacccacactcagcactatgaatgttataggtaccaaaaactgcagaaaatgggctttacagatgtgggtccaaacaaccagccagttagttttcaagaaatctttgaagccaaaagacaagagttctatgatcaatgtcagagggaagaagaagagttgaaacagagatttatgcagcgagtcaaggagaaagaagcaacatttaaagaagctgaaaaagagctgcaggacaagttcgagcatcttaaaatgattcaacaggaggagataaggaagctcgaggaagagaaaaaacaactggaaggagaaatcatagatttttataaaatgaaagctgcctccgaagcactgcagactcagctgagcaccgatacaaagaaagacaaacatcgtaag

SEQ ID NO: 46197 - DNA, 474 bp, Homo Sapiens
atggaggttggcaagaacaagcgccttatgaaaggcggcaaaaagggagccaagaagaaagtggtcgatccattttcgaagaaggattggtatgatgtgaaagcacttgctatgttcaatataagaaatactggaaagatgctagtcaccaggacccaaggaatcaaaattgcatctgatggctttgagggttgtgtgcttgaagtgagtcttactgatttgcagaatgatgaagttgcatttagaaaattcaagctgattactgaagatgttcaaaaactgcctaacttccatggcatggatcttacccatgacaaaatgtgttccatgatcaaaaaatggcagacaatgattcttcatctgttctgtgttggttttactaaaaaatgcaacaatcaggtacggaagacctcttatgctcagcaccaacaggtcctccaaatctggaagaagatgatggaaatcatgacctga

SEQ ID NO: 46198 - DNA, 591 bp, Homo Sapiens
atggtgttcagggagttcgtggaggttgcccgggtggcctacgtctgctttggacctcatgctggaaaaccggtcgcgactacagatgttattgatgggaagagggctttggttgatggaccgtgcactcaaaggaggagacaggccatgcctttcaagcacaggcagctcacagatttcctcctcaagcttccacaccgcgcccgccagaggtacgtccgacaggcctggcagaagctacacatcaacacagaatgggcagccagacgaggggccaagaagatggaagccagagaaaggaaaggcaaaatgacacagttcaatcatttggatcattttaaagttatgaaggcaaagaaaatgaggaacagaattatcgagaataaagttaagacgcttcaaaaggcagccctcctgaaagcttcttccaaaaaggcacctgctgctaaggggacggctgcagctgcagctgctggtaaagttccagcgaaaaagccgccgtgcgtaagaaggctacagcccagaagattctttcccagaaagccgcaggccagaaggcagcgcctgctccaaaagttcagaggactcaaa

SEQ ID NO: 46199 - DNA, 1782 bp, Homo Sapiens
tttctgcagctgccacgaaaacccggaacggcggagcggcgccgcccctcgcggcacctccctggcagcccttggaggccgcgctgggcatgctcagtcagctgggccgcctcagctctcggagtaggaagctcgggcgctccggctgtaaggagccgcggcggggggaaaatggagcccttcaccaatggtgagtgggctgccgaggcgccgggacccgggctctccggagccctgagggtcgtgggcagtcgtgacacgcggggtcgggctgcagccgtctcccccaacaccgcgggcttcccacgagggctgagggaggcagggagaggggatctgggggaggcagggaggttcggggggcgggcggcggccagtgcgggacccggggctggcttgaaggtcagcgccgccgccgctcgcccggggtgcggccggtgggcaaacagcaaagtttgggctgctgtgcgcagaggagtgggcagtgggaaagttggcagctcaggtttgcccccggaggaggcggtgtcggcccgactctcctgtaggagcgttaagttgtggcagctgccgagcccaacttttgtggggcgccaggagctgtccccctgcccttcagtgagctgccggcgtgacttttcctaatagggcggggtgggggtgggaggcttggcaggttaatgttgtggaaggaagggaaacttcaggaaaggcttgctcacctcgctcggtgccgcggaggtgcctggccacagtgccaccctcctgaccctgccgaggtactcggcagggccaccacgcatcccctcactggctgcagatcacatcagtttttcagtcaaagacttgttaatgtcaagggtccgtcacggtggtgataccactgtgtgacaggaagcgagagtcaacgcagggagcctgcaccctgcaaacagccacagcccttcactgaacggggagcataaatcccaccctagttagaaccatggcttttgtgcggaccagaagtgccagagccacaatataggggtgagatgtcttaccgttttgcggtgttgagtgtgtggattcccttttaagatagaaagtaggaaaactgccagtaagggagacgactcactaaaagaggattcagtctctggttgacatgttttgctgagtgtggttggttacttcaggtacagtatcacattaataggggccacagtctatatccctgtttagtttgttagttaccactcaagagcagacagatattgtccactttatcccaaatcccagccagactttgttgtatgctgtgcttcattcatggggctgtgaactactgattatattctccctattcctaatgtagaatgctttattctactgccatctttctgtctgcactgtttaattaggcttactgataacaactttaattctgaattttctttctcattcaggttctatttgtaattactaagacttaaagaatagtctggtgaagttactcgaagaattaaggaaggtttgagctaaaatgaactagagaccatctagtactttagtgtaaaatatgtttaatacaagtcgttaagtccttgtaagtgactattccaatgttcattctttgtttttggaagaatgcttggagttaccatgtttttaaatgtgaaatttcatctaaattaaaaaaaaaatctctgtgatgaggctgactcacccatttggtcaagattagtgctagctgatttgctgaacctttgcctacagaattaaagtactttctcaagtttt

SEQ ID NO: 46200 - DNA, 3582 bp, Homo Sapiens
gcctagagggagaaaacttgttgaaattcagagatccccctccccctaccaatacacaccaaatcagacgcctctgaccagatctgaatttggctctcagagatttccattgtagccaggcagttggggcactttctgagtgctgcctccacctcactgtccccagcctgcctgcctccgtttccctagccctgggcctgtgccgctgtcaccatcacctgggcgccctctagtggatgaatcggattatgcacgagggggcttggagcaggattcagaaggggctcctgtccttccttgaaatgctggacgccgggatcctggaacagctcttcaggtctctgcattcctcctggcaacagccagagcctgggcgcagggggctactgttgtttgaaggctgaaggctgcagcctggtagggcactcaggagacctggcagttggctgcagggccaggtctaggggccagggcatgagggatgctctgggctggctcagccccgggcccccatgcggattgtgactgtgggggcatggccacatgatgttgaggggggatctctgaccctgaccttcttggctctgtgcatccttgaaaccagaaaggtctggaacaaatcagtgaacaatgccctaactcggggagggagccacatcctgaccccagcagcctcagaaggatccgtgtcagggttatggggcaccctgggggccccgagtctgcatgggtctccacatgcaacttctgccggaaactctgaaaaatcccaactggggggtcataggacacaatcagaaatgctgatgccactgtgtgtggatccccgggccctggggggtcaggagcatgtagaaggtgggccacagggggttcataagagaatcctgtaaccgcccctgccccccaaacttagaagcccactggagggccatgggtgaaagcttgggggggtgtcctgtggagtgggtggtggggggtctttgggtttacatgctgctgggcctgagcagcaggaccccgtccacagctgatccctgggccctgctgctcagctgctctcttgagtgttgctgtggctgccgagagagcctgagtcgagcctctcttgtgccggccgtacgctgtcaggccacgctggtgagtttggcaaggcacagatgcccagagcagagaactttccttggggatttaatatgtgcgaatcttgaggtccggcaaatctttccctcagctagagagggggtttttgagactagaatcacctcagcatcctcctgtccccagctgtgtccagcctgtctgcagggacatcctgagaggactaggctctcccctcatccacctgcgtaagtgccaccctgaagcctgtccacccatgcttggagaggcttggcctcaacctgcttagccagcagcaggcttgggcctggggtgcagcagagacccaggtggctgtggggtggttgcttcatggggtggttctgaaacgcagttggaagtgcatggacagtgccttacctgttctctgtgggaccctgtttagaaaccaggtctgagttactgggggtcatcgctacattctgatggcctagctgtgtggaggccacggtggagccccatccaaggagccagggccctgggtctagccgtgaccagaacgcatgccctggaggtgtttctcatcttgcacctgtgttgcctggtgtctcaagtggccacaaaactgtgttagctcttggtgcccctgggcttcggaaccagggtttcccttcatctcagtgacccgggagcatctgggcagtgagtaaagagggtgatttacttgatgggtacgtttggtcctgcctgggagcccccccaggcacggtcctgggacctgaagctgccctcgttggtggaggggagggagagagcttcagggatgaggtggcgttgagctgggcgggaagggtgagcccctgcaaggtggggtgggtgtgctggggacgctgagcagcacggccagcaggtgggtcttcagctcggtacccggtgggacttgtggttggggctggtgtgtggccaggagaggggctggcagaagacaagggggactgtgaggcagctcccatccagcggttgaagcctgatggcctggctctgtgcctcagttctctcatctataaaatgagaaaacagtgccagcctcccagacctgtcatgaggatgaacgagtgaccacgtagcatgggctgggtgcgtgtcacctaacattaccagcctttgcaaggagagccctggggacctggctgagtttttcccttgcctggcccactgcacctgtccccacaggagccaaggaggtcctgctgctggcccggtagacggaccaatggagggtctcgctggacacaccggacttcaccgacatcgtgctgcagctggacgacatccagcatgccatcgccatcaactatgacccaatggagggccacgtctactggacggatgacgaggtgtgggccatccgcagggcatacctggatgggtctggggcgcagacgctgatcaacaccaagatcaacgaccccgatgacatcgcagtcaactgggtggcccgaagcctctattggacccacacaggcactgaacacatcgaggtgacgtgcctcaacagcacctcccacaagatcctggtgtcagaggacatggacgagccccgtgccattgcactgcatcccgagatgggcctcacgtactggatagactggggagagaaccctgaaatcaagcgtgccaacctggacaggcaggagctgcgcgtgctggtcaatgcttccctcgggtggcccaacggcctggccctggacctgcaggaagggaagctctactggggagatgccaagacagacaagatcgaggcgatcagtgtcgatgagacgaagaggcagaccctcctgaaggacaagctcccacacattttcaggttcaccctgctgggggacttcatctactggaccgcctggcagcaccacagcatcaagcgggtacacaaggtcaaggccaaccgggacgtcatcattgaccagctgcccgacctgatggggctcaaagctgtgaacgtggacaaggtcgtcggaaccaaccctcatgcggacaggaatgggggtgcagccacctgtgcttcttcacgccccacacaacccggtttggctgccccatctagggcctggaactgctgagtgacatgaagacctgcatcatgcccaaggccttcttggtcttcaccagtagagccgccatccacaggatctccctcgagaccaacaacaacgatgtggccatcctgctctcggcgtcaaggaggcctcggccctggactttgatgtgtccagcaaccacatctactggacagacatcagcctgaaggtagcgtgggcccgaacatgcacacgtgcagcctatatgggaaaaccttccctctgtacctgcctcaaaggtttcagacatttttcttaaagcactataatatttattgtaacacaattcaagctaattaaatatgagcaagcctatttcaaaaaaaatagacgattataa

SEQ ID NO: 46201 - DNA, 754 bp, Homo Sapiens
aggctgacagagaaatttttcattttctttcttgtttgactgtatgcaaacatcaaactaagaatggcaaaaatgaatctctcttcctatatattaatactaactttttctttgttttctcaaggtattttactttcagcatccaagtccataagaaatttagatgatgacatggtatttaatacattcaggttggggaaaggctttcagaaggaagacactgcagaaaaatcagttattgctccttccctggaacaatataaaaatgatgagagcagtttcatgaacgaagaggaaaataaagtttcaaagaacacaggctccaaacataatttcttaaatcatggtctgccactgaatctggctataaaaccttatcttgcactaaaaggatctgtagctttcccagctgagaatggagttcagaatactgaatcaacacaagaaaagagagaaattggggatgaagaaaactcagctaaatttcctataggaaggagagattttgacatgctcagatgtatgctgggaagagtctaccgaccttgttggcaagtctgatacctgttggtccacatcatcttttcagaagaaaataaaagcatttaattgccaatgggaggagaagcccatactgctactataacttgtgtatgttaaatgtctgttttaaaagaaagtagtgttaagatgtatcagtaactgaaatgatatgctttctctgtgcattaaactttgtgaaaattctgcataa

SEQ ID NO: 46202 - DNA, 951 bp, Homo Sapiens
atgatctgtgaaaatcacaccagagtcactgaatttattcttcttggttttacaaacaaccccgagatgcaagtttccctctttatttttttcctggccatttatacagtcactttgttgggcaactttcttattgtcacagttaccagtgtggatctcgcacttcaaacacccatgtacttctttcttcaaaatctgtcacttcttgaagtatgtttcaccttggttatggtgccaaaaatgcttgtagatctagtgtccccaaggaaaattatctcttttgtgggctgtggtacccagatgtacttcttcttcttctttggcagttctgaatgtttccttctctccatgatggcttatgatcgctttgtggccatctgtaaccctctccattattcagtcataatgaacaggtccctatgcttgtggatggccataggctcttggatgtccggtgttcctgtgtctatgctacagacagcttggatgatggcccttcctttctgtggaccaaatgccgtggaccactttttctgtgatggtcccccagtgttaaaactagtcacagtggatacaaccatgtatgaaatgcaagcacttgcctccacactcctgtttatcatgtttcccttttgtctcattttggtttcctacacccgcattatcataacaattctgaggatgtcctctgccactggccgccagaaggcattttctacttgttcctcacacctcattgtggtgtccctcttctacggaacagccagtctgacctacctgcggcccaaatcaaaccagtcccctgagagcaagaagctagtgtcattgtcctacactgtcatcacacctatgctaaaccccatcatctacggcctgaggaacaatgaagtgaaaggggctgtcaagaggacaatcactcaaaaagtcttacagaagttagatgtgttttga

SEQ ID NO: 46203 - DNA, 1236 bp, Homo Sapiens
gtggctccagtggagcaagttgtggcggatgctggggctttccttcgggatgcggctctgcaggacatcgggaagaacatttacatcatccgggaggtggtcactgagtttcgggacaaggccacatgcaggcggctcgctgtcctgccctatgagctgcggttcaaggagcccttaccagaatacgtgcagctggtgactgagttttcaaagaaaacaggagactaccccagcctctctgccacggacatccaagtgcttgcgctcacataccagttggaagcagagtttgttggggtgtctcacctaaaacaagaaccacagaaggttaaactgagctcatcgattcagcacccagaaacacctctgcacatttctggtttccatctgccctccaagcctaaacccccacaagaaacagaaaaaggacacccagcttgtgagcctgagaacctggaatttagttccttcatgttccggagaaaccctctgcccaacatcgatcatgaactgcaggagccgctgattgacagaggtgaggacgttccaagagaggaggaggaggaggaagaaaacgggtttgaagacagaaaagatgacagcgatgacgacgggggtggctggataacccccagtaacatcaagcagatccagcaggagctggagcagtgcgacgtccccgaggacgtgcgggttggctgcgtgaccacagacttccccaggcagaatgttctgctgcagatggggctgcacgtgctggcggtgaactgcatgctgattcgtgaggcccagagctacctgggctgccacggctgtttcaagacaacgtctgacatgagccgagtgttctgttcacactgtgggaacaagaccctgaagaaagtgtccgtgaccatcagtgacgacggcaccctgcacatgcacttctcccgcaaccccaaggtgctgaacgcccgcggcctccggtactcgcttcccactcccaaagggggcacatacgccatcaacccccatctcaccgaggatcagcgcttccctcaaccgcgactctcccgaaaggccaggcagaaaaccaacgtgttcgcccctgactacatcgccgggatgtcgccctttgtcgagaatgacatctccagccgctcagctaccctacaggtccgggacagcaccttgggagctgggcggagacgcttaaatcccaacgcttccagaaagaagtttgtgaagaaaaggtga

SEQ ID NO: 46204 - DNA, 384 bp, Homo Sapiens
atgaaggccggccagtgcgtcatcgggctgcagatgggcaccaacaaatgtgcaagccagtcgggtatgaccatgtacggcacaaggaggcatctctacagccccaagaaccatcctgcccccgtggaccactcgaccatcagcctccagatgggtacaaacaagtgcgccagccacatgggcatgacggctccctggacccagctgcacatctatgacaccaagctgggcaccaacaagtatgacaactcctccgtgtccctgcagatgggctacctgcagggtgctaaccagagcagccaggtctttggcctgggccggcagatatacaattccaactactgcccacaaggcccagtggccaacagggctccctcgggcacc

SEQ ID NO: 46205 - DNA, 1636 bp, Homo Sapiens
atcatctatatgttaaatatccgtgccgatctgtcttgaaggagaaatatatcgcttgttttgttttttatagtatacaaaaggagtgaaaagccaagaggacgaagtctttttctttttcttctgtgggagaacttaatgctgcatttatcgttaacctaacaccccaacataaagacaaaaggaagaaaaggaggaaggaaggaaaaggtgattcgcgaagagagtgatcatgtcagggcggcccagaaccacctcctttgcggagagctgcaagccggtgcagcagccttcagcttttggcagcatgaaagttagcagagacaaggacggcagcaaggtgacaacagtggtggcaactcctgggcagggtccagacaggccacaagaagtcagctatacagacactaaagtgattggaaatggatcatttggtgtggtatatcaagccaaactttgtgattcaggagaactggtcgccatcaagaaagtattgcaggacaagagatttaagaatcgagagctccagatcatgagaaagctagatcactgtaacatagtccgattgcgttatttcttctactccagtggtgagaagaaagatgaggtctatcttaatctggtgctggactatgttccggaaacagtatacagagttgccagacactatagtcgagccaaacagacgctccctgtgatttatgtcaagttgtatatgtatcagctgttccgaagtttagcctatatccattcctttggaatctgccatcgggatattaaaccgcagaacctcttgttggatcctgatactgctgtattaaaactctgtgactttggaagtgcaaagcagctggtccgaggagaacccaatgtttcgtatatctgttctcggtactatagggcaccagagttgatctttggagccactgattatacctctagtatagatgtatggtctgctggctgtgtgttggctgagctgttactaggacaaccaatatttccaggggatagtggtgtggatcagttggtagaaataatcaaggtcctgggaactccaacaagggagcaaatcagagaaatgaacccaaactacacagaatttaaattccctcaaattaaggcacatccttggactaaggattcgtcaggaacaggacatttcacctcaggagtgcgggtcttccgaccccgaactccaccggaggcaattgcactgtgtagccgtctgctggagtatacaccaactgcccgactaacaccactggaagcttgtgcacattcattttttgatgaattacgggacccaaatgtcaaactaccaaatgggcgagacacacctgcactcttcaacttcaccactcaagaactgtcaagtaatccacctctggctaccatccttattcctcctcatgctcggattcaagcagctgcttcaacccccacaaatgccacagcagcgtcagatgctaatactggagaccgtggacagaccaataatgctgcttctgcatcagcttccaactccacctgaacagtcccgagcagccagctgcacaggaaaaaccaccagttacttgagtgtcactcagcaacactggtcacgtttggaaagaatattaaaaagagaaaaaaa

SEQ ID NO: 46206 - DNA, 933 bp, Homo Sapiens
atgtggcccaatattactgcagccccttttttgctgactggctttccagggctggaggcagctcatcactggatctccatccccttctttgctgtttatgtgtgcatccttctgggcaatggcatgctcctctacctcatcaagcatgaccacagtcttcatgagcccatgtactacttcctcaccatgctggcaggcacagacctcatggtgacattgaccacgatgcctactgtaatgggcatcctatgggtgaatcacagggagattagcagtgtgggctgcttcctacaggcttactttattcactccctttctgttgtggaatcaggttccctcctggcaatggcatatgattgtttcattgccatccgcaatcctttgagatatgcttccattctcaccaatactagagtcatagcgttaggagtgggagtgtttctaaggggttttgtatccatcctgcctgtaattttgcgtcttttttcattttcatattgcaaatctcatgttatcacacgtgctttctgcctccaccaagaaatcatgagactggcttgtgctgacataactttcaatagactttaccctgtaattttgatctctttaacaatcttcctagactgtctgatcatcctcttctcctatattctaattcttaatactgtcataggcattgcttctggtgaagagagagccaaagccctcaatacctgtatctcccacattagttgtgttcttatcttctatgttacagtgatgggtttgacattcatttacagatttgggaagaatgtgccagaggttgtccacattatcatgagttacatctacttcctctttcctcctttaatgaaccctgtcatctacagcatcaaaaccaagcaaatacaatatggcattatccgccttttatctaaacataggtttagt

SEQ ID NO: 46207 - DNA, 2378 bp, Homo Sapiens
ctcagcttctggtaccacctccatgggccccagattgggactctgcgcctagccatgagacgggaaggggaggagacacacctgtggtcgcggtcaggcacccagggcaaccgctggcacgaggcctgggccaccctttcccaccagcctggctcccatgcccagtaccagctgctgttcgagggcctccgggacggataccacggcaccatggcgctggacgatgtggccgtgcggccgggcccctgctgggcccctaattactgctcctttgaggactcagactgcggcttctcccctggaggccaaggtctctggaggcggcaggccaatgcctcgggccatgctgcctggggccccccaacagaccataccactgagacagcccaagggcactacatggtggtggacacaagcccagacgcactaccccggggccagacggcctccctgacctccaaggagcacaggcccctggcccagcctgcttgtctgaccttctggtaccacgggagcctccgcagcccaggcaccctgcgggtctacctggaggagcgcgggaggcaccaggtgctcagcctcagtgcccacggcgggcttgcctggcgcctgggcagcatggacgtgcaggccgagcgagcctggagggtgagtgcagggtggggtgcccctccccctccccctcccccgagggctgcctggacccgctgaggctgccctgccctgcacccgccaggtggtgtttgaggcagtggccgcaggcgtggcacactcctacgtggctctggatgatctgctcctccaggacgggccctgccctcagccaggtgggagccctgccgtggcctcggccctgctctggggtgcctgcctagccctttcccttcgtagtcgtggtgcccagggcttgggccgtggggcagcaccactcacccacccatgtcctgcaggttcctgtgattttgagtctggcctgtgtggctggagccacctggcctggcccggcctgggcggatacagctgggactggggcgggggagccaccccctctcgttacccccagccccctgtggaccacaccctgggcacagaggcaggccactttgccttctttgaaactggcgtgctgggccccgggggccgggccgcctggctgcgcagcgagcctctgccggccaccccagcctcctgcctccgcttctggtaccacatgggttttcctgagcacttctgtgagtccggctgggccaatgggtgcctgggcaacgggggcagcaggggtccaggagcagaggtggggaggtggcctccccagcccgcccctggttaggcgtgcaggagccccaggaccccaggcctgacacgccctggccctgctctcagacaagggggagctgaaggtactgctgcacagtgctcagggccagctggctgtgtggggcgcaggcgggcatcggcggcaccagtggctggaggcccaggtggaggtagccagtgccaaggagttccagatcgtgtttgaagccactctgggcggccagccagccctggggcccattgccctggatgacgtggagtatctggctgggcagcattgccagcagcctgcccccagcccgggtgagccctgggctgcagtggaggcacggaggagggcccaaggggccagcctggctcggggtttgccaggcttaccagtgtgtggtcccaggagctgcgagcatgctgcacccagacaggacaagagagctgccaggcccaggccctgtgccctcctcactctgccctgctcacccctggggccgctgcctgggctgggctgtccctggggtgcagcctctggggcctgccctgcctggctgtggcctctgtgctccctgtgcccacacccagggcaaggtccatcctggaggaaccgccagccgggtcagggcagccactgactgctctcacttggtgagggaaagaatctcgcctggggccatgagccccaccaagtctgcagacagcagctgcctgtctgccaggccccatccttgtggtagcagaaccaataccctctgcctttgaaataggggtgaaccccaggagccagcagaggctgagggaccatgcagccccaggcttcctccttagccccagatgtgggggctgctttggagggctcacatgtccctatggcccacagggaacacagccgcacccgggtctgtgccagctgtggttggcagtgccctcctattgctcatgctcctggtgctgctgggacttgggggacggcgctggctgcagaagaaggggagctgccccttccagagcaacacagaggccacagcccctggctttgacaacatccttttcaatgcggtaggagcccc

SEQ ID NO: 46208 - DNA, 1803 bp, Homo Sapiens
gatcttccggaagtcgagatcattagcctgctggaggagcagctgccccattataagttaagagccgacaccatctacggttatgaccacgacgactggctccatacacctctcatttctccagatgccaacattgacctcacaaccgagcaaattgaagagacgttaaaatacttccccagctccatcctgagggaagtgagagaaaagaacgtccgcagcagcgagagccagaccgacgtgtccgtctccaacctcaacctcgtggacaaaaaagagcgggatttagaattggccgctcgcatcggccagtcgttgttgaagaagaacaagaccctacccgagaggaacgagctgctggaggagcaggtggaacacatcagggaggaggtgtctcagctccggcatgagctgtccatgaaggatgagctgcttcagttctacaccagcgctgcggaggagagtgagcccgagtccgtttgctcaaccccgttgaagaggaatgagtcgtcctcctcagtccagaattactttcatttggattctcttcaaaagaagctgaaagaccttgaagaggagaatgttgtacttcgatccgaggtgatccagctgaagacagagaccatcacctatgaggagaaggagcagcagctggtcaatgactgcgtgaaggagctgagggatgccaatgtccagattgctagtatctcagaggaactggccaagaagacggaagatgctgcccgccagcaagaggagatcacacacctgctatcgcaaatagttgatttgcagaaaaaggcaaaagcttgcgcagtggaaaatgaagaacttgtccagcatctgggggctgctaaggatgcccagcggcagctcacagccgagctgcgtgagctggaggacaagtacgcagagtgcatggagatgctgcatgaggcgcaggaggagctgaagaacctccggaacaaaaccatgcccaataccacgtctcggcgctaccactcactgggcctgtttcccatggattccttggcagcagagattgagggaacgatgcgcaaggagctgcagttggaagaggccgagtctccagacatcactcaccagaagcgtgtctttgagacagtaagaaacatcaaccaggttgtcaagcagagatctctgaccccttctcccatgaacatccccggctccaaccagtcctcggccatgaactccctcctgtccagctgcgtcagcaccccccggtccagcttctacggcagcgacataggcaacgtcgtcctcgacaacaagaccaacagcatcattctggaaacagaggcagccgacctgggaaacgatgagcggagtaagaagccggggacgccgggcaccccaggctcccacgacctggagacggcgctgaggcggctgtccctgcgccgggagaactacctctcggagaggaggttctttgaggaggagcaagagaggaagctccaggagctggcggagaagggcgagctgcgcagcggctccctcacacccactgagagcatcatgtccctgggcacgcactcccgcttctccgagttcaccggcttctctggcatgtccttcagcagccgctcctacctgcctgagaagctccagatcgtgaagccgctggaaggtgatcacgcggggcctcggcccctctctgtcctcctgggggactccctttggtccctgatccacctgcggaaggcggggcacctctgtcacgcctactcctttttcttccgcgacagccacccgcgctgctggtttgagttcctctga

SEQ ID NO: 46209 - DNA, 1536 bp, Homo Sapiens
gaggaattctccacgagttttgagcagcctcgggtttcccaccacctccaaatcatggaagacacagggtaagagcaaagacaaggtggctttggccgatgtccaccctctcgtggcgtcccttctcttctctcctccttgagcagggagaccatcggggtgcaacctggccggggcggggaggaggtgcagggcattgccagagcgggcctgtccatgggcaagggatagcgacctcctgggccaggacatgtgacagctgcgcaggcctgggcccggcgtggcggaggtgcgcgagagcggccagaagagggcgccagagtgccaggagccgcccgcggaggagcccgcaccggccccgatacccagctccgcgccacgcggacccaccgagcccgcgctcagacgccccagctccgccgagaggccgctcgcgccgtgtccttcctcttccccaagttcaggcagagcccccggagccatggccagcccttccagcagctccgaagacactggcaagccccgaggcagggatggccggcccagaagggaggaggaggaggacgtccctcccgaagagaagaggctggggctgtagctggaggggggaagcgcacagcccgaggactgcgaggacagggaggacccgccgctgccgggcacgaaggagaccggcacccagacaggtggcgacggcaaaggagaggaattctccacgagttttgagcagcctcgggtttcccaccacctccaaatcatggaagacacagggtgcaggcagagcccccgagccatggccagcccttccggcagctccgaagccactggcaagccccgaggcagggatggccggcccaggagggaggaggacgacgtccctccggaagagaagaggctgcggctgtagctggagaggggaagcgcacagcccgaggactgcgagaacggggaggacgcgccgcggccaggcagggaggagaccggcacccagacaggtggcgaccgcagaggagtggtcatttttcttcttgtggcctctggaatgtgacacagaactcaagggacaggaaggagatgagttggaggctgggacaggggtccctgccagggatgctggtgactcacgtgacggtgttgatgtgtggagtccggtgcctggtttggggaattttcgtgggatatgttccaaaggactgatggacctatcaggtgcagtggttcacacctgtaatcccagcactttgggaggccgaggctggcggatcacctaaggtcaggagttcgagaccagcctggtcaacatggcaaaactgtctctactaaaaatacagaaattagccaggtgtgatggcacacacctgcaatcccagctacttgggaggctgaggcaggagaatcgtttgcacctgggagacagaggttgcagtcagccgagatggaaccactgtacttcagccagcctgggtgacagagcgagactctgtttcaaaaataaataaataaataaaatagaattctgaattttatttttaacaa

SEQ ID NO: 46210 - DNA, 663 bp, Homo Sapiens
attaggattcaagatggattggcatcaaagttcacttctttaacaaaagtgctttatgaccttaataaaatattagagaatggtaggatccatggaagccctttacaaaaacttgtgatagaaagttttgatgataagcagactttgcaacaactggaattgcaaaatgacccaattttacaaagcttccagaatgcagttagtgaaacagatgaagatatcagtatcccagagagtgaagaacaggagcatgaagaggatggttcagagacagaggctgatggccaggaggacctagaagatttagaggaggaggaggaagtgtcagatatgggtggtgacaatcctgaagtgagtgagagagcaaactcaagcaaattcgatccgacgaaaagcccagttctcagtgatgaggattctgaccttgactttcatatcaacaaattggaacagcagagcaaggtgcgaaacaaaggacacgggaaaccaagagaaaagtccatagcagacgagaaattcttccaactctctgaaatggaggcctatttagaaacagaaaaagaagaggaacgaaaagatggtaatgatgatgacgtagaagatactgatttttttgatattgattctgatgaagatgaaggggcactgtttagaagtaaaaaa

SEQ ID NO: 46211 - DNA, 933 bp, Homo Sapiens
atgcctaatttcacggatgtgacagaatttactctcctggggctgacctgtcgtcaggagctacaggttctcttttttgtggtgttcctagcggtttacatgatcactctgttgggaaatattggtatgatcattttgattagcatcagtcctcagcttcagagtcccatgtactttttcctgagtcatctgtcttttgcggacgtgtgcttctcctccaacgttacccccaaaatgctggaaaacttattatcagagacaaaaaccatttcctatgtgggatgcttggtgcagtgctactttttcattgccgttgtccacgtggaggtctatatcctggctgtgatggcctttgacaggtacatggccggctgcaaccctctgctttatggcagtaaaatgtctaggactgtgtgtgttcggctcatctctgtgccttatgtctatggattctctgtcagcctaatatgcacactatggacttatggcttatacttctgtggaaactttgaaatcaatcacttctattgtgcagatccccctctcatccagattgcctgtgggagagtgcacatcaaagaaatcacaatgattgttattgctggaattaacttcacatattccctctcggtggtcctcatctcctacactctcattgtagtagctgtgctacgcatgcgctctgccgatggcaggaggaaggcgttctccacctgtgggtcccacttgacggctgtttctatgttttatgggacccccatcttcatgtatctcaggagacccactgaggaatccgtagagcagggcaaaatggtggctgtgttttacaccacagtaattcctatgttgaatcccatgatctacagtctgagaaataaggatgtaaaagaagcagtcaacaaagcaatcaccaagacatatgtgaggcagtaa

SEQ ID NO: 46212 - DNA, 656 bp, Homo Sapiens
gcgcgctttccgcgccagcttcagtgtcagctcgcgagccctggcgtcgcgtaggagggaggatggagagcggcgacgaagcggccatcgagaggcaccgcgtccacttgcgctccgccacattgcgcgacgccgtacccgccacactgcatctgctgccctgcgaggttgcggtggacgggcccgccccggtggggcgcttcttcacgcccgccatccgccagggccccgagggactcgaagtgtcgtttcggggccgctgtctacggggagaggaggtggcggtgccgcctggcctcgtgggatacgtgatggtgacagaagagaagaaggtgtcgatggggaagccagaccccttgcgggattccgggactgacgaccaagaggaggagccgctggagcgggacttcgaccgcttcattggagccactgccaacttcagccgcttcaccctgtggggtctggagaccatccctggcccggatgccaaagtgcgtggggccttaacttggcccagccttgcggcagcgattcacgcacaggtgcccgaggactgagaaccagagcttgaaattcaaagctgcgatcccttcacagcagtaaaccagctctttggaaccgattccatcaccccaataaaggagctcttcacagca

SEQ ID NO: 46213 - DNA, 609 bp, Homo Sapiens
atggctactctgatctatgttgataaggaaaacgaagaaccaggcatccttgtggctacaaaggatgggctgaagctggggtctggaccttcaatcaaagccttagatgggagatctcaagtttcaatatcatgttttggcaaaacattcgatgctcccacatccttacctaaagctaccagaaaggctttgggaactgtcaacagagctacagaaaagtcagtaaagaccaatggacccctcaaacaaaaacagccaagcttttctgccaaaaagatgactgagaagactgttaaagcaaaaaactctgttcctgcctcagatgatggctatccagaaatagaaaaattatttcccttcaatcctctaggcttcgagagttttgacctgcctgaagagcaccagattgcacatctccccttgagtgaagtgcctctcatgatacttgatgaggagagagagcttgaaaagctgtttcagctgggccccccttcacctttgaagatgccctctccaccatggaaatccaatctgttgcagtctcctttaagcattctgttgaccctggatgttgaattgccacctgtttgctctgacatagatatttaa

SEQ ID NO: 46214 - DNA, 1122 bp, Homo Sapiens
gggtccttccggcgggtgacattcagccggcggttcggggcgacggactctccattccagaaccatggcccaatttgtccgtaaccttgtggagaagaccccggcgctggtgaacgctgctgtgacttactcgaagcctcgattggccacattttggtactacgccaaggttgagctggttcctcccacccctgctgagatccctagagctattcagagcctgaaaaaaatagtcaatagtgctcagactggtagcttcaaacagctcacagttaaggaagctgtgctgaatggtttggtggccactgaggtgttgatgtggttttatgtcggagagattataggcaagcggggcatcattggctatgatgtttgaagaccaatctttaacatctgattatatttgatttattatttgagtgttgttggaccatgtgtgatcagactgctatctgaataaaataagatttgtcaaaactcagtgttttctccatcagatactccatgaaaggtcacaatttctcttgatattaagctgggttgtctttaaacaaccctaaatacacgtctgtttagcccgcaattggaaaggatatatgtggcaatattaacctggtacatgaatatatggggataacattttaatttgaaggtttggaatatatatatttaagctttatttccagaacagtgagggttaggtcttgggaaaactataacttgccaaagtagaagaaatagtagtaccatatgccaaagtgatagagatgaatcatgtcagtagttagaataacatttcaactgttttctttgctaaaatcacagaaagaccctattgacaacatctatgtctgtaaaaatgttagagtacttgtcatcttgaatatagcctccccaagagagaacagggtggtattctaagtatgtttctttgtaacatctttagcagtaggacagagccatacatgtgaaatctgatttttatgtgtgttattcgtttgtctggttttactacctttgcaaaaacaaaataccccaaagatatttaaacaaggttataatttagcatcttccctggatctaaatagtatattatatcctgaaataaatgaaatgattgct

SEQ ID NO: 46215 - DNA, 672 bp, Homo Sapiens
ccaatgagctgcctgaaggattcagtgtcttggtgttcacaaggccccagcacatcgtctaggacgtgagacccacacgccgccctcagtctcctcagttcactgtttcccccggggaaacaaccgccagggcctgtaggaaaacacagcaaactagaaagtccagttggaagagatttcagatgtgctacagcctccacggcaggagtgaagctggacctccaggctcctggatgacactgaggattgtggagctgagtgacaccagccggcaggagaggccatggcaggaagtggagcctcccaccgaactccagggagcaccagcgactgagaggccacatggcgggcggctgtgggttgggggggctgcctgcccgcacactctttacggcagaagcagtgacatttcccttgctgtgcccatggcagggacgggcccgtggcaggtgctgtgagcatgtgcttgccaagttcctgatgcggagcccagccagcccagagggccacattcttgtcactgcttcttggagccgcagctcatgccaagttcctcacacccctctctgggctctaactttgtgctgcctcagatgttcagggtactttgcttcaagccatatcaaaagctggtttgaaaaataaagtcctacagaggtgctaactgaataa

SEQ ID NO: 46216 - DNA, 2370 bp, Homo Sapiens
gcaaatcttcaggggccgtccaggactacagagctgtttcaccctaccttggcttcaatctcttcccccatgctcgaaggtgcggagctgtacttcaacgtggaccatggctacctggagggcctggttcgaggatgcaaggccagcctcctgacccagcaagactatatcaacctggtccagtgtgagaccctagaagacctgaaaattcatctccagactactgattatggtaactttttggctaatcacacaaatcctcttactgtttccaaaattgacactgagatgaggaaaagactatgtggagaatttgagtatttccggaatcattccctggagcccctcagcacatttctcacctatatgacgtgcagttatatgatagacaatgtgattctgctgatgaatggtgcattgcagaaaaaatctgtgaaagaaattctggggaagtgccaccccttgggccgtttcacagaaatggaagctgtcaacattgcagagacaccttcagatctctttaatgccattctgatcgaaacgccattagctccattcttccaagactgcatgtctgaaaatgctctagatgaactgaatattgaattgctacgcaataaactatacaagtcttaccttgaggcattctataaattctgtaagaatcatggtgatgtcacagcagaagttatgtgtcccattcttgagtttgaggccgacagacgtgcttttatcatcactcttaactcctttggcactgaattgagcaaagaagaccgagagaccctctatccaaccttcggcaaactctatcctgaggggttgcggctgttggctcaagcagaagactttgaccagatgaagaacgtagcggatcattacggagtatacaaacctttatttgaagctgtaggtggcagtgggggaaagacattggaggacgtgttttacgagcgtgaggtacaaatgaatgtgctggcattcaacagacagttccactacggtgtgttttatgcatatgtaaagctgaaggaacaggaaattagaaatattgtgtggatagcagaatgtatttcacagaggcatcgaactaaaatcaacagttacattccaattttataacccaagtaaggttctcaaatgtagaaaattataaatgttaaaaggaagttattgaagaaaataaaagaaattatgttatattatctagactacacaaaagtaagccacactatatcttcatgagttgcaaatccatggaaacacagtaaaccagccctgaaacaaagcatttccttgttttcagtggtattagatcttgtttccacatgtctgtctcattcttcactgggccttacaggttagttttaattaactctatggtatttttcttattcttgtttgatcatgttaaaaattggacctaataaaagtattttattcttgcttttccatgcttctctacaggtccaaatactgaatgtctcctttactttttctcttttaaatttttttctagacagggtctcactctgtcacctaggctacagtgcagtggtgtgatcacagctcactgcagcctcgacttcccaggctcaagtgatcctcccagctctcagcctccaaagtagctggcactacaagtgtacacccccacacaaggctaagttttgtattttttgtagagacagggtttcaacatattatccaggctggtgtcgaattcctgggctccagggatccacagtcccccttggcctcccaaagtgttgggattacatgcatgagccactgtgctgggcttcatttacattttaactgtctgttccttgcctagattcacagaaatccaaagctgtatgtagtcaacatggttcacaagtgttggaaaatgtgttttttgttttgttttgttttgtttcgttttgttttgagacagagtttccctctgtcgcccaggctagagtgcaatggcgtgatctcggctcactgcaacctccacctcccagattcaagcaactctctgcctcagcctcccgagtagctgggattacaagcacccaccactacactcagctaattttttgtatttttagtagagccggggtttcaccatcttggccaggctgatcttgaactcctgagctcatgatccacccgcctcagcctcccaaagtgctgggattacaggccccttgttcagccactgcacctggccccttattttgtttttgttttctaatatactttgatgtaatcagcttgagaaagcaacacaatttcaaatcctatcttctagatgcaagcagtgttaaatttgttaataaatttgcttttcacacctttctttaaataaaaggtatatctctc

SEQ ID NO: 46217 - DNA, 1014 bp, Homo Sapiens
atggaagggaaaaatcaaaccaatatctctgaatttctcctcctgggcttctcaagttggcaacaacagcaggtgctactctttgcacttttcctgtgtctctatttaacagggctgtttggaaacttactcatcttgctggccattggctcggatcactgccttcacacacccatgtatttcttccttgccaatctgtccttggtagacctctgccttccctcagccacagtccccaagatgctactgaacatccaaacccaaacccaaaccatctcctatcccggctgcctggctcagatgtatttctgtatgatgtttgccaatatggacaattttcttctcacagtgatggcatatgaccgttacgtggccatctgtcaccctttacattactccaccattatggccctgcgcctctgtgcctctctggtagctgcaccttgggtcattgccattttgaaccctctcttgcacactcttatgatggcccatctgcacttctgctctgataatgttatccaccatttcttctgtgatatcaactctctcctccctctgtcctgttccgacaccagtcttaatcagttgagtgttctggctacggtggggctgatctttgtggtaccttcagtgtgtatcctggtatcctatatcctcattgtttctgctgtgatgaaagtcccttctgcccaaggaaaactcaaggctttctctacctgtggatctcaccttgccttggtcattcttttctatggagcaatcacaggggtctatatgagccccttatccaatcactctactgaaaaagactcagccgcatcagtcatttttatggttgtagcacctgtgttgaatccattcatttacagtttaagaaacaatgaactgaaggggactttaaaaaagaccctaagccgaccgggcgcggtggctcacgcctgtaatcccagcactttgggaggccgaggcgggtggatcatgaggtcaggagatcgagaccatcctggctaa

SEQ ID NO: 46218 - DNA, 141 bp, Homo Sapiens
atccagattctattagaaaacaggaacgacagatatgatgagatctgccggcactgggaaggcgatgtcctgggttacaagtctgtggctcagatcgccaagctcgaaaaggcaaaggctaaagaacttggcactaaactc

SEQ ID NO: 46219 - DNA, 906 bp, Homo Sapiens
ctccctcgttgccccagcctcgcgggccgcctaactgccccgttccaagggtgccaccggaccccgctggagaggaacttctccgttggctggatttcatcaccacccattcccgattccacgtttcctttaagcggggctggcggagccgcaaggcggcaaggaactggattgcgattggtcagcacgtgcctcggtcggcggtacaattggctgaggcgctgggccttgggaagcattccccgacgggattggtcgtcgctctcgcagagcccgcctcccgcagtacaagcggcccccgggtcgggtgggaggaggggactccgggaggaggaacatggcggtggcggacctcgctctcattcctgatgtggacatcgactccgacggcgtcttcaagtatgtgctgatccgagtccactcggctccccgctccggggctccggctgcagagagcaaggagatcgtgcgcggctacaagtgggctgagtaccatgcggacatctacgacaaagtgtcgggcgacatgcagaagcaaggctgcgactgtgagtgtctgggcggcgggcgcatctcccaccagagtcaggacaagaagattcacgtgtacggctattccatggcctatggtcctgcccagcacgccatttcaactgagaaaatcaaagccaagtaccccgactacgaggtcacctgggctaacgacggctactgagcactcccagcccggggcctgctgcctccagcagccacttcagagcccccgcctttgcctgcactcctcttgcagggctggccctgcctgctcctgcggcagcctctggtgacgtgctgtccaccaggccttggagacaggctagcctggccacagaattaaacgtgttgccacacctgccggcttctgaa

SEQ ID NO: 46220 - DNA, 1794 bp, Homo Sapiens
ctggaagcgggcgagtctcgtgctgtgtcggacctgcagcccctggccttccgccaccatggagtacctcatcggtatccaaggccccgactatgttcttgtcgcctccgaccgggtggccgccagcaatattgtccagatgaaggacgatcatgacaagatgtttaagatgagtgaaaagatattactcctgtgtgttggagaggctggagacactgtacagtttgcagaatatattcagaaaaacgtgcaactttataagatgcgaaatggatatgaattgtctcccacggcagcagctaacttcacacgccgaaacctggctgactgtcttcggagtcggaccccatatcatgtgaacctcctcctggctggctatgatgagcatgaagggccagcgctgtattacatggactacctggcagccttggccaaggccccttttgcagcccacggctatggtgccttcctgactctcagtatcctcgaccgatactacacaccgactatctcacgtgagagggcagtggaactccttaggaaatgtctggaggagctccagaaacgcttcatcctgaatctgccaaccttcagtgttcgaatcattgacaaaaatggcatccatgacctggataacatttccttccccaaacagggctcctaacatcatgtcctccctcccacttgccagggaacttttttttgatgggctcctttatttttttctactcttttcaggcgcactcttgataaatggttaattcagaataaaggtgactatggatataattgagccctctggtccaggtctcagtttacctaatattacctcagaaaggatatggagggaagatgatctttttgccaggtctgacttttcttcctgctccgccctccattaacgctcagtaccctttagcagctgacggccccacgttctactccatgcttggcttcctttccaactagctctttcatatattttacttgctagtatctccattctctctaaagtagtggttctttttgcccttaaacttaaatttttaaattaattaacctgaattaataatacatgcacttaatgtaacatgcaaacagtacaaaaacatgtagtgaaaaatatttcttccagagctgggtgtggtggctcatacctgtaatcccagcactttgggaggccgaggcgggcggatcacgaggtcaagagagcgagaccatcctgaccaacatggtaaaaccccgtctctactaaaaatacaaaaattagctgggcgtggtggcacgcacccctagtcccagctactggggaggctgagacaggagaatcggtcgaacccgggaggcagaggttgcagtgagcctagatcgcgccactgtactccagcctggcaacagagtgagactccgtctcaaaaaaagaaggaaaaatgtttcttccatccctataatccagtcatctgcttcctgcttcccttcctggaggaaacttcagctactaatttcttatgttttttaagagatattctgttactgtgtaaagtatacatacatacagacacatgccccctttaaattttttagatttatttatttatttagagacagggtctcactctagcccaggctggagtgctgtggcgtaatcttggctcactgcaacctccgcctcccgggcccaagtgatcctcccatctcagcctcctgagtagctaggattacaggcgcacaccaccaatgcccagctagtttttgtgtttttcatagagacagggtctcaccatgtcattcagg

SEQ ID NO: 46221 - DNA, 814 bp, Homo Sapiens
ggcgagcggactcgactcggcaccgctgtgcaccatggcccgggccctgtgccgcctcccgcggcgcggcctctggctgctcctggcccatcacctcttcatgaccactgcctgccaggaggctaactacggtgccctcctccgggagctctgcctcacccagttccaggtagacatggaggccgtcggggagacgctgtggtgtgactggggcaggaccatcaggagctacagggagctggccgactgcacctggcacatggcggagaagctgggctgcttctggcccaatgcagaggtggacaggttcttcctggcagtgcatggccgctacttcaggagctgccccatctcaggcagggccgtgcgggacccgcccggcagcatcctctaccccttcatcgtggtccccatcacggtgaccctgctggtgacggcactggtggtctggcagagcaagcgcactgagggcattgtgtaggcggggcccaggctgcccgcgggtgcacccaggctgcagggtgaggccaggcaggcctgggtaggggcagcttctggagccttgggacagagcaggcccacaatgccccccttcttccagccaagaagagctcacaggagtccagagtagccgaggctctggtattaacctggaagcccccctggctggaggccaccgccaccctaggaagggggcagggacgtgaccttgacttacctctggaaagggtcccagcctagactgcttaccccatagccacatttgtggatgagtggtttgtgattaaaagggatgttcttgaacttggaaaga

SEQ ID NO: 46222 - DNA, 144 bp, Homo Sapiens
gccaacgtgcgcgagcggcggcgcatgcagtccatcaacgacgccttcgaggggctgcgctcgcacatccccacgctgccctacgagaagcgcctctccaaggtggacacgctgcgcctggccatcggctacatcaacttcctc

SEQ ID NO: 46223 - DNA, 1605 bp, Homo Sapiens
agaagaaaaggggtcaagaaggcaggaccccgtgaagcacacctttcctaaggattttgacgaatgagaatgaagataaactgtgagttgaaagtgaaagagaaagcataagggatcttaggtgcatctgacaagccttagatgacctccagcaacttcagttctcaccgaattactgcatttcagccttactgagaagcagccagtcatactatcctcaaattttaacccaggatgagttatcctactaaagaaggaagtgatacagctggaaatgctcacaaaaattctgaaaatgagcctcctaatgactgtagtacagacatagagtctccatctgctgatcccaatatgatctatcaggtagaaaccaacccaataaacagggagccaggcacagcaacctcccaggaagatgttgttcctcaagcagcagaaaacagcgagctcgaaacagagatccaaaaagatcaacgagaagaagatctaaaagaagagcttcttctacttcagacccccattcccagaaaattggtctctcacaagcccttaaatgatagatcaagatcccactcagggaaagttgagatgaaagcaaacaatttccccataaatcacaaaactcgttttcgactttcaacttcatggagagtcccatttattaacagtcatgagataagaagtatgattctccatctgctatgtgatagatatttctctcaggctgcagggtgtcagaataccatgtgggtaaagcgaaaatatatagcatgtctttaccatccaaatagtttcacccatcacgagagagccataacatttagaaggccttcgagggtgcactactaccgtcccctcactgagagaatgacatcaggaaaattttgcaaatcaactgacactaaagggaaatgtagattccgtgctattgtgaggtctgtgctctttgtgtcacagatacaaattgaaagtatttttaatataaaaggttttgtggatatattgacatatatccataccatgaatgttatgatcacaaacaccaataatggttggaaatacttttgtcccatctgtggaaggctttttaacacttactctgaattaagacaacattcatgcagctcttctgggaattaaattaaattggggtaaattcattttaaaatataacttctaaaattcataatttgactactaaagtaagacaaaattgcatgaacataaattttagtattattagagggagtagcagaaaggaacacaaactaatagtacctctcagtaagaaatacctatggggagtgaggaaacatctgtttatactttgcttttacaagtacatcattgaaatatcagacctgtcatctatattgagtcagcatttgaaccaagtaaatgttttcactgtcttaacatctatttctgtagatgtaaatattgttaacataaaagaatccaagttaacaggatcctgactaagatagcaaacatatattggaaggccagacaaagttctaccaagtgtttccagagattctgctacatgtattatctgaaatgttctccatatattcaataaaaaccaatttgaagacatagaaa

SEQ ID NO: 46224 - DNA, 978 bp, Homo Sapiens
atggactcagaactcaaggaagaaattcctgtgcatgaggaattcattttgtgtggtggagccgaaacccaggttctaaaatgtgggccctggacagacctctttcatgatcaaagtgtcaaaaggcctaagctgcttattttcattattcctggtaacccaggtttttctgccttttatgtgccatttgcaaaggctttatactctttgacaaacagacgctttccagtttggactatcagtcatgctgggcatgcgttggctcccaaagacaagaagattcttacaacatcagaggattcaaacgctcaagaaattaaggacatttatggactaaatggacaaatagagcacaaactagctttcctgagaactcatgtgccaaaggacatgaaacttgtgctcattggccattcaataggcagctatttcacacttcagatgctgaagcgagtccctgagctcccggtaattcgtgcctttctgctctttccaacaattgaacgaatgtctgagtcacccaatggcagaattgccactccacttttgtgctggtttcgatatgttctctatgttactggctacttattattgaaaccgtgtcctgagacaatcaagtccttgctaatcagaaggggccttcaagtaatgaacctagagaatgaattttcaccattgaatatattagaaccattctgccttgctaatgctgcctaccttgggggccaagaaatgatggaggtggtgaagagagatgacgaaaccataaaggagcatttatgtaagcttacattttattatggtactatagatccttggtgtccaaaagagtactatgaagacattaagaaggattttccagaaggagacattcgactctgtgagaaaaacatacctcatgctttcatcacccattttaaccaggaaatggcagacatgattgctgactccctaaaggatgacttgtccaaaatgtaa

SEQ ID NO: 46225 - DNA, 582 bp, Homo Sapiens
tccacagtgtttggatggaacagatccgggaactcacttccagcctccgaccacccgctgatttcctctcttcttgcaacctccaggagcatcggctcagccatctcctgcttctcggaccaaccaacgccgtttttttggttagctccttcttgccgaccaaccatgagctcccagattcgtcagaattattccaccgcggtggaggcagccgtcaaccgcctggtcagtttgcacctgcgggcctcctacacctcctccctctgcggcttctatttcgatcaccaagatgtggctccggaatgcggggcttacttcttccatgaattggccaaggagaagcgcaagggtgttgagcgtctcctgaagatgcaaaaccagcgtggtggccctgctgtcttccaggacatcctgaagccaggtcaagatgagtggggtaaaaccctggaagccatggaagccgccatggccccggggaaaaatctcaaccagagtcttttggatcttcatgcactgggttccgcccctacagacccccatctctgtgacttcctggagagtcacttccgagatgaggaagtg

SEQ ID NO: 46226 - DNA, 1800 bp, Homo Sapiens
atggcttcagtggcctgggccgtcctcaaggtgctgctgcttctccccactcagacttggagccccgtgggagcaggaaatccacctgactgtgatgccccactggcctctgccttgcctaggtcatccttcagcagctcctcagagctgtccagcagccacggcccggggttttcaaggcttaatcgaagagatggagctggtggctggactccacttgtgtcaaataaataccaatggctgcaaattgaccttggagagagaatggaggtcactgctgtcgccacccaaggaggatatgggagctctgactgggtgaccagctacctcctgatgttcagtgatggtgggagaaactggaagcagtatcgccgagaagaaagcatctggggttttccaggaaacacaaacgcagacagtgtggtgcactacagactccagcctccctttgaagccaggttcctgcgctttctccctttagcctggaaccctaggggcaggattgggatgcggatcgaagtgtacggatgtgcatataaatctgaggtggtttattttgatggacaaagtgctctgctgtatagacttgataaaaaacctttaaaaccaataagagacgttatttctttgaaatttaaagccatgcagagcaatggaattctacttcacagagaaggacaacatggaaatcacattactctggaattaattaaaggaaagcttgtcttttttcttaattcaggcaatgctaagctgccttccactattgctcctgtgaccctcaccctgggcagcctgctggacgaccagcactggcattccgtcctcatcgagctcctcgacacgcaggtcaacttcaccgtggacaaacacactcatcatttccaagcaaagggagattccagttacttggatcttaattttgagatcagctttgggggaattccgacacccggaagatcgcgggcattcagacgtaaaagctttcatgggtgtttagaaaatctttattataatggagtggatgttaccgaattagccaagaaacacaaaccacagatcctcatgatgggaaatgtgtccttctcatgtccacagccacagactgtccctgtgacttttctgagctccaggagttatctggctctgccaggcaactctggggaggacaaagtgtctgtcacttttcaatttcgaacgtggaacagagcaggacatttgcttttcggcgaacttcgacgtggttcagggagtttcgtcctctttcttaaggatggcaagctcaaactgagtctcttccagccgggacagtcaccaaggaatgtcacagcaggtgctggattaaacgatgggcagtggcactctgtgtccttctctgccaagtggagccatatgaatgtggtggtggacgatgacacagctgttcagcccctggtggctgtgctcattgattcaggtgacacctattattttggagctctctacgagcagtcttgtgaagcccacaagcaccgagggaacccgtctgggctttactatattgatgcagatggaagtggccccctgggaccatttcttgtgtactgcaatatgacagacgccgcgtggacggtggtgcagcacggtggccccgacgcggtgaccctccgaggtgcccccagcgggcacccgcgctcggctgtgtccttcgcgtacgcagcgggcgcggggcagctgcggtccgcggtgaacctggcggagcgctgcgagcagcggctggctctgcgctgcgggacggcgcggcgcccggactcacgaggt

SEQ ID NO: 46227 - DNA, 204 bp, Homo Sapiens
atggaggagtgggacgtgccacagatgaagaaagaggtggagagcctcaagtaccagctggccttccagcgggagatggcgtccaagaccatccccgagctgctgaagtggatcgaggacgggatccccaaggaccccttcctgaaccccgacctgatgaagaacaacccatgggtggaaaagggcaaatgcaccatcctgtga

SEQ ID NO: 46228 - DNA, 462 bp, Homo Sapiens
atggccgagctgccccacaggatcatcaaggaaacccagcgtttgctggcagagccagttcctggcatcaaagcagaaccagatgaaagcaacgcccgttattttcatgtggtcattgctggggaatcaaaggattccccctttgagggagggacttttaaacgtgaactattacttgcagaagaatacccaatggcagcccctaaagtacgtttcatgaccaaaatttatcatccaaatgtagacaagttggaaagaataagtttagatattttgaaagataagtggtccccagccctgcagatccgcacagttctgctatcgatccaggccttgttaaatgctcccaatccagatgatccattagcaaatgatgtagtggagcagtggaagaccaacgaagcccaagccattgaaacagctagagcatggactaggctatatgccatgaatagtatttaa

SEQ ID NO: 46229 - DNA, 459 bp, Homo Sapiens
atggctcgtacgaagcaaacagctcgcaagtctaccggcggcaaagctccgcgcaagcagcttgctactaaagcagcccgtaagagcgctccggccaccggtggcgtgaagaaacctcatcgctaccgcccgggcaccgtggccttgcgcgaaatccgtcgctaccagaagtccaccgagctgctgatccggaagctgccgttccagcgcctggtgcgagaaatcgcccaggacttcaaaaccgacctgcgtttccagagctctgcggtgatggcgctgcaggaggcttgtgaggcctacctggtgggactcttcgaagacaccaatctgtgcgctattcacgctaaacgcgtcaccatcatgcccaaagatatccagctggcacgtcgcatccgtggggaaagggcataagtctgcccgtttcttcctcattgaaaaggctcttttcagagccactca

SEQ ID NO: 46230 - DNA, 807 bp, Homo Sapiens
atgatcttgggactcatctgtctggaccacattctgcctacccccatgtacttcttcctctcacacctggccatcattgacatgtcctatgcttccaacaatgttcccaagatgttggcaaatctgatgaacaagaaaagaaccatctcctttcttccatgcataatgcagacctatttgcatttctcttttgctgctacagagtgtctgattttggtggtgatgtcctatgataggtatgtggccatttgccaccctctccagtacactgtcatcatgagctggagagtgtgcacgatcctggctctcacatcctggtcatgtgggtttgccctgtccctggtacatgcaattcttcttctaaggttgccgttctgtgggccccgggatgtgaaccacctcttctgtgaaattctgtctgtcctcaagctggcctgttctgacacctgggttaaccaagtggtcatatttgctacctgtgtgtttgtcttagttggacctctttgtttgatgcttgtctcctacatgcacatcctctgggccatcctaaagatccagacaaaggaaggccgcataaaggccttctcgacctgctcctcccacctgtgtgtggttggactcttctttggcatagccatggtggtttacatagtcccagactctaatcaacgagaggagcaggagaaaatgctgtccctgtttcacagtgtcttgaacccaattctgaaccccctgatctacagtctgaggaatgctcaggtgaagggcgccctccacagagcactgcagaggacgctgtctatgtaa

SEQ ID NO: 46231 - DNA, 760 bp, Homo Sapiens
actgccctggcttcctgcgcctcttcaggtcatcgcttgctctcgttcccaggctttggcctctagtggacgagaatcaccgagtctgcggggctggacgctgactgcccgggccagcacctaggcgggcgggagctgtgcggcccagggttcacgcgggccgggtagaggctcgagccgggacccccgagcggcggatctgggccccgagaaggacccccgcctggatttgccccgtaggcccggcccgggcccctcgggagcagaacagctttggtgaggtggacaggaggtgacctcgcgagcagacgcgcgcgccagcgacagcagcccgccccggcctctcgggagccgtggggcagaggctgcggagccccaggaggggccggagccctcatgacttcagtgacctgcttctgcccctctaggtctatcagccacagtctctgcaagtttccaagagcagcagaaaatgaacacattgcaggggccagtgtcattcaaagatgtggctgtggatttcacccaggaggagtggcagcaactggaccctgatgagaagatagcatacggggatgtgatgttggagaactacagccatctagtttctgtggggtatgattatcaccaagccaaacatcatcatggagtggaggtgaaggaagtggagcagggagaggagccgtggataatggaaggtgaatttccatgtcaacatagtccaggtaagttagtagattatcacatgttaaaaaacact

SEQ ID NO: 46232 - DNA, 180 bp, Homo Sapiens
ctcttccaagtccaccccggctctgtctcctgctctggtttctctctgacccttagagccaacacaccctgctggtggaggacagtccctgcctcccatcacccgcagctcctcacttacccagatcatccgtcttcctgccatgccagtgttctaagtccctcactgatttctcaatga

SEQ ID NO: 46233 - DNA, 811 bp, Homo Sapiens
ggttttctccgcgggcgcctcgggcggaacctggagataatgggcagcacctgggggagccctggctgggtgcggctcgctctttgcctgacgggcttagtgctctcgctctacgcgctgcacgtgaaggcggcgcgcgcccgggaccgggattaccgcgcgctctgcgacgtgggcaccgccatcagctgttcgcgcgtcttctcctccaggtggggcaggggtttcgggctggtggagcatgtgctgggacaggacagcatcctcaatcaatccaacagcatattcggttgcatcttctacacactacagctattgttaggttgcctgcggacacgctgggcctctgtcctgatgctgctgagctccctggtgtctctcgctggttctgtctacctggcctggatcctgttcttcgtgctctatgatttctgcattgtttgtatcaccacctatgctatcaacgtgagcctgatgtggctcagtttccggaaggtccaagaaccccagggcaaggctaagaggcactgagccctcaacccaagccaggctgacctcatctgctttgctttggcatgtgagccttgcctaagggggcatatctgggtccctagaaggccctagatgtggggcttctagattaccccctcctcctgccatacccgcacatgacaatggaccaaatgtgccacacgctcgctcttttttacacccagtgcctctgactctgtccccatgggctggtctccaaagctctttccattgcccagggagggaaggttctgagcaataaagtttcttagatcaatca

SEQ ID NO: 46234 - DNA, 495 bp, Homo Sapiens
gtgtggtgtttggtcttatagatgtcagcattggcgattttcagaaggaatatcaactgaaaaccattgagaagttggcattggaaaagagttacgatatttcatctggcctggtagcaatatttatagcattctatggagacagaaaaaaagtaatatggtttgtagcttcctcctttttaataggacttggatcacttttatgtgcttttccatccattaatgaagaaaataaacaaagtaaggtaggaattgaagatatttgcgaagaaataaaggttgtcagtggttgccagagcagtggtatatcattccaatcaaaatacctgtctttcttcatccttgggcagactgtgcagggaatagcaggaatgcctctttatatccttggaataacctttattgatgagaatgttgctacacactcagctggtatctatttagttttaccccctctattacgattgacccattttgagttttctttgaattttg

SEQ ID NO: 46235 - DNA, 3446 bp, Homo Sapiens
tatctgatgaaaaggataccacagaacccaagataccagcatatcaaatcaagactggacactggtaacagtatgactaaatatactgagaagctcgaagagattaagaaaaattatagatacaaaaaagatgagcttttcaagagactaaaagttacaacttttgcccagctgatcatccaagttgcttccctctctgatcaaacactggaagtgacagctgaggagattcaaaggctggaagacaatgattctgcagcttcagaccctgatgctgaaaccactgccaggaccaatgggaaaggaaatccaggtgagcagtcgccgagccctgagcagttcataaacaacgcaggagcaggggactccagccgctcaactcttcagagtgtcatcagtggtgttggggaactggatctagacaaagggccagtgaagaaagcagagccccataccaaagacaaaccttatcctgactgccccttcctgctgctagatgtgcgtgatagagattcttaccagcagtgccacattgttggagcttacagttacccaattgcaactctgtctagaacaatgaacccttattcaaatgatattcttgaatataaaaatgcccatggcaagatcatcattctgtatgacgatgatgaaaggctggccagtcaggcggccaccaccatgtgcgagcgtggatttgaaaacctcttcatgctttccggaggtctaaaagtcttagctcagaaattcccggaaggactgattactggttccctgccagcatcttgccagcaggcccttcctcctgggtctgcccggaaacgatccagccccaaagggccacccctaccagctgagaataaatggagatttaccccagaagacttaaaaaagatagaatattatctggaagaggagcaagggcctgcagatcatcctagccgactgaaccaagctaactcctccggaagagagtccaaggtgcctggtgcccgaagcgctcagaatctgccaggtggcggccccgccagccactcaaacccccgctccctcagcagtggtcacctgcaaggcaaaccctggaagtaaagactttgtctcacttaggcaaataaatgttcttcctcttttcagaacccctgagcatttcccaagttgggtcatttccagaaacttctgcagaggaaagaccatgacatatgtatgggataggcctcttccctgtccctgtctccagttcctctcccctcaggaggccacctcaggaaggattttgacaggtgaccataaaaaccagaggtgtgacaggctctagtctcctccctgttgtttacagcatatttaagtcttgtgaaactgtataggaaaaaagtatctacgtttttagtttttttgttttgtttttttttaataaggtccagcttgttgggtctctctgtgttgttttgtaaatacttcagtcacatctgcccgtgtgcctgtccctgccaccttttcattcactgttcttgacttcatgaaggcttctccgggcagtcttggtgtgagaagctgtttccaagggtgcagatgagccttaggttccagccgcctgcagaccccaccccagcaggctcactcagcaaggagctctctgcccagcatattgcaggccctgttttgagtatggaagccagtgcctgtgtactcactgaaattgaagatgaggaaagtagctgtacactcactgaatgctcccccttactagatatttcctggagccagaaaggtatgcatgtgggtgtcttcacaccggggaggagggcctctcatgggaaagccctggccaccacaccggcctgtgccccttgaagcccaccaaagcggccctcacttgtggtcagtatatcagttatgacgcccattgcccagcttcagtccatccatgttagatggacagaaattatggccagttgaaaataccagctttggttggacaactgtggacacacaaggtgaagaggactccgaagtcctttgtcagggctgacaacctcgtaagcccttgcttagaaatacagtattagtctaattgagtaattagtgcaatttcctgcttacttttcattctcatgactgaactgtgattaggaagttgtgattatagattctggttttggccggaattttgaatcagcattaattgaattgctaaatgactgacattcattccatttaattgggggaacaaaaggcctcaggtaaggatgaggaactctgaaatcagatggaaaagagcggtgttaatttttatggtctgtgatcgtagctgtgataagggactgaggaataaattgtgctctttgtcatggcaaccagcttctgaaaagcccactgaaaattgcctgtcctgctggtaactgctacggggtaagatttgccttaacagtactattttctcgccaccaaaaaaaaaaaaaaaaaaaaaaaaaaatgcaccacagtatttctagcatgggggctgtgtttgtatgagaaataaacgtaataaatatctcatagagacatatggaaaaataactttcagattcagcccagttctgttttagagtgtgtttattcttctctacttgatttccaaagtgcaacattttccgatgctttagaaatcaaacaaaccagggacattgttcagatgtcaagccatgcccaattttccacaagattcaagaatcttgtataaaattcagccaacgtacacatagctttaatgaggagcctgtcatgtttccccataaatttattgcctgagaacttagttcagcctttgctaatgccaaaatgctctggctttgtattttctttacagcatagatagaaaaatgcacatttttccacactcagctttcccctagcatggacaagattttcagccatttttgccacatatacatttttaaggaaaaaagatttttctctgtaagaaagttctggttatgctgttttaaaggtgacttgtcaggagttgagacttccctgccggattctattttgaaagtaaatggtcttccctccttgttccgattctgcgttcccatcgtcagacaactttggagtattagaaaccactgtatatatgtggaaagccaggtcagccagacctgttagaattggtgtgcactcacctgagagatctggcaggttggatatatttatgtgtatttctccacagtgcttgctttgccctgttggtaaggattttaaataaccatgctcaaaagagctgttctaatctgcgttttgcatgttaagtgttaatatcaaacattctttacgtgctcgaggtattgcttttaacattctactttgccagtttcttcattagattaattgacatgtattatttaaatgaccagtgatgctttgtgcaattatgaatgttgaagattaaagtacatagttactaa

SEQ ID NO: 46236 - DNA, 597 bp, Homo Sapiens
gtgaagttgcctcattatttgctgagttccaagcctaagtctcaacctcttgcaaaggtgcaagattctgttggaggaaaagtgaacacatcctctgttgcatctgctgccattaataatgcaaagtcatccctttttgggttccatcttctcccatcatcagtcaagtttggagtgcttaaggaaggacatacctatgccacagttgtaaagctcaagaatgttggagtggacttctgcaggtttaaagtaaagcagcccccacccagcacaggactgaaagtgacttacaaacctggacctgtggcagctggtatgcagacagaactgaatatagagttatttgccacagctgttggagaggatggggccaagggatcagcacacatctctcacaatatcgagattatgacagagcatgaggttctgttcctacctcccttaacaagtattttacctgttttaacaagcagcaattatgataaacgaccaaaagactttccccagggaaaagaaaatccaatggtccagagaacttctacaatttattcctccacacttggagtcttcatgtctcgtaaagtttctccacattag

SEQ ID NO: 46237 - DNA, 1809 bp, Homo Sapiens
atggactcgcgggtatcggagctgttcggcggctgctgccggcccggagggggcccggccgtgggcggaaccctcaaggctaggggggccggcagcagcagcggctgcggggggccaaagggaaagaagaagaacggaaggaacagagggggcaaagccaacaaccccccgtatttgccccccgaggctgaagatggaaacattgaatataaattgaagctggtgaatccatcccagtaccgctttgagcacctggtgacacaaatgaagtggcggctccaggagggacgtggtgaggccgtctaccagattggggtagaggacaatgggctgctggtggggctggctgaggaggaaatgcgagcttcgctcaagaccctgcaccggatggcagagaaggttggggcagacataaccgttcttcgagagcgagaagtggattatgatagcgacatgccccggaagatcaccgaggtgctagtacgaaaggtccctgacaaccaacagttcctagacctccgtgtggccgtcctggggaatgtggactctgggaagtcaactctgcttggagtcctgacccagggagagctggacaatgggcggggccgggctcggctcaaccttttccgccacctgcatgagattcagtctggccgaacctccagcatcagcttcgagatcctgggctttaacagcaagggagaggtggtgaattacagcgactcacggacagcagaagagatctgtgagagcagctccaagatgatcaccttcatcgacctggcaggccaccataagtacctacacaccaccatctttggcctcacatcatactgccccgactgcgccctgctcctcgtcagtgccaacactgggattgctggcaccacaagggaacatctggggctggccctggccctgaaagtgcccttcttcatcgtggtcagcaagatcgacctatgtgccaagaccacagtggagaggacagtacgccagctggagcgggtcctcaagcagcctggctgccacaaggtccccatgctggtcacctctgaggatgatgccgtcactgctgcccagcagtttgctcagtcacccaatgtcacccccatcttcacattgtccagtgtgtctggagagagtctggacctcctcaaagtctttctgaatattctgccgccactcaccaacagcaaagagcaggaggaactcatgcagcagctgacggagttccaggtggatgaaatctacacagtaccagaggtggggactgttgttggaggaacactttccagtgggatttgccgtgagggggaccagctggtggtgggccccacggatgatggctgcttcctggagctgagagtatgcagcatccagcgcaaccgctctgcctgtcgtgtgctgcgagctggtcaggctgctacactggcgcttggggactttgaccgtgcactgcttcgcaagggcatggtgatggtgagcccggagatgaatcctaccatctgctcggtgtttgaggcagagatagtcttactgttccatgccaccaccttccgacgaggattccaggtgacagtacacgtgggcaacgtacgtcagacggcagtggtggaaaagatccatgccaaggacaaactgcggacaggcgagaaggcagtggtacgtttccgcttcctgaaacacccagagtacctgaaggtgggcgccaaactgctgttccgggagggtgtcaccaagggcatcggccatgtcactgatgtacaagccattacagcaggagaagcccaggccaacatgggcttctga

SEQ ID NO: 46238 - DNA, 1576 bp, Homo Sapiens
gcgaggcagccagcgagggagagagcgagcgggcgagccggagcgaggaagggaaagcgcaagagagagcgcacacgcacacacccgccgcgcgcactcgcgcacggacccgcacggggacagctcggaagtcatcagttccatgggcgagatgctgctgctggcgagatgtctgctgctagtcctcgtctcctcgctgctggtatgctcgggactggcgtgcggaccgggcagggggttcgggaagaggaggcaccccaaaaagctgacccctttagcctacaagcagtttatccccaatgtggccgagaagaccctaggcgccagcggaaggtatgaagggaagatctccagaaactccgagcgatttaaggaactcacccccaattacaaccccgacatcatatttaaggatgaagaaaacaccggagcggacaggctgatgactcagaggtgtaaggacaagttgaacgctttggccatctcggtgatgaaccagtggccaggagtgaaactgcgggtgaccgagggctgggacgaagatggccaccactcagaggagtctctgcactacgagggccgcgcagtggacatcaccacgtctgaccgcgaccgcagcaagtacggcatgctggcccgcctggcggtggaggccggcttcgactgggtgtactacgagtccaaggcacatatccactgctcggtgaaagcagagaactcggtggcggccaaatcgggaggctgcttcccgggctcggccacggtgcacctggagcagggcggcaccaagctggtgaaggacctgagccccggggaccgcgtgctggcggcggacgaccagggccggctgctctacagcgacttcctcactttcctggaccgcgacgacggcgccaagaaggtcttctacgtgatcgagacgcgggagccgcgcgagcgcctgctgctcaccgccgcgcacctgctctttgtggcgccgcacaacgactcggccaccggggagcccgaggcgtcctcgggctcggggccgccttccgggggcgcactggggcctcgggcgctgttcgccagccgcgtgcgcccgggccagcgcgtgtacgtggtggccgagcgtgacggggaccgccggctcctgcccgccgctgtgcacagcgtgaccctaagcgaggaggccgcgggcgcctacgcgccgctcacggcccagggcaccattctcatcaaccgggtgctggcctcgtgctacgcggtcatcgaggagcacagctgggcgcaccgggccttcgcgcccttccgcctggcgcacgcgctcctggctgcactggcgcccgcgcgcacggaccgcggcggggacagcggcggcggggaccgcgggggcggcggcggcagagtagccctaaccgctccaggtgctgccgacgctccgggtgcgggggccaccgcgggcatccactggtactcgcagctgctctaccaaataggcacctggctcctggacagcgaggccctgcacccgctgggcatggcggtcaagtccagctgaagccggggggccgggggaggggcgcgggagggggcg

SEQ ID NO: 46239 - DNA, 750 bp, Homo Sapiens
atggctcgtggtgccaagaagcatctgaagcgggtagcagctccaaagcattggatgctggataaattgaccggtgtgtttgctcctcgtccgtccaccagtccccacaagttgagagagtgtcttcccctcatcattttcctaaggaacagacttaagaagatttgcatgcagcggttcattaagatcgatggcacggtccgaactgatataacataccctgctgggttcatggatgtcatcagcattgacaagacaggagagaatttccatctgatccgtgacaccaaaggttgctttgctgtacacgaggagaccaagtacaagttgtgcaaagtgagaaaaatctttgtgggcacaaaaggaatccctcatctggtgactcatgatgctcgcaccatccgctaccctgaccccatcaaggtgaatgacaccattcagattgatttggagactggcaagatgaccgatttcatcacgttcgacactggcaagccatatatggtgactggaggtgctcacctgggaagagttggtgtgatccccaacagagagaggtacccgggatcttctgacgtggttcatgtgaaagacaccagtggcaacagctttggcactcaagtttccaacattttcactattggcaagggcaacaaacgatggatttctcttccccgaggaaagggtatccgcctcaccattgctgaagagagagacaagagactggcggccaaacagagcagcgggtga

SEQ ID NO: 46240 - DNA, 2004 bp, Homo Sapiens
atggggcaaactaaaagtaaaactaaaagtaaatatgcctcttatctcagctttattaaaattcttttaaaaagagggggagttagagtatctacaaaaaatctaatcaagctatttcaaataatagaacaattttgcccatggtttccagaacaaggaactttagatctaaaagattggaaaagaattggcgaggaactaaaacaagcaggtagaaagggtaatatcattccacttacagtatggaatgattgggccattattaaagcagctttagaaccatttcaaacaaaagaagatagcgtttcagtttctgatgcccctggaagctgtgtaatagattgtaatgaaaagacagggagaaaatcccagaaagaaacagaaagtttacattgcgaatatgtaacagagccagtaatggctcagtcaacgcaaaatgttgactataatcaattacagggggtgatatatcctgaaacgttaaaattagaaggaaaaggtccagaattagtggggccatcagagtctaaaccacgagggccaagtcctcttccagcaggtcaggtgcccgtaacattacaacctcaaacgcaggttaaagaaaataagacccaaccgccagtagcttatcaatactggccgccggctgaacttcagtatctgccacccccagaaagtcagtatggatatccaggaatgcccccagcactacagggcagggcgccatatcctcagccgcccactgtgagacttaatcctacagcatcacgtagtggacaaggtggtacactgcacgcagtcattgatgaagccagaaaacagggagatcttgaggcatggcggttcctggtaattttacaactggtacaggccggggaagagactcaagtaggagcgcctgcccgagctgagactagatgtgaacctttcaccatgaaaatgttaaaagatataaaggaaggagttaaacaatatggatccaactccccttatataagaacattattagattccattgctcatggaaatagacttactccttatgactgggaaagtttggccaaatcttccctttcatcctctcagtatctacagtttaaaacctggtggattgatggagtacaagaacaggtacgaaaaaatcaggctactaagcccactgttaatatagacgcagaccaattgttaggaacaggtccaaattggagcaccattaaccaacaatcagtgatgcagaatgaggctattgaacaagtaagggctatttgcctcagggcctggggaaaaattcaggacccaggaacagctttccctattaattcaattagacaaggctctaaagagccatatcctgactttgtggcaagattacaagatgctgctcaaaagtctattacagatgacaatgcccgaaaagttattgtagaattaatggcctatgaaaatgcaaatccagaatgtcagtcggccataaagccattaaaaggaaaagttccagcaggagttgatgtaattacagaatatgtgaaggcttgtgatgggattggaggagctatgcataaggcaatgctaatggctcaagcaatgagggggctcactctaggaggacaagttagaacatttgggaaaaaatgttataattgtggtcaaatcggtcatctgaaaaggagttgcccagtcttaaataaacagaatataataaatcaagctattacagcaaaaaataaaaagccatctggcctgtgtccaaaatgtggaaaaggaaaacattgggccaatcaatgtcattctaaatttgataaagatgggcaaccattgtcgggaaacaggaagaggggccagcctcaggccccccaacaaactggggcattcccagttcaactgtttgttcctcagggttttcaaggacaacaacccctacagaaaataccaccacttcagggagtcagccaattacaacaatccaacagctgtcccgcgccacagcaggcagcgccacagtag

SEQ ID NO: 46241 - DNA, 402 bp, Homo Sapiens
atggctgagccttcctctgagatgacctccaacaaaggcctgagcaccaaggagcccaaagcggccaatgccacgatggcccacaagcagaagaggcatgggcactctcaccccagccgctgcagggacagcttcaccacctattttccccgggtgctgaagcaggttcacgcgggcctcagcctttcccccgaggcagtggatgtcatagattccttcgttcacgacatcttggagcacatcgccaccaaggccggccacttggcccactataccaagtgcaccaccatcacctcctgcgagatgcagaccaccattcgcctgatgttcccggggcagatgggcaagcacgccatatccaggggctccaagactctgctccactacaccaggagcaagtga

SEQ ID NO: 46242 - DNA, 360 bp, Homo Sapiens
atggggcccatgagtgaggaggacaagagagaaaggagaagtttgggtgtaaatcccagagattgttcatcatgtgagaggagccgtgcatgcatttcatgccatactcacaccatggatggagaaaaaaagcttcactttctgagaatggccctgggggcactgcatctagtgcctgtgcatctgcagacctgccggatgcctccaggggaatcatgccaccccaagcaagaaagggcccagttgccaggagcctggaggcagagagctgaggagccagcccctgacatcagaatggagctcaaaggttggctgggtgtgacttgccgtggacagcttctcttgggaaatctactttaa

SEQ ID NO: 46243 - DNA, 603 bp, Homo Sapiens
atggggcaggagtttagctgggaggaggcggaggcagctggcgagatagatgtggcggagctccaggagtggtacaagaagtttgtgatggagtgccccagcggcacactctttatgcatgagtttaagcgcttcttcaaggtcacagacgatgaggaggcctcccagtatgtagagggcatgttccgagccttcgacaagaatggggacaacaccatcgacttcctggagtacgtggcagctctgaatctcgtgctgaggggcaccctggagcacaagctgaagtggacattcaagatctatgataaggatggcaatggctgcatcgaccgcctggagctactcaacattgtggagggaatttaccagctgaagaaagcctgccggcgagagctacaaactgagcaaggccagctgctcacacccgaggaggtcgtggacaggatcttcctcctggtggatgagaatggagatggccagctgtctctgaacgagtttgttgaaggtgcccgtcgggacaagtgggtgatgaagatgctgcagatggacatgaatcccagcagctggctcgctcagcagagacggaaaagtgccatgttctga

SEQ ID NO: 46244 - DNA, 2162 bp, Homo Sapiens
aatttccagtgccccaaggtctctgcactgccgcccctcctcacaggagacggacacctcagcctagatcccttggtgctctccacgctgttcaggctgaattgaagatccctcttacccgccaggtgccaagaactatgaacaggcagggcaatagaaagacaactaaagaaggatccaacgatttgaaattccagaacttcagtctgccaaaaaacaggtcatggcctcgcatcaatagtgccacaggccagtaccagaggatgaacaagcctcttctagactgggaaagaaactttgctgcagtcctggatggagcaaaaggccacagtgatgatgactatgatgaccctgagcttcggatggaagagacatggcagtcgattaaaattttaccagcccggcctataaaggaatctgaatatgcagatacacactatttcaaggttgcaatggacactccccttccgttagacaccaggacctctatctccattggacagccgacctggaacacacagacgaggttggaaagagtggacaaacccatttccaaggacgtcagaagccaaaacattaaaggagatgcatccgtaagaaagaacaagattcctttaccacctcctcggcctctcataacacttccgaagaagtaccaacccttgccccctgagccggagagcagcaggccacctttatctcagagacacacctttccagaagtccagagaatgcccagtcagataagcttaagggacttaagtgaggtaattcctcataaccagaggaagcctgaatcaactcatctgttagaaaaccaaaatactcaagagattccacttgccattagcagttcttcattcacgacaagcaaccacagtgtgcaaaacagagatcatagaggaggcatgcagccctgttctcctcagagatgccagcctccagccagctgcagccctcacgaaaatatactgccctataaatacacaagctggagaccacctttccccaaaaggtctgatagaaaggatgtccagcacaatgaatggtacattggagaatacagccgccaggcagtggaagaggcattcatgaaggagaacaaggatggtagtttcttggtccgagattgttccacaaaatccaaggaagagccctatgttttggctgtgttttatgagaacaaagtctacaatgtaaaaatacgcttcctggagaggaatcagcagtttgccctggggacaggactcagaggagatgagaagtttgattcagtagaagacatcatcgaacactacaagaattttcccattatactaattgatgggaaagataaaactggggtccacaggaaacagtgtcacctcactcagccactccctctcaccagacacctcttgcctctgtagcctggtctttgtgttatctttggtttactggattcagcgcttccattgttttcattgatttcaaaagtttattttctgtgccttcaagggacaacttttttaactttggagaaaagaaaaacactctataacagagagtggaaaatcactcacggttttgaaagttcaaaccacagagaaaatatttataacatgcaaaaaataaaaacattctagtaactggccactggaaaataaataaaaataaaaactagggttttaaaagtatcttctaaaaaacaacaacaaaaaatactataaacatagccattatgctcatgatacaggcgagcagcaaagggcaccagaagctgttgcttaaatgtttgcagtcagtgcaagacaagtctatgggaaattcccaaatctgtgctctttacaggacactgcgctgcctttatgtcagttgttgggccttacatatatacaatgtgtggatgatttcttacactaaagatgctgggctgggtgcggtgcctcatgcctgtaatcccagcactttgggaggctgaggtggacagatcacgaggtcaggagatcaagaccatcctggctaacatggtgaaaccccatgtctactaaaaatacaaaaaatcagctgggcgtggtggtgggtgcctgtagtcccagctactcgggaggctgaggcaggagaatggtgtgaacccgggaggcggagcttgcagtgagccgaaatcgcgccactgcactcca

SEQ ID NO: 46245 - DNA, 1062 bp, Homo Sapiens
atgcggctgcgcttttggctcctcatttggctcctgctgggatttatcagccatcagcccacccctgtgtctttcctgaagactatcttctggtctcgaaatggacatgatggatccatggatgtacagcagagagcctggaggtccaaccgcagtagacagaaagggctgaggtccatttgtatgcacacaaagaaaagagtttcttcctttcgaggaaataaaattggcctgaaagacgtcattactctacggaggcatgtggaaacaaaagttagagctaaaatccgtaagaggaaggtgacaacgaaaatcaaccgtcatgacaaaatcaatggaaagaggaagaccgccagaaaacagaaaatgtttcaacgtgcgcaagagttgcggcggcgggcagaggactaccacaaatgcaaaatccccccttctgcaagaaagcctctttgcaactgggtcagaatggcggcagcggagcatcgtcattcttcaggattgccctactggctctacctcacagctgaaactttaaaaaacaggatgggccgccagccacctcctccaactcaacaacattctataactgataactccctgagcctcaagacacctcctgagtgtctgctcactccccttccaccctcagtggatgataatatcaaggagtgtcctcttgctcctcttccaccctctcctcttccaccctcagtggatgataatctgaaggaatgtctctttgtcccgcttccaccctctcctcttccaccctcagtggatgataatctgaaggaatgtctctttgtcccacttccaccctctcctcttccaccctcagtggatgataatctcaagactcctcccttagctactcaggaggccgaggtggaaaaaccacccaaacccaagaggtggagggtggatgaggtggaacaatcgcccaagcccaagaggcagagggaggccgaggcacaacaattacccaaacccaagaggcggaggttgagtaagctgagaacacgccattgcactcaagcctgggcaataagaataaatccgtag

SEQ ID NO: 46246 - DNA, 2914 bp, Homo Sapiens
gtaagcacagacacctccagcttgcgaagggcagatccgaaaggccggagtgcgctgttggctgatatccagcaaggaactcgcctgcgcaaagtcacgcagatcaacgaccgcagtgccccgcagatcgagagttctaaaggaaccaacaaagaaggaggaggttctgcaaacacacgaggcgcgagcacacctcccaccctgggagatctgtttgctggtggctttcctgtattgcgaccagcaggccagcgggatgtagcaggtggcaagacagggcagggccctggctcccgcgcgccctctcccaggcttcccaacaaaaccatcagcggcccgcttatcccgcctgcctctcccaggctaggcaatacctccgaggcgcatggcgctgccaggacagctgacaaggcagtgaagcctcagctggctcccttgcacctcccgcccatcccgcccccgctccctctgctcccaccttgtgggtatccggggctcaaagcggagcccgccagccctgcgcaagatgcgcaggagcctcccgccccgccgcccccgctccccccttatgcttcttgctccccgagggcttctttgcccgcgccccctttgccaggagttaatagcagcagtgaaactccacccccgctaccccctaaatcccccagcttccaggccccaccgcagaaggccggtgcgcaggccttgcccgccccgcctgcccctccgggctcccagccgttcctgcagaagaagaggcatggccgaccaggggccggtgggggaaagctaaatccacctccagcaccccctgcgagatcacctaccacagagctttcaagcaagagccagcaggccacagcctggaccccgacgcagcagcctggaggtcaactgcgaaatggaagcctgcacatcattgatgacttcgagtctaaattcacgttccattctgtggaagactttccccctccggatgaatataaaccatgccagaagatttaccccagcaagatccccagaagccgtacacctggtccctggctccaagcggaagcagtcgggcagagctctgatgacatcaaaggcagaaattctcaggtaacacaagcctcatgtctctgaatgtaaaaccaggaattctcctcaggaggcacagaaatggtaagggtatgctttctcctaaacagctttatatttttcctcacactccttttcctcagggaaagccatttggtggaccttttttcaagccagaatgaaacactcaccatttcaaaatctgaagtgtgacaaaagggggcttccctggaatcaccactacatatagaagcaagtttagcaactctgacattctgcaacaatcatgccaatcacttcccattcttccttggttatgatggcctgtgagaaaaactgaataacatgtataaaacataattcagtattctctctcatctgtagaatacatggtttcttttagcacacttggagtttttttttcccccaccaatgttataattgattttggccaaatttagtcacaattcaagtactagtacccacaagaaatgaacagaactagaaggcaagccagacagctgcttttgtgataagacagtccttgaagaaacacctttaatctcacccagggcatcttgaaccgaattatttcctaacctggacacatttccctgcacatgacagggtctcatctttaaaagccctttgtttctttgaaaacatgtattcagtcgaacaataatctccccatttctgaatactatgtgacagactacagagtcacttgcagttaaaccaggcaattctgcaactgtgtggaacatcaaggaaagtgacctgagaaggaagaggctaggttcctggaagctaggatgagttcctcagaggaaaaagtacatcctctagcagataagtatcccccttttctaaccacagctgatgcaagaattgcagtaacgattcttagacgatcacaggttcaaaactgtgtgtatgattgtagttaaggaagaagtatatatacacaggaaaaaagacaggaagaatatacacaatattgttaacaggtagagagaattctgagaagatggcagaggagaaagcaccaggaatctgtggacaacaattgcattggcagaatctgtctgatgtaatttgtctcatgtattttggaactctgggattcattaaaggcttgaaacttccatgggaaagcttggacagtaaattgtgctcttagtacaatagtaactactcatcctccaccccccaccccatggcaggcaactgggcacgtgttcctggagcagcttgcatacagcttgcaggagccaaggtgggcacaaaaaaaaaaccctgtcctccagatactggggaatctgttctctgattggttattgctgcttctgatcacagaggtacaaataaagagatgggcagccattgttgcacctcctcttattgttgtaaatccctttccctctggctgaagtggcctcctggggatttcaagggctggtggccattttgttcctcctgtccttgctctttttttttccccatttgggagccaaacattaaagatgaacattcaaaggctactacatatatgatgaaaattagaaagtgaccacatatgcccagggaaaggcacaggctcagaaaagaccaagaagaccttaagattacacctcagactgattcttagcacagagacagcctacaacaatcaaaaaaataaaatgaacaaaaacaataagaaaaaccagcaaaccctgggggacagagagaattgatatctagagttaccacattattagattaaaatgtagagttttcaacaacaacaaaaatcacatcatacaaagaaacaggagagtatggcccattc

SEQ ID NO: 46247 - DNA, 897 bp, Homo Sapiens
gctgaatttttcctcatgggattttcgaattcctgggatattcagattgtacatgctgctctattcttcctagtttacctggcagctgtcataggaaatctcctaatcatcatacttaccactctggatgttcacctccaaaccccaatgtatttctttttgagaaacttgtctttcttagatttttgttacatctctgtcacaattccaaaatctattgttagttccttgactcatgatacttccatttctttctttgggtgtgctctgcaagccttctttttcatggacttggcaactacggaggtagccatccttacagtgatgtcctatgaccgctatatggccatctgccggcctttacattatgaggtcatcataaaccaaggtgtctgtctgaggatgatggccatgtcgtggctcagtggggtgatctgtggattcatgcatgtgatagcaacattctcattaccattctgtgggcgcaatagaatacgtcaatttttctgtaatattccacagctcctaagcctcttagaccccaaagtaattaccattgagattggagtcatggtttttggtacaagtcttgtgataatctcctttgttgtaattactctctcctacatgtacattttttctgtcatcatgaggattccttctaaggagggtagatcaaaaacattttctacctgcattccacatcttgtggttgtaacactctttatgatatctggcagcattgcctatgtgaagccaatttcaaattctccccccgttctggatgttttcctgtctgcgttctacacagtcgtgcccccgaccctgaaccccgtcatctatagtctgaggaatagggacatgaaggcagccctgagaaggcagtgtggtccctga

SEQ ID NO: 46248 - DNA, 2808 bp, Homo Sapiens
aagttctctaagtttgaagcgtcagcttcaaccaaacaaattaatggctattctacattcaaaaatcaggaaatttaaatttattatgaaatgtaatgcagcatgtagtaaagacttaaccagtgttttaaaactcaactttcaaagaaaagatagtattgctccctgtttcattaaaacctagagagatgtaatcagtaagcaagaaggaaaaagggaaattcacaaagtaactttttgtgtctgtttctttttaacccagcatggagagaaaatttatgtccttgcaaccatccatctccgtatcagaaatggaaccaaatggcaccttcagcaataacaacagcaggaactgcacaattgaaaacttcaagagagaatttttcccaattgtatatctgataatatttttctggggagtcttgggaaatgggttgtccatatatgttttcctgcagccttataagaagtccacatctgtgaacgttttcatgctaaatctggccatttcagatctcctgttcataagcacgcttcccttcagggctgactattatcttagaggctccaattggatatttggagacctggcctgcaggattatgtcttattccttgtatgtcaacatgtacagcagtatttatttcctgaccgtgctgagtgttgtgcgtttcctggcaatggttcacccctttcggcttctgcatgtcaccagcatcaggagtgcctggatcctctgtgggatcatatggatccttatcatggcttcctcaataatgctcctggacagtggctctgagcagaacggcagtgtcacatcatgcttagagctgaatctctataaaattgctaagctgcagaccatgaactatattgccttggtggtgggctgcctgctgccatttttcacactcagcatctgttatctgctgatcattcgggttctgttaaaagtggaggtcccagaatcggggctgcgggtttctcacaggaaggcactgaccaccatcatcatcaccttgatcatcttcttcttgtgtttcctgccctatcacacactgaggaccgtccacttgacgacatggaaagtgggtttatgcaaagacagactgcataaagctttggttatcacactggccttggcagcagccaatgcctgcttcaatcctctgctctattactttgctggggagaattttaaggacagactaaagtctgcactcagaaaaggccatccacagaaggcaaagacaaagtgtgttttccctgttagtgtgtggttgagaaaggaaacaagagtataaggagctcttagatgagacctgttcttgtatccttgtgtccatcttcattcactcatagtctccaaatgactttgtatttacatcactcccaacaaatgttgattcttaatatttagttgaccattacttttgttaataagacctacttcaaaaattttattcagtgtattttcagttgttgagtcttaatgagggatacaggaggaaaaatccctactagagtcctgtgggctgaaatatcagactgggaaaaaatgcaaagcacattggatcctacttttcttcagatattgaaccagatctctggcccatcaggctttctaaattcttcaaaagagccacaacttccccagcttctccagctcccctgtcctcttcaatcccttgagatatagccaactaacgacgctactggaagccccagagcagaaaagaagcacatcctaagattcagggaaagactaactgtgaaaaggaaggctgtcctataacaaagcagcatcaagtcccaagtaaggacagtgagagaaaagggggagaaggattggagcaaaagagaactggcaataagtaggggaaggaagaatttcattttgcattgggagagaggttctaacacactgaaggcaaccctatttctactgtttctctcttgccagggtattaggaaggacaggaaaagtaggaggaggatctggggcattgccctaggaaatgaaagaattgtgtatagaatggaagggggatcatcaaggacatgtatctcaaattttctttgagatgcaggttagttgaccttgctgcagttctccttcccattaattcattgggatggaagccaaaaataaaagaggtgcctctgaggattagggttgagcactcaagggaaagatggagtagagggcaaatagcaaaagttgttgcactcctgaaattctattaacatttccgcagaagatgagtagggagatgctgccttcccttttgagatagtgtagaaaaacactagatagtgtgagaggttcctttctgtccactgaaacaaggctaaggatactaccaactactatcaccatgaccattgtactgacaacaattgaatgcagtctccctgcagggcagattatgccaggcactttacatttgttgatcccatttgacattcacaccaaagctctgagttccattttacagctgaagaaattgaagcttagagaaattaagaagcttgtttaagtttacacagctagtaagagttttaaaaatctctgtgcagaagtgttggctgggtgctctccccaccactacccttgtaaacttccaggaagattggttgaaagtctgaataaaagctgtcctttcctaccaatttcctccccctcctcactctcacaagaaaaccaaaagtttctcttcagagttgttgactcatagtacagtaaagggtggaggtgatatggcattctgaaagtagggagggactaagtcagtcatcatactaaac

SEQ ID NO: 46249 - DNA, 1779 bp, Homo Sapiens
atgatggaggagcgtgccaacctgatgcacatgatgaaactcagcatcaaggtgttgctccagtcggctctgagcctgggccgcagcctggatgcggaccatgcccccttgcagcagttctttgtagtgatggagcactgcctcaaacatgggctgaaagttaagaagagttttattggccaaaataaatcattctttggtcctttggagctggtggagaaactttgtccagaagcatcagatatagcgactagtgtcagaaatcttccagaattaaagacagctgtgggaagaggccgagcgtggctttatcttgcactcatgcaaaagaaactggcagattatctgaaagtgcttatagacaataaacatctcttaagcgagttctatgagcctgaggctttaatgatggaggaagaagggatggtgattgttggtctgctggtgggactcaatgttctcgatgccaatctctgcttgaaaggagaagacttggattctcaggttggagtaatagatttttccctctaccttaaggatgtgcaggatcttgatggtggcaaggagcatgaaagaattactgatgtccttgatcaaaaaaattatgtggaagaacttaaccggcacttgagctgcacagttggggatcttcaaaccaagatagatggcttggaaaagactaactcaaagcttcaagaagagctttcagctgcaacagaccgaatttgctcacttcaagaagaacagcagcagttaagagaacaaaatgaattaattcgagaaagaagtgaaaagagtgtagagataacaaaacaggataccaaagttgagctggagacttacaagcaaactcggcaaggtctggatgaaatgtacagtgatgtgtggaagcagctaaaagaggagaagaaagtccggttgagaggaaacaaaaggcatgaaccattgatacacatggaaacttggattgatctccaagacattattctgagaaaaagtcagtctcaaggttatataatgtataattacattgagattacattctcaaaaagccaaagccatattgttgcaggacagatgagtggttgccaggggctgagcaaaagtcatcctttccttacaaagatttgcttcatttgcactcttgctggtgtcgcatccaggttgcagcactcggagcgggcgaggcagggggctgaggagcggagccacaagctgcagcaggagctgggcgggaggatcggcgccctgcagctgcagctctcccagctgcacgagcaatgctcaagcctggagaaagaattgaaatcagaaaaagagcaaagacaggctcttcagcgcgaattacagcacgagaaagacacttcctctctactcaggatggagctgcaacaagtggaaggactgaaaaaggagttgcgggagcttcaggacgagaaggcagagctgcagaagatctgcgaggagcaggaacaagccctccaggaaatgggcctgcacctcagccagtccaagctgaagatggaagatataaaagaagtgaaccaggcactgaagggccacgcctggctgaaagatgacgaagcgacacactgtaggcagtgtgagaaggagttctccatttcccggagaaagcaccactgccggaactgtggccacatcttctgcaacacctgctccagcaacgagctggccctgccctcctaccccaagccggtgcgagtgtgcgacagctgccacaccctgctcctgcagcgctgctcctccacggcctcctga

SEQ ID NO: 46250 - DNA, 1173 bp, Homo Sapiens
atggggaaccgcagcaccgcggacgcggacgggctgctggctgggcgcgggccggccgcgggggcatctgcgggggcatctgcggggctggctgggcagggcgcggcggcgctggtggggggcgtgctgctcatcggcgcggtgctcgcggggaactcgctcgtgtgcgtgagcgtggccaccgagcgcgccctgcagacgcccaccaactccttcatcgtgagcctggcggccgccgacctcctcctcgctctcctggtgctgccgctcttcgtctactccgaggtccagggtggcgcgtggctgctgagcccccgcctgtgcgacgccctcatggccatggacgtcatgctgtgcaccgcctccatcttcaacctgtgcgccatcagcgtggacaggttcgtggccgtggccgtgccgctgcgctacaaccggcagggtgggagccgccggcagctgctgctcatcggcgccacgtggctgctgtccgcggcggtggcggcgcccgtactgtgcggcctcaacgacgtgcgcggccgcgaccccgccgtgtgccgcctggaggaccgcgactacgtggtctactcgtccgtgtgctccttcttcctaccctgcccgctcatgctgctgctctactgggccacgttccgcggcctgcagcgctgggaggtggcacgtcgcgccaagctgcacggccgcgcgccccgccgacccagcggccctggcccgccttcccccacgccacccgcgccccgcctcccccaggacccctgcggccccgactgtgcgccccccgcgcccggccttccccggggtccctgcggccccgactgtgcgcccgccgcgcccagcctcccccaggacccctgtggccccgactgtgcgccccccgcgcccggcctccccccggacccctgcggctccaactgtgctccccccgacgccgtcagagccgccgcgctcccaccccagactccaccgcagacccgcaggaggcggcgtgccaagatcaccggccgggagcgcaaggccatgagggtcctgccggtggtggtcggggccttcctgctgtgctggacgcccttcttcgtggtgcacatcacgcaggcgctgtgtcctgcctgctccgtgcccccgcggctggtcagcgccgtcacctggctgggctacgtc

SEQ ID NO: 46251 - DNA, 2025 bp, Homo Sapiens
attgccaaggacaagatgggaagaaaatacacatcaactcctcggcacattgaagtgtttcctccattcagacttcttccagagaaaatgacactgattccaatgaatatgatgcaggtaatgtctgaaggtggcccccagccccaatccatcgttcacttctccatcagtaatcagaccgtggctgttgttaataggagggggcaagttacagggaagattgttggcacagctgtggttcatggcaccatccagacagtaaatgaagatactggcaaagtcattgtgttttctcaggatgaagtacagattgaagttgttcagctaagggctgttaggatccttgcagctgcaactcggctcatcacagctaccaagatgccagtttatgtcatgggagtaaccagtacccagacccctttctccttcagcaatgctaatcctgggctcacattccactggtctatgagcaaaagggatgtattggatctagtgcccaggcattcagaggtttttctacagctcccagtagagcataactttgccatggttgtccatacaaaagcagcaggcaggaccagtatcaaggtcactgttcactgcatgaacagttcctctgggcagtttgaggggaatttgttggaactctctgatgaagtacagatcctggtgtttgaaaaactccaactcttctatccagagtgccaaccagagcagattctgatgcctataaattctcagctcaaactccataccaacagggaaggagctgccttcgtgagttctcgtgttctcaagtgtttccctaattcatccgtcattgaggaggatggtgaagggctcctgaaagctggttccattgcaggtactgctgtattggaagtcacttctatagaaccttttggagtcaaccaaacaaccataactggggtccaggtagcaccggtgacatacctgcgagtgagcagccaacccaagctatacacagcccaaggaaggaccctgtcagcatttcccttgggcatgtctcttaccttcactgttcagttttataatagtatcggagagaaattccacacacacaatacccagctttatctggctctgaacagagatgacttgctgcatattggaccagggaataagaactatacttacatggcccaggctgtgaacagagggctgacacttgtggggctttgggaccggagacatccaggcatggcagattatattcctgttgctgtagagcatgccattgagccagacaccaagcttacctttgttggagatatcatctgcttcagtactcaccttgtcagccagcatggtgaacctgggatatggatgatttctgccaacaatattctacagacagacattgtcactggagtaggagtggccaggagtccggggactgcaatgatttttcatgacatcccaggagtagtgaaaacatatcgagaggtggtggtcaatgcatcatcaagattaatgctcagttatgacctcaagacttatctcaccaataccctcaattcaactgtattcaagctcttcatcaccactggcagaaatggtgtcaatcttaaaggattctgtaccccaaaccaggccttggccattacaaaagtacttcttccagcgaccctcatgctgtgccatgtacagttcagtaatactttgctagacattccagcaagtaaagtctttcaggtccattcagatttcagtatggagaaagatcactgtgaagattccgccatcctcaagcggttcactggctcttaccagatcctgctcttgaccctctttgcagtgctggcatcaacagcttccatcttcctagcatacaatgccttcctaaacaagatacaaacagttccagttgtgtatgtaccaactctaggaacaccacagccaggtttttttaactccacaagttctccccctcacttcatgagtctacaacctccattggcccaaagtcggctgcaacattggttatggagtataaggcactaa

SEQ ID NO: 46252 - DNA, 3798 bp, Homo Sapiens
gctggtagagagtgccggagaggcctggaggagacttcggacctgctttcacaactgcagagcctcctggggccacaccttgacaaaggtgactttggtcagctctccggtccagaccccccaggtgaggtgggcgaaagagcacctgatggagcctcccagtcctctcatgagcctatggaagatgctgctcccattctctccctgttagcttccccggatcctcaagccaagcatcctcaggatctggcctccaccccatcaccaggcccaatgaccacctcagtctcctccctaagtgcctcccagccaccagaaccttcccttcccctagaacacccctcacccgagccacctgcacttttccctcacccaccacacacccctgatcctctggcctgctctctgcctcctccaaaaggcttcactgctcctcccctgcgggactccacactgataactccatctcactgtgactcagtggcacttccactgggcaccgtccctcaaagcttgtctccacatgaggatttggtggcttctgtcccagccatctcaggccttggtggctcaaacagtcatgtttctgcctcctcccggtggcaggagactgccagaacctcgtgcgcctttaactcatcagtccagcaagatcatctttcccgccacccaccagagacctgtcagatggaagctggtagcctgtttttgctcagctctgatggccagaatgtcgtggggatacaagtcacagaaacagccaaggtcaacatttgggaagaaaaagaaaatgttggatcatttacaaatcgaatgaccccagaaaagcacttaaattctttgcggaatttggctaaatcattggatgctgagcaggacaccacaaacccaaaacccttctggaacatgggagagaactcgaaacagctgcccggacctcagaagctctcagatcctaggctctggcaggaaagtttttggaagaattatagccagcttttctggggcctcccctctctgcacagcgagtccctggtggctaacgcctgggtaactgacaggtcttatactttacagtctcctcctttcttgttcaatgaaatgtccaatgtctgcccaattcaaagggagactacaatgtccccactgcttttccaggcccagcccctgtcccatctggggcccgagtgccaaccctttatttcatccacaccccaattccggcccacacctatggctcaggccgaggctcaggcccatcttcaatcttctttcccagtcctatctcctgcttttccatccctgattcagaacactggagtagcttgccctgcatcgcagaataaagtgcaagctctctccctacctgaaactcagcaccctgaatggcctttgttgaggagacaactagaaggtaggttggctttaccctctagggtccaaaaatctcaggacgtctttagtgtctccactcctaaccttccccaggaaagtttgacatccattctgcctgagaactttccagtcagtcctgaactccggagacaactggagcaacacataaaaaagtggatcatccaacactggggcaacctgggaaggatccaagagtctctggatctgatgcagcttcaggacgaatcaccagggacaagtcaggccaagggcaaacccagtccctggcagtcctccatgtccacaggtgaaagcagcaaggaggcacagaaggtgaagttccagctagagagggacccgtgcccacatctggggcaaattctgggtgagaccccacaaaatctatccagggatatgaaaagcttcccacggaaggttctgggggtgacttctgaggagttggaaaggaacttgaggaagcccttgaggagtgactcgggaagtgatttattaagatgcacagagaggactcatatagaaaacatcctgaaagcccacatgggcaggaacttgggccagaccaacgagggcttgatccccgtgcgtgtgcgtcgatcctggcttgctgtcaaccaggctcttcccgtgtccaacacccatgtgaaaaccagcaatctagcagccccgaaaagtgggaaagcctgtgtgaacacagcccaggtgctttccttcctcgagccgtgtactcagcaggggttgggagcccatattgtgaggttttgggccaaacacaggtggggtctacccctcagggtcctcaagcccattcagtgctttaaactggaaaaggtttcatccttgtcccttacacagcttgctggtccctcctcagccacctgtgaatctggggctggctcagaagttgaggtggacatgttccttagaaagccaccaatggcaagtctgagaaagcaggtgctgaccaaagcatctgatcacatgccagagagtcttctggcctcctcacctgcatggaagcagttccagagggcaccgcgaggaatcccatcttggaatgatcatgaacccttgaagcctcctccagctggacaggagggcaggtggccatctaagcccctcacgtacagcctcacaggcagcacccagcagagcaggagcttaggagcccaatcttcaaaggctggagagacaagggaggcagtgccacaatgcagagtccccttggaaacctgtatgctggcaaacctccaagccacaagtgaggatgtgcatggtttcgaggctccagggaccagcaaaagctctctacaccctagagtgtctgtctcccaagatccaagaaagctgtgtcttatggaggaggttgttagtgaatttgagcctggaatggccacaaagtcagagacccagcctcaagtttgtgccgctgttgtgctccttccagatgggcaagcatctgttgtgccccacgcttcagagaatttggtttctcaagtgccccagggccatctccagagcatgcctactgggaacatgcgggcttcccaggagctacatgacctcatggcagccagaaggagcaaactggtgcacgaggagcccagaaaaccaaactgtcaaggctcatgcaagagccaaaggccaatgtttccccctattcacaagagtgagaagtttaggaagcccaacttagaaaaacatgaagaaaggcttgaaggattgaggactcctcaacttaccccagtcaggaaaacagaagacacccatcaggatgaaggcgtccagctactgccatcaaagaaacagcctccttcagtaagcccctttggagaaaacatcaagcaaatttttcagtggattttttcaaagaaaaaaagcaagccagcaccagtcactgctgagagccaaaaaacagtaaaaaacagatcatgtgtgtacagcagcagtgctgaagctcagggtctcatgacggcagttggacaaatgctggacgagaaaatgtcactttgccatgcgcgccatgcctcgaaggtaaatcagcacaaacagaagtttcaagccccagtctgtgggtttccctgcaaccacaggcacctcttctactcagaacacggcagaatactgagctatgcagccagcagtcaacaagccactctcaagagccagggttgtcccaacagagacagacaaatcagaaatcaacagcccttgaaaagtgtgcggtgcaacaatgagcaatggggcctgcgacatccccaaatcttgcaccccaagaaagctgtatccccagtcagtccccctcagcactggccgaagacatccggtgcctctagccaccatcaccactgtccaaggcactgtcttctttgggaaggtatctga

SEQ ID NO: 46253 - DNA, 3130 bp, Homo Sapiens
gggcttgctgtggccctgtcaggaagagtagagctctggtccagctccgcgcagggagggaggctgtcaccatgccggcctgctgcagctgcagtgatgttttccagtatgagacgaacaaagtcactcggatccagagcatgaattatggcaccattaagtggttcttccacgtgatcatcttttcctacgtttgctttgctctggtgagtgacaagctgtaccagcggaaagagcctgtcatcagttctgtgcacaccaaggtgaaggggatagcagaggtgaaagaggagatcgtggagaatggagtgaagaagttggtgcacagtgtctttgacaccgcagactacaccttccctttgcaggggaactctttcttcgtgatgacaaactttctcaaaacagaaggccaagagcagcggttgtgtcccgagtatcccacccgcaggacgctctgttcctctgaccgaggttgtaaaaagggatggatggacccgcagagcaaaggaattcagaccggaaggtgtgtagtgtatgaagggaaccagaagacctgtgaagtctctgcctggtgccccatcgaggcagtggaagaggccccccggcctgctctcttgaacagtgccgaaaacttcactgtgctcatcaagaacaatatcgacttccccggccacaactacaccacgagaaacatcctgccaggtttaaacatcacttgtaccttccacaagactcagaatccacagtgtcccattttccgactaggagacatcttccgagaaacaggcgataatttttcagatgtggcaattcagggcggaataatgggcattgagatctactgggactgcaacctagaccgttggttccatcactgccgtcccaaatacagtttccgtcgccttgacgacaagaccaccaacgtgtccttgtaccctggctacaacttcagatacgccaagtactacaaggaaaacaatgttgagaaacggactctgataaaagtcttcgggatccgttttgacatcctggtttttggcaccggaggaaaatttgacattatccagctggttgtgtacatcggctcaaccctctcctacttcggtctggccgctgtgttcatcgacttcctcatcgacacttactccagtaactgctgtcgctcccatatttatccctggtgcaagtgctgtcagccctgtgtggtcaacgaatactactacaggaagaagtgcgagtccattgtggagccaaagccgacattaaagtatgtgtcctttgtggatgaatcccacattaggatggtgaaccagcagctactagggagaagtctgcaagatgtcaagggccaagaagtcccaagacctgcgatggacttcacagatttgtccaggctgcccctggccctccatgacacacccccgattcctggacaaccagaggagatacagctgcttagaaaggaggcgactcctagatccagggatagccccgtctggtgccagtgtggaagctgcctcccatctcaactccctgagagccacaggtgcctggaggagctgtgctgccggaaaaagccgggggcctgcatcaccacctcagagctgttcaggaagctggtcctgtccagacacgtcctgcagttcctcctgctctaccaggagcccttgctggcgctggatgtggattccaccaacagccggctgcggcactgtgcctacaggtgctacgccacctggcgcttcggctcccaggacatggctgactttgccaacctgcccagctgctgccgctggaggatccggaaagagtttccgaagagtgaagggcagtacagtggcttcaagagtccttactgaagccaggcaccgtggctcacgtctgtaatcccagcgctttgggaggccgaggcaggcagatcacctgaggtcgggagttggagacccgcctggctaacaaggcgaaatcctgtctgtactaaaaatacaaaaatcagccagacatggtggcatgcacctgcaatcccagctactcgggaggctgaggcacaagaatcacttgaacccgggaggcagaggttgtagtgagcccagattgtgccactgctctccagcctgggaggcacagcaaactgtcccccaaaaaaaaaaaagagtccttaccaatagcaggggctgcagtagccatgttaacatgacatttaccagcaacttgaacttcacctgcaaagctctgtggccacattttcagccaaagggaaatatgctttcatcttctgttgctctctgtgtctgagagcaaagtgacctggttaaacaaaccagaatccctctacatggactcagagaaaagagattgagatgtaagtctcaactctgtccccaggaagttgtgtgaccctaggcctctcacctctgtgcctctgtctccttgttgcccaactactatctcagagatattgtgaggacaaattgagacagtgcacatgaactgtcttttaatgtgtaaagatctacatgaatgcaaaacatttcattatgaggtcagactaggataatgtccaactaaaaacaaacccttttcatcctggctggagaatgtggagaactaaaggtggccacaaattctttgacactcaagtcccccaagacctaagggttttatctcctccccttgaatatgggtggctctgattgctttatccaaaagtggaagtgacattgtgtcagtttcagatcctgatcttaagaggctgacagcttctacttgctgtcccttggaactcttgctatcggggaagccagacgccatttaaaagtctgcctatcctggccaggtgtggtggctcacacctgtaatcccagcactttgggagaccaaggcgggcggatcacttaaagtcaggagtccaagaccagactcgccaacatggtgaaaccgtatctctaataaaaatacaaaaattagctgggcatggtgcgggcacctgtagtcctagctatcaagaggctgagacaggagaaacacttgaacctgggaggtggaggttgcattgagctgagatcgtgccactgcactccaggctgggtgacagagcgagactccatctcaaaaaaaaaaaaaagaaaaa

SEQ ID NO: 46254 - DNA, 3771 bp, Homo Sapiens
gatattttccaatttgtcactggatgagcgttgcctttccgcatcattggtttgcaagtactggcgtgacctttgtttagacttccagttttggaagcagctggatcttagtagtcgtcagcaggtcactgatgaattgttggaaaaaattgcatcaagaagtcagaatataattgaaatcaacatttctgattgtcgcagtatgtctgataatggcgtatgtgttttagcatttaaatgtcctggacttcttaggtatacagcctacaggtgtaaacagctttctgacacctctattattgcggttgcctctcactgtcctttacttcagaaagtgcatgtaggcaaccaggacaaactcactgatgaaggactcaagcagctgggctcaaaatgcagagaactcaaagatattcatttcggccagtgttacaagatctcagatgaaggcatgatcgtcatagctaagggctgtctgaaattacaaaggatatacatgcaggaaaacaaattagtgacagatcagtcagtgaaagcatttgctgaacactgtcctgagcttcaatatgtaggcttcatgggttgttcagtcacttctaaaggagtcattcacctaaccaagctaagaaacctttccagcttggacctacgtcatatcactgaactggataatgaaaccgtgatggaaattgtcaagaggtgcaaaaatcttagctctctcaatctctgtctgaactggatcataaatgacaggtgtgtggaggtcattgcaaaggaaggacaaaacctgaaagagctatatttggtgtcctgtaaaatcacagattatgcactgatagccattgggcgatacagcatgacaatagagactgtggatgtcggatggtgtaaagaaatcacagaccaaggagccaccctgattgcacagagcagcaagtctctgagatatttggggctgatgagatgtgataaagtaagagttgactatcaagttgtttgctttctacatatcagtatagttaatagcttgatgtcatatcctctctccttctctatctccacccccgtgtattatatattatatatacattttatatgtatatatgcaattatagctatgcattgtttgcctgcttttgtaaactaatctgagattatctttgtatttccccacttaataatgaattttgtgcttaagtagaaagaaaaagtaatcatatacatagtcaactagagtttggcatcctattcataagtccatggaccaaaatgtaaaagattacatgacaaactgcaatttgcagggtctaaccgtaaaattgtattctgggtttcaagtttccagcaacagtaaaggtggaaagaacagtgccaaattggtttttcacaagtgtgtaattttggtactgaacatctatgtattctggccattcgggaccaacaaagggccagtaagggggtatgtgggaatttgcatctccccatacatcagatgccactcccagcacatgataagaagtggttccagaggtcctggtggaaggcctgtagaaccagccagggatgtgagcatgagtttaggaaatggtgtagcatttaacgtgggaccctttgaagactgagaaaacagataataaaaatctatactgacacctgtaatcccagcacattgggaggccaaggcagaaggatcacttgagcccaggaatttgagaccagcctggacaacatgggaaaaccctgtctctatccccctctcccccaacaaaaaaaaattagccaggcataatggcacacacctgtagtcccagctactcgggaagctaaggtgggaggatcacctgagctcaagaggccgaggttgcagtgagccgtgattgtgccgcaaccacctcagcctggatgacggagcacgactgtgtcccaaacaaacaaaaaaaacctatactggacaccaggcactccacaggtgttttcttctttgtttattccatgttttacctataacaagtctaagaaatagttatttgcattgtgaaggggagaaaatggaggctcagaaagaccagtcagtggccccaggatactctggcaagacttcatgccgggtctttggagtctgtatccagtgctgctggcacaacccagggggcagtctgtggccacggggactgcttcccttggaaaaggtccagttcagatacttgctcagaaagtgccgccatcttgtactaatttacacatgtgtgctacttttgtaaatggtgattaggaacaaatctagcaaaataatgtgaaactaaatagacacgccattcaaagggcatgcatcttctaaatgtagcaaatgtgggggcaaatgaagtatggcccaaagctcttgtgtcctttgtgattttttgttaattggctaattcttttctccaaacactttagaatcccaacttatacgagacctttgccagctagttatgtttagagaaatgttattatatattctcagcccagcccagaagcgacttactttgtaactaagcaacagcactgagatccggggcttgcgagtctcccacaaatctttccactaaccaacctaatgccgctgctaaccctgccactttaaaatgacttcttttaagacaagttaaagggtccaccataggcatagtcctctagaaacaggaatcaatgacagcagaactcctcagcttccagcagaaggaactgccacatgaatgctaactaaagctaccaaaatgtacacattcatacatatgtgtccgcagccattctcagaaattgtcatatttctaacctgtaatctttagatggttaagatcagctccatcttcggagatacactgtagaagttgtatgttacagttactacaggagaatgttattccagacatatttgctgaccagcattttgctgatttttagttaagaaatgggttattttctacccaaatgcaaattagtccaaaattaaatagagacagtattcagattagctgtatccctgagggttttagcccttttcctgggctgcctctgaatcctttctctaaccagagagccactctgagaacccattggctccagcacgacgccgtctggtcagagcctgctgcagtgcagcccagggagatgctggacccagccttgctgtctggcttcctcagacttaaagcagctcagagccaaacacgagaggctctgtgaggatggaagacagttccaaaccacacacaaagcacaagtaaagccttgcacagaaaagcctgcttgttggtttagttggatggaaatctaaagtagctattcagttttcagattttgtatcatgccatccatctccagattttaagttaccatcaagattcaaaggaagatatgagtaacaaagaaaagaaattagtagcaacggtatggtctgcggagagccagagttcaggttcagatctgggctttgcacttactagttgtgtcaccgcgggcagttactaacctctcagtgcctgttccctcgtttgcaaaatgaggatgatactagtacctatcttgtagaattgtgagcatgtgaatgagttaacatacataaagcacttagaataatgtctattatatataaaatgctctgttactgattagtcttatcatccatatcattatattaacctgtgttgtgatactggaattttccaatgagaaaaaaaaattatattgcctactatcccattttgaaagacaattaaaaagaaaggaaaa

SEQ ID NO: 46255 - DNA, 792 bp, Homo Sapiens
atgaggaagctcctcagttttgggagacgcctgggccaggcgctcctgagctccatggaccaagagtatgcgggtcgggggtaccacattcgggactgggaactgcggaagatccacagggcggccatcaagggcgacgccgcagaggtggagcactgcctgacgcgcaggttccgggacttggacgtccgcgacagaaaagacaggactgttctacatttggcctgtgcccatggccgtgtgcaagtggtcactctcttgctggacagaaaatgccagatcaacatctgtgacagactaaacaggacacctttaatgaaggctgtacactgccaggaagaggcttgtgccattattctcctgaaacgtggcgccaatccaaacattaaggatatctacggcaacactgctctccattatgccgtgtataatgaggggacttcactggcagaaagactgctttcccaccatgcaaatattgaagcactaaacaaggagggaaacactccacttttgtttgctataaattccaggagacagcatatggtggaatttttattgaagaaccaggcaaatatacatgccgttgacaatttcaaaagaacagccctcatacttgcagtacagcataacttgtcaagtatcgtcaccctcctgcttcaacaaaatatacatatctcttctcaagacatgtttggccaaactgccgaggattatgctttttgttgtgatttgagaagcatccaacaacaaattttggaacataaaaataagatgcttaaaaatcatctt

SEQ ID NO: 46256 - DNA, 2472 bp, Homo Sapiens
cttctggccagggaacgtggaaggcgcaccgacagggatccggccagggagggcgagtgaaagaaggaaatcagaaaggaagggagttaacaaaataataaaaacagcctgagccacggctggagagaccgagacccggcgcaagagagcgcagccttagtaggagaggaacgcgagacgcggcagagcgcgttcagcactgacttttgctgctgcttctgcttttttttttcttagaaacaagaaggcgccagcggcagcctcacacgcgagcgccacgcgaggctcccgaagccaacccgcgaagggaggaggggagggaggaggaggcggcgtgcagggaggagaaaaagcattttcactttttttgctcccactctaagaagtctcccggggattttgtatatattttttaacttccgtcagggctcccgcttcatatttccttttctttccctctctgttcctgcacccaagttctctctgtgtccccctcgcgggccccgcacctcgcgtcccggatcgctctgattccgcgactccttggccgccgctgcgcatggaaagctctgccaagatggagagcggcggcgccggccagcagccccagccgcagccccagcagcccttcctgccgcccgcagcctgtttctttgccacggccgcagccgcggcggccgcagccgccgcagcggcagcgcagagcgcgcagcagcagcagcagcagcagcagcagcagcagcaggcgccgcagctgagaccggcggccgacggccagccctcagggggcggtcacaagtcagcgcccaagcaagtcaagcgacagcgctcgtcttcgcccgaactgatgcgctgcaaacgccggctcaacttcagcggctttggctacagcctgccgcagcagcagccggccgccgtggcgcgccgcaacgagcgcgagcgcaaccgcgtcaagttggtcaacctgggctttgccacccttcgggagcacgtccccaacggcgcggccaacaagaagatgagtaaggtggagacactgcgctcggcggtcgagtacatccgcgcgctgcagcagctgctggacgagcatgacgcggtgagcgccgccttccaggcaggcgtcctgtcgcccaccatctcccccaactactccaacgacttgaactccatggccggctcgccggtctcatcctactcgtcggacgagggctcttacgacccgctcagccccgaggagcaggagcttctcgacttcaccaactggttctgaggggctcggcctggtcaggccctggtgcgaatggactttggaagcagggtgatcgcacaacctgcatctttagtgctttcttgtcagtggcgttgggagggggagaaaaggaaaagaaaaaaaaaagaagaagaagaagaaaagagaagaagaaaaaaacgaaaacagtcaaccaaccccatcgccaactaagcgaggcatgcctgagagacatggctttcagaaaacgggaagcgctcagaacagtatctttgcactccaatcattcacggagatatgaagagcaactgggacctgagtcaatgcgcaaaatgcagcttgtgtgcaaaagcagtgggctcctggcagaagggagcagcacacgcgttatagtaactcccatcacctctaacacgcacagctgaaagttcttgctcgggtcccttcacctcctcgccctttcttaaagtgcagttcttagccctctagaaacgagttggtgtctttcgtctcagtagcccccaccccaataagctgtagacattggtttacagtgaaactatgctattctcagccctttgaaactctgcttctcctccagggcccgattcccaaaccccatggcttccctcacactgtcttttctaccattttcattatagaatgcttccaatcttttgtgaattttttattataaaaaatctatttgtatctatcctaaccagttcggggatatattaagatatttttgtacataagagagaaagagagagaaaaatttatagaagttttgtacaaatggtttaaaatgtgtatatcttgatactttaacatgtaatgctattacctctgcatattttagatgtgtagttcaccttacaactgcaattttccctatgtggttttgtaaagaactctcctcataggtgagatcaagaggccaccagttgtacttcagcaccaatgtgtcttactttatagaaatgttgttaatgtattaatgatgttattaaatactgttcaagaagaacaaagtttatgcagctactgtccaaactcaaagtggcagccagttggttttgataggttgccttttggagatttctattactgcctttttttttcttactgttttattacaaacttacaaaaatatgtataaccctgttttatacaaactagtttcgtaataaaactttttcctttttttaaaatgaaaataa

SEQ ID NO: 46257 - DNA, 1926 bp, Homo Sapiens
atggccgaggcccccccgcgccgcctcggcctgggtcccccgcccggggacgccccccgcgcggagctagtggcgctcacggccgtgcagagcgaacagggcgaggcgggcgggggcggctccccgcgccgcctcggcctcctgggcagccccctgccgccgggcgcgcccctccctgggccgggctccggctcgggctccgcctgcggccagcgctcctcggccgcgcacaagcgctaccgccgcctgcagaactgggtctacaacgtgctggagcggccccgcggctgggccttcgtctaccacgtcttcatatttttgctggtcttcagctgcctggtgctgtctgtgctgtccactatccaggagcaccaggaacttgccaacgagtgtctcctcatcttggaattcgtgatgatcgtggttttcggcttggagtacatcgtccgggtctggtccgccggatgctgctgccgctaccgaggatggcagggtcgcttccgctttgccagaaagcccttctgtgtcatcgacttcatcgtgttcgtggcctcggtggccgtcatcgccgcgggtacccagggcaacatcttcgccacgtccgcgctgcgcagcatgcgcttcctgcagatcctgcgcatggtgcgcatggaccgccgcggcggcacctggaagctgctgggctcagtggtctacgcgcatagcaaggagctgatcaccgcctggtacatcgggttcctggtgctcatcttcgcctccttcctggtctacctggctgagaaggacgccaactccgacttctcctcctacgccgactcgctctggtgggggacgattacattgacaaccatcggctatggtgacaagacaccgcacacatggctgggcagggtcctggctgctggcttcgccttactgggcatctctttctttgccctgcctgccggcatcctaggctccggctttgccctgaaggtccaggagcagcaccggcagaagcacttcgagaagcggaggatgccggcagccaacctcatccaggctgcctggcgcctgtactccaccgatatgagccgggcctacctgacagccacctggtactactatgacagtatcctcccatccttcagcagccggatgggcatcaaagaccgcatccgcatgggcagctcccagcggcggacgggtccttccaagcagcatctggcacctccaacaatgcccacctccccaagcagcgagcaggtgggtgaggccaccagccccaccaaggtgcaaaagagctggagcttcaatgaccgcacccgcttccgggcatctctgagactcaaaccccgcacctctgctgaggatgccccctcagaggaagtagcagaggagaagagctaccagtgtgagctcacggtggacgacatcatgcctgctgtgaagacagtcatccgctccatcaggattctcaagttcctggtggccaaaaggaaattcaaggagacactgcgaccgtacgacgtgaaggacgtcattgagcagtactcagcaggccacctggacatgctgggccggatcaagagcctgcaaactcgggtggaccaaattgtgggtcgggggcccggggacaggaaggcccgggagaagggcgacaaggggccctccgacgcggaggtggtggatgaaatcagcatgatgggacgcgtggtcaaggtggagaagcaggtgcagtccatcgagcacaagctggacctgctgttgggcttctattcgcgctgcctgcgctctggcacctcggccagcctgggcgccgtgcaagtgccgctgttcgaccccgacatcacctccgactaccacagccctgtggaccacgaggacatctccgtctccgcacagacgctcagcatctcccgctcggtcagcaccaacatggactga

SEQ ID NO: 46258 - DNA, 597 bp, Homo Sapiens
atggtctggttctgcaacagtgccgactgccaattttcagtcttcgcccttaccaccataggatggatcctctcctctacgtccacgggcctcgtggagtggcgaatatggtacatgaaagacacctcgctctacccccctggaatcgcctgcgtgggaatatttagagtctgcatttaccggcgtcgcaccaacagcaccacaaccaaattttgttaccgatacagctaccaggacacctttctcccttttgaaatttccatggctcaacgcttcctactgactgccagcattttcggattcttcgggagagcctttaacatgtttgcacttagaaacatgtccatgagaatgtttgaggaggacacctacaattcattcgttgtttcaggaattctcaacattgctgctggtgtctttaacttaattgctgtgctccagaactacgatgccgtcataaactcacaggggatcaccttcctgccatctctccaaatgcccttcaagccagatgtgcaggaagttggcactgccattcaagtggcagggataggtgtcttgccgatgctgttaactgggatgttttctctgttttac

SEQ ID NO: 46259 - DNA, 804 bp, Homo Sapiens
gagtctcctaaagagcccaaacagctaaggaagctcttcattggagggttgagctttgaaacaaccaatgagagcctgaggagccattttgagcaatggggaacgctcacggactgtgtggtaatgagagatccaaacaccaagcgctccagggcctgtgggtttgtcatgtgtgccactgtggaggaggtggatgcagccatgaatgcaaggccacacaaggtagatggaagagttgtagaacaagcaaagagagttgtctcaagagaaaattctcaaagaccaggtgcccagttaactgtgaaaaatatatttgttggtggcattaaagaagacactgaagaacatcacctaagggatcattttgaacagtatggaaaagaagtgattgaaatcatgactgaccgaggcattggcaagaaaaggggctttgcctttgtaacgtttgacaacggtgactccatggataagactgtcattcagaaagcatacttgaatggccacagctgtgaagctaggaaagccctgtcaaagcaagagggttctggaaactttggtggtggtcatggaggtggtttcagcgggaatgacaacttgggtcatggaggaaacttccactacagtgattttgacaattacaacaatcagtctccaaattttggacccctgaagggaggaaactttggaggcagaagctctgtcccctgtggtggtggaggccaatactttgccaaaccacaaaaccaaggtggctatggtggttccagtagcagcagtagctatggcagtggcagaagattttaa

SEQ ID NO: 46260 - DNA, 1583 bp, Homo Sapiens
ccaccgccactgaccgaccgttcgaccggcaaacatggttgaagcggatcgcccggggaagctgttcattgggggcctcaacctcgaaaccgacgagaaagccctcgaagccgagtttggcaagtatggccgcatcgtcgaggtgctcctgatgaaagaccgagaaaccaacaagtcgaggggcttcgcgttcgtcacctttgaaagccccgcagacgccaaggccgccgccagagacatgaacggcaagtccctggatggtaaggccatcaaggtggcccaggccaccaaaccggcgttcgagagcagccggcggggcccgccgcctccccgcagccgcggtcgcccgaggttcctgcgcggaacccgcgggggtggcggcggcccgcggcgttccccatcccggggcgggcccgatgatgacggcggctacacggcggatttcgacctgcggccctccagggccccgatgcccatgaagcgtgggccgccgccgcgcagggtcggcccaccccccaagagggccgcgccgtcgggcccggctcgcagcagcggcggtggaatgcgcgggagggccctggccgtgcgggggcgagacggctactcaggcccaccgcgccgggagccgctgcccccgcgccgcgacccctacctgggcccgcgggatgagggctactcgtccagagacggctactcgagccgagactaccgcgaaccccggggttttgccccctcgcccggagagtacacccaccgcgattacggccactccagtgtccgggacgactgtcccttgagaggctacagcgaccgagacggctacggaggtcgcgaccgtgactacggggatcatctgagcagaggctcccatcgagagccctttgagagctacggagagctgcgcggcgccgccccaggacgggggacaccgccatcttacggaggaggaggccgctacgaggagtaccggggctactcacccgatgcctacagcggcggccgcgacagttacagcagcagttatggccggagcgaccgctactcgaggggccgacaccgggtgggcagaccagatcgtgggctctctctgtccatggaaaggggctgccctccccagcgtgattcttacagccggtcaggctgcagggtgcccaggggcggaggccgtctaggaggccgcttggagagaggaggaggccggagcagatactaagcaggaacagacttgggaccaaaaatcccttttcaacgaaactaacaaaaagaagaacctgttgtatggtaactacccaaggactagtacaaggaagagttgtttttaccttttaagaatttcctgttaagatcgtctccatttttatgcttttgggagaaaaaacttaaaattcgtttagtttagttttggaattgttaacgtttctttcaacaagctcctgttaaaagtatatgaacctgagtactagtcttcttacatttacaagtagaaattcgattaatggcttcttcccttgtaaattttcttgataaatgaggcaaacagttctaagatctttgataaacatctgctcacctaaaatggaaaa

SEQ ID NO: 46261 - DNA, 1830 bp, Homo Sapiens
gaggcacagataaagataagttttactgtcatgctgcttttaacataacagagcaacatcacctaggaaaaaagtttgtaggaggatttttaatccatatatttgtcttatggctagataaagatttctctgaaaaaaagaagcatgtcaggaatctctgggtgcccctttttcctctggggacttctagcattgttgggcttggctttggttatatcactgatcttcaatatttcccactatgtggaaaagcaacgacaagataaaatgtacagctactccagtgaccacaccagggttgatgagtattatattgaagacacaccaatttatggtaacttagatgatatgatttcagaaccaatggatgaaaattgctatgaacaaatgaaagcccgaccagagaaatctgtaaataagatgcaggaagccaccccatctgcacaggcaaccaatgaaacacagatgtgctacgcctcacttgatcacagcgttaaggggaagcgtagaaagcccaggaaacagaatactcatttctcagacaaggatggagatgagcaactacatgcaatagatgccagcgtttctaagaccaccttagtagacagtttctccccagaaagccaggcagtagaggaaattcatgatgatcccatcagactgtttggattgatccgtgctaagagagaacctataaactagctggaccatgatctagttcaatgatttggctcctattgaagatggcttctaagaaaacaagatgcacagaggacacagaaggacttggcagcagggtgatgacctgatcatttgttgatgggatggtggcttacctcttattcacagcttacacttatgcatgccaaatgtaaggccatgaaaatcagtatttcaaataacttaaaaaatgctttactactaaaatgtaaaaaattaatgtgctcacctcggcagcacatatactaaaaattaataagacccagcttgaaaattgagcctgataacaagattacaaattcacaatacctaatacttagggaaatataaaaatttaagcatgaatgtgttctggaacacgttagaagaaaaataaaagccaatgagtttttttttaattctcctttctcaccaatgggcaatagcccataattgaaataaatttctgattgaaaggtataggaaacattaaaatgcattactaagagaagtaatataattttcttacaaagtatttttcccaaagatagctttactatttcaaaaattgtcaaattaatgcatgctccttacaacaaacaaatatcaaaaagagtttaggaattctactagccagagatagtcacttggagaaactttctatatatccttctaaatatttttctgggcatgcttatgtatgtacatcagttgtttctttttattttgaaccaaaaatgtggtttcttttgtacacattacttaaactttctttccagtcaacaatatattgtggatttattttcactgttatatttaactatatataaatacgcatatattgtaattttaatgtctgcttagcaccccactgataaccaaatcacagtttatttaaataattttaatgacttttcaaaaacaatttattgatgcaaaaagcaaggttgagatgacaatgtttctttcaataattaaaaaatactgcttcactgtcttctctctgtttcatcagaaacacatactataatacttgtctctgtccttaagtgtgatacacgctatttttctgattgttaagactttccttattactggttctaatttgattataatatgccaaggtatggt

SEQ ID NO: 46262 - DNA, 1386 bp, Homo Sapiens
ggcctcacctacaacgacttcctgattctcccaggattcataggcttcataactgatgaggtggacctgacctcagccctgacccggaagatcacgctgaagactccgctgacctcctcctccatgggcactgtgacagatgccgacatggccatcgtgatggctctgatgggagggctcataggaggtattagtttcattcaccacaactgcaccccagagtttcaggccaataaggtgcagaaggtcaagaagtttgaacagggcttcatcacggaccccgtggtgctgagcccctcgcacaccgtgggtgatgtactggaggccaagatgcggcatggcttctctggcatccccatcactgagacgggcaccatcggcagcaagctggtgggtatcatcgcctcccgagacatcgactttcttgctgagaaggacaccatcctcctcagtgagatgatgacgccaaggaccgagctggtggtggctccagcaggcgtgattgaaagagcaaatgagatcctgcagcgtagcaagaaagggaagctgcctatcgtcaatgatcacaatgagctggtggccatcatcacccgcaccgacctgaagaagaacagactacctctggcctccaaggatttccacaagcagctgctgtgcggggcagttgtgggcacccgtgaagatgacaaattctgcctggacctgctcactcaggcgggcgtcgatgtcatagtcttggactcgtcccaagggaactcggtgtatcagatcgccacggtgcattacatcaaacagaagtacctccacctccaggtgattgcggggaacgtggtgacagcagcccagcgtggcatgggctgcggctccatctgcatcaccggggaagtgatggcctgtggtcagacccacggcactgctgtgtacaaggtggccgagtatgtctggcgctttggtgtgcccgtcatagccgatggcagcatccagaccgtggggtacatggtcaaggccctggcccttggagcctccacagtgctggcccttggagcctccacagtgatgacgggctccttgctggccgctaccacggaggcctctggcgagtacttcttctcagacagggtgtggctcaggaagtaccggggcatgggctcgctggatgccatggagaagagcagcagcacctacttcagcgagggggataaggtgaagatcacacagggtatctcgggctccatccaggacaaagggtccattcagaagtttgtgccctacctcatagcgggcatccagcatggctaccaggatatcggggtccacagcctgtctgtctttgggtccatgatgtactcaggagagctcaagtttgagaagcggaccatgttggct

SEQ ID NO: 46263 - DNA, 623 bp, Homo Sapiens
gggctgtagagcgactatgggcgcacgccgggtatccgcgccgcagccaggctcggagcgcgcggctggaggggcgcgggcggcgcgcgctccagagatgccttcctgcgaggctccgtcagcgcggcccggggagatcgcccgcaggcagcggaggcgcggcgggccgggggacgaccagggagcccctaacaaagcagctttgggagggccggaggcctctgcctccctcggcgataggtccgcgaagctgcctgtcatctcgcataggtggaggtggccaatggcgtgcacagacggagctctagttggcgcgcgcgcgcggctcggcatcggtgggattggtcggaggttgtggagaacgcggaaacggagacgctggcggtacagcctcgagcgaaacctttccctacacgaggccggagcttcctcctctcctgaagagctctagacttccccatttacaacaaaggctgggatgtatgttccttacaccttgattccatacacacgtgttcgccccgggagctgggaaggtctgcgctcccggggtgatcttgttgaaaacaaaaagaattgcccacgctgtggaagataaacctaaaccggaaaattgaaagtca

SEQ ID NO: 46264 - DNA, 657 bp, Homo Sapiens
atggttaagtatttcctgggccagagcgtgctccggagttcctgggaccaagtgttcgccgccttctggcagcggtacccgaatccctatagcaaacatgtcttgacggaagacatagtacaccgggaggtgacccctgaccagaaactgctgtcccggcgactcctgaccaagaccaacagaatgccacgctgggccaagcaactatttcctgccaatgttgctcactcggtgtacatcctggaggactctattgtggacccacagaatcagaccatgactaccttcacctggaacatcaaccacgcccggctgatggtggtggaggaacgatgtgtttactgtgtgaactctgacaacagcggctggactgaaatccgccgggaagcctgggtctcctctagcttatttggtgtctccagagctgtccaggaatttggtcttgcccagttcaaaagcaacgtgaccaagactatgaagggttttgaatatatcttgactaagctgcaaggcgaggccccttccaaaacacttgagacagccaaggaagccaaggagaaggcagaggagacggcactggcagctacagagaaggccaaggacctcgccagcaaggcggccaccaagaagcagcagcagcagcaacagtttgtgtag

SEQ ID NO: 46265 - DNA, 624 bp, Homo Sapiens
atgagtgaggcggttcgggtaccctcgcccgccactccgctggtggtggcggcgcccgcgcctgaggagaggaaagggaaggagtcagagcgcgagaagctgccgcccatcgtatcggcgggcgccggcgcgaccgcgggtttggacagaggagccaaaggccaaatttccactttcagcagttttatttcagctgttagcccgaagaaagaagctgctgaaaacagaagttcacctgcacatcttgttttccctaacatcaagaatgtgagagaaccaccaccaatttgccttgatgttagacaaaaacagcgtacatctatggatgcatcatcatccgaaatgaaggccccagtccttccagaacctattcttcctatccagcccaaaactgtgaaagactttcaggaagatgtagaaaaagttaagtcatcaggagattggaaagcagtacatgatttttatctaacaacgtttgattctttcccagaattaaatgctgcatttaagaaagatgccactgcctcatttaacaccattgaagactctgggattaatgctaaatttgtgaatgctgtgtatgataccttacttaatactgtaagtattatgacatgcaagtaa

SEQ ID NO: 46266 - DNA, 182 bp, Homo Sapiens
tgggaagaagccctaagactgctcctccgcccaccctggaagctccaggaagcagccacctccacactaattggagaccagcctcttcccaaagtagaactgggatcgtgagtagcagccacactgactccagtgtcagctccccacctccagctccaaggcctctcactctggtgcgtagg

SEQ ID NO: 46267 - DNA, 867 bp, Homo Sapiens
atggtcacggggaagtgtactccccctgcgatattgggagtaatgtcgtcctccccaaacctggatgttagcaacgagatcacagagggggtgtacacaccctgcgacattggaagtaatatgatcctctccccacctggatactgggaaagatatcacagcgcggaggatccagaactgcagccggtcctcgctttgctgtccctgtccctgtccatgtatctggtcacagtgctgaggaacctgctcagcatcccggctgtcagctctgactcccacctccacacccccacgtacttcttcctctccatcctgtgctgggctgacatcggtttcacctcggccacggttcccaagatgattgtggacatgcagtggtatagcagagtcatctctcatgcgggctgcctgacacagatgtctttcttggtcctttttgcatgtatagaaggcatgctcctgactgtaatggcctatgactgctttgtaggcatctatcgccctctgcactacccagtcatcgtgaatcctcatctctgtgtcttctttgttttggtgtcctttttccttagcctgttggattcccagctgcacagttggattgtgttacaattcaccatcatcaagaatgtggaaatctctaattttgtctgtgacccctctcaacttctcaaacttgcctcttatgacagcgtcatcaatagcatattcatatatttcgatagtacaatgtttggttttcttcctatttcagggatcctttcatcttactataaaattgtcccctccattctaaggatgtcatcgtcagatgggaagtataaaactttctccacctatggctctcacctagcatttgtttgctga

SEQ ID NO: 46268 - DNA, 741 bp, Homo Sapiens
cagagcatgcaagcggcaagatgtcctacagatgaattatctttaaccaattgtgcagttgtgaatgaaaaggatttccagtctggccagcatgtgattgtgaggacctctcccaatcacaggtacacatttacactgaagacacatccatcggtggttccagggagcattgcattcagtttacctcagagaaaatgggctgggctttctattgggcaagaaatagaagtctccttatatacatttgacaaagccaaacagtgtattggcacaatgaccatcgagattgatttcctgcagaaaaaaagcattgactccaacccttatgacaccgacaagatggcagcagaatttattcagcaattcaacaaccaggccttctcagtgggacaacagcttgtctttagcttcaatgaaaagctttttggcttactggtgaaggacattgaagccatggatcctagcatcctgaagggagagcctgcgacagggaaaaggcagaagattgaagtaggactggttgttggaaacagtcaagttgcatttgaaaaagcagaaaattcgtcacttaatcttattggcaaagctaaaaccaaggaaaatcgccaatcaattatcaatcctgactggaactttgaaaaaatgggaataggaggtctagacaaggaattttcagatattttccgacgagcatttgcttcccgagtatttcctccagagattgtggagcagatgggtaag

SEQ ID NO: 46269 - DNA, 336 bp, Homo Sapiens
attattccagggtttatgtgtcagggtggtaacttcacaagccataatggcactggtggcaagtccatctatggggagaaatttgatgaggaaaacttcatcctgaggcatagagttcctggcatcctgtccatggcaaatgctggacccaacaaaaatggttcctttatcatctacactgccaagactgaatggttgtattggttggatggcaagcatgtggtctttggcaaggtgaaagaagacatggatattgtggaggccatggagcgctttgggtccaggaacggcgggaccagcaagaagatcaccactgctgactgtggacaactctaa

SEQ ID NO: 46270 - DNA, 1196 bp, Homo Sapiens
gcggaggctcggggagtcggcgccatgaccccatcgaggcttccctggttgcttagctgggtctcggccacggcgtggagagcggcaagatcaccccttctgtgtcattctctgaggaaaacaagttcttctcaaggaggaaagtctgaacttgtcaaacagtcccttaagaagccgaagttaccagaaggtcgttttgatgcaccagaggattcccatttagagaaagaaccactggaaaaatttccagatgatgttaatccagtgaccaaagaaaaaggtggacccaggggcccagaacctacccgatatggagattgggaacgaaaaggacgctgtattgatttttaagtcgcatattctttaacttcaatattgttttctgaatatgtacatctgaattaacttatttctgattattttctttctttatatcctttatgtcgtgtagtttgtataatgtgtttaaatatatatatatatgatggctttggaagaaaatatgctgctgtaaattaggaaagggagaccagcctgaccaatatggagaaatctcgcctttactaaaaatacaaaattagccaggcgtggtggcatgcacctgtaatcccaactactctggaggctgaggcaggagaatggcttaaacccaggaggtggaggttgcggtgagctgaggtcgcgccattgcactccagcctgggcaacaagagcgaaactccgtctcaaaaaaaaagataggaaagggaaaatattttttcattaacatatattaatttaatgagtatagaaatgattcttgtttttttgagacagagtctctctctctcacccaggctggagtggagtggcactatcccaactcactgcaacttccgccccgccaggttcaagcaattctcctgcctcagcctcctgagtagctgggattacagacacccaccattgcgcctggctaatttttgtatttttagtaaagacaaggtttcaccatgttagccaggctggtctcgaactcctgacctcagttgatccacctgcctcagcctcccaaagtgctgggattgcaggtgtgagccaccacgcccagcctagaaatgattcttagagctgtaggcctttacttcatcatttttcagtttaaattaatcagttgcttataaaatgcatacataaataaaataatttttaaaaaa

SEQ ID NO: 46271 - DNA, 456 bp, Homo Sapiens
atggctcactgcaacctctacctcccaagctcaagcaatcctcccacctcagcctctcaagtagcttcagattgttcactgttggcatataaaaatgttactgatttttgtatgttaatattgtatcctgcaactttactgaatttatttctcagttctaatacttttttggtggagtctttaggtatttccagatataagatcatattatatgcaaaccaggataatttgacttcttcctttccttcccaatatagatgccctttatttctttttttttttttttttggacttattgctctagctgggacttcgagtactgtgctgaacaacagtggtaaaagtgggcattcttattgtgttccagatcttacaggaaaggctttcagtttttcctcattcattatcatgctagctgtgggtctgccatatatggcttttattatgttaaggtag

SEQ ID NO: 46272 - DNA, 513 bp, Homo Sapiens
ttccttgtggcaggaacccacttaggtggcaccaagcttaacttccagatggaacagtacatctgtaaaaggaaaagtgatggcatctacatcataaatctgaggaggacctgggagaagcttctgctggcagctcgtgccattgttgccattgaaaaccctgctgatgttagtgccatatcattcaggtactggctagctgtgctgaagtttgctgctgccactggagccactccagttgctggccgcttcactcctggaaccttcactaaccagatccaggcagccttccgggagccacggcttcttgtggttactgaccccagggctgaccaccggccgctcatggaggcatcttatgttaacctacctaccattgctctgtgtaacacagattctcctctgcactatggggacattgccatcccatgtgacaacaagggagctcactcattgggtttgatgtggtggacgctggctcgggaagttctgcgcatgcgtggcaccgtttcc

SEQ ID NO: 46273 - DNA, 671 bp, Homo Sapiens
aagtgtcttctccccgggtttggtggcctgcttctggagtggtcagttctgctgccgacatgcccacccagctcgagatggccatggacaccatgattagaatcttccaccgctattctggcaaggaaaggaagagattcaagctcagcaagggggaactgaaactgctcctgcagcgagagctcacggaattcctctcgtgccaaaaggaaacccagttggttgataagatagtgcaggacctggatgccaataaggacaacgaagtggattttaatgaattcgtggtcatggtggcagctctgacagttgcttgtaatgattactttgtagaacaattgaagaagaaaggaaaataaaggaagttcgtgaatgctaatcaagggctaaataaagtggaaagcagcatccttgaaaatcatcgctctcaggacggggtctgcctggaatagcactgaatgtgtttagtagtgcctttggcttgggggctttggagaaagctgcttgagcccttcccatgctcataaattaggtaaggagcagtgaggaagtgtctacagcaacctcagccaatgtgatgtgcctctacagctgtatgaagtagattctctgattttatcttgaaatccacaacttccacaaaaaagaaaaatcttttaccatttctcatt

SEQ ID NO: 46274 - DNA, 422 bp, Homo Sapiens
tcatcaacccactaatttggtcctacccagcaatggctcaatgcacaactattgcccacagcagactaaaattacttcagctttcaaatacattaacactgtgatatcttgtactattttcatcgtgggaatggtggggaatgcaactctgctcaggatcatttaccagaacaaatgtatgaggaatggccccaacgcgctgatagccagtcttgcccttggagaccttatctatgtggtcattgatctccctatcaatgtatttaaggtacagagcagttgcctcctggagtcgtgttcagggaattgggattcctttggtaactgccattgaaattgtctccatctggatcctgtcctttatcctggccattcctgaagcgattggcttcgtcatggtaccctttgaatataggggtgaa

SEQ ID NO: 46275 - DNA, 777 bp, Homo Sapiens
atggtacaaaggaagcctagagtcaagttgatttcacaagttactagttccagatattcaacgagatcttcacctctctttctgttatgtctctatctgggcatctgtctcactttctctgtgtctctttgtccttgtatagttctttctgcgtgtctctctgcatctttgtctctgtgcccttgttgttttcactacattgttgcctttctttctatttttctaatccattgtcactatttatctgcattttttctatcttcatgtttctttttgcatctatttttctgtatttgtcttccttatcacttcatatcttacctcatctctctctgtgtgtgtgtgtgtgtttgtgtgtgtgtctgtttgtctgtctctgttatatatgtttctagacttgtctaccagagttttgacaactttaggaaacattctgattggccaagcctgggtaacatgcacacctctcaaacacattgtcctgtgcacgggatgctgacagccagcattgtgtccatcgctcttattaggaaggaggactggattttccagatccttgtggtcctggaaatgacttccagtgtgcagatgtctacaccagtcatgtggagcacttcagcctccagagcctcacagtggaggggtgtaaggggcagtttgtttcttgtggagcccacaggacaaatggcagagctccctctggttctagggtccctcactgggggtacctgttcacagtcattccactccttgtctgagctccctttgtcattgacg

SEQ ID NO: 46276 - DNA, 681 bp, Homo Sapiens
atgaataactcacagatatctactgtgacgcagtttgtgttgttggggtttcctggtccctggaaaattcagatcatctttttctcaatgattttgttggtctacatcttcactctgactgggaatatggccatcatctgtgcagtgaggtgggaccatcgactccatacccctatgtacgtgctcctagccaacttctccttcctagagatctggtatgtgacctgcacagtccccaacatgctggtaaattttttctccaaaactaagaccatatcattctctggatgtttcactcagttccacttcttcttttccctgggcacaactgaatgcttcttcctctgtgtcatggcttatgatcggtacctggccatctgccacccactgcactatccctccattatgactggccagctctgtggcatcttggtgtctctttgttggctcattggtttccttggacattcaatttccattttcttcatttttcaactacctttctgtggtcccaacatcattgatcattttctgtgtgatgtagacccactgatggcattgtcctctgcccctactcacatcatagggcatgtgttccattctgtgagctctcttttcatcaacctcaccatggtgtacatccttgggtcctataccttggtgctcagaactgtgctttag

SEQ ID NO: 46277 - DNA, 2626 bp, Homo Sapiens
ctttccttgcaggaaattgatactttatcaacatagagattaattatttgtatttgggagcagcagaactggggaccaattacctgtcaagagttttataaacccgtgacataaactgttattccattgctttcatcctccatctcaccttggaacttgtattacttatggcgttcaggagacaagtgaaaaactttgtgaaaaattactcagatgctgaaataaaagtcagggaagcaacttctaacgacccttggggtccctctagttctctgatgttagatatcagtgacttgactttcaacacaatttctctctcagagattatgaatatgctgtggcacagactcaatgaccatgggaagaactggcgccacgtgtataaatcccttaccctaatggattatctcatcaagaatggatcaaagaaagttattcagcattgcagagaggggttctgtaaccttcaaacactaaaagattttcagcacatagatgaagctggaaaagaccaaggttattatatccgggaaaaatctaagcaagtcatcacattgctgatggatgaaccattgctgtgtaaagagagggaagtggcatgtcggactagacagcgtacctcccactctatattgttttctaaaagacaacttggttcaagtaactcactgacagcgtgcacttctgcccccacaccggatatttctgcttcagagaagaagtataagcttcctaagtttggaaggttacataataaaagaaatgtgtgcaaggcaggattgaaacaagagcattgccaagatgttcatttgcctacagaaactatgttgtcccaggaaacacttccactcaagattcatggttggaaatcaacagaggacctgatgacatttttggatgatgatccagagctgcctttactagcaacacctccttccattgtctctccaatcacttgcttgtcagaagcagaagaagtttgtaatctttcgggtgcagatgctgtgcctactctctcagaaaatagtccttctgggcagagagatgtgagtttggacaagagatcagatggtatctttacaaatactgtcacagaaaacctcttggaaacacctttagaaaagcaatcagctgcagaaggtcttaaaacattgacaattttaccagcatgttggtcaagtaaagaggagtttatcagccccgacttaagggtatcaaagtcagattctactttccataaccaggcctctgtagaaacactctgtctctctccctcattcaaaatatttgaccgagtgaaggagattgtaatcaacaaggcctaccagaaaccagcacaatccagcattcagatggatgataaaatcctcaagacaaccacacgggtttcaactgcttctgagggagcatcttccttttctcctttatccatgtcatctcctgatttagcctctccagagaagtcagctcatctcttatcaccaattctggccggaccttccttctggactctgtcccatcaacagttgtcttctacctcctttaaagatgaagataagacagccaagctgcatcactcctttgcttctaggggcccagtgtcttctgatgtagaggaaaatgatagcctcaatctactgggaattcttccaaataactctgattctgctaaaaagaatataagtcacatttctagtagtcactggggggagttttccacccaaaatgtagaccagttcatccctctgtcctgttctggttttcagtcaaccaaagacttcccccaggaacctgaagcaaagaattccattagtgttcttttaagggaggtaaaacgtgcgatcgctagattacatgaagatctgagcacagtgatccaagaacttaatgtcatcaataacatcttgatgagcatgagtctgaatagttcacaaataagccagtcttcccaggtcccccagtcttctgaggggagctcagatcagatctaatcatcacaatatctatttttgatagaactcgtgtggttccacttccccaagacttacgttagcattgtataaattcatattattatggcaaaaaaggggatggtttaatttttccttgtcaggtttattagcaagtatctttcaaactaatactttcatttgggtggtttattttttaaaagggaaagatgtcacctttgataatttcagatttagatattagttcatttgaaacagaagagaatttcattctttcatgctctgtacctcaaatgggttaagcattagtgaaaattgtggtaagacctcaaactgcaaatgactattcaagagcttttggataaggaggcaggaagaagctctttatctttcaactgtatggagcttgttaacaagcctctgaggtgacctaggaggattgagtttgggggtatacatttcacacattcttttgcaagttttaggttctgcaaccaagggccagaaatcttttctttcttccagatgctagtgttaggagttaaatggaaacaagaaggacatggggcaaatgtttttactgtcaatgtatattgcaaggtgaattcaaatgcatccttttattctacttcagaaaataaatttgatatttttca

SEQ ID NO: 46278 - DNA, 1074 bp, Homo Sapiens
gatccaaacccaccaatcacgaacctaaggatgaaagcaaaggctcagcagttgacctgggaccttaacagaaatgtgaccgatatcgagtgtgttaaagacgccgactattctatgccggcagtgaacaatagctattgccagtttggagcaatttccttatgtgaagtgaccaactacaccgtccgagtggccaacccaccattctccacgtggatcctcttccctgagaacagtgggaagccttgggcaggtgcggagaatctgacctgctggattcatgacgtggatttcttgagctgcagctgggcggtaggcccgggggcccccgcggacgtccagtacgacctgtacttgaacgttgccaacaggcgtcaacagtacgagtgtcttcactacaaaacggatgctcagggaacacgtatcgggtgtcgtttcgatgacatctctcgactctccagcggttctcaaagttcccacatcctggtgcggggcaggagcgcagccttcggtatcccctgcacagataagtttgtcgtcttttcacagattgagatattaactccacccaacatgactgcaaagtgtaataagacacattcctttatgcactggaaaatgagaagtcatttcaatcgcaaatttcgctatgagcttcagatacaaaagagaatgcagcctgtaatcacagaacaggtcagagacagaacctccttccagctactcaatcctggaacgtacacagtacaaataagagcccgggaaagagtgtatgaattcttgagcgcctggagcaccccccagcgcttcgagtgcgaccaggaggagggcgcaaacacacgtgcctggcggacgtcgctgctgatcgcgctggggacgctgctggccctggtctgtgtcttcgtgatctgcagaaggtatctggtgatgcagagactctttccccgcatccctcacatgaaagaccccatcggtgacagcttccaaaacgacaagctggtggtctgggaggcgggcaaagccggcctggaggagtgtctggtgactgaagtacaggtcgtgcagaaaacttga

SEQ ID NO: 46279 - DNA, 732 bp, Homo Sapiens
cgtgggttggcagtatgagagttgtaatggcccgactgttgagtgagggggagcaggggatcccaacggcttgcgctgcctttgcgcagcagccggcgggcggccacgtcgcggcctggctggggtaggagagggcggtccccagtgcagttgggtgaactaccgttgcacactggagtttctggtgtctttgcttggaactgacctagctcgtggcagggggaactcggctagcggccccacagcccctgctgactcaaaacaactgagttgtaagacgttcatcgccgtgttatccttgagtaaagaatgaactctggaagcccagccagggacaatgcaccttcacagagattctgcactaatctgagtgaaggtctaaggtttggaatctccccctcatggagagaagctttgtatggctgtcatgcttagacagtgattcctgcaacttgaccttcaggctgggagaggtggagagccatgcctgttctccttccttgctatggaatttgctgacacaatatcttccgcctggtgctgggcatatcctaagaacttacaactttcctgtattatcctgtgtgagcagctgtcaccttattgggggaaaaatgcctgaaaattagggggcacttcaagtagatagcttctatttcctatatttgtcttatatacaagtatttgcttttatcaaaataattccaataaagcattttaaagtaaagaaga

SEQ ID NO: 46280 - DNA, 1907 bp, Homo Sapiens
cggaaagcgttgctgcgtaaatggcgggggcgtgtcttttggctcctccgcgtgtagttacctgagaaacgcgggaagttgggcccaggcagtgttgctgcggttgcctaagttgtttttctatttctggagagagccgtgagcttgtccaggggccccaatcctgaggccgacccggtttctggcgcggtgcgatggaggtagtggaggccgccgccgctcagctggaaactctgaaattcaatggcaccgactttggagttggggaaggtccggcggctccgtctccgggctctgcccctgtgccagggacacagccgccgctacagtcgtttgaggggtccccggacgctgggcagaccgtggaggttaagcctgccggggagcagcctctgcagcccgttctgaacgccgtcgcggccgggaccccggcgccgcagccacagccaccggctgaatcgccggcctgcggagactgcgtcacctccccaggagccgcagagcctgcgcgggcgccggactccttggagacctcggactcggattcggactcggacagtgaaacagattcagatagttcaagttcatcgtcttcctcttcatcttcctcatcgtcgtcttcttcctcttgtatatcacttcctccagtgctgtcagatggagatgatgatttacaaattgagaaggaaaataagaattttcctcttaaaacaaaagatgaattacttcttaatgaactgccttctgttgaagaactcactattattctgcctgaagatattgagttaaagcctcttgggatggtttcaagtattattgaacaactagtaataattgaatctatgactaacctacctccagttaatgaggagactgtaatttttaaaagtgatcgacaagcagcaggaaagatattcgagatatttggacctgttgcacatccattttatgtgttacggtttaattcttcagatcacattgagagtaaaggtattaaaataaaggagactatgtattttgctccatcaatgaaagatttcactcaatatatattcacagaaaaactaaaacaggataagggatcagatgcatcatggaagaatgatcaggaaccaccaccagaggccttagattttagtgatgatgaaaaagagaaggaagccaaacagaggaaaaaatctcagattcaaggccggaaaaaactcaaatctgaatttaatgagcctggtgaagattttactgaagtacatcagaattggaatgctcatagctctgcttcagagcatgcaaaaggatatcgtaacagagaattcacacgaggattttccagggccagataccctcgatcttgccatggcaggcctccacctcagcatttctataactcagaacatatggtatctcaggagacttcaggatttccttctcagagacaaaataatcccattatgccacaatacccctttcctcttccagtgtttgacatgcataattttcccctccgccctccacccccaccaccacccccacctgtaaacatgggttgggctacaccaaacatggctgctcatccattacttaacttaccatactccctacccccaccccctccccctccaccactgcctcctccaccctcttctggagatagtaattctcattttggaccttactattaggtgactatgcatttccagagaaatgtggacttttcatattatgtggtaaggatttttttttttcaagagtgattatggagctagatttttaaaaacactgtaaaatactaaatgattccttctgttgtaagttgatatatatttgtaacctttgtgaaattgtattcatatgaaaatgtcagctcaaattcttgggagaacattaaattatgtaatatttaattaaaa

SEQ ID NO: 46281 - DNA, 2097 bp, Homo Sapiens
ggggccctgattcacgggccgctggggccagggttgggggttgggggtgcccacagggcttggctagtggggttttgggggggcagtgggtgcaaggagtttggtttgtgtctgccggccggcaggcaaacgcaacccacgcggtgggggaggcggctagcgtggtggacccgggccgcgtggccctgtggcagccgagccatggtttctaaactgagccagctgcagacggagctcctggcggccctgctcgagtcagggctgagcaaagaggcactgatccaggcactgggtgagccggggccctacctcctggctggagaaggccccctggacaagggggagtcctgcggcggcggtcgaggggagctggctgagctgcccaatgggctgggggagactcggggctccgaggacgagacggacgacgatggggaagacttcacgccacccatcctcaaagagctggagaacctcagccctgaggaggcggcccaccagaaagccgtggtggagacccttctgcaggaggacccgtggcgtgtggcgaagatggtcaagtcctacctgcagcagcacaacatcccacagcgggaggtggtcgataccactggcctcaaccagtcccacctgtcccaacacctcaacaagggcactcccatgaagacgcagaagcgggccgccctgtacacctggtacgtccgcaagcagcgagaggtggcgcagcagttcacccatgcagggcagggagggctgattgaagagcccacaggtgatgagctaccaaccaagaaggggcggaggaaccgtttcaagtggggcccagcatcccagcagatcctgttccaggcctatgagaggcagaagaaccctagcaaggaggagcgagagacgctagtggaggagtgcaatagggcggaatgcatccagagaggggtgtccccatcacaggcacaggggctgggctccaacctcgtcacggaggtgcgtgtctacaactggtttgccaaccggcgcaaagaagaagccttccggcacaagctggccatggacacgtacagcgggccccccccagggccaggcccgggacctgcgctgcccgctcacagctcccctggcctgcctccacctgccctctcccccagtaaggtccacggtgtgcgctatggacagcctgcgaccagtgagactgcagaagtaccctcaagcagcggcggtcccttagtgacagtgtctacacccctccaccaagtgtcccccacgggcctggagcccagccacagcctgctgagtacagaagccaagctggtctcagcagctgggggccccctcccccctgtcagcaccctgacagcactgcacagcttggagcagacatccccaggcctcaaccagcagccccagaacctcatcatggcctcacttcctggggtcatgaccatcgggcctggtgagcctgcctccctgggtcctacgttcaccaacacaggtgcctccaccctggtcatcggcctggcctccacgcaggcacagagtgtgccggtcatcaacagcatgggcagcagcctgaccaccctgcagcccgtccagttctcccagccgctgcacccctcctaccagcagccgctcatgccacctgtgcagagccatgtgacccagagccccttcatggccaccatggctcagctgcagagcccccacgccctctacagccacaagcccgaggtggcccagtacacccacacgggcctgctcccgcagactatgctcatcaccgacaccaccaacctgagcgccctggccagcctcacgcccaccaagcaggtcttcacctcagacactgaggcctccagtgagtccgggcttcacacgccggcatctcaggccaccaccctccacgtccccagccaggaccctgccagcatccagcacctgcagccggcccaccggctcagcgccagccccacagtgtcctccagcagcctggtgctgtaccagagctcagactccagcaatggccagagccacctgctgccatccaaccacagcgtcatcgagaccttcatctccacccagatggcctcttcctcccagtaa

SEQ ID NO: 46282 - DNA, 2151 bp, Homo Sapiens
ttaaattttaacatgcatttattaaatttatatgcagatgactacactactgcaattacagaaatgagtaagaacatactctcaagatcttacagtcattggttggggtgaaagtatttcttctgtcttcatgaaaaattaaaaagatagaaaatcttgaagtattttgctaccttaaaacaactacccaccctacatttgtactaaaataggcttttgcttgttttaaaagcaattctagatgaggttatatttttacaatactgtatctcatctcaaataaatttatacattctttaccctgtctaaacttgcatgcaaaataagaaccagcaagccttcaaacttcaatcacagtattccataggctatattttaagtctattgcattagttgaaatttattttgcagagtatgttaacaaacatattctaacacttaaaaaatcattacaattttttctgtttttgtcttctaaattactctgagcagtgaattactggagggaagatacccatgtctaaaatttgtgtctggtgccagtctcagatttctgccaaacaccagtaggtattcaaaagtgtggtccctttaaaacagcaggccggatatcacctttctgtcttcaaagattcaaaccagactcccaatctgggatttctctacagagggttggctgcttcccagttaatgtgagttttgcaaagtttgcatttcatgaaaacagtgttgtgtaaacatatattgtgtcactttacctactatttactaaaatcagagagtttagcctttgaaatttatggttctctggagctatcataaatcaatcagtcatacgaatggactagctgtagactcaggatatcaataaaactaggcagtgaaatttgcctataattatactatatttagattaatagttatcaaaaacatttttccccaaaaaatacctcaagggtaaaacagaatggtaaagtttttttcaggataatgaattttcaaacatttccaagaccataaccagccattttaagtactgtaaactctgttatatttcatttggataagtatctaataagcaattattacatatcctctcatttaaattaccactgaaaactagaaataatctttatttaatacgactgttttaacaccatatggaacgggaaataactaaatgaaaattgttcacgtaaatgtgatgggagtgggggggtggggagcagtatttcttgacatgtggcatgtcactcaggaaagtaaaaggcccatcatatccaaaatgccagcttggatattcccttgccacccacttgacgaacagacataccacatggcattaaatgctgcaacctttcctaaaaatgccacttggattggtccgctgtggtgagtatataagaactcttggtctgtctcttgagtctgtgagttcaaagggaagaatctagtaaataacaccggctaaattttgccctcagatgtttggcataaatgatttgtgaggatattggaacctttggctgttttcacaccaatgaaataaattatgctacttgaaaaaaattctacagaacataatgctacacagtcacagtcgactttttgcaaaagtaccagagaatatcttttagaaacagtgcttataaagccccatatactccttagatatttcccaaggatttcttctcttggctagcaggaaaacaatcttaatattttatttattcttcataaatacaatgtatataatataaaacactttgtgcacatgtttccaacaatttcattttctatgcatctttacataaggtagtagctaataactctttctgtggacacgtattttccagttttctaaggtttatgtgttcaagcattgtaaaaacatatttaaaaattgaattaccagtaaaaatattgaatgtacaggtcattatgctcccacaaatacaaaatacattgaaaaattatatcaacagataattacatatgaaatatgaggcatatattttcttctattatttattttctccctaaagagttctaattgattaaatctcaagagacaaaatgtaattttataaaacaactgtattgttcagatttaggagacaacctaagaagatgattctgagtaggtaggat

SEQ ID NO: 46283 - DNA, 729 bp, Homo Sapiens
atggaactattattattagaaacctttcagtggaacctctgccttccaacagccgcccatttcattgagtattatctctctgaagcagtacacgaaacagatcttcatgacggctggccaatgatttgcttggaaaagactaaactctacatggccaaatatgcagattacttcctggaagtatctttgcaagctgctgcatgtgtggcttcttcgaggattatacttcgtctttctccaacgtggcctacaagactacatcgtcttactgcctactcttgggatttcttagtgcagtgtattgaacgactgttgatcgctcatgataatgatgtgaaagaagcaaacaaacagagagggcaagcaggacctcagtcagcgcaactaagtgtattccagacagcctcccagccatcacggccagttcactttcagcaacctcagtatctccatcagacacatcagacctcactgcagtatcgccatcctacgtcagaacaaccaagctgtcagcagattgtatcgaccacacacacctcatcttacacactacagacatgtcctgctggcttccaaactagtgttcagggccttgggcacatgcagactggtgttgggatgtcactggcaataccagtagaagttaagccctgtctgagtgtttcttacaaccggagttatcagataaatgaacattacccttgtattactccatgttttgaaaggtga

SEQ ID NO: 46284 - DNA, 4736 bp, Homo Sapiens
ttttttttttttttttttttttttttttcctttcccctccccctccctctccaagccggaggggtcctgaggtgacagcgcctgcaactgaaatttcagcagcgggagaagatggacaagagaaagctcgggcgacggccatcttcatccgaaatcatcacagaaggaaaaaggaaaaagtcatcttctgatttatcggagataagaaagatgttaaatgcaaaaccagaggatgtccatgttcaatcaccactgtccaaattcagaagctcagaacgctggactctccctttgcagtgggaaagaagcctaaggaataaagtcatctctctagaccataaaaataaaaaacatatccgagggtgtcctgttacttccaagtcatcaccagaaaggatacccagagttatattgacgaatgtcctgggaacggagttaggaagaaaatacataaggaccccacctgtaactgagggaagtttgagtgatacagacaacttgcaatcagagcaactttcttcatcatctgatggcagcctagaatcttatcaaaatctaaaccctcacaagagctgttatttatctgaaaggggctcacaacgaagtaagacagtagatgacaattctgcaaagcagactgcgcacaataaagaaaaacgaagaaaggatgatggcatttctcttttaatatctgatactcagcctgaagaccttaacagtggaagtagaggttgtgatcatctcgaacaggaaagcagaaacaaggatgttaaatattctgattcaaaagtggaactcactctgatttccaggaagacaaagagaaggcttagaaataatttacctgattctcaatattgtacttctttggataagtcaacagaacagacaaaaaaacaagaagatgactcaacaatatccactgagtttgaaaagccaagtgaaaactatcatcaggatccaaaactgcctgaagaaattacaactaaacctacaaaaagtgattttactaaactatcctcacttaacagtcaggagttgactttgagtaatgccaccaaaagtgcctctgccggttcaaccactgaaaccgttgagaactctaattccattgatattgtggggatttcttccctggttgagaaggatgagaatgagttgaataccatagaaaagcctattctaagaggacataatgaagggaaccaatcactgatctcagctgaaccaattgttgtttccagtgatgaagaaggacctgttgaacataaaagttcagaaattcttaagttacaatctaagcaagaccgtgagacaactaatgaaaatgagagtacttctgaatcagcattgttagaactaccattgattacatgtgaatctgtacagatgtcatctgaattatgcccatataatcctgtcatggagaacatttccagtattatgcctagtaatgagatggatctacaactggattttatatttacttctgtttatattggtaaaataaaaggagcttctaaaggttgtgttacaatcacaaaaaaatatattaagatcccatttcaagtgtccctgaatgagatttcattgctagtggataccacacatttaaagcggtttgggttatggaaaagtaaggatgataatcacagtaaaaggagtcatgctattcttttcttctgggtctcttcagattatcttcaagagattcagacccaattagaacactctgtattaagccagcaatcaaaatctagtgaattcattttccttgaactacacaatcctgtttcacaaagagaagaattgaagctgaaagatattatgacggaaataagtataatcagtggagaattagagctttcttacccgttgtcttgggttcaggcatttcctttgtttcagaacctctcttcaaaagaaagttcttttattcattattactgtgtttcaacttgttctttccctgctggtgttgctgttgctgaagaaatgaagctgaaatcagtatctcagccctcaaacacagatgcggccaagcctacttacaccttcctgcagaagcaaagtagcggttgctactccctttctattacatctaatccagatgaagaatggcgagaagtcaggcacactggacttgttcagaagttgattgtatatcctccaccacctactaaggggggattaggagtaactaatgaagatctggagtgtttagaagaaggagagtttcttaatgatgtaatcattgatttttaccttaagtatcttatattggagaaggcatcagatgaacttgttgaacgaagtcacatttttagtagctttttctataaatgcttgacaagaaaggaaaataatttaacagaagataatccaaatctttcaatggcacagagaagacataaaagagtaagaacatggactcgtcacataaacatttttaataaagattacatctttgtacctgtaaatgagtcgtctcactggtatctcgcagtcatttgttttccatggttagaagaagctgtgtatgaagattttccacaaactgtatcccagcagtcccaggctcagcagtcccaaaatgacaacaaaacaatagataatgatctacgtactacttcgacactgtctttgagtgcagaggattcccaaagtaccgagtcgaatatgtcagtaccaaagaaaatgtgtaaaaggccatgtattcttatactagactccttgaaagctgcttctgtacaaaacacagttcagaatttacgagagtatttagaggtagagtgggaagttaaactaaaaactcatcgtcaattcagcaaaacaaacatggtggatctatgccctaaagttcctaaacaggacaatagcagtgattgtggagtatatttattgcagtatgtggaaagcttcttcaaggatcctattgttaactttgaacttccaattcatttggagaagtggtttcctcgtcatgtaataaagaccaaacgggaagatattcgagagctcatcttgaaacttcatttacagcaacagaagggcagcagtagctagttaatctgtacaaacatgacacagatgttctctaagattactggaaagcctcttaccagcatttgtgttagccagctcacagagaagaaaataacttgcagtagttttataataagtcattggaacattatttaaaatatgtaggacacattattagaattgttgggatctcatagatggaatgggaatgggggtgatatagataaacttactagatataaattaaaattttataaatatttcatatttttctgagtaaatatgattggattatgcaacagcatatgtaatatgggaatgttttgtagataataaaacttacatgatctgtacttccacgtgactgggtgctgaggggagttaaagcctccctggtgccagccccagtgcttgtcaaatttgctgacaggtcacatcatattgtaattctattctttgcagctcaagcatgcagtatgaatactgtgtattttttaaaaaaataatttagtatcaaggcttcagaaaatgccatttacggcatcccttctgtatgtaacaaaaagacattcataatgttaggaagatgataaaaattcgctcttttaaagtgcagcttattattctcaattgctaaatacgattactctgctttttttttttcatttcttttgatgtcatatgtgagtatcttataatttagttcatttgttcagggtaaaatttgaaacaaaaaattttacctgtgcaaaatagttttttaaaaattatacatgtagctcaacttgaggtactgctatataaatattcactcacattatcacggaatttatgtatagtttctctaatatagaagataaaattggtgtcctcataactttaacaaagaaaaccctcagtcctatttattaatgggtagaattaaatatataattttatagctcagtttacccagtattcatctgcaaagccagattgctctcattgcttttatatttttaaattgtagcttttagagacctatgatcctcatggaacttaattttttattaaatattcaggtaacagttctgaattcatgtgataatggtggcattatatatgattaaacacttcagaactttctaatgttatcaggagtattttgagggagatatgattatattgtattttctcagataagaaaaatgttttttaacaatattattttaatctgttttaagcatctcttagatttacattataactacataaagcagtgaagcaaaggcaaattaagataaagctagaaagtctgaacattttatttcaaaatcatacgaatcggggtcagttaagcctcagtattcttagcttttgttgattttggcactatctttatattattaaatatatttgttgtttggatatttcatataaagatggctataattacatatttcattcccaatttgtgtgtgttggggggtacttttaaaggtgactattgttttgtacatctaattttgggaaagcaagtctataagacatcttgtgatttcttaatgtttttgtttgtatgtttttcaaagatatcactgtcctttatcatgttttgaagattgtttaaaattcattttcctaaattaatgtgcaagtaatgttttgaggatatcagtgttttatattaaacatatttccaattcattaaa

SEQ ID NO: 46285 - DNA, 651 bp, Homo Sapiens
atggatgatgtcatctactatgtgaatggcacttaccacctgctggagtttcttgcggccgtctgtatggtggcctattgcgtctcagagaccatctttggagaatggacagtgatgggctcaatgatcatcattcattcctactataacgtgtggcttcaggcccagctggggtggaagagctttcttctccacagggatgctgtgaataagattaaatcgttacccattgctacgaaagagcagcttgagaaacacaatgatatttgtgccatctgttatcaggacatgaaatctgctgtgatcacgccttgcgttcattttttccatgcaggctgtcttaagaaatggctgtatgtccaggagacctgccctctgtgccactaccacctgaaaaactcctcccagcttccaggattaggaactgagccagttctacagcctcatgctggagctgagcaaaacatcatgtttcaggaaggaactgaacccccaggccaagagcatactccagggaccaggatacaggaaggttctagggacaataatgagcgcatcgccagacaaccagatagccaggaaggggcttttgaccccaaagaatatcttcacagtgcaaaagatgaagcacatcctgttgaatcagcctag

SEQ ID NO: 46286 - DNA, 288 bp, Homo Sapiens
atgcacctccacagaggtctccttctcagccaagcctcagggaattgtggcattcatgctgtacccgtgatctgttcccactggaggaggagatgtctagactgtgatggggtctctgagaactgctcttctgactttattcctgaaagaggctgtgtgcaagaattgagtcccagggggactggaatgttgtctggtgaatgtgtgggaccgcatccacccctcaccagcttgtatcctcacctttatctgatgttatggctgctcaaagtatctgtcccaaaatga

SEQ ID NO: 46287 - DNA, 2312 bp, Homo Sapiens
ggcgcgctaggctcacaaaggcaggcacagactgcaaccctgctcagtgctccgggcgcttcaggctggcttgggtcctgctgctccaaccccaagggccctggagcgctccctgatacctccatcactcaccatggccagccagttctgcctccctgaatccccatgtctctcgcccctgaaacccttgaagccacatttcggagacatccaagagggcatctacgtggcgatccagcgcagtgacaagcggatccacctcgctgtggtcacggagatcaacagagaaaactattgggtcacggtagagtgggtggagaaagcagtcaaaaaaggcaagaagattgacctggagaccatactcctgctgaatccagctctggactctgctgaacaccccatgccgcccccgcccttatcccccttggctctggcgccctcttcggccatcagggaccagcgtaccgccacgaaatgggttgcgatgatcccccagaaaaaccaaacagcctcaggggacagcctggatgtgagggtccccagcaaaccttgtctgatgaagcagaaaaagtctccctgcctctgggaaatccagaaactgcaggagcagcgggaaaagcgcaggcggctgcagcaggagatccgagctagacgcgccctcgatgtcaataccagaaaccccaactacgaaatcatgcacatgatcgaagagtatcgcaggcacctggacagcagcaagatctcagtcctggagcccccgcaagaacatcgcatctgcgtctgcgtgaggaagcggcctctcaaccagcgagagacaaccttaaaggacctggatatcatcaccgtcccctcggacaatgtggttatggtgcatgagtccaagcaaaaggtggacctcactcgctacctgcagaaccagaccttctgcttcgaccatgccttcgatgacaaagcctccaacgagttggtgtaccagttcaccgcccagccactggtggagtccatcttccgcaagggcatggccacctgctttgcctatgggcagacgggaagtgggaagacgtacaccatgggtggagacttttcaggaacggcccaagattgttctaagggcatttatgctctggtggcacaggatgtctttctcctgctcagaaactccacatatgagaagctggacctcaaagtctatgggacattttttgagatttatgggggcaaggtgtatgatttgttgaactggaagaagaagctgcaagtccttgaggatggcaatcagcaaatccaagtggtcgggctgcaggagaaagaggtgtgttgtgtggaggaagtgctgaacctggtggaaatagggaatagctgtcggacttccaggcaaacacctgtcaacgctcactcatccaggagccatgcagtgttccagatcatcctgaagtcaggacggataatgcatggcaagttttccctcgttgatttagctgggaatgaaagaggagcagatacaaccaaggccagccggaaaaggcagctggaaggggcagagattaacaagagtcttctagccctcaaagaatgtattctggctttgggtcagaacaagcctcacaccccattcagagccagcaaactcacactggtgctccgggactcctttataggccagaactcctccacttgcatgattgctaccatctctccggggatgacctcttgtgaaaacactctcaacactttaagatatgcaaacagagtaaaaaaattaaatgtagatgtaaggccctaccatcgtggccactatccgattggacatgaggcaccaaggatgttaaaaagtcacatcggaaattcagaaatgtcccttcagagggatgaatttattaaaataccttatgtacagagtgaggagcagaaagagattgaagaggttgaaacattacccactctgttagggaaggataccacaatttcagggaagggatctagccaatggctggaaaacatccaggagagagctggtggagtacaccatgatattgatttttgcattgcccggtctttgtccattttggagcagaaaattgatgctctgaccgagatccaaaagaaactgaaattattactagctgacctccacgtgaagagcaaggtagagtgaagccaatggcgagagatcaggtccgaaatgctgcattgctgcagtttccaccactcttatacaggaaaactgtccaaattatctaaagatcctcctgagaagcttaaaacatcttaaaatacactgatgggaaacatgctctttcttctgcctctgt

SEQ ID NO: 46288 - DNA, 1038 bp, Homo Sapiens
gtcgtcgtcgacaactgctccagcatgcgcaaggctccccaggccgtcttcccctccattgtggggcaccctaggcaccagggagtgatggtgggcatgggtcagaaggactcctatgtgggcaaggaggcccagagcaagagaggcatcctgactctgaagtaccccatcaagcatggcaacgtcacgaactgggacaacatggagaagatctggcaccacacctacaacgaggtgcgtgtgactgctgaggagcaccccgtgctgctgactgaggcccccctgaaccccaagctcaaccatgagaagacgacccagttcatcatgtttgagaccttcaacaccccagccatggatgtggccatccaggccgtgctgtccctgtatgcctctggaggtaccactggcatcgtgatgcaccccggtgacagggtcacccacactctgtccatcggaggggtacgccctccccacgccatcctgcgtctggacctggctggcggggacctgactaactacctcaagaagaccctcacccagcacagctaccttcaccaccacgctgagcaggaaatcatgtgtgacatcaaggagaagctgtgctacgtcgccctggaattcgagcaggagatggcctcggcggcctccagctcctccctggagaagagctatgagctgccagatgaccaggtcatcaccatcgacaatgagcggttccgctgccccgaggcactcttccagccttcctttctgggcatggaatcctgtggcatccatgacactaccttcaactccattatgaagtgtgacgtggacaaccacaaagacctgtacgccaacacagtgctgtctggcggcaccaacatgtaccctggcatcacagacaggatgcagaaggagatcaccaccctggcgcccagcacgatgaagatcaagatcattgctcctccccagtgcaagcactccgtgtggattggctactccatcctggcctccacgtccaccttccagcagatgtggatcagcaagcaggagtag

SEQ ID NO: 46289 - DNA, 804 bp, Homo Sapiens
aatgaagatttggaagtgattgcttccaccgacctgaagtacctgttggtgccagtgtttcaaggagccttcaccatgaaacaagtcaagcccagcaagcgtctagatcatttgcagtgggctcaagagcactataaactaattaactgtgccattgctatcaggtggcagagcttgagctgccgaaaaccaagaactcagctgaaaaatcacactgctaatttctccatggcttatcctagcctcattgctatggcatctcaaagacaggctaaaagagagagacacaagcagaaggagttggagcacaggttgtctgcaatcaaatctgctgtggaaactggtcaagcagatgatgagcgtgttcgtgaatattatcttcttcaccttcagagcttagaagagattgagagcattgaccaggaaataaagatcctgagagaaagagactcttcaagagaggcatcaacttctaattcatctcgccaggagaggcctccagtgaaacccttcattctcactcggaacatggcccaagtcaaagtatttggagctggttatccaagtctggcaactatgacggtgagtgactggtataagcaacattggaaatatggagcattaccagatcagggaatagccaaggcaacaccagaggaattcagaaaagcagctcagcaacaggaaggtcaagaagaaaaggaggaagaggatgatgaacaaacactctacagagttcgggagtgggatgactggaagggcatccatcctagggactatggcagccaacagagcatgggctga

SEQ ID NO: 46290 - DNA, 204 bp, Homo Sapiens
ttgctggccgaggcagggaactactcggcgctgcagaggatgtttccatcgccttatttctatcacccaagcctgctgggcagcatggacagcactacggcggcggcggctgccgctgccatgtacagcagcatgtaccggactcctccagcaccccatccccagctgcagcggcccctggtgccccgtgtgctcatccacggc

SEQ ID NO: 46291 - DNA, 1834 bp, Homo Sapiens
atgtggctggaccgccgcggatggctcagggttcttggacattggcgctacgaccttaggcgccctagctttaccaggacttggagtggcgataagggcccaatggcagaaacagtgtctacccaggttgggacagagggcgggctgagggcttcgcatcagcaaaacggtgacgctggtggcgacgcgaaggttgagctgtcccccgggcccccgaagccggctggccgggaagtggagccggccccagtaggcggggagcatccctcggctgcagccccaggcccgggcaagcataagaagcggcggggcgcaaccagggagcgtgtcgtgccgcccccgaagaagcggcggaccggggtgagcttcggagatgagcactttgcagaaaccagttattacttcgagggcggcctgcgtaaggtgcggccctattactttgacttccggacctactgcaaaggtcgctgggtgggccacagcttgctgcacgtcttcagtaccgagttccgagctcagcccctggcctactatgaggccgcggtccgggcgggccgcctgcaactcaacgagaagccggtgcaggacctcaacatcgtgctcaaggacaatgatttcttgcggaacacagtgcacaggcatgagccaccagtcacagcagagcccattcgcctgctagctgagaacgaagatgtggtggttgtagacaagccttcctccattcccgttcacccctgtggccgcttccgacacaacacagttatcttcatcctaggcaaggagcaccaactcaaggagctacaccccttgcatcggcttgaccgccttacctcaggggtgcttatgtttgccaagacagctgcagtctctgagagaattcacgagcaggttcgggaccggcagctggagaaggagtacgtgtgccgggtggaaggggagttccccactgaggaagtgacctgtaaagaacccatcttagtggtgtcttacaaagtaggggtgtgccgtgtagatccccggggcaagccctgtgagacagtgttccagaggctaagctacaatggccagtccagtgtggtacggtgccggccactcacaggccgcacacaccagattcgagtccaccttcagttcttgggccatcccattctcaacgaccccatctacaactcagttgcctggggtccttctcgaggccggggcggctacattcccaagacaaacgaggagttgctacgggacctggtagcagagcaccaggccaaacagagcctggatgtgctagatctctgtgagggtgacctgtccccaggactcacagactctacggccccctcctcagagttgggcaaggacgacctggaagagttggctgcagctgcccagaagatggaggaagtagctgaggcagcccctcaggagttggacacaatagccttggcatcagagaaggcagttgaaacagatgtcatgaatcaaagacccactctgtgcagagtgccggctggtgcgacaggatcccttgccccaagaccttgtgatgttcctacatgccctacgctataaagggccaggctttgagtacttttcaccaatgcctgcctgggcacaggatgactggcaaaaggactgagggtgtggccaatggagggattgcttcttgggttgtgacaaggatgggctatagggcaagggctgaccccatgggctagtacttggggtttctataggaatgaggacgggcttctaaagagacctgctcatacttgctacctccttccagtgggaatttggagactttttggtttgtaaatatatccctttttctaacatc

SEQ ID NO: 46292 - DNA, 1570 bp, Homo Sapiens
gcccgtcaccaaggagggccgggcttccatcgtgcccctggcggcagccagcggcctgtgcgagctcctgtccgtcaacagctgcatgggccgtgtgaggcgcatctaccctcagctgctcctggccctgctcattcaggtccattaccacatcggcctcaacctgcctggctgcgtggctcctcccaaggacaccaagaagggtgcacagccctctcccttcgtacctgtgcgctgggtggtgaaagtggtgaaaaccctgctactgaggatgggctgctcttatgagaccacgtttctggaggaccagggtggctgggagctcatggagcaggtggagagccaccaccgcggagtggccttgctggcaagggccatggtgcagtactcctgccaggagctgtgccgcatcctctacctgctcatcccgctcctggagcgaggcgacgagaagcacaggatcacggccaccgccttcttcgtggagctcctccagatggagcaggtgcgccggatccccgaggaatactctctggggcggatggcagaaggcctgagccaccacgaccccatcatgaaggtgctgtccattcgaggcctggtcatcctggcccgcaggtctgagaagaccgccaaggtgaaggccctcctgccctccatggtgaagggcctgaagaacatggatgggatgctggtggtggaagcggtccacaacctcaaggctgtcttcaaggggcgggaccagaagctgatggacagtgcggtctatgtggagatgctgcagatcctgctgccgcacttcagcgacgcacgagaggtcgtgcgctcctcctgcatcaacctgtatgggaaggtggtccagaagcttcgggcaccacgcactcaggccatggaggagcagctggtcagcaccttggtgcccctactgctgaccatgcaggagggcaactccaaggtaagccagaagtgtgtgaagaccctgttacgctgttcttacttcatggcttgggagttgccaaaaagagcttatagccggaagccctgggacaaccaacagcagacagtggccaaaatttgcaagtgccttgtgaacacccaccgagacagcgccttcatattcctcagccagagcctggagtatgccaagaactcacgggcctccctccggaagtgctcagtcatgttcatagggtccctggtcccctgcatggagagcataatgacagaagatcgtctgaatgaagtgaaagctgctctggataacttgagacatgacccagaagcatcagtgtgcatctacgcagcccaggtccaggaccacatcctggccagctgctggcagaactcctggctgccgcacgggaactcatgggtgtgttactcagccaccacccaccgctggagccccagctgtgagaacctgcccacttcccaccagcggcgctcctggatcatgcaggcactgggctcctggaagatgtccttgaagaagtgacgtccctgagccccaaaccctcctcagggtggttgagttccagccatgctccctataaatgtcatgtggcttacc

SEQ ID NO: 46293 - DNA, 3154 bp, Homo Sapiens
gtgggaaaggagaagtttcacaaatcccaacattggggcttttgcaacaatgttatgatgttggtgagtgatgaaaagcctggaataggtggagaaccacttctggggcaaaagataaagcctaaatgtagcatatatcctaaaggagatggaagtgatgtaccatcatgggtagcctttgataaacaggtattatcttttgatgcctatttggaagaggaagtacttgataaaagccaaaccaactacagaataagatactataaaatctacttctaccctgaagatgacacaattcaagtaaatgaaccagaggtgaaaaatagtggattacttcaagggacttctatccggcgtcatcggattactcttccgcctcctgatgaggatcagttttatactgtgtatcattttaatgtcggcacagaggttgtcttctatggccggacattcaagatttatgactgtgatgcattcacaagaaactttttgaggaaaataggggtcaaagtgaatcccccagtgcaatgtccagaagatccttacatgaagattcggagagaggttgtagaacacgtagagcccttacgtccctacgaatccctcgacaccctgaaacagttcctccagtatcatggcaagattttgtgtttcttctgcctgtgggatgactcagtctcaatgtttggagaccgtagagaactcatcctgcattacttcttgtgtgatgatactattgaaatcaaagaattgcttccacacagctcaggccgagatgctctaaaaatgttcctccggaggagtaagctacccaagaattgcccacctagagtctatcaaccaggccagataacagatcgagcagttctcaattcatatggtgactttataaagaaccaagcggatggctacctgttcgatagatataagggaaggaacctcatattttattacctgtttctactaggaaaagtagaccaagagttttacaaagatagtgacctgtccctaggagtcaccatcaatgtgtggggaagaaaagtgctcctttatgactgtgatgaatttacgaagtcttattataagtctaaatatggaattgagaactttacctcagtttcatgcaagcctccttctcctcctccaaaaatagaaaggaaatttccaccttacaacggttttggttctgaagaggattctctccgtaactgcatagacctcaagcccacacctcatcggaggaacttcaagaagtttatggaaaaagacagctatggctccaaaagcaatatactccgtttttttgcaaaactagtcacagacaaatgtgttgacttggacaggatgtttgttatttcatattatctcggtgatgacaccatttcagtgtttgaacctatagagaggaattcaggaattgctggtgggatgttcttgaaaagaagtcgcgttaagaagcctggacaagaagtctttaaaagtgaactatctgaatatatcaaggccgaggagctgtacattggagtcacggtgaatgtgaatggttacctatttcgtttgctcaatgctgatgagtataccttaaactacatggagcagaatacagataagtatcctttcagtaacctcaaacttgccctacaaaagctgaagcaagaagaaggaaaatccagagagctcaagcaggtatttaaagctgctgactctaagcacacaaatatggtggattataatacattcagagacatattgatgtctttgactgttggaaaccttgcagagcaagaatttgtaaccattgcacgtcactaccgtgtgcctgagggcacatgttcagatatggatttcttaatcgcactggcccacgaaaagttcaagaaaaatatgtttgagaatttcgacactttcatttattcctgtgtgtatgaagatcgagaaaaaaaaaatgtattacccaccaaagacattaaaaggctgtgcaaatcctccagattacctttgagtgatgatcttctagaatccttattgtcaaggtttgaagacagtgaaaaacaaatagattataagtcatttttctctgccctgaactggagaaagaatccagtgcctgaattgcaaccagcatcataccttaaagagagatgtgaagatgtttggcttggtatgccatcacctattcctgcgaaatacattgactactggacctttttgaaggacgcgtttggcttagaggaggaataaccatgccagttttggtcaattctctatgatttacttctctcattttgccacatttactttagtagatataatttcattaaaaacaaaaaagaaacaaggtttatattaaatggaaatccataaaccacaattaatcctattttgtcatgttagttttacagaacatcatgttacattgccgacgtactgttactatttaaaatgccatcttaaaacatgttgaatatttttattatatgtatggtttattaataccaaaaaatcttctgataatttttgatccaacataatttgattcattactatatgaacagaaaatgacttttgaaggttatacatgacaatacaaaatcaaattatatcacagcaataagttgtgattctattaaacatttttgaaacctttttgacacgtttattacttacataattaagttttgtagcaacccacctcatcaaaataattcttaaacctctctagagtaaatatatttatcttttgaacttagtaaagctatgggaagaaaaagaacctccaacacacacacacacacacacacacacgcacgtgcacacacactggaaacatatgcagtatttatatttgtaatgcccttttttctatctaaagtcagcttgttagcttaggaatatatgcatgtgtgtataattatagtttgaccaaaactttattatgtctaaaatatttacaaatgtgaaagctgaagattttgagatttttgttttttttttggtttgttttacacacacatcccacgcgccccaccctagaggtttaaatattcagaaactacaacatttttcccctgcatttttctagttctatttttatttttcttcagcagaactcttgtcatgtagtgtacatttgattaaaacccatagccatgta

SEQ ID NO: 46294 - DNA, 336 bp, Homo Sapiens
atggctgggaataaaggaagaggaggatgtgctgctcatacctttaatactgaggctgttggatttagcaaaggtgaaaagttaccttatgtagtgttgaaaccacccccactatttcctgatgcagattataaatcagtgccactgaaaacagaagatgaagaatacatgctggctttgaaacaggagttgagagaaacaatgaaaagaatgccttattttattgaaacacctgaagaaagacaagatattgaaaggtatagtaaaagatacatgaaggtatataaagaagaatggataccagattggagaagacttccaagagagataacgcca

SEQ ID NO: 46295 - DNA, 948 bp, Homo Sapiens
atggaggccatgaaactattaaatcaatctcaagtgtcagaattcattttgctgggactgaccagctcccaggatgtagagtttcttctctttgccctcttctcggttatctatgtggtcacagttttgggtaaccttcttattatagtcacagtgtttaacacccctaacctgaatactcccatgtattttctccttggtaatctctcttttgtagatatgacccttgcttcttttgccacccctaaggtgattctgaacttgttaaaaaagcagaaggtaatttcttttgctgggtgcttcactcagatatttctccttcacttactgggtggggttgaaatggtactgttggtctccatggcttttgacagatatgtggccatttgtaagcccctacactacatgaccatcatgaacaagaaggtatgtgttttgcttgtagtgacctcatggctcttgggtctccttcactcagggtttcagataccatttgctgtgaacttgcccttttgtggtcccaatgtggtagacagcattttttgtgacctccctttggttactaagcttgcctgtatagacatatattttgtacaggtagtcattgttgccaacagtggcataatctccctgagctgtttcattattttgcttatctcctacagtctgatcctcataaccattaagaaccactctcctactgggcaatctaaagcccgttccactttgactgctcacatcacagtggtgattctcttctttggcccatgcatctttatctacatttggcccttcggcaaccactctgtagataagttccttgctgtgttttataccatcatcactcctatcttgaatccaattatctatactctgagaaacaaagaaatgaagatatccatgaaaaaactctggagagcttttgtgaattctagagaagatacttag

SEQ ID NO: 46296 - DNA, 321 bp, Homo Sapiens
gatgtggccgtggggctgttcgccttcccctttgccatcatcatcagcgggttctgcactgacttccacagccacctctttcttgcctgcttcatgcttgtgctcacacagagctccatcttcagcctcctgtccatggccatcaacaggtacctggccagccacagtcggctcaggcataaaagtttagtcactgggacccaaacaagaggggttactgctgtcctctgggtccttgcctttggcactggactgaccccattcctggagtggaacagtaaagacagtacctctaataactgcatggagccctgggatgga

SEQ ID NO: 46297 - DNA, 645 bp, Homo Sapiens
atggtgctctttaagcgtgatcggagggaagacacacagcagggccaccattccatgaatgggaggtgtacagatcactttctctttgtgctcagttctgttctgtctccagcagctatattggtaagactagtacctgccagggagaggtgcccccaagtgaaggggtacagtggcacctgggaaaaggcacctggaaggtttccatgtggcccagcccagcatggaagcagggtgggaactctgctgtgtcgccagcgctcactctactcgagtggctttttgaaagccctaccatgtctgtgtcaggcctgtgctgcttcacatcctacagctgaaaggccggccacgctccctgtccacacactccctgtccacacactccctgtccacacactccctgtccacaactgcagccgggccctctgcctatgggcacccaatccaagcagctgctccacctttgtttggcatggtgatttgtgttttttctcttggtgcttatgtgtgtgggcttgggacgagtgctggtatgcacttaggaccttcttgatagctccctgcactttggaacacggagcagatgagagagggggggcttgccctccaccttggacttggaagaagcccacattggagaggtga

SEQ ID NO: 46298 - DNA, 1900 bp, Homo Sapiens
gtgctgcagggagcaggggaatgtgggagagacacttacacgggcccacaggccacctgaaagagggaagacggtcagggtggggactcagacagaatggggggccccagaggcagtggaggcagcggtggtggcggcggcagacgaggaagccagccatgtgaggaggtggatggagtggtgccccgggggcggacggacggacaagttggtgaatgcacggagggggcagctccccacaagcacagtccacaggggctctcgggagcccaggcagaagagagacggctggacagcacagatgggtgcaacatctgtctgaggacacaaacaaagtggagatggtcaaggcgatggcacacagagctggcaaaggacagaccaaatgcggcaggaagaaaacgcaaagaggaggcagacgaggctggcagaggggttcatgttctgagtgaagagggattgagcacacatttaaggtgatcaactagccaacacgttccaggaagcagctaactctctgtggccagaagcgcaggtgaaattagaatcctgggaaggggcttgcaggatcatctgacggaagtgtcctctgacggaagggtcctccgatggaagggtcctctgatggaagggtcatctgaccactgtctcagctgccctgcagatccccataaagccaccactcttgccccaactccagaagaaaaatgttgggaccaataatcaccatcatattctttccactttgaggtattaattactcaagtggggattacagtccaggtctcactgccatatctgtgggcctgctatctggtcccaggtgatataggggaagctattctgttttacctgggagtgttagacctcagcccagtactttgcccacttgtggatgcccagtggccagcccacgggtcttcctgccctagccccaatccagccccagggaggcagtggtgccagcctcctgcccgcacctgcttagagactttgagccacgtctttttgagccggaagattgcactgcggttcatggacgaggtgatctccagtacggcattgtagttgtggaggcagcggcatatgtcagctacggccacccacttctcgatggcgctcaccctggcgttgatgtcctcattgcggatgatttctgaagcaatcaagttactgatctttaagccgatgcaataagacagggaaaaagaggagtaagtattgcaaagatgataaatggtcactatttgcagatatgattgcctgcttgaaaatacaagaaggaattggaaaactacgagaacaactaacagagcttgctagggttgctggctaaaggttcaatatacaaaaatgaaaagtttatatatacattagcaataatcaattagaaaatacaacaaaaatacaaccttccaaataacaatgggaatctgtaaatacctaggaacttaatgagaactatgtaggatggaaaaaacaggtcaccaaaggatataaaaggcttgaataacagagaaagagatcaaattcccaaatgggaatgtaaatatgtcatttttctgacaactaatacatgtgtttaatgtaatccaataaaacactcaggccaggcgcggtggctcacacctgtaatcccagcactttgggaggccgaggcaggcgaatcatttgaagtcaggagttcaagaccagcctgaccaacatggtgaaaccctgtctctacaaaaaatacacacacaaaaaaaattagctgggcgtgatggcgcatgcctgtaatctcagctacttgaaaaactgaggcaggaaaatcacttgaacccaggaggtggatgtttcagtgagccaagattgcgctgctgcactccagcctgggtgacagagcgagactccatctcag

SEQ ID NO: 46299 - DNA, 903 bp, Homo Sapiens
aaccacactggaaagttggatttcatcctcatgggactcttcagacgatccaaacatccagctctacttagtgtggtcatctttgtggttttcctgaaggcgttgtctggaaatgctgtcctgatccttctgatacactgtgacgcccacctccacagccccatgtactttttcatcagtcaattgtctctcatggacatggcgtacatttctgtcactgtgcccaagatgctcctggaccaggtcatgggtgtgaataaggtctcagcccctgagtgtgggatgcagatgttcctctatctgacactagcaggttcggaatttttccttctagccaccatggcctatgaccgctacgtggccatctgccatcctctccgttaccctgtcctcatgaaccatagggtctgtcttttcctggcatcgggctgctggttcctgggctcagtggatggcttcatgctcactcccatcaccatgagcttccccttctgcagatcctgggagattcatcatttcttctgtgaagtccctgctgtaacgatcctgtcctgctcagacacctcactctatgagaccctcatgtacctatgctgtgtcctcatgctcctcatccctgtgacgatcatttcaagctcctatttactcatcctcctcaccgtccacaggatgaactcagcagagggccggaaaaaggcctttgccacctgctcctcccacctgactgtggtcatcctcttctatggggctgccgtctacacctacatgctccccagctcctaccacacccctgagaaggacatgatggtatctgtcttctataccatcctcactccggtgctgaaccctttaatctatagtcttaggaataaggatgtcatgggggctctgaagaaaatgtta

SEQ ID NO: 46300 - DNA, 842 bp, Homo Sapiens
cgagcgcgacggtgcggggcgcgcgggcgacgggccagcgggatgggagcagggtcccccggcggcccgcagcctcgggagccgcgctgaagccgggggcgggaccagcgcggagccgacatgtgtctgcgcctcggaggcctgagtgtgggcgacttccggaaggtgctgatgaagacaggcctggtgctggtggtgctgggccatgtgagcttcatcacagctgccctgttccatggcacagtgctgcgctacgtgggcacccctcaagatgcggtggctctgcagtactgcgtggtcaacatcctctctgtcacttccgccatcgtgggcaaggcactgctggctgcctgcacttttgggagctctgaactactggccctcgcacctgactgtcccttcgaccccacacgcatttatagctccagcctgtgcctctggggcatcgccctagtgctctgcgtggcggagaacgtgtttgctgtacgctgtgctcagctcacccaccagctgctggagctgaggccctggtgggggaaaagcagccaccacatgatgcgggagaacccagagctggtggagggccgtgacctgctgagctgcaccagctctgagcctctgaccctctgagagatgatgtcctgcccaggcccgatggccactaggaccctgcaagcaactctgctctgtgaccaggccaggattcctggagctggcctgagagggctcaatggaccctcggggacccaagtggggctttcaaccctctcccccaccacccagcccactgcactgaaatgagactttattctgaaattattaaaaagaacagagatgctcca

SEQ ID NO: 46301 - DNA, 561 bp, Homo Sapiens
atggctaaaggtgaccccaagaaaccaaagggcaagatgtctgcttatgccttctttgtgcagacgtgcagagaagaacataagaagaaaaacccaaaagtccccatcaattttgcagaattttccaaaaagtgctctgagaggtggaagacaatgtccaagaaagagaaatctaaattcaatgaactggcaaaggcggataaagtgcactatgatcaggaaattaaggattatggaccagctaaaggaggcaagaagaaggatcctaatgcccccaaaaggccaccgtctggattcttcctgttctgttcagaattctgccccaagagcaaatccacaaaccccggcatccctattggagacgtggcaaaaaagctgggtgagatgtggaagaacttaaatgacagtgaaaagcagccttacatcactcaggcggcaaagctgaaggaaaagtatgagaaggatgttgctgtctataagtcgaaaggaaagtctgatggcgcaaagggtcctgctaaagttgcccagaaaaaggtggaagaggaagatgaagacgaggag

SEQ ID NO: 46302 - DNA, 690 bp, Homo Sapiens
atggctgggatcgccaccatggaggaagtgaagtgcaagatccaggttctgcagcagcaggcagatgatgcagaggagagagctgagcgcctccaggagaaggaggaagaaaagtgggccgggaacaaggaggctgaggtggcctccttgaatcgtaggatccagtttgaagaggagctggaccatgctcaggagcgcctgaccactgccctgcaaaagctggaagaagaggagaaagctgctgatgagagtgaaagagatatgaaggaaatccaactcaaagaagctaagcatattgcagaagaggcagataggaaatatgaagaggtgcctcgtaagttggtgatcattgaaggagacttggaatgcacagaggaacgagctgagctggcagagtcccgctgccaagagacagatgagcagatcagactgatggaccagaacctgaagtgtctaagtgatgctgaagaaaaatactctcaaaaagaagacatatatgaggaagagatcaagattctcactgacaaactcaaggaggcagagacccgtgctgagtttactgagagattggtagccaagctggaaaagacaactgatgacttggaatataaactgaaatgcaacaaagaggagaacctctgtacacaaaggatgctgtaccagactctgcttgacctgaatgagatgtag

SEQ ID NO: 46303 - DNA, 623 bp, Homo Sapiens
acgatctatgaaagataaaatgtggtgtgaggacacggcccagccccaccgtcgtcttccagccccaccatcgtcttccagccccaccgtcgtcttccagtcccaccgtcgtcttctagccccaccatcgtcgtcttggactctctgggtggcaccacgctgtgggtgctgctctcctctgtgtcccaaacgagtttgtgcctcactttgtcgggttttggctgtgacttggagcctcaccaagctcccttttcctctgtctcccattctcctctccaggccagggtggcttccccagccctcctccccgggtcctgcctgtgccgagccttcctcccaggagggaggtgatactgacttgagatcttatgggtgttttgtttgtggctgggcctggccgaccctctctccacggccttagatcacactctggatggataggacagtcgtcctcaatactgagcctctttggagcatacccactgatggtggttcacaagctacccacgcccacaggctgacccagatctccgtgaaattaaaaaatactgtgaaaggaaaaagagccaatgtcatgtggataatgaagtgtcagccactgaaaaatctcaaaataataaaca

SEQ ID NO: 46304 - DNA, 699 bp, Homo Sapiens
cccaggccatcatctatgctgatggaggcacgtgtggatctcatcgacctggacttgtgtaactcgacccagtggtacaatgagcacgttcagccaaccaatgtgtgcgcggggtatcctgtaggcaagatcgacacctgccagggggacagcggcgggcctctcatgtgcaaagacagcaaggaaagcgcctgtgtggtcgtgggaatcacaagctggggggtaggctgtgcccgtgccaagcgccccggaatctacacggccacctggccctatctgaactggatcgcctccaagattggttctaacgctttgcgtatgattcaatcggccacccctccacctcccaccactcgaccgcccccgattcgaccccccttctcccaccctctctctgctcaccttccttggtatttccaaccgccccctcgaccacttccaccccgaccaccggcagcccagccccgacccccaccttcacccccgcccccacccccacccccaccctcacctttacccccacccccacccccacccccacctacaccctcatctaccacaaaacttccccaaggactttcttttgccaagcgcctacagcagctcatagaggtcttgaaggggaagacctattccgacggaaagaaccattatgacatggagaccacagagctcccagaactgacctcgacctcctga

SEQ ID NO: 46305 - DNA, 1949 bp, Homo Sapiens
agcacagtccctctgagctgcacggagacctcgcaggcccccggaactgtcgcccttccaggatgtggctccctgctcttgtcctggccactctcgctgcttccgcggcttgggggcatccgtcctcgccacctgtggtggacaccgtgcatggcaaagtgctggggaagttcgtcagcttagaaggatttgcacagcctgtggccattttcctgggaatcccttttgccaagccgcctcttggacccctgaggtttactccaccgcagcctgcagaaccatggagctttgtgaagaatgccacctcgtaccctcctatgtgcacccaagatcccaaggcggggcagttactctcagagctatttacaaaccgaaaggagaacattcctctcaagctttctgaagactgtctttacctcaatatttacactcctgctgacttgaccaagaaaaacaggctgccggtgatggtgtggatccacggaggggggctgatggtgggtgcggcatcaacctatgatgggctggcccttgctgcccatgaaaacgtggtggtggtgaccattcaatatcgcctgggcatctggggattcttcagcacaggggatgaacacagccgggggaactggggtcacctggaccaggtggctgccctgcgctgggtccaggacaacattgccagctttggagggaacccaggctctgtgaccatctttggagagtcagcgggaggagaaagtgtctctgttcttgttttgtctccattggccaagaacctcttccaccgggccatttctgagagtggcgtggccctcacttctgttctggtgaagaaaggtgatgtcaagcccttggctgagcaaattgctatcactgctgggtgcaaaaccaccacctctgctgtcatggttcactgcctgcgacagaagacggaagaggagctcttggagacgacattgaaaatgttaggtgctgcactgctctctccccagagtcaaccccttctgggcactgtgattgatgggatgctgctgctgaaaacacctgaagagcttcaagctgaaaggaatttccacactgtcccctacatggtcggaattaacaagcaggagtttggctggttgattccaatgttgatgagctatccactctccgaagggcaactggaccagaagacagccatgtcactcctgtggaagtcctatccccttgtttgcattgctaaggaactgattccagaagccactgagaaatacttaggaggaacagacgacactgtcaaaaagaaagacctgttcctggacttgatagcagatgtgatgtttggtgtcccatctgtgattgtggcccggaaccacagagatgctggagcacccacctacatgtatgagtttcagtaccgtccaagcttctcatcagacatgaaacccaagacggtgataggagaccacggggatgagctcttctccgtctttggggccccatttttaaaagagggtgcctcagaagaggagatcagacttagcaagatggtgatgaaattctgggccaactttgctcgcaatggaaaccccaatggggaagggctgccccactggccagagtacaaccagaaggaagggtatctgcagattggtgccaacacccaggcggcccagaagctgaaggacaaagaagtagctttctggaccaacctctttgccaagaaggcagtggagaagccaccccagacagaacacatagagctgtgaatgaagatccagccggccttgggagcctggaggagcaaagactggggtcttttgcgaaagggattgcaggttcagaaggcatcttaccatggctggggaattgtctggtggtggggggcaggggacagaggccatgaaggagcaagttttgtatttgtgacctcagctttgggaataaaggatcttttgaaggccaaa

SEQ ID NO: 46306 - DNA, 1619 bp, Homo Sapiens
gcctgagaccctcctgcagccttctcaagggacagccccactctgcctcttgctcctccagggcagcaccatgcagcccctgtggctctgctgggcactctgggtgttgcccctggccagccccggggccgccctgaccggggagcagctcctgggcagcctgctgcggcagctgcagctcaaagaggtgcccaccctggacagggccgacatggaggagctggtcatccccacccacgtgagggcccagtacgtggccctgctgcagcgcagccacggggaccgctcccgcggaaagaggttcagccagagcttccgagaggtggccggcaggttcctggcgttggaggccagcacacacctgctggtgttcggcatggagcagcggctgccgcccaacagcgagctggtgcaggccgtgctgcggctcttccaggagccggtccccaaggccgcgctgcacaggcacgggcggctgtccccgcgcagcgcccgggcccgggtgaccgtcgagtggctgcgcgtccgcgacgacggctccaaccgcacctccctcatcgactccaggctggtgtccgtccacgagagcggctggaaggccttcgacgtgaccgaggccgtgaacttctggcagcagctgagccggccccggcagccgctgctgctacaggtgtcggtgcagagggagcatctgggcccgctggcgtccggcgcccacaagctggtccgctttgcctcgcagggggcgccagccgggcttggggagccccagctggagctgcacaccctggaccttggggactatggagctcagggcgactgtgaccctgaagcaccaatgaccgagggcacccgctgctgccgccaggagatgtacattgacctgcaggggatgaagtgggccgagaactgggtgctggagcccccgggcttcctggcttatgagtgtgtgggcacctgccggcagcccccggaggccctggccttcaagtggccgtttctggggcctcgacagtgcatcgcctcggagactgactcgctgcccatgatcgtcagcatcaaggagggaggcaggaccaggccccaggtggtcagcctgcccaacatgagggtgcagaagtgcagctgtgcctcggatggtgcgctcgtgccaaggaggctccagccataggcgcctagtgtagccatcgagggacttgacttgtgtgtgtttctgaagtgttcgagggtaccaggagagctggcgatgactgaactgctgatggacaaatgctctgtgctctctagtgagccctgaatttgcttcctctgacaagttacctcacctaatttttgcttctcaggaatgagaatctttggccactggagagcccttgctcagttttctctattcttattattcactgcactatattctaagcacttacatgtggagatactgtaacctgagggcagaaagcccaatgtgtcattgtttacttgtcctgtcactggatctgggctaaagtcctccaccaccactctggacctaagacctggggttaagtgtgggttgtgcatccccaatccagataataaagactttgtaaaacatgaataaaacacattttattctataa

SEQ ID NO: 46307 - DNA, 1554 bp, Homo Sapiens
gcacagggaaccctgattattcagggggtagccccagaggatgctgggaattacagctgccaggcgactaatgaggttggcactgaccaggagacggtcaccctctactacacagacccaccgtcggtctctgctgtaaatgccgtggtgctggtggccgttggggaggaggctgtgttggtgtgtgaggcatctggggttcccccgccccgagtcatctggtatcgagggggtcttgaaatgatcctggcccctgagggctccagctctgggaagctgcggatcccggcggctcaggagagggatgctggcacctacacctgccgggctgtcaatgagttgggtgacgcctctgcagaaatccagctggcggttggactcccacctaccatcgagggcgccggtggaagaccatacgtggtgaaggctgtggctgggaggcctgtggcgctggagtgcgtggccagaggccacccgtcccccaccctctcctggcaccacgaggggctgcccgtggcagagagcaacgagtcgcggctggagacagacgggagtgtgctgaggctggagagcccgggggaggcatccagtggcctgtacagctgtgtggccagcagtcctgccggggaagccgtcctgcagtactccgtggaggttcaggtgcccccacagctcctggtggctgaaggcttgggacaggtgaccaccatcgtgggacagcccctggaacttccctgccaggcctcaggctccccagtacccactatccagtggctgcagaatggccgcccagccgaggagctggctggggtgcaggtggcctcgcaggggaccacactgcacattgaccatgtggagctggaccactcaggcctcttcgcctgccaggccaccaatgaggcgggcactgccggggccgaggtggaggtgtctgtgcatgtcccaccagtgatcgagaatggcctcccagacctgtccaccaccgaaggctcccacgccttcttgccttgcaaggcgaggggcagtcctgagcccaacatcacctgggacaaagatggccagcctgtgtcgggcgccgaggggaagttcaccatccagccttctggggagttgctggtgaagaacttggagggccaggacgcaggcacctatacctgtaccgctgagaacgccgtgggccgggcccgccgccgcgtgcacctcaccatcctggtactgcctgtgttcaccaccctgcctggggaccgcagcctgcgccttggggacaggctgtggcttcgctgtgctccggtgttccaggtggagccccaggacatgacagtgagatctggggatgacgtggccctgcggtgccaggccactggagagcccacacccaccattgaatggctacaggcgggtcaacccttgcgggccagccggcggctccggaccctgcccgatgggagcctgtggctggagaacgtggagactggggatgcaggcacctacgactgcgtcgctcacaacctcctgggctctgccacagcccgggcgttcctggtcgtgagaggt

SEQ ID NO: 46308 - DNA, 1610 bp, Homo Sapiens
tgcacaaggatggctctgaaatggactacagttctgctgatacaactcagtttttactttagctctgggagttgtggaaaggtgctggtatgggccgcagaatacagcctttggatgaatatgaagacaatcctgaaagaacttgttcagagaggtcatgaggtgactgtactggcatcttcagcttccattctttttgatcccaacgactcatccactcttaaacttgaagtttatcctacatctttaactaaaactgaatttgagaatatcatcatgcaattggttaagagattgtcagaaattcaaaaagatacattttggttacctttttcacaagaacaagaaatcctgtgggcaattaatgacataattagaaacttctgtaaagatgtagtttcaaataagaaacttatgaaaaaactacaagagtcaagatttgacatcgtttttgcagatgcttatttaccctgtggtgagctgctggctgagctatttaacataccctttgtgtacagtcacagcttcagtcctggctactcatttgaaaggcacagtggaggatttattttccctccttcctacgtacctgttgttatgtcaaaattaagtgatcaaatgactttcatggagagggtaaaaaatatgctctatgtgctttattttgacttttggttccaaatatttaatatgaagaagtgggatcagttttacagtgaagttttaggaagacccactacattatctgagacaatgaggaaagctgacatatggcttatgcgaaactcctggaattttaaatttcctcatccattcttaccaaatgttgattttgttggaggactccactgcaaacctgccaaacccctacctaaggagtttgtacagagctctggagaaaatggtgttgtggtgttttctctggggtcaatggtcagtaacatgacagaagaaagggccaacgtaattgcaacagcccttgccaagatcccacaaaaggttctttggagatttgatgggaataaaccagatgccttaggtctcaatactcgactgtacaagtggataccccagaatgaccttctaggtcatccaaaaaccagagcttttataactcatggtggagccaatggcatctatgaggcaatctaccatgggatccctatggtgggcattccattgttttttgatcaacctgataatattgctcacatgaaggccaagggagcagctgttagagtggacttcaacacaatgtcgagtacagacctgctgaatgcactgaagacagtaattaatgatccttcatataaagagaatattatgaaattatcaagaattcaacatgatcaaccagtgaagcccctggatcgagcagtcttctggattgaatttgtcatgcgccacaaaggagccaaacatcttcgagttgcagcccacaacctcacctggttccagtaccactctttggatgtgattgggttcctgctggcttgtgtggcaaccgtgctatttatcatcacaaagtgttgtctgttttgtttctggaagtttgctagaaaaggaaagaagggaaaaagggattagttatatctgagatttgaagctgg

SEQ ID NO: 46309 - DNA, 2900 bp, Homo Sapiens
ccgggagtcggtgaggcggctgcaggtccctccctgcggagccgctggtccggctggcggagatgtgaccgcgggcccggccggcctgcctcaggcgtcgcgtcagctcccgtgtccgtgcccttaacccacaccgatggcgggatccggctgcgcctggggcgcggagccgccgcgttttctggaggccttcgggcggctgtggcaggtacagagccgtctgggtagcggctcctccgcctcggtgtatcgggttcgctgctgcggcaaccctggctcgccccccggcgccctcaagcagttcttgccgccaggaaccaccggggctgcggcctctgccgccgagtatggtttccgcaaagagagggcggcgctggaacagttgcagggtcacagaaacatcgtgactttgtatggagtgtttacaatccacttttctccaaatgtgccatcacgctgtctgttgcttgaactcctggatgtcagtgtttcggaattgctcttatattccagtcaccagggttgttccatgtggatgatacagcattgtgcccgagatgttttggaggcccttgcttttcttcatcatgagggctatgtccatgcggacctcaaaccacgtaacatattgtggagtgcagagaatgaatgttttaaactcattgactttggacttagcttcaaagaaggcaatcaggatgtaaagtatattcagacagacgggtatcgggctccagaagcagaattgcaaaattgcttggcccaggctggcctgcagagtgatacagaatgtacctcagctgttgatctgtggagcctaggaatcattttactggaaatgttctcaggaatgaaactgaaacatacagtcagatctcaggaatggaaggcaaacagttctgctattattgatcacatatttgccagtaaagcagtggtgaatgccgcaattccagcctatcacctaagagaccttatcaaaagcatgcttcatgatgatccaagcagaagaattcctgctgaaatggcattgtgcagcccattctttagcattccttttgcccctcatattgaagatctggtcatgcttcccactccagtgctaagactgctgaatgtgctggatgatgattatcttgagaatgaagaggaatatgaagatgttgtagaagatgtaaaagaggagtgtcaaaaatatggaccagtggtatctctacttgttccaaaggaaaatcctggcagaggacaagtctttgttgagtatgcaaatgctggtgattccaaagctgcgcagaaattactgactggaaggatgtttgatgggaagtttgttgtggctacattctacccgctgagtgcctacaagaggggatatctgtatcaaaccttgctttaatcagtaacctaaggactgtttcctttttctcctcttccatttcttgggttattccacatatgaatgcaggactacccccttaccattttaagaaggtactttatacatttatttaatcctactaatgtgcagccattgcccaagcagtgactgcgttgcatacatttggcactgagtaggacaagacctctcagctatacattgaggggttttagagcatccatgtgggcaacccttttttgtgcgggagagcaggtgttgctcttcagtatgtagcctaaaaaaatcttaattatttcatggatcatgaagcaaggatgaataatatcatgtcttggtaaatactaacaaatttgttaggtttggtgacatcatttacagattatttctttatgttgtccagtggttcttccttattgttgatatccataagctggcactggatgctctcagtaatgttaagtaattgtcaagcagcagttacctactgtgttcttaacactgagttgtgaattttttcttaaagcagtactgtagtactgaatattcctttaaaggaactgcagtgagcctatctaagtttttttaaattaaggcttttaaaatagaaagctgatgcttgatcttgcacaatttttatgtctagtatgtatgcttgagtgaatgtgcgagtatgaatgattagagaaaatttgagtcagtgtactttatagtgtgaatcctgtgagctaatacagtctatacttatttcttccctacctgtttcacatccgtaagatttaagatatacattttttgagaggtagtctgtctgatacaatgtaaatgacaaaacataattcctgagaggcccagaacaaactggagtctagcctggagttaaattgagacttctaaaatgattggaacaaagactaagttgtgccagatgtaaatcaacccctcttttagtttactttagactttgtattagctcatcttttttgtagtaaatctatagttttaaggtttctcaagatgtggctctacctactatgatgaaaattgaagtgggtcaaaagaattagatgtacagtgaagggaaaagaaaaaaaatgggcgaagagagggtggaaaataaaaggattcttttttcttcctttctgtttctcgtatccctgctccctttttcctccccttccctcattctttgcctctatccttagctgaagacaaactagaggagcagcatcccaggtagtttggcttttgactgcaaggtagttaagaaaggtgtagatataatgaggtagaagtagaaaggaagaaaaactcaaagaattcttaaaaggattcatagcaacataatgtgtccctgagtagaggatgctgctatgcgtgagttcatggacacaagttgattacatggtttttagaattataattatggattcttcttatttcatggtaggttgtctttaaagatataaaaattaggatgcctttatgaagcactgattatacc

SEQ ID NO: 46310 - DNA, 579 bp, Homo Sapiens
atgaagctaaagcagcgagtcgtgctgttagcaattctccttgtcatttttatcttcaccaaagttttcctgattgacaacttagatacatcagctgccaaccgggaggaccagagggcctttcaccgaatgatgactggcttgcgggtggagctggcacccaagctggaccataccttgcagtctccctgggagattgcagcccagtgggtggttccccgggaagtgtaccctgaagagacaccagagctgggggcagtcatgcatgccatggccaccaagaaaatcattaaagctgatgtgggttataaagggacacagctgaaagccttactgatacttgaaggaggccagaaagttgttttcaaacctaagcggtatagccgagaccatgtggtggaaggggaaccgtatgctggttatgatagacacaatgcagaggtagcagcctttcacttggacaggattctgggtttccaccgagcccccttggtagttggcagatttgttaatcttcggacagagatcaaacctgtcgccacagagcagctgttgagcaccttcctaactgtaggtaag

SEQ ID NO: 46311 - DNA, 610 bp, Homo Sapiens
ctcaggaacagccttctcctgcctcctctgcacctggacaactcaactcctgccaagatgtcctgccagcagaaccagcagcagtgccaacccccacccaagtgtccctcacccaagtgtcccccaaagagcccagtacagtgtctgcctccagcttcctctggctgtgccccaagctctgggggctgtggccctagctccgagggcggctgcttcctgaaccaccacaggcgccaccaccgatgccggcgccagaggcccaactcctgtgacaggggcagtggtcagcaaggcgggggctctggctgcggccatggctctggaggctgctgctgacctggatcctgatgctgagacaagcgattttggaggaaacaagaatcccaagggcccaggaaaaccccatcttgatgcatgagttcccagataccctcttctggctttcacaggctgagctaggggttttcctgtggaaggtctgagctctccccagaaggcacttcctgtctgatgtccaggatgtcacatgttcccttacccctgtacctgtgaaggattggcagtgcttgtgcctgacctcatcaaaaaataaagctccttgtcctcatta

SEQ ID NO: 46312 - DNA, 1726 bp, Homo Sapiens
gggcgggaagagggaagcgccgaggctgcctgactggaatgagggtagctgcggcgactgcggcggctggagcggggccggccatggcggtgtggacgcgggccaccaaagcggggctggtggagctgctcctgagggagcgctgggtccgagtggtggccgagctgagcggggagagcctgagcctgacgggcgacgccgccgcggccgagctggagcccgctctgggacccgcggccgccgccttcaacggcctcccaaacggcggcggcgcgggcgactcgctgcccgggagcccaagccgcggcctggggcccccgagcccgccggcgccgcctcggggccccgcgggtgaggcgggcgcgtcgccgcccgtgcgccgggtgcgggtggtgaagcaagaggcgggcggcctgggcatcagcatcaagggcggccgcgagaaccggatgccgatcctcatctccaagatcttccccgggctggctgccgaccagagccgggcgctgcggctgggcgacgccatcctgtcggtgaacggcaccgacctgcgccaggccacccacgaccaggccgtgcaggcgctgaagcgcgcgggcaaggaggtgctgctggaggtcaagttcatccgagaagtaacaccatatatcaagaagccatcattagtatcagatctgccgtgggaaggtgcagccccccagtcaccaagctttagtggcagtgaggactctggttcgccaaaacaccagaacagcaccaaggacaggaagatcatccctctcaaaatgtgctttgctgctagaaacctaagcatgccggatctggaaaacagattgatagagctacattctcctgatagcaggaacacgttgatcctacgctgcaaagatacagccacagcacactcctggttcgtagctatccacaccaacataatggctctcctcccacaggtgttggctgaactcaacgccatgcttggggcaaccagtacagcaggaggcagtaaagaggtgaagcatattgcctggctggcagaacaggcaaaactagatggtggaagacagcaatggagacctgtcctcatggctgtgactgagaaggatttgctgctctatgactgtatgccgtggacaagagatgcctgggcgtcaccatgccacagctacccacttgttgccaccaggttggttcattctggctccggatgtcgatccccctcccttggatctgaccttacatttgctaccaggacaggctctcgacagggcattgagatgcatctcttcagggtggagacacatcgggatctgtcatcctggaccaggatacttgttcagggttgccatgctgctgctgagctgatcaaggaagtctctctaggctgcatgttaaatggccaagaggtgaggcttactattcactatgaaaatgggttcaccatctcaagggaaaatggaggctccagcagcatattgtaccgctacccctttgaaaggctgaagatgtctgctgatgatggcatccgaaatctatacttggattttggtggtcccgagggagaactgaccatggacctgcactcttgtccgaagccgattgtatttgtgttgcacacgtttttatcggccaaagtcactcgtatgggactgcttgtatgagcaacaaaaaatcagaaaagagccttgactgtcacaagaaatatttccacctcaaaaaaaaaaaa

SEQ ID NO: 46313 - DNA, 447 bp, Homo Sapiens
atggacatctcttgggacaactggcacaagtgccacaaaaccagggacaagagaaagccctaccacaagaagcggaagtatgagttggggcacccagctgccaacaccaagactggcccccgccgcatccacacagtccgtgtgtggggaggtaacaagaaatactgtgccctgaggctggacgtgaggaatttctcctggggctcagaatgttgtgctcataaaacaacgatcatcgatgttgtctacaatgcatctaataacgagctggttcgtcccaagaccctggtgaagaattgcattgtgctcattgacagcacactgtaccgacagtggtacgagtcccactatgcgccgcccctgggctgcaagaagggagccaagctgactcctgaggaagaagagattttgaacaaaaagcgatctaaaaaaattcagaagaaatat

SEQ ID NO: 46314 - DNA, 3481 bp, Homo Sapiens
gcggcgacgcgggcggcgggcggcgcggggcggtccggcgggttcaaagaggaaaacatggcggaaaacaaaggcggcggcgaggctgagagcggcggcgggggcagcggcagcgcgccggtaactgccggggccgccgggcccgccgcgcaggaggcggagccgcctctcaccgcggtgctggtggaggaggaggaggaggaaggcggcagggccggcgctgagggcggcgcggccgggcccgacgacgggggggtggccgcggcctcctcgggctcggcccaggctgcttcatctcctgcggcctcagtgggcactggagttgccgggggcgcagtatcgacgccggctccagctccagcctcggctcccgctccgggtccctcggcagggccgcctcctggaccgccagcctcgctcctggacacctgcgccgtgtgtcagcagagcttgcagagccggcgtgaggcggagcccaagctgctgccctgtcttcactccttctgcctgcgctgcctgcccgagccggagcgccagctcagcgtgcccatcccggggggcagcaacggcgacatccagcaagttggtgtaatacggtgcccagtatgccgccaagaatgcagacagatagaccttgtggataattattttgtgaaagacacatctgaagctcctagcagttctgatgaaaaatcagaacaggtatgtactagttgtgaagacaatgcaagtgcagttggcttttgtgtagaatgtggagagtggctatgtaagacatgtatcgaagcacatcaaagagtaaaatttactaaagatcacttgatcaggaagaaagaagatgtctcagagtctgttggagcatctggtcaacgccctgttttctgccctgtacacaaacaagaacagttgaaacttttctgtgaaacatgtgatagattgacatgtagagactgtcagctattggaacacaaagaacataggtatcagtttttggaagaagcttttcaaaatcagaagggtgcaattgagaatctactggcgaaacttcttgagaagaagaattatgttcattttgcagctactcaggtgcagaataggataaaagaagtaaatgagactaacaaacgagtagaacaggaaattaaagtggccattttcacccttatcaatgaaattaataagaaaggaaaatctctcttacaacagctagagaatgttacaaaggaaagacagatgaagttactacagcagcagaatgacatcacaggcctttcccggcaggtgaagcatgttatgaacttcacaaattgggcaattgcaagtggcagcagcacagcactactatacagcaagcgactgattactttccagttgcgtcatattttgaaagcacggtgtgatcctgtccctgctgctaatggagcaatacgtttccattgtgatcccaccttctgggcaaagaatgtagtcaatttaggtaatctagtaatagagagtaaaccagctcctggttatactcctaatgttgtagttgggcaagttcctccagggacaaaccacattagtaaaacccctggacagattaacttagcacagcttcgactccagcacatgcaacaacaagtatatgcacagaaacatcagcagttgcaacagatgaggatgcagcaaccaccagcacctgtaccaactacaacaacaacaacacaacagcatcctagacaagcagcccctcagatgttacaacaacagcctcctcgattgatcagtgtgcaaacaatgcaaagaggcaacatgaactgtggagcttttcaagcccatcagatgagactggctcagaatgctgccagaataccagggatacccaggcacagcggccctcaatattccatgatgcagccacacctccaaagacaacactcaaacccagggcatgctggaccctttcccgtagtatcggtacacaacaccacaatcaacccaacgagccctactacagcaactatggcaaatgcaaaccgaggtcccaccagcccatctgttacagcaatagagctaatcccctcagttaccaatccagaaaaccttccatcgctgccagatattccacccatacagttggaagatgctggctcaagtagtttagataatctactaagtagatacatctcaggcagtcacctacccccacagcctacaagcaccatgaatccttctccaggtccctctgccctttctccgggatcatcaggtttatccaattctcacacacctgtgagacccccaagtacttctagtactggcagtcgaggcagctgtgggtcatcaggaagaactgctgagaagacaagtcttagtttcaaatctgatcaggtgaaggtcaagcaagaacctgggactgaagatgaaatatgtagcttttcaggaggtgtaaaacaagaaaaaacagaggatggcaggaggagtgcttgcatgttgagcagtcctgagagtagcttgacaccacctctctcaaccaacctgcatctagaaagtgaattggatgcattggcaagcctggaaaaccatgtgaaaattgaacctgcagatatgaatgaaagctgcaaacagtcagggctcagcagccttgttaatggaaagtccccaattcgaagcctcatgcacaggtcggcaaggattggaggagatggcaacaataaagatgatgacccaaatgaagactggtgtgctgtctgccaaaacggaggagatctcttgtgctgcgaaaaatgtccaaaggtctttcatctaacttgtcatgttccaacactacttagctttccaagtggggactggatatgcacattttgtagagatattggaaagccagaagttgaatatgattgtgataatttgcaacatagtaagaaggggaaaactgcgcaggggttaagccccgtggaccaaaggaaatgtgaacgtcttctgctttacctctattgccatgaattaagtattgaattccaggagcctgttcctgcttcgataccaaactactataaaattataaagaaaccaatggatttatccaccgtgaaaaagaagcttcagaaaaaacattcccaacactaccaaatcccggatgactttgtggccgatgtccgtttgatcttcaagaactgtgaaaggtttaatgaaatgatgaaagttgttcaagtttatgcagacacacaagagattaatttgaaggctgattcagaagtagctcaggcagggaaagcagttgcattgtactttgaagataaactcacagagatctactcagacaggaccttcgcacctttgccagagtttgagcaggaagaggatgatggtgaggtaactgaggactctgatgaagactttatacagccccgcagaaaacgcctaaagtcagatgagagaccagtacatataaagtaaaatgacatggatttaaatcaattgtttaaaaaaaaaaaaa

SEQ ID NO: 46315 - DNA, 342 bp, Homo Sapiens
gaatctggactgggaaagttgacattaatcaactcattattcctcacagatttgtattctccagagtatccaggtccttctcagagaattaaaaaacctgtacagatggaacaatccaaagttttaatcaaagaaggtggtgttcagttgctgcttacaatagttgataccccaggatttggagatgcagtggataatagtaattgctggcagcctgctatcaattatattgatagtaaatttgaggactacctaaatgcagaatcgcgagtgaacagatgtcagatgcctggtaacagggtgcagtgttgtttatacttcattgctccttcaggacatggg

SEQ ID NO: 46316 - DNA, 513 bp, Homo Sapiens
gaagtttgctacgaaagactcggctgcttcagtgatgactccccatggtcaggaattacggaaagacccctccatatattgccttggtctccaaaagatgtcaacacccgcttcctcctatatactaatcaactttcaaggttggacccagcagaaccttgctttcagggcacacctgaattagtccgattggaccccagcgatgccaaatttgtggatgtaattcacacggatggtgcccccatagtccccaatttggggtttggaatgagccaagtcgtgggccacctagatttctttccaaatggaggagtggaaatgcctggatgtaaaaagaacattctctctcagattgtggacatagacggaatctgggaaggctcaacccattcctatgagtttgatgcaaagctggatgttggaacaattgagaaagtcaagtttctttggaataacaatgtgataaatccaaccctccccaaagtgggtgccaccaagatcactgtgcaaaag

SEQ ID NO: 46317 - DNA, 1026 bp, Homo Sapiens
atggatctaacttatattcccgaagacctatccagttgtccaaaatttgtaaataaactgtcctcccaccaaccgctcttttcatgtccaggtgataatgtattcggttatgactggagccatgattatctattcggaaacttggttataatggtttccatatcgcatttcaaacagcttcactctcccacaaactttctgatcctctccatggcaaccacggactttctgctgggttttgtcattatgccatacagcataatgcgatcagtggagagttgctggtactttggggatggcttttgtaaattccacacaagctttgacatgatgctcagactgacctccattttccacctctgttccattgctattgaccgattttatgccgtgtgttaccctttacattacacaaccaaaatgacgaactccaccataaagcaactgctggcattttgctggtcagttcctgctcttttttcttttggtttagttctatctgaggccgatgtttccggtatgcagagctataagatacttgttgcttgcttcaatttctgtgcccttactttcaacaaattctgggggacaatattgttcactacatgtttctttacccctggctccatcatggttggtatttatggcaaaatctttatcgtttccaaacagcatgctcgagtcatcagccatgtgcctgaaaacacaaagggggcagtgaaaaaacacctatccaagaaaaaggacaggaaagcagcgaagacactgggtatagtaatgggggtgtttctggcttgctggttgccttgttttcttgctgttctgattgacccatacctagactactccactcccatactaatattggatcttttagtgtggctccggtacttcaactctacttgcaaccctcttattcatggcttttttaatccatggtttcagaaagcattcaagtacatagtgtcaggaaaaatatttagctcccattcagaaactgcaaatttgtttcctgaagcacattaa

SEQ ID NO: 46318 - DNA, 507 bp, Homo Sapiens
cgacgcagagcagcgccctggccgggccaagcaggagccggcatcatggattccttcaaagtagtgctggaggggccagcaccttggggcttccggctgcaagggggcaaggacttcaatgtgcccctctccatttcccggctcactcctgggggcaaagcggcgcaggccggagtggccgtgggtgactgggtgctgagcatcgatggcgagaatgcgggtagcctcacacacatcgaagctcagaacaagatccgggcctgcggggagcgcctcagcctgggcctcagcagggcccagccggttcagagcaaaccgcagaaggcctccgcccccgccgcggaccctccgcggtacacctttgcacccagcgtctccctcaacaagacggcccggccctttggggcgcccccgcccgctgacagcgccccgcagcagaatgggtgcagacccctgacaaacagccgctccgaccgctggtcccagatgccagcaagcagcggctga

SEQ ID NO: 46319 - DNA, 1258 bp, Homo Sapiens
gccaggaccctggaaggaagcaggatggcagccggaacagcagttggagcctgggtgctggtcctcagtctgtggggggcagtagtaggtgctcaaaacatcacagcccggattggcgagccactggtgctgaagtgtaagggggcccccaagaaaccaccccagcggctggaatggaaactgggaggaggcccctgggacagtgtggctcgtgtccttcccaacggctccctcttccttccggctgtcgggatccaggatgaggggattttccggtgccaggcaatgaacaggaatggaaaggagaccaagtccaactaccgagtccgtgtctaccagattcctgggaagccagaaattgtagattctgcctctgaactcacggctggtgttcccaataaggtggggacatgtgtgtcagagggaagctaccctgcagggactcttagctggcacttggatgggaagcccctggtgcctaatgagaagggagtatctgtgaaggaacagaccaggagacaccctgagacagggctcttcacactgcagtcggagctaatggtgaccccagcccggggaggagatccccgtcccaccttctcctgtagcttcagcccaggccttccccgacaccgggccttgcgcacagcccccatccagccccgtgtctgggagcctgtgcctctggaggaggtccaattggtggtggagccagaaggtggagcagtagctcctggtggaaccgtaaccctgacctgtgaagtccctgcccagccctctcctcaaatccactggatgaaggatgtgagtgacctggagagaggggctgggagaaccaggcgaggaggggccaactgcaggctctgtgggaggatcagggctgggaactctagccctggccctggggatcctgggaggcctggggacagccgccctgctcattggggtcatcttgtggcaaaggcggcaacgccgaggagaggagaggaaggccccagaaaaccaggaggaagaggaggagcgtgcagaactgaatcagtcggaggaacctgaggcaggcgagagtagtactggagggccttgaggggcccacagacagatcccatccatcagctcccttttctttttcccttgaactgttctggcctcagaccaactctctcctgtataatctctctcctgtataaccccaccttgccaagctttcttctacaaccagagccccccacaatgatgattaaacacctgacacatcttg

SEQ ID NO: 46320 - DNA, 255 bp, Homo Sapiens
aggaatccctggataaagaccagctcaaccatcgctgagaaaacagacctaggcttcccagggcggttaacccgccggcctctgggcagagactgtaaacaaaacaaaataaaacaacaacaaaaaactcccagtgtgtttcctactcttctttgtcttggaggaaagcaaagggagagaaatggacttcaccagtggtctttggcttcatcaattcacaggaaatggcatcaagatggttcaactaagacatga

SEQ ID NO: 46321 - DNA, 1952 bp, Homo Sapiens
agatcaagtgggcagggcttcaccctaaaaggagggggcggggatccaccctagaacaagggggcggggctccaccccagaagaagggggcaaggttcagccctagaacgaaggggcggggccccaccctagaatgagtgggcggggtctatcccagaaccaggggattggactcaaccccatcaaggaggcggggctacactttagggcgacggagcagagctccagggcagggctccactgtagggcaacggggatgggcttggagcgggactctggggacgaggctccactgtagggcctgggggcagagccggggcggcgcgtgaggctaggcttcatcctagaatgagtgggcggggctcgactgatgctgatggtgagcggggccttaccgacacgcgggaccgctcgtctctagaacgcactggccctggtgacagtcgatggcgttgtccacgcccgacgtgcatttggtgacacagcggagccgggtggcctccaccagagggaagtagaactcttcatagcccgtgggagcggcgcggcggcagatggctgggggttggggaggggtatgcacagagacaaggacctcatccattctattcaggggcctgataatggtgcctctgaatatgcgcgaggaggattccatttccgaggtgggatgctgtggggtagaccctgggattcgatgaggggaggccacccccagcaccctcaccctctcctcgtggcccctgctgtcctcaggtggaagccactaaccaacgccaggaagagcctccctaggccacatgacttgcctcccgcaaaggtctctccctgcccacaggcttcaatgggcaaatgtccctggtggcaggggtcatggccatgggagaccactcagccctttaccccaccctcaccttccggggtcagctctgtcttgctgttgttgttcaccttgatggagtcaggcttaaaacacagggctgcggaaacacaggcacagatggaatgggcggggcaggtcaaggggttagggccaggaagcaggataggcacagggagggcagtgagggctctctccgtctgggggagtgtggaggggccacaggggaagactcctgttctctcccttatcccccctgaataatccgaggtcttcagccatcgggaaatgctgagcctgacgatcagggggtctcttccccagtacccaggtcctggggagaccctccctagccccactcttgatggcattgtgtgtagacttattcccgttctcccaacctgccagaggtaccacagggctggcacctgagtccagtggccccctggctgagctggagtgggctggggtgacacctcaggccctggcccctccctccagcccgggctcactctgggagtcctggcagctgttcgcatcctggctggcgttctggagcccctccttcagcgtggtcttcacctgctcatactcgctctccagctgggggctgaagggcatctccagcaggaccagggatgggttctcactatgttgcccaggctggtcttgaactggtttcaggtgatccacccacctaaccttgccaaagtgctaggattgcaagtgtgagccaccacatctggcctgacgttctcgttgcatcaagccatcatccaccgggcgcccctggacgcgcgttctctccctctctctctttctctctctctctctctaatgctgacccactcagtagagcaggggccagccagagggggacgaagtcaccaatccaggcaccaccttcccacatgtccctgcaacttctctctttccagtgtgctgaagaagggaggtgccacccctcctccagataaatggccccagaaaacgatccaaaaaaatacccagggagcgattccttatgtacctcctccacccctctctttataaaatctgatgattacaaaag

SEQ ID NO: 46322 - DNA, 612 bp, Homo Sapiens
atgaaacctgactccgggccaggagtgcctagggtcggtccagcggagcgcgcattcagcgaggggtgttcggccggggccaggcggggcccaggcggggcccgctggcagctggttcccgccgccgcagagccgcaggggcgggaatggggactcgccgcgctgcctcgaggaggaatgattccagggaccccccggggttccgagagagctgggctggtccggaatgaattccccgttcctctggctgctggccccggacacaagaccctccgtctcctgccgagagaggctcccccagccgcctcgccacgccgcagcccgtccgcgcccgcgtccccgcttacttttcgtcgcagcgatgaggttcttcccgtccttaatgagctctttgatgaacttgttggtcctctcgagttccgcttcgtgagcgcggatcctctcccggaaccacgggctgtcgaggtagcagtcgctgaactccaggggctgcagccccatgacggcagcggtcgctgcgcggtgcgcacggccgcgcgctcctgcccgagccgagctccgaggccgctgccaggtgcggcgccgcgcgttcagggagcacagaggagctag

SEQ ID NO: 46323 - DNA, 231 bp, Homo Sapiens
atgttgttctttcggagtaacccctacttccagaataaagtgattaccaaggaatatctggtgaacatcacagaatacagggcttctcattccactccaattgagtggtatccggattatgaagtggaggcctatcgccgcagacaccacaacagcagccttaacttcttcaactggttctctgaccacaacttcgcaggatctaacaagattgctgaggtgagtcctcac

SEQ ID NO: 46324 - DNA, 798 bp, Homo Sapiens
gaaaacttggctgccaaagtgtttgagtccattggcaagtttggcctggtcttagccgttgcaggaggtgtggtaaactctgccttatataatgtggatgctgggcacagagctgcgatctttgaccaattccatggagtacaggacattgtagtaggggaagggactcactttctcatcccatgggtacagaaaccaattatctttgctgttctcgaccacgtaatgctccagtcatcactggtagcaaagattattgtcaatatcacacggcggatcctcttccggcctatcgctagccaacttcctcatatcttcaccagcatcggagaggactatgatgagcgtgtgctgccgtccatctaccaaatcaagtcagtggtggcacgctttgatgctggagaactaatcacccagagagagctggtctccaggcaggtgagcgacgaccttacggagcgagcagccacctttgggttcatcctggactacgtgtccttgacacatctgactttcaggaaggagttcacagaagccgtggaagccaaaaaggtggctcagcaggaagcagagagggccagatctgtggtggaaaaggctgagcagaggaaaaaggcggccatcatctctgctgagggtgactctaaggcagccgagctgatcaccaactcactggccaccgcaggggacagcctgatcgagctgtgtaagctggaagtcgtggaggacattgcaaccagctctcgctctcggaatatcacctacctgccagcagggcagtccgtgcccctccagctg

SEQ ID NO: 46325 - DNA, 294 bp, Homo Sapiens
gatgttctggaaattaaggaggagggtgtcctcaagttccttgcagcaggaagccacttaggtagcaccaaccttgacttccaaatggaacagcacatctataaaaggaaaagtaatggcatcgacatcataaatctggagaagcttctattggcagcttgtgctattgaaaaccctgctgatgtcagcatcatctccaggaatactagctggttggctgtgctgaagtttgctgctgccattggagccactcctattgctggctgtttcattcctggaacttacactaaccag

SEQ ID NO: 46326 - DNA, 309 bp, Homo Sapiens
gaggtgcagctggtggagtctgggggaggcttggtccagcctgggggttctctgagactctcatgtgcagcctctggattcaccttcagtgaccactacatgagctgggtccgccaggctcaagggaaagggctagagttggtaggtttaataagaaacaaagctaacagttacacgacagaatatgctgcgtctgtgaaaggcagacttaccatctcaagagaggattcaaagaacacgctgtatctgcaaatgagcaacctgaaaaccgaggacttggccgtgtattactgtgctagagacacagtg

SEQ ID NO: 46327 - DNA, 750 bp, Homo Sapiens
gttgagatgaaacggcaactacggcgactacgggagctccacctatacagcacatggaagaagtaccaagaggcgatgaagacatccttgggagttccacaatgtgagcgtgacgaaggctccttgggcaagccattgtgtccacccgagatactctcggagacgttgccaggctctgtgaagaaaagggtatgctttccatcagaagatcatctagaggagtttatagcagaacatctccctgaagcatccaatcagagtctcctcactgttgcccatcgactctgtttcctaggtgacctggaagacctggaggagcatgggccagggcagacagtctctgaggaagccacagaagttcacacgatggagggggacccagacacactggccgaatttctgatcagggatgtacttcaggagctgtccagttacaacggtgaggaggaggacccagaggaggtgaagacatccttgggagttccacaacgtggtgacctggaagacctggaggagcatgtgccagggcagacagtctctgaggaagccacaggggttcacatgatgcaggtggacccagccacgctggcaaagagtgacctggaagacctggaggagcatgtgccagagcagacagtctctgaggaagccacaggggttcacatgatgcaggtggacccagccacactggcaaagcgtacgtattctgggatcatctctttgtttaggtgtgaaatcttagtgttgtaa

SEQ ID NO: 46328 - DNA, 2797 bp, Homo Sapiens
gtttgcgtttgaacctcttggcgggtgccggccatggcggcttcgctcccgggacctgggagccggcttttccgcacatatggggctgcggacggcaggagacagcggcggccgggccgggaagccgcgcagtggttcccgccgcaggaccggaggcgtttcttcaacagcagcggcagcagcgacgccagcatcggcgacccctcgcagtccgacgatcctgacgatcccgacgaccccgacttccccggcagcccggtgaggcggcggcggaggcgtcccggcggccgagtgcccaaggaccggcccagcctgaccgtgaccccaaagcgctggaagctgcgagctcgcccaagcctaaccgtgaccccaagacgcctggggctgcgagctcggcccccgcagaagtgcagcacaccctgcggcccgctccgacttccgcccttccccagccgcgactccggccgcctcagcccggacctcagcgtgtgcggccagcccagggacggcgacgagctgggcatcagtgcctccctgttcagctctctggcctcgccctgccccgggtccccaacgccaagggacagtgtcatctcgatcggcacctccgcctgtctggttgcagcctcagccgtcccgagcggcctccacctcccagaagtctccctggaccgagcatctctcccctgctcccaggaggaagcgacaggaggagccaaggacaccaggatggtccaccaaacccgcgccagcctcaggtcagttctctttggccttatgaactcaggaacccctgaggattctgagtttcgggcagatgggaagaatatgagagagtcctgctgtaaaaggaaactggtggtgggaaatggaccagagggtccaggtctgtcaagcacaggcaagaggagggccacaggccaggactcttgtcaagagagagggcttcaagaggccgtccggagagagcatcaggaggccagtgttcccaagggccgcattgtgccaaggggaatagacaggctggagagaactagatcaagccggaagagcaaacatcaggaggcaacggaaacctctctcctccattcccaccgctttaaaaagggccaaaagctgggaaaagattcgttccccacccaggacctgactcctttacagaatgtctgcttttggaccaaaaccagggcttccttcagtttccacaagaagaaaattgtgactgatgtgtcagaggtctgcagcatctataccactgccacttctctctctggatccctcctatcagaatgttcaaaccggcctgtcatgaacagaacaagtggtgctccgtcctcttggcactcctcctctatgtatttgctaagccccttaaacactctaagtatttcaaacaaaaaggcatctgatgctgaaaaggtttatggggaatgcagtcagaagggtcctgtcccctttagccattgccttcccacagaaaaactgcaacgctgtgagaagattggggaaggggtgtttggcgaagtgtttcaaacaattgctgatcacacacccgtagccataaaaatcattgctattgaaggaccagatttagtcaatggatcccatcagaaaacctttgaggaaatcctgccagagatcatcatctccaaagagttgagcctcttatccggtgaagtgtgcaaccgcacagaaggctttatcgggctgaactcagtgcactgtgtccagggatcttaccctcccttgctcctcaaagcctgggatcactataattcaaccaaaggctctgcaaatgaccggcctgatttttttaaagacgaccagctcttcattgtgctggaatttgagtttggagggattgacttagagcaaatgcgaaccaagttgtcttccttggctactgcaaagagcattctacaccagctcacagcctccctcgcagtggcagaggcatcactgcgctttgagcaccgagacttacactgggggaacgtgctcttaaagaaaaccagcctcaaaaaactccactacaccctcaatgggaagagcagcactatccccagctgtgggttgcaagtgagcatcattgactacaccctgtcgcgcttggaacgggatgggattgtggttttctgtgacgtttccatggatgaggacctgtttaccggtgacggtgactaccagtttgacatctacaggctcatgaagaaggagaataacaaccgctggggtgaatatcacccttatagtaatgtgctctggttacattacctgacagacaagatgctgaaacaaatgaccttcaagactaaatgtaacactcctgccatgaagcaaattaagagaaaaatccaggagttccacaggacaatgctgaacttcagctctgccactgacttgctctgccagcacagtctgtttaagtaagctaaatgtatcttactgccccgaaatgagaggagactggtcttgaagcctctggtgctgtttcaacctccatccccacaggagggtggaactcccattctcacaggtttccagtcagcttttcaaacaagaattttgtttccaaatggaaactgaaatatttgttgaaatgtttaaatttgctgataacaaatgttctgaaagaagtaaactagccgggcacagtggcgtgcgcctgtagtcccagctactcgggaggctgaggcaggaggatcgcttgagcccaagagttcatatctagcctggtcaacatagcaagacccctgtctctatttttttaaataaataaactacatgtgaaaacaaa

SEQ ID NO: 46329 - DNA, 188 bp, Homo Sapiens
ttactatttttggaaatgaagaaaatggaaagaccgttgtttaccttgtggctttccatctgttctttgttatgtttgtatggtcctattggatgacaattttcacatctcccgcttccccctccaaagagttctacttgtccaattctgaaaaggaacgttatgaaaaagaattcagccaagaaaga

SEQ ID NO: 46330 - DNA, 255 bp, Homo Sapiens
atggcctgtttggctggacgatgcctcggcttgaccttttttgaaaagtgctggttagttcccgcccctggtaaacctggggtaggtgggggttctgtcttaactcgaggggcacctgggatccaggacgcttctagggggctctggctgcccgtgttaatgaaggacagcgcttccgcgagcaccctgggaactgggtcttgggtagcaaagccctcccagagaaaagattgggcacaactaaggctttcctga

SEQ ID NO: 46331 - DNA, 372 bp, Homo Sapiens
atggggagaatgtctctagggcatgtcagagaccttcactgcagcctctcccattataggccaggaggccttgaaggaaaaaaatggtttagtgggccaggcctcaggcacccccccttgctctttgcagccttgaaacatggtaccctgcgtccccagctgcttcagcttcagctgtggctaaaaggggccaacatacagctcaggccattgtttcagagagtgcaatccccaagctttggcagcttacacatggtgttgggcttgcaggagcacagaagtcaagaattgaggtttgggaacctctgcctagatttcagaggatgtatggaaatgcctggatgtccagacagaagtctgctgcaggggtag

SEQ ID NO: 46332 - DNA, 372 bp, Homo Sapiens
agtgaacagagtatctgtcaggcaagagctgctgtgatggtttatgatgatgccaataagaagtgggtgccagctggtggctcaactggattcagcagagttcatatctatcaccatacaggcaacaacacattcagagtggtgggcaggaagattcaggaccatcaggtcgtgataaactgtgccattcctaaagggttgaagtacaatcaagctacacagaccttccaccagtggcgagatgctagacaggtgtatggtctcaactttggcagcaaagaggatgccaatgtcttcgcaagtgccatgatgcatgccttagaagtgttaaattcacaggaaacaggtaaggtgcccatggtttatttgtat

SEQ ID NO: 46333 - DNA, 231 bp, Homo Sapiens
gggggagctgggggcacattgccgttcagcgtccaaacgtgacaaatgtgcagaagcgtccagggagctgtggacatgagcggctggccgcggatgctcaccctgtgatttgttgctttgattcctcaggccgtgacttggcgagcacgaccctccccgggtaccctccacacgtcccccccgctggacagggcagctactcagcaccgacgctgacagggatggtgcctg

SEQ ID NO: 46334 - DNA, 1957 bp, Homo Sapiens
acactgactaaagatattggaagagtgaagatcagagaattttaagtctgaaatttggcatcactgccctgaacaatataaccttagttggcataaactactcatacagacaaaggcattatccatcacaataagtaactttttgtctttatttcaaccggacaatcgtgattagaaaagctcctgtgacaaaattcaagaaaacctgacataaatgaacaacaatacaacatgtattcaaccatctatgatctcttccatggctttaccaatcatttacatcctcctttgtattgttggtgtttttggaaacactctctctcaatggatatttttaacaaaaataggtaaaaaaacatcaacgcacatctacctgtcacaccttgtgactgcaaacttacttgtgtgcagtgccatgcctttcatgagtatctatttcctgaaaggtttccaatgggaatatcaatctgctcaatgcagagtggtcaattttctgggaactctatccatgcatgcaagtatgtttgtcagtctcttaattttaagttggattgccataagccgctatgctaccttaatgcaaaaggattcctcgcaagagactacttcatgctatgagaaaatattttatggccatttactgaaaaaatttcgccagcccaactttgctagaaaactatgcatttacatatggggagttgtactgggcataatcattccagttaccgtatactactcagtcatagaggctacagaaggagaagagagcctatgctacaatcggcagatggaactaggagccatgatctctcagattgcaggtctcattggaaccacatttattggattttcctttttagtagtactaacatcatactactcttttgtaagccatctgagaaaaataagaacctgtacgtccattatggagaaagatttgacttacagttctgtgaaaagacatcttttggtcatccagattctactaatagtttgcttccttccttatagtatttttaaacccattttttatgttctacaccaaagagataactgtcagcaattgaattatttaatagaaacaaaaaacattctcacctgtcttgcttcggccagaagtagcacagaccccattatatttcttttattagataaaacattcaagaagacactatataatctctttacaaagtctaattcagcacatatgcaatcatatggttgacttttgaatggaaaaccccacaatattaagaaaagcattcatgtgactttattagggacactaaactacatcattaacatgtcacagcttggttgacaataatcaccaagaaaatctctttggtttttaaaaataaataaacatatattcataaaactcaaaaaacagttatactgaacgttgagatggcagaaactttcagaagcaaaaattaagcatattgaaaggatcccactcatatgaaactaacaggctgttttctgtttaaactcaactgtcagtgcttctgttcagaacacgttatttcatgactaggataaagaagcaaatggtttatgacttgtctgctttctggtagttagaatacaagggtcaatctatggctagtgtttattggtaattttaaaatctttaaaaataagtagctgggcacagtggcttacgcctgtaatcccagcactttgggaggctgaggtgggtggatcattttgaggtcaggagttcaagaccagcctgggcaacatggtgaaaccctgtctctactaaaaatacaaaaatcagctggacatggtggtgggcgcctgtaatcccagctactcgggaggctgaggcaggagaatcgcttgagcccgggacggaggttgcagtgagcggagatcgtgccactgcactacagcctgggaggcagagcgagactctgtctcataaaacaaaacaaaaaaataaaaataa

SEQ ID NO: 46335 - DNA, 1209 bp, Homo Sapiens
atggcccgaactgaccagaagcccccgtgcagaggtggctgctggggacagccaggtcaccccaacacgggtggggcagctgcacaccccacttaccaccccatgggtcacaggcctcgaacgtgcatcctgctacgtggagaccagaccacaggtggccaagctccgtctcgggaaataagcctggggccctgggcggccggcactcacttcctggctatctctaccaccccatggggcaggaagacacccgcctgcatttctgagctcccaaccagctcaggaacagcgcagccgctcgcaaatgcagtgtgcgaggtacagaccgttccagggcctggcctgcgcccacagggaactcctgccatgcgggccccttctcacaaggggacaccgcccacccccaacccctggggcccagagcagccccagaacagacacaagcatcccaaaaagggggtcactgggggcccctcgccgccgcctcctgccgcctcccgatatggccaaacacccgggcgcgagccccgcgtgcaggcgccgggcctgggcccctgtggccgtcccgccagcggccgtcttctgtccctgcatttagagaagggggatggcaaagggacccgccagcggatccctcttacagatgctgccgtgggcggcgaccgcacagacatcccctctgctattgctgcgggaccggcaaggacgccggaccgacacggcctccccatccctgggtccaccccgactcccatggtggggagcggccggcttggagcccctgtgggacggagtggaggtggagcaagtgcccggagctctcggccatcatgtgcgaatgttttgctccgtgctgacgcctccctcggcaccgtcctgtctgtgttgtggactgggcagctctcacggggttgggcgcttctgcccccgggggacgctggccggcatctggagacgtctgtgatctccgctggtgttgccgcaggcatctggctggtggagcccggggaggccgcccaggaccctgcgacccgcaggaccgccccgccgcggaggacggccagccccgaacccccagcgcccggggcacccctgcctgcctgccctgggcggatccccggggccgcgcggttcgggccgcgctcctgcccgctggggtctcccgccgtcctcgccgtcaccaccgggtggagccacaggtccgtgtga

SEQ ID NO: 46336 - DNA, 1984 bp, Homo Sapiens
ggatccagagatttagattttttataagctttcctgccaccgaaacgggtgtttgggacctcacgaggccctgttcattcttcgtcgctgcgctccccactctgtactggatgcatttactgacgttgttgtctccgtccccagagtatgaacccccaaggtgactcatgcagctgtgggtgcccggcatacagcatggtgactggaatggatgagcacccaataaacatttgttgcaggaatgcaggaggacgggcaggccagcaagcaggctgcctggtttttcccacatgggcttttctgggaaagaagagcttctatttttggaaagggctgctatgattgagaaaagttcatggcagcaaaaaaaggacagacgtcgggagggaaacactcctagttctcccagacaacacattttttaaaaagactccttcatctctttaataataacggtaacgacaatgacaatgatgattacttatgagtgcggctagtgccagccactgtgttgtcactgggcgagtaatgatctcattggatcttcacggtgggcgtgcggggctccagggacagcctgcgttcctgggctggctgggtgcagctctcttttcaggagagaaagctctcttggaggagctggaaaggtgcccgactccagccatgctggcgctactgtgttcctgcctgctcctggcagccggtgcctcggacgcctggacgggcgaggactcggcggagcccaactctgactcggcggagtggatccgagacatgtacgccaaggtcacggagatctggcaggaggtcatgcagcggcgggacgacgacggcgcgctccacgccgcctgccaggtgcagccgtcggccacgctggacgccgcgcagccccgggtgaccggcgtcgtcctcttccggcagcttgcgccccgcgccaagctcgacgccttcttcgccctggagggcttcccgaccgagccgaacagctccagccgcgccatccacgtgcaccagttcggggacctgagccagggctgcgagtccaccgggccccactacaacccgctggccgtgccgcacccgcagcacccgggcgacttcggcaacttcgcggtccgcgacggcagcctctggaggtaccgcgccggcctggccgcctcgctcgcgggcccgcactccatcgtgggccgggccgtggtcgtccacgctggcgaggacgacctgggccgcggcggcaaccaggccagcgtggagaacgggaacgcgggccggcggctggcctgctgcgtggtgggcgtgtgcgggcccgggctctgggagcgccaggcgcgggagcactcagagcgcaagaagcggcggcgcgagagcgagtgcaaggccgcctgagcgcggcccccacccggcggcggccagggacccccgaggcccccctctgcctttgagcttctcctctgctccaacagacaccctccactctgaggtctcaccttcgcctttgctgaagtctccccgcagccctctccacccagaggtctccctataccgagacccaccatccttccatcctgaggaccgccccaaccctcggagccccccactcagtaggtctgaaggcctccatttgtaccgaaacaccccgctcacgctgacagcctcctaggctccctgaggtacctttccacccagaccctccttccccaccccataagccctgagactcccgcctttgacctgacgatcttcccccttcccgccttcaggttcctcctaggcgctcagaggccgctctggggggttgcctcgagtccccccacccctccccacccaccaccgctcccgcgggaagccagcccgtgcaacggaagccaggccaactgccccgcgtcttcagctgtttcgcatccaccgccaccccactgagagctgctcctttgggggaatgtttggcaacctttgtgttacagattaaaaattcagcaattca

SEQ ID NO: 46337 - DNA, 1221 bp, Homo Sapiens
cccagcactcacagcacagccccctgagacccgccctgcacttgaccgcagcaggagggagtccaggagccaaggttgccgcggtgtctccgtcagcctcaccatgaacctggaaccgcccaaggctgagttccggtcagccaccagggtggccgggggacctgtcacccccaggaaagggccccctaaatttaagcagcgacagaccaggcagttcaagagcaagcccccaaagaaaggcgttcaagggtttggggacgacatccctggaatggaaggcctgggaacagacatcacagtcatctgcccttgggaggccttcaaccacctggagctgcacgagctggcccaatatggcatcatctagcacgaggccctgctgaagtccagaccctccccctcctgcccactgtgctctaaaccctgctcaggattcctgttgaggagatgcctccctagcccagatggcacctggacaccaggatgggactgcaacctcaggtctccccctacatattaataccagtcaccaggagcccaccacctccctctaggatgccccctcaggggctggccaggccctgctcaacatctggagatacaggcccacccctcagtcctgcccacagagaggcttggtcggtctccactcccagggagaacgggaagtggaccccagcccgggagcctgctggaccccagatcgtcccctcctcccagctggaaagctagggcaggtctccccagagtgcttctgcaccccagccccctgtcctgcctgtaaggggatacagagaagctccccgtctctgcatcccttcccaggggggtgcccttagtttggacatgctgggtagcaggactccagggcgtgcacggtgagcagatgaggccccaagctcatcacaccagggggccatccttctcaatacagcctgcccttgcagtccctatttcaaaataaaattagtgtgtccttgcctgtctgtggcatatttgtgcatgggacagggcctgtggtggggtcacttgagccggagcacatgggggaaggggtgggcagtggggcaggaggggctggcctgcctgagtgggaagacagcccttgggctcacactctcactgagccttgctggtggccccaagacacgcaatgtcaggccatggctgggtcaaggcagaaggccttggtgcacacccaggggccatagtcaatgaagc

SEQ ID NO: 46338 - DNA, 2361 bp, Homo Sapiens
atggggctgcagcccctggagttcagcgactgctacctcgacagcccgtggttccgggagaggatccgcgctcacgaagcggaactcgagaggaccaacaagttcatcaaagagctcattaaggacgggaagaacctcatcgctgcgacgaaaagtctgtcagtggcccagcggaagtttgctcattcactcagagactttaagtttgagtttatcggtgatgctgtgacagatgatgaacgatgcatagatgcttccttacgtgaattttcaaattttttgaagaatctggaggaacagagagaaattatggcattaagtgtaactgaaaccctgattaaacccttggaaaaattcagaaaagagcaacttggagctgtaaaggaagaaaaaaagaagtttgacaaagagacagaaaagaattatagtctaattgataaacatttgaatttatcagcaaaaaagaaagactcacatttacaagaggcagatatccaagtagagcagaaccggcaacacttctatgaactgtctctcgagtatgtgtgtaagctgcaggaaatccaagaaagaaagaagtttgagtttgtggaacctatgctgtcattttttcaggggatgtttaccttctatcatcagggccatgaacttgccaaagacttcaatcactacaaaatggaactacagatcaacattcagaatacacggaatcgatttgaaggaacaaggtcagaagtggaagagctcatgaacaaaatcagacagaatcccaaggaccacaaacgagcaagtcagtttacagccgaaggctacctgtatgtccaggaaaaaaggcctgctccgtttggttccagttgggtcaaacactattgcatgtatcgaaaagcagcaaagaagttcaacatgatcccatttgagcacagatctggagggaaacttggggacggagaggtgttctttttgaaagaatgtaccaagaggcatactgactccattgacagaaggttttgttttgacatagaagctgctgatcggcctggcgtttccttgaccatgcaggcattttccgaagaggaaaggaagcagtggttggaagctctgggtggaaaggaagctctgtcccatagttttaatacagccatcatcccaagaccagaaggaaatgcacagttggataagatggggttcacaattatcagaaaatgcatcagtgccgttgaaacacgaggtataaatgaccaaggattgtacagagttgtgggggtgagttcaaaggtccagagacttctgagtatgttgatggatgtaaaaacatgcaatgaggtggacctggagaattctgcagattgggaagtgaagacaataacaagtgccttgaaacagtatttgaggagtcttccagagcctctcatgacctatgagttacatggagatttcattgttccagccaaaagcggcagcccagaatctcgtgttaatgcgatccatttcttggtacacaaactgccagagaagaataaagagatgttggatattttggtgaaacacttaacaaatgtttcaaatcactccaagcagaacctgatgactgtggcaaacttaggagtggtgtttggaccaactctgatgaggccacaggaagaaactgtcgctgccctcatggacttgaagtttcagaatattgttgtggaaatcttaattgaaaaccatgaaaagatttttcggacgccgcccgatactacattccctgagcccacctgcctgtcagcatcacccccaaatgcgccaccaaggcagtcgaagagacaaggccagagaaccaagaggcccgtggccgtctacaatctttgtctggagctggaagatggtgacaatccttacccttccaaggaggacacccctaccagcagtctggactcactttcctccccgtctcccgtgactacagctgtccctgggcctcctggaccagacaaaaaccaccttctggcagatggagggagctttggagactgggcatccactatcccaggccagacccgatcgtctatggtccagtggcttaacccacagtctccaaccacaacaagctccaactcagctgtgacacctctttcacccgggtcgtcccctttccccttttctcctcctgctactgtagcggacaagccacctgaaagcatccgcagtcggaaggctcgagccgtgtatccgtgtgaagcagaacacagctcggaattatcttttgaaataggagcaatttttgaggatgtacaaacctccagggaacctggctggctagaagggactctgaacggcaagagggggctgattccacagaactacgtcaagctgctgtag

SEQ ID NO: 46339 - DNA, 117 bp, Homo Sapiens
accacggagcaggtccgtgccttggagggcgtcttccggcaccaccagtacctgggccctctggagcggaattggctggccagggagatgcagctctcagaggtccagataaaaacc

SEQ ID NO: 46340 - DNA, 426 bp, Homo Sapiens
atgggcttccaaaagttctcccccttcctggctctcagcatcttggtcctgttgcaggcaggcagcctccatgcagcaccattcaggtctgccctggagagcagcccagcagacccggccacgctcagtgaggacgaagcgcgcctcctgctggctgcactggtgcagaactatgtgcagatgaaggccagtgagctggagcaggagcaagagagagagggctccagcctggacagccccagatctaagcggtgcggtaatctgagtacttgcatgctgggcacatacacgcaggacttcaacaagtttcacacgttcccccaaactgcaattggggttggagcacctggaaagaaaagggatatgtccagcgacttggagagagaccatcgccctcatgttagcatgccccagaatgccaactaa

SEQ ID NO: 46341 - DNA, 1652 bp, Homo Sapiens
agtgcagtgtgggttggggccgggggtggggggcagaggggggtggcccaggtggccctaggaccccccctccatggaaaaccagctatggcataacaccgtgagatgttgcaatcaataccaagaaagcccccacgatgccgaggacatcttactcctgctgctgggcctcatcgttcttgtcaacattggcatcaacgtggcaactatgatgtggcatggactccagaacgccttagacaagatgattgattgggctactcagaaaaatgaaattcaggccagtgaaagtcccccaagtggtcccccagacaaggctcaggatgtccacatccactgcatcctggaccctgtgcaggtgaagatgtcccgacccacgcagtactcctctttctcctgccaccatttctccaaccatcacagtagcagtcttcttcgctgtgttcgtcgccgccgccgccgccaccgccgttgtcgccgtcgctgctgcaaccaccagcagcggccgcagaactacagacaaatcccccatagccactcagtcttccgtaacccacatcgcagccaaaagatgtcacaactacaccgagtgcctttctttgatcaggaggacccggattcctacctggaggaggaggacaacctgcccttcccgtatcccaagtacccacgtcgcggctggggcgggttttatcagagagcgggcctgccctccaatgtggggctgtggggccaccagggtggtatcctggccagtctgccaccaccctctctctacctgtcacctgagctgcgctgcatgcccaagcgtgtagaggccaggtctgagctgaggctgcagtcctatgggcgccacggttcccaatcccgactgtggggcaatgtggaggctgagcagtgggcctcgtctccaccacctccccaccggctgccccctaacccctcttgggtccccgtggggcacagcccttacccctcagtgggctggatgctgtatgactcctgggatcagcggcgtcgtggcacggagggctttgagcgcccccctgcctcggtgtcccggaacgcccggcctgaggcccagggctgccgggagcaccactccccacagtcccaccagcagagcctgcttggtcacgcctatggccagtcccaccgcagtccccacccatccacggaacccttgggctacagctcccaggacccccgtgaggtgcggcgtcgggcagctgactgggctgaggctctgcccgcctggcgtcctctgactacctctgcctccctcacggtgttggacgaggcctcccatcaacggaccccagctccaagctcagtgctggtcccccattcctcccagccctggcccaaagtccaggctgcggaccctgcccctcccccgaccatgtttgtcccactcagccggaatccagggggcaatgccaactaccaggtgtacgacagcctggagctgaagcggcaggtgcagaagagcagagccaggtccagctcactgccaccggcttccacctccaccttgaggccctctctgcacaggagccagaccgagaaactcaactgaccagcaggcggatgtggggtgtggggcagggcatggagggagaggaataaagagaaacagagtccaggaaaca

SEQ ID NO: 46342 - DNA, 732 bp, Homo Sapiens
gagaaattcaacacgtacgtgaccctgaaagtgcagaatgtcaagagcacgaccatcgcggtgcggggcagccagcccagctgggagcaggatttcatgttcgagattaaccgtctggatttgggactgacggtggaggtgtggaataagggtctcatctgggacacaatggtgggcactgtgtggatcccactgaggaccatccgccagtccaatgaggagggccctggagagtggctgacgctggactcccaggtcatcatggcagacagtgagatctgtggcaccaaggaccccaccttccaccgcatcctcctggacacgcgctttgagctacccttagacattcctgaagaggaggctcgctactgggccaagaagctggagcagctcaatgctatgcgggaccaggatgaagtgagtgttgggtattcgttccaagatgagcaagacaagcctctgcctgtccccagcaaccagtgctgcaactggaattattttggctggggtgagcagcacaacgatgaccccgacagtgcagtggatgatcgtgacagtgactaccgcagtgaaacgagcaacagcatcccgccgccctattatactcacaacccaacgcctcagtccaccaatattctgttcgcccaccacccctgggctcccgggagtcctacagtgactccatgcacagttacgaggagttctctgagccacaagccctcaggtaggtgc

SEQ ID NO: 46343 - DNA, 417 bp, Homo Sapiens
atggacatcctcccttaccttcacatgtcacatggcaagtgccctctcctggtgaggggcaagggtgagatggagggagaagccctgttgagctgcttggccatgaacagtttgggggaacaggaagcttgccttgacctcgggtccaagactccctccctagagatctcatcaaataaccaggaaagaccaaccaacagagaagagactggaatcatctgcccagaaagacttttcatctattcttctaaggacagctccaagagattacctgggggactttgtataaaaaataagacaacctgtgttcctgtgcagcttcatccctcatctttccctaagtgtcaagaagcaatagttagtccacaagcacgagtgaaattactgaacaaaattaagatggatacagcactctaa

SEQ ID NO: 46344 - DNA, 1509 bp, Homo Sapiens
actattattgacaaaaggcaagacataaaagggaagacagagtatttggttcaaaaggctgacacttgggaaccagagcaggacctcgtgaactgcggtaaatgtatttatgactacaagagaactaaaaatcagaaaaaaagtatactgacaagaacaggtagaactttttcaatcaatgtcagaaaaaggtccaggtctacgaacgccaacttttctaagaactctcataaaaaaatgacaggtaaacatcacaaatccaaaaacagccagtcgtttgctgccagccagaacgttaggaaatgcagcttcacctctctccaacccaaaaatatggagctggtaaattcaactatcaagacatttgcatctgagactgttaacagcaaaaacaccgagaatggctttcatgaacctgagaaactggaccctgttgcaccagattcgcaggacatgtcagtgcacaaggtggcatcagagaagcccatcagagctttagcagatcttggtgcaaaccaggctggaagagcgaagtggccccagatacacccactaatgtctcagctgtctggctcaattactacttccatggccacaggctcaggtaataaggaaggtacactggaattaatggatccactaacagccaatggaacaagaaacatgtatatatgtgttccaagggtgagagttgggcaaagaaagacaattgatgatgaaaaaaatcagccttttatcaaaaggatgtatttctccataaggctaacagaaagtgccagcaggtttagagacattgtggtgaggaaagaggatggcttccagatgttgctatcaactagatcaacagagaaaaactcactaaataaagaagtaatgaaagaaattgagaattctctgaatatggccactgggaatgacagcaagctcatgctgctcagtgtagctggcagtgccttttgctgtggtcttgattttgtgcatttaagaaatgacagaaacagagcaagcattgaaatggtggtcaccatcaagaactttgtgaatactttcactctgtttacgaagactattgtaccagccagtagcccaggcattggactaggtgcatctataatgctttttgtgatttggtttggtaaagaaaaggctttgtttcacaccacttgtacaacctttagacagagtccagggggctgttctaccatcacatttcccaagatgatgggtggagcatcttccaatgaaatgttgattggttggaaagccgacagcaatgcatgtgccaaaggcctggtccctcaggtgtcttgggctgcaactttcacccaagaggttaggatccctattaaggagcttgcctcatgtaatccagttttgctaaaggaatgtaacactcttgttcactgtaatgttatgatggagatgaaacaggccaatgtgagagtgtgtgaagtgctaaagaaaatctggggctcagcacaagggatagaatccatgttaaagcatgtg

SEQ ID NO: 46345 - DNA, 477 bp, Homo Sapiens
atgcaaggcattgacagatggatcccatcgatacccccactgcaaaaccatagtgcagtgaatagaagacacttctctgcaccccaaaagctccatgctgattgtgagaaggaaatgctggatggaggggttcctggaactactgtgagggtttcttttgatttctcctgcttagaaatggtgcgagaactttggatgtggaacgtggaggaggaggaacacgaagtggggatctgcacttggggtggtcagcactgcggatgcccagcaaagtcactgcctggtccacatcccggaggggtctctgcgcctcagtcggcatcgcagctgatggtgaaacttttggtgtggcagaagagtgtccacaaacttcggaaggtatccgctacatcctccatagccgttgatgaatggagttgtgttttgaataaaatatctatgcatccttttgtgagcaaggagcatgatggtacttag

SEQ ID NO: 46346 - DNA, 3495 bp, Homo Sapiens
atgcctgagcaggacaaggaccccagagtccaagaaaatcctgatgatcacagaacggtccccgaggtcaccggggatgcacggtctgcattttggcccctgcgggacaatggaggcctctctccctttgtgcccaggcccgggcctctgcagacagacctccatgcccagagctcagaaatcagatataaccagacatcccagacatcctggacgagctcgagcaccaaacgaaatgctatctccagctcctacagctccacgggaggcttgccggggctaaagcagaggaggggaccagcctcatcccgctgccagctgaccctcagttactcaaagacagtgagtgaggacaggcctcaggctgtctcttcgggtcacacacggtgtgaaaaggcggcagatacagcaccagggcagacactcgcccccaggggtggctcccccagatcccaggcctctaggccccgtagacgcaagattcccctgctgccaagcaggcgaggggagcctttgatgatgccacctcccttagagctggggtaccgggtcacggctgaagacctgcacctggaaaaacaggcggcattccagcgcatcaacagtgcactgcacgttgaggacaaggccatctcggactgcagaccctcacggccttcccacactttgtcctcacttgcaacaggggcttcgggtgggcctcccgtttctaaagcacccactatggatgcacagcaggacagacccaagtcccaagactgcctgggcctagtggcccccctagcatctgctgcagaggtctcctctacagctcccgtgtctgggaagaagcagagaccaccaggacccctgttctcctcctcagatccccttcctgccacctcttcccactcccgggactcagcccaggtcacctcgatgattcctgcccccttcacagctgcaagcagggatgccggcatgagaagaacaaggtcggcccctgcagctgccgcagcagcccctcccccctccacattgaaccccacgtcggggtcactactcaatgcagtggatggaggcccctcacatttcttggcctcagccacagctgcagcacgtgcccagaggtcagaagtgagatacaaccagagatcccagatctcccggaccagatcctgcctcaaacgaaatgccagctccagctcccacagctctacggaaggcctcccggaactaaagcggaggagggggccagcctcatcccactgccagctggcccacagttcctcaaagacagtgagtgaggacggacctcaggctgtctcttcgggtcacacccgctgtgaaaagagggcagatacagcaccagggcagacactcgcccccaggggtggctcccccagatcccaggcctctaggccccacatcaacagtgcactgcacgttgaggacaaggccatctcggactgccgaccctcgcggccttcccacactttgtcctcacttgcaacaggggcttcgcgtgggcctcccgtttctaaagcacccactatggatgcacagcaggacagacccaagtcccaagactgcctgggcctactggcccccctagcatctgctgcagagctcccctctacagctcccgtgtctgggaagaaacacagaccaccaggacccctgttctcctcctcagatccccttcctgccacctcttcccactcccgggactcagcccaggtcacctcgatgattcctgcccccttcacagctgcaagcagggatgccggcatgagaagaacaaggtcggctcctgcagctgccgcagcagcccctcccccctccacattgaaccccacgtcggggtcactactcaatgcagtggatggaggcccctcacatttcttggcctcagccacagctgcagcacgtgcccggaggtcacaagtgagatataaccagagatcccagacctcccgaaccagatactgcctcaaacgaaatgccagctccagctcccacagctctacggaaggcctccaggaactaaagcggaggagggggccagcctcatcacactgccagctggccctcagttcctcaaacacagtgagtgaggacggacctcaggctgtctcttcgcgtcacacccgctgtgaaaaggcagatacagcaccagggcagacactcgcccccaggggtggctcccccagatcccaggcctctaggccccgcatcaacagtgcactgcacgttgaggacaaggccacctcggactgcagaccctcacggccttcccacactttgtcctcacttgcaacaggggcttcgggtgggcctcccgtttctaaagcacccactatggatgcacagccggacaaactcaagtcccaagactgcctgggcctagtggccgccctagcatctgctacagaggtctcctctacagctcccatgtctgggaagaagcacagaccaccaggacccctgttctcctcctcagatccccttcctgccacctcttcccactcccaggactcagcccaggtcacctcgatgattcctgcccccttcacagctgcaagcagggatgccagcatgagaagaacaaggcctggcacctcggctcctgcagctgccgcagcagcccctcccccctccacattgaaccccacgtcggggtcactactcaatgcagtggatgaaggcccctcacatttcttggcctcagccacagctgcagcacgtgcccggaggtcacaagtgagatataaccagagatcccagacctcccggaccagatcctgcctcaaacgaaatgccagctccagctcccacagctctacggaaggcctccaggaactaaagcggaggagggggccagcctcatcccactgccagctggccctcagttcctcaaacacagtgagtgaggacggacctcaggctgtctcttcgcgtgacacccgctgtgaaaaggcagatacagcaccagggcagacactcgcccccaggggtggctcccccagatcccaggcctctaggccccgcatcaacagtgcactgcacgttgaggacaaggccatctcggactgcagaccctcacggccttcccacactttgtcctcacttgcaacaggggcttcgggtgggcctcccgtttctaaagcacccactatggatgcacagcaggacagacccaagtcccaagactgcctgggcctagtggcccccctagcatctgctgcagaggtctcctctacagctcccgtgtctgggaagaagcacagaccaccaggacccctgttctcctcctcagatccccttccggccacctcttcccactccggggactcagcccaggacacctcgctgattcctgcccccttcacacctgcaagcagggatgccggcgctcgagaacaacaggatgctttggtcctgtatcagcaggacgcttttcgggtagatcctactgccaccctagctatgggcacatgtcagagtcccatgtaa

SEQ ID NO: 46347 - DNA, 437 bp, Homo Sapiens
ggagtccaaatcactcattgtttgtgaaagctgagctcacagcaaaacaagccaccatgaagctgtcggtgtgtctcctgctggtcacgctggccctctgctgctaccaggccaatgccgagttctgcccagctcttgtttctgagctgttagacttcttcttcattagtgaacctctgttcaagttaagtcttgccaaatttgatgcccctccggaagctgttgcagccaagttaggagtgaagagatgcacggatcagatgtcccttcagaaacgaagcctcattgcggaagtcctggtgaaaatattgaagaaatgtagtgtgtgacatgtaaaaactttcatcctggtttccactgtctttcaatgacaccctgatcttcactgcagaatgtaaaggtttcaacgtcttgctttaataaatcacttgctctcc

SEQ ID NO: 46348 - DNA, 204 bp, Homo Sapiens
cagcaggtttctttagtcaaccatgaccttcccaccaacagggaaaactatatccacagaatcagtcgagatggatggtttggccgtaagggtgtggctattaacatggtgacagaagaagacaaggggacttttcaaaacatcgagaacttctacaacacttccattgaggaaattcccctcaatgttcctgacctcatctga

SEQ ID NO: 46349 - DNA, 984 bp, Homo Sapiens
atggcggttctactggagaccactttaggcgacgtcgtcatcgacttgtacaccgaagaacggccgcgtgcctgcttgaatttcttgaaactgtgcaaaataaaatattacaattattgccttattcacaatgtacagagggattttatcatacaaactggcgatcctacagggactggccgtggaggagagtctatctttggccaactgtatggtgatcaagcaagcttttttgaggcagaaaaagtcccaagaattaagcacaagaagaaaggcacagtgtccatggtgaataatggcagtgatcaacatggatctcagtttcttatcaccacaggagaaaatctagattatcttgatggtgtccatacggtgtttggtgaggtgacagaaggcatggacataattaagaaaattaatgagacctttgttgacaaggactttgtaccatatcaggatatcaggataaatcatacggtgattttagatgatccatttgatgaccctcctgatttattaatccctgatcgatcaccagaacctacaagggaacaattagatagtggtcgaataggagcagatgaagaaattgatgatttcaaaggaagatcagctgaggaagtagaagaaataaaggcagaaaaagaggctaaaactcaggctatacttttggagatggtgggagacctacctgatgcagatattaaacctccagaaaatgtactgtttgtgtgtaaattgaacccagtgaccacagatgaggatctggaaataatattctctagatttgggccaataagaagttgtgaagttatccgagactggaagacaggagagtccctctgttacgcttttattgaatttgaaaaggaagaagattgtgagaaagcattcttcaaaatggacaatgtgcttatagatgacagaagaatacatgtggattttagccagtcggttgcaaaggttaaatggaaaggaaaaggt

SEQ ID NO: 46350 - DNA, 1901 bp, Homo Sapiens
cgctgccttcatctctccatctctgcgctgctgccggctgcgccatccagcacccagactccagcaccggccgaggacccccactccggctgcagggaccctgtcccagcgagaccgcaggcatgtcatccgaaaagtcaggactcccagactcagtccctcacacttctccgccgccctacaatgcccctcagcctccagccgaacccccagccccaccgccacaggcagccccttcctcacaccatcaccaccaccaccactaccatcagtctggcaccgccaccctcccgcgcttaggggcagggggcctggcctcttccgcggccaccgctcagcgcggtccctcctcctctgccacgctgccgaggcccccccaccacgcccctcccggccctgctgccggggcacccccacccggctgcgctaccttgccccgcatgccacccgacccttacctgcaggagactcgcttcgagggcccacttcccccgccgccgcccgctgccgccgccccgcccccgccggcgccagcccagactgcccaggcccctggcttcgtggtgcccacgcacgcggggactgtgggcacgctgccgctggggggctacgtagcgcccggataccccctgcagctgcagccttgcactgcttacgtgccggtctacccggtgggcacgccatatgcaggcgggaccccggggggaacaggagtgacctccactctccccccgccgccccagggcccagggctggccctactggagccgaggcgcccgccacacgactacatgcccatcgcggtgctgaccaccatctgttgcttctggcctactggcatcattgccatcttcaaggccgtgcaggtgcgcacggccttggcccgcggagacatggtgtcggccgagatcgcttcacgcgaggcccggaacttctccttcatctccctggccgtgggcatcgcggccatggtgctctgtaccatcctcaccgtagtcatcatcatcgccgcgcagcaccacgagaactactgggatccctaaaaacgcccctggtccggccccactctgcgcccctcgatctcccaggctctttctgcagtcataccgcggacccaatgggcgccctgcacacccgtttctggggccgtcagacttggatacatcgtaaactccgcctccacggaacgtctcgccttgcgagcaagctcggaatccagttcctcaggaacccctccaaaacccacacccccagggacgccgctttccgggatcccggccaaacgccggaccctcagtcgctccaggccccctcaccctcaaagtgtagcgcccccaaccgagcaacctcggtttggtccctaaaaccccgcctcctctataagcaccgccccagctctgacaaaaccccgcctccaggtcggcaggctccgccttcttttcttctccgcggggtgattcagtccagtgattgggtttgtggctccaggcctcgcccacagacggacagacccctccctttcttccggcaaaaggaccgagccctggggtagtaaggcccccacactcctgttttttgcaagtacatttttgtccctcctccacccaggtatctgcctattttcttgctaatcccagaacctttccttttgctttttttaaggacatttgggaagttcctggtgtaggacccttctccctgggataagaaacctgcctgtaaacgctctgtaaatactcccttccacccatcccagcccctgggcagccgggcagaagggaatccaggctatggacctcccaagtccccgctccccgctcccctcggcggccccgccttgttctgatctgtgtgtgagtgtgtgtgaacttctgaaagacaatattaaagagacttagttg

SEQ ID NO: 46351 - DNA, 606 bp, Homo Sapiens
atggggctgatttcccacctagagaggttgatggcagaaggaaaatggggaggcactggggttgtggagggcatgggtatggctgaggagggtgctgggaacggcaaggcggtctgggggatggggaggggcaaaggtgagagatcaccttccctatcctccaccttcccgcagggaagacgaagccaggtgccagggctggggtcgggacacccatgttctgggcggcttgaccccaaatcccagaccccggaagctccaggctcgggatgtgtcctgagcacctgtcccggccccctcctctccagcctgtcaggccagcctccccagcccccttccctcaactctaggggcagcatagccccaggccaccctagcccagcccctgcattgccgtttccccagaggtggcccctccacctctgctctgacctctccccatctctctgcccctccttttctcacaagtgccatgagttttcaaacatcttcgggtctcagcctgctgctgccatgaactttgttgggttaagggggaggggctctaggaaggaactggggggaaggggacaggtaggtggctggagggaccctttttgctgctag

SEQ ID NO: 46352 - DNA, 483 bp, Homo Sapiens
ttattcacagataatgagtgtgtatatggcaactaccctgaaatacctttggaagaaatgccagatgcagatggagtagccagcactccctccctcaatattcaagagccatgctctcctgccacatccagtgaagcattcactccaaaggagggttctccttacaaagcccccatctacatccctgatgatatccccattcctgctgagtttgaacttcgagagtcaaatatgcctggggcaggactaggaatatggaccaaaaggaagatcgaagtaggtgaaaagtttgggccttatgtgggagagcagaggtcaaacctgaaagaccccagttatggatgggaggtacatcttccaaggtctcggagggtaagcgttcactcttggttgtatttggggaagagaagctcagacgtaggaatagccttctctcaggctgatgtctacatgcctggactgcagtgtgccttcctctcgtag

SEQ ID NO: 46353 - DNA, 1110 bp, Homo Sapiens
atggagttttcgctcttgttgcccaggctggagtgcaatggcgcaatctcagctcaccgcaacctccgcctcccgggttcaagcgattctcctgcctcagcctccctagtagctgggattacaggcatgtgccaccacgctcggctaattttgtatttttttttagtagagatggagtttctccatgttggtcaggctggtctcgaactcccgacctcagatgatcctcccgtctcggcctcccaaagtgctgagattacaggcatgagccaccatgcccggtgcctggctaatttttgtggtagaaacagggtttcactgtgcccaagctggtctcctgagctcaagcagtccacctgcctcagcctcccaaagtgctgggattacaggcgtaccgtgcctggcctttttattttattttttttaagacacaggtgtcccactcttacccaggatgaagtgcagtggtgtgatcacagctcactgcagccttcaactcctgagatcaagcctcctgcctcagcctcccaagtagctgggaccaaagacatgcaccactacacctggctaatttttatttttatttttaattttttgagacagagtctctctgtcacccaggctggagtgcagtggcgcaatcttggctcactgcaacctctgcctcccgggttcaagttattctcctgccccagcctcctgagtagctgggactacaggcgcccaccacgcctagctaatttttttgtatttttagtagagatggggtttcaccatgttcgccaggttggtcttgatctcccttgtgatctgcctgcctcggcctcccaaagtgctgggattacaggcgtgagccaccacgcccggcctatttttaatttttgtttgtttgaaatggaatctcactctgttacccaggctggagtgcaatggcacaatctcggctcactgcaacctctgcctcccgggttcaagcgattctcctgtctcagcctcccaagcagctgggattacgggcacctgccacaccccgctaatttttgtattttcattagaggcggggtttcaccatatttgtcaggctggtctcaaactcctgacctcaggtga

SEQ ID NO: 46354 - DNA, 1461 bp, Homo Sapiens
gagaaaggagaggagggaggaggcgcgccgcgccatggtgtcctgcgcggggccagggccagggccggggccgggccaggccgggccatgagccgcgccgggagctgggacatggacgggctgcgggcagacggcgggggcgccggtggcgccccggcctcttcctcctcctcatcggtggcggcggcggcggcgtcaggccagtgccgcggctttctctccgcgcctgtgttcgccgggacgcattcggggcgggcggcggcggcggcagcggcggctgcggcggcggcggcggcagcctccggctttgcgtaccccgggacctctgagcgcacgggctcttcctcgtcgtcgtcctcttctgccgttgtagcggcgcgcccggaggctcccccagccaaagagtgcccagcacccacgcctgcagcggccgctgcagcgcccccgagcgctccagcgctgggctacggctaccacttcggcaacggctactacagctgccgtatgtcgcacggcgtgggcttacagcagaatgcgctcaagtcatcgccgcacgcctcgctgggaggctttcccgtggagaagtacatggacgtgtcaggcctggcgagcagcagcgtaccggccaacgaggtgccagcgcgagccaaggaggtatccttctaccagggctatacgagcccttaccagcacgtgcccggctatatcgacatggtgtccactttcggctccggggagcctcggcacgaggcctacatctccatggaggggtaccagtcctggacgctggctaacgggtggaacagccaggtgtactgcaccaaggaccagccacaggggtcccacttttggaaatcttcctttccaggggatgtggctctaaatcagccggacatgtgcgtctaccgaagagggaggaagaagagagtgccttacaccaaactgcagcttaaagaactggagaacgagtatgccattaacaaattcattaacaaggacaagcggcggcgtatctcggctgctacgaacctatctgagagacaagtgaccatttggtttcagaaccgaagagtgaaggacaagaaaattgtctccaagctcaaagatactgtctcctgatgtggtccaggttggccacagacagcttagaagccattcggttgtctccaaaaggcctttggaaagacttgaatatgtatttaattccccccaccccctgccaatggtggcaaattttgtgaattgtttttctctcttccccttatctggctctaaaaccttctgctgcccaacctgactttgtagttctgatttttacttgtttattattggttttgttcttgcctagggtttttaaaatatctgtttttaatgttttgtttctccctccaggccagtataaagggacttgaagtattttttaataatccgccccccaatgaacttcagaagtgccattct

SEQ ID NO: 46355 - DNA, 438 bp, Homo Sapiens
atgcagtttatgttgctttttagtcgtcagggaaagcttcgactgcaaaaatggtatgtcccactatcggacaaagagaagaaaaagatcacaagagaacttgttcagaccgttttagcacggaaacctaaaatgtgcagcttccttgagtggcgagatctgaagattgtttacaaaagatatgctagtctgtatttttgctgtgctattgaggatcaggacaatgaactaattaccctggaaataattcatcgttatgtggaattacttgacaagtatttcggcagtgtctgtgaactagatatcatctttaattttgagaaggcttattttattttggatgagtttcttttgggaggggaagttcaggaaacatccaagaaaaatgtccttaaagcaattgagcaggccgatctactgcaggagaaaacagagact

SEQ ID NO: 46356 - DNA, 252 bp, Homo Sapiens
atgcctctcacaaaggatctccttcatccctctccagaagagaagaggaaacacaagaagaaacgcctggtgcagagccccaattcctacttcatggatgtgaaatgcccaagatgctataaaatcaccacggtctttagccatgcacaaacggtagttttgtgtgttggctgctccactgtcctctgccagcctataggaggaaaagcaaggcttacagaaggatgttccttcaggagaaagcagcactaa

SEQ ID NO: 46357 - DNA, 4151 bp, Homo Sapiens
ctcattgacacaattgcctcggagatcggagaactgaaacaggagatggtgcggacagatgtcaacctggaaaatggcctggaacccgctgaaacccacagcatggtaagacacaaggatggtggctattccgaggaagaggacgtgaagacctgtgcccgggactcaggctatgacagcctctccaacaggctcagcatcttggaccggctcctccacacccaccccatatggctgcagctgagtctgagtgaggaggaggcagcagaggtcctgcaggcccagcctccggggatcttcctggttcataaatctaccaagatgcagaagaaagtcctctccctccgcctgccctgtgaatttggggccccactcaaggaatttgccataaaggaaagcacatacaccttttccctggaaggctcaggaatcagtttcgcagatttattccggctcattgctttctactgcatcagcagggatgttctaccatttaccttgaagttgccttatgccatttcaacagccaagtcggaggctcagcttgaagaactggcccagatgggactaaatttctggagctccccagctgacagcaaacccccgaaccttccacctccccataggcctctttcctccgacggtgtctgtcctgcctccctgcgtcagctctgccttataaatggagtgcattctatcaaaaccaggacgccttcagagctggagtgcagccagaccaacggggccctgtgctttattaatccccttttcttgaaagtgcacagccaggacctcagtggaggcctgaaacggccgagcacaaggactcccaacgcgaatggcacggagcggactcggtcccccccacccaggcccccgccacccgctattaatagtctccacacaagccctcggctggccaggactgaaacccagacgagcatgccagaaacagtcaaccataacaaacatgggaacgtagctctgcctggaacgaaaccaactcccatccctccaccccggctgaagaagcaggcttcttttctggaagcagagggcggtgcaaagaccttgagcggcggccggccgggcgcaggcccggagctggagctgggcacagctggcagcccaggtggggccccgcctgaggccgccccgggggattgcacaagggccccgccgcccagctctgaatcacggcccccgtgccatggaggccggcagcggctgagcgacatgagcatttctacttcctcctccgactcgctggagttcgaccggagcatgcctctgtttggctacgaggcggacaccaacagcagcctggaggactacgagggggaaagtgaccaagagaccatggcgccccccatcaagtccaaaaagaaaaggagcagctccttcgtgctgcccaagctcgtcaagtcccagctgcagaaggtgagcggggtgttcagctccttcatgaccccggagaagcggatggtccgcaggatcgccgagctttcccgggacaaatgcacctacttcgggtgcttagtgcaggactacgtgagcttcctgcaggagaacaaggagtgccacgtgtccagcaccgacatgctgcagaccatccggcagttcatgacccaggtcaagaactatttgtctcagagctcggagctggacccccccatcgagtcgctgatccctgaagaccaaatagatgtggtgctggaaaaagccatgcacaagtgcatcttgaagcccctcaaggggcacgtggaggccatgctgaaggactttcacatggccgatggctcatggaagcaactcaaggagaacctgcagcttgtgcggcagaggaatccgcaggagctgggggtcttcgccccgacccctgattttgtggatgtggagaaaatcaaagtcaagttcatgaccatgcagaagatgtattcgccggaaaagaaggtcatgctgctgctgcgggtctgcaagctcatttacacggtcatggagaacaactcagggaggatgtatggcgctgatgacttcttgccagtcctgacctatgtcatagcccagtgtgacatgcttgaattggacactgaaatcgagtacatgatggagctcctagacccatcgctgttacatggagaaggaggctattacttgacaagcgcatatggagcactttctctgataaagaatttccaagaagaacaagcagcgcgactgctcagctcagaaaccagagacaccctgaggcagtggcacaaacggagaaccaccaaccggaccatcccctctgtggacgacttccagaattacctccgagttgcatttcaggaggtcaacagtggttgcacaggaaagaccctccttgtgagaccttacatcaccactgaggatgtgtgtcagatctgcgctgagaagttcaaggtgggggaccctgaggagtacagcctctttctcttcgttgacgagacatggcagcagctggcagaggacacttaccctcaaaaaatcaaggcggagctgcacagccgaccacagccccacatcttccactttgtctacaaacgcatcaagaacgatccttatggcatcattttccagaacggggaagaagacctcaccacctcctagaagacaggcgggacttcccagtggtgcatccaaaggggagctggaagccttgccttcccgcttctacatgcttgagcttgaaaagcagtcacctcctcggggacccctcagtgtagtgactaagccatccacaggccaactcggccaagggcaactttagccacgcaaggtagctgaggtttgtgaaacagtaggattctcttttggcaatggagaattgcatctgatggttcaagtgtcctgagattgtttgctacctacccccagtcaggttctaggttggcttacaggtatgtatatgtgcagaagaaacacttaagatacaagttcttttgaattcaacagcagatgcttgcgatgcagtgcgtcaggtgattctcactcctgtggatggcttcatccctgccttccttcctttctttttccttttttttttttttttttttttttttacaaagagccttcatgtttttatatatttcatagaaatttttatagcagttgcaggtaaactgtcaggattggttttaaaatatttttgtaactttaaaatattctataattatgcatgtgattttaacatttaatattcaaaaataaatctcttgctggatttgagagtattgcatttttaaagtctctcttctgtaactggatgttttggcaactttgtggggagagactgctggatttcttaaagcaacgtattcctgacactggccacagaatgcctttggaaatcggatgtactgttctcttgttcacgtttagtggtgttttgctgttttgttttttaaacaaatgatgctgagaataaggagagaaatgaatgtagagagaggtagagagagaaatatgaactctaacaaaggactgaggagtgcagtctgctggttcaggctcttcaaaagatgtagaaaaagagatagaaggaaccacctatgcttaaaatactgtaaatatgcagtgaggtttggcaaaatctattccatgtgtgatttgcttgtagaaacaattttgaaagccccttgaggaaaataaaaatcaagaagaacacttttctcccttttccatacaaattaaaacttaacagcatcaaattattgggaccagaaaccaagtaatgtataatgtggcttttgttgagttaaataagatgctatataatggagaagaatttgaaaatgcacaaaaaaatcaatctacattatcagaacctgcagtgaaattaaacttatgttaaataaaaccagtttgcaggtgcacaaactatgagggtcttgtatccacgtaacacaggtagttacaaaaacatgttattgtactgtgtaaagatgcatagtcatctcatttggttggctttgtaccttgtaccttttttagccttggcttttgttgaactagaaccctcagcacatactgtgttgtacttttgtaaatgattttttaaatggaattttgcacataatacattgtaatactgtatgataatcatgtgtgaaaataatttttgaaatatc

SEQ ID NO: 46358 - DNA, 1506 bp, Homo Sapiens
gggtcctctcagtggccagagaacagaaagaaaatctgactgtgcacgagcgaagggtgacaccgggcgtgcagcaccgacctgaaggcacctcttcgggggagcccgaaatttgaagattctctttcctgtcggagactacaaaccaaataaatagaaaaaactatccaagatgactgtcacttactccagtaaagtagcaaatgcaactttttttggatttcataggttactcctcaagtggagaggcagcatctacaaactactgtacagggaatttattgtttttgctgttctttatacagcaataagtttggtatacagattgttacttacaggagtccaaaaacgttactttgaaaaattatcaatttactgtgacagatatgctgaacaaattccagtaacctttgtgcttgggttttatgttactctggtagtgaaccgatggtggaaccagtttgtgaatttgccctggccagacaggctaatgttcctcatctctagcagtgttcacggaagcgacgagcacgggcgcctgcttagaaggacgctgatgcgctacgtcaatctcacctccctgctcatctttcgctcggtgagcactgctgtgtacaaaagatttcccacaatggaccacgtggttgaagcaggttttatgacaacagatgaaaggaaattattcaaccacctcaagtctcctcatctgaaatattgggttccattcatctggtttggaaatcttgcaactaaagcccggaatgaaggtagaatcagagacagtgttgatctgcaatcattgatgactgaaatgaatcgataccgctcttggtgcagcctcttattcggttatgactgggttgggattccgctggtttacacccaggttgtcactcttgctgtctataccttcttctttgcgtgcctgattggacgccagtttttggatcccaccaaaggctacgcagggcatgacttggatctttacattcccatcttcaccctcctacaattcttcttctatgcaggatggcttaaggtagcagagcagcttatcaacccttttggagaagatgatgatgattttgaaactaactggtgcattgacagaaatttgcaggtctctcttttagctgtggacgaaatgcacatgagcttacccaagatgaagaaggacatttactgggacgattctgctgctcgcccaccatacacattggcagctgctgactactgcataccctcatttctggggtcaacagtccagatggggaaacagatgcctaagaatgagtggaagatggaagatataaaaatcccactccctcagcctcaattccagtgtgctaagagtgatcctggtggttaaaggtacaacactcgaatctttcaaaacaacttggctcctaaacacaagccaacaatctcatctgctgctcaactgaaaaacattctccactttttagcatccaggcatgtggagttcctaagaaatgcactttatta

SEQ ID NO: 46359 - DNA, 1362 bp, Homo Sapiens
atgtcaattgtaacagtgcaacttggtcagtgtggcaatcagattggttttgaagtttttgatgctttgcttagtgactcacacagttcccagggactctgctctatgagagagaatgaggcatatcaagcatcttgcaaagaaagattcttcagtgaggaggagaatggagttccaattgcccgggctgttcttgttgacatggaacccaaagttatcaatcaaatgctgtcaaaggctgcccagtctggccaatggaaatatggtcaacatgcatgcttctgtcaaaaacaaggttctggaaacaactgggcatatggttactctgttcatggacccaggcatgaagaatctataatgaacataatccggaaggaagtggagaaatgtgactctttcagtggttttttcatcataatgagtatggctgggggcacaggatcaggattaggagctttcgttacacagaatttagaagatcagtactcaaactcattgaaaatgaatcagattatttggccttatggaactggtgaggttattgttcaaaactacaactccattttgacactttctcacttgtaccgatcttcagacgccctccttcttcatgagaatgatgccatccataagatctgtgcaaaactgatgaatatcaagcagatctcctttagtgatatcaatcaagtcctcgcacatcagctgggaagtgtgttccagcctacttattctgcagaaagctcatttcactacagacgaaatccactaggagacttaatggagcatttagttccccatcctgaattcaagatgctgagtgttcgtaacattcctcacatgtctgagaattcattggcatacaccacatttacttgggctggcctcctcaagcatttgagacagatgctcatttctaatgcaaagatggaagaaggtattgataggcatgtatggcctcctttatcaggacttcctcctcttagtaaaatgtctctcaacaaggacctgcattttaacacttccattgctaacttggtcattcttcgtgggaaagatgtgcaaagtgcagatgtggagggatttaaagatccagctctgtatacttcctggttgaagcctgttaatgctttcaacgtgtggaaaacccagcgggcctttagcaaatatgagaagtctgcagtgttggtcagcaacagccagttcttagtaaaaccacttgatatgattgttgggaaggcatggaatatgtttgcttcaaaagcctacattcatcagtacacaaaatttggaatcgaagaagaggactttttagacagtttcacgtcattagagcaggttgttgccagttactgtaatctctga

SEQ ID NO: 46360 - DNA, 435 bp, Homo Sapiens
atggtcaaactttatgaccttcgttcttttgataaggggccatttgctacctttaagatgcagtatgatcgaacttgtgagtggacagcacttaaaatcagcaacggtggcaagctcatcctcatttccaccaatgtcagcttcattcgtctcattggtgcattcaaaggagtggtgatacacacatttggcagttatgccaacagcgaagctgtcacactggaggcttcatttactgcagactctcagtttgttatgattggttcagaggatggcaagatccatgtctggaatgaagagagtggtataaaagtagctgggttggatggtaaacacacaggcccaattacctgtttgcaattcaaccccaagtttgtgacttttgccagcgggtgtaccaacatggccttctggttgcccaccattgatgactga

SEQ ID NO: 46361 - DNA, 425 bp, Homo Sapiens
cgtcgctccagctgctcttgacgactccacagataccccgaagccatggcaagcaagggcttgcaggacctgaagcaacaggtggaggggaccgcccaggaagccgtgtcagcggccggagcggcagctcagcaagtggtggaccaggccacagaggcggggcagaaagccatggaccagctggccaagaccacccaggaaaccatcgacaagactgctaaccaggcctctgacaccttctctgggattgggaaaaaattcggcctcctgaaatgacagcagggagacttgggtcggcctcctgaaatgacagcagggagacttgggtgaccccccttccaggcgccatctagcacagcctggccctgatctccgggcagccaccacctcctcggtctgccccctcattaaaattcacgttccca

SEQ ID NO: 46362 - DNA, 1296 bp, Homo Sapiens
atgcagcggccgctgagggtggcgcaggggccccggccagcccggggctgcagcagtgcggacagctccagaagctcatcggcatctccattggcagcctgcgcgggctgggcaccaagtgcgctgtgtccaacgacctcaccgagcaggagatacggaccctggagcattgtcccaattccttcttctaatgaagaaatacgcttagttgatgatgcgtttggaaaaatttgtcacatggtcagtgatggctcttgggtggttcatgttcaggcagcaaaactgttgggctctatggagcaagtcagttctcatttcttggagcagacccttgacaagaagctgatgtcagatctgaggaggaaacgtactgcacatgagcgtgccaaggaactttacagttcaggggagttttccagtggcagaaagtgggaagatgatgctcccaaggaagaagtagataccggggctgtgaacttgattgagtcaggagcttgtggagcttttgttcatgggttggaagatgagatgtatgaggttcgtattgctgctgtggaggccctctgcatgttggcccagtcttcaccctcttttgctgagaagtgccttgatttcctagttgacatgttcaacgatgaaattgaggaagtacgtctgcagtccatacataccatgagaaaaatctctaacaacatcaccctccgagaagatcagcttgacactgtcctggctgtgctagaggattcagccagagatattcgagaggctcttcatgaactcttatgctgtactaatgtttcaaccaaagaagggattcatcttgcattggtggagctgctgaaaaatttaaccaagtaccctactgatagggactccatatggaagtgcttgaagtttctgggaagtcggcatccaaccctggtgcttcccttggtgccagagcttctgagcacccacccattttttgacacagctgaaccagacatggatgatccagcttatattgcagttttggtacttattttcaatgctgctaaaacctgtccaacaatgcgagcattgttctcagatcacaccgtcaggcactatgcctacctccgagacagtctttctcatcttgttcctgccttgaggttaccaggtagaaaactggtgtcatcagctgtttctcccagcatcatacctcaagaggatccttcgcagcagttcctgcagcagagccttgaaagagtgtatagtcttcagcacttggaccctcagggagcccaggagctgctggaattcaccatcaggtag

SEQ ID NO: 46363 - DNA, 735 bp, Homo Sapiens
aatatgccttggttcaagggagaaagtcacagtaaggatggcaatgccagtggaaccaagctgcttgaggctctggactgcatcctaccacaaacttgtccaactgacaagcccggtggtattggtacttttcctgttggccaagtggagactggtgttctcaaacctggtatgctggtcacctttgctccggtcagtgttacaactgaagtaaaatctgtcgaaatgcaccatgaagctttgagtgaagctcttcctagggacaatgtgggcctcaatatcaagaaagtgtctgtcaaggatgctcgtcctggcaacgttgctggtgacagaaaaaacgacccaccagtggaagcagctggtttcaccgctcaggtgcttatcctgaaccatccgggccagttcagcactggctatgcccctgtgctggattgccacacagctcacattgcatgcaactttgctgagctgaaggaaaagattgatatctgttctggtaaaaagctggaagatgaccctaaattcttgaagtctggtgatgctgccatcgttgatatggttcttggcgagcacatgtgtgttgagagcttctcagactatccacctctgggtcactttgctgttcatgatatgagacagacagttgccatgggtgtcatcaaagcattggacaagaaggctgctggagctggcaaggtcaccaagtctgcacagaaagctcagaaggataaatga

SEQ ID NO: 46364 - DNA, 1481 bp, Homo Sapiens
gcgcaggcgacagctcatggcgttcagggcctgacggttgctagggtgacagggacacaacatggcggcgggatctctaacgctctccttcgagggaccaccacggagatcctagtgcgggaccccgcctcagggaagtggaaagcagggggacaaccttcctgcttctttcttttccgtccagtgtcggcaaggggttgtcaccggcttccgcatccaagatgaagaactataaagcaattggcaaaataggagagggaacgttttctgaagttatgaagatgcaaagcctgagagatggaaactactatgcatgtaaacaaatgaagcagcgctttgaaagtattgagcaagtcaacaacctacgagagatccaagcactgaggcgcctgaatccgcacccaaacattcttatgttgcatgaagtggtttttgacagaaaatctggttctcttgcactaatatgtgaacttatggacatgaatatttatgagctaatacgagggagaagatacccattatcagaaaaaaaaattatgcactatatgtaccagttatgtaagtccctggatcatattcacagaaatggaatatttcacagagatgtaaaaccagaaaatatactaataaagcaggatgtcctgaaattaggggactttggctcctgccggagtgtctattccaagcagccgtacacggaatacatctccacccgctggtaccgggccccggagtgtctcctcactgatgggttctacacgtacaagatggacctgtggagcgccggctgtgtgttctacgagatcgccagtctgcagcccctctttcctggagtaaatgaactggaccaaatctcaaaaatccacgatgtcatcggcacacccgctcagaagatcctcaccaagttcaaacagtcgagagctatgaattttgattttccttttaaaaagggatcaggaatacctctactaacaaccaatttgtccccacaatgcctctccctcctgcacgcaatggtggcctatgatcccgatgagagaatcgccgcccaccaggccctgcagcacccctacttccaagaacagaggaaaacagagaagcgggctctgggcagccacagaaaagctggctttccggagcaccctgtggcaccggaaccactcagtaacagctgccagatttccaaggagggcagaaagcagaaacagtccctaaagcaagaggaggaccgtcccaagagacgaggaccggcctatgtcatggaactgcccaaactaaagctttcgggagtggtcagactgtcgtcttactccagccccacgctgcagtccgtgcttggatctggaacaaatggaagagtgccggtgctgagacccttgaagtgcatccctgcgagcaagaagacagatccgcagaaggaccttaagcctgccccgcagcagtgtcgcctgcccaccatagtgcggaaaggcggaagataa

SEQ ID NO: 46365 - DNA, 636 bp, Homo Sapiens
gagcctccggccgcccgccgggtttgtcccgcgatccccgaccatgcccgccgacctcagcggtacttggaccctgctcagcagcgacaacttcgagggctacatgctggccctaggtattgactttgccactcgtaaaatagccaagttgctgaagccacagaaagtgattgagcagaatggggattcttttaccatccacacgaacagcagcctaaggaactactttgtgaaatttaaagttggagaagaatttgatgaagataacagaggcctggacaacagaaaatgcaagagtttggttatctgggacaatgacaggctcacctgtatccagaagggagaaaagaagaacagaggctggacccattggatcgaaggagacaaactccacctggaaatgttctgtgaaggtcaagtgtgcaaacagacattccagagagcctgatccacatccagcagcagagcccacttgtggctgcagctttatgccaaattatattgcagactgaacagacgtttatctatcccatttggcgacgaggactcgtggctggagagagccacacagcgtgtaacctgaagtcatctagattatggggaaactgctcagcttcaataaacctgtccaaatga

SEQ ID NO: 46366 - DNA, 690 bp, Homo Sapiens
ttgggaaagatcataaccagccatcaaccgcacccccaggatgaggagcagagcccccagcccagcgccagggtacccctccaggaggtggtggatgatgaagtgtcgggaccatcagcccctggggtagatcccagccccccatgtaggtatttttgctggaaaaggaagagggagtggttggacaaatgtgaggaggagccagagaagaagctcacccccgagcctgaggagacctgggtggtggagatgctgtgtgggctcaagatgaagctgaagcaacagcgagtgtcagtgctccctgagcaccacgaggccttcaataatcagattgaggatcctgtgattaaaagattcctggcctgggacaaagatctgagggtgtcagacaacgtaagtatctcctggctatggtcagcgtattttagccgggccagacccttctcctggcaataccaacgcatctatttcttcctggctctctacttggccaatgacatggaggaggacagcgagacccccaaacaaaacatcttcttcttcctgtacgggaagaactgctctcagattgccttgttccatacgcttcatttccgggtcttccgttctgtgtgctgcagggcttgcatttccctggaggagttcgaggagatccaggcttatgacccagggcactgggtgtgggcgtga

SEQ ID NO: 46367 - DNA, 1852 bp, Homo Sapiens
atgcactccctggacgagccgctcgacctgaagctgagtatcaccaagctccgggcggcaagagagaagcgggagaggacgctgggtgtggtccggccccgtgctctgcacagggagctgggcctggtggatgacagccccacacctggctctccaggctccccgccctcaggcttcctgctgaactccaagttccccgagaaggtggagggacgcttttcagcagcccctctcgtggacctcagcctgtcaccaccatctgggctggactcccccaatggcagcagctcgctgtcccccgagcgccagggcaacggggacctgcctccagtgcccagtgcctcggacttccagccactgcgctatttggatggtgtccccagctccttccagttcttcctgcccctcggctccgggggggccctgcacctgcctgcctcctccttccttacccctcccaaggacaagtgcctctcgccagacctgcccctgcccaagcagctggtgtgtcgctgggccaagtgtaaccagctctttgagctcctgcaagacctggtggaccatgtcaacgattaccatgtcaagcccgagaaggatgcggggtactgctgccactgggagggctgcgcccgccatggccgaggtttcaacgccaggtacaagatgctcatccacatccgcacacacaccaacgagaagccacaccgctgtccgacctgcagcaagagcttctcccgcctggagaacctgaagatccacaaccggtcgcacacaggtgagaagccctacgtctgcccctacgagggctgcaacaagcgctattccaactccagtgaccgctttaagcacacgcgcacccactatgtggacaagccctactactgcaagatgcccggctgccacaagcgctacacggaccccagctcactgcgcaagcacatcaaggcccatggccactttgtgtcccacgagcagcaagagctcctgcagctgcgcccaccccccaagccgccactgcccgcccccgacggcggcccctatgtcagtggggcccagatcatcatccccaacccagctgccctctttggaggccctggcctgcccggcttacccctacccctggcccccggcccccttgacctcagtgccctggcctgtggcaacggtgggggcagtgggggtggggggggcatgggccctgggctgccaggccccgtcctgcctctcaatctggccaagaacccgctgctgccctcgccctttggggctggcggactgggcttgcctgtggtctccctccttgctggcgcagctggtggcaaggccgagggggagaaggggcgtgggtcggtgcccaccagggccctgggcatggagggccacaagacgccccttgaaaggacggagagcagctgctcccggccaagccccgatggactccccctgctgccaggcaccgtgctggacctgtccacgggcgtcaactcagctgccagcagcccagaggcgttggcccctggctgggtggtcatcccgccgggctcggtgctgctcaaaccggctgtggtgaactgagcccatcctgcggacagttgtggtgcccccccggcagctcccggcactgcccccgacgaacggaaactcttctgtgaaatagcaataatgtcctactgcccgggcagccccagcccagcccgccgggagcaaggatggtgctaggtcattcatggctggcctcccagcccccgggtggggacctggcctgtcatgcagggagagctgtgctcctgggtgctgaagcctcgctcctgtctgtcccccaccacctggccctcagcttctgagaggcttt

SEQ ID NO: 46368 - DNA, 2822 bp, Homo Sapiens
atggccgctgccaacccgtgggacccggcgtccgcgcctaacggcgctgggctagtgctaggccacttcatagcttcggggatggtcaatcaggagatgttaaacatgtctaagaaaacagtttcttgttttgtgaacttcaccagactacagcagatcacaaatattcaagctgaaatctaccagaaaaacctggaaattgaactcctgaaactagaaaaagatacagcagatgttgttcatcctttctttttggctcagaagtgtcatactctgcaaagcatgaataatcatttggaagcagtgctgaaagagaagagatcccttaggcaaagactgttgaaacccatgtgccaggaaaacttacctattgaagctgtttatcacagatatatggtacatttgctggagttggctgtgactttcattgagagattagaaacccaccttgaaacaattagaaatattcctcatttagctgcaaatctaaagaaaatgaaccaggctttagcaaagatggatatattggtgactgagacagaagaactggcagagaatatactcaagtggcgtaaacaacaaaacgaagtttcgtcttgtatccccaaaatattagctgaagaaagttatctttataaacatgatattataatgcctcctttaccttttacttctaaagttcatgtccaaactattaatgccaagtagtcatcaactttatttttgcttaattatgtgtagtcatatgaagtctatttctagttgactgtaacatgggtattaatagtctttgctgctggtaatactgaaagaacctgctttatattggagtatcaagatctcaggttcattaagaccaaactgacttttcctttgtttttcatatatttttattctacctttcagtaaaactagagaagctaaaaaatagccatgacaatttattaatataagtgaattaaccatttctcaggtgggaaattctctttttttaaaaatgtgtgtttatcgtctggtgtggtggctcacacctgtaatcctaacacttggggaggctgaggcgggcagatcacttaaacccaggagttcaagaccagcctgggtaacatggtgaaatcccatatctacaaaataaacaaaaaattagccgaccatggtggtgcatgcctgtagtcccagctattcgggaggctgaggtaagaggatcacctaagcctgtgaggtcatggttgcaatgagtcatgatcacgccactgcgctacagcctgggcgacacagtaagaccctgtctcaaaaaaaagaagtgtgtttctggccaggcacggtggctcacgcctgtaatcccagcactttgggaggcctaggtgggcagatcatgaggtcaggagttcgagaccagcctggccaacatggcgaaacacctgtctctactaaaaatacaaaaattaggccgggcgcagtggctcacacctgtaatcccaacactttgggaggccgacccagatgggtggatcacctgaggtcaggagtttgagaccagccttgacaacatggtgaaaccccatctctggtagaaatataaaaaattaaccgggcatggtggtggacgcctgtaatcccagctacttgggaggctgaggcagaataatcgcttgaacccaggaggcagaggttgcagtaagccaagatcgtgcctctgcactccaacctgggtgatggagcaagactccatctccaaaaaaataaaaaatacaaaaattagccaggcatggtagcatgtgcctgtaatcccagctactcaggaggctgaggcaggagaatcacttgaacccaggaggcagaggttgcagtgagcccagatcgtgccaccgcactctagcctgggcaacagagcaagactctgtcttaaaaaaaaaaaaaaaaggtgtttctgaattagaagggtcttcttgaatctgaaaatgtctatgatgattattcctgtgggaatgtcactaagtatgcagaaaagagtaacacagccagcctgacttatcctttgaaaggcctgattataaggtttgtcctcagctgttgcatctgggaacttagatatcagaaggtatcttagtctgttctgctgtcataacagaattacacaaactaagtattttataatgaacagaagtttatttggttgacaggtgtggaggctaggcagtccaagaacatggtgccagcatctagtgagggtcttgccatggcagaaggcaccacatggcaagtgagcatgagaaagatatatgggtctaaacttagccttttatcatgagcccactcccaagatagcagcactaattcattaatgagggcaaagccctccttacctaattactttttaaaggtctcataacacttttacaatgtcaattaaatttccaacacttgaactttgggggacatatttaaaccttaacaggagggctccactcactgaaaagagtcgttcatggtagctaacctgtggtttgtgctgaaaacctgctttcttcctgggagtctagaattttggtacatggtaggtagaaggtacctacgtgaccagcccccagtaaaaaccctgggcactgtatctctaacaagtttccctggtaaacaacatttctcacatgttgtcacaattcagttgctggtggaatgaaacaacagatatgtgtgactccactgttagaggactctggaagcttatacctggtttcccccagactttgcctctgtaccttttctctttgctgttttgcttcatatgcttttgctgtaataaatcatagctgtgtgatgat

SEQ ID NO: 46369 - DNA, 603 bp, Homo Sapiens
gggcttggcgggcctgcactcggagcagccggccggcccttccggccccgggcagtgagggacttggcacccgggccaggctgcagagggtgtactgggtcccccagcagtgccggcccacctgcgctgtgcttgatttctcgctgggccttagctgccttcccgcggggcagggctcgggacctgcagcccgcggtgcctgagcctcccacccgctccatgggctcctgtggggcccgagcctccccgacgagtaccaccccctgctccagggcgcccagtcccatcgaccacccaagggctgaggagtgcgagcgcacggcgcgggactggcaggcagctccacctgcagccccggtgcgggatccactaggtgaagccagctgggctcctgagtctgatggggacgtggagagtccttatgtcctgctcagggattgtaaacacaccaatcagcaccctgtgtttagctcaaggtttgtgagtgcaccagtcgacactctgtatctagctgctctggtggggcctcggagaacctttatatctagctcagggattgtaaatacacccatcggcactgtgtatctagctcaaggtttataa

SEQ ID NO: 46370 - DNA, 312 bp, Homo Sapiens
atgtctggtcgcggcaaaggcggtaaaggtttgggtaagggaggtgccaagcgtcaccgaaaagtgctgcgggataacatccaaggcatcaccaaaccggccattcggcgccttgctaggcgtggtggggttaagcgaatttccggtttgatttatgaggagactcgtggcgttctcaaggtgtttctggagaacgtgatccgggacgccgtgacctacacggagcacgccaagcgcaagactgtcactgccatggatgtggtttacgcgctcaagcgtcaaggacgcactctgtacggcttcggcggttaa

SEQ ID NO: 46371 - DNA, 1158 bp, Homo Sapiens
gatgtcagccccaaacaggatgaaggagtgctgaaagtcatcaagacagagggcacaggtacagagatgcccatgactggggacctagtctttgtccactacactggctggctgttagagggcacaaagtttgactccagtgtggatcgcaaggacaaattctcctttgacctgggaaaaggggaggtcatcaaggcttgggacattgccgtagcaaccatgaaggtgggggaggtgggccacatcacctgcaaaccagaatatgccgttcagcagacagtcctccaacgatctccccataacgccacgcttgtgtttgaagatgggggaatcatccgcagaatagggactcgcggtgaaggctatgtcaagcccgatgagggcgctatggtggaggttgcgctggaagggtgctgcaaggaccagctctttgaccaacgggcgctccgctttgaggttagtgagggggagaacctggatctgccttatgatctcgagagggccattcagcacttggagaaaggagaacattccactgtgtacctcaagcccagctatgcttttggcagtgttgggaaggaaaagttccaaatcccaccaaatgccgagctgaaatatgaattatatctcaagagttttgaaaaggccaaggaatcttgggagatgatttcagaagagaagctggaacagaacaccgtagtgaaagagcagggcagtgtgtacttcaaggaaggcaaatacaagcaagctttactacagtgtaagaagattgtgtcctggctggaatattctagtttttccaatgaggaagcacagaaggcacaggcccctccactggcctctcacctcgacctggccatgtgtcagctgaaactacaggccttctctgctgccattgaaagctgtaacaaggccctagaactggacagcaacaacgagaagggccccttccgccggggagaggcccacctggcggtgaatgactttgaactggcatgggctgacttccagaaggtcctgcagctctaccccaacaacaaagccgccagggcccagctggctgtgtgtcagcagcggatccacaggcagcttgcccggaagaagttctatgccaaaatgtttgagaggctggctgaggaggagaacaaggccaaggca

SEQ ID NO: 46372 - DNA, 747 bp, Homo Sapiens
atggcatggaagagcagtgtcataatgcaaatgggaagatttcttctcttagtaattttatttctgccacgtgagatgacaagttctgttttaactgtgaatggtaaaactgagaactatatcctggatactacacctggctcccaagcatctctgatatgtgctgttcaaaaccacaccagagaggaagaactgctctggtaccgagaggaggggagagtggatttgaaatctggaaacaaaatcaattccagctctgtctgtgtctcttccatcagtgaaaatgacaacggaatcagctttacctgcaggctggggagggatcagtccgtgtccgtttcggtggtgctgaatgttacttttcctcctctcctaagtggaaacgacttccaaacagttgaggaaggcagtaatgtgaagttggtttgcaatgtgaaagccaacccccaggctcaaatgatgtggtacaaaaacagtagtctcctcgatttagagaaaagccgtcaccaaatccaacagacaagtgagtcttttcagctgtcaatcaccaaagtcgagaagcctgacaacggaacctacagttgtattgcaaagtcatctctgaaaacggagagcttggactttcacctgattgttaaagataaaactgtgggtgtaccaatagagcccattattgctgcatgtgttgtgatctttctgacattgtgctttggactgattgctagaagaaagaaaataatgaaggta

SEQ ID NO: 46373 - DNA, 348 bp, Homo Sapiens
cagattgaggagaacaccacagtggtcaccatgcagtccgccaaggttggagctactgagatgacgctcatggagctgagatgtacagtccagtccttggagattgacctggactccataagaaatctgaaggccagcttggagaacagcctgagggaggtgaaggcccgctacaccctgcagatggagaaggtcaatgggattttgctgcacctggagttagagctggcacagacccaggcagagggacagtgccagggccaggagtaccaggccctgctgaatgtcaaggtcaagctggaggctgagatcactacctaccgccgcctgctggaaaatggtgaggac

SEQ ID NO: 46374 - DNA, 3675 bp, Homo Sapiens
atgagcaactccgttcctctgctctgtttctggagcctctgctattgctttgctgcggggagccccgtaccttttggtccagagggacggctggaagataagctccacaaacccaaagctacacagactgaggtcaaaccatctgtgaggtttaacctccgcacctccaaggacccagagcatgaaggatgctacctctccgtcggccacagccagcccttagaagactgcagtttcaacatgacagctaaaacctttttcatcattcacggatggacgatgagcggtatctttgaaaactggctgcacaaactcgtgtcagccctgcacacaagagagaaagacgccaatgtagttgtggttgactggctccccctggcccaccagctttacacggatgcggtcaataataccagggtggtgggacacagcattgccaggatgctcgactggctgcaggagaaggacgatttttctctcgggaatgtccacttgatcggctacagcctcggagcgcacgtggccgggtatgcaggcaacttcgtgaaaggaacggtgggccgaatcacaggtttggatcctgccgggcccatgtttgaaggggccgacatccacaagaggctctctccggacgatgcagattttgtggatgtcctccacacctacacgcgttccttcggcttgagcattggtattcagatgcctgtgggccacattgacatctaccccaatgggggtgacttccagccaggctgtggactcaacgatgtcttgggatcaattgcatatggaacaatcacagaggtggtaaaatgtgagcatgagcgagccgtccacctctttgttgactctctggtgaatcaggacaagccgagttttgccttccagtgcactgactccaatcgcttcaaaaaggggatctgtctgagctgccgcaagaaccgttgtaatagcattggctacaatgccaagaaaatgaggaacaagaggaacagcaaaatgtacctaaaaacccgggcaggcatgcctttcagagtttaccattatcagatgaaaatccatgtcttcagttacaagaacatgggagaaattgagcccaccttttacgtcaccctttatggcactaatgcagattcccagactctgccactggaaatagtggagcggatcgagcagaatgccaccaacaccttcctggtctacaccgaggaggacttgggagacctcttgaagatccagctcacctgggagggggcctctcagtcttggtacaacctgtggaaggagtttcgcagctacctgtctcaaccccgcaaccccggacgggagctgaatatcaggcgcatccgggtgaagtctggggaaacccagcggaaactgacattttgtacagaagaccctgagaacaccagcatatccccaggccgggagctctggtttcgcaagtgtcgggatggctggaggatgaaaaacgaaaccagtcccactgtggagcttccctgagggtgcccgggcaagtcttgccagcaaggcagcaagacttcctgctatccaagcccatggaggaaagttactgctgaggacccacccaatggaaggattcttctcagccttgaccctggagcactgggaacaactggtctcctgtgatggctgggactcctcgcgggaggggactgcgctgctatagctcttgctgcctctcttgaatagctctaactccaaacctctgtccacacctccagagcaccaagtccagatttgtgtgtaagcagctgggtgcctggggcctctcgtgcacactggattggtttctcagttgctgggcgagcctgtactctgcctgacgaggaacgctggctccgaagaggccctgtgtagaaggctgtcagctgctcagcctgctttgagcctcagtgagaagtccttccgacaggagctgactcatgtcaggatggcaggcctggtatcttgctcgggccctagctgttggggttctcatgggttgcactgaccatactgcttacgtcttagccattccgtcctgctccccagctcactctctgaagcacacatcattggctttcctatttttctgttcattttttaattgagcaaatgtctattgaacacttaaaattaattagaatgtggtaatggacatattactgagcctctccatttggaacccagtggagttgggatttctagaccctctttctgtttggatggtgtatgtgtatatgcatggggaaaggcacctggggcctgggggaggctataggatataagcattagggaccctgaggctttaagtggtttctatttcttcttagttattatgtgccaccttcttagttattatgtgccacctcccctatgagtgacgtgtttgatcactagcagaatagcaagcagagtatcattcatgctggggccagaatgatggccggttgccagatataactgctttggagcaaatctcttctgtttagagagatagaagttatgacatatgtaatacacatctgtgtacacagaaaccggcacctgccagacagagctggttctaagatttaatacagtgctttttttcctctttgaaatattttactttaataccagtgccttttcttgttgaacttcttggaaaagccaccaattctagatcttgatttgaattaatacacacaatatctgagacacttacacttttcaaaagatttgtgtatgcattgcctaattagagtagggggagaagggcaactattattatccctattttacaaaactgaggcttagtgaggttcagccacatgcctagacttatatactagttagtggtgcagccagggagaggactcagatttcctggaggcaaagtctatctctgaaactccatgaagacttttgcagccagttcccaccaatatgccccagacgtgagacaaacaaggacttttttttttatatagagccatccataaaatcctaagcccttttattaatgtataaccaggagaacatctgtgccaacggttggactttttatggctgagattcgggaggaagtgtgacaccaagcaggagaggaagaatgattttctttgtacttaggttttctaaggacattgttttaatctgtatcgtgccaaagttgtatcactgttaaacttctgaagacataaccagttgagtcttatttcaagatatgttctcaagccaattgtgtgcttctcttgtttctgtgattgctttctagccaaagcgaagcttgtacaggttgagtatcccttatccaaaatgcttggaaccagaagtgtttcaaattttagattattttcagattttggaatgtttgcatatacataatgagatattttgggaataggacccgagcctaaacacaaaattcattgatgtgtcagttacaccttatccacatagcctgagggtaattttatacgatattttaaatagttgtgtacatgaagcatggtttgtggtaacttatgtgaggggttttcccattttttgtcttgttggtgctcaaaaagttttggattttggagcatttcggattttggatttttggattagggttgctcaacccatattattggctgtacatcctggtcacttctgacttctgtttttactaatggaagctttgca

SEQ ID NO: 46375 - DNA, 1038 bp, Homo Sapiens
atgagcgcagcgttcccgccgtcgctgatgatgatgcagcgcccgctggggagtagcaccgccttcagcatagactcgctgatcggcagcccgccgcagcccagccccggccatttcgtctacaccggctaccccatgttcatgccctaccggccggtagtgctgccgccgccgccgccgccgccgcccgcgctgccccaggccgcgctgcagccatgccgcccgcacaccctcaccaccagatccccagcctgcccacaggcttctgctccagcctggcgcagggcatggcgctcacctctacgctcatggccacgctccccggcggcttctccgcgtcgccccagcaccaggaggcggcagcggcccgcaagttcgcgccgcagccgctgcccggcggcggtaacttcgacaaggcggaggcgctgcaggctgacgcggaggacggcaaaggcttcctggccaaagagggctcgctgctcgccttctccgcggccgagacggtgcaggcttcgctcgtcggggctgtccgagggcaagggaaagacgagtcaaaggtggaagacgacccgaaaggaggagagcttctcgctggagagcgatgtggactacagctcggatgacaatctgactggccaggcagctcacaaggaggaagacccgggccacgcgctggaggagaccccgccgagcagcggcgccgcgggcagcaccacgtctacgggcaagaaccggcggcggcggactgccttcaccagcgagcagctgctggagctagagaaggagttccactgcaaaaagtacctctccttgaccgagcgctcgcagatcgcccacgccctcaaactcagcgaggtgcaggtgaaaatctggttccagaaccgacgggccaagtggaaacgggtgaaggcaggcaatgccaattccaagacaggggagccctcccggaaccctaagatcgtcgtccccatccctgtccacgtcagcaggttcgctatcagaagtcagcatcagcagctagaacaggcccggccctga

SEQ ID NO: 46376 - DNA, 4816 bp, Homo Sapiens
tacactccagtcatggcggcccgacaggccgtgggcagcggggctcaggagacatgcggtctggatcggattttggaggcattgaagctgctgctgagcccgggaggctcgggctcaagttcactacaggtcacaaaacatgatgtcttgttggctactttaaaatctaacctgtctgctttggaggacaagtttctgaaggatcctcagtggaagaatctgaaactcctaagagatgaaattgctgataaggcagaatggccacaaaactctgtggatgtcacttggagttttacctctcaaaccttgttgttgcttttgtgcttgaaggaaaccatgatccgccttgcagctaatttcaatccaggtaaacccaaccctaggactccggaagttgctcctgccctgagccccgatgcacttagtatctcacaacagaagactgtccagttcgttttgcagtttgtagttaccttgggtatctgcccctatctcatgcctggtgttggagtccctttgagatatagaactgaatttggtgccgtcgttcaagacgtggtgtgttttgatgctgcccccgatgcaactcgaagactgtacaccagctgcaaggcccttctgaatgttgctcagcacacatctctggggagcttgatcttctgccaccactttggggatatcgcagcaggtctgtgccaactgggattctgcccaaccaaaagaaaactgctaacacctgcagaagaggttctaactgaagaggagagaaccctatccaggggggccttgagagacatgctggatcaagtctatcagcccttagcagtccgggaactgcttatcctccagggaggaccaccccagtcctgcacagatgtgaagacacagatgaggtgtcgggccccagcttggcttcggcgtctatgtggacagctgctctctgaaaggttaatgagacctaatggtgttcaggcagtagtccggggcattttggaaggagcaggtgcgggagcagctggtggaagtgatgctgaggtgacggctgctgactggaagaagtgtgacctgatcgcaaagattttggcctcttgtccccagcagtctctttcaccagagaattactacagggacatctgcccccaggttctggatttatttcactttcaagataaattgacagcacgacaatttcagagagttgccaccactacctttataactttgtcaagagaacgcccacatttggcagcaaagtatttgctccagccagtgttagctcctcttcatcgatgtttgaatacagcagagctttcagagagtgacatggtaccaggaactattttggtgacagaagaagaacttagtagatgcattgaggatgtgtttaaggtgtacgtggttgggaatgaacctttaacagttttgatggattccctgcttccagtcctgggagtgctttttcttctctactgttttactaagcagagtgtgtctcacataaggtcactttgccaagaaatcttattatggattctggggaagctggaaaggaagaaggcaattgccagcctgaaaggatttgcagggttggacaaagctgtgccctctctccattctctgtgtcagtttagagttgccactcaaggtggcattatgattaccatcaaagaggccattagtgatgaagatgaagatgaagccctgtaccagaaggtatcctctgagcagggccgggtggagcatctcggggacttgctgtcccactgccaggaatgcggtttggcaggagacttcttcatcttctgtttgaaagagttgactcatgtggcctcggaaaatgaaacagagttaaaaactgagcccttctccagcaagagcctcttggaattagagcaacatcagactcttcttgtggaaggccaagagcggaagctgcttgtcctgcagctgatggctgttctgtgcgagagaatgtctgagcagatattcacaaacgtcactcaggtggtggactttgtagcagcaacattgcagagagcctgtgcaagcctggcccatcaggcagagagcaccgtggaatcacagacgctgagcatgtccatggggctggtggctgtcatgctaggaggagctgttcagttgaagtcaagtgattttgctgttctgaagcagttgttgcctctgttggagaaggtatccaacacataccctgatccggtcatccaagaactcgctgttgatctccgcatcaccatctctacccatggagcctttgccactgaggccgtcagcatggctgcccaaagtacactgaacagaaaagatctggaagggaaaatagaagagcagcaacaaaccagtcatgaaagacccactgatgtagctcatagccaccttgaacaacagcagagccatgagacagccccccagacaggcctgcagtcaaatgctccaatcattcctcaaggagtcaatgagcccagcactactacaagtcagaaatctggaagcgtaaccacagaacagctccaagaggttcttttgtcagcttatgaccctcaaattccaacacgggctgctgccctgcgtactctttcccactggatagagcagagagaagcaaaagcccttgagatgcaagagaagcttctcaagatattcttggaaaacttggaacatgaagacacttttgtatatctatctgcaattcagggggttgccctgctgtcagacgtctatcctgagaaaatcttgccggacttgttggctcaatatgacagcagcaaagacaagcacacaccagagaccagaatgaaagtcggggaagtccttatgcgaatcgtcagggcattaggagacatggtctcaaagtaccgagaacctttgatccataccttcctgaggggagtgagagatcctgatggtgctcacagggccagcagcttggccaaccttggggagctgtgccagaggctggactttctgctgggctccgtggtccatgaggtaacagcttgcctgattgctgtggccaaaacagatggtgaagttcaagtacgcagagctgccatacatgtggttgtgctgctgcttcggggactcagccagaaagctactgaggtgctgagcgccgtcctcaaggatctctaccacctgctgaagcacgtagtgtgtctggagcccgatgacgtggccaagctccatgcccagttggccctagaagagctggatgacatcatgaaaaacttcctgttccctccacagaagctggagaagaagatcatggtcctgccgtagacctggctccaaggacgtggaggaggcaggcagggccaggcacccagagccgtgcccaggtcttccagcaggtggccctgctgcctcttgagtgctggcagcatggctgaccctcggggtggttttatggtgcaggtcacttgggtcttcagggtcccttccgagggcatgtgttcagcactcccgcgttcagcctgaggggtgtacagttaagagaagacagttacagatctcattaatctacatttttcactgtcctctagcattgaaagaaggatgtctacctggtgaaagtatattttaacatgactgatggaatttcactaattgcccactctcttggaacttgaggagaagcggttggccacccatatgtcacctagctctatattctttcaggctgagattcttcttcaggaaaatgaggagcagaactggccacccttggctgctcaagaggcatttcagagtaggagatgcagttggaggtggggaggggaaggaaatagttatcaaataatgcaaaatggaataaagttatcttggatggaaagaacagggctaaatctggtcctctggtgtcgagatggaaaactgtggagttgaagaggctctgatgcccagaaaggacaatcaagctggttgactcttccagagaagaagggtaagccctgtatttatcctcccaggccattcttcttcactcctgctgctgtttgcagagagttgccctgattatcaggagaaaagaaccacgagcatccagagagtttacatcctgccttctgtcctctgctccttcagaaagatgaatgcctagacaatgggttcacactgaatgcaggctggaaagaatgcatgctggtggcctaatgccagggctgttgaaacaatttcagatatagcactgtggtctccactttatttctttatatgttttggccgctgcattttgattgcagctaaaagagataacagaaaggagatactggctggctgcttcatattagccctctctgttgtcaacaccttgatgaggccaacccagagatgcttgatcagtcctcagctttgcagggctaggtacagaattttatcacaggattttatcacgctctctggggtgactagatccacaggaaccaaaacgcagtttccaaaagctcgagtgactgaaggatctatacacaaacatggctatttgctagttaacaacaggatatttctctctggccagatcacagacatggttctgagtcagatcttccttggtggcatccctttaaagaggccatcttatgaacaggatcacaagtgagcttagtgagcagagagttagaacaaatctagctaggtgtgtttaaggaatatttccattcagctagtgtagctggattaatttctattctccaaatcaaggatgtctagaaaatgggcattgtggctttcaaatctaagaagaatctcctttgggccagctggatgtacaataaaaatgcttgtttcttggccttccttt

SEQ ID NO: 46377 - DNA, 3661 bp, Homo Sapiens
gctcacggagcggctggctaggctgaggagagctcgccgggctctgaggcgcaggaattcaataaagaaaatggcagctcttactccaaggaagaggaagcaggattctttgaagtgtgacagccttttacacttcactgaaaatctgtttccatcacctaataaaaagcactgtttttatcaaaacagtgataaaaatgaagaaaacctgcattgctctcaacaagagcattttgttttaagtgcgctcaaaacaactgaaataaatagactgccatcagcaaatcaaggctcaccatttaaatctgcgctctccactgtatctttttacaaccaaaataagtggtacctcaatccactggagagaaagctgataaaagagagtagatctacttgtctaaaaactaatgatgaagataaatcttttcccattgtgacagaaaaaatgcaaggaaaaccagtctgctccaagaagaacaacaaaaaaccacagaagagtttaactgctaagtatcaaccaaagtatagacacatcaagcctgtatcaaggaattctagaaattccaagcaaaatcgagtgatctataagccaattgtggagaaggaaaataattgtcattcagctgaaaataattccaatgctcctcgggttctgagccaaaaaataaaaccacaagttacactccagggtggagcagcattttttgttagaaaaaaatcttctcttagaaaatcgtccctggaaaatgagccgtcactgggacgcacccaaaagagtaaatcagaagtcattgaagattctgatgtagagactgtcagtgaaaaaaaaacttttgcgacaaggcaagtgccaaagtgcttggtcctagaagagaaattgaaaattggactactgagtgcaagcagtaaaaataaagagaaattaataaaggattcatcagatgacagagtttcttcaaaggaacataaagttgataaaaatgaggctttttcttcagaggattctcttggtgagaataagacaatttctcctaagtccactgtctatccaatcttcagtgcatcttcagtcaattcaaaaagatctttaggtgaagaacagttttctgtgggatctgtcaacttcatgaaacagaccaatatccagaaaaatactaataccagagatacaagtaaaaaaacaaaagaccagctcatcatcgacgctggtcagaaacattttggggctactgtgtgcaagtcttgtggtatgatatatactgcttccaaccctgaagatgaaatgcagcatgtacagcatcaccacaggtttctggaaggaatcaaatatgtgggttggaagaaagaacgtgtagtagcagagttttgggatgggaaaatcgtgttggttctgccacatgatccaagctttgctatcaaaaaggtagaagatgtccaagaacttgttgataatgaattgggcttccagcaagttgttcctaaatgtccaaacaaaataaaaacttttctttttatatctgatgaaaagagagtagttgggtgtttaattgcagaacccatcaaacaggcatttcgtgtcctgtctgaaccaattggtccagaatccccaagctctacggaatgtcctagggcttggcaatgttcagatgtaccagaacctgcagtctgtgggataagtagaatctgggttttcagactgaagagaagaaagcgcattgcaagacgactggttgataccctcaggaattgcttcatgtttggctgttttctcagcactgatgaaatagcattttctgacccaacaccagatggcaagttatttgcaaccaagtactgcaacacccctaatttcctcgtatataattttaatagttaaagctgatttcagttataaaggagttactatctggataagttcaaagagctccttattataaaatacaaactatttaatatcaaaataaaaaataccgagactcacactcatacacacacacacacacacgcacacacacatatcacagttttgttccttatgagttgaaaagtcaggaataaatttgttgaaaattatctggggattcaaaggaaaaatctttgggtgattccctgattagcactctgaatgtttaattatgaaactttgtagctataactggaaaattacctgactctttgtaagagtattaaatacaaagtgatttttctctagaaatgtgacctggtcttttataaagcccactcttagaccaggattatctaatgccacatcagaagcaaacaggcaaatttaaacttgggcaagtaatttctgtgcccaatttgtaaagggaattcctgaatttttttttttttttaatagaggcatgggtctcactgtgttgcccaggctggtctgaaacttttgggctcaagcgatcctcccaaaacgctgggattacagtcatgagccaccgtgcccagcctaattcctgacttctctatacagagtcttcacttgataggcactcgtctgtagtaactcagtttgaatatctttagaaaatgtttagaatttatttgtaacaagatggtaaggaataagattatcccatatgcatttctgtagagcagaatttgatagcttagtgttcaatctttttgaaaataaatgtttacctgtcatcagatttaattaaaattatacttagtaattgcactattacttagttaatttttgttgtatggaaatattggtagtactactttgggaacctgttactgacaattgatgtcattaacaaaatgcctagttggattagatgttttcattttctaattttttgcttgtttaaaatgcaccttacttgttctgagatacctggcaaaagtctttacaaaatgtatggtaatagaaccaaggttagtaaatatacataggctggtggatgagagaccatggaactgtgtaaatacacttaaatgttcacacatttttctagtgtaattcttggatactttaaaaagcaaaacattgttcaaattgttttgattctgaaaaatcattcaactgctaactggcaataagactctaggcaagtcgttttccagattgtaattatatgtagaaactattcatctgcattcattttatttgcctgtaagttaacatgtttccaaaatttaaaagcctgggtccccaaaagaatgtggaagtattaaaatgtatgtaattatgcaaacattttaatgctattttctgcacttatttcttttaaatattttatttaaaatttttaattaacattttgtttgcttaatgcttttgttatgaatcaattaaaattctttattttatacaactaaatctgattttaattattttattatgaaaatagtatatgttaaataaaattcagataatacagaaatagagattgccaaaagaagaggcttcccggccgggcgcggtggctcacgcctgtaatcccagcactttgggaggccgaggcgggtggatcatgaggtcaggagatcgagaccatcctggctaacaaggtgaaaccccgtctctactaaaaatacaaaaaattagccgggcgcggtggcgggcgcctgtagtcccagctactcgggaggctgaggcaggagaatggcgtgaacccgggaggcgagcttgcag

SEQ ID NO: 46378 - DNA, 648 bp, Homo Sapiens
atgagtagcaaagtctctcgctacacactgcaggaggcggtgcgggaagtcctgcacaggaaccatcacaaacgccacaagttcctggatacggtggagttgcagatcagcttaaagaattatgacccccagaaggacaagcgcttctcgggcacagtcagacttaagtccactccccaccccaagttctctgtgtgtgtcctggggaggcagcagcactgcgacgaggccaaggccgtggatattccccacatggatatcgaggcactgaaaaaactcaacaggaataagaaactgatcaagaagctggccaagaagtatgatgcaattttggcctcagagtctctgatcaagcagatcccagtcctcggcccaggcctaaataaggcaggaaagttcccttccctgctcacacccaaggaaaacatggtggccaaagtggacgaggtgaagtttatgataaagttccaaatgaagaaggtgttacctctggctgtggctgttggtcacgtgaagatgacagactatgagcttgtgtataacattcacctggctgtcaaattcctggtgtcattgctcaagaaaaactggcagaatgtccgggccttatgtatcaagaggaccacggacaagctccagcgcctatag

SEQ ID NO: 46379 - DNA, 3069 bp, Homo Sapiens
caggagggcccatgtgcttaccctgttttgcccatgaagaaacagctcagtgttgcgggtcagtgcccacatcacacagcatctagcacgtaactgcaccccgggagtcgtgggcatctgctggcctcctgccggcctcctgccctgctgacagcttgctgtgccccctgcctgccccagtacgagcgggccctggacgtggcggcagagcccaagcacgagcggcagcgccgagcccagatacgcaagaacatcacggagactctggtgtccctgagggtccacactgtggatgacatccagcagatcgctgctgcgctggcccagtgcatgggggcccagcagggagctcgtatgccgctcgtgcctgaagcagacgctgcacaagctggaggccatgatgcgcatcctgcaggcagagaccaccgcgggcaccgtgacgcccaccgccatcggagacagcatcctcaacatcacagggagacctcatccacctggccagctcagacgtgcgggcaccacagcgctcagagctgggagccgagtcaccatcgcggatggtggcgtcccaggcctacaacctgacctctgccctcacgcccatcctcacgcgctcccgcgtgctcaacgaggagcccctgacgctggcgggtgaggagatcgtggcccagggcaagcgctcggacccgcggagcctgctgtgctatggcggcgccccagggcctggctgccacttctccatcccctaggctttcagcagggccccggccaacctcagtgacgtggtgcagctcatctttctggtggactccaatccctttccctttggctatatcagcaactacaccgtctccaccaaggtggcctcgatggcgttccagacacaggccggcgcccagatccccatcgagcggctggcctcagagcgcgcctcaccgtgaaggtgcccaacaactcggactgggctgcccggggccaccgcagctccgccaactccgttgtggtccagccccaggcctccgtcggtgctgtggtcaccctggacagcagcaaccctgcggccgtgctgcatctgcagctcaactatacgctgctggacggccgctacctgtctgaggaacccgagccctacctggcagtctacctgcactcggagccccggcccaatgagcgcaactgctcggctagcaggaggatccgcccagagtccctccagggtgccgaccaccggccctacaccttcttcatttccccggggaccagagacccagtggggagttaccgtctgaacctctccagtcacttccgctggtcggcgctggaggtgtccgtgggcttgtacacgtccctgtgccagtacttcagcgaggaggacgtggtgtggcggacagaggggctgctgcccctggaggagacctcgccccgccaggccgtctgcctcacccgccacctcaccgccttcggcaccagcctcttcgtgcccccaagccatatccgctttgtgtttcctgagccaacagcggatgtaaactacatcgtcatgctgacatgtgctgtgtgcctggtgacctacatggtcatggccgccatcctgcacaagctggaccagttggatgccagccggggccgcgccatccccttctgtgggcagcggggccgcttcaagtacgagatcctcgtcaagacaggctggggccggggctcaggtaccacggcccacgtgggcatcatgctgtatggggtggacagccggagcggccaccggcacctggacggcgacagagccttccaccgcaacagtctggacatcttccagatcgccaccccgcacagcctgggtagcgtgtggaagatccgagtgtggcacgacaacaaagggctcagccctgcccggttcctgcagcacatcatcgtcagggacctgcagacggcacgcagcaccttcttcctggtcaatgactggctttcggtggagacggaggccaacgggggcctggtggagaaggaggtgctggccgcgagtcacgcagccctgttgcgcttccggcgcctgctggtggctgagctgcagcgtggcttctttgacaagcacatctggctctccatatgggaccggccgcctcgtagctatttcactcacatccagagggccacctgctgcgttctcctcatctgtctcttcctgggcgccaacgccgtgtggtacggggctgttggagactctgcctacagcacggggcgtgtgtccaggctgaacccgctgagcgtcgacacagtcgctgttggcctggtgtccagcgtggttgtctatcccgtctacctggccatcctctttctcttccggatgtcccggagcaaggtgggctggggctggggacccgggagtactgggaatggagcctgggcctcggcaccatgcccagggccgccactttccagtgctgcagccagagggaaaggcgtccaccaaaggctgctcgggaagggtcaacacacttgagcagccttagctagactgaccagggagaaagagagaagactcagaagccagaatcgtgaaagaacgagggcacttcgctaagcagacgccacggacaactgcacagcagcacgccagataactcagaagaagcaagcacgcggctgtgcacgcttccgaaatgcactccagaagaaaatctcagagccttcacgatagaatttttctaagcagttaaggaagaattaacaccaatccttcacagactctttccaagaatacagcaggtgggaactcttcccattcatacggaaacgggaggccgcaccccttaggaatgcacacgtggggtcctcaagaggttacatgcaaactaaccccagcagcacacagagaaggcgcataagccgcgaccaggaggggttgctcccgagtccgtggcaggaaccagaggccacatgtggctgctcgtatttaagttaattaaaatggaacgatggccgggtgtggtggctcacacctgtactcccagcactttgggaggcggaggcgggcagatcacttgaggtcaggagttccaagaccagcct

SEQ ID NO: 46380 - DNA, 483 bp, Homo Sapiens
atgggattactgagtcagaggaagtggacattgagtggctctcaacagacaggctgtgttgctctcacagtgcccagcttcccatgggtggccagccgaatgcattatgggagaaagcaggtctcgtggataatatttctgaagatcggagcaggttgccaggtccacgtcggccatgactgcagcacgctccggaggcagcagggggcaccctggagcttcgcatcctccttcaggcccgcggcatctcccctggctccaccatccccaggtgtctcaggcctgtttcctcctcatgagaggtggagcggtggttcccaaacacgatgtgggaagtgtgttaaaatgcagatcctgggctcgaccctgaagctcttccggcatccaccttcccaggtgaccagactctggggaaggcatcacctcaagactcctgcacccttcctccagagtcctgggattcagctaaatcctgggaaggta

SEQ ID NO: 46381 - DNA, 918 bp, Homo Sapiens
atggcttttcttccttcctgggtttgtgtactagttggttccttttctgcttccttagcagggacttccaatctctcagagacagagccccctctgtggaaggagagtcctggtcagctcagtgactacagggtggagaacagcatgtacattattaatccctgggtataccttgagagaatggggatgtataaaatcatattgaatcagacagccaggtattttgcaaaatttgcaccagataatgaacagaatattttatgggggttgcctctgcagtatggctggcaatataggacaggcagattagctgatccaacccgaaggacaaactgtggctatgaatctggagatcatatgtgcatctctgtggacagttggtgggctgatttgaattattttctgtcttcattaccctttcttgctgcggttgattctggtgtaatggggatatcatcagaccaagtcaggcttttgcccccacccaagaatgagaggaagttttgttatgatgtttctagctgtcgttcatccttccctgagacaatgaacaagtggaacaccttttaccagtatttgcagtcaccttttagtaagtttgatgatctgttgaagtacttatgggctgcacacacttcaaccttggcagataatatcaaaagttttgaagacagatatgattattattctaaagcagaagcgcattttgagagaagttgggtactggctgtggatcatttagctgcagtcctctttcctacaaccttgattagatcatataagttccagaagggcatgccaccacgaattcttcttaatactgatgtagcccctttcatcagtgactttactgcttttcagaatgtagtcctggttcttctaaatatgcttgacaatgtggataaatctataggtaag

SEQ ID NO: 46382 - DNA, 794 bp, Homo Sapiens
tcaggtcaggatgggcaccgtgcgcccacctcgcccctcgctcctgctggtctccacccgggagtcttgtctcttcctcctcttctgcctgcacctgggcgccgcctgcccacagccctgccggtgccctgaccacgcaggggctgtggctgtcttctgcagcttgcggggccttcaggaggtccccgaggacatcccggccaacaccgtgctcctgaagctcgatgccaacaagatctcccacctcccggacggggccttccagcacctgcaccggctcagggagctggatctgtctcacaacgccatcgaggccatcggctccgccaccttcgcgggcctggccgggggcctgcggctgctggacctgtcttacaaccgcatccagaggatccccaaggacgccctgggcaaactcagcgccaagatacgcctgtcccacaaccccctgcactgcgagtgcgccctgcaggaggccctgtgggagctgaagctggaccccgactctgtggacgagatcgcctgccacacctcagtgcaggaggagtttgtggggaagcctctggttcaggctctggatgcgggtgccagcctctgcagcgtcccccacaggaccacagacgtggccatgctggtcaccatgttcggctggttcgccatggtgatcgcctacgtcgtgtactatgtgcgccacaaccaggaggatgcccggaggcacctggagtacctgaagtctctgcccagcgcccccgcctccaaggaccccatcggcccggggccctagcgcctgttcc

SEQ ID NO: 46383 - DNA, 934 bp, Homo Sapiens
gggcgcgcgtcctcgcgggtctgaatggaagggtcgaggtcgtcgtcggcggcgagcagatcctgaagccagaactccaccccggcgcccgcgccatgcggcgggagaggtgcggcgccccccacccgcgtcgccgccatggaggtgctgcggcgctcctcggtcttcgccgccgagatcatggacgcctttgaccgctcgcccacagacaaggagctggtggcccaggccaaggcgctgggccgggagtacgtgcacgcgcggctgctgcgcgccggcctctcctggagcgcgcccgagcgtgccgcgccggtcccgggacgcctggctgaggtgtgcgcggtgctgctgcgcctgggcgatgagctggagatgatccggcccagcgtctaccgcaacgtggcgcgtcagctgcacatctccctgcagtctgagcctgtggtgaccgatgcgttcctggccgtggctggccacatcttctctgcaggcatcacgtggggcaaggtggtgtccctgtatgcggtggccgcggggctggccgtggactgtgtgaggcaggcccagcctgccatggtccacgccctcgtggactgcctgggggagttcgtgcgcaagaccctggcaacctggctgcggagacgcggcggatggactgatgtcctcaagtgtgtggtcagcacagaccctggcctccgctcccactggctggtggctgcactctgcagcttcggccgcttcctgaaggctgccttcttcgtgctgctgccagagagatgagctgcccacctggcagtggccgcagcctggccctctgggcccaacgcaggaggccctcagcacccgaacacatcttcctcctccccacccgagcctggagcactctaaccctcggagaccccctaagccccgttcctccgcagacccaggccctccg

SEQ ID NO: 46384 - DNA, 1919 bp, Homo Sapiens
atgctcgccgcctccatcttccgtccgacactgctgctctgctggctggctgctccctggcccacccagcccgagagtctcttccacagccgggaccgctcggacctggagccgtccccactgcgccaggccaagcccattgccgacctccacgctgctcagcggttcctgtccagatacggctggtcaggggtgtgggcggcctgggggcccagtcccgaggggccgccggagacccccaagggcgccgccctggccgaggcggtgcgcaggttccagcgggcgaacgcgctgccggccagcggggagctggacgcggccaccctagcggccatgaaccggccgcgctgcggggtcccggacatgcgcccaccgcccccctccgccccgccttcgcccccgggcccgccccccagagcccgctccaggcgctccccgcgggcgccgctgtccttgtcccggcggggttggcagccccggggctaccccgacggcggagctgcccaggccttctccaagaggacgctgagctggcggctgctgggcgaggccctgagcagccaactgtccgtggccgaccagcggcgcattgtggcgctggccttcaggatgtggagcgaggtgacgccgctggacttccgcgaggacctggccgcccccggggccgcggtcgacatcaagctgggctttgggagaggccggcacctgggctgtccgcgggccttcgatgggagcgggcaggagtttgcacacgcctggcgcctaggtgacattcactttgacgacgacgagcacttcacacctcccaccagtgacacgggcatcagccttctcaaggtggccgtccatgaaattggccatgtcctgggcttgcctcacacctacaggacgggatccataatgcaaccaaattacattccccaggagcctgcctttgagttggactggtcagacaggaaagcaattcaaaagctgtatggctcctgtgagggatcatttgatactgcgtttgactggattcgcaaagagagaaaccaatatggagaggtgatggtgagatttagcacatatttcttccgtaacagctggtactggctttatgaaaatcgaaacaataggacacgctatggggaccctatccaaatcctcactggctggcctggaatcccaacacacaacatagatgcctttgttcacatctggacatggaaaagagatgaacgttatttttttcaaggaaatcaatactggagatatgacagtgacaaggatcaggccctcacagaagatgaacaaggaaaaagctatcccaaattgatttcagaaggatttcctggcatcccaagtcccctagacacggcgttttatgaccgaagacagaagttaatttacttcttcaaggagtcccttgtatttgcatttgatgtcaacagaaatcgagtacttaattcttatccaaagaggattactgaagtttttccagcagtaataccacaaaatcatcctttcagaaatatagattccgcttattactcctatgcatacaactccattttctttttcaaaggcaatgcatactggaaggtagttaatgacaaggacaaacaacagaattcctggcttcctgctaatggcttatttccaaaaaagtttatttcagagaagtggtttgatgtttgtgacgtccatatctccacactgaacatgtaataagaaaaagtaggaaatggagggtcataggacttcgctaaaattctgatactgtttacaaagaaaaccggattttcagtagctgaagaaaatatggcactgtaagttaaaacccaatgggaaaagccttagttgaacttttaaaatacttgatttaaaaacaattgctcaggcaaaacataattcataaactaaaaggtttaaaaaaa

SEQ ID NO: 46385 - DNA, 2140 bp, Homo Sapiens
aaaggagtctcggaggactgtaagaagaatgcttcgaggccgatccctctctgtaacatccctgggtgggcttccccagtgggaagtcgaagaacttcctgtggaggagttactgctctttgaagttgcttgggaagtgaccaataaagttggaggcatctatactgtgattcagacaaaggccaaaacaacagcagatgaatggggagagaactattttctgataggtccatattttgagcataatatgaagactcaggtggaacagtgtgaacctgtaaatgatgctgtcagaagagcagtggacgcaatgaataagcatggctgccaggtgcattttggaagatggctgatagaaggaagtccttatgtggtactttttgacataggctattcagcttggaatctggacaggtggaagggtgacctctgggaagcatgcagtgtcggcattccttatcatgaccgagaagccaatgatatgctgatatttggatctttaactgcctggttcttaaaagaggtgacagatcatgcagatggtaaatatgtcgttgcccaattccatgaatggcaggctggaattggactgatcctttctcgagccaggaaacttcctattgccacaatatttacaacccacgctacactacttgggaggtatctctgtgcagcaaatattgatttctacaaccatcttgataagtttaacattgacaaagaggctggggaaaggcagatttaccaccggtactgcatggagcgagcttccgttcattgcgctcacgtgttcaccacggtttctgaaataacagcaatagaagctgaacatatgctgaagagaaagcctgatgtagttactccaaacggcttgaatgttaagaaattttcagcagtgcatgagtttcaaaatctacatgccatgtacaaggccagaatccaagattttgttcgaggtcatttctatggtcatctcgactttgatcttgaaaagactttgttccttttcattgctgggaggtatgagttttcaaacaaaggagctgacatcttcctagaatccttatccaggctaaatttcctgctgaggatgcataaaagtgacatcacagtgatggtgtttttcattatgcctgccaagacaaataatttcaacgtggaaaccctgaaaggacaagcagtgcgaaaacagctgtgggatgttgcacattctgtgaaggaaaagtttggaaaaaaactctatgatgcattattaagaggagaaattcctgacctgaacgatattttagatcgagatgatctaacaattatgaaaagagccatcttttcaactcagcgacagtcattgcccccagtgaccacgcacaacatgattgatgactccaccgaccccatcctcagcaccattagacggattggacttttcaacaaccgcacagatagagtcaaggtgattttgcacccagagtttctatcctccaccagtcccttactacccatggactatgaagagtttgttagaggttgtcatcttggagtatttccatcatactatgaaccctggggttatactccagctgaatgcactgtgatgggtatccccagtgtgaccacgaatctctccgggtttggctgtttcatgcaggagcacgtggctgatcctactgcttacggtatttacatcgttgacaggcggttccgttctccagatgattcttgcaatcagctgactaagtttctctatggattttgcaaacagtcacgccgccaaaggattatccagaggaacagaactgagaggctctcagatcttctggattggagatacttaggcagatattaccagcatgccagacacctgacattaagcagagcttttccagataaattccatgtggaactaacatcaccaccaacgacagaaggatttaaatatcccaggccttcctcagtaccaccttctccttcagggtctcaggcctccagtcctcagagcagtgatgtggaagatgaagtggaggatgagagatacgatgaggaagaggaggctgaaagggatcggttaaatatcaagtcaccattttcactgagccacgttcctcatgggaagaaaaagctgcatggtgaatataagaactga

SEQ ID NO: 46386 - DNA, 1866 bp, Homo Sapiens
atgtgttctgggtggtctagctcagtcatctggagacacacacagtttgctgtggaacgttgtggcttctgtggctcctcaggcccgggggcgccccttgaaccctccactcttggctccaagcaccttccctgggaagctgtatctgctgggttcgcagacaggaacagaaacatggatggagccatgtggctgagcctctgtcctgataacgaagacctgctttggaggaaaaagcacaaattgctacaagcccggggcaaaggcgatctcgctctgcagagaagagcggatgccaagctgtggaaaaactaccagctccagcgcttggctgaggagttgaggagagggtatcaggaggcacagcacctgcacgtcggtggcctggacaggctgcagtcagcacgtctgttgggctggggaggaggacgggccagggaaaatgagcctgactcgcaggggcccatccagcgaagatcagccaggcccccgagggccaaggagaagcatagagcagcccttagtgaagagaggagttgcagggaagagttgggccagcaacaccccaggcactccaggccccggaagacagcagcgagtccagagaaaccacagactacaaaagccacgggtcggatgaattctcacctggccccgcctgagaagagaaagggaaggccagaaccttcgaccaagtctgggggtggccgctgtgccatccatcctcggaggagcaaaggggcggacctagaaaggtcaaacccactcgtggctgctgtgggagaaatcgggcttgtggaggaaaaagagaaaggaacagctcgggcggggaggaggcaactgggaaagggggcagtttgctttgttccagccctgaccagtcgctctcagggacagagtctggaggggaagctgagagacctcgggcagctgtggccagctgattccagctgcagaagggaagccgtgtccccagcatctcagtgcacgctccgggagaagaacaagtggcagaaagagctggagttggcctttgaagagttgtttaatataaacagaaagctgaaaaaacacctgtgcttgtacctggcactgaagcccaggatggaccagagacctggggaagggcatgccttctcagagatgcaagagtgtggcgctgggaccccaagagggaagaaaatggcagacccagagatgctgcctgccggggaacccaggagcccagcagaggaggaggcgcagcaggcagcgtccaagaccgacttgaaaacgttcatgggcaaggcccagaaccaaaaatatcagggcacggtcaagcccacgtttagaaatggaagtcaaacattgtctcccgaggcaggtatatttatcaacaaagaggactcattattgtatagcactgaatctggacaagagacccccaaactgggcacgctggcagagggctcccttcagctccaccttcaagaccaggcagacagagtgggctcgacggcatccaggcaaaggcagaaagcagagatggagcagagaagacaaaaacaactggaatcgcttgaacaaatggaacacccagatatgagcttggaaatccactacaaagctgagctagaaaaagagaggagggagcaaagaagagctcgactggcccatctgaagtcctcctccacgagagcccaggaaagggagagaggatctgagctcagcaccacttccccatcgggcaccagcctcgccgacgacgaccggcacagtcagatgatccgagaccagcagcagcagatcttacagcaaaacaggttgcacaagcagtttcttgaagaagcccggaaatgcttgcgggagtttcagaacatatgctaa

SEQ ID NO: 46387 - DNA, 330 bp, Homo Sapiens
gaatccttaaacacattacttaaacagctagaagaagaaaagaagactcttgaaagtcaagtgaaatactatgcacttaaactggaacaagaatcaaaggcttaccagaagatcaacaatgaacgccgtacatacctagctgaaatgtctcagggttctggtttacatcaagtttctaaaaggcaacaggtggatcaactgcctaggatgcaagagaatctagtgaaaactggaagatataatccagctaagcagaagacagtgagtgccaagagaggaccagtaaaaaagattacaagaccaaaccatcttccagaactccatccatga

SEQ ID NO: 46388 - DNA, 1283 bp, Homo Sapiens
ggggcccagggccctcctatggaccctgcccgctcccctcccattgtccacggctgtccgcccacccccattctccaagcttcagccccctccttagttcggcatctgcacagcactgaagaacctgggaatcagaccctgagaccctgagcaatcccaggtccagcgccagccctatcatgaccaaggagtatcaagaccttcagcatctggacaatgaggagagtgaccaccatcagctcagaaaagggccacctcctccccagcccctcctgcagcgtctctgctccggacctcgcctcctcctgctctccctgggcctcagcctcctgctgcttgtggttgtctgtgtgatcggatcccaaaactcccagctgcaggaggagctgcggggcctgagagagacgttcagcaacttcacagcgagcacggaggcccaggtcaagggcttgagcacccagggaggcaatgtgggaagaaagatgaagtcgctagagtcccagctggagaaacagcagaaggacctgagtgaagatcactccagcctgctgctccacgtgaagcagttcgtgtctgacctgcggagcctgagctgtcagatggcggcgctccagggcaatggctcagaaaggacctgctgcccggtcaactgggtggagcacgagcgcagctgctactggttctctcgctccgggaaggcctgggctgacgccgacaactactgccggctggaggacgcgcacctggtggtggtcacgtcctgggaggagcagaaatttgtccagcaccacataggccctgtgaacacctggatgggcctccacgaccaaaacgggccctggaagtgggtggacgggacggactacgagacgggcttcaagaactggaggccggagcagccggacgactggtacggccacgggctcggaggaggcgaggactgtgcccacttcaccgacgacggccgctggaacgacgacgtctgccagaggccctaccgctgggtctgcgagacagagctggacaaggccagccaggagccacctctcctttaatttatttcttcaatgcctcgacctgccgcaggggtccgggattgggaatccgcccatctgggggcctcttctgctttctcgggaattttcatctaggattttaagggaaggggaaggatagggtgatgttccgaaggtgaggagcttgaaacccgtggcgctttctgcagtttgcaggttatcattgtgaactttttttttttaagagtaaaaagaaatatacctaaa

SEQ ID NO: 46389 - DNA, 360 bp, Homo Sapiens
gtctctgagagccagggccctggcacagtccttcagtttttatccttcaactgctcctcctacacgcccacacccaccctggagttgctcaatgtccagccacccaccaccttcttcaacccacccagcttggccaggtggcaagggacctatgtgggcaagttgaccttgagcagctctgctcagttggatgccctgatggtgaaccactacaaggtgcagctgaagttcacatgtggcaaccatgtgatggagggctcactctctgtggatgtgcagcgggaccttagccatatccagtgtgctggtcaatttgccagcccaggtgaggccaggggcagccggcagggtgggggcagg

SEQ ID NO: 46390 - DNA, 444 bp, Homo Sapiens
aactccagagcctccttcaagatgctgctggtcctgctctcagtggtccttctggctctgagctcagctcagagcacagataatgatgtgaactatgaagactttactttcaccataccagatgtagaggactcaagtcagagaccagatcagggaccccagagacctcctcctgaaggactcctacctagaccccctggtgatagtggtaaccaagatgatggtcctcagcagagaccaccaaaaccaggaggccatcaccgccatcctcccccacctccttttcaaaatcagcaacgaccaccccgacgaggacaccgtcaactctctctaccccgatttccttctgtcagcctgcaggaagcatcatcattcttccagagggacagaccagcaagacatccccaggagcaaccactctggtaatctagaattcagtggcag

SEQ ID NO: 46391 - DNA, 1167 bp, Homo Sapiens
agcctggacccattcagtcagaggcagccagcgggacctgcttcaccgagcgcagcgaagccgagacccgggctggcccctctgctgcccccggagcgggccatgccgccgcgggagctgagcgaggccgagccgcccccgctccgggccccgacccctcccccgcggcggcgtagcgcgcccccagagctgggcatcaagtgcgtgctggtgggcgacggcgccgtgggcaagagcagcctcatcgtcagctacacctgcaatgggtaccccgcgcgctaccggcccactgcgctggacaccttctctgtgcaagtcctggtggatggagctccggtgcgcattgagctctgggacacagcgggacaggaggattttgaccgacttcgttccctttgctacccggataccgatgtcttcctggcgtgcttcagcgtggtgcagcccagctcctttcaaaacatcacagagaaatggctgcccgagatccgcacgcacaacccccaggcgcctgtgctgctggtgggcacccaggccgacctgagggacgatgtcaacgtactaattcagctggaccaggggggccgggagggccccgtgccccaaccccaggctcagggtctggccgagaagatccgagcctgctgctaccttgagtgctcagccttgacgcagaagaacttgaaggaagtatttgactcggctattctcagtgccattgagcacaaagcccggctggagaagaaactgaatgccaaaggtgtgcgcaccctctcccgctgccgctggaagaagttcttctgcttcgtttgagcagctatggctgcatagcaagtagtaggcaggaggccaaagacttctgagacctggggcacccgggcctttgcggcagctactggcagggcctggccacctcataggactcagttcccttctgaacactcgggggacatgggcctctaactgcccactctgatatgcctgggtgagcctaggagggaaggctctgatttggatttctccagtcaaagctcacagaaaaaaacctggcactttgattttcatgggatggtcctaacagggtcagtcacctccgagcagtttgggaacccagtttcttgtcctgggccctcaggtcagcctggctgaattaggacccttccttgg

SEQ ID NO: 46392 - DNA, 375 bp, Homo Sapiens
gagaaagcttgtggagaaggcgggcaaaaaaaaaagcaggttctgaggttcactcttggttgcacccaccccatagaagatggaatcgtggatgctgccaattttgagcagtttttgcaagaaaggatcaaagtgaacggaaaagctgggaaccttggcgaaggggtggtgaccgtcaaaaggagcaagagcaagatcaccgtgacatccaaggtgcatttttccaaaaggtatttgaaatatctcaccaaaaaatatttgaagaagaataatcttcgtgattggttgtgcatagttgctaacagcaaagagagttacaaattacgttccttccaaattaaccaggacgaagaagaggaggaagacgaggattaa

SEQ ID NO: 46393 - DNA, 312 bp, Homo Sapiens
aggaaggaaagaagaaagggaggaagaaaggaaaacagggagcctagagaaaggagggagaaaataagaaaaaaaaaagagagagagaaaggtagaacctggattctcttcgtggcctgtgctgaggactacatcagtctcctgcaattatcatctacactgaaaaacaaagaggacagaggcgaagctagtggccctcaccatcccctgcaagctgattgcttcttactgcaagcacttgagcatcttcctgagagctttcttgggcaatgggaaccaggcttggcccaatcacaggcaggtgaagtatga

SEQ ID NO: 46394 - DNA, 849 bp, Homo Sapiens
atgggcgagcataatctcctgaatcccgggtttgtggggccgctggtaaacatccacacgggagacaccttctacttccccaacttccgcgcgtccggggcgcagcttcccgggctgccttcgctgtcctacccacgccgcgacaacgtgtgctccctgtcctggccgtcggcggagccgtgcaatggctacccgcagccctacctcggcagcccagtgtctctcaaccctcccttcggccgcacgtgcgagctggcgcgcgtggaggacggcaagggttactaccgcgagccgtgcgccgagggtggcggcgggggcctgaagcgtgaggagcgcgggcgcgacccgggagccgggcccggggcagcgctgctcccgctggagccgtcggggccgcctgcgctcggcttcaagtacgactacgcggcgggcggcggcggtggcgacggcggcggcggcgcaggacctccgcacgacccgccctcctgccagtcgctggaatccgactccagttcgtccctgctcaacgagggcaacaagggcgccggcgcaggcgaccccggcagcttggtatcgccgttgaaccccggcggcgggctctcggccagcggcgcgccctggtacccgatcaacagccgctctcggaagaagcgcaagccctattcgaagttgcaactggcagagctggagggcgagtttctggtcaacgagttcatcacacgccagcgccggagggaactctcagaccgcttgaatcttagtgaccagcaggtcaagatctggtttcagaaccggagaatgaaaaagaaaagacttctgttgagggagcaagctctctccttcttttaa

SEQ ID NO: 46395 - DNA, 622 bp, Homo Sapiens
catggctacctgggccctcctgctccttgcagccatgctcctgggcaacccaggtctggtcttctctcgtctgagccctgagtactacgacctggcaagagcccacctgcgtgatgaggagaaatcctgcccgtgcctggcccaggagggcccccagggtgacctgttgaccaaaacacaggagctgggccgtgactacaggacctgtctgacgatagtccaaaaactgaagaagatggtggataagcccacccagagaagtgtttccaatgctgcgacccgggtgtgtaggacggggaggtcacgatggcgcgacgtctgcagaaatttcatgaggaggtatcagtctagagttacccagggcctcgtggccggagaaactgcccagcagatctgtgaggacctcaggttgtgtataccttctacaggtcccctctgagccctctcaccttgtcctgtggaagaagcacaggctcctgtcctcagatcccgggaacctcagcaacctctgccggctcctcgcttcctcgatccagaatccactctccagtctccctcccctgactccctctgctgtcctcccctctcacgagaataaagtgtcaagcaagattttagccgc

SEQ ID NO: 46396 - DNA, 396 bp, Homo Sapiens
atgggcaagttcatgaaacctgggacggtggtgcttgttctggctggatgctattctggatgcaaagccatcatcgtgaagaacattgatgatggtaccttagatcgcccctacagccatgctctggtggctggaattgaccgctgtccccacaaagtgacagctgccatgggcaagaagaagatctctaagaggtcaaagatcaagtcttttgtgaaagtttataaccacaatcagctaatgcccacaaggtactctgtggatatccccttggacaaaactgtcatcaataaggatgtcttcagagaccctactcttaaacacaaggcccgaaggccaaggtcaagtttgaagagagatacaagacaggcaagaacaagcggttcttccagaagc

SEQ ID NO: 46397 - DNA, 1444 bp, Homo Sapiens
atttaatggcgcggacgccggcggcggcgggctcctggccgggccagcgcagcggaagagccaagccagcatgtcggggacccgagcctccaacgaccggccccccggcgcaggcggcgtcaagcgggggcggctgcagcaggaggcggcggcgaccggctcccgcgtgacggtggtgctgggcgcgcagtggggggacgagggcaaaggcaaggtggtggacctgctggccacggacgccgacatcatcagccgctgccaggggggcaacaacgccggccacacggtggtggtggatgggaaagagtacgacttccacctgctgcccagcggcatcatcaacaccaaggccgtgtccttcattggcaacggggtggtcatccacttgccaggcttgtttgaggaagcagagaagaatgaaaagaaaggcctgaaggactgggagaagaggctcatcatctctgacagagcccaccttgtgtttgattttcaccaggctgtcgacggacttcaggaagtgcagcgccaggcacaagaggggaagaatataggcaccaccaagaagggaatcggaccaacctactcttccaaagctgcccggacaggcctccgcatctgcgacctcctgtcagattttgatgagttttcctccagattcaagaacctggcccaccagcaccagtcgatgttccccaccctggaaatagacattgaaggccaactcaaaaggctcaagggctttgctgagcggatcagacccatggtccgagatggtgtttactttatgtatgaggcactccacggcccccccaagaagatcctggtggagggtgccaacgccgccctcctcgacattgacttcgggacctacccctttgtgacttcatccaactgcaccgtgggcggtgtgtgcacgggcctgggcatccccccgcagaacataggtgacgtgtatggcgtggtgaaagcctataccacacgtgtgggcatcggggccttccccaccgagcagatcaacgagattggaggcctgctgcagacccgcggccacgagtggggagtgaccacaggcaggaagaggcgctgcggctggctcgacctgatgattctaagatatgctcacatggtcaacggattcactgcgctggccctgacgaagctggacatcctggacgtactgggtgaggttaaagtcggtgtctcatacaagctgaacgggaaaaggattccctatttcccagctaaccaggagatgcttcagaaggtcgaagttgagtatgaaacgctgcctgggtggaaagcagacaccacaggcgccaggaggtgggaggacctgcccccacaggcccagaactacatccgctttgtggagaatcacgtgggagtcgcagtcaaatgggttggtgttggcaagtcaagagagtcgatgatccagctgttttag

SEQ ID NO: 46398 - DNA, 2910 bp, Homo Sapiens
atggttttctctgtcaggcagtgtggccatgttggcagaactgaagaagttttactgacgttcaagatattccttgtcatcatttgtcttcatgtcgttctggtaacatccctggaagaagatactgataattccagtttgtcaccaccacctgctaaattatctgttgtcagttttgccccctcctccaatggtactccaggcaagattttgaaaaaatttaaacctagatttaatgttactttaagcttactcccttcaaacgaaacagaaaaaactaaaatcactatagtaaaaaccttcaatgcatcaggcgtcaaaccccagagaaatatctgcaatttgtcatctatttgcaatgactcagcattttttagaggtgagatcatgtttcaatatgataaagaaagcactgttccccagaatcaacatataacgaatggcaccttaactggagtcctgtctctaagtgaattaaaacgctcagagctcaacaaaaccctgcaaaccctaagtgagacttactttataatgtgtgctacagcagaggcccaaagcacattaaattgtacattcacaataaaactgaataatacaatgaatgcatgtgctgtaatagctgctttggaaagagtaaagattcgaccaatggaacactgctgctgttctgtcaggataccctgcccttcctccccagaagagttggaaaagcttcagtgtgacctgcaggatcccattgtctgtcttgctgaccatccacgtggcccaccattttcttccagccaatccatcccagtggtgcctcgggccactgtgctttcccaggtccccaaagctacctcttttgctgagcctccagattattcacctgtgacccacaatgttccctctccaataggggagattcaacccctttcaccccagccttcagctcccatagcttccagccctgccattgacatgcccccacagtctgaaacgatctcttcccctatgccccaaacccatgtctccggcaccccacctcctgtgaaagcctcattttcctctcccaccgtgtctgcccctgcgaatgtcaacactaccagcgcacctcctgtccagacagacatcgtcaacaccagcagtatttctgatcttgagaaccaagtgttgcagatggagaaggctctgtccttgggcagcctggagcctaacctcgcaggagaaatgatcaaccaagtcagcagactccttcattccccgcctgacatgctggcccctctggctcaaagattgctgaaagtagtggatgacattggcctacagctgaacttttcaaacacgactataagtctaacctccccttctttggctctggctgtgatcagagtgaatgccagtagtttcaacacaactacctttgtggcccaagaccctgcaaatcttcaggtttctctggaaacccaagctcctgagaacagtattggcacaattactcttccttcatcgctgatgaataatttaccagctcatgacatggagctagcttccagggttcagttcaatttttttgaaacacctgctttgtttcaggatccttccctggagaacctctctctgatcagctacgtcatatcatcgagtgttgcaaacctgaccgtcaggaacttgacaagaaacgtgacagtcacattaaagcacatcaacccgagccaggatgagttaacagtgagatgtgtattttgggacttgggcagaaatggtggcagaggaggctggtcagacaatggctgctctgtcaaagacaggagattgaatgaaaccatctgtacctgtagccatctaacaagcttcggcgttctgctggacctatctaggacatctgtgctgcctgctcaaatgatggctctgacgttcattacatatattggttgtgggctttcatcaatttttctgtcagtgactcttgtaacctacatagcttttgaaaagatccggagggattacccttccaaaatcctcatccagctgtgtgctgctctgcttctgctgaacctggtcttcctcctggactcgtggattgctctgtataagatgcaaggcctctgcatctcagtggctgtatttcttcattattttctcttggtctcattcacatggatgggcctagaagcattccatatgtacctggcccttgtcaaagtatttaatacttacatccgaaaatacatccttaaattctgcattgtcggttggggggtaccagctgtggttgtgaccatcatcctgactatatccccagataactatgggcttggatcctatgggaaattccccaatggttcaccggatgacttctgctggatcaacaacaatgcagtattctacattacggtggtgggatatttctgtgtgatatttttgctgaacgtcagcatgttcattgtggtcctggttcagctctgtcgaattaaaaagaagaagcaactgggagcccagcgaaaaaccagtattcaagacctcaggagtatcgctggccttacatttttactgggaataacttggggctttgccttctttgcctggggaccagttaacgtgaccttcatgtatctgtttgccatctttaataccttacaaggatttttcatattcatcttttactgtgtggccaaagaaaatgtcaggaagcaatggaggcggtatctttgttgtggaaagttacggctggctgaaaattctggaaatgcttctacagagaggaatggggtctcttttagtgttcagaatggagatgtgtgccttcacgatttcactggaaaacagcacatgtttaacgagaaggaagattcctgcaatgggaaaggccgtatggctctcagaaggacttcaaagcggggaagcttacactttattgagcaaatgtga

SEQ ID NO: 46399 - DNA, 486 bp, Homo Sapiens
atggagtacacagggagcaaatatatcggggaatatgtagatgggaggatggagggcaaagccaagtacatcctccctaccgaaacaatatatgttggggaaatgaaggatggcatgtttcacggcgagggaaccctgtacttccccagcggaagccaatacgacgccatttgggaaaacggattggccataaagggcacatatacgttctcagatgggctgcactatgatgagaaaaactggcattactgcgacggctatgatcggaggttttacacagagatcctcaatggcttgaagcctgcaggtatggctcaactcaccaatatggacccacctagaaaaatccccaagggctattacgattgtggagacggcttctataacccagtcacgagggtagtcaaggactataggaaccgctttctaagaaacgcagatgatgacgagcatgagtggatcacccgtacctgtcgaaagggctag

SEQ ID NO: 46400 - DNA, 607 bp, Homo Sapiens
agttcccatgagcatgagagaagaagcaatgcacgctccggcagattcctaggaaccaaatacctctgaggagcaccagatttcagcttatgggatgctttgattgctctgtggctgcatttaggagaaggaagctgcagtcatgcgtcatcactgccagcctcacatctcttgacagttaaagccttagggtggagcaagggaaaatttaaaataacaaatgaagcaaaagcaagaggtgatgttccaaagcagaggaaggctaagtttatatatacaaatgtcaagtgtgtatagtgcaaaactaggaccagttggtggaatctgtggtcaaaaacaaaagccttccttttttttttttcaagacgcaagaccacttgcgccagcagcgtgcatcagcaagatagcaaaagcaggacgagagctgcccggaagacatctacctggccagaagacacctaccctggccggaagacatgtacccctgaagatagagaaagaggccatcgtgtactacgtagcagtcatgtcagactgggacacttcctgtttacagaggactataaaacccctgtcctgtcctcacttggggctgacgccatcttag

SEQ ID NO: 46401 - DNA, 171 bp, Homo Sapiens
atgccaacgagaccccagccacagccggtccccagattcttgacatcatcacaagaaagaattcacagatggtgcacaagaaggctctcgccagatgctggtcttgtgatcttggacttcccagcctccagaactataatggctgctccatcagcctggttcttggaatga

SEQ ID NO: 46402 - DNA, 3257 bp, Homo Sapiens
atgccccgccaccacgcgggaggagaggagggcggcgccgccgggctctgggtgaagagcggcgcagcggcggcggcggcgggcggggggcgcttgggcagcggcatgaaggatgtggagtccggccggggcagggtgctgctgaactcggcagccgccaggggcgacggcctgctactgctgggcacccgcgcggccacgctcggtggcggcggcggtggcctgagggagagccgccggggcaagcagggggcccggatgagcctgctggggaagccgctctcttacacgagtagccagagctgccggcgcaacgtcaagtaccggcgggtgcagaactacctgtacaacgtgctggagagaccccgcggctgggcgttcatctaccacgctttcgtttttctccttgtctttggttgcttgattttgtcagtgttttctaccatccctgagcacacaaaattggcctcaagttgcctcttgatcctggagttcgtgatgattgtcgtctttggtttggagttcatcattcgaatctggtctgcgggttgctgttgtcgatatagaggatggcaaggaagactgaggtttgctcgaaagcccttctgtgttatagataccattgttcttatcgcttcaatagcagttgtttctgcaaaaactcagggtaatatttttgccacgtctgcactcagaagtctccgtttcctacagatcctccgcatggtgcgcatggaccgaaggggaggcacttggaaattactgggttcagtggtttatgctcacagcaaggaattaatcacagcttggtacataggatttttggttcttattttttcgtctttccttgtctatctggtggaaaaggatgccaataaagagttttctacatatgcagatgctctctggtggggcacaattacattgacaactattggctatggagacaaaactcccctaacttggctgggaagattgctttctgcaggctttgcactccttggcatttctttctttgcacttcctgccggcattcttggctcaggttttgcattaaaagtacaagaacaacaccgccagaaacactttgagaaaagaaggaacccagctgccaacctcattcagtgtgtttggcgtagttacgcagctgatgagaaatctgtttccattgcaacctggaagccacacttgaaggccttgcacacctgcagccctaccaaaaattgcttgaaatggaataatcatgcctctgttctccacagtcagaagctaagttttaaggagcgagtgcgcatggctagccccaggggccagagtattaagagccgacaagcctcagtaggtgacaggaggtccccaagcaccgacatcacagccgagggcagtcccaccaaagtgcagaagagctggagcttcaacgaccgaacccgcttccggccctcgctgcgcctcaaaagttctcagccaaaaccagtgatagatgctgacacagcccttggcactgatgatgtatatgatgaaaaaggatgccagtgtgatgtatcagtggaagacctcaccccaccacttaaaactgtcattcgagctatcagaattatgaaatttcatgttgcaaaacggaagtttaaggaaacattacgtccatatgatgtaaaagatgtcattgaacaatattctgctggtcatctggacatgttgtgtagaattaaaagccttcaaacacgtgttgatcaaattcttggaaaagggcaaatcacatcagataagaagagccgagagaaaataacagcagaacatgagaccacagacgatctcagtatgctcggtcgggtggtcaaggttgaaaaacaggtacagtccatagaatccaagctggactgcctactagacatctatcaacaggtccttcggaaaggctctgcctcagccctcgctttggcttcattccagatcccaccttttgaatgtgaacagacatctgactatcaaagccctgtggatagcaaagatctttcgggttccgcacaaaacagtggctgcttatccagatcaactagtgccaacatctcgagaggcctgcagttcattctgacgccaaatgagttcagtgcccagactttctacgcgcttagccctactatgcacagtcaagcaacacaggtgccaattagtcaaagcgatggctcagcagtggcagccaccaacaccattgcaaaccaaataaatacggcacccaagccagcagccccaacaactttacagatcccacctcctctcccagccatcaagcatctgcccaggccagaaactctgcaccctaaccctgcaggcttacaggaaagcatttctgacgtcaccacctgccttgttgcctccaaggaaaatgttcaggttgcacagtcaaatctcaccaaggaccgttctatgaggaaaagctttgacatgggaggagaaactctgttgtctgtctgtcccatggtgccgaaggacttgggcaaatctttgtctgtgcaaaacctgatcaggtcgaccgaggaactgaatatacaactttcagggagtgagtcaagtggctccagaggcagccaagatttttaccccaaatggagggaatccaaattgtttataactgatgaagaggtgggtcccgaagagacagagacagacacttttgatgccgcaccgcagcctgccagggaagctgcctttgcatcagactctctaaggactggaaggtcacgatcatctcagagcatttgtaaggcaggagaaagtacagatgccctcagcttgcctcatgtcaaactgaaataagttcttcattttctttccaggcatagcagttctttagccatacatatcattgcatgaactatttcgaaagcccttctaaaaagttgaaattgcaagaatcgggaagaacatgaaaggcagtttataagcccgttaccttttaattgcatgaaaatgcatgtttagggatggctaaaattccaaggtgcatcgacattaacccactcatttagtaatgtaccttgagttaaaaagcctgagaaaccaaacacagctaatgctatggggtgtatgaatatgtcaagtttaggtcatttagaagatttgacactgtattttgaaattatgggagtaaacaccttcaaatttcaggcatttctgctttgtgactaaatacaaactacattttcaagattaggccataatgtatatttaaacacaatggctatcaacagctgctaata

SEQ ID NO: 46403 - DNA, 2118 bp, Homo Sapiens
atggccgccgctgcgaccatggcggctgcggcccgggaactggtgttgcgggctgggacctcagatatggaggaggaagagggcccgctggcgggtggtcctgggctccaggaaccactgcaacttggggagttggatatcacttctgatgaattcatcctggatgaagtggatgttcacattcaggcaaatctggaggatgagttagtaaaggaagctcttaaaacgggtgtagatctccgtcactattcaaagcaagttgagctggagctacagcagattgaacagaaatccattcgggattatattcaagagagtgagaatatagcatctctacacaaccagatcacagcctgtgatgctgtcctggagcgaatggagcagatgttgggagcttttcagagtgacctcagctccatcagctctgagatccggacactgcaggaacagtcaggagccatgaacattcgacttcgaaatcgccaggcagttcgggggaaacttggggagcttgttgatggtctggtggtgccttctgctctggtcacggcaattctggaggctccagtgacagagcccaggttcttggagcagctacaggagctggatgccaaggcagccgcagtcagagagcaggaagctagaggcacagcagcctgcgcagatgtcagaggcgtgctcgatcggctccgggtcaaggcagtgacgaagatccgagagtttatcctccagaagatttattccttcaggaaacccatgaccaactatcagatcccccagacggccctgctgaagtacaggttcttctatcagtttctgctgggcaatgaacgagcaacagcaaaggagatcagggatgaatatgtggagacgctgagcaagatttacctgtcttactaccgctcttacctggggcggctcatgaaggtgcagtatccatttgaggccctcttccgcagccagcactacgccctcctagacaattcctgccgcgaataccttttcatctgtgaattttttgttgtgtctggcccagctgcacacgacctgttccatgctgtcatgggccgtacactcagcatgaccctgaaacacctggattcttatctagctgactgctacgatgccattgctgtttttctctgtatccacattgttctccggttccgtaacattgcagcaaagagggatgttcctgccctggacaggtactgggaacaggtgcttgccttgctatggccacggtttgaactgatcctggagatgaatgttcagagcgtccgaagcactgacccccagcgcctaggggggttggatactcggccccactatatcacacgccgctatgcagagttctcctccgctcttgtcagtatcaaccagacaattcctaatgaacggaccatgcaattgctgggacagctgcaggtggaggtggagaattttgtcctccgagtggcagctgagttctcctcaaggaaggagcagcttgtgtttctgatcaacaactatgacatgatgctgggtgtgctgatggagcgggctgcagatgacagcaaagaggttgagagcttccagcagctgctcaatgctcggacacaggaattcattgaagagttgctgtctcccccttttgggggtttagtggcatttgtgaaggaggctgaggctttgattgagcgtggacaggctgagcgacttcgaggggaagaagcccgggtaactcagctgatccgtggctttggtagttcctggaaatcatcagtggaatctctgagtcaggatgtaatgcggagtttcaccaacttcagaaatggcaccagtatcattcagggagcgctgacccagctgatccagctctatcatcgcttccaccgggtgctgtcccagccgcagctccgagccctccctgcccgggctgagctcatcaacattcaccaccttatggtggagctcaagaagcataagcccaacttctgatgtgccagaaaccgccctgagatctgccggtcatctccatggacttctgcaccccattccatacccttcttcacctggggtaccccttccagttttccccttgcttcccaggcccttgacatggcttacctgccttca

SEQ ID NO: 46404 - DNA, 891 bp, Homo Sapiens
gacagagcgcgccgcagccccgcgcgtccggccgccgcccgcgcccatccagcagcctcgccggagccacaccgcgggacagacgcggccgcggcgcgtcccggcccggtccagcccagcccagcccagtcccggcaccgggcggcccggcggccggcccgcccccgagggcgccgggcgcggcgggaggatgccgaagccgacgctgctgctgcgcgggggctgggagcgcgagcgcagccccggggactcggagctgggccgccagttccgggactggtgcttgcgcacctacggcgactcggccaaaaccaagacggtgacacgcagcaaataccagcggatcgccgaggtcctgcagggcggcggcgggactggcgcgggcagcggccccgcagccggcgagaaaggcaagttccagttctgggtgcgctccaagggcttccgcctgggcagcggccgggaacccaagatgggccaagtggtgtatgtgccggtcaagacgggctcgctgtgtagtattcaattttatggatgtaccataatttacttatccagtcccctgttaatggacatttggattgtttatgatattctgctctcgcaagacttcagtgaacatccctgaatatggatggccatttcaagcatgggcgagtttataccaaggagttgaattgctgcgtctgagggcatgtgcttttggagatgatacagactgccctccacagacagggaaccaattttcactcccggcaataatgtctagaacgtgagccattcgtgtgatgaccgaggttactgtatattgagcattcagtgtatgctggcactgtgcatcccctcgtaatgaccctgaagatcagaattaaaatccccactttacagaga

SEQ ID NO: 46405 - DNA, 2432 bp, Homo Sapiens
ggctgtgggaataagatggcggggaagaagaatgttctgtcgtctctcgcagtttacgcggaagattcagagcccgagtctgatggcgaggctggaatcgaggcggtgggcagcgcggctgaggagaaaggcggattggtatctgatgcctatggggaggatgacttttctcgtctagggggtgatgaagatggttatgaagaagaagaagatgagaacagtagacagtcggaagatgacgattcagagactgaaaaacctgaggctgatgacccaaaggataatacagaagcagaaaagcgagacccccaggaactcgtggcctccttttctgaaagagttcggaacatgtcgcctgatgaaatcaagatcccgccagaaccccctggcagatgttcaaatcacttgcaagacaagatccagaagctttatgaacgaaagataaaggagggaatggatatgaactacattatccaaaggaagaaagaatttcggaaccctagcatctacgagaagctgatccagttctgtgccattgacgagcttggcaccaactacccaaaggatatgtttgatccccatggctggtctgaggactcctactatgaggcattagccaaggcccagaaaattgagatggacaaattggaaaaggccaaaaaggagcgaacaaaaattgagtttgtgacgggcaccaaaaaaggcaccacgaccaacgccacgtccaccaccactaccactgccagcacagctgttgcagatgctcagaagagaaagagcaagtgggattcggctatcccagtgacaacgatagcccagcccaccatcctcaccaccacagccaccctgccagctgttgtcacggtcaccaccagcgccagcggctccaagaccaccgtcatctctgctgtgggcaccattgtgaagaaggccaagcagtgacctgaggggccaccctaggacttgaaaggaccgtgcagcccagtgaccactgcccagtgggaggcgccactttgtatatttcaggactgggacctactccccagatgccacctgagaggagcttctgtttggcattccagatggaaggacaggcagcacgggagccaggcgctgtggacagggtctgtccacgcaccacctggggtctgccgcctattaaaagtgccgtattcttacctcttggcatctcagatgcactggcctctcctgcattctgtttgcaggcaaatgcttcagctcacatgtcccccaagactcaatagtcttggttgggactattgcctcagggttgacaacagggtgatggaggcctgggacgctgttcagaggggtgacccaagaagtcaccgttgttatccgtgtatgcctctgggcatggacaggcgggagtccccgagccccacgtatgccccatctgccgccttgatcccaaaacccagccagttctcgggtgatggtggagctgtgctcccttgagtgcacttgagcactccccagaccagatcactttttggacacacccaggaaggcttttgaagtcaagccagtttccagaagggctggggtgagatcctgacctgtgcagagagtggggaggcgtcagcgcctggccagggctgccccagtcctttggtgcccggtgagcgcagccagcaggagctgagcagcgggggagatgaatcacctcctgccttggcgaggcggcagctcattgtttacaggcaagccctgctcctgggagggctcctgccaccccacccttcctctgtgtgttatctctgccccacagcagcccctgggcagcaccagtggccactgggctccccccggggttgaaacgggtttcccagaccaggggttcagaggagactatttacccttcatgatctttggcgattctccactggagcggaagggctgtgtgtcaaaagaaggaagccaggctgtgaagggccgtgttgctttcagtgggtgggcagaggtttagaaaggtggttctgaaatggcacctggtactcttgtgggacctggggaatataaggaactctgtgcatgaggtttcaaaaataaaaattgagtccactctccccgtacacacacactcgggcacttcaggaggtcagttctcaccccttcctcgatggggctttaaagctctggggagaagagctgctccccactcatgccccagagggactgtgaaaaggcttcctgtgacctccgatggcggcccctcattggccaagggcactgtggatgttttgtgggaggcagcatggcaccgtggaaagggcagtagacgtggagccggcacctctggtctggattccacttaaaaccagttgagtggtctcaagcccttaacctctgtaagcctgtttcttctctgaaatcacagtaataaagcgtcgtaagatggttgggaagaa

SEQ ID NO: 46406 - DNA, 1207 bp, Homo Sapiens
caacccatctccgaaaaggattaagcatcactagggctccaagtgagttctgatcagaggctgttcggaagacagcaggggccatgaccaccctctctcctgaaaacagcctctctgccagacagtcagcctccttcatcctggtgaagagaaaaccacccattgacaagacagaatgggacagcttctttgatgagagtggccacttggccaaatcacgggacttcatttgtgttaacatcctggaaaggggtctgcaccccttcgtgaggactgaagcctggaaattcctcacgggctacttctcatggcagagttcccaggatgagcggctcacggtggacagcatgaggaggaagaactacaaggccttatgccaaatgtatgagaagattcagccccttctggaaaacctgcaccggaacttcacagagactcgcaataacattgcacgtgacattcagaaaatctatgacaaagatcccctgggcaacgtcctcatcgacaagaagaggctagagaagatcctgctcctgagttacgtctgcaacacgcaggcagagtaccagcagggcttccatgagatgatgatgctcttccagctgatggtggagcacgaccacgagaccttctggcttttccagttcttcctgcagaaaacggaacacagctgtgtcatcaacattggcgtggccaagaacctagacatgctcagcaccctgatcaccttcctggaccccgtgtttgctgagcacctaaaagggaagggtgcaggggctgtgcagtccctcttcccctggttctgcttctgcttccagcgtgccttcaagtccttcgatgatgtctggaggctctgggaggttctgctgacggggaagccctgcaggaacttccaggtgctggtggcctacagcatgctgcagatggtgcgggagcaggtgctgcaggaaagcatgggcggggatgacatcctcctggcctgcaacaacctcatcgaccttgatgctgatgagctgatctctgccgcctgcgtggtttatgctgagctcatccagaaggatgttcctcagacattaaaggatttcttcctctgaggacaccaaagcccgcagtggactgatgccttcgatgggcaggatgaaggccaggggcactggagtgagggagtagataaaacagctgcaatataaacagtcctctggaataa

SEQ ID NO: 46407 - DNA, 219 bp, Homo Sapiens
atgagcggcgcctgcacgagctacgtgagcgcagagcaggaggtggtgcgcggcttcagctgcccgcggccggggggcgaggcggccgctgtcttctgctgcggcttccgcgaccacaagtactgctgcgacgacccgcacagcttcttcccctacgagcacagctacatgtggtggctcagaaatggggtttcaccatgttgcccaggctggtcttga

SEQ ID NO: 46408 - DNA, 1095 bp, Homo Sapiens
tggaacccacgccccctgcatcgcggccatcacggctgcctccaacgctggaacccacgcccctgcgtcgcggccgtcactggaacccacgcccctgcgacgcggccgtcactggaacccacgtcccctgcgtcgcggccgtcactggaacccacgtcccctgcgtcgcggccgtcactggaacccacgccccctgcatcgcggccgtcacggctgcctccaacgctggaacccacgccctgcgtcgcggccgtcactggaacccacgcccctgcgacgcggccgtcactggaacccacgtcccctgcgtcgcggccgtcactggaacccacgtcccctgcgtcgcggccgtcactggaacccacgccccctgcatcgcggccgtcacggctgcctccaacgctggaacccacgccctgcgtcgcggccgtcactggaacccacgcccctgcgacgcggccgtcactggaacccacgtcccctgcgtcgcggccgtcactggaacccacgtcccctgcgtcgcggccgtcactggaacccacgccccctgcatcgcggccgtcacggctgcctccaatgctggaacccacgtcccctgcgtcgcggccgtcactggaacccacgccccctgcgtcgcggccatcacggctgcctccaatgctggaacccacgtcccctgcgtcgcggccgtcactggaacccacgtcccctgcgtcgcggccgtcactggaacccacgtcccctgtgttgcggccatcgtggctgcctccaacgctggaacccacgccccttgcatcgcggccatcacggctgcctccaacgacccacgcccctgcgtcgcggccgtcactggaacccacgtcccctgcgtcgcggctgtcactggaacccacgtcccctgcgtcgcggccgtcactggaacccacgccccctgcatcgcggccgtcacggctgcctccaatgctggaacccatgtcccctgcatcgcgcccgtcactggaacccacgtcccctgcgtcgcggccgtcactggaacccacgtcccccgtgtcgtggccgtcgtggctgcctccagcactggaagccacgtcccct

SEQ ID NO: 46409 - DNA, 386 bp, Homo Sapiens
ccacatcccaggaggccgaggcggcttgccccgcatctcagaagccgggcaggccctgagccttctgacctcacatcctctgccacaccacagtggagaaaccagaactggaggagcagccagaatgcagagaagaaaaaagaggttctctgcatgtttggaagtcggaattggttgaagttgaagatgatgtgtatctgaggcacagctcttccctgacttataggctttgacactgctgttgaggtttgactcgaagcccagagttttggtgtggatgagcagggacaaattgctgagcatgaagaagagtaaaattaagcaagtggaacatatgccctttgcctctgctctgcacagtgaaatgaaaagtcaacctttgaaca

SEQ ID NO: 46410 - DNA, 785 bp, Homo Sapiens
agtcccggccagtgcctctgcttccggctcgaattgctctcgctcacgcttgccttcaacatgtccgagactgcgcctgccgcgcccgctgctccggcccctgccgagaagactcccgtgaagaagaaggcccgcaagtctgcaggtgcggccaagcgcaaagcgtctgggcccccggtgtccgagctcattactaaagctgttgccgcctccaaggagcgcagcggcgtatctttggccgctctcaagaaagcgctggcagccgctggctatgacgtggagaagaacaacagccgcatcaagctgggtctcaagagcctggtgagcaagggcaccctggtgcagaccaagggcaccggcgcgtcgggttccttcaaactcaacaagaaggcggcctctggggaagccaagcctaaggctaaaaaggcaggcgcggccaaggccaagaagccagcaggagcggcgaagaagcccaagaaggcgacgggggcggccacccccaagaagagcgccaagaagaccccaaagaaggcgaagaagccggctgcagctgctggagccaaaaaagcgaaaagcccgaaaaaggcgaaagcagccaagccaaaaaaggcgcccaagagcccagcgaaggccaaagcagttaaacccaaggcggctaaaccaaagaccgccaagcccaaggcagccaagccaaagaaggcggcagccaagaaaaagtagaaagttcctttggccaactgcttagaagcccaacacaacccaaaggctcttttcagagccaccca

SEQ ID NO: 46411 - DNA, 531 bp, Homo Sapiens
gagggaagcctggttaccctgagatgtcaaacaaagctgcaccccctgaggtcagcctggaggctccttttctccttccacaaggatggccacaccttgcaggacaggggcccccacccagaactctgcatcccaggagtcaaggagggagactctgggctttactggtgtgaggcggcccccgagggtggccaggtccagaagcagagcccccagctggaggtcagagtgcaggctcctgtgtcccatcctgtgctcactctgcaccacggtcccgctgaccctgctgtggaagatgtggtacagctcctctgtgaggcccagaggggctcccctccaatcctgtacttgttctacctcaatggagagatcttgggtatctgtcctggggatcactcggctccccatggtggagctgtttccctcttgttcccagtgaagtcagagcaggatgctgggatctcatcctgcaaggctgagaacagcatctccagagagaggagtgagcccaaaagctctcccttgttggtg

SEQ ID NO: 46412 - DNA, 2979 bp, Homo Sapiens
aagggaagtcggctcaggaggaccgagtgagggcaccgaggcgggacgcacgcacccggcgaaggttgctccaccccggtcaggatcaggcgagggggaaccagcctgagtgcagctgccaactcccgccgagtgcgtctgcgaactcccggagcggagtcccgcgtgccgccacctccccgcgggacgcactctcctcgctcccccgggccccgcgtcctccccccggccacccttccccacttttccccccttttccaatcacatggcattttaagaatgccggaaagatggcggtagcggcggcggcggcggcggctgggccggctggcgcgggaggcggccgggcgcagcggagcgggctgctggaagttttggtgcgggatcgctggcacaaagttctggtgaacttgagcgaggacgccctggttctgagcagcgaggagggcgctgcggcgtacaacggcatcgggaccgccaccaatggctcgttctgcaggggcgccggggctgggcacccgggcgcgggcggcgcgcagcccccggactcgcccgccggggtccgcaccgctttcaccgacctgcccgagcaggtgcccgagtccatctcgaaccagaagcgtggcgtgaaggtgctgaagcaggagctgggcgggctggggatcagcatcaaggggggcaaggagaacaagatgcccatcctcatcagcaagatcttcaaggggctggcggcggaccagacccaagccctgtacgtgggcgacgccatcctgtccgtgaacggagccgacctgcgggacgccacccacgacgaggcggtgcaggcgttgaagcgcgcgggcaaggaagtgctgctggaagtgaagtacatgcgagaagccacgccctatgtgaagaaaggatccccagtatccgagattgggtgggaaacacctccgcctgaatcccctcggttagggggcagcacctcagaccccccgtcatcgcagtccttctccttccacagagaccggaaaagcatccccctcaaaatgtgctacgtcactcggagtatggccttggccgaccctgagaacaggcagcttgaaatccactctccagatgctaagcacacggtgatcctaaggagcaaggactcagccacggcccaggcatggttcagtgccatccattccaacgttaatgacctgctgacccgagtgattgctgaggtcagagagcagctggggaaaacaggcattgctgggagccgagagattaggcatcttggctggcttgcagaaaaggtgccaggggagagcaagaaacagtggaaaccagccctggttgtgctgactgagaaagaccttttaatctatgacagcatgccacggaggaaggaagcctggttcagcccagttcacacataccctcttcttgccaccaggctggtccattcaggtccaggaaagggatcaccccaggctggtgtggatctgtcctttgcaacgcgaactggtaccaggcaagggattgaaacacatctcttcagagcagagaccagcagggacctctcccactggacaaggagcatagtacagggttgccacaattctgctgaactcattgctgaaatcagcactgcttgcacctacaaaaaccaggagtgccgtttgaccatacattatgagaatggattttctattaccactgaaccacaggagggtgcctttcccaagaccatcatacagtctccttatgaaaagctcaaaatgtcttcagatgatggaatcaggatgctgtatttagattttggaggcaaagatggagagattcaactggaccttcattcctgccccaagccaattgttttcatcattcattccttcctgtcagctaagattacaagactgggcttggtggcctgaagacaggggtgacttgcctttgagaaaagaagggctgcaatgccaccagagaacgtgatgtcagacaccatctgtagtgagcagcgcaccagatgtagcgtgctacagtcagctttagctctcaagagtcgtatgtaactgtcccagactcctctgtcagtttcagcaactacaagggataccctgcgaaagtaccatgagaaatatcagagtaaaactttctagaacagtacaaggttaaagaggtgaggtgacgggaaatacacagcatagctttgaaataatgacaaccaaggacatgaccattagaacagcatgtgcagatcttaatcatcccagttcctaggcaacttgttcaccaggtacgcaagggccgaatagttgagaaatggacattcttacctactcctcctagccccctatccccagtaacagtgatcccttttcttattgtgatttatttcctaattcttgctgagttgactttcccttgtaggaaaagaaaaatatttcaaatagaaacccaccttttatttaagtatgaagcagctgttactttttaaaaaatgaattatctttcaatggtgtagaatgattccaaagtgtctccattagcatatactgagcaggaattaaataaagcatcagatactgatctgagctgtaagctggtagaatctgagccaaagtagactgcttaaattgataagctttgctaaagagttgtatgcacaaaggatgattaattctgggactatactcacaccaaggtctgctgtcttatagccaagaattacagctttatttatagagagtgaattatgggtattttttcagaaaatattgtcatctgatatacacataaaacaactcacattgttggagttaactaattatccccatttcatggttttcagtggcaacttactgacccttgtttttgcctgtgcttgtatgcatgcattttcaagcaagtaataaagcagcctcatttaattctggataatgctgggttttacatatagactgaatgctataatcaaatctattgacagtatctgcagttctttca

SEQ ID NO: 46413 - DNA, 1538 bp, Homo Sapiens
ggcgctaccgaggggctgtgggcgcgcagctggaacctccggctgtcagtgcgcttacagttcctaaccccgaccctgcgcgcagcccgcactatggcagccccgccgcagctaagggctctgctcgtagtcgtcaacgcactgctgcgcaagcgccgctaccacgctgcgttggccgtgcttaagggcttccggaacggggctgtctatggagccaaaatccgggcccctcacgcgctggtcatgacctttctcttccggaatggcagcctccaggagaagctgtgggccatactgcaggccacatatatccactcctggaacctggcacggtttgtgttcacctacaagggtctccgtgccctgcagtcctacatacaaggcaagacctacccagcacacgcattcctggcggccttcctcgggggtatcctggtgtttggagaaaacaataacatcaacagccagatcaacatgtacctgttgtcacgcgtcctgtttgccctgagccgcctggctgtagagaagggctacatccctgaacccaggtgggacccgttcccgctgctcactgcggtggtgtgggggctggtgctgtggctctttgagtatcaccgatccaccctgcagccctcgctgcagtcctccatgacctacctctatgaggacagcaatgtatggcacgacatctcagacttcctcgtctataacaagagccgtccctccaattaatgcagccctgaggtgtctggctgtggctcaagatttggccccatgcagaccctcccaaaggatactgccttctcaagatcataggcctcagactccaactggtgttatcccagggttccgtttgctgaagtaaaaacactgattttaaaatcccagtgggtacctttgtatggtggcacaagtggccgaatcaggctgaggaatctacggcttggttccagctgtgcagctgacttctgtgagactggggccagccacactactctctaggcctcaggggtcaaggagctcagaggagggccctgaggtctctttccggtgggtatgttcattcttcaactgttcttatgtcacagagggctccttgctggtgggcagtgggttgtaaatactttttaaaaaacactaagttccttatctcagatgctgttctactggagaagttctagattcccactgtccaatagaaacacgtgagccatatatgtaattaaaatgtttctagtagctgcattacaaaaaagaagcctgggcactgtggctcactcctgtaatctcagaactttgggaggctgaggcaggtggatcacttgagctcaggagcttgagaccagcctgggcaacatggtgaaacccagtttctacaaaaaatacaaaaaattagccgggttccatcacctgtggttccagctgaggtgggaggatcacttgagcctatgaggtcgaggctacagtgagcaaagatcacgccactgcactccagcctgggcgacagtgagaccctgtctcaccaaagaaaaaaaaaa

SEQ ID NO: 46414 - DNA, 429 bp, Homo Sapiens
aaaggggatgtccccactaagagaccacctgtccttcgagcaggagttaacaccatcaccaccttggtggagaataagaaagctcagctggtggtgattgcacacaacgtgcatcccactgagctggtgggcttcttgcctgccctgtgttgtaaaatgcgggtcccttactgcattattaaggggaaggcaagactgggacatctagtccacaggaagacctgcaccactgtcaccttcacacaggttaactcggaagacaaaggcgctttggctaaactggtggaagctatcaggaccaattatgatgacagatacgatgagatccactgtcactggggaggcaatgtcctgggtcacaagtctgtggctcatgtcaccaagctcgaaaaggcaaaggctagagaacttgccactaaactgggttaa

SEQ ID NO: 46415 - DNA, 929 bp, Homo Sapiens
caactcccacaaggcctagggccacgtcccgccgtcctcggctgctgagcctgatgggacaagtagttttgcgaacggcttaacctacagattgaagaggtcggaagctctgaggcccggggcttccggaggtcgcggagatggaattggagcagagagaagggaccatggcagccgtgggctttgaggagttctcagcgccgccaggctcagagttggcgttgcctcccctatttggtggccacatcctggagagcgagctggagacggaagtggagtttgtgtcaggtggtctgggcggctcagggctccgggagcgagatgaagaggaagaggcagcccggggtcggcggcggcgccagcgggaattaaatcgcagaaagtaccaggcactaggtcggcgctgccgggagatcgagcaggtgaacgagcgggtcctgaacaggctccatcaggtgcagaggataactcggaggctgcagcaggaacggaggttcctcatgagagtgctggactcctacggggatgactaccgggccagccagttcaccattgtgctggaggatgagggcagccagggcacggatgcccccaccccaggcaatgcggagaatgagcctccagagaaagagacactgtccccgcccagaaggactcctgcacccccagaacccggcagcccagcccccggtgaggggcccagtgggcggaagaggcggcgagtgccacgggatggacgccgagcaggaaatgcgctgactccagagctggccccggtgcagattaaggttgaggaagactttggctttgaagcagatgaggccctggattccagttgggtttctcggggtccagacaaactgctgccctacccgaccctggccagcccagcctctgactgacgcatgcccaataaactgaccccacac

SEQ ID NO: 46416 - DNA, 4302 bp, Homo Sapiens
gagtcattttttacaggtcagaactgtagaaataatgagaaagtgacatttgtacgcatagctgatttggagaaccataataacgatggaggcttctggactgtgattgacgggaaagtgtatgatataaaggacttccagacacagtcgttaacagaaaatagtattcttgctcagtttgcaggggaagacccagtggtagctttggaagctgctttgcagtttgaagacacccgggaatccatgcacgcattttgtgttggccagtatttggagcctgaccaagaaggcgtcaccataccagatctggggagtctctcctcacctctgatagacacagagaggaatctgggcctgcttctcggattacacgcttcctatttagcaatgagcacaccgctgtctcctgtcgagattgaatgtgccaaatggcttcagtcatccatcttctctggaggcctgcagaccagccagatccactacagctacaacgaggagaaagacgaggaccactgcagctccccagggggcacacctgccagcaaatctcgactctgctcccacagacgggccctgggggaccattcccaggcatttctgcaagccattgcagacaacaacattcaggatcacaacgtgaaggactttttgtgtcaaatagaaaggtactgtaggcagtgccatttgaccacaccgatcatgtttccccccgagcatcccgtggaagaggtcggtcgcttgctgttatgttgcctcttaaaacatgaagatttaggtcatgtggcattatctttagttcatgcaggtgcacttgatattgagcaagtaaagcacagaacgttgcctaagtcagtggtggatgtttgtagagttgtctaccaagcaaaatgttcgctcattaagactcatcaagaacagggccgttcttacaaggaggtctgcgctcctgtcatcaaacgtttgagattcctctttaatgaattgagacctgctgtttgtaatgacctctctataatgtctaagtttaaattgttaagttctttgccccattggaggaggatagctcagaagataattcgagaaccaaggaaaaagagagttcctaagaagccagaatctacggatgatgaagaaaaaattggaaacgaagagagtgatttagaagaagcttgcattttgcctcatagtccaataaatgtggacaagagacccattgcaattaaatcacccaaggacaaatggcagccgctgttgagtactgttacagatgttcacaaatacaagtggttgaagcagaatgtgcagggtctttatccgcagtctccactcctcagtacaattgctgaatttgcccttaaagaagagccagtggatgtggaaaagagaaagtgcctactaaaacagttggagagagcagaggttcgcctggaagggatagatacaattttaaaattgtatctggtgagcaagaatttcttacttccatctgtgccgtatgcgatgttttgtggatggcaaagacttattcctgagggaatcgatataggggaacctcttactgattgtttaaaggatgttgatttgatcccgccttttaatcggatgctgctggaagtcacctttggcaagctgtacgcttgggctgttcagaacattcgaaatgttttggtggatgccagtgccaaatttaaagagcttggtatccagccggttcccctgcaaaccatcaccaatgagaacccatcgggaccgagcctggggaccatcccgcaagcccacttcctcctggtgatgctcagcatgctcaccctgcagcacagcgcaaacaaccttgacctcctgctcaattccggcacgctggccctcgctcagacggcactgcgcctgattggccccagttgtgacagcgttgaggaagatatgaatgcttctgcccaaggtgcttctgccacagttttggaagaaacaaggaaggaaacggctcctgtgcagctccctgtttcagggccagaactggctgccatgatgaagattggaacaagggtcatgagaggtgtggactggaaatggggcgatcaggatgggcctcctccaggcctaggccgagtgattggtgagctgggagaggacgggtggataagagtccagtgggacacaggcagcaccaactcctacaggatggggaaagaaggaaaatacgacctcaagctggcagagctgccagcccctgcacagccctcagcagaggattcggacacagaggacgactctgaagccgaacaaactgaaaggaacattcaccccactgcaatgatgtttaccagcactattaacttactgcagactctttgtctgtctgctggagttcatgctgagatcatgcagagtgaagccaccaagactttatgcggactgctgcgaatgttagtggaaagcggaacgacggacaagacatcttctccaaacaggctggtgtacagggagcaacaccggagctggtgcacgctggggtttgtgcagagcatcgctctcacgctgcaggtgtgcggcgccctcagctccccgcagtggatcacgctgctcatgaaggttgtggaagggcacgcacccttcactgccacctcgctgcagaggcagatcttagctgtgcatttgttgcaagcagtccttccgtcatgggacaagaccgaaagggtgagggacatgaaatgcctcatggagaagctgtttgacttcttggggagcttgctcactatgtgctcctctgacgtgccgttactcagagagtccacgctgaggcggcgcagggtgtgcccgcaggcctcgctgactgccacccacagcagcacactggcggaggaggtggtggcactgctgcacacgctgcactccctgactcggtggaatgggctcatcaacaagtacatcaactcccagctccgctccatcacccacagctttgcgggaaggccttccaaaggggcccagttagatgactacttccctgattccgagaaccctgaagtggggggcctcatggcggtcctggctgtggttggaggcatcgatggtcgcctgtgcctgggcggccaagttgtgcacgatgactttggagaagtcaccatgactcgcatcaccctgaagggcaaaatcaccgtgcagttctctgacatgcggacgtgtcgcgtttgcccattgaatcagctgaaaccactccctgccgtggcctttaatgtgaacaacctgcccttcacagagcccatgctgtctgtctgggctcagttggtgaacctcgctggaagcaagttagaaaagcacaaaataaagaaatcgactaaacaggcctttgcaggacaagtggacctggacctgctgcggcgccagcagttgaagctatacatcctgaaagcaggtcgggcgctgttctcccaccaggataaactgcggcagatcctgtctcagccagctgttcaggagactggaactgttcacacagatgatggagcagtggtatcacctgaccttggggacatgtctcctgaagggccgcagccccccatgatcctcttgcagcagctgctggcctcggccacccagccgtctcctgtgaaggccatatttgataaacaggaacttgagactgctgcactggccgttgtggagtccactcacccttcgagcccaggatttgaagactgcagctccagtgaggccaccacgcctgtcaacgtgcagcacatccgccctgccagagtgaagaggcgcaagcagtcacccgttcccgctctgccgatcgtggtgcagctcatggagatgggatttcccagaaggaacatcgagtttgccctgaagtctctcactggtgcttccgggaatgcgtccggcttgcctggtgtggaagccttggtcgggtggctgctggaccactccgacatacaggtcacggagctctcagatgcagacacggtgtccgacgagtattctgacgaggaggtggtggaggacatggatgatgccgcctactccatgtctactggtgctgttgtgacggagagccagacgtacaaaaaccgagctggtttcttgggtaatgatgattatgctgtatatgtgagagagaatattcaggtgggaatgatggttagatgctgccgaacatacgaagaagtgtgcgaaggtgatgtgatgttggcaaagtcatcaagctggacagagatggattgcatgatctcaatgtgcagtgtgactggcagcagaaagggggcatctactggtttaggtacattcatgtggaacttatag

SEQ ID NO: 46417 - DNA, 471 bp, Homo Sapiens
atggccgtagggaagttcctgctgggctccctgctgctcctgtccctgcagctgggacagggctggggccccgatgcccgtggggttcccgtggccgatggagagttctcgtctgaacaggtggcaaaggctggagggacctggctgggcacccaccgcccccttgcccgcctgcgccgagccctgtctggtccatgccagctgtggagcctgaccctgtccgtggcagagctaggcctgggctacgcctcagaggagaaggtcatcttccgctactgcgccggcagctgcccccgtggtgcccgcacccagcatggcctggcgctggcccggctgcagggccagggccgagcccacggcgggccctgctgccggcccactcgctacaccgacgtggccttcctcgatgaccgccaccgctggcagcggctgccccagctctcggcggctgcctgcggctgtggtggctga

SEQ ID NO: 46418 - DNA, 2343 bp, Homo Sapiens
ctcggttcaggttccggggcgccgcagagctcccggcctctggaccgcgcgcggcgctctggggaatccggcgccacgcgccgtgcggtggccaggatggaggaggccggagcagcggtggtcacggccggggaggccgaactgaactggtcccgcctcagcgtgtccaccgagacgctggagtctgagctggaggcgcggggggaggagcggcgcggggcgcgggaggcgctgctgcggctgctgctgcctcacaaccgtctggtgtcgctgccacgggcgctgggcagcggcttcccgcacctccagctgctggacgtgagcggcaacgcgttgaccgcgctcgggccggagctgctcgctctgcgcggcctgcgcacgctgctggccaagaacaaccggctcggcgggcccagtgcgctgcccaagggcctggcccagtcgccgctctgccgcagcctccaggtgctcaacctcagcggcaactgtttccaggaggtgcctgcctcgctcttagagctgcgcgcgctgcagaccctgagcctgggcggcaaccaactgcagagcatcccggctgagatcgagaacttgcagagtttagagtgtttatatcttggaggaaatttcattaaagaaatcccaccagaattaggaaatctgccttctctgaattatttggtattatgtgacaacaaaatccaaagcatacctcctcaactttcacagttacattcacttcgttccctaagtcttcacaataacttgctgacatatctgcctcgagagatcctcaaccttattcatttggaagagttgagtttacgaggaaatccattggttgttcgttttgttagagatttaacctatgatcctccaactctcctggaattagctgcacggaccattaagattcgaaatatttcctacactccctatgatcttcctggaaatcttcttagatacttgggttcagccagcaattgcccaaacccaaagtgtggaggagtctactttgactgctgtgtcagacaaattaaatttgtggacttctgtgggaagtatcgcctcccactgatgcactacttgtgttcaccagaatgttcttccccttgcagttctgcctctcacagctccacttcccagagtgaatctgactcagaagatgaagctagtgttgctgcacgcagaatgcagaaagttcttcttggttgaacaggagtgcacagtgttgtgaaatacttaaaaaactgagcaaaatggttagacaagaaaatagagcttgaagttcactagaaatcttatcttcatcttaagtgttcatcaaagagtctgggatgatataaaacattttgtgtttcatctacccattcagcaagaatgagtccagtcccatgtttagattattttaacataatttgtgaatgatagtttcacatttggctgatggtttgcagttttcactcaagttttgcatgaatcacaaagcagaatggtaccttttgaagagcagttctgcaataagtcatgagtagtataacttttggacattgagatggagaaagtgagaaattatcaaagctataattgccagagttgcccttgggtttaggtagaacactgtataccatatatactatataccatatatactatatataccatatatattatatgccataaacaggattaaccctcccttttctaattgcctgtatgtctagattacagaactattcaaagaagctcacagatggttacatgggacaaacctttctgacaaactaactggtaaagtaaggcatataacatttacatgagatattaaaactttttcattattatcctttgttctatatgattgctattaaccttatgtaatctagcaatgactgttatagtgccttaatccagcaaggatataaaaatgtattcaagaagtaatgccagagcaacctataacctgacataccatgcagaacattgtaaaatattctttaacagaactaggtaaataactgtgtatctaatatccgatctcatggccctcttaacatttttttgtttaaatgtgcactcatcccttataagcacattacttttacacttaatggtaggccacaatcttcatcaatctgttcatcataagacagagtaagaatttttaacagaaaattctaaaagagatagaagctaggaaagcttctttatatcttgcattaaatgggtagggaaaaaatatgactctcacccatgtcatgtactggaccatctttctctactttttaaagaaaaactaatacaactagaaaaacatcacaacaagccaaataaaaatggagaaaa

SEQ ID NO: 46419 - DNA, 3978 bp, Homo Sapiens
atggaaatagaagaggagtctgctgaaaagattcaatttcttaagagcagtggaacctctctcttaagtactgatagcttagaaacaaatgaactagtagtttctgagctcaaccatagtagtctcggagtgggattggacacattagaagaacaagaggagaaagaacaattttttgccaggcttgagaaaggcttgacatcttccattgattattcgagattaaataaggaattggattctaatgactctacacattttaaagctttacatagtaatcaagccaacgcagaactaactgatgacgaacatgagaatgaatcgaaacatgaagaactggcagaaaattacagtgatgattttgaagatgagtatgttggtgcaccgttgactactaaagatgaagagatgccttccaaagagaattccaaatcagaaaaaataagtgtgcccaaacaggaagaagaaaaaactggcatgcttgctaatgttgtgctgcttgattcattagactctgttgcagaggtcaatcttgatgaacaagataaaataacacctaagccaaggtgcctaccagaaatgactgagaatgaaatgacaggaacaggtgtttcttatggacaaagcagtagtgacgttgaagccctacatcaagcttattgtcatatagcccattcattgggagatgaagacaaacaaaaaattgagagtaacacagtggaagatatcaagagctcagtgaaaggtcatcctcaagaaaatgaagagaattcaaaaaacatctctactatggaatctgatctgcccacagtagaggagctgatgaaacctatcagaatagattcctttgggatcagtggttttgatttacaacctgtcagctctgagaaagtggccgaaagaaaagaaactgaattttttagctctttacccctgaagatgaacccaaatattttgtctcaagactcacaacatgtgaaccttttttttgacaaaaatgatgagaatgtgattttacaaaagaccacaaatgagagtatggaaaacagctgtccacaagtaactgaagtaactgccacagaagaacatgttgataaaatgtaccttaatattttgaggaaaaaaataactgttaattcttcatcattatctcaggatgacaaaattaataaaacttacagatctcaacttagttctgaagaagaaggggctgtaatgggtaaacaggtaccatacaagaaggccagaagtgcacctcctttacttaaaaggaaaccccagagtggattatatgcgtcagttaggagctcaggctatggcaaacccagttcaccactcaagatgttttctactcttgaaaagaaaacttcagaggacattataaaaagcaaaaacttgagatcgatttctacctccaatcaacctaggaaaaaagaaatcttatctggaacaaaactcatcaagcctgcagctttggataaaccagctcacaaaactgaaagttgcctgtctactcgtaagaagtctgaaaatcccacagaaactgattcctgtattcagtttcagactgtaggatactgtggtgagaacaaggagaagaaattacttatgtttaaaagagttcaggaagcagaggataaatggaggggtgcgcaagccctaattgagcaaattaaagccacattctcagaaaaggagaaagaactagaaaataagttggaagaactaaagaaacaacaggaaaaagaactcttcaaattgaatcaagataattatattcttcaagccaagttaagcagctttgaagaaacaaacaaaaaacaaaggtggttacattttggagaagcagctgatcctgtcactggagaaaagttgaagcaaatccaaaaagaaatacaagaacaagagacacttcttcaaggatatcaacaggaaaatgaacgattatataatcaagtaaaagatctccaagaacaaaacaagaaaaatgaggagcgaatgtttaaggaaaaccaaagtttattcagtgaggtagcttccttaaaagaacagatgcacaaaagtcgttttctgtctcaagtagttgaagattcagagcccacaagaaatcagaattttacagatctgttagcagaactacggatggcacagaaagaaaaagacagtttattggaagacatcaaaagactgaaacaagacaaacaagctcttgaagtagacttcgaaaaaatgaagaaagagagggaccaagccaaagatcagattgcttatgtcacaggtgagaaattatatgaaataaaaattttagaagaaacacataaacaagaaatcagtcgtctgcaaaaaagattacagtggtatgctgaaaatcaggaacttctggataaagatgcacttcggcttagagaagcaaatgaggaaattgagaagctcaaacttgagattgagaaactgaaagctgaatctgggaatccatctattcggcagaagatacgcttaaaagataaagcagcagatgccaaaaaaattcaggatctggagcgacaagttaaggaaatggaagggattctgaagagaagatatcccaattctttacctgctttaatattggctgcatcagcagctggtgatacagtggataaaaatacagtggaatttatggagaaaaggataaaaaagctagaagctgatctggagggcaaagatgaagatgcaaagaaaagccttcgtaccatggaacaacagtttcagaaaatgaagattcagtatgaacaaagactagagcagcaggagcagctacttgcctgcaaattgaatcaacatgactctcccagaattaaagccctagagaaggaacttgatgacatcaaggaagcccatcagatcactgtaagaaaccttgaagccgaaatagacgttcttaaacatcagaatgctgaattagacgtcaagaaaaatgataaagatgatgaagattttcagtctatagaattccaggtggaacaggctcatgctaaagctaaattagtaagactcaatgaagaactggctgcaaaaaagagagaaatacaagacctctcaaaaactgtggagaggcttcagaaagacagaagaatgatgctatcaaatcagaactcaaagggcagagaggaaatgtctgccaaaagggcaaagaaagatgttttgcactcaagtaaaggaaatgctaactccttccctggaaccctggacagcaagctgtaccaaccacatactttcactgattcccatgtttcagaagttttacaagaaaactacagattaaaaaatgagctagaaggattaatttcagagaagaatgaactgaagatgaaatctgaagcagtgatgaatcaatttgaaaactccatgagaagggtcaaggaagatactgcagcacacattgcatccctcaaagcatctcatcagagagaaatagagaaactcctttgccaaaatgcagtagaaaattcttcttccaaagtagctgaactaaatcgtaaaatagcaactcaagaggtacttataagacatttccaaagtcaagttaatgagctgcagagtaaacaagagtctctcgtagtttctgaagttcgagaagaaattctacagaaagagattacaaaactcttagaagaattgagagaagccaaagaaaaccatacaccagagatgaaacatttcgtgggcttagaaaagaaaattaagcagatggaaatgagacatgcacaaagagaacaggaacttcaacagataatacagcaaacacaccaagtagtagaaactgagcaaaacaaagaagttgaaaaatggaaaagactggcacagttaaagaatcgtgagctggagaagttccgcacagaactagactcaatattagatgttctccgagagctgcaccggcaaggagtggttgtgccagttgcttttgcagatgaaatgaatgcaccagagtattaa

SEQ ID NO: 46420 - DNA, 945 bp, Homo Sapiens
atggatgtgggcaataagtctaccatgtctgaatttgttttgctggggctctctaattcctgggaactacagatgtttttctttatggtgttttcattgctttatgtggcaacaatggtgggtaacagcctcatagtcatcacagttatagtggaccctcacctacactctcctatgtatttcctgcttaccaatctttcaatcattgatatgtctcttgcttctttcgccaccccaaagatgattacagattacctaacaggtcacaaaaccatctcttttgatggctgccttacccagatattctttctccaccttttcactggaactgagatcatcttactcatggccatgtcctttgataggtatattgcaatatgcaagcccctgcactatgcttctgtcattagtccccaggtgtgtgttgctctcgtggtggcttcctggattatgggagttatgcattcaatgagtcaggtcatatttgccctcacgttaccattctgtggtccctatgaggtagacagctttttctgtgaccttcctgtggtgttccagttggcttgtgtggatacttatgttctgggcctctttatgatctcaacaagtggcataattgcgttgtcctgttttattgttttatttaattcatatgttattgtcctggttactgtgaagcatcattcttccagaggatcatctaaggccctttctacttgtacagctcatttcattgttgtcttcttgttctttgggccatgcatcttcatctacatgtggccactaagcagctttctcacagacaagattctgtctgtgttttataccatctttactcccactctgaacccaataatctatactttgaggaatcaagaagtaaagatagccatgaggaaactgaaaaataggtttctaaattttaataaggcaatgccttcatag

SEQ ID NO: 46421 - DNA, 504 bp, Homo Sapiens
atggccctcctgaaaccttcggagggcaccctccccacagaagcccggggacggggacggcgaaggagactggtttggaccccgagccaaagcgatgccctgggagcctgttttgagcagaacatgtacccgggcatcgccaccagagaacggctggcccagaccatcagcattctggagcccagggtccagatttggtttcaaaataagaggtcacgcccactgaggcagccccggcgggaatctcggccctggcccaggagatgcggcccgcaagaaggcaggaaaaccgccgtcactgaatcccagaccgccctgctcctccgagcctttgagaaggatcgcattccaggcatcgccaccagggaagagctggccagagagacgggcctcccggattccaggattcagatctggtttcagaatcgaagggccaggcgcccgggacagggtggcagggtgaacacgcaggcagacggcctgtgcaacgcggcccccggcggg

SEQ ID NO: 46422 - DNA, 387 bp, Homo Sapiens
atgtcgccttccttagtccgggcaactgcccgggctgtgagcaagaggaagctgcagcccacccgggcagccctcaccctgacaccttcagcagtaaacaagataaaacaacttcttaaagataagcctgagcatgtaggtgtaaaagttggtgtccgaaccaggggctgtaatggcctttcttatactctagaatatacaaagacaaaaggagattctgatgaagaagttattcaagatggagtcagagtattcatcgaaaagaaagcacagctaacacttttaggaacagaaatggactatgttgaagacaaattatccagtgagtttgtgttcaataacccaaacatcaaagggacttgtggctgtggagaaagctttaatatt

SEQ ID NO: 46423 - DNA, 252 bp, Homo Sapiens
atgtacaccatcatcaacgggcccagcaagttggtcgcgcagcgccgcacaggtctcacgcagcagcaggtgaagggccagctccaggagctcctgaaaagccggcagcccgcgccgccgaccttgcagccccagcgggcgcagcccttcgcgcagccgctgggaccctggcccctgtcgagagaatgtccgctttgtgtccgaagcctggcagcaggtgcggcagcagctggatggtggcccagccggtga

SEQ ID NO: 46424 - DNA, 1176 bp, Homo Sapiens
atgttccccaatggcaccgcctcctctccttcctcctctcctagccccagcccgggcagctgcggcgaaggcggcggcagcaggggccccggggccggcgctgcggacggcatggaggagccagggcgaaatgcgtcccagaacgggaccttgagcgagggccagggcagcgccatcctgatctctttcatctactccgtggtgtgcctggtggggctgtgtgggaactctatggtcatctacgtgatcctgcgctatgccaagatgaagacggccaccaacatctacatcctaaatctggccattgctgatgagctgctcatgctcagcgtgcccttcctagtcacctccacgttgttgcgccactggcccttcggtgcgctgctctgccgcctcgtgctcagcgtggacgcggtcaacatgttcaccagcatctactgtctgactgtgctcagcgtggaccgctacgtggccgtggtgcatcccatcaaggcggcccgctaccgccggcccaccgtggccaaggtagtaaacctgggcgtgtgggtgctatcgctgctcgtcatcctgcccatcgtggtcttctctcgcaccgcggccaacagcgacggcacggtggcttgcaacatgctcatgccagagcccgctcaacgctggctggtgggcttcgtgttgtacacatttctcatgggcttcctgctgcccgtgggggctatctgcctgtgctacgtgctcatcattgctaagatgcgcatggtggccctcaaggccggctggcagcagcgcaagcgctcggagcgcaagatcaccttaatggtgatgatggtggtgatggtgtttgtcatctgctggatgcctttctacgtggtgcagctggtcaacgtgtttgctgagcaggacgacgccacggtgagtcagctgtcggtcatcctcggctatgccaacagctgcgccaaccccatcctctatggctttctctcagacaacttcaagcgctctttccaacgcatcctatgcctcagctggatggacaacgccgcggaggagccggttgactattacgccaccgcgctcaagagccgtgcctacagtgtggaagacttccaacctgagaacctggagtccggcggcgtcttccgtaatggcacctgcacgtcccggatcacgacgctctga

SEQ ID NO: 46425 - DNA, 724 bp, Homo Sapiens
ggcgaggagccgggagcacggtggagcggtggagggcgtcactgggtttcggcgtctggcaagcggttcagctgtctgctccctagcagccggccttcgggtcgggcgtctccgccggctactgccgcttcagttctcccggtgtggccacgagtcgggttgcactgctgtgatccatcctcatctcctaaagatgcatcctgacttatctccacacttgcacactgaagaatgcaacgtcttgattaacttgcttaaggaatgtcacaaaaatcacaacattctgaaattttttggttattgtaatgatgttgatcgggagttgagaaaatgcctgaagaatgagtacgtagaaaacaggaccaagagcagggagcatggcattgcaatgcgaaagaaactttttaatcctccagaggaatccgaaaaataaattgtattttcactcgatgccttggctgagagaagacctaaagactctgggttgatacctgaaagaatcctgtcttatttggtctccataatcctttgaatggaaagtgacctgtgagagattgaaccatggagaaatatgaaaaccctggattctgagtatttgttgggcagggcgtttagtactgtctcccctttaccagcaaacctgacttcaccatgtttattccctttgcctacaaccagttaatatctgagtaacttatctccttcaataaaataatttaaataa

SEQ ID NO: 46426 - DNA, 1566 bp, Homo Sapiens
caggtcactgggaccctggttttcactgtcatcactgctgtgctgggttccttccagtttggatatgacattggtgtgatcaatgcacctcaacaggcaagtataatatctcactatagacatgttttgggtgttccactggatgaccgaaaagctatcaacaactatgttatcaacagtacagatgaactgcccacaatctcatactcaatgaacccaaaaccaaccccttgggctgaggaagagactgtggcagctgctcaactaatcaccatgctctggtccctgtctgtatccagctttgcagttggtggaatgactgcatcattctttggtgggtggcttggggacacacttggaagaatcaaagccatgttagtagcaaacattctgtcattagttggagctctcttgatggggttttcaaaattgggaccatctcatatacttataattgctggaagaagcatatcaggactatattgtgggctaatttcaggcctggttcctatgtatatcggtgaaattgctccaaccgctctcaggggagcacttggcacttttcatcagctggccatcgtcacgggcattcttattagtcagattattggtcttgaatttatcttgggcaattatgatctgtggcacatcctgcttggcctgtctggtgtgcgagccatccttcagtctctgctactctttttctgtccagaaagccccagatacctttacatcaagttagatgaggaagtcaaagcaaaacaaagcttgaaaagactcagaggatatgatgatgtcaccaaagatattaatgaaatgagaaaagaaagagaagaagcatcgagtgagcagaaagtctctataattcagctcttcaccaattccagctaccgacagcctattctagtggcactgatgctgcatgtggctcagcaattttccggaatcaatggcattttttactactcaaccagcatttttcagacggctggtatcagcaaacctgtttatgcaaccattggagttggcgctgtaaacatggttttcactgctgtctctgtattccttgtggagaaggcagggcgacgttctctctttctaattggaatgagtgggatgtttgtttgtgccatcttcatgtcagtgggacttgtgctgctgaataagttctcttggatgagttatgtgagcatgatagccatcttcctctttgtcagcttctttgaaattgggccaggcccgatcccctggttcatggtggctgagtttttcagtcaaggaccacgtcctgctgctttagcaatagctgcattcagcaattggacctgcaatttcattgtagctctgtgtttccagtacattgcggacttctgtggaccttatgtgtttttcctctttgctggagtgctcctggcctttaccctgttcacattttttaaagttccagaaaccaaaggaaagtcttttgaggaaattgctgcagaattccaaaagaagagtggctcagcccacaggccaaaagctgctgtagaaatgaaattcctaggagctacagagactgtgtaa

SEQ ID NO: 46427 - DNA, 1620 bp, Homo Sapiens
ccgcgtgcgggccccagggaggtgtggaagaagggtggccgcctgctgtcggtgctgctggcggtgaacgtgctgctcctcgcctgcacgctcatcagcggcggagccttcaacaaggtggccgtgtacgacaccgacgtgttcgcgctgctcactgcgatgatgctgctggcaacgctctggatcctcttctacctcctccgaaccgtgcgctgcccctgcgcggtaccctaccgggacgcgcacgctggccccatctggctccgaggtgccaggggaggtgggggcgaggtaggtgtaagggttcctcaggcggagagaacaagatggcatggacttgggtgcgctggagttttgtccatctatggagtaaatgactctcaccaatgtctctccatacagacctactttctctgggtctctgctaaagactgcgttcacgtccacctggatctgacctggtgtggtctcatgttcacactcaccaccaacctggccatctggatggcggccgtggtggatgaatctgtgcaccaatcccactcctacagcagttctcacagcaacgccagccacgcccgtctcatctctgaccacaacccggtcggaggagactcctgcctctgcagcacggccgtctgccagatcttccagcaggggtacttctacctatatcccttcaacatcgagtacagcctcttcgcctccaccatgctgtatgtcatgtggaagaatgtgggtagattcctggcctccacccctggccacagccacaccccaacccctgtcagcctcttccgggagaccttttttgctggcccggttctgggcctgctgctcttcgtggtggggctggctgtcttcatcatctacgaggttcaagtgagcggggacgggagccgcaccaggcaggccctggtcatctactacagcttcaacattgtctgcttgggactcaccaccttggtcagcctgagcggctccatcatctaccgttttgaccgccgggccatggaccaccataagaaccccacgcgcactctggacgtggccctgctgatgggtgccgccctgggtcagtacgccatctcttactactccatcgtggctgtggtggcgggcacaccccaggacctgctggcagggctcaacctcacccatgcactgctcatgatcgcccagcacaccttccagaacatgtttatcatcgagagccttcaccgaggaccgcccggggctgagcctcacagtacccaccccaaggagccctgccaagacctcaccttcaccaacctggatgccctccacacgttgtccgcctgcccacccaaccccgggctggttagccccagcccttcagaccagcgggaagcagtggccatcgtctcaacccccagaagccagtggagacgccagtgcctaaaagacatttctctgtttctcctactctgcaatgtcattctgtggatcatgcctgccttcggggcccgccctcatttcagcaacacagtggaggtggatttctacggctactccctctgggcggtcatcgtcaacatctgcctccctttcggcatcttctaccgcatgcacgctgtgtccagcctgctggaggtctac

SEQ ID NO: 46428 - DNA, 3541 bp, Homo Sapiens
gcccatctaaaaaaaaaaaaaaaagaaattagaaacagggtctttgcagatgtgattaaattaagcatcttgagatgggggcattatcctggattatttaggtgggccctgaatgccatctcaagagtccttataagagagagacagagggagactagacacgcagagagaggagaaggccacgtgaagacagagctgaggatgctggcattgaagataaagcgatgcagccacaagccagggagtgtcagcagaagctggaggaggcaagaaacgtgttcctcccggggcctgcagaccccttggtctcaccctggtgacactgactttggacttctggcctccagagctgtaagattctaagccaccaaatatatggtgatttgttacggcagccgagagaaactaataggagagtggttagtggttcacgctacaccctggtctacaccggaagcctctctccctggcacatgatggtgtccccaggatccagctcagagccaggcacacagtggggcccaggagagacaaaaatgatgtgcagaagcaaatgggtggggtttgccacccacctcccttacctcccttgtctgtttagcaaagaggtctttcatgctggtgttttccaaattaggttgtgaccatgtgtgatcatgacatccaggcagagggctggcatttttccgaaaaagggtagaaaatgtcagagtatggtgtgtgtgtaggcagggtcagtattggtcactgacccttacactgcagtggcatttgtgaaataggtcagggtcactggtcacgttgtctaaggtgttatccgagctcgtttcacaaccaagagaattaaagagcatagaccacccaaaaggtgaggttggagcgaaagtttaataagcaaaagaagaaagctctccacagaggagagggaagcccaagcgggttgccatttttacagttgattccaaaagctttttttttaaaaaattatttatttatttattttttattattatactttaagttttaggatacatgtgcacaacgtacaggtttgttacatgtgtttatatgtgccatgttggtgtgctgcacccagtaactcgtcctttagcattaggtatatctcctaatgctatccctcccccctccccccaccccacgacagtccccggtgtgtgatgttccccttcctgtgtccatgtgttctcattgttcaattcccacctatgagtgagaacatgcgttgtttggttttctgtccttgcgatagtttgctgagaatgatggtttccagcttcatccatgtccctacaaaggacatgaactcatcattgtttatggctgcatagtattccatggtgtatatgtgccacattttcttaatccagtctatcattgttggacatttgggttggttccaagtctttactattgtgaatagtgccgcaataaacatatgtgtgcatgtgtctttatagcagcatgatttataatcctttgggtatatacccagtaataggatggctgggtcaaatggtatttctagttctagatccctgaggaatcaccacaccgacttccacaatggttgaactagtttacagtcccaccaacagtgtaaaagtgttcctttttctccacatcctctccagcacctgttctttcctgactttttaatgatcgccgttctaactggtgtgagacggtatctcattgtgattttgatttgcatttctctgatggccagtgatgatgagcatttttcatgtgttttttggctgcataaatgtcttcttttgagaagtgtctattcatatccttcgcccactttttgatggggttgtttgtttttttcttgtacatttgtttgagttcattgtagattctggatattagccatttgtcagatgagtaggctgcaaaaattttctcccattctgtaggttgcctgttcactctgatggttaaactaaagagcttctgcacagcaaaagacaccaaaagcttttataagaaactcctttcatctctgtagctgtttgagtatcttatctgtaaagctatctgcataactctccgttatctatgtagttgtgggtacgtctttaggcaagcacaaagctccgcttctcttgtttctgtaaccgtgggtttgttttaggtaagctccgcccctccccgtgcaagttcccacagagaccaccatgtacgtgcctgaaaaggggagggaacttttcctgggagcctgtcagtcacgcaaagaacaaaaggcttctgtgctgggcagcttgagttttccccaggctgctctattgttgcctgtagctgtgatttttcaggcaggctgctcctctgaggaccacccttaactgtctacctaactggtttttccttttcttctcctcatttgtatttatgtatcagtgtattatgtatttatatacacttggagatacagtaaaatgtacctctcactgtgggttaccataaatactgtaaatttgagaaacactctttcaggcctgagaggagcagtgacaacagtagggatgatcaagtcagatgtccctggtacccaggaatggctggatgagagaaggagacagggtgacctgcccctgcctacaaactctaacccagttctgtccctggagctgtgtgaccccggacaaggccctgcccctttccaggctgtcgttgtcctcatccagcctgggagagggttggcgctgaggcccccaccttcttgcctgtttcctcctgaccccaccccttcccctcctgctgggcagatccgagtgaagcctgacaggaccggtgtggtcacggatggtgtgaagcactccatgaaccccttctgtgagatcgcggtggaggaggctgtgcggctcaaggagaagaagctggtgaaggaggtcatcgccgtcagctgtgggcctgcacagtgccaggagacgattcgtaccgccctggccatgggtgcagaccgaggtatccacgtggaggtgcccccagcagaagcagaacgcttgggtcccctgcaggtggctcgggtcctggccaagctggcagagaaggagaaggtggacctggtgctgctgggcaaacaggccatcgatgatgactgtaaccagacagggcagatgacagctggatttcttgactggccacagggcacattcgcctcccaggtgacgctggagggggacaagttgaaagtggagcgggagatcgatgggggcctggagaccctgcgcctgaagctgccagctgtggtgacagctgacctgaggctcaacgagccccgctacgccacgctgcccaacatcatgaaagccaagaagaagaagatcgaggtgatcaagcctggggacctgggtgtggacctgacctccaagctctctgtgatcagtgtggaggacccgccccagcgcacggccggcgtcaaggtggagaccactgaggacctggtggccaagctgaaggagattgggcggatttgagcccctcccagagatggcaataaaactgactctcaaca

SEQ ID NO: 46429 - DNA, 3203 bp, Homo Sapiens
atggaaaacggaggggcaggcactctgcagataaggcaagtcctgcttttctttgttttgctgggaatgtctcaggcgggctctgaaactgggaactttttggtgatggaggaattgcagagcgggagctttgtaggaaatttggcaaagaccctgggactcgaggtgagtgagctgtcttcgcggggggctcgggtggtttctaatgataacaaagagtgtttgcagctggacacaaacactggggatttgctcctgagagaaatgctagacagggaggagctctgtggctccaatgagccttgtgtgctgtatttccaagtgttaatgaaaaaccccacgcagtttttacaaattgagctccaggtcagggatataaatgatcactctcccgtcttcttggaaaaagaaatgctcttagaaatcccagagaacagtcctgttggtgctgtgttcttgcttgaaagtgcaaaggatttagatgtaggaatcaatgctgtaaaaagctacacaataaatccgaactctcatttccacgttaaaataagagtcaatccagacaataggaaataccctgagttagttctggacaaggcgctggattatgaagagcgcccggagctcagtttcatcctcactgctctggatggcgggtcccctcccaggtctggaactgccttggtcagggtggtggttgtagatattaatgacaactcccctgagtttgagcaggctttttatgaggtgaagattctggagaatagcatccttggctccctggttgtgaccgtctcagcctgggatttagactctggaacaaacagtgaactatcctataccttttcccatgcctcagaagatattcgcaagacatttgaaattaatcaaaagtctggtgacattactttaacagcacctttggattttgaagcaattgagtcatactcaataatcattcaagccacagatgggggaggactttttggaaaatctacagtcagaattcaggtgatggatgtaaacgacaacgctcctgaaatcactgtgtcatcaattaccagtccaatcccagaaaacactccagagactgtggttatggttttcaggatacgagacagagactctggggacaacggaaagatggtttgttctatcccggaggacatcccattcgtgctaaaatcttcggtaaataattactacactttggaaacagagagaccgctggacagagagagcagagccgagtacaacatcaccatcaccgtcaccgacttggggacccccaggctaaaaaccgagcacaacataaccgtgctggtctccgacgtcaatgacaacgcccccgccttcacccaaacttcctacgccctgttcgtccgcgagaacaacagccccgccctgcacatcggcagcatcagcgccacagacagagactcgggcaccaacgcccaggtcaactactcgctgctgccgtcccaggacccgcacctgcccctcgcctccctggtctccatcaacgcggacaacggccacctgtttgccctcaggtcgctggactacgaggccctgcaggggttccagttccgcgtgggcgccacagaccacggctccccggctttgagcagcgaggcgctggtgcgcgtgctggtgctggacgccaacgacaactcgcccttcgtgctgtacccgctgcagaacggctccgcgccctgcaccgagctggtgccctgggcggccgagccgggctacctggtgaccaaggtggtggcggtggacggtgactcgggccagaacgcctggctgtcgtaccagctgctcaaggccacggagcccgggctattcggcgtgtgggcgcacaatggcgaggtgcgcaccgccaggctgctgagcgagcgcgacgcggccaagcacaggctggtggtgctggtcaaggacaatggcgagcctccgcgctcggccaccgccacgctgcacgtgctcctggtggacggcttctcccagccctacctgcctctcccggaggcggccccggcccaggcccaggccgactcgctcactgtctacctggtggtggcgttggcctcagtgtcgtcgctcttcctcttctcggtgctcctgttcgtggcggtgcggctgtgcaggaggagcagggcggccccggtcggtcgctgctcggtgcctgagggcccctttccaggacatctggtggacgtgagtggcaccgggaccctgtcccagagctaccactatgaggtgtgtgtgactggaggctccaggtcaaataagttcaaatttctgaaaccaattatccccaacttcctaccccagagcacaggtagtgaagtcgaagaaaatcccccatttcagaataatttgggtttctgataaagaatgaaaaataaaacctgtgtttatgaatacatttataattaggaacttatcgtgaggtgcctgtaaagtagtatttttgatcacttcaaatacatactcttcaagtcaagaaataaatttctttacatagaaaaggatacagatttagtaccaagaacacttcacaaagcaggaaatgtgcatgtgtaatggtttatgtcaaacaattatgcttaatataaagtctattaagtggtaagtcttgtttgagatattttaaattgctttccattgttttcaatatttactgtgacttttgttttctgagttgattagaatgctgttcgagtatacctaccctagtttcagaagcatagattgtagtgtacctttttaaactttatttttttaaaaaaagttgttttatgaatcatacactattttcacacttttaatctcagaagaaacatatgtgacatggtattttagtaatgaccaaatagacggtcttagagattcagtaagttcactaaggtccactaactaataagtgacaaaactgagcatccatcctagatctgcctgactctaagtcagtgactttgctcccattccatactgtttttgtcattggatatcacctggcaagtttctgcctaactaaagagaagaaaagtttttatcgtattcatactactgttcaatctttatttagaaataaactttatctatgatttcattttcttataaaccagtaatcttgcttttctgggtaaattttcagctattattactaatgctctgatctgcccaaatcttaagtaaaaaac

SEQ ID NO: 46430 - DNA, 3018 bp, Homo Sapiens
ggcaagccgattttttcagttgatattcaccctgacgggaccaagttcgcaactggaggacaagggcaggattctgggaaggttgtgatctggaatatgtctccagtcctccaggaggatgacgagaaggatgaaaatattcccaagatgctttgccagatggacaatcacttagcatgtgtgaactgtgtgcggtggtcaaacagtgggatgtatttagcttctgggggagatgacaaactgattatggtgtggaagcgggctacgtacatcggccccagcaccgtgttcggctccagtggtaagcttgccaatgtggagcagtggcggtgtgtctctatcctccggaatcattcaggcgatgtgatggatgtagcatggtctccccacgatgcctggctagcctcatgcagcgtggataacactgtcgtcatctggaatgctgtaaagttcccagaaattctagctactctgagaggtcattctggcttggtcaaagggttgacatgggaccctgttggtaaatacatagcttctcaagctgatgaccgcagcctaaaggtgtggaggacgctggactggcagttggagaccagcatcaccaagccttttgatgagtgtggaggaacgacccatgtgttgcggctcagctggtcacctgatgggcattacctggtgtctgcccatgccatgaacaactcaggccccactgcccagatcatcgaacgggagggatggaagaccaacatggactttgttgggcaccggaaagctgtgactgtcgtgaaattcaacccaaaaatcttcaaaaagaagcagaagaatgggagttctgcgaagcctagctgcccgtactgctgctgtgctgttggcagcaaggaccgctcgctttctgtctggctcacatgtctgaaacggccgctggtggtcatccatgaactgtttgacaaatccatcatggatatttcctggactctgaatgggctgggcatcttggtatgctctatggacggctctgtggcattcctcgacttctcccaggatgagcttggcgatcccctgagcgaggaggagaagagccgcattcaccagtccacctatggcaagagcctagccatcatgaccgaggcccagctctccacagccgtcattgagaaccctgagatgctcaagtaccagcgaaggcagcagcagcagcagctggaccagaagagtgctgcgaccagggagatgggctcagccacctcagtcgcaggcgttgtcaacggggagagtcttgaagatatcaggaagaatcttttgaagaaacaagttgagactcggacagcagatggccggagaagaatcacgcctctctgcatagcacagctggacactggggacttctccacggcattctttaacagcatccccctctcgggctccctggcgggcaccatgctctcttctcatagcagtccacagctactgccactggactccagtacccctaactccttcggcgcctcgaagccttgcacagagcctgtggtggctgccagtgccagacctgcaggcgattctgtcaataaagacagtatgaatgctacctctactcctgctgcattgtcaccttctgtgttaacgaccccgtccaagatcgaacccatgaaagcgtttgactcccggttcacagagcggtccaaagccacaccaggtgctcctgccctgaccagcatgactccgacagctgtggaaaggttaaaagagcagaaccttgtgaaagagctgaggccccgagacctcctggagagcagcagtgacagcgatgagaaagtccctttggctaaggcttcctcactgtccaagcgaaaacttgagcttgaggtagagacagtagagaagaagaagaaagggcggcctcggaaggactctcgtctcatgcctgtgtctctgtctgtccagtctccagctgccctaaccgcagagaaggaggccatgtgtctgtctgcaccagcacttgcactgaagctgccaattccaagcccccagagagcattcaccctccaggtcagctccgatccttccatgtacattgaggtggagaatgaagtgacagtggtggggggcgtgaagctgagccgcctgaagtgcaaccgggaagggaaggagtgggagacggtactcaccagccggatcctcactgctgcgggcagctgtgacgtggtgtgtgtcgcctgtgaaaaaaggatgctgtcagtgttctccacctgtggtcgccgtctcctctctcccatcctcctgccatccccgatctctactttgcattgcacaggctcctacgtcatggcgctcaccgctgcagccacactctctgtctgggatgttcacagacaggtggttgtggtgaaagaagagtctctacactccatcctggcaggaagtgatatgacggtatcacagatcttgctgacgcagcatggaatcccagtaatgaacctgtccgatgggaaggcgtactgctttaatccgtcactttccacatggaacctggtttctgacaagcaggactcactggctcagtgtgcagactttaggagcagcctgccatcccaggacgccatgctgtgctcaggaccgttagccataatccagggccgcacctccaactcgggaaggcaggctgcccggctcttctccgtgcctcatgtggtgcagcaagagaccaccctggcctacctagagaaccaggtggcagcagcactcaccctgcagtccagccacgagtaccgccattggctcctcgtctacgcacggtacctcgtaaacgaagggtttgaataccgacttcgagaaatatgcaaggacttactgggtccggttcactactccactggaagccagtgggagtcaacagtagtgggtctgcggaagagggagctgctgaaggagctgctaccagtcatcgggcagaacctccgattccagcgcctcttcaccgagtgtcaggaacagctcgacatcctgagggacaagtag

SEQ ID NO: 46431 - DNA, 1427 bp, Homo Sapiens
cagtcacatttcagccactgctctgagaatttgtgagcagcccctaacaggctgttacttcactacaactgacgatatgatcatcttaatttacttatttctcttgctatgggaagacactcaaggatggggattcaaggatggaatttttcataactccatatggcttgaacgagcagccggtgtgtaccacagagaagcacggtctggcaaatacaagctcacctacgcagaagctaaggcggtgtgtgaatttgaaggcggccatctcgcaacttacaagcagctagaggcagccagaaaaattggatttcatgtctgtgctgctggatggatggctaagggcagagttggataccccattgtgaagccagggcccaactgtggatttggaaaaactggcattattgattatggaatccgtctcaataggagtgaaagatgggatgcctattgctacaacccacacgcaaaggagtgtggtggcgtctttacagatccaaagcaaatttttaaatctccaggcttcccaaatgagtacgaagataaccaaatctgctactggcacattagactcaagtatggtcagcgtattcacctgagttttttagattttgaccttgaagatgacccaggttgcttggctgattatgttgaaatatatgacagttacgatgatgtccatggctttgtgggaagatactgtggagatgagcttccagatgacatcatcagtacaggaaatgtcatgaccttgaagtttctaagtgatgcttcagtgacagctggaggtttccaaatcaaatatgttgcaatggatcctgtatccaaatccagtcaaggaaaaaatacaagtactacttctactggaaataaaaactttttagctggaagatttagccacttataaaaaaaaaaaaaaggatgatcaaaacacacagtgtttatgttggaatcttttggaactcctttgatctcactgttattattaacatttatttattatttttctaaatgtgaaagcaatacataatttagggaaaattggaaaatataggaaactttaaacgagaaaatgaaacctctcataatcccactgcatagaaataacaagcgttaacattttcatatttttttctttcagtcatttttctatttgtggtatatgtatatatgtacctatatgtatttgcatttgaaattttggaatcctgctctatgtacagttttgtattatactttttaaatcttgaactttataaacattttctgaaatcattgattattctacaaaaacatgattttaaacagctgtaaaatattctatgatatgaatgttttatgcattatttaagcctgtctctattgttggaatttcaggtcattttcataaatattgttgcaataaatatccttgaacacacata

SEQ ID NO: 46432 - DNA, 3011 bp, Homo Sapiens
gggaggacgacggacggcagcggccaagcgagaagaaagacgtggcagcaagcgggagtcggggatagtgtcatcggttcgggtcccactactttggagcttgtctcaaactccacatacagaaagccaccgaccttattccggtatcctacacccattccccaccctcattacactcccacccctggccctcagcgtgggagtcaagagcaacagggacacttccgtactccttgtaggattggtgaaaccgtaatgacgaacacccctaaactcccataattggatttggggatattccctgcccaaaaaattcctggaaaattgactagtattaagtgcgtaatagattggaactcagtgaagacacagacgttcctgttgagagcaatcagctaatgattacagtttaaagacaatttctgtgatcaagttgtcatttggaagattaaacccatttcacgaggacttggagcctggtccttgctttgaggaagcagtggcttgtttcaagaagccacttctgatctaagaatctacccagcatgcctaatcaaggagaagactgctatttttttttctattctacatgtaccaaaggtgacagctgcccattccgtcactgtgaagctgcactaggcaatgaaactgtttgcacattatggcaagaagggcgctgttttcgacgggtgtgcaggtttcggcacatggagattgataaaaaacgcagtgaaattccttgttattgggaaaatcagccaacaggatgtcaaaaattaaactgcgctttccatcacaatagaggacgatatgttgatggccttttcctacctccgagcaaaagtgtgttgcccactgtgcctgagtcaccagaagaggaagtgaaggctagccaactttcagttcagcagaacaaattgtctgtccagtccaatccttcccctcagctgcggagcgttatgaaagtagaaagttccgaaaatgttcctagccccaagcatccaccagttgtaattaatgctgcagatgatgatgaagatgatgatgatcagttttctgaggaaggtgatgaaaccaaaacacctaccctgcaaccaactcctgaagttcacaatggattacgagtgacttctgtccggaaacctgcagtcaatataaagcaaggtgaatgtttgcattttggaataaaaactcttgaggaaattaagtcaaagaaaatgaaggaaaaatctgaggagcaaggtgagggttcttcaggagtttccagtcttttactccaccctgagcctgttccaggtcctgaaaaagaaaatgtcaggactgtggtgaggacagtaactctctccaccaaacaaggagaagaacccttggttagattgggccttactgagacactggggaaacgaaaattttcgacaggcggtgacagtgatcctccattaaagcgcagcctggcacagaggctagggaagaaagttgaagctccagaaactaacactgacgaaacaccaaagaaagctcaagtttccaagtctcttaaggagcgattaggcatgtcagctgatccaaataatgaggacgcaacagataaagttaataaagttggtgagatccatgtgaagacattagaagaaatgcttcttgaaagagccagtcagaaacatggggaatcgcaaactaaactcaagacagaaggaccttcaaaaactgatgattctacttcaggagcaagaagctcctccactatccgtatcaaaaccttctctgaggtcctggctgaagaagaacataggcagcaggaagcagagagacaaaaaagcaaaaaggatacaacttgcatcaagctaaagactgatagtgaaattaaaaaaacagtagttttgccacccattgttgccagcaaaggacaatcagaggagcctgcaggtaaaacaaagtccatgcaggaggtgcacatgaagacggtggaagaaattaaactggagaaggcactgagggtgcagcagagctctgagagcagcaccagctccccgtctcaacatgaggccactccaggggcaaggttgctactgcgaatcaccaaaagaacatggaggaaagaagagaagaaacttcaggaaggaaatgaagttgattttctgagccgtgttagaatggaagctacagaggcttcagttgagaccacaggagttgacatcactaaaattcaagtcaagagatgtgagatcatgagagagacgcgcatgcagaaacagcaggagagggaaaaatcagtcttgacacctcttcagggagatgtagcctcttgcaatacccaagtggcagagaaaccagtgctcactgctgtgccaggaatcacatggcacctgaccaagcagcttcccacaaagtcatcccagaaggtggaggtagaaacctcagggattgcagactcattattgaatgtgaaatggtcagcacagaccttggaaaaaaggggtgaagctaaacccacagtgaacgtgaagcaatctgtggttaaagttgtgtcatcccccaaattggccccaaaacgtaaggcagtggagatgcaccctgctgtcactgccgctgtgaagccactcagctccagcagcgtcctacaggaacccccagccaaaaaggcagctgtggatgctgttgtcctgcttgtctctgaggacaaatcagtcactgtgcctgaaacagaaaatcctagagacagtcttgtgctgcctctaacccagtcctcttcagattcctcacccccggaggtgtctggcccttcctcatcccaaatgagcatgaaaactcgccgactcagctctgcctcaacaggaaagcccccactctctgtggaggatgattttgagaaactaacatgggagatttcaggaggcaaattggaagctgagattgacctggatcctgggaaagatgaagatgaccttccgcttgagctatgagaaatgattgatagctgaaggtggtagtgaggacactttaaaaaaaaa

SEQ ID NO: 46433 - DNA, 441 bp, Homo Sapiens
atgatgggaatctgcccaagctgtgccctctggggaatgaaatcttgctcctcgtgcagcttcccctttcccttgcggggtgggggctgggggtgccaaggctccacccttggagggggttgctgggggtgccaaggctccaccctttgctcgctgggcagagggaaggaagcacctccctgtatgctctgcaggggcccctgcaggccactttgcctcagaggaaggaggagaggtcccctgggaaaatgccacacacacacacacacacacacacacacacgcacatgcacacacgcacgcatgcacacacacacacacatatgtgcaggggtgcagcctaagtcagtggagccaggactggctgcgcagctgggcctgccccattcttggagtccccagggaatgagcctcaggatccacttcgtcccttgtttctaa

SEQ ID NO: 46434 - DNA, 255 bp, Homo Sapiens
atgtgcgatgcctggatctgggccagaaggtcggccacctcctcctcgtggttgctccgcaggaaggccacctcatcctgcagcgactgcaccttcttgtccagctccaccttgaccagcgacgcctcctcgatgtctttgcgcagcgcgcggatggccgcctcagtgtcgtcgcgcaaccgcgcctcctcctcaaagcgctccttgagccggtggatgtcttcctccaggtggtccgagtccagctgcacctga

SEQ ID NO: 46435 - DNA, 1080 bp, Homo Sapiens
gcttcctgcggccagcccgggttcaatcagcggccgacaactgtctagggctcagacaccaccagccaatgagggagggcagcgtggagccgcccgtctgggctcgcggctcctggaccaatggggaagtggcatgtgggagggcgccggggggccccccgccaatggggagctacggcgcgcggccgggacttggaggcggtgcggcgcggcgggtgcggttcagtcggtcggcggcggcagcggaggaggaggaggaggaggaggaggaggaggatgaggaggatgtgggccacgcaggggctggcggtggcgctggctctgagcgtgctgccgggcagccgggcgctgcggccgggcgactgcgaagtttgtatttcttatctgggaagattttaccaggacctcaaagacagagatgtcacattctcaccagccactattgaaaacgaacttataaagttctgccgggaagcaagaggcaaagagaatcggttgtgctactatatcggggccacagatgatgcagccaccaaaatcatcaatgaggtatcaaagcctctggcccaccacatccctgtggagaagatctgtgagaagcttaagaagaaggacagccagatatgtgagcttaagtatgacaagcagatcgacctgagcacagtggacctgaagaagctccgagttaaagagctgaagaagattctggatgactggggggagacatgcaaaggctgtgcagaaaagtctgactacatccggaagataaatgaactgatgcctaaatatgcccccaaggcagccagtgcacggaccgatttgtagtctgctcaatctctgttgcacctgagggggaaaaaacagttcaactgcttactcccaaaacagcctttttgtaatttattttttaagtgggctcctgacaatactgtatcagatgtgaagcctggagctttcctgatgatgctggccctacagtacccccatgaggggattcccttccttctgttgctggtgtactctaggacttcaaagtgtgtctgggatttttttattaaagaaaaaaaatttctagctgtc

SEQ ID NO: 46436 - DNA, 1463 bp, Homo Sapiens
atgaacgactttgacgagtgcggccagagcgcagccagcatgtacctgccgggctgcgcctactatgtggccccgtctgacttcgctagcaagccttcgttcctttcccaaccgtcgtcctgccagatgactttcccctactcttccaacctggctccgcacgtccagcccgtgcgcgaagtggccttccgcgactacggcctggagcgcgccaagtggccgtaccgcggcggcggcggcggcggcagcgcggggggcggcagcagcgggggcggccccggcgggggcggcggcggcgcggggggctacgctccctactacgcggcggcggcggcggcggctgcggcggccgcggcggccgaggaggcggccatgcaacgcgagcttctcccgcccgcgggccgccggccggacgtgctcttcaaggcgcctgagccggtgtgcgctgcgccggggccgccgcacggccccgcgggcgccgcctccaacttctacagcgcggtgggccgcaatggcatcttgccacagggcttcgaccagttctacgaggcagcgcccgggcccccgttcgccgggccgcagcccccgccgccacccgcgccgccacagcccgagggcgcagccgacaagggcgaccccaggaccggggctggtggcggcgggggcagtccctgcaccaaggcgacccctggctcggagcccaagggggcagcagaaggcagcggtggcgacggcgagggccccccgggagaggcgggggccgagaagagcagcagcgcagttgccccccagcggtcccggaaaaagcgctgtccctataccaagtaccagatccgcgaactggaacgcgagtttttctttaacgtgtacataaacaaagagaaaagacttcaactctctcggatgctcaacctcactgaccggcaagtcaaaatctggttccagaatcgcaggatgaaagaaaagaaactgaacagagaccgtctgcagtatttcactggaaaccccttattttgagagctccaggaagcgccctcaccccagccccactcacccaccctccttcccaccagcctgctctccgcaggcccactgtccttgggtttaatgacgtctcttctctgtggaacttcacgattccttcccacggtcaactcgggacctcccagcgaccactgcagcctgcggacgaggccgggacttggccgagcggatcctaataaggggaaaatggtaaatgcaaacgtcccgttacaattttaccgccagtgtgctgtcgttccccctccccctctccgagtcctcgtggggacacggcggggtctgtaggaagttgggccgggttgggggttgctagaaggcgctggtgttttgctctgagttttaagagatcccttccttcctcttcggtgaatgcaggttatttaaactttgggaaatgtacttttagtctgtcatatcaa

SEQ ID NO: 46437 - DNA, 650 bp, Homo Sapiens
ggttcctcccgacatgtcgcagaagccctagggactgttccgcagctctagatggcccagtggggaggggctgccctgtgggcattgctgtctgatggcctgaaggcaccgcttggagggacacatgcctggggacagtgggctcacagatgtcttgctgctttgccaccgagcctcacagccatctgctgacctctcagagcccagcaggcccctgcccgggggttcgtggaatgcccctgggggtctcagacccactgctcagctcttggccaggctccgtatctctctagattggaggattctggagggaagtcggtgtggcctccgatcaaagcctggtgctgacggccccgaagcgggtggagggcttgttcctcaccttgagcgggagtaacctgaccgtgaaggttgcatataacagctcaggaagctgtgagatagagaagatcgtgggctcagaaatagacagtacgggaaaattcgcttttcctggtaagtgcagttgccctgtgatggcaggtggaacccggctgtgcacacagctaggccttattgttccccatgctgttccctgcactgttccccatgctgttccctgcactgttctctgtgctgttccctgcactgttccccatgctgttccctga

SEQ ID NO: 46438 - DNA, 1509 bp, Homo Sapiens
aatctgcaggaattcttagggggcctgagccctggggtattggaccgattgtatgggcaccctgccacatgtctggctgtcttcagggagctcccatccttggctaagaactgggtgatgcggatgctctttctggagcagcctttgccacaggctgctgtagctctgtgggtaaagaaggaattcagcaaggctcaggaggaaagtacagggctgctgagcggcctccggatctggcacacacagctgctcccaggcgggctccagggcctcatcctcaaccccattttccgccagaacctccgcattgcccttctgggtggggggaaggcctggtctgatgacacaagtcagctgggaccagacaagcatgcccgggacgttccctcccttgacaagtacgccgaggagcgatgggaggtggtcttgcacttcatggtgggctcccccagtgcagctgtcagccaggacttggctcagctcctcagccaggctgggctcatgaagagtactgaacctggagagccgccctgcattacttccgctggcttccagttcctgttgctggacaccccggctcagctctggtactttatgttgcagtatttgcagacagcccagagccggggcatggacctggtagagattctctccttcctcttccagctcagcttctctactctgggcaaggattactctgtggaaggtatgagtgattctctgttgaacttcctgcaacatctgcgtgagtttgggcttgttttccagaggaagttgggggttgaggttctgcatcttgggagggatctgatatttcaggcaggaagatgtaaggcagtgacttctgagacaaggcatctgcctttctattcttttcagaggaaatctcggcgttactaccccacacgcctggccatcaatctctcatcaggtgtctctggagctgggggcactgtgcatcagccaggtttcattgtcgtggaaaccaattaccgactgtatgcctacacggagtcggagctgcagattgccctcattgccctcttctctgagatgctctatcggttccccaacatggtggtggcgcaggtgacccgggagagtgtgcagcaggcaatcgccagtggcatcacagcccagcaggtattcccacttgggagaggtggagcaggaagacaggctgcacttgggctgcgggggacaggggtcacattatggaaggctagctctgagtctgttataataggtggtgtcaacccttgctccttgcagacacctgtgctgccccccaccatcaccgaccagatccggctctgggagctggaaagggacagactccggttcactgagggtgtcctgtataaccagttcctgtcgcaagtggactttgagctgctgctggcccacgcgcgggagctgggcgtgctcgtgttcgagaactcggccaagcggctcatggtggtgaccccggccgggcacagcgacgtcaagcgcttttggaagcggcag

SEQ ID NO: 46439 - DNA, 534 bp, Homo Sapiens
atgtgctcggtcaaagttaactctactgtaattcctgcttgggttgttctggggatacctaatttctccccaccagccacttccccaagaatagtgagtgtgagggtccttacagacagggagatgagagcgtcactcctctttatgaccgtcaaagctctgcaggtgctcgcccttcgggtctctccagcctcacctggtacccctctcccccttgcttgctttctgcagccatggtggccttttattcctcagacccgttttctttcctgtcccaggaagggcctttgcaggtgctcttcccacagcctgaaagttcctcgggtagctggctcttcctcaccctccaggcctccaggcctcagttcaaatgcctctccctgggagaggctggtcctgaccaccaccgcctcctgcctaaacacagcagattctctctcccctctagaatccaaacaccaggggagcaagagtagagttggtttcattcaccccgggctctccaagcatagcaaacgctctggaagcacgtga

SEQ ID NO: 46440 - DNA, 2601 bp, Homo Sapiens
ggccatggatgggcttggataaagcaccataagttcttcctctaggccatggactccccctggaactggcagcctggcccccaggcttcaggctgtccctgggttgaaggtggtgtttcacctgggacctgcccctttctgcccaggagcctgtctgcctcctgctaccatcaacatggcatccacagcacccaggctgtgcatgctgagggacgcctgcaggcctgcactgagctgccctcagtctcctcttggcttccctcctgtgcctgtcggtgaccaaagtctggagggggccaagatgacaggggtctggcatgtcaacaccacccagagtacatacacacccagctgggttgcgacagcacccaggctcagtttcaactttgctccaaaaatcagagtggacactgggagtggtgagatgccagggagcgggagcaggcaattacaagcctgcatgacaggggggcttcctgggtccccaagagcagagggatgcctgggtccagagctgtggctaggtagctgcagctgtgcctgggagctcagggctcctgccctgccaacttgatagaaggcagggttcccacctgttcctggtccctgccagctctgtggagcatgcagccccagctatgcctcccctgctgcagctggcatccccacagcagctgctccagataggccactgctgccatcactgacaattctttcagctcacaaaggtagccatgaattaggaaagttgggtcaggctccaggcagcctgcgttcaggcaagctcaagagctgaggatgcccacctttgcaaacatggcaactctacccatccctgtgtctcctagacactagagcccccaccctctgctattattctaccatactcattccccagccagagtctgggacctgggctcctgcagataattctacatcaaaaacaggggaagtagaaaagttcatgaaggctcctaagtctctccaaccacccagggccacaaaatccatgtagaggcctcatgaagggttttgtctaatcaaatagtttgctccaaccagccagcatctttcttttgatctagatgtctgtctccatagaaaaggacatctattgagggtcagggacctaatggcttgtgggttcctgagatacaattatgtgttacggagaaacaaagaaaattttgagacttttaggcaacagagaaaccactgcaaaaccctgtaattacagggcaagaagaaaaaagtgagctgccacagtgcctggggtagaaatagcctgacgttgcttcctggatggacctagaatgttgcacaaggtgacgtcagagtggttgcttagaagagaggtcattggatgcagttttccagctgagtacagtgggtggggtgcactgttgttcctggggcagagtgggcgagggagctgtggggagagatgaggaagcaggacaggaaaccacatttgctgaaggccaagggctgtgacaggcagacactgagacatatcgctgcactcagttctcagaacaactcagcgaagtcaggccttgtacccctagtcactagacaagaaaacagagggtcagagaggtgaggagacttgcccaagctcacctgatccctgacctgactgattgaaggcccagggcacccatccatgctaactaaggtgcaagttcgtactgtcacttctttgtgaaggggctgctctttaacaaaggataaaatgagaggttgttctactctgaggggaggggaggcagagagaaagaggggagagacttgcctctgtttgcctacaggtgccaagccaaaagaggggcttgagcttgtggagaaagcattgagttggaaatcgaatcacccagcttcaaattctgcctctactaatgccatgtggtctggggccaattactttagttctctgtgcaacagtgtcggcatcgggagtaaaggggttgaggtggtggggtgagaagtgtccactcttggtccctgcaagtctgaatcctttacactgcatgtcagcttagaataatgacggttatgagcaaggagcctggaatcagattgccaggttcaaatcccaactttgccctaagctacagtgtgacgtcaggcaagccacagatctgtgactcagtttaccctgtgtaaaatgaggataatgataatattcacaacctaggttgtcatgacaattaaatgacatcatgtgcgtgcaaccaaaatagcatttggctcatcctaggcacgggagaactatatgccaggactcagcccatggctcacgcagagctggagaagatctgggggaaggaaaaacagcttgcttgctgggcggtcccagactgcaaggtctccacctaccccagctcgcatcataactccttgaagtcaatccagatgggctctggccaccccaggggactgagcccattcccatcgagagctcattaaaattacccagaaatgggctgggcgtggtggctcacgcctataatcccaccactttgggaggccaaagtgggcagatcgaagtcaagagattgagagtatcctggccaacatggtgaaacctcatctctactg

SEQ ID NO: 46441 - DNA, 945 bp, Homo Sapiens
atggccaagaataatctcaccagagtaaccgaattcattctcatgggctttatggaccaccccaaattggagattcccctctttctggtgtttctgagtttctacctagtcacccttcttgggaatgtggggatgattatgttaatccaagtagatgtcaaactctacaccccaatgtacttcttcctgagccacctctccctgctggatgcctgttacacctcagtcatcacccctcagatcctagccacattggccacaggcaaaacggtcatctcctacggccactgtgctgcccagttctttttattcaccatctgtgcaggcacagagtgctttctgctggcagtgatggcctatgatcgctatgctgccattcgcaacccactgctctataccgtggccatgaatcccaggctctgctggagcctggtggtaggagcctatgtctgtggggtgtcaggagccatcctgcgtaccacttgcaccttcaccctctccttctgtaaggacaatcaaataaacttcttcttctgtgacctcccacccctgctgaagcttgcctgcagtgacacagcaaacatcgagattgtcatcatcttctttggcaattttgtgattttggccaatgcctccgtcatcctgatttcctatctgctcatcatcaagaccattttgaaagtgaagtcttcaggtggcagggccaagactttctccacatgtgcctctcacatcactgctgtggcccttttctttggagcccttatcttcatgtatctgcaaagtggctcaggcaaatctctggaggaagacaaagtcgtgtctgtcttctatacagtggtcatccccatgctgaaccctctgatctacagcttaagaaacaaagatgtaaaagacgccttcagaaaggtcgctaggagactccaggtgtccctgagcatgtag

SEQ ID NO: 46442 - DNA, 1680 bp, Homo Sapiens
atggacgtgaaggagaggaagccttaccgctcgctgacccggcgccgcgacgccgagcgccgctacaccagctcgtccgcggacagcgaggagggcaaagccccgcagaaatcgtacagctccagcgagaccctgaaggcctacgaccaggacgcccgcctagcctatggcagccgcgtcaaggacattgtgccgcaggaggccgaggaattctgccgcacaggtgccaacttcaccctgcgggagctggggctggaagaagtaacgccccctcacgggaccctgtaccggacagacattggcctcccccactgcggctactccatgggggctggctctgatgccgacatggaggctgacacggtgctgtcccctgagcaccccgtgcgtctgtggggccggagcacacggtcagggcgcagctcctgcctgtccagccgggccaattccaatctcacactcaccgacaccgagcatgaaaacactgagactgatcatccgggcggcctgcagaaccacgcgcggctccggacgccgccgccgccgctctcgcacgcccacacccccaaccagcaccacgcggcctccattaactccctgaaccggggcaacttcacgccgaggagcaaccccagcccggcccccacggaccactcgctctccggagagccccctgccggcggcgcccaggagcctgcccacgcccaggagaactggctgctcaacagcaacatccccctggagaccagaaacctaggcaagcagccattcctagggacattgcaggacaacctcattgagatggacattctcggcgcctcccgccatgatggggcttacagtgacgggcacttcctcttcaagcctggaggcacctccccgctcttctgcaccacatcaccagggtacccactgacgtccagcacagtgtactctcctccgccccgacccctgccccgcagcaccttcgcccggccggcctttaacctcaagaagccctccaagtactgtaactggaagtgcgcagccctgagcgccatcgtcatctcagccactctggtcatcctgctggcatactttgtggccatgcacctgtttggcctaaactggcacctgcagccgatggaggggcagatgtatgagatcacggaggacacagccagcagttggcctgtgccaaccgacgtctccctatacccctcagggggcactggcttagagacccctgacaggaaaggcaaaggaaccacagaaggaaagcccagtagtttctttccagaggacagtttcatagattctggagaaattgatgtgggaaggcgagcttcccagaagattcctcctggcactttctggagatctcaagtgttcatagaccatcctgtgcatctgaaattcaatgtgtctctgggaaaggcagccctggttggcatttatggcagaaaaggcctccctccttcacatacacagtttgactttgtggagctgctggatggcaggaggctcctaacccaggaggcgcggagcctagaggggaccccgcgccagtctcggggaactgtgcccccctccagccatgagacaggcttcatccagtatttggattcaggaatctggcacttggctttttacaatgacggaaaggagtcagaagtggtttcctttctcaccactgccatt

SEQ ID NO: 46443 - DNA, 1542 bp, Homo Sapiens
cagctggagaagttcagcatctccgctcatggcaaggagctgttcgtcaatgcagacctgtacattgtagccggccgccgctacgggctggtaggacccaatggcaagggcaagaccacactcctcaagcacattgccaaccgagccctgagcatccctcccaacattgatgtgttgctgtgtgagcaggaggtggtagcagatgagacaccagcagtccaggctgttcttcgagctgacaccaagcgattgaagctgctggaagaggagcggcggcttcagggacagctggaacaaggggatgacacagctgctgagaggctagagaaggtgtatgaggaattgcgggccactggggcggcagctgcagaggccaaagcacggcggatcctggctggcctgggctttgaccctgaaatgcagaatcgacccacacagaagttctcagggggctggcgcatgcgtgtctccctggccagggcactgttcatggagcccacactgctgatgctggatgagcccaccaaccacctggacctcaacgctgtcatctggcttaataactacctccagggctggcggaagaccttgctgatcgtctcccatgaccagggcttcttggatgatgtctgcactgatatcatccacctcgatgcccagcggctccactactataggggcaattacaggctcaggtttctcttttttcctcttcctctccaggaaaaacaaacgaaggaagccctgactcggaagcagcagaaatgccgacggaaaaaccaagatgaggaatcccaggaggcccctgagctcctgaagcgccctaaggagtacactgtgcgcttcacttttccagaccccccaccactcagccctccagtgctgggtctgcatggtgtgacattcggctaccagggacagaaaccactctttaagaacttggattttggcatcgacatggattcaaggatttgcattgtgggccctaatggtgtggggaagagtacgctactcctgctgctgactggcaagctgacaccgacccatggggaaatgagaaagaaccaccggctgaaaattggcttcttcaaccagcagtatgcagagcagctgcgcatggaggagacgcccactgagtacctgcagcggggcttcaacctgccctaccaggatgcccgcaagtgcctgggccgcttcggcctggagagtcacgcccacaccatccagatctgcaaactctctggtggtcagaaggcgcgagttgtgtttgctgagctggcctgtcgggaacctgatgtcctcatcttggacgagccaaccaataacctggacatagagtctattgatgctctaggggaggccatcaatgaatacaagggtgctgtgatcgttgtcagccatgatgcccgactcatcacagaaaccaattgccagctgtgggtggtggaggagcagagtgttagccaaatcgatggtgactttgaagactacaagcgggaggtgttggaggccctgggtgaagtcatggtcagccggccccga

SEQ ID NO: 46444 - DNA, 489 bp, Homo Sapiens
atgaggttacggcaggcactaaatctgccccgagtgcttgactcagcctcacttgatccgctgcaacagcctcccctctggactgagatggtgagcatcagccaaggcaggactcggcacacggtgcagtcagcagcctctccagggacatgccaaggtttccaggaggccagtctttgctggaaatttctcagtgaccacttttccccctttctttctttcttttctttctttttttttttttttttttttgaggtggagtctcactctgttgcccaggctggaatgcagtggcgtgatctcggctcactgcaacctccacctccctggttcgagcaattcccctgcctcagcctccggagtagctgggattacaggcgcacgccaccacgcacagctaatttttttttttttttttttgtatttttagtagagacagggttttgccacgttggccagactggtctcaaactcctgacctcaggctaa

SEQ ID NO: 46445 - DNA, 1266 bp, Homo Sapiens
tttctattttcaggacttattttctgaatattctttttttcttagatggagaaaaaccttacaatttcaaaacctgaggatattagtggcagttccttaaaaatgttttcttctcccttcacagtcccactttgctccattttgggttgtgggttttgattctacctttcaccctagaggcattcctcaaatggctggtgatccttgcctgtctgcacatattgaagagggggacaataagctgactggaagcaaccggctcataggagtaggatttgttgactctggcattcctgaaactgctgcttccctggagacccccaatatcagctgccaaattttgcacagaatcttctcatctcctggctggaagcataagcctggctaccagcattcagacagccaagtaggggaaagtgctaagcattaaatattctgaatacaggctgggcacagtggctcacacctggaatcccagcactttaggaggccgaggcgggtggatcacctgtggccaggagttcgagactagcctggccaacatggcgaaaccccgtcgctactaaaaatatgaaaaaattagccgggcgtggaggcacgcgcctgtagtcccagctactcaggaggttgaggcaggagaattgcttgaatccaggaggtggtgcatgcctgtagtcctagctacttgggaggctgaggcatgagaatcaagtgattcttgcacctgggaggcagaagttgcagtgagctgagatcacaccactgaaccaccgcagcctgtcttaaaaaataaaaataaagaagtaacatttttgggaactggtgtgcctggaaacctttttattccacctacccttacactaattgaggctggagataacattcccttggaattttaaagatattgatctactttcttctcatatctgatgttatttgaggcattcagattctcagtcctttgtatgaaacttttaaaattttttctagttcaggtattccttgtagtgaaattcacaatggcataccctagtgcgggtctgtttttatatattgtgctgggcactggaaagccatggctttcagtttcattggtgatttcctctgctgtttcttctgttctctttatggcatgcttattattcagatctgaggccttttgttctggtcttttctttcctactttctgcagtgagtcaagattgtgccacagcactccagcgtggcaacagagcgagactccgtctaaaaaaaaaaaaaaaaaaa

SEQ ID NO: 46446 - DNA, 477 bp, Homo Sapiens
gctaaggccatcaaacctattgatcggaagtcagtccatcagatttgctctgggccggtagtactgagtctaagcactgcggtgaagaagatggtagaaaacagtctggatgctggtgccactaatattgatctaaagcttaaggactatggaatggatctcattgaagtttcaggcaatggatgtggggtagaagaagaaaacttcgaaggcttaatgatgtcaccatttctacctgccacgtatcggcgaaggttgggactcgactggtgtttgatcacgatgggaaaatcatccagaaaaccccctacccccaccccagaccacagtcagcgtgaagcagttattttctacgctacctgtcataaggaatttcaaaggaatattaagaagaaacgtgcctgcttccccttcgccttctgccgtgtcagttccttgagggctccccagccatgcttcctgtacagcctgcaaaac

SEQ ID NO: 46447 - DNA, 1362 bp, Homo Sapiens
agtcctgggagtgcttgcaggcacttccggagcttccattatcatgaagcaactgaaccgcttgaggctatcaaccaacttcagaaattgtgccatcagtggctgaggccagagatccactcaaaaaagcacattttggaaatgctggtactagagcacttcctgaccatcctgccaaaggggacccagaactgggtgcagaagcatcatccacagcttgccaaacaggccctggtcctggtggaacgcttgcagagagaacctggtggaacaaagaatgaggtcacagcccatgagctgggagaggaggcagtgctcttgagaggaacaacagtggccccaggcttcaagtggaagccagcagagctcgaaccaatgggtctggtactacaagaacagctgggctggaatactcagaaagaaacccagcctgtatatgaaagagctgtgcatgttcaacagattttagccctttctgagcacaaaagcaccaaagactggaagatggcacctaagctcatctggcctgagtcccagagtttattgacatttgaagacatggctgtgtacttctctgaggaagaatggcaattattaggtcctcttgagaagactctctacaatgatgtaatgcaggatatctatgagactgccatctctctagggttaaagctaaaaaatgacaatggaaatgactatcctataatatcggtttctgcacctgaaatacaaacagcaggatacaaagtatcaaaaaagaccagaatgaaaattgcccagaaaacaaaggacagggaaaatcatggtgatacacacggtatagaaatggcatcaagcttttccaaggaagaaaagaaacttacaacttgtaaacaagagcttccaaaacttatggatcttcacgggaaaggccacacaggagagaaaccttttaaatgtcaggactgtgggaaaatcttcagagttagctcagatcttattaagcaccagagaattcacactgaagagaaactctataaatgtcaacaatgtgacaggaggtttagatggagttcaggtcttaataagcacttcatgacacatcaaggaataaacccatatagatgctcatggtatgggaaaagcattagttatgacacaaatctacaaacacaccaaagaattcacacaggagagaagccctttaaatgtcatgaatgtgggaaaatattcattcacaaatccaaccttattaaataccagagaactcacacaggtgagcagccttatacttgtagcatatgcaggagaaactttagtaggcagttgagccttcttagacaccagaaactccacagaagatgggaagcatgtccaatgtct

SEQ ID NO: 46448 - DNA, 2635 bp, Homo Sapiens
ctcaaaaggggccggatttccttctcctggaggcagatgttgcctctctctctcgctcggattggttcagtgcactctagaaacactgctgtggtggagaaactggaccccaggtctggagcgaattccagcctgcagggctgataagcgaggcattagtgagattgagagagactttaccccgccgtggtggttggagggcgcgcagtagagcagcagcacaggcgcgggtcccgggaggccggctctgctcgcgccgagatgtggaatctccttcacgaaaccgactcggctgtggccaccgcgcgccgcccgcgctggctgtgcgctggggcgctggtgctggcgggtggcttctttctcctcggcttcctcttcgggtggtttataaaatcctccaatgaagctactaacattactccaaagcataatatgaaagcatttttggatgaattgaaagctgagaacatcaagaagttcttatataattttacacagataccacatttagcaggaacagaacaaaactttcagcttgcaaagcaaattcaatcccagtggaaagaatttggcctggattctgttgagctagcacattatgatgtcctgttgtcctacccaaataagactcatcccaactacatctcaataattaatgaagatggaaatgagattttcaacacatcattatttgaaccacctcctccaggatatgaaaatgtttcggatattgtaccacctttcagtgctttctctcctcaaggaatgccagagggcgatctagtgtatgttaactatgcacgaactgaagacttctttaaattggaacgggacatgaaaatcaattgctctgggaaaattgtaattgccagatatgggaaagttttcagaggaaataaggttaaaaatgcccagctggcaggggccaaaggagtcattctctactccgaccctgctgactactttgctcctggggtgaagtcctatccagatggttggaatcttcctggaggtggtgtccagcgtggaaatatcctaaatctgaatggtgcaggagaccctctcacaccaggttacccagcaaatgaatatgcttataggcgtggaattgcagaggctgttggtcttccaagtattcctgttcatccaattggatactatgatgcacagaagctcctagaaaaaatgggtggctcagcaccaccagatagcagctggagaggaagtctcaaagtgccctacaatgttggacctggctttactggaaacttttctacacaaaaagtcaagatgcacatccactctaccaatgaagtgacaagaatttacaatgtgataggtactctcagaggagcagtggaaccagacagatatgtcattctgggaggtcaccgggactcatgggtgtttggtggtattgaccctcagagtggagcagctgttgttcatgaaattgtgaggagctttggaacactgaaaaaggaagggtggagacctagaagaacaattttgtttgcaagctgggatgcagaagaatttggtcttcttggttctactgagtgggcagaggagaattcaagactccttcaagagcgtggcgtggcttatattaatgctgactcatctatagaaggaaactacactctgagagttgattgtacaccgctgatgtacagcttggtacacaacctaacaaaagagctgaaaagccctgatgaaggctttgaaggcaaatctctttatgaaagttggactaaaaaaagtccttccccagagttcagtggcatgcccaggataagcaaattgggatctggaaatgattttgaggtgttcttccaacgacttggaattgcttcaggcagagcacggtatactaaaaattgggaaacaaacaaattcagcggctatccactgtatcacagtgtctatgaaacatatgagttggtggaaaagttttatgatccaatgtttaaatatcacctcactgtggcccaggttcgaggagggatggtgtttgagctagccaattccatagtgctcccttttgattgtcgagattatgctgtagttttaagaaagtatgctgacaaaatctacagtatttctatgaaacatccacaggaaatgaagacatacagtgtatcatttgattcacttttttctgcagtaaagaattttacagaaattgcttccaagttcagtgagagactccaggactttgacaaaagcaacccaatagtattaagaatgatgaatgatcaactcatgtttctggaaagagcatttattgatccattagggttaccagacaggcctttttataggcatgtcatctatgctccaagcagccacaacaagtatgcaggggagtcattcccaggaatttatgatgctctgtttgatattgaaagcaaagtggacccttccaaggcctggggagaagtgaagagacagatttatgttgcagccttcacagtgcaggcagctgcagagactttgagtgaagtagcctaagaggattctttagagaatccgtattgaatttgtgtggtatgtcactcagaaagaatcgtaatgggtatattgataaattttaaaattggtatatttgaaataaagttgaatattatatata

SEQ ID NO: 46449 - DNA, 966 bp, Homo Sapiens
atgggggaatggaccatcttggagaggctgctagaagccgcggtgcagcagcactccactatgatcgggaggatcctgttgactgtggtggtgatcttccggatcctcattgtggccattgtgggggagacggtgtacgatgatgagcagaccatgtttgtgtgcaacaccctgcagcccggctgtaaccaggcctgctatgaccgcgccttccccatctcccacatacgttactgggtcttccagatcataatggtgtgtacccccagtctttgcttcatcacctactctgtgcaccagtccgccaagcagcgagaacgccgctactctacagtcttcctagccctggacagagacccccctgagtccataggaggtcctggaggaactgggggtgggggcagtggtgggggcaaacgagaagataagaagttgcaaaatgctattgtgaatggggtgctgcagaacacagagaacaccagtaaggagacagagccagattgtttagaggttaaggagctgactccacacccatcaggtctacgcactgcatcaaaatccaagctcagaaggcaggaaggcatctcccgcttctacattatccaagtggtgttccgaaatgccctggaaattgggttcctggttggccaatattttctctatggctttagtgtcccagggttgtatgagtgtaaccgctacccctgcatcaaggaggtggaatgttatgtgtcccggccaactgagaagactgtctttctagtgttcatgtttgctgtaagtggcatctgtgttgtgctcaacctggctgaactcaaccacctgggatggcgcaagatcaagctggctgtgcgaggggctcaggccaagagaaagtcaatctatgagattcgtaacaaggacctgccaagggtcagtgttcccaattttggcaggactcagtccagtgactctgcctatgtgtga

SEQ ID NO: 46450 - DNA, 1641 bp, Homo Sapiens
gtgtgtgtgtgtgtgtgtgtgtgtgtgtgtacacgagcgcatgcctctctctgatcacaggtagcactcagattaccctgcctgctctgtgctttgctgcagaccatttgaccagaacgtgtgcagctcagccagccacagaactggaatttttcaggagcagggggagcatggagtttggactttgctgagcaactgaagtggagcgcagagcttgctcgcttaggagagagcatcatggatggcaaacaagggggcatggatgggagcaagcccgcggggccaagggactttcctggcatcaggcttctttcaaacccattgatgggcgatgctgtgtctgattggtctcctatgcatgaagctgcaatccacggacatcagctgtctctgaggaacctcatcagccaggggtgggctgtgaacatcatcacggcagatcatgtttccccactccatgaagcctgtcttggaggtcatctctcttgtgtgaagattttattaaagcatggagctcaggtgaatggtgtgacagcagactggcacactccactgtttaatgcttgtgtcagcggcagctgggattgtgtgaatttgcttctgcagcacggagccagcgttcaacctgagagtgatctggcatcccccatccatgaagctgctaggagaggccacgtggagtgtgtcaactctcttatagcttatgggggcaacattgaccataagatcagccacctgggcactccactctatttggcttgtgaaaaccaacagagagcctgtgtcaagaagcttctggagtcaggagcggacgtgaaccaagggaaaggtcaggattccccacttcatgcagtggccaggacagccagtgaagagctggcctgcctgctcatggattttggagcggacacccaggccaagaatgctgaaggcaaacgtcctgtggagctggtgcctccagagagccccttggcccagctcttcttggagagagaagggcccccttctttgatgcagttatgccgccttagaattcggaagtgttttggaatccagcagcatcataagataaccaaactcgtcctcccagaggatctgaaacagtttctcctacatctttaaatgcatctagggaatggattcacaaacgatgtgaaaacattattgagtgttgtagccactagaattttaaaatcaagttggatttatagagtttgactagttttttcgattagatttgtatttgttataaacttgtttatggagtttgactaattttttctattcaatttgtatttgttaaactcaagccagggttgaaagacactgcatacgtttgtattattagttagaaggcatgaagacttttttccctgcatggagagtgtcataagttattgttttgcatatctactgcatgccaagcactttctgcatcatctaatttagccctcacagccactgggtcaagatgtccaattttccagagtaaggatagaggagtcaaattcaaatacaggttttctgacattaacttatgtgatgacttgatcgaggcaggcttttccagcatcactgtcctggttccatctctgctatatgggaatgaaaataaagaaacatatttcttggcttgtctaa

SEQ ID NO: 46451 - DNA, 2806 bp, Homo Sapiens
ggtccttatcaccccagctcctttttgtttttctgtctcctgccttttccagaagtctgttgaactcaaagggctgaatgacagcagtcttccctccgtgactgggaaactacacgggaggaaccgtatcctgacgcagacgcgatgcggtgttccatcaggaaatgcttcatactctcagtgggcatcgtattcctgtggcccttcatcactttgaaaatccccaaggaaactgaagatgatcaaaatgtgatgactgtcaaaggccaagtagcaagccttgagccttgctcagtttgggaactgggaatatagggtggaaatggtgtggacaggcagattctggaaagcccctgggctttcttccttcctgaccttttcacctgagagcaggaagctccaaagggaatgggggtatggacctgggcctattagtccatgaagaagctgtatttattttccttattcgttaaggtaaagaagacagcaaatactgcttgagccctggatattttagccaatggccaggcatcctgagaatgtgccaggctcactctagggagaatggttcactccacctctttccctagaaaagcttatgggaagccactggggtgtaaaatttgttctttttatgaaaggatatatatgtttgcccttgtcaatgcccccggaggccagttataacagccggaaggacccaagatcactagaagactggcagaacctcaccttcaaatatatggaaaaaatccagaagagaagaaagacatggctgacagtggggaatctcatcagtgcagcaaggggatggaagcagcctcttgtacacattggtctccctgttccgtgtttcttctaaggctgagcagaaacgtctcacggtgctggtccacctggcagattctgacctcacctggctcagagaaactcttgcccatatttcaagcctcttcagcccacagatcttgaaagggcagttgctactgatccatgcttcatccgatgcctaccccactgtggagagcatcagggatgaggcctttcatggcgaattctactccaagcagaacgtagatcatgccttcctcatgagctttgccacaaagttctctgattacttcctgttaatagaggacaatgtcttttttgcccccaactttgtcacccacattcattcaagggtgaccaccatgaagtccaactcgtgggtgctaatggagttctccaatatgggcttccttggcaaactcttccacagcagggacctcccactcctggcccatttcctccttctcttctacaaggagaaaccccttgacagcctgatttctcatttccatacgctcctggtccaggaaagcccaatcctctgcagacctttcctattctactgcagggtctcctacactgcctttgatcacaagcagaaggccacagcacttcagaaaaagaatgccgatggtcccaacaacccgcctggagctgtcttcactgatatgcaggtttccgatgtgcatttcccctgggaggcctacactctggatgagtcattcttttggacacacaacattagtataggaaaccacctgacagtgattctgaaccatccagcaaacctgagcagggtgcaagtgatgacgggctccattaatgggaggtacgccctggagaaggggcaggtggagctgggctaccaacctgagggggtgccgcagcactgcaccagcttcgccttgctgggacatctttcggaggggcagatggatcagaagatacttctgaaaggtatggggtaccacgtgagctgtgtgaggctggtggtgaaagctggtcaggctggggggctcatgatcaggcatatctacctctgggagaaaaatgacaaatagcaagtggatcaatgctgaagataaatcagtagggggatgaaaaattaaaatcttaaagccacttcattctagtctatatgagtgacataggggagacacaatggaatgaagggcagacagagaagactatcagtctgttggtgccgccaagatgtcaggagacttgttgcttcctttctatccaaacaactctcataggatatcttttgctgtggcatatatagcttatccgaatttggggagagttttggtcactcccaaaatatttagatacctgggatgctgagatcagcccaaatcaaggtgtccctgtgtatacatgcgtgtgcatgtatgcacttctatgttcacacggaggcagaggtggggatgaggtatgtggtcacaggagggcaggcaggaaaatcacggctgaatccctagaattgacatcataaaaagccatgaaagggactctcattagaagttaaaatctccgaagtgcaggaaagtagcagatggacaaatagcaataaaacgaatcccttagctctattattgaagctgtttcacagtgccaatctagttccctcctttcctccccaacaaacttgggcacaaataggttttaactaggctgggtatggtggctcatgccagtaattgcagcctcccttaggaggctgaggtgggaggatctcttgaggccagcagttcaagaccaacctaggcaacacggcaagaccctgtctccacaaaaaattaaaaagttagccaggttgtggtggcatgtgcctgtggtcctagctactcaggaggctgaggcaggaggatcacttgagcccaggaggttgaggctgcagtgagccatgattatgccattacactccagcctgggcaacagcgtaagaccctgtctccaaaaaaaaaaaaaa

SEQ ID NO: 46452 - DNA, 390 bp, Homo Sapiens
atgagtaagagatacttacagaaagcaacaaaaggaaaactgctaataataatatttattgtaaccttgtgggggaaagttgtatccagtgcaaaccatcataaagctcaccatgttaaaacgggaacttgtgaggtggtggcactccacagatgctgtaataagaacaagatagaagaacggtcacaaacagtcaagtgctcctgcttccctgggcaggtggcaggcaccacgcgagctgctccatcatgtgtggatgcttcaatagtggaacagaaatggtggtgccatatgcagccatgtctagagggagaagaatgtaaagttcttccggatcggaaaggatggagctgttcctctgggaataaagtcaaaacaactagggtaagt

SEQ ID NO: 46453 - DNA, 2712 bp, Homo Sapiens
caaattcacgaggaatgctcccaaagcacagagaggttaaattactcagtctaaggtcacgcagcagtaagtaatggagctggaatttgagctctaacagtctgctccggagctcgggccttgctgctggcgtcaggccatgcacagagagctgatggaagcaggaggagctgatgtgaagttatgcgacacacatggccttttaggaatgttccatttggctgctgcactcccatccaccctgtgtacacatcctccagaggcgatcacctcggctgttgggctctgaggcccgagtgccttcgcatagtgtcgagagcgccatggacctctacctctgtgggttttgtggctgtgggacctcagtgccttcctgtgcgtggctggcactcttcgcgccctgttcgcgatgactcggtagtagagaagtccctcaagtccttgaaggacaagaacaagaagctggaggaaggcggcccggtgtacagcccccccgcagaggtggtggtgaagaagtccctggggcagcgggtgctggacgagctgaagcactactaccatggcttccgcctgctatggatcgacaccaagatcgcggcacgcatgctctggcgcatcctcaacggccacagcctgacccgccgggagcgcaggcagtttctccggatctgcgctgacctcttccgcctggtgccgttccttgtgttcgtggtggtgccgttcatggagtttctgctgcctgttgctgtgaagctcttccccaacatgttgccatccacatttgagactcagtcactcaaggaggagaggctgaagaaggagcttcgggtcaagctggagctggccaagttcctccaggacaccatcgaggagatggccttgaagaacaaggcagccaagggcagcgccaccaaagacttctctgtgtttttccagaaggtgctgtgatacgtctgagtccctgtgacctcaccagggagccttccctgattttctgtttccctttcgctgtgctcagcagagtggagctcccccaggtgctggctggcgcttgaaagtttacccaggaggctcagtcgggggccagtggagtgtcaggagtctgcccccacgagctcccagtgagttaagctgtggtggctgcgcctcgtcagccttcagaattatgggcgtctgtgtctcatcaccctgcagctgtccaggagcagtagaatctgacccatgaggagcctgagaccctgatggtgtgaggtgtgggtggcttggccgggctcctctgctgggcattgccctctggctggagtcagtcaagaagatcccaggtcccaggggctggtcagaggcctggactgtgggagcagtgggggctggagaggaggagcggcccttgaggtttcctgcggtcatgtggtgagtgaggtgaggatggggagacggcagctgccacggaccgagatccctgaggactagatggggttcacgaggccggtgttgttggcttgagggacttgtgccactttggagtgagaaggatgtgtctgaagtgcaggaagagcttaaaccagggcctagaaactccagccatgcgtgtgcgttgtctgtggggttttcccgctgcagcacagaggcgagtggtttccatggctgcaaagccagaaatacttgctgtctggcccttgacagaaaagactgccaggctgaggcctaaccacggagaagcctctcgggaggaggcgacacagccatggggctgctgagccccccagggagtgggtggtggttccagcaagatgttttagggggagccatgctttgggagcctcacccaggacatcgtgccttgcagagcaggaggggcccgtcccaacctttcctgggccgcccagctgccaagaaggatgtgcttgcagtcacctgcacgggggtgtgctgcatagggccgcccccaggagcacacctgaaattgtgtctcagagctggcatcctgcatgttacgatttgagttgggcaccaagtcagcctcgtcctccctcatctgtcacctctgctaggtaccctcctagcccagctcttggcagagactgagctggtggcttgtccctcaggtggtaggaactgcagaggatcacccaaagggccctgagtgatccacgctaagggactctagctctccctaaagagctagatggccacccctcccccaaggctcaggcagtcatccgtgggagatgtaggtgcacacaggtgcacctcttcctgccccagagcagcagggtcccggccacttctgtggcagagagaggatcacaggacctgcatgcagcagcctgtgggcccgggcgtctcccccagcagacagcagcctcagctttgctggttcaggcaggagaggtccacaggccagacgccacctttccccaggctagcccagcaccggagtcagaagtcagtggtttgaggccaagctgggcaggtgacttgaggtcgggtatttgagaccagcctggccaacatagtgaaatcccatctctactaaaatacaaaaattagctgggtgtggtggcgcagcctgtaatcccagctactcgggaggctaaggcaggagaatcccttgaacccaggaggtggaggttgcagtgaaccgagattacaccactgcattccagcctgggtaacagagcgagaccctgtctcaaacaaaaaaaaaaaaga

SEQ ID NO: 46454 - DNA, 267 bp, Homo Sapiens
atgatgaagggaacatcatcgtttggaaagcatcacaataagacgaggacgtaccaccttcagaagtcgacctgtggcaaatgtggctatgctgccaagcgcaagaggaagtataactggagtgccaaggctaaaagacaaactaccactggaactggtcaaatgaggcacttaaaaattgtatacagcaaattcgggcatggattctgtgaaagaacaccacctaaacccaagagggcagctgctgcagcatccagttcatcttaa

SEQ ID NO: 46455 - DNA, 1095 bp, Homo Sapiens
atggacgccccgaggcacgtggtcaacttcgggcctggtcccgccaagctgcctcactcagtgttgttagagataaaaaaggaattattagactacaaaggagttggcattagtgttcttgaaatgagtcacaggccatcagattttgccaagattattaacgatacagagaatcttgtgcgggaattgctagccgttccagacagctgtaaggtgatttttgtgcaaggaagtgggtctggccagttcggtgctgtccccttaaacctgattggcttgaaagcaggaagatgtgcggactatgtggtgacagggacttggtcagctaaggccgcagaagaagccaagaagtttgggactataaatatcattcaccctaaacttgggagttatacaaaaattccagatccaagcacctggaacctcaacccggatgcctcctatgtgtattattgcgcaaatgaggtggtgcatggtgtggagtttgactttataccctatgtcaagggagcagtactggtttgtgacatgtcctcaaacttcctgtccaagccagtggattccaagtttggtgtgatttttgctggtgcccagacgaatgttggctttgctggggtcactgtggtgattgtctgtgatgacctgctggggcctctgagagtgccccttggtcctgaatacgaggtacaggctggaaacagctccttgtacaacacgcctccatgtttcagcatctatgtcatgggcttggtcctggagtggattaaaaacaatggaggtgccgcggccatggagaagcttagctccatcaaatctcaaatgatttatgagattattgataattctcaaggattctacgtatgtccggtggagccccaaaatagaagcaagatgaatattccattctgcatttgcaatgccaaaggagatgatgctttagaaaaaagactttttgataaagctcttgaacttaatatgttgcccttgaaagggtataggtctgtgggaggcatccgggcctctctgtataatgctgtcactattgaagatgttcagaagctggccgccttcatgaaaaattttttggagatgcat

SEQ ID NO: 46456 - DNA, 513 bp, Homo Sapiens
atgcggcttcaaggggctatctttgtgctcctgccccacctggggcccatcctggtctggctgttcactcgtgatcacatgtctggttggtgtgagggcccgaggatgctgtcctggtgcccattctacaaagtcttattgcttgtacagacagccatctactctgtcgtgggctatgcctcctacctggtgtggaaggacctgggagggggcttggggtggcccctggccctgcctcttggcctctatgctgttcagctcaccatcagctggactgtcctggttctctttttcacagtccacaaccctggtctggccctgctgcacctgctgctgctgtatgggctggtggtgagcacagcactgatctggcatcccatcaacaaactggctgccctgttactgctgccctacctagcctggctcaccgtgacttcagccctcacctaccacctgtggagggacagcctttgtccagtgcaccagcctcagcccacggagaagagtgactga

SEQ ID NO: 46457 - DNA, 231 bp, Homo Sapiens
caggggccgttgacatttagggatgtggccatcaaattctctctggaggagtggcaatgcctggacactgctcaacaggatttgtataggaaagtgattttagagaactacagaaacctggtcttcttggcaggtattggtttctctaggccagatctgatcaactgtcaggagcaaggaaaagatccctggaatatgaagagacacggtatggtagccacaccccaggta

SEQ ID NO: 46458 - DNA, 441 bp, Homo Sapiens
tgcccggggcaagcaccagcccatgccatcaccctcacagagccctgggtatgcttgaccattgacggccaggaggctaactgtctcctggacactggtgtggccttctcagtcttattttcctgtcccagacaacggtcctccagagctgtcactatccaaggggtcctaggacagccagtcactagatacttctcccagccactaagttgtgactggggaacttcactcttttcacatgcttttctaattatgcctgaaagcccaactcccttgttagggagagacattctagcaaaagcaggggccattatacacctgaacataggagaacacccgtttgttgtcccctgcttgaggaaggaattaatcttgaagactgggcaacagaaggacaatatggacgagcaaagaatgcccgtcctgttcaagttaaactaa

SEQ ID NO: 46459 - DNA, 918 bp, Homo Sapiens
gaaaagagatactctcagaaaaaagtcattggctttagaaactctccaagcgacctaagccaaacacagcagcaaataaaggaaatgaaagagatgtatgaaaatgcagaagctaaagtgaataattccactggaaagtggagctgtgtagaagagaggatatgtcaactccaacatgaaaatccgtgcattgaacagcaactagatgatgttcatcagaaagaggatcataaagagatagtaactaatatccaaagaggctttattgagagtgaaaagaaagacctcatgctagaagagaaaaataagaagctaatgaatgaatgtgatcatttaaaagaaagtctctttcaatatgagagagagaaagcagaaagagtagtggttgtgagacaacttcaacaagaagcggctgacagcctaaaaaaattaactatgttagagtctccactggaaatatcacattatcacattaatttggatgagacacaggtcccaaagaagaaattatttcaagtggaaaattattctcagcctacttcattatcaagctatactattttattcatgcaatttgatgatcttatggcggagaaggaagcagtatcttcaaaatgtgtcaatttgcctaaagagaatcaagtttttcaacaggagttattatctatgaaaaaagtacaacaggaatgtgaaaaacttgaggaggataaaaatatgttggaagaagaaatattaaatcttaagacacatatggaaaacagtatggtagaacttagtaaactacaagaatataaatcagagctagatgaaagggcaatgctggcagtagaaaaattagaagaaatccatttacaggaacaagcacaatataaaaaacaattagagcagttaaacaaggatataatacagcttcactaa

SEQ ID NO: 46460 - DNA, 240 bp, Homo Sapiens
tggctcatgcctgtaatcccagcactttgggaagccgaggtgggaggatcacctgaggttaggagttcgagaccagcctggccaacatgggaaatactgtctctactacaaatacaaaaattagccggtcatggtggcacccgcctgagtctacttgggaggctgaggcaggagaactgcttgaacctgggaggtggaggttgcagtgagccgaaatcccaccactgcatttcagcctgg

SEQ ID NO: 46461 - DNA, 1121 bp, Homo Sapiens
ggcgctgcgggggctgacatgtcgtcccggcctgggcgcgaggacgtgggggctgcgggcgcgcggcggccgcgtgagccgccggagcaggagctgcagcgacgtcgggagcagaagcggcggcgacacgacgcgcagcagctgcagcagctcaagcacctggagtccttttacgaaaaacctcctcctgggcttatcaaggaagatgagactaagccagaagattgcataccagatgtaccaggcaatgaacacgccagggaatttctggctcatgcaccaactaaaggactttggatgccactggggaaagaagtcaaagttatgcagtgttggcgttgcaaacgctatggtcaccgaacgggtgacaaagaatgccctttctttatcaaaggcaaccaaaagttagagcagttcagagtggcacatgaagatcccatgtatgacatcatacgagacaataaacgacatgaaaaggacgtaaggatacagcagttaaaacagttactggaggattctacctcagatgaagataggagcagctccagttcctctgaaggtaaagagaaacacaagaaaaagaagaagaaagaaaagcataagaaaaggaagaaagaaaagaaaaagaagaaaaaacggaagcacaaatcttccaagtcaaatgagggttctgactcagagtgacaaggatgtgacttgttcaacattctcttctcaaacactgaccaaggaacagaggaagatgcagtcagagaaagcagcaggatagagacgccgagagaggagtatatgtgggtcacagcagtgagctcccacccgccttgcagtgaagatgtgaccccaggagagggagtgtctccttccaggtgctagctctggacagcagctgattttaggcaggaaagtttcttcatcgttgtcctccctgctggtcacatgagtttacgattcctttgaagtgtctcccacagggtggcaggactgggagaatctctgaggcgtgtcttccaggccctcccacagcttgtgccctccacagtgtggactcaggtcccatagacatcaggctggagtcttctctgttgttgagaataataaaagctcattatttattttttaaa

SEQ ID NO: 46462 - DNA, 2064 bp, Homo Sapiens
atggaagcagtctctagggtcttcccagccttggctggccaggctccagaagaacaaggggagattatcaaagtaaaggttaaagaagaagaccacacttgggatcaggaatcagccctacgtaggaatttgtcttataccagggaactctctcgtcagcgcttcaggcagttctgctatcaggagacacctgggcccagggaggctctgagtcaactgcgggaactttgccgtcagtggctgaacccagagatacataccaaggagcagatcctggaattgttggtgctggagcagttcctgaccatcctgcctgaggagctccagtcttgggtgcgggagcataatcctgagagtggagaagaggtggtgactttgctggaagatttggagagggagcttgatgaacctagacagcaggtctcacagggcacatatgggcaggaagtttctatggaagaaatgatccctctggattctgcaaaggagtctttaggcacccagcttcagtctatggaagatagaatggaatgtgaatctccagagccacacccacttcaagataatgggtcatttttgtggttttccatgatgtctcaaagcatgggtggtgataacctcagtagcttagatactaatgaagcagaaattgaaccagaaaacatgagagaaaagttcttcagaagcttagcaaggttactggaaaacaaaagtaataatactaagatattttctaaagcaaagtactgtcagttgataaaggaagtgaaagaagctaaagctaaggcgaaaaaggaatcagttgactaccgtcgcttggctagatttgatgttatccttgtacaaggaaatgagaagctaattgaggctgtaaatggggaaacagataaaatacggtattacttacacagtgaggacttatttgacattctgcataatacacatctcagcattggacatggtggacgtactcgcatggagaaagagttacaagcgaaatacaagaacatcacaaaagaagttataatgctgtatctgaccctctgtaaaccatgccaacagaaaaattcaaaactcaagaaggttctaacatcaaaatcaattaaggaagttagttcaagatgccaagtagatcttatagacatgcagttgaatcctgatggggagtacagatttattttgcattatcaagatctctgtacaaagttaacttttttacggtcattaaagtctaaaaggcctacggaagttgcacatgctcttttagatatatttacaattattggagcacccagtgtcctacaatctgacaatgggagggaattttcaagccaggttgtcagtgaactcagtaatatttggccagaattgaaaattgtccatgggaagtctcagacctgccaaagccagagttctgcagaacaaactgaggatatccgaaagaggattttctcctggatgcaaactaacaactcatcacactggactgaatttttgtggttcattcagatgtcccaaaatcagccctatcacagaagcatgcaacagactccatgtgaaagtgcatttagctctgaagctaaactgggcttgtcccattctcagctaactgaagaacttgttgccagcttgcatacagaaaatgaattagatcaggctgacaaagagttagaaaatactttaagagcccagtatgaagaaaacattgagactggaacagacagtagtgatattgaagagaatctttctgtcactcctaaggtggctgaaaaaagccctcctgagagcagactaagatttttatcctgtgtagtttgtgaaaaagaatgcacaggtgttaatagttgtatatcatgtgatggaaatatccatgcaatttgtggagtgccctctcaacatgggactgagggctgtggtcggcaaataacttgtagcctttgctatgaaaccagcacaatgaaaaggaaacatgatgagattcaaagaagtttgcctgttaaaccttccaaaatgctaaagccatcagggacaccattttcaccagacaaagtaggagattgggta

SEQ ID NO: 46463 - DNA, 663 bp, Homo Sapiens
ctctactgttcctatgagaccaattccaacgcctacctgctgctccagcccatccggaaggaggtcatccacctggagccctacattgctctctaccatgacttcgtcagtgactcagaggctcagaaaattagagaacttgcagaaccatggagacgtcatttagtcatttcgggcaacagatcattgatgcttcaatctgtggtgtgttttagtgcctggctgaaggacactgttgacccaaaactggtgaccctcaaccaccgcattgctgccctcacaggccttgatgtccggcctccctatgcagagtatctgcaggtggtgaactatggcatcggaggacactatgagcctcactttgaccatgctacggtaatggtggagtcaatgaccaatcccctgggaatgaagtcaggaaaccgagttgcaacatttatgatctatctgagctcggtggaagctggaggagccacagccttcatctatgccaacctcagcgtgcctgtggttaggaatgcagcactgttttggtggaacctgcacaggagtggtgaaggggacagtgacacacttcatgctggctgtcctgtcctggtgggagataagtgggtggccaacaagtggatacatgagtatggacaggaattccgcagaccctgc

SEQ ID NO: 46464 - DNA, 441 bp, Homo Sapiens
atggttcttgtttcttattttttacattattttcagggatgtgtgtcccatcaaagtctcattatggaggagttgaattttcccgggacacctgtggcagggctgccagacaccagcctaaactgctctcactctcatttccagaccaagggcctctggtggcctgtagggagccatgggcaatcacagcaaccctctctgaggccaaggaagttcaggtatgagctgtacctgaggctgccctggcctctcctctcccgtcagtcctcactgggtgtcttctcaccctgccctctgccagctccactgctttccctgctgggtttcattgcttgtgcaaggaagatacggaagccacacaatgggttggttctttctagcccttcccagactgactataggccagcggggtctgtatctagaaatcttttattactctaa

SEQ ID NO: 46465 - DNA, 676 bp, Homo Sapiens
cgcccagtgacctgccgaggtcggcagcacagagctctggagatgaagaccctgttcctgggtgtcacgctcggcctggccgctgccctgtccttcaccctggaggaggaggatatcacagggacctggtacgtgaaggccatggtggtcgataaggactttccggaggacaggaggcccaggaaggtgtccccagtgaaggtgacagccctgggcggtgggaacttggaagccacgttcaccttcatgagggaggatcggtgcatccagaagaaaatcctgatgcggaagacggaggagcctggcaaattcagcgcctatgggggcaggaagctcatatacctgcaggagctgcccgggacggacgactacgtcttttactgcaaagaccagcgccgtgggggcctgcgctacatgggaaagcttgtgggtaggaatcctaataccaacctggaggccctggaagaatttaagaaattggtgcagcacaagggactctcggaggaggacattttcatgcccctgcagacgggaagctgcgttctcgaacactaggcagcccccgggtctgcacctccagagcccaccctaccaccagacacagagcccggaccacctggacctaccctccagccatgacccttccctgctcccacccacctgactccaaataaag

SEQ ID NO: 46466 - DNA, 555 bp, Homo Sapiens
atggttcgctattcacttgacccggagaaccccacgaaatcaggcaaatcaagaggttccaatcttcgtgttcactttaagaacactcgtgaaactgctcaggccatcaagggtatgcatatacgaaaagccacgaagtatctgaaagatgtcactttacagaaacagtgtgtaccattccgacattacaacggtggagttggcaggtgtgcgcaggccaagcagtggggctggacacaaggtcggtggcccaaaaagagtgctgaattcttgctgcacatgcttaaaaacgcagagagtaatgctgaacttaagggtttagatgtagattctctggtcattgagcatatccaagtgaacaaagcacctaagatgcaccgccggacctacagagctcatggtcggattaacccatacatgagctctccctgccacattgagatgatccttacggaaaaggaacagattgttcctaaaccagaagaggaggttgcccagaagaaaaagatatcccagaagaaactgaagaaacaaaaacttatggcacgggagtaa

SEQ ID NO: 46467 - DNA, 2715 bp, Homo Sapiens
atgaggcgcagcaaggccgatgtggagcggtacgtcgcctcggtgctgggtctcaccccgtcgcctcgacagaagtcaatgaaaggattctattttgcaaagctgtattatgaagctaaagaatatgatcttgctaaaaaatacatatgtacttacattaatgtgcaagagagggatcccaaagctcacagatttctgggtcttctttatgaattggaagaaaacacagagaaagccgttgaatgttacaggcgttcagtggaattaaacccaacacaaaaagatcttgtgttgaagattgcagaattgctttgtaaaaatgatgttactgatggaagagcaaaatactgggtcgaaagagcagcaaaacttttcccaggaagtcctgcaatttataaactaaaggaacagcttctagattgtgaaggtgaagatggatggaataaactttttgacttgattcagtcagaactttatgtaagacctgatgacgtccatgtgaacatccggctagtggagttgtatcgctcaactaaaagattgaaggatgctgtggcccactgccatgaggcagagaggaacatagctttgcgttcaagtttagagtggaattcgtgtgttgtacagacccttaaggaatatctggagtctttacagtgtttggagtctgataaaagtgactggcaagcaaccaatacagacttactgctggcctatgctaatcttatgcttcttacgctttccactagagatgtgcaggaaaatagagaattactggaaagttttgatagtgctcttcagtctgcgaaatcttctttgggtggaaatgatgaactgtcagctactttcttagaaatgaaaggacatttctatatgtatgctggttctctgctcttgaagatgggtcagcatggtaataatgttcaatggcgagctctttctgagctggctgcgttgtgctatctcatagcatttcaggttccaagaccaaagattaaattaagagaaggtaaagctggacaaaatctgctggaaatgatggcctgtgaccgactgagccaatcagggcacatgttgctaagcttaagtcgtggcaagcaagatttcttaaaagaggttgttgaaacttttgccaacaaaattgggcagtctgcgttatatgatgctctgttttctagtcagtcacctaaggatacatcttttcttggtagcgatgatattggaaaaattgatgtacaagaaccagagcttgaagatttggctagatacgatgttggtgctattcgagcacataatggtagtcttcagcatcttacttggcttggcttacagtggaattcattgcctgctttacctggaatccgaaaatggctaaaacagcttttccatcgtttgccccatgaaacctcaaggcttgaaacaaatgcgcctgaatcaatatgtattttagatcttgaagtatttctccttggagtagtatataccagccacttacaattaaaggagaaatgtaattctcaccatagctcctatcagccgttatgcctgccctttcctgtgtgtaaacagctttgtacagaaagacaaaaatcttggtgggatgcggtttgtactctgattcacagaaaagcagtacctggaaacttggcaaaattgagacttctagttcagcatgaaataaacactctaagagcccaggaaaaacatggccttcaacctgctctgcttgtacattgggcaaaataccttcagaaaacgggcagcggtcttaattctttttatggtcaactagaatacatagggagaagtgttcattattggaagaaagttttgccattgttgaagataataaagaagaacagtattcctgaacctattgatcctctgtttaaacattttcatagtgtagacattcaggcatcagaaattgttgaatatgaagaagacgcacacataacttttgctatgttggatgcagtaaatggaaatatagaagatgctgtgactgcttttgaatctataaaaagtgttgtttcttattggaatcttgcactgatttttcacaggaaggcagaagacattgaaaatgatgccctttctcctgaagaacaagaagaatgcagaaattatctgacaaagaccagggactacctaataaagattatagatgacggtgattcaaatctttcagtggtcaagaaattgcctgtgcccctggagtctgtaaaacagatgcttaattcagtcatgcaggaactcgaagactatagtgaaggaggtcctctctataaaaatggttctttgcgaaatgcagattcagaaataaaacattctacaccgtctcctaccaaatattcactatcaccaagtaaaagttacaagtattctcccgaaacaccacctcgatggacagaagatcggaattctttactgaatatgatttgccaacaagtagaggccattaagaaagaaatgcaggagttgaaactaaatagcagtaagtcagcatcccgtcatcgttggcccacagagaattatggaccagactcggtgcctgatggatatcaggggtcacagacatttcatggggctccactaacagaagcagcacatcgtcattttacaattgagaaacatggagactccaaatggattatttacaggttcacaaaacagctttgtggcactgaaagggcgagagccaagatctcctga

SEQ ID NO: 46468 - DNA, 2399 bp, Homo Sapiens
catgctgcagaagcgggagaaggtgctgctgctgaggaccttccagggccgcacgctgcggatcgtgcgcgagcactacctgcggccctgcgtgccctgccacagcccgctctgcccgcagcccgccgcctgcagccacgatgggaaactcttgtctagtgatgtgactcattacgtgatcccagactggaaagttgttcaagattatcttgagatccttgagtttcctgagttgaagggaattattttcatgcagacagcttgtcaagctgtgcagcatcaaagaggcaggagacagtataacaaactgcgaaacctgctgaaggatgcgcgtcatgattgcattctctttgctaatgaattccagcaatgctgctatctgccacgggaaagaggagagtccatggagaagtggcagaccaggagcatatacaacgcagctgtttggtactatcatcactgccaggacaggatgccaattgttatggtgacagaagatgaagaggcaattcagcagtatggaagtgaaacagaaggagtattcgtgattactttcaagaattacctggacaatttctggcctgatttaaaagctgcccacgagctttgtgattctatccttcagtctcgacgggagagagagaatgagagtcaggagagccatgggaaggagtacccagaacatcttcccctggaagtgttagaagctgggattaaatctggacgctatatccagggaattctgaatgtcaacaaacacagagcccaaatagaagcttttgttcgacttcaaggagccagcagtaaagattcagatttagtcagtgacatcctaatccacgggatgaaggctcgaaaccgctcaattcatggagatgtggtagttgtggagctgcttcctaaaaatgaatggaaaggaagaaccgtagccctgtgtgagaatgactgtgacgacaaggcttcgggcgagtccccaagtgagcccatgcctacaggtcgagtggtgggcatacttcagaagaactggcgggattatgtggtgacatttccgtccaaagaagaggtccaatctcagggcaaaaatgctcagaaaatcctggttacaccttgggattacagaattcccaaaattcgaattagcactcagcaagcagaaaccctccaggacttcagggtggtcgtgcgcatcgattcctgggagtcaacatctgtgtatccaaatggacattttgtgcgtgttttaggaagaatcggagatctggaaggggaaattgcaaccatcctggtggaaaacagtatttcagttattcctttctcagaagctcagatgtgtgagatgccagtaaacacaccagaaagtccctggaaggtgagtcctgaagaggaacaaaaacgtaaagacttgaggaaaagccatctcgtattcagcattgaccccaaaggttgtgaagatgtggatgacacactctcagtcagaaccttaaataatggcaacctggaacttggggtccacatcgcagatgtaacacactttgtggcaccaaattcttacattgatattgaagctagaacaagggccaccacttattatctagcagatcgtcgctatgacatgctgccttccgtcctcagtgcagatttgtgttcccttctgggaggcgttgataggtatgctgtaagcatcatgtgggaactggataaagcctcttatgaaattaagaaagtgtggtatggcagaaccattattcgatcagcatacaaactgttctatgaagcagcccaagaactactggatggaaacttaagcgttgttgatgatattccagaattcaaagacttggatgagaagagcagacaagccaagctggaggagttggtgtgggcaattggaaagctgaccgacatagctcgccatgtcagagctaaacgagacggatgtggtgccctggaactggaaggggtagaggtttgcgtacagctagatgacaaaaagaacattcacgacctcatccccaagcagcccctggaagtccacgagacagtggctgaatgcatgatcctggccaaccactgggtcgccaaaaagatctgggagagcttccctcatcaggccttgctgcgccagcaccctcctccacaccaggagttcttttcagaactccgggaatgtgctaaagccaaaggcttcttcatagatacacggtattcctcttttgagggggcagaggaatggagtggcatgctgtatatttagttatcttacagttgttcttaaaatgtgacagccagatctttgaccaaaaagagaaaacagattcttggctctcctcatttttgaagacacatttttccctcttcattgttatgtatagagacttaaaacaagtttatttaggcat

SEQ ID NO: 46469 - DNA, 4014 bp, Homo Sapiens
aaccgccaacggctgtggcgtttaaacccaagccgcagccgctgctgctcgccgagctcccggagctgggtgggggtgccccacgctgaaagagagtgatggagtgcccagtgatggaaactggctcactttttacctcaggaattaagagacatttgaaagacaaaagaatttcaaagactactaagttgaatgtttctcttgcttcaaaaataaaaacaaaaatactaaataattcttctattttcaaaatatctttaaagcacaacaacagggcattagctcaggctcttagtagagaaaaagagaattctcgaagaattacaactgaaaagatgctattgcaaaaagaagtagagaaactgaattttgagaacacatttcttcgcctaaagctaaataacttgaataagaagcttatagacatagaagctctcatgaacaataacttgataactgcaattgaaatgagcagtctttctgagttccatcagagttcctttctactgtcagctagcaagaagaaacgaattagtaaacagtgcaagttgatgcgtcttccatttgcaagggttccattaacttcaaatgatgatgaagatgaagataaagagaaaatgcagtgtgacaacaatattaaatcaaagacattacctgatattccctcttcaggatcaacaacacaacctttatcaactcaggataattcggaagtgttatttcttaaagaaaataatcaaaatgtatatggtttagatgattcagaacatatttcttctatagttgatgtacctcccagagaaagccattcccactcagaccaaagttctaagacttctctaatgagtgagatgagaaacgcccagtctattggccgcagatgggagaaaccatctcctagtaatgtgactgaaaggaagaagcgtgggtcatcttgggaatcaaataatctttctgcagacactccctgtgcaacagttttagataaacaacacatttcaagtccagaattaaattgcaataatgagataaatggtcatactaatgaaacaaatactgaaatgcaaagaaataaacaggatcttcctggcttatcttctgagtctgccagagaacctaatgcagagtgcatgaatcaaattgaggataatgatgactttcaattgcagaaaactgtgtatgatgctgacatggatttaactgctagtgaagtcagcaaaattgtcacagtctcaacaggcattaaaaagaaaagtaataaaaaaacaaatgaacatggaatgaaaactttcagaaaagtgaaagattccagctctgaaaaaaagagagaaagatcaaagagacagtttaaaaatagttcagatgtcgatattggggaaaagattgaaaacaggacagaaagatctgatgtcctggatggcaaaaggggtgcagaagatcccggttttattttcaataatgaacagctggctcagatgaatgaacagctggctcaggtgaatgaactaaagaaaatgacccttcaaactggctttgaacaaggtgacagagaaaatgtactgtgtaataaaaaggagaaaagaataacaaatgagcaagaggaaacatactctttatcccaaagttcaggtaaatttcaccaggagagtaaatttgataagggtcagaattccctaacttgtaataaaagtaaagcttctagacagacatttgtgattcacaaattagaaaaagataacttactcccaaaccaaaaggataaagtaaccatttatgaaaacctagacgtcacaaatgaatttcacacagccaatctttccaccaaagataatggaaatttatgtgattatgggacccacaatatattggatttgaaaaagtatgtcactgatattcaaccctcagagcaaaatgaatcaaacattaataagcttagaaagaaagtaaaccggaagacagaaataatttctggaatgaaccacatgtatgaggataatgataaagatgtggtgcatggcctaaaaaaaggtaatttttttttcaaaacccaagaggataaagaacctatctctgaaaacatagaagtttccaaagagcttcaaatcccagctctttctactagagataatgaaaatcaatgtgactataggacccagaatgtgttgggtttgcaaaagcagatcaccaatatgtaccccgttcagcaaaatgaatcaaaagttaataagaagcttaggcagaaagtaaatcggaagacagaaataatttctgaagtgaatcatttagataatgacaaaagtatagaatacacagttaaaagtcactcactctttttaacgcaaaaagataaggaaatcatccctggaaacctagaagacccaagtgagtttgaaacacctgctctttctaccaaagatagtggaaacctgtatgattctgagattcaaaatgttttgggggtgaaacatggccatgatatgcaacctgcttgtcaaaatgattcaaaaataggtaagaagcctagactaaatgtatgtcaaaagtcagaaataattcctgaaaccaaccaaatatatgagaatgataacaaaggtgtacatgacctagaaaaagataacttcttctctctaaccccaaaggataaagaaacaatttctgaaaatctacaagtcacaaatgaatttcaaacagttgatcttctcatcaaagataatggaaatttatgtgattatgacacccagaatatattggagttgaaaaagtatgttactgataggaaatctgctgagcaaaatgaatcaaaaataaataagctcaggaataaagtgaattggaagacagaaataatttctgaaatgaaccagatatatgaggataatgataaagatgcacatgtccaagaaagctatacaaaagatcttgattttaaagtaaataaatctaaacaaaaacttgaatgccaagacattatcaataaacactatatggaagtcaacagtaatgaaaaggaaagttgtgatcaaattttagattcctacaaagtagttaaaaaacgtaagaaagaatcatcatgcaaggcaaagaacattttgacaaaagctaagaacaaacttgcttcacagttaacagaatcttcacagacatctatctccttagaatctgatttaaaacatattactagtgaagcagattctgatccaggaaacccagttgaactatgtaagactcagaagcaaagcactaccactttgaataaaaaagatctcccttttgtggaagaaataaaagaaggagagtgtcaggttaaaaaggtaaataaaatgacatctaagtcaaagaaaaggaagacctccatagatccttctccagagagccatgaagtaatggaaagaatacttgacagcgttcagggaaagtctactgtatctgaacaagctgataaggaaaacaatttggagaatgagaaaatggtcaaaaataagccagacttttacacaaaggcatttagatctttgtctgagatacattcacctaacatacaagattcttcctttgacagtgttcgtgaaggtttagtacctttgagcgtttcttctggtaaaaatgtgataataaaagaaaattttgccttggagtgctccccagcctttcaagtaagtgatgatgagcatgagaagatgaacaagatgaaatttaaagtcaaccggagaacccaaaaatcaggaataggtgatagaccattacaggacttgtcaaataccagttttgtttcaaataacactgctgaatctgaaaataagtcagaagatctatcttcagaacggacaagcagaagaagaaggtgtactcctttctattttaaagagccaagcctcagagaataacagtgttttatggacaggcacagtggctcacacctgtaatcccaatactttgggtggctgaggtgagaggatcacttgagcccaagagtcggagaccagcctgggcaacacagggagacgctcactctac

SEQ ID NO: 46470 - DNA, 1484 bp, Homo Sapiens
tgggcaaaaagatcaaaattctacagaagaatctgatggctaaatggctaatttgcaaaacacaatgccctgtacattttgaggacatcctaaaacatgtgtaaacttttcagaattcagtttaccaaagttatcaaacttaaaaatgattaaaatttatttgctactgcaaagaattcaaccaatttctccaatgactactccatattcattttgaaaaacagtaccggatttaaagcttacacaacaaaattcacaaaagtgttatatgtgcctatatgacatataggcacaaataactgcagacattctgaagctaacactgctcaaccaggaaaaaaaaaagactgcaattggatatgtaataacagctatttaagacggcagtaacgtgttaaaatggttcataaaaatcacatcataaggccctgaaattctagtaaaaatatctctaagtaaacttgtgaactactactaaataactaattttctctctctctgtagtcactcattttatctttggattactttcccattctatcaccacgttgctttctctgaacttcattttacatttgcatattatttattccattagcaattgctcatcccagtctgaatctcaaaattctactataggaggcatttggcattctgtggaataagagaattttgagatggaaatgatcaaccagctcaaaacctcgtaagctagagttcagttaagcttagcacaatgatgaaaacaatttctcattaaaacttctttcattccctctacagaagcagtaaccctgggtacagttaaaactgcctgggtctttaagctttgtcacctcggacaagtcattatacctaacctcccagggcctcagcttccagagtagttaaatggaaaaacaatagcatctatctcaggttattagattatgaaatgagttaacacacgcaaacaggctgaaagagtccctggtgcgcagtgcaggtattagtcatttagaggtatagttactattacaggaaggtagtaacttagaaagacttacctttaaggtccaacaacctaatctacatatttgtatatttctaaggtaagagaatttttaaaagtctattttcaccccgtaaacctaatgcaggaggataaggcacgggttactacaggaaaaagtaatgcagactgggggatgcgaaccaaagcacagacgaatgtgccccgacgattcctccgagaacataatgaaatggcggaccttcctgccagaggagcgcacagtcacccaggcaggtgatgtgacacacacgttagggtctaaaggtcccaaggctggagtcccctttactggaccctaaacatgtctgcctcctgccccgcaatcagacttagagaactgtggacggtggaaagtcttatcatgaccaggccatccttcgctggggtgaacggaaagcattcagaaggggaaaattgaaaacaacaaaga

SEQ ID NO: 46471 - DNA, 264 bp, Homo Sapiens
atgagaagtccaggatacatgttcacctcggtggccacaagactcttccctgagcacaagtgggaggcccagcctccatctcactgcccttcttactcatctctactgcaagactcattcctactgttcaaaaggtctgaattcggccaggcgtggtggctcacagctgtaatcccagcactttgggaggccaaggcgggtggatcacgaggtcaggagatcaagaccatcctggccaacatggtaaaaccccatctctactaa

SEQ ID NO: 46472 - DNA, 489 bp, Homo Sapiens
gtaggtctaaagggactaatccactccaccaccccaatctccttaagcttttggatcccttcctctacatcaaaccaagggagatcaggcatttccaggttgctcacagtgggccaccttttaatccatatttcaggtaaccaagcaaataaactattagaacctttcttaactccccgagctgcaacattaaaagcagagtcccggccaggcatggcagctcacgcctgtaatcccagcactttgggtcgccgaggtgggcggatcacaagatcaggacttcgagaccagcctgaccaacatgatgagaccctgtctcttctaaaaatacaaaaattagcccggcctggtggcacacgtctggaatcccagctacttaggaggctaaggcaggagaatctcttgaacccaggaggcggagcctcccgagtagctgggactacaggcacccaccaccacacccagcaaattttttgtattttttttaat

SEQ ID NO: 46473 - DNA, 354 bp, Homo Sapiens
gacgggtgtgtgtctaaacttatggtctgcaacttggcctacagagggaagctggaggaggtgaaggagaggattctggccaataaacccctggctatgagaactgaccaggacagaaattggtctcctcttcagactgctgtttgtgctggccagaatgagactgtaaaagcccttctgggaaaaggtgctcaagtgaatgctgtcaatcaaaatggctctactcccctacatcatgcagcttccaaaaacaggcatgagattgctctcatgttactagaaggtggggctaatccagatggtaaggatcattatgaggctacagcaaagcaccaggccacagccaagggtaac

SEQ ID NO: 46474 - DNA, 906 bp, Homo Sapiens
agcgtgggccaaggcgtcagcagaccctgggcggcggctgtggaggaggccagcgtggagtacggctcggcccggtacctgctgctgtgcggcctgggcgggatgctgagctgcggcacacacacggccatcgtgtccctgcacctggtcaagtgccgcatgcaggtggaccccggctggtacaagggcgtcctcagcggcttcggcgtgacggtgcacagcgacgggctgtgcggcctggctcgcggctgcgctcagaccttcttcggctactccctgcagggcttcttcaagttcggcctttacgaggtcttcaagatccgctccgcggagctcctgggcccagagaaagcctacgggtggagagccggcctgtaccttttcgcctgggccagcgccgagttcttccccgatgtctcgctggagcccatggaggcggtcaaggtccgcgtgcagacgcgaccgggctacgccagcgcgagccacggcgtccaggatgtagggcgagagggcctgtgggccttctacaagggcgtggcgccgctgtggctgaggcagatcccctacaccatgatgaagttcgcctgcttcgagcgcacggtagaggacctctacaggtatgccgtgcccaagccccagagccagtgcaccaaggccaagcagctgggcatcaccttcggcgtcttctgcgctgtcgtgtcccatcccgccgactccgtggtgtctgtgctgaacaaggagaagggcatcgcggccctgggcgtcctccgaagactggggttcacgggcgtgtggaagggcgtcgttgcgcgcatcggcctctttgcgcacatccccatgatcggcaccctcacggccctgcagtggtttatctatgacctggtcaaggtctatttcaagctgcct

SEQ ID NO: 46475 - DNA, 480 bp, Homo Sapiens
atgaaggcctggggcactgtggtagtgaccttggccacgctgatggttgtcactgtggatgccaagatctatgaacgctgcgagctggcggcaagactggagagagcagggctgaacggctacaagggctacggcgttggagactggctgtgcatggctcattatgagagtggctttgacaccgccttcgtggaccacaatcctgatggcagcagtgaatatggcattttccaactgaattctgcctggtggtgtgacaatggcattacacccaccaagaacctctgccacatggattgtcatgacctgctcaatcgccatattctggatgacatcaggtgtgccaagcagattgtgtcctcacagaatgggctttctgcctggacttcttggaggctacactgttctggccatgatttatctgaatggctcaaggggtgtgatatgcatgtgaaaattgatccaaaaattcatccatga

SEQ ID NO: 46476 - DNA, 742 bp, Homo Sapiens
ggcgcggggctgaaggctagcaaaccgagcgatcatgtcgcacaaacaaatttactattcggacaaatacgacgacgaggagtttgagtatcgacatgtcatgctgcccaaggacatagccaagctggtccctaaaacccatctgatgtctgaatctgaatggaggaatcttggcgttcagcagagtcagggatgggtccattatatgatccatgaaccagaacctcacatcttgctgttccggcgcccactacccaagaaaccaaagaaatgaagctggcaagctacttttcagcctcaagctttacacagctgtccttacttcctaacatctttctgataacattattatgttgccttcttgtttctcactttgatatttaaaagatgttcaatacactgtttgaatgtgctggtaactgctttgcttcttgagtagagccaccaccaccatagcccagccagatgagtgctctgtggacccacagcctaagctgagtgtgaccccagaagccacgatgtgctctgtatccagaacacacttggcagatggaggaagcatctgagtttgagaccatggctgttacagggatcatgtaaacttgctgtttttgttttttcctgccgggtgttgtatgtgtggtgacttgcggatttatgtttcagtgtactggaaactttccattttattcaagaaatctgttcatgttaaaagccttgattaaagaggaagtttttataa

SEQ ID NO: 46477 - DNA, 3634 bp, Homo Sapiens
tttttttcagagaaactgtaatccagttattaattggatagctgaatgaggatgagaggattatagctttcatcttgtggcttatcaaaaccagtatctgcatcttgcccgctttttaaattttaattagaattgacagcagaagtcaaatcctttaggcaatatgaaaatagtatatcatacattcaagttaatgcattttaaaatttattattgaggtagtctttatcccagtgatagacaggggcttggagatcatctacaacactactgagaactctttaacaccacgttaggcatacccatctaccacaatgaaaacattgaagtgatattcgcattttgcttttatctcctggaatttcataacatatgaggagcatgtggtcatatgagatcaaggaagataaatgctaatctgcatttttcttaaatgggcaaaataagtcacttttcttttcttttctttttttttttttttttttttttgagacggagtctcactctgtttcccaggctggagtgcagtggcacaatcttgcctcactgcaacctccgacccccctggttcaagtgattctcctgcctcagcctcccaagtagctggaattacaggtgcccaccaccatgcccggctaatttttgtatttttagtagaaacggggtttcaccacgttggccaggctggtctcgaactcctggcctcaagtgatccacttgcctcagcctcccaaagtgctgggattgcaggcgtgagccaccgagcctgaccaagtcacttttctaatgtattctacatctaaatatgttctacagtctcttgttgctgtctttgcagagttcaagtttatatttccactgaagctaatgactaatacaatgctttagaatttgtggggttctgatcttttcttgtttagaactattttcaaataaacacatttctttttatttcttttttaaatgtgcaaaatcacaactgatgtttgcctctgtatcttctattgaagttcagtattctctatttggtatttttcatgacttagaaaatgtaattatttccatgtcacaaaaataaaactatttataattatgataacctttacaagtgatttttcccaaaggataattgactttaatatttaaaatataagtttggcatatacctctaattgtgtgtggagacaaactcatttcttcttctatttacaggtacataaatgcatatgatactctgatctcattataggattaataaccttctttcatttagagtatttttattgtctccatatctagcatctaaactaaaattttatggttttctatagaagcagctcaattcttgtttatacagtgtaaaacttagcagctatcagtgcgtttatcatccatgaagctcatttcacatctcatctattatatgaataaaatgtgaagataattatgtttttctaaaatgacattgttaggactgatccccccagtcaaattaaattccactatttcaagtaagtttacagattatttttatcttactattgattcttgaacagaaataccaataaattagtgaagaaagaccatatatctaacggtagctcccaaaacacagaccgtgacctccaagctacaagtgaaaatatcagtaatgggaactaaaaggaaatggaatgaaactcctttagccttttctgtttggtaaggaagggtccacattctgtgaggcctgaaactgatataatttgaggtagaggttttctaagaaaaaaatatataactacaaactcataatgaggttccaaagtaagtatttagaatcaacaattactagagctttggagatagagattaatttcatccaagatatttcaaggttatttatcagagttgcttccaatgttgtttaccctatttacctagaaccttccacaatttccagaaactccctgcgctctcagcagttagataggagggctccatagtttaagcatcattagcttcagggtaaatctgcacttgcctgttctgatgatgattatctgtgtctctgcctgctgtgtttctaaacctgcttcctctgctgttctgggctaccacccaaaatgggggcccgcttgattagctttattttttttgactgtctctatcttttccattaaaaaaaaaggctttttgcaataatatgacatacttaaacctgtttgtttatggcaggtgagaatatctgtttaaatataattcttaagaaatttttctcctcttgtgagtacagataaatatgaggatgtactctttatactttgggaaaagagtatttgcagttgacaacctgatctacctgaatggtcagaggtaaaactgttaccctaaggataaacagagttcaggcactcaaactgggtctaagttttctaaagaggccatttttttaatgaagcatcataagcaaaaatgatttcatcaatgtttctgtgagatccaatgcccatagacccagagcattgtgaccagccttcaacgtgggggacgggaattccaaggatgatctcattatactgcatttcactgatttcaaactggtcacacatgtgcaggtagctgagccaatttacatttaaaagattttcactacagctcttcggtactagctagtgcatgagcacaatcgtgtaaacacaatttatgttttcctaatcttttccagaattattattcaaatgctgactaacctattgttattaaggcttcagccaactatgaagagttagttgataataatctaatatataaatctttctccatttttccatagactcttgagtcaaagattttagactctaaaggtataaactgctaatgatataatgaaacatagataaaactatatacaaatgtcccaaataaaagtaaatggcaatttgtaggcaggagcacagggggtgaggtcaatccattctttggagttgtatagataatacaacagttgaacattatattacaatcacaaatgggttaaatttggcttttgtaatgcaaggttttgagagatctaagaattggagcattttttaaaatatgggaaagaaaatatataaacaccaaatcaaggcattttgcattgtactactcatcttttgaattaaaagactcaaaaatagtataattttgcctgctactgttttcctacataaattcaattataaaatgaaacattttcaactcattaatctttctagcaataaactattctatagataaaatctaaagttgatattaagaactgttggggatatggggaataaaagagaaggactattacatttgttgaaacaagtttgttctgggcattgtgctaagaattgtaagttattccatttgatctaatgagtaatagaaacaagcaaatcaaagtggaaatgagaatttcaagttggtgtaattagtgttatgaaagatgtttcacagactaatgtgggaacatatttttttttgaaattgcagtccataaaagcttcttgtgcccaggcatggtggctcatgcctgaaatcccaagactttggaaggccaaggcaagataatcacttgagcacaggagttcaagaccagcctgggtaacatagtgagaccctg

SEQ ID NO: 46478 - DNA, 972 bp, Homo Sapiens
atggcctatgtccccgcaccgggctaccagcccacctacaacccgacgctgccttactaccagcccatcccgggcgggctcaacgtgggaatgtctgtttacatccaaggagtggccagcgagcacatgaagcggttcttcgtgaactttgtggttgggcaggatccgggctcagacgtcgccttccacttcaatccgcggtttgacggctgggacaaggtggtcttcaacacgttgcagggcgggaagtggggcagcgaggagaggaagaggagcatgcccttcaaaaagggtgccgcctttgagctggtcttcatagtcctggctgagcactacaaggtggtggtaaatggaaatcccttctatgagtacgggcaccggcttcccctacagatggtcacccacctgcaagtggatggggatctgcaacttcaatcaatcaacttcatcggaggccagcccctccggccccagggacccccgatgatgccaccttaccctggtcccggacattgccatcaacagctgaacagcctgcccaccatggaaggacccccaaccttcaacccgcctgtgccatatttcgggaggctgcaaggagggctcacagctcgaagaaccatcatcatcaagggctatgtgcctcccacaggcaagagctttgctatcaacttcaaggtgggctcctcaggggacatagctctgcacattaatccccgcatgggcaacggtaccgtggtccggaacagccttctgaatggctcgtggggatccgaggagaagaagatcacccacaacccatttggtcccggacagttctttgatctgtccattcgctgtggcttggatcgcttcaaggtttacgccaatggccagcacctctttgactttgcccatcgcctctcggccttccagagggtggacacattggaaatccagggtgatgtcaccttgtcctatgtccagatctaa

SEQ ID NO: 46479 - DNA, 960 bp, Homo Sapiens
atggaaccaggaaatgatacacaaatttcagaatttcttcttctgggattttcacaagaacctggactgcaacccttcctctttgggctgttcctgtccatgtacctggtcactgtgctcgggaacctgctcatcatcctggccacaatctcagactcccacctccacacccccatgtacttcttcctctccaacctgtcctttgctgacatttgtgttacttccaccaccattccaaaaatgctgatgaacatccagacacagaacaaagtcatcacctacatagcctgcctcatgcagatgtattttttcatactctttgctggatttgaaaacttcctcctgtccgtgatggcctatgaccggtttgtggccatctgtcaccccctgcactacatggtcattatgaaccctcacctctgtggactgctggttctagcatcctggaccatgagtgctctgtattccttgctacaaatcttaatggtagtacggctgtccttctgcacagccttagaaatcccccactttttctgtgaacttaatcaggtcatccaacttgcttgttctgatagctttcttaatcacatggtgatatattttacagttgcgctgctgggtggaggtcccctgactgggatcctttactcttactctaagataatttcttccatacatgcaatctcatcagctcaggggaagtacaaggcattttccacctgtgcatctcacctctcagttgtctccttattttatggtgcaatcctaggggtgtaccttagttctgctgccacccgcaactcacactcaagtgcaacagcctcagtgatgtacactgtggtcacccccatgctgaacccctttatctatagtctgaggaataaagacataaagagggctctgggaatacatttgttgtggggaacaatgaaagggcaatttttcaagaagtgcccatga

SEQ ID NO: 46480 - DNA, 1229 bp, Homo Sapiens
atgggctttgatgtgctcctggatcaagtgggtggcatggggagattccagatttgtctgatagctttcttttgcatcaccaacatcctactgttccctaatattgtgttggagaacttcactgcattcacccctagtcatcgctgctgggtccccctcctggacaatgacactgtgtctgacaatgataccgggaccctcagcaaggatgacctcctgagaatctccatcccactggactcaaacctgaggccacagaagtgtcagcgctttatccatccccagtggcagctccttcacctgaacgggaccttccccaacacaaatgagccagacacggagccctgtgtggatggctgggtgtacgacagaagctctttcctctccaccatcgtgactgagtgggacctggtatgtgaatctcagtcactaaaatcaatggttcaatccctatttatggctgggtcacttctgggaggtctaatatatggccatctttcagacagggttggacggaagatcatatgcaaattgtgtttcctccagctggccatctctaacacctgtgcggccttcgctcccaccttccttgtttactgcatactgcgcttcttggcagggttctccaccatgactattttgggaaacacttttattctcagcttagagtggacattgccccggtcacgatctatgacaataatggtgctattatgttcctacagtgttgggcagatgctcctaggagggctggcttttgccattcaggactggcacatattgcaactgactgtgtctacacccataattgtcctcttcttgtcctcttggtatgaacaatctccacattctttgcctgtaagcgaggctatggtagacatagaaaggaaaattctgacacctgggatctgttcggtctctggcctagtcctgagccatgatgtccatagtacctattgtgtcacctgagaagcaaacaatggaataggatgacactatatgtggggaggctggcactttgcattcattattttagacatggaattatcatgaaattatttttcttaatagaaaaaatacccacttatttttgaagcaaatgtattatttatctaacttttggaatattatgtgatggagataatttgggggcttttgtcattgtaactgagattgaatataaggaaaacacaataaatttatctacataactatttaaaattagaaga

SEQ ID NO: 46481 - DNA, 1537 bp, Homo Sapiens
gcgggagcgggcgacgcggggaaggggggagccagggggagggcgccggccggaggaggggcggacccgcccgccctagccgagcagagcacagccgagccgagcggcccgggcgggggccgaccccggccagcgtcggcgcagagagcgggcggaggcgcaggccatgctgcggctggtgcccaccggggcccgggccatcgtggacatgtcgtacgcccgccacttcctggacttccagggctccgccattccccaagccatgcagaagctggtggtgacccggctgagccccaacttccgcgaggccgtcaccctgagccgggactgcccggtgccgctccccggggacggagacctcctcgtccggaaccgatttgttggtgttaacgcatctgacatcaactattcagcaggccgctatgacccctcagttaagcctccctttgacataggtttcgaaggcattggggaggtggtggccctaggcctctctgctagtgccagatacacagttggccaagctgtggcttacatggcacctggttcttttgctgagtacacagttgtgcctgccagcattgcaactccagtgccctcagtgaaacccgagtatcttaccctgctggtaagtggcaccaccgcatacatcagcctgaaagagctcggaggactgtcggaagggaaaaaagttttggtgacagcagcagctgggggaacgggccagtttgccatgcagctttcaaagaaggcaaagtgccatgtaattggaacctgctcttctgatgaaaagtctgcttttctgaaatctcttggctgtgatcgtcctatcaactataaaactgaacccgtaggtaccgtccttaagcaggagtaccctgaaggtgtcgatgtggtctatgaatctgttgggggagccatgtttgacttggctgtagacgccctggctacgaaagggcgcttgatagtaatagggtttatctctggctaccaaactcctactggcctttcgcctgtgaaagcaggaacattgccagccaaactgctcaagaaatctgccagcgtacagggcttcttcctgaaccattacctttctaagtatcaagcagccatgagccacttgctcgagatgtgtgtgagcggagacctggtttgtgaggtggaccttggagatctgtctccagagggcaggtttactggcctggagtccatattccgtgctgtcaattatatgtacatgggaaaaaacactggaaaaattgtagttgaattacctcactctgtcaacagtaagctgtaaaaacagaacaatgacataaatcaagggagaaagaaaatgggcactttatgtctcagaattactcaaatcaatttatttttagttggtaatggatataatatttcttaaaacaaaagtaaggtgttaatgaataggtctctccttctcctcctcctcctcctcttcccttgggggaaaaaaaaaaatgtgctaataaaacttccctccatggctaagagggaaaacgcttacattcaa

SEQ ID NO: 46482 - DNA, 1905 bp, Homo Sapiens
cactgtgctctgcgagccgaatcatggatcacactgacaatgagttacaaggcactaatagttctggatccttgggtggtcttgatgttcgcagacgaattcctataaagctcatctccaaacaagcaaacaaagcgaaacctgcaccgcgaactcaaagaactataaacaggatgcctgcaaaggctccacctggtgatgaagaaggatttgattataatgaagaagaacggtatgactgtaaagggggtgagctgtttgcaaatcagcgaagatttcctggacaccttttttgggactttcagataaacatcttaggtgaaaaggatgatacaccagttcatttctgtgacaagtgtggattgcctattaaaatctatgggagaatgattccatgcaagcatgttttttgctatgactgtgctattttacatgaaaaaaagggagataagatgtgtccaggctgtagtgatcctgtgcagcgaattgagcagtgtacacgaggttctctcttcatgtgtagcattgttcaagggtgcaagagaacatatttgtctcagagagacttacaggctcatatcaaccatcgccatatgagagctggaaaacctgttacccgtgcttcacttgaaaatgttcatcctcctattgccccaccaccaactgaaatccctgagcgttttataatgccaccagacaagcaccatatgagccatattccgccaaagcagcacatcatgatgccaccacctcctttgcaacatgtgccacatgagcactataatcagccacatgaggatattcgtgctcctccagcagaattgtccatggctccacctccacctcgatcggtcagtcaggaaacctttcgtatttcaacaagaaaacacagcaatttaataaccgtccctattcaggatgactcaaattcaggtgctagagaaccaccacctcctgccccagcacctgctcaccatcatcctgaatatcagggtcaaccagtggtatcgcaccctcatcatattatgcctccacagcaacattatgcaccacccccacctcctccaccaccaataagccatccaatgccacatcctccccaggctgcaggtactcctcacttggtatatagccaagctccacctccaccaatgacctctgctccaccaccaataacccctccccctggacatattattgcccagatgccaccttatatgaatcatcctcctccaggacctcccccacctcaacatggtggtccacctgtaactgcaccccctcctcaccattataatcctaactcattaccccagttcactgaagatcaaggaactctgagccctccatttacacaaccagggggaatgagtcctggtatatggcctgcaccaagagggccaccaccacctccacgattgcagggtccgccttctcaaaccccacttcctggaccacatcatccagatcagacaagatatagaccgtattaccaatgataatagtattttgaatggaagatatgagggggaaaaaaacttatgtgtagtcaatcttttaagctttgactgttttgggaaggaagagtacctcttatcgaggtagtataaaacacatagggtcttgtttcttaaaatggttttaaatcttgaccttaagattgatttcaagtaccatactgtagtacagataagtggctcagttgagcacagctatattttaacatctctttgttcccctagtttagtaaattgacccagaggtgaccatttgtaaaaaatttgaaaaaatttttcattgttttacttcaaaagtattgttttgttaaacccaacgtttagtttttcttgtgatacattttgttaacctgtgtaaaaggattaaatttcaatatggttgtaaaaa

SEQ ID NO: 46483 - DNA, 579 bp, Homo Sapiens
cgctgcgtgccggaccatggcgcaggggcagcgcaagtttcaggcgcacaaacccgcaaagagtaagacggcagcggcagcctctgaaaagaatcggggcccaagaaaaggcggtcgtgttatcgctcccaagaaggcgcgcgtcgtgcagcagcaaaagctcaagaagaacctagaagtcggaatccggaagaagatcgaacatgacgtggtgatgaaagccagcagcagcctgcccaagaagctggcactgctgaaggccccagccaagaagaaaggggcagctgccgccacctcctccaagacaccttcctgaggacgctggccccagtgcaggccaacatcccaccccctacctccatatgggaccttgcaagtcatcccacaggctgcactgtcaggaagaggaccctgtcccccagcactgggcttcacctagaacttcagtgggggccaagggtgctgagaacccagcaatgaccaggaagatacagtcactaacttcatctgtccccgtgccccttcccaggtcctgcctccacaggtttaacccagaacaataaacctggctttgtcatc

SEQ ID NO: 46484 - DNA, 378 bp, Homo Sapiens
atgctggagcttgcttcaaagggcactaccatttccgaaaagggctttaagaaggcagttgctaaaactaaggaggacaaaaagcgcaagagatgccgcaaagagagctattctatttacatctacaagctgctgaagcaggtccacgcggacactggaatctcttccaaggccatgagtatcatgaattcttttgttagtgacatttttgagcgcattgcctgtgaggcttcccgcctggcgcattatgacaagcgctcgaccatcacctccagggagatccagacggccgtgcgcctgctgctgcctggggaactagccaagcacgttgtgtcggagggcaccaaggctgtcaccaagtacactagctccaagtaa

SEQ ID NO: 46485 - DNA, 1232 bp, Homo Sapiens
agtgttcggctgggacaggcacgctgtggctggctacttcccttccttccatcccccttgggccaaacaggatcggtgcttctggaaacaatgaccgataaaacagagaaggtggctgtagatcctgaaactgtgtttaaacgtcccagggaatgtgacagtccttcgtatcagaaaaggcagaggatggccctgttggcaaggaaacaaggagcaggagacagccttattgcaggctctgccatgtccaaagcaaagaagcttatgacaggacatgctattccacccagccaattggattctcagattgatgacttcactggtttcagcaaagataggatgatgcagaaacctggtagcaatgcacctgtgggaggaaacgttaccagcagtttctctggagatgacctagaatgcagagaaacagcctcctctcccaaaagccaacaagaaattaatgctgatataaaacgtaaattagtgaaggaactccgatgcgttggacaaaaatatgaaaaaatcttcgaaatgcttgaaggagtgcaaggacctactgcagtcaggaaacgattttttgaatccatcatcaaggaagcagcaagatgtatgagacgagactttgttaagcaccttaagaagaaactgaaacgtatgatttgagaatacttgtccctggaggattatcacaccccaaatgcataatctcgttaatgattgaggagagaaaaggatcagattgctgttttctacaatggagcaggatattgctgaagtctcctggcatatgttaccgaatcaactggccttccagaggctaagaaatttctgttagtaaaagatgttctttttcccaaagcgttttatttgaaaggataacttgtgttttggttattttgtattcccacctgtgctggtagatattattaacccattaggtaaatactattacagtcgtggtttctgcagcagctcacactgatgtagctggcgtttataactaccttctttcgctacccgtttcgcattccctttgccctgagatagcatgtcagttggtcatgatgcttggcctggcaggatgactcaaaccttcattacggaagagtctgaaccattagatatcctgcctggatggggttgctgtgattttccattaactctaatcgaaaaacacaggaggactaagaagctctctagacatatcacacatactcttccttagcccctcgtgt

SEQ ID NO: 46486 - DNA, 2235 bp, Homo Sapiens
atgtctcagtggaatcaagtccaacagttagaaatcaagtttttggagcaggtggatcaattctatgatgacaactttcccatggaaattcggcatctgttggcccaatggattgaaaatcaagactgggaggcagcttctaacaatgaaaccatggcaacgattcttcttcaaaacttgttaatacaactggatgaacagttaggtcgtgtttccaaagagaaaaacctactcttgatacacaatctaaaaagaattaggaaggtccttcagggaaaatttcatggaaatccaatgcatgtagctgtggttatttcaaactgtttaagggaagagaggagaatattggctgcagccaacatgcctgtccaggggcctctagagaaatccttacaaagttcttcagtttcagaaagacagaggaatgtggagcacaaagtggctgccattaaaaacagtgtgcagatgacagaacaagataccaaatacttagaagatctgcaagacgaatttgactacaggtataaaacaattcagacaatggatcagagtgacaagaatagtgccatggtgaatcaggaagttttgacactgcaggaaatgcttaacagcctcgatttcaagagaaaggaggctctcagtaaaatgacccaaatcatccatgagacagacctgttaatgaacaccatgctcatagaagagctgcaagactggaagcggcggcagcaaatcgcctgcatcgggggtccactccacaatgggctcgaccagcttcagaactgctttacactattggcagaaagtcttttccaactgagaaggcaattggagaaactagaggagcaatctaccaaaatgacatatgaaggtgatcccattccaatgcaaagaactcacatgctagaaagagtcaccttcttgatctacaaccttttcaagaactcatttgtggttgagcgacagccatgtatgccaacccaccctcagaggccgttggtacttaaaaccctaattcagttcactgtaaaactaaggctactaataaaattgccagaactaaactatcaggtaaaggttaaggcatcaattgacaagaatgtttcaactctaagcaaccgaagatttgtactttgtggaactaatgtcaaagccatgtctattgaagaatcttccaatgggagtctctcagtagaatttcgacatttgcaaccaaaggaaatgaagtccagtgctggaggtaaaggaaatgagggctgtcacatggtgactgaagaacttcattccataacgtttgaaacacagatctgcctctatggcctgaccatagatttggagaccagctcattgcctgtggtgatgatttccaatgtcagtcagttacctaatgcttgggcatccatcatttggtacaacgtgtcaaccaacgattcccagaacttggttttctttaataatcctccacctgccacattgagtcaactactggaggtgatgagctggcagttttcatcgtacgttggtcgtggtcttaactcagatcaactccatatgctggcagagaagcttacagtccaatctagctacagtgatggtcacctcacctgggccaagttctgcaaggaacatttacctggtaaatcatttaccttttggacatggcttgaagcaatattggatctaattaagaaacacattcttcccctttggattgatgggtatgtcatgggctttgttagcaaagagaaggaacggctgttgctaaaggataaaatgcctggcacctttttattaagattcagtgaaagccatctcggaggaataactttcacctgggtggaccattctgaaagtggggaagtgagattccactctgtagaaccctacaataaaggccggttgtctgctctgccattcgctgacatcctgcgagactacaaagttattatggctgaaaacattcctgaaaaccctctgaagtacctatatcctgacattcccaaagacaaagccttcggtaaacactacagctctcagccttgcgaagtttcaagaccaacagaaaggggtgacaaaggttatgttccttctgtttttatccccatctcaacaatccgaagtgattcaacagagccacattctccatcagaccttcttcccatgtctccaagtgtgtatgcggtgttgagagaaaacctgagtcccacaacaattgaaactgcagtatgttccctttat

SEQ ID NO: 46487 - DNA, 1765 bp, Homo Sapiens
gggcgagacgcgcaaaagagagaatgatggctctgggatctgaaatctttccttccgcaggaactggacacggcagtgaggaccagcgtatccaagaggatggacttagtgatggggaacacccagggacatgcccgagagcctcaagaaacaccttcagatgacattgcccagcgtcttacattagagaactctccagacagcccccgaggcctggggccgggtgctgctcccagactgtgagctcgtggccacgggaagcctgagtgcggcagaggccccacagctgcgccaagtgcggcaaagcctcccgtacagttactccctgagcggtcatctccgaagccctgctcatgagaagcctcccctttgccctgactgtggaaagcgtttcagccagagctcctacctgctgcagcaccggcagattcacccagggccgtcagccctgcaagtgcaaggcctgcgggaggggttttactcagagcgcatccctcctccagcactggcgggtccacagcgactggcgagagaccttgtcgctgtccccagtgcggcaagacctgctgtggccgctccaacctcatcaagcaccagcgagtccactcgggagaagccattcgtctgcgggagtgcggcaagggtttagcggccagctctgctgctggctcaccaaggagcacacactggccgaagccctgcgtctgtccccagtaccagcaggtttttggggaccggtggaagctgatcggccaccagcgaattcacacaggagagtgtgtcccttctgctgctgcagctgcggtgacagtgtcaatgagaagacctccctctcccagcgcgtccttccgcacccaggggagaagacctgcaggggtgggagcgtggagagcgtcagcctcgcacccagctcagtcgccccggacagcacctctgggctccggccctgtgggagccccgggtccttccttcaacatctgcccccatccacactcctgccccgacctcccttcctttatcctggccccccactcagtctccagcctctggttccatccggccttcccgcagtgcctgcagtgcctctgggaggcctggaagttgcccaggttccgccagccacccagccggcagctcagcaggagggggcgatggggcccagaagctgtgcgagcgcgggacgggactcgcgggaggcggttcaggccccaggctaccctgagccagcccggaaggcctcgcagcacagagcggccggaccgctcggcgaggccagggccaggcttcagcgacagtgccgagctcctccaccgccctcgaacccacactggagaggagccctaccagtgtttccggtgtggaaggcctccagccggaggtccaacctggcccgacactgaagaaccagcgtgctgcagccctgggtggaattgttgcagccgccggtggactgtggatctgagatgcagtcccctccctccacacagacccgctcaggacggcttttctgtatggcagatctttctcagaagtgctgggggctattttgtttgttttttttcccctgaattctcgctcctttcccttatacattaagggatttaggcaggtgcggctgcgggcggtgactcacacctgtaatcccagcgctttaagagaccgaggtgggaggatcgcgtgagcccgaagaatttgagactagcctgggcagcctagcgagaccgcatctctgtgaaataaaaataaaacgagctggtgtggtggc

SEQ ID NO: 46488 - DNA, 805 bp, Homo Sapiens
gtctctcccgaccatggagggggtcgcggtggtgacggcgggcagcgtaggcgctgccaaaaccgagggagctgcagccttgccgcctccgcctcctgtctccccgcccgccctcacccctgcacccgcagcgggtgaggagggaccggcgcctctgtctgagacgggggctcccggctgctccggctcccggccccctgagctggagccggagcgcagcctgggccgcttcagaggccgcttcgaggacgaggacgaggagttggaagaagaagaggagctggaggaggaagaagaggaggaggaggaggacatgagtcacttctcgttgaggctggagggaggccggcaggactcggaggacgaggaggagcgcctgattaatctctctgagctgaccccatacatcttgtgttccatttgcaaaggttacttaatagatgcaactaccatcacagaatgtcttcataccttttgtaaaagctgcatcgtaagacatttttactacagcaacagatgtccaaaatgcaatatagtagtacatcagacacaacctctttataacataagtgctaatgaaggcacgggacattttaagccattggaaaagaagtttgttcgagtttcaggagaagcaactattggacatgtagaaaaattcctcagaagaaaaatgggtcttgatccagcttgtcaggtagatataatctgtggtgatcacctgttggagcagtatcaaactctaagggaaatccgacgtgcaataggtgatgcagcaatgcaggtaggttatagacatacccat

SEQ ID NO: 46489 - DNA, 1057 bp, Homo Sapiens
atgtgtccttggcggcctagactaggccgtcgctgtatggtgagccccagggaggcggatctgggcccccagaaggacacccgcctggatttgccccgtccggcccgggcccctcgggagcagaacagccttggtgaggtggacaggaggggacctcgcgagcagacgcgcgcgccagcgacagcagccccgccccggcctctcgggagccggggggcagaggctgcggagccccaggagggtctatcagccacagtctctgcatgtttccaagagcaacaggaaatgaacacattgcaggggccagtgtcattcaaagatgtggctgtggatttcacccaggaggagtggcggcaactggaccctgatgagaagatagcatacggggatgtgatgttggagaactacagccatctagtttctgtggggtatgattatcaccaagccaaacatcatcatggagtggaggtgaaggaagtggagcagggagaggagccgtggataatggaaggtgaatttccatgtcaacatagtccagaacctgctaaggccatcaaacctattgatcggaagtcagtccatcagatttgctctgggccagtggtactgagtctaagcactgcagtgaaggagttagtagaaaacagtctggatgctggtgccactaatattgatctaaagcttaaggactatggagtggatctcattgaagtttcagacaatggatgtggggtagaagaagaaaactttgaaggcttaatctctttcagctctgaaacatcacacatgtaagattcaagagtttgccgacctaactgaagttgaaactttcggttttcagggggaagctctgagctcactgtgtgcactgagcgatgtcaccatttctacctgccacgcgtcggtgaaggttgggactcgactggtgtttgatcacgatgggaaaatcatccaggaaaccccctacccccaccccagagggaccacagtcagcgtgaagcagttattttctacgctacctgtgcgccataaggaatttcaaaggaatattaagaag

SEQ ID NO: 46490 - DNA, 446 bp, Homo Sapiens
ctctcggccttagcgccatttttttggaaacctcggcgccatgagagccaagtggaggaagaagcgaatgcgcaggctgaagcgcaaaagaagaaagatgaggcagaggtccaagtaaaccgctagcttgttgcaccgtggaggccacaggagcagaaacatggaatgccagacgctggggatgctggtacaagttgtgggactgcatgctactgtctagagcttgtctcaatggatctagaacttcatcgccctctgatcgccgatcacctctgagacccaccttgctcaaaaacaaaatgcccatgttggtcctctgccctggacctgtgacattctggactatttctgtgtttatttgtggccgagtgtaacaaccatataataaatcacctcttccgctgttttagctgaggaattaaatcaaaaaaaaaaaaaaaaaaaga

SEQ ID NO: 46491 - DNA, 591 bp, Homo Sapiens
cggcccgggaggcggaggcgcgggggaggaggccccgcttggctcctcagccccggatgctgcatgacttcatccttccgccggctcccctgctgaggtagggccggtccggcagcaagcccgccgcccgcgccccgccgcagtcccgctcccgccccgcgcccaccccgcgcccgccatgtccgagatcctgccctacagcgaagacaagatgggccgcttcggcgcagaccccgagggctccgacctctccttcagctgccgcctgcaggacaccaactccttcttcgcgggcaaccaggccaagcgaccccccaagctgggccagatcggccgagccaagcgagtggtgatcgaggatgaccggatagacgacgtgctgaaggggatgggggagaagccgccgtccggagtgtagacgcgccggctcgggcggcgggctccgggcccagcctcgcagcggccaggagcgcgggccggcgatgcggctgccggcgcccccccgccccggcccaggcgcccgcgggcgggggctgcagggccgtgccgccgccgccgccaggcactccggagctgtccgcttcagcacca

SEQ ID NO: 46492 - DNA, 673 bp, Homo Sapiens
gccatgacgagccgggccggaagaagaggtagggcgccgccgtgacagattagtcctaaagggaacggggttgttagttcaattggctaccggaaaaaaccaggctgggctgggcgccgccatgacaaccgataccggaaaaggcgggtcgttccccccggacagccctacgccggcaaaggtctcgagatgcaggcggccctagaggtcaccgctcgctactgtggccgggagctggagcagtatggccagtgtgtggcggccaagccggaatcctggcagcgggactgtcactaccttaagatgagcattgcccagtgcacatcctcccacccaatcatccgccagatccgccaggcctgtgctcagccttttgaggccttcgaggagtgtcttcgacagaacgaggcagctgtgggcaactgtgcagagcatatgcgccgcttcctgcagtgcgctgagcaggtgcagccgccacgctcacctgcaactgtggaggcacagccacttcctgcctcctgaggactcctctgacggcaggaaaactggacatgaatgactgcccccacgcccctcccctgcagagtggccagatggagtcctgagccctggacatgggcccggctttcctggatatcaggacttccaataaataaagactctgtatactggg

SEQ ID NO: 46493 - DNA, 2007 bp, Homo Sapiens
aggcatgatttcaccttcacttgaactgcttcattcaggactctgcaaattccctgaagtagaaggaaaaatgaccacattcaaagaggcagtgacattcaaggatgtggctgtggtcttcactgaggaggagctggggctgctggaccctgcccagaggaagctgtaccgagatgtgatgctagagaacttcaggaacctgctctcagtagggaatcaaccattccaccaagatactttccacttcttagggaaggaaaagttttggaagatgaagacaacaagccaaagagaagggaattcaggaggcaagatccaaattgagatggagactgttccagaagcaggaccacatgaagagtggtcctgtcagcaaatatgggaacaaattgcaagtgacctaaccaggtctcaaaactccataaggaacagctctcagttcttcaaagaaggtgatgtcccctgccagattgaggcaagactatctataagtcacgtgcaacagaaaccttaccgttgtaatgaatgtaaacagtccttcagtgatgtttctgtctttgatcttcatcaacaatcacactcaggagagaaatctcatacatgtggtgagtgtggaaaaagcttctgttacagcccagcccttcatattcatcagagagtccatatgggagaaaaatgctataagtgtgatgtgtgtggtaaggaatttaatcagagctcacatctgcaaactcatcagagagtccatactggagagaaaccattcaaatgtgggcaatgtgggaaaggcttccatagtagatcagcacttaatgttcattgcaaattgcacacaggagagaaaccttataattgtgaggaatgtgggaaagccttcattcatgattcacagcttcaagaacatcagagaatccatactggggagaagccattcaaatgtgatatatgtggtaagagcttccgtgttagatcaagacttaataggcattccatggttcacacaggagaaaaagcattcagatgtgatacatgtggcaagaactttcgtcagagatcagcacttaatagtcattccatggtccacatagaagagaagccatacaaatgtgagcaatgtggaaaaggcttcatttgtaggcgagatttttgtaagcatcagatggtccacacaggagagaaaccatataattgtaaagaatgtgggaagaccttcagatggtcctcatgtcttttgaaccatcagcaagtccacagtggacaaaaatccttcaaatgtgaagaatgtgggaagggattttatacaaattcacgacgatcttcccatcagagatcccacaatggagaaaagccatataactgtgaggagtgtggtaaggactataaaaggaggttggatcttgagtttcaccagagggtccacacgggtgagagaccctataattgtaaggaatgtggcaagagctttggctgggcctcctgtcttttgaaacatcagagactccacagtggggaaaaacctttcaaatgtgaagagtgtggaaagagatttactcagagttcacaacttcattcccatcagacatgccatactggagaaaagctatacaaatgtgagcagtgtgagaaggggtacaacagtaaatttaatcttgacatgcaccagagggtccacgggggagagcgaccctataattgtaaggaatgtggaaagagctttggctgggcttcatgtcttttgaaacatcagagactccacagtggagaaaagccattgaaatctggagtgtgggaagagatctactcagaattcacagcttcatttacatcagtaagtctatgtgggagaaaagccatataaatgtgagaagtgtgggaagggctttggctgggcctcaactcatctgacccatcaattctccacagcagagaaaaaccattcaaatatgagaactgtgggaagagctttgtacatagatcatatcttttttttttttttttgagacagag

SEQ ID NO: 46494 - DNA, 1836 bp, Homo Sapiens
gttgattcctagaggtggaatccattaaactgacaaagccccagtcccggggtcctaatagtcgggactattaggtcatcctgggtactcaggcctctagactctagactgagctgccttggtcactcggggacagttggcagagtattcgtggtcagggaggtgacccgtggtcagcaggatcaggccacccagggacaaagggtgcttctgcgccaggccctggagaaggacagagcggtggggactcggggtcggccgcagataggggagtcaccacctgccggcaatcagccatgactgcctttgcactgtccatgctctcagcccaccacctcctccccctgccattgcagtggctaacactggagacgaagaccaagacaccaccgcctttctccagtaccactcaaatcagcacaggcaaggacaaaggcctcaatccacaactgctgaagatggaccctggccacatgggatggtcagacacgcctgcccagctatctgcaggcgaagaggctcagaagaggtttaggggcctgaaggacatcttgcttccatgtccatatgagcaggctatttctgctccatgagtcaattttgccatataaaatacttaatttcagccattccagggtgctgtaggatgcacagcttcccatcagcccacctgaactccagccatgccattttaataccaggaataaggtcacctgctttcctgccccttaggaggccagagccgtggaagcaaaatggcacttctgtttacctgttatattatttttttgtcatccttatatgcttggaaaatgcaattatatgaaaaaagtttagtaattacagacataacagcagaaagtcctcggaaccaagcttactctcatggccgattctgctccacctgggactctgctgtgctgcgggcatcctgtggtcagaatcgcagaggggccatcagggagggccttcccagaggatggacctcacgtgactgctgcgtgggcaagtggcactggccactctgcctggagagaggagtaaatgcagggctggccaggcgacctgcacactctgctactggccttgtccatctttagcctctaatttgaaaatgaggctcacacagaccaagagtatctttgagggttagtacagaccacagaaatgccctgggcctttcactctctccttttgcaaattcccatgtgtggaaatgccgtttggataatgagggagcctgaaggaggtggacacatgagcagccccgacaggcctggctccatcctctgaaaatggggccccgtgcccggcgtgtggccttactggttcagtcttctttacagtggtaggttttgagtgcccagatgcccagtgcctcctacctggaacagcacaggatctggcagacccctggaagaatcacatgcacacttaaatattcagggagttcccacccagcagagctcgcctctgtggctaccttggtcttgctgctgatatctgccagaaaaggcctggacttggagacaagcctgggatttacactcagtccttccccatctggctggttccatttccttggctctcactgctggaagtctgtgctcctgaacatcaagtcagagggggcatctgaatgcagggcagggagcctcagatgggaagaagtcagaggaaccagaatgtgtcagaaaatgccaagtcatgtgcctgagctcaaaagtcagctgggccacaggctggctgtgtgatcttgggcaagttcaaccagcttctttatacctcttttcttgcctcaaaatgataagagaaaccacttcactaatacactga

SEQ ID NO: 46495 - DNA, 849 bp, Homo Sapiens
atggaacaaagttctccaggatttaggcaaactcacctacaagatttatcagaagccactcaagatgtgaaggaagagaatcattatcttactcctcgaagtgttcttttagagttggataatatcattgcttccagtgattctggtgaatccattgaaactgatggtccagaccaggtctctggaagaattgagtgtcattatgagccaatggaatcctattttttcaaagagacatcccatgagtctgtggatagcagcaaagaggaaccccagacccttccagagacccaggatggggacctccacctgcaagaacaaggctcaggaattgattggtgtctttcccctgccgatgtggaagcacagaccacaaatgaccaaaaggggtcggcctcactaactgttgtgcaattgtctatattaatcaataatatccccgatgaaagccaagtggagaaactgaacgttttcctttctcctcctgatgtcatcaactatcttgctctcacagaagccacaggacggatatgtgtgtctcagtgggaaggccccccacgtttgggatgcatattttgccacggagatcatcttctggcagtgaatgacctgaaaccccagagcctggaggaggtctccctgtttcttacccggtccatccagaaggagaaattaaagcttaccatcggcaggatcccaaattcagagacattccatgctgcatcctgtatgtgtccctcaaaatgccaaagtgctgcaccttctcagctggataagcctagactgaacagagctcccaagaggagtccggccattaaaaagagccagcagaaaggagccagggagtaa

SEQ ID NO: 46496 - DNA, 606 bp, Homo Sapiens
atgtccactgaggcacaaagagttgatgacagtccaagcactagtggaggaagttccgatggagatcaacgtgaaagtgttcagcaagaaccagaaagagaacaagttcagcccaagaaaaaggagggaaaaatatccagcaaaaccgctgctaaattgtcaactagtgctaaaagaattcagaaggaacttgcagaaatcacattggaccctcctcccaactgtagtgctggacccaaaggagacaacatttatgaatggaggtcaactatattgggacccccaggatctgtctatgaaggaggggtgttctttcttgacattaccttttcaccagactatccgtttaaaccccctaaggttaccttccgaacaagaatctatcactgtaatattaacagccaaggtgtgatctgtctggacatcttaaaggacaactggagtccggctttaactatttctaaagttctcctctccatctgctcacttcttacagattgcaaccctgctgaccctctggtgggcagcatcgccacacagtacatgaccaacagagcagagcatgaccggatggccagacagtggaccaagcggtacgccacatag

SEQ ID NO: 46497 - DNA, 402 bp, Homo Sapiens
aagaccatcgaggacctgagggctcagatctttgcaaatactgtggacaatgcccgcatcattctgcaggtcaacaatgactgccttgctgctgctgactttagagtcaagtatgagacacagctggccatgcgccagtctgcggaaagcgacatccgtgggctccacaaggtcattgatgacaccaatgtcactcggctgcagctggaaacagagatcgaggctctgaaggaggagctgctcttcatgaagaagaaccacgaagaagaagtaaaaggcctacaagcccagactgccagctctgggttgaccatggaggtagatgctcccaaatctcaggacctcgccaagatcgtggcagacatctggccccaatatgacgacctggctcggaagaactga

SEQ ID NO: 46498 - DNA, 1118 bp, Homo Sapiens
ccaccatctgggacaccagctggtccaggcacagccttgccacagtccagagaaggccacctctaatggggcctgcaggcattgtggccacaggaggaaagggccggggggcccctctccccactcctggggcagctcccttgcccttccccagcctcaggcactctcatcatctccgttggcctcttctgggggctcttggggttcatctccagggtggaaaacttggagggcccctcctggcagagtcaaggatggggtcagcgagaccccatcccctcagccctcaacctttgtttcacccagagcccctctgaatcctgggagctggctctttccactccccgagggggccctcaggcccaccctggctgtcccagcatggcccccgcggcttctgcgctgcacccttcccgtccctccctgctcctcatggtcactagtgcctgcttatccactgggtcatcccctcggccagggcccctcctgccctggaagcccagcaagcgcccactcgtagctcctcagcgggtcctcgccggcctgtgccaggtgcaggggccagtgggaggacaacaggagccacgcaggccatcagcgcaagagcaaacgcacatggcaacgttggtccgctcagccactggttctgtggtggaacggtggatgtctgcactgtgacatcagctgaggtacgagaactgccggttgcggcttataaacaagatgatgcccttgcggtaggccatgtgggcggtgaagttcaaggccagctggaggtgcgtggctgtctgttccaggtcgatgatgtcgtggtccaggcggctcccaaagatgtacggctccataaacctgccagagaccccaccaaggcaagggggatgagagttcacggggccatctccactggctccttgcaggaacacagacgcccaccagggactcccgggctcctctgtgggggcactatgggctgggaagcacaatttgcaacgctccccgtgtgcatggacagcagtgcagacccatccaggccacccctctgcatgcctcgtctcgtggcttaacccctcctaccctctacctcttcccgaaggaatcctaatagaactgaccccata

SEQ ID NO: 46499 - DNA, 735 bp, Homo Sapiens
atgaatgacccttttgccaggatggagacccgggggcctcagggagctgcgaatcccatggactcctcccgcagcctgggggacctcgggccttttccgcgggaggtagggcgcggggctccgctagctccgggcgcccggaatcccgcgacggcaggggcgagccgaagccagggcggcggccacgaggacagaacggcagatcgggccctcggacctcgggccggggaggaattggaccgtgagtcctgggtcagagagaaagtgctctttctcctgcacccagagaggtggttagggactcgaggggaccctgcacgggaagaggtggccggtgcagaggaccttcctcatgcgggtggagaggaccacggcgaggagcccaactacccttctgtctttcaacgacaaaagcgaatttctggcaggcgtgtagccccgccgcgggacgcagcagacccacccaaatacgtgcttgtgcgggtggaggattatcaggtaacacaagaagtgttgcagacctcctgggccaagggtcgcatgaccacgaggactgaggagcacttcgtgaccgcgctcacttttcgcagcagtagagagggacagcctggggaacgctggggccctgctgaatcccgggctctccaggcacgaacaggggcatcccgcgtccacgccgcggggaggagggtttcaccgtctccagggacttggctcgaggaaattaaactctaa

SEQ ID NO: 46500 - DNA, 864 bp, Homo Sapiens
ctgaatgagcgagaggtccagcttggggtggccgataagatgtcctggccttccgagtacaaggacagtgcctggatcttcctgggagggcttccttatgaactgactgaaggggacatcatctgtgtgttctcacaatatgggattgttaacatcaatctcatgcgggacaagaagactgggaaatccaaaggattctgtttcctctgctatgaaggccagaggagcacaattctggccattgacaattttaatgggatcaagatcaaaggaagaactatccgagtggatcatgtgtctaactattggactcctaaggactcagaagaaatggataatgtgaccaaagagctccaggagaagggctgtggggcttgtactccctcaccaagtttgcagagcaaccatcctctttcatcacccagaagcaagacagtgaaagaaaaggatgaccctggccctgagaagcacagcagcaagaactcagagagagctcagaagtcagagcccagggaggggatgaagctccctaaggccaggactgcctactctggtggagcagaggacctagagagggacctgaagaaagagaaacccaagcatgagcacaagtcctcaagcaggagggaggcaagagaagaaaagaccagtaatagggacagagggcggcagacacacattctagccagtacaatgggtgttctgaagggcgtagtcatagaagtaaaagtaggaggagccgagataaatcccataggcataaaagggcccggcgctcccgggagcgggagtcttcgaatcccagtgacagtaggcatcactgaattcagctgctcagcagatttagaaataattatttttttt

SEQ ID NO: 46501 - DNA, 150 bp, Homo Sapiens
ctgttgctggaaagcgagctcgctgtagaccggccgcgacaccatgtagctgcagctgtactcggggagctgcggcggctccgacctgccgcctggcgctgccatgacctgcgagccagaggacagcgaggagggaggacacgcggtaag

SEQ ID NO: 46502 - DNA, 2202 bp, Homo Sapiens
gccgacgtgacgctgcgaaggctgctggataatgaggtctttgacctcgaccccgatctgcaggagccgagccagatcaccaagagggacctggaagccagagcacagaatgagttcttccgggctttcttcaggttgccgaggaaggagaagctgcacgcggttgtggactgttcgctctggacgccgttcagtcgctgtcacaccacggggcggatgttcgcctctgacagctacatctgctttgccagcagagaagatggctgctgtaagatcatcctgccactcagagaggtggtgagcatcgagaagatggaggacacgagcctgctgccgcatcccatcattgtcagtatcagaagcaaggtggccttccagttcattgagctccgggaccgagacagcctggtggaggcgctgcttgcgaggttgaagcaggtccacgccaaccaccccgtgcactacgacacctctgcggatgatgacatggcttcactcgtgtttcattcaacaagcatgtgcagtgaccacagatttggggatcttgaaatgatgtcttctcaaaatagcgaggagagtgagaaagagaagagcccgctgatgcaccccgatgccctggtcaccgccttccagcagtcaggcagccagagccctgactcccgaatgtccagagaacagataaaaataagcctgtggaatgaccactttgtggaatacggcagaaccgtgtgtatgtttcgcacagagaagattcggaagctcgtagccatgggcatccctgaatctttgcgagggagactctggcttctcttctcagatgcggtgacggatcttgcctcacaccctggttactacgggaatctggtggaggagtccctggggaaatgctgcctggtaaccgaggagatagaacgagacctgcaccgctccctgccagagcaccccgccttccagaacgaaacgggaattgctgctttgaggagagtcttgacggcctatgcccaccggaaccccaagattggatactgccagtccatgaacatcctgacctccgtgctgctgctgtacaccaaggaggaggaagccttctggctgttggttgctgtgtgtgagcggatgctgcccgattacttcaaccaccgagtgatcggggcacaagttgaccagtctgtcttcgaggagctcatcaagggtcatctcccagagctggcagagcacatgaacgacctctcagccctggcgtccgtctctctctcgtggttcctgaccctgttcctcagcatcatgcctctagagagtgcggtgaatgtggtagactgcttcttctatgatggcatcaaagccatcttccagctgggactggctgtgcttgaggccaatgctgaggacctgtgcagcagcaaggatgatggccaggccttgatgatcctcagcaggtttctagatcacattaagaatgaggacagcccagggcccccagttggcagccaccatgcctttttctccgacgaccaggagccctaccctgtgactgatatttcggacctgatccgggattcctatgagaaatttggagaccagtctgtggagcagatcgagcacctacgttacaagcacaggatcagggtcctccaaggccacgaggacaccacaaagcagaacgtgcttcgagtcgttatcccggaagtctcaattcttcctgaagacctagaggagctctacgacttattcaagagagaacatatgatgagctgttactgggagcagcccaggcccatggcctcacgccacgaccccagccggccctatgctgagcagtaccgcatagatgcccggcagtttgcacacctgtttcagctagtctcgccctggacctgcggggcccacacggagatcctcgccgaaaggacgttcaggctcttggatgacaacatggaccagctcatcgagttcaaagcgtttgtgagctgcctcgatattatgtataatggagaaatgaatgagaagattaaactattatacaggcttcatatccctccagcactcactgaaaatgaccgagacagccagtcgccgttgaggaatcctctgttgtcaacatcgagacccctggttttcgggaaacccaatggcacggatgcagttgattatcagaaacagctgaagcagatgattaaggatttagccaaagaaaaagataaa

SEQ ID NO: 46503 - DNA, 723 bp, Homo Sapiens
cactcctcggctcgtgggggctgcctcccccccctgcgatgggggtcctaagagccaggcgggaagaggggctggctctcagtcccttcctcgcggggggtgcctcccgcctctgcgatgggggtcctaagagccagggggggaagacgggctcgctctcagtcgccgcctcgcggggggtgcctcccgccctgcgatgggggtcccaagagccgggggggaagaggggctggctctctgtactcgcctctcgatgggtgcctccccgcctgcgattggggtcctaagagccaggggagaggggctagctctgagtccctgcctggggggtgcctccccaccctgcgatggcggtcccaagtgtcagggggggaagagggggtggctgtcactcctcggctcgcggaggctgcctcccaccactgcgatgggggttctaagagccaggggggaagaggggctggttctcagtccctgcctcagtgggggtgcctccccctctgcgatgggggtcctaagagccagctgaggaagaggggctggctctcagttcccgccttttttttttttctcagtgttttagacgcccagctgcacaacttgattgccttacaaatgacctgcttccaggatgcggaaattcctaatttcttctgtgacccttctcaactcccccatcttgcatgttgtgacaccttcaccaataacataatcatgtatttc

SEQ ID NO: 46504 - DNA, 621 bp, Homo Sapiens
atgaagggcagcagcaggcagaagctggatcagagaaccttcacggagcaggtgcgtgagtgcaaggacaatggctacctgctctcctccaagaagatcagttctggggccttctccaaggtgtacttggccgatgccacccacgagtgcatgcaccacaaccccaagctgtcctcccacctgcagggcaagcgccacaccatgatagctatcaagatcgtctctacaaccgaggccccggtggagttctcccgcaagctcctaccccatgagatctcactcaacgctacctacaagcacctgaccatgcagctgtatgagacctatcagagcagccggctcgtgctggagctggtgccctggggcgacctgctggagcacatccaggctgcagtggatcacctctgccgcccagggctggagaaggaagcccctggactcttctggcagctagttagtgccatggcacactgccacagcgtgggcatcgtgcaccaggacctgaagtgcgagaacatcctgctggatgttcttctccatggccttctcaagctgaccgactttggcttcacaggctgcatggggcccaggaactcaccgctcagcactttcggcggctcc

SEQ ID NO: 46505 - DNA, 1875 bp, Homo Sapiens
gatgtacactaagcgaccctcagctgtgtgggaccagccctgccaacttccatcgtgggctcagctgcagctgccacctgcacacggtgcggggaagcagtgatggcaacctttcaccgtgcccacgccaccagcagcgtgaaacccagggccagacgtcaccaggagcctaattcaggcgattggcctggcagctacagggcgggaactcgctgctcagccatcggatttaggctgctgcacagtccccagcactggcgacctcgttctctgggcgcagggcaaggaagagaggaccccagttgggagggtggtgcactcggagacctgaaggccctctgggaccagccttgccagcctccgccttgggttcagctgcagctgtcatctgcatatggcgcgcggcagcagaggtggcaactctcaacgctgcccgagccaccagcagcgcggacccctggccagatgccccagcagcgcctaattcgggcggccggcccttcagctgcaggaggggggaaccagtggctcagccccatgtaggcggctgcacagtgcccagcactcaagacctcgcgctcaaaagagggcacaggaggagcagctgcagggggcagcgtcgttaggcgggccctgagacagctgggaccgcgcgctcggctctagggagctcggccagtccacaggcgtctcagcagcagctgccacctgcatgcggtgccggcgagtgctcggctcagggcggtttctggccacacgcagtttctggccacgcgcaaggcggttgccttttgaggtcccatgggcgctggggcccaactgctctgctccgtatattatttattctccgagaggttggagacgtccttgtccgagaagttggagggtccctgtctgaggtctgggccagactgccttgctttctggtgctgggccggatgggggccgggtgggggctgggctgggggaagggcgagggcgagttgtggcgtctctgaagccaatagctgggccatgaagatgatcttggctgtggagagccagaagggccaggtgcgcctgagctcctggagtagtaactgcatcttctctgacccctggtaccagactccagatgaggatgtcgggatgatacacaaagctgcgtccaggggaacgcgtgggagctgcagctgaggctcccgctgaagagaaaagaccagtctgaaatctacaagaacagagaattcttccaaatcaacatgaaaatacctctaaaactgggcaaagtactttttccagctctgcaagtcacctatgcacataggaaaaaaatacttaatgtgtccgataagagaaggactttaatttaaaaaaggaataaaatgccgttttctgtcctaagtttgtgaagatgaggagcagtgatatttacacttctgcttaaagttaagttgctgatgacttttcaaaaagacaatttggtggatggttccacatttggcctgtgccaatggctgcccagaagtggtaacttttctggtgcacagaaaatgccagcttaacatctgtgacagtgaaaacaagacacctctaacgaaggctataatgtgccaagaagatgtgaaactattctgctagaccttggtgctgatccaaatattaccgatgtctatggcaacactgctctccatatgctgtctataatgagaatatgtcaatggtagcaagactgttttcacacaagacaaacatcgaagtgaaaaacaatgtagagcaaccaatgttattttcaaaatatttgaaatccacttgttttaacattgacatatgtaagggtcagtttttgctatttggaagcttaagcaatccctgaataaaaataatttgaaataa

SEQ ID NO: 46506 - DNA, 593 bp, Homo Sapiens
accacgcctaaatagccgcagcctctgcgcgtcgccctccacggttaccccggctctccgcccctccttctcgcggcgctcgagggaccatggccgatcctcgcgtgagacagatcaagatcaagaccggcgtggtgaagcggttggtcaaagaaaaagtgatgtatgaaaaagaggcaaaacaacaagaagaaaagattgaaaaaatgagagctgaagacggtgaaaattatgacattaaaaagcaggcagagatcctacaagaatccaggatgatgatcccagattgccagcgcaggttggaagccgcatatttggatcttcaacggatactagaaaatgaaaaagacttggaagaagctgaggaatataaagaagcacgtttagtactggattcagtgaagttagaagcctgaaacttttctcgtatggggtggtttttgcattaaatcctggggtccattttacaatccattatttttgaccactgctatgtgttcaagtagtatgagaatgtgattgtttttatctggttacatatatatttctttgtctaatttaatatgtcaaataaatgagttcatctaataaaa

SEQ ID NO: 46507 - DNA, 1590 bp, Homo Sapiens
ttttgtataaacattctgatttaataaatggtatgaatatatattttgcatactttacaataaagaaaattttgaaagaaaatggatctaaaactttgtttccctccaatttacatagtaaagtcaactgcatacagttctttccatgtgtaagttttacatttgtattttctacaattaagtaaatctaaatgttaaattttaacacatatatccaattatgtacacaattacaatgtcaatttataagtcaagcttacttaacaatcataaattacaaaaaacgcactatgaataattttgttctagaagtatcacatcaactcatatgatctaggtgaacccaaaagtaaaaaataatgattataaattatggtagtgtctgtaaaaccctgttataaaggaggtattcttttaaaatatgtaccttatatataaaagctcctgactccttttaaggaccaaaattattttcagtctaaccattttcattaaagcgcttatttaaaaagtatcaccttataaaactgagtatataaaatacaatgcagcccttgatagctaagaatctttataaacgccaatgatttagtgacctgtttatcaaactatttctatggatgggttgattttttttcttcctctaaattaagtggccctagactaatatatttgttcagttattctgttttcttccttactgccatttcacatctccatcagtgagttcctcaggatttgcctttatgttacaactatgaaagtcttcaatccaattccctgcttccacacaaaggacaaagaaagcctaaactttccttttccttttttctgggctccaataggaagcagcatttacaacgtgtctggcttggtgggaggaagattgtcaattgaggtatcatgtgtgttcacctgcctctcttgccctatttctttggttgctataaatttcctgcttctcaaatatctggatttttggctacctatttggcttccgtctttggtgtttatatctgtctggttttagcaggtctctctgattcctgacccacagctcctctccttctctaatattcaagtatgctgcttccctaactcctcattccttctccttgaatttcactttacaattgcgctaggttctaacatcgttggccatagattaccacaaaacataatttcttaaattctgcaaatttctaatgtttctaatcttggtttcctacaagatctaacactaagcttgtgttatcctgattacagtgtatataaaacaatgcttgtggaaaattaacctaggagaaagcttataggggaaacctgatgatgaattttattaaattaataacccttataacaatttcaaatgtaatactatctggatttgaacttcaatacttttcctaagtaaaattcttaaccatggtagaagttatgtttgttgatgttcactcatctataccctccatattctcagcaaagttggcataaatctgacctgaataaacagggttataacattatcaggcttgtaaaatactttatcaaatcaatgcatcagttaaagcaggggtccccagccctggg

SEQ ID NO: 46508 - DNA, 303 bp, Homo Sapiens
cagtcatgaggactttcctctttctctttgccgtgctcttctttctgaccccagccaagaatgcattttttgatgagaaatgcaacaaacttaaagggacatgcaagaacaattgcgggaaaaacgaagaacttattgctctctgccagaagtctctgaaatgctgtcggaccatccagccatgtgggagcattatagattaatgcagaagatttaggtttccagagaagcatacataacctagcttctttttactcttgcctctgctgtaggcagacactttaataaaaataaatgactgtc

SEQ ID NO: 46509 - DNA, 624 bp, Homo Sapiens
gacatcgcctggtggtattaccagtatcagagagataagattgaagatgagctggagatgaccatggtttgccatcggcccgagggactggagcagctcgaggcccagaccaacttcaccaagagggagctgcaggtcctttatcgaggcttcaaaaatgagtgccccagtggtgtggtcaacgaagacacattcaagcagatctatgctcagtttttccctcatggagatgccagcacgtatgcccattacctcttcaatgccttcgacaccactcagacaggctccgtgaagttcgaggactttgtaaccgctctgtcgattttattgagaggaactgtccacgagaaactaaggtggacatttaatttgtatgacatcaacaaggacggatacataaacaaagaggagatgatggacattgtcaaagccatctatgacatgatggggaaatacacatatcctgtgctcaaagaggacactccaaggcagcatgtggacgtcttcttccagaaaatggacaaaaataaagatggcatcgtaactttagatgaatttcttgaatcatgtcaggaggacgacaacatcatgaggtctctccagctgtttcaaaatgtcatgtaa

SEQ ID NO: 46510 - DNA, 969 bp, Homo Sapiens
agctttggggttgtccctggacttgtcttggttccagaacctgacgacccggcgacggcgacgtctcttttgactaaaagacagtgtccagtgctccagcctaggagtctacggggaccgcctcccgcgccgccaccatgcccaacttctctggcaactggaaaatcatccgatcggaaaacttcgaggaattgctcaaagtgctgggggtgaatgtgatgctgaggaagattgctgtggctgcagcgtccaagccagcagtggagatcaaacaggagggagacactttctacatcaaaacctccaccaccgtgcgcaccacagagattaacttcaaggttggggaggagtttgaggagcagactgtggatgggaggccctgtaagagcctggtgaaatgggagagtgagaataaaatggtctgtgagcagaagctcctgaagggagagggccccaagacctcgtggaccagagaactgaccaacgatggggaactgatcctgaccatgacggcggatgacgttgtgtgcaccagggtctacgtccgagagtgagtggccacaggtagaaccgcggccgaagcccaccactggccatgctcaccgccctgcttcactgccccctccgtcccaccccctccttctaggatagcgctccccttaccccagtcacttctgggggtcactgggatgcctcttgcagggtcttgctttctttgacctcttctctcctcccctacaccaacaaagaggaatggctgcaagagcccagatcacccattccgggttcactccccgcctccccaagtcagcagtcctagccccaaaccagcccagagcagggtctctctaaaggggacttgagggcctgagcaggaaagactggccctctagcttctaccctttgtccctgtagcctatacagtttagaatatttatttgttaattttattaaaatgctttaaaaaaa

SEQ ID NO: 46511 - DNA, 786 bp, Homo Sapiens
tatgactccacccatgacaagttccaaggcaccatcaaggctaagaacaagaagtttgtcaccaatggaaatcccatcaccatcttccaggaacaaaatcccatcaaaatcaaatgggctggtcctgacgctgattatgttatgaagtccactggcatcttcactgccttggagaaggctggggctcacttagagggtgcaaccaaaagggtcatatctgctctctctgttgatgcccccatgtttgtgatggccgtgaaccttgagaagtatgaaaacaaccttgtgattgtcagcaacgcttcctgtactgccaattgtttagctgccctgcccaaggtcatccatgacaactttggcatcatggagggactcatggccacagttggtgccaatattgccacccagaagactgtggatggcctctctgggaaactgtggcgtgatggccacaggactctccaggacatcatccctgcatttacccactctaccaaggctgtgggcaaggccatccctgagcttaacagaaagcccactggcatggccttccatgtctccactgccaacatgtgggttgtagacctgatctgccatagagagctgcccaaatatgatgacatcaagaaggtggtgaaactggcatcggaggccaccctcaagggcctcctgagctacacagagcaccaggttgcctcctccaactttaacagagacacccactccaccttcaatgctgggaatggcattgccctcaaagaccactttgtcaagctcatttcctga

SEQ ID NO: 46512 - DNA, 1881 bp, Homo Sapiens
tggagagactacaactcccagtatgcaccgcgatgcgcgcctcaccctgcatctcccagcccgcagccagctggcatcctagaccctctgccctgcgaccaacagccgggagcggaccagacaccagaactcccggaacggttgaagacggttccgctccctgtcccgcctttcgcagcccagcagtttcgccctgcggagaggagccttgctgtttccaaatctctcctgctgaagagacattggagctagggcggctagtttcacctggtaattgtgacaccctgtctcctcgagctgcaggcttttatgcttgtcatgttcgaagtttgataccttgcagatcaacaaagggtcggtggcctctcactgcctccgccgcagggttgtcaagacatgcgcagtgcggcccgtccctagggctgggttaagggccgcggatgtggcagttctcaggcctcttgggatcgcctcaagaagccccctcacgagtgtctcgatttcctgtcagccaacaaagggccgttcgcctttcatggcctccacagcagcgttgccgtggctgtcacaaatcctctgcaccccaggagtgccgcttggacccccgggctcgctgcgtggtccatatctaggtcgggcctctcacggagactttcccaccagtgtaataaagaggagaaaacgtcacagcggaagggcctgaccctgctgcatccactaaggaaacagctacggggatgggaccctggaagctgctgtgggagcctcatccaccgcttctctgaccccacccaggctgcttcccaggcctcagggtcttagtgtggacctccgggccgtgattaatgcagtttttcaggttaagtactgcacgactactcgcttctgaaactgatagacactgcctcagctccgtgcagggcagacgcacaagagcagaatctccgtgggacatctctctggagcatcaatattactgcagtatttggaagaaacaaatttaaataagttctaaggtgaagaatggaacatttaagacaagtctggaaagtcatctgcctttaataactgtcgtttgtccttaacgtcagactttctccaagaccaaaactctaagaacttatttccattcttacaaatagtaaaaatgataaatcatatcaagtcaattgaaagtcctgcctgctgctttcctaaatcacaatatggccttggtatggttttatttgtacttttgtgggggattcgtggatctttagattaaaaaaaaaaaataggtttttgaacaatttttgcaagtttgcagctgttagttattgatttatttttgcaacccatctaattcttctgtctctctcctctcctcaggctcaataattccatgggtctctaaggctgtgtttattttctttaaattttgttgatttacttttatactccatttgattttttctatctctcaccttttctcagactcagtcatcccacaggtctgtaaggctctgttcattttctttaaacttttttttttcctctcctcagattggataaattatattgctatgtctctgtttctgaactatagaaaagctcaaaattactatttttatttctcattttttatatggctattttttctctgctgatgtttcacatctattcatttatgagaatattttcctttgccctcatgagcgtgtttataatagctgccttcaaattcttgtctgccgtttacatcttggacatcttggagatggctactgcctgctttttatcttgtgtatttattacattttcacgtgtcttcacgcatctcttgaattggaaattgtgccctggagactgtatacaagactggattaaaaagactggattctg

SEQ ID NO: 46513 - DNA, 1094 bp, Homo Sapiens
atgcgaacacaagtatatgaggggttgtgtaaaaattatttttctcttgctgtactacaaagagatagaatcaaactgctttttttcgacatactggtttttctttctgtttttcttctctttcttctatttcttgtggatattatggctaataacacaacaagtttagggagtccatggccagaaaacttttgggaggaccttatcatgtccttcactgtatccatggcaatcgggctggtacttggaggatttatttgggctgtgttcatttgtctgtctcgaagaagaagagccagtgctcccatctcacagtggagttcaagcaggagatctaggtcttcttacacccacggcctcaacagaactggattttaccgccacagtggctgtgaacgtcgaagcaacctcagcctggccagtctcaccttccagcgacaagcttccctggaacaagcaaattcctttccaagaaaatcaagtttcagagcttctactttccatccctttctgcaatgtccaccacttcctgtggaaactgagagtcagctggtgactctcccttcttccaatatctctcccaccatcagcacttcccacagtctgagccgtcctgactactggtccagtaacagtcttcgagtgggcctttcaacaccgcccccacctgcctatgagtccatcatcaaggcattcccagattcctgagtagggtggcttttggtttttgtttctttcttgtcttgtcttttattgaaaggaaatcaaaaataggctaaacagaattttgagggcatggcccaaataactcatgagttccaagttgaaacatggttgtgcaagttggacattacaatgtaaaacacattttcttcaaacacgttttcccttttgtttcaaaaaatgtaatattttcccccaagcgttttatatttatgtattttgtattcaatgtgaggcttattaaaaatagtgattctaatgtaagaatcagctaagatgcattatatatattttaattaaaattaaaacttcagatatttgtggattacaatcctcatttacttccaatgtgactaaaaagagaaaaaaaa

SEQ ID NO: 46514 - DNA, 324 bp, Homo Sapiens
acccagaggcggtcttgtagcggggccggcttggggcttggttctatgtccctgcgggtcggtgcgagggcgaagaggaacccgtgggcctcgggggatcccggggggccggaccagtgtcccctagttgtgggagcagacgcgtgggcgcatcgcgggcgggcagggcctgaagtgcaggtgcgggcagcggaccctggcgggggctgggaggacaggcgtggggtcccggcagtgaagcgggttctagaggcgcaggagcgggtaggcgaggccggtggccctgggcccggagtctgcaggccgcgctcctgtcctgccgct

SEQ ID NO: 46515 - DNA, 369 bp, Homo Sapiens
catgtactgatacattccaagcatacatgcacactgatacatacagagaaacccatggaatccaggcccaaaggaaatggaatgtgtagcaaagaatatacattgtctctgggcttgctctctcgcctaacttccttcaggcttgttctgatttcccctggggcctgcacatatggtgtattgcttagatttgtgcctgggttcggactgcacattaaatcagagacgtggggtagaatcaggtccacagctctatatcctgttgtgatggataagcgttctctttccatttcctcccctgggcagggagatgatggaagtgttttgcatgaagacaggaaatatcttcagtacggctttgtgagctag

SEQ ID NO: 46516 - DNA, 1506 bp, Homo Sapiens
atgacttgggctttggaagtagctgttttaatgaagaagtccgaaacatatgcacctttattctgtcttccgtctttccataaattttgcaaaggccttttagccaacactctcgttgaagatgtgaatatctgtctgcaggcatgcagcagtctacctgctctgtcctcttccttgccagatgatcttttacagagatgtgttgatgtttgccgtgttcaactagtgcactgtggaactcgtattcgacaagcatttggaaaactgttgaaatcaattcctttagatgttatcctaagcaataacaatcacacagaaattcaagaaatttctttagcattaagaagtcacatgagtaaagcaccaagtaatacattccacccccaagatttctctgatgttattagttttattttgtatgggaactctcatagaacagggaaggacaattggttggaaagactgttctatagctgccagagactggataagcatgaccagtcaacaattccacgcaatctcctgaagacagatgctatcctttggcagtgggccatatgggaagctgcacaattcactgttctttctaagctgagaaccccactgggcagagctcaagacaccttccagacaattgaaggtatcattcgaagtctcgcagctcacacattaaaccctgatcaggatgttagtcagtggacaactgcagacagtgatgaaggccatggtaacaaccaacttagacttgttcttcttctgcagtatctggaatatctggagaaattaatgtataatgcatacgagggatgtgctaatgcattaacttcacctcccaaggtcattagaacttttttctataccaatcaccaaacttgtcaggactggctaacgcggattcgactctccatcatgagggtaggattgttggcaggccagcctgcagtgacagtgagacatggctttgacttgcttacagagatgaaaacaaccagcctatctcaggggaatgaattggaagtaaccattatgatggtggtagaagcactatgtgaacttcattgtcctgaagctatacagggaattgctgtctggtcatcatctattgttggaaaaaatcttctgtggattaactcagtggctcaacaggctgaagggaggtttgaaaaggcctctgtggagtaccaggaacacctgtgtgccatgataggtgttcattgctgcatctccagctttgacaaatcggtgctcaccttagccaatgctgggtgtaacagtgccagcccgaaacattgtctgaatggtgaatccagaaaaactgtgctgtccaaaccgactgactcttcccctgaggttataaattatttaggaaataaagcatgtgagtgctacatctcaattgccgattgggctgctgtgcaggaatggcagaacgctatccatgacttgaaaaagagtaccagtagcacttccctcaacctgaaagctgacttcaactatataaagtaa

SEQ ID NO: 46517 - DNA, 243 bp, Homo Sapiens
caggccctgtgttatggaactttctggggctaccctaagatgctggaagctgccaatctcatggagggcctagtggatatcggcccttgggtcactcttcccagaggacagcctgaggtgttggagtggggcctcccaaaggatcaggctggagaacttgggacagtggataagtctggtctgttcctgttatctggacttggcagattaatgcaacattctgtgggactttgcaatagctaa

SEQ ID NO: 46518 - DNA, 1825 bp, Homo Sapiens
cacagccagtgtactggatgcctgattaagcgtcatggggtctttcatccagactgcgttttcattattcgctgaaacatacaggttttaatttttacgaggctaaggccacggccgcctcacctcggtttttgccgccacctagaggaactatgtgcgccccaacggttgcccggatgtaggcgtagggtggagccgtaagagattgactagccagttgatttggttggcgcaggctcagaaacgccgtgacgccgcccttccccccaacacgtgatgaaagtcggggtgacgaagggccggctttgcgcaggtgcacagtactcgctatggcccattcgtcacgtgacgagggcgggactgtggcactgtggaggggcgcctagtaggcaggcgctctcagctctctccccggtacgtgacgagactccacggacgtcacgtgaggcaggcggcgagcgcgggtggggcggggttaggcggcgctccgcgagaaccaaagtgcagccgctgacccggcaaaactcagcgggggctggatagccatgcccaagtactgcagggcgccgaactgctccaacactgcgggccgcctgggtgcagacaaccgccctgtgagcttctacaagttcccactgaaggatggtccccggctgcaggcctggctgcagcacatgggctgtgagcactgggtgcccagctgccaccagcacttgtgcagcgagcacttcacaccctcctgcttccagtggcgctggggtgtgcgctacctgcggcctgatgcagtgccctccatcttctcccggggaccacctgccaagagtcagcggaggacccgaagcacccagaagccagtctcgccgccgcctcccctacagaagaatacacccctgccccagagccctgccatcccagtctctggcccagtgcgcctagtggtgctgggccccacatcggggagccccaagactgtggccaccatgctcctgacccccctggcccctgcgccaactcctgagcggtcacaacctgaagtccctgcccaacaggcccagaccgggctgggcccagtgctgggagcactgcaacgccgggtgcggaggctgcaacggtgccaggagcggcaccaggcgcagctgcaggccctggaacggctggcacagcagctacacggggagagcctgctggcacgggcacgccggggtctgcagcgcctgacaacagcccagacccttggacctgaggaatcccaaaccttcaccatcatctgtggagggcctgacatagccatggtccttgcccaggaccctgcacctgccacagtggatgccaagccggagctcctggacactcggatccccagtgcataaggatcaagacagacaatgtcgagggacaaaagatagaagatggaggaggaaagacattatacgtgggcttggcccagccccaccgcccacgcctgggtagtagcagtgcctccctcaagggcctgggttctaccaccccactcctagggatctcttgaaccttaggggtgacctgggcccaagtctctcatcagcccccaatcccctgggtaccaggcttctgccacccccggctcagatctttgcaaatcagtacgacagcctcagagcagagcaagggttgtttgggagaatcatacctggttctaaggagtcccacgctttttgccaagcctggtactgagttcatgataccatggtggacacagctgagaaaatccctgccctcatggtgctcattctacttgagtagacgatgaactagtaaacaaataaacaagaacactgcagacatg

SEQ ID NO: 46519 - DNA, 1716 bp, Homo Sapiens
cagaaaataataaacactgctggaaccagtaatgcagaagtccccttggctgatcccggaatgtaccagctggacattacattaagaaggggtcaaagtttagctgctcgagatcgaggagggacgagtgatccatatgtgaagtttaaaatcggaggaaaagaagtttttagaagtaagataatacacaagaacctcaaccctgtgtgggaagaaaaagcttgtattctggttgatcatcttagggagccattgtatataaaggtatttgactatgattttggactacaggatgactttatgggctcagcctttctggatctgacacaattggagttaaacaggcccacagatgtgacccttactctgaaagatcctcattatcctgaccatgatcttggaatcattttgctctcagtcatccttacccctaaagaaggagagtccagggatgtgacaatgctaatgaggaagagttggaaaagatcaagtaaggaactttcagaaaatgaagtggttggatcttatttctctgtgaagtctctcttttggaggacgtgcggcaggccagctcttcctgtcctgggcttctgcagagcagagcttcagaatccttattgcaaaaatgtacaatttcagacccaaagtttacgcctatcagacctacacagaaaatcgcatctttggagaggaatagtcagcatcaccttgattgaagggagagacctcaaggccatggattccaacgggttgagcgatccctacgtgaagttccggcttgggcatcagaagtacaagagcaagattatgccaaaaacgttgaatcctcagtggagggaacaatttgattttcacctttatgaagaaagaggaggagtcattgatatcactgcatgggacaaagatgctgggaaaagggatgatttcattggcaggtgccaggtcgacctgtcagccctcagtagggaacagacgcacaagctggagttgcagctggaagagggtgagggacacctggtgctgctggtcactctgacagcatcagccacagtcagcatctctgacctgtctgtcaactccctggaggaccagaaggaacgagaggagatattaaagagatatagcccattgaggatatttcacaacctgaaagatgtgggatttctccaggtgaaagtcatcagagcggaagggttaatggctgccgacgtcactggaaaaagtgacccattttgtgtggtagaactgaacaacgatagactgctaacacatactgtctacaaaaatctcaatcctgagtggaataaagtcttcacgttcaacattaaagatatccattcagttcttgaagtgacagtttatgatgaagatcgggatcgaagtgctgactttctgggcaaagttgctataccattgctgtctattcaaaatggtgaacagaaagcctacgtcttgaaaaacaagcagctgacagggccaacaaagggggtcatctatcttgaaatagatgtgatttttaatgctgtgaaagccagcttacgaacattaatacccaaagaacagaagtacattgaagaggaaaacagactctctaaacagctgctactaagaaactttatcagaatgaaacgttgtgtcatggtgctggtaaatgctgcatactacgttaatagttgctttgattgggattcacccccaaggagtctcgctgctttg

SEQ ID NO: 46520 - DNA, 930 bp, Homo Sapiens
atggagaataggaataacatgacagagtttgttttgctggggcttacagagaatccaaagatgcagaaaatcatatttgttgtgttttttgtcatctatatcatcactgtggtgggatatgtgctcattgtggtcaccatcactgccagcccatcactggggtcccccatgtacctttccctggcctatctctcctttattgatgcctgctattcctctgtcaatacccctaacctgatcacacattcactctatggaaagaaggccatcctattcaatggatgcatgactcaagtctttggagaacatttcttcggaggtgcagagggcatcctacttactgtgatggcctatgaccactatgtggccatctgcaagcccttgcactatatgactatcatgaaccagtgtgtgtgtgccctgctaatgggagtggtgtggatgggaggctttcttcatgcaaccatacagatcctcttcatcttccaattacctttctgtggtcctaatgtcatagatcactttatgtgtgatctgaaccctttgctcaacctcgcctgcactgacacccatatgctggaactcttcattgctgccaacagtggattcatctgcttgttaaactttgccctcctgctggtctcctatgtggtcatcttgtgctccctaaggactcatagcttggaggcaaggcacaaagccctctccacctgtgtctcccacatcacggttgtcatcttattctttgtgccctgcatatttgtgtacatgagacctgcagctactttacctattgataaagcagttgctatattctacactatgataactcctatgttaaaccccttaatctataccttgaagaatgcccagatgaaaaatgccatcaggaaattgtgtagtagaaaggacatttcaggtgacaaataa

SEQ ID NO: 46521 - DNA, 396 bp, Homo Sapiens
atggggggaagcgcgttaaaccagggagtcctggaaggggacgacgcccccggccagtccctgtacgagcggttaagtcagaggatgctggacatctcgggggaccggggcgtgctgaaggacgtcatccgagaaggagctggagacctagtggcgcctgatgcttcggtgctagtgaaatactatggatacctggaacacttggacagacccttcgattctaattactttaggaaaactcctcggctaatgaaacttggagaggatattacattgtggggcatggagctgggccttctgagcatgcagagaggagagctggccagatgcttcgtcttgggtaaactcctcgactcccaaggccccagcctccatctttacctcagagcctcctga

SEQ ID NO: 46522 - DNA, 345 bp, Homo Sapiens
atgggtctggagctgtacctggacctgctgtcccagccctgccgttcagtctacatcttcaccaagaacggcatccccttcgagcttcgcaaagtggagctgaccaaaggccagcagcacagtgatgcctttgcccaggtgaatgccctgaggaaggtgccattgaaggatggggacttcaccttggctgagagtgtggctagcttgctgtgtatgaactgcatgtacaaagcacctgaccactggtacccccaggacctgcaggcccgcgcccgtggggatgagtacctgtcatggcagcacatggccctgcagagtagctgctgctgggccatgtggcagaag

SEQ ID NO: 46523 - DNA, 1558 bp, Homo Sapiens
ggaagaccaaattgatagactggactttatctgaaaccagatgaaccttttaacactggatgttaacaaaaaaaccagggaggttactggggaggtggcaaacaaagtgtcatgtgcaatgacagatgaaatttgtcaactgtctgttttggttgatgaattttgttcagtttcatcctactccagatgtattaaaaatatataaaagtgaattaaataagcatatagaggatggtatgggaagaaatttggctgattgatgcaccaatgaagtaaacaccttagtgcttcagttccagcaagaaattgttgaaaatttgaagccattacttccagctggtatataggataaactacatacactgatcccttgcaagaaatttgatcttagttataatctaaattaccacaagttatgttcagattttcaagaagatattgtgtttcatttttccctgggctggtcttccctcgtacctcaatttttgggccctagaaatgctcaaatggtgctcctaggattatcagagcctatctttcagctccctagatctttagcttctactcccactgctcctaccagtccagcaatgccagataatgcatcacaggcagaactcatgattacattagtaacaggattggcttctcttacatctagaacttctatgggcatcgataatgttggaggaatgatttggaaaactataggctggaaactcatatctgtttcattaactatgtatggagctttgtatctttatgaaagactgtcctggaccacccatgccaaggagagagcctttaaacagcagtttgtaaactatgcaactggaaaactgaagatgattgctagctccacaagtgcaaactgcagccaccaagtaaaacaacaaatggctaccacttttgctcgcctgtgccaacaagctgatattactcaaagacaactggaagaagaaattgctagattacccaaagaaatagatcagtgggagaaaatacaaaacaatttaaagctcttaagaaataaagctgttcaacttgaatatgagctggagaattttactaagcagtttctaccttcacgcgatgaagaatcctagcaatagagattgctttggtgacaatgataggaggaaatgaaacttgtaagatcaggacaattgttatttttatgaaatgactttaaatatgaattttactaactgtacctaaatagcaaagccttatgtagattctgttagtgatgtatctcagggtattggtatttttgaagagtattgtgtccttagttttaattttgggtaaagaaaaaactaaaatctggaattagttacaagcaacagcaccaacttatgtgacccttgaggggtggggctgtgagctcttaatttgtttttgattctgaaaatctctgcttcctggcatccaggagttagagattgagcctttcatcttctttctcaaaactagtttttgatgctttctttcctgggaatagtcactttttaattttatttaataaactgcattgctggaaccacacacacaaaaa

SEQ ID NO: 46524 - DNA, 3426 bp, Homo Sapiens
agaatcagaacaatgcctccacgaccatcatcaggtgaactgtggggcatccacttgatgcccccaagaatcctagtagaatgtttactaccaaatggaatgatagtgactttagaatgcctccgtgaggctacattaataaccataaagcatgaactatttaaagaagcaagaaaataccccctccatcaacttcttcaagatgaatcttcttacattttcgtaagtgttactcaagaagcagaaagggaagaattttttgatgaaacaagacgactttgtgaccttcggctttttcaaccctttttaaaagtaattgaaccagtaggcaaccgtgaagaaaagatcctcaatcgagaaattggttttgctatcggcatgccagtgtgtgaatttgatatggttaaagatccagaagtacaggacttccgaagaaatattctgaacgtttgtaaagaagctgtggatcttagggacctcaattcacctcatagtagagcaatgtatgtctatcctccaaatgtagaatcttcaccagaattgccaaagcacatatataataaattagataaagggcaaataatagtggtgatctgggtaatagtttctccaaataatgacaagcagaagtatactctgaaaatcaaccatgactgtgtaccagaacaagtaattgctgaagcaatcaggaaaaaaactcgaagtatgttgctatcctctgaacaactaaaactctgtgttttagaatatcagggcaagtatattttaaaagtgtgtggatgtgatgaatacttcctagaaaaatatcctctgagtcagtataagtatataagaagctgtataatgcttgggaggatgcccaatttgatgttgatggctaaagaaagcctttattctcaactgccaatggactgttttacaatgccatcttattccagacgcatttccacagctacaccatatatgaatggagaaacatctacaaaatccctttgggttataaatagtgcactcagaataaaaattctttgtgcaacctacgtgaatgtaaatattcgagacattgataagatctatgttcgaacaggtatctaccatggaggagaacccttatgtgacaatgtgaacactcaaagagtaccttgttccaatcccaggtggaatgaatggctgaattatgatatatacattcctgatcttcctcgtgctgctcgactttgcctttccatttgctctgttaaaggccgaaagggtgctaaagaggaacactgtccattggcatggggaaatataaacttgtttgattacacagacactctagtatctggaaaaatggctttgaatctttggccagtacctcatggattagaagatttgctgaaccctattggtgttactggatcaaatccaaataaagaaactccatgcttagagttggagtttgactggttcagcagtgtggtaaagttcccagatatgtcagtgattgaagagcatgccaattggtctgtatcccgagaagcaggatttagctattcccacgcaggactgagtaacagactagctagagacaatgaattaagggaaaatgacaaagaacagctcaaagcaatttctacacgagatcctctctctgaaatcactgagcaggagaaagattttctatggagtcacagacactattgtgtaactatccccgaaattctacccaaattgcttctgtctgttaaatggaattctagagatgaagtagcccagatgtattgcttggtaaaagattggcctccaatcaaacctgaacaggctatggaacttctggactgtaattacccagatcctatggttcgaggttttgctgttcggtgcttggaaaaatatttaacagatgacaaactttctcagtatttaattcagctagtacaggtcctaaaatatgaacaatatttggataacttgcttgtgagatttttactgaagaaagcattgactaatcaaaggattgggcactttttcttttggcatttaaaatctgagatgcacaataaaacagttagccagaggtttggcctgcttttggagtcctattgtcgtgcatgtgggatgtatttgaagcacctgaataggcaagtcgaggcaatggaaaagctcattaacttaactgacattctcaaacaggagaagaaggatgaaacacaaaaggtacagatgaagtttttagttgagcaaatgaggcgaccagatttcatggatgctctacagggctttctgtctcctctaaaccctgctcatcaactaggaaacctcaggcttgaagagtgtcgaattatgtcctctgcaaaaaggccactgtggttgaattgggagaacccagacatcatgtcagagttactgtttcagaacaatgagatcatctttaaaaatggggatgatttacggcaagatatgctaacacttcaaattattcgtattatggaaaatatctggcaaaatcaaggtcttgatcttcgaatgttaccttatggttgtctgtcaatcggtgactgtgtgggacttattgaggtggtgcgaaattctcacactattatgcaaattcagtgcaaaggcggcttgaaaggtgcactgcagttcaacagccacacactacatcagtggctcaaagacaagaacaaaggagaaatatatgatgcagccattgacctgtttacacgttcatgtgctggatactgtgtagctaccttcattttgggaattggagatcgtcacaatagtaacatcatggtgaaagacgatggacaactgtttcatatagattttggacactttttggatcacaagaagaaaaaatttggttataaacgagaacgtgtgccatttgttttgacacaggatttcttaatagtgattagtaaaggagcccaagaatgcacaaagacaagagaatttgagaggtttcaggagatgtgttacaaggcttatctagctattcgacagcatgccaatctcttcataaatcttttctcaatgatgcttggctctggaatgccagaactacaatcttttgatgacattgcatacattcgaaagaccctagccttagataaaactgagcaagaggctttggagtatttcatgaaacaaatgaatgatgcacatcatggtggctggacaacaaaaatggattggatcttccacacaattaaacagcatgcattgaactgaaaagataactgagaaaatgaaagctcactctggattccacactgcactgttaataactctcagcaggcaaagaccgattgcataggaattgcacaatccatgaacagcattagaatttacagcaagaacagaaataaaatactatataatttaaataatgtaaacgcaaacagggtttgatagcacttaaactagttcatttcaaaa

SEQ ID NO: 46525 - DNA, 435 bp, Homo Sapiens
atgcacgccctgcccagctggtcagcctcagtttccccatctgtcagtctggacagtgacgctcccagcgtccggcgaagccccgctcttggcccttggtccctccgcctgatcacaagagggtgccgcgacggccggggacgggtctggcgtgggcagggacctctccgaccctcattgaggaaagaatggcggaacccgaaaaccgggccctggcgtccctcctgcaaggtggggaggagagctggacggcaggatttgggaagggcttggggagcagggccccctgagggtggcgggggaggcagtgctaccagaaccatggttcggttggttcagccgcctggacctcatctgctccctgaggttggtctttgctccgcaccctggtgcggcctggtacacagaaggcgctcagtaaacacttgtggatga

SEQ ID NO: 46526 - DNA, 288 bp, Homo Sapiens
ggaaggagagcgcgagcgagggagcgggcgagctccgagggggtgtgggtgtagggagagagagaaagagagcaggcagcggcggcggcggcagcggtggggaaaagcggattccgccccgaaccacaccgaggggagctcgtggtcgagacttgccgccctaagcactctcccaagtccgacccgctcggcgaggacttccgtcttctgagcgaaccttgtcaagcaagctgggatctatgagtggaaaggtgaccaagcccaaagaggagaaagatgcttctaagg

SEQ ID NO: 46527 - DNA, 1960 bp, Homo Sapiens
gagagggtggggagatgacacagttgttcccccagccctggcggggcgggcagcatggttcactccagcatgggggctccagaaataagaatgtctaagcccctggaggccgagaagcaaggtctggactccccatcagagcacacagacaccgaaagaaatggaccagacactaatcatcagaacccccaaaataagacctccccattctccgtgtccccaactggccccagtacaaagatcaaggctgaagaccccagtggcgattcagccccagcagcacccctgccccctcagccggcccagcctcatctgccccaggcccaactcatgttgacgggcagccagctagctggggacatacagcagctcctccagctccagcagctggtgcttgtgccaggccaccacctccagccacctgctcagttcctgctaccgcaggcccagcagagccagccaggcctgctaccgacaccaaatctattccagctacctcagcaaacccagggagctcttctgacctcccagccccgggccgggcttcccacacaggccgtgacccgccctacgctgcccgacccgcacctctcgcacccgcagccccccaaatgcttggagccaccatcccaccccgaggagcccagtgatctggaggagctggagcaattcgcccgcaccttcaagcaacgccgcatcaagctgggcttcacgcagggtgatgtgggcctggccatgggcaagctctacggcaacgacttcagccagacgaccatttcccgcttcgaggccctcaacctgagcttcaagaacatgtgcaaactcaagcccctcctggagaagtggctcaacgatgcagagactatgtctgtggactcaagcctgcccagccccaaccagctgagcagccccagcctgggtttcgacggcctgcccggccggagacgcaagaagaggaccagcatcgagacaaacgtccgcttcgccttagagaagagttttctagcgaaccagaagcctacctcagaggagatcctgctgatcgccgagcagctgcacatggagaaggaagtgatccgcgtctggttctgcaaccggcgccagaaggagaaacgcatcaacccctgcagtgcggcccccatgctgcccagcccagggaagccggccagctacagcccccatatggtcacaccccaagggggcgcggggaccttaccgttgtcccaagcttccagcagtctgagcacaacagttactaccttatcctcagctgtggggacgctccaccccagccggacagctggagggggtgggggcgggggcggggctgcgccccccctcaattccatcccctctgtcactcccccacccccggccaccaccaacagcacaaaccccagccctcaaggcagccactcggctatcggcttgtcaggcctgaaccccagcacgggccctggcctctggtggaaccctgccccttaccagccttgatggcagcgggaatctggtgctgggggcagccggtgcagccccggggagccctggcctggtgacctcgccgctcttcttgaatcatgctgggctgcccctgctcagcaccccgcctggtgtgggcctggtctcagcagcggctgcggctgtggcagcctccatctccagcaagtctcctggcctctcctcctcatcctcttcatcctcatcctcctcctcctccacttgcagcgagacggcagcacagacccctggaggtccaggggggcccgaggcagggtccaaacctgagtgagggccagccatgcctcccctcccattcctctggtccctgccttggtcccttgcctgggaagagggcgaggaggccagtggtggggacgcagagggtcctcagagcaggagtgacaagggaggaaagaccaaaaaaacaaccaaccaaaaaaaaaaaaaaaaaggaaagaaa

SEQ ID NO: 46528 - DNA, 2017 bp, Homo Sapiens
cgagagagttgtaggcgcaaagctgaggaaaggagagtgtggagaggggcctggtgtggtggggcccggtgtttgggaccggagggtgttgacggctgatgagttccttgggtttgctctttcttcacctgaaaagaagactccaggaagggcagcacatgccggagaaagatgaattccagcttgaccgcccagaggcgcggcagtgacgccgagttgggaccctgggtgatggctgcgaggtccaaggacgcggcgccgtcccaacgcgacggacttttgcccgtgaaagtggaggaagactcacccggaagttgggagcccaactatcccgcggcttcgccggaccccgaaacttctcgactgcactttaggcagctgcgttaccaggaggtggctggaccggaagaggcgctgagccggctccgagaactctgtcgtcggtggctgagacccgagctgctctccaaggagcagatcctggagctgctggtgctggagcagttcctcaccatcctgcccgaggagcttcaagcctgggtgcgagagcactgcccagagagcggggaggaggcggtggccgtggtgcgggctctgcagcgagcgctcgatggaacctcatcccaggtttggaaagcagagtggagaacaaagagttgattccaatgcaacaaattttagaagaagcggagccacaggggcaactacaagaagcgttccaggggaagcgccccctgttttctaagtgtggcagtacccatgaggacagggtggaaaagcagtccggagaccccttgcccctgaaacttgaaaattctcctgaagcagaaggactcaacagcatctcagatgtcaataagaatggttccatagaaggggaagactctaaaaataatgaattgcagaacagtgccaggtgttccaaccttgttctatgtcagcacatcccgaaagcagagaggcccactgacagtgaggaacacgggaacaagtgcaagcaaagtttccacatggtgacgtggcacgtgctgaaacctcacaagtctgacagtggagacagtttccatcattccagcctttttgagacccagaggcagctccatgaagaaagaccttataaatgtggtaactgtgggaagagtttcaaacaacgctctgacctctttagacaccagagaatccacacaggtgagaaaccctatggctgccaagaatgtgggaaaagcttcagccagagtgctgccctgaccaagcaccagaggacacacacaggcgagaagccgtacacctgtctgaaatgtggggagcgcttcaggcagaattcacacctaaatcgtcatcaaagtacccacagtagagacaaacattttaaatgtgaggaatgcggggaaacctgtcatatttccaacctttttagacatcagagactacataaaggggaaagaccctataagtgtgaagaatgcgagaagagcttcaaacagcgctctgacctctttaaacaccacagaatccacactggggagaagccctatggatgttccgtctgtgggaaacgcttcaatcagagtgcaaccctcattaaacaccagagaattcacactggggaaaagccttacaaatgtcttgaatgtggggaaagatttagacaaagtacacaccttatccgacaccaaagaattcatcaaaataaagtgctgtcggctgggcgtggtggctcacgcctataatcccagcactttgggaggccaaggcaggcagatcatttgagatcaggagtttgaaaccagcctggccaacatggtaaaatcctgtctctactaaaaatacaaaaatgagccgggcatggtggtgcatgcctgtaagcccagctattcgggaggctgaggtaggagaatcacttgaacccaggaggcggaagttgcagtgagctgagatcatgccactgcactccagcctgggcaacagagcgagactccatctcaaaaaagaaataaagtgctgtcattttgatatg

SEQ ID NO: 46529 - DNA, 2583 bp, Homo Sapiens
atgccaggcgggggtcctcagggcgccccagccgccgccggcggcggcggcgtgagccaccgcgcaggcagccgggattgcttaccacctgcagcgtgctttcggaggcggcggctggcacggaggccgggctacatgagaagctcgacagggcctgggatcgggttcctttccccagcagtgggcacactgttccggttcccaggaggggtgtctggcgaggagtcccaccactcggagtccagggccagacagtgtggccttgactcgagaggcctcttggtccggagccctgtttccaagagtgcagcagcccctactgtgacctctgtgagaggaacctcggcgcactttgggattcagctcagaggtggcaccagattgcctgacaggcttagctggccgtgtggccctgggagtgctgggtggcagcaagagtttgcagccatggatagttctgagaccctggacgccagctgggaggcagcctgcagcgatggagcaaggcgtgtccgggcagcaggctctctgccatcagcagagttgagtagcaacagctgcagccctggctgtggccctgaggtccccccaacccctcctggctctcacagtgcctttacctcaagctttagctttattcggctctcgcttggctctgccggggaacgtggagaagcagaaggctgcccaccatccagagaggctgagtcccattgccagagcccccaggagatgggagccaaagctgccagcttggacgggcctcacgaggacccgcgatgtctctctcggcccttcagtctcttggctacacgggtctctgcagacttggcccaggccgcaaggaacagctccaggccagagcgtgacatgcattctttaccagacatggaccctggctcctccagttctctggatccctcactggctggctgtggtggtgatgggagcagcggctcaggggatgcccactcttgggacaccctgctcaggaaatgggagccagtgctgcgggactgcctgctgagaaaccggaggcagatggagctggaaccaattgctttggatccaccatggaagcctcgacatcctgaaccaaactcctattaatgaaacttcccaaatttaaacaaagcaagacaaatagatatccacacagcgtagatcatgacttctttagacatcatgaaaagaaaaagaggacccacgtggaagaatacgctcatttatgatcagggtagcatcatattcctctcccttttaacattatttcaggatagcagctgtctggatgctggccatgggcttgaaaaaaaccaggtgggcatttctgcccactgtaccgtttctcccatgcgtttcccagtcccctgtcatggcatgaaaaaaccgctattgttctgtgttgggacaattagatttttgtaggggggagaaaccacccaaaagcaaatggaaaaatatgctatgattaatgtcagttacgggaattaaacttcggaggcctttaggacaattatgaaggaatcattttccccttggtggcaatatgtactacagttgtcccttgatatccatgggggattaattccaggacgcctgtggatacagaaatccacgtgtactcaagtcttgttttcagtggatatgaaaagtcggccctccatatctgcaggttttacacttggcgaatgctgtatttttgattcatgttggattaaggatctggaacccctgatacagactgtatttattgaaaaaaaagtctgcctatgagtagactcacatgttaaaacccgtgttgttcaagggtcaaccataactgcaggcagaacatctgggcaggaagctcctgcaggaagacctgtaaactcaggtctgtggaacggcgatgatcttcttcccttgcttccagaattattgctgtgagatcaggtgcactggctacgaccttactctttgtgcagaacttatttctggtctggtttaagtgaacgttattctttctgtgcagtcctgtggttacatcaaaggttaaatttcatatagcatgtctgttatatcagacttctctgatggcctgtccagagcaaacattttaaaatattggtcctattctgtcttataacagtctgctctggtgatttttgtctcatcaattggattatgacactgtcagccactgttagtgttattctcaaattcagtcttccattcatctctccttcccttccctggcagacagacttctgcagccactgggactgttggggtgaggaaaggcaagaaccgatgtttcattctctccctcccttcttcctccctcttttttgttggttgtggggtgggctacatcttcttacccaaacaaccaggagcatttgttggcaagtttattgtgcccagtgccgatgtctggacaattaattccctaggtcagtggctttcacagtttgtgatggtgactccaggaaggaaactcaccatgaccctgtatatacatagaacaaaaatgcagcccactctgatattgtatttgttctattctagttcattaaaagtgaatgttggtcttcatccttt

SEQ ID NO: 46530 - DNA, 2813 bp, Homo Sapiens
cgcagagaggcgcgccgcgccggcgccggcgcagagaggcgcagggctctcttgcttacagtggtcgccagcgccccctgctggcgccggggcactgcagggccctcttgcttactgtatagtggtggcacgccgcctgctggcagctagggacattgcagggtcctcttgctcaaggtgtagtggcagcacgcccgcctgctggcagctggggacactgccgggccctcttgctccaacagtagtggcggattatagggaaacacccggagcatatgctgtttggtctcagtagactcctaaatatgggattcctgggtttaaaagtataaaataaatatgtttaatttgttaactgattaccatcagaattgtactgttctgtatcccaccggcaatgtctaggaatgcctgtttctccacaaagtgtttacttttggatttttgccagtctaacaggtgaagccctggagattcttattagtgatttgggctggggcctggccatgtgtatttttttaaatttccactgatgattttgctgcatggccggtgttgagaatgactgcgcaaattgccggatttcctttgctgttcctgcatgtagtttaaacgagattgccagcaccgggtatcattcaccatttttctttttgttaacttgccgtcagccttttctttgacctcttctttctgttcatgtgtatttgctgtctcttagcccagacttcccgtgtcctttccaccggtcctttgagaggtcacagggtcttgatgctgtggtcttgatctgcaggtgtctgacttccagcaactgctggcctgtgccagggtgcaagctgagcactggagtggagttttcctgtggagaggagccatgcctagagtgggatgggccattgttcatcttctggcccctgttgtctgcatgtaacttaataccacaaccaggcataggggaaagattggaggaaagatgagtgagagcatcaacttctctgacaacctaggccagtaagtgtgtggtgatgccaggcatgcccttccctagcatcaggtctccagagctgcagaagacgacggccgacttggatcacactcttgtgagtgtccccagtgttgcagaggtgagaggagagtagacagtgagtgggagtggcgtcgcccctagggctctactggaccagcgtctcctgtctcctggagaggcttcgatgcccctccacaccctcttgatcttccctgtgatgtcatctggagccctgctgcttgcggtggccttataaagcctcctggtctggctccaaggcctggcagagtctttcccagggaaagctacaagcagcaaacagtccgcatgggtcatccccttcactcccagctcagagcccaggccaggggcccccaagaaaggctctggtggagaacctctgcatgaaggctgtcaaccagtccataggcaagcctggctgcctccagctgggtggacagacaggggctggagaaggggagaagaggaaagggggttgcctgccctgtctcctacctgaggctgaggagggagaaggggatgcactgttggggaggcagctgtaactcaaagccttagcctctgttcccacgaaggcagggccatcaggcaccaaagggattctgccagcatagtgctcctggaccagtgatacacccggcaccctgtcctggacaagctgttggcctggatctgagccctcgtggaggtcaaagccacctttggttctgccattgctgctgtgtggaagttcactcctgccttttcctttccctagagcctccaccaccccgagatcacatttctcactgccttttgtctgcccagtttcactagaagtaggcctcatcctgacaggcagctgcaccactgcctggcgctgtgcccttcctttgctctgcccgctggagacggtgtttgtcatgggcctggtctgcagggatcctgctacaaaggtgaaacccaggagagtgtggagtccagagtgttgccaggacccaggcacaggcattagtgcccgttggagaaaacgggaatcccaaagaaatggtgggtcctggccatccgtgagatcttcccagggcagctcccctctgtggaacccaatctgtcttccatcctgtgtggccgagggccaggcttctcactaggcctctgcaggaggctgccatttgtcctgcccaccttcttagaagcgagacggagcagacccatctgctactgccctttctataataactaaagttagctgccctggactattcaccccctagtctcaatttaaaaagatccccatggccacagggcccctgcctgggggcttgtcacctcccccaccttcttcctgagtcactcctgcagccttgctccctaacctgccccacagccttgcctggatgtctatctccctggcttggtgccagttcctccaagtcgatggcacctccctccctctcaaccacttgagcaaactccaagacatcttctaccccaacaccagcaattgtgccaagggccattaggctctcagcatgactatttttagagaccccgtgtctgtcactgaaaccttttttgtgggagactattcctcccatctgcaacagctgcccctgctaactgcccttctctcctccctctcatcccagagaaacaggtcagctgggagcttctgcccccactgcctagggaccaacaggggcaggaggcagtcactgaccccgagacgtttgcatcctgcacagctagaggtcctttattaaaagcacactgttggtttctg

SEQ ID NO: 46531 - DNA, 648 bp, Homo Sapiens
atgctggagattttcctttcagagaagaaaagcatttcctatcctgcccgtcttgtgcagtgttacctttttatcaccttggtccacgttgagctctacatcctggctgtgatggcctttgaccggtacatggccatctgcaaccctctgctttatggcagcagaatgtccaagagcgtgtgctctttcctcatcacagtgctttatgtgtatggagcactcactggcctgatggagactatgtggacctacaacctagccttctgtggccccagtgaaattaatcacttctactgtgtggacccaccactgattaagctggcttgttctgacacctacaacaaggaggtgtcaatgtttgttgtggctggtttcaacttcacttatcctctccttatcatcctcatttcctatctctacatatttcctgccaccctaaggatctgctctacagaaggcaggcacaaagctttttctacctgtggctcccatctgacagccgttactattttctattcagctcttttcttcatgtatctcagacgtccatcagaagagtccatggagcaggggaaaatggtagctgtattttataccactgtaatccccatgttgaatcccatgatctacagtctgaggaacaaagat

SEQ ID NO: 46532 - DNA, 585 bp, Homo Sapiens
atgtcgataaaaggtcttgagcaggcgatcgctaacctggatagcctggacagaaatatggttcccaatgccagcgcatgggctgtgaaccgggttgctgctaatggcgtctcggttgccgtccgaagggtggcgaaagaaacggtagccggtgataaccgcgtttcggggatacccgtaaagctggtacgacaaagggtgcgaatcaacaaagcctcggcgtcagggcactcagcggcccgaattaaggttaaccggggcaatcttcccgccatcaaactcggtgccgcgcaggtcagggcgacgaatcgaaagggcccgctggttcgaaaaagtagcgtgttaagaattggccgttatgtttttcgcgacgcctttatccagcgcctggcgaacggccgctggcacgtcatgaagcgaattgcaggaaaaagtcgttatcccatcgacgtggtcaaaattccattgtccgcgcccctcacaactgctttcgaagcagaaaagaaacgcatgcttgaagaggaaatgccaaaacaacttggctatgccctcaggcaacaactgaggttgcatctgacacgatga

SEQ ID NO: 46533 - DNA, 282 bp, Homo Sapiens
atggaagtgaaaggttggggtggagaagatgttcatctttatcgaaaatacttacgtggtgacctcattgttattcggaatccagttcctggtcttttccacctctggcatgaaaagcactgtgctgatgagctgacccccgagcagtaccgcatgtgcatccagtctaaagccatggatgaggcttctcgctcccacctgggaatgctggtcttcagggaggaaatagagacgcatcttcataaacaggcatacaggacaaacagcgaagctgttggttga

SEQ ID NO: 46534 - DNA, 576 bp, Homo Sapiens
aaggttcagtcgtttggggaaagggttgtgcttttcattctaaacgccattatttttggaagattggagagaaatttggatgatgatgacatgttttttctacctcactctgtgaaggaacaagctaaaatcctgtggagacgtggagcggctgttgggttttacacaaccaagatgaaaggcagactgtgtggtgatggcaccggtgcatgctacctgctgcctgtctttgacaccgtgttcatcaggaggaaacactggcaccgaggcttgggaacagccatgctgcgggacttctgtgagacattcccagaggacgaggccctgggggttagctgctcgatgtctcctgccatgtaccaagcacacccaggaaattccgaggacgtgagccgtcatgcgaggacttctcagaatgacagacccagacagcctgcccctggagacggcagcaaggagaggatgtgtggagaagaactggaagacacaaaggatgatccagagtgtggagtggaagaggaggatgccgggctggcagggcagccaccaggcaagcttacaaggtccagtccctga

SEQ ID NO: 46535 - DNA, 581 bp, Homo Sapiens
cttgctgcgacgcagcggtcggaagcggagcaaggtcgaggccgggttggcgccggagccggggccgcttggagctcgtgtggggtctccggtccagggcgcggcatgggcgtcctggccgcagcggcgcgctgcctggtccggggtgcggaccgaatgagcaagtggacgagcaagcggggcccgcgcagcttcaggggccgcaagggccggggcgccaagggcatcggcttcctcacctcgggctggaggttcgtgcagatcaaggagatggtcccggagttcgtcgtcccggatctgaccggcttcaagctcaagccctacgtgagctacctcgcccctgagagcgaggagacgcccctgacggccgcgcagctcttcagcgaagccgtggcgcctgccatcgaaaaggacttcaaggacggtaccttcgaccctgacaacctggaaaagtacggcttcgagcccacacaggagggaaagctcttccagctctaccccaggaacttcctgcgctagctgggcgggggaggggcggcctgccctcatctcatttctattaaacgcctttgccagctata

SEQ ID NO: 46536 - DNA, 2013 bp, Homo Sapiens
atgtctttggctgatctaacaaaaacaaatatagatgagcatttcttcggcgtggcattagaaaacaataggaggtctgcagcatgcaagagaagcccaggcacaggcgatttttcacggaacagtaatgcttccaataagagtgttgattatagcagatctcagtgctcctgtggaagtttaagttctcagtatgattattcagaagactttctctgtgattgttcagaaaaggctattaatagaaattatttaaagcagcctgtggtaaaagaaaaggagaagaaaaagtataatgtttctaaaatctcccaatctaaaggccagaaggaaatatcagttgaaaaaaagcacacctggaatgcatcactctttaattctcaaatccatatgattgcccaaagaagagatgctatggctcatcgaatactctcagcaaggcttcataaaattaaaggactaaaaaatgaattagctgatatgcatcataaattggaagccatccttacagaaaaccaatttttgaaacaacttcagcttaggcatttgaaagctataggaaaatatgagaattcacaaaataatctacctcaaattatggctaaacatcagaatgaagtaaaaaatttaaggcaactacttaggaaatcccaggaaaaggaaagaactctatctaggaaacttagagaaactgacagccagttactgaagactaaagatatcttgcaggcactgcagaaactttctgaagacaaaaaccttgcagaaagggaagaactcactcataaattatctattatcacaacaaaaatggacgcaaatgacaaaaaaatacagagcttggaaaaacaactgaggttgaactgcagagcctttagccggcagctggctattgagactcggaagactttagcagctcagacagctaccaagactctgcaggtggaagtaaaacaccttcaacaaaaacttaaggaaaaggatcgtgagcttgaaattaaaaacatctatagtcatcgaatacttaaaaatttacatgacacagaggactatccaaaagtttcttcaacaaaatcagtccaagcagacagaaaaattttgccattcacaagtatgagacaccagggaacccaaaaatcagatgttccacctttgacaactaagggtaaaaaggcaacaggaaacatcgatcataaagaaaaatcaactgaaataaatcatgaaattcctcactgtgtgaataaactaccaaagcaagaggattctaagagaaaatatgaagatttatcaggggaagagaaacatttggaagtccaaatactgctggagaatactggaagacaaaaagacaaaaaagaagaccaagaaaagaaaaacatttttgtgaaagaagagcaagaactaccaccaaaaataattgaagttattcatcctgaaagagaaagcaatcaagaagatgttctagtaagagaaaagtttaaaagaagcatgcagagaaatggtgtggatgacacacttggcaaaggcactgctccctacacgaaaggccccctcagacaaagaagacattactcattcacagaagcaactgaaaacctgcatcatgggcttcctgcttcaggggggccagccaatgccggcaacatgaggtacagtcatagtacaggcaagcatctcagtaacagagaggaaatggagctagagcattctgacagtgggtatgagccctcatttggtaagtcttccagaataaaagtgaaggatacaactttcagagataagaaaagcagtctcatggaagaactctttggatcaggctatgtcttgaaaactgaccaatcaagtcctggtgttgcaaaaggctcagaggagcctttgcaaagtaaggagtcgcatcccctgcctcccagtcaggcctccaccagccatgctttcggagactctaaagtaactgtggtaaattctattaagccatcgtcacctacagaaggaaaaagaaaaataattatttaa

SEQ ID NO: 46537 - DNA, 3012 bp, Homo Sapiens
aaccgctacggcgtttgaaagtgtccgggttgcttaggatccctacaggtagcgcctctggatacatgcgtggtctgctgacccagagagaaacgaaagcagaactgtttggcgggagatcatgtcagccgtggtagctcagacgctgcatgtttttggtcttcgatcccacgtggccaacaatatcttctacttcgatgaacagatcattatatttccttcaggaaatcactgtgtgaagtacaatgtggatcagaaatggcaaaaattcattccaggctcagagaagagtcagggcatgttggccttgtccatcagtcccaatcggcggtacctcgctatctctgagactgtgcaagaaaaacctgccatcaccatttatgaattgtcatccatcccttgccggaagcgcaaagttcttaataattttgacttccaagttcagaaatttattagcatggctttttctccagactccaaatacctattggctcagacgtcacctccagagtcaaatcttgtctactggctgtgggaaaaacagaaagtaatggccattgttagaatcgacactcagaacaaccctgtctaccaggtgagcttcagtccacaggataacactcaggtgtgtgtcactggaaatgggatgtttaagcttctccgttttgctgagggaaccctgaagcaaaccagctttcagaggggagaaccccaaaactatctagctcacacctgggtggctgatgacaagattgtcgttggcactgacacaggcaaactcttcctctttgaatctggagatcagcgttgggagaccagcataatggtcaaggaacctaccaatggctcaaagagcctggatgtcattcaggaatcagagagcctgattgaatttccaccagtcagttctccactcccttcctatgaacagatggtggcggccagtagccatagccagatgtccatgccccaggtgtttgccattgcagcctattcaaagggatttgcctgttctgctgggccagggagagttctgctgtttgagaagatggaagaaaaggatttttaccgtgagagcagagaaatcaggattcctgtggacccgcagagcaatgatccaagtcagtctgacaaacaggacgttctctgcctgtgcttcagcccctcagaggaaactctggttgccagcaccagtaagaaccaactctacagcatcaccatgtccctgacagagatcagcaagggggagcctgctcactttgagtatttgatgtatccattgcactcagcacccatcaccggtctagctacctgcatccgcaaaccccttatagccacctgttctctggatcgatccatccgcctttggaattatgaaacaaacaccctggaactatttaaggaataccaagaagaggcatattccatcagccttcatccatctggacacttcattgtagtagggtttgctgacaaactacgcctcatgaatctactcattgatgatatacgttctttcaaagaatactctgttagaggatgcggagagtgttcctttagcaatggaggtcacctgtttgctgcagtcaatggaaatgtgattcacgtttacaccaccacgagcctagagaacatctcaagcctgaaaggacacacagggaagattcgctcaattgtgtggaatgcagatgatagcaaactgatttctggtggcacagatggtgctgtgtatgaatggaatctgtccacaggaaagagagagacagaatgcgtgctcaagtcttgcagctacaactgtgttactgtctcccccgatgccaaaattatctttgctgttggatcagaccacaccctcaaggagattgcagattccttgatccttcgagagatatcggcgtttgatgtcacctacaccgccattgtcatctcgcattctggacgcatgatgtttgtgggcacctcggtgggaaccattcgtgccatgaagtaccctctgcctctgcagaaggaattcaatgagtaccaggcccatgccggtcctatcaccaaggtgagcagggccctctccccaggaacccagtcccacacctgcctgctacgtgccttgttcatcccttcaacctcccaatgtcttttctctctccttcttctctcttatttattcatccatcattcattgaatcaccatctattgactatgaatatactctttgtttaaactacttccaggaatttagcctaggaaatcatcagagatacacctaaaaatgtatgtacaacgttttcaccataatattatgcataataaggggccgtttggtggatgccgtagctgccgtgagtgtgggctgcacttgaccacagctgcctcctcctccagagaatgccccagactgaaaggagccatagccctgaagattggcccctacctctccctgagggtacaaaaggccaccccaggggcaataccatgagtacacatttgtaaattgtccttccattcacccttctcataaagtagtatctatgttcaacagtcaaaatgtggaagcaaccaagcatccatcgacagacgaatgcataagcaaaagatggtatatctatacaatggaacaataccctgcctaaaaaggaagggaattctgcaatgtgctaccacatggatgaaccttgaggatgttatgctaaattaaataaggccaaccacaaaaagataagtacagtgtgattccacttttaggagatacttggagcagtcagaatcacaaagacagagtggtggttggcaggggctgcaggaagggggaatgaggaatgattgtttcataggtatagagttttggttttacaagacaaaaggattatgggggtagttggtggcaatggctgcacaacattacaaatgtatttaataacatgaactgtacacttgaaaatggttaagatagcaaattttacagaatatgtattttacgacaattttaaaaatgaaataaaaaagaattatcttgc

SEQ ID NO: 46538 - DNA, 687 bp, Homo Sapiens
ctggcgcagttatggtgctgcgcgctggcgctgcagggcaggttgctgtacccccgggagagcccgtcgcgggagctcaagaagctggacggcctcaagcttcagcgcctacttctccgacaaccggcgccggggcttctaggagcagtgttacggtcctcggctgcgagaggccccaccctggacatgccggtttcttccaccttcaacgacattggccaggactggtggccgcagccttttttcggccagatgtggtacgaacaggaagtgaccctgccagagcgatggacccaggacctgcacacaagagtggtgctgaggattggcagtgcccactcctatgccatcatgtgggtgaatgggatcgaagcgctggagggtgagaggggctgtctccccttccaggccaacatcagcagcctggtcctggtgggtcccctgccctcccacctccacatcactgtcaccatcaacaacacactcactccctccaccctgccaccagggaccaaccacgatatgaccaacacctttatatatctcaggggttactttgtctggaacacagactttgacttcttcaactatgcaggactgcagcggtctgtgcttctgtacacaacacccaccacctacattgatgacatcaccatcaccaccggcgtggagcatgacagtggtgag

SEQ ID NO: 46539 - DNA, 552 bp, Homo Sapiens
atgaacggggtgcgtatgctgctctcggggtggtcccggcttggccctgccctgccgcgtggacgctgccacctccgtttcctgggggagagttttgtcgtgtgtgaggacggggttgttcccatggtcaccacctgtgaccctcacctgcgtgcagagggagcacagctgggcctgggctcatccacgtcgggtgcccctggggtgcttgtggcctcccctgcacagggagctcctcctggtggggcctccgacccccctcatttaggtgtcccccagctgtggacgtccccactctggcgcgggctccttccttctggggtcgtttgtggaacggggcctgggtccgtggctccgggagggaacggccccgagggtggggtccccctggctggggaggggccccgcagagaggcccaggctgcaccccgaggcgtctggcgtggctgcggtccccctccagcactgacgcttgtaaatcctggacggagccacgctgtggctgagggagccgagcccgtgactgaaaatcctccaaacgtacaagcgtga

SEQ ID NO: 46540 - DNA, 2145 bp, Homo Sapiens
gatgaaactgaccatatagacaaaattaatgacaggcagattccatttgacctcctgagcactttagaagctgaaaaagtctgtcagaaccatgtacaacatccaatatccgagaagaggagggtagaaatgaaggaaaaattcaaaaagactttggaaaaaattcaagtcatttcacctggacagccatgggaggaagttatgtgctttgttatggaggatgaagccttcaagtatatcactgaggctgatagcaaagaggcatatggtaggcatcagatagttaaatccaaagaaaagtttcaagaaatgctttttgagcattctgaacttttttatgatttagatcttaatgcaacacctagttcagataaaatgagtgaaattcatacagttctgagtgaagaacctagatataaagctttacagaaacttgcacctgatagggactctcttctacttaagcatataggatttgtttatcatcccactaaagaaacgtgtcttagtgaccaaaattgtacagacattaaagtggagcagttacttgctagcagtcttttacagttggatcacggctgcttaagattatatcacgatagtaccaatatagataaaattaacctttttattttagggaaggttggccttgcccaagaactagcaaatgagataaggacacaatccactgatgatgagtatgccttagatggaaaatttatgaacttgatcttcggccagttcgccttaccttttgagtcagttactgctgcctttaaaccacatcggtgcttctgtgtatttaattccattaagtcattgagttttattgaatttattgggaaaataagaactgaagcttctcagatcagaaaagataaatacttggctaatcttccatttacattaattctggctaatcagagagattccattagtaagaatctaccaattctcaggcaccaagggcagaagttacaatgtccttttgtagatgtacctgctggtacatatcctcataatttttatgaaacccaaataaagcaagctctaagaggagtactggaatctgttaaacccaatttggatgtggtgagcccagtttctgccaagaaggacatatcagaagctgacttgagaattgtcatgtgtgccatgtatggagatccatttagtgtgaatcttattccctcacccttccctgattctcattcttgcagtgctgctcaagctggacagaataattccctaatgcttgataaaatcattggtgaaaaaaggaggcgaatacagaccacaatattatcataccactcttcaattggagtaagaaaagatgaactagttcatgggtatatattaatttactctgcaaaacagaaagcatcaatgggaatgcttcgagcatttctatcagaagttcaaaacattcctgtacagctggtggcagttactgatagccaagcagattttttttttgaaaacgaggctatcaaagaattaatgactgaagaacacattgcaactgagatcactgctaaatttacagcattgtattctttatctcagtatcatcagcaaactgagatctttattctgttttttagtgatgttctagagaaaaaacatatgatagaaaattcttatttgtctgataatacaagggaatcaacccatcaaagtgaagatgtttttctaccatctcccagagacttttttccctataacaactaccctgattcagatgatgacacagaagcactacctccttatagtccaactggggatgatgtacagttgcttccaacacctagtgaccattccagatacagattagatttgcaaggaaatgaatattctattcatagtaccccaaactgtcgtgaccatgaacgcaaccataaagtgcctccacctattaaacctaaactagttgtacctaagacaaatgtgaaaaaaatggatccaaacattttaaaaacaattgaagctggtattggtaaaaatccaagaaagcggacttcccaggtgcctttggcacatcctgaagatatgaatccttcagataactatgcggaacccattgatacaattttcaaacagaagggctattctgatgagatttatattgtcccagatgatagt

SEQ ID NO: 46541 - DNA, 198 bp, Homo Sapiens
atgagcgcacgcggtgagggcgcggggcagccgtccacttcagcccagggacaacctgccgccccagcgcctcagaagagaggacgcggccgccccaggaagcagcagcaagaaccaaccggtgagccctctcctaagagacccaggggaagacccaaaggcagcaaaaacaagagtccctctaaagcagctcaaaag

SEQ ID NO: 46542 - DNA, 549 bp, Homo Sapiens
atggccgactcggaaaaccaggggcctgcggagcctagccaggcggcggcagcggcggaggcagcggcagaggaggtaatggcggaaggcggtgcgcagggtggagactgtgacagcgcggctggtgaccctgacagcgcggctggtcagatggctgaggagccccagacccctgcagagaatgccccaaagccgaaaaatgactttatcgagagcctgcctaattcggtgaaatgccgagtcctggccctcaaaaagctgcagaagcgatgcgataagatagaagccaaatttgataaggaatttcaggctctggaaaaaaagtataatgacatctataagcccctactcgccaagatccaagagctcaccggcgagatggaggggtgtgcatggaccttggagggggaggaggaggaggaagaggagtacgaggatgacgaggaggagggggaagacgaggaggaggaggaggctgcggcagaggctgccgcgggggccaaacatgacgatgcccacgccgagatgcctgatgacgccaagaagtaa

SEQ ID NO: 46543 - DNA, 2062 bp, Homo Sapiens
gaggagctccatgttcagaaggagattgtaaaggaatttttcatcagaggtcctggagcagcctgtggcttgacctcactttacttccaggaaagtaccatgacccgttgcagccatcagcagtctccctatcagcttctgtttggggaaccctacatctttgaagaacttctgagcttgaagatccgcatctctccagatgcctttttccagattaacacagctggtgcagagatgctgtatcggactgtgggggagctgactggagtgaactctgacaccatccttcttgacatctgctgtggaactggcaagtggaagcccagggcagaatctgcatgctgctcagctcccaaggcccttgtagcttgcggaggtggtcggggagaggtagtggtagtggtgcagcatacatctcgggtccttgggattgaattgttggagcaggcagtggaggatgcaagatggactgcagccttcaatggcatcaccaactctgaatttcatactggtcaagcagagaagattttgccagggctgctaaagtcaaaggaagatggacagtcaattgttgctgtggtgaacccagcccgtgccggactgcattacaaggtgattcaagccattcgaaacttcagggccatccacacgctagtttttgtttcctgcaagctccatggtgaatccactaggaatgtcattgagctgtgctgtcctccagaccctgctaagaagctcttaggcgagccctttgtcctgcagcaagctgtacctgtggatttgttccctcacaccccacattgtgagctggtgctcctctttactcgataagcagcctcctagaagacagcaggctatttgttaaggctgaagtttcagaaactttcaggtttggcatattgctacattgcagaccctgggagcattacagtggaaaccaatctttggtttgtgaataggaagaatctattaggcctctggtctgaggcagattttttttttgagatagagtctcactcttgcccaggctggagtgtcgtggcgtgatctcagctcactgcaacctccgcctcccgggttcaagtgattctcgtgcctcagcttccccagtagctaggattaaaggtgcgtgccaccatgcccggctaatttttgtatttttggtagagacagggtttcaccatgttggccaggctggtctcaaactcctgacctcaagtgatccacccgcctcggcctctcaaagtgctgggattataggcgtgagccaccacaccccgccgcggctgacttaaccttagatttcagattccctttcaatcatgcccgtttgcttgggtttgaccactccccactcctggatctggactgtttcttcctgttgctgtcagccttggttctagtttatagtcttgtctcctccgtttctgcttatggtgtggacaaatgaccttttttaagcagctggtaataattttacattgactggagcctgtgcatttgctcagagatgctacaatttttagatatttctaagacttctggattcttgaggtagttaaggattaaaaccagaaacagtcgaggttttttaaaagcagggtaagccatgaagtgaatacagggtgactgagtgatcatcagatgagattaattcttttgggttttcttggttttaaggcatctcgaatgccccttgaaaatgtagttttccctggtggtgggcacctgtaatcccagctactcgggaggctgaggcaggataattgcttgaacctgggaggtggaggttgcagtgagctgaaattgtgccactgcactccagcctgggtgacagagtgagacaccatctcaaaaaaaaaaaaaaaaagaaaatgtagttatccctaggagcaatagcaccaattaactctcacccgtggaggaagaattggttattggagagaccctaagggaaaggagattttcagagagactgaatacctataattgtgctgtgtagtgtggaggcaaaaagctccaaaatctagtataacataataaactggatattgaaaactga

SEQ ID NO: 46544 - DNA, 283 bp, Homo Sapiens
cagttatgatcctcttctgaaatcaggaatacgaccccaagaaatgacaggcaaaaagatgccagtaatcaatattgaggacctgacagaaaaggacaaattgaagatggaagttgaccagctcaagaaagaagtgacactggaaagaatgctagtttccaaatgttgtgaagaagtaagagattacgttgaagaacgatctggcgaggatccactggtaaagggcatcccagaggacaaaaatcccttcaaggagctcaaaggaggctgtgtgatttcataa

SEQ ID NO: 46545 - DNA, 1958 bp, Homo Sapiens
ctactgtgaggggatgaaggtgctccctgcatctggccttgctgtcttcctcatcatggctttgaagttttccactgcagccccctccctagttgcagcctcccccaggacctggaggaacaactaccgcctcgcacaggcgtatcttgacaaatattacacaaataaagaaggacaccagattggtgagatggttgcaagaggaagcaattccatgataaggaagattaaggagctacaagcgttctttggcctccaagtcaccgggaagttagaccagaccacaatgaacgtgatcaagaagcctcgctgtggagttcctgatgtggccaattatcgcctcttccctggtgaacccaaatggaaaaaaaatactttgacatacagaatatctaaatacacaccttccatgagttctgtcgaggtggacaaagcagtggagatggccttgcaggcctggagtagcgccgtccctctgagctttgtcagaataaactcaggagaagcggatattatgatatcttttgaaaatggagatcacggggattcctatccattcgatgggcctcgggggactctagcccatgcatttgctcctggagaaggcctgggaggagatacacatttcgacaatgctgagaagtggactatgggaacgaatggttttaatttgtttaccgttgctgctcatgaatttggccatgccctgggcctggcccattccacagacccatcagcactgatgtacccaacttataagtacaagaatccctatggattccacctccccaaagatgatgtgaaagggatccaggcattatacggacctcggaaagtattcctggggaagcccactctgccccatgccccccatcacaagccatccatccctgacctctgtgactccagctcatcctttgacgctgtgacaatgctggggaaggagctcctgctcttcaaggaccggattttctggagacggcaggttcacttgcggacaggaattcggcccagcactattaccagctccttcccccagctcatgtccaatgtggatgcagcttacgaagtggctgagaggggcactgcttacttcttcaaaggtccccactactggataacaagaggattccaaatgcaaggtcctcctcggactatttatgactttggatttccaaggcacgtgcagcaaatagatgctgctgtctacctcagggagccacagaagacccttttctttgtgggagatgaatactacagctacgacgaaaggaaaaggaaaatggaaaaagactatccaaagaatactgaagaagaattttcaggagtaaatggccaaatcgatgctgctgtagaattaaatggctacatttacttcttttcaggaccaaaaacatacaagtatgacacagagaaggaagatgtggttagtgtggtgaaatctagttcctggattggttgctaaatagaaaagcctagtcttctcaagcaatgaggatgactacaagcagcctctaactggatcttaaggactaaagcagaatgtaggagagggattcttccaaaggccttcaaatcaaattagaattcactgagaataataatacttccaatttttttcatagttgtataatcagaatttcaatccacattagaaaagtttttatatgggcaactttatgcgaaatccaaatcaacacaatgcactctgcagttagacaccattattttttcttacctaatatactgaagcagattgatccgtttgatttttatttccaggaggaagactagtggtggattccatgacatatattgtaattcttttcataggaaatgtcattacagtatgaattataattatttacaagcaatggcttttgtggccatcatttggccatcatttgttataataaatataaatttcccaatttttacttaaaagacatcacaacaaa

SEQ ID NO: 46546 - DNA, 954 bp, Homo Sapiens
atggctataggaaactggacagaaataagtgaatttatcctcatgagcttctcttccctacctactgaaatacagtcattgctcttcctgacatttctaactatctatttggttactctgaagggaaacagcctcatcattctggttaccctagctgaccccatgctacacagccccatgtacttcttcctcagaaacttatctttcctggagattggcttcaacctagtcattgtgcccaaaatgctggggaccctgcttgcccaggacacaaccatctccttccttggctgtgccactcagatgtatttcttcttcttctttggggtagctgaatgcttcctcctggctaccatggcatatgaccgctatgtggccatctgcagtcccttgcactacccagtcatcatgaaccaaaggacacgggccaaactggctgctgcttcctggttcccaggctttcctgtagctactgtgcagaccacatggctcttcagttttccattctgtggcaccaacaaggtgaaccacttcttctgtgacagcccgcctgtgctgaagctggtctgtgcagacacagcactgtttgagatctacgccatcgtcggaaccattctggtggtcatgatcccctgcttgctgatcttgtgttcctatactcgcattgctgctgctatcctcaagatcccatcagctaaagggaagcataaagccttctctacgtgctcctcacacctccttgttgtctctcttttctatatatcttctagcctcacctacttctggcctaaatcaaataattctcctgagagcaagaagttgttatcattatcctacactgttgtgactcccatgttgaaccccattatctacagcttgagaaatagcgaggtgaagaatgccctcagcaggaccttccacaaggtcctagccctcagaaactgtatcccatag

SEQ ID NO: 46547 - DNA, 3279 bp, Homo Sapiens
ccagcccaggctgagcccactgatggctaccaatacacctactcccaggccagcgagatccggacccagaagcttaccagcggtgtcttacacaagctggactctttcacccaggtgtttgccaaccaaaacctgcgaattcaggtcaacaatatggcccaggtgctgcacactcagtcagcagtgatggatggagcccctgacagtgctctccgccagctgctgtctcagaagcccatggagcccccagcaccggctatcccttcccgctaccagcaggtgccccagcagcctcaccctggtttcactggtgggctgtccaaaccagctcttcaggtcgggcagcaccctacccaagggcacctgtattatgactaccagcagcctctggctcaggtgccagtgcagggaggacagccactgcaggccccacagatgctgtcacagcacatgcaacagatgcagcagcaccagtattacccaccgcagcaacagcagcaagccgggcaacagcgtatctccatgcaagaaatacagacgcagccgcaacaaattcgcccatcacagccacagccgccgccacagcagcagcagccgcagcagctacagctgcagcagcggcagggttcaatgcagatacctcagtattatcagccccaacccatgatgcagcacttgcaagagcagcagcagcaacagatgcacctgcagcctccttcttatcacagggaccctcaccagtataccccagagcaggcacacactgtccagctgattcccctgggctccatgtcccagtactactaccaggagccccagcagccctacagccaccccctctaccagcagagccacctgtcccagcaccagcagcgtgaggacagtcagctgaagacctactctagtgacagacaggcccaggccatgctgagctcccatggggacctggggcctcctgacacaggaatgggagacccagcgagctcagatctgacccgggtcagcagcaccctcccccatcgccccctcctatcccccagtgggatccacctcaacaacatggggcctcagcatcagcagctgtctcccagtgccatgtggccccagatgcacctacctgatgggagagcccagccagggtcccctgagtcaagtggccaacccaaaggagcgtttggggagcagtttgatgccaagaacaagctgacatgctccatctgcctgaaggagttcaagaacctgcctgccctgaatggccacatgcggtcccacgggggaatgagggcctcccccaacctcaaacaggaaatccccaggaagcatcagccgagtgtgcccaaagccgaggagcccctcaagaccgtgcaggagaagaaaaagttccggcaccggccggaacctctcttcatcccgccgccgccctcctacaacccgaaccccgctgcctcctactcgggcgccaccctgtaccagagccagctgcgctccccgcgcgtcctcggggaccacctgctcctggaccccacccacgagctgcccccttacacgcccccacccatgctgagcccggtgcgccagggctcggggctcttcagcaatgtcctcatctccggccacggccctggcgcccacccgcagctgcccctgacgcccctgacgcccacaccacgggtgctgctgtgtcgctccaacagcatcgatggcagcaacgtgacggtcaccccagggcctggagagcagactgtagatgttgaaccacgcatcaacattggcttgagattccaagcagaaatccctgaactccaagatatctctgccctggcccaggacacacacaaggccacactggtatggaagccctggccagaactagaaaaccatgacctccagcaaagagtggagaatcttctgaatttgtgctgttccagtgcattgccaggtggagggaccaattctgaatttgctttgcactctctgtttgaggccaaaggtgatgtgatggttgctctggaaatgctgctactgcggaagcctgtcaggttaaaatgtcatcctttagcaaattaccactatgccggttcggacaagtggacctccctagaaagaaaactgtttaacaaagcactagccacttacagcaaagactttatttttgtacagaagatggtgaagtccaagacggtggctcagtgcgtggagtactactacacgtggaaaaagatcatgcggctggggcggaaacaccggacacgcctggcagaaatcatcgacgattgtgtgacaagtgaagaagaagaagagttagaggaggaggaggaggaggacccggaagaagataggaaatccacaaaagaagaagagagtgaggtgccgaagtccccggagccaccacccgtccccgtcctggctcccacggaggggccgcccctgcaggccctgggccagccctcaggctccttcatctgtgaaatgcccaactgtggggctgactgtagatgtcatgtcactccctttcttccccaggtgttcagctcccgacaggcactgaatggccatgcccgcatccacgggggcaccaaccaggtgaccaaggcccgaggtgccatcccctctgggaagcagaagcctggtggcacccagagtgggtactgttcggtaaagagctcaccctctcacagcaccaccagcggcgagacagaccccaccaccatcttcccctgcaaggagtgtggcaaagtcttcttcaagatcaaaagccgaaatgcacacatgaaaactcacaggcagcaggaggaacaacagaggcaaaaggctcagaaggcggcttttgcagctgagatggcagccacgattgagaggactacggggcccgtgggggcgccggggctgctgcccctggaccagctgagtctgatcaaacccatcaaggatgtggacatcctcgacgacgacgtcgtccagcagttgggaggtgtcatggaagaggctgaagttgtggacaccgatcttctcttggatgatcaagattcagtcttgcttcagggtgacgcagaactataaagccctgtgtgtcacttagagacagtgaaaacccacggcctccatcttcattaatcaggaaacctggactgcctgcttgttttgtaacccttttaaactacctgttttaaaagtggtcattttattcaggtttagaaaaaaaaatcctatttcttttccttttatttaaaaaaatttgtttttgtggggggttgggggaataaataattggcacaacta

SEQ ID NO: 46548 - DNA, 882 bp, Homo Sapiens
cagaagaagctggaggagctggaacttgacgagcagcagaagcggctggaagcctttctcacccagaaagccaaggtcggcgaactcaaagacgatgacttcgaaaggacctcagagctggacgcgggcaacggcggggtggtcaccaaagtccagcacagaccctcgggcctcatcatggccaggaagctgatccaccttgagatcaagccggccatccggaaccagatcatccgcgagcaccaggtcctgcacgagtgcaactcaccgtacatcgtgggcttctacggggccttctactgtgacagggagatcagcatctgcatggagcacatggatggcggctccctggaccaggggctgaaagaggccaagaggattcccgaggacatcctggggaaagtcagcattgcggttctccggggcttggcgtacctccgagagaagcaccagatcatgcaccgaaatgtgaagccctccaacatcctcgtgaactctagaggggagatcaagctgtgtgacttcggggtgagcggccagctcatcgactccatggccaactccttcgtgggcacgcgctcctacatggctccggagcggttgcagggcacacattactcggtgcagtcggtcatctggagcatggacctgtccctggtggagctggccatcgaaagcctgcccgccatggccatcttcgaactgctggactatattgtgaaagagccgcctcctaagctgcccaacggtgtgttcacccccgacttccaggagtttgtcaataaatgcctcatcaaaaacccaacggagcgggcggacctaaagatgctcacaaaccacgccttcatcaagcggtccgaggtgaaagaagcggattttgcc

SEQ ID NO: 46549 - DNA, 1442 bp, Homo Sapiens
gtattaaagggaccggagcggggcagttcccgacgccgcagcgctcgctttcccttccctcctctctggccctccctcctcccacccactggctccctcccccagcgctctccagtttctgtgccccaggagctacgcgacagtcttccaggattatggagtttctgagcgagaagtttgccctcaagagccctccgagtaaaaacagtgacttttacatgggcgcaggaggtcctctggagcacgttatggagacgctggacaatgagtccttttacagcaaagcgtctgcaggcaaatgcgtgcaggccttcggacccctgccccgcgccgagcatcacgtgcgcttggagaggacctcgccctgtcaggacagcagcgtgaactatgggatcactaaagtagaaggacagccccttcacaccgaactgaatagagctatggacaactgtaacagtctccgaatgtctcccgtgaaagggatgcaagagaagggagagctggatgaacttggggataaatgtgatagcaatgtatccagcagtaagaaacggaggcaccgaaccaccttcaccagtttgcagctagaggagctggagaaagtctttcagaaaactcattacccggatgtgtatgtcagagaacagcttgctctgaggacagagctcactgaggccagggtccaggtttggtttcaaaatcgaagggccaaatggagaaaaagggaacgttatggccaaatacaacaagcgaaaagccattttgctgccacctatgatatatcagttttgccaaggactgacagctacccacagattcagaacaatttgtgggcaggaaatgcaagtggtggttctgtggttacttcatgcatgttaccacgtgacacttcctcctgtatgacaccttattctcactcgcctcggacagattccagttacacggggttttcaaaccaccagaaccagttcagccacgtgcccctcaacaattttttcactgactctcttcttactggggcaaccaatggacatgcatttgaaacaaagccagagtttgaaaggaggtcttccagtatcgcagttcttcgaatgaaagccaaggagcacaccgccaatatttcatgggccatgtaacatacagtactcttttatttttcttttaatagcaaagttaaacattcttatttctcatatttaaaggataccacaataagctgctgtgtgtggaattgctaaaggtcaagatattcagtgagaccagcttaaatgaatagttgttatttaacattaaaatctaagaatgaacctctgaaaagactaaataggtttaccatgtgccagtctccacaaaccctgttttagtagtaaggttttctttttctattgtacaagtcaatgaaatatgatcacgcaacttattaaagaataaatgtgttaaac

SEQ ID NO: 46550 - DNA, 4037 bp, Homo Sapiens
atggcggagccctcggccccggagagcaagcacaagtcgtccctcaactcgtccccgtggagtggcctcatggccctgggaaacagccggcacggccaccacgggcccggggcccagtgcgcgcacaaggcggcgggcggcgcggcgccgccgaagccggccccggcggggctgtccggggggctgtcgcagccggctgggtggcagtcgcttctctccttcaccatcctcttcctggcctggcttgccggcttcagctcgcgcctcttcgccgtcatccgcttcgaaagcatcatccacgagttcgacccgtggtttaactatagatcaacacatcatcttgcatctcatgggttctatgaatttttaaattggtttgatgaaagagcatggtatccactaggaagaatagtaggtggtactgtttacccagggttgatgataaccgctggccttattcattggattttaaatacattgaacataactgttcacataagagacgtatgtgtgttccttgcaccaacttttagcggccttacatctatatctactttcctgcttacaagagaactttggaaccaaggagcaggacttttagctgcttgttttattgctattgtaccaggctacatatctcggtcagtagctggatcctttgataatgaaggcattgctatttttgcacttcagttcacatactatttatgggtaaaatctgtaaaaactgggtcagttttttggacaatgtgctgctgcttatcctatttctatatggtctctgcttggggtggttatgtatttatcatcaatcttattccactgcatgtatttgtgttgttactgatgcagagatacagcaaaagagtctacatagcatatagcactttctacattgtgggtttaatattatcaatgcagataccttttgtgggattccagccaatcagaacaagtgaacacatggcagctgcaggtgtctttgcattgctgcaagcttatgctttcttgcagtatctgagagaccgattaacaaaacaagagttccagacccttttctttttgggtgtatcactagctgcaggtgctgtgttccttagtgtcatctatttgacttatacaggttacattgcaccatggagtggcaggttttattcattgtgggatactgggtatgcaaaaatacacattccaattattgcatcagtgtctgagcatcaacctacgacttgggtgtctttcttctttgatctacatattcttgtatgtaccttcccagcaggcctttggttctgcatcaaaaatatcaacgatgaaagagtatttgttgctctatatgcaatcagtgctgtctactttgctggagtgatggtgcgactgatgttgactttgactccagtcgtgtgtatgctgtctgcaattgccttttcaaatgtttttgagcactatttgggggatgacatgaaaagggaaaatccacctgtggaggacagcagtgatgaggatgacaaaagaaaccaaggaaatttgtatgataaggcaggtaaagtgaggaaacatgcaactgaacaggaaaaaactgaagagggattaggccctaatataaaaagcattgtcaccatgttgatgctgatgctattgatgatgtttgctgtccactgtacctgggtcacaagcaatgcctactctagtccaagtgtagtcctggcctcatacaatcatgatggcaccaggaatatcttagatgattttagagaagcttacttttggctaaggcaaaatacagatgaacatgcacgagtaatgtcttggtgggattatggctatcagatagctggaatggctaatagaactacgttggtggataataacacctggaataacagccacatagcactggtgggaaaagctatgtcttctaatgaaacagcagcctataaaatcatgaggactctagatgtagattatgttttggttatttttggaggggttattggctattctggtgatgatatcaacaaatttctctggatggttaggatagctgaaggagaacatcccaaagacattcgggaaagtgactattttaccccacagggagaattccgtgtagacaaagcaggatcccctactttgttgaattgccttatgtataaaatgtcatactacagatttggagaaatgcagctggattttcgtacacccccaggttttgaccgaacacgtaatgctgagattggaaataaggacattaaattcaaacatttggaagaagcctttacatcagaacactggcttgttaggatatataaagtaaaagcacctgataacagggagacattagatcacaaacctcgagtcaccaacattttcccaaaacagaagtatttgtcaaagaagactaccaaaaggaagcgtggctacattaaaaataagctggtttttaagaaaggcaagaaaatatctaagaagactgtttaaatgcactgttctggttcctaacttgaagcagttgtccttgtgagaaccggtctttgcctttagctcatgtcgtgtttcacagcaaagagggtacagaaccatcactggtccaggttaatgtacaaaattttctggcaatgcctgattaaaaaaataaaattggcttgttgagaacagctgttttcgatttctaatgtgaagcaagacagagcactgctgtaaatgtctagcagcagattttttttttattggtacatattatccttcaaatctgagaatttggactaactgcaccaaagaaccctctaatttggtccctggcacatgcatacttgtcaatgtttttattcttttacaagacctgcattttatttgaattacccgaatagcaatatgtaaaatacaagtgacaaaatgtgatgagagcttcttgaaccggtaaactagtacaggtctgagaaagacatattagaagaatcattatacttccttgaattatatttattttcatgtttctctaatgcaaagaatgtttcatcaaatgtatattttctgttgcttactgtttgctctgagaagaagctgctgtttcaaagatggacctctgagtagctaattgattcaagtagtttttttatgttgacacattattactgctgttagcagtcgttttcaccaggtacttacagagcagatttcatacatcattcattcaagggctaaatttatattttttggaaatcatggcaactacacaggatgttgcttaccaggacggagttttggtatcttagtactgaagttagcactatgtttacatgcaaaagattaaggaaaaaacccttaaagtggacaggtatccaaagttcattttctgtgactcatcaaagtgacaaaagacttgtaacaactttgcctggacttttttcattttacaacagttcatccattcacaatgattttgttctctgctccatattttttaatcccttaagcatttgatgaaacactctttagtgctatatgcattttcttacttttgttaaaaatgtgacagttgtcaaaaaatgcactaaaatgtaaatggagattgaacaagttcactttccagcttataggcaactttatacagacttgaacattttctccagttgtttagtaaaagtgaaagagaaagggtttttcctgccacaggatataacttttttttatataacaagcataacacaccactgcttttggtggaaaagtgcagaatagtatgtaccttttatgaagaaaaatgtaatttacaatattcagtgagaatgttactgctgattttcttttccaaggtgtagaatattctttgatttatagaattcatttttgacccagatgatggttcctttacagaacaataaaatggctgaacattttcacaaatagagtgtaacgaagtctggatttctgataccttgtcatttgggggattttattttactttgttgctttaaaattcaatgcagagaagttgttgactgtaggggaaataaagttaattcaaattttgtgtt

SEQ ID NO: 46551 - DNA, 2161 bp, Homo Sapiens
gcgagctgcagcggtgatcgccgcggcaggcccagaagtgtatcctgactcgtaaattgacgaagccactggtgctgcaagtgttcttttggggtagtgtctgggatccggtgcaagtcgaatcactgttcaaataaggtgtaattgaaaagtgatcctctcttcagagctgtcaaaaacaaatccaagtctggatctcgctctcctcgctcaggatctgcatcaagatctcgttctcgttcatgttggaagtctcggtccctaaggccatctgtctctggttcaaggaagtgcaggctgagttctaggtctcgttccagattatattctccagctcataacagagaaagaaaccacccaagagtagaatcgggatttccgaggtcacaacaaaggctatatagaaggccctattatttccgtgggcgcaacagaggcttttatccatggggccagtataacggaggaggctatggaaactaccgctcaaattggcagaattgccggcaagcacacggccgttcaagatcccggtccccagcgagaaggtccccttcaccaaggtccaggagccattctagaaactctgataagtcgtcttctgaccagtcaaggcgctcctcatcttcccgttcttcctccaaccatagccgagttgaatcttctaagcgcaagtctgcaaaggagaaatcctcttccgaggatagccggccatctcaggctaccggggataaccagggagatgaggccagggagcagacattctctggaggcacctctcaagatacaaaagcatctgagagctcgaagccatggccagatgccacctacggcactggttctgcatcaggggcctcagcagtttctgagctgagtcctcgggagcaaagctcagctctcaaaagccccctccaggctgtggtggtgaggcagcggtcactccttcctagccccgtgccaaaacctagtcctccactttccagcacatcccagatgagctcaactctgccaagcggtgctgagtatcagcctgggacacaccaagttcagttcgaccgtggttcttccctgagtccatccaaaaacagccctgtgggtaagaatttaccatccattggctccacatatgtctcatctcagaaggaggagagtgctgctccaggaggagcagcctgtacaaagaggtacctagaagagcagaagacagagaatagaaaagataaggaacggaaacaaacaaatacagataaagaaaaaataaaagagaaaagggagcttctctgacacagacttgggtgatggaaaaatgaaatctgattcttttgctcccaaaactgattctgagaagccttttcggggcagtcagtctctcaaaaggcataagctccgaagtgactttgagaagaagatggctgacttccacaaggaagagatggatgatcaagataaggacaaagctaagggaaggaaggaatctgagtttgatgatgatgaacccaaaatatgtctaaagtcataggtgcaaacgaaaaccaggaggaggagaagtcaggcaaatgggagggcctggtatatgcacctccagagaaggaaaagcagaggaaaacagaggagctggaggaggagtctttcccagagagatccaaaaaggaggatcggggcaagagaaccaaaggtgggcacaagggctttctgcctgagaggaatttctgagtgactgctcacaaagcggtccgggagaaaagctctttgcctcccccaagaaagacttctgagagccgagacaagctggaagcgaaaggagacttttccacagggaagtcttccttttccattactcgagagacacagggcgatgtctggatggactcttttgatgaggactttgcacgacccaatggcttattggctcgggaacgcaagctttgccaagatctagtccatagcaacaaaaaggaacaggagttttgttccattttccagcacatacagtcagctcagtctcagcgtagcccctcagaactgtttgcccaacatatagtgaccattattcaccatgttaaagagcatcactttgggtcctcaggaatgacattacatgaacgctttactaaatacctaaagagactaactgagcaggcggcagccaaaaacaagaaaa

SEQ ID NO: 46552 - DNA, 1368 bp, Homo Sapiens
ctcttaacattcagggatgtggccatagaattctccccagaagagtggaaatgtctggatcctgcccagcagaatgtatatagagatgtgatgttggagaactatagaaacctggtctccctgggtgaggataactttcatgtgaacctggtctccctgggtgttgctatctctaacccagacctggtcacctgtctggagcaaagaaaagagccctacaatgtgaagatacataagatcgtagccagacccccagctatgtgttctcatttcacccaagaccattggccagtgcagggcatagaagattcattccacaaacttatactgagaagatatgagaaatgtggacatgataatttacaattaagaaaaggctgtaaaagtttgaatgagtgtaagttgcagaaaggaggttataatgaatttaatgaatgcttgtcaactacccagagcaaaatacttcagtgtaaagcaagtgtcaaagttgttagtaaattttcaaattcaaacaaacgtaagacaagacatactggagagaaacactttaaagaatgtggcaaatcatttcagaagttttcacacctaactcaacataaggtaattcatgctggagagaaaccctacacttgtgaagaatgtggcaaagcctttaaatggtctttaatatttaatgaacataagagaattcatactggagagaaaccttttacttgtgaagaatgtggcagcatctttaccacatcctcacactttgctaagcataaaataattcatactggagaaaaaccctataaatgtgaagaatgtggcaaagcctttaataggttcacaacccttactaaacataagagaattcatgctggagagaaacccatcacatgtgaagaatgtaggaaaatctttacctcatcctcaaactttgccaaacataagcgaattcatactggagagaaaccctacaaatgtgaagaatgtggcaaagcctttaataggtccacaacccttactaaacataagagaattcatactggagagaaaccctacacatgtgaagaatgtggcaaagcttttagacagtcctcaaaactgaatgaacataagaaagttcatactggagagcggccctacaaatgtgatgaatgtggcaaagcctttggacggtccagggtcctgaatgaacataaaaaaattcatactggagagaaaccctacaaatgtgaagaatgtggcaaagcctttagacggtccacagatcggagtcaacataagaaaattcatagtgcagataaaccctacaaatgtaaagaatgtgacaaagcctttaaacaattttcgctcctgagtcaacataagaaaattcatact

SEQ ID NO: 46553 - DNA, 1157 bp, Homo Sapiens
ggacgattgccgctgcagccgccgccccactcacctccggtgtgtctgcagcccggacactaagggagatggatgaatgggtggggaggatgcggcgcacatggccccgggcggctcggcggtcagctgccgcccccacagcggaccggtcggggcgggggtcgggcggtagaaaaaagggccgcgaggcgagcggggcactgggcggaccgcggcggcagcatgagcggcgcagaccgtagccccaatgcgggcgcagcccctgactcggccccgggccaggcggcggtggcttcggcctaccagcgcttcgagccgcgcgcctacctccgcaacaactacgcgccccctcgcggggacctgtgcaacccgaacggcgtcgggccgtggaagctgcgctgcttggcgcagaccttcgccaccggtgaagtgtccggacgcaccctcatcgacattggttcaggccccaccgtgtaccagctgctcagtgcctgcagccactttgaggacatcaccatgacagatttcctggaggtcaaccgccaggagctggggcgctggctgcaggaggagccgggggccttcaactggagcatgtacagccaacatgcctgcctcattgagggcaagggggaatgctggcaggataaggagcgccagctgcgagccagggtgaaacgggtcctgcccatcgacgtgcaccagccccagcccctgggtgctgggagcccagctcccctgcctgctgacgccctggtctctgccttctgcttggaggctgtgagcccagatcttgccagctttcagcgggccctggaccacatcaccacgctgctgaggcctggggggcacctcctcctcatcggggccctggaggagtcgtggtacctggctggggaggccaggctgacggtggtgccagtgtctgaggaggaggtgagggaggccctggtgcgtagtggctacaaggtccgggacctccgcacctatatcatgcctgcccaccttcagacaggcgtagatgatgtcaagggcgtcttcttcgcctgggctcagaaggttgggctgtgagggctgtacctggtgccctgtggcccccacccacctggattccctgttctttgaagtggcacctaataaagaaataataccctgcc

SEQ ID NO: 46554 - DNA, 390 bp, Homo Sapiens
atgatcctgtctaacaccacagcggtgacgccctttctgaccaagctgtggcaggagacagttcagcagggtggcaacatgtcgggcctggcccgcaggtccccccgcagcagtgacggcaagctggaggccctctacgtcctcatggtactgggattcttcggcttcttcaccctgggcatcatgctgagctacatccgctccaagaagctggagcactcgaacgacccattcaacgtctacatcgagtccgatgcctggcaagagaaggacaaggcctatgtccaggcccgggtcctggagagctacaggtcgtgctatgtcgttgaaaaccatctggccatagaacaacccaacacacaccttcctgagacgaagccttccccatga

SEQ ID NO: 46555 - DNA, 819 bp, Homo Sapiens
atgtcctcgaccgagagcgccggccgcacggcggacaagtcgccgcgccagcaggtggaccgcctactcgtggggctgcgctggcggcggctggaggagccgctgggcttcatcaaagttctccagtggctctttgctattttcgccttcgggtcctgtggctcctacagcggggagacaggagcaatggttcgctgcaacaacgaagccaaggacgtgagctccatcatcgttgcatttggctatcccttcaggttgcaccggatccaatatgagatgcccctctgcgatgaagagtccagctccaagaccatgcacctcatgggggacttctctgcacccgccgagttcttcgtgacccttggcatcttttccttcttctataccatggctgccctagttatctacctgcgcttccacaacctctacacagagaacaaacgcttcccgctggtggacttctgtgtgactgtctccttcaccttcttctggctggtagctgcagctgcctggggcaagggcctgaccgatgtcaagggggccacacgaccatccagcttgacagcagccatgtcagtgtgccatggagaggaagcagtgtgcagtgccggggccacgccctctatgggcctggccaacatctccgtgctctttggctttatcaacttcttcctgtgggccgggaactgttggtttgtgttcaaggagaccccgtggcatggacagggccagggccaggaccaggaccaggaccaggaccagggccagggtcccagccaggagagtgcagctgagcagggagcagtggagaagcagtaa

SEQ ID NO: 46556 - DNA, 844 bp, Homo Sapiens
atgaggcttcggaaccagctccagtcagtgtacaagatggacccgctacggaacgaggaggaggttcgagtgaagatcaaagacttgaatgaacacattgtttgctgcctatgcgccggctacttcgtggatgccaccaccatcacagagtgtcttcatactttctgcaagagttgtattgtgaagtacctccaaactagcaagtactgccccatgtgcaacattaagatccacgagacacagccactgctcaacctcaaactggaccgggtcatgcaggacatcgtgtataagctggtgcctggcttgcaagacagtgaagagaaacggattcgggaattctaccagtcccgaggtttggaccgggtcacccagcccactggggaagagccagcactgagcaacctcggcctccccttcagcagctttgaccactctaaagcccactactatcgctatgatgagcagttgaacctgtgcctggagcggctgagttctggcaaagacaagaataaaagcgtcctgcagaacaagtatgtccgatgttctgttagagctgaggtacgccatctccggagggtcctgtgtcaccgcttgatgctaaaccctcagcatgtgcagctcctttttgacaatgaagttctccctgatcacatgacaatgaagcagatatggctctcccgctggttcggcaagccatcccctttgcttttacaatacagtgtgaaagagaagaggaggtaggggccaagcccccaccccatcccactccccttccctccccagatatttatgtgaaatgaactgcagctttattttttgaaataaaaacttttaaaaagca

SEQ ID NO: 46557 - DNA, 555 bp, Homo Sapiens
gctctctgtggtggcttcattcaaggctccagtgggaccatcttgtcgccagggtttcccttctaccccaacaacttgaactgcacctggattatcgaaacatctcatggcaagggtgtgttcttcactttccacaccttccacctggaaagtggccatgactacctcctcatcactgagaacggcagcttcacccagcccctgaggcagctaactggatctcggctgccagctcccatcagcgctgggctctatggcaacttcactgcccaggtccgcttcatctctgatttctccatgtcatatgaaggattcaacatcaccttctcagagtacgacttggagccctgtgaggagcccgaggtcccagcctacagcatccggaagggcttgcagtttggcgtgggcgacaccttgaccttctcctgcttccccgggtaccgtctggagggcaccgcccgcatcacgtgcctggggggcagacggcgcctgtggagctcgcctctgccaaggtgtgttggtaggtggtcacgtgctttcattttgcttcactaa

SEQ ID NO: 46558 - DNA, 507 bp, Homo Sapiens
ttggccaatgtgctttgtaacagagccagactgttttcctatctcccaggattttactctttagttaaagttggcaatcccaaagccttttcaaccgcaggattgtcaggtttaggttctcatgtggccgctctacctccagatatatgctctcaaaaggtgtggcctgatgaaactatgggaccgtttggacctcaagatcagaggttcaagcttcctgggatcataggttttgattgtcacctcaatgggactgcttcacagaagaaaagcctgctttataaaactttgcctgatgttctagcagaaactttatcaagtgaaagacacaagtttgtgatgacacaatatgtgaatgaatttcagggtaatgatgcacctgttgaacaagaaattaacagtgcagaaacttttgaaagtgccagagtggagtgtgcaatacaaacgtgtccagaattgtggcgaaaagattttgaatcactgtttccagaagtagctaatagcaaa

SEQ ID NO: 46559 - DNA, 324 bp, Homo Sapiens
atgttggggagacacatctgctgggttcccagcccaaggtccccaaccctggctgtctggccttgtctgtcaccccccgtgcccactggcagggacaggaagcccccccaccccgctttgggcagtttgccttggcacgggcctgatctgttttcctccccagagcagctgctgttctgtctgctgggcagagggctgggttcctccgaggtaggcaggggcctcaacccagagcccctctcacaccctctcactcaggcttatgtctctccctcctcccccacccccaccccaggaagaggagatcccagaactggagattga

SEQ ID NO: 46560 - DNA, 1448 bp, Homo Sapiens
ccggagcctgcggcgggcggctgtgacggccccggcgctgacggcggcggccgggggggcggtgtcgacgcccgcggcgccggctggggcatcaccgcgggcctcgaccccgaaatggcgctgctggccgaacacttgctgaagccgctgcccgcggacaagcagatcgagaccgggcccttcctcgaggcggtgtcccacctgccgcccttcttcgattgccttgggtccccagtgtttactcccatcaaggcagacataagcggcaacatcacgaaaatcaaagctgtgtacgacaccaacccagccaagttccggaccctgcagaacatcctggaggtggagaaagaaatgtatggagcagagtggcccaaagtaggggccacactggcgctgatgtggctgaaaagaggcctccgcttcatccaggtcttcctccagagcatctgcgacggggagcgggacgagaaccaccccaacctcatccgtgtcaacgccaccaaggcctacgagatggccctcaagaagtaccatggctggatcgtgcagaagatcttccaggcagcactgtacgcagcaccctataagtctgacttcctgaaagcgctctccaaggggcagaatgttacggaggaggagtgcctggagaagatccgcctcttcctagtcaactacacggcgaccatcgatgtcatctacgagatgtacacccagatgaacgctgagcttaactacaaggtgtaggcatgcccactgctggacacgtccccgactcgtggccacatggagaaacaggcaaaccagaatcactgtgaatcaagtcggtgaactgcccctggcctgtgtcccccagagcagcccagggtcctgccagagtctgcaggggacagccctcgttttttaagtcttttttttttttttttttggtctattctaaaggaccagtaaataatgatcttacttccaaatctccttggaatttcacgacagcacagactgactttataccttcatttcagcgtggtaaaaaccgattaacacttctaatgagtcaagtcctagggttttttggttttgttttgttgccaacgaggaacacagctctgggggaatggtgtcatccacctcgctttaaaaataagcacatgatggctgggcaccgtggctcacgcctgtaatcccagcactttgggaggctgaggcgggtggatcacctgaggtcgggagtttgagaccagcctggccaacatggtgaaaccccatcgctactaaaaatataaaaaattagctgggcatggtggcgcacgcctgtagttccagctactcaggaggctgaggcaggagaatcgcttgaacccgggaggtggaggttgcagtgagctgagatcgcaccattgcactccagcctgggcaacaagagcgaaactctgtctcaaaaaaaaaaaaaa

SEQ ID NO: 46561 - DNA, 348 bp, Homo Sapiens
atggactggacctggaggttcctctttgtggtggcagcagctacaggtgcccactcccaaatgcagctggtgcagtctgggcctgaggtgaagaagcctgggacctcagtgaaggtctcctgcaaggcttctggattcacctttactagctctgctatgcagtgggtgcgacaggctcgtggacaacgccttgagtggataggatggatcgtcgttggcagtggtaacacaaactacgcacagaagttccaggaaagagtcaccattaccagggacatgtccacaagcacagcctacatggagctgagcagcctgagatccgaggacacggccgtgtattactgtgcg

SEQ ID NO: 46562 - DNA, 483 bp, Homo Sapiens
atgattaggaatactgatataaacttgctaatggacaaaaaatattggctttcctacaaggtaggaagcattccctctaccagacagaattcatttcctgcccacagacaagcgcgtttgcattgccagcagctatttacaacttatgaagctgtaaaacagctcccaagcaatgaaggctgcaagcagataaggtggcaggccgtgagcaggcctcaaatggagttttacagtgaagcacaaatgttcccctacagaacccaagatgtctctttaaaagaaatcatgaaagaagaggggattaagtggagcttatggactgctccagggttaagtggcctccaaaataaacaacaggactgctcagtagtcagagtgaattttgggtggggtttgaaagagttccagctttcctctgctaatggtgacataaaatgttcatttcatacccatgcatatacactgatgtatacatgtagttga

SEQ ID NO: 46563 - DNA, 942 bp, Homo Sapiens
aatatgggcaatgcctacaatgccctgggcatgtacgaccaggcggtcaaataccatcggcaggagctgcagatctccatggaagtgaatgaccgcgcctcacaggcctccacacatgggaaccttgccgtggcctaccaggccctgggtgcccatgaccgggccctgcaacactatcagaaccacttgaacatcgcccgggagctacgagacatccagagcgaggcccgggccctcagcaacctgggcaatttccactgctctcggggagagtatgtccaggctgccccctattatgaacagtacctccggcttgctcccgaccttcaagacatggaaggagaagggaaggtctgccacaatcttggctatgcccattactgccttggaaactatcaggaggcagtgaagtactacgaacaggatctggcactggctaaagaccttcacgacaagttgagccaagcaaaagcctactgcaacttgggcctagcattcaaggctctgctgaatttcagtaaagctgaagagtgtcagaagtacctactgtccctagcccagtctctgaataattcccaggctaaatttcgagccctaggaaacctgggcgatatattcatctgtaaaaaagatataaatggtgcaataaaattctatgagcagcaactgggcttagctcaccaggtaaaggacagaagattagaagccagtgcatatgcagccctgggcactgcataccgaatgatccagaagtatgacaaggccctgggttatcacacacaggaactggaggtatatcaggagctgagtgacttgccaggggagtgcagagctcatgggcacctggctgctgtctacatggcccttgggaaatacacaatggcattcaagtgttatgaagagcaactggatctagggcaaaagctgaaggatccgagtctg

SEQ ID NO: 46564 - DNA, 783 bp, Homo Sapiens
atgtctaagtcagagtctcctaaagagcccaaacagctgaggaagctcttcattggagggttgagctttgaaacaaccaatgagagtctgaggagccattttgagcaatggggaacgctcatggactgtgtggtaatgagagatccaaacaccaagtgctccaggggctttgggtttgtcacatatgccactgtggaggaggtggatgcagctatgaatgcaaggccacacaaggtggatggaagagttgtggaatcaaagagagctgtttcaagagaagattctcaaagaccaggtgcccacttaactgtgaaaaagatatttgttggtggcattaaagaagacaccaaagaacatcacctaagagattattttgaacagtatggaaaaattgaagtgattgaaatcatgactgaccgaggcagtggcaagaaaaggggctttgcctttgtaacctttgacgaccatgactctgtggataagattgtcattcagaaataccatactgtgaatggccacatctgtgaagttaggaaagccctgtcaaagcaagagatggcgagtacttcatccagccaaagaggtcaaagtggttctggaaacttctacaatgattttggcaattacaacaatcagtcttcaaattttagacccatgaagggaggaaattttggaggcagaagctctggcccctatggcggtggaggcaatactttgcaaaaccaaggtggctatggcagttccagcagcagcagtagctatggcagtggcagaagattttaa

SEQ ID NO: 46565 - DNA, 3996 bp, Homo Sapiens
ggcgcgcacccgcgcgcgcacactcgcacaccgcacctcagcgcctgcccggcctcgcccccacccgcgagcgccgaacctcctggggccggatgccatgggtaacaacttctccagtatcccctcgctgccccgaggaaacccgagccgcgcgccgcggggccacccccagaacctcaaagactctatcgggggccccttccccgtcacttctcaccgatgccaccacaagcagaagcactgtccggcagtgctgcccagcggggggctcccagccacgccgctgctcttccacccgcacaccaagggctcccagatcctcatggacctcagccacaaggctgtcaagaggcaggccagcttctgcaacgccatcaccttcagcaaccgcccggtcctcatctacgagcaagtcaggctgaagatcaccaagaagcagtgctgctggagcggggccctgcggctgggcttcaccagcaaggacccgtcccgcatccaccctgactcgctgcccaagtacgcctgccccgacctggtgtcccagagtggcttctgggccaaggcgctgcctgaggagtttgccaatgagggcaacatcatcgcattctgggtggacaagaagggccgtgtcttccaccgcatcaacgactcggctgttatgctgttcttcagcggggtccgcacggccgacccgctctgggccctggtggacgtctacggcctcacgcggggcgtccagctgcttgatagcgagctggtgctcccggactgtctgcggccgcgctccttcaccgccctgcggcggccgtcgctgcggcgcgaggcggacgacgcgcgcctctcggtgagcctatgcgacctcaacgtgccgggcgcggacggcgacgaggccgcgccggccgccggctgccccatcccgcagaactcactcaactcgcagcacagccgcgcgctgccggcgcagctcgacggcgacctgcgtttccacgccctgcgcgccggcgcgcacgtccgcatcctcgacgagcagacggtggcgcgcgtggagcacgggcgcgacgagcgcgcgctcgtcttcaccagccggcccgtgcgcgtggccgagaccatcttcgtcaaggtcacgcgctcgggtggcgcgcggcccggcgcgctgtcgttcggcgtcaccacgtgcgaccccggcacgctgcggccggccgacctgcctttcagccctgaggccctggtggaccgcaaggaattctgggccgtgtgccgcgtgcccgggcccctgcacagcggcgacatcctgggcctggtggtcaacgccgacggcgagctgcacctcagccacaatggcgcggccgccggcatgcagctgtgcgtggacgcctcgcagccgctttggatgctcttcggcctgcacgggaccatcacgcagatccgcatcctcggctccactatcctggccgagcggggtatcccatcactcccctgctcccctgcctccacgccaacctcgcccagtgccctgggcagccgcctgtctgaccccttgctcagcacgtgcagctctggccctctgggtagctctgctggtgggacagcccccaattcgccagtgagcctgcccgagtcgccagtgaccccaggtctgggccagtggagcgatgagtgcaccatttgctatgaacacgcggtggacacggtcatctacacatgtggccacatgtgcctctgctacgcctgtggcctgcgcctcaagaaggctctgcacgcctgctgccccatctgccgccgccccatcaaggacatcatcaagacctaccgcagctcctagcccgttgcggtggcccatcccgcatacccatcttctcgggcttcagcccagtcccagctgaggaacaagccagtggggccccttctcttcctcattttggaaacttttcctcctctattaaacatgggaaactgaagcccttgaaggtttggggagaggggggtatcaggcagggagggggcagaggcaaatcaccgggcagagggaggggaggagaggaggccgcactctccctgtctctcccgtctctgcacccagctcctctctgcatgctgagggctaaattgggatctcagcctgccctaatctttccccatctgaggcaggtttctaggaggtgtctgtagtccatgtggcacctttgtgagaattagaaaacatgtaccttcctctgggcagctgcagccctgagccaggacatgtggcctggctagtgcagcatggagtggattttaggctcatttgccctctcagccaactgcccttgagcagtgtacagcctgctcaacaaccgccctgggcaggccgctcctgagctgctgtctccctctctgacctatgcctaccttctctttcttcgttccctgcccactgggcatggcagctgggggtgagaggctggtggttgcctcccgtcctgggcaggctgcagcctcatgccatgtctctctcccactacctgatgggcacatggacaggctgcagagggctccaggttctgggcccctggctgagaaggggaggatcctgtcctggctgtagccttcctgccccaatcatctcgctggatgccattgcccaggggtagcccttcggtatgggctggggagaagggttggtcttctgccagggtccctaagaacaggtttgcagctaccctctctgaccttttccccatatcttgtgctgtccagggcctaggctgatagtcagagcctgtggcacacctgggatgggccagggccctgggtggggaggtgtgggttccctgggccaagaccagcctttttcctcagtttaattaatttatttatttggtttgtggttttgggttttttttgtttgtttgtttgtaggtgagttcccatcctctgggcccctagaaatgctgcctttgtgtgtggggtacctgggaaagggtgtggctgaggcagtcataatgcagtatcttcccctgactccagccacaaagctcatacccagccctaccaatcatgaactggaactccataaggaggggccaaattgggaggccttttggcaaacagtgtctattttacagagaggcaaaccaagcctccttagtgccctggggctgatggtcacccagagccatagagcacccttcctcctgggccagagctgggttatcatggttggcttaggtacctcaggtggcccaggaggtcccccctccataaggacgtcaaacttccaggagggccagtgttcctagtgtgggccaggaacaggacagggagaccttgtgatggcggggcagggagcctgttcgtagggaagatgaggaggcaagggctgcctctcacacctccaggttctctaagttctggggagggagcgccccacctgctgaggtcggtcctctcagccctgcctgccctggcctgggctctcccagcctcccagccctctgccccctcagatggctttttgtttttgtttttttttgcatccatcagagactgcacctctgtgtggcaggcagggcatgggttttagtcctggccactgaccagctgtgtggccctggccgagtcgtagccccctggagcccagcttccatttctataaaatggttgtttcgggagagaggggcaggctttctgtgtgactcgggagttcttccgtgagggctgccagggggtggtgtgccaggacctcaggctgggcctttgtgctggccttgcagtgggtgtgtggggaagtcactgtcccactatgggtctccactacccagtcactgaccctgggagaccccttctgtgtgggagggagcgggggctggctagcgggccccccagccagggatcccagaggctgagggttggggagaggaagccatcatctcattacctctgtcagtgcaggggtggctgctgcttcccttgtgcacttgggtcgctgtgattgtgaataaaagtgatttcgtacca

SEQ ID NO: 46566 - DNA, 684 bp, Homo Sapiens
acgggtggggaaggggggctcgcgccctacaggccgagccctgcggccgcagcggggtaagggtaggatggccgatcgcgcccagaccccagggagtctccctctcggcttttctgccggcgtctccagcagcatgatctggcatttattattcggaataatgtgccaggcaggaggaggccctgggttaaacacgcggccctgcagctcccaggtgaaacgactcatcgtttcctgccggcgcatcttactgaaggggacccaggccccacgaagggaaggaaccgtcctcaaggtcacgtcgtagtcaaaggccgagcccagaccgaagccagccagtcagcctggaaatctgcctgtagtcagctgatgcagagtcaccctgcagttcctactttgaggggttgcagaagcacatatttcactatggagggccgcctgcaggcctcgcgctgacaggatcttttgtgacgctgcaaatgtcctggtcagtgtccttctttctacaagaggcgttggagccgggctctgcatagggcgtatatatccctggccgccaaggaagctgacccttgaaatttgtgaagctttcatattcactcaatacacatttacagagcctctacttcctgtcaggcgtcacacaataaatattcggaggagcaagaagagagtgattcaaca

SEQ ID NO: 46567 - DNA, 531 bp, Homo Sapiens
atgacctccagttccatccatgttgctacaaatgacagaatcccattctttttcataatattgtccatacataccacattttctatatccatttatctgttgatggacacaggttgcaaagggattgctggattgtatgataattctatgtgtagtttcttgaggaaccttcatggtgttcttcatagtggttgtactactgtacattcctaccaatggtggatgagcgttcccctttctccacatcctcacaagcatttgttattttttcttttttttcaaatgaacattttaactggggtgagatatcttaatgtggtattggtttacatttccctaattatggttgagcattttttcacatatctaatggccattcatatgtcttcctttgagaaatgtctatacagatctctggccctttttttaaatttttttttttttttggggtcacccagtctggaggtgatctgggcttccacatcctgggctcaagtgatcattccacctcaggatgacccaaatagctag

SEQ ID NO: 46568 - DNA, 495 bp, Homo Sapiens
atgaagattttccagcgcaagatgcggtactggttgcttccaccttttttggcaattgtttatttctgcaccattgtccaaggtcaagtggctccacccacaaggttaagatataatgtaatatctcatgacagtatacagatttcatggaaggctccaagagggaaatttggtggttacaaacttcttgtgactccaacttcaggtggaaaaactaaccagctgaatctgcagaacactgcaactaaagcaattattcaaggccttatgccagaccagaattacacagttcaaattattgcatacaataaagataaagaaagcaagccagctcaaggccaattcagaattaaagatttagaaaaaagaaaggatccaaagcccagagtcaaagttgtggacagaggaaatgggagtagaccatcttcaccagaagaagtgaaatttgtctgtcaaactccagcaattgctgacattgtaatcctggtcgatggt

SEQ ID NO: 46569 - DNA, 1128 bp, Homo Sapiens
tctctggagatcgggctgtgcgtgaacatgcggagcctgccctggtacgtcccggccaaccccgactccttcttcccacgctgctacagcctctgcaccgagagtgagcagcaggagttcctggatgctgaaaatgctgaggcaaagctcaggggcctcccggggcagcttgtggacatcgcgtgcaaggtgtgccaggcctacctggggcagctggagcatgaggacatcgacacgtcagcagatgccgtggaggacctcactgaggccgagtgggaggacctgacccagcagtactactccctcgttcatggcgatgctttcatctccaattcaagaaattacttttcgcagtgccaggctctgctgaatagaatcacgtctgtgaaccctcagacggacattgacgggctccggaacatctggattataaagcccgcggccaagtcccggggccgagacatagtgtgcatggaccgtgtggaggagatcctggagctggcagctgcagaccaccctctttccagggacaacaagtgggtggtccagaagtacatcgagacgccgctgctcatctgtgacaccaagttcgacatcagacagtggttcctcgtcacggactggaaccccctgaccatctggttctacaaggagagttacttgcggttctcaactcagcgcttctccctggacaagctggacagcgccatccacctgtgcaacaacgccgtccagaagtacctgaagaatgatgtgggccgcagccccctgctgcccgcacacaacatgtggaccagcaccaggttccaggagtacctgcagcgccagggccgtggcgccgtgtggggcagcgtcatctacccgtccatgaagaaggccatcgcccacgccatgaaggtggcccaggaccacgtggagcctcgcaagaacagctttgagctctacggggctgacttcgtccttgggagggacttcaggccctggctgatcgagatcaattccagccccaccatgcacccgtccacgccggtcacggcccagctgtgtgcacaggtgcaggaggacaccatcaaggtggccgtggaccgcagctgtgacatcggcaacttcgagctcctgtggaggcag

SEQ ID NO: 46570 - DNA, 699 bp, Homo Sapiens
atggctaactactacgaagtgctgggcgtgcaggccagcgcttccccggaggacatcaagaaagcctaccgcaagctggcccttcgttggcaccccgacaagaaccctgacaataaggaggaggcggagaagaagttcaagctggtgtctgaggcctatgaggttctgtctgactccaagaaacgctccctgtatgaccgtgctggctgtgacagctggcgggctggtggcggggccagcacgccctaccacagccccttcgacaccggctacaccttccgtaaccctgaggacatcttccgggagttttttggtggcctggaccctttctcctttgagttctgggacagcccattcaatagtgaccgtggtggccggggccatggcctgaggggggccttctcggcaggctttggagaatttccggccttcatggaggccttctcatccttcaacatgctgggctgcagcgggggcagccacaccaccttctcatccacctccttcgggggctccagttctggcagctcggggttcaagtcggtgatgtcgtccaccgagatgatcaatggccacaaggtcaccaccaagcgcatcgtggagaacgggcaggagcgcgtggaggtggaggaagacgggcagctcaagtcggtgactgtgaacggcaaggagcagctcaaatggatggacagcaagtag

SEQ ID NO: 46571 - DNA, 6034 bp, Homo Sapiens
gggcctgcggccctccctgcaccggcggacgctcctctcagtcttggagtctcttcgcccaggtggctgtggatccggtacgggagttgccgccgcggtccaactccccgctgccgcccagcgcatccgctcgcaggagcgccggcggccagcagtgcgctctgcagcatgtcgctacatgcctgggagtgggaagaggaccccgcaagcatagagcccatctcctccatcactagcttttaccagtccacgagcgagtgtgacgtggaggaacacctgaaggccaaggccagggcccaggagtctgactctgaccgcccgtgcagcagcatcgagtcctcatctgagcctgccagcactttcagctccgacgtgccccacgtggtcccctgcaaattcaccatctcactggccttccctgtgaatatgggtcagaagggaaaatatgcaagtttgattgaaaaatataagaaacaccctaaaacagacagttctgttacaaagatgcgtcgtttttaccacattgagtatttccttctgccggacgatgaagaacctaaaaaagttgacatattgctatttccaatggtggccaaagtattcctggagtcaggagtaaagactgtgaagccgtggcacgaaggtgacaaagcctgggtgtcgtgggagcagacttttaatatcactgtgacaaaggaattattaaagaaaataaatttccacaaaatcaccttgaggctctggaacactaaagacaagatgtcaagaaaagtcagatattaccgattaaagactgccggcttcacagacgacgtgggagcttttcataagtcagaagtgagacatttggttttaaatcagagaaaattatctgaacagggcattgagaataccaacattgtcagagaagagtcgaaccaggaacatccgccaggaaaacaagaaaaaacagaaaaacacccaaagtctttgcaaggttctcaccaagcagagcccgaaacttcttccaagaacagtgaggaatatgagaagtccctcaaaatggacgattcttccacgattcaatggagtgtttcaagaacaccaaccatttctttggcaggagcaagcatgatggagatcaaggaattaattgagagtgaatcacttagcagcttaacaaacatattagacagacaaaggtctcaaattaaagggaaagattcagagggaagaaggaaaatccagaggagacataagaagcccctggcagaagaagaggcagaccccacgctgacaggccccaggaagcagagcgctttctccatccagctggccgtcatgccgctccttgccggtacccactgcttgccctgttcccagcagctcctgcttgtcttgtggccagaacggccataagcggatgctcctaatgacaaccctgctgcgtgccacctcatttcatcctcacagccacctcaggaaactcaggggaattggcttcatagtacagggggaaacaaaggcccagagagggtagctaccttgcctgagatcacacagctaggaaatgtgaagcctggacttgaacccagctctgtttgattccaaaatccaaggaagcctatgggaatattaaatgtcatcattgtgtttgttaagaagatgctgcttttaataaatgctttcctacagatttttacaaaaacatctagtaaagggaatgaggaaagggaaccctttttgactgagcccctctgggtgcaggcacttcccgtgtgacacatcacttacttctcagaccaaattctgacccactcagccaacctgtggtgtggtggtggctgtggtggttatcatagttaccatttttttcagtgaggaaaagaactcaaagaggttaagtaactttcctaatcccacacagctcagtggccaaacagggatttaattattttgctttataagatctaccacaatttatgaactggactttatacatactggtaaatcataactaaatattatatcaatatgttttgatgattgaaagctcagcatatattttggtaaaattatgttgctttgttccaaaaaagagtaatatggggtgaactccccccctttttttttctttttagagaaaattcagactttgttcgtttttttgccatcacgtgtcttgtgcgccctctcctggctactctgcagaagcgcgtgcgttggtcttttctgagctggaaccagcattcatagagaagggggcaaaaaccccgtaagtcagagcctccagttcagttccacaggtgccagtcgtcatcctcctctcgcgctcttgggttggtgtcaattcagtttgagaaagtgctattaacttttcagtttgcactttttttttttttgagatagggtcttgctctctcacccaggctggagtgtaagtgacatgatcatagctcactccagcctgaagcaagcctcccgcctctgccacccgcatagctaagactacaggtgcacaccaccacacctggctattttttttattttctgtagagacaaggtcttgctatgttgcccaggctggtctcaaactcctggtcacaagtaatcctcctgcttcagcctctcagagttctagaattacaggcatgagctgccgcatttggcagtttgcagttttaaatgactttttgaaaatgatacttcacctacagcttgtccttcctgatcaccttcactttctcgtagcatcagaacctcttgagaggcaacagtgacagagagtaaactttcagagggtcttaccccaccccacgctccagcctgaccctccagcatacctattgcacacagtagctttgagcgaacgcctttgctagctgcttccttcgtcctacagtcccaaggaggaacccatgatcctcctgggggagcgtaccatgggacctgccccgctttggattttactgtgagaggaaaaagaagttcaaccatttgggcctgcctggcatgactgtttccagcagaatgaagccaggacatggtcccctctctcttttttttttttcgagatggagtcttgctctgtcgcccaggctggagtgcagtggcgcgatctcggctcactacagcctctgcccccccaggtttaagcaattctcctgcttcaacctctagagtagctgggattacaggcgcatgccaccatgccaggctaatttttgtattttttgtagagatggggtttcacaattttggccaggctggtcttgaactcctgacctcgtgattgtcttacatgtccgtgtgaagagaccaaacaggctttgtgtaagtaacaaggctgtttatttcacctgggtgcaggcaggctgagtctgaaaagagagtcagcaaagggtggtgggattatcattagttcttacaggttttgggataggcagtggagttaagagcaatgttttgggggcagggggtggatctcacaaagtacattctcaagggtggggagaattacaaaaaaaccttcttaagggtgggggagattataaagaaccttcttaagtgtgggggagattacaaagtacattgatagttagggtggggcagaaacaaatcacaatggtggaatgtcatcagttaaggctattttcacttcttttgtggatcttcagttgcttcaggccatctggatgtatacatgcaggtcactggggatatgatggcttagcttgggctcagaggcctgacagtgatccacctgcctcagcctcccaaagtgctgggattacaggcgtgagctaccgcactggacctagcctcccctctctataacctgccccgtcatgtacaatgctgtacagtgcaggggttcacatgtaagaactttggtgaccaaaacactttgatcatggctcagccacttaccagcaagttacctactttctctgagtctcactttcctcctctgtgaaatgggggtgattactcctacctcagagcgttgttttaaggatcacaggagctgacgtgtgtaaactgctagcacagtgggacccagggggtgcaggtgtggaggcagcagctgtcctgaggccatgtgtgtgggccgctccattatacccatgacatagcctatggtcatcgacagagaacgggtcagctcagcaggccagttgtatgtctggttttgccagaaactaatagcataagattatttactgtaagcccagcataattatttttggtaatcatcttcaatttcaaattaggccatagatcatgtatgtataccttattagtaaatattggttggctagtaacccagtaagattctagaaagattctgtgtctgggaatgagctcttattttaaaaggatagtattgcatagcggaggggccccacttagcccaacagaactggtttggatgctggttctacaacgtattttctaagagaccttggatgattgcgtcagaactctgggcctcatttcccccatctgtaatgtggagatgacagcaaccacacaaggttaaggatgaaatgacattagcgcatgtttgggactggctgttggaggagcacaaacattcccttacaccattccactcttaaccagggctcttaactcagggggcttgtgtctgctggggacacttggctgtgtgtggaggcattttggttggcacgactgagagtgggatgccactggcatctagtaagatactgttaaacatgccataatgcacaggactgtcccctgagcaaagaatggtctgccccaactgtcagcagtgtggaggctgtgagcccgcagcctggaattctgttctggtgtatgtctccctgactctgatgatttgagcactttttttttatttttatttttgcaatggggattccttctaccttgagtagtcttttttttttttttgagacggagttttgctcttgttgcccaggctggagtacaatggcgcgatctcagctcaccgcaacctccgcctcccgggttcaagcgattctcctgcattagccttcctgagtagttgggaatacaggcatgcgctaccacgtccggctgattttgtatttttggtagagacgaggtttctccattttggtcaggctggtctcaaactcccgacttcaggtgatccgcctgcctcggcctgccaaactgctgggattataggcgtgagccaccgtacccggcctacccttgggtagtctttcatgtgaaaaggctcacaaaattatagaacacaggcgtaatgggtgacagcttttatgaatcagctttgttaaagaggatcctgcgggagcatgagggctacccccaggagctgtgcacgcctctgttcacagcctgtgcagatggctgtgcacacctggcccgggacttgttttagaagtgcctactctttctgaatgtgagcgacttggcttttacatgccctagaaatacatttacaggcatgttgaaaggaatagactgatctttttgagcaccatctcatatatcatctttcttaatcctttaaacccaaggaaggtggtgtctatccccattttgaagatgaaattgagccttggagactctagcttatcacatgacaaagagtcagatctgggattcaaacccaggtcaatcctgcctccaaaacttgaggtgattttttttgtttatttgttttgttttttccttacctagtacatctctgactggtgaaatacatggataccttttatagaaaaagcattctgggctgggtgtggtggctcacgcctgtaatccctacactttgggaggccgaggcgggtggatcacgaggtcaggagatcgagaacagcctggctaacacggtgaaaccccgtctttactaacaatacaaaaaattagccaggcatgttgtcgggcacctgtagtcccagctacttgggaggctgaggcaggagaatggcgtgaacccaggaggcgtagctagcagtgagccaagaccgtgccactgtactccagcctgggcagcagagcaagactctgtctc

SEQ ID NO: 46572 - DNA, 1980 bp, Homo Sapiens
tttcccgcggctgttcgctgttccagtgggtcgtggcggtggcggcagcggcggttaggggatgtaacggtcgcccgcctccggcgtgacgatggcggccgtagggtccggaggctatgcgcggaacgatgcaggggagaagctgccctctgtcatggcgggagttccggcgcggaggggccagtcctccccgccccccgccccaccaatctgcctacggcggcggacgcgactctcgacggcctccgaggagacggtgcagaaccgggtgtcactcgagaaggtgcttggcatcacagcccagaacagcagtggcctaacctgtgaccccggcacaggccatgtggcctacctggcaggctgtgtggtggtgattttggaccccaaggagaacaagcagcagcacatctttaacaccgccaggaagtctctcagtgctctggccttctcccctgatgggaagtacatagtgacaggggagaatgggcataggcctgctgtgcgcatctgggatgtggaggagaagaatcaggtggcggagatgctaggccacaagtatggtgtggcgtgtgtggccttctcacccaatatgaagcacatcgtgtccatgggctaccaacatgacatggtgctcaacgtctgggactggaagaaagacatcgtagtggcctccaacaaggtatcttgtagagtcattgccctctccttctcagaggacagcagctattttgtcactgttgggaaccgccatgtgaggttctggttcttggaagtctccactgagacaaaggtgacgagcacagtgccccttgtagggcgctcgggcatcctgggcgagctgcacaacaacatcttctgtggtgtggcctgcggtcggggccggatggcgggcagtaccttctgtgtgtcctactcgggcctcctctgccagttcaatgagaagagggtgctggagaagtggatcaacctgaaggtctccctgtcttcctgcctctgtgtcagccaggagctcatcttctgtggctgcacagatgggatagtccgcatcttccaggcccatagcctgcactacctcgccaacctgcccaagccacactaccttggggtagacgtggcacagggcctggagcccagcttcctcttccacaggaaggcggaagcagtctacccagatacagtggcactgaccttcgaccccatccaccagtggctgtcctgcgtgtataaggaccacagcatctacatctgggatgtcaaggacatcaacagagtgggcaaggtgtggtcagagctcttccacagctcctacgtttggaacgtggaggccctgtcctaggtgctgaggacacagacacaaaatccctgcccttaacaagctcacatttggatgggaaaggaaacctggaaacatcatcagtgaataacacgccaagcagcagtaaccctctgaagaaaaatgaggcggggaaggggaaggggaatgcaggtggtattctagagaggagaggggtcagggaaggcctccctgaggacatatgagcagagacctgcaggaaatcggggagtgagacctgcaactgctggggagaaccacaagcacagaggccctgcggcaggaacatgcactccacagagagctttgctgtggaggtcgtttatgtatttcactgctttttttaaaaaggagttgaagacggggcatggtggctcacacctgtaatcccaacactttgggaatctgaggcgggaggatcacttgagtccaggagtttgagaccagcctgggcaacacaagaccctgtctctacaaataatttttaaaaattagccaggcatggtagcacacacgtgtggtcccagctactcaagaggtggaggcaggaagatcacttgagcctgggatgtcaaggctgcagtgagctgtgattgtgccaccacactcccacactccagcctgggtaacagtgagaccatgtctag

SEQ ID NO: 46573 - DNA, 333 bp, Homo Sapiens
gaggaggctcagaggatgacaaccctgttttctgccatgtctgaggagcagctatctcgctacgaagtgtgtcgccggtcagctttcccaaaagcacgcattgcagctctgatgcagtccatcactggcagatcggtgtctgagaacaccgccattgccatggctggaatagccaaggtctttgtgggagaggtggtggaagaggccctggacgtgtgcgaaatgtggggagaaacgcccccgctgcagcccaagcatttacgggaggctgttcgcaggttaaagcccaagggcatcctccccaacagcaactacaaaaaaatcatgttctag

SEQ ID NO: 46574 - DNA, 350 bp, Homo Sapiens
ctcatggaatgctgtgtaaatgccctggtgacatcatttaaagagactatcttagctgagtgccaaggcatgatcaagagaaatgaaactgaaagtagttttattaaaattatgtttattttctcatttttttgtgttattctttttcttttaaaaactgtaaaaccttttgtttctgactctgagaaatacgttgagcagttacttacactatttaatagatttagtaaactcgtcaaagaagcttttcaagatgatccacgatttcttactgcaagagataaggcgtataaagcagttgttaatgatgctaccatatttaaacttgaattacctttgaagcagaaggg

SEQ ID NO: 46575 - DNA, 450 bp, Homo Sapiens
atggccagtttaagctgctgtaatcttgcacatgcaaatctttgctgttcaaatcttgaacgagctcatctctctggatcagtgcttgactgtgcaaatatccagggagtcaagatgctcttctgttctaatgtggaaggagcatccctgaaactgtgtaattttgaggatccttctggtcttaaagccaatttagaaggtgttaatctgaaaggtgtagatatggaaggaagtcagatgacaggaattaacctgagggtggctacattaaaaaatgcaaagttgaagaactgtaacctcagaggagcgactctggcaggaactgatttagataactgtgatctgtgtgggtgtgatcttcaagaagccaacctgagagggtccaacatgaagggagctatatttgaagagatgctaacaccactatacatgtcacaaagtgtcagatga

SEQ ID NO: 46576 - DNA, 87 bp, Homo Sapiens
atgtatgtggctgagtccactaggaagacgcttctgtaccacatggagttctctgaattaacttccagatatattaaaattattaat

SEQ ID NO: 46577 - DNA, 631 bp, Homo Sapiens
ggagcctctcgggaggcgggtaacgttatagtatttgtcagaagttggggtctccgtgggcattgtgatccgtcccaggcagtggattaggaggccagaaggagatcccttccacggtgctaggctgagatggatcctctcagggcccaacagctggctgcggagctggaggtggagatgatggccgatatgtacaacagaatgaccagtgcctgccaccggaagtgtgtgcctcctcactacaaggaagcagagctctccaagggcgagtctgtgtgcctggaccgatgtgtctctaagtacctggacatccatgagcggatgggcaaaaagttgacagagttgtctatgcaggatgaagagctgatgaagagggtgcagcagagctctgggcctgcatgaggtccctgtcagtatacaccctggggtgtaccccaccccttcccactttaataaacgtgctccctgttgggtgtcatctgtgaagactgccaggcctaggctctctgtagagagtcttcaagatcccggagtggtagcgctgtctcctggtgaaggagtatttgtcacactggaatgtgactgtgtgtgtatgtatgtgtatatatatatatatatatatatatatata

SEQ ID NO: 46578 - DNA, 123 bp, Homo Sapiens
atgttgttgagagagataacatattcaatcactcctctctctttacatggaacttcccttctaaactgcaattggagagctacaggtctggtaacattggaagggcacaggcctttccaatga

SEQ ID NO: 46579 - DNA, 2046 bp, Homo Sapiens
atcgtggtagcacaccgactttctactattcgaagtgcagatttgattgtgaccctaaaggatggaatgctggcggagaaaggagcacatgctgaactaatggcaaaacgaggtctatattattcacttgtgatgtcacaggatattaaaaaagctgatgaacagatggagtcaatgacatattctactgaaagaaagaccaactcacttcctctgcactctgtgaagagcatcaagtcagacttcattgacaaggctgaggaatccacccaatctaaagagataagtcttcctgaagtctctctattaaaaattttaaagttaaacaagcctgaatggccttttgtggttctggggacattggcttctgttctaaatggaactgttcatccagtattttccatcatctttgcaaaaattataaccatgtttggaaataatgataaaaccacattaaagcatgatgcagaaatttattccatgatattcgtcattttgggtgttatttgctttgtcagttatttcatgcagggattattttacggcagagcaggggaaattttaacgatgagattaagacacttggccttcaaagccatgttatatcaggatattgcctggtttgatgaaaaggaaaacagcacaggaggcttgacaacaatattagccatagatatagcacaaattcaaggagcaacaggttccaggattggcgtcttaacacaaaatgcaactaacatgggactttcagttatcatttcctttatatatggatgggagatgacattcctgattctgagtattgctccagtacttgccgtgacaggaatgattgaaaccgcagcaatgactggatttgccaacaaagataagcaagaacttaagcatgctggaaagatagcaactgaagctttggagaatatacgtactatagtgtcattaacaagggaaaaagccttcgagcaaatgtatgaagagatgcttcagactcaacacagaaatacctcgaagaaagcacagattattggaagctgttatgcattcagccatgcctttatatattttgcctatgcggcagggtttcgatttggagcctatttaattcaagctggacgaatgaccccagagggcatgttcatagtttttactgcaattgcatatggagctatggccatcggagaaacgctcgttttggctcctgaatattccaaagccaaatcgggggctgcgcatctgtttgccttgttggaaaagaaaccaaatatagacagccgcagtcaagaagggaaaaagccagacacatgtgaagggaatttagagtttcgagaagtctctttcttctatccatgtcgcccagatgttttcatcctccgtggcttatccctcagtattgagcgaggaaagacagtagcatttgtggggagcagcggctgtgggaaaagcacttctgttcaacttctgcagagactttatgaccccgtgcaaggacaagtgctgtttgatggtgtggatgcaaaagaattgaatgtacagtggctccgttcccaaatagcaatcgttcctcaagagcctgtgctcttcaactgcagcattgctgagaacatcgcctatggtgacaacagccgtgtggtgccattagatgagatcaaagaagccgcaaatgcagcaaatatccattcttttattgaaggtctccctgagaaatacaacacacaagttggactgaaaggagcacagctttctggcggccagaaacaaagactagctattgcaagggctcttctccaaaaacccaaaattttattgttggatgaggccacttcagccctcgataatgacagtgagaaggtggttcagcatgcccttgataaagccaggacgggaaggacatgcctagtggtcactcacaggctctctgcaattcagaacgcagatttgatagtggttctgcacaatggaaagataaaggaacaaggaactcatcaagagctcctgagaaatcgagacatatattttaagttagtgaatgcacagtcagtgcagtga

SEQ ID NO: 46580 - DNA, 507 bp, Homo Sapiens
atgggggaacacagtccagacaacaacatcatctactttgaggcagaggaagatgagctgacccccgatgataaaatgctcaggtttgtggataaaaacggactggtgccttcctcatctggaactgtttatgataggaccactgttcttattgagcaggaccctggcactttggaggatgaagatgacgacggacagtgcggagaacacttgccttttctagtagggggtgaagagggctttcacctgatagatcatgaagcaatgtcccagggttatgtgcagcacattatctcaccagatcagattcatttgacaataaaccctggttccacacccatgccaagaaatattgaaggtgcaaccctcactctgcagtcggaatgtccggaaacaaaacgtaaagaagtaagtaaagcagtcagtgagggcctagtttggttttggggcaagtccttacaaaatggtgcaaattttagctggggagtaaaggagtgcatggggtta

SEQ ID NO: 46581 - DNA, 1333 bp, Homo Sapiens
ccgcttagacaatgccccggagccgccagaccgtcgcgcccctgccccatcgtagtatatgagctcgcctacacaaggacccccgctaaaagccagagctcccagtccccgaggcttgaagacggggactcccttctccaccaactctgtcctcggggggtggggccccagccgagatcacagcgcgacaggagtgggggtggccgctggagacaggtgaagaaacaagaaaactaagaaatccgagcggttggagggggagtctgtgtggatgggatggggacgccgggggaggggctgggccgctgctcccatgccctgatccggggagtcccagagagcctggcgtcgggggaaggtgcgggggctggccttcccgctctggatctggccaaagctcaaagggagcacggggtgctgggaggtaaactgaggcaacgactggggctacagctgctagaactgccacctgaggagtcattgccgctgggaccgctgcttggcgacacggccgtgatccaaggggacacggccctaatcacgcggccctggagccccgctcgtaggccagaggtcgatggagtccgcaaagccctgcaagacctggggctccgaattgtggaaataggagacgagaacgcgacgctggatggcactgacgttctcttcaccggccgggagtttttcgtaggcctctccaaatggaccaatcaccgaggagctgagatcgtggcggacacgttccgggacttcgccgtctccactgtgccagtctcgggtccctcccacctgcgcggtctctgcggcatggggggacctcgcactgttgtggcaggcagcagcgacgctgcccaaaaggctgtccgggcaatggcagtgctgacagatcacccatatgcctccctgaccctcccagatgacgcagctgctgactgtctctttcttcgtcctgggttgcctggtgtgccccctttcctcctgcaccgtggaggtggggatctgcccaacagccaggaggcactgcagaagctctctgatgtcaccctggtacctgtgtcctgctcagaactggagaaggctggcgccgggctcagctccctctgcttggtgctcagcacacgcccccacagctgagggcctggccttggggtactgctggccaggggtaggatagtataggaagtagaaggggaaggagggttagatagagaatgctgaataggcagtagttgggagagagcctcaatattgggggaggggagagtgtagggaaaaggatccactgggtgaatcctccctctcagaaccaataaaatagaattgaccttttaga

SEQ ID NO: 46582 - DNA, 743 bp, Homo Sapiens
ctgtgaggaccccgcacagccaagatggcggcgtccgtgcgacaggcacgcagcctactaggtgtggcggcgaccctggccccgggttcccgtggctaccgggcgcggccgcccccgcgccgcaggccgggaccccggtggccagaccccgaggacctcctgaccccgcggtggcagctgggaccgcgctacgcggctaagcagttcgcgcgttacggcgccgcctccggggtggtccccggttcgttatggccgtcgccggagcagctgcgggagctggaggccgaagaacgcgaatggtacccgagcctggcgaccatgcaggagtcgctgcgggtgaagcagctggccgaagagcagaagcgtcgggagagggagcagcacatcgcagagtgcatggccaagatgccacagatgattgtgaactggcagcagcagcagcgggagaactgggagaaggcccaggctgacaaggagaggagggcccgactgcaggctgaggcccaggagctcctgggctaccaggtggacccaaggagtgcccgcttccaggagctgctccaggacctagagaagaaggagcgcaagcgcctcaaggaggaaaaacagaaacggaagaaggaggcgcgagctgctgcattggctgcagctgtggctcaagacccagcagcctctggggcacccagctcctgaggctttgtcccttcccaataaagcctgctacctggcagtacccctgaaga

SEQ ID NO: 46583 - DNA, 2019 bp, Homo Sapiens
ctgctcgcgctgcccctggcgggggcggccgaagagcccacccagaagccagagtccccgggcgagcctcccccaggcttagagctcttccgctggcagtggcacgaggtggaggcgccctacctggtggccctgtggatcctggtggccagtctggccaaaatcgtgtttcacctgtctcggaaagtaacatctctggtccctgagagctgcctgctgattttgctgggcctggtgctagggggaattgttttggctgtggccaagaaagctgagtaccagctggagccaggcaccttcttcctcttcctgctgcctcctattgtgttggactcaggctatttcatgcctagcaggctgttctttgacaacttgggtgccatcctcacctatgccgtggtaggcacactctggaatgccttcacaacaggcgctgccctctggggcttgcagcaggctggacttgtagcccctagggtgcaggctggcttactggacttcctgctgtttgggagcctcatctcggcggtggaccccgtggccgtgctagctgtctttgaggaggtgcacgtcaatgagactctctttatcatcgtctttggcgagtccctgctcaacgatgctgtcaccgtggtgctgtacaaggtctgcaactcctttgtggagatgggctctgccaatgtgcaggccactgactacctgaagggagtcgcctccctgtttgtggtcagtctgggcggggcagccgtgggcttagtctttgccttcctcctggccctgaccacacgcttcaccaagcgggtccgcatcatcgagccgctgctggtcttcctcctcgcctacgcagcctacctcactgctgaaatggcctcgctctccgccattcttgcggtgaccatgtgtggcctgggctgtaagaagtacgtggaggccaacatctcccataagtcacgcacaactgtcaaatatacaatgaagactctagccagctgtgctgagaccgtgatcttcatgctgcttggcatctcagccgtggactcttctaagtgggcctgggattctgggctggtgctgggcaccctcatcttcatcctgttcttccgagccctcggcgtagtcctgcagacctgggtgctgaatcagttccggctagtccctctggacaagattgaccaagtggtgatgtcctatgggggcctgcggggggctgtggcctttgctctcgtcatcctactggataggaccaaggtccctgccaaggactactttgtagccaccactattgtagtggtcttcttcacagtcatcgtgcagggcttgaccatcaagccactggtcaaatggctgaaggtgaagaggagtgagcatcacaaacccaccctgaaccaggagctgcatgaacacacttttgaccacattctggctgcagtggaggacgttgtggggcaccatggctaccactactggagggacaggtgggagcagtttgacaagaaatacctgagtcagctgctgatgcgacgatcagcctaccgcatccgggaccagatctgggatgtgtactacaggcttaacatccgggatgccatcagctttgtggaccaggtgggccagcagcttccaggtctcactctgccttctatgcccagccgcaattctgtggcagaaacttctgtcaccaacctgctgagggagagtggcagtggagcgtgtctggatctgcaggtgattgacacagtacgcagcggccgggatcgtgaggatgctgtgatgcatcatctgctctgcggaggcctctacaagccgcgccgtaggtacaaagccagctgcagtcgccacttcatctcagaggatgcgcaggagcggcaggacaaggaggtcttccagcagaacatgaagcggcggctggagtcctttaagtccaccaagcacaacatctgcttcaccaagagcaagccacgaccccgcaagactggccgcaggaaggcatgtcttccctcagggactcctcttgggagc

SEQ ID NO: 46584 - DNA, 1577 bp, Homo Sapiens
attaaaaacttctgataaaattacctaagtacacacaaacaaaaacatgcccacacaaatcacttaatttctaaaacttttaatttttctgcttctctagtaccttgtattccatcacacagcaaaatctggcagctccacttccagaatttacttgaactccacagcttatttccgatttcctgttatcaccagagtctaaaacacagtttatattgcattcacctcctattttacaccgtaatttcctactttacactctaactttatataaaaaagaaactaccttttcaagatctaattcacgcaattttatttgttcttaattgagacttctttctaggtgctgtcacaccttgtaacgtcagatacaaatgtctctatccaatttcatgagttccagttattttattttaagggaatgtgtatatacatttataaatttgtgtatgtgtgtattcacttattctttattttatatgttttgcatgcatatattcactaaatccctgataatggaaagataacaaatctttttttttctttcttttttgtatgtaaattattttccgaaggaggtgggttgggagaaatatatcttaacttggcaagtttaaaagagaaagtggccattactaatgaaaattattctctagcattttcatgtttatctttaatagcattgctgatgacatattccctcttatcagttgtgtaggtgccattcactgcaatatactggccatccgcactggcaacgactttgctgccattaagctacaggtgataaaattgatctatctcatgatatggcattcgttggtgattatctcacctgtagtgactctggcattcttccctgcatctctgaaacaggggagcttacactttctattaatcatatattttgtattattgttgacaccatggctggagttttcgaaaagtggaactcatcttcctagcaacacaaaaattccagcatggtgggtaagtatggatgcttatcttaatcatgctagtatatgctgccatcaattctcctgcttgtcagcagtgaaactgcagctgtcaaatgaggaattgataagagacacgaggtgggacatacaatcctacactacagatttcagtttttagaaaatgtgataataatattgatatttagtttctttggagggaacgttttaccgaagtgttgtgactcaataattgccgtgtagttcatcaaaacctacatattagcctttggctttaagctccgcttctgtcagtatttgcaaccaaggtggtcgggcaaagtattgccaggagatactgaaaatcatccagaagcactgtgatattgtgtaagcatctggagaaaattcagttaaaagaataaaagtaagcagctgaggaattactatcactcatggagaagggtaggatattttcaataagtgagtatgcaatatccatatatactttcacagaacaaagagtaaagaggctgagtgtgactttataaagatactcataaaaaatataaacaacaaaaccttggaagtagtttctaataaaattgatttttctaa

SEQ ID NO: 46585 - DNA, 360 bp, Homo Sapiens
ggggtggtcatcgactccagcctgccacacttgatggccttggaggatgatgtgctcagcacaggtgttgtgctctatcatctcaaggaagggacaacaaaaataggaaggattgactcagaccaggaacaggacattgtcctgcagggtcagtggattgagagagaccactgcactatcaccagtgcctgtggtgtagttgttctacgacctgcccgtggggcccgctgtacagtcaatggccgggaggtcactgcctcctgccgtctgactcaaggagctgtcataaccctggggaaggcacagaagttccgattcaaccacccagcagaggctgctgtcctgcggcagcgaaggcag

SEQ ID NO: 46586 - DNA, 2173 bp, Homo Sapiens
atacttgcgcgccgacgccgccgctcgcttgtgaaactggaaggctgccatggctagcccagccgcctcctcggtgcgaccaccgaggcccaagaaagagccgcagacgctcgtcatccccaagaatgcggcggaggagcagaagctcaagctggagcggctcatgaagaacccggacaaagcagttccaattccagagaaaatgagtgaatgggcacctcgacctcccccagaatttgtccgagatgtcatgggttcaagtgctggggccggcagtggagagttccacgtgtacagacatctgcgccggagagaatatcagcgacaggactacatggatgccatggctgagaagcaaaaattggatgcagagtttcagaaaagactggaaaagaataaaattgctgcagaggagcagaccgcaaagcgccggaagaagcgccagaagttaaaagagaagaaattactggcaaagaagatgaaacttgaacagaagaaacaagaaggacccggtcagcccaaggagcaggggtccagcagctctgcggaggcatctggaacagaggaggaggaggaagtgcccagtttcaccatggggcgatgacaatgtttgccacagcctctgcctggaacctggctcgtgctgtgaccagaagggaaaggcggctgtttggctctttctcccccgcaaggacccgctgacccgctggatggagagcaaaggagacccctcccgagccgctcacagtcctgtatttggcaggtttgggagcctgaggggccatctccctgacactcagaggcactgccttgcagacaccatccgtgctcctggtaaagggggacagagagcctcaccttgccacatatttgaacagtgatgagtttggggctggtttctgggaagggaacgtttatttagtaaagagcagaacacccttgcgttttgttgggacatgtggaccgtgagtcgcaaacactctggagaaggctgagatgccaccattcccacggggactgaagacacattacgtggacctggtcccaggctcagtgaggagatggcctcagctgtggggctggtccatgttgcccactcactccagtgggaagtggggaccacgccatagagggtctgctcccactgcagctcccggtgctctcgtgttctgggaaggcctgggtgtgtgcacaaggaggcccgggccagggacttcaccaggggctgggtcacaagggcacagggtgtgtggaaagcgctgtgggggaagagccggtcaccggagagtgagcaggcggagactccaagctgggctgagccagagcagaaggcgagggattcccagccggacgggggttctctcaccaacagctgtgatttcatcccgaagtggaagggggtctaaacagaacaggctgagagaggcgggactgggtcaagtgggtggagctcctccttgcatgactgcaactgtcggggctttccgccggctcacagcagttggggccagcggggagaagagaggcggaactgctgtgtcctcatgtggcgcagcctcaaactggcatccaggcactgggcccatgcagagaaggcacctgcagagagcagggcagcccggcgcaggggcatgcgcctagaatcccagctactcggaaggccaaggcaggaggaccgcttgagtccagggattcaaggccaacctgggcaatagagcgagaccctgtctcttaaaaaacgatgatgatgaacacagaggacggggcactgtgctgggagccagggggcctgggaggagccgagaccagccttttacctcggggttttgaggccaacagggacgacagagacagtttctagttagagccttggctccatttttggatgatttagccccgagttcctgagtctattttatgccccttacgtactttgatagaactaaggaaatagtggttttgagtgaagggaaaggaaacccagaaacattttacgttgcttttacttctgtagtgtagattgccccggcccctctctgagccctgtagcatctgtgatagcttctgtcccttcatcggttcatgtcacagggattttctttcccaggaagcggacacggagagtcagccctaataaatgagcacatgccctggctgtacattttgaaacctg

SEQ ID NO: 46587 - DNA, 210 bp, Homo Sapiens
attagtggcgggcccttggaaaaccactacagactgaagcaatttcacttccactggggagcagtgaatgaggggggctcagagcacacagtggacggccacgtgtaccccgcagagctgcatttagttcactggaattctgtgaaataccaaaattacaaggaagctgtcgtgggagagaatctttctgtgataggcgtgtttttaaag

SEQ ID NO: 46588 - DNA, 372 bp, Homo Sapiens
atgaggtcagagaagtcgaaggggtgctggcgagacgggggtgatgcccacccgggcgagaaagcttcccaaagttctgggattacaggcgtgagccaccgcacccggctgacaagtgtccttctaagaaacacacagaggagaagacacagaagaggagagcaccatgtgatggtagacacagaaattggagttctacagccacaagccaaggaactcctggagccaccaggagatggaagatgcaaagaactgattttctctcagagcctctggagggagtgtggccctggtgacaccttgattttggacttctggcctacagaaccatgcacacaggaggacttcatttcccaggtctccttgcagtga

SEQ ID NO: 46589 - DNA, 3249 bp, Homo Sapiens
cggcggggacggcggcggcggcggcgggcggggagggcgtgcgccggccgagaggtgtcggcggcgaggcaaaggaagtttcaagtggaaggtcgtccgtcggccggcgcgtcctcctgctctcctccgcagcatcatggcggagccgagcggctcgcccgtgcacgtccagcttccccagcaggcggccccggtgacagcggcggcggcggcggccccggcggccgcgacagcagcgccggccccggcagctcccgcggccccggccccggccccggccccggcggcacaggctgtcggctggcccatctgcagggacgcgtacgagctgcaggaggttatcggcagtggagctactgctgtggttcaggcagccctatgcaaacccaggcaagaacgtgtagcaataaaacggatcaacttggaaaaatgccagaccagtatggatgaactattaaaagaaattcaagccatgagtcagtgcagccatcccaacgtagtgacctattacacctcttttgtggtcaaagatgaactttggctggtcatgaaattactaagtggaggttcaatgttggatatcataaaatacattgtcaaccgaggagaacacaagaatggagttctggaagaggcaataatagcaacaattcttaaagaggttttggaaggcttagactatctacacagaaacggtcagattcacagggatttgaaagctggtaatattcttctgggtgaggatggttcagtacaaatagcagattttggggtaagtgcgttcctagcaacagggggtgatgttacccgaaataaagtaagaaaaacattcgttggcaccccatgttggatggctcctgaagtcatggaacaggtgagaggctatgacttcaaggctgacatgtggagttttggaataactgccattgaattagcaacaggagcagcgccttatcacaaatatcctcccatgaaagtgttaatgttgactttgcaaaatgatccacccactttggaaacaggggtagaggataaagaaatgatgaaaaagtacggcaagtcctttagaaaattactttcactgtgtcttcagaaagatccttccaaaaggcccacagcagcagaacttttaaaatgcaaattcttccagaaagccaagaacagagagtacctgattgagaagctgcttacaagaacaccagacatagcccaaagagccaaaaaggtaagaagagttcctgggtcaagtggtcaccttcataaaaccgaagacggggactgggagtggagtgacgacgagatggatgagaagagcgaagaagggaaagcagctttttctcaggaaaagtcacgaagagtaaaagaagaaaatccagagattgcagtgagtgccagcaccatccccgaacaaatacagtccctctctgtgcacgactctcagggcccacccaatgctaatgaagactacagagaagcttcttcttgtgccgtgaacctcgttttgagattaagaaactccagaaaggaacttaatgacatacgatttgagtttactccaggaagagatacagcagatggtgtatctcaggagctcttctctgctggcttggtggatggtcacgatgtagttatagtggctgctaatttacagaagattgtagatgatcccaaagctttaaaaacattgacatttaagttggcttctggctgtgatgggtcggagattcctgatgaagtgaagctgattgggtttgctcagttgagtgtcagctgatgtatgtcccttgatgtcaccctgatctgtcatgccccaccgccacccctactcccttcaaccctccctctttctgcccatttcctcccaccccctcactcccatttcctagcaaaatcagaagattgtgaagaggccggcttcaacaaaatgggataaaaaaataattttttaaaacttacaacactccgagttctgctttattctctagcaatccacagtacaagaacaagcaaatgccacagctgcacgactgttgctcatttttccaaaagctatttaatattcttagcaatcaatttggatatcccttaagtgaaaagaatctgaaatacactcaggtggtcttatttattggcaacaaaaggaattttctatccagaagcctatttctcctttcattgttgttatttctgttataatactttaattgtacatctgacaatactgcctcttttatgttgtatttagaaattaatatacttataaaattaagatttattagccaaacttgaattctagttttaaaactgactgtgaattttatttttcatatatttatgcattacacaccttagctataagaaaaaaagggttttgattatatgcttcttgcagttaatctcgttatttaaacaaaaagttttgggtctgtctttggagtatttgtaacttctaaattttgaaatgactgaattaggaatttggatgcttattcttttagtctgtttgcctaaaaaccaatttacaatctgactgtctcttgggagagggaggtgccttgcaaactttcacattaagaatgtgcctgaggctgctttactctggaatagtctcagatctaaaatttcctctatataaggtggcatatgttaagttttgcttcattggaccgtttagaatgctatgtaaaatgttgccattctgttagattgctaactatatacccatctctgatttggctctccttaagtgataggatttgttattctaaaggtgataaacttgaaaatatcagaatctgagttttacttgaaattttgcagaatacccaggtggagtgaaaattggaagggttttgtgcaatgactaaaaggtaaaacgctgttaaggttcaagaatcaatactttcaacccaagtagccctctgcttgactgtatattatggaactagtaaaccttaggattttgaaaattggagtctaatctttcaaggaggtgggctcccaggatggtaccattgctctttcctagctaaccctagatatggcagctctttaatgtacttcaaaaagcaaatatatattactaaggaaaaaaagttatttataattgccttgtcataattgttaaggtgttctagagccatttgcatacaatttaatgtaatttcattccattctattgtttacacaacgattactcgaagatgactgcaaaggtaaaaggaaaataaaagtgtattgcacaatgag

SEQ ID NO: 46590 - DNA, 483 bp, Homo Sapiens
atggctttccttatgaaaagtatgataagtaaccaggtaaagaatttaggatttggtggtgggtctgaagaaaataaagaagaaggaggtgcatctgatcctgcagcagctcaagggatgactagagaggagtatgaggagtatcaaaagcaaatgattgaggagaagatggaaagagatgctgcatttacacagaaaaaggcagaaagggcatgcctcagagttcatctcagagaaaaatacaggctcccaaagagtgaaatggatgagaatcaaatccagatggctggagatgatgtggatttacctgaagatctccggaaaatggtagatgaagatcaagaagaggaagaagataaagattctattcttgggcagatacagaatctccagaacatggacttggataccataaaagaaaaagcccaggccaccttcactgaaatcaagcagacagcggagcagaagtgttccgtgatgtga

SEQ ID NO: 46591 - DNA, 1669 bp, Homo Sapiens
ctccctcagcaaggacagcagaggaccagctaagagggagagaagcaactacagaccccccctgaaaacaaccctcagacgccacatcccctgacaagctgccaggcaggttctcttcctctcacatactgacccacggctccaccctctctcccctggaaaggacaccatgagcactgaaagcatgatccgggacgtggagctggccgaggaggcgctccccaagaagacaggggggccccagggctccaggcggtgcttgttcctcagcctcttctccttcctgatcgtggcaggcgccaccacgctcttctgcctgctgcactttggagtgatcggcccccagagggaagagttccccagggacctctctctaatcagccctctggcccaggcagtcagatcatcttctcgaaccccgagtgacaagcctgtagcccatgttgtagcaaaccctcaagctgaggggcagctccagtggctgaaccgccgggccaatgccctcctggccaatggcgtggagctgagagataaccagctggtggtgccatcagagggcctgtacctcatctactcccaggtcctcttcaagggccaaggctgcccctccacccatgtgctcctcacccacaccatcagccgcatcgccgtctcctaccagaccaaggtcaacctcctctctgccatcaagagcccctgccagagggagaccccagagggggctgaggccaagccctggtatgagcccatctatctgggaggggtcttccagctggagaagggtgaccgactcagcgctgagatcaatcggcccgactatctcgactttgccgagtctgggcaggtctactttgggatcattgccctgtgaggaggacgaacatccaaccttcccaaacgcctcccctgccccaatccctttattaccccctccttcagacaccctcaacctcttctggctcaaaaagagaattgggggcttagggtcggaacccaagcttagaactttaagcaacaagaccaccacttcgaaacctgggattcaggaatgtgtggcctgcacagtgaagtgctggcaaccactaagaattcaaactggggcctccagaactcactggggcctacagctttgatccctgacatctggaatctggagaccagggagcctttggttctggccagaatgctgcaggacttgagaagacctcacctagaaattgacacaagtggaccttaggccttcctctctccagatgtttccagacttccttgagacacggagcccagccctccccatggagccagctccctctatttatgtttgcacttgtgattatttattatttatttattatttatttatttacagatgaatgtatttatttgggagaccggggtatcctgggggacccaatgtaggagctgccttggctcagacatgttttccgtgaaaacggagctgaacaataggctgttcccatgtagccccctggcctctgtgccttcttttgattatgttttttaaaatatttatctgattaagttgtctaaacaatgctgatttggtgaccaactgtcactcattgctgagcctctgctccccaggggagttgtgtctgtaatcgccctactattcagtggcgagaaataaagtttgcttagaaaagaa

SEQ ID NO: 46592 - DNA, 234 bp, Homo Sapiens
atgcaaatcttcctgaaaaccctgaccggcaagaccatcaccctggaggtggagccaagtgacatcctccaaaatgtgaaggccaagatccatgttaaagagggcatcccccctgaccagcacagtctcatctttgtaggcaagcagttagaagatggctgcactgtttgtgactacaacattcagaaagagtcagccctgcacctggtcctccatctgaggggtggctattaa

SEQ ID NO: 46593 - DNA, 315 bp, Homo Sapiens
atgtcagacgcagccgtagacaccagctccgaaatcaccaccgaggacttaaaggagaagaaggaagttgtggaagaggcggaaaatggaagagacgcccctgctcacgggaatgctaatgaggaaaatggggagccggaggctgacaacgaggtagatgaagaagaggaagaaggtggggaggaagaaggtgatggtgaggaagaggatggagatgaagatgagggagctgagtcagctacgggcaagcgggcagctgaagatgatgaggataacgatgtcgatacccagaagcagaagaccgacgaggatgac

SEQ ID NO: 46594 - DNA, 399 bp, Homo Sapiens
tttttgcagtttatagaaggatcatttgaagaatatttaaagcgtttggaaaatccacaggaatgggtaggacaagtggaaataagtgccctttctcttatgtacaggaaagattttataatttatcgggaaccaaatgtttctccttcacaagtaacagaaaataattttcctgaaaaggtgttactgtgtttttcaaatggaaatcattatgatattgtgtatcccataaagtataaagaaagctctgctatgtgtcagtctctcctttatgaattgctgtatgagaaggtatttaaaactgatgttagtaaaattgtgatggaactagacacgttggaagtagctgatgaagataacagtgaaatatcagattcagaggatgacagttgcaagtaa

SEQ ID NO: 46595 - DNA, 1125 bp, Homo Sapiens
atgatggacggccgcctcctggaacacccgcatgcccagttcgggggctcgctgggcggcgtggtgggcttcccctacccgctgggccaccaccacgtgtacgagctggccgggcaccagctgcagtcggccgccgccgccgcctcggtgcccttctccatcgacggcctgctcgggggctcgtgcgccgccgccgcctcggtggtcaaccccacgccgctgctgccagccgcctgcggggtcggcggggacggccagcccttcaagctgtcagactcgggggacccggacaaggagagcccgggctgcaagcggcggcgcacccgcaccaacttcaccggctggcagctggaggagctggagaaggcgttcaacgagagccactatcccgacgtgttcatgcgcgaggcgctggcgctgcgcctagacctggtcgagtcccgagttcaggtctggttccaaaaccgccgggccaagtggaggaagaaggagaacacgaaaaagggcccggggcggccggcgcacaactcgcacccgaccacgtgcagcggcgagcccatggacccggaggagatcgcgcgcaaggagctggagaagatggagaagaagaagcgcaagcacgagaagaagctgctgaagagccagggccgccacttgcactcgcccggcggcctgtccctgcacagcgcgcccagctccgacagcgacagcggcggcggcggcctgccgcctgcacccggcacctgcgaccccgccttctacccgagccaaagaagcggcgccggcccacagccgcgcccaggtcgccctgcggacaaggacgcggcctcgtgcgggccaggggccgctgtggcggcggtggagcgcggcgccgcggggctgcccaaggccagcccattcagcgtggagagcctcctgtccgactcgccgccgcgccggaaagccgcttccaacgccgccgccgccgccgccgcggggctggacttcgcgcccgggctgccgtgcgcgccgcggaccctgatcggcaagggccacttcctcctctaccccatcacgcagccgctcggcttcctggtgccgcaggccgcgctcaagggcggcgcgggcctggagccggcgcccaag

SEQ ID NO: 46596 - DNA, 690 bp, Homo Sapiens
atgtcccctctgatcatgggacttgatgtgaacccagatgcctgcttgacggctctgctggacatctgcaagctcctagaggctgtctgtccctccagccctacctcctctggccatgaaatccccactcagctgctcggcaaggaccttcagtcatccctgtgcccaccctttcccttggcctgggcactcctcctgccaactccacttctgagctttcacccagagggctgtgcaccctcccactcccactgccttgcctgtcatctctccttgcacccagtgcaaacctcctccagtggtctcctggcccatcagcctgtcatgggctggatgcccaaatgcagggccaagctcatgcacctgctgcttatgagcttcagtgtctgcctgatgacctcaggggatccgagctcctcggcacggcagccgaggtcccctacgctggcctcagcatacctgcccagccacggcagacagcatcctcagtcacgagaagtctgtgcttctggaacctggaacatgcagggctttgcagacagagctccatgctacttcctctgcccttctcactccctccaaaatccacactgctcccccgtcaccacctgtgccctcctaattccatcagcacccatcagccactcaccagccatcctaactccatcggccaccttcctaattccttag

SEQ ID NO: 46597 - DNA, 789 bp, Homo Sapiens
gaacgcctgaaagctttacagaaagccgtgattctatcccactttttccggcatcccaatattacaacttactggacagttttcactgttggcagctggctttgggttatttctccatttatggcctatggttcagcaagtcaactcttgaggacctgttttcctgaaggaatgagtgaaactttaataagaaacattatctttggagctgtgagagggttgaactatctgtaccaaaatggctgtattcacaggagtattaaagccagccatatcctcatttctggtgatggcctagtgaccctctctggcctgtcccatctgcatagtttggttaagcatggacagaggcatagggctgtgtatgatttcccacagttcagcacatcagtgcagccgtggctgagtccagaactactgagacaggatttacatgggtataatgtgaagtcagatatttacagtgttgggattacagcatgtgaattagccagtgggcaggtgcctttccaggacatgcatagaactcagatgctgttacagaaactgaaaggtcctccttatagcccattggatatcagtattttccctcaatcagaatccagaatgaaaaattcccgtggaactcacacagtaaatagtgaccgattacacacaccatcctcaaaaactttctctcctgccttctttagcttggtacagctctgtttgcaacaagatcctgagaaaaggccatcagcaagcagtttattgtcccatgttttcttcaaacagatgaaagaagaaagc

SEQ ID NO: 46598 - DNA, 846 bp, Homo Sapiens
atgctgactgagcagcttcggagactcaccaagcaagtacaggaagcaagacacaacagagatgatgaagctatcaaaaaggcagtgaatgaatatgatgaaaccatggagaaatacattcctgtgttgatggctcaggcaaaaatctactggaatcttgaaaattatccaatggtggaaaaggtcttccgcaaatctgtggaattctgtaacgaccatgatgtgtggaagttgaatgtggctcatgttctgttcatgcaggaaaacaaatacaaagaagccattggtttctatgaacccatagtcaagaagcattatgataacatcctgaatgtcagtgctattgtactggctaatctctgtgtttcctatattatgacaagtcaaaatgaagaagcagaggagttgatgaggaagattgaaaaggaggaagagcagctctcttatgatgacccaaatcggaaaatgtaccatctctgcattgtgaatttggtgataggaactctttattgtgccaaaggaaactatgagtttggtatttctcgagttatcaaaagcttggagccttataataaaaagctgggaacagatacctggtattatgccaaaagatgcttcctgtccttgttagaaaacatgtcaaaacacatgatagtcattcatgacagtgttattcaagaatgtgtccagtttttaggacactgtgaactttatggcacaaacatacctgctgttattgaacaacccctcgaagaagaaagaatgcatgttgggaagaatacagtcacagatgagtccagacaattgaaagctttgatttatgagattataggatggaataagtag

SEQ ID NO: 46599 - DNA, 4538 bp, Homo Sapiens
cggtgctgcctgggccccgtcaatcgaagggtcatgtggcggcagcagtcagagaatccaggtgaggcgggccccaggtgagcagtggggagtggagtttggctgcagcagaagccaggtggccatgctgtgggctctgacgccccctcaggtcagagcctccttctccttccctgactgtgtcaggcagctgcccttgggttgcatgcagaagcgtggagggaggcctggcccagcctgctccgcaccaaactctgtttcgtggtctggcaagagtaagggtggccctggtgttgccagatgacccccctccccgggattctcagtgactgtgagtgtgtggcttagtatgtgcggagggtcccctgcctccctttaattccatgtggagcctttgtgggggcaggggtttgtccagaggtcaacaagctggccctcctctctcagagggccctgatggaagaatccccctaccacccttccaggctgacttctgtctatttctcctgcagagtgagctggacttggaaaagggcttggagatgagaaaatgggtcctgtcgggaatcctggctagcgaggagacttacctgagccacctggaggcactgctgctggtgaggaggatttagggagctgagcagggcgggatggggcagggtgacagggttggggagcctctttgcccttaagtcccaggtcagctgtcagagcctgggtgcagctcgccatccctggagtggataccagtggaagactgagttgccaaaccaagctggttttaaaattgtatttgttatgtgatttaaaaataaaagtgcatatgtcaggtaaccatgactgtctactgccatacaatgcacctgacggatggcagcccctctcacctgtgctacctcacttgtgccctcttccagcccatgaagcctttgaaagccgctgccaccacctctcagccggtgctgacgagtcagcagatcgagaccatcttcttcaaagtgcctgagctctacgagatccacaaggagttctatgatgggctcttcccccgcgtgcagcagtggagccaccagcagcgggtgggcgacctcttccagaagctggtgagtaacccagggccggtgctgggactacaggcgtgtaccaccacgtccagctaattttttgcatttttagtagagacagggttttgctatgttggccaggctggtctcaaactcctaacctcaagtgatccacctgcctcagcctcccaaagtactgagattacaggcgtgagccgccatgcccagcctttttttttttttttctaatttatatttatttagatagttatttttaaaaagagatggggacttactacgttgtccaggctggagtgcagtggctattcacaggcgcaattccactgctcatcagcacgggagttttgacctccttcctttccaaccttggctgtttcactccttcttaggcaaactgatggttcccgactcctgggaggtcaccatattgatgccaaacttagtgtgtagtgcactacagcccagaactcctgactgaagccatcctccggcctcagccttccgcgtagctggggctataggtgcacgccaccacaccctgtgtgtggctgggactacaggtgcacgccatcacaccctgtgtgcgccatcacaccctgtgtgcaccatcacaccctgtgtgcacacactttccctaaagcaggcttcctccgctgggaaacaagtcctctaggggcaggtgtggccagaggccaggcccccctctaagtgtgaagagcatgtgattccttaaaagcccttcccccagcacttctggactaccgagacacacagctctggcctcgggcctccccttggctggtgctgggggctgagttttctgctctgaggtgtggctttcctgtagggggacccctccctctgccaccctgtgctgcagacccccagactccaggccagagctaaggcttgaggaacacagaaggcacttaatttgttccagttcttgctccctggggctctttcccccatggccagagagcaggaggctgtattttgatacatgctgccccctccatctttgaagcccccccacccccgtttctccgtgtgtgtgtcagcagttttaaacctagtggagggtggtggctcgggctgggctccgcgtcgggctgccccgcagctgctcttgggcagccagggccgctgggtgtggggccgccgggaatggcgggcccgggtgagggcgggcccgggtgagggcgggggcggagaggcgaagaagctgcaggaagggagggtgacgagggggaagcgaaggaaggggaagaggaagggaaaagcgagcgagaggggcaaggcggaagaggaagcagggcggaagggaagcccgggccgcagacggcgaaggaggcagcgggccgggggctgaggcgggagcgaggacacgcccaagagaggaagcagagggaggcggaagcgtggaggaaggggcgagaggcatcatcaaaggagatgaggggagcgtaggggccgggaaagaggcacaaggaagaaagtatgggaaggaggaatggagggtcagggctaggcggcgggagggcgccaggccgggaagagtacaaggacaaggaggtcaggtttgggcctacatcccggggacaggggcggccatggcggcggcagccagggaggaggaggaggaggcggctcgggagtcagccgcctgcccggctgcggggccagcgctctggcgcctgccggaagtgctgctgctgcacatgtgctcctacctcgacatgcgggccctcggccgcctggcccaggtgtaccgctggctgtggcacttcaccaactgcgacctgctccggcgccagatagcctgggcctcgctcaactccggcttcacgcggctcggcaccaacctgatgaccagtgtcccagtgaaggtgtctcagaactggatagtggggtgctgccgagaggggattctgctgaagtggagatgcagtcagatgccctggatgcagctagaggatgatgctttgtacatatcccaggctaatttcatcctggcctaccagttccgtccagatggtgccagcttgaaccgtcagcctctgggagtcgctgggcatgatgaggacgtttgccactttgtgctggccacctcgcatattgtcagtgcaggaggagatgggaagattggccttggtaagattcacagcaccttcgctgccaagtactgggctcatgaacaggaggtgaactgtgtggattgcaaagggggcatcatatcaagtggctccagggacaggacggccaaggtgtggcctttggcctcaggccagggttgtttatacaccatccagactgaagaccaaatctggtctgttgctatcaggccattactcagctcttttgtgacagggacggcttgttgtgggcacttctcacccctgaaaatctgggacctcaacagtgggcagctgatgacacacttggacagagactttcccccaagggctggggtgctggatgtcatatatgagtcccctttcgcactgctctcctgtggctatgacacctatgttcgctactgggactgccgcaccagtgtccggaaatgtgtcatggagtgggaggagccccacaacagcaccctgtactgcctgcagacagatggcaaccacttgcttgccacaggttcctccttctatagcgttgtacggctgtgggaccggcaccaaagggcctgcccgcacaccttcccgctgacgtcgacccgcctcggcagccctgtgtactgcctgcatctcaccaccaagcatctctatgctgcgctgtcttacaacctccacgtcctggatattcaaaacccgtgaccgtcagggccacccctgcctgtgggccaaggagaccagtgagtcagggacctctcttgcatgaagggtgcagtgatagttcctccccactgccccactgtgctcctgggcctgtgaccccagtgctcaggcaccttgcagtagaggcttctgactcctggagctttgtggcttaccagagatgcagtccctcccaggaacctgttggagaggcaggacctgctgctttagaggagtgcagctgaacctcggccctgcgactctgtttggccagagcaaggatctggcctggagaggcccatcctacaccccttattagagccgtgatagcctacagagtgaggtgaggttctcccgccttcccaggtggtttctttctgccacttcctggaaagaaaggtgaggctgccaatagcccgctagcaccagccagacctcacgcttgaccaacctctcggggccagaggttcattcctggggcactgtggcctggttttgttttgaaaccaagagagggcaaagggaacccagcagttctgagtgagttctagccagccctacctcaggctggctgttgagagattttacaattttcatttttgtaaaaataaagcttgattgttcacag

SEQ ID NO: 46600 - DNA, 634 bp, Homo Sapiens
cggctgagaggcagcgaactcatctttgccagtacaggagcttgtgccgtggcccacagcccacagcccacagccatgggctgggacctgacggtgaagatgctggcgggcaacgaattccaggtgtccctgagcagctccatgtcggtgtcagagctgaaggcgcagatcacccagaagatcggcgtgcacgccttccagcagcgtctggctgtccacccgagcggtgtggcgctgcaggacagggtcccccttgccagccagggcctgggccccggcagcacggtcctgctggtggtggacaaatgcgacgaacctctgagcatcctggtgaggaataacaagggccgcagcagcacctacgaggtacggctgacgcagaccgtggcccacctgaagcagcaagtgagcgggctggagggtgtgcaggacgacctgttctggctgaccttcgaggggaagcccctggaggaccagctcccgctgggggagtacggcctcaagcccctgagcaccgtgttcatgaatctgcgcctgcggggaggcggcacagagcctggcgggcggagctaagggcctccaccagcatccgagcaggatcaagggccggaaataaaggctgttgtaaagagaa

SEQ ID NO: 46601 - DNA, 6789 bp, Homo Sapiens
cagtacaacagggtctggattcccgatcctgaagaagtttggaagtctgctgaaatagccaaggactacagagttggtgacaaggtcctgcgactcctgctggaggatggaacggagctggattattctgtcaatccagaatctctgcctccacttcggaatcctgacatcctcgtgggcgagaatgacctcacggctctcagctatcttcacgagcccgcggtgctccacaacctcagaatccgctttgcagaatccaaactcatttacacctacagtggaatcattttggtggccatgaatccttacaagcagttgccaatatacggagatgccatcatccacgcctacagcgggcagaacatgggcgatatggacccacacatatttgccgtggcagaagaggcatacaagcagatggccagaaacaacagaaaccagtccataattgtaagtggggagtcaggtgctggaaagacagtgtcggctcgctatgccatgaggtactttgccaccgtcagcaaatcgggcagcaacgctcacgtggaagacaaggtcctggcatccaatcccatcaccgaggccgttggaaatgccaagaccacccgcaatgacaatagtagtcggtttgggaaatacacagaaatcagttttgatgaacaaaatcaaattataggagccaacatgagcacttacctcctggagaaatccagagttgtctttcaatcggaaaatgaacgaaattaccacattttctatcagctttgtgcatctgcacagcagtcggaatttaaacatcttaaattggggagtgccgaagaatttaattatacaagaatgggaggcaatactgtcattgagggtgtgaatgatcgagctgaaatggtagagactcaaaagaccttcacgcttctgggtttcaaggaggattttcagatggacgtttttaaaatcctggcagccatcctacatctgggcaatgtgcagatcaccgcggtgggcaacgagaggtcctcagttagtgaggatgacagtcacctgaaggtgttctgtgagctcctgggcctggagagtggcagagttgctcagtggctgtgcaatcgcaaaatcgtcacaagctctgagacggtggtaaaacccatgaccaggcctcaggctgtcaacgccagggatgcactggccaaaaagatctatgctcacctgttcgacttcattgtggagagaattaaccaagcgttgcagttttcaggcaagcagcacacttttattggtgttttggacatttatggttttgaaacctttgatgtgaacagctttgaacaattttgcatcaattacgctaatgaaaaactgcaacaacagtttaacatgcatgtcttcaaactggaacaagaagaatacatgaaggaagatataccttggacgctgatagatttttatgacaatcaaccagttattgacctgattgaagcaaaaatgggaattctggagttactggatgaagaatgtttgttaccacatggaactgatgaaaactggcttcaaaagctgtataataattttgtcaacaggaaccctttgtttgaaaagcctagaatgtcaaacacatcctttgtcatccagcactttgctgataaggtagagtataaatgtgaaggtttcctggagaaaaacagagacaccgtctatgacatgctggttgaaatcctgagagcaagcaagtttcatctctgtgccaacttttttcaagaaaatccaactcctccttctccttttggttcaatgattacagttaaatctgcaaagcaagtcatcaagccaaacagcaagcatttccggaccacagttgggagcaagttccgcagctctctgtacttgctcatggagaccctcaatgcgacgacgccccactacgttcgatgcatcaagccaaatgatgagaagttaccctttgaatttgactccaaaagaattgttcagcagctgcgagcctgcggcgttttagaaacgattcgcattagtgcacagagctacccttccaggtggacatacatcgagttctacagtcgctacggcattctcatgaccaagcaagagctttccttcagcgataaaaaggaggtgtgcaaggtggttttacacagactcatccaggattctaatcagtaccagtttggtaaaaccaaaattttcttcagagcaggacaagtggcttatttagagaaacttcgattggataaactgaggcagagttgtgttatggtacaaaagcacatgcgtggctggctccagaggaaaaaattcctccgagagagacgagccgccctgataatccagcagtacttccggggtcagcaaactgtgaggaaagctattactgcagtggccttaaaagaagcttgggcagccataatcattcagaagcactgccgcgggtatcttgttcgcagcctgtatcagttgattcgcatggccaccatcacaatgcaggcctacagccgaggattcctggcaaggaggaggtatcgaaagatgctggaggaacataaggctgtgatcctacagaaatacgcacgggcgtggctggccagacgcagattccagagtatccgacgattcgtgcttaatattcagcttacttacagggtccagcgtttgcagaaaaagttggaagatcagaacaaagaaaaccatgggctggtggagaagctgactagcctggctgctcttcgagctggggatgtggaaaagattcagaagctggaagcagaactagaaaaagcagccactcacaggcgaaattacgaggagaaggggaagagatacagggatgctgtggaagagaaattggcaaagcttcagaagcataattcagaactggaaacacagaaagaacaaatacagctgaagcttcaagagaagactgaagagttaaaagaaaaaatggacaacctcaccaagcagctctttgatgatgtacaaaaggaagaacggcaaagaatgcttcttgaaaaaagttttgaactgaaaacacaagactatgagaagcagattcagtctttgaaagaagaaattaaagctctcaaggatgagaagatgcaactccaacacctggtggagggggagcacgtcacttctgatggcttgaaggcggaagtggcccgcctgagcaagcaggtcaagacaatctctgagttcgaaaaagagatagaactacttcaggcacagaagatagatgtggagaaacatgtgcagtcacaaaaacgggaaatgagagaaaagatgtcagagatcaccaaacaacttctcgaaagctatgacattgaagatgtaagaagcaggctctctgtggaagatctggaacatttaaatgaggatggagaactttggtttgcttatgaaggactaaagaaagcaacacgtgttttggagagccatttccagtctcagaaggattgctatgaaaaggagattgaagctttgaacttcaaagtggtgcatctcagtcaagaaatcaaccacctgcagaagttattcagagaagaaaatgacatcaatgaaagcatccgtcatgaagttaccaggctaacatcagagaacatgatgatcccagactttaaacagcaaatttcagaattggagaaacagaagcaagatcttgaaatccgcctgaatgaacaagctgagaaaatgaaaggaaaactagaagaattgtctaatcagttacatcgcagtcaagaggaggaaggaacacaaagaaaggccttggaagcccaaaatgaaatacataccaaagagaaggagaagctgattgataagattcaagaaatgcaggaggccagtgaccacttgaagaaacaatttgaaactgaaagtgaagtcaagtgtaacttccggcaggaagcatcccggctcactttggaaaacagggatcttgaagaagaattagacatgaaagacagagtgattaaaaagctacaagatcaagtcaagacactaagcaagacaattggaaaagccaatgatgtgcactcgtcctcaggacccaaggagtaccttggaatgctgcaatacaagagagaagacgaggccaagctcattcagaacctcattcttgacttgaagccccgtggcgtggtggtgaacatgatccccgggctgccggctcatatcctgttcatgtgtgtgcgctacgcagactctctgaatgatgccaacatgctgaagtccctcatgaacagcaccattaatggcatcaagcaggtggttaaggaacatttagaagactttgaaatgctgtccttttggctttccaacacttgtcattttctcaattgcctgaagcagtacagcggagaagaggaattcatgaagcataatagtccacagcagaataagaattgcttgaacaattttgacctttcagaatacagacagattctcagtgatgtggctatacgaatatatcatcaatttattatcataatggaaaagaatatccaaccgataatagttccgggaatgctggagtatgagagcctgcagggcatttccggcctgaagcccacaggcttccggaagcgctcctctagcatagacgacacggacggctacaccatgacctccgtcctgcaacagctgagctacttttacaccaccatgtgccagaacggcctggaccccgagcttgtgaggcaggcggtgaagcagctcttcttcttgatcggggcggtcacgctgaacagcctcttcctgcgcaaggacatgtgctcctgcagaaaagggatgcagatcaggtgcaatatcagctacttagaagaatggcttaaagataagaacttgcagaacagcttagcaaaggaaactttggagcccctctctcaggcagcctggttgcttcaggtcaagaagaccacagacagtgatgccaaggagatctacgaacgctgcacctcactgtctgctgtgcagatcataaagatccttaattcatacacacctatagatgactttgagaagagagtgactccatcctttgttcgcaaagtacaggctctcctaaatagccgggaggattcatcacagctgatgttggataccaaatatctctttcaagtcacatttccttttaccccctctccacatgctctggaaatgattcagatccccagcagtttcaagctaggctttctgaataggttatagcaggagaaaaagtcaatgcactttttcttcaaaagctaagtgaaggttcaatatgagggatgtgttttattaattggcagtggaaattggaatgtgatttaaggaagaaaacagacttttctcaaatggaccacatcatctctcactcacagtgacaatgctgctcctgtaattttgtaagaattcacacacaccagctgtatttggaaaagccatgtctcactctcgaatctcagctggttttcactgaaattcctggagggctcatattttcttccacgtgcctcttgatctgttctgtcttgtggcagggctctaccaggagggagtgagatctggggacacagtggcttccaagttttctaaggttcatgtgaaacctgagtacatttacaaagctgcaagtggattctagtgctgagtcttccaggaaaaaatcccgtttggccaccgtgacctgccaaaagttctcttgccccatgcctgctggggacagaaggttttcatgaactctttttactgaaaatgccctgcatttaaaaatgtttattttagacccttctaaatttttttttttttttttttttgagactccggagtctcgctctatcgccaggctggagtgtagtggcatgatctcggcttattgcaacctccgcttcctgggttcaaacaattctcctgcctcagcctcctgagtagctgggactacaggcacctgccaccacgcccagctaatttttgtatttttagtggagacaggtttcaccatgttggccaggatggcctcgatctcttgacctcgtgatccgcccacctcagcctcccaaagtgctaggattacaggcgtgtgccaccgcgcccggctgacccttttaatttttaagagtgttcaatccgagatgaatcatttgaagtatttttatatgtatatctatttaaaactaatatattattaaagcttaattgccatgccgtttatcttctctgaaagaacttcaaatcttacctgccaacatattcaccataatttttttattttttaatacctttcatacaataacttttttaaaacaacctcagattgaaaaagcaacctaaattactttcgctctctaatcagcatttcaatgtatttatttttaaattttctcaaaaagtaactaaaaaattgtgtcggaccctacttttgagaaatctacgtttcccaagttttatgggaactggctattccttgtcccggcacaccttctcattccttcctttcagagcctaaaacctcatttgataagcactcctagtctctggcctgtggatccagtgctattctgtcaccaacctaagaatcccaattgcaccttctgtttctgacagtcacaggtgacagctgtgattctataatacagactggtgtcttagaggtaggaataatacatgattatgaagcatcaccctgctaatacataataatgtctttttatattataagtgattgagtttagttcatttcaatacattgtacatgaaaaaatgaaaagtagaactttgtaatactttaatcaataaaattaattaccaaatgaa

SEQ ID NO: 46602 - DNA, 972 bp, Homo Sapiens
atgtctggggacgagatgatttttgatcctactgtgagcaaaaagaaaaagaagaaaaagaagccttttatgttagatgaggaagcggatacccaaacagagataacccagccttcagaaacaaaagaagtggggccagagccaactgaggacaaagatttggaagctgatgaagaggacactaggaaaaaagatgctgctggtgatctagatgacttgaacttctttaatcaaaagaaaaagaaaaaaaaaactaaaaagatatttgatattgatgaagctgaagaaggtgtaaaggatcttaagattgaaagtgatgttcaagaaccaactgaaccagagaatgaccttgacattatgcttggcaataaaaagaagaagaagaaggtcaagttcccagatgaggatgaaatactagagaaagatgaagttctagaagaggaagacagcaaaaaagatgatggtatctcattcagtaatcagacaggccctgcttgggcaggctcagaaagagactacacatatgaggagctactgaatcgagtgttcaacatcatgagggaaaagaatccaggtatggttgctggggacataaggaaatttgtcatgaaacctccacaggtcgtccgagtaggaaccaagaaaacgtcttttgtcaactttacacatatctgtaaactattacatcatcagcccaaacatctccgtgcatttttgttggctgaattgggtacaagtggttctatagatggtaataaccaacttgtaatcaaaggaagattccaacagaaacagatagaaaatgtcttgagaagatatatcaaggaatatgtcacttgtcacacgtgccgattactggacacaatcctgcagaaggacatgcgaatctatttcctacagtgcgaaacttgtcattctagatgttctgttgccagcatcaaaaccagctaccaggctgtaatgggcaagtga

SEQ ID NO: 46603 - DNA, 1347 bp, Homo Sapiens
atgtcaggaatgtacagatgtcagaccagccaatacaatggatttaacgtgaaaccaagggaagccttggtgcagctcatcgttcagtatccccctgcagtggaaccagcattcttggaaatccggcaaggacaggatcgaagtgtcactatgagttgcagagtactgagagcctatccaatacgggtgctgacctatgagtggcgcttgggcaataaattattacggacgggtcaatttgactctcaggaatacacagagtacgctgtgaagagtctttccaatgaaaactatggggtttataactgtagcatcataaatgaagctggagctgggagatgcagctttcttgttacaggaaaggcctatgctccagaattctattatgatacctacaatccagtatggcagaacagacaccgtgtttattcttacagtctacagtggacacagatgaatcctgatgcagtggatcggattgttgcataccggttgggcatcaggcaggctggacagcagcgctggtgggagcaggagattaaaataaatgggaatattcaaaagggagaattaattacatataacttgacagagctaattaaaccagaagcttatgaagtccgactgactcctctcaccaaatttggtgaaggagattcaacaattcgtgtgatcaaatatagtgctcctgtaaatcctcatttgagagaatttcattgtggatttgaagatggtaatatttgtttgttcactcaagatgatacagataattttgactggacaaagcaaagtacagcaacaagaaatacaaaatatactcctaatacaggacctaatgctgaccgtagtggctccaaagaaggtttttatatgtacattgagacatcacgacccagattggaaggcgaaaaggctcgacttctcagccctgttttcagcatagctcccaaaaacccttatggacccacaaacactgcatattgtttcagcttcttttatcacatgtatggacaacatataggtgtcttaaatgtttatctacgtttgaaagggcaaacaacaatagagaatccactgtggtcttcaagtgggaataaaggacaaagatggaatgaggctcatgttaatatatacccaattacttcatttcagctcatttttgaaggtatccgaggtcctggaatagaaggtgacattgctattgatgatgtatcaattgcagaaggagaatgtgcaaaacaagacctagcaactaagaattccgttgatggtgctgttgggattttggttcatatatggctttttcccattatcgtcctcatctctatcttaagtcctcgaaggtga

SEQ ID NO: 46604 - DNA, 177 bp, Homo Sapiens
atgtggtatgaaaatctctcaggcttacgtcaacagtctatcgctaattcctggctgtggagtctccataggcctcccttttctcgccatagcctattggattgctccgtgcagcaaggtacagactgcttaaggtgcatgtcgtttgcggttatttcttctctcttcttagcatga

SEQ ID NO: 46605 - DNA, 1339 bp, Homo Sapiens
gggagagagatcttcctctctcttcgggcgtgttaagacagcggggttggcctgtacttcctctggccctggctgaagagggctagtgaaaccgttaaacccctaggcgatcatggccttgagacctgaggaccccagtagcgggttccggcatagcaacgtggtggccttcatcaacgagaaaatggccaggcacacgaaaggccccgagttctatcttgagaatatatccttatcctgggagaaggtggaagacaagctgagggccatactggaggacagcgaggtgcccagtgaggtcaaagaggcctgcacctggggcagcctggccttgggagtgcgctttgcccacaggcaggcacagctacaaaggcacagggtgcggtggctgcacggcttcgccaaactgcacaaatcagccgcacaggccttggcatcagacctgaagaagctcagggagcagcaggagacggaacgcaaggaggcggcctcccggctaagaatggcccagaccagcctcgtggaggtgcagaaagagagagacaaggagctggtgtctccccatgagtgggagcagggggcagggtggccaggcctggccactgccggaggggtttgcacagaaggagcagctgaggaggaagaagaggcggcggtggctgctgctggtgctgctggaggaaaaggagcagaagaagagcagaggttggaggttgtggctgcccctgtggaggccatggctccccctgtggaggctggggctgcccccatggagacccagttcccccacgtggaggccagggctgcctccatggagaccacagagaagctggagagaatcctcctgcagctccttggagatgctgatcaggaaaagtacacctattgggggcagaaggagggagatctccggtcggtcgaaacagccacatcttatttctctggaaccacgaacccctggtccagagcctcatcagaacctcttcctgtccagctccctgcctcatactcatactcatactcaagccctttttcctccttctcagacatacccactatatcccctccacaagcaacagtcacagcaccagttccgcctcagctgccttccgactgggaggcctttgatactagcctgtggtctgatggggggccccacagaatagaccatcaggagcacccaagagacaggagatactccgaacctcatcagcaaagacctccagtatatcgcaggccaggggactgggactgcccttggtgtaacgctgtgaatttttcacggagggatacttgcttcgactgtgggaagggaatctggctgcaaaaacctcattga

SEQ ID NO: 46606 - DNA, 936 bp, Homo Sapiens
atgtccaacgccagcctcgtgacagcattcatcctcacaggccttccccatgccccagggctggacgccctcctctttggaatcttcctggtggtttacgtgctcactgtgctggggaacctcctcatcctgctggtgatcagggtggattctcacctccacacccccatgtactacttcctcaccaacctgtccttcattgacatgtggttctccactgtcacggtgcccaaaatgctgatgaccttggtgtccccaagcggcagggctatctccttccacagctgcgtggctcagctctattttttccacttcctggggagcaccgagtgtttcctctacacagtcatgtcctatgatcgctacttggccatcagttacccgctcaggtacaccagcatgatgagtgggagcaggtgtgccctcctggccaccggcacttggctcagtggctctctgcactctgctgtccagaccatattgactttccatttgccctactgtggacccaaccagatccagcactacttctgtgacgcaccgcccatcctgaaactggcctgtgcagacacctcagccaacgtgatggtcatctttgtggacattgggatagtggcctcaggctgctttgtcctgatagtgctgtcctatgtgtccatcgtctgttccatcctgcggatccgcacctcagatgggaggcgcagagcctttcagacctgtgcctcccactgtattgtggtcctttgcttctttgttccctgtgttgtcatttatctgaggccaggctccatggatgccatggatggagttgtggccattttctacactgtgctgacgccccttctcaaccctgttgtgtacaccctgagaaacaaggaggtgaagaaagctgtgttgaaacttagagacaaagtagcacatcctcagaggaaataa

SEQ ID NO: 46607 - DNA, 1285 bp, Homo Sapiens
acaggcttggcgacgccatgtttcaagggcagcgcggttggttttgcggcagcgttagccaggatctgaggcaattctgggtggctgaagggggaacgatcagtgacccgcgagccgccgacttcttgttcagctgtgatgcctcgcacccagacacgctgagaatatatcagagccttgattacatagaagataatgctacagtttttcatgcctactatctctctgcggtagctaatgccaaaataaaaaactcggtggctttgggtcatttcattcttcctcctgcgtgcctgcaaaaagaaataagaagaaaaattggtagttttatttgggaacaagaccaacattttctgatagaaaagcatgatgaagtaacaccaaatgaaataaagacccttagggaaaacagtgaactagcaacagagcacaaaaaagaattatccaaaagcccagaaaagcattttataagaactccagttgtagaaaagcagatgtacttccctctacagaattacccagttaacaacatggtaacaggttatatatcaattgatgccatgaagaaattccttggggagctacatgacttcattcctggaacctcaggatatttggcatatcatgttcaaaatgaaattaatatgtctgctataaaaaacaaattgaagaggaaatagtaaattaaattgtaaataccttggcatttattttctataaaatattatacagatgtgcatatcataaaatgctcccttttggtactgggggatagtgaaatgggaaataatttttctgtttctcaaagtatatctttaggaaatacagaatcattttggttctgtgttttgacatttttcccctagcttttaacaacatgttcaaatattctcaatgcacagttgttaatgagtaattgccgttaaaatatatttcataagaagtctcaatctcaaactctccatctctcaatcctcctcctcctcctctttcttgctttctcttttccctctctctttctctcctccccttctctctttctgtctttcaaatgttcttttggctttaacattctattaattatattttttctagattgaatactgtgaatgctaagttttattaatctggtcatcttattttgattttaaaaattaggatgctagttgcattctgaattactgtttctggtttgaaacatggagaaaaacattttaataattcatatttcatgttggatggtttctaataataaatatctcaaaagtgacttaacataaacaga

SEQ ID NO: 46608 - DNA, 1799 bp, Homo Sapiens
agcagtggatggttcaggttgggaagaagagcagtgggattgccagttaaggttgtggaatcaaagagcaaaggctgttgtgaagtggaatatcaggctcaaatggaggtccctcccgaatgagcactgacacctgtgtgcccggacatccacgagggccccaacacctgtgctcctgacagctccatgcactaagcagggcacagtctggatccaggggactgactgtctctggcattgagcggttggtaatcaataccccaccctccctgttctcagtcacttggggacaaaaaagaaagcctgcagaacacgactgctggcccacctgccagagtagccaaggaaacaggatgcccgctaaagcatgttaaggaaggtgtggagcagctgctgggaactgtcttgatttaaaggaagacatggaggactgctgtatgctaccgtattacacggcccaaagcagccccgcaatgggcatgtttaacacctccatggggaagctgcagcggcaactgtacaaaggcgagtatactatattcaggtatgcacccatgtttgagagcgactttatccagatcagcaaaagaggagaagtgattgacgtgcacaaccgtgcccgaatggtaacaatgggcatcgttcgcaccagcccctgcctcacactacctgatgtcatgctgctggcccgaccagctgctgtctgtgacaatgccaggtgtggtcctgccacccagaaaagagaaagtccgcctgcagagatcttagaactaaccaggctgcttcccttgatgtttgtgaaaataaccatccacaacagcgtaaaaaaacagctccacctgaagcttgccacgggccgctctttttatcttcagctgtgtcctccatcggatgcaagtgaagacctttttgttcactgggaaaaccttgtttacatcctgagaccaccagtggaggcttacagtgataccagggctatcctagctgggaacacattggactcatctgtgttggaggaagtgcagaggagcccagtgggatatgccatgaagttttgtgaagagaaggagcaattcagaatcagtagacttcacatgaatgctgaaatgtttgggtccacctattgtgattatacaatagagatatgaatccaacatacctcccacatatactacgttcaagagttcacacacccctgcagtcataaaacctatagtgcctgatgaaggggcagggtagcaacagcagtagtgatgacagtaagcaccaccacaggtaccatggatgtggctgcaaccaagtctgcagactcaggagagaaacacagcactggcaaaagcagccttcagaggtccaggaggaagtatagccagcatggctattagtgggtgcttccatgtcttaatcttgttatagcaagggctgcatgcacattcttgtcctaaaagggtacttcaagcatatcagtaagtgctactggcctctccctagagagcagtatgaatgtggtggctacaggagcagagagatactgagaaggctgttgcattgacagtatctctctgctactcaaaggctgactctctgctactcagcattgggagtcagttatctcaactctgcaggatgaggccacatgcgtgaatgggatggaagccagagggtctctacctagctggattgactctgcagtaataacctcaaagcccagtactacacatggtgcagaggtggacatctcacctaagactgtggaggggaacaatgtgattcaccataataaaatccatcaactcaaa

SEQ ID NO: 46609 - DNA, 1097 bp, Homo Sapiens
ggcgcggctggggctgcggcttcagggtgcctctgacagctgctgcaggaaacatggccaagtttgccctgaatcagaacctgcccgacctgggcggcccccgcctgtgcccggtccccgccgccgggggcgcacgcagcccgagctcgccctactcggtggagacgccctacggcttccacctggacctggacttcctcaagtacatagaggagctggagcgtggccccgctgcccgccgcgccccgggacccccgacctcgcgccgtccccgcgcgccccggcccggcctcgcgggcgcacgtagcccaggcgcctggacatccagcgagtccctggccagtgacgacggtggagcaccgggcatactctcccagggcgcgccctcggggctcctgatgcagccgctgtcgccgcgcgcgcccgtgcgcaacccgcgcgtcgagcacacgctccgggagaccagccggcggctggagctggcgcagacacacgagcgcgcgcccagccccggccgcggggtcccgcgcagcccacgcgggtccggccgcagcagccccgcccctaaccttgcccctgcttcgcccggccctgcccaactgcagctggtgcgcgagcagatggccgcggcgctgcggcgcctgcgcgagctcgaggaccaggcgcgaacgctgcccgagctgcaggagcaggtgcgcgcgctgcgcgccgagaaggcgcggctgctggccgggcgcgcgcagcccgagccggacggggaggctgagacgcgcccggacaagctcgcccagctgcggcggctcaccgagcgcctggccacctccgagcgcggcggccgtgccagggccagcccccgggctgacagcccagacggcctggctgcagggcgcagcgagggcgcgctccaggtcctcgacggggaggtcgggagtctcgatgggacgccccagacccgggaggtggccgccgaggccgtgcccgagacccgagaagcgggtgcccaggccgtgccggagacccgggaggccggcgtggaggctgcccccgagaccgtggaggcggacgcgtgggtgaccgaggcgctgctggggctgcct

SEQ ID NO: 46610 - DNA, 855 bp, Homo Sapiens
atgtacggaagctgtcttttggagaaagaagcaggcatgtacccgggcactctcatgagccctgggggcgacggcacagctgggacaggcggcacagggggcggtgggagtccgatgccagcctccaatttcgctgcggcaccggctttctcgcactatatggggtatcctcatatgcccagcatggatcctcactggccgtctctgggagtctggggctcaccctacagtcccccgcgagaagactggagcgtgtatcctgggccgtctagtacaatgggcacagtgccggtgaacgacgtgacctctagccccgccgctttctgctcgaccgactacagcaacttgggccctgtgggcggtggaactagcggcagcagcctaccaggccaggctggcgggtcgcttgtcccgacggacgcaggcgccgccaaggccagttcccccagcaggagccgccacagcccctatgcatggatgcgcaagacggtgcaggtgacggggaaaaccaggacaaaagaaaagtatcgtgtagtttacactgatcatcaaagattggagctggaaaaggaattccattgcaatagatatatcaccatccagagaaaatcagagctggcagttaacctgggcctttccgagagacaggtgaaaatctggtttcagaatcgcagagccaaggagagaaagatgatcaaaaagaaaatctcccagtttgagaatagtggaggctcggtgcaaagtgactctgactccatcagccctggggaactacctaacacttttttcaccacaccatctgctgttcgtggatttcaacctattgagatacagcaggttatagtctccgaatga

SEQ ID NO: 46611 - DNA, 489 bp, Homo Sapiens
gccatctcctcctcggcatcatggccgccctcagaccccttgtgaagcccaagatcgtcaaaaagagaaccaagaagttcatccagcaccagtcagaccaatatgtcaaaattaagcgtaactggcggaaacccagaggcactgacaacagggttcgtagaagattcaagggccagatcttgatgcccaacattggttatgggagcaacaaaaaaacaaagcacatgctgcccagtggcttccggaagttcctggtccacaacatcaaggagctggaagtgctgctgatgtgcaacaaatcttactgtgccgagatcgctcacaatgtttcctccaagaaccgcaaagccatcgtggaaacagctgcccaactggccatcagagtcaccaaccccaatgccaggctgcgcagcgaagaaaatgagtagacagctcgtgtgcacgttttctgtttaaataaatgtaaaaactgcaaaaaaaaaaaaaaaa

SEQ ID NO: 46612 - DNA, 942 bp, Homo Sapiens
atgaagagggagaatcagagcagtgtgtctgagttcctcctcctggacctccccatctggccagagcagcaggctgtgttcttcaccctgttcttgggcatgtacctgatcacggtgctggggaacctgctcatcatcctgctcatccggctggactctcaccttcacacccccatgttcttcttcctcagccacttggctctcactgacatctccctttcatctgtcactgtcccaaagatgttattaagcatgcaaactcaggatcaatccattctttatgcagggtgtgtaactcagatgtattttttcatatttttcactgatctagacaatttccttctcacttcaatggcatacgatcggtatgtggccatctgtcaccccctccgctacaccactatcatgaaagagggactgtgtaacttactagtcactgtgtcctggatcctctcctgtaccaatgccctgtctcacactctcctcctggcccagctgtccttttgtgctgacaacaccatcccccatttcttctgtgatcttgttgccctactcaagctctcatgctcagacatctccctcaatgagctggtcattttcacagtgggacaggcagtcattactctaccactaatatgcatcttgatctcttatggccacattggggtcaccatcctcaaggctccatctactaagggcatcttcaaagctttgtccacctgtggctctcacctctctgtggtgtctctgtattatggcacaattattggactgtattttctcccctcatccagtgcctccagtgacaaggacgtaattgcctctgtgatgtacacggtgatcaccccattgctgaatcccttcatttatagcctaaggaacagggacataaagggagccctggagagactcttcaacagggcaacagtcttatctcaatga

SEQ ID NO: 46613 - DNA, 306 bp, Homo Sapiens
ggaggctgtggctcttgtggctgctcccagtgcagctgctgtaagccctgctgctgctcttcaggctgtgggtcatcctgctgccagtccagctgctgtaagccctgctgctcctcctcaggttgtgggtcatcctgctgccaaaccatgggctgttgcggctgctccggaggctgtggctccagctgtgggggctgtggctccggctgtgggggctgtggctccggctgtgggggctgtggctctggctgtggaggttctggctccagctgctgtgtgcccgtctgctgctgcaagcccgtgtgc

SEQ ID NO: 46614 - DNA, 1918 bp, Homo Sapiens
gtgttgggtttgggggacgctggcagctgggttctcccggttcccttgggcaggtgcagggtcgggttcaaagcctccggaacgcgttttggcctgatttgaggaggggggcggggagggacctgcggcttgcggccccgcccccttctccggctcgcagccgaccggtaagcccgcctcctccctcggccggccctggggccgtgtccgccgggcaactccagccgaggcctgggcttctgcctgcaggtgtctgcggcgaggcccctagggtacagcccgatttggccccatggtgggtttcggggccaaccggcgggctggccgcctgccctctctcgtgctggtggtgctgctggtggtgatcgtcgtcctcgccttcaactactggagcatctcctcccgccacgtcctgcttcaggaggaggtggccgagctgcagggccaggtccagcgcaccgaagtggcccgcgggcggctggaaaagcgcaattcggacctcttgctgttggtggacacgcacaagaaacagatcgaccagaaggaggccgactacggccgcctcagcagccggctgcaggccagagagggcctcgggaagagatgcgaggatgacaagagtctggctctgtggcccaggctgaagtgcagtggtacgatctccgctcactgtaagctctgcctcccaggttcacgccattctcctgcctcagcctcccgaatagctgggactacaggagcctaccaccacgcctggctaattttctgtatttttagtagagatggggtttcacagtgttagccaggatggtctctatctcctgacctcgtgatccgcccaccttggcctcccaaagtactgggattacaggcgtgagccaccgtgttcagcccacatgatactaattctcaatgggcagaatgaaataaaaccatttattgatatagtgctttatgattgttcaaagtttattatatgcataagtcatttatttgggaaagttgaataccatgtggtatgtgatagggatagaaagatagtaagattcccgttctttgaagaagtgagggaggcacacatagaaaaataatccataatgcatgattaaatgctatagtaaagctgcttacaaaggggtttgagaatacagaggaataactgattaacttcctcaggaagtcaagagcgaaataattcactgaaaaggtgatctttagtaatttaacaaaatgagaaagggataaggacaggaggaacataaatgaggccaggaaagctggaaagtatgttgtaccttcacagaaggtcaagcagtagaataggagagtgtaatataaggtacatggtattgagaagtaggggaaattatgtctgagttaaagctatttggggccagaataatgatgattattgttattactattttattgtggtaaaacatctataacaaaatttactatttttaccattttaagtgtataatttagtggcattaagtacattcacaatgttgtgtaaccatgattactaccatctatttctagaactttttcacgatcccaaaccaaacaaaacctctacccattaagcagtaattcccattgcccttccctccagcctgtggtaacctctattctagtttctgtgtctatgaatttgtctattctagatacctcatataggaggattatacaatatttgtccttttttatctggcttatttcacctagcataatgttttcaagattcatttatgttgtagcatgtatcagaacttcattcctctttatggctgataatattttattatgtgtatataccatgttttgcttttcattcatctgttgatgaacacttgagttcttcccctctttcagttattgtgagtaatgcctctataaacggtggtgtacaagt

SEQ ID NO: 46615 - DNA, 357 bp, Homo Sapiens
atggagtttgtgctgagttgggttttccttgctgctattttaaaaggtgtccagtgtgaggtgcagctggtggagtctgcgggaggccttcagcctggggggtcccttagactctcctgtgcagcctctggattcacttgcagtaacgcctggatgagctgggtccgccaggctccagggaaggggctggagtgggttggctgtattaaaagcaaagctaatggtgggacaacagactacgctgcacctgtgaaaggcagattcaccatctcaagagatgattcaaaaaacacgctgtatctgcaaatgatcagcctgaaaaccgaggacacggccgtgtattactgtaccacaggc

SEQ ID NO: 46616 - DNA, 523 bp, Homo Sapiens
atgaaaccccagtttgttgggatcttgctcagctccctgctaggggctgccttgggaaaccgaatgcggtgctacaactgtggtggaagccccagcagttcttgcaaagaggccgtgaccacctgtggcgagggcagaccccagccaggcctggaacagatcaagctacctggaaaccggaggtgttttttgagggggctgaaaatccctttgggctccttgaaatcacatctgctctgccccagaaggcaagtcctgaagccaggagtccaacaccccagtttcattctctctctcagccccagtgaccttgattcaccaacatccagcctgcgtcgcagcccatcattgcaatcaagtggagacagagtcggtgggagacgtgacttatccagcccacagggactgctacctgggagacctgtgcaacagcgccgtggcaagccatgtggcccctgcaggcattttggctgcagcagctaccgccctgacctgtctcttgccaggactgtggagcggatag

SEQ ID NO: 46617 - DNA, 1377 bp, Homo Sapiens
gcgatatttgggagacttactgaacacaatgagacgattttgttcaaagaaaagtttctggattggacagaactgaaaagaccaaatgagaagaaccccggggaacttgcccagcacaaggaagactccagggccgatgtcaagcggaacaacgtgacacggatggtgtccgtgccccagacgacagcaggtgccatcctggacagggtgaacattggctgtggctgtggcctggtggaaggacaccacaggaggcagtttgagatcaccagtgtctccgtggatgtctggtacatcctggaatttgactatagcaggctccccaaacaaagcatcgggcagttccacgagggggatgcctatgtggtcaagtggaagttcatggtgagcacggttagtgagcgcttatggctttctccagctgaaagaggtcagcccagcagccctgcgggagccagcttctccaatgaaccctgtcatgccctctgctgcgtgcgtgcagtggggcaccgcagtcatacgcctttgagagccagtcttctccacctcgaagctcggattaattctacctgtgtttccacagtgttgaattatttcatattttacattcattcttcatctggaatttactttgatgcacatgatatcttcagctttgttctcttttctttcaaagatcccggaagttttaacttcgcgccccgcctgttcgtcctcagcagctcctctggggatttcgcagccacggagttcgtgtaccctgcccgagccccctctgtggtcagttccatgcccttcctgcaggaagatctatacagcgtgccccagccagtgcctttccttgacaatcaccacgaggtgtgcctctggcaaggctggtggcccatcgagaacaagatcactggttctgcccgcatctgccgtgcctctgaccaaaagagcacgatggagaccatgctccagtattgcaaagatgaggcctcgccagcagctccccggagccctagaccctttttccctttctgcatggtccccaagtcttaccttatccatgctggtctggagcccctaacattcaccaatatgtttcctagctgggagcacagagacgacactgctgagatcacagagatggacatggaagtttccaatcagatcaccctcgtggaagacgtcttagccaagctctgtaaaaccatttacctgctggccaacctcctggccaggccactcccggagggggtcgatcctctgaagcttgagatctatctcaccgacgaagacttcgagtttgcactagacatgatgagggacgaatacaatgccctgcctgcctggaagcaggtgaacctgaagaaagcaaaaggcctgttctga

SEQ ID NO: 46618 - DNA, 1835 bp, Homo Sapiens
tgcgcggggccgggtccgggagccccagggcagccgccccgccgagtcgcaggtacagcgtcaccttcgtcccctccggagctgcacgtggcctgagcaggatggtgccctccagcccagcggtggagaagcaggtgcccgtggaacctgggcctgaccccgagctccggtcctggcggcacctcgtgtgctacctttgcttctacggcttcatggcgcagatacggccaggggagagcttcatcaccccctacctcctggggcccgacaagaacttcacgcgggagcaggcatgtacgaacgagatcacgccggtgctgtcgtactcctacctggccgtgctggtgcccgtgttcctgctcaccgactacctgcgctacacgccggtgctgctgctgcaggggctcagcttcgtgtcggtgtggctgctgctgctgctgggccactcggtggcgcacatgcagctcatggagctcttctacagcgtcaccatggccgcgcgcatcgcctattcctcctacatcttctctctcgtgcggcccgcgcgctaccagcgtgtggccggctactcgcgcgctgcggtgctgctgggcgtgttcaccagctccgtgctgggccagctgctggtcactgtgggccgagtctccttctccacgctcaactacatctcgctggccttcctcaccttcagcgtggtcctcgccctcttcctgaagcgccccaagcgcagcctcttcttcaaccgcgacgaccgggggcggtgcgaaacctcggcttcggagctggagcgcatgaatcctggcccaggcgggaagctgggacacgccctgcgggtggcctgtggggactcagtgctggcgcggatgctgcgggagctgggggacagcctgcggcggccgcagctgcgcctgtggtccctctggtgggtcttcaactcggccggctactacctggtggtctactacgtgcacatcctgtggaacgaggtggaccccaccaccaacagtgcgcgggtctacaacggcgcggcagatgctgcctccacgctgctgggcgccatcacgtccttcgccgcgggcttcgtgaagatccgctgggcgcgctggtccaagctgctcatcgcgggcgtcacggccacgcaggcggggctggtcttccttctggcgcacacgcgccacccgagcagcatctggctgtgctatgcggccttcgtgctgttccgcggctcctaccagttcctcgtgcccatcgccacctttcagattgcatcttctctgtctaaagagctctgtgccctggtcttcggggtcaacacgttctttgccaccatcgtcaagaccatcatcactttcattgtctcggacgtgcggggcctgggcctcccggtccgcaagcagaatgaagaactgcatgtggcttctctgtctctgtggaaaagccatctcaggttggcggcagacacattgtcatcagaggggagcagcggctctggtcctcggagctggttcctctctcccaccctaagggcagccctccatggtcctgtctgtccttctgaagtgtgtccatcctgacctgcgggtcctcagctgctcccacacttgtgccagcccggaggggactggtcccggtcaccgcggacgtgctggccttggtatgtgccaggcttgcctgggctgggcagccttgggggggctgcctttgtggtgggcgctggggaagtacgtcccagcggcctcagggtctaaggagcgctagtgccttgcccacaggtgcgggaccatctgatgtgatgtgaatactcttcccacatacattaaacacacttaagtgag

SEQ ID NO: 46619 - DNA, 906 bp, Homo Sapiens
gtctacaccccctcctcacacgcacttcacctgggtcgggattctcaggtcatgaacggtcccagccacctccgggcagggcgggtgaggacggggacggggcgtgtccaactggctgtgggctcttgaaacccgagcatggcacagcacggggcgatgggcgcgtttcgggccctgtgcggcctggcgctgctgtgcgcgctcagcctgggtcagcgccccaccgggggtcccgggtgcggccctgggcgcctcctgcttgggacgggaacggacgcgcgctgctgccgggttcacacgacgcgctgctgccgcgattacccgggcgaggagtgctgttccgagtgggactgcatgtgtgtccagcctgaattccactgcggagacccttgctgcacgacctgccggcaccacccttgtcccccaggccagggggtacagtcccaggggaaattcagttttggcttccagtgtatcgactgtgcctcggggaccttctccgggggccacgaaggccactgcaaaccttggacagactgctgctggaggtgccgccgtcgaccgaagacgccagaagctgccagttccccgaggaagagcggggcgagcgatcggcagaggagaaggggcggctgggagacctgtgggtgtgagcctggccgtcctccggggccaccgaccgcagccagcccctccccaggagctccccaggccgcaggggctctgcgttctgctctgggccgggccctgctcccctggcagcagaagtgggtgcaggaaggtggcagtgaccagcgccctggaccatgcagttcggcggccgcggctgggccctgcaggagggagagagagacacagtcatggcccccttcctcccttgctggccctgatggggtggggtcttag

SEQ ID NO: 46620 - DNA, 846 bp, Homo Sapiens
cagaagtcctacaaggtgtccacctctggcacccgggccttctgcagctgctcctacacgagtgggcctggtgtctgcatcagctccttgagcttctcctgggcagcagcagcttccggggtggcctatggtggggccagtggcatgggaggcatcactgccgtcccagtcaaccagagcctgctgaacccccttaacctgaaggtgaaccccaacatccatgctgtgtgcacccaggagaaggagcagatcaagaccttcaacaacaagtttgcctccttcgtcgacaaggtacggttcctggagcagcagaacaagatgctggagaccaagtggagcctcctgcagcagcagaagacggctgggagcaacatggacaacatattcgagagctacatcaacagccttaggcggcagctggagactctgggccaggagaagctgaagctggaggcggagcttggcaacacgcaggggctggtggaggacttcaagaacaactatgaggatgagatcaataagagtacagagacggagaatgaatttgtcctcatcaagaaggatgtggatgaagcttacattaacgaggtagagctggagtcttgcctggaagggctggatatcaacttcctcaggcagctgtatgaagaggagatccgggagctgcagtcccagatctcggacacgtctgtggtgctgtccattgacaacagccgctccctggacacggacagcatcatcgctgaggtcaaggtacagtacgaggagatcgccaaccgcagtcgggctgaggccgagagcatgtatcagatcaagtatgaggagctgcagacgctggctgggaag

SEQ ID NO: 46621 - DNA, 417 bp, Homo Sapiens
ctaaagtggaagggtttcgcagatgaggacacacagggggagccagatgagaacgtcattgctgagtttctgcagtcacagaaaacagccgagacagatgagtcagagggaggcaagcacaaagctgtttccgattctggaggtaagggagaggaggtcaaacctaagaagaagaagtcgtcagaaaagccaggctttgccctgggttttgagtcacagaggattattggagctaccgactccagtggagagcccatgttcctgatgaaatggaaagcctctaatgaggctgacctggcttctgccaaggaagccaatgtcaagtgctcacagattgacatatccttatgtgaggaaaggccagtgtggtatttctacccctcagaggatgataacaagaatgatgacaagaattaa

SEQ ID NO: 46622 - DNA, 1230 bp, Homo Sapiens
cggcggcgcgccggcggcaggaccatggttgagcgcgccagcaagttcgtgctggtggtggcgggctcggtgtgcttcatgctcatcttgtaccagtacgcgggcccaggactgagcctgggcgcgcccggcggccgcgcgccgcccgacgacctggacctgttccccacacccgacccccactacgagaagaagtactacttcccggtccgcgagctggagcgctcgctgcgcttcgacatgaagggcgacgacgtgatcgtcttcctgcacatccagaagacgggcggcaccaccttcggccgccacctcgtgcagaacgtacgcctcgaggtgccgtgcgactgccggcccggccagaagaagtgcacctgctaccggcccaaccgccgcgagacttggctcttctcccgcttctccaccggctggagctgcgggctgcacgccgactggaccgagctcaccaactgcgtgcccggcgtgctggaccgccgcgactccgccgcgctgcgcacgcccaggaagttctactacatcaccctgctacgagaccccgtgtcccgctacctgagcgagtggcggcatgtgcagaggggtgccacgtggaagacgtcgttgcatatgtgtgatgggcgcacgcccacgcctgaggagctgccgccctgctacgagggcacggactggtcgggctgcacgctacaggagttcatggactgcccgtacaacctggccaacaaccgccaggtgcgcatgctggccgacctgagcctggtgggctgctacaacctgtccttcatccccgagggcaagcgggcccagctgctgctcgagagcgccaagaagaacctgcggggcatggccttcttcggcctgaccgagttccagcgcaagacgcagtacctgttcgagcggacgttcaacctcaagttcatccggcccttcatgcagtacaatagcacgcgggcgggcggcgtggaggtggatgaagacaccatccggcgcatcgaggagctcaacgacctggacatgcagctgtacgactacgccaaggacctcttccagcagcgctaccagtacaagcggcagctggagcgcagggagcagcgcctgaggagccgcgaggagcgtctgctgcaccgggccaaggaggcactgccgcgggaggatgccgacgagccgggccgcgtgcccaccgaggactacatgagccacatcattgagaagtggtag

SEQ ID NO: 46623 - DNA, 1089 bp, Homo Sapiens
atgcaggcggagcgaggagctcggggaggccgtgggcggcggccaggccgcggccggcctggcggagatcgccacagcgagcggcccggagccgcagcggcggtagccagaggcggcggcggaggcggcggcggggacggaggcggacgccggggccgtggccgtggccggggcttccgcggcgctcgcggaggccgaggaggaggaggcgccccgcgaggcagccgccgggagccgggaggctggggcgcaggggccagcgcgccggttgaagatgacagcgatgcagagacctatggagaagagaatgatgaacagggaaattattctaaaagaaagattgtctctaactgggatcgatatcaagatattgaaaaagaggtcaataatgaaagtggagagtcacagaggggaacagatttcagtgtcctccttagctctgcaggggactcattctcacagttccggtttgctgaggagaaagaatgggatagtgaagcttcttgtccaaaacagaattcagcattttatgtggatagtgagttattggttcgagcccttcaagagctgcctctctgcctccgactcaacgttgctgccgaactggtccagggtacagttcctttagaggttcctcaggtgaaaccaaagagaactgatgatggcaagggattagggatgcagttaaaggggcccttggggcctggaggaagggggcccatctttgagctgaaatctgtggctgctggctgccctgtgttgctgggcaaagacaacccaagcccgggtccttcaagggattctcagaaacccacttccccactgcagtcagcaggagaccatttggaagaagaactagatctgttgcttaatttagatgcacctataaaagagggagataacatcttaccagatcagacgtctcaggacctgaaatccaaggaagatggggaggtggtccaagaggaagaagtttgtgcaaaaccatctgtgactgaagaaaaaaacatggaacctgagcaaccaagtacctccaaaaatgttaccgaggaagagctggaagactggttggacagcatgatttcctaa

SEQ ID NO: 46624 - DNA, 348 bp, Homo Sapiens
gtaacagaaacacggactggtcctcttggctgcagtaactatgacaacctagattctgtcagttctgttctggttcagagtcctgagaataagattcagttgcaagggcttcaagtacttctcccagactatcttcaggaacgttttgtacaagcagctttgagctacattgcttgcaattcagagggagagtttatctgcaaggaaaatgactgctggtgtcactgtggtcccaaatttccagaatgcaactgcccctccatggacattcaagccatggaagagaatcttcttcgaataactgaaacctggaaagcttacaacagtgactttgaggaatcaggtaag

SEQ ID NO: 46625 - DNA, 402 bp, Homo Sapiens
gctcctacaaagcggactgcccgcaaaccgaccagtggtaagcccaggaagcaactggctacaaaagccgctcgcaagagtgcgccctctactggaggggtgaagaaacctcatcgttacaggcctggtactgtggcgctccgtgaaattagacgtcagaagtccactgaacttctgattcgcaaacttcccttccagcgtctggtgcgagaaattgctcaggactttaaaacagatctgcgcttccagagcgcagctatcggtgctttgcaggaggcaagtgaggcctatctggttggcctttttgaagacaccaacctgtgtgctatccatgccaaacgtgtaacaattacgccaaaagacatccagctagcacgccgcatacgtggagaacgtgcttaa

SEQ ID NO: 46626 - DNA, 2364 bp, Homo Sapiens
tttccccgcccctcgcctcggccctttctcttcccagcacctcggctgttccccggcggcggcagcggcagcggcggcccacacagcagcgagaggcgagaggaggctgcctcgaggaggctgcctcgaggatgaagtgcaaacccaaccagacgcggacctacgaccccgaggggttcaagaagcgggcggcgtgcctgtgcttccggagcgaacgcgaggacgaggtcctgttagtgagtagcagccggtacccggaccgctggatcgtgccgggcgggggcatggagcccgaggaggagccgggcggtgcggcggtccgagaggtgtacgaagaagcgggagtcaaggggaagttaggccggctcctgggcgtcttcgaacagaaccaggatcgcaagcacagaacgtacgtgtatgtactgactgtcacggagctgctggaggattgggaagattcggttagcattgggaggaagcgagagtggttcaaagtcgaagatgccatcaaggttctccagtgccacaagcccgtgcacgccgaatatctggagaaactaaagctgggcggttccccaaccaatggaaactccatggccccatcctcgccagatagcgatccctaatgaacagcaaagatgttcagtattgtgctgaaagaaacattgatgtgaacccagtgatcagtggaattgtcaagtacaggtgagcacttctgtgttcccaagaagacagctcatctggtttcttcctgcatcttgggacactccttccctgtctataccactgactcttgctctggttgttgtactcttatacgtgaatagactcttaattcagcacctatagccttttgttgtgcttttttgatgtgtctgccttcattagactatgatgtctttgagagcaaagactatttttccttactctttgcatattctgcatctgagacactacttgaaatatggttggcatcactgaaggttctttgattcaattaatattttgtaatcaccgtgtggcaaaacattccccttccaatctggtgctagtagagtatatgctatctaggcaccatgtgtgtggcttttgtgtatcaggtgtttcagaaatatttcaagacagttgtaagatgtttgaggacaagaattattactcctatttctatgtcataccacacagtagctgcacagttttaagattatgccatcacctagggtaatgttttgtagaatcagtccttcgtgtaacaactctagtgtttttgtactgttgatgatttgcttaaattttattcaaaaactatcacttgctataaaggtaattgtaaaaataaatacagtggacgcaaaataatgttgtgagtttttataaaaataaattttaaaatgatatataagacatttttttgcaatgcctgccctaaccacttcttacatgtcatcttaacatctctttgaggaaacactgtttcctcattttacagatttaacatactgtattatttgatgccagagccaacaggctatatcataggcagtttccaaacttaattatgccatttagtttgtctagatttcttttgcctctctcactgatccatttggctgtagttttcatcccttttccagtacacacagctagctcctcatcctacctggtttctgcatatgagaatgcagagggctgagagagggcaaaattgttgtcatttagaaaaggcatttaggaaagaggctgctattagaggggaacacaaagtgaaggtttttttaaaaaagaggacttgcatcagctgcctccagaacaattttaagaaaataacaaagatgtttagaagaaatcttacggagtttgccatgggatgtgtgatatcagcagtcttcagctccttacaaattaccaaaagtggttctaatatgctagtttgtttgattttttcttttatattataaagcaattgcatcgataaaagcttggactccattttagtgtgacactcttcctcatgataccagtgaaatgtattgattgtgtccccagttgttacataatttgaaataaaaatataacttcttgatttattgttttttaagatgtgatatggtactgtggttatgttgttttaaaaaatgattatcttttagagaagtatactgaaaaatgtacaggtgaaatgatatgttactggtattcgcttcaaaatcatctgagtgtggggtaattgagtacatagatgaaacaagattggccataaattggtaattgctgaagctgtgtgatggatgtttgagagttcattatactattctctatacttttgtatatgtttgaaattttccataataaaaattgaaaaaagta

SEQ ID NO: 46627 - DNA, 2412 bp, Homo Sapiens
atggaggtgaaacctgtgggagaacctactcaagaggtgtctaaattcaaactttccaccaaggtagaaagcacgggacactggctggtggaagatcatgttcgaatatgggaagttttaaagacagaggagagctcgattcaggactggggtgaagaggtagaggaaggagctgtttaccatgtcaccctcaaaagagtccagattcaacaggctgccaataaaggagcaagatggctaggggttgaaggggaccagctgcctccaggacacacagtcagtcaatatgaaacctgtaagatcaggaccataaaagctggcaccttggagaagcttgtggagaacctgctgacagcttttggggacaatgactttacctatatcagcatctttctttcaacgtacagaggctttgcctccactaaagaagtgctggaactactgctggacaggtatggaaacctgacaagcccaaactgtgaagaagatggaagccaaagttcatcagagtccaaaatggtgatcaggaatgcaatcgcttccatactaagggcctggcttgaccagtgtgcagaagacttccgagagccccctcacttcccttgcttacagaaactgctggattatctcacacggatgatgccgggctctgacccagaaagaagagcacaaaatcttcttgagcagtttcagaagcaagaagtggaaactgacaatgggcttcccaacacgatctccttcagcctggaagaggaagaggaactggagggtggagagtcagcagaattcacgtgcttctcagaagatctcgtggcagagcagctgacctacatggatgcacaactcttcaagaaagtagtgcctcaccactgcctgggctgcatttggtctcgaagggataagaaggaaaacaaacatttggctcctacgatccgtgccaccatctctcagtttaataccctcaccaaatgtgttgtcagcaccatcctggggggcaaagaactcaaaactcagcagagagccaaaatcattgagaagtggatcaacatcgctcatgaatgtagactcctgaagaatttttcctccttgagggccatcgtttcggcactgcagtctaattccatctatcggttaaaaaagacttgggctgccgtcccaagggaccgaatgctgatgtttgaagaactttcagatatcttctcagaccataataaccatttgaccagccgagaactactgatgaaggaaggaacctcaaaatttgcaaacctggacagcagtgtgaaagaaaaccagaagcgtacccagaggcggctgcagctccagaaggacatgggtgtgatgcagggaactgtgccctacctgggcaccttcctgactgacctgaccatgcttgacactgcccttcaggactacatcgagggtggactgataaactttgagaaaaggagaagggaatttgaagtgattgcccagataaagctcttacagtctgcctgcaacagctattgcatgaccccagaccaaaagttcatccagtggttccagaggcagcagctcctgacagaggaggagagctatgccctgtcatgtgagattgaagcagctgctgacgccagcaccacctcgcccaagcctcggaagagcatggtgaagagactcagcctactgtttctagggtctgacatgatcaccagtcccactcccaccaaagagcagcccaagtccactgccagcgggagctctggtgaaagcatggactctgtcagcgtgtcatcctgcgagtcgaaccactcagaggctgaggagggctccattactcccatggacacccctgatgagcctcaaaaaaagctctctgagtcctcctcatcctgttcttctatccattccatggacacaaattcctcagggatgtcttccttaatcaaccccctctcctcccctccgtcctgcaacaacaaccccaaaatccacaagcgctctgtctcggtgacgtccattacctcgactgtgctgcctcctgtttacaaccaacagaatgaagacacctgcataatccgcatcagtgtggaagacaataacggcaacatgtacaagagcatcatgttgacgagccaggataaaacccccgctgtgatccagagagccatgctgaagcacaatctggactcagaccccgccgaggagtacgagctggtgcaggtcatctcggaggacaaagaacttgtgattccagactcagcaaatgtcttttatgccatgaacagccaagtgaactttgacttcattttgcgcaaaaagaactccatggaagaacaagtgaaactgcgtagccggaccagcttgacgttgcccaggacagctaaacggggctgctggagtaacagacacagcaaaatcaccctctga

SEQ ID NO: 46628 - DNA, 1561 bp, Homo Sapiens
gagtctgccacttccctctctcccctggcccgcaaagttttggcggagccatcgctggggctgagcgcgcccccggggggagatcggggagcgcccgatgccgggcggccggagccattgacccgggacgccgccgtccgctgagcagccgaccaccccgccgcctccggtgcatggggactggctgaggagccagcatgggcaactgcgtggggagacagcgccgggagaggccggcagccccgggacacccccgcaagcgagcaggacgcaatgagcccctgaagaaagagcggcttaagtggaagagcgactaccccatgactgacgggcagctgcggagcaaacgggatgagttctgggacacagcgcctgccttcgagggccgcaaggagatctgggatgccctcaaggctgccgcctatgctgctgaagccaacgaccacgagctggcccaggccatcctggatggagccagcatcaccctgcctcatggcaccctctgtgaatgctacgatgagctgggcaatcgctaccagctgcccatctactgcctgtcaccgccggtgaacctgctgctggagcacacggaggaggagagcctggagccccccgagcctccacccagcgtgcgccgtgagttcccgctgaaggtgcgcctgtccacgggcaaggacgtgaggctcagcgccagcctgcccgacacagtggggcagctcaagaggcagctgcacgcccaggagggcatcgagccatcgtggcagcggtggttcttctccgggaagctgctcacagaccgcacacggctccaggagaccaagatccagaaagattttgtcatccaggtcatcatcaaccagcccccaccaccccaggactgatgggcccacggacccctgggaagaggccccgcctggagcactaggcccccaccctgctgctgccttccagtgctgtcattttcttcaggggccctcccctcggtgtggctggtgggtgagccgtgaagggaccctgcctttcagggcactacgcgccaccagttcccggtacccagggagcaggcagccacacacgggccttgcaaccttgtcagagaaaaggcgaacagggccctcaccctgcctgtctcccgaagcaggttcgagccacaagggccaaccaggaggcccctggagcccagatctgtcatctggtgctgccagctgtgctcactctggttttctgctcagggtctgaagcagctgctgtctccctcctctgcccccatcccctggctctcccctgggcacagtgccactcccttggaagggagggaaccacccgtgagccccagggcttgggaagcctgaggcgggcctctgcctctccctgcccccagcacaattggcagagatgaggcgggtggtggacagctgggctgtcgtggcagggtctgcacagggccatgtcctggctgtaacccaggcagtgggaggtctgcagcctggtcatggcctccacagcaggtccctgtggacagacatatctgcatatttatcaataaagccttttgctcctt

SEQ ID NO: 46629 - DNA, 693 bp, Homo Sapiens
cagcctaagaattttggcatgggacaggacatccagcccaaaagggacctcaccggctttgtgaaatggccccactgtatcaggctgcagtggcagagagccatcctctataagaggctgaaagtgcctcctgtgatgaacctgttcacccaagccctggaccgccatacagctactcagctgcttaagctggcccacaagtacagaccagagacaaagcaagagaagaagcagaggctgttggctgctgagaagacagctgccagcaaaggggatgtccccactaagagaccaccattcaatgtccttcaagcaggagttaacaacgtcaccaccttggtggagaacaaaaagtctcagctggtgatcactgcacacgacatggatcccatcgagctggtcttcctgcctgccctgtgtcgtaaaatgggggtcccttactgcactatcaaggggaaggcaagactgggacgtctagtctacaggaagacctgcaccactgttgccttcgcatgggttaactcggaagacaaaggagctttggctaagctggtggaagctatcaggaccaattacaaagacagacacgacgagatctgctgtcactggggaggcaatgtcctggcttccaagtctatggcccgcattaccaatctcaaaaaggcaaaggctaaagaacttgccaccaagctg

SEQ ID NO: 46630 - DNA, 912 bp, Homo Sapiens
atgttcatgaacaagaaccctcctgccaggcgcaccctggctgacatcatcatggagaagctgactgagaagcagacagaggttgagacagtcatgtcagaggtgtcgggcttccctatgccccagctggacccccgggtcctagaagtgtacaggggggtccgggaggtattatctaagtaccgcagtggaaaactgcccaaggcatttaagatcatccctgcactctccaactgggagcaaatcctctacgtcacagagccggaggcctggactgcagctgccatgtaccaggccaccaggatttttgcctctaacctgaaggaacgcatggcccagcgcttctacaaccttgtcctgctccctcgagtacgagatgacgttgctgaatacaaacgactcaacttccatctctacatggctctcaagaaggcccttttcaaacctggagcctggttcaaagggatcctgattccactgtgcgagtctggcacttgtaccctccgggaagccatcattgtgggtagcatcatcaccaagtgctccatccctgtgttgcactccagtgcggccatgctgaaaattgctgagatggaatacagcggtgccaacagcatcttcctgcgactgctgctggataagaagtatgcactgccttaccgggtgctggatgccctagtcttccacttcctggggttccggacagagaagcgtgaactgcctgtgctgtggcaccagtgcctcctgactttggtccagcgctacaaggccgacttggccacagaccagaaagaggccctcttagaactgctccggctgcagccccatccacagctatcgcccgaaatcaggcgtgagcttcagagtgcagtcccccgcgatgtggaagatgttcccatcaccgtggagtga

SEQ ID NO: 46631 - DNA, 2095 bp, Homo Sapiens
ttattttttaaaccagggtctgtgatgggaatccggttacctgctccttccaaaccctctgagactccgccatcttccacttcgtcctctgctttctctgtcatgaatcctgtaattcaagctgttgggtcttcttcagcagtgaatgttatcactcaggcaccatcattgctttcctctggagctagttttgtgtctcaggctggtacattgaccctgaggatttctcctcctgaaccacaaagctttgcaagtaaaacaggctctgaaaccaaaataacttatagctcaggaggacagcctgttggtacagccagtcttattcctctccagtctggtagttttgccttgttacagctcccaggacaaaagcctgttcctagctccattcttcagcatgttgcttcccttcagatgaagagagaatctcagaatccagaccagaaagatgaaacaaactcaataaaaagagagcaagaaacgaagaaggttctacagtcagaaggagaggctgtagaccctgaggctaatgtaataaaacaaaactcaggagctgctacctcagaagaaactctgaatgattccttggaagataggggtgatcatttggatgaagaatgccttccagaagaaggttgtgcaactgtcaaaccatctgagcattcctgtatcactgggtcacatacagatcaagattataaagatgttaatgaagaatatggggctaggaatcgtaagagttccaaagaaaaagtggctgttctggaagttaggaccatttctgaaaaagccagtaataagacagtccaaaatttaagtaaagtacagcatcaaaaacttggtgatgtgaaggtggaacagcagaaaggatttgacaatccagaagaaaactcaagtgaatttccagtcacctttaaggaagaaagtaaatttgaattgtcaggaagcaaagttatggagcagcaatctaatctacagccagaggccaaagagaaggaatgtggagactctctggagaaagacagggaaagatggagaaaacatctgaagggccccttaaccaggaaatgtgttggagcttcacaggaatgtaagaaagaggcagacgagcagttaattaaagaaacaaagacatgtcaggaaaattcagatgtgtttcagcaagaacaaggcatctctgacttacttggaaaaagtggaattactgaagatgccagagttttgaaaactgaatgtgattcttggagtaggatttctaatccttcagccttctccattgttcctaggagagctgcaaaaagcagcagagggaatggacattttcagggtcacttactgctacctggagaacagatacaaccaaagcaagagaagaagggtgggagaagcagtgctgacttcactgttttggatttggaagaagatgatgaagatgataatgagaaaactgatgattctattgatgaaattgtggatgttgtttctgactaccagagtgaggaggttgatgatgtagaaaaggtgaataactgtgtagaatacattgaggatgatgaggagcacgtggacattgagactgtagaagagctctcagaggaaattaatgttgctcacctgaagaccacagcggcccacacacagtcattcaaacagccgtcctgtactcacatctctgcagatgaaaaagcagctgaaaggagtcgaaaggctccaccaattcctctaaaactgaagcctgattactggagtgacaaactacagaaagaagcagaagcgtttgcttattatcgccggacacacactgccaatgagcggcggcggcgtggtgaaatgagggatctctttgagaaattaaagatcacattgggattacttcattcttccaaggtttccaaaagtctcattcttactcgagccttcagtgaaattcagggactaacagatcaggcagacaaattgataggacagaaaaatctcctgactcgaaaacggaatattctgatacggaaagtatcgtctctttcaggtaagacagaagaagtggtcctgaagaagctagagtatatttatgcaaaacagcaagcactagaggcac

SEQ ID NO: 46632 - DNA, 1488 bp, Homo Sapiens
atgtctgtgtccaaagaatataacctaagacgccactatcaaaccaatcacagcaagcattatgaccagtatacggaaagaatgcgtgacgagaagcttcacgagctgaaaaaagggctcaggaagtatctcttaggctcgtcagacaccgagtgtcccgagcaaaaacaagtgtttgcaaacccaagtccaacccagaaatcccccgtgcagcctgtagaggacctagctgggaacttatgggagaagttacgtgaaaaaatcaggtcttttgtggcatattctatcgcaatcgatgagatcaccgatataaataataccacccagttggccatattcatccgtggtgtcgatgagaatttcgatgtgtccgaagaacttctggatacggtgcccacgacgggtacaaaatctggaaacgagatcttttcgcgtgttgagaagagcctgaaaaagttctgtatcgactggtcgaaattagtaagcgtggcctccactggcaccccagcgatggtggatgccaataacgggcttgttacaaaactgaagtccagggtggcgacgttctgcaagggtgcggaactgaagtccatctgttgtataattcatccgaaatcactctgtgctcagaagttgaagatggaccacgtcatggacgtggtagtgaagtccgtgaactggatatgctcccggggactgaaccacagcgagttcacaaccttgctctatgagctggacagccagtatggtagcctcctgtactacacggagattaagtggctcagtcgcgggctcgtgctaaagagatttttcgaatccttggaagaaatcgactccttcatgtcatccagagggaaacccctgcctcaactgagctccatagattggatccgagacctggccttcttggttgacatgacgatgcatctgaacactttgaacatctctctccaaggacactcccaaatcgtcacgcagatgtatgacctgatccgggtgttcctagcaaaactgtgcctctgggagactcacttgacgaggaataatctggcccactttcccaccctgaaattggtttccagaaatgaaagcgatggcctgaactacattcccaaaatcgcggaactcaagaccgaattccagaaaaggctgtctgatttcaaactctacgaaagcgaactgactctgttcagctccccgttctccacgaagatcgacagtgtgcacgaggagctccagatggaggttatcgacctgcaatgcaacgcggtcctgaagacgaaatacgacaaggtgggaataccagaattctacaagtacctctggggtagctacccgaaatacaagcaccattgcgcaaagattctttccatgttcgggagcacctacatctgcgaacagctgttctccattatgaaactgagcaaaacaaaatactgctcccagttaaaggattcccagtgggattctgtactccacatcgcaacg

SEQ ID NO: 46633 - DNA, 1022 bp, Homo Sapiens
ccaaggtgtccaagtcacacagagccacagaatctcacaggtgtctgagaattcctcctcctgggactctcagaggatccagaactgcagcccatcctggctggtctgtccctgtccatgtatctggtcacggtgctgaggaacctgctcatcatcctggctgtcagctctgacccccacctccacacccccatgtgcttcttcctctccaacctgtgctgggctgacatcggtttcaccttggccacggttcctaagatgattgtggacatgcagtctcataccagagtcatctcttatgagggctgcctgacacggatatctttcttggtcctttttgcatgtatagaagacatgctcctgactgtgatggcctatgactgctttgtagccatctgtcgccctctgcactacccagtcatcgtgaatcctcacctctgtgtcttcttccttttggtatactttttccttagcttgttggattcccagctgcacagttggattgtgttacaattcaccatcatcaagaatgtggaaatctctaattttgtctgtgacccctctcaacttctcaaacttgcctgttctgacagcgtcatcaatagcatattcatgtatttccatagtactatgtttggttttcttcccatttcagggatccttttgtcttactataaaatcgtcccctccattctaaggatttcatcatcagatgggaagtataaagccttctccacctgtggctctcacttggcagttgtttgctgattttatggaacaggcattggcgtgtacctgacttcagctgtgtcaccaccccccaggaatggtgtggtagcgtcagtgatgtacgctgtggtcacccccatgctgaaccttttcatctacagcctgagaaacagggacatacaaagtgccctgcggaggctgctcagcagaacagtcgaatctcatgatctgttccatcctttttcttgtgtggctgagacagggcaaccacattaaatctctacatctgcaaa

SEQ ID NO: 46634 - DNA, 1990 bp, Homo Sapiens
tgatgtttcaggaatcactgacgtttcaggatgtggccgtggacttcaccagagaggagtgggaccagctgtaccctgcccaaaagaacctctatcgagacgtgatgctggagaactacaggaatctagttgcactggggtatcagctttgtaagccagaggtaatcgcgcagttggagctagaggaagaatgggtgatagaaagagacagcctgctggatactcatccagatggagaaaacagacccgaaatcaaaaagtcaaccacaagccagaatatttctgatgaaaatcaaacccatgagatgataatggagagactcgcaggagacagcttctggtactccatcctaggaggactctgggattttgattaccatccagagtttaaccaagaaaaccacaagagatatttaggacaagtaactttgacccacaaaaagatcacacaggagagaagccttgagtgtaataaatttgcagaaaactgtaatctgaactcaaaccttatgcagcagagaattccttccattaaaatacccctgaattctgacacacagggaaacagcatcaaacataattcagacttgatttactatcagggaaattatgtaagagagactccctatgaatatagtgagtgtggaaaaatcttcaatcaacatattcttcttactgatcatattcatactgcagagaaacccagtgagtgtgggaaggccttcagccacacctcatctcttagccagcctcagatgttgcttacaggagagaagccctataagtgtgatgaatgtggaaaaagattcagccagaggatacatctcattcaacatcagagaattcacacaggagaaaagccttttatatgcaatggatgtgggaaagccttccgtcagcattcatcctttactcaacatctgaggattcatactggagaaaagccctataaatgtaatcaatgtggtaaagcttttagccgcatcacatcccttactgaacatcatagacttcataccggagagaaaccttacgaatgtggtttctgtggcaaagccttcagtcagaggacacatctgaatcaacatgaaagaactcatacaggagagaaaccctataaatgtaatgaatgcgggaaagcctttagccagagtgcacaccttaatcaacacaggaaaatccatactcgggagaaattatgtgaatataaatgtgagcaaactgttcgccacagtccttcatttagcagcacataacttatggtgggggaaatcagataaatatataaatgtaggagattttttggtcagacctttttatcccattcaatatcaaattattcatagtggagagaaagcttatacataaatttttgttttgttttgtttttgagactgagtctcactctgtcacccaggctgaagtgcagtggtacaatcttggctcactgcaacctctgccacctgggttcaagcgattctcctgcctcagcctcctgagtagctgggaccacaggtatgcaccaccacgcccagctaattttttgtatttttagtagagacggggtttcaccatgttggccaggctggtctcgaactcctaacctcaggtgatccgcccacctcggcctcccaaagtgctgggattacaggcgtgggccactgcgcctggccataaactttcaatgcgtagaaaccaaattaatttagaccttaaactagcagcatattacattcccaggaggggttataaaaagaaaaaataatttattttacaaatgagattatatttggagtcatgttccaaatctgatataaaactttttaaaaaatcagaagtccttatccaggcatggtggtgcacacctgcaatcccagctactctggagactgaggcatgagaatgacttgaacatgggaggtggaggttgctgtgagctgagatcatgccactgtactccagcctgggcaacagagcaagactctgtctc

SEQ ID NO: 46635 - DNA, 279 bp, Homo Sapiens
atggcgtaccgtggccagggccagaaagtgcagaaggttatggtgcagcccatcagcctcatcttcagatacttacaaaatagatcgcggattcaggtgtggctctatgagcaagtgaatatgcggatagaaggctgtatcattggttttgatgagtatatgaaccttgtattagatgatgcagaagagattcattctaaaacaaagtcaagaaaacaactgggtcggatcatgctaaaaggaggtaatattactctgctgcaaagtgtctccaactag

SEQ ID NO: 46636 - DNA, 393 bp, Homo Sapiens
ggttttgtgcaacagtctaacctcctgtcccattctgtacaagcagcagaccatctggacagcatctctcccaggggatcctgcctggaatctgggggtcattctaatgacagaaacaaaggacctcagctccagaaagaagctgtctcaggccccatggctggcaaaccattccgcccccagtccttatccaagtattcccgtcactatagcccagaagacgagccaagtccagaagcccagcccattgctgcctacaaaattgtttcacaaaccaacaagcagtcgatagctgggtctgtttctatcacatccctttcctccaggactacggagctgccagctgctgatccatttgctctagcacccttcccttcaaaatcaggcaagaaa

SEQ ID NO: 46637 - DNA, 789 bp, Homo Sapiens
accgcgggcggcgcgggcacgggcacgggcgcgggcggcgcggcgaggaggcggcccgcggagtccagcgaagtttggcggaacatggcggaagcgtctggggcacgcaggagcgcggggcggcggcggccggagcccgaggagctgtagcagccttagtcgccgccgccgcggggcgaggtcgccgccatggcccgctggatcccgaccaagaggcagaagtacggggttgcgatctataactacaatgcttctcaagatgtggagctctccttgcagatcggtgacacagttcacatcctggagatgtacgagggttggtacagaggatataccctccaaaataaatctaaaaaggcaattggttccaggacccccacaataccgaaatccatggatgctcaagtctctgatataaaatggcatagtatttgcatataacctctgcatttcctcccgtgtactttaaatcatgtctagattatttataatacctaatacaatgtaaatgctatgtaagtagttattataccgtattgtttagggaataatgacaaggaaataaacctctgcttactttttttttctatatttttaatcatcagttggttgaacccatgatatggagggccttgtgtatataaaaatcagtctagctaatagtgccattgttgttggctttgaacagtagatagatagggttcccccaggatctaaatgataaattctggattttttttaaatttttttgtgttcattaaagagtgcttaaaacctttaagcttaaaa

SEQ ID NO: 46638 - DNA, 5495 bp, Homo Sapiens
gttgacatctacagcctttggaaacatggacaaatttcccttcaactggaaattgaaatcccacatccttgacagctccatctactccaacagacccaaagtgcagaccttgttttatgtcactggcatgggctgggatgacagtgaccttacggaagatctaccctgtgtcaagatgtttgctttccctgaggccagggaagtggcagccagctgtcggctgcaaggggccccagggctgtgtgtggctgagctggagctgctgcccgagtggttcagctcaggcctggacctggaaccagaggaggagatcccagccctgctcgggggcaccacgatggagctcttcttcacgctctacccagctgacaaggctggccagtgtcctctggaggaggaaggcaagtgggagaacaatatccactcgggcctggagagcccccagcaagcgtttccagcccgagagaggattgggagtgtggtggtctacccaacccaagatgatctgaagtggtccctggtgagcttggacgagaatgtggtcatctcggtacctctgaatctagtccgggaaggggacacggccacctttttggtctctctgaccagtagctctgtggcagaccagttcactcttagaattaaggcggcagcaggtgtgaagataacggcagtgagagtcagcagtgaggaccaatgggcagtccaggaggaaattgataatggcagcactcagacgtcggccaccctcacctgcatgggccatcgcccggacacgcagagcagggtaaatggatccttctatgagatcttgcaagtggactttggaattgataatagcagtgacctggctggggcccagcagattacctggcaggtggagtacccgattgaggactccatgagtgagctggtcgtctccgagatcttcgtcagccagacaaccttcgtgggcatcgtccctcttgccatggacaccgaggttttgaacactgccattctcactggaaagcctgtttcagttcctgtcaaagtcgtgggggtccaggaggatggttctgtggtcgatgtgtctgagtctgtggaatgcaagtctgccgatgaagatgtcattaaggtaaggggggatttatctacagctgtcctaagtgctcagagctttttgtcgttccttcttttgtctccaaggtcttgttctcactgagcatcccatgctctaaagggctggaggccagaatgacctcacgaaggaggaaacagctgaccgcagagactccctggaatcagcaggcggctgcagcaggtgatgctgcttccctctccctggaaaggggaatccctgacccttaatctccagcagaaagaatttattctcctccccttcttgtctcccctattcttctctctatctttcctcgtaagacaatattttcctaactttagcaatccaaataagaccttctcattttttgcaaactcactgtgcctaataatattatttactcaatatattttctttaaatgccttgcttctttcgggtagccagttagctcagtgggttagagtgtggtgctaataaatgcattactttttcaaacttaaaaactaatttagcttcattataagacaataaagtccgtgagcttggtgtattacattttttgttaatatgcattaaaataaataactattcaaataaaattaagttcacccatgtgccacctaactgaacttgaatataaccagtgggatacagtttaggaaatgggacatttctgctagattcttcactcaaattagctatgtttctgactccaaattctgctaggaaccagaaaatatttttttcatgctctctgaaggggtctttttgaaccaccaaatttaatatttctgcctattttttcttagcacattggttgctattgcttttgcagcagagacctcagggagaaaggatttgaatttttagaatgactgatccttcctcctttaaattattaagagagccccaaagtccaatctattcagctattttagaaaaatacaataactcagagttctgcccttcctcacattctacaagctcttgtttagaggttacatgaaacttggtctcagtattgaaaacttcgtggtagacaggaaaacctttaggggtttccctatagtagaaaaggtctgggaggggttgatttcttcttgttgtgacctacaggatgctgtgtcttaagcaagagacagtttcggaaaaaaagactgatgtattcgtgaggtctaattaacaaagaaattaattcctaggaaactcaagtttggcatagactctttcctggacatggaatgctcatcgtccttagatatggaaggtggactggcttaaaacctgcacacatagccctgcctggggttcctggtggtccttgtattctgtaggcaggtttgattaaatatatggccttaaatattcagagtttagaaagagctgagccaagtcacaggagattatatgcaccaatgacaaatatggatgatgaactgctgttggttgctattgacaatgcgcaagttttacactatttttactattcccatgtcattctagaaaggagacactgataagagatggtatctgtatgcttacgtcataatgggctcaaacaaatgattcagtctgtagtttcctaagccttttgttctgacctaagagcctgctatgaagccccatggggtggaatcctccttctcttgccctgaagagctctactctagaggggcaggtccaagttcacagatcccgttattgccatatacctggttttctccactccacacaaatgtactaaaagtatcctctgctcatcctcatagacgttgttttggaagatgatacctttttgctcagctgtcacctatatagcctcaggaggatggggattcgtctaacaaattattgcccagtcttcagaggaacaaagtgaaacctgcagatcgcaagctcagagctgtattcacactttttaaggggattccaggactgttgcaagtttgggggcttgtgtcaattgaggcgatttaattaaatggctgtgatgcatttactatggcttcagtgtcaatgtttgtagtaaattttactataactccaagttgaatggagttgtccacagagctatgaccttggcatcatcccagggacatcctcaaatacatggcacattcattagcaccctttggagagatcctctgagtctgtggagttgtcacacagtcatacttcagagtacagaaaacactgaatgatttttagggagagtcttgcagggctcaccaaagatctttgtgccttggaaccatgagttagataagggaaaaatgtgaatttagaaagatgtaagttatggtaatatccaaacaaatgaacttgtttggcctgtgattgtatgacttttgcgggacagaatcagaggacatacatgattttgaaaagctggaaccttggcctaatctggcaagattaaaagagataaatgtaaaatttcaagttgacaactatagtagtccttccttatctgtggtttcactttccgtggtttcatttcactgtggtcaatcacagtccaaaaacgttaaatgaaaattttcagaaagaagcaattcatgttttaaattgtgtactgttctgagtatcgtgaagaaatcttgagtcttcctgctccatcccacctgggttgtaactcatgactttgtctggcatatccatgctgtagataccacccacctctgagtcatttagtagctgcctgggtgatcaaatagactgtcgcggtatcacagtgcttgtgttcaagtcacccttatgttatttacaaatgaccccaaagtataagagtagtgatgctggcaattcggctagaccaacaagaagtcataaagtgcttcttttaagtgaaaaggtgagagttcttgacttaataaggaaggaaaaagatcatatgctggagttactaagatctacagtcagagcgaatcgtctatccatgaaatcgtgatgaaggaaaaaacattcatcgtagttttgctgtcacatctcaaatacaaaagttaaggccacagtgtgtgataaattcttcattaagatgtgaaaagacattaaatttaggtgaaagacatgaacagaaacttgttctgctggatgacagtctgattcagttctatctgtggtttcaggcatccactgggggtcttagactatattacccatggatgggaggagactgggagactgctgtacttttaggttaaaaaaaaaaaaaacaagtagaggattgtgtgtgtgtgtgtgtgtgtgtgtgcgcacacacacaagaagccttagcgtttttatcagtattgggatccagtgagtcaactgtttgataaggctgctacaggttgatttttattagcatgaatgggtgtgtgcctcagagcagaggtcacaggcaggcagtctgcagaccagatctgacccagaagtgtgtggggggtgcggggagggtctgcatagtttaaaaattgttacttaatttgttgcccccatgtaaaaattggcaagttcgcacagaaatctggatttacagtttcttatgaaaaatcacaggaccaggtggtcctgggtctccatgatttcctgtgaacctcgtctggagttgaagagaggatgctcctctgcataaaacctgtgccctccagctcactgtagtctccaccactcccttttgtctttcacatggaggttgaaggatatttgtcatttctggtcacacttgtgctcctagtttttgatagtggatttcagaggaaggtgagatattttttgtactccagtctctaaaaataaataagcaacaaatgatagacttcactctctcactctgatggagaattctgtatctttctaggccgtaagaagaacaataaaaaattgggttgtgctctgccaaaaagtgtctgagaggctgaggactcttgaaatcaaatcacaggagaaatgattgaaggaagtgtgagtgttaagcctattgatgagaagaaaaggctcaggggtgaggtggagagggagacatgacagctttttgtaagtctttcaagggccatcatgtagaagatggagtagctttgtgctttttagattccaagaatggaagttgaaaggtaccagttttagctcaatataaagaaaaagactgcagaggtagtgagttctttggttgagcttccagacatgtgatgttgctaaagatcctgactccaccttcctcaccgtttgaccttgggcaaattacttaccatctctgagcctagtttccttatctataaaatggggatggtaatgatacagtggaaacgtacttttctagagatttgttctaaagtcacagcaaacggcagaactaacaataaccaaactactccctaatccttgaaaatccccagtctcactgggtcatcc

SEQ ID NO: 46639 - DNA, 1879 bp, Homo Sapiens
gcccgcgcgggatccgggtggctgcaggctgctggcttctgcggctgcggggtcggggtcgcggccagggccaagccgcagcgagttcacaggcggaacccctgcaggcggcgccccctacgcgaggtcacccctgggaaggagcgcagcccacccggcccctccgcatccgagcaggacgcccgtctcctctccctgaggatttcaggtctccctgtcccaggaggcttgtgccaagatggcatcagctggagacacccaggcaggcccacgggatgcagcagatcagaacttcgactatatgttcaaactgctactgataggcaacagcagtgtgggcaagacttccttcctgttccgatacgcggacgactccttcactcccgccttcgtcagtactgtgggcatcgatttcaaggtcaagaccgtctaccgccatgacaagaggatcaagctgcagatctgggacacagcgggccaggagcgctaccgcaccatcaccacggcctactaccggggagccatgggcttcctgctcatgtatgacatcgccaatcaggaatcctttgccgctgtgcaggactgggccacgcaaatcaagacctactcctgggacaacgcccaggtcatcctggtggggaacaagtgtgacctggaggacgaacgtgttgtgcctgctgaggatggccggaggctcgccgacgaccttggtttcgagttctttgaagccagtgccaaggagaacatcaatgtgaagcaggtcttcgagcgcctggtggatgtcatctgcgagaagatgaacgagtccctggaacccagctccagctcaggcagcaacgggaaaggcccggccgtgggggatgctccagccccccagcccagcagctgcagctgctagagatggcccccaaccccccacccacccctctcctgcctcggcagggactgtgatcgaggcgtgagccacagtggttatctccaagctcagggcaatcccttccctcctgtcaactgctccccgactcctgcatggctcattccttcacaatgtcgccgtggctgccaggttcctcaggcagccccggtgggaggctgcggaccatggggactcagctctgcatggcaggcagaggcccagggacactgacgtgcatgagcttgctgctttccagggtgtgttgagggtggccatgggtgacacgtcccactctttctgatggaggggcatccgtggtgccttctagcttagaaccattttccaggtctcttctgggttgggcaggactgatattcccaagctggtggaagatggttcatcttcctcgcacagtgtgggttcttggagttcatccagggaaggcggcgcctctttctcaggtcctgcaggctggtctctgagcctgcccccacgaactttctggattccaaggtgggatggtgatccctttgacccctgcagaccctctacttgcgaaaagcagcattgaagcagccttttcccattgtagaagggacagggagtcagatcccctcaaccccccggcttcagggaccccagaagtgccttccaagcttcccccaagatccacatcacccacgaccctgccactgtttttgctgtgttcaccacatctctgatcctgaagtgaattctggaactatggaccacattagactgggcagagattcgcccaacccctagcactccggctctgggctttcggccagaagttaattaacctcagagccaggagcctggggctggggcctccctcccaggccctgtttagctgtttagctggttgtgttttaagcaagttcttgcccaatcatgcatcctgctagaaaaggaaatgaagcaacgttcccagccaccgca

SEQ ID NO: 46640 - DNA, 624 bp, Homo Sapiens
atgtacctggtcacggtgctggggaacctgctcattatcctggccatcggctctgactcccacctcgacacccccatgtacttcttcctctccaacctgtccttgcctgacatcggtttcacctcggccacggtccccaagatgattgaggagatgcaatcgcatagcagagtcatctaccatggggactgcctgacacagatgtctttctttgtcctttttgcatgtaaggatgacatgatcctgactgtgatggcctatgactggtttgtggccatctgtcaccccctgaactacccaggcatcatgaatcctcacctctgtgtcttattagttttggtgccttttttccttagcctgttggattcccagctgcacaatttgattgtgttacaattcatctgcttcaagaatgtggaaatctctaattttttctgtgacccgtttcaacgtctcaaccttgcctgttctgacagtgacatcaataacatatacatatatttagatagtactatatttggttttcttcgcatttcagggatccttttgtgttactatacagttgccttccccattctaagaattccatcctcagatgggaattataaagccttctccacctga

SEQ ID NO: 46641 - DNA, 126 bp, Homo Sapiens
atgaggaaggtcagggacaagtctgaaatgaatcatcctaggcttaatgcctgtgactgggcagtggggtctccctctgtcacccagtctggagtgcagtggtgcaatctcagctcactgcaacct

SEQ ID NO: 46642 - DNA, 405 bp, Homo Sapiens
atggtctgtggactcctggtcagccttgactggctaggagaccttgggcagtacctacagtcttgctgtttctgtttcatctgcaagaattatgacccacacactccagctgcagcccagggcactgtgatattttatacgtgtgtagatgtttttgtccacagttcctggttcatcactcccataaccctttgttataatgttgggacactgcaggcctcagaaaacggaatctctgtctgtgaccttctcctgccccatttcacttgctcaacaccagactttaatctgactgtagctcataagaccctcattccagagagggtgctgccccatacccggaaggaggaacgctgcacagagaggccaagaagcatctggacagacaggccttgctgggtttag

SEQ ID NO: 46643 - DNA, 315 bp, Homo Sapiens
atggctgattctgagaaaggcaagaaaatttttcttcagatgtgtgcccagtgccacactgtggaaaagggaagcaagcacaagactgggcctaaactccatggtctcttcaggtggaggacatgtcagtccattggattatctatagagattgataagaacaaagccatcacctggggagaggatacactgatagagtattttgagaattccaggaagtacattcctggaacaaaaatgatctttgccagcattaagaacaatgcagaaagggcagacttgatagcttatctcaaaaaagctactagtgagtaa

SEQ ID NO: 46644 - DNA, 2049 bp, Homo Sapiens
atgcacgcagtgccgcgcggctttggcaagaaagtgcgtgtgggcgtgcagtcctgtccccttctcgggccaggcgtgcccccagccctcctccgtgttctggtctctgctgaagaacctgcccttcctggaacacctcgagctgattgggtccaacttctcctccgccatgccccgcaacgagcccgccatccgcaactcgctcccaccctgcagccgcgcacagagtgtcggggactcggaggtggccgccatcggccagctggccttcctgcggcacctgacgctcgcacagctgcccagcgtccttacgggctccgggctggtcaatatcggcctgcagtgccagcagttgcggtccctgtcgctggccaacctgggcatgatggggaaggtggtgtacatgcccgcgctctcagacatgttgaagcactgcaagcggctgagggacctcaggctggagcagccctacttcagcgccaacgcccagttcttccaggcgctgagccagtgcccctcgctgcagcgcctgtgcctggtctctcgcagcggcaccctccagcccgatgccgtgctggccttcatggctcgctgcctgcaggttgtcatgtgccacctgttcaccggggagtccctcgccacctgcaagagcctgcagcagtcgcttctccgcagcttccaggccgagcggcccgcgttaaacgtcgtcatcttccctctgctccacgagggcctgaccgacgtcatccgggacgtccccctggtgcacctggatgagatcaccttatttaagagcagagtggccgaggaaccgccgaacctgtggtggtgagaggcggagccgccgcccatcggtctcagtcacctcgagaagctgcaggagcctgggacgccagggacccttggtttgtcacaagaggaagggggcctctctcccggccagccacgccccacctggctcctggggctcccggcgtctccacggctctctcatggggactgttgctctgtgaagtttaggtcgaggggatgcgttctgggtgacatgagggggctcgggggacggtcgatgtggggggctggctgaaccaggctgacccttggggcctggctggggggtttgtatactgagccgcaatccctgggggccctgtccacgggcctggagggcccgaaccccctgccacttccgaccgggaagcgtgtcccttggctgttgtgtttgtggtcacctgccaccggggccccgtggatgggcggccacatgctgtccccctgaagtccagtcggccgggctggtcaccgtgtatctgagtgtccccttgcatggtcaagtgtgacatggggaagggcctgccagtttagtggctgcagacttgggactctccatcccattaggacacacttgagcccactcatgtctctggggcttttctagccagatgatgcctgtggccccagagaggtcccctgaggttgggactgctggttggagcctctcctgtgacttttcagcccaaccagcagggcccgtttctaacgagagaggcctcctccccctcccacccaccccacggccttcagcttccctgggaaggtccatgcgcgttcctggggaaatcgatacacattcggctttgttagaataacgcgaaacattaaaacccagaaaggattcttaaggctggagtagcaatcacatgaccccatttcaaatgacttcatttaagactttaaaaatactcagctgggcgcgatggctcacgcctgtaatcccggcactttgggaggctgaggtgggtggatcacgaggtcaggagttcaagaccagcctggccaacatggtgaaaccccatctctactaaaaatacaaaaattagctgggcgtggtggcgggcgcctgtaatcctagctactcaggaggctgaggcaggagaatcgtttgaacctgggaggcggaggttgcagtgagccgagatcacaccattgcactccagcctggacaacagggtgagactccgcctcaaaaaaaaaaaaaaaaaaaaaaaa

SEQ ID NO: 46645 - DNA, 1272 bp, Homo Sapiens
atgttgcccctgtccatcaaagacgatgaatacaaaccacccaagttcaatttgttcggcaagatctcgggctggtttaggtctatactgtccgacaagacttcccggaacctgtttttcttcctgtgcctgaacctctctttcgcttttgtggaactactctacggcatctggagcaactgcttaggcttgatttccgactcttttcacatgtttttcgatagcactgccattttggctggactggcagcttctgttatttcaaaatggagagataatgatgctttctcctatgggtatgttagagcggaagttctggctggctttgtcaatggcctatttttgatcttcactgctttttttattttctcagaaggagttgagagagcattagcccctccagatgtccaccatgagagactgcttcttgtttccattcttgggtttgtggtaaacctaataggaatatttgttttcaaacatggaggtcatggacattctcatggctctggccacggacacagtcattccctctttaatggtgctctagatcaggcacatggccatgtcgatcattgccatagccatgaagtgaaacatggtgctgcacatagccatgatcatgctcatggacatggacactttcattctcatgatggcccgtccttaaaagaaacaacaggacccagcagacagattttacaaggtgtatttttacatatcctagcagatacacttggaagtattggtgtaattgcttctgccatcatgatgcaaaattttggtctgatgatagcagatcctatctgttcaattcttatagccattcttatagttgtaagtgttattcctcttttaagagaatctgttggaatattaatgcagagaactcctcccctattagaaaatagtctgcctcagtgctatcagagggtacagcagttgcaaggagtttacagtttacaggaacagcacttctggactttatgttctgacgtttatgttgggaccttgaaattaatagtagcacctgatgctgatgctaggtggattttaagccaaacacataatatttttactcaggctggagtgagacagctctacgtacagattgactttgcagccatgtagtgaatggaaagaaattatgcaccttttatggaccaaatttttctggtactgtacgatccaaaacattgtacccagctttttaaaagagagaaattatcactacaactcccgagcactaagtagacggggtagagtcagccg

SEQ ID NO: 46646 - DNA, 630 bp, Homo Sapiens
atggaaggacacctggcgtgcatcagctctcagccgttcttaccgtctgtctcgatctctcagcagtattcagcacaagtctacatggctgaccccaataacaaccctggacaccaaggcccaaatgaggacaccgaggcacacacggcttcagttgcttgcctggagtcacccatgcgatttgcaataccaggtaagcagtgtcatgtgacttgctttggccaatcaagtgtgagtgggagggagctgcggcatcgcatccaaggagaagccttcgcagccaccgctgccagatatggatggagtctcactctgtcgcccaggctggagtgcagtagcacgatcttggctcgctgcaagctacgcctcctgagttcacaccattctcctgcctcagcctcccgagtagctgggactacagagacaggtgctcgttatgttggccaggctggtcttgaactcctgggctcaagtgatcctctcgcttcggcctcccaaagtgctgagattacagctcccagaagctggcagcctggccctggcagcctggccttcaccccccgccaggaggccagaggagttttctcagggggatttgaccagccccagaggaagaacgaaagatggtga

SEQ ID NO: 46647 - DNA, 1628 bp, Homo Sapiens
gtacaggagcagcactgccggcgggggcgggtgccagggacttggaggtggaggggacgcggcggtactctggcgtcttccgacttcgactccttaccttaaaagatgctggagtcatatgtaactccaattttaatgagctatgtgaatcgctacatcaagaacttaaagccgtcggatctacagctttcactatggggtggagacgtggtactcagcaagctcgagttaaagttggatgtgctggaacaggaactgaaattaccattcacttttttaagtggacatattcatgaattgaggattcatgtaccatggacaaaactgggttcagaaccagtggtaattaccatcaatactatggaatgcattttgaaacttaaggatgggatacaggatgaccatgaaagctgtggttctaattctaccaaccgtagtactgctgagagcacaaaatcatcaatcaaaccgcggagaatgcagcaggctgctcctacagatcctgacttaccaccaggttatgtgcagagtctgattagacgagttgtaaataatgtaaacattgtgataaataatctcatactaaaatatgttgaagatgatatcgtcctttccgtcaatatcacttctgcagaatgttatacagtaggtgaattatgggatcgtgcattcatggatatttctgcaactgatttggtgctgagaaaggttatcaatttttctgactgtacagtttgtcttgataaacggaatgccagtggtaaaatagaattttaccaggatcctttattatacaaatgttccttcagaactcgtcttcattttacatatgaaaacctaaattccaagatgccatctgttattaaaattcatactttagtggaaagtttgaaactttctatcacagatcaacaactgcctatgtttattcgtataatgcaacttggaattgctctttactatggagaaataggcaattttaaagaaggcgaaatagaggaccttacttgtcataataaagatatgctaggaaacattacaggttctgaagatgaaacaagaatagatatgcaatatcctgctcagcataaaggtcaagagttatattcacagcaagatgaggagcagccacagggatgggtgtcatgggcctggtcctttgtgcctgcaattgtgagttatgacgatggcgaggaagactttgttgggaacgatcctgcatcaaccatgcatcaacaaaaagcacagactttgaaggatcctattgtttctataggattttattgcacaaaggcaacggtgactttcaaagtaggtcttttctcttgctgtttatatctctatcaactttaatgcttaaatttggattgttagtacaattctagctttattcaagtttgctttgcattcagtagatgtgagatagagtctaacagttcttacttcataaaattacatggctcctccacttgaaatctttgaattctgatcccttcctgtcttcttagggcattctccacatttcttttttattagcttcatggatagttttttgccctattgaatcattcagttggtgtacaaacatgccttaatattgtcattaaaaaagaaaggaacagcaaaaa

SEQ ID NO: 46648 - DNA, 318 bp, Homo Sapiens
gtgcaggctgagccactgcctgagccgctgctccacgtcctgggccttagcttcccgctgcagacctgccggccgattcttcgctgccctcccggtctcatgaagccgctggtcgtgtttgtccacggcggtcccggcggcatccttgagaaagatggctacacacacctttctgcaggagagttacttcatgatgaaaggaagagcccagattcacagtatggtgaactcactgaaaattacattaaagaaggaaacatgggaccagtggagataaccatcagtttattaaagagggaaatggatcagacaatggct

SEQ ID NO: 46649 - DNA, 372 bp, Homo Sapiens
atgtccctggtgcacaatgcctgccttcactacagcctttcacacaaagcatttaccctgttgcttaattgtctgatcgtcccactcccttggatgagaactgcatctcttccatctcttattctgagtggcttggctaagacattcactgactccatggggaaacttcacctacagaggaaagagccatcctcctgtgggcaggtgatgtgtccttgttctttccctgacgtgcccagtcctcttgcaagtgacttgaaaggatgcaccagcctggctgcaggcagaggtgtgaagaaggtccttgcttccccttcaccttctgccatgattctaagtttcctgacgcctcccagccgtgcttcctgttaa

SEQ ID NO: 46650 - DNA, 249 bp, Homo Sapiens
agggccgctgaggcggtggaggcctggcagagagcgtccccgcggtcgcggcttctggcttctctgtggagcttggttcttccgtggtggtgcagcaccccaggaacttcaggaaccagtccttccttggagagctccccgggacagccacgggggccaagtgaaactagcgcgttttcttggatcctacactttatagtgagtcataaatactttaaatacaaagccaacaacatttgctgcaaataa

SEQ ID NO: 46651 - DNA, 1414 bp, Homo Sapiens
cggggcgcgggcctccggcctgaggcccggcgaggtgctggagggagcggggcgcggatccggcccagatgggcagctccgtccgcggggtcagggccgggcttcggcttcaccgcagcctcgcctgagcgggcgcctctgaagtggagggcgggccgcctgggccgcgggcctcgggaggatggtggcgccctggcgcgtctccgtcagggtttgcctgtcgcacctgaggtgcttcgagctcagacagggactcagcctcctgaggccctccgagtgccctcgcgatgccaggctctgctggcttctgctgggcactttgcccaaggtcgtctccctgtgcggggacgtgggtgagggggcccctgacgttctgagtcggcgaagggtccgctgcagcggggcggctggcgcggggcccgcggagagcctcccccgagcgggacctctgggcggcgtcttcctgcatctccgcctctggcttcgcgccggcgctctgttggtgaaattcttccccctcctactcctctaccccctcacctacctggctcccagcgtctccaccctctggctccacctgcttctgaaagccaccgagacctcaggcccaacctacatcaaactgggccagtgggccagcacccggcgcgatctgttttcggaggctttctgtgcccaattttccaagctgcatgtccgagtgacgccccacccgtggactcacactgagcgcttccttcggcaggcttttggggatgactgggggagcatcctctcttttgagaaccgggaacctgtgggctcaggctgcgtggcccaggtgtacaaagcatacgccaacactgccttcctggagactgacagcgtccagagacttggcagggcctcctgtctgccgcccttctcacatactggggcagtcggtgggctgagagagctctttggataccttggaaatggccggaaacctccagaaaatctcgcagaccagtcgtttctagaaaggctgctcctccctaaagctgacctggttggatcaaatgcaggggtgtctcgggctcaggtccctggccaccaacctgaggccaccaacctcatctccgtggcagtgaaagtgttgcaccctggcctgctcgctcaggtgcatatggacctgctgctgatgaagattggcagccgagtcctgggagttttgccaggcatcaagtggcttagcttgcctgagattgtggaggaatttgagaagctgatggtccaacagattgacctgcgttacgaagctcagaatctagaacacttccaggtcaacttccggaatgtgaaagccgtcaagttccccacccctctgcgcccctttagcctctcctatggcagctgggacgttttaaaattgggacaccaatttcaaatgtaa

SEQ ID NO: 46652 - DNA, 2371 bp, Homo Sapiens
gccgccgtcggcgcgctgggtgcgggaagggggctctggatttcggtccctcccctttttcctctgagtctcggaacgctccggctctcagaccctcttcctcccaggtaaaggccgggagaggagggcgcatctcttttccaggcaccccaccatgggcaatgcctccaatgactcccagtctgaggactgcgagacgcgacagtggcttcccccaggcgaaagcccagccatcagctccgtcatgttctcggccggggtgctggggaacctcatagcactggcgctgctggcgcgccgctggcggggggacgtggggtgcagcgccggccgcaggagctccctctccttgttccacgtgctggtgaccgagctggtgttcaccgacctgctcgggacctgcctcatcagcccagtggtactggcttcgtacgcgcggaaccagaccctggtggcactggcgcccgagagccgcgcgtgcacctacttcgctttcgccatgaccttcttcagcctggccacgatgctcatgctcttcgccatggccctggagcgctacctctcgatcgggcacccctacttctaccagcgccgcgtctcgcgctccgggggcctggccgtgctgcctgtcatctatgcagtctccctgctcttctgctcgctgccgctgctggactatgggcagtacgtccagtactgccccgggacctggtgcttcatccggcacgggcggaccgcttacctgcagctgtacgccaccctgctgctgcttctcattgtctcggtgctcgcctgcaacttcagtgtcattctcaacctcatccgcatgcaccgccgaagccggagaagccgctgcggaccttccctgggcagtggccggggcggccccggggcccgcaggagaggggaaagggtgtccatggcggaggagacggaccacctcattctcctggctatcatgaccatcaccttcgccgtctgctccttgcctttcacgatttttgcatatatgaatgaaacctcttcccgaaaggaaaaatgggacctccaagctcttaggtttttatcaattaattcaataattgacccttgggtctttgccatccttaggcctcctgttctgagactaatgcgttcagtcctctgttgtcggatttcattaagaacacaagatgcaacacaaacttcctgttctacacagtcagatgccagtaaacaggctgacctttgaggtcagtagtttaaaagttcttagttatatagcatctggaagatcattttgaaattgttccttggagaaatgaaaacagtgtgtaaacaaaatgaagctgccctaataaaaaggagtatacaaacatttaagctgtggtcaaggctacagatgtgctgacaaggcacttcatgtaaagtgtcagaaggagctacaaaacctaccctcagtgagcatggtacttggcctttggaggaacaatcggctgcattgaagatccagctgcctattgatttaagctttcctgttgaatgacaaagtatgtggttttgtaatttgtttgaaaccccaaacagtgactgtactttctattttaatcttgctactaccgttatacacatatagtgtacagccagaccagattaaacttcatatgtaatctctaggaagtcaatatgtggaagcaaccaagcctgctgtcttgtgatcacttagcgaaccctttatttgaacaatgaagttgaaaatcataggcaccttttactgtgatgtttgtgtatgtgggagtactctcatcactacagtattactcttacaagagtggactcagtgggttaacatcagttttgtttactcatcctccaggaactgcaggtcaagttgtcaggttatttattttataatgtccatatgctaatagtgatcaagaagactttaggaatggttctctcaacaagaaataatagaaatgtctcaaggcagttaattctcattaatactctttatttatcctatttctgggggaggatgtacgtggccatgtatgaagccaaatattaggcttaaaaactgaaaaatctggttcattcttcagatatactggaacccttttaaagttgatattggggccatgagtaaaatagattttataagatgactgtgttgtaccaaaattcatctgtctatattttatttagggaacatggtttgactcatcttatatgggaaaccatgtagcagtgagtcatatcttaatatatttctaaatgtttggcatgtaaatgtaaactcagcatcaaaatatttcagtgaatttgcactgtttaatcatagttactgtgtaaactcatctgaaatgttacaaaaataaactataaaaca

SEQ ID NO: 46653 - DNA, 255 bp, Homo Sapiens
atggaagctggggagaggattgatgccagccagctgcctcacagggtgctggaaacacgtggccatgccattagcatcctgttcggcttctggacgagtttcatctgtgacacctacatagtcctcgcttggatcagcaagataaaaggcagccctgatgttagtgcctcctctgatgagccatacgccagaatccagcagagcagaaggcaatgccacgcagaagaggaccaaagtcaggtgccagaagcaggt

SEQ ID NO: 46654 - DNA, 801 bp, Homo Sapiens
ctgctgagggaccaggccttggccatctccaccatggaggagctgcccagggagctcttccccacactgttcatggaggccttcagcaggagacgctgtgaaaccctgaaaacaatggtgcaggcctggcctttcacccgcctccctctagggtccctgatgaagtcgcctcatctggagtcattaaaatctgtgctggaaggggttgatgtgctgttgacccaagaggttcgccccaggtgtctccaggcctccttggagatggtcgttatgaccgactgcctgctgtcagagtcggacttgaagcatctctcttggtgcccgagcatccgtcaattaaaggagctggacctgaggggtgtcacgctgacccatttcagccctgagcccctcacaggtctgctggagcaagttgtggccaccctgcagaccctggacttagaggactgtgggatcatggattcccaactcagcgccatcctgcctgtcctgagccgctgctcccagctcagcaccttcagcttctgtgggaacctcatctccatggctgcccttgagaacctgctgcgccacaccgtcgggctgagcaagctaagcctggagctgtatcctgcccctctggagagttatgacacccagggtgctctctgctgggggagatttgctgaacttggggctgagctgatgaagacaccgagggacttaaggcagcccaagatcattgtgttctgcaccgtcccctgccctcgctgtggcatcagggcctcctatgacctggagcccagtcactgcctctgttga

SEQ ID NO: 46655 - DNA, 1566 bp, Homo Sapiens
aatgtgactgagaccactacaatggccatgcctaataattacttatttttataagtgctggatgcgttttacccaacataatagcagatacagacttttaagcttaaaacctaaatgtcatagctccaaacatttggttgtatgttgaaataactctcaagcaaaaattgattttgaaacgagagctgtaaataaataaaataaatgacataaactcataaatatctggaagaaatgcttataaagaggtcagccttaaaaatgtcatgaggtctaatgtgccgctcttctatttctatggatagtacttggacaggacaaggactcaagggtctgctggtccatctctgcaccttgaaacagtggctagggcaccaggagtaatgcttccagccaaaaccatgtggttagtgtgaggagtccctccgggttaaggagtgtgtcagcataatgtgacctgaagaagaggtatacctcataggcgcccaggatcaaggtctccggcacacattgaaatcccccatgcccaggtgtggtgaagtgaatccctcagctggtgctgggcttccaggtgaggcatcctggagaggatgtgcggggcgaaggtcatatgagcacctgcagcactggaatggggtgtcactggcctgttaggccgttgctcaccaggacctctcctgagctcctacgtggcttagtggtaagtgtcccatctacccgaccccgcagcccgggtttctcctccacttacagacccgtgccctcttggggagaatgccagcctccctggagactcaggccctgcaggacccacatgctgtcgtctctcatgggctagacactctctggtgcacagggattcccagacagtgaatcccaaagccctgcaggttctgttgcttcttccctgaatgcctgccttccccgaccgaacacacaggaagacacaggtagctactaggttttatttccctccggatgtcatttcaggtccatgacatctcctttaggtagttcgcccagccactcttttcctcctacctctgccattcatgagaactgtgaggactcttcgtgtctccccagcgggcaggcttcacgggtcctgaagttggattgtcaaacccagtggtcccctgcttgccagctcaagagctgcgtttgaggcacacctgtgggtgggagtgtgggccccacctctggccaaacaaaggtacacaaggggaaacaggtgcaggtgtgtacaggcgtgcaccagctcaaacatgcaggctggaacgtgcacacgctcacattggtaccagggaaactgggtgggtgtctgggtgtctacaccaatactcagatgaaccttaatgctcagccacattcccttgctggacacacacagaaggtcccctgccatttaattgatcgtctacagtgggatttatttttacttttatacttttttaacttaccaaagtatgttgcattctttcccccatcatgaaaaagactttgatataagtaaggaggaaaagcattttttataataaaatactttatctgcatctatactattaa

SEQ ID NO: 46656 - DNA, 1641 bp, Homo Sapiens
aacttcatggccacagccccaggccctgctggcattgccatgggcagcgtgggcagcctgttggaacggcaggacttctcccctgaagagctgcgggcggcacttgccgggtctcggggctcccgccagcctgatgggctcctccggaagggcttgggccagcgtgagttcctcagctacctgcacctccccaagaaggacagcaagagcaccaagaacaccaagcgggcccctcggaacgagcctgccgactatgccaccctctactaccgggaacattctcgcgcgggtgacttcagcaagacctcgctgccagaacggggtcgctttgacaagtgccgcattcgcccctcagtgttcaagcctacggcgggcaacgggaaaggcttcctatccatgcaaagtctggcgtcccacaaaggccagaagctgtggcgcagcaatggcagcctgcacacgctggcctgccacccgcccctgagccccgggccccgggccagccaggcccgggcacagctgctgcacgccctcagcctagatgagggcggccctgagcccgagcccagcctgtccgactcctccagtgggggtagttttggtcgcagtcctggtactggccctagccccttcagctcctcccttggccaccttaaccacctcgggggctccctggaccgggcctctcaaggacccaaggaggctgggccaccagctgtgctgagctgcctgcccgagccaccacccccctacgagttctcctgctcctctgccgaggaaatgggagccgtgctgcccgagacctgtgaggagctcaagaggggccttggcgatgaggacggctccaaccccttcacgcaggtgctggaggagcgccagcggctgtggctggctgagctgaagcgcctgtatgtggagcggctgcacgaggtgacccagaaggctgagcgcagcgagcgcaacctccagctgcagctgtttatggctcagcaggagcagcggcgcctgcgcaaggagctgcgggctcagcagggcctggctccggagcctcgggcccccggcaccctcccagaggctgaccccagtgcacgaccagaggaggaagcccgatgggaggtgtgccagaagacagcagagattagcctcttgaagcagcagctgcgtgaagcccaggcggaactggcccagaagctggcggagatcttcagtctgaagacacaacttcggggcagccgggcacaagcccaggctcaggacgcagagctggtccggctgcgcgaggctgtgcgcagcctgcaggagcaggcccctcgggaggaagccccaggcagctgtgagactgatgactgcaagagcaggggcctgctaggggaggcaggaggcagcgaggccagagacagtgctgagcagctgcgggctgagctgctgcaggagcgacttcggggccaggagcaggcgctgcgctttgagcaggagcggcggacttggcaggaggagaaggagcgcgtgctgcgctaccagcgggagatccagggagggtacatggacatgtaccgccgcaaccaggcactggagcaggaactgcgggcactgcgggagccccccacaccctggagtccccggctcgagtcctccaagatctga

SEQ ID NO: 46657 - DNA, 510 bp, Homo Sapiens
atgattgaaaacgaaatgctgacaatggaactgaatggagattctatgcaggtgagacctatcatgaccagaaagttgcggaggcgaccaaatgatcccgtccccatcccagacaagaggaggaaacctgctccagcccagctaaactatttgttaacagatgaacagatcatggaggatctgagaacattaaataagcttaagtcacccaagagaccagcatctccatcctctcctgagcacttgcctgcgacacccgcggaatctccagcccagaggtttgaagctcggatagaagatggcaaactgcactatgacaaaagatggtaccacaagagccaggccatctatctggagtcaaaggacaaccagaaactgagctgcgtgatcagttctgtaggagccaatgagatctgggtgaggaagacaagtgacagcaccaagatgaggatctacctgggccagcttcagcgcgggctcttcgtcatccaccggcgctcagctgcttga

SEQ ID NO: 46658 - DNA, 3216 bp, Homo Sapiens
atggctctcaaaccatgtcttgaggccccaattgagtctgggctctgttcagggattgaatgtcatgctgagcacccaacactagttctgatgctctttgccagtgtgctggtgacttgccttgaggctgctaaactcaccgtaggcttccagaccccctggaacatctcccatccattcagcatgcaaaggctgggtgcaggcctccagattgccatggacaaggtcaactcagagctagtggaccttggaaatttcaccacttacaccaactcagcctgcagcaccaaggagtctcttgctattttcaacaaccaggtccagaacgaacagatttctgccctgtttggaccagcatgcccagaagcagctgaggttatcggcttgctggcctctgagtggaaccccatgtttgactttgttggacaaaccacaaaactgtctgacacctgtgtgaaacttgtgtcacccaagcaggacattggtgatgtgctccaggaaagtctccagtacctgggctggaaacacattgggatgtttggaggctactctggggcttcctcctgggatggagtggatgaactgtggagggttgtagagaatgaactcaaatcccattttatcatcactgccagcatgagatacaccaacaatagtctagtccttcttcaagagcatctttggaggatatcatcaattgccagggttatcatcttaacgtgcagctcagaggatgcaaaaattattcttctggctgcagcaaacctgggactcagcactggagaatttgttttcatcattttgcagcagttggaggaccgtttttggaaggaagtactgacaaatcagaaaatgatgcacctccaaaaggtgtatgggtcactgcttctcattgccctcagctcctacagaaaaggccgtggagacgaaggcttttggaaacaagtctaccaaacaccgaggaggtcgcccttccgcagcaccatctcctgggaggagcaggtgagcccttactctgcctaccttcacgacgccgtcctgctctatgctgagaccgtgaagcaggtggtaaaggctggaggcgacttccaggatgggtggcagctggtcagcgctctgaagggttccagtcagaccacagtgcagggaatcacaggccctgtgtttgtggatgcccagggagaaaggcacatggattactctgtctatgccctgcagaagtctgaaaatgggccccttttactttcttttcttcattatgacagttatcaaaggaatttctccaatatgacctggccgcatggctcccttcctgaagacagacctggctgtggattttataatgagctctgtgaaactcagtctgcttttacgggcgtgactgctgtgcttctgacattgatgatcctcattcctgtcttgggagctgccatcataggtctgattttaaggatgcagaggcaaaacaaagacatctggtggcaaatcaattttgatgatatcaccattcttccccagaacaagccatcccagagagccacacctgtgtcaaaaggcatcaacagtaactcatctagtgtgatgatttctgtggacctcagctcttttgtcaagagccagcagtgggaagagctcttctatgccgcagtagggctttatcagggaaaccatgtggccatccgttacgttggtgaccaagcagaagcctgggttaggaagccgattgtgctacaggaaatacagctgatgggtgaattaaggcacgagagcattgttcccttctttggtatttgcaccgaaccacctaacatctgcattgtcacccagtattgcaaaaaaggaatttttcaggatgttttgagaaactcggatcatgaaatggattggatattcaaactctcatttgcatacgacatagtcaatggcatgctgttcctccacaggagccccctgggctcccacagcaacctgaaaccttccaactgcctgatggatggtcggctgcaggtgaagctgtcaggtggcttttcctgttttgcctggcagtaccctcactccatgcggacatcccattcttttgcagagctctactggactgccccagagctgctgcagttcccggagatgccctggtcgggtaccccgcaaggagatgtttacagcttcgccattctgatgagggagctgatctaccattgggaccacgggccttttgatgacctccacgaggcaccggatgaaatcatcaaccaaatcaaagaccctgcagcagcagtcccactgcaaccttccctgcccgaggagaagggcaatgaaaagatcgtggccatggtgagggtgtgttgggatgaatctctggagaaaagacccagtttctcttccatcaagaaaactttacgagaggccagtcccagaggtcatgtgagcatactggccagtgtgatgagcaagctggaagtgtatgccaattacctggaggaagtggtgcaagagaggaccagccagctgactgcagagaagaggaaggtggagaagcttctgtccaccaaagtgcccagcttcactggagaacaactactagccggaaggtccgtggaaccagaacatttcgaatctgtgacaatctttttatctgatattgttggattcacaaagctgtgttctctcagctcccctttgcaagtcgtcaagctcctcaatgacgtgtacagtttattcgatcacatcatcacaacttatgatgtttataaggttgagaccattggagatgcatacatggtggctagtggactccctcacaatggaagccagcatgtggctgagattgccaccatgtccctgcacttcctcagtgccaccatctgcttccaaattgggcacatgccccaggagaagctccagcttcgtattggcctctacacaggtcctgtggtggctggtgtgctggggattaccatgtccagatactgtctatttggagacactgtcaacatggcatccagaatggagagcagcagttcacctctccggattcatgtctctcagagcactgcaagcaccctggtggcattgggagggtacgatttgctaaagagaggcaccattccagtcaagggcaaaggagagcaaacaactttctggttgaaagataaagaaggcttcactcttccacccgaatttactgaggaaaaagccaaagtcccagagatattgtga

SEQ ID NO: 46659 - DNA, 1887 bp, Homo Sapiens
gcaccagtaaggatagcatcaactggcaaacggagaaggaggagaacagagtggagaggaaccctgttaggagaaattgagcggcattccatctggtaggcaagtttgcatttctcctttttgggatctgcccaggaatgttgtcaagtgtaatggctcccctgtgggcctgcatcctggtggctgcaggaattctagccacagatacacatcatccccaggattctgctctgtatcatctcagcaagcagctattacagaaatatcataaagaagtgagacctgtttacaactggaccaaggccaccacagtctacctggacctgttcgtccatgctatattggatgtggatgcagagaatcaaatattaaagacaagtgtatggtaccaagaggtctggaatgatgaatttttatcctggaactccagcatgtttgatgagattagagagatctccctacctctaagtgccatctgggcccccgatatcatcatcaatgagtttgtggacattgaaagataccctgaccttccctatgtttatgtgaactcatctgggaccattgagaactataagcccatccaggtggtctctgcgtgcagtttagagacatatgcttttccatttgatgtccagaattgcagcctgaccttcaagagcattctgcatacagtggaagacgtagacctggcctttctgaggagcccagaagacattcagcatgacaaaaaggcgtttttgaatgacagtgagtgggaacttctatctgtgtcctccacatacagcatcctgcagagcagcgctggaggatttgcacagattcagtttaatgtggtgatgcgcaggcaccccctggtctatgtcgtgagtctgctgattcctagcatctttctcatgctggtggacctggggagcttctacctgccacccaactgccgagccaggattgtgttcaagaccagtgtgctggtgggctacaccgtcttcagggtcaacatgtccaaccaggtgccacggagtgtagggagcacccctctgattgggcacttcttcaccatctgcatggccttcttggttctcagcttagctaagtccatcgtgttggtcaaattcctccatgatgagcagcgtggtggacaggagcagcccttcttgtgccttcgaggggacaccgatgctgacaggcctagagtggaacccagggcccaacgtgctgtggtaacagagtcctcgctgtatggagagcacctggcccagccaggaaccctgaaggaagtctggtcgcagcttcaatctatcagcaactacctccaaactcaggaccagacagaccaacaggaggcagagtggctggtcctcctgtcccgctttgaccgactgctcttccaaagctaccttttcatgctggggatctacaccatcactctgtgctccctctgggcactgtggggcggcgtgtgaagactgaagtgttcttcagtaattgtgctggcacttaggagagagaggagggggaataatagtgggttaaaaagctttctgggtcgggtgtggtggttcttgcctatagtcccagtgctttgggaggccatagcaggaggattgcttgagcccaggagttcgagaccagccagagcaacatagtgagaccacatctctaccagtaaataaataaataaataaataaataaataaataaataaatagctgggcatagtggctcatgcctgtactctcagctacttgggaggttgaggtgggaggattgcttgagcccaggatttcaaggctgcagtgagccatgattgcaccactgcaccccagcctgggtgacagagcaagaccctgtctcaaaaaaaataaaataaaaggctttctgccttca

SEQ ID NO: 46660 - DNA, 876 bp, Homo Sapiens
gagcccgtgttctggtactacgtgaaggaggtcctcaacaagcacgagctgcgcttctactccctgcgccacatcgcctcagacgtgggccggggccgcacctggctgcgctgtgccctcaacgaacactccctggagcgctacctgcacatgctcctggccgaccgctgcaggctcagtactttttatgaagactggtcttttgtgatggatgaagagaggtccagtatgcttcctaccatggcagcaggtccgaactccatactctttgcgattaacattgacaacaaggatttgaacgggcagagtaagtttgctcccaccgtttcagacctcttaaaggagtcaacgcagaatgtgaccttgctgaaggagtccacgcaaggagtgagcagcgtgttcagggagatcacagcctcctctgccatctccatcctcatcaaacctgaacaggagaccgaccccttgcccgtcgtgtccaggaatgtcagtgctgatgccaaatgcaaaaaggagcggaagaagaaaaagcaagtgaccaacattatctcatttgatgatgaggaagatgagcagaactctggggacatgtttaaaaagacacctggggcaggggagagctcagaggacaactccgaccactcctctgtcaatatcatgtccgcctttgaaagccccttcgggccaaactccaatggaagtcagagcagcaactcgtggaaaattgattccctgtctttgaacagggagtttgggtaccagaagcttgatgtgaaaagcatcgatgatgaagatgtggatgaaaacgaagatgacgtgtatggaaactcatcaggacggaagcacaggggccactcagagtcgcccgagaagtaa

SEQ ID NO: 46661 - DNA, 978 bp, Homo Sapiens
atgatactaattaacaacatggcagaaatgttcctaatgcaattatcatttgatgtcttatttttctctacagatatcctttgttttaattttccagaaatgaccaagcttttcagctatattgtcattaaaaatgtttattaccctcaagtcagctttggaatctcagcaaacaccttcctccttcttttccacatcttcacttttgcttatactcacaggcttaagcccattgacatgaccattagtcacttgcccctaatccacatactgctactcttcactcaggcgatactggtgtcctccgacttatttgaatcatggaatattcagaacaatgatctaaagtgtaagatcatcacatttttaaacagggtgatgaggggagtctccatctgcaccacttgcctcctaagcgtgctccaggccatcaccatcagccccagcacctccttcttggaaaagtttaaacatatttctgcaaatcacaccttaggcttcatcctcttctcatgggtcctcaacatgttcattataaccttttgcttttcattgtgcctaccccgaataggaggccagtcttttgtttgtcacctgttatgttttgcccatgagctacacccacaggagcctgtttttcatactaatggttttgagggatgtcatcttcataggactcatggtcctctcaagtggctaggtgattattttgtacaaacaagagactgtcccagcacctacatagcaccagcgccaagagcctccccagcaaaaagggcctcccagaccatcctattgttggtgagctgttttgtcttcttatattgggtggacttcatattctcattttcagtggttgtgacatggataaacgaccctctactggtaattatgcctgtggtcaataactatgccataattagtcctttagtcttaacctatgctgataacatattcaagattgttcagactctttgg

SEQ ID NO: 46662 - DNA, 1413 bp, Homo Sapiens
atggagtttgctgctgaaaatgaagggaagtctgggggaggtctccacagcgtagctgagggggtgcggctaagtccagagcctggcagggagggagtaagggacttagcaggggcggaggagttcggcggcggagaggaggggacagggctgacagggataaaggagataggggatggagaggaaggaagtggacaaaggccagaggaaataccgatggacctaacggtagtgaagcaggaaattatagactggccaggtacagaaggcaggttggctggccagtgggtagaacaggaggtggaggataggcctgaggtgaaggatgagaacgcaggcgtattggaggtgaagcaggagacggatagtagtttagtggtaaaagaagcgaaggtgggtgaaccagaggtaaaggaagagaaggtaaaggaagaggtaatggactggtcagaagtgaaggaagagaaggataacttggagataaaacaggaggagaagtttgttggtcaatgcataaaagaggaattgatgcatggagagtgtgtaaaagaagagaaggatttcctgaagaaagaaatcgtggatgatacaaaggtgaaagaagagcctccgataaatcacccggtgggctgcaagcggaaactggccatgtcaaggtgtgagacttgtggtacagaagaagcaaagtacagatgtccacgttgtatgcgatattcctgcagtttgccctgtgtaaagaaacacaaagcagaactgacatgtaatggagttcgagataaaactgcatacatttcaatacaacagtttactgaaatgaatctcctaagtgattatcgatttttggaagatgtggcaagaacagcggaccatatttctagagatgcttttttgaagagaccaataagcaataaatatatgtactttatgaaaaatcgtgcccggaggcaaggtattaacttaaaacttctacccaatggattcaccaagaggaaggagaattcaaccttttttgataagaaaaaacaacagttttgttggcatgtgaagctccagtttcctcaaagtcaagctgagtacatagaaaaaagagtaccagatgataaaactattaatgaaatcctaaaaccttacattgatcctgaaaagtctgatcctgtaattcgtcaaaggttgaaagcctacattcgctctcagactggggttcagattttaatgaagattgaatatatgcagcaaaatttagtaagatattatgaactagatccttataaaagtctcctagacaatttgaggaacaaagtgatcattgagtatccaacattacatgtggtattgaaaggatccaataatgacatgaaagttcttcaccaagtgaagagtgaatctaccaagaacgttggcaatgaaaattga

SEQ ID NO: 46663 - DNA, 474 bp, Homo Sapiens
atggatacttccttctggtatgttgaggagaacggagacctggactctgaggcctcctatccatatgaaggaaaggttaaaacctgtaggtacaatcccaagtattctgttgctaatgacactggctttgtggacataccttcatgggagaaggacctggcgaaggcagtggcaactgtggggcccatctctgttgctgttgatgcaagccatgtctccttccagttctataaaaaaagccttcattttattctctcggaaatttattttgagccacgctgtgactctgaaggcctggatcatgctatgctggtggttggctatggctatgaaggatcagactcggataacaaatattggctggtgaagaacagctggggtaaaaactggggcatggatggctacataaagatggccaaagaccggaggaacaactgtggaatcaccacagcagccagctacccaactgtgtga

SEQ ID NO: 46664 - DNA, 1354 bp, Homo Sapiens
gtgctgtgaggcttgccccgcggacagtaaacttgcaggggcgagagggagggacatcgattaaacctaaatcgtgggcgttcagtcctcagggcaccggagcgcgtgaaaactccagcggactctgctggaaaggagatcatgccctctaagtctctttccaacctctcggtgaccaccggcgcgaatgagagcggttccgttcccgaggggtgggaaagggatttcctgccggcctcggacgggaccaccacggagttggtgatccgctgtgtgatcccgtccctctacctgctcatcatcaccgtgggcttgctgggcaacatcatgctggtgaagatcttcatcaccaacagcgccatgaggagcgtccccaacatcttcatctctaacctggcggccggggacttgctgctgctgctcacctgcgtcccggtggacgcctcgcgctacttcttcgacgagtggatgtttggcaaggtgggctgcaaactgatccctgtcatccagctcacttccgtgggggtttccgtgttcactctcactgccctcagcgccgacaggtacagagccatcgttaaccccatggacatgcagacgtcaggggcattgctgcggacctgtgtgaaggccatgggtatctgggtggtctccgtgttgctggcagttcccgaagcggtgttttcagaagtggctcgcatcagtagcttggataatagcagcttcacagcatgtatcccataccctcaaacagatgaattacatccaaagattcattcagtgctcattttcttggtctatttcctcataccacttgctattattagcatttattattatcatattgcaaagaccttaattaaaagcgcacacaatcttcctggagaatacaatgaacataccaaaaaacagatggaaacacggaaacgcctggctaaaattgtgcttgtctttgtgggctgtttcatcttctgttggtttccaaaccacatcctttacatgtatcggtctttcaactataatgagattgatccatctctaggccacatgattgtcaccttagttgcccgggttctcagttttggcaattcttgtgtcaacccatttgctctttacctactcagtgaaagcttcaggaggcatttcaacagccaactctgctgtgggaggaagtcctatcaagagagaggaaccagctacctactcagctcttcagcggtgcgtatgacatctctgaaaagcaatgctaagaacatggtgaccaattctgttttactaaatgggcacagcatgaagcaggaaatggcactgtgattttggccattcaactcactacctggagagaacttagtaa

SEQ ID NO: 46665 - DNA, 747 bp, Homo Sapiens
gcgcgagcgccgcccgcgcccccgccgacctcccaccgccagcggctccgcacccggcgcccgcagccctcgtacctcacaccgctgctccgaaagccccggaacgcactcccgggctctcccggtgcccttacggagggtgctgtgcttctgcccaacgccggcgctcggccaaggcggccgcggagcagcgagaagccgcggaccggcaccgtcatggccgcggatccccggcttccggactggggctccacctcccgcgactccagtcctcgcggctggaggcctggctccgccctcacccgggctggcagggcagcaagtagcgcttcccagccaggttccggcagacacgcagagtggggtaaagagcggttcccaggaccggggacggaactgacagagtgccgggtccgcagggggcggggccaggacccaagtcccgggccctctgaggatgtggaagcgtgcagtgtggcctggcgactgggccccgcacccagccaacatatagctggcattcccatagcgacggcacagagaaggcctccaaactatcactttaggcagcacgccccactttccaccaagccagagatcctgcccaacagtctccgtgactacgtggaattggatttaaagcaggaaagaagtaataggttcattgtttcccacttcctttgtgagattccttggaagttggagaaaagaacaaaggtgtgtggagaaggagcaaaacctggctga

SEQ ID NO: 46666 - DNA, 669 bp, Homo Sapiens
gcgcgccgccgccagtgctgcgggctccgggcaatggatgcccccggggccctggcccagaccgccgcccccggtccgggcaggaaggagctgaagatcgtgatcgtgggcgacggcggctgcggcaagacctcgctgctcatggtgtacagccagggctccttccccgagcactacgccccatcggtgttcgagaagtacacggccagcgtgaccgttggcagcaaggaggtgaccctgaacctctacgacacggccgggcaagaagactatgaccggctgcggcccctgtcctaccagaacacccacctcgtgctcatctgctatgacgtcatgaatcccaccagctacgacaacgtcctcatcaagtggttccctgaggtcacgcatttctgccgcgggatccccatggtgctcatcggctgcaagacagacctgaggaaggacaaggagcagctgcggaagctccgggccgcccagctggagcccatcacctacatgcagggcctgagcgcctgcgaacagatccgagctgctctctacctggaatgttccgccaagtttcgggagaatgtggaggacgtcttccgggaggccgccaaggtggctctcagcgctctgaagaaggcgcaacggcagaagaagcgccggctctgcctgctgctctga

SEQ ID NO: 46667 - DNA, 627 bp, Homo Sapiens
atgggcatctctcaggacaactggcacaagcgccgcaagactggcagcaagagaaagccctacgacaagaagcggaagtatgagttggggcacctggctgccaacaccaagattggcccccaccacatccacacagtccgtgtgcggggaggtaacaataaatacggtgccctgaggcgggacatggggaatttctcctggggttcagagtgttgtactcgcaaaacaaggatcactgatgttgtctacgatgcgcccaatagcaagctggtccgtaccaagaccctggtggagaactgcttcgtgctcactgacagcacaccgtaccaccagtggtatgagtcccactatgcgctgcccctgggctgcaagaagggagccaaactgactcctgaggaagaaaagactttaaacaaaaaacgatctaaaaaaattcagaagaaatacgatgaaagggaaaagaatgccaaaatcagccgtctcctgggggagcagttccagcagggcaagcttcttgcatgcgtcgcttcaaggctgggacagtgtggccaagcccatgtctatgtgccagggggcaaggagatggagttctatcttaggaaaatcaaggcccggaaaggcaaataa

SEQ ID NO: 46668 - DNA, 249 bp, Homo Sapiens
atgtctgtctgtcccgtggacctgccccgcagggcccagcgtttgtggctacgagcaccagcccgtctgcggcggaaaccccctgtgctcgacccgcttccggctcattcaggaatgtgtggcaactgcagacttgcatctggaacggggagacgtgaggttgcgactcctgcccccagacacactgccatggtgctgcccccagacgcactgctatggtgtggtcttagtgcccagtatctcgtttga

SEQ ID NO: 46669 - DNA, 915 bp, Homo Sapiens
atgaaaaatagaacatcagtgacagatttcatccttctgggtctgacggataatccgcaactgcaggttgtgattttctcgttcctatttcttacgtatgtactgagtgttactggaaatctaactatcatctcccttaccctgctggattcccacctgaagacccccatgtatttcttcctcaggaatttctccttggaaatttcatttacttctgtctgtaatcctagatttctgatcagcattctaacaggggacaaatccatatcttataatgcttgtgcagctcagctatttttctttatcttccttggctcaacggagtttttcctcctggcctctatgtcctatgattgctatgtggctatatgtaagcctctgcattatacaaccatcatgagtgacaggatctgttatcagcttataatcagctcttggctggctggtttcttggtaatttttccaccactggccatgggcttacagctggatttctgtgactccaatgtcattgaccactttacctgtgactctgctcctttgctgcaaatctcttgcacagacacaagtactctagagctcatgagctttattttagctctgtttactcttatatccactttgatattagtaattctctcctatacttacatcatcagaactattctgagaatcccctcagcacagcaaagaaaaaaagccttttcaacctgctcctcacatgtgattgttgtctctatctcttatggaagctgcatcttcatgtatgtgaaaacatcagcaaaggaaggagttgctttgacaaaaggagtagctatactcaatacctctgtcgctcctatgctgaatccatttatttacactctaagaaaccagcaggtgaaacaagcatttaaggatgttctgagaaagatt

SEQ ID NO: 46670 - DNA, 894 bp, Homo Sapiens
atcctacagggccactgcgagggtgagctctgggctctggccctgcaccccaagaagcctctggctgtgacaggcagcgatgaccgctctgtcaggctgtggagcctggctgatcatgccttgatcgcccgctgtaacatggaagaggcggttcgcagtgtagctttcagccccgacggatctcagctggccctgggcatgaaggacggctctttcattgttctccgagtcaggcacgtactgatagatatgacagaagtagttcacatcaaagatcgaaaagaagtcattcatgaaatgaaattttctccagatggttcttaccttgcagtgggatccaatgatggcccagtagatgtctatgctgttgcccagaggtataagaaaattggagaatgcagcaagtcccttagtttcatcacgcatattgactggtccttggatagtaaatacttacaaactaatgacggtgcaggagaacgattgttctacagaatgccatctgggaagcctttaacaagtaaagaagaaattaaagggattccttgggcctcctggacatgcgtgaaaggccctgaagtgagtggaatttggcccaaatacactgaggttactgacatcaactcagtggatgcgaattacaacagctcagtgctggtgtctggagatgattttggactggttaaattgtttaaatttccttgtctcaagagaggagccaaatttagaaagtatgtgggccattctgcacatgtcacaaatgtccgctggtcccatgactttcagtgggtgttgagcacaggaggggctgatcactcagttttccagtggaggtttattccagaaggtgtcagcaacggcatgctggaaactgcaccccaaggtaaacccagc

SEQ ID NO: 46671 - DNA, 2208 bp, Homo Sapiens
gagagttttgagtatggaatgagtatcctgtaccattgcaagaagggattttacttgctgggatcttcagccttgacctgtatggcaaatggcttatgggaccgatccctgcccaagtgtttggctatatcgtgtggacacccaggggtccctgccaacgccgtcctcactggagagctgtttacctatggcgccgtcgtgcactactcctgcagagggagcgagagcctcataggcaacgacacgagagtgtgccaggaagacagtcactggagcggggcactgccccactgcacaggaaataatcctggattctgtggtgatccggggaccccagcacatgggtctcggcttggtgatgactttaagacaaagagtcttctccgcttctcctgtgaaatggggcaccagctgaggggctcccctgaacgcacgtgtttgctcaatgggtcatggtcaggactgcagccggtgtgtgaggccgtgtcctgtggcaaccctggcacacccaccaacggaatgattgtcagtagtgatggcattctgttctccagctcggtcatctatgcctgctgggaaggctacaagacctcagggctcatgacacggcattgcacagccaatgggacctggacaggcactgctcccgactgcacaattataagttgtggggatccaggcacactagcaaatggcatccagtttgggaccgacttcaccttcaacaagactgtgagctatcagtgtaacccaggctatgtcatggaagcagtcacatccgccactattcgctgtaccaaagacggcaggtggaatccgagcaaacctgtctgcaaagccgtgctgtgtcctcagccgccgccggtgcagaatggaacagtggagggaagtgatttccgctggggctccagcataagttacagctgcatggacggttaccagctctctcactccgccatcctctcctgtgaaggtcgcggggtgtggaaaggagagatcccccagtgtctccctgtgttctgcggagaccctggcatccccgcagaagggcgacttagtgggaaaagtttcacctataagtccgaagtcttcttccagtgcaaatctccatttatactcgtgggatcctccagaagagtctgccaagctgacggcacgtggagcggcatacaacccacctgcattgatcctgctcataacacctgcccagaccctggtacgccacactttggaatacagaatagctccagaggctatgaggttggaagcacggtttttttcaggtgcagaaaaggctaccatattcaaggttccacgactcgcacctgccttgccaatttaacatggagtgggatacagaccgaatgtatacctcatgcctgcagacagccagaaaccccggcacacgcggatgtgagagccatcgatcttcctactttcggctacaccttagtgtacacctgccatccaggctttttcctcgcagggggatctgagcacagaacatgtaaagcagacatgaaatggacaggaaagtcgcctgtgtgtaaaattccttcagatgtctttttcgtcaattcactgtggaaggggtattatgaatatttagggaaaagacaacccgccactctaactgttgactggttcaatgcaacaagcagtaaggtgaatgccaccttcagcgaagcctcgccagtggagctgaagttgacaggcatttacaagaaggaggaggcccacttactcctgaaagcttttcaaattaaaggccaggcagatatttttgtaagcaagttcgaaaatgacaactggggactagatggttatgtgtcatctggacttgaaagaggaggatttacttttcaaggtgacattcatggaaaagactttggaaaatttaagctagaaaggcaagatcctttaaacccagatcaagactcttccagtcattaccacggcaccagcagtggctctgtggcggctgccattctggttcctttctttgctctaattttatcagggtttgcattttacctctacaaacacagaacgagaccaaaagttcaatacaatggctatgctgggcatgaaaacagcaatggacaagcatcgtttgaaaaccccatgtatgatacaaacttaaaacccacagaagccaaggctgtgaggtttgacacaactctgaacacagtctgtacagtggtatag

SEQ ID NO: 46672 - DNA, 1881 bp, Homo Sapiens
agtgtcattccatgcagacaagcgtgtccttcatgagacaggattcagtactgagctagatcgtgtaaagaatctacctcattgtgaaacggaaatatttgaagtgagatttgacccacagggggccaatcttcctgttggaagcaaagaagtcattctgcccatcaaggtggttggagggccaacagttcacatctgtctccaagccaaggtgaccattccaaccatgactctctctcgtggaaaagtggactttgccacaattcagtgtggacagtgcctggtggaaactattcagctttccaatcatctccaagtcccttgtgaatggttcgtccagagccaaaagcctgttgacaagctggagaaacacatgccgaagtacttaagacagaaactacgcgctgaattaaagccaaagacacggatcttcgaaatccagcccatttctggagtcttggatcctggtgagaagtccaacgtgcaagtgaaattcatgccaaaagaagagaaattctacagccaaaccctggtgtttcagattgcccagagtgctcaaaagcttaccctcctggcacgtgggcaaggtctagagccacgcctggaatttagtccttcagtcctggatctggggccactgctactttgtgcacctggagacgaggccgaggtgatagtgaagaatccctgcaacttccccattgagttttattccttagaatttgatcagcagtatctcatagaagaaaagatcttgcggaagctgaagggctatgattcctacaacaccctgctgctgcctccccgcaaccctggggagaagctgcccccagaactgtacgagtacttcaaagagataaagaagtcaaaagaggagcagatgagggcgaaatatctggagaatctggcacaggagaatgaagaggaagatataacctcatcagatcagggaacctccaatagcacaaagaggacatcgctgagccgagggatctctgtcacatccaacctggaagaatggcacgccctgttggtcgagtccaaaacctacctagaggaagaggaggatgaggaaagcctggaaaaaatcattttccaaactgacaagcttcagagcattgacagccactccatggaggaagttggagaggtggaaaacaacccagtgagcaaagcaatcgctcgccacctgggcattgacatttctgcagaaggccgcctggccaagaaccggaaaggcatcgccattatcattcatgggacacccttgtcaggaaagtcagccaatgccgttagcgtggccaagtactacaacgcagcctgcctgagcatcgactccattgtgctggaagctgtggccaacagcaacaacatcccagggatccgggcccgtgagctctgcatcagggctgccatagagcagtccgtgaaggaaggagaggaggctgctgagtgactgctaccgaggagtggtgtttgatggcctcgacactctctttgctcagaatgctgcagccgccctcctctgcctgctgaaggccattggcagccgggagcatatatacattctcaacatggcccaggattacgcagccatgaaggcccaggagaaagccaaaaaggagcaagaaggcaaggcctcctacctttccattgggcttaagtgaaactttgacatttgctattccgttggcgcctcacctctgccctgtaaggtggccaggagttgtatttctgctttgctaggagggaactgggacgcgagtggccggctgggaagttctatgatgaacgctttgctgacagcaggtgcattcctgcttccctcccatcacactgtacccctccatcctttctgcaattacagccattacgggtccc

SEQ ID NO: 46673 - DNA, 2145 bp, Homo Sapiens
cccggagcgcggggaagtttcctccgaagctgcgctcctggaacagcagcacctgcaagcgcccggcagcggcccgcgaggttactttatggaattgggctcttagagaacaagaaaagactgaagttttacgggaaaacaaatcatgtggtcttcagattctgaaataaggagaaatgcagccatctgaaatggtcatgaaccccaaacaagtcttcctctctgtgctgatatttggagtagctgggctactcctcttcatgtatttgcaagtctggattgaagaacaacatacagggagagtggagaagagaagagaacaaaaagtaacttcaggatggggaccagtgaagtacttgcggcctgtacccagaatcatgagtacagaaaaaatccaggaacatatcaccaaccagaaccccaagtttcacatgcctgaggatgtacgagaaaaaaaggaaaatcttctactcaattctgagagatctactaggctcttaacaaagaccagtcattcacaaggaggggatcaagctttaagtaagtccacagggtcaccaacagagaagttgattgaaaaacgtcaaggagctaagactgtttttaacaagttcagcaacatgaattggccagtggacattcaccctttaaacaaaagtttagtcaaagataataaatggaagaaaactgaggagacccaagagaaacgaaggtctttccttcaggagttttgcaagaaatacggtggggtgagtcatcatcagtcacatctttttcatacagtatccagaatctatgtagaagataaacacaaaatcttatattgtgaggtacctaaggctggctgttccaattggaaaagaattctgatggtactaaatggattggcttcctctgcatacaacatctcccacaatgctgtccactacgggaagcatttgaagaagctagatagctttgacctaaaagggatatatacccgcttaaatacttacaccaaagctgtgtttgttcgtgatcccatggaaagattagtatcagcctttagggacaaatttgaacaccccaatagttattaccatccagtattcggaaaggcaattatcaagaaatatcgaccaaatgcctgtgaagaagcattaattaatggatctggagtcaagttcaaagagtttatccactacttgctggattcccaccgtccagtaggaatggacattcactgggaaaaggtcagcaaactctgctatccgtgtttgatcaactatgattttgtagggaaatttgagactttggaagaagatgccaattactttttacagatgatcggtgctccaaaggagctgaaatttcccaactttaaggataggcactcttccgatgaaagaaccaatgctcaagtcgtgagacagtatttaaaggatctgactagaactgagagacaattaatctatgacttttattacttggactatttaatgtttaattatacaactccatttttgtagtttgcattcattttctaaaaccctgtatatacttaatgatgataagttcaaatcagctgtaatttttctataattctctgtatgacagaaatttaaccaagtgcagttgtcttgatttaatgtagatttttaccaaatagtatgacaccaattggcacaaagttataggaaaatcacctacaggagatgtaaacaacttgagttgctctaaaatgtttggaaaagagctgcttttgcattatgaattatattgttgaagcaataacctagccagctgttgcattagctaaagcagcctcttgcaatggtaggaaaaaaggatctcaaatagcatgagtgtatgtctatatcctgaaatttattgtctaaaatgcatgaatatatttttagcagtctgtggcatattaatcaaactgttgaattgttttcttacaccctggaaatctttctatcaactataatgataaatccattttgaagtgatattttggacttaggcattttactttagattggaaggcattatgtgatttacaatatgagaatatagcagaaaaaccagatgaggctgtggctttttatattcaacagccaataaaaaatgcacaacatgctaagatcaaagcaacaaaaccaa

SEQ ID NO: 46674 - DNA, 1071 bp, Homo Sapiens
atgggtctcatggtgaggggtggggtcacctgcaggtcccaggaaaggctgctgggagtggggacagggacagcatcggcacagccaccagttacggcttctccttactgctccttcacaggcagaagccgagccgacgccccggcgcgggcggcaggaaatggccagcccaggcttcgggcgcaggtggacctcagctcggcctcgtcggtgctggtcactgtcctggacgccaaggctctgcccctgactctgctgtcctggggcagcttgtgcgcaactgcccaaaaccacaacaaccaggaaggtgcaccagcccaacccaaaggctccatggctaaccagagggcccttcgatttccacctccttcaggaagcccccctgggctgcacaccaggatgaggctgaccagtcctccccaaccacactttgagccccctcctcccacaacagtgggtgctcccaggtccctacagggggactggtttggcagtgattccagggccgtccgggcgctgaggctcataggctgggcttcccgaagccttcatccgttgcccggttcccgggatcgggcccaccctgccgccgaggaagaggacgaccctgaccgccccattgagttttcctccagcaaagccaaccctcaccgctggtcggtgggccataccatgggaaagggacatcagcggccctggtggaaggtgctgcccctcagctgcttcctcgtggcgctgatcatctggtgctacctgagggaggagagcgaggcggaccagtggttgagacaggaagggagccgacagccgcccttcggatttgatgtcacgtttgcccgtgactgtcctggctatgcgtgcgtcctcagcactgaaggacttggctggtggatggggcacttggctatgctgattcgcgtgaaggcggagcagaatctcagcagatcggaaactgctcctcgcctggctcttgatgtccaaggattccatcggcaagacttctcagatccttggggaaggtttcagttgcactgtatgctgttggatttgccaagtctttgtataacataa

SEQ ID NO: 46675 - DNA, 3851 bp, Homo Sapiens
agtgtgtgcggatctgtggtggagaaggtatctcattcctctctaacatcatctccactttgcatctgtctctcttagtctgctttttttccaccgatgtaacagacctggagccagcaggactcagaggaaaggacttaatcaggtttatgtgtcctaaaggttatgaagacagtatggagtttccagaccatagtagacatttgctacagtgtctgagcgagcagagacaccagggttttctttgtgactgcactgttctggtgggagatgcccagttccgagcgcaccgagctgtactggcttcatgcagcatgtatttccacctcttttacaaggaccagctggacaaaagagacattgttcatctgaacagcgacattgttacagcccccgctttcgctctcctgcttgaattcatgtatgaagggaaactccagttcaaagacttgcccattgaagacgtgctagcagctgccagttatctccacatgtatgacattgtcaaagtctgcaaaaagaagctgaaagagaaagccaccacggaggcagacagcaccaaaaaggaagaagatgcttcaagttgttcggacaaagtcgagagtctctccgatggcagcagccacatagcaggcgatttgcccagtgatgaagatgaaggagaagatgaaaaattgaacatcctgcccagcaaaagggacttggcggccgagcctgggaacatgtggatgcgattgccctcagactcagcaggcatcccccaggctggcggagaggcagagccacacgccacagcagctggaaaaacagtagccagcccctgcagctcaacagagtctttgtcccagaggtctgtcacctccgtgagggattcggcagatgttgactgtgtgctggacctgtctgtcaagtccagcctttcaggagttgaaaatctgaacagctcttatttctcttcacaggacgtgctgagaagcaacctggtgcaggtgaaggtggagaaagaggcttcctgtgatgagagtgatgttggcactaatgactatgacatggaacatagcactgtgaaagaaagtgtgagcactaataacagggtacagtatgagccggcccatctggctcccctgagggaggactcggtcttgagggagctggaccgggaggacaaagccagtgatgatgagatgatgaccccagagagcgagcgtgtccaggtggagggaggcatggagagcagtctgctcccctacgtctccaacatcctgagccccgcgggccagatcttcatgtgccccctgtgcaacaaggtcttccccagcccccacatcctgcagatccacctgagcacgcacttccgcgagcaggacggcatccgcagcaagcccgccgccgatgtcaacgtgcccacgtgctcgctgtgtgggaagactttctcttgcatgtacaccctcaagcgccacgagaggactcactcgggggagaagccctacacatgcacccagtgcggcaagagcttccagtactcgcacaacctgagccgccatgccgtggtgcacacccgcgagaagccgcacgcctgcaagtggtgcgagcgcaggttcacgcagtccggggacctgtacagacacattcgcaagttccactgtgagttggtgaactccttgtcggtcaaaagcgaagcactgagcttgcctactgtcagagactggaccttagaagatagctctcaagaactttggaaataattttatatatatataaataatatatatatatatacatatatataaatagatctctatatagttgtggtacggtctaaaagcagtcttgtttcctggaaataaaaagttgggatattaacttgtttttgcactttagaatagcatgagaatctcactaatttagcattctgataaaagaaactttagagcaagtcagaatagagaggtgtttttcctttgaggggataggggaagtaagccaataagaaccttttaaacaaatcgtcctgtcacaaaatgctttcatatggcttaattttgtcaacactgcattgtcttttgagctcttttttcccccccaacaaagtttttttgttttttgtttttttttttaagtagaaattccctccagttttattagcctctttatatgtctcaaattgcatgaattttttctggctgttggaaacctgaatgcttttagacccaaatggaaaatttctgaaatgctggattatctatttttaaacaagcagttgacttaaaactttctgtggcaacttctggttttctgacagttcccagtgagagaaatgctgaaagtacactgggatcactgggacactgtcttatgaaggtttgcttgggatgaaaaaggatattgcagcttcagcagtgttgaactgtgtgtttaaaaatgtgaattactgttattgtatactgtaattgattacatgggctgggggggtgtcaaagaacttgacaggttgtgttgatgctcttagttgagtcttgaaaagtaaatattaacgctacagaaatgcatgagtttcaatatattttttgtctttgtttgcattgtataactttaacgagtgagtttaaaattatttaatttccttagaaaaataacaccatttggaaaaaaaaactggtgttatgaagaacgtaaatgcactgtttttatttttattttatataatttaaattgactttcccactgtctttaagttgaaactgttaagctgaataaaaacttaagctgcaaattgataacttcgctacataacaaggaaaatataaatgtttacaaacagcttaaagatttgcatgtgcagtgtgcatttataacaaacttctaattgcacaaaacccatgccagctcagagtttaggtgtacacatttacccagttgagcgttcttagaataactactgcacaagttgacaataggtcgttctctctttttttttgtttgctccctttttctttttctccccttcctccttaccctccctcccttactctccccccccaccaccaccctccacccccaactcatgaaaagattctatggactgaaaaagccccaggctgaaaggactggactgccttgattgacatggggaagggggttagtagactatgtggattgcggcagcagaggctgcagcctaacgtgtggttttaatgaccagcacgcaaggcaaaagcattttgcacagtgtttgttttcctgtcttgcacttacaaataaggtctatgggagtagcatggaaaacgtttgctgtttttcccttttttttttaattgcttttgtttaaaatttgatcgccttaactactgtaaacatagcctatttttgtgcttaagatactgaatggaaaactccattgtgtgttgctggactgttttggaaatatttggttaaatgtgtgttaatttggctgtaatggcatttaaagcaaacaaacaaacaaaaaaagctgtgaaaatggccttggagcattatctttagttacttgaagagtttctagtttttttaaaatacagtttatgttaaaataatttttattaatttagagaagacaatcaatgtctgtgagaaaacggactttcttttggattttctttttgtggtcattgtgagtgattgctttttccttttcttagtttcacattcttcctttgttctaaaacttagactgacatctagctttgacaatcatagtatgttttattttcctgagggggaataacttataatgctgtttagttttgtactattggtgtgttggtgaatttttaaactgtgtgctaactgcaataaattatatgaactgagaa

SEQ ID NO: 46676 - DNA, 327 bp, Homo Sapiens
tgtcctgccaatgaattacggctagattctactggagtcatattgagccctggatatcctgacagttacccaaatcttcaaatgtgtgcatggagcatttcagtggaaaagggttataatatcaccatgtttgtagaattcttccagacagaaaaggaatttgatgttcttcaggtgtatgatggaccaaatattcaaagtccagtgcttatttccctcagtggggattattcatctgcttttaatataacaagcaatggtcatgaagtatttcttcagtggtcagcagatcatggcaataacaaaaaaggcttccggataagatat

SEQ ID NO: 46677 - DNA, 1386 bp, Homo Sapiens
ttcccttttttcagccaactgctcgctcgctcacctccctccttggcacgatgagcacctgcagccaccagttcacctcctccagatccatgaagggctcctgcagcatcgggggcagcatcgggggcggctccagccgcatctcctctgtcctggccggagggtcctgccatgcccccagcacctacgggggggcctgtgtgtctccttctctcgcttctcctttgggggagcctgcgggctggggggcggctatggcggtggcttcggcagcagcagcagctttgctagtggctttgggggaggatatggtggtggccttggtgctggcttcggtggtggcttgggtgctggcttgggtggtggctttgctggtggtgatgggcttctggtgggcagtgagaaggtgaccatgcagcacctcggtgaccgcctggcctcctacctagacaaggtgcgtgctctggaggaggccaacgccgacctggaagtgaagatccgtgactggtaccagaggcagcggcccagtgagatcaaagactatagtccctacttcaagaccatcgaggacctgaggcacaagatcattgcggccaccattgagaatgcgcagcccattttgcagattgacaatgccaggctggcagctgatgacttcaggaccaattaggagcacgagctggccctgcggctgactgtggaggctggcgtcaatggcctgtgccgggtgttggacgagctgaccctggccaggactgacctggagatgcagatagaaggcctgaaggaggagctggcctacctgaggaagaaccactaggaggagatgcttgctctgcgaggtcagaccggtggagaagtgaacgtggagacggatgccgcacctggcgtggacctgagctgcatcctgaatgagatgcgcaaccagtacgagcagatggcaaagcacaaccacagagatgctgggcctggttcctgagcaagaccaaggagctgaacaaaaaagtggcctccagcagtgaactggtacagagcagccgcagtgaggtgacggagctccagagggtgttccagggcctggagatggagctgcagtcccagctcagcataaaagcgtccctggagaacagcctggaggaaaccaaaggctgccactgcatgcagctgtcccagatccagggactgattggcagtgtggaggagcagctggcccagctatgctgtgagatggagcagcagagccgggagtaccagatcttgctggacatgaagacacggctggagcaggagatcgccacctaccgccacctgctggagggcgaggacgcccagctggggggcggctatggcggtagcttcagcagcagcagcagctttgctagtggc

SEQ ID NO: 46678 - DNA, 879 bp, Homo Sapiens
atggggctgccactagcccgcctggcggctgtgtgcctggccctgtctttggcagggggctcggagctccagacagagggcagaacccgaaaccacggccacaacgtctgcagcacctggggcaacttccactacaagaccttcgacggggacgtcttccgcttccccggcctctgcgactacaacttcgcctccgactgccgaggctcctacaaggaatttgctgtgcacctgaagcggggtccgggccaggctgaggcccccgccggggtggagtccatcctgctgaccatcaaggatgacaccatctacctcacccgccacctggctgtgcttaacggggccgtggtcagcaccccgcactacagccccgggctgctcattgagaagagcgatgcctacaccaaagtctactcccgcgccggcctcaccctcatgtggaaccgggaggatgcactcatgctggagctggacactaagttccggaaccacacctgtggcctctgcggggactacaacggcctgcagagctattcagaattcctctctgacggcgtgctcttcagtcccctggagtttgggaacatgcagaagatcaaccagcccgatgtggtgtgtgaggatcccgaggaggaggtggcccccgcatcctgctccgagcaccgcgccgagtgtgagaggctgctgaccgccgaggccttcgcggactgtcaggacctggtgccgctggagccgtatctgcgcgcctgccagcaggaccgctgccggtgcccgggcggtgacacctgcgtctgcagcaccgtggccgagttctcccgccagtgctcccacgccggcggccggcccgggaactggaggaccgccacgctctgccgtaag

SEQ ID NO: 46679 - DNA, 654 bp, Homo Sapiens
gcttcccctcctttcccaccagggatagtcatcctggggctgaggtctgacagcaggtggaagcagcccctgtgtgtggagagccttccggagggcatgccccgcgccttcctggtcaggagtcggcgtccacagccccccaactggggccatctgcctgaccagctccggggagatgcctatatcccaggtgggcccctcactgtgcctggaggtaaggggcaggagagacgcagtgtcaccatctggcttttctcctcagactgcagcagcctgggggggccaccggcacaacagtcgtccagtgtcagggatccgtggacagcgcgcatgctgacaaggcacctcaagtgccacagccccgtgcgccgccacctgtgccgctgttgtggcaagggctttcatgacgccttcgatctcaagcgccacatgaggactcacactgggatccggcccttccgctgcagtgcttgcgggaaagcgtttacgcagcgctgctccctggaagctcaccttgctaaggtgcatggacagccggccagctacgcttaccgtgagcgccgcgagaagctgcacgtgtgcgaggactgcggcttcaccagctcccggcccgacacctacgcacagcaccgcgccctgcaccgcgcagcctga

SEQ ID NO: 46680 - DNA, 2785 bp, Homo Sapiens
ttactttcttactcttgggtcagttcctgctacagctatcccaccatggacttcttgatgagtggcctggcagcctgcggggcctgtgtattcaccaatcccctggaggtggtgaagaccaggatgcagttgcaaggagaactgcaggcccctggcacataccagcggcactaccgaaatgtcttccatgccttcatcaccatcggcaaggtggatggccttgctgccctgcagaaaggcctggcccccgccctcttgtaccagttcctgatgaatggcatccgactgggcacctatgggctggctgaggctgggggctacctgcacacagccgaaggcacccacagtcctgcccgcagcgcagcagctggggccatggctggggtcatgggagcctacttggggagccccatctacatggtgaagacacacctgcaggcacaggcagcctcagaaattgctgtagggcaccagtataagcatcagggcatgtttcaggcgctaaccgagattggccagaaacatggtctggtggggttatggcgtggggctctgggcggcctgccccgagttatcgtcggttcctccacccagctgtgcaccttctcatccaccaaggacctcctgagccagtgggagatctttcctccccagagctggaagttggcgctggtggctgccatgatgagtggcattgcagttgtcttggccatggcaccctttgatgtggcctgcacaaggctctacaaccagcccacagatgcacagggcaagaaccgagtccccaagttctcagcaacatcatgcagtgcttcagcgcctttactggggaccaaagatgttaggatcgtgaagggtcagactggtcaccagctgttcaaagtcacccaggctccagggtgcagcccgattctcctgggaacccagtcatgagatacccgcccgttccttcctccttacgggggctgattgaaggtaagcaagagatcagtctggtactggggcagcctcagcaaggcctgatgaagtgtcacgtcctttgctacctaaggggatcagagtcaggatgcttacctggatctctgcgtccccgctaccgcccttccaggacattacacactctcgggccctcacctgctggttttccttagctatctgctgcttgccagagaggacccaggcttcttgacagcggcccctcagggccaggttctccaaactgagaggctgaacagactccacatggacagccctagccccctgcacgccaccaacatcctcaaagtggtacctggagtagggaagcggggtcaggaagggacatctctggtcgcctccccgggagcatctttaagttgcaggcctggctcccggcccgtgcgtggtctcaccgcccggattaaccgtcggccgcgggccccgcccactggtccgaccccgcccctgccattggccagccgggggccattccctcaccgcgcagccgcttcgccccgtacgtgggcctgcagctcgagaagttccactatcaggctctggtccgtcacgggatggcagaaaacttcttgattgtccgggaccggtcggaggtcgctggagtgaggcgaggcagaccctggttgaccccggtctcttcccacaacccacccagtcagccgcccctgggcgccccggccttctcaccttacgtcaatggcccccatggggaggatggcggaaaaggcgcccccgaacagcgggcagtctctcgtgggctccatgggtctgaggctgggttatgggcattagaaaggtttaaaagaagtccacattgggtcacgtggcatcggctccctgggtttcgcagctgccaccgccacccgggtctggcttagctcccggatcctttaagatttggctccgccctgcgctctcgttggccaatcggcgccaagaccctgggggcgggggtcagcggctttgctccggaagccgcgctcttaggagtgcgcctggcgggacggtggggtctgccttggggttggacttagggttagggtctatgtcgcccccggtggtcacgagcatgctcccgccagcctcctcttgattgattgattgattgattgattgacaggtctcgctgtgtcgcccaggctgtaatgcagtggcgcgatcaccgctcactgcagtctccacctccaggactcaagtgatactcctgcctcagcctcttgagtggctcctgctcccgccaccacgcccggctaaatttttaattacttgtagaaatggggcggggtggggagtgtctcccaatcttgcccaggctggcctcaaactcctggactcaagcgatcctcccgcctcggctccctaagtgctggaattacaggcgagagccacagcgcctggcctcctcgtccttttcaagtggtcacaccttccaagaaggtcgcctgagaccctcctgaggggcaggtgctcgtcaaaggggcccacgtctaggtagggtctcttgagtcaggaaagcatagtttcacggtgttctgggcctctgaaagaagaatgggctgccacccagaccgctaattcatagatctgctgctgggaattaggggaacaatgcgtccaggttaggattcaggtctcacatcttcctgaaagtgagagccaacctgggtattagaaatctaattcctctcaaatatttgccttgggaatgctcccgggcaggtgcaaccccacccccagctccacacacctggacagaagcacagattaaaccctcttttgtttgtctttt

SEQ ID NO: 46681 - DNA, 1506 bp, Homo Sapiens
tttttcttcttcagagtaaaaggccaagctatgatagcaactggtggagtgataactggcctggccgccttgaaaaggcaagactctgccagatcacagcagcatgtcaacctcagcccgtctcctgctacccaagagaagaagcccatcaggcgccggccccgggcagatgttgtggttgttcgtggcaaaatccggctttattccccatctggtttttttcttattttaggagtgctcatctccattataggaattgctatggccgttcttggatattggccccaaaaagaacattttattgatgctgaaacaacactgtcaacaaatgaaactcaggtcattcggaatgaaggcggtgtggtggttcgcttctttgagcagcatttgcattctgataagatgaaaatgcttggcccattcaccatggggattggcattttcattttcatttgtgctaatgccattcttcatgaaaaccgtgacaaagagaccaaaatcatacacatgagggatatctattccacagtcattgacattcacacgctaagaatcaaggagcaaaggcaaatgaacggcatgtacactggtttgatgggagaaacagaagtaaaacagaatgggagctcctgtgcctcgagattggcagcaaatacgatcgcctctttctcgggttttcggagcagttttcgaatggacagctccgtggaggaggatgaacttatgttaaatgaaggtaagagttctgggcatcttatgccccctttgctctctgacagctctgtgtctgtctttggcctctatccacctccttccaagacaactgatgataagaccagcggctctaagaaatgtgaaaccaagtcaattgtgtcatcgtccatcagtgcttttacattgcctgtgatcaaacttaataactgtgttattgatgagcccagtatagataacatcactgaagatgctgacaacctcaaaagtaggtcaaggaatttgtcaatggattcccttgtggttcctttgcccaacaccagtgaatccttccagcccgtcagcacagtgctaccaaggaataattccattggggagtcgttgtcgagtcagtacaagtcatctatggctctcggacctggggctggacagctcttgtctcctggggctgccagaagacagtttgggtccaatacatccttgcatttgctctcgtcacactcaaagtccttggacttagaccggggtccctccactctaactgttcaggcagaacaacggaaacatccaagttggcctaggttggatcggaacaacagcaagggatatatgaaactagagaacaaagaagacccgatggataggttgcttgtgccccaagttgccatcaaaaaggactttaccaataaggagaagcttcttatgatttcaagatctcacaataatttgagttttgaacatgatgagtttttgagtaacaacctaaagaggggaacttctgaaacaaggttttaa

SEQ ID NO: 46682 - DNA, 1535 bp, Homo Sapiens
gtgttcctgcggcggcatctgccgcccgaggtctacgacgcggtccgcgcctacgagccatgcatcgtggtgtccaactctgagaaccacatcctcaagtatgtggtgctaagcgaccggctcgtctacctaaccgagaacccgcccaagtccatccggcgggtagtggctctgcgggacgtcgtggccattgacctgattgatgattacccggaatttttgagttcgccagatagagaaatcagccaacacattcgtatcatctattcttcaaccgttttgaaaaaagagtgtaaaaagtcaaacagtgtcaggaaattcctatttccatttcatcatactaaagctaacaacaagaaagtcaaggaagaaaagaacggccttgccttttggagaagcaaagagtccagaagtctgaaagaatctcctctcaggtctgaggagaaaattaagcacttcagtcaacttaaatctgaactttttcttaaagacaattctttgaggaggatactttctttacttatggaacttaaagtagcagcccagaaaaacttcattctgaaaaggcttttctggaagaccagtgaccttttctatttcatagtaaacaaacttcatgagtacttgccggagtctagggataagaatgcactacaaaatcaaagccaaagggttgatgagctggtggcatgcattgaaattatacagaccctagtattgatgttcagagaaacagaaaccgagtcatcacgcctgaacacattggcagctaagaagggagcactatttaatctcttggtaattttaattagtgagcctcagattccaaaatcttgtcctgtgtttgatatccagttggtggctgattcagctttagtcagaatgtcttttgacgctgagttacagaagcttattctggagtatacaaatactgctacagcacttttatatgagatacttctggtctttcagcagggaaatctcggattgggatccacaaagtttgctattagctggataatgtcctttctacaaagctgtcctcccatcattacttttgtggccagtattgtgaaacaagtggtgaggggtctttcagcttcatttcagctgctaagtccctgccaagcagttctgttgtaccagcaattttacatcctcaagagctgtctgcggcacagcaggactctagctgagtatattaggaataactacagagaagaattcaggtactttattcacatgccagccttgcagaaaaggctcccattgtgttaccccatcactcaacctaccattcaactttttcatgaagttctgaaattggttgaatagaaacaaacaatgtacgcaatgttaataagagtataaaatgttaatcaagagtcaacttgatattcacgagaaacatttttttatttgtttaatatctggctatctctgagtcctataaacaaagattttaattgaatgttccatcaatacctctctatgagaagtttaaaattttaaaaaataaatttgatttattataa

SEQ ID NO: 46683 - DNA, 138 bp, Homo Sapiens
caggatccacctctgatgttcagtgaagagtaccagaaaagtctgctagagcagtaccatctgggtctcaatcaaaaacgcagaaaatacgtggttggagagctcatctggaattttgccgatttcatgactaaccag

SEQ ID NO: 46684 - DNA, 1288 bp, Homo Sapiens
gcatctgcattgccgggaccggatatgagcatgaaacctagtgccgccccgtctccatcccctgcacttccctttctcccaccaacttctgacccaccagaccacccacccagggagccacctccacagcccatcatgccttcagtattctctccagacaaccctctgatgctctctgctttccccagctcactgttggtgacaggggatgggggcccttgcctcagtggggctggggctggcaaggtcattgtcaaagtcaagacagaaggggggtcagctgagccctctcaaactcagaactttatccttactcagactgccctcaattcgactgccccgggcactccctgtggaggccttgagggtcctgcacctccatttgtgacagcatctaatgtgaagaccattctgccctctaaggctgttggtgtcagccaggagggtcctccaggccttccgcctcagcctccaccaccagttgctcaactggtccccattgtgcccctggaaaaagcttggccagggccacatgggacaaccggggaaggaggtcctgtggccactctatccaagccttccctaggtgaccgctccaaaatttccaaggacgtttatgagaacttccgtcagtggcagcgttacaaagccttggcccggaggcacctatcccagagtcctgacacagaagctgtgaaggagtatgttgacatcatggaatggctggtggggactcacttggccactggggagtcagatggaaaacaagaggaagaagggcagcagcaggaggaggaagggatgtatccagatccaggtctcctgagctacatcaatgagctgtgttctcagaaggtctttgtctccaaggtggaggctgtcattcaccctcaatttctggcagatctgctgtccccagaaaaacagagagatcccttggccttaattgaggagctagagcaagaagaaggactcactcttgcccagctggtccagaagcgactcatggccttggaagaggaggaagatgcagaggcgcctccaagtttcagtggcgctcagttggactcaagtccttctggttctgttgaggatgaagatggggatgggcggcttcggccctcacctgggcttcagggggctgggggcgccgcttgccttggaaaggtttcttcttcaggaaaacgggcaagagaagtgcatggtgggcaggagcaagccctagatagccccagagggatgcacagggatgggaacactctgccatcccccagcagctgggacctgc

SEQ ID NO: 46685 - DNA, 4110 bp, Homo Sapiens
accagcggagcgctgggtgtcagtgagcagcgaggagccgcgcgcccccgtgcccgcgtctgtccgtgcgcccgagcgcccactcccgggtctgaggtctgcccggcgcgccgcttgcagagcatactcagggccgcgcacctgccccgcgcacctgcccgccgcccgctcggcgctccgggcttcgctagccagcctccctgcgacagcgcgggggctccggccgtgcctccgcgtccgccccgcgcctcagccgggcccgggcgcagcgctgcggagggcgagggccgcccggagtccggccagggccggcgcggcgatgatgaacaggttccgaaagtggctctacaaacccaagaggtcggatccgcagctgcttgcccggttctactatgccgacgaggagctgaaccaggtggccgcggagctggacagcctggatgggcggaaggacccccagcggtgcacgctgctggtcagccagttccgctcctgtcaggacaatgtgttgaacatcattaaccagatcatggatgagtgcatcccccaggaccgcgcccccagagatttctgcgtcaagttccctgaggagatccggcacgacaacctggccggccagctgtggttcggtgccgagtgcctggccgccggctccatcatcatgaaccgggagctggagagcatggccatgcgcccgctggccaaggagctgacgcgcagcctggaggacgtgcggggcgccctccgtgaccaggcgctgcgggacctgaacacctacacagagaagatgagggaagcgctgaggcacttcgacgtcctgttcgcagagtttgagctcagctacgtctcggccatggtgcctgtgaagtcccccagggagtactacgtgcagcaggaggtcatcgtgctcttctgcgagacggtggagagggccctggacttcgggtacctgactcaggacatgattgatgactacgagccggccctcatgttcagcatccccaggctggccatcgtgtgtggcctcgtggtctatgcggacggacctctgaacttggaccgcaaggtggaagacatgtccgagctgttccggcccttccacacgttgctgcggaaaataagggatttgctgcagacgctgacggaggaggagctgcacacgctggaacggaacctctgcatttcccaagacgtggagttccccatccgcgcagacgtgcagggacccgctgccctggcgcctgccctctctgcccctctcccccctgaggggccactctcagctaaggccaaagacccggatgcagagctggcctgctccatgcagtacgacgaccaggagctggagcagctcagccgcatggtccacagggcgggggacgagatgtcctctttgctttcaccgcccattgcctgccagtccccagctcacaggccaggagcggagggcagcccaggcggggaggcctctccaggtagaccgcgcctgcggtcaggcagtgacgaggaggagcgcgtgttcttcatggatgacgtggaggggacggcagaagccctggccaggcccgagtccccagctggcccatttgggtgggcaggcagtacctgggccgacccccaggagaaagggcagggtgggccaggcggagcggcggggatcagcttgcccgcctcggaaaaggaggaggacttgagcaacaacaatctcgaggccgagggcacagatggggccagcctcgcgggcaccagctcctgcagctgcctggactcgcggctgcacctggacggctgggaggtgggtgcggatgacgcagagacggctgagatgatcgcccaccggacagggggcatgaagctctcagccacggtcatcttcaaccccaaatcgcccacttccctggactctgcggtcgccacccaggaggccgcctcggagcccgtggccgaggggatggatggcggcccccacaagcttagcactggggccaccaactgccttctgcattcctgcgtgtgctgtgggagctgcggggacagcagggaggacgtggtggagcgtctgcgggagaagtgcagcccgggaggcgtcattggtgcctcgtacgctgccggcttagccaaggccagcgacagggcccctgagagacaggaggaggcgcccccaccctcagaagatgcctccaacgggcgggagcccaaagcccccacttccgacaagtgcctgcctcacacctcaggttcccaggtggacacagcgagtgggctgcaaggagaggctggggttgcaggtcagcaggagccagaggccagagagctgcatgctgggagcccctcggctcacgaggcgcctcaggccctgtcgggctccagcagctccacagctgggtcctgctcctcagacaagatggggccagaggcggccccagcagccacgcatgctgccccacaggccacaagagagaagatccggtccaggttccacggcagccacgacctcatccaccgcctgttcgtctgcatttcaggtgtggctgaccagctgcagacgaactatgccagtgacctgagaagtattcttaaaacactgtttgaggtcatggccaccaagcctgaaacagacgacaaggaaaagttaaggaaggtcacccagactctgcggagtgcggccttggaggactgtgcactgtgccaggagaccctgtcatcctctgaactggcagccaagacccgcgatggggactttgaagaccccccggagtgggtgccagacgaggcctgtggcttctgcacggcgtgcaaagcacccttcaccgtcatccgccggaagcaccactgccgcagctgtgggaagatcttctgctcgcgctgctcctcgcactcagcaccgctgccccgctacgggcaggtgaagccggtccgagtgtgcacccactgctacatgttccatgtcacgcccttctacagcgacaaggccggcctgtgacgtggtgccaggggcagccccaacccacccgggccaggaacccccaggaaggtggggccacgctgcaggcaggtctcactgcgtctcatgaggccgctgccgctgctgcaggggcacccagacctccagagcatccagagcctctgtcctgcccacgctagcctccctgcagggaccccgggccggctgcaggggccaacaagaggtcagctttgcccagcaggggacccggaggagcctggtggctgcctcagggcagggtgcctggcggagaaggcctgggccctcccactggtccctcggagatctgctggggctatgggaatcggggcgggtgatggaggtggacaagagtggggccactctgcgcctctgctgttgcggtgaatctggaagccggagcaagggccactccacaggctctttggcacagcagggctccctatgtgcctcccaaacgtcaaatgcaggctacccattctccccatcagctgcccacctcgttccccagccctcacccctcacccctcaccatccttcctcaggacttggctaaacaacatgcatctcatttcttcttggagtggggagatgcgggaagctgacccagtggtcctctaggcaggcagggtgctcctggtgtctgcccaccactgtccccttgctgatggcatgggggtccgaccaggcactgacaccgcaggcagaggttgctcggggccttgggtcgggtttaccaatcagccaggacgcccggggccaccagctcagctaccacttccccttccctctgcaccctctggaaccctggcccaattcctcagaccccagagtggcctgggacccaagctgccgcagctgagtggccccagcggacacctcctcaggcttaaatctcaggcttcacattgcaatgacgattgcagttttatttttggagatgacacacctactgcttcttttctaggataaatctaattactgtttactggtggagtacatatgcatagaaacggcttctgtcggggggagagtatataatggaggaaatattatgtattgagattatatttattttctaaatgctgtaatttgaagccatttccataaatctatttaaggattgc

SEQ ID NO: 46686 - DNA, 1483 bp, Homo Sapiens
cggccgccggcccagtgaggctgggttcgaggagctggagcgggaaactggagcttaaattctggcggcgagatggacattctgaaatcagagatccttcggaagcggcagctggtggaggacaggaacctgctggtggaaaataaaaaatatttcaagcgtagtgagctcgccaaaaaagaagaggaagcatattttgaaagatgtggctacaagatacagccaaaagaggaggaccagaaaccattaacttcatcgaatccagtgttagaacttgaactggcagaggaaaaattacctatgacgctttctaggcaagaggtcatcagaagattgagagaaagaggagaaccaatcagactatttggagagactgattatgatgcttttcaacgtttaaggaaaatagagatcctcacaccagaagttaacaagggattgaggaatgatttgaaagcagccttggataagattgatcagcagtacctcaatgaaatcgtcggcggtcaggagcctggagaggaagacacacagaatgatctgaaagttcatgaggaaaacaccacaattgaagagttagaggcgcttggagagtccttagggaaaggcgatgatcataaagacatggacatcatcaccaaattcctgaagtttcttcttggcgtttgggctaaagaattgaatgccagagaagattatgtgaaacgcagtgtgcagggtaaactgaacagtgcgacccagaaacagaccgagtcctacctaagaccactttttagaaagctacggaaaaggaatcttcctgctgatattaaagaatcaataacggatattattaaattcatgttgcagagagaatacgtgaaggcaaatgatgcttatcttcagatggccattggaaatgcgccttggcccatcggtgtcactatggttggtatccatgccagaactggcagagaaaagattttttccaagcatgttgcacatgttttaaatgacgaaactcagcggaaatatattcagggattgaagaggttaatgaccatttgccagaaacactttcctacagacccatccaaatgtgtggagtacaatgcactgtgagatctgtgtatggtgtgttaataacaataagaaacttagggaagcaggctgtggacttctggaattaccaacaggaatgaggaaagaagaaaactggagtttccagtctctgagttctacctgatgtaactcttgattggttttaagaactttgttggccttcatttcatatctgactgcaagctgatttttctttcttgctttcattttaattagtccaaaattaagttttaaagatttttcctcacaatttaaatccatagacaacagaagggggtttaaaatgacctttttttcagttgacccgaaagttgtggttagatgattaaaaagaaacatttgaggatggacttaattatttcagtaaaatattataatttgc

SEQ ID NO: 46687 - DNA, 160 bp, Homo Sapiens
atctgtaattctaaactgtaatttactgttgtatatttcacccataattcttttagggacaattcctggaccaattatatttggtttcacaatagacagcacatgtattctttgggatataaatgattgtggaattaaaggagcttgctggatttatgat

SEQ ID NO: 46688 - DNA, 2000 bp, Homo Sapiens
aagttgtctggcgccgggagtgagaccctaaaacaaagaagaacacaaatcatgtcccgaggacttccaaagcagaaaccgatagaaggtgttaaacaagttatagttgtggcttctggaaagggtggagtcggaaaatctactacagcagtgaatcttgcacttgcactagcagcgaacgattcgtccaaggccattggtttgctagatgtggatgtgtatggaccttcagttccaaagatgatgaatctgaaaggaaatccggaattatcacagagcaacctaatgaggcctctcttgaattatggtattgcttgtatgtctatgggctttctggttgaagaaagtgaaccagtagtttggagaggccttatggtaatgtcggccattgagaaattgttgaggcaggtagattggggtcaactggactacttagttgtagacatgccaccaggaactggagatgtgcagttatcagtctcacagaatattcctataacaggtgctgtgattgtctccacgccccaggacatcgcattgatggatgcacacaagggtgctgagatgtttcgcagagtccacgtgcccgtccttggccttgtccaaaacatgagtgttttccagtgtccaaaatgtaaacacaaaactcatatttttggtgctgatggtgcaaggaaactagcacagacccttggtcttgaagttctaggagacattcccttacaccttaatataagggaagcttcagatacaggccagccaattgtgttttcacagcctgaaagtgatgaggccaaagcttacttgaggattgctgtggaagtggtaagaagattgccatcaccttcagaatgattccccaagtgtcctggaaatttgcctggtactgacattaagaggacctttggaaatcagcaatgtggtgatggaacctacagaaataatagaaatcataactgttttatttctaaggaaagaatgtcttcatatttgacttgctaagctaaggttcacaaaactttgatgtatcaatgttaactgctatatttaggaattttttgaaagctggtgtgtaccacctgcaaagaactgcattttattttattgaattacccctttagaaatcacgagtttatgatgttacaagtccattttgggagagaactgtacactttttgcaggaccacagaattagtaatttaaatgatatactaaatttgtgtatgggcataagtattacgccttcccaccaggcaatttggactgtctttgaatcctgtctttggtactgtcttggacatgttcttaatatgaacctctgcttcttcatctggatcacactataccccagacttaatgaatttcagtctccaggagtggagcctgaacatatgtatttttagtaagaccatgatgatgttgatgatgattctggtaatcatggcagtaagaataatagctaacatttaacaagttaattataattgttcttccatttgtgtgagtgggtactattatctccattttacagataagtaatttgagatataatttgaaggcactcaaccttgagtgtcttgctgagggttactgtatctagcaggtgatggagcttggatttgaacttgagtaattcgatattagattcatctttttgtacaccaatgtgcttttgttaattaaaaaaagtcggtggtggctaggcgtggtggctcacgcctgtaatcccagcactttgggaggttgaggtgggtggatcatgaggtcaggagttcaagaccagcctgaccaacatggtgaaaccccgtctctactaaaaatacaaaaattagctgggtgtggtggcatatgcctgtaatcccagctactcgggaggctgaggcaggagaatcatttcaacccgggaggctgaggttgcagtgagtggagattgtaccactgcactccagcctggtcaatggagtgcgactccatctcaaaaaaaaaaaaaaaaaaaaaaa

SEQ ID NO: 46689 - DNA, 672 bp, Homo Sapiens
atggatgttgagcagcaggaggaggaagacaacgacgaggaggcggccgcgggcagcagagccggccgctcgttctccagccgtcttcaggacagccgcagcctggacgggctgagcgaggcgtgcggtggcgccgggtcctcagggagtgccgagtccggcgcgggcggcggacgccgcgccaccatctccagtcccctggagctcgaaggcacagtgagccgccacggcgaccttacccactttgtcgccaacaacctgcaactcaagatccgtctgagcggcgcgcctccacccccgccttctgcccctgcgcggccctgcccagcgcctgcacccacacccacaccggccattcccccaatcgaccccgaggtgctgcgggatctggagcggttgagtcgggagctgggaggccgggtggaccgtctgcttcgcggtctgggtggcgcggtgcaggagctgacggcgctgagcgtgggttgcatccagacctaccgcgatgctgtggactccttaggtgaagccgtggacatgagcatcaagggcatgtacaccctgctggcgcgctgcgaggagctggagcgggctctgcagccggttcaggggctggcgcgccaagtccgggatatccgacgtactctggaggtgttggaggccctgtgcaagtga

SEQ ID NO: 46690 - DNA, 354 bp, Homo Sapiens
atggccaagatcaaggctccagatcttcgcgggaagaaggaggagctgctgaaacagctggacgacctgaaggtggagctgtcccagctgcgtgtcgccaaagtgacaggcggtgcggcctccaagctccctaagatcctagtcgtccgaaaatccattgcccatgttctcacagttattaaccagactcagaaagaaaacctcaggaaattctacaagggcaagaagtacaagcccctggacctgcggcctaagaagacacgcgccatgcgccgccggctcaacaagcacgaggagaacctgaagaccaagaagcagcagcggaaggagcggctgtacctgctgcggcagtga

SEQ ID NO: 46691 - DNA, 5475 bp, Homo Sapiens
cggaacggcggcgcttcgctgcccgggagcgccagctgcgtgaggaggccgagcgggagcggcggcagctggctgaccgtctgcgctccaagtgggaggcacagcgcagccgggagttgcggcagctgcaagaggagatgcagcgggaacgcgaggccgagatccggcagctgctgcgctggaaggaggccgagcagcggcagctgcagcagctgctgcaccgggagcgcgatggcgtggtgcgccaagcccgggagctgcagcgccagctggccgaggagctggtgaaccgcggccactgtagccgcccgggggcgtccgaggtttccgcggcgcagtgccgctgtcgcctgcaggaagtgttggcgcagcttcgctggcagactgacggcgagcaggcggcgcgcatccgctatctgcaggcggcgctggaggtggagcgccagctcttcctcaagtacatcctggcgcacttccgcgggcacccggctttgtcgggatcaccggacccccaagctgtgcattccttggaagaaccgctgccccagacctccagcggctcttgccacgcccccaaacccgcctgccaactcggatctctagacagcctgagtgctgaagtcggtgtgcgctcccgctcgctaggcctggtgtcctctgcgtgctccagctccccagacggcctgctctccacgcacgccagctcccttgattgcttcgcacctgcgtgttcccgctcgcttgacagcacccggagcctccccaaggcctccaaatccgaggagcggccctcctcaccagacacctccacccctggctcccggaggctctcgccgccaccatcgccactcccgccgccaccaccaccgtcagcccacaggaaactcagcaacccgcggggaggagaaggctctgagagccagccctgcgaagtcctgactccctcacccccgggcctgggccaccacgagctgataaagctgaactggctgctggccaaggcgttgtgggtgctggcgcgccgctgttataccctgcaagaggagaacaagcagctgcggcgtgcaggctgcccctaccaggcagacgagaaggtgaagcggctcaaggtaaagcgcgcggagctgaccgggctcgcgcggcgcctagctgaccgcgcccgcgagctgcaggagaccaacctccgggccgtgagcgcgcctatacccggcgagagttgcgccggcctggagctgtgccaagtctttgcccgccagcgcgctcgggacctgtcggagcaggcgagcgcgccgctggccaaggacaagcagatcgaagagctgcggcaggagtgccacctcctgcaggcgcgtgtcgcctcgggtccctgcagcgacctgcatactggaaggggcggcccctgcacccagtggctcaacgtcagagacttagaccgcctgcagcgcgagtcccagcgggaagtgctgcgcctgcagaggcagttgatgcttcagcagggcaacggtggcgcttggcccgaggcgggcggccagagcgcaacctgcgaggaggtgcgacggcagatgctggcgctggagcgcgagctggaccagcggcggcgcgagtgccaggagctgggcacgcaggcggccccggcgcggcgacgtggcgaggaggccgagacacagctgcaggcggcgctgctcaaaaacgcctggctggcggaggagaatgggcggctgcaggccaagaccgactgggtgcggaaggtggaggctgagaatagcgaagtgcgcggccacctgggccgcgcgtgtcaagagcgcgatgcctccggcttgatcgccgaacagctgctgcagcaggcggcgcgcgggcaggacaggcagcagcagctgcaacgcgacccgcagaaggccctgtgtgacctccatccttcctggaaggagatacaggcgctccagtgtcggcctggtcaccctcctgaacagccctgggagaccagtcaaatgccggagtcccaagttaaaggtagcagaaggcccaagttccacgcacggcctgaagactacgcagtgtcacagcccaacagagacatacaggagaaaagggaagcctccctcgaggagagcccagttgcccttggggagtcagccagtgtcccccaagtttcagagacagtccctgccagccaacctctgtccaagaaaaccagctcccagtcaaactcctcctctgaggggtcgatgtgggccaccgtgccgtcctcccctactctggacagggacacagccagtgaggtggatgacctggagcctgacagcgtgtccctggccctggaaatggggggctcggcggctcctgctgcccccaagctcaagatcttcatggctcagtataactacaacccatttgaggggcccaatgatcaccctgagggtgagctgcccctcacagctggggactacatatatatcttcggggacatggatgaggatggcttctatgagggggagcttgacgatggccggcgggggctggtgccctccaacttcgtggagcagattccggacagctacatcccaggctgcctgcctgccaaatcccctgatcttggccccagtcaactcccagcggggcaggatgaagctctggaggaagacagcttattatctgggaaagcccagggaatggtggacagagggctgtgccagatggtcagggtgggctccaagacagaagtagcaacagagatcctggataccaagacggaagcctgccagctgggcttgctgcagagcatggggaagcagggcctctccagaccccttctggggaccaaaggggtgctccgtatggctcccatgcagctacacctgcagaatgtcacagccacatcagccaacatcacctgggtctacagcagccaccgccacccccatgtggtatatcttgatgaccgagagcatgccctgaccccagcgggcgtgagctgctacaccttccagggcctgtgccccggcacgcactaccgggtgcgggtggaggtgcggctgccatgggacttgctgcaggtgtattggggaactatgtcctccaccgtcaccttcgacacactcttggcaggacctccctacccaccgctggaggtgctggtggagcgccatgcctcgccaggtgtcctggtggtcagctggctccctgtgaccattgactcagctgggtcctccaatggagtccaggtcaccggttatgctgtgtatgcagatgggcttaaggtttgtgaggtcgccgatgccactgctgggagcaccgtattggaattctcccagctacaggtgcccctcacgtggcagaaggtctcagtgagaaccatgtcactctgtggtgagtccctggattcagtgcctgctcagatccccgaggacttcttcatgtgtcaccgatggccagagactccaccctttagctacacttgtggcgacccatccacctacagagtcaccttccccgtctgcccccagaagctgtcactggctcctccgagtgccaaggccagcccccacaaccctggaagctgcggggagccccaggccaagttcctagaagcattctttgaagaacccccaaggaggcaatccccagtgtccaacctgggctcagaaggagaatgtccgagttcaggggctggcagccaagcccaggagcttgcagaggcctgggagggctgtagaaaggacctgctctttcagaagagtccccagaaccacaggccaccttcagtcagtgaccagcctggggagaaggaaaattgctaccagcacatgggcaccagcaaaagccctgctccaggattcatccatctacgcaccgagtgtgggcccaggaaagaaccgtgtcaggaaaaggctgcccttgagagggtacttcggcaaaagcaagatgcccaagggttcacacctccccagctgggcgccagccaacagtatgcatctgacttccataacgttttgaaggaggagcaggaggcactgtgcttggatctgcggggcacagagaggcgagaggagaggagggagcctgagccccacagcaggcaaggacaagctctgggggtgaagagagggtgccagctccatgagcccagctcggcactgtgtccagctccatccgccaaagtcatcaagatgcccaggggtggcccccaacagctggggacgggggccaacactccagccagggtctttgtggccctctctgattacaaccccctggtgatgtctgccaacctcaaggctgcagaggaggagctggtcttccagaaaaggcagttgctaagagtgtggggctctcaggacacccatgatttctacctcagcgagtgcaacaggcaagtgggcaatatccccgggcgcctagtggctgagatggaggtggggacagagcagactgataggaggtggcgttctccggcccaagggcacctgccttctgtggcccacctcgaggactttcaggggctcaccatcccccagggttcctccctggtgctccaggggaactccaagagactcccactgtggactccaaagatcatgatagcagctctggactatgatcctggggatgggcaaatggggggccaggggaagggcaggctggcgctgagggcaggagacgtggtcatggtttacgggcccatggatgaccaaggattctattatggagagttgggcggccacaggggcctggttcctgcccacctgctggatcacatgtccctccatggacactgagcaagcatccttgcccaggtagtggcctctggctgctcacaccctgccagaggagaagcaagcgttcagaccctcacaccagcacccctcctcaccaccataagtagcatgtgctccaagtgccactgtgttaaactgatggtagtccttaagcgtcccctaggctctgaaagtagcaggacttaagcctgagttatttgcaaaagcaaacacaacaagccaacccctgagagtctgagaagccatttcaaagttgctgataactatggcaggtatacggagaagcgcctttttctgtggccaatgtgtgttttctctgggaggttaaggttatctgtccattgccttgtacgaaagtctcaagaaaagtctacatcttaaaaaagaaaaagcaatctgagtgttatttttgggatgtgagggtgatctggctgcgacatgtgtcaccccattgatcatcagggttgattcggctgatctggctgactaggcgggtatccccttcctccctcaccactccatgtgcgtccctccagaagctgtgtgctcaatggaagaggatgaccatccccgatagaggacgatcggtcttcagtcaagagtataagagtagctgcgctcccctgctagaacctccaaacgagctctcagaatgttatttttctgtcttatgtccaacccctcattaaaatgttcatag

SEQ ID NO: 46692 - DNA, 2555 bp, Homo Sapiens
caaaattacagttaattgtggataacttacatagaaaatttaatagaatcaacaggttaattagtagaatggagagtgcatacatagaggtataatagtcaacctgtaagacatcagatcaatttataaaatgcaacagtgtgcattgacctcagcagttactagggtaattatatgtcatggcttgggacagtctcagttgacacttgttgttctgacataatttttaatgttgttccccttttaccctcaaaagtattctgatttggatgataaattatactgtcacccttgctataacaaactaaatattaaacacagatacagataccattcatactgacaaaaacgatcctgtattttggaatgacactaagatatgaccatgaccatgtcatacaaagctatagagaagataccaagatgctcctggaatagggaagagccaggagagcagtggaacaagatctacagtgtggaaacaggtctgctgggcacttatagctttgaatggcagagtcaagttgcaaacaagacaatgaggaaaagaaatacaaactccatctgtggcaggcagcatgaaccccactgccctgtgtctattacaagagcaattgcccagccacaactacttaccttcccagactcccttgcaagcaggggtggtcacatgacccagtctggccaatgtcatgtaagtgggagtctattgggaaggggacataaatccaggggaagatgaactatcttgcatgcatgagaatgaaggatgctcactaacacaggtggagtagaaggcagggagaaactgggttctggtggcagccctggactgccccctccacaccactgcagtcaaatttcctttacttgcataaattgcaactggtgacagttcttaactgataaaccatcttcaaccaaactacatgttttttgggcaaatggagaagtcaagggagtggctccgacaaagccagcaaagcccacctccccagagtgagagatacgccaagaaggagaacctactctccactctttgcatcagtgggaatgtgtacaggggctaagggtgagagattccgtggggccatctcctcagcttcacagaacaaagccaggtactctccatcaccgacttttttttctccatagcacacacctctatccagcataccacctattgtacttacttgaataatttattgtttgtcttccccacatagaaagttagctacaagagggttaaggtgattgtgtgttttacacattgctgcattgccagggcctaggacagtaactggcatactgtaggggcttaataatgtttatcaaataaatgaatgaaccaagaatttaaagcccaatgaaccatctttcaaatataaagtcaacagaaaaacatgttgaacatatttttgaattatagttcccatgaccccttcttaaaaaaattaaggacacccttaggcaaatcaagaatgattcagaaaagtttaatgtaaaaggatgggcagatgatttttttaaaagttctgtggatagatggcagtgatggctgctgtattaatccattttcatgctgctgataaagacatacccaagcaatttacaaaagaaagaggcttaactggacttacagttccacatggctggggaggcctcacaatcatggtgaaaggcaaggaggagcaagtcacgtcttatgtggatggtggcaggcaaagggacagagagagtgagcgagcttgtgcaggaaaattcccatcagacctcatgaaatttattcactatcatgaaaacagcatgggaaagacttgcccccatgattcaattacctcccactgggttcctcccatgacacatgggaattgtgggagttacaattcaagatgagctttgggtacagccacagccaaaccatatcagttgccctacagtgagaaggtacttaatgcccctgaactgtatacttaaaaatggttaaaatggttatatgttatgtgcattctaccacaattcataaaaaggatgagcagaagcataacaaatgcaaatgaagagaaatcaggggtcaagttgtaaatggagcactgccaagagtgccagcaatgagcacagaatttgtgtaactgcaggactattaaagccaatctaaagattatgaccatcacagagaagaatgaaacaaaacagaactggcataaataataaaaagtaggaggggtggaggtgagaaggagagaggtaatacaagtaaactatgtcatattcatatatagttggaggtctaaattattgcttagaagtctaagtaaaattagaggcatcaaggtaaacaaaaaataatcaactaaaataacttgatggaagggagacaagaagagggaaagtagaaatattctaattttgatattgttcacagtagggagaaaataagcgctgtctagagaaataaaaggattaaagatatcatgtcatattataattatgaagataaccatgggatcaaaaacgcagctttccaaattatcagaagacatacacacagaaaa

SEQ ID NO: 46693 - DNA, 1649 bp, Homo Sapiens
ctggcggctcttgggactggcggggctgcgcgcggggttagggtgggggtacgggaaggctcaacccaggacctgcgtaccttgctttgggggcgcactaagcacctgccgggagcagggggcgcaccgggaactcgcagatttcgccagttgggcgcactggggatctgtggactgcgtccgggggatgggctagggggacatgcgcacgctttgggccttacagaatgtgatcgcgcgagggggagggcgaagcgtggcgggagggcgaggcgaaggaaggagggcgtgagaaaggcgacggcggcggcgcggaggagggttatctatacatttaaaaaccagccgcctgcgccgcgcctgcggagacctgggagagtccggccgcacgcgcgggacacgagcgtcccacgctccctggcgcgtacggcctgccaccactaggcctcctatccccgggctccagacgacctaggacgcgtgccctggggagttgcctggcggcgccgtgccagaagcccccttggggcgccacagttttccccgtcgcctccggttcctctgcctgcaccttcctgcggcgcgccgggacctggagcgggcgggtggatgcaggcgcgatggacggcggcacactgcccaggtccgcgccccctgcgccccccgtccctgtcggctgcgctgcccggcggagacccgcgtccccggaactgttgcgctgcagccggcggcggcgaccggccaccgcagagaccggaggcggcgcagcggccgtagcgcggcgcaatgagcgcgagcgcaaccgcgtgaagctggtgaacttgggcttccaggcgctgcggcagcacgtgccgcacggcggcgccagcaagaagctgagcaaggtggagacgctgcgctcagccgtggagtacatccgcgcgctgcagcgcctgctggccgagcacgacgccgtgcgcaacgcgctggcgggagggctgaggccgcaggccgtgcggccgtctgcgccccgcgggccgccagggaccaccccggtcgccgcctcgccctcccgcgcttcttcgtccccgggccgcgggggcagctcggagcccggctccccgcgttccgcctactcgtcggacgacagcggctgcgaaggcgcgctgagtcctgcggagcgcgagctactcgacttctccagctggttagggggctactgagcgccctcgacctatgagcctcagccccggaagccgagcgagcggccggcgcgctcatcgccggggagcccgccaggtggaccggcccgcgctccgcccccagcgagccggggacccacccaccaccccccgcaccgccgacgccgcctcgttcgtccggcccagcctgaccaatgccgcggtggaaacgggcttggagctggccccataagggctggcggcttcctccgacgccgcccctccccacagcttctcgactgcagtggggcggggggcaccaacacttggagatttttccggaggggagaggattttctaagggcacagagaatccattttctacacattaacttgagctgctggagggacactgctggcaaacggagacctatttttgtacaaagaacccttgacctggggcgtaataaagatgacctggacccctgc

SEQ ID NO: 46694 - DNA, 675 bp, Homo Sapiens
cccctgctcttcctccggggccgctggcactgcggccgctccgcaggcagagaagccgggagcgggcgaggcggcggcggcagcagcgatggcaggaatagagttggagcggtgccagcagcaggcgaacgaggtgacggaaattatgcgtaacaacttcggcaaggtcctggagcgtggtgtgaagctggccgaactgcagcagcgttcagaccaactcctggatatgagctcaaccttcaacaagactacacagaacctggcccagaagaagtgctgggagaacatccgttaccggatctgcgtggggctggtggtggttggtgtcctgctcatcatcctgattgtgctgctggtcgtctttctccctcagagcagtgacagcagtagtgccccacggacccaggatgcaggcattgcctcagggcctgggaactgacccagctggtcctgaaggagaagccaaatggctgcactggccgattctggtctccagaggaccttggtgtttgctctcccttgacccaccccagtgagtgccaaagggcagccccaacatgtgcacccctgcatttcctgtcatgccacagactggcccttgagggcagcctgctgtactggccatgctgggccagccccacctggagctcagtaaaaactgctgtttgattaaaa

SEQ ID NO: 46695 - DNA, 2625 bp, Homo Sapiens
gcattgatgttggccccagcctccaggagctgctgcaccatctctcggaaatcatcaatgcagcactgcaaaccgtgccacgcctcccgggagggctcctgtccacatggaaagatgcaggccagacactgccggctcctctttactctctgctccggagggaggcaggaaggagtctcaagggccaccacagtgcctcttcccccaagactccagagcaccagaagtggaacccacacagctggggctgcaagcgtggggcacaggtgaggagaagagagtcacaagcagagcctagggcaggcactgagagggggccacctgcatagctctgtgcctgcccagggcctggctctctcacccacagaggtggctggtcccaccctatttcacggaggtggagaccagggctctcctgagcagcctaacaagaagcagcaatgactaccggccacccctgctcccgtggggccccgcactaggtttttctgcaggctcctgggggtccactcatggcctcagctcacctcacagcaggagccctctgcatgcagcccccgcctgaaggacggctgtcccgcacaggctcacctcagggctgcccactgcttggggcttgcctgatgggggcaccctgggccacccagcctgaagagaccaggcaagatctgggggctggagcccaggagctgtggacaggcccagcccccagccttggcatgagacggcacccaggtagcagggagtgggccgtctgctgggagctgctctgggctcagccacactcaccttcttccaggtcatttcgggcagcggcctccagaaggacaacactgggagggaagaggacctgcttcaggagcccttggctggctgcctccttccggggacgctccccaggacccttcttgccctgggcctccttctcagcctgggcccacatcttcacctgctgggcgcgccgcttctgggcatgcttcagccgctcctgtgtgctcatcctgcccaccatgggcatctctgccagcagctccaggtgctcggccatggcggcggctgcttgcccacagggctgctcggggcaccagagtggggagcttgggggccaggctgggcctgaggggtggggcagctagctggactggcaccctcgggggcatccccttcccagagcttcgtgcccttggctgggtcaggaggccccacacaataaccaggcccaggcagccctggggggcatgggccggggcagggagggcagtgtgggagggcaccccaaacctgctccccaggccagcctctagctgtcgacaagcagcgcctcgcctccctctcggggtcagggtgcacaacctatgggaggcagccccgagacctggccggcctcagtgcagggtctgaaactaattacccagataacaaggttccagcttccgggcaccctgctgagggggaagggagggcagggccaaccagcagtgagagcccctgtgagcccctgagagtcctcttttcaccttctaggctcaggagcctgggtggggcctgggagcagccatgacccagcccccaacccctcccagctgtgtgccgaggtcagtgcatcagtactaacgaggaggtgcagccgctgaggctgggggagggcaggtagtcagagtcctggagtcctggccccagggcccaggggtgaggctctctaggcagccagggcaccaagggcacaggcgggccggccgcagtgtcttcaggagcacctcctcttccagcagctgctcacacctgagaagtggggaacaaggaagcatatcaaggccggcttgaggcagggtggcccgggggagcccctgccctgggcctcaggtgagaccaggcttccagctgtctcaggtcctgccctgtgtgaggcccaccctttgtccacagagagcactgcaggtcaacagtcctgggggtacggggagctactctgcccccattctgccccaggttcagagaggggcgggggaaaggcatgtcaggctcctcccacccaccctttccagaaagggccgcccaccccagcgaggcgttccctgctaggctgctcctccagggccaggcgctgccctaaggctgggcagggtgaggtctcgtggaacagccttgagggctttgcaggctactgccttccaagggcaggccccgcctcctgggcctccacctctcctgccttccaagggtaggccccgcctcctcctgtcctgactgataccccagcctctcactgcccagtctctagacctcttccttgatgggctcccacaatgcctctgccatcctaggctgcaataaaagcccccacctggtgcctggcttgaggcctatggggacagacaggcaggcagacagcttcggctggggcacaaccctgcctatgtacctgctatggccctagtcctgcccgacacactaagtgtggttgctgggctggccacaggcctcacctcagaaggcactctgtgcttggccaggcgcggtggctcaggcctgtaatcccagcactttgggaggccaaggcgggtggatcacgaggtcaggagatcgagaccatcctagctaacagggtgaaaccccatctctgct

SEQ ID NO: 46696 - DNA, 813 bp, Homo Sapiens
ctttctgatctgcctcccccagggaaagctgactttgatgtcactgggcctcatgcccctattctggctatggctgggggacacgtggagttacagtgccagctgttccccaatatcagtgccgaggacatggagctgaggtggtacaggtgccagccctccctagctgtgcacatgcatgagagagggatggacatggatggagagcaaaagtggcagtacagaggaaggaccaccttcatgagtgaccacgtggccaggggcaaggccatggtgaggagtcacagggtcaccacctttgacaacaggacatactgctgccgcttcaaggatggtgtaaagttcggcgaggccactgtgcaggtgcaggtggcagggctgggcagagagcccagaatccaggtgacagaccagcaggatggagtcagggcggagtgcacatcagcaggctgtttccccaagtcctgggtggaacggagagacttcaggggccaggctaggcctgctgtgaccaatctatcagcctcagccaccaccaggctctgggctgtggcatccagcttgacgctctgggacagggctgtggagggtctctcctgctccatctccagccccctcctccctgaaaggaggaaggtggctgagagccacctgcccgctaccttctccagaagctcccagttcacggcatggaaagcagctctgcctctgatccttgttgccatgggactcgtaatagctggaggcatctgcatcttctggaaacgtcaaagggaaaagaacaaagcatcactggaagaagagagggagtga

SEQ ID NO: 46697 - DNA, 648 bp, Homo Sapiens
atgaatgatcagggagagatttattcaaccctgagatttttgcagtctccttcagagtcacagaatagattaaggcctgatgatactcaaaggcctgggaaaactgatgacaaagaattttcagtgccctggcacctcattgcagtgactcttgggatcctctgtttacttcttctgatgatagtcacagtgttggtgacaaatatctttcagtgtattcaagaaaaacatcaacggcaggaaattctaagaaactgtagtgaaaagtacatcatgcaaaatgacaactacttaaaagagcagattttgacaaataagactttaaaatttgacgttctcaaaaatagctttcagcagaaaaaggaactggattcacgccttatacaaaagaacagatgtcatagagaaaatgagatcgtttttaaagttttgcaaaatacaggcaaattctctgaagaccacgggtcctgttgtggagtaaactgttattattttaccatgcagaagaaagactggaagggatgtaaacagacttgtcaacattgtagatcatcccttttgaagatagatgacaaagatgaactcgtattttacattcacttttattctcttggactctgtttctcaatgttggacctaagatattga

SEQ ID NO: 46698 - DNA, 858 bp, Homo Sapiens
atgtttgggctgttcggcctctggagaaccttcgacagtgtggtcttctacctgacgctgatcgtgggcctcgggggaccggtaggtaacgggctggtgctctggaacctcggcttccgcatcaagaagggccccttctccatctacctgctgcacctggccgccgccgacttcctgttcctctcctgccgtgtgggcttctccgtggctcaggctgccctgggcgcccaggacacactctacttcgtgctcaccttcctgtggttcgcggtggggctctggctgctggcggccttcagcgtggagcgctgcctctccgacctcttccccgcctgctaccagggctgccggcccagacacgcctcggccgtcctctgcgccctggtgtggaccccgaccctgccggccgtgccgctgcccgccaacgcctgcggcctgctgcgcaacagcgcgtgccccctggtctgcccgcgctaccacgtggccagcgtcacctggttcctggtgctggcccgcgtcgcctggacggctggcgtggtcctctttgtctgggtgacctgctgctccactcgcccgcggcccaggctctacggcatcgtcctgggcgcgctgctcctgctcttcttctgtggcctgccctcggtcttctactggagcctgcagcccctgctgaacttcctgctgcccgtgttttccccgctggccacgctgctggcctgcgtcaacagcagctccaagcccctcatctactcggggttgggccgacagcccgggaagcgggagccgctgaggtcggtactgcggagggccctgggggagggcgccgagctgggtgccaggggacagtccctgcccatg

SEQ ID NO: 46699 - DNA, 624 bp, Homo Sapiens
atgtgggaatgcagtcggagcatttgtcctttattttattggcttaagaatttcaaaggaaataaggaaagcaccatgatatgtgcgggacctaagcacatccagggtgaaaaggttagtgatgcagtggaaacatataatatctgttctgaagtccaggtggtcaacacagaaagatcacacctggtgccccaaactccccagaaacctctgattatccctagacctaccatcttcaaacctgacgtcacccaatccacctttgaaacaccaagcccttccccagggtttcagattcctggcgcagagcaagagtatgagcatgtttcatttcacaaaattattgccgggagtgtggctctctttctctcagtggccatgatcctcttggtgatctatgtgtcttggaaacgctacccagccagcatgaaacaactccagcaacactctcttatgaagaggcggcggaaaaaggccagagagtctgaaagacaaatgaattcccctttacaggagtattatgtggactacaagcctacaaactctgagaccatggatatatcggttaatggatctgggccctgcacatataccatctctggctccagggaatgtgaggtatga

SEQ ID NO: 46700 - DNA, 285 bp, Homo Sapiens
caggaatcattgaccttcaaggacgtgtttgtggacttcaccctggaggagtggcagcaactggactctgcccagaagaacctctacagggatgtcatgcttgagaactacagccacctggtgtccgtggggtatctagttgcgaagccagatgtgatcttcaggttgggaccaggtgaagagtcctggatggcagatggggggaccccggtacggacctgtgcaggtgaggacaggccagatgtatccatttttgcctcatgtattttgaagtgctgttattag

SEQ ID NO: 46701 - DNA, 1346 bp, Homo Sapiens
gacctgggcgggcggaggagtgtgacgggccttagggccgctgtggatggtttctaaaatgatcattgaaaacttcgaggcactcaagtcctggctcagcaagactctcgagcccatctgtgatgcagatccatccgccctagcaaaatatgttctggctttggtaaagaaagacaaaagtgaaaaagagttaaaggcattatgtattgatcagctggatgtatttcttcagaaagagacacagatatttgtggaaaaactttttgatgctgtgaatacaaagagttacctacctcctccagagcagccatcatcaggaagcctgaaggtagaattttttccacaccaagaaaaagatataaagaaggaagaggtaacgatttgtgttaataccttacaggttatttaaacacataagaggaataaccaaactgagtttttatcttctatatctttgtgttggagtcctcaggaccactcccagtttaaatgatttttctaggaggactcataggactctgcatataattgtgcttatggccctggcttatttcagcaaaaggatataaagcaaagtcagcaaatggaaaaggtgtatgaggccaagtccagtggaaaacaagcacaagcttacaaagtcctcagagttgcacaggatgtgcttaattcccctagcagtgaactgtaacaacacatgggaattaggcaagctccttagaaactctgccctgcgttcttatttggaactggtcacataggcaccgcctacctagtatgtaccaaaattccagactcctgggaggaaggcagatgttcagtgtagaccatattgtttcataactaattcaggcatagtgaaccattccttatcagggggtaatgggaaccctcgagaaatcaaagtgcccaggagccagccttacaagcatgctggctttctaaggttagtattgtcaggcctgcttttactctgcacaatatcttacagacatagagtcttaatatctgttctatgaaaataattaggttgacaattggtctgtttgcttttgtcatacatgtatttagtaggggactgtttttaaggtagtaaaacacaaggaccttcacaagacagtggatatgacttcatacttcaagaggtcccaaaatttttgtgtgtattttacaaccttctctcttcacccttagttactagtcatataataatttatatcttttcaatttgatgttaaaagattataatttggccagggtgagcgtggtggctcatgcctgtaatcccagcactctgggaggctgaggcaggaggctcacttgagcccaggagtttgagaccagtctgg

SEQ ID NO: 46702 - DNA, 585 bp, Homo Sapiens
actctgctagaatgtcagatctgttttaattactgcagccccgtgaaggccaagttgctggattgcaagcacacctgctgttcagtttgcctccagcagacgaggaccagccagaaggatgtgcgatgcccctggtgcagcggtgtcaccaagctgccccctgacttctccgtgtcgcagctcctcgacgaccccgaggtcctggctgtcatcaccattccacacgcttcggagcacatgccggtcttcatcagacttcccggcagtgggtgctacatgctgcccctgcccatctccaaggagcacgcgctgctgcccggagatatgagccgccacctgctgcccaggaaccggcagaagtccgtcactgtggtgaccatccctgctggacagcagcctctgcaaggcagggctccccagggggtggcggaggaggagcaggacaggcggggcatggtgaaaagctccatgtggttgagggtgtgcactgtcatcttggtggcttgcgtcttggtcttcctcctcagcatcgtgctccataacatgtcctgcatttctaagcgcttgactgtgacatcttgtggc

SEQ ID NO: 46703 - DNA, 2392 bp, Homo Sapiens
gaattgaattgcctggtggatccgggagcgggaaggcaccgcgaacggcagggaatcctggcctgcaccttagtgatctgaggcgtggtgtttctgctggatccggtttcatcgtgttgcgccgcccatcctgaatagttgtgatgttgttgcctggctgtgctgcaggttagcccacactaagcggtcccgggctgttgtgtgggcttgggcgtgtgaaaagagggagcagatttacggtgcggttgagaagtacggcgaccaaacggtaaagagggaggaacttgaagtctaaacaagcctgcgtctcctggttttctcaagtggcgtttcatctaagtagcggtctggcccagaccctgcttatcttcacgagatcagaggagaccggacgccttcggggtggtatggccttagacgccggtagtgcagcctgtctgccccaaaggcgcggctcagccacgcccgtccgactccatgcgccacctctaatccagtgccatggggatcttatcgggacccgggagccgctcgccggaggtctggctgggttgctctccgtgtctacgcccaagcaccgttgcccgccgccttgcgccttctgttggcctcttagagccttccgtgattgcttgcgcctaggccactcgctggacctccgcggcgccaccctgtttcctcgcgggagtgccagaggccttttcccctgcccaagctctgggatctccgggcagcctccattccgccgactctccaggccttccccggctccggagctccagagcttccatgactttgggccgctccggacttggtgtgctctgaggtgtcaacgcccagggcccacagtcctgggatcttctctggtcttttgccttgcggcggggggattgttttggatcccttgctgcccctcttgcaagaccctctcttgcttcacccacccagagccgtttctttaaaatttcaaccatgttctgaactgcagctttacagttgaatattttctttcagaataatttgattctgaactcggtttttcttgacatacctgaattgtttcatgtgagccggcaatttcacatgcttttactttttcttttttttaaaatttttatttttgagacagagtcacattataatctattacttctactagagatctgtttcttcctatttaatgaattattgcttttcatatagtctgaaatttgttttttctctctttctttctcttcctctctctctttctttctttctttctttctttctgacggattctcgctctgttggccaggctggagtgcagtgttcgatctcggctcaccgcaacctcctcttctgggttaaagccattctctcgcctcagcctcccgagtaccttgtactaaaggcgcgcaccaacctcgcctggctagtttttgtatttttagcagtgacatggtttctgcacgttggccagtcctgtctcaaactccagacctcgggtgatctgcctgcctcggcctcttaaaatactaggtttacaggtgtgagccactgtgcccaccagcttttactttttctaaaagccatgtattaccctgttcaaggtactagagtacctgtttacattcctctataatatggcaaacattactaattttgggcacacactcttcctttgtcttattgaattcaagtaccttttcgtcaggtttgacttccaggttctctaaatgtgctttctggaggctgaagcaatcatattgctggagatatttctttacctttttgataactggtctaagaaacaaagattttacattttatcaggataattatctgtggttcctgttgcttgtttttattaggtttttgattacttgacaaaacagcgcttaaaagggttaagggtttttaaaaaaattcatgtaactgtctgtatttcattttgaagtattttgattatcatcctggttaaataaatgactattaattcacagtgacatttgatgctgttttgataaagtgtttttaaccttttgatattttggcaagctttcccgggatcacatcctaaattgtcttttctttttttatcttgaattaacttgatgttccagagggccctgaaacttttcaaatgtttataaaagagacatattaaactaaatcaggctcatttgaagatgataaactgtatgaaaaacattgtcaaataagttacactagatcttctttcagttatattttatgggtgtgttattgatatgaatgttccaaaattgtgtaaaactcctagaaatctaagacgtcatcagttgtaattctgcttatgttgtttgacacaaaataaccagtttcttgtcaatttctggttataataaactttcatcagatttttaaccat

SEQ ID NO: 46704 - DNA, 1751 bp, Homo Sapiens
tgtctccctaacaggaagcaggctgtgagccaaggggaaggcagaggacagaaatgaatgtgtttccaggctttcctggtggtttatggcattctccaaactcctatgcaagggctattcctgaccaagaagatctaaagagaacgtctctgaaatcaagtccggatgaagaattaagagaaaaaaagtgaatatggtttttgctcacagaatggataacagcaagccacatttgattattcctacacttctggtgcccctccaaaaccgcagctgcactgaaacagccacacctctgccaagccaatacctgatggaattaagtgaggagcacagttggatgagcaaccaaacagaccttcactatgtgctgaaacccggggaagtggccacagccagcatcttctttgggattctgtggttgttttctatcttcggcaattccctggtttgtttggtcatccataggagtaggaggactcagtctaccaccaactactttgtggtctccatggcatgtgctgaccttctcatcagcgttgccagcacgcctttcgtcctgctccagttcaccactggaaggtggacgctgggtagtgcaacgtgcaaggttgtgcgatattttcaatatctcactccaggtgtccagatctacgttctcctctccatctgcatagaccggttctacaccatcgtctatcctctgagcttcaaggtgtccagagaaaaagccaagaaaatgattgcggcatcgtgggtctttgatgcaggctttgtgacccctgtgctctttttctatggctccaactgggacagtcattgtaactatttcctcccctcctcttgggaaggcactgcctacactgtcatccacttcttggtgggctttgtgattccatctgtcctcataattttattttaccaaaaggtcataaaatatatttggagaataggcacagatggccgaacggtgaggaggacaatgaacattgtccctcggacaaaagtgaaaactatcaagatgttcctcattttaaatctgttgtttttgctctcctggctgccttttcatgtagctcagctatggcacccccatgaacaagactataagaaaagttcccttgttttcacagctatcacatggatatcctttagttcttcagcctctaaacctactctgtattcaatttataatgccaattttcggagagggatgaaagagactttttgcatgtcctctatgaaatgttaccgaagcaatgcctatactatcacaacaagttcaaggatggccaaaaaaaactacgttggcatttcagaaatcccttccatggccaaaactattaccaaagactcgatctatgactcatttgacagagaagccaaggaaaaaaagcttgcttggcccattaactcaaatccaccaaatacttttgtctaagttctcattctttcaattgttatgcaccagagattaaaaagctttaactataaaaacagaagctatttacatatttgttttcactcaactttccaagggaaatgttttattttgtaaaatgcattcatttgtttactgtagtttttgtgggttttattttacttgctttttatgttttaggaaaagcgttcactttgaactttagccaacagtccttttactattaatatattagttacatgcataaaaaagaaaatgctttcttactatttactgttggttcaaaaacataaacctaagccatacacac

SEQ ID NO: 46705 - DNA, 948 bp, Homo Sapiens
atgtccataaccaaagcctggaacagctcatcagtgaccatgttcatcctcctgggattcacagaccatccagaactccaggccctcctctttgtgaccttcctgggcatctatcttaccaccctggcctggaacctggccctcatttttctgatcagaggtgacacccatctgcacacacccatgtacttcttcctaagcaacttatctttcattgacatctgctactcttctgctgtggctcccaatatgctcactgacttcttctgggagcagaagaccatatcatttgtgggctgtgctgctcagttttttttctttgtcggcatgggtctgtctgagtgcctcctcctgactgctatggcatacgaccgatatgcagccatctccagcccccttctctaccccactatcatgacccagggcctctgtacacgcatggtggttggggcatatgttggtggcttcctgagctccctgatccaggccagctccatatttaggcttcacttttgcggacccaacatcatcaaccacttcttctgcgacctcccaccagtcctggctctgtcttgctctgacaccttcctcagtcaagtggtgaatttcctcgtggtggtcactgtcggaggaacatcgttcctccaactccttatctcctatggttacatagtgtctgcggtcctgaagatcccttcagcagagggccgatggaaagcctgcaacacgtgtgcctcgcatctgatggtggtgactctgctgtttgggacagcccttttcgtgtacttgcgacccagctccagctacttgctaggcagggacaaggtggtgtctgttttctattcattggtgatccccatgctgaaccctctcatttacagtttgaggaacaaagagatcaaggatgccctgtggaaggtgttggaaaggaagaaagtgttttcttag

SEQ ID NO: 46706 - DNA, 1716 bp, Homo Sapiens
ggctgggcacggtggctcacgcctgtaatcccagcactttgggaggctgaggagggcggatcacaaggtcaggagatcgagaccatcctggctaacacggtgaaaccctgtctctacaatataaaaaaagttagcgtggtggcgggtgcctgtagtcccagctactggggaggcaggcaggagaatggcacctgggaggcggagcttgcagtgagtcgagattgcgtcactgcactccagcctgggcgacagtgtgagactttgtctcaaaaaaaaaaaaaaaaaaaaaaagatggctcacgcctgcagcactttgggaggccgagacgggcggatcacgaggtcaggagatcgagactatcctggttacacaaccctgtctctaccaaaaatacaaaaagccgggcgtggtggcgggagcctgtagtcccagctactccggaggctgaggcaggagaatggcgtgaacccaggaggcggagcttgcaggagatcacgccactgcactccagcctgggcgacagagcgagactccgtctcaaaacaaacaaacaaacaaaaacctacctcaggccaggtgcagtggctcacgcctgtaatcccaacactttgcgaggacgaggcggggggatcacgaggtcaagttatcgagaccatcctggccaacatggtgaaatcccatctctactaaaaatacaaaaattagctgggcgtggtggccgcacctctcagctacttgggaggctgaagcaggagaattgcttgaatccaggaggcggaggttgcagtgagctgagatcgcaccactgcactccaacctggatagagagagactctgtctcaaaaaaaaaaaaaatacttactttcttttttttttttttttttttgagacggagtcttgctctgtcacccaggctggagtgcagtggcacgatctcagctcactgcaacctctgtctcctgggttcaagcaattctcctgcctcagcctcccgagcagctgggactacagtcgcacaccaccacgcccggctaacttttgtatttttagtagagacggggtttcaccatattgcccatgctggtctcgaactcctgacctccacccgcctcggcctcccaaagtggtgggattacaggcgtgagccaccgcgcccagccagtactttcttattaactgaatatcgagtcttgctctgtcgcccaggctggagcgcagtgacgcaatcttggctcactgcaacctctgcctcccaggttcaagcaattctcctgcctcagcctcccaagtacggactacaggcgcacgccaccacacctggctttgtattgctagtaagacgaggtttcaccatgttggctaggaaggtctcgatctctagtgatccacccgccttagcctcccaaagtgcttggattacaggcgtgagccaccgcacccacaaaatgaaaattcttttttttttttttgaagagtctcgctctgttgcccaggctggagtgcagccagatggctcactgcaacctccgccttctggattcaagcgattctcctgcctcagcttcctgagtagctgggattacaggcatgcgccactacgtccagctaatttttgtatttttagtagagatggggtttcctgtgttccaggatggtctccatctcttgacctcgtgatccgcccacctcggcctcccaaagtgctgggattacag

SEQ ID NO: 46707 - DNA, 504 bp, Homo Sapiens
atggactccaataaatacattgagcatctgctgactcagcttgaggagcaacacaggagtctctggagggagaagttggcagtggcccgactacagcgagaagttgcccaaagaacaagtgagggggccatgcatgagaagctgatacatgaactggaagaggagagacacttacgtcttcaaagcgagaagcggttgcaggaggtgaccctagagtctgaacgcaacagaattcagatgcgtagcttgcagcagcagttctccaggatggaagaaacagtacgaaatctattgcagagtcaaggatctccagagcagaaaaaagaagaaactgttaatataatggtctatcaggaaaagctgtcagaggaagagagaaaacataaggaagctttggaagatcttcacatggtggttgatgaggattcgaggagtgaaagcagcagtacagatgagggaaaagaaaagaccaaattgctattagagagattgaaagctctagag

SEQ ID NO: 46708 - DNA, 414 bp, Homo Sapiens
gagatcgccgcgctcatcattgacaatggctctggcatgtgcaaagctggctttgctggggatggatggcccctgagctgtgttcccctccatcatcagccccggcaccagggtgtgatggtgggcatgggccagaaggactcctacatgggccatgaggcccagagcaagcacgacatcctgaccctgaagtaccctatcgagcatggcatcatcaccatctgggatgacatggagaagatctggcaccacaccttctacaacgagctgtgcatgaccccagagaagcacccggtgctgttggccgaggcccctaaccccaaggccaacagagaaaagatgactcagatcatgtttgagaccttcaacaccccagccatgtatgtggccatccaggccgtgttgtccctctaa

SEQ ID NO: 46709 - DNA, 2760 bp, Homo Sapiens
atggcctctgctactgcggcagcagcacgacggggcctcggccgggctctccctctcttctggcgtggctaccagaccgagcggggcgtttacggctaccggccgaggaagcccgagagccgcgagccccagggcgccctggagcgccccccagttgatcatggccttgccaggttggtgacagtatattgtgagcatggtcataaagctgccaaaatcaaccccctcttcaccggacaagccctgctggagaatgtgcctgaaatccaagccctggtgcagacactgcagggacccttccacacggcaggattattgaacatggggaaggaagaggcctcacttgaggaagtgttagtctatctcaatcaaatctactgtgggcagatttctattgaaacctcccaacttcagagccaggatgagaaagactggtttgccaagcggtttgaggaactgcaaaaggagacgtttaccacagaagagcgaaaacatctgtcgaaactaatgctggaatctcaggagtttgaccactttctggccaccaagttctcgacagtgaagcgatatggaggcgaaggggctgaaagcatgatgggctttttccacgagctgctgaaaatgtcggcctacagcgggatcactgatgtcattattgggatgccccatagagggaggctgaatttattgacaggccttctgcagttccctccagagctgatgttccgtaaaatgcgaggcttaagtgaatttccagagaatttctcagccactggagacgtcctgtctcacctgacctcctctgtggacctgtactttggggcgcaccatcccctccatgtgacaatgttgcccaatccctcgcacctggaggccgtcaaccccgtggccgtgggcaaaactcgcggcaggcagcagtctcgccaagacggcgattactctccagacaactcagcccagccgggggacagggtcatttgcttacaggtccatggtgatgcttctttctgtggtcaagggattgttcctgaaacattcacgctgtccaatctcccacatttcagaattggtgggagtgtgcatttgattgttaataaccagctgggttacaccactccagctgaaagaggaaggtcttctttatactgcagtgatattgggaagcttgtgggctgtgccatcatccatgtcaatggagacagcccagaggaagtggtccgtgccacacgactggcttttgaataccaacgccagttccgcaaggatgtgattattgatctgttgtgctacaggcagtggggccacaatgagctggatgagccattctacaccaaccccatcatgtacaaaatcatcagagctcgaaagagcattccagacacatatgcagagcacctcattgctggcggactcatgacgcaggaggaggtgtctgaaataaaatcctcctactatgccaagttgaatgatcacttaaataacatggcccactacaggccccctgccctgaacctgcaggcccactggcagggcctggctcagccagaagcgcaaatcaccacctggagtacaggtgtgcccctcgacctcctgcggtttgttggcatgaagtctgtagaggtgccaagagagctgcagatgcacagtcacctgctgaagacacatgttcagtccagaatggagaagatgatggacggaatcaagctagactgggccaccgcggaagctcttgccttgggttctttacttgctcaaggttttaatgttcgtctaagtggccaagatgttggtcgtggaactttcagtcagaggcatgcaatcgtggtttgccaggagacggatgacacctacatccccctgaaccatatggacccaaatcagaaggggtttctagaggtcagcaacagcccactgtcagaagaggccgtcctgggatttgaatatgggatgagcattgagagcccaaagttactgcccctgtgggaggcacagtttggcgatttcttcaatggtgcccagatcatctttgacacattcatctctggaggagaggccaagtggctcctacaaagcggcatcgtcatcctccttccacatggctacgatggggctgggccagaccactcatcctgtcgaatagagcgtttcctgcagatgtgtgacagtgcggaagagggggtggacggagacactgtgaacatgtttgtggttcacccaacaactcctgcacagtatttccacttgcttaggagacagatggtccggaacttcagaaaaccactcattgttgcttcccctaagatgttactcaggctcccggcagccgtgtcaactcttcaagaaatggcaccaggaacaacatttaacccggtcattggtgattcatctgtggatccaaaaaaggttaagaccctcgtgttctgctccggcaaacatttctactccctggtgaaacaaagagaatctctgggggccaagaagcatgactttgccatcatccgagtagaggaactctgccccttcccgttggattctttacagcaagagatgagcaaatacaaacatgttaaagatcatatttggagtcaggaggaacctcagaacatgggtccgtggtcgtttgtttctccaaggtttgaaaagcagctggcctgcaagctccgtctggtgggccggccccctttgccagtacccgctgtaggaattggcacagttcacttgcaccagcatgaagatatcctcgccaagaccttcgcttga

SEQ ID NO: 46710 - DNA, 447 bp, Homo Sapiens
atggctttgggagttccaatatcagtctatcttttattcaacgcaatgacagcactgaccgaagaggcagccgtgactgtaacacctccaatcacagcccagcaaggtaactggacagttaacaaaacagaagctgacaacatagaaggacccatagccttgaagttctcacacctttgcctggaagatcataacagttactgcatcaacggtgcttgtgcattccaccatgagctagagaaagccatctgcaggtgttttactggttatactggagaaaggtgtgagcacttgactttaacttcatatgctgtggattcttatgaaaaatacattgcaattgggattggtgttggattactattaagtggttttcttgttattttttactgctatataagaaagaggtgtctaaaattgaaatcgccttacaatgtctgttctgga

SEQ ID NO: 46711 - DNA, 408 bp, Homo Sapiens
atgcatggggagctggaagtggggagggagtgcgaagacgatcttcccctggagtttggccactggacggccaaactcctctcttaccacccgcagctgaactcctctcagcgttcaggtgttcctcatcttctcactttctctgccatgccgttctgctgtttgactgcttttctcttcatctcttcatctgctcctggagcctggggtttggggtttatatgggtacaggatacgggggtgtggtgggccaaagggcaactttttgggtacgaaaacagaaatgcctgttcccagttagggccatgggtctccaggcttgagggtggggcctttgctggggagccgccctcttctatgcagtatttccctgtctcttttctatatcaatacctcaataaaatttag

SEQ ID NO: 46712 - DNA, 444 bp, Homo Sapiens
atggggaagctgagtccggggccacaggtgcagccaggaggtgcaggtgagcagcgctcagaccagcctgtcagcctcagtcctgagcttacttctggtgatggagggagatatacagaaaagatcctgcagcctgcaggtgtggcacagctgatcttgggccaaggatgcacagctgtgtgtgtgcctggccaccggcaagggcacgtgggctcagaagcacaggtgtgcccacaccctgcgtgcctgtgtgtggcgcagcagctcccgacgcgcgcaggacacacacacagcacagacagaccctcccatggccacacggacaaagatggcttcactatagacaccggtgcagacaggatgtgcactgctttccaaggcctgtgcgcaacacagactcagggcctgtgggcatcagcaccgcccagacccaggcacacgtga

SEQ ID NO: 46713 - DNA, 1038 bp, Homo Sapiens
gcaaaagttgctggtctaattgaagcaaacggagaactcaaggtcttcatagaccagaaccttagtcccggaaaaggcgtgtccctcatagccgttcacccctccatcgtcagcccgctcgggaaacagctcttgccgaaaacctttggacagtccaatgtcaacgttgtcccgcaagtggtaaccggtacgcctcagagaccggcagcgtcaaacaccctcgtgataggtagcccacacaccgccagcactcactttgcctctcagaaccagccttccgactcctcaccttggtctgccgggaagtgcaacaggaaaggagagaagaatggcaaggcctgtggcatttctccaggaaggtctgacaaggtgcagtggaaagggaccacttcctatcacgaggtggcggacgagctggcagaggaattcagtgctgccggcaaccacatcttaccaaacgagtcagcttatgaccagagcaacatcgatcgcgtctactatgccttaaacgtgctgatggccatgaacatctccaaggaagaaggagatcaagtgagtctgcccaccaactcggctcaggaatgtcagaacttagaggtggaaagacagaggaaacttgacagaataaaacagaaatctcaatttcagaaacttattcgacagcaaattgccttcaagaacctggtgagaaaccagcacgcggagcagcaggccagccggccaacgacgcccagctggctcatccacctgcccttcatcatcgttaacaccagcaagaccgtcatcgactgcagcagcatctccaacgacaaattcgagtatctgtttaattttgacaacacatctgaaatctacaatgacatagaagtgctgaagcggatgagcatggcttgtgggctggagtccgggagctgctctgccgaagaccttaaaatggccagaagtctggtcccaaaggctctggagccgtacgtgacagaaatggctcagggaactggtggaggcgtgttcatcacgacggcacgttccatgtctaac

SEQ ID NO: 46714 - DNA, 918 bp, Homo Sapiens
gtgaacccagacactggctacatcaactatgaccagctggaggagaacacccgcctcttccacccgaagctgatcagtgcaggaaccagctgctcctccacctggactatgccccgctgcagaaaaactgcagatgagaatggggtgtatctcatggtggacatggcacatatcagcaggctggtggcagctggcgtggtgccctccccatttgaacactgccacaccactcacaagaacctgagaggctgccaagtccgcacgatcttctacaggaaaggagggcaaagtatggatcccaagactggcaaagagattctgtacaacctggagtctctcatcaactctgctgtgttccctggccttcagggaggtccccacaaccacaccattgctggggttgctgtggccctgaagcaagctatgactctggaatttgaagtttatcagcaccatgtggtggccaactgcagagctctgtctgaggcactgacggagctgggctaccaaacagtcacaggttgttctgataaacatttgatcctcgtggatctccattcaatcaaaggcacagatggcagaagggctgagaaggtcctagaagcctgttctattgcctgcaacaagaacacctgcccagatgatagaaacactctacggcccagtggactgcggctggggaacccagcactgacatctcttggacttttggaaaaaggcttccaaaaggtagcccactttatccacagagggatagagctaaccctgcagatccagagcaacgctggcatcagagccaccctgaaagagttcaaggagagactagcagggcataaataccaggggtgtgtgcaggctctccaggaggaggttgagagcttcactctcttccctctgcctggcctgcctgacttctaa

SEQ ID NO: 46715 - DNA, 1845 bp, Homo Sapiens
atgtccatgctgcccaccttcggcttcacgcaggagcaagtggcgtgcgtgtgcgaggtgctgcagcagggcggcaacatcgagcggctgggccgcttcctgtggtcgctgcccgcctgcgagcaccttcacaagaatgaaagcgtgctcaaggccaaggccgtggtggccttccaccgcggcaacttccgcgagctctacaagatcctggagagccaccagttctcgccgcacaaccacgccaagctgcagcagctgtggctcaaggcacactacatcgaggcggagaagctgcgcggccgacccctgggcgccgtgggcaaataccgcgtgcgccgcaaattcccgctgccgcgctccatctgggacggcgaggagaccagctactgcttcaaggaaaagagtcgcagcgtgctgcgcgagtggtacgcgcacaacccctacccttcaccccgcgagaagcgtgagctggcggagacgggcctcaccaccacacaggtcagcaactggttcaagaaccggcggcagcgcgaccgggcggccgaggccaaggaaagggagaacaacgagaactccaattctaacagccacaacccgctgaatggcagcggcaagtcggtgttaggcagctcggaggatgagaagactccatcggggacgccagaccactcatcatccagccccgcactgctcctcagcccgccgccccctgggctgccgtccctgcacagcctgggccaccctccgggccccagcgcagtgccagtgccggtgccaggcggaggtggagcggacccactgcaacaccaccatggcctgcaggactccatcctcaaccccatgtcagccaacctcgtggacctgggctcctagaacccatttgccttgatgagcttgccttttgtgacttgacactggggacgtggagtggcggtgtccaggggcgccccgcccctgcggccccaccaggtactgaaagacccgcaggctgagcgggtagaacagccgggtagggcagatagctgtctatgttggttcttgtttgggatttattttcaacaagttacttttaggatccttttggggctggagactgagtcttgaaccacagaagggaataaattatacaccactgtcattctctctctccctctgtctcttccttttaccctctcttgtcttgccttttccccctttcctcttcctttcccttccttctcttttcttttttctgctttctgtctttctccctctccttgtattgctttccttctagatttctagcttgccaccgttcattctctccttctgtctctccctttctctctccttctctgtttctcctctcttctctcctgccagtctcttgtactctgtgtcctggtccctccgtatgtacccctgtctttctcctcctgactggtggtctatctgcccctacctctggccctcgctttaccggagtagggggtgggagagggaagaggagagaaaatacagggactttgaacctaggccatctcctgaggccttttccctcgcccatgtgggtcagtgggagctgcaggtgtcagcttttcgtctagtaacttaagtgagagagaaagggcagcgccacagaagcccctaaacgccgcctcgtcatacgcccctcctccttctctcttggcgaggccccgccacaccgcgctcttcctcccgggactgtgactacagcgctcccggctgagcgcgccccccgagccgccgacttgccgtctccccgtaatgccctcatgtgaatgttcttcgggaaatatttctgcttttattttataataaaattagaaatcataaatatataaa

SEQ ID NO: 46716 - DNA, 282 bp, Homo Sapiens
atggaggattcgatgaacatggatatgagccccttgaggccccagacctatcttttcaattgtgaaccaaaggccgacaaagatgatcactttaaggtgaatgatgatgaaaataagcaccagttatctttaagaacggtcagtttaggggctggtgcgaaggatgaactgcacattgttgaagcagaagcaatgaattacaaaggtagtccaattaaagtaacactggcaactttgaaaatgtctgtgcaggcaacagtttcccttgggggctttgaaata

SEQ ID NO: 46717 - DNA, 2444 bp, Homo Sapiens
taatgcaggtaatctaaaaaggacggaggaacagcaaggtttggatgaagggtttgactctcttacagatcagagcactggagagactgatcctgatgatgtatctggagtgcagcctaaaggtcatattaatacgaagaaaaatcttacagctctcagtacttccaaagtagatcacaatgtcccaaggcatcgttgtatgttatgtaacaaggaatttttaggtggtcacattgtaaggcatgcccaggctcatcagaaaaaaggcagttttgcatgtgtaatatgtggtaggaaatttagaaacagaggacttatgcagaagcatttgaagaatcatgttaagaagatacagaggcagcaaattgctgcagctcaacaggatgatcaggaagtcactgctttggaagaaataaattgttctagttcttccatttcatttgaaaatgggaattctgatagtaaggatttggaagtggagacacttactgcttctagtgaaggaaacaaagaagtcatccctgagcatgtggctgaattcattgaaattcccataagtgtaccagaagatgttattgaaaatgttattgaaaatggcagtcctaataattctttaaataatgttttcaagcctttaactgaatgtggggatgattatgaggaggaagaggatgaagaaggtgattatgaagaagatgattatgacctgaatcaagaaacttcagtaattcataaaatcaatggaactgtgtgccatccaaaagacatatatgccacagatcaagaaggaaactttaagtgtcctgctcttggttgtgtccggatatttaaaagaattgggtttctaaataaacatgcaatgaccgtacatccaaccgatttaaatgtgcgacaaacagtaatgaagtggagcaaaggaaaatgcaaattttgtcaaaggcaatttgaagattctcaacattttatagaccaccttaatagacatagctatccaaatgtgtatttttgtttgcattttaattgcaacgagtcgtttaagctgccgttccagcttgcccagcacacaaaaagtcacaggatatttcaggctcagtgtagttttccagaatgccatgagctttttgaagatcttcctctgctgtatgaacatgaagctcaacactatttaagtaaaacaccagagtcatctgcacaaccaagtgaaacaattctttgggatgttcagacagactcaaatcctaatcaggaaaaagactcatctagtaatgagaaacaaactattagtctgccagtttctactagcaaatcaaggaaagagtctacagaaccaaagacatgtatagaaagtatggaaaagaaaacagacagtttagttcagaatggaaacgaacgttctgatgacactgtttcaaatataagcttgatagaccaaaagatgcctgacatagagccaaattctgaaaataattgtagtagtagtgatatagtcaatggacacagtgaaatagagcaaacacctttagtttcatcagatcctgctttgaaaattgatacaaacagaatcaggacagaaaatggttccattttgcccagtgttgtaccacaagaacacaacaccttgccagtatctcaggcaccttccaaaccaaatctgacaagtgaacatacttcatatggcttaattttaacaaaaccatacgtcagaccattgcctcccagttaccttgatgaacggtatcttagtatgccaaaacgcagaaaatttctgactgatagagtagatgcctgttctgatcaagataacgtgtataaaaaatcagtgaaaagattaagatgtggcaaatgcctgaccacctactgtaatgcagaagcacttgaggctcatcttgcacaaaagaaatgtcagacactctttggatttgattcagatgatgaaagtgcctgatgaaaacggttcagaaagatctgtcaatcaagcagtagtgtgaaaaaagcactataagaaaatgcatcatcagtttgctatttccctgatggccttaattttagagtggtcttggattactaaagataaagacaaagcacattttctagaatgaactcacagagatgtgctggcttagactccaaaaggattataaaactcccaaagtaccagttttccagaaaaccacattttacagtttatgatgattaatagcagcagcatgttcagtttcgcttatatgagaaacatgtttaggcaactagtcagaaaaccagctatggccttacagaaagggaaaaattaacccattattaaaaagtgtgtgtggggaggggggctggtttacaatattaaaccatttaaagtattttattctacaaatggggtttgttttcttgtcatgcataatcagattatgtcccctcccttctggttaaacatggtttaaggaaccgct

SEQ ID NO: 46718 - DNA, 783 bp, Homo Sapiens
gtgtctaagtcagagtctcctaaagaggctgaacagctgcagaagctctccatcaaagagttgggctttgaaacaaccgatgaatgtatgaggagccattttgagcaatggggaacgctcacggactgtgcggtagtgagggatccaaacaccaagcactccaggggctttgggtttgacacatatgccactgcggaagagggatgcagtcatgcatgcaaggcacacaaggtggatggaagaaacacggaaccaaagagagctgcctcaagagaagattctcaaagaccaggtgcccacttaactgtaaaaaagatacttgctggtggctttaaagaagacactgaagaacatcacctcagagattattttgaacagtatggggaaattgaagtgattgaaatcatgactgacagaagcagtggcaataaaaggggttttgcctttgtaacctttgatgaccatgactctgtggataagattgtcattcagaaataccatcctaatggctacaactttgaagtaagaaaagccctgtcaaagcaagagatggctagtgctttatccagccaaagaggtcaaagtggatctggaaacttctacaatgattttggcaattacaacaatcagtcttcaaattttggacgcataaagagaggaaactttggaggaagaaggtctggcccctgtggtggtagatgccaatactttgccaaagtacaaaaccaaggtggctatgccagttccagtagcagcagtagctatggcagtgtccgaggattt

SEQ ID NO: 46719 - DNA, 321 bp, Homo Sapiens
gtggtcaatgtacctaaaacccgaataaccttctgtaagaaatgtggcaagcatcaacctcacaaagtgacgcagtataagaagggcaaggattccttgtatgcccagggaaagaggcgctatgatcagaagcagagtggctatggtaggcagacaaagccaattttccagaagaaggctaagaccacaaagaagattgtgctaaggctggaatgtgttgaatctaactgcagattcaggaggatgctgaccattaagagatacaagcattttaaactgggaggagataagaagagaaagggacaagtgatccagttctaa

SEQ ID NO: 46720 - DNA, 498 bp, Homo Sapiens
atggctaaaggtgaccccaagaaaccaaagggcaagatgtctgcttatgtcttctttgtgcagacatgcagagaagaatgtaaaaagaaaaaccctgtcaattttgcagaattttccaagaagtgctctgaaaggtggaagacaatgtccgggaaagagaagtctaaatttgatgaaatggcaaagacggataaagtgcactgtgatcgggaaatgaagggaccagctaagggaggcaagaagaagaaggatcctagtgcccccaaaaggccaccatctggattcttcctgttctcttcggaaatccgccccaagatcaaatccacaaaccctggcatctctattggagatgtggcaaaaaagctgggtgagatgtggaataacttaaatgacagtgaaaagcagccttacatcactaagacggcaaagctgaaggagaagtacgagaaggatgttgctgattctaagtcgaaagggaagtttgatggctcaaagcgt

SEQ ID NO: 46721 - DNA, 668 bp, Homo Sapiens
cgtacgcagctgtctttgtctggggcggcggcagcgtggcaggagcgaggggcgccccgacccgtcccctctgccctccactacccctgccggctccagcccgtccgtgtctcaccgtctttatttaacaaagaacggagagactataaatgaccctgagcagagtggctgcgagcagggcccctggggcgtcccacgggcgtcatcctagccgcgtgagcgccgagcttgggcaccgggggggttggcgtgcttgtacacttgctccgttttctctgaaactgccgcgatgaatgtcagtccccagagccggaaccgttcccggttttctctacttggatctgagaactctgtccctccagccctgcgagcgctttgccagggtgacgggcggaaatgtccccgcatccgtgcctgctttcccagatgggaccctccagcagtcccctccactgcccgtgcttcctcctaaccacttccccccagcgaccgcggaaggcgcttcctcccccgcagcgcgagccccaagctcctccagagccccagctctccccgcccccttcccgaccttgtttcatatgacccctcccccgcacatactcaatttcgtcttcccaaggcgcccactctccacatcctgatgaaaaaaagagccggctgctgtccta

SEQ ID NO: 46722 - DNA, 2397 bp, Homo Sapiens
atgattgctaaagacaaagacacgcttgacttcattcggaacttgtgccagaagagacatgtttgtatccagtcatctctggcaaaagtatcctcaaaaaaggtaaatgagaaagatgttgataagtttctgctctaccagcatttttcctgcaacataagaaacattcaccatcatcagattctggcaattaaccgtggagaaaatttgaaggtactgacggttaaggtcaatatttctgatggagtgaaggatgaattctgtaggtggtgcatccaaaacaggtggagaccacgtagctttgcaaggccagagttaatgaagatcttatataattcactgaatgattcctttaaacgccttatttatcctcttctctgtagagaattcagagccaaactaacatcagatgcagagaaggaatcagtaatgatgtttggacggaaccttcgtcagctccttttaacaagccctgttccagggcgcaccttaatgggagtggatcctggttataaacatggttgcaaattagctataatttctcctactagtcagatacttcatactgatgtggtttacttgcattgtggacaaggcttccgagaggcggagaaaataaagacacttttgctgaatttcaactgcagcacagtagtgattggaaatggaactgcctgcagggaaacagaagcttactttgctgacctgataatgaagaattattttgcaccactggatgttgtttactgtatcgtcagtgaagcaggagcatcaatctacagtgtcagccctgaagctaacaaagagatgccagggctggaccctaatttgagaagtgcagtttccatagcaaggcgtgtacaagatccattagctgagctagtgaaaattgagccaaagcacattggagttggaatgtatcagcatgacgtatcccagactttactcaaggcaacactggacagtgttgtagaagaatgtgtcagctttgtgggagtggatattaacatctgttcagaagttttgttaaggcatattgcaggactcaatgccaacagggccaaaaatattattgaatggcgagagaaaaatggaccctttatcaaccgagaacagctgaagaaagtgaaagggctgggcccaaaatccttccaacagtgtgctggcttcatcagaatcaaccaggattatatccgaacgttttgcagtcagcaaactgaaacttcaggccaaattcaaggagttgctgtgacatcttcagcagacgttgaggtcacaaatgagaagcagggcaaaaagaagagcaaaactgcagtgaatgttttactgaagccaaatcctttggaccaaacttgtattcatccagaatcatatgacatagcaatgaggtttttgtcatccattggagggacactgtatgaggttggaaagcctgaaatgcaacaaaaaataaattcattccttgaaaaggaaggaatggagaaaattgcagaaagattgcaaacaacagtacacaccttacaggtcatcatagatggtctcagccagcctgaaagctttgactttcgaacagattttgataaacctgatttcaagagaagcatagtatgcctggaagatctgcagattgggacagttcttacaggcaaagttgagaatgccactctctttggaatttttgtggatataggagtggggaaatctgggctgattcccatacgaaatgtaacagaagcaaaactttcaaaaacaaagaagagaagaagccttggactgggccccggagaaagagtggaagtccaagtactcaacattgacatcccccgatctaggattactctggacctcattcgggtgttatgagtatcccacgaaggccagacgctgattttattttctcatttccacagattgacaaggataagtcagttgtttgtaaactctaggtagcagatgagaaataattcacttaatatcagaaatattttccaaacactttcctttattttttcttctgaataaatagaaaaccaacagtttgatttccttttcccttaaaggaaacaactaatacacattcttatatggctttatgtagtaatagttttctgactaaaattttgttttttattttttgtaatttatctttaactccttttgcattttgtataacagattgcttaacttctacttgccaacatctgccttgctggacttgtatgggattgtcttcttgatttgaattgtaccgtctttgttgacacagtagggctgggcagtgtttaatccttccattttatagatttttttttaatcaggccttttggacttcattcataattttgcaataatctcttttcccttgtcatgcaagccaaaaatataccagtaaaacag

SEQ ID NO: 46723 - DNA, 369 bp, Homo Sapiens
ctgactgaaaggcagactgcagaattcaaagaagctttttcactatttaacaaagatggtgatggaactataacaacagaatcaggaactgtaatgaggtctcttgggcagaatcccacagaagcagagttacaggacatgattaatgaagtagatgctgatggtaatggcacagttgacttccctgaatttctaacaatgatggcaagaaaaatgaaagacacagacagtgaagaagaaattagagatgcattctgtgtgtttgataaggatggcaatggctatattagtgcaacagaacttcaccatgtgatgacaaaccttggagagaatttaacagatgacgaggttgatgaaatgatcaggtaa

SEQ ID NO: 46724 - DNA, 7074 bp, Homo Sapiens
atggtccgcttcggggacgagctgggcggccgctatgggggccccggcggcggagagcgggcccggggcggcggggccggcggggcggggggcccgggtcccggggggctgcagcccggccagcgggtcctctacaagcaatcgatcgcgcagcgcgcgcggaccatggcgctgtacaaccccatcccggtcaagcagaactgcttcaccgtcaaccgctcgctcttcgtcttcagcgaggacaacgtcgtccgcaaatacgcgaagcgcatcaccgagtggccatatcctgccgggcggggccgggcggggccgggcggggaccgggtccttaactcacgcactccattcgagtatatgatcctggccaccatcatcgccaactgcatcgtgctggccctggagcagcacctccctgatggggacaaaacgcccatgtccgagcggctggacgacacggagccctatttcatcgggatcttttgcttcgaggcagggatcaaaatcatcgctctgggctttgtcttccacaagggctcttacctgcggaacggctggaacgtcatggacttcgtggtcgtcctcacagggatccttgccacggctggaactgacttcgacctgcgaacactgagggctgtgcgtgtgctgaggcccctgaagctggtgtctgggattccaagtttgcaggtggtgctcaagtccatcatgaaggccatggttccactcctgcagattgggctgcttctcttctttgccatcctcatgtttgccatcattggcctggagttctacatgggcaagttccacaaggcctgtttccccaacagcacagatgcggagcccgtgggtgacttcccctgtggcaaggaggccccagcccggctgtgcgagggcgacactgagtgccgggagtactggccaggacccaactttggcatcaccaactttgacaatatcctgtttgccatcttgacggtgttccagtgcatcaccatggagggctggactgacatcctctataatacaaacgatgcggccggcaacacctggaactggctctacttcatccctctcatcatcatcggctccttcttcatgctcaacctggtgctgggcgtgctctcgggggagtttgccaaggagcgagagagggtggagaaccgccgcgccttcctgaagctgcgccggcagcagcagatcgagcgagagctcaacgggtacctggagtggatcttcaaggcggaggaagtcatgctggccgaggaggacaggaatgcagaggagaagtcccctttggacgtgctgaagagagcggccaccaagaagagcagaaatgacctgatccacgcagaggagggagaggaccggtttgcagatctctgtgctgttggatcccccttcgcccgcgccagcctcaagagcgggaagacagagagctcgtcatacttccggaggaaggagaagatgttccggttttttatccggcgcatggtgaaggctcagagcttctactgggtggtgctgtgcgtggtggccctgaacacactgtgtgtggccatggtgcattacaaccagccgcggcggcttaccacgaccctgtattttgcagagtttgttttcctgggtctcttcctcacagagatgtccctgaagatgtatggcctggggcccagaagctacttccggtcctccttcaactgcttcgactttggggtcatcgtggggagcgtctttgaagtggtctgggcggccatcaagccgggaagctcctttgggatcagtgtgctgcgggccctccgcctgctgaggatcttcaaagtcacgaagtactggagctccctgcggaacctggtggtgtccctgctgaactccatgaagtccatcatcagcctgctcttcttgctcttcctgttcattgtggtcttcgccctgctggggatgcagctgtttgggggacagttcaacttccaggatgagactcccacaaccaacttcgacaccttccctgccgccatcctcactgtcttccagatcctgacgggagaggactggaatgcagtgatgtatcacgggatcgaatcgcaaggcggcgtcagcaaaggcatgttctcgtccttttacttcattgtcctgacactgttcggaaactacactctgctgaatgtctttctggccatcgctgtggacaacctggccaacgcccaagagctgaccaaggatgaagaggagatggaagaagcagccaatcagaagcttgctctgcaaaaggccaaagaagtggctgaagtcagccccatgtctgccgcgaacatctccatcgccgccaggcagcagaactcggccaaggcgcgctcggtgtgggagcagcgggccagccagctacggctgcagaacctgcgggccagctgcgaggcgctgtacagcgagatggaccccgaggagcggctgcgcttcgccactacgcgccacctgcggcccgacatgaagacgcacctggaccggccgctggtggtggagctgggccgcgacggcgcgcgggggcccgtgggaggcaaagcccgacctgaggctgcggaggcccccgagggcgtcgaccctccgcgcaggcaccaccggcaccgcgacaaggacaagacccccgcggcgggggaccaggaccgagcagaggccccgaaggcggagagcggggagcccggtgcccgggaggagcggccgcggccgcaccgcagccacagcaaggaggccgcggggcccccggaggcgcggagcgagcgcggccgaggcccaggccccgagggcggccggcggcaccaccggcgcggctccccggaggaggcggccgagcgggagccccgacgccaccgcgcgcaccggcaccaggatccgagcaaggagtgcgccggcgccaagggcgagcggcgcgcgcggcaccgcggcggcccccgagcggggccccgggaggcggagagcggggaggagccggcgcggcggcaccgggcccggcacaaggcgcagcctgctcacgaggctgtggagaaggagaccacggagaaggaggccacggagaaggaggctgagatagtggaagccgacaaggaaaaggagctccggaaccaccagccccgggagccacactgtgacctggagaccagtgggactgtgactgtgggtcccatgcacacactgcccagcacctgtctccagaaggtggaggaacagccagaggatgcagacaatcagcggaacgtcactcgcatgggcagtcagcccccagacccgaacactattgtacatatcccagtgatgctgacgggccctcttggggaagccacggtcgttcccagtggtaacgtggacctggaaagccaagcagaggggaagaaggaggtggaagcggatgacgtgatgaggagcggcccccggcctatcgtcccatacagctccatgttctgtttaagccccaccaacctgctccgccgcttctgccactacatcgtgaccatgaggtacttcgaggtggtcattctcgtggtcatcgccttgagcagcatcgccctggctgctgaggacccagtgcgcacagactcgcccaggaacaacgctctgaaatacctggattacattttcactggtgtctttacctttgagatggtgataaagatgatcgacttgggactgctgcttcaccctggagcctatttccgggacttgtggaacattctggacttcattgtggtcagtggcgccctggtggcgtttgctttctcaggatccaaagggaaagacatcaataccatcaagtctctgagagtccttcgtgtcctgcggcccctcaagaccatcaaacggctgcccaagctcaaggctgtgtttgactgtgtggtgaactccctgaagaatgtcctcaacatcttgattgtctacatgctcttcatgttcatatttgccgtcattgcggtgcagctcttcaaagggaagtttttctactgcacagatgaatccaaggagctggagagggactgcaggggtcagtatttggattatgagaaggaggaagtggaagctcagcccaggcagtggaagaaatacgactttcactacgacaatgtgctctgggctctgctgacgctgttcacagtgtccacgggagaaggctggcccatggtgctgaaacactccgtggatgccacctatgaggagcagggtccaagccctgggtaccgcatggagctgtccatcttctacgtggtctactttgtggtctttcccttcttcttcgtcaacatctttgtggctttgatcatcatcaccttccaggagcagggggacaaggtgatgtctgaatgcagcctggagaagaacgagagggcttgcattgacttcgccatcagcgccaaacccctgacacggtacatgccccaaaaccggcagtcgttccagtataagacgtggacatttgtggtctccccgccctttgaatacttcatcatggccatgatagccctcaacactgtggtgctgatgatgaagttctatgatgcaccctatgagtacgagctgatgctgaaatgcctgaacatcgtgttcacatccatgttctccatggaatgcgtgctgaagatcatcgcctttggggtgctgaactatttcagagatgcctggaatgtctttgactttgtcactgtgttgggaagtattactgatattttagtaacagagattgcgaacaatttcatcaacctcagcttcctccgcctctttcgagctgcgcggctgatcaagctgctccgccagggctacaccatccgcatcctgctgtggacctttgtccagtccttcaaggccctgccctacgtgtgtctgctcattgccatgctgttcttcatctacgccatcatcggcatgcaggtgtttgggaatattgccctggatgatgacaccagcatcaaccgccacaacaacttccggacgtttttgcaagccctgatgctgctgttcaggagcgccacgggggaggcctggcacgagatcatgctgtcctgcctgagcaaccaggcctgtgatgagcaggccaatgccaccgagtgtggaagtgactttgcctacttctacttcgtctccttcatcttcctgtgctcctttctgatgttgaacctctttgtggctgtgatcatggacaattttgagtacctcacgcgggactcttccatcctaggtcctcaccacttggatgagttcatccgggtctgggctgaatacgacccggctgcgtgtgggcgcatcagttacaatgacatgtttgagatgctgaaacacatgtccccgcctctggggctggggaagaaatgccctgctcgagttgcttacaagcgcctggttcgcatgaacatgcccatctccaacgaggacatgactgttcacttcacgtccacgctgatggccctcatccggacggcactggagatcaagctggccccagctgggacaaagcagcatcagtgtgacgcggagttgaggaaggagatttccgttgtgtgggccaatctgccccagaagactttggacttgctggtaccaccccataagcctgatgagatgacagtggggaaggtttatgcagctctgatgatattcgacttctacaagcagaacaaaaccaccagagaccagatgcagcaggctcctggaggcctctcccagatgggtcctgtgtccctgttccaccctctgaaggccaccctggagcagacacagccggctgtgctccgaggagcccgggttttccttcgacagaagagttccacctccctcagcaatggcggggccatacaaaaccaagagagtggcatcaaagagtctgtctcctggggcactcaaaggacccaggatgcaccccatgaggccaggccacccctggagcgtggccactccacagagatccctgtggggcggtcaggagcactggctgtggacgttcagatgcagagcataacccggaggggccctgatggggagccccagcctgggctggagagccagggtcgagcggcctccatgccccgccttgcggccgagactcagcccgtcacagatgccagccccatgaagcgctccatctccacgctggcccagcggccccgtgggactcatctttgcagcaccaccccggaccgcccaccccctagccaggcgtcgtcgcaccaccaccaccaccgctgccaccgccgcagggacaggaagcagaggtccctggagaaggggcccagcctgtctgccgatatggatggcgcaccaagcagtgctgtggggccggggctgcccccgggagaggggcctacaggctgccggcgggaacgagagcgccggcaggagcggggccggtcccaggagcggaggcagccctcatcctcctcctcggagaagcagcgcttctactcctgcgaccgctttgggggccgtgagcccccgaagcccaagccctccctcagcagccacccaacgtcgccaacagctggccaggagccgggaccccacccacagggcagtggttccgtgaatgggagccccttgctgtcaacatctggtgctagcacccccggccgcggtgggcggaggcagctcccccagacgcccctgactccccgccccagcatcacctacaagacggccaactcctcacccatccacttcgccggggctcagaccagcctccctgccttctccccaggccggctcagccgtgggctttccgaacacaacgccctgctgcagagagaccccctcagccagcccctggcccctggctctcgaattggctctgacccttacctggggcagcgtctggacagtgaggcctctgtccacgccctgcctgaggacactctcactttcgaggaggctgtggccaccaactcgggccgctcctccaggacttcctacgtgtcctccctgacctcccagtctcaccctctccgccgcgtgcccaacggttaccactgcaccctgggactcagctcgggtggccgagcacggcacagctaccaccaccctgaccaagaccactggtgctag

SEQ ID NO: 46725 - DNA, 2082 bp, Homo Sapiens
aatgaaccatttcttttccctgatgcaggcagagctgaaccgtttccaagatacaaagagactccttcaagattattactggggaatggaaagtaaaatcccagtagaggacaacaagagatttactcgaatccctttggtccaactggatagtaaagacaattctgaaagccagcttagaattcctctagttcctcgaatatccatttctctggaaacagttacacccaaaccaaaaacaaaatcagtactgaagggcaagatggataactccctagaaaacgttgagtccaactttgaggccgatgaaaagttggtcatggacacctggcagcaggcttctttagcagtatctcacatggtggctgctgaaattcatcagaggcttatggaagaagaaaaagaaaaccagccagcagaccccaaagaaaaatctcctcagatgggtgcaaataaaaaagtcaaaaaggagccacccaagaaaaaacaggaagacaaaaaacccaaaggtaaatcaccacctatggcagaagcaactcctgtcatagtaacaacagaggaaattgctgaaatcaaaaggaaaaatgaactgagggtcaaaataaaagaagaacaccttgctgccttgcaatttgaagaaatagccacgcaatttcgacttgaactgataaagacaaaagcattggctcttcttgaagatttagtaacaaaggtggttgatgtatataaactcatggaaaaatggcttggtgagaggtatttgaatgaaatggccagtacagaaaaattaactgacgtagctcgctatcacattgaaacatctacaaaaattcagaatgaactttatttaagccaagaagacttcttcattaatggcaatataaaagtcttcccagatcctcccccatcaatacgtcctccacctgtagaaaaggaagaagatggtaccctgaccattgaacagcttgacagtcttcgagatcagttcttagatatggcacctaaaggcataataggaaataaagcatttactgacattctgatcgatttggtgaccctgaaccttggcacaaacaactttcctagtaattggatgcaccttacccaacctgaattacaggaattaacatctttattaacagtcaactccgagttcgtggactggcggaagttcctgttagtaacctcaatgccttggcccattcccttggaggaggagctccttgagacccttcagaagttcaaggctgtggataaggagcagttgggcaccatcacttttgagcagtatatgcaggctggtctgtggtttacaggagatgaagatataaaaattccagaaaatcctcttgaaccccttccatttaataggcaggagcatcttatagagtttttctttaggctatttgctgactatgagaaggatccaccccagcttgactacacacagatgctgctttactttgcttgccacccagacaccgtggaaggagtctacagggccctcagtgtggctgttggaactcatgtcttccaacaagtcaaagcttccattccaagtgcagaaaagacctcctcaactgatgcaggtccagctgaggaatttcctgaacctgaggaaaatgctgcaagagaagaaaggaaattaaaagacgacacggagaaaagggaacagaaggatgaagaaatccctgaaaatgcaaacaatgaaaagatgtccatggaaacactactcaaagtgttcaaagggggaagtgaagcacaggactccaatagatttgccagccacctaaagatagagaacatttatgcagagggcttcataaaaacatttcaagacctaggtgccaagaacctggagccaattgaagtcgctgttctcttgaagcatccttttattcaagacctgatttcaaattattcagactataagtttcctgatattaaaataattctccaaaggagtgaacatgtacaaggaagtgatggagagagatcaccttcaagacatacagaggaaaagaaatgaagacaaaagagtgtgatttttttaattctgcaataaatcttccaaaaattaaa

SEQ ID NO: 46726 - DNA, 1083 bp, Homo Sapiens
ggcagcgatggcagcggcggcagctggactaaacaggtcacctgcaggtattttatgcatggggtttataaggaaggagataactgttgcaagttgcatgacctctctgacagtccgtataatgtagtgtacaagagtttgcagccagggtactgtatttatggagactgctgcagatatgaacatagcaagccattgaaacagaaagaagcaactgctacagagctaactacaaagtcatcccttgctgcttcctcaagtctctcatggatagtcggaccacttgttgaaatgaatacgggtgaagctgagtcaagaaattcaaactttgtaactgtaggagcaggttcagagggctgggtgaatgctgttgagtttgttcctgggcaaccctactgtggccgcactgcgccttcctgcactgaagcacccctgcagggctcagtgaccaaggaagaatcagagaaagagcaaactgccgtggaaacaaagaagcagctgtgcccctatgctgcagtgggagagtgccgatatcgggagaacttgtgtgtatatggagattcgtgtgacatgtgtggccaggtcctgcatctgatggatgctgcccagagatcacagcatataaaatcatgctttgaggcccatgagaaagacagggagctctcatttgctgtgcagcgcagcgaggaaatggtgtgtgagagctgcatggagatgatctatgagaaagccaaccccagacagcaccgcttcgggatcctctccaactgcaaccacacctactgtcttaagtgcattcgcaagtggaggagtgctaagcagtttgagagcaagatcataaagtcctgcccagaatgtcggatcacatctaactttgtcgttccaagtgagtactgtgtggaggagaaagaagagaagcagaaactcattctgaaatacaaggaggcaatgagcaacaaggcgtgcaggtattttgatgaaggacatgggagctgcccgtttggagggaacggtttttataagcatgtgtaccctgatggccgtagagaggagccacagagacagaaggtgggaacatcaagc

SEQ ID NO: 46727 - DNA, 456 bp, Homo Sapiens
gcggccgactcgcaagatggcgccgcagaaagacaggaagcccaagaggtcaacctggaggtttaatttggaccttactcatccagtagaagatggaatttttgattctggaaattttgagcaatttctacgggagaaggttaaagtcaatggcaaaactggaaatctcgggaatgttgttcacattgaacgcttcaagaataaaatcacagttgtttctgagaaacagttctctaaaaggtatttgaaataccttaccaagaaataccttaagaagaacaatcttcgtgattggcttcgagtggttgcatctgacaaggagacctacgaacttcgttacttccagattagtcaagatgaagatgaatcagagtcggaggactaggcaaaggctccccttacagggctttgcttattaataaaataaatgaagtatacatgagaaataccaagaaa

SEQ ID NO: 46728 - DNA, 981 bp, Homo Sapiens
atgtgtcccttgaccttgcaggtcactggcctaatgaatgtctctgagccaaattccagctttgcttttgtaaatgaatttatactccaaggtttctcttgtgagtggacaattcagatcttcctcttctcactctttactacaacatatgcactgactataacagggaatggagccattgcttttgtcctgtggtgtgaccggcgacttcacactcccatgtacatgttcctgggaaatttctcctttttagagatatggtatgtctcttctacagttcccaagatgttggtcaacttcctttcagagaaaaaaaacatctcctttgctggatgttttctccagttttatttcttcttctctttgggtacatcagaatgcttgcttttgactgtgatggcctttgatcagtaccttgctatctgccgtcccttgctctatcctaatatcatgactgggcatctctatgccaaactggtcatactgtgctgggtttgtggatttctgtggttcctgatccccattgttctcatctctcagatgcccttctgtggcccaaacattattgaccatgttgtgtgtgacccagggccacgatttgcattggattgtgtttctgccccaagaatccaactgttttgctacactctaagctcattagttatttttggtaacttcctctttattattggatcctatactcttgtcctgaaagctatgttgggtatgccttcaagcactgggagacataaggccttctctacctgtgggtctcatttggctgtggtatcactgtgctatagctctcttatggtcatgtatgtgagcccaggactcggacattctacagggatgcagaaaattgaaactttgttctatgctatggtgaccccactcttcaatccccttatctatagcctccagaataaggagataaaggcagccctgaggaaagttctggggagttccaacataatctaa

SEQ ID NO: 46729 - DNA, 777 bp, Homo Sapiens
ttctatgttcccattctccctttcactcagagtccttatgttgactgggggcggtggctcacaccagaaatctcggcactttgggaagccaaggcgggtgaatcacttgaggtcaggagttcaagaccagcccaacggcgaaactccgtctctactaaaaatataaaaattagtcccgtctctactaaaaatataaaaattagtcagacgtggctgtttggtggtgtgcatctggtcccaactactcgggacgctgaggcaggtgaattgcatccaggaggcagaggctgcaatgagctgagatcatgccactgcactccagcctgggtgacagagactgtctcaaaaaaaaaaaaaaaaaaaaaaaaaacaagggtcctttgcattaatgcatccacattattccatgtactcaccaggattttttgttataaacaaaaatacccactctggttaattaaaagattatcagtcaatttacaaaaacaacaggaagatttaacaaagaaaaaaaaacagaggaagcaacatccagaactcacagcacagaatactgtgcttaaaatgctgctgcaaggagtattaattaacttatacactgtgacacttaacaggccaggtgtggtggctcacgcctgtccagcactttgggaggctgaggcgggacacttgaacccaggacagcctgggcaacatggtgagaccccgtgtctacaaaaaataaaaaagccgggagtggtggcaagctcctatagttccagctacttgggagactga

SEQ ID NO: 46730 - DNA, 1421 bp, Homo Sapiens
acagaaagagatccagagcttgaaaagccagatcagtgccctacagaaaggctacagcaaggtgctgtgccagaccctgtcagagcggaactcagaaatcacatccctgaagaatgagggcgagaacttaaagagagacaacgctatcacatcagggatggtgtcatctttgcaaaaagacatattagcaaaggatgagcaagttcaacaactaaaggaagaggtcagtcacctaaaaagtcagaacaaggacaaggaccaccagctggaagcccttggctctagatgctcggtgctaaaggaagagttaaaacaggaagatgctcacagggagctcagggaagcccaggagaaagagttaaaactctgcaaaacccaaatccaagacatggagaaagaaatgaagaagcttagggcagagctgaggaagagttgtactgaacaaagcgtgatctctaggactctgagagaaaaaagcaaggttgaagagaagcttcaggaggattccagaaggaaattgcttcagctgcaagaaatggggaacagagagagcgtcattaaaatcaatttggagagggcagtaggtcagctggagcacttcagaagtcaagtcatcaaggccacctatggacgggcgaagccgttccgggacaagcccgtcaccgaccaacagttaatagagaaaattacccaggtcactgaggacaacatcaattttcagcagaaaaagtggaccctccagaaagagacccagctgagcaactccaagcaggaggagaccaccgagaacatcgagaagctgaggacgtcgctggacagctgccaggcttgcatgaaaatatcctgttgcagccatgacctgaagaaggaggtcgaccttcttcagcacctccaggtgagcccacctgtctcggggctccagaaggtggtgctggacgtcctgaggcacgcgctgtcctggctggaggaggtggagcagctcctccgggacctcgggatcctgccctccagccccaacaaagatcaagttcaacagttctcaggaaactcagcagtctttactgcaggaaaagctgcgggagcatctggcagagaaggagaagctgaacgaggagaggctagagcaagaggagaagctcaaagccaaaatcaggcaactgacggaagagaaggcggtaaggctttggaggagtacattactcaagagagaaacagagcgaaagagactttagaggaagaacggaagagaatgcaagaactggagagcctcctggcccagcagaagaaggctttggcgaaaagcattacccaggagaagaacagagtgaaggaagcattagaggaagagcagacaagagtccaagagctggaggaacgcttggcccgccagaaggaggttttggagagcagcatagcccatg

SEQ ID NO: 46731 - DNA, 345 bp, Homo Sapiens
atgagacttctcatcctggccctccttggcatctgctctctcactgcatacattgtggaaggtgtagggagtgaagtctcacataggaggacctgtgtgagcctcactacccagcgactgccagttagcagaatcaagacctacaccatcacggaaggctccttgagagcagtaatttttattaccaaacgtggcctaaaagtctgtgctgatccacaagccacgtgggtgagagacgtggtcaggagcatggacaggaaatccaacaccagaaataacatgatccagaccaagccaacaggaacccagcaatcgaccaatacagctgtgaccctgactggctag

SEQ ID NO: 46732 - DNA, 1781 bp, Homo Sapiens
gctgcgaccggcgctccccggggcaggtggctgcatagtcttggcggaggtgaccaaagccacgtaatgtccgtagttcgctcatccgtccatgccagatggattgtggggaaggtgattgggacaaaaatgcaaaagactgctaaagtgagagtgaccaggcttgttctggatccctatttattaaagtattttaataagcggaaaacctactttgctcacgatgcccttcagcagtgcacagttggggatattgtgcttctcagagctttacctgttccacgagcaaagcatgtgaaacatgaactggctgagatcgttttcaaagttggaaaagtcatagatccagtgacaggaaagccctgtgctggaactacctacctggagagtccgttgagttcggaaaccacccagctaagcaaaaatctggaagaactcaatatctcttcagcacagtgaagcgggagtggaagaaggatctaaagggaaaaactgacatgtttatgttatggaaaaagaaatttttctaagtttcatcacaaactgtgtccagtttctctgtggtgtttatgaaatagctaaaagcaaatgaagtaaagggcatactatggtttttcacaaaggtttatggtcgtgtttcaaattttcatcatttcagtgaacatacttccacgttacattaagtgtgcctagcagtctgttgcattttgtaagctcacagttttttgttttgagatggaatctcactctgtcacccaggctggagtgcagtggtgcaatcttggctcactgcaagctccgcctcccgggttcacgccgttctcctgcctcagcctcccgagtagctgggactacaggcgcctgccaccatgcccagctaatttttttttttttttttttggtatttttagtagagacggggtttcaccgtgttagccaggatggtcttgatctcctgacctcgtgatctgcctgccttggcctctcagagtgctgggattacaggcgtgagccactgtgcttagcaagctcactgttttagaaggttttatttttgtcttttgagacagggttttgctttgttgtgggggctggagtgcagtggtatgatcttggctcactgcagccttgacctccctggctctagcatctttccaccccagccttctgagtagctgggaacacaggagcgtaccactacacttggctgattttttgtaaattttgtagagacagggtctccctgtgttgcccaggttggtctcggactcctgggagcaatctgcccatcttggcctaacagtgctgggattacaggcctgagccactgtgcccagccggtttcctttatttcattcaaaggaattttgaatttatcttagaacctttattttgaaggaagaaagtcttttttttttttgagctggagtttcactcttgttgcccaggctggagtgcaatggcatgatctcagcccaccacgacctccgcctcccaggttcaagtgattctgcttcagcctcctgagtagctaggattacaggcatgtgccaccacgcccagctaattttgtatttttagtagggatggggtttctccatgtttgtcaggctagtcttgaactccggacctcaggtgatccgcccgcctgggcctctcaaagtgcttggattacaggcatgagccactgcatgtaatgaccagccactggtcagaattctttcaatcaagctgtgttaataagaatattgatgtgtggaaaataaaattttacaattctg

SEQ ID NO: 46733 - DNA, 219 bp, Homo Sapiens
gcctacaggagagccctgtggacactccagcctcagccttccttgccatccgcaaccacaccagtggctggaaagccagagtcccctggctcctgcactttttctgcacgggactccctcacagcctctggcccccgcctccctccaaggcagttgtcagagcaagatcagctccctggaagacacccgggttgtaaacagggtggggcaggggtcctg

SEQ ID NO: 46734 - DNA, 330 bp, Homo Sapiens
cagggcatagttggcagcctccctgaggtgctgcaggcacccgtgggaagctccattctggtgcagtgccactacaggctccaggatgtcaaagctcagaaggtgtggtgccggttcttgccggaggggtgccagcccctggtgtcctcagctgtggatcgcagagctccagcgggcaggcgtacgtttctcacagacctgggtgggggcctgctgcaggtggaaatggttaccctgcaggaagaggatgctggcgagtatggctgcatggtggatggggccagggggccccagattttgcacagagtctctctgaacatactgccccca

SEQ ID NO: 46735 - DNA, 840 bp, Homo Sapiens
atggagaagtacgagcggatccgagtggtggggagaggtgccttcgggattgtgcacctgtgcctgcgaaaggctgaccagaagctggtgatcatcaagcagattccagtggaacagatgaccaaggaagagcggcaggcagcccagaatgagtgccaggtcctcaagctgctcaaccaccccaatgtcattgagtactacgagaacttcctggaagacaaagcccttatgatcgccatggaatatgcaccaggcggcactctggctgagttcatccaaaagcgctgtaattccctgctggaggaggagaccatcctgcacttcttcgtgcagatcctgcttgcactgcatcatgtgcacacccacctcatcctgcaccgagacctcaagacccagaacatcctgcttgacaaacaccgcatggtcgtcaagatcggtgatttcggcatctccaagatccttagcagcaagagcaaggcctacacggtggtgggtaccccatgctatatctcccctgagctgtgtgagggcaagccctacaaccagaagagtgacatctgggccctgggctgtgtcctctacgagctggccagcctcaagagggctttcgaggctgcgaacttgccagcactggtgctgaagatcatgagtggcacctttgcacctatctctgaccggtacagccctgagcttcgccagctggtcctgagtctactcagcctggagcctgcccagcggccaccactcagccacatcatggcacagcccctctgcatccgtgccctcctcaacctccacaccgacgtgggcagtgtccgcatgcggaggcctgtgcaggga

SEQ ID NO: 46736 - DNA, 4608 bp, Homo Sapiens
gggtggacaagtcacctgtctaactgtggtgagagcaacaggcctccaaaggaaagaagttgtttccgagtttgtgactggcacagtgacctctttcagtgggaggtttctgactggcaccactgtgtgcttgttccttacgctcgcggtgaagtcaagcctcggactgcagagtgtgtgacggctcagcatggactgcagcaccggatggtgcgctgcattcagaagctgaaccgaactgtggttgcaaatgaaatatgcgaacactttgcccttcagcctcctacagaacaggcttgcctcattccttgtccccgggattgtgtagtatctgagttcttaccatggtccaactgtagcaagggatgtgggaagaaattgcagcatagaactcgcgcggtcatagctccccctctctttggtggtttgcaatgtccaaatctgactgagtcaagagcctgtgatgctcccatttcctgtcctcttggggaagaggaatatacatttagccttaaggttggaccatggagtaaatgcagactgcctcatcttaaagaaattaatccaagcggaagaactgttctggattttaactctgattcaaatgagcgagtcacctttaaacatcaaagttacaaagcacatcatcattcgaagtcttgggcaatagagataggttatcaaacccggcaggtttcgtgtacaagaagtgatggacaaaatgctatgttaagcctttgccttcaagattccttcccattgactgttcagtcctgcatcatgcccaaagactgtgaaacctcccagtggtcctcctggagcccctgctccaagacatgccgttcagggagtctcttgccaggatttaggagcaggagccggaacgtgaagcacatggctattggaggtggaaaggagtgtcctgaacttcttgagaaagaggcctgcattgttgaaggagaacttctgcagcaatgtcccaggtattcctggagaacttctgaatggaaagaatgccaagtctctctcctcctcgagcagcaggatccccactggcatgtgacgggacccgtgtgtggcggtgggatccagacccgggaggtgtactgtgcccagagcgtaccagcagctgccgcactgagggccaaggaagtctctagacctgtggaaaaggcattatgtgtgggacccgccccgttgccctctcagctctgcaatatcccttgctctacggactgcatagtatcttcctggtcagcctggggcctgtgcatccatgaaaactgtcatgatcctcaggggaaaaaaggatttagaacgaggcagcgccatgtcctcatggaatctacagggcctgcagggcattgccctcatttggtggagtctgttccttgtgaggatccaatgtgctaccgatggctggcatcagaagggatctgtttccctgatcatggaaaatgtggcctgggacatcgtattctgaaggccgtctgccagaatgaccgcggagaagatgtatcagggagtctttgcccagttccccctcctcctgagaggaagtcttgtgaaattccctgccgaatggactgtgtgctgagcgagtggacggagtggtcatcctgttcccagtcctgttcaaataaaaactcagatgggaaacagaccaggtcaagaactatcctggcactggctggggaaggtggaaagccatgtccccctagtcaggctctccaagagcatcgtttgtgtaatgaccattcctgtatgcagcttcactgggagacatcgccttggggcccttgttctgaggacacattggtaactgcccttaatgcaaccattggctggaatggagaagccacgtgtggtgtaggcattcagactcggagagtcttctgtgtcaagagtcacgtgggacaagtaatgaccaaaagatgtccagattctactcgacctgaaactgtgcgcccctgttttctcccatgcaaaaaagactgtattgtgactgctttcagtgagtggacaccctgcccaaggatgtgccaagcaggaaatgccacagtaaaacagtctcgatacagaatcatcatccaagaagcagccaatggaggccaggaatgcccagataccttatatgaggagagagagtgtgaagatgtttccttgtgtcctgtatatcggcagtggaagccacagaaatggagcccttgcatcttagtgccagagtctgtctggcagggaataacgggcagcagtgaagcctgtggaaaggggttacaaacaagagctgtctcatgcatctctgatgacaaccggtcagcagaaatgatggaatgcctcaagcagacaaacggcatgcctctccttgtgcaagaatgcacagtcccatgtcgagaagactgcaccttcactgcttggtccaagtttacgccctgctccacgaactgtgaagccacaaaaagtaggcggcgacagctcacagggaaaagcagaaagaaggagaaatgccaggattctgacctttaccctctagtggagacagaactatgtccttgtgatgaatttatatcccaaccttatggaaactggtcagattgcattcttccagaaggcagaagggagcctcaccgaggactgcgggtacaagcagacagcaaagaatgtggagaaggcctgcgctttcgagcagtagcctgttctgataaaaatggaagacctgttgacccctccttctgcagcagctctggttacattcaagaaaaatgtgtcattccctgcccatttgattgcaagttaagcgattggtctagttgggggtcttgcagttcatcttgtggaattggagtgagaattcgatccaaatggctaaaagaaaaaccttacaatggaggacgaccatgtcccaaactggatctcaagaatcaggtacatgaggcagtcccatgttacagtgagtgcaatcagtattcctgggttgtagaacactggtcttcatgcaaaatcaacaatgagctgaggtccctgcgctgtggaggaggaacacaatctaggaaaatcagatgtgtgaatactgcggatggtgaaggtggagcagtggatagcaacctgtgcaaccaggatgaaattcccccagaaacccagtcctgttctcttatgtgtcccaatgagtgtgtcatgtctgagtggggactttggagcaaatgcccacagtcatgcgatccccacacaatgcagagaagaactcgccacctgctaagaccatcactgaactcaaggacttgtgctgaagactcacaggtgcagccttgcctcctgaatgaaaattgcttccagttccagtacaatctaacagagtggagcacatgccagctgagtgaaaacgcaccctgtggtcaaggcgtcaggacccgcctgctaagctgtgtgtgcagtgatggcaagccagtcagcatggaccaatgtgagcagcataatttggagaagccccagagaatgagcattccctgcttggtggaatgcgtggtcaactgtcagctctcagggtggacggcttggacagagtgttcacagacctgtggccatggaggtcgaatgagccggactcgatttatcattatgccaacccaaggagaaggacggccatgccccacagagcttacccaggagaaaacctgcccagtgaccccctgctacagctgggtccttggcaactggtctgcatgtaaattggagggtggagactgtggggaaggagttcagatccgcagcctttcctgcatggtccacagtggttcaatatctcatgcagctggacgtgtcgaggatgcactgtgtggagaaatgccctttcaggacagcatcctgaagcagctgtgttctgtgccttgcccaggagactgccatttaacagaatggtcagagtggagcacatgtgaattaacctgcattgatggaagaagctttgagactgtgggccgccagtctagatcaaggacttttataattcagtcttttgagaaccaagacagctgcccccaacaggttctagaaacacgcccttgtacaggaggcaaatgttatcactacacatggaaagcaagtctttggaacaataacgaacgaactgtatggtgccagcgttcagatggcgttaatgtcacaggaggctgctcccctcaggcccgtcctgctgccattcggcagtgcattccagcctgcagaaaacctttctcctactgtacacagggtggagtctgtggttgtgagaagggctatacagagataatgaaatcaaatggtttcctggattactgcatgaaagtaccaggctcagaggataaaaaagctgatgtgaaaaacctttctgggaaaaacagacctgtgaattcaaaaatacatgatatttttaaaggatggtctcttcaaccacttgatccagatggccgagtaaaaatttgggtttatggcgtttcaggtggcgcttttctcatcatgattttcctaatatttacttcctaccttgtttgcaagaagccaaaaccacatcaaagcacacctccccaacagaagcctctgaccttagcctacgatggagacttagacatgtaa

SEQ ID NO: 46737 - DNA, 132 bp, Homo Sapiens
tgcccccctgcccccctgcctggccctgcatatccttcactgctgtgggagccaagctgggacctgcccaggcctctcagtcactgggaacctccaaggatgccacaaagctgtttgctgctggctcttgag

SEQ ID NO: 46738 - DNA, 654 bp, Homo Sapiens
atgacacttctgcctaggctcgcgctgcgggaggaagcagccaggcgaggtcccctccgtgccccggtgcagcctggcctgggagagaggagcccccagcgacaccgagagccaaaacagggcagagtttctcagaggtggcacccggccagggagcccctcgcggctacagggtttctccacggactcggccatctggggagagcagcccagagccctcgagcctcctgctgtattctgtggcctgggacttggggggacccattgaggacactgggacgcagccaaagggaggtgcagacagtgtgtactggcgtttccggggaccaagcccagaaggagcaggacggccacctcctggcctggaggaaaatcctgcttcctggcaagaaaaccacccctagaggaataggactggggtgcaggacgctttctcaggcaaccgcccctttccttctccaaaactggggcaggaaaagagcattcaggccaggcagcgaaaaccccagctctggtacctcccgccccagcagaggccgcctggaggcacggagttccggcctggatgaggcctgggaagcccagcgactcacaggccacggccgcttcccctctccgaggaaggaaaagtccctgcagcgcggcctcggctaa

SEQ ID NO: 46739 - DNA, 306 bp, Homo Sapiens
agacattcaaacttcttaatagaccaggcgtggtggctcacgcctggaatcccagcactttgggaggctgaggctttcctcattggccgtcatgccttggatcattaaggacactttggaacggagctttgctattctctgaagatacacaaaatcctccactgctcacgtcataatctatttaccaactgtggaaaattccgcggtgcctgtggtttttaaagtgatgctgaagcgagcacctttgtgcatatgtcttgatccacgcctgattttaaaatttcagataaaatcctagaagtgaaa

SEQ ID NO: 46740 - DNA, 249 bp, Homo Sapiens
atgagattaaggtttaataatgatagaatgaagaccataataaaagagaccctacttacctcagcaattcttacctttcttacctatttgatgaagatgtcttttgaaaggtgtactgcaaggaacaaaatgtttgtaaattctgcttttaccaaggaggtggataattactgtacctcatggaaaaagttttatttaaagtgttatttctcgttgaatactatcaaaaaggaaaaaaaaatgacctaa

SEQ ID NO: 46741 - DNA, 708 bp, Homo Sapiens
atggtcacagggaaccctcagatgacctggtgcctgccattctggacaccacccatcagtcaggatgacatcactgtacatgacaacatcaagtatatcattgacgtgaatggctcccatggtgcattttattataagaacagcatgggcaagagcaccccactcttttatatctatgactcatacctgacatcccttgaggcctggacccacctcctgacaccaaacagcccccactatggggtcttcatagcactattggtggaagagggccacacctacgatgtcctggccgcagggtttgaaggcatgtccacctactttgtctccaatggattctcctggggctcctcccatcagaagtggaaagctgtgaagaacttttatgatgccaacaacctcatgttcattcccagcatggggcctggctgcatagacactagcatccggccctggaacgaccacaatagggagaagagggtcaatggcaaggactatgacagggccttgcaggcggccgcgatggtgacgcccaagatcagctccatcacctccttcaatgagtggcccgagggcacccagatggagaagaccactcccaagaagacaccccgcctgtatttggactacctgcctcctcagcacagcctgtacttggagctgacccgctgctgggagcacttcatcaaagagaaggtgcagtggctc

SEQ ID NO: 46742 - DNA, 522 bp, Homo Sapiens
atggaggctccgggaccccgcgccttgcggactgcgctctgtggcggctgttgctgcctcctcctatgtgcccagctggctgtggctggtaaaggagctcgaggctttgggaggggagccctgatccgcctgaatatctggccggcggtccaaggggcctgcaaacagctggaggtctgtgagcactgcgtggagggagacagagcgcgcaatctctccagctgcatgtgggagcagtgccggccagaggagccaggacactgtgtggcccaatctgaggtggtcaaggaaggttgctccatctacaaccgctcagaggcatgtccagctgctcaccaccaccccacctatgaaccgaagacagtcacaacagggagccccccagtccctgaggcccacagccctggatttgacggggccagctttatcggaggtgtcgtgctggtgttgagcctacaggcggtggctttctttgtgctgcacttcctcaaggccaaggacagcacctaccagacgctgtga

SEQ ID NO: 46743 - DNA, 873 bp, Homo Sapiens
tggccacgtccgcacccgggggagggggccgcggcggcaggccgggggccggcgccgcctgctcgagccggggagccctcggggctgcggttgcaggaaccttccctctacaccatcaaggctgttttcatcctagataatgacgggcgccggctgctggccaagtattatgatgacacattcccctccatgaaggagcagatggttttcgagaaaaatgtcttcaacaagaccagccggactgagagtgagattgcattttttgggggtatgaccatcgtctacaagaacagcattgacctcttcctatacgtggtgggctcatcctacgagaatgagctgatgctcatgtctgttctcacctgcctgtttgagtctctgaaccacatgttaaggaagaacgtggagaagcgctggttgctggagaacatggacggagccttcttggtgctggacgagattgtggatggcggtgtgattctggagagtgacccccagcaagtgatccagaaggtgaattttagggcagatgatggcggcttgactgaacagagtgtggcccaggttcttcagtctgccaaggaacaaattaaatggtcgttattgaaatgaaggctgtggattcaaggctccctgccccccagatcatttccccaatcctggcaaaagcccaaagatcccagggtcaggagagacccctctgtatccccaggtccctcccagaactgactcctaaggtctccagccagggcttctgagatgcaaaggtttggcctcaggagagtcaccttttctcacggccctggccttaactcatatcttaggcattcctggccccagggccctaataaacctgcttttgtcttctgccaa

SEQ ID NO: 46744 - DNA, 945 bp, Homo Sapiens
atgttgatgaattactctagtgccactgaattttatctccttggcttccctggctctgaagaactacatcatatcctttttgctatattcttctttttctacttggtgacattaatgggaaacacagtcatcatcatgattgtctgtgtggataaacgtctgcagtcccccatgtatttcttcctcggccacctctctgccctggagatcctggtcacaaccataatcgtccccgtgatgctttggggattgctgctccctgggatgcagacaatatatttgtctgcctgtgttgtccagctcttcttgtaccttgctgtggggacaacagagttcgcattacttggagcaatggctgtggaccgttatgtggctgtctgtaaccctctgaggtacaacatcattatgaacagacacacctgcaactttgtggttcttgtgtcatgggtgtttgggtttctttttcaaatctggccggtctatgtcatgtttcagcttacttactgcaaatcaaatgtggtgaacaattttttttgtgaccgagggcaattgctcaaactatcctgcaataatactcttttcacggagtttatcctcttcttaatggctgtttttgttctctttggttctttgatccctacaattgtctccaacgcctacatcatctccaccattctcaagatcccgtcatcctctggccggaggaaatccttctccacttgtgcctcccacttcacctgtgttgtgattggctacggcagctgcttgtttctctacgtgaaacccaagcaaacgcaggcagctgattacaattgggtagtttccctgatggtttcagtagtaactcctttcctcaatcctttcatcttcaccctccggaatgataaagtcatagaggcccttcgggatggggtgaaacgctgctgtcaactattcaggaattag

SEQ ID NO: 46745 - DNA, 906 bp, Homo Sapiens
atggatgttggtttttctcgtactactgttcagacactgtcaagaagccactgcaaaaacatcaaacaaaaaatttctcaatgggaaggaagggctaatggtatatctaatccagaaaagtggtgtccaaaggactttggagtgagatataactgtcaccaagagatccgtcttaagaaaaatcctatagctgagagaaagagcaaaaacttggatgtaaccagccgtgaaaatgtgggtctagatataaatgaaaataccaaaagccatgatcaaagtgagaatgaaaataagaaacatgaatatgacgatacacacttctttaaaaatgaatcagaatccaactgggtatgttctcgggtcaaagaaattgaaagctgtaaagaagatgtcttagatccagagacttcattacctccaggaaacttctatacctcacaaatactgtggaagaaaatagaagcacttcccccagataaactcttaaatttggctttagaacattgtgactcttcagaaaaagaactgaacttcagagttctggatagttcatacggaataaccaagagcttagaaaatatttactctgaacctgaggggcaagaatgtggaccttccataaatcctttgccaaaacctcgtaggacattcagatatttatccgaatctggtgttacgccgtataaagaaagaaactgtgacaaaaaatactgtgaaaataactcttgtgcacaatcttctttggcctcttctcaggaacctgaaccaaagaaatatggtggaaaaatcagaggaagatctaaaaggtatgtttttatcctacagataaagacttgtaggtattttccttacaggattattgagcttctttttccttttcaaaccagtttccatttcccagcttag

SEQ ID NO: 46746 - DNA, 567 bp, Homo Sapiens
atggccttgacctttgctttactggtggccctcctggtgctcagctgcaagtcaagctgctctgtgggctgtgatctgcctcaaacccacagcctgggtagcaggaggaccttgatgctcctggcacagatgaggagaatctctcttttctcctgcttgaaggacagacatgactttggatttccccaggaggagtttggcaaccagttccaaaaggctgaaaccatccctgtcctccatgagatgatccagcagatcttcaatctcttcagcacaaaggactcatctgctgcttgggatgagaccctcctagacaaattctacactgaactctaccagcagctgaatgacctggaagcctgtgtgatacagggggtgggggtgacagagactcccctgatgaaggaggactccattctggctgtgaggaaatacttccaaagaatcactctctatctgaaagagaagaaatacagcccttgtgcctgggaggttgtcagagcagaaatcatgagatctttttctttgtcaacaaacttgcaagaaagtttaagaagtaaggaatga

SEQ ID NO: 46747 - DNA, 402 bp, Homo Sapiens
aagaagaaactgatggtcttcttttcatcctgtaggtccataaaataccactatgagttgcggaactacattgacttgcctacctcagccattcatttccagaagcaaaatcgtgtagaattacattttttccagttctgtaatgcagattcagggatattgtgtacagatgaggcagggagagagctagatattcctggctggattgttcagtattatcctccagatgaccctaaggaatatgttcatcgtcgggggacaatagccagggacctaaacgaaagagggcatgccttgctcagtttttgcccagaagaattgggttttgtttgttacctgaagcaacccaaggttccattaagtgaatttgacttttcctggcctaaaatttctgacattcag

SEQ ID NO: 46748 - DNA, 1023 bp, Homo Sapiens
atgcttaatgtttttgttgcactgacaaaagggcagtatccagtatttaatcaatatccaaagtttattgtggactatcaaacacaggaacgagaaagaataaggaatgatgaattggattacttaagagagaggcagacagttgaagatatgcaagctaaagtcgaccagcaaagagttgaagatgaagcttggtaccagaaacaggagctgcttcgtaaagctgaagaaacaagaagagaaatgctcttacaagaggaggagaaaatgatacaacaaagacagaggctagctgctgtgaaaagagagctgaaagtaaaggaaatgcacttacaagatgctgcaagaaggcgttttctgaagcttcagcaagatcaacaggaaatggaactaagaagactggatgatgaaattgggagaaaggtatatatgagagatcgagaaattgctgccacagccagagacctagaaatgagacagctggaactcgaatcacaaaagagactttatgagaagaatcttactgaaaatcaagaagctcttgcaaaagaaatgcgagcagatgcagatgcctatagacgaaaagtggatcttgaagaacacatgtttcataagctgatagaagcaggtgaaacccagagccagaaaactcagaagtggaaggaagctgaaggaaaagagttccgtttgagatcagcaaagaaagcttctgctctttcagatgcgtctagaaagtggtttttaaagcaagagataaatgcggctgtagaacatgctgaaaatccatgtcataaagaagaacccaggttccaaaatgaacaggactcaagctgtttgcctagaacctcacaattaaatgactcttctgaaatggatccctcaacacagatttctttaaatagaagagcagtagaatgggacaccacgggacagaatcttattaagaaagtgagaaatcttcgccagagactcactgcccgggctcgtcacagatgtcaaacccctcatcttttggctgcatag

SEQ ID NO: 46749 - DNA, 1646 bp, Homo Sapiens
aaagaaaaaccacactgcatctacaatgcttgtggaaacgcaagctttgcagcagctccaggatgagcgccagcctgctgggaagggtcctccatgctgtgtacacttcacaggtaaacagggcacagtggggacacctgtcctccccccagtctcacgggggcagcagcggagcccacgtgagaaccagagctgtggaggccccggctgctgcgagactgcaatgtcagcttgtggctggaacatggctttctgggctgactcctgggggtactcagggcctccctgagtgtccagcaggacacaaagagggaaggccacgcccacatcctgggacaggactgcgccaaacccccaggtgcactaaaggccaagggccacgcagaggaaggaggaggaggtccgcctcagccaggccagcttcctcccagtcccagcaggagctcgatgctacgcagccctggcgggcagcccccctcccagtcccgcagcggctcggcccttcacggctctgcctgtgcaccctacgtgcaggtagaaccagggaaaatgcctgctgacctggtggcctccaggccacacatggatcccagagtgagcctgggcccgggctcccgctcacctcgcacccgggcctcgctggaaaactccttgcagtcggatttcaggtggatgatgatttttgtcccggttctaactcccgaagcttcggcgatttcaaacactccagaactaaggcaggcaaagaaaggaaaagccaggtggatgtgacactgggacataccctgcatgggactccagcggttcccgagggtttcataggcagagcccaaacaacacacaacacacctcaaatgccccatttctgaccccagcgcaccactcaggccatcacatgcccatcaggaacgatgagcctgtcgcaggcggcagagttctcctggttccctcgggcggggggcgggggggcgggggtcctccaccgaccctgggcttcgaagaagcttctgggcttaccccaaaagcaggcctggggcactgtgggggactggcccagctccaaatcgggtgccagatgcccaggggcaaaaacaaaggccagggggacaggcgccccctaagaagagcagaaaaccatctccgaagcacaggaggggggaatcccccggcagggccatgttgatgccttggcctaagtttactctgagccccgctcccatggaattaaacaggaatgttagttttgggagagtggggagtcaagctgagcacagtgcacacactgtggagcagaaatggcatcacggagggaggacgcctcggctggctggaagcggctcacctgctaaaaagccctcggagccaggcgtggtggctcacgtctataatcccagcactttgggaggccaagacgggcagatcacctgaggtcggggttcgagaccagtctgaccaacatggagaaaccctgtctctactaaaaatacaaaattagctgggcgtggtggcatgcgcctgtagtcccagctactcaggaggctgaggcaggccaattgcttgaacctgggaggcggaggtggcagtgagccaagattgtgccattgcactccagcctaggcaacaagagtaaaactccgtcccaaagg

SEQ ID NO: 46750 - DNA, 3498 bp, Homo Sapiens
gaagctggttctgcagacatgtccaaaaacatcattatgcctgaagaagagcatcaacaaaattctgaggaatttcaaataatttcaggtcaaccatctgatactcttaaatctagaaatgctgcagattgctctattttaaatgagaatactaatttagatatgtctaaagtgctctgcgctgctgactctgtagaagttgagactgaagaagaatctaatttcaatgaagaccattccttttgtgagactttccaacaggctcctgtcaaggataaagttaggaaacctgaggagatgatgtcacttactatgtcctcaaactatggctccccaagcagatttcaaaatgaaaattcaggaagctctgccttaaattgtgagacagcaaagaaaaaccatgagatatcgaatgatgcaggtgagctgcgtgtccattgtgagggtgaaggaggaaacgcaggagacggtggaggtgttgtcccccacagacacctgtgccctgtgacgctcgatggggagcgctcggctgaaagccctgtgctcgttgtgacaagaataaccagagaacagggaaatctggagagcgggggtcagaacagagttgcacgtgggcatggtttggaagacttgaaaggtgtccaagaagatcccgttctggggaataaggaaattctgatgaattcacaacatgaaacagaatttattttggaggaggatggcccagcttctgatagcacagttgaaagtagtgatgtctatgaaactataattagtattgatgataaagggcaggccatgtacagttttggtcgatttgactcctccataataagaataaagaaccctgaagatggtgagttgatagaccagtctgaagagggcttgatagcaacgggagtgagaattagtgagctgcccttgaaagactgtgctcaaggtgtgaaaaagaagaaatctgagggcagttccattggtgagtctacacgaattcgctgtgatgattgtggcttcttagcagatggactgagtggactgaatgttcacatagccatgaagcatcctacaaaagagaagcacttccattgtttactctgtggaaagtcgttctataccgaaagcaaccttcaccagcatctggctagtgccggccacatgagaaatgagcaggccagtgtggaggagcttccggagggaggggccacctttaaatgtgtcaagtgcacagagccctttgattctgaacagaatttatttttacatattaaaggacagcatgaggaattgctgcgggaggtgaataagtatatagtggaagacactgagcaaatcaaccgcgagagggaggaaaaccagggaaacgtctgcaagtattgtgggaagatgtgtcgaagcagcaactcgatggccttcctggcacacattcgcactcacacaggatcaaaaccattcaagtgcaagatatgccattttgcaacagctcagcttggagatgccagaaaccatgtgaaaaggcaccttgggatgagggaatacaagtgtcatgtctgtggggttgcttttgtaatgaagaagcacttaaatactcatctactaggcaagcatggagttggcaccccaaaagaaaggaaatttacatgccacttatgtgatagaagtttcacagagaagtgggccctgaacaaccacatgaaactccacacgggagaaaagccgtttaaatgtacctggcccacgtgccattactcattcctcacagcctccgcaatgaaagaccactacaggacgcacacaggcgagaagtcgtttctgtgtgacctctgcggctttgccggcgggacccgccacgccctcaccaagcatcgcagacagcacacaggagaaaaacctttcaagtgcgatgagtgtaactttgcctccacaactcagtcccatttgactcggcataaacgtgtccacactggagaaaagccctacagatgcccctggtgtgactacaggtcaaactgtgctgaaaatatccgcaaacacattctgcatactggcaaacatgaaggagtcaagatgtacaactgtcccaagtgtgactacgggaccaacgtcccggtggagttccggaaccatttgaaggaacagcatcctgacatcgaaaacccggacctcgcttacctgcatgctggcattgtttccaagtcgtacgagtgccgtctaaagggacaaggagccaccttcgtggagacagacagccccttcaccgcggcggccttggcagaagagcccctcgtcaaggagaagcccctcagaagcagcaggaggccagcgccgccccctgagcaggtgcagcaggtcatcatcttccagggctacgacggggagtttgccctggacccctcggtggaggagacggccgccgccacgctgcagacgctggccatggccggccaggtggcccgggtggtgcatatcacggaggatggccaggtcatcgccacgagtcagagcggggcacatgtaggcagcgtggtgcccggacccatcctccccgagcagctggctgatggagccacccaggtggtcgtcgtggggggctccatggaaggccacggcatggatgagtccctcagtccaggtggcgctgtgatacaacaggtgaccaagcaggagattttaaacctctcggaggctggagtcgctccccccgaggcatcctcagccctggatgcattgctctgtgcggtcactgaattaggggaggtggagggcagggctgggctcgaggagcaaggcaggcccggcgccaaagacgtgctgatccagctgcccgggcaggaggtctcccatgtggctgccgaccccgaggcccccgagatccagatgttcccacaggcccaggagagcccggccgccgtggaggtgctcacccaggtggtccatccctcagcagccatggcctctcaggagcgggcacaggtggccttcaagaagatggtccagggcgtcctccagtttgctgtgtgtgacacggccgcggccggccagttggtcaaggacggtgtcacccaggtggtggtgagcgaagagggtgccgtccacatggtcgccggggagggtgcccagatcatcatgcaggaggcgcagggcgagcacatggatctggtggagtccgacggggagatctcgcagatcatcgtgacggaggagctggtccaggccatggtgcaggagtccagtggcggcttctccgagggcaccacgcactacatcctgacagagctgcccccaggggtgcaggacgagccgggcctgtactcccacaccgtgctggagactgcggactcgcaggaactcctgcaggccggggccacgctaggcacagaggccggggccccaagcagggcagagcagctggccagcgtggtcatctacacccaggagggctcctcggccgcggcggcaattcagagccaaagagaaagcagcgaactccaggaagcatga

SEQ ID NO: 46751 - DNA, 240 bp, Homo Sapiens
atggggagtttgggggaaagtggcttttccagagccagcatcaaagaatcaagcactgaagacatagctggctctgaggtggggtgggtgcgggatcacagaccgcatgtcatccccttgcccccacccctgcaactctggggtatatctgtgtctagcaacgatgtctcatggcgtgacagactagaggatacgcatccctggaatgtgagtcaacaggaaagatggggccccacgccc

SEQ ID NO: 46752 - DNA, 381 bp, Homo Sapiens
gtccttcctctcctagcctaaggcgtgcaaacagagcgccactgggaggctgaaacctttaggccgatgcttgcttgcaaggtcaggcaagctggattctggtccccacctttgcagagagaacagcgatgttgtgcgcccatttctcagatcaaggaccggcccatcttactacctccaagagtgcttttctctctaataagaaaacatctactttgaaacatctactgggcgagaccaggagtgatggctcagcctgtaattctggaatttcgggaggccgaggcaggaagattccttgagcacaggagttccagaccagcctgggcaatgtagcaagacgctgtctctatttatacaataaaatttttttaaaaaagg

SEQ ID NO: 46753 - DNA, 951 bp, Homo Sapiens
atggttgaagaaaatcataccatgaaaaatgagtttatcctcacaggatttacagatcaccctgagctgaagactctgctgtttgtggtgttctttgccatctatctgatcaccgtggtggggaatattagtttggtggcactgatatttacacactgtcggcttcacacaccaatgtacatctttctgggaaatctggctcttgtggattcttgctgtgcctgtgctattacccccaaaatgttagagaacttcttttctgagggcaaaaggatttccctctatgaatgtgcagtacagttttattttctttgcactgtggaaactgcagactgctttcttctggcagcagtggcctatgaccgctatgtggccatctgcaacccactgcagtaccacatcatgatgtccaagaaactctgcattcagatgaccacaggcgccttcatagctggaaatctgcattccatgattcatgtagggcttgtatttaggttagttttctgtggattgaatcacatcaaccacttttactgtgatactcttcccttgtatagactctcctgtgttgaccctttcatcaatgaactggttctattcatcttctcaggttcagttcaagtctttaccataggtagtgtcttaatatcttatctctatattcttcttactattttcagaatgaaatccaaggagggaagggccaaagccttttctacttgtgcatcccacttttcatcagtttcattattctatggatctatttttttcctatacattagaccaaatttgcttgaagaaggaggtaatgatataccagctgctattttatttacaatagtagttcccttactaaatcctttcatttatagtctgagaaacaaggaagtaataagtgtcttaagaaaaattctgctgaaaataaaatctcaaggaagtgtgaacaaatga

SEQ ID NO: 46754 - DNA, 1312 bp, Homo Sapiens
ggccatggtggagatcagcagcagcttccccacccaggacaaggcctagatgaggaaactgagacccaaaaagagacagcaactggcccagggtcaccagcatgcagatgcctgctatgatgtctctgcttcttgtgtctgtgggcctcatggaagcacttcaggcccagagccaccccatcacacgacgagacctcttctctcaagagattcagctggacatggccctggcctcctttgatgaccagtacgctggctgtgctgctgccatgacagctgctctcccggatctcaaccacacggagttccaggccaaccaggtgtatgcagacagctggacactggcaagcagccaatggcaggagcgtcaggccaggtggccagagtggagtctcagccccacccgtccatccccgccacccctgggcttccgcgatgagcatggggtggccctcctggcctacacagccaacagccccctgcacaaggagttcaatgcagccgtgcgtgaggcgggccgctcccgggcccactacctccaccacttctccttcaagacactccatttcctgctgactgaggccctgcagctcctgggcagcggccagcgtccaccccggtgccaccaggtgttccgaggtgtgcacggcctgcgcttccggccagcagggccccgggccaccgtgaggctggggggctttgcttctgcctccctgaagcatgttgcagcccagcagtttggtgaggacaccttcttcggcatctggacctgccttggggcccctatcaagggctactccttcttccctggagaggaagaggtgctgatccccccctttgagaccttccaagtgatcaatgccagcagactggcccagggccccgcccgcatctacctccgagccctgggcaagcacagcacctacaactgcgagtacatcaaagacaagaagtgcaagtctgggccttgccatctggataattcagccatgggtcagagccccctctctgcagtctggtctttgctgctgctgctctggttcctcgtggtgagggcctttccagatggtccaggcctcctttgatgcatgagacacgggacagcctcgcctgctgcctctgcccatcctgaggatgttggccatgtgtgctttcagtgtaaccaagattcctgtcaatcccatctgcagggaactctgggaccttctctggtagctgccagaccggctggtggagaaacaggagacaatctggggactgaaccttacccagggctgtaggagtgagactctgaataaagggttgggccggc

SEQ ID NO: 46755 - DNA, 318 bp, Homo Sapiens
ggattaaatatggatgatgttgagaaaggcaagaagatttgtattcagaagtgtgcccagtgccacactgtggaaaaggcaggcaagcacaggactgggcctaatctccatggtctcttcggatggaagacaggtcaagccgttggattattttacacagatgccattaagaacaaaggcatcacctggggagaggatacactgatggagtatttggagaatcccaagaagcacatctctggaacaaagatctttgccagcattaagaagaaggcagaaagagcagacttgatagcttatctcaaaaaagctactaat

SEQ ID NO: 46756 - DNA, 1481 bp, Homo Sapiens
gaagagttgggcagagttgcaggggtctccacagctgaggcagtttggccggattatttgggttcctgctcggatggcggcgacgctgatcctggagcccgcgggccgctgctgctgggacgaaccggtgcgaatcgccgtgcgcggcctagccccggagcagccggtcacgctgcgcgcgtccctgcgcgacgagaagggcgcgcttttccaggcccacgcgcgctaccgcgccgacacccttggcgagctggacctggagcgcgcgcccgcgctgggcggcagcttcgcggggcttgagcccatggggctgctctgggccttggagcccgagaaacccttggtgcggctggtgaagcgcgacgtgcgaacgcccttggccgtggagctggaggtgctggatggccacgaccccgaccccgggcggctgctgtgccgggtgcggcacgagcgctacttcctcccgcccggggtgcggcgcgagccggtgcgcgcgggccgggtgcgaggcacgctcttcctgccgccagaacctgggccctttcctggcattgtggacatgttcggaactggaggtggcctgctggagtatcgggctagtctgctggctgggaagggttttgctgtgatggctctggcttactataactatgaagacctccccaagaccatggagacgctccatctggagtactttgaagaagctgtgaactacttgctcagtcatcctgaggtaaaaggtccaggagttgggctgcttggaatttccaaagggggtgagctctgcctttccatggcctctttcctgaagggcatcacggctgctgtcgtcatcaacggctctgtggccaatgttgggggaaccttacgctacaagggcgagaccctgccccctgtgggcgtcaacagaaatcgcatcaaggtgaccaaagatggctatgcagacattgtggatgtcctgaacagccctttggaaggacctgaccagaagagcttcattcctgtggaaagggcagagagcaccttcctgttcctggtaggtcaggatgaccacaactggaagagtgagttctatgctaatgaggcctgtaaacgcttgcaggcccatgggaggagaaagccccagatcatctgttacccagagacagggcactatattgagcctccttacttccccctgtgtcgggcttccctgcatgccttggtgggcagtcctattatctggggaggggagcccagggctcatgccatggctcaggtggatgcttggaaacaactccagactttcttccacaaacacttgggtggccacgaggggacaatcccatcaaaagtgtaaattttatttgatcatgtggcctctctgttgctaatctctcctggaaacatctgccacatttagtgtgtgtatgtgtattcattctttctcataacttcttaaagtttcttcccctcattattaaaatgaatttaccagtaag

SEQ ID NO: 46757 - DNA, 1299 bp, Homo Sapiens
ccatccccagggatgggcggagggggtggcggcagcgacagcaggggaggcagctggattaaacaggtcacctgcaggtattttatgggggtttgtaaggaaggtgataactgtcgctactcccatgacctctctgacagtccgtgtggtgtagtgtgcaagtattttcaatatgaacatagcaagccattgaaacaggaagaagcagctgctacagagctaactacaatatcatcccttgctgcttcctcaagtctcttgtcgttagtcggaccacttgttgaaatgaatacaggtgaagctgagtcaagaaattcaaactttgcaattgtaggagcaggttcagaggactgggtgcatgctattgagtttgttcctgggcaaccctactttggctatactgtgccttcctgcactgaagcacctctgcaggactcagtgaccaaggaagaatcagagaaagagaaaaactgctgtggaaaccaagaagcagctgtgcccctgtgctgcagtgagagagtgctggatggggagaactgtgtgcctctccatggagattcatgtgacatgtgtggactgcaggtcctgcatcccatggctgctgcccagagatcacagcatataaaattgtgcattgaggcccatgagaaggacatggagctctcacttgctgtgcagcgcagcaaggacgtggtgtatgggatctgcatggaggtggtctatgagaaagcaaaccccagtgagtgctgcttcgggattctctccaactgcaaccatgcctactgtctcaagtgcattcgcaagtggagcagtgctaagcaatttcagagcaagattataaagtcctgcctagattgccagatcacatctaactttgtcattccaagtgagtcctgggtggagaaagaagagaagcagaaactcattcagaaatacaaggaggcattgagcaacaaggcttgcaggtattttgatgaaggacgtgggagctgcccatttggaaggaattgtttttacaagcatgcgtaccctgatggccttacagagaagccacagagacagaaagtgggaacatcaagcagaaactgggtccaagaaggaaccacttctgagaactcactgaggaaagagatagcagcaacccttttgacaatgatgaagaggttgtcacctcttgaggtgggcgagatgttgcttatgcttttggctgcaggtggggatgatgaactggcagactctgaagatgagtgggacttgtttcatgatgagctggaagatttttatgatttggatctatag

SEQ ID NO: 46758 - DNA, 390 bp, Homo Sapiens
atgggacagtgggcaactcgctgcaaagccaaccgtgtgctcccccgccgcgcccgtgagcttcacgcctcggacagctcctggtgcactttcccgctcttcctgtcaggaggtggtgccctctgggtaccaggccgctcgtcccgggccaatcgcaaagcgcttagagccgaatggggcgggacagaggcaagaaagggtcgtcccaattggagcgttcgaaaggttctgggcagaggcggggaagcggcgagtgggggcctcgccccgcctgcggtcgccatggtaaccgagagggcgcagctcagcgttggcgccagcaccggggtcttgtgctgtccctcaatgggtgaccagttaaggtgggaacctgtggtctcacatacttga

SEQ ID NO: 46759 - DNA, 255 bp, Homo Sapiens
atgtcggagcccgggggcggcggcggcgaggacggctcggccggattggaagtgtcggccgtgcagaatgtggcggacgtgtcggtgctgcagaagcacctgcgcaagctggtgccgctgctgctggaggacggcggcgaggcgccggccgcgctggaggcggcgctggaggagaagagcgccctggagcagatgcgcaagttcctttcggacccgcaggtccacacggtgctggtggagcgctccacgctcaaa

SEQ ID NO: 46760 - DNA, 2279 bp, Homo Sapiens
atcgtttccccgcgcgcaggtccgcggggaggggcggcctgccgaccggcccaccccagggcgttcctgaagggcgtcctcggccgcccccaccgcctcccagatgtactatgcggtttcccaggcgcgcgtgaacgcggtccccgggaccatgctgcggccacagcggcccggagacttgcagctcggggcctccctctacgagctggtgggctacaggcagccgccctcctcctcctcctcctccacctcctccacctcctccacttcctcctcctccacgacggcccccctcctccccaaggctgcgcgcgagaagccggaggcgccggccgagcctccaggccccgggcccgggtcaggcgcgcacccgggcggcagcgcccggccggacgccaaggaggagcagcagcagcagctgcggcgcaagatcaacagccgcgagcggaagcgcatgcaggacctgaacctggccatggacgccctgcgcgaggtcatcctgccctactcagcggcgcactgccagggcgcgcccggccgcaagctctccaagatagccacgctgctgctcgcccgcaactacatcctactgctgggcagctcgctgcaggagctgcgccgcgcgctgggcgagggcgccgggcccgccgcgccgcgcctgctgctggccgggctgcccctgctcgccgccgcgcccggctccgtgctgctggcgcccggcgccgtaggaccccccgacgcgctgcgccccgccaagtacctgtcgctggcgctggacgagccgccgtgcggccagttcgctctccccggcggcggcgcaggcggccccggcctctgcacctgcgccgtgtgcaagttcccgcacctggtcccggccagcctgggcctggccgccgtgcaggcgcaattctccaagtgagggcgggcctgggcctggggcgcgacctcggcccggcctcccttcgctcagcttctccgcgcccctgctccctgcgtctgggagagcgaggccgagcaaggaaagcatttcgaaccttccagtccagaggaagggactgtcgggcacccccttccccgcccccacccctgggacgttaaagtgaccagagcggatgttcgatggcgcctcggggcagtttggggttctgggtcggttccagcggctttaggcagaaagtgctcgctctcacccagcacatctctctccttgtccctggagttgcgcgcttcgcggggccgatgtagaacttagggcgccttgccgtggttggcgcgccccgggtgcagcgagaggccatccccgagcgctacctccccggagcggagcacgccggctcccagtactaggggctgcgctcgagcagtggcgggggcggaggggtggttcttttccttctcctccgccagaggccacgggcgcccttgttcccgccggccaggtcctatcaaaggaggctgccggaactcaagaggcagaaaaagaccagttaggcggtgcagacggtctgggacgtggcagacggacggaccctcggcggacaggtggtcggcgtcggggtgcggtgggtaggggcgaggacaacgcagggtgcgctgggttgggacgtgggtccacttttgtagaccagctgtttggagagctgtatttaagactcgcgtatccagtgttttgtcgcagagagttttcgctcttaaatcctgggggtttcttagaaagcaacttagaactcgagattcacctttcgtttccctttccccaaaagtagcgtaaccaacatttaagcttgcttaaaaacgaaaaccaaccgccttgcatccagtgttcccgatttactaaaataggtaaccaggcgtctcacagtcgccgtcctgtcaagagcgctaatgaacgttctcattaacacgcaggagtaccgggagccctgaaccgcccgctgctcggcggatcccagctgcggtggcgacggcgggaaggcgctttccgctgttcctcagcgggccgggcccttgaccagcgcggcccgcaggtcttccttctcgccgtcttgcagttgaagagctacatacgtagtcagtttcgatttgttacagacgttaacaaattcctttacccaaggttatgctatgacctttccgcagtttactttgattttctatgtttaaggttttggttgttggtagtagccgaatttaactggcactttattttacttctaaccttgtttcctgacggtgtacagaatcaacaaaataaaacatttaaagtctgattttttaca

SEQ ID NO: 46761 - DNA, 318 bp, Homo Sapiens
ctgctgaccaccccttcctgtgtccagtgtgaggttcagctggtgcagtctgggggaggcttggtacagcctgggtccctgagactctcctgtgcaggctctggattcaccttcagtagctatgctatgcactgggttcgccaggctccaggaaaaggtctggagtgggtatcagctattggtgctggtggtggcacatactatgcagactccgtgaagggccgattcaccatctccagagacaatgccaagaactccttgtatcttcaaatgaacagcctgagagccgaggacatggctgtgtattactgtgcaaga

SEQ ID NO: 46762 - DNA, 369 bp, Homo Sapiens
atgagagtctgctatagtgagatggaaatggctagcttgcctttttcttgtctatttcatagccaaggaggaaggaaaaactggacctcaatttacttttgggatacactcattattccagaggagggtaaaaggctgagaagcttaaggtatttcagtctgttttatgttactcatttgcgaaaagcaggctcatcgaatacaggtgagtttcaacgtgtcttgaatatggcagcatttaaaagtcttcagaccaggcatggtggctcatgcctgtcatcccagcactttgggaggccgaggcaggcagatcatgaggtcaggagatcgagaccatcccggctaacagtgaaaccctgtctctactga

SEQ ID NO: 46763 - DNA, 613 bp, Homo Sapiens
cattaacctgctggattacctgccggagatcctggatggactcttccagatcctgggtgacaatggcaaagagattcgcaaaatgtgtgaggttgttcttggagaattcttaaaagaaattaagaagaacccctccagtgtgaagtttgctgagatggccaacatcctggtgatccactgccagacaacagatgacctcatccagctgacagccatgtgctggatgcgggagttcatccagctggcgggccgcgtcatgctgccttactcctccgggatcctgactgctgtcttgccctgcttggcctacgatgaccgcaagaaaagcatcaaagaagtggccaacgtgtgcaaccagagcctgatgaagctggtcacccccgaggacgacgagctggatgagctgagacctgggcagaggcaggcagagcccacccctgacgatgccctgccaaagcaggagggcacagccagtgggtgcactgaggcgcagcacttccgtgacatccctccaatgatgcgcaactccctactcgtgagaaaacgtgagaccaacccaaacggggagacattctgcagagtgaccagcgcttcaaaagtgtcaagtttatga

SEQ ID NO: 46764 - DNA, 987 bp, Homo Sapiens
atgatgtctggagaacccctgcacgtgaagacccccatccgtgacagcatggccctgtccaaaatggccggcaccagcgtctacctcaagatggacagtgcccagccctccggctccttcaagatccggggcattgggcacttctgcaagaggtgggccaagcaaggctgtgcacattttgtctgctcctcggcgggcaacgcaggcatggcggctgcatatgcggccaggcaactcggcgtccccgccaccatcgtggtgcccagcaccacacctgctctcaccattgagcgcctcaagaatgaaggtgccacagtcaaggtggtgggtgagttattggatgaagccttcgagctggccaaggccctagcgaagaacaacccgggttgggtctacattcccccctttgatgaccccctcatctgggaaggccacgcttccatcgtgaaagagctgaaggagacactgtgggaaaagccgggggccatcgcgctgtcagtgggcggcgggggcctgctgtgtggagtggtccaggggctgcaggaggtgggctggggggacgtgcctgtcatcgccatggagacttttggtgcccacagcttccacgctgccaccaccgcaggcaaacttgtctccctgcccaagatcaccagtgttgccaaggccctgggcgtgaagactgtgggggctcaggccctgaagctgtttcaggaacaccccattttctctgaagttatctcggaccaggaggctgtggccgccattgagaagttcgtggatgatgagaagatcctggtggagcccgcctgcggggcagccctggccgctgtctatagccacgtgatccagaagctccaactggaggggaatctccgaaccccgctgccatccctcgtggtcatcgtctgcgggggcagcaacatcagcctggcccagctgcgggcgctcaaggaacagctgggcatgacaaataggttgcccaagtga

SEQ ID NO: 46765 - DNA, 1602 bp, Homo Sapiens
gagctccgtgctgggaggtgggaagggggcttgaccctggggactcaggcagtctggggacagttccaccaggggccggtgcctagaattggtgagggaggcacctcaggggctgggggagaaggagcgagcgctcttcgcccctctctggcacccagcggcgcgcctgctggccggaaaggcagcgagaagtccgttctccctgtcctgcccccggcgacttgcggcccgggtgggagtccgcaggctccgggtccccagcgccgctggccagggcgcgggcaaagtttgcctctccgcgtccagccggttctttcgctcccgcagcgccgcaggtgccgcctgtcctcgccttcctgctgcaatcgccccaccatggactccccgatccagatcttccgcggggagccgggccctacctgcgccccgagcgcctgcctgccccccaacagcagcgcctggtttcccggctgggccgagcccgacagcaacggcagcgccggctcggaggacgcgcagctggagcccgcgcacatctccccggccatcccggtcatcatcacggcggtctactccgtagtgttcgtcgtgggcttggtgggcaactcgctggtcatgttcgtgatcatccgatacacaaagatgaagacagcaaccaacatttacatatttaacctggctttggcagatgctttagttactacaaccatgccctttcagagtacggtctacttgatgaattcctggccttttggggatgtgctgtgcaagatagtaatttccattgattactacaacatgttcaccagcatcttcaccttgaccatgatgagcgtggaccgctacattgccgtgtgccaccccgtgaaggctttggacttccgcacacccttgaaggcaaagatcatcaatatctgcatctggctgctgtcgtcatctgttggcatctctgcaatagtccttggaggcaccaaagtcagggaagacgtcgatgtcattgagtgctccttgcagttcccagatgatgactactcctggtgggacctcttcatgaagatctgcgtcttcatctttgccttcgtgatccctgtcctcatcatcatcgtctgctacaccctgatgatcctgcgtctcaagagcgtccggctcctttctggctcccgagagaaagatcgcaacctgcgtaggatcaccagactggtcctggtggtggtggcagtcttcgtcgtctgctggactcccattcacatattcatcctggtggaggctctggggagcacctcccacagcacagctgctctctccagctattacttctgcatcgccttaggctataccaacagtagcctgaatcccattctctacgcctttcttgatgaaaacttcaagcggtgtttccgggacttctgctttccactgaagatgaggatggagcggcagagcactagcagagtccgaaatacagttcaggatcctgcttacctgagggacatcgatgggatgaataaaccagtatgactagtcgtggagatgtcttcgtacagttcttcgggaagagaggagttcaatgatctaggtttaactcagatcactactgcagtc

SEQ ID NO: 46766 - DNA, 3365 bp, Homo Sapiens
gcaaagaaatggctcaaaagcttcagctctttctgtgccctgggagctgagatgcacgtcagtggccttgccagcgtggccaattctctgctgactgccagaaaaaagaggccaggaagaaagaggaaagagaagagatcgctcaggggtgagaccatgcccttcatcttttcttttccctaatctcctctgcttgtgtccacccacactctccccacctggcaaaattgttcaaaattgctgtggagtttacctcagtttcctctttcagtctgtggtgtgtggtccatcctcttgctgagcacattgaaaggaactggctatctttgatctcttcctccagatcagagtcaaggaatgtgtttataatggacacttcatccaaagaaaatatccagttgttctgcaaaacttcagtgcaacctgttggaaggccttcttttaaaacagaatatccctcctcagaagaaaagcaaccatgctgtggtgaactaaaggtgttcttgtgtgccttgtcttttgtttactttgccaaagcattggcagaaggctatctgaagagcaccatcactcagatagagagaaggtttgatatcccttcttcactggtgggagttattgatggtagttttgaaattgggaatctcttagttataacatttgttagctactttggagccaaacttcacaggccaaaaataattggagcagggtgtgtaatcatgggagttggaacactgctcattgcaatgcctcagttcttcatggagcagtacaaatatgagagatattctccttcctccaattccactctcagcatctctccgtgtctcctagagtcaagcagtcaattaccagtttcagttatggaaaaatcaaaatccaaaataagtaacgaatgtgaagtggacactagctcttccatgtggatttatgttttcctgggcaatcttcttcgtggaataggagaaactcccattcagcctttgggcattgcctacctggatgattttgccagtgaagacaatgcagctttctatattgggtgtgtgcagacggttgcaattataggaccaatctttggtttcctgttaggctcattatgtgccaaactatatgttgacattggctttgtaaacctagatcacataaccattaccccaaaagatccccagtgggtaggagcctggtggcttggctatctaatagcaggaatcataagtcttcttgcagctgtgcctttctggtatttaccaaagagtttaccaagatcccaaagtagagaggattctaattcttcctctgagaaatccaagtttattatagatgatcacacagactaccaaacaccccagggagaaaatgcaaaaataatggaaatggcaagagattttcttccatcactgaagaatctttttggaaacccagtatacttcctatatttatgtacaagcactgttcagttcaattctctgttcggcatggtgacgtacaaaccaaagtacattgagcagcagtatggacagtcatcctccagggccaactttgtgatcgggctcatcaacattccagcagtggcccttggaatattctctggggggatagttatgaaaaaattcagaatcagtgtgtgtggagctgcaaaactctacttgggatcatctgtctttggttacctcctatttctttccctgtttgcactgggctgtgaaaattctgatgtggcaggactaactgtctcctaccaaggaaccaaacctgtctcttatcatgaacgagctctcttttcagattgcaactcaagatgcaaatgttcagagacaaaatgggaacccatgtgcggtgaaaatggaatcacatatgtatcagcttgtcttgctggttgtcaaacctccaacaggagtggaaaaaatattatattttacaactgcacttgtgtgggaattgcagcttctaaatccggaaattcctcaggcatagtgggaagatgtcagaaagacaatggatgtccccaaatgtttctgtatttccttgtaatttcagtcatcacatcctatactttatccctaggtggcatacctggatacatattacttctgaggtgcattaagccacagcttaagtcttttgccttgggtatctacacattagcaataagagttcttgcaggaatcccagctccagtgtattttggagttttgattgatacttcatgcctcaaatggggatttaaaagatgtggaagtagaggatcatgcagattatatgattcaaatgtcttcagacatatatatctgggactaactgtgatactgggcacagtgtcaattctcctaagcattgcagtacttttcattttaaagaaaaattatgtttcaaaacacagaagttttataaccaagagagaaagaacaatggtgtctacaagattccaaaaggaaaattacactacaagtgatcatctgctacaacccaactactggccaggcaaggaaactcaactttagaaacatgatgactggaagtcatgtcttctaattggttgacattttgcaaacaaataaattgtaatcaaaagagctctaaatttgtaatttctttctcctttcaaaaaatgtctactttgttttggtcctaggcattaggtaatataactgataatatactgaaacatataatggaagatgcagatgataaaactaattttgaactttttaatttatataaattattttatatcacttacttatttcactttattttgctttgtgctcattgatatatattagctgtactcctagaagaacaattgtctctattgtcacacatggttatatttaaagtaatttctgaactgtgtaatgtgtctagagtaagcaaatactgctaacaattaactcataccttgggttccttcaagtattactcctatagtattttctcccatagctgtcttcatctgtgtattttaataatgatcttaggatggagcagaacatggagaggaagatttcattttaagctcctccttttctttgaaatacaataatttatatagaaatgtgtagcagcaaattatattggggattagaattttgaattaatagctctcctactattaatttacatgtgctttttgtgtggcgctataagtgactatggttgtaaagtaataaaattgatgttaacatgcccaattattgttcttttatgaatccaatgaatttaaaactattgttaaatataatactgccccactttaatatatgtaagcaacttcctacttatacacgacgtgttcctaaaacatgtttgaaaggtgaatttctgaaagtctacaataaatgtaggtgttacaacaggaa

SEQ ID NO: 46767 - DNA, 330 bp, Homo Sapiens
atggtgcttgcaaagaagattaaaaagtcagtggaatggatcaactctaggcttctacttgttataaaaagtggaaagtacatactggcgtacaagcagactccaaagatgatcaggcaaggcaaagcaaaattggctatccacactgaaaactgtccagctttgaggaaatccaaaatagagtactataccatgttgaccaaaactggtgtccatcactacagtgacaataattttgaattgggcatagcatgtggtaaatactgcagagtatgcatgttgtctatcattgatccagacgattctgatatcgttagaagcgtgccagaa

SEQ ID NO: 46768 - DNA, 3849 bp, Homo Sapiens
aaacatctgtatggattatttcactataatcctatgatgcttggacttgaatcacttccagatcccacagacacctgggaaattatagagaccattggtaaaggcacctatggcaaagtctacaaggtaactaacaagagagatgggagcctggctgcagtgaaaattctggatccagtcagtgatatggatgaagaaattgaggcagaatacaacattttgcagttccttcctaatcatcccaatgttgtaaagttttatgggatgttttacaaagcggatcactgtgtagggggacagctgtggctggtcctggagctgtgtaatgggggctcagtcactgagcttgtcaaaggtctactcagatgtggccagcggttggatgaagcaatgatctcatacatcttgtacggggccctcttgggccttcagcatttgcacaacaaccgaatcatccaccgtgatgtgaaggggaataacattcttctgacaacagaaggaggagttaagctcgttgactttggtgtttcagctcaactcaccagtacacgtctgcggagaaacacatctgttggcaccccgttctggatggcccctgaggtcattgcctgtgagcagcagtatgactcttcctatgacgctcgctgtgacgtctggtccttggggatcacagctattgaactgggggatggagaccctcccctctttgacatgcatcctgtgaaaacactctttaagattccaagaaatcctccacctactttacttcatccagaaaaatggtgtgaagaattcaaccactttatttcacagtgtcttattaaggattttgaaaggcgaccttccgtcacacatctccttgaccacccatttattaaaggagtacatggaaaagttctgtttctgcaaaaacagctggccaaggttctccaagaccagaagcatcaaaatcctgttgctaaaaccaggcatgagaggatgcataccagaagaccttatcatgtggaagatgctgaaaaatactgccttgaggatgatttggtcaacctagaggttctggatgaggatacaattatccatcagttgcagaaacgttatgcagacttgctaatttacacatatgttggagacatcttaattgccttaaaccccttccagaatctaagcatatactctccacagttttccagactttatcatggggtgaaacgcgcctccaatcccccccacatatttgcatcagcagatgctgcttaccagtgcatggttactctcagcaaagaccagtgcattgtcatcagcggagagagtggctctgggaagacagaaagcgcccacctgattgttcagcatttgactttcttgggaaaggccaataatcagaccttgagagagaaaattctacaagtcaactccctggtggaagcctttgggaactcatgcactgccatcaatgacaactcgagccgttttggaaaatatctggaaatgatgtttacaccaactggagttgtgatgggggcaagaatctctgaatatctcctggaaaaatccagagttataaaacaggcagcgagagagaaaaattttcatatattttactatatttatgctggtcttcatcaccaaaagaagctttctgatttcagacttcctgaggaaaaacctcctaggtacatagctgatgaaactggaagggtgatgcacgacataacttccaaggagtcttacagaagacaattcgaagcaattcagcattgcttcaggattatagggttcacggacaaagaggtgcactcagtgtacagaattttggctgggattttgaatattgggaacattgagttcgcagctatttcctctcaacatcagactgataaaagtgaggtgcccaatgctgaagctttgcaaaatgctgcctctgttctgtgcattagccctgaagagctccaggaggccctcacctcccactgtgtggtcacccggggcgagaccatcatccgtgccaacactgtagacagggctgcggacgttcgagacgccatgtccaaagccctgtatgggaggctcttcagctggattgtgaatcgcattaatacactcctgcagccagacgaaaacatatggcaagttcctcggagagcagagggaggtggaatgaatgtggggatcttggatatctttggattcgagaattttcagagaaattcatttgagcagctctgcataaacatcgccaatgagcaaatccagtactatttcaatcagcatgtttttgctcttgagcagatggaatatcagaatgaaggcattgatgctgtacccgtggaatatgaggacaaccgcccgctcttggacatgttcctccagaaacccctgggactgcttgcacttttggatgaggaaagtcggtttccccaagcaactgaccagaccctggttgataaatttgaagataatctacgatgcaaatacttctggaggcccaaaggagtggaactgtgctttggcattcagcattatgctggaaaggtattatatgatgcttctggggttcttgagaaaaatagagacactctccctgccgatgtggttgtggtcctgagaacgtcagaaaacaagcttcttcagcagctcttctcaatccctctgaccaaaacaggtaatttggcccagacaagagctaggataacagtggcctcaagttctttgcctccacatttcagtgctgggaaagccaaggtggacactctggaggtgatacggcatccggaagaaaccaccaacatgaagaggcaaactgtggcttcttacttccggtattctctgatggacctgctctccaaaatggtggttggacagccccactttgtgcgctgcattaaacccaatgatgaccgagaggccctgcagttctctcgagagagggtgctggcccagctccgctccacagggattctggagacagtcagcatccgccgccagggctattcccaccgcatcctttttgaagaatttgtgaaaaggtattattacttggcattcacagcacatcaaacacctcttgctagcaaagagagctgtgtggctatcttggaaaagtccagattagatcactgggtactgggaaaaacaaaggtttttctcaaatattaccatgttgagcaattaaatttgctgcttcgagaagtcataggcagagtggttgtgctgcaggcatataccaaggggtggcttggagccaggagatacaaaagggtcagagagaagagagagaagggagccattgccatccagtcagcctggagaggatatgatgctcggaggaaatttaagaaaataagcaacagaaggaatgagtctgctgctcataatcaagcaggggacacttcaaaccaaagcagtgggccacattcccccgtcgcagcaggtacgaggggaagtgccgaggttcaagactgcagcgagcctggtgaccataaagttctcaggggctctgtacatcgtaggagccattcacaagcagaatccaacaatggccgtacacagacttcaagcaactctcctgctgtcacagagaaaaatgggcattcacaagcccagagttctccaaaagggtgcgatatcttcgcaggacatgcaaacaagcactcggtttctgggactgatttgctgtcttctcggatatgccatcctgctccagatcagcaaggattgagtctctggggagcccctcaaaagcctgcctttccacattacggatgtaacttttatgggttcagaaaatggtcttgcacagaagcatcgaacacctcgccgacgatgtcagcagcccaaaatgctgagtag

SEQ ID NO: 46769 - DNA, 767 bp, Homo Sapiens
gtgactccagagcctccagcgagatgctgctgattctgctgtcagtggccctgctggccctgagctcagctgagagttcaagtgaagatgtcagccaggaagaatctctcttcctaatatcaggaaagccagaaggacgacgcccacaaggaggaaaccagccccaacgtcccccacctcctccaggaaagccacaaggaccacccccacaaggaggaaaccagtcccaaggtcccccacctcctccaggaaagccagaaggacgacccccacaaggaggcaaccagtcccaaggtcccccacctcatccaggaaagccagaaagaccacccccacaaggaggaaaccagtcccaaggtaccccacctcctccaggaaagccagaaagaccacccccacaaggaggcaaccagtcccaccgtcccccacctcctccaggaaagccagaaagaccacccccacaaggaggtaaccagtcccaaggtcccccacctcatccaggaaagccagaaggaccacccccacaggaaggaaacaagtcccgaagtgcccgatctcctccaggaaagccacaaggaccaccccaacaagaaggcaacaagcctcaaggtcccccacctcctggaaagccacaaggcccacccccagcaggaggcaatccccagcagcctcaggcacctcctgctggaaagccccaggggccacctccacctcctcaagggggcaggccacccagacctgcccagggacaacagcctccccagtaa

SEQ ID NO: 46770 - DNA, 308 bp, Homo Sapiens
gactgacaggccttggcttctcggtctctcaggacgcgcgggcggccatgcgccccttcgacccctccgctctgctgcccacctgctgggattactggacctatgtgggctcgctcaccaccccgccgctgaccgagtcggtcacctggatcatccagaaggagcccgttgaagtggccccaagccaactctctgcatttcgtactctcctgttttctgcacttggtgaagagaagaagatgacggtgaacaactatcgtccacttcaacccctgatgaactggaaggtctgggcgtccttccaggcc

SEQ ID NO: 46771 - DNA, 396 bp, Homo Sapiens
aaatactgctgcaacgagacggagttccaggcggtgatgcaggcgaacctcacggccagctccgagggttacatgcacaacaattacaccgccttgttgggagtgtggatctatggatttttcgtgttgatgctgctggttctggaccttttgtattactcggcaatgaactacgacatctgcaaggtctacctggcacggtggggcatccaaggacgatggatgaaacaggacccccggcggtgggggaaccccgctcgggcccctcggccgggtcagcgggccccacagccgcagcctcccccaggcccgctgccacaagccccacaggccgtgcacacattgcggggagatgctcacagcccaccgctgatgaccttccagagttcgtctgcc

SEQ ID NO: 46772 - DNA, 483 bp, Homo Sapiens
  misc_feature (1)...(483): n = A,T,C or G
atgacgacccccaataaaggaaacaaggccttgaaggtgaagcgggagccgggtgagaatggcaccctgacggatgaggagctggtgaccatgtcggtgcgggagctgaaccagcacctgcggggcctgtccaaggaggagatcgtccagctgaagcagcgccggcgcacgctcaagaaccgcggctacgctgccagctgccgcgtgaagcgggtgacgcagaaggaggagctggagaagcagaaggcggagctgcagcaggaggtggagaagctggcctcagagaacgccagcatgaagctggagctcgacgcgctgcgctccaagtacgaggcgctgcagaccttcgcccggacggtggcccgcagccccgtggcgccacgactcntcttagccgccggcctggggctcctcgtcccaggcaaggtggccgccaccagcgtcatcacaatagtaaagtccaagacggatgcccgatcgtag

SEQ ID NO: 46773 - DNA, 894 bp, Homo Sapiens
aaccattcctcagtgactgagttcattctggctgggctctcagaacagccagagctccagctgcgcctcttcctcctgttcttaggaatctatgtggtcacagtggtgggcaacttgagcatgatcacactgattgggctcagttctcacctgcatacccccatgtactatttcctcagtggtctgtccttcattgatatctgccattccactatcattacccccaaaatgctggtgaactttgtgacagagaagaacatcatctcctaccctgaatgcatgactcagctttacttcttcctcatttttgctattgcagagtgtcacatgttggctgtaacggcatatgaccgctatgttgccatctgcagccccttgctgtacaatgtcatcatgtcctatcaccactgcttctggctcacagtgggagtttacattttaggcatccttggatctacaattcacaccggctttatgttgagactctttttgtgcaagactaatgtgattaaccattatttttgtgatctcttccctctcttggggctctcctgctccagcacctacatcaatgaattactggttctggtcttgagtgcatttaacatcctgacgcctgccttaaccatccttgcttcttacatctttatcattgccagcatcctccgcattcgctccactgagggcaggtccaaagccttcagcacttgcagctcccacatcttggctgttgctgttttctttgggtctgcagcattcatgtacctgcagccatcatctgtcagctccatggaccaggggaaagtgtcctctgtgttttatactattgttgtgcccatgctgaaccccatctatagcctaagaaataaggatgtcaaatttgccctgaagaaa

SEQ ID NO: 46774 - DNA, 1041 bp, Homo Sapiens
ggcccatggaggaaaaggaagataagcatcaacagcataaaatagaggatgctgctataacatatgtaagtgaaaatgaagaaattaaacacgaagaaaaacctggaaaaagcatacatcattcaaaatcacatgttggaagaggacgtatatattatgctaaattcattaacacaaatgcaagaacatacaatgaaccatttccctacatagatcccaaaaaagggccagaaatacagggtgactggtggtcacatggtaaagcactggaacctgtcttcctaccaccttacgactctaagagcacccagaggagtgacttccaaaaaccatcgtgtccactggttttgccagtcaaacacagcaagatgcaaaagccttcttgtggaatagtaccacttgcctctcctggtacatcagcagaacttcaaaacaattttatagaatacatctcttttatacatcaatatgatgccagaaaaactccgaatgagcctctccagggaaagagacacggagcttttgtacagagagagataaaaccaggcagtaggccaacagttcctaaaggagcagaggtattactgaacactccagggtcacgttcatcagaacagtccaaaaaaacagagaaaggaaactcagcggaaagcagaatgatctcaccaggtctctgccaacaaaattctcaggagctgttagagcctaaaactcacttatcagaaacagacgtcagacaggcagccaaggcatgccccagcactcctgagagcagagaaaagacctcaggcgccactcaaacaactgtaggagatgctcttttcactaggcacaagcctttaaatccaccaattaaaaaatcagaataaattaccttcttcagataaaaatctaatccctggaatatagggaaatttcacaatcatcatcttggccctcacatttacttttctgttatcagtaacttcagaacatacaatttatgtaaatggaaaaagagaaaaaagacaattaaaatacaaccaaatgttattaataaga

SEQ ID NO: 46775 - DNA, 324 bp, Homo Sapiens
gggtttgtaaaagttattaagaataaggcctactttaagagatatcaagtgaaatttagaagacgacgagagggtaaaactgattactatgctcagaaacacttggtgatacaggataaaaatgaatacaacatacccaaatacaggatgatagttcctcatgctgctatacgagagagtccagtctgtgaaaagaagcccaagaaagaagttaaaaagaagaagtggaaccgacccaaaatgtcccttgctcagaagaaagattgggtagctcaaaagaaggcaagcttcctcagagctcaggagcgggctgctgagagctaa

SEQ ID NO: 46776 - DNA, 483 bp, Homo Sapiens
atgagacaagaggtagaggggagaggtagaggtagccacgagctgataattacagacaagagatgcggagtatgtgggggctcattatcctgcatagtctatctttgtatatctttgaacttttcaagaataaaaaagcttaaaaagtatacatggcctggtcctaccagagactcacccaatgccagcctccagccagggagagccaagtttgcattttcacacgcatctcacactcctctgcactctcaacttggagagctccaaacagggaaaccccaagccttgctggcttctgccaaccccctgagcagaagcatgggtccccctgatcaccacctcaccaccctcatcctgatctcactgtacactccctttcctggtctgctaagtagcgggtgtttttccttgacactaacgctacagctagaccacggtgggcttggcaacaggtgtcttcccagatgctggcgttaccgctag

SEQ ID NO: 46777 - DNA, 2269 bp, Homo Sapiens
aaaggagactggccgctggggctcaggaccgggattatccgagctctgcagaagtgcaccgctattgctttgggaggttaaaaaaaaaatcacacggtttccagtgaaaaagtgacagagggtggtggcctttggaaccgccgtgaagtcttctgcctggaacccgaaacttgcatgctatggaacacccgctctttggctgcctgcgcagccctcacgccacggcgcaaggcttgcacccgttctcccaatcctctctcgccctccatggaagatctgaccatatgtcttaccccgagctctctacttcttcctcatcttgcataatcgcgggataccccaacgaagagggcatgtttgccagccagcatcacagggggcaccaccaccaccaccaccaccaccaccatcaccaccatcagcagcagcagcaccaggctctgcaaaccaactggcacctcccgcagatgtcttccccaccgagtgcggctcggcacagcctctgcctccagcccgactctggagggcccccagagttggggagcagcccgcccgtcctgtgctccaactcttccagcttgggctccagcaccccgactggggccgcgtgcgcgccgggggactacggccgccaggcactgtcacctgcggaggcggagaagcgaagcggcggcaagaggaaaagcgacagctcagactcccaggaaggaaattacaagtcagaagtcaacagcaaacccaggaaagaaaggacagcatttaccaaagagcaaatcagagaacttgaagcagaatttgcccatcataattatctcaccagactgaggcgatacgagatagcagtgaatctggatctcactgaaagacaggtgaaagtctggttccaaaacaggcggatgaagtggaagagggtaaagggtggacagcaaggagctgcggctcgggaaaaggaactggtgaatgtgaaaaagggaacacttctcccatcagagctgtcgggaattggtgcagccaccctccagcaaacaggggactctatagcaaatgaagacagtcacgacagtgaccacagctcagagcatgcgcacttatgatataaacagaggaccagctccattctcaggaaagaaatgttgtgatggcaagccttacccaaatatcgtttacacagagagatgactatggcagtgatgtttaatattattaaatccaggcatttcgaatctgtttttcatgatttatagagggtttacacaaagtgccacttattaaagagcttccacagtgaagatggagaaggtgaacttgctttgaatattccagatgtgtttggtcgtgcgtatggcagtgagcaggtatgtgtttgcttttgcttgcactgaaaattaaattgctatcaagagcaaactatgaacggttttttattcaagatgtctccagagtgaagatgccgaggatgaacttgcattgaacattccagatgtgtgagatcatgtgtattacagtgggcaggtatttgcttttgcttgcactgaaaattaaattgctatcaagaataaaccatgaaacattttatcctgaacagccacagtgcctgaattcactcaagtggataaaaagtgtattttaactctgtatatattacccttaagtcattttcctgtcttcactaatttagcaatgcattcatattagctgatgaaaataggcactcacaatgacaaccagagccagtttcttgtcttttttatacattttgtcatcccagagacaatcagtatgtgcttacctgtgttcaagtagagaaaaatacagtagagtctgataggacatattcttgtaccacagacaaaacaaatcttatgttgcatttactatcaactgctgctaatacgttattataaaacttacctagctcctgaattcttcctatcttatagcttaaaacaattaggatcataggcaaatcagttaccttgcagaaagagctttgtatgacagacattgtcttattttatttctgtaaaatattagctgtatgaatatgatttaattaacaagaaaacatttcttcctgattgacaacagtgttagacaaggtgcaaagcgaaactggttgctcaagttgatagaaaacaaaattctgaatatcttcaaattaaattcggtaaaaacacattattttttcatatgtgatgtattcatgcagaacaactatctttgtattttgtttttaaaatgtgtttaataaatgatcctttgtaaataa

SEQ ID NO: 46778 - DNA, 842 bp, Homo Sapiens
atgggctccgggcgccgggcgctgtccgcggtgccggccgtgctgctggtcctcacgctgccggggctgcccgtctgggcacagaacgacacggagcccatcgtgctggagggcaagtgtctggtggtgtgcgactcgaacccggccacggactccaagggctcctcttcctccccgctggggatatcggtccgggcggccaactccaaggtcgccttctcggcggtgcggagcaccaaccacgagccatccgagatgagcaacaagacgcgcatcatttacttcgatcagatcctggtgaatgtgggtaattttttcacattggagtctgtctttgtagcaccaagaaaaggaatttacagtttcagttttcacgtgattaaagtctaccagagccaaactatccaggttaacttgatgttaaatggaaaaccagtaatatctgcctttgcgggggacaaagatgttactcgtgaagctgccacgaatggtgtcctgctctacctagataaagaggataaggtttacctaaaactggagaaaggtaatttggttggaggctggcagtattccacgttttctggctttctggtgttccccctataggattcaatttctccatgatgttcatccaggtgagggatgacccactcctgagttattggaagatcattttttcatcattggattgatgtcttttattggtttctcatgggtggatatggattctaaggattctagcctgtctgaaccaatacaaaatttcacagattatttgtgtgtgtctgtttcagtatatttggattgggactctaagcagataatacctatgcttaaatgta

SEQ ID NO: 46779 - DNA, 2406 bp, Homo Sapiens
ctgctgctgaggcggctctcggtggaagagtccggtctgggcctcggcctgggcccgggccgctccccgcacctgaggcgcctgtcgcgcgccggcccgcgtctgctgagccctgacgccgaggagttgcccgccgcgccgccgccgtccgcggtgcccctggagccgtccgagcacgagtggctcgtgcggactgccgggggccgctggacccaccagctgcacgggctgctgctgcgcgaccgcggcttggcggccaagcgcgacttcatgtctggcttcacggccctgcattgggccgccaagagcggcgacggcgagatggcgctgcagctggtggaggtcgcgcggcgcagtggcgcaccagtcgacgtgaacgcacgctcccacggcggctacacgccgctgcacctggctgcactgcacggccacgaggacgctgccgtgctgctggtggtgcgtctgggtgcccaggtgcacgtgcgtgatcacagcgggcgtcgcgcctaccagtacctgcggcccggctcctcgtacgcgctgcgccgccttcttggcgatccaggcctgcgaggcaccacggagccagatgcgaccggtggtggaagtggcagtcttgctgccaggcgccccgtacaggtggccgccaccatcctcagttccaccaccagtgcatttctgggcgtcctggctgacgacctcatgctccaggacctggcccgaggcttgaagaagtcgagctccttcagcaagttcttgagcgcctcgcccatggctccacgtaaaaagacaaagatccgcggtggtctgccagccttctcagaaatctctcgtcgacctactccggggcctttagctggtctagtgcccagttttcctccaacaacctgaaggtccctggggctaccacctggttgatctatcgtggcctgctcgtcgcagtccaaacccgcccaagactgcagcccaatcaacgcctggagcctcattctgtttccagctttgtccagggcagcctgttttacccagatgggcctgcacctccagcttctttctgaagcatgacccatctccagagatgggatttgagaaatcagtgagagcttcctataaagaactccaggagacaggcctgaactctagagggaacttgaaatccagggtcaaaggttaaggggcagcagctggtctggcccctgaaagccttcacctgatgcctctgcagctacacaatcccaagacagagctagagcaagggtctctttaaatgttgaaagatgttaggttgtcagctttaagatatgtggtggttttgtaatttgatgcttttattctgtttttaaattgaaatgaggtaatgcaactttcgtaataaccttttggaattatatttttccacttttaggcaaagtgcttagacattttcaattttttttttgctaaatactttggaattctatttaaaaaatagatgatcaagatctaaaggaaattaatcccaaccaacaaacttaaaagtttatctacctcgttttaggcaatcaagattctggagagtcttgaacacagaataacgattgtgaccattatgaatgtaactaatttcagttgtactgtgaatgctaaatatttgcaaacaagtacatcttgaaagtaaaggtgacttagagaaaagagacattttgacagatacttttaatttgtggttgtctccatcatgaaatagaaacgtgtttggcacttgtgggtggctattttgatttggcatgactacttaattttttaaaaaaattgtggtttgtgaattgcacctttgtgccatgtttctgaatctggttttcaaatccagtggagcctttcagtgaaataggtgactattaaaaaagtaatagtattacagaaaaatgagcgattaaatagtaatggatacaattaaggagcaactattttatatgactgttctgtacaaacaaaaagtatgtaatacccattttaaaaaaccatttgaaagtagacaacttattccaaaatagcaaatgcagaatctctgctcagtgagcttggatgagtggcttaacttctctgggcctttgttcctatctgtaaatgagaaagtttgtagatattgccaagatttcccaggctcaatacagtgtaattattttatgttttaaagatatgaaatctgtttactcaaccaattttttaaatgtcatattgtgataatgctctgcttttgcaaattgtgtttgcatgtcattagttatatcaaatagttttgtggcatggggtagtggagcttccctccccacccccatatgtatcagtgaagcctttgaaattacttaaggcagtctttcatggaatgttttgattgagcaatgaaataaacagtcctccattttg

SEQ ID NO: 46780 - DNA, 1364 bp, Homo Sapiens
gagacttttaatcatctatcccttgtgctttacgcagaccctacaatacactagaggcttcaaagaggtcaaaaattcacatgtgtagacaaattaggtcccttaagatgccaggcaaacgaagtgctaccaaaacacgcaatgactgtcctaaaagtgcgttctgggatacacctgtaaacttggatcaagttccctcccctctcctcaaaatatatcgacttgtgctgaaagaaatcacgaccgatgctcacaattctgacctcgtaattatatagggggtggttttggtttctgcgtctttccctgattcagtggcaggtaacatatttcatgtacaaaatgaactgcaacaccacggcaaacaagggacaggccctcaaagttgtcggtagggagccaggaccccgccagtggcgtggggagacaccgtactaaacaagcttgcaaacagcaggcaccttcctgccactgaggaggaagggctggctaagggaggccggggcggaggaagccaagctctgcaggccctgacaaagtcctcccggcctccacgcgtcgccatggcaacgcggggtctgtgctggccgggattggccggcctggcgcgcgcagggcccgctgggaaagcgcgtccccgccgcggctccgccagtttgaacttggcgggccagatgtgggcggcggggcgctgggggcctacttttccctcttcctacgccggtttctctgctgactgcagacccaggtctcggccctcctcggactcctgctcagtccctatgacgggcgcacgtgggcaggggctggaggtggtgcgctcgccgtcgccgccgctgccgctgagctgcagcaattccaccaggtcgctgttgtctccccttggccaccagagcttccagtttgacgaggacgacggtgacggggaggatgaggaagacgtggatgatgaggaagacgtggatgaagatgcccatgattcagaggccaaagtggcgagcctgagaggaatggagttacaggggtgcgccagcactcaggttgaatcagaaaataaccaagaagaacagaaacaggtgcgcttaccagaaagccgcctgacaccatgggaggtgtggtttattggcaaagaaaaagaagaacgtgaccggctgcaactgaaagctctagaggaattaaatcaacaactagaaaaaagaaaagaaatggaagaacgtgaaaaaagaaagataattgctgaagaaaagcacaaggaatgggttcagaaaaagaatgagcaagtaaggaggggaaaatggatacacacattgacatctcttttgcaaaatatttcttcctattatacttcattacctaggttttaa

SEQ ID NO: 46781 - DNA, 5122 bp, Homo Sapiens
agatgttagtaggcaggaagaggcggagggagagctcagtgaaggagaacactggtatggaaactcttcagagactccgtcagaagcatcctatggggaagtccaggagaactataagttgtctctggaggaccggatccaggagcagtccacgtccccggacacctccttgggaagcacgactcccagcagccacacgttggagctggtggcactggacagtgaggtcctgcgagactcactgcagtgtcaagatcacctttccccgggagtgtcttctttgtgtgacgatgacccaggctccaacaagcccctgagcagcaatttgaggcggctgctggaggctggttccctcaaactcgatgctgcagccacggctaatggcagagtggagtcccccgtaaacgttggctcgaacctctccttttccccgccttcccaccacgcccagcagctcagtgttctggccaggaagttggccgagaagcaggaacagaatgaccaatacactccaagtaaccgttttatatggaatcaaggtaagtggttgccaaactcaaccaccacctgcagcttgtctccggattcagccatcctaaaactgaaagctgcagccaatgccgttctgcaggacaaatctctcaccaggactgaggagaccatgcgatttgagtccttttcctccccttttagctcccagtctgccagttctaccttggccgctttgtccaagaaggtcagtgaaagaagtttgactcctggtcaggagcaccctccaccggccagctccttcctttccctggcttctatgacctcctcagcggcccttctgaaggaggtggccgcaagggctgcgggcagtcttctggctgagaaatcatcgctgctgcctgaggaccctctaccgcccccgccttcagagaagaaaccagaaaaagtcactccgccacctccaccgccacctccaccacctccaccaccaccaccacaatccctggaattattattactcccagttcctaagggaagagtttctaaaccctccaattcagcctcagaagaggaaagtggaaagcctttccagtgtccaatatgtggtttggttattaaaaggaagagttactggaagcggcacatggtgattcacacaggtttaaaaagtcatcagtgtccgctctgtccattccggtgtgctcgcaaggacaatctcaaatcccacatgaaggttcatcagcaccaggatcggggagagacctttcagtgccagctgtgcccttttacttcctcacgccacttcagcctgaaactccacatgcgttgccatcagcacttcctgaggacagaagccaaggtgaaggaggagatcccagacccagatgtcaagggatctccccacctcagtgacagtgcctgcctggggcagcaaagggaaggaggagggacagagctagtggggaccatgatgacgtctaacactccagagaggactagccagggaggggctggcgtctcgcctttgctggtgaaggaggaacccaaggaagataacggcctgcccacctcctttactttgaatgctgccgacaggcccgccaaccacacaaagctgaaagacccctccgagtatgtggccaacagtgcgtcagcattgttcagccaggacatctctgttaagatggcgtctgattttctcatgaagctgtcagctgcaaatcagaaggagcccatgaatcttaattttaaagtgaaagaggagcctaaggaaggggagtccctaagcacgactttgcctcggtccagctatgtgttcagcccggaatctgaagtgtcagccccaggcgtctctgaggacgcactaaagccccaggaagggaagggaagtgtgctaaggcgggatgtgtcagtcaaagcagcctctgaacttctcatgaaactctcagcggaaagctacaaggaaacacagatggtgaagattaaagaggaacccatggaggttgacatccaggactcccatgtctcgatatcacccagccggaatgttggctacagcactttaatcgggcgagagaaaaccgaacccttacagaagatgccagagggcagagtacccccagagagaaacctcttcagtcaggatatctctgtgaaaatggcttccgagctcctctttcaactgtcagaaaaagtgagcaaagagcacaatcatacaaaagaaaacaccatccggaccacgaccagccctttcttttcagaagacacatttagacaatcaccattcacctccaattcaaaagaactgctgcccagtgactccgtgctgcacggaagaatatcagctccagaaacagaaaagatagtcctagaggcaggaaatggattaccatcctggaaattcaatgaccagctttttccctgtgacgtgtgtgggaaagtgtttggccgacagcagacattgtcccgacacctctcgctgcacacagaggaaagaaaatacaaatgccacttgtgcccctatgctgctaagtgccgtgcaaatctgaaccagcacttgaccgtccattccgtgaagctggtgagtacagacaccgaggacattgtcagcgccgtcacctctgaaggcagtgatgggaagaaacatccttattattacagttgtcacgtgtgtggatttgagaccgagctcaatgtccagtttgtcagccacatgtcactccacgtggacaaggagcagtggatgttttcgatctgctgcactgcctgcgacttcgtcaccatggaggaagcagagataaagactcacattggcaccaagcacacaggggaagacaggaagacccccagcgaatcaaatagcccctcttcatcctccctctcagctctgagtgattcagccaacagcaaagatgattcagatggctcccagaaaaacaagggcgggaacaatctgctggtcatctctgtcatgcctgggagccagccctcactgaacagtgaggaaaagccagagaaagggttcgaatgtgttttttgcaactttgtctgcaagacgaagaacatgtttgagcgtcatctgcagatacacctcatcacccggatgtttgagtgtgatgtgtgccacaagttcatgaagacccccgaacagctgctggagcataagaaatgccacactgtccccaccggtgggctcaactcaggacagtggtgagtttcagactcctctagggtgcccattctgcatttattccaccaaccgccccgctgccatggagtgccacctcaagacccactacaagatggagtacaagtgccggatctgccagacggtgaaggccaaccagctggagctggagacgcacacccgggagcaccgcctgggcaaccactacaagtgcgaccagtgcggctacctgtccaagaccgccaacaagctcatcgagcacgtgcgcgtccacaccggggagcggcccttccactgtgaccagtgcagctacagctgcaagcgcaaggacaatctcaacctgcacaagaagctgaagcacgccccacgccagaccttcagctgcgaagagtgcctgttcaagaccacacaccctttcgtcttcagccgccacgtcaagaagcaccagagtggggactgccccgaggaggacaagaagggcctgtgtccagcccccaaggaaccggccggcccgggggccccgctcctggtggtcgggagctcccggaatctcctgtctcccctgtcagttatgtctgcctcccaggctctgcagaccgtggccctgtcggcagcccacggcagcagctcagagcccaacctggcactcaaggctttggccttcaacggctcccctttgcgctttgacaagtaccggaactcagattttgcccatctcattcccttgacaatgttataccccaagaaccacttggatctcacattccaccctccccgacctcagactgcgcctcccagcatcccctcacccaaacactccttcctggcctatctcggactgagagaaagagcagagactgtctgagggcagccatgttctgtaccaaaaacagagagacaaaagacaaaaaaaaaaaaaaaaaccacaaaacttaaacacaaccccagcaggtgtatgttgctgcaaaacctacagaccccgatgggtctggaacatgtgtactgtatatctttagtaaggaatagaaaattggctctgtgtgtatacctattgcattgacctgaaagctgctttatccaatcttcagagaggtgacctactgcatacttctaccttcagaggcatgcctccccagccacccactcccactctcagcccttctccgtacttttctctgaaaggaatcttgtcttgttaaaccctaaagagagtgtccttaatagcaatcagcacttgtaagcttatatactggtgcatttggttttctgttgggtgaatgcggtgtgtgggcgtttgtggattctgaaagagaaagccgtgtgtcgtgtgccatgacatttctattgcacattctttgtactggcttctttaacagcgatgaacgttcttttccctcctgggttgttcatccacgacagtctctccctgtgctccttcatcacctttccctctctctttgatggctacagagtggtagggcctggtgcttagtcgatgaaggaatggtagccatctacagtgctgctggagatttccgccagagcgctggagaccttgcgctcagatcttctctggtgatgaagaggcgaggaatcaagtgactgatctggaagaaatatctcgcagcactgcagctaacatcacagaacttaagtgtgttttgtgtgtgtgcccacacgtagacaaatgtgtacggtgcacacacacagtgcatcattttttaagggcagattatatatatatatgagatgtattaattcagtggttaccatttgtttgcaggaaaaagaaatgtatgggtgaaaaaatttatggttgataaatccagccaaggagattaaaaggggtttggataaattctgggtataaatgctcagactaaaaaaaagaaatggcagttttgcacagtgctatggtcttgcactagtttttgtttctcatct

SEQ ID NO: 46782 - DNA, 354 bp, Homo Sapiens
atgaaactgtcctctgctgcggggcaggagtctccaggtcacccccatccctccccacctgcctggaccctgaagaagccttctgagtctgtggctcaacgtgcgatgtgcagtgcaagggcctgccccgtagcctgccccgtaggctgccccatagcctgccccgtaagctgccccgtagcctgccccgtaggctgccccgtaggctccatggccactgccccacaaggcctgtctccacaggaatgggaagcggacagggagacgggcagcagctcacatgctgggacaacgcagtgttcaatccattctccatccagcagctccagacatctttccagaacacaaacctga

SEQ ID NO: 46783 - DNA, 1767 bp, Homo Sapiens
agctggcccgcttgaggcgtagggggtggcgctctccgttcggcggcgctcccatggcgcacattaccattaaccagtacctgcagcaggtgtacgaagccatcgacagcagagatggagcatcttgtgcagagttggtgtcttttaaacatcctcatgttgcaaacccacgacttcaaatggcctctccagaggagaagtgtcaacaagtcttggaacccccttatgatgaaatgtttgcagctcatttaaggtgcacttatgcagtggggaatcatgacttcatagaggcatacaagtgccagaccgtgatagtccaatatcctttgtcgttcatggcagctgcagatcaacagttggtaaagaaaggaaaaagcaaagttggggacatgttggaaaaagcagcagagttactgatgagctgtttccgggtctgtgccagcgacacccgtgctggtatagaggactctaagaagtggggcatgctgtttctggtgaaccagctgtttaaaatctacttcaagatcaacaaactccatttatgtaaacccctaattagagcaattgacagctcaaacctgaaagacgattacagcactgcacagagagtaacatacaaatactacgttggacgcaaggctatgtttgacagcgattttaagcaagctgaggagtacctgtcatttgcctttgagcattgtcaccgttctagtcagaagaacaaaaggatgattctgatctatttgcttccagtaaaaatgctattgggtcacatgcccactgtggagctcctgaaaaagtatcacctgatgcagtttgcggaagtaaccagagctgtgagcgagggcaacctgctgctgctgcacgaggcgctggcgaagcacgaggccttcttcattcgctgcggaatcttcctcatcctggagaagctgaagatcatcacctacaggaacctctttaagaaagtgtatttgttactgaaaacacaccagctgtctctggatgcttttctggttgccttgaagttcatgcaggtggaggacgtggacattgacgaagttcagtgtattctggctaacttgatatacatgggacacgtcaaaggctacatatcgcatcagcatcagaagctggtggtcagcaagcagaacccatttcctcccctgtccacggtgtgttgaaagtacacggagccccgaggacgggtgagcagttgtttctttccactttggttgtgctgatgagaccggtccggtactgcaacaaggctccctgaagccggaactcttggaggcgcttttcccagggatgctgaggctgagattttcagcacacccgagttaatctccttcatttgtaactaatttcagcctgatgaaaacctggaattcctttttcacagactcggctggttctggagtctttgtgagacttctttgaaggaggctttgcgtgaaggctgctcggctcacttttcctaagtgtggttcctgaaggctgtctttgtaactttttgtagttctttgtgtaaaaagcgtattctgaatttatacacatggcatgttcttcattatatcttccaggatacatctatttttatatattaaatttgaatgtgttatcaaaatgcttggttaacttaaggcacctttttaaaagcagaatttaatttgatttaaattttccagattttatagcttgcctgtatggatgctcctcaatttatgatagggttacatcccaataaacttattttatttgcctttg

SEQ ID NO: 46784 - DNA, 480 bp, Homo Sapiens
atgtgtggtgccagtggccagcaccccatgagatgcaaacatcaggggatccagctaatacctcattcccccttggggcctggcctagactgggtatgtggggtgtgtgtgtgtgtgtgtgtgtgtgtgtgtgtgtgtgtgtgtgtgtatttgttctctatctatccatccatccatccatccatccatccagggattcattcattctacatgccaaatgtgggccaggctcaagggacccagagaggagagccctctgggagtccccagtctggtagaggaagcaggagtagacacaatgagagcacattagaaacaggcacaatcacagatggaagccaggtgctgtgggtgccccaaggaggaattgcctcgggtggattagggaagacttcccagctaaggcttggagcacaggtaggagttcatttggtgctaatagtagaagtcgtggccaggtgcagtggctcacgcctgtaa

SEQ ID NO: 46785 - DNA, 2273 bp, Homo Sapiens
agtgcccgcgcagcgttgagttgcacagcggtattctcaccaggccctgcaatcggtgggccacagtgccggccacagagatggtggaaggaccaggctgtactctgaatggagagaagattcgcgcgcgggtgctcccgggccaggcggtgaccggcgtgcggggaagcgctctgcggagtctgcagggccgcgccttgcggctcgcagcctccacggttgtggtctccccgcaggctgctgcactgaataatgattccagccagaatgtcttgagcctgtttaatggatatgtttacagtggcgtggaaactttggggaaggagctctttatgtactttggaccaaaagctttacggattcatttcggaatgaaaggcttcatcatgattaatccacttgagtataaatataaaaatggagcttctcctgttttggaagtgcagctcaccaaagatttgatttgtttctttgactcatcagtagaactcagaaactcaatggaaagccaacagagaataagaatgatgaaagaattagatgtatgttcacctgaatttagtttcttgagagcagaaagtgaagttaaaaaacagaaaggccggatgctaggtgatgtgctaatggatcagaacgtattgcctggagtagggaacatcatcaaaaatgaagctctctttgacagtggtctccacccagctgttaaagtttgtcaattaacagatgaacagatccatcacctcatgaaaatgatacgtgatttcagcattctcttttacaggtgccgtaaagcaggacttgctctctctaaacactataaggtttacaagcgtcctaattgtggtcagtgccactgcagaataactgtgtgccgctttggggacaataacagaatgacatatttctgtcctcactgtcaaaaagaaaatcctcaacatgttgacatatgcaagctaccgactagaaatactataatcagttggacatctagcagggtggatcatgttatggactccgtggctcggaagtcggaagagcactggacctgtgtggtgtgtactttaatcaataagccctcttctaaggcatgtgatgcttgcttgacctcaaggcctattgattcagtgctcaagagtgaagaaaattctactgtctttagccacttaatgaagtacccgtgtaatacttttggaaaacctcatacagaagtcaagatcaacagaaaaactgcatttggaactacaactcttgtcttgactgattttagcaataaatccagtactttggaaagaaaaacaaagcaaaaccagatactagatgaggagtttcaaaactctcctcctgctagtgtttgtttgaatgatatacagcacccctccaagaagacaacaaacgatataactcaaccatccagcaaagtaaacatatcacctacaatcagttcagaatctaaattatttagtccagcacataaaaaaccgaaaacagcccaatactcatcaccagagcttaaaagctgcaaccctggatattctaacagtgaacttcaaattaatatgacagatggccctcgtaccttaaatcctgacagccctcgctgcagtaaacacaaccgcctctgcattctccgagttgtggggaaggatggggaaaacaagggcaggcagttttatgcctgtcctctacctagagaagcacaatgtggattttttgaatgggcagatttgtccttcccattctgcaaccatggcaagcgttccaccatgaaaacagtattgaagattggacctaacaatggaaagaatttttttgtgtgtcctcttgggaaggaaaaacaatgcaattttttccagtgggcagaaaatgggccaggaataaaaattattcctggatgctaatatctgtagattctctggcatttagtctcttcaaactgtgtataatgtttggtcctcctctgtttcatagaaaagtcatagaatatctatgatacattgaaaagttactgcaatatttgagaactgttctttttttttcttgtgtgtgccatctttccattgttggctacgtcttttcttttgccttgatgaacgttctatgtatttcatcggatatacagcatattccatttaggatgtgtatttaatgcatttagtaatgacgataaagtgtttttagtatgcttttagtctcttgtaactggggagaagcagtgttttttttttaggaaaggattatgcgacacaataaaataagatattctgtctgtagtg

SEQ ID NO: 46786 - DNA, 963 bp, Homo Sapiens
tccaagagcctctgcctggtctgtggggacgtggcctccggctaccactacggtgtgtcatcctgtgaggactgcaaagccttcttcaagaggaccatccaggggagcatcaagtacagctgtccggcctccaacaagtgtgagatcatcaagcggagacgcaaggcctgtcaggcctgccgcttcaccaagtgcctgggagtgcgcctggatcgcgtccggggtgggcggaagaagtacaagcggtgccagaggtggacccgctgcccttcccgggcgccttccctgctgggcccctggcagtcgctggaggcccccagaagacaccccagtgaatgcgctggtgtctcatctgctggtgccgtggctaccctctgtgacctctttgaccgagagatcgtatttaccgtcagctgggccaagagcatcccaggcttctcattgctgtcgctgtctgaccagatgtcagtactgcagagcgtgtggatggaggtgctggtgcccggtgtggcccagcgctcactgccactgcaggatgagctggccttcactgaggacagagtcctggatgaagagggggcacgggcagctggcctgggggaactggggactgccctgctgcaactggtgcggcggctgcagtccctgcggctggagcgaggggagtacgttctactgaaggccctggcccttgccaattcagactctgtgcccatcgaagatgccgaggctgtggagcagctgccagaagctccgcacgaggccctgctggagtatgaagccggccgggctggcaccggagggggtgctgagcggcggcggccaggcaggctgctgttcacgctaccgctcctccaccagacagcgggcaaagtgctggcccatttctatggggtgaagctggagggcaaggtgcccatgcacaagctgttcttggagatgctcgaggccatgatggactga

SEQ ID NO: 46787 - DNA, 4982 bp, Homo Sapiens
caggccctcatcaccttttttcaagtcaagatttcatcccatacatgcatgactcaatcagatttggaaatgtggatatgccctgcgtccaagcccaatatagcccttcccctccaggttccagttatgcggcgcagacatacagctcggaatacaccacggagatcatgaaccccgactacaccaagctgaccatggaccttggcagcactgagatcacggctacagccaccacgtccctgcccagcatcagtaccttcgtggagggctactcgagcaactacgaactcaagccttcctgcgtgtaccaaatgcagcggcccttgatcaaagtggaggaggggcgggcgcccagctaccatcaccatcaccaccaccaccaccaccaccaccaccatcaccagcagcagcatcagcagccatccattcctccagcctccagcccggaggacgaggtgctgcccagcacctccatgtacttcaagcagtccccaccgtccacccccaccacgccggccttccccccgcaggcgggggcgttatgggacgaggcactgccctcggcgcccggctgcatcgcacccggcccgctgctggacccgccgatgaaggcggtccccacggtggccggcgcgcgcttcccgctcttccacttcaagccctcgccgccgcatccccccgcgcccagcccggccggcggccaccacctcggctacgacccgacggccgctgccgcgctcagcctgccgctgggagccgcagccgccgcgggcagccaggccgccgcgcttgagagccacccgtacgggctgccgctggccaagagggcggccccgctggccttcccgcctctcggcctcacgccctcccctaccgcgtccagcctgctgggcgagagtcccagcctgccgtcgccgcccagcaggagctcgtcgtctggcgagggcacgtgtgccgtgtgcggggacaacgccgcctgccagcactacggcgtgcgaacctgcgagggctgcaagggctttttcaagagaacagtgcagaaaaatgcaaaatatgtttgcctggcaaataaaaactgcccagtagacaagagacgtcgaaaccgatgtcagtactgtcgatttcagaagtgtctcagtgttggaatggtaaaagaagttgtccgtacagatagtctgaaagggaggagaggtcgtctgccttccaaaccaaagagcccattacaacaggaaccttctcagccctctccaccttctcctccaatctgcatgatgaatgcccttgtccgagctttaacagactcaacacccagagatcttgattattccagatactgtcccactgaccaggctgctgcaggcacagatgctgagcatgtgcaacaattctacaacctcctgacagcctccattgatgtatccagaagctgggcagaaaagattccgggatttactgatctccccaaagaagatcagacattacttattgaatcagcctttttggagctgtttgtcctcagactttccatcaggtcaaacactgctgaagataagtttgtgttctgcaatggacttgtcctgcatcgacttcagtgccttcgtggatttggggagtggctcgactctattaaagacttttccttaaatttgcagagcctgaaccttgatatccaagccttagcctgcctgtcagcactgagcatgatcacagaaagacatgggttaaaagaaccaaagagagtcgaagagctatgcaacaagatcacaagcagtttaaaagaccaccagagtaagggacaggctctggagcccaccgagtccaaggtcctgggtgccctggtagaactgaggaagatctgcaccctgggcctccagcgcatcttctacctgaagctggaagacttggtgtctccaccttccatcattgacaagctcttcctggacaccctacctttctaatcaggagcagtggagcagtgagctgcctcctctcctagcacctgcttgctacgcagcaaagggataggtttggaaacctatcatttcctgtccttccttaagaggaaaagcagctcctgtagaaagcaaagactttcttttttttctggctcttttccttacaacctaaagccagaaaacttgcagagtattgtgttggggttgtgttttatatttaggcattgggggatggggtgggagggggttatagttcatgagggttttctaagaaattgctaacaaagcacttttggacaatgctatcccagcaggaaaaaaaaggataatataactgttttaaaactctttctggggaatccaattatagttgctttgtatttaaaaacaagaacagccaagggttgttcgccagggtaggatgtgtcttaaagattggtcccttgaaaatatgcttcctgtatcaaaggtacgtatgtggtgcaaacaaggcagaaacttccttttaatttccttcttcctttattttaacaaatggtgaaagatggaggattacctacaaatcagacatggcaaaacaataatggctgtttgcttccataaacaagtgcaattttttaaagtgctgtcttactaagtcttgtttattaactctcctttattctatatggaaataaaaaggaggcagtcatgttagcaaatgacacgttaatatccctagcagaggctgtgttcaccttccctgtcgatcccttctgaggtatggcccatccaagacttttaggccattcttgatggaaccagatccctgccctgactgtccagctatcctgaaagtggatcagattataaactggattacatgtaactgttttggttgtgttctatcaaccccaccagagttccctaaacttgcttcagttatagtaactgactggtatattcattcagaagcgccataagtcagttgagtatttgatccctagataagaacatgcaaatcagcaggaactggtcatacagggtaagcaccagggacaataaggatttttatagatataatttaatttttgttattggttaaggagacaattttggagagcaagcaaatctttttaaaaaatagtatgaatgtgaatactagaaaagatttaaaaaatagtatgagtgtgagtactaggaaggattagtgggctgcgtttcaacattccgtgttcgtactcccttttgtatgtttctactgttaatgccatattactatgagataatttgttgcatagtgtccttatttgtataaacatttgtatgcacgttatattgtaatagctttgcctgtatttattgcaagaccaccagctcctggaagctgagttacagagtaattaaatggggtgttcacagtgacttggatacaccaattagaaattaaataagcaaatatatatatatatataaatatagcaggttacatatatatatttataatgtgtctttttattaaccatttgtacaataaatgtcacttcccatgccgttattttatggttcatttgcagtgacttttaaggcagtactgtttagcactttgatattaaaattttgcttatgttttgctaaattcgaataatgtttgaagatttttaggtctaaaagtctttatattatatactctgtatcaagtcaaaatatctttggccattttgctaagaaacaaactttgaatgtcaaactgatgtcacagtagtttttgttagctttaaatcatttttgctttagtctttttaaaggaaaataacaaaactatgctgtttatattgtcattaaattatacaatcaaacaaatgccaaatgaattgcctaattgctgcaaagtataacccagataggaaatcatatgtttttttccaagagtcattctaatatttgattatgttatgtgtgcttttatgaaagattgttatttttatatatcaagatgatagaacctggaatgttaggattttgaaatgttagacttggaaggggcctggtctgtcaactagtccaaccccttaaaattcatagaggagcaaactggggcccattgaagggtgaagagttactcaaggtcaaacagctggtaacagaatcaagactaagacctaatttacctttccatactctttttttttctcaacttcatctatataaaatcaggcttttaaacataaccactaatatttacctgaagataaccatgagtaaagtatacttttgcattaattttttgagcttatatgcaaacataataaatattattaaatatcaggaaagctaacatttcatacaagatagcttcagaccaaattcaaattgaatttgaataaattagaaatactgtgcatacataaccttcttgtgcaccatgagtatttggaaagttaatccttgtttttgtcgtgtctataaaggaagaacaaaacaaaataaaaacagagccctagagaaatgctgttactttttatttttacacccatcagatttaaggaaaagactttttagccattataatctagtggttggaaggaatgaagaagcttttttagtaataggtccagatatgagtgctaaaaataaagatgatagcatgttcttctgtcttccatagttattacaactatgagagcctcccaagtcatcttatcaactcaactcccttttttttgtcttaatgttgcacataagtttatacagagtggatgaccacactagcacagaagagaacaacatgtattaaagcaggtgattcctccccttggcgggagagctctctcagtgtgaacatgccttctgtgggcggaaatcaggaagccaccagctgttaatggagagtgccttgcttttatttcagacagcagagttttccaaagtttctctgctcctctaacagcattgctctttagtgtgtgttaacctgtggtttgaaagaaatgctcttgtacattaacaatgtaaatttaaatgattaaattacattttatcaatggc

SEQ ID NO: 46788 - DNA, 2566 bp, Homo Sapiens
ccaacctgagcaaacacagcagcccgagtgttcccaaggccaaaatgctgagaacgtccactcctaatctgtgtggtggtctgcattgccgggccccctggctctcttctggcattctctgcctctgcctcatattcttgttgggccaggtgggcttgctgcagggacacccccagtgcctggattacgggccccctttccagccccctctgcaccttgagttttgctctgactatgagtccttcggctgctgtgatcagcacaaggaccgccgcatcgctgcccggtactgggacatcatggaatattttgatctgaagagacatgagctgtgtggagattacattaaagacatcctttgccaggagtgctcgccctacgcagcccacctctacgacgccgaaaacacccagacgcctctccggaatctcccgggcctctgctctgattactgctctgccttccattctaactgtcactcagccatttccctgctgaccaatgaccgcggcctccaggagtctcatggaagggacggtacccgcttctgccacctcctggaccttcctgacaaggactattgcttccctaatgtcctgaggaacgactatctcaaccgccacctgggcatggtggcccaagatcctcagggctgcctgcagctctgcctgagcgaggtggccaacgggctgaggaaccccgtctccatggtccatgctggggacggcacccatcgcttctttgttgccgagcaggtaggagtggtgtgggtctacctccctgatgggagtcgcctggagcaacccttcctggacctcaagaacatcgtgttgaccaccccatggatcggggatgagagaggcttcttggggttggcttttcaccccaaattccgccacaatcgcaagttctatatttattattcgtgcctggacaagaagaaggtagaaaagatccgaattagtgagatgaaggtttctcgggctgatcctaacaaagctgacctgaaatcagagagggtcatcttggagattgaagaaccagcctcaaaccataatggcggacaacttctttttggcctggatggctatatgtacatattcactggggacgggggacaggctggagatccctttggcctgtttggaaatgctcagaacaaaagttccctgctgggaaaagttttaaggatcgatgtgaacagggcaggctcacatggcaagcggtaccgagtcccctcggacaatccatttgtttctgagccaggggcccaccccgccatctatgcctatgggatcaggaacatgtggcgttgtgctgtggaccgaggggaccccatcacgcgccagggccgaggccggatattctgtggggacgtgggccagaacaggtttgaagaggttgacctcattttgaaaggtggaaactatggctggagagcaaaggaagggtttgcatgttatgacaaaaaactttgtcacaatgcctctttggatgatgttctgccaatctatgcttatggccatgcagtggggaagtcagtcactggaggttatgtctatcgtggttgtgaatccccaaatctcaatggcctgtatatctttggagacttcatgagtggtcgacttatggctttgcaggaagatagaaaaaacaagaaatggaagaagcaggatctttgcctgggcagcaccacgtcctgtgccttcccagggctgatcagcacccatagcaagttcatcatctcctttgctgaagatgaagcaggggagctgtatttcctggcgacctcttacccaagtgcctatgcaccacgtggatctatttacaagtttgttgacccctcaaggcgagcacccccaggcaagtgcaaatacaagccagtgcccgtgagaaccaagagtaagcggatcccgttcagaccactcgccaagacagtcttggacttgctaaaggaacaatcagagaaagctgctagaaaatcttccagtgcaaccttagcttctggcccagcccagggtttgtctgagaaaggctcctccaagaagctggcttctcctacaagcagcaagaatacattgcgagggcctggtacaaagaagaaagccagagtggggccccacgtccgccagggcaagaggaggaagagcctgaaaagccacagtggcaggatgaggccatcagcagagcagaagcgagctggcagaagtctcccttgacctattggtcaaggtggccgacagggtgacgtgagagaggagagccacctcatcaaatgaaagtcactgctgaataaagaccttagaagtctgggaagccagggtagaggtggggcagggcggttttcctctccctgggaaatcttgctgtctactgaataaataaatgcaccttctctgtatgcagtgcttctgtgggagaccatatcccagattgctggtgcacctgggttatggtaagcactagtccatgagcctgcttggaatcacactggatgtctccgttttgtcttgtaaatgcctacaacctgaggtaataaatcaacatttgctcaaactggcacata

SEQ ID NO: 46789 - DNA, 1157 bp, Homo Sapiens
atgagacaggaacttaaaaacttaaagctagctgtggacagagaaagggagcgcccagtgaaagcaggaaagaaaaaggacaagaaaggaaagaaaggcaaaaagaaagagaagaaggcaaagaaggataaagatctgacagctgacaggaccatcgagtctctgtataaggaactggtggaagaaggattactgatccaggctctgaaagtcaacctctctgattacattggtgagtacagctacctggggactactcttcgccaggtgtccatagaacccatgccctccctcctggatgtcagacagctcatcacattgtacggaatctggccattaggttctgcagcagtgcatgagaaagctcctttggtgaaatcgctactgttagccgggccgtctggggtagggaagaaaatgctggtccatgccatctgcaccgaaacgggagccaacctcttcaacttgtcctcctctaacattgctgggaaataccctggcaaaaatggcctccaaatgatgctgcatgcagtcttcaaggtggctcgacagctccagccctccgtggtgtggattgaagacacagaaaaaaccttctacaaaaaagttcccaacgcagaaaagatgaatgaacctaaacgcctgaaaaaacaccttccccaaatcctgaaactcctgaaaccagatgaccggattctgattgtggggaccacacggcgtcccttcgatgctgaactccaatctttctgcaaagtttaccagaaaattattttggtgcccagaccagactatgcttccagatacgttctgtggaagcaaatcattgaacgcaatggaggagtcctcaccagtgccttgaatgtcagctgcctggcgaaggtcactgacggcttcacccaaggacatatagtcgaagtggttaaaggcgtgctcacagatcagagaatccggcggcaaattcataaacctctcactgcagttgagtttattacggcgataaccagcatgaatccagtgtacaaagaggaagaagagagctttaagaactggtatgccaaaactcctctgggtaaaaaacgtgccttggcgataacaggaggcagcacagaaaaggcaaaggacaaagggaaaaggaaataaaagaaagagaaaaaggc

SEQ ID NO: 46790 - DNA, 591 bp, Homo Sapiens
tggcaagacaagtgggtgaacggcaacactgcttttcatcaggaacaaggacctcagctattaaagaaacatttagatacttttcttaaaggagagagtggactgagggtattttttcctctttgcagaaaagaggttgagatgaaatggtttgcagaccggggacacagcgtagttggtgtggaaatcagtgaacttgggatacgagaattttttacagagcagaatctatcttactcagaagaaccaatcaccgaaattcctggaaccaaagcatttaagagttcttcggggaacatttcatcatactgttgcagtatttttgatcttcccaggacaaatattggcacatttgacatgatttgggatagaggagcattagttgccattaatccaggtgatcgcaaatgctatgcggatataatgttatccctcctgggaaagaagtttcaatatctcctgtgtctttcttacgatccaactaaacatccaggtccaccattttatgttccacatgctgaaattgaaaggttgtttggtaaaatatgcaatatacattgtcttgagaaggttgatgcttttgaagaatga

SEQ ID NO: 46791 - DNA, 1280 bp, Homo Sapiens
cctgagggtgcgactccgccgcgatggtgacccggttcctgggcccacgctaccgggagctggtcaagaactgggtcccgacggcctacacatggggcgctgtgggcgccgtggggctggtgtgggccaccgattggcggctgatcctggactgggtaccttacatcaatggcaagtttaagaaggataattaattacacaaacccttcacagactgctctggtgcctggtggtgctagctcctcccacctcagcacctgctgcatctggagcagcccaagcctcaggatggacaagaggaaacccacagctcagcttcaggcttcttatgtttctgaaaacagcttggatattttaatgcacgttgcattaaacctcactgaaacctgctccgtgcccggatgttgatcatgctggtggcttggttactgtgactgtagctggagtggcacaggtgacccaggcgtcctttcagctccagaatgttgcaagtctaggagagtgttccaatggctgacagaaactgcctatttgaaatggctcataagtagtatctgcagtgtgttcatccgttgctgccttaacaagtcacccacacgtagtggcttaaagcaacgaacattcactctctcacagtctgtgtcagtcggggatttgggagtgatgtatctgggtggttgtggcccagagtctctcatgaggttgcagttaagacatcagccaaggccacttcgtctgaggaaggctcaactggggctggagccacttccaagccagtgccctcacgtggctgtcggtgacagccacagttccttcccatgggggcccctacacgaagctgcttgagcatcctcacggcatggcctctgccttccccagagcaggtgaaccaagggagaggaaggagcaagccacagtgcttctatgagccaccctgagaagtctcacgtgatcacttccgccacagcctgtttatcaaaagcaagccccccaggcccagcccacgtgcagagggaggagaatgaggttctgtgttttgaagggaagaatatcagaattggtagacatttcaaactgtcacattagggatacaaaaatgaacaggctgggagtggtggctcagcctacaatcccaacactttgggaggctgaggaaggggcatcacttgaaccaggagttcagtactaacctgggcaacaaagaggcccctgtctctgataaaaagaaaaaaaatgaaaaaataaaaatgaacaggtataaaaagagaatatggtacaaa

SEQ ID NO: 46792 - DNA, 1752 bp, Homo Sapiens
ccacccgggacttgggcagcggcgccggcagcccagcgtctatttgcgcttaagagccagcaaggaagctccaggggccccagctggccgtgctcccccgggatgcaagtccctgcgctgacgcccggcagcggctggcacgggcgcggctgctccgggtgcacagggatgctgctgtttcggggaccccggcgccctgccttggccagccccgcgggcccctgaggccactctccggagcgcgccgccgctgggcttctggcgctgcctgaggcatcctccccaaccaccgaacctccggcggttctcctcggcccagaccgatggagccggggatgctgggtccacacaacctcccacaccacgagccaatcagcttcggcatcgatcagatcctgagcggccccgaaaccccagggggcggtctaggcctgggtcgcgggggccagggtcatggggagaatggggcgttctcgggtggataccacggagcctcgggctacggtcccgccggctcacttgccccgctgcccggcagctccggagtgggcccaggcggcgtgatccgcgtccctgcgcaccgcccgctgcctgtgccgccgcccgctgggggggcgcctgcagtgcctgggccctcgggtttgggcggcgccggaggcctagcgggactcaccttcccctggatggacagcggccgccgctttgccaaggaccggctcacggctgcgctctcgcccttctctgggacgcgccgcataggccacccctaccaaaaccggacccctccgaagcggaagaagccgcgcacgtccttctcccgctcacaggtgctggagttggagcggcgcttcctgcgccagaagtacctggcctctgcggagagggcggcgctggccaaggccttgcgcatgaccgacgcacaggtcaaaacgtggttccagaaccgacgcaccaagtggcggcgccagacggcggaggagcgcgaggccgagcggcaccgcgcgggccggctgctcctgcatctgcagcaggacgcgttgccacggccgctgcggccgccgctgcccccggaccctctctgcctgcacaactcgtcgctcttcgcgctgcagaacctgcagccctgggccgaggacaacaaagtggcttcagtgtccgggctcgcctcggtggtgtgagcgacgcccgtccgatcggcgtggagcgccgggcccggagcggtggagcgcgcggctgcctgcgtccatggtctagtggcagccgggcgcgtgaggagcggcaggccttgaggctgtcgtcgagggctcctccaccaccggccggctcccaagccagcgttgcgcagatgcacggccagctcagaggcggcctttcccgccatttttcacttcactgccgttacgccctcgctggaacctgaggcgccgagagggcgggacctgcaggacagtagccaatgaggtgcggggagggggccgggctggccaatgggagctgctttcctgagggactcgaaattctccggcgggtggtcgggagctggggctctgaggggctctagcggcgttgcgcgcggtgccggctgggtctgtaccaaaggtgtgaaggaaagaagacaccgaccacggcgaagcaatagagggggtgctggagcgcgagaggctggctgattgtgaccgaaaccagagggttgtccaccccgggcatctcatccctcaactgtaaaataatcgctaaggattccttcctgac

SEQ ID NO: 46793 - DNA, 1320 bp, Homo Sapiens
atggccagtgaggaagtcttgaagaatagagccataaagaaagcaaagcgcagaaatgttggattcgaatctgacactggaggagcctttaaaggttttaaaggtttggtggtaccttctggaggaggacgctttcctggatttggtagtggcgctggagggaagcctttggaaggactgtcgaatggaaacaacataaccagtgcccctcccttcaccagtgcaaaggcagcggcagagcccaaggtagcctttggttctcttgctgcaaatggccctaccgccttggttgataaagtttcaaatcccaaaactaatggggacactcagcagccctcctcctctggccttgcttccagtaaagcttgtgtcggaaatgcctatcacaagcagttggccgccttgaactgctccgtgcgggattggatagtgaagcacgtgaatacaaaccccctctgtgatctgacacctatctttaaggactatgagaaatatttagcaaacattgaacagcaacacgggaacagtggcaggaattctaaaagtgaatctaacaaagtggcggctgaaacacagtctccttccctttttggctcaacaaaattacagcaagagtcaacgtttttgtttcatggcaacaaaactgaagatacacctgacaagaaggtggaggtggcatctgaaaagaaaacgaacccatcatcactaggagcgacaagtgcctcatttaatttcgacaagaaagttgatagctctgttttgggctcattaagctctgtccccctgactggattttctttctcccctggaaactccagtttatttggcaaagatactacccagagtaaaccagtctcttcaccatttcccactaaaccattggagggccaagcggaaggtgacagtggtgaatgcaaaggtggagatgaagaagagaatgatgagccgcccaaagtagtagttaccgaagtaaaagaagatgctttttactccaaaaagtgtaaactgttttacaagaaagacaatgagtttaaagagaaaggcataggtactctgcatttaaaacctacagcaaatcagaagacacagcttttggtgcgggcagacaccaatttaggcaacatattgctgaatgttctgattccacccaatatgccatgtacgcgaacagggaagaataacgttcttatcgtctgtgttccaaatccaccaattgacgagaagaatgccaccatgccagtcaccatgttgattcgggtaaaaaccagcgaggatgcagacgagttgcacaaaattttactggagaaaaaggatgcctga

SEQ ID NO: 46794 - DNA, 534 bp, Homo Sapiens
atgccccaccccacacgcacccccgccctctgtcaagcaggactcgggctctccgttggccgagcagacgttttatttgtggaacggaattgctgtcgggatgggcgtggggtcgttagcagcataatcaacacccacatccaccctgggggcagccacgtcttgtcaacaggtggaggccgtgacatgctgcaattagcagctaatgaggaggcctgtgtgacccacgcctccgtcacagaattggaatctcagcttccggaaccgcccactccaccatcagccaagccgggaccactccatagtgcctggcccctgagctgtgcccatgctcctgtgttgaagacctggttcccaaccaccaagctgttctccacggaggccacaccctctaacctgctcaccggcagcacacgggggttcctgtcccgcagaaccaccaagctgttctccacggaggccacaccctctaacgtgctcaccggcagcacacgggggttcctgtccctccacatcctcatcacagcttgttaa

SEQ ID NO: 46795 - DNA, 936 bp, Homo Sapiens
atgaaaatcttcaacagccccagcaactccagcaccttcactggcttcatcctcctgggcttcccttgccccagggaggggcagatcctcctctttgtgctcttcactgttgtttacctcctgaccctcatgggcaatggttccatcatctgtgctgtgcactgggatcagagactccacgcccccatgtacatcctgctcgccaacttctccttcttggagatatgttatgtcacctccacagtccccagcatgctggccaacttcctctctgacaccaagatcatctcgttctctggctgcttcctccagttctactttttcttctccttgggctctacagaatgctttttcctggcagttatggcatttgatcgataccttgccatctgtcggcctctacgctatccaaccattatgaccagacgtctctgtaccaatcttgtggtcaattgctgggtacttggtttcatctggttcttgattcctatcgtcaacatctcccaaatgtccttctgtggatctaggattattgaccacttcctatgtgacccagctcctcttctaactctcacttgcaaaaaaggccctgtgatagagcttgtcttttctgtcttaagtcctctgcctgtctttatgctctttctcttcattgtggggtcctatgctctggtcgtgagagctgtgttgagggtcccttcagcagctgggagaagaaaggctttctccacctgtgggtctcacctggctgtggtttcactgttctacggctcagtactggtcatgtatgggagcccaccatctaagaatgaagctggaaagcagaagactgtgactctgttttattctgttgttaccccactgcttaaccctgtgatatatagtcttaggaacaaagatatgagaaaagctctgaagaaattttggggaacataa

SEQ ID NO: 46796 - DNA, 459 bp, Homo Sapiens
atgcgtgaaaagctaattcgtttgcagtcgttgtatattgatcagtttaaacgacttcagcatctgctcaaggagaagaagcgccgatacttacataatcgcaaagtggaacatgaagctctaggcaatagtctcctgactggcccagagggacttttggccaaagaacgagagaacttaaagcgattaaaatgtctgcgacgataccgccagcgctatggagtggaagccttactgcataggcagttgaaggaacggagaatgctggccacagatggtgctgcccaacaggcccataccactcgttccagtcagaggtgcttggcctttgtggatgatgttcgttgttccaatcagtctcttccaatgaccagacactgccttacccagaaagatgcgactgccattggtgacctgttaactctttactgtggtctaatggagacagcactcgactga

SEQ ID NO: 46797 - DNA, 618 bp, Homo Sapiens
atggcggcctccacggcctcgcaacggcccctcaaggggatcctgaaggacaacacctctacgacttcctctatggtggcgtcggccgaacatccccgtgggagtgtccacgagcagctgagcaaaaaatcccagaagtgggatgaaatgaacatcctggcgacatatcgtccagcagacaaagactatggtttaatgaaaatagatgaaccaagcactccttaccatagtacgatgggtgatgatgaagatgcatgtagtgatacagaaaccactgaagctatggcaacagatagcttggctaagaacttagctgctgctgaaggcttggagccaaagtatcaggttcaggaacaagaaagcagtggagaggaggatagtgacctctcacctgaagaacgagaaaaaaagcgacaatttgaaatgagaaggacgcttcactacaatgaaggactcaatatcaaactagctagacaattaatttcaaaagacctacacgatgatgacaaagttgaagaaatgttagagactgcacatggagaaagcatgaatacggaagaatcaaatcaaggatctactgcaagtgaccaacagcaaaataaatcacgaagttcatag

SEQ ID NO: 46798 - DNA, 1759 bp, Homo Sapiens
ggagcggcgggtcccgtctcgacaggtcttctctgttggttgaaatgtctatgattttatctgcctcagtcattcgtgtcagagatggactgccactttctgcttctactgattatgaacaaagcacaggaatgcaggagtgcagaaagtattttaaaatgctttcgaggaaacttgctcaacttcctgatagatgtacactgaaaactggacattataacattaattttattagctctctgggagtgagctacatgatgttgtgcactgaaaattacccaaatgttctcgccttctctttcctggatgagcttcagaaggagttcattactacttataacatgatgaagacaaatactgctgtcagaccatactgtttcattgaatttgataacttcattcagaggaccaagcagcgatataataatcccaggtctctttcaacaaagataaatctttctgacatgcagacggaaatcaagctgaggcctccttatcaaatttccatgtgcgaactggggtcagccaatggagtcacatcagcattttctgttgactgtaaaggtgctggtaagatttcttctgctcaccagcgactggaaccagcaactctgtcagggattgtaggatttatccttagtcttttatgtggagctctgaatttaattcgaggctttcatgctatagaaagtctcctgcagagtgatggtgatgattttaattacatcattgcatttttccttggaacagcagcctgcctttaccagtgttatttacttgtctactacaccggctggcggaatgtcaaatcttttttgacttttggcttaatctgtctatgcaacatgtatctctatgaactgcgcaacctctggcagcttttctttcatgtgactgtgggagcatttgttacactacagatctggctaaggcaagcccagggcaaggctcccgattatgatgtctgacaccatccttcagatctattgccttggcttcagggggataaggagggaacatatcataactgcactgtgatgaagaagctgttccccacagaggagaagctctgctttctttctctccaactttccttttttaaaatcagcatgatgtgcctgtgagcatggaagagtcctctcagaagaatgttggccatgagactatcattcagaggaggaggggatttctctcttcaaggccgtaacagtggaagaacagtcatatgccattggaagtcttggccagcagtcctgaatccttcctgaagagttcagaaaatagatgtggtattgctctgaggaccaggcaggaggaactctacaacctgagtttgcctttgtgaggcattagtatagaccaaataaaaagctgcagaaattggaaagtttatgttttaaataaatgactgtgataaatatcagattatttgcacacttatggtactacgagtttataaagtccaagatggtgtgaaattggttctttttacttttatatttttgcttgaatcttaactctggaaatcacctgatgtagaagaagactgtgatgagctcgtctgtggaacatcacaagtatcgaaaatacagtaatggatgtttcctttctaatccacatttattgtttcttttgaaatcacgtctaaaaaatatgactcacactatagccgttgtttcccaaacttcagtctctttagtactacttgtattattttcttaatatttatcttttaaattttaaagtttttttaaaaaaa

SEQ ID NO: 46799 - DNA, 1357 bp, Homo Sapiens
ccggctccggtgtcatggccggctcctaccctgaaggtgcacctgcaatcctcgccgataagaggcagcagttcggaagccggttcctgagcgatccggcgcgcgtcttccaccacaatgcctggtaatcaccctgccccctcgcccggcctgtcgctggccgtctgtcccgccgcctcggagcattccgaaaagcccctgaccgccggccacgagtcaagctgccctacccgaggcactctccaaggggagagaaactcctaggccagcgactcaccctgctcgcagccaggacgtgaagcccctaagctgcccgtttgattttctcagggacaatgtggagtggtcggaagagcaagccgcggcggcggagagaaaagtccaggagaacagtatccagcgggtgtgccaggagaaacaagttgattatgagatcaatgcccacaaatactggaatgacttctacaaaatccacgaaaatgggtttttcaaggatagacattggctttttaccgaattccctgagctggcacctagccaaaatcaaaatcatttgaaggattggttcttggagaacaagagtgaagtatgtgaatgtagaaacaatgaggatggacctggtttaataatggaagaacagcacaagtgttcttcgaagagccttgaacataaaacacagacacctcctgtggaggagaatgtaactcagaaaattagtgacctggaaatttgtgctgatgagtttcctggatcctcagccacctaccgaatactggaggttggctgtggtgtgggaaacacagtctttccaattttacaaacgaacaatgacccaggactctttgtttattgctgtgatttttcttccacagctatagaactggtccagacaaattcagaatatgatccttctcggtgttttgcctttgttcacgacctgtgtgatgaagagaagagttacccagtgcccaagggcagtcttgatattatcattctcatatttgttctttcagcagttgttccagacaagatgcagaaggctatcaacaggctgagcaggcttctgaaacctggggggatggtacttctgcgagattacggccgctatgacatggctcagcttcggtttaaaaaaggtcagtgtctatctggaaatttctatgtgagaggtgatggaaccagagtttacttcttcacacaagaggaactggacacgcttttcaccactgctggactggaaaaagttcagaatctggtggaccgccgactgcaggtgaaccgagggaagcaactgacaatgtaccgggtttggattcagtgcaaatactgcaagccccttctgtccagcaccagctaa

SEQ ID NO: 46800 - DNA, 1035 bp, Homo Sapiens
atggagcttctgacaaataatctcaaatttatcactgacccttttgtttgtaggctccgacacctgagtccaacaccttcagaagaacacatgaaaaataagaacaatgtgactgaatttatcctcttagggctcacacagaaccctgaggggcaaaaggttttatttgtcacattcttactaatctacatggtgacgataatgggcaacctgcttatcatagtgaccatcatggccagccagtccctgggttcccccatgtacttttttctggcttctttatcattcatagataccgtctattctactgcatttgctcccaaaatgattgttgacttgctctctgagaaaaagaccatttcctttcagggttgtatggctcaactttttatggatcatttatttgctggtgctgaagtcattcttctggtggtaatggcctatgatcgatacatggccatctgtaagcctcttcatgaattgatcaccatgaatcgtcgagtctgtgttcttatgctgttggcggcctggattggaggctttcttcactcattggttcaatttctctttatttatcagctccctttctgtggacccaatgtcattgacaacttcctgtgtgatttgtatcccttattgaaacttgcttgcaccaatacctatgtcactgggctttctatgatagctaatggaggagcgatttgtgctgtcaccttcttcactatcctgctttcctatggggtcatattacactctcttaagactcagagtttggaagggaaacgaaaagctttctacacctgtgcatcccacgtcactgtggtcattttattctttgtcccctgtatcttcttgtatgcaaggcccaattctacttttcccattgataaatccatgactgtagttctaacttttataactcccatgctgaacccactaatctataccctgaagaatgcagaaatgaaaagtgccatgaggaaactttggagtaaaaaagtaagcttagctgggaaatggctgtatcactcatga

SEQ ID NO: 46801 - DNA, 279 bp, Homo Sapiens
aagaagagcgtccccaggagaaacaagcttgaccactatgctgtcacagagtttcctctgaccactgagtctgccatgaagaagatagaagacaacaacacacttgtgttcactgtggatgttaaagccaccaagcaccagatcaaacaggctgtgaagaagctctatgacactgatgtggccaaagtccatgccctgattaggcctgatgcaggaagaaggcataagctcctggctcctgattacaatgctttggatattgccaacaaaattgggatc

SEQ ID NO: 46802 - DNA, 369 bp, Homo Sapiens
atgggtttccacttttgcatctggatcatttttctcttgccaccaccatgtaagaagtgcctttcacctcccaccatgaacctgaggcctcccaagtcatgtggaaatgtcttttattgggtgctggttcttaactctggacttctctacaagttttgtcaaactatcaaatgcagagcaaattggaggcctgccagagcacccagagggtggaatgaagcaacagagaggcatcaggaaaggagaacacagatggagacagagatgggaggcataagcaccacctactggcacaggctgtgcacttgcacggataggagagctgaaaagttggtcatggatggaaataactgctggtttcacaaatga

SEQ ID NO: 46803 - DNA, 411 bp, Homo Sapiens
tggatgcttccttctggctccaggagcccgggagaattgctgccccttctggttcagtttcctgctatgggaaatagctatggggctatgacctgcctcacaaggtggttgagaaggggacagaagggcctggatgatgtctcacgagcagctaactgcacatcttcctgccagctctgcaaaaggatttgccctagtgctttaggggtctggaggggctgggagaacccaggtcacctgatatccaatcctgtgccaagatgggtacctagcactcctatgccatggggtccaggacagtgggcagctggaggctgtgtccttgggactagtcccatggtgtggtttggggacccattccaagaaccaagaagggggacacacagaagtcgagcaagaattagcatgtga

SEQ ID NO: 46804 - DNA, 408 bp, Homo Sapiens
cgctcgctggcccgccgggtgctagctgctcacgctccgcagggcccgggtcgggggcgggggcggggcggcgccgggcggcagaggaggggccgggggatcctgccttgcactcgccgggaccttggaagccaggcctggctcgttcaacgcggccgccttggtcacaggagtcccagtttccagctgcctcctcctttggacctagcagtccaggcccccagcccctcctcccttcagacccaggagtccaggcatccggcccctcctccctcagacccaggacttgcgaccccagccacctctccccccagccccaggcgcctgagtactaagcccacagttccccccaccacctcccaaccccgccccgtctcagactcaggagtccagcccccagcctcctcc

SEQ ID NO: 46805 - DNA, 3677 bp, Homo Sapiens
ggccagcaatggcagcagcagcggcgggcagtctgcccaagtgtcttaggaaccaaaagcaaataaaagtgtttccatatatgccaccagccaagtggccatcctaattcagaaagaagctagcctttgagtgtctgtcatggtgcatccgtttcagtattatttcctaaaatgagaagcccctgtgtcaacaagatccaggggctggagcccaatgccaagcctgtgttgtccccagcgaccctgcagctgctcgctctgatgtaccctgtgccattcaaggagatgtggtccaggaaagtgagcctcatggttttcagagaagtcattgttctgtttacattttcataaaacctgtttaaaatagctccccgtctcaggctttcagcagtaacagtgagctgactggcaagttcgatgttagctcccgggacactcagcagcgatggtgagcattttggtttccttaaggcccagcaagacttccagggacatctctggtgaagccagaatggagacacccgtgacctcaggctgaaagtcactcgacattggtctcttgtgttgatagggaaggaaatcaggcattcctatttctttaaataacaaaaccactaattgccactcaatgctggaatattttgggtcacctaatcatagatttctcagggcatcaatactcaaatataggctgattatgccccagttcaaatgggaactattaacagagtgcatttcttgcttgctgggtttcaacagacatcagccaaaagaacaaaagagatgtcaggacagattccaggagtgtcggagcacatgtgtggcacccgctccctctggcagcgaatgtaggaagtcgccaaatttacccactcttcaacaagtcattgtttaaacacggtttttcattttctcaacttttaatagcaaaaagtgccaaagtcctcagagacctaacagccttggtctaccgtgctgaccagggtgaaggcacggcgagggactcctcccagacgtgcctcttgtgtgccagctggctgtggctcgggagcagacgcaggcctctccattgtccaggggagcctggcggcgcatccctcctctcccacctcctggcacttccagctgggtgtcccacatgttggattccgtccccaccacacttccagagaccggagaactgtgcagggcctaaggccgtttggatgaattgtcaaaacaagatgcttccagttacagcggcaggagcgggactgggagcacgggctgacggctgctggtgcctttcttcccacctcgcttgcctgtttccgcttgacccttcctccagctccgatgagaagagtataaagcatcttcctaacgggtgtgtttgctatacgaacataatggacgtgaagtggggcagaaacccagaactcagcattcaaggatgcccaggagagctgtccctgttttaaagagctgtgttttgttttgtttcgcatttagagagcagacaaggcacccttctgctgcgctgatacgtttcttacactgggccattttagacccccagggaaacagccttcctggagcgttgtctggaggttccagggacagggcagcctcccagagccgagcaagagctcaaggtacaaatgagagatttgctataccgtgagaagtcaacaacttagccaccacttccccgcaatggaccatgtaacaaatacctcagcaggccctgcaaaaggccatgctagagctgaggcgcacagcctgtggcctctgtagttagggcaggtgggatggagactccttgagtgcacacacctgagcctgcccacacacaggggagcagcatctcgtatgacgtctggaaggaacttcggttgtgtaaagggagccttgaagatacgtgcaaaaggtgctaccccaatttggtgaaactgacattgggcacgtcttgggcttaggagaagcggccgatggtcccggcctgcagtgacaaacccccctccccgcaccgcccccagcaccccctctcctcttcacctcttcctgctggccacgaggaagccacttcctcagagagaccctaccagatgcggatggaaacagatgcaccaaagcaagccctgatgaaaccgcgacttcctaaggtctgtctcctctgaacttgcacctgggcctctctgtgtttggttccaagcacttcccacctcaaactcccattttcaaaccactgtatctctgcgcacatctgctacttaccagccgcatacatgatggagggttttttggtcctgatccagtggccacacctgtctttgaaatgtctcactgaactccagttttaaaatagattcattgcttcaacacagcaagcccaatgcacccagctaagactggcttgaccgacagcctggcctttggtggggggcttcctggggcctggggaaagctggccaccttcaacagctggtacctcttcaacagtgtggcctttcaaaatgcagatgccaccaggagaacatgcccacagctcaccacctatggatgccatggctctgggcagctttcaaagcaggttcctgtggtctcctcagctgtttgagggggtaacagcaaatcagcctccattttaaaatgaaaacaccagcctccagatgtagggcctgctgggtgttgctagccgctggtccccaggcacggtgcactttctccacctcctgcagcctccctgttgtttctagactcttgcacctggtgagtgcaaggataggtgacccaggggcctgcagccttgtcctcagctcccatctcctggactgccagcctcaccctctgcagttagcatggttggcctgatgcagggatcccgagggattactttttagaccttctttcacattcagaaaagtagtatagattcaggagaggcaagaaaattatgctgtccatagaagtcacccatgaagactgatgccaccacctgaaggctcatgattgttaaaaatgtccacgggaacctctcgtccacaggaggtttgtctcaacacttcccatttttacggcattggcattgccaagcatggggaagtatctgctcttctcatgttaaaagtggcccagcttttcttaactcagtccaagctgacttgtttagctgcactggaatttcttaccaaccaaatatttgcatcgagcaaagggggctgtgtgcacctccctaatggcagcgatgatggctgctgtcattcaagcccatcttcagacgtcacagtctggaagtgaaatgtccacaaacatctgtggcagaaaaggctatacggaccacccagttgtgctgcagctttacagagcaaggaagggttgtggcaaataaatgattaacctgcctcgactgtgctgagggcaacaaaggccatctcaccaaaggattattcgatgccattaaatcatcccgtgaccttcctgcttccgagtccatggcctttgcccagggcatgtactcccctgagaggccttctgcctagaaagatctatgactgggttccaaagttgaggcctaggtttttgctgggatttagatattttcaggcaccattttgacagcattcaggaaaacggttattgaccccatagactagggtaagaataaaggcaataaatttggtctgactcagaatata

SEQ ID NO: 46806 - DNA, 900 bp, Homo Sapiens
agaaagtctgtgattgctgtgagcttcatagcagcgttccttttcctgctggttgtgcgtcttgtaaatgaagtgaatttcccattgctactaaactgctttggacaacctggtacaaagtggataccattctcctacacatacaggcggccccttcgaactcactatggatacataaatgtgaagacacaagagcctttgcaactggactgtgacctttgtgccatagtgtcaaactcaggtcagatggttggccagaaggtgggaaatgagatagatcgatcctcctgcatttggagaatgaacaatgcccccaccaaaggttatgaagaagatgtcggccgcatgaccatgattcgagttgtgtcccataccagcgttcctcttttgctaaaaaaccctgattattttttcaaggaagcgaatactactatttatgttatttggggacctttccgcaatatgaggaaagatggcaatggcatcgtttacaacatgttgaaaaagacagttggtatctatccgaatgcccaaatatacgtgaccacagagaagcgcatgagttactgtgatggagtttttaagaaggaaactgggaaggacagagtccagtctggctcatatctcagcacagggtggtttaccttccttctggccatggacgcctgttatggcattcacgtctacgggatgataaatgacacctactgcaagacagaagggtatagaaaagtcccctaccattattatgaacaaggaagagatgagtgtgatgaatattttcttcatgaacatgccccatatgggggtcataggtttatcactgaaaagaaagtgtttgctaaatgggccaagaagcacaggataatatttacacatccaaactggacattgtcttga

SEQ ID NO: 46807 - DNA, 938 bp, Homo Sapiens
gaggagccagagagagctgcggagagctgccagctgcagcgggcgtgttccgcagctgtaggcacctgtcgtcctgccttcgatggctcctccctccgtccccctggtcctcctcctcgtcctcttgctgagcctggcagagactccagcatccgcacctgcccaccggggacgaggaggctggaccctcaatagtgctggctaccttctgggtcccgtcctccaccttccccaaatgggtgaccaagacggaaagagggagacagcccttgagatcctagacctgtggaaggccatcgacgggctcccctactcccaccctccacagccctccaagaggaatgtgatggagacgtttgccaaaccagagattggagatctgggcatgctcagcatgaaaattcccaaggaggaagatgtcctgaagtcatagatgtcttcaaatccctgttcctatccttcttctccagctcctcctgctccctctgaaaccttttctaggtaccctatgctgagactaagatcctgaagttaaatacccaggtctcatgaagacattgtaaagcatttgaattattctaaaaaatttctggagtttcttaggttttattgattcatccttgaaatcagtataatgtgctattaatggaaccaatagtaattcgaggactagttgggagattctggggtaatcagggaatattcctgcaacacatttaaaggaattgtgttcttttggaatcatcccaattataacacgagctattgcataatacaaataaccctcttaagtctgagagtctgtgtctttatttgaaaagattcttcaaattgcgtacttactcctccatattctttcaacccacatgagtctcctcgagaagtgaggagaggcagtttggagcagaatggagagaataaaatgtttcttgtcaaac

SEQ ID NO: 46808 - DNA, 582 bp, Homo Sapiens
atgtcgcagaacggagcgcccgggatgcaggaggagagcctgcagggctcctgggtagaattgcactttagcaataatgggaaagggggcagtgttccagcctcggtttctatttataatggtgacatggaaaaaatactgctggacgcacagcatgagtctggacggagtagctccaagagttctcactgtgacagcccacctcgctcacagacaccacaagataccaacagagcttctgaaacagatacccatagcattggagagaaaaacagctcacagtctgaggaagatgatattgagagaaggaaggaagttgaaagcatcttgaagaaaaactcagattggatatggtggtcaagtcggccggaaaatattccccccaaggagttcctctttaaacacccgaagcgcacggccaccctcagcatgaggaacacgagcgtcatgaagaaagggggcatattctctgcagaatttctgaaagttttctttccatctctgctgctctctcatttgctggccatcggattggggatctatattggaaggcgtctgacaacctccaccagcaccttttga

SEQ ID NO: 46809 - DNA, 255 bp, Homo Sapiens
gtacattattccatctttgcagaagctcgatgctgggttttaccgctgcgtggtgcgaaacagaatgggagcactcctgcaaagaaaatcagaagttcaagtcgcatatatgggaagtttcatggatacggaccagaggaaaacagtttctcaaggacgtgcagcgattctaaacctgctgcccatcaccagctaccccagacctcaagtgacttggtttagagaagggcacaagattattccaagcaacagaat

SEQ ID NO: 46810 - DNA, 300 bp, Homo Sapiens
cgccccagacaccagggcgtgacggtgggcatgggtcagaaggacctatgtgggcaacgaggtccagagcaagagaggcatcctgaccctgaagtaccccatcaagcaggacattgtcaccacctgggacgacatggagaagatctggcaccacaccttctacaacgagctgtgtgtggctgccaaggagcaccccatgctgctgaccaaggtccccctgagccccaaggccaaccacaagaagatgacccagatcatgttggagatcttcgacaggccagccatgtacgtggccatcca

SEQ ID NO: 46811 - DNA, 1146 bp, Homo Sapiens
atgtccggggtggtgcggaccctcagccgctgcctgctgccggccgaggccggcggggcccgcgagcgcagggcgggcagcggcgcgcgcgacgcggagcgcgaggcccggaggcgtagccgcgacatcgacgcgctgctggcccgcgagcggcgcgcggtccggcgcctggtgaagatcctgctgctgggcgcgggcgagagcggcaagtccacgttcctcaagcagatgcgcatcatccacggccgcgagttcgaccagaaggcgctgctggagttccgcgacaccatcttcgacaacatcctcaagggctcaagggttcttgttgatgcacgagataagcttggcattccttggcagtattctgaaaatgagaagcatgggatgttcctgatggccttcgagaacaaggcggggctgcctgtggagccggccaccttccagctgtacgtcccggccctgagcgcactctggagggattctggcatcagggaggctttcagccggagaagcgagtttcagctgggggagtcggtgaagtacttcctggacaacttggaccggatcggccagctgaattactttcctagtaagcaagatatcctgctggctaggaaagccaccaagggaattgtggagcatgacttcgttattaagaagatcccctttaagatggtggatgtgggcggccagcggtcccagcgccagaagtggttccagtgcttcgacgggatcacgtccatcctgttcatggtctcctccagcgagtacgaccaggtcctcatggaggacaggcgcaccaaccggctggtggagtccatgaacatcttcgagaccatcgtcaacaacaagctcttcttcaacgtctccatcattctcttcctcaacaagatggacctcctggtggagaaggtgaagaccgtgagcatcaagaagcacttcccggacttcaggggcgacccgcacaggctggaggacgtccagcgctacctggtccagtgcttcgacaggaagagacggaaccgcagcaagccactcttccaccacttcaccaccgccatcgacaccgagaacgtccgcttcgtgttccatgctgtgaaagacaccatcctgcaggagaacctgaaggacatcatgctgcagtga

SEQ ID NO: 46812 - DNA, 2575 bp, Homo Sapiens
atcgatgtgagttatggaatggcagatgatttaaaaaggattaggaaaataaaaaacgtaacaaatcagatcgcactcctgaaattaggaaaattgccactgctttataagctttcctcattggaaaaggctggatttggaggtgttcttctgtatatcgatccttgtgatttgccaaagactgtgaatcctagccatgataccttcatggtgtcactgaatccaggaggagacccttctacgcctggttacccaagtgtcgatgaaagttttagacaaagccgatcaaacctcacctctctattagtgcagcccatctctgcacccctcgttgcaaaactgatctcttcgccaaaagctagaaccaaaaatgaagcgtgtagctctctagagcttccaaataatgaaataagagtcgtcagcatgcaagttcagacagtcacaaaattgaaaacagttactaatgttgttggatttgtaatgggcttgacatctccagaccggtatatcatagttggcagccatcatcacactgcacacagttataatggacaagaatgggccagtagtactgcaataatcacagcgtttatccgtgccttgatgtcaaaagttaagagagggtggagaccagaccgaactattgttttctgttcttggggaggaacagcttttggcaatattggctcatatgaatggggagaggatttcaagaaggttcttcagaaaaatgttgtggcttatattagcctccacagtcccataagggggaactctagtctgtatcctgtagcatcaccatctcttcagcaactggtagtagagaaaaataatttcaactgtaccagaagagcccagtgcccagaaaccaatatcagttctatacagatacaaggtgatgctgattatttcatcaaccatcttggagttcccatcgtgcagtttgcttacgaggacatcaaaacattagagggtccaagttttctctccgaggcccgtttttctacacgagcaacaaaaattgaagaaatggatccctctttcaaccttcatgaaaccattactaagctctcaggagaagtgattttgcaaattgccaacgaacctgttctgccctttaatgcacttgatatagctttagaagttcaaaacaaccttaaaggtgatcaacccaacactcatcaactgttagccatggcgttacgcctgcgggagagtgctgaactttttcagtctgatgagatgcgacctgctaatgatcccaaggagagagcacccatccgcatccggatgctgaatgacattctccaagacatggagaaaagctttctggtaaagcaggcaccaccaggtttttatagaaacatcctctaccaccttgatgaaaagacaagccggttttcaatacttatagaggcttgggaacactgcaaaccccttgcatcaaatgagacccttcaagaagccctgtcagaggtgttgaacagcattaattcagctcaggtttacttcaaagcaggacttgatgtgttcaagagtgtcttggatgggaagaattgagaaaactctgagcatttttaaaagtttgtttacaattccacaagcaaaagctctaatttaaccagattttctgacattgaaggcttattttccccaatggctttttgacaagtataaagctattattacattgtattttttaaatgtaaatatagaaagaacattttgcacatttaatatttttcttatatctacatttctgaatatgtaaagcaagttattgaaataggacttaagaattacctattaaaaagaaatctgatatataaaaatatgtactattttaaggaaaaatttccaagaagttctggactatctttgttcctatggggagggcatataggaacacagtttattctctctgatagagctattaatgacttagtttctgtaaaagaaatggagagttgatatggttcagattaacttcactattaagtgttcaatatgaagaattcaagtattctgactgagtgattggttgacctaaaccactttgaatgtttctattttatgaaatgaagtttctcttcttaacacaactagatgtagtaatacactggttatgaaattgtatttttttaagtattaatgaaaaaagagccataagcattccaggagaaaatctcaagggagctacatagagcaatttaaatgcaaatttttttcctaacaacttacaaggtgactagctttgaaacccctaatttgcctcagttgattttctaagaatttcaggagtgatgtatgtcttaagagggagaaaaaaatatttcttattactttttctcttgtttctgttggaaacactgaagcagggactctaaaatgaaagcatctcacattggttttctttcttgtatcttttctgaaactccttgctgtaaggcagctttctcagagtactatatattttcaacagtaaagtagcagagtttctctttgaaacccaaaatgtcttctaaagaatcaaatttctatttctgcctctgacaaaaagaacttactatgaaag

SEQ ID NO: 46813 - DNA, 2858 bp, Homo Sapiens
agtggcggggaagcaaagcacaggagcgctgtggtgccagcggccgggctagggacgactggcgggtttgcgctggacccgaccccgagggcgggcgcaagggggcgggcgctgccgtactcaggccgcggggccagggcgggccggccggcggggcatttaaaccccgctgacagccagtccagcccgggacacgcgcccagctctgtagcctcctccgtcgactcagccttaggtaccggtcaggcaaaatgcggtcctccctggctccgggagtctggttcttccgggccttctccagggacagctggttccgaggcctcatcctgctgctgaccttcctaatttacgcctgctatcacatgtccaggaagcctatcagtatcgtcaagagccgtctgcaccagaactgctcggagcagatcaaacccatcaatgatactcacagtctcaatgacaccatgtggtgcagctgggccccatttgacaaggacaactataaggagttactagggggcgtggacaacgccttcctcatcgcctatgccatcggcatgttcatcagtggggtttttggggagcggcttccgctccgttactacctctcagctggaatgctgctcagtggccttttcacctcgctctttggcctgggatatttctggaacatccacgagctctggtactttgtggtcatccaggtctgtaatggactcgtccagaccacaggctggccctctgtggtgacctgtgttggcaactggttcgggaaggggaagcgggggttcatcatgggcatctggaattcccacacatctgtgggcaacatcctgggctccctgatcgccggcatctgggtgaacgggcagtggggcctgtcgttcatcgtgcctggcatcattactgccgtcatgggcgtcatcaccttcctcttcctcatcgaacacccagaagatgtggactgcgcccctcctcagcaccacggtgagccagctgagaaccaggacaaccctgaggaccctgggaacagtccctgctctatcagggagagcggccttgagactgtggccaaatgctccaaggggccatgcgaagagcctgctgccatcagcttctttggggcgctccggatcccaggcgtggtcgagttctctctgtgtctgctgtttgccaagctggtcagttacaccttcctctactggctgcccctctacatcgccaatgtggctcactttagtgccaaggaggctggggacctgtctacactcttcgatgttggtggcatcataggcggcatcgtggcagggctcgtctctgactacaccaatggcagggccaccacttgctgtgtcatgctcatcttggctgcccccatgatgttcctgtacaactacattggccaggacgggattgccagctccatagtgatgctgatcatctgtgggggcctggtcaatggcccatacgcgctcatcaccactgctgtctctgctgatctggggactcacaagagcctgaagggcaacgccaaagccctgtccacggtcacggccatcattgacggcaccggctccataggtgcggctctggggcctctgctggctgggctcatctcccccacgggctggaacaatgtcttctacatgctcatctctgccgacgtcctagcctgcttgctcctttgccggttagtatacaaagagatcttggcctggaaggtgtccctgagcagaggcagcgggtataaagaaatatgaggccccaattggaacagcagcatggagggtcccagttgggtccccaacgtgctccccatgggcaagacaatggaaacttccacaagcagggaaggcaaaccctctttattgaacattagccagcccagcccagaccccagggctgcctaaggacacagagattctccatgggaaggggactgccaagcatgaggaaatagaagattcaggggcctgagctctggaagctgcaagcaaaagggatgggactagggctgagttgtgtctccattttgataaggaaaggatatgctcagactcttgcttgttcagattccaagacagaaggcttcacaaggccaacgcctggaaaatgggcatctctccttcccatgttaagctttaacctctgtaatctgcctgtatctataggtgggcatctcactccaccaaaggagcccagcctctctttgtccctctatccatgcaacagtcttctctgtgcatttccccaagctgggccctcttctactctccatttaggcctgttgataactccattacccgcccatcactgctgttcctccagggccagcactcgggcgaggcaggggagctgccttcggtacataatttgaaggggcactccctcttgggcacatgccggccctgagtgcctcccttgcctcactctgatcctggccccataatgtcctcagtggaaggtgatgggggccggtgctgtggggagagtagaaagaggggttggcatgactaaaaataccagtatgtgtattaagtattttgagaatgaaatgccaaggagtgcctactatatgccagctctaggaatggagtagacagtggacacaagaaggacttacgccctgagcacaggtgccaatggtgacaagactggcaagacgtgagggcatgaatggttcattcaggcagctgctgcagatgtggtcacctggtgccatctgctgctcccttttccacttttctatgtcctccttccaccccaagtcccggatcactcgctgttttctggctagctcttggcatctccatctgagcctaaagttgcccactggcaccaatagattctgtttgacctgc

SEQ ID NO: 46814 - DNA, 291 bp, Homo Sapiens
atgaacatatttcttctaacatttctaacaattatgaagattttctccctaagtgtgactttttcttatgtcttggggtatcagatttacagcgtaacatgtgtacttcaaattgtagtagtgactggaaatttaggattctgttgtttcataacacttaaatctgcagcagattttcaggaaaatggtcaagattcacagataattccttccttattccttacagattttacaattgtatggttatttctgaatttggttaatttgtttataagtgtagtggacatttaa

SEQ ID NO: 46815 - DNA, 645 bp, Homo Sapiens
cgcgggcggctggggaatggctgctgccatggtgccggggcgcagcgagagctgggagcgcggggagcctggccgcccggccctgtacttctgcgggagcattcgcggcggacgcgaggacaggacgctgtacgagcggatcgtgtctcggctgcggcgattcgggacagtgctcaccgagcacgtggcggccgccgagctgggcgcgcgcggggaagaggctgctgggggtgacaggctcatccatgagcaggacctggagtggctgcagcaggcggacgtggtcgtggcagaagtgacacagccatccttgggtgtaggctatgagctgggccgggccgtggcctttaacaagcggatcctgtgcctgttccgcccgcagtctggccgcgtgctttcggccatgatccggggagcagcagatggctctcggttccaggtgtgggactatgaggagggagaggtggaggccctgctggatcgatacttcgaggctgatcctccagggcaggtggctgcctcccctgacccaaccacttgacttaatctcactttcttaaattcttctattctcagacactgctctagtaccattccttcctcttagccccaggagcaaattaaaaggtacagttaaaatcctaa

SEQ ID NO: 46816 - DNA, 558 bp, Homo Sapiens
atgagaggctgtggcagcaggagactctgtgggagctggagaggatgctggagctggagtgggaagccctctacaagcagcaggccgagccccacagcagctttgaggagctggtgtaataatgagaacaagagtgcactgcagttggagcggcaagtaaaggagctgaagcttggagaacctggaagctaccagccagcagaaacagcagctaaagcccagttgagcctcatggctctccctggggaaggatatggaggaggacatctggacaatgaggaggaggcacctcggcccatgctgaacattccaggggacctggagagccgggaggccatggtggcatttttcaactccgctggagccagtgcccaggaggagcaaagcgtgtgctgccagcccctggctcacccagtggcctcatcccagaaaaagccagaggcagcggccccagccccagagactgggggtgaatctgtgtgtggggacacccactgggccctgcaggaggccatggagaagctgcagcaactttatggaaggagaagatggacctga

SEQ ID NO: 46817 - DNA, 1234 bp, Homo Sapiens
agttcactcactttcaaagccagctgaaggaaagaggaagtgctagagagagcccccttcagtgtgcttctgacttttacggacttggcttgttagaaggctgaaagatgatggcaggaatgaaaatccagcttgtatgcatgctactcctggctttcagctcctggagtctgtgctcagattcagaagaggaaatgaaagcattagaagcagatttcttgaccaatatgcatacatcaaagattagtaaagcacatgttccctcttggaagatgactctgctaaatgtttgcagtcttgtaaataatttgaacagcccagctgaggaaacaggagaagttcatgaagaggagcttgttgcaagaaggaaacttcctactgctttagatggctttagcttggaagcaatgttgacaatataccagctccacaaaatctgtcacagcagggcttttcaacactgggagttaatccaggaagatattcttgatactggaaatgacaaaaatggaaaggaagaagtcataaagagaaaaattccttatattctgaaacggcagctgtatgagaataaacccagaagaccctacatactcaaaagagattcttactattactgagagaataaatcatttatttacatgtgattgtgattcatcatcccttaattaaatatcaaattatatttgtgtgaaaatgtgacaaacacacttatctgtctcttctacaattgtggtttattgaatgtgatttttctgcactaatataaattagactaagtgttttcaaataaatctaaatcttcagcatgatgtgttgtgtataattggagtagatattaattaagtcacctgtataatgttttgtaattttgcaaaacatatcttgagttgtttaaacagtcaaaatgtttgatattttataccagcttatgagctcaaagtactacagcaaagcctagcctgcatatcattcacccaaaacaaagtaatagcgcctcttttattattttgactgaatgttttatggaattgaaagaaacatacgttcttttcaagacttcctcatgaatctctcaattataggaaaagttattgtgataaaataggaacagctgaaagattgattaatgaactattgttaattcttcctattttaatgaatgacattgaactgaattttttgtctgttaaatgaacttgatagctaataaaaagacaactagccatcaaaa

SEQ ID NO: 46818 - DNA, 570 bp, Homo Sapiens
gaaacatccactatggctgccaagaaaaactggcaatccagtgataaacagaatgggaaaggtcattggagccaaaagcacaaggagaggatcaggctactgaggcacgaacgggaggttgctgcaagcagtacaacctgctgcaggacagtaagtagtaccagtgacagtgacctgacttgtgacagcacgagctcatcagatgatgatgaagaggtttcagggagcagcaagacaatcactgcagagataccaggtcatttgcatccaggattcctagcaagtgacaaaatatctgccggcaatgcaccgctcaatgaagaaattaatattgcctcttcagatagtgaagtagagattgtgggagttcaggaacatgcaaggtgtgttcatcctcgaggtggtgtgatttggagtgcttcttcgtggaagcatggctcgggcacacagtatcttagcaccaggcagacacagtcatgggctgtgagcccccagcagacttgggcttcaccagcagaagttattgaccttatctcggatgaggatagcaggcataaatacctactgtga

SEQ ID NO: 46819 - DNA, 2812 bp, Homo Sapiens
catgagcgatgttaccattgtgaaagaaggttgggttcagaagaggggagaatatataaaaaactggaggccaagatacttccttttgaagacagatggctcattcataggatataaagagaaacctcaagatgtggatttaccttatcccctcaacaacttttcagtggcaaaatgccagttaatgaaaacagaacgaccaaagccaaacacatttataatcagatgtctccagtggactactgttatagagagaacatttcatgtagatactccagaggaaagggaagaatggacagaagctatccaggctgtagcagacagactgcagaggcaagaagaggagagaatgaattgtagtccaacttcacaaattgataatataggagaggaagagatggatgcctctacaacccatcataaaagaaagacaatgaatgattttgactatttgaaactactaggtaaaggcacttttgggaaagttattttggttcgagagaaggcaagtggaaaatactatgctatgaagattctgaagaaagaagtcattattgcaaaggatgaagtggcacacactctaactgaaagcagagtattaaagaacactagacatccctttttaacatccttgaaatattccttccagacaaaagaccgtttgtgttttgtgatggaatatgttaatgggggcgagctgtttttccatttgtcgagagagcgggtgttctctgaggaccgcacacgtttctatggtgcagaaattgtctctgccttggactatctacattccggaaagattgtgtaccgtgatctcaagttggagaatctaatgctggacaaagatggccacataaaaattacagattttggactttgcaaagaagggatcacagatgcagccaccatgaagacattctgtggcactccagaatatctggcaccagaggtgttagaagataatgactatggccgagcagtagactggtggggcctaggggttgtcatgtatgaaatgatgtgtgggaggttacctttctacaaccaggaccatgagaaactttttgaattaatattaatggaagacattaaatttcctcgaacactctcttcagatgcaaaatcattgctttcagggctcttgataaaggatccaaataaacgccttggtggaggaccagatgatgcaaaagaaattatgagacacagtttcttctctggagtaaactggcaagatgtatatgataaaaagcttgtacctccttttaaacctcaagtaacatctgagacagatactagatattttgatgaagaatttacagctcagactattacaataacaccacctgaaaaatatgatgaggatggtatggactgcatggacaatgagaggcggccgcatttccctcaattttcctactctgcaagtggacgagaataagtctctttcattctgctacttcactgtcatcttcaatttattactgaaaatgattcctggacatcaccagtcctagctcttacacatagcaggggcaccttccgacatcccagaccagccaagggtcctcacccctcgccacctttcaccctcatgaaaacacacatacacgcaaatacactccagtttttgtttttgcatgaaattgtatctcagtctaaggtctcatgctgttgctgctactgtcttactattatagcaactttaagaagtaattttccaacctttggaagtcatgagcccaccattgttcatttgtgcaccaattatcatcttttgatcttttagtttttccctcagtgaaggctaaatgagatacactgattctaggtacattttttaactttctagaagagaaaaactaactagactaagaagatttagtttataaattcagaacaagcaattgtggaagggtggtggcgtgcatatgtaaagcacatcagatccgtgcgtgaagtaggcatatatcactaagctgtggctggaattgattaggaagcatttggtagaaggactgaacaactgttgggatatatatatatatatataattttttttttttaaattcctggtggatactgtagaagaagcccatatcacatgtggatgtcgagacttcacgggcaatcatgagcaagtgaacactgttctaccaagaactgaaggcatatgcacagtcaaggtcacttaaagggtcttatgaaacaatttgagccagagagcatctttcccctgtgcttggaaaccttttttccttcttgacatttatcacctctgatggctgaagaatgtagacaggtataatgatactgcttttcaccaaaatttctacaccaaggtaaacaggtgtttgccttatttaattttttactttcagttctacgtgaattagctttttctcagatgttgaaactttgaatgtccttttatgattttgtttatattgcagtagtatttattttttagtgatgagaattgtatgtcatgttagcaaacgcagctccaacttatataaaatagacttactgcagttacttttgacccatgtgcaaggattgtacacgctgatgagaatcatgcactttttctcctctgttaaaaaaaatgataaggctctgaaatggaatatattggttagaatttggctttgggagaagagatgctgccatttaaccccttggtactgaaaatgagaaaatccccaactatgcatgccaaggggttaatgaaacaaatagctgttgacgtttgctcatttaagaatttgaaacgttatgatgacctggcaacaaaaagtaatgaagaaaa

SEQ ID NO: 46820 - DNA, 1173 bp, Homo Sapiens
atggaggaaccgggtgctcagtgcgctccaccgccgcccgcgggctccgagacctgggttcctcaagccaacttatcctctgctccctcccaaaactgcagcgccaaggactacatttaccaggactccatctccctaccctggaaagtactgctggttatgctattggcgctcatcaccttggccaccacgctctccaatgcctttgtgattgccacagtgtaccggacccggaaactgcacaccccggctaactacctgatcgcctctctggcggtcaccgacctgcttgtgtccatcctggtgatgcccatcagcaccatgtacactgtcaccggccgctggacactgggccaggtggtctgtgacttctggctgtcgtcggacatcacttgttgcactgcctccatcctgcacctctgtgtcatcgccctggaccgctactgggccatcacggacgccgtggagtactcagctaaaaggactcccaagagggcggcggtcatgatcgcgctggtgtgggtcttctccatctctatctcgctgccgcccttcttctggcgtcaggctaaggccgaagaggaggtgtcggaatgcgtggtgaacaccgaccacatcctctacacggtctactccacggtgggtgctttctacttccccaccctgctcctcatcgccctctatggccgcatctacgtagaagcccgctcccggattttgaaacagacgcccaacaggaccggcaagcgcttgacccgagcccagctgataaccgactcccccgggtccacgtcctcggtcacctctattaactcgcgggttcccgacgtgcccagcgaatccggatctcctgtgtatgtgaaccaagtcaaagtgcgagtctccgacgccctgctggaaaagaagaaactcatggccgctagggagcgcaaagccaccaagaccctagggatcattttgggagcctttattgtgtgttggctacccttcttcatcatctccctagtgatgcctatctgcaaagatgcctgctggttccacctagccatctttgacttcttcacatggctgggctatctcaactccctcatcaaccccataatctataccatgtccaatgaggactttaaacaagcattccataaactgatacgttttaagtgcacaagttga

SEQ ID NO: 46821 - DNA, 2222 bp, Homo Sapiens
cctcgccactccagctgcgcctccggctgcagcgcacacgtctcctgcgcctcctcctccggagcgtcgctgtccgtcgggttcatccctcgcagcagtctccaggcgagagagggggccagagtgctcgcacttctcctaggggcaccatgcccaacgacgaggcattcagcaagccctctacaccgtcggaagcccctcacgcccccggggtaccgccgcagggcagagccgggggctttggcaaagcgtctggggcgctagtgggggcggccagcggctcgagcgccgggggcagcagcagaggaggcggctccggctccggggcgtcggacctgggtgccgggagcaagaagtccccgcggctgcccaagtgcgcacgctgcaggaaccacggctacgcctcgccgctcaagggccacaagcgcttctgcatgtggcgcgactgccagtgcaagaagtgcaacctgatcgccgagaggcagcgcgtgatggccgcgcaggtggccctgagaaggcagcaggcccaggaggaggaattgggtatcagccaccccatcccactgcccagtgcggccgagctgcttgtcaaaagagagaacaatggcagtaacccgtgcctcatgactgagtgcagtggcacctctcagccaccgccggccagtgtccccaccactgcagcttcagagggacgtatggtcatccaggatattcctgctgtcaccagcagagggcatgtggagaacacacctgacctggtttcagactccacctactacagcagcttctaccagccgtctctgtttccttattacaacaatctatacaactgcccgcagtactccatggccttggctgctgattctgcttctggggaggtgggaaatcccctcgggggatcccctgtgaagaacagccttcggggcctccccggaccttatgtgcctggtcagacaggaaaccagtggcagatgaagaacatggagaaccgccatgcaatgagctcccagtacaggatgcattcttactacccgcctccctcttacctgggccagagcgtgccccagttcttcacttttgaggatgctccctcttacccggaagccagggcgagcgtattctcgccgcccagcagtcaagattctggcttggtttccctctcgagcagctctcctattagtaacaagagcacaaaggcagtgcttgaatgtgagcctgcgtcggagcccagcagcttcacagtcactcccgtcatcgaggaggacgagtgagcagtgcctgctgccgatggcggttcacttggagtaacaggcttattccactttccatggggtttgttaatattttgcattgactcatactatcttaactgttgagaacgtatttggtttatattccttagagtttagtccagaggctgtaacacatttgtaatactttagggtccgtgactaccatctgcatggtttaagtgctttactcacggagtttaaataatagtgttcatttttttaatgacactggtttcatgtagttttcaagaaataaaagaattcattcaagtgaagccatttgtgtgcctctaaatgagtcatctaattagatgttacttttagttttaaaatgaaatcttaggtgccttaggggttttttttttttttaagtattttttaaaaacctgcaaagatataaatttagccaagttacctgacgggtgagaagaaaagagcaggcaaaattagtgatttttttagaagtctgctaaatggatatattgtgtgtgttgctgttggaaatagccccaccccatcctcccaatccaaaacgtaactgaaatataatcagaaacattaaagcctgtaaaaaaaaattgctgcgtttttggtaaagggtgtaatttgtaaacagtgcaatttaaagtgaccttagtgatgcagagttcctgagtggtgtttgtagaatgagtttatcatacattctttctactactggaaaaaaatggatgcagtctggactgttgtaaccttaggttgtaatctgatttggaaataagtacatctttaaaagttgctacagatttgagttcatgattttgttaaaaattgctatggagtactttgttatataacagaagccatcctgaaatgaaactagtctaaaaaaattcattgttctacttagttgcagctgtacctgaaataaaaatgttattgatgactgaa

SEQ ID NO: 46822 - DNA, 2843 bp, Homo Sapiens
cagggaccactgacatttagggatgtggccatagaattctctctggaggagtggcaatgcctggacactgcacaacggaatttatataggaaagtgatgtttgagaactacagaaacctggtcttcctgggtattgctgtctctaagcctcacctgataacctgtttggagcaaggaaaagagccctggaataggaagagacaggagatggtagccaaacccccagttatatattctcatttcactgaagacctttggccagagcatagcataaaagattcttttcaaaaagtgatactgagaggatatggaaaatgtggacatgagaatttacaattaagaataagttgtaaaagtgtggatgagtctaaggtgttcaaagaaggttataatgaacttaaccaatgtttgagaactacccagagcaaaatatttcaatgtgataaatacgtgaaagtctttcataaattttcaaattcaaacagtcataagaaaagaaatactggaaagaaggttttcaaatgtaaagaatgtggcaaatcattttgcatgctttcacatctaacacaacatataagaattcacactagagagaattcttacaaatgtgaggaatgtggcaaagttcttaactggttctcagagcttattaaacataagggaattcatatgggagagaaaccctacaaatgtgaggaatgtggcaaagcctttaaccaatcctcaacccttattaaacataagaaaattcatattgaagagaaacccttcaaatgtgaagaatgtggcaaagcctttagtttattctcaatccttagtaaacataagataattcatactggagacaaaccttacaaatgtgatgaatgtcacaaagcctttaactggtttgcaacccttactaaccataagagaattcatactggagagaaacccttcaaatgtgaagaatgtggcaaagactttaaccagttttcaaaccttactaaacataagaaaattcatactggagagaaaccctacaaatgtgaagaatgtggcaaagcttttaaccagtttgcaaaccttactagacataagaaaattcatactggagagaaatcctacaaatgtgaagaatgcggcaaagcttttatacagtcctcaaaccttactgaacatatgagaattcatactggagagaaaccctacaaatgtgaagaatgtggcaaagcttttaatgggtgctccagccttactcgacataagagaattcacactagagagaatacctacaaatgtgaagaatgtggcaaaggctttactttattttcaacccttactaaccataaagtaattcatactggagagaaatcctacaaatgtgatgaatgtggcaatgtttttaactggcctgcaactcttgctaatcataagagaattcatgctagagagaaaccctacaaatgtgaagaatgtggcaaagcttttaaccggtcctcacaccttactagacataagaaaattcatactggtgagaaactctacaaacctgaaaaatgtgacaataattttgataacacctaaaacttttctaaacataaaagacaccatcctgttgagaaaccctaaaaatgtgaagaatttgacaaagccttccaatgattgttacacttgcttgtaggtaagataatttatattggagaaaactttataagtgtaaagaatgtgacaaaacttaaccaatactcacatcttattgcacaggaaagcatttttacttgagaaagattgtacaagtataaagaatgtgaaaaagtcattgatatcttttcacatcttactcaacaccagagtttatacttattaaaagcattataaatgcaattactgtcaaaagaaatttcagaaaacataacactttaaagtgaagaagcgtgtttattttgaagacaaacataacaaatataaggagcataggagggttgtagtacctttacttgtattacaaatcttattgtacgcattttgtactagagaaaaacactgaagcagttgctcaaactttgttcaacatcagggaatttatattggagaaaaatcctgcaaatgtaatgaatttggaaaaacattttttttcaaaaactacggcgtagaaaacatgaatttatattgaaatgtgtttttgcagatgcagtaagtatgaaaaatatttaatccaaaattgagtctatgtaaatattaaataatttacagtagaaataactaaggcactgacactttagacattacactaaaacagagtgttgagtataaaaaaatctataagttgttagattatttgtaaataactttaaaaggagtagaagattctttggagagttataattacattgaaagtatactttttttcttgaaaaaattatggcttatttgaaaagtaaataatgatgaaattcaactctcaaattactttatttcattcctattgtattcacatgtgaaagcatgtgataaattgttgctgtgtcagatataggagagattcttttttattagatgggcattatttatggttttttctgtggaagagtatgggcattaaaatgtaaggtttatgatgaaaatctaagtggagaggccctgttagtttacttttcatattgagtgatgcatgaggtaggtgtttggagtaatattctgcatcatagagaaaagcatttttaattttactttaaattaaatgtaattaaattactagtgaatcattttactaattgtacttttatgctataaatgcagtacatttgaaaatttttagattatgtataagcttaattttataattaaacatttctttaaca

SEQ ID NO: 46823 - DNA, 613 bp, Homo Sapiens
agtctccggcgagttgttgcctgggctggacgtggttttgtctgctgcgcccgctcttcgcgctctcgtttcattttctgcagcgcgccagcaggatggcccacaagcagatctactactcggacaagtacttcgacgaacactacgagtaccggcatgttatgttacccagagaactttccaaacaagtacctaaaactcatctgatgtctgaagaggagtggaggagacttggtgtccaacagagtctaggctgggttcattacatgattcatgagccagaaccacatattcttctctttagacgacctcttccaaaagatcaacaaaaatgaagtttatctggggatcgtcaaatctttttcaaatttaatgtatatgtgtatataaggtagtattcagtgaatacttgagaaatgtacaaatctttcatccatacctgtgcatgagctgtattcttcacagcaacagagctcagttaaatgcaactgcaagtaggttactgtaagatgtttaagataaaagttcttccagtcagtttttctcttaagtgcctgtttgagtttactgaaacagtttacttttgttcaataaagtttgtatgttgcattta

SEQ ID NO: 46824 - DNA, 612 bp, Homo Sapiens
cagggacgtgtctgtgctcctgcgtgtgaccagggttgactaaactctgccaggatgtcttgccagcaaaaccagcagcagtgccagccccctcccaagtgtcctcccaagtgtaccccaaaatgtccacctaagtgtccccctaaatgcctgccccagtgcccagctccatgttcccctgcagtctcttcttgctgtggtcccatctctgggggctgctgtggtcccagctctgggggctgctgcaactctggggctggtggctgctgcctgagccaccacaggccccgtctcttccaccggcgccggcaccagagccccgactgctgtgagagtgaaccttctgggggctctggctgctgccacagctctgggggctgctgctgacctgggctaagaagaactctttggacagaatgtttaagaacctcctacagcctgatgcttaaccctttccatttcctctcattccattcatgggtggacagcgaccacaaagactcatggggcttccctgggagaactttgcacttgatggagcacctcaattgcaggttttgttttcctcctttacctcatgttataataaagctctgatttctgactcacaaa

SEQ ID NO: 46825 - DNA, 2289 bp, Homo Sapiens
ttgtgtttagaaaaggctcgggcaaagccagcccaagttcgctctctgcacacctcgagcacctcgcggacggcgtgggtccgccagctccgggacctgccgccgctgcctgcgcgccccggggcggaggacggtgccagccgcccacgaggagaccccgctcccgcaggaggccgagctgaagcggcggagcgcgccgccagccagccggggtgagtgccccgggcgaggccggcggccgccaaagcccccgcgggctcgcccgggcgcccggatgccagccccgagccccgccgccgggtgcatgcctcccccgcggcgcgcccccgcaggctgctgcccgctgtgaccgcccttccccgcaggcgggcgccggccaggctctccccgagatcagcgcacgggtggcacccgccggacccccagcggcagcggcggcggcggctgcagggggcgcggggcggaggctgcgagggcgcgcgcggggaggatggacgggtccggggagcgcagcctcccggagccgggcagccagagctccgctgccagcgacgacatagagatagtcgtcaacgtggggggcgtgcggcaggtgctgtacggggacctcctcagtcagtaccctgagacccggctggcggagctcatcaactgcttggctgggggctacgacaccatcttctccctgtgcgacgactacgaccccggcaagcgcgagttctactttgacagggacccggacgccttcaagtgtgtcatcgaggtgtactatttcggggaggtccacatgaagaagggcatctgccccatctgcttcaagaacgagatggacttctggaaggtggacctcaagttcctggacgactgttgcaagagccacctgagcgagaagcgcgaggagctggaggagatcgcgcgccgcgtgcagctcatcctggacgacctgggcgtggacgcagccgagggccgctggcgccgctgccagaagtgcgtctggaagttcctggagaagcccgagtcgtcgtgcccggcgcgggtggtggccgtgctctccttcctgctcatcctcgtctcgtccgtggtcatgtgcatgggcaccatccccgagctgcaggtgctggacgccgagggcaaccgcgtggagcacccgacgctggagaacgtggagacggcgtgcattggctggttcaccctggagtacctgctgcgcctcttctcgtcacccaacaagctgcacttcgcgctgtccttcatgaacattgtggacgtgctggccatcctccccttctacgtgagcctcacgctcacgcacctgggtgcccgcatgatggagctgaccaacgtgcagcaggccgtgcaggcgctgcggatcatgcgcatcgcgcgcatcttcaagctggcccgccactcctcgggcctgcagaccctcacctatgccctcaagcgcagcttcaaggaactggggctgctgctcatgtacctggcagtgggtatcttcgtcttctctgccctgggctacaccatggagcagagccatccagagaccctgtttaagagcatcccccagtccttctggtgggccatcatcaccatgaccaccgtcggctacggcgacatctaccccaagaccacgctgggcaagctcaacgcggccatcagcttcttgtgtggtgtcatcgccatcgccctgcccatccaccccatcatcaacaactttgtcaggtactacaacaagcagcgcgtcctggagaccgcggccaagcacgagctggagctgatggaactcaactccagcagcgggggcgagggcaagaccgggggctcccgcagtgacctggacaacctccctccagagcctgcggggaaggaggcgccgagctgcagcagccggctgaagctctcccacagcgacaccttcatccccctcctgaccgaggagaagcaccacaggacccggctccagagttgcaagtgacaggagggcccctcaggcagagatggaccaggcggtggacagatgggtagatgtggcaggcatgtcatcgacagcacagaagggctgtcctgtgtccccccaaccctcccctggacagactctgaaggccctcccggcacctctgccaaggctgggtaagactcctctatgttgcctgctgtccaggagcccgggagggaggggtgtgcaggagccgcagggccgtgtgggacgagtggaggccgcggcctggctggcacgagagcccacgcccgcttctgtatctccctcaataaagcctcctgctctgtgca

SEQ ID NO: 46826 - DNA, 1395 bp, Homo Sapiens
ctctagaccataaagaagatggagaggcacatggtcaggggacaattgtataagcattttgatttggagaggaagaatgccaagcaggctgaagccagactggaccaaagactgcagagactaaaggttatttgcctctaccatgtgaaattgctgacctgggagcagaggcagctccaaaaagaactgcagaggttgcagcaagcagaaaccatgaagaaaaagttctcctcttatttggggaatggatttcagaagagaccagaagatgttctcgtgttctcaccacagggaaggcagaagcacagagccccacaggctaagaaaatgagagcattggcaacccgtatggcccaagacacatgcaaaagcaagtcccaggtgcctccttcacatgatgctggcctcaaagaccccatgaagagcaaaaagcagccactctctcaaaataacagaactgcctgcttcataaaagagcaaccacaagcccaagagaaagattctgtgaatccatctaaggacgtagaccccagcaagggcatctctgttccatgccaaaatcaagaggtttccaccaacaccatagaacaaggtcctagttccagcccagctagtgatagtggaatggcatgtgctgatgagaccagatcaaaagatgttgctctaaagccagatgggaacactggaaaacaaattcccccaaaacacatggaatgtgcaggaagcttcgaaggcgagttcacaaagccaaccttcttagagttgctttcaaaggccagaaatgcccattatctccggcacagggtcccccctgagtctgagaggttgcttagcattggagagatatttgggcatggggaatcctcatcatccagggcaggaaaggagtgtgaaaacagggtgccttctaagtttcttcctctctaaccgtttaacatagcctgacaataacatatgccattattgctaaggaaatgtgttcctcaaatgactatattaagcaatacagagaaaaacaaacaaacataattgaattacaattttattttaaactccctattattttccgggaatataatatttcttgaatgaacaatgctaatatatgaaaaaggagaggaagaatgaatcttctgaaaatattttaagtgatatgtttatgatgtcatcaaaaatatgaatatatattgatgactggacttgggaaaacagtaacagtcttgctttcagggacttcctgtttcctctaggagattctcatggtgccacctgctggcaaaacggcatagctattctctctgttttagtttgatatatagtagtggtaggaataggaatgtgattgtaaataggtactgtaacatggtctataaagaaaatctgctctttaaccac

SEQ ID NO: 46827 - DNA, 626 bp, Homo Sapiens
ggcggcgcgggaacctgacaccgaggatgaataaatgatgctcgctgactacccgtggccaaagcccgtggccaccgagcgccggctggcaggggcagtgaccggcggccggcccgttcgtccctgggctccgcaagcggcgcggtggcacgaagatggcggggtggccgggcgcgggtcccctctgcgtgctgggcggcgccgcactcggggtgtgcctcgcgggggttgccgggcagctggtggagcccagcacggccccacccaagcccaagccgcctccgctgaccaaggagacagtggtgttctgggacatgcgcctgtggcacgtggtgggcatcttttcgctcttcgtgttgtccatcatcatcacgctgtgctgtgtcttcaactgtcgtgtgccacggacccggaaggagatcgaagcccggtacctgcagcgaaaggcagccaagatgtacacagacaagctggagactgtgccacccctcaatgagctcacagaagtcccaggagaggataagaagaagaagaagaagaagaagaaggacagtgtggacacagtggccatcaaagtagaggaggatgagaagaatgaggccaagaagaagaaaggagagaaatga

SEQ ID NO: 46828 - DNA, 510 bp, Homo Sapiens
atggccccgtcagaagaccccagggactggagagccaacctcaaaggcaccatccgtgagacaggcctggagaccagctccggtgggaagctggctggccatcagaagaccgtccccacggctcacctgacttttgttattgactgcacccacgggaagcagctctccctggcagcaaccgcatcaccaccccaagcccccagtcccaatcgagggcttgtcaccccaccaatgaagacctacatcgtgttctgtggggaaaactggccccatctgactcgggtgacccccatgggtgggggatgccttgcccaggccagggccaccctgccgctctgcagagggtctgtggcctcagcttccttcccagtcagcccgctctgcccccaggaggttcccgaggctaaggggaaacccgtgaaggctgcgcctgtgaggtcttcaacttggggaacagtcaaggactcactgaaagccctctcctcttgtgtctgtgggcaggccgattag

SEQ ID NO: 46829 - DNA, 405 bp, Homo Sapiens
atgttttcttgtataaaagttttctcatgcaagagggttgatgttataacagtaactaaaaggatattaggatacatgttttctcatatcttcagtgataaagatacttatttctctagacaagttgtaaaactgttaaacaagatattaggctgggcatggtggcttatgcctgtaatcccagcagttttggaggctgaggtgggtggaacacttgaggtcaggagttcaagaccagccgatcaacataaccccgtctctactaaaaattacaaaaaattagccgggcatggtggtgcatgcctgagtctactcgggaggctgaggcaggagaattgcttgaacccaggaggcggaggtttcagtgagccgacatcacaccactgcactccagtctggagatag

SEQ ID NO: 46830 - DNA, 1155 bp, Homo Sapiens
gggactgtcataaaaggggcgggacgcgccgcggtcgggatgacgtgagctgggggcgctcgtcgctgcagccggcggctagcgggcgtccgcgccatggagcgctacgcgggcgccttggaggaggtggcggacggtgcccggcagcaggagcgacactaccagctgctgtcggcgttacagagcctggtgaaggagttgcccagctcattccagcagcgcttgtcctacaccacgctgagcgacctggccctggcgcttctcgacggcaccgtgttcgaaatcgtgcaggggctactggagatccagcacctcaccgaaaagagcctgtacaaccagcgcctgcgcctacagaacgagcatcgagtgctcaggcaggcgctgcggcagaagcaccaggaagcccagcaggcctgccggccccataacctgcctgtgcttcaggcggctcagcagcgagaactagaggcggtggagcaccggatccgtgaggagcagcgggcgatggaccagaagatcgtcctggagctggaccggaaggtggctgaccagcagagcacactggagaaggcgggggtggctggcttctacgtgaccaccaacccacaggagctgatgctgcagatgaacctgctggaactcatccggaagctgcagcagaggggctgctgggcagggaaggcagccctggggctaggaggtccctggcagttgcctgctgcccagtgtgaccagaaaggcagccctgtcccaccatagccacaggcagcagaagtctgggcagagttcatcttcttgacctttggccactgccttcccagctgcccgcagggggttccccctgctgaggagagaccaggtggaccccagctgcctgtcacccttcatctgggacttgctgtcaaaccctaggatagtctcataaaggggaggctgggccagcctgctgctgtctgcttcagggccaggcagagagtgaggctgggggttctcacaccttactccaccgggcacatcccaacctgcactggggcccactcgagcgcttgttctggtctcagccgctcccttggcagctgcagcccccatgcagaagaggctcccaggcccaagctctgtgtgacccagagaaataaagatgcctcagtgtggccc

SEQ ID NO: 46831 - DNA, 276 bp, Homo Sapiens
gaaattgaaaagtaccaagaagtggaagaagaccaagacccatcatgccccaggctcagcagggagctgctggaggtagtagagcctgaagtcttgcaggactcactggatagatgttattcaactccttccagttgtcttgaacagcctgactcctgccagccctatggaagttccttttatgcattggaggaaaaacatgttggcttttctcttgacgtgggagaaattgaaaagaaggggaaggggaagaaaagaaggggaagaagatcaaag

SEQ ID NO: 46832 - DNA, 2559 bp, Homo Sapiens
atgctgccaggcacgtcaacaggcaataatcaaagcactatcactctatcagttgcttctcagaacttaactttcaccagcagcagctcaccacctaatggtgactcaatcaataaagaccctaaattatgcactaaaagcccaagaaaacgactgtcttctacattgcaggagacccaggtgcctcctgtaaagaaaccaattgtggaacagctttcagcagctaccatagaagggcagaaacaaggcagtgttaagaaggaccaaaaggttccacattcagggaaaacagaaggttcaacagcaggtgctcagattcctagcaaggtatcagtaaatgtcagttcacacataggagcaaatcaacccttgaattcctctgcccttgttatcagtgattcagctttggaacagcaaacaaccccatcatcatctccagatataaaagtaaaacttgaaggaagtgtctttctcttggacagtgattcaaagtcagttggcagctttaatccaaatggatggcaacaaatcactaaagattctgagtttatatctgccagttgtgaacaacagcaagatatcagtgttatgacaattcctgagcactctgatatcaatgacttagagaaatctgtttgggaattagaaggaatgccacaggacacatatagccagcagctacatagccagatacaggaatcttctttaaatcaaatacaagcacattcttcagatcagttacctctgcaatctgaactgaaggagtttgagccttctgtttcccagacaaatgaaagctactttccttttgatgatgaacttacacaagatagtattgtggaagagctggtgcttatggagcagcaaatgtcaatgaacaattctcattcttacggcaactgtttgggaatgacccttcagagtcagtcagtaactccaggagctccaatgtcatctcacacttccagcacccacttctatcatccaatccacagcaatggcactccaatccacacacccacacccacacccacacccactcctactccaaccccaaccccaaccccgacatctgaaatgattgctggatctcagagtctgtcacgggagagcccttgctccaggctagcccagactacacctgtggatagtgctttaggaagtagccgacatacacccattggtactccacattctaactgcagcagtagtgtcccccccagccctgttgaatgcaggaatccgtttgcattcactccaataagctccagtatggcatatcatgacgccagcattgtctcaagtagtcctgtgaaaccgatgcaaagacccatggccacacaccctgacaaaaccaagcttgaatggatgaataatgggtatagtggggttggtaattcatcagtttctggccatggtattctcccaagctatcaggaactagtggaagaccgtttcaggaaacctcatgcttttgctgtgcctggacagtcttatcagtctcaatccagacatcatgacactaattttggtcgtttgactcctgtctctcctgtgcagcatcaaggtgccactgtaaataacaccaacaaacaggagggttttgcagtccctgcccctcttgataataaaggaactaattcatctgccagcagcaacttcagatgccggagtgtgagccctgctgttcatcgccaacgtaatcttagtggaagcaccctctatccagtatctaatatcccacgatctaatgtgaccccctttggaagtccagttaccccagaagttcatgttttcacaaatgttcacacagacgcatgtgccaacaacatagctcaaagaagccaatcagttccattgacagtcatgatgcagacagccttcccaaacgctcttcagaagcaagcaaacagtaaaaaaataaccaatgttttgttgagtaaacttgattccgacaatgatgatgcagtgagaggtttgggaatgaacaacctgccctctaattatacagcccggatgaatctcactcagattttggaaccttccactgtttttcctagtgccaacccacaaaatatgatcgattccagcacttctgtttatgagttccaaacaccatcttacctcaccaaaagtaatagcaccggtcagatcaatttttctcctggagataatcaagcacaatcagaaattggagagcaacaattagatttcaatagcactgttaaagacctgttgagtggagacagcttgcaaaccaaccagcagctggtaggtcagggagcatctgatctcactaatactgcatctgatttctctagcgatatcaggttgtcttctgagctctcaggcagcatcaatgatttgaacactttagacccaaatctactgtttgatccaggtcgtcagcagggacaagatgatgaagctacactggaagaattaaagaatgacccattatttcaacaaatttgcagtgaatccatgaattctatgacttcatcaggttttgaatggatagaaagcaaggaccatcctactgttgaaatgttgggttaa

SEQ ID NO: 46833 - DNA, 5676 bp, Homo Sapiens
atggcttttccgccgcggcgacggctgcgcctcggtccccgcggcctcccgcttcttctctcgggactcctgctacctctgtgccgcgccttcaacctagacgtggacagtcctgccgagtactctggccccgagggaagttacttcggcttcgccgtggatttcttcgtgcccagcgcgtcttcccggatgtttcttctcgtgggagctcccaaagcaaacaccacccagcctgggattgtggaaggagggcaggtcctcaaatgtgactggtcttctacccgccggtgccagccaattgaatttgatgcaacaggcaatagagattatgccaaggatgatccattggaatttaagtcccatcagtggtttggagcatctgtgaggtcgaaacaggataaaattttggcctgtgccccattgtaccattggagaactgagatgaaacaggagcgagagcctgttggaacatgctttcttcaagatggaacaaagactgttgagtatgctccatgtagatcacaagatattgatgctgatggacagggattttgtcaaggaggattcagcattgattttactaaagctgacagagtacttcttggtggtcctggtagcttttattggcaaggtcagcttatttcggatcaagtggcagaaatcgtatctaaatacgaccccaatgtttacagcatcaagtataataaccaattagcaactcggactgcacaagctatttttgatgacagctatttgggttattctgtggctgtcggagatttcaatggtgatggcatagatgactttgtttcaggagttccaagagcagcaaggactttgggaatggtttatatttatgatgggaagaacatgtcctccttatacaattttactggcgagcagatggctgcatatttcggattttctgtagctgccactgacattaatggagatgattatgcagatgtgtttattggagcacctctcttcatggatcgtggctctgatggcaaactccaagaggtggggcaggtctcagtgtctctacagagagcttcaggagacttccagacgacaaagctgaatggatttgaggtctttgcacggtttggcagtgccatagctcctttgggagatctggaccaggatggtttcaatgatattgcaattgctgctccatatgggggtgaagataaaaaaggaattgtttatatcttcaatggaagatcaacaggcttgaacgcagtcccatctcaaatccttgaagggcagtgggctgctcgaagcatgccaccaagctttggctattcaatgaaaggagccacagatatagacaaaaatggatatccagacttaattgtaggagcttttggtgtagatcgagctatcttatacagggccagaccagttatcactgtaaatgctggtcttgaagtgtaccctagcattttaaatcaagacaataaaacctgctcactgcctggaacagctctcaaagtttcctgttttaatgttaggttctgcttaaaggcagatggcaaaggagtacttcccaggaaacttaatttccaggtggaacttcttttggataaactcaagcaaaagggagcaattcgacgagcactgtttctctacagcaggtccccaagtcactccaagaacatgactatttcaagggggggactgatgcagtgtgaggaattgatagcgtatctgcgggatgaatctgaatttagagacaaactcactccaattactatttttatggaatatcggttggattatagaacagctgctgatacaacaggcttgcaacccattcttaaccagttcacgcctgctaacattagtcgacaggctcacattctacttgactgtggtgaagacaatgtctgtaaacccaagctggaagtttctgtagatagtgatcaaaagaagatctatattggggatgacaaccctctgacattgattgttaaggctcagaatcaaggagaaggtgcctacgaagctgagctcatcgtttccattccactgcaggctgatttcatcggggttgtccgaaacaatgaagccttagcaagactttcctgtgcatttaagacagaaaaccaaactcgccaggtggtatgtgaccttggaaacccaatgaaggctggaactcaactcttagctggtcttcgtttcagtgtgcaccagcagtcagagatggatacttctgtgaaatttgacttacaaatccaaagctcaaatctatttgacaaagtaagcccagttgtatctcacaaagttgatcttgctgttttagctgcagttgagataagaggagtctcgagtcctgatcatgtctttcttccgattccaaactgggagcacaaggagaaccctgagactgaagaagatgttgggccagttgttcagcacatctatgagctgagaaacaatggtccaagttcattcagcaaggcaatgctccatcttcagtggccttacaaatataataataacactctgttgtatatccttcattatgatattgatggaccaatgaactgcacttcagatatggagatcaaccctttgagaattaagatctcatctttgcaaacaactgaaaagaatgacacggttgccgggcaaggtgagcgggaccatctcatcactaagcgggatcttgccctcagtgaaggagatattcacactttgggttgtggagttgctcagtgcttgaagattgtctgccaagttgggagattagacagaggaaagagtgcaatcttgtacgtaaagtcattactgtggactgagacttttatgaataaagaaaatcagaatcattcctattctctgaagtcgtctgcttcatttaatgtcatagagtttccttataagaatcttccaattgaggatatcaccaactccacattggttaccactaatgtcacctggggcattcagccagcgcccatgcctgtgcctgtgtgggtgatcattttagcagttctagcaggattgttgctactggctgttttggtatttgtaatgtacaggatgggcttttttaaacgggtccggccacctcaagaagaacaagaaagggagcagcttcaacctcatgaaaatggtgaaggaaactcagaaacttaactgcagtttttaagttatgctacatcttgacccactagaattagcaactttattatagatttaaactttcttcatgaggagtaaaaatccaaggctttactgctgatagtgctaattggcattaaccacaaaatgagaattatatttgtcaaccttctccttataaataagttcagacatacatttaataacatagggtgacttgtgtttttaggtatttaaataataaaatttcaagggatagtttttattcaatgtatataagacaggtagtgcctgatttactactttatataaaatagtacctccttcagttactgtttctgatttaatgtacggaactttatttgttgttgttgttgttgttgttgttgttgttttaaagcagtccaaatttggaccttagcaatcatgtcttttgtataggtacttaatgttaatacatattacactacagtttacttttcagaatactaaagactttataactgcatgaacttggatttttttaatcactcatatggtagaattttataaacacatacatgataccatccaaattcttgcttttaataacaaaggtacaatattttgttttagtatgaaaatctggtagatcctattacacttctgtttatattaaatccacaatattttattacatttttaacttgtataaattttaggtcaaatccttcaagccaacctatactaaaaattagttccataatcacaaatggctcttttgtgtaattgtttaatttcacctgaatatcataatgcttaaagccatatggagttggaaattatttccaaagcatatttattccattgttttagtctggctatttacagtataaaaaaagcatttttattaaaatactgtgtagttctttgagatagttgcttatgcatatagtaagtattacattcttagagtagagcagagtttttagttagtattaatttattttcctccattcatgtacttttccttatatttccaaaactgttactgagaatgggtcaagatcagtgagaaatctttacagttgacaggaacctggaccccttaccccaactttatgagtaatgcttggaataaaaactcttaaggcaactcactgatttacttctagcaatagcatgatgttacaggaatattacctctgtttaagcaaggtaatgtgtaaaatcagtctcggctgtcagaataacttctaaaaggtatttttataagcagttcaagttactgaaaaccttttaaacctttctgaagttcgttagtataaattacttttctaggattattaataaaagccacataggtggcaagttgtagttttatatggctctgtagagtggtgaaccttctagaggaatatatgatttattcacagttcctcaaggcctggggatgatgatcagttatacctatttttgtgcaattacatcatgttgtacattagaaatggagagtttaatagctctttaactgctgtcctcattaggtaatgataaatatttcccttaaataattgactattttgctgtgttttaaaaatgattgaaatttatcttgccatatctcataatttcatgcacaagttgactgagctaatcttgagaatatattcgtaaaataggagcacatttagttgaggtatacaaggtaggactctagacaaaaccttctattttagctttagtgaatttcaaaagtaatgggtcttggagtatagatttttattagtagcttgaaagagcttaatcatatgcagtaagtatttttattaccaataaatttaaaattttttaagaaaaatatttttatcctagggccaagtgttgcctgccaccaatcagtaagttagtctataacaaattttaccctaacagttttaccacctagtaacagtcatttctgaaaatatgttggatagaaagtcactctttggcaaaagtgttagaatttgcttttgtgccatctattccttttatggcatctatcttgaaagtaatcttgtattggagattgaaagatgctgtaatttagaaattaacatgatatcttaaattacctttatgaaatatagttttgtataatagcatagattttccttcaaaaaatgaacatttatatatctacaaaaatatggagaagagtaatttgaaagcctactttctgaagaaaatggtgggatttttttttatcatgattaaatatcaaaaaattgccctatgaaaactttaaatctctaaaacatttgaaatactaccatatttgtgatttattgagaataaaaatccattttgaaatgtaaaatttttatgatctgattcagttttaagaaaacatgaatgaactagaagatattaaaaacatttgacattggtaagaaatattgatactgatattgatttttatataggtatttatttcagaattgatattttgagaaaaatacatgtgagtcattttttctgtttctcttttctcttaacgattatcactgtaattctgaatct

SEQ ID NO: 46834 - DNA, 420 bp, Homo Sapiens
ctgtttgcagacaagcttccaaagacagcagaaaactttcatgctctgagcactggagagaaaggatttggttataagggttcctgttttcacagaattattccagggtttatgtgtcagggtggtggtttcacatgccataatggcactggtggcaagtccatctacggggagaaacttgatgatgagaacttcatcctaaagcatacatgtcctggcaccttgtccatggcaaatgctggacccaacacaaacggttcccggtttttcatctgcactgccaagacagtggttggacaaaagcatgtggtctccagcaaggtgaaagaaggcatgaatattgtgggggccatggagcactttgggtccaggaatggcaagaccagcaagatgatcaccactgctgactgtggacaactc

SEQ ID NO: 46835 - DNA, 1980 bp, Homo Sapiens
aaaatccgcgccggggacagtcagggatgctcccaggcccttcgctcttgctttcagctagtcattgtcgagcgccgcccgtgacaggcgttttgccaagccctggagttactgaagtgaacaagtccctggtctctcgggacccattgccggttgaaacacatcccgcctcctcttccagtcctagaggccgcctcctccggaaagccggccttgattgctcctcatgtaggacgcggttccctcctctgagatcctgcagactctcaggtgctcacacgtgggtgtgcagcggattcagccggcagctctttaaagcggcaggcagatggaaattcgaggccagcccagccccggcgactgcgctgcggacggccagaggccatcctttgagaaacacccgtggattcttaccctgacctctgcataccctgagaaagaacgaacgtggcagcctgcgtctgcttgtctatgtctttcatgtttgctaacctaagggtcgagaagcggctcgaggagaccaggctgcacagaccgtcacgtccattccctctctggccccagccccgcgggaagaaaacgagggcgttcagcctggcagttcattcacttattaggaagaagacatcccacacccccacccagcacacacacagatgtcagggaccagccactaggaaccactccctgagcgaatgaaggcatccccgtagccacgtgcctggtacatcacaagcactcaaaacgtggctgccacctttcgaaattgcatgcccaaaactttatgagatcctcacaacacacttgggaaacagacaaaagagtttgaatgcccgcctacttaacagatacagaaaatggtgttccgtgtacaagcgacttactcatgtctgctggtaactcataatgtgccgtttgacctccttaggacataattaataatggtaattaacagtgctacgatatgccaggcattgagcttagcgccttaaaagtcatagctaactatgtttcacagcaaaccctcagaggcaaatgtgacccgcctcctacgcaggaggcaacagaggctcagacatgttaaagaagcttggcctgagtctcccagcagagaaagggcagagcgtgtagccctgacaacgtgcttaattgcaactcctgtgggtcccatcacaactctctcttcctatgtggtgtccgcaacattaatacatagagacaccgaggagcctcagttctgcttgtgggcgggcctgtctttcaccaggctggcaaaagcagtgcaaacatcattttggaggtgataaaataaaatctctcacagaggttggatgtcctttccgcctttcatggaagcacagtagatctgcagagtgttttatgcaagtagacttggtgccagtagtggaagtgtgtgcaggattctgttacccagctgtgctcaaaacagagcccaagtctctccgatggtcagcctggcacggcccccagatggtaacgagacgccagggacaatctgccagtggcaattttagaaagcaggtggtgctaggaagggcattctcttcagttccatgttttcaagttagaagtgcctcagagcatttacccccagctccttgagggggtgaggcagaggatcacttgagcccaggagtttgaggctgcagtgaactataatggcaccactgtactccacttgggcgacacagccagaactcctctttgaaaaacataataataaataaaaataataaatagtagtaataagagaccccttagaaaaaatcaactggctcttttatgaaaggaagatgctttcagaatgaatagctaatgcatgtggggtttaatacctaggtgatgggttgacaggagcagcaaaccaccatggcacacatttactacctatgtaacaaacctgcacatcctgcacatgtatcctggaacttaaaataaaattttaaaaaaagaagatgc

SEQ ID NO: 46836 - DNA, 2751 bp, Homo Sapiens
ttttctctcagttgaagcgcgcacattgagtcggcttttctactgcttcggctagggtaccttgtgaccatgtcttccaagaagaatagaaagcggttgaaccaaagcgcggaaaatggttcgtccttgccctctgctgcttcctcttgtgcggaggcacgggctccttctgctggatcagacttcgcggcaacctccgggactctgacggtgaccaacttattagaaaaggtagatgacaaaattcctaaaacattccagaattcccttattcatcttggactcaacactatgaagtctgcaaatatatgtataggtcgaccagtgttgcttactagtttgaacggaaagcaagaggtgtatacagcctggcctatggcaggatttcctggaggcaaggtcggcctgagtgaaatggcacagaaaaatgtgggtgtgaggcctggtgatgccatccaggtccagcctcttgtgggtgctgtgctacaggctgaggaaatggatgtggcactgagtgacaaagatatggaaattaatgaagaagaactgactggttgtatcctgagaaaactagatggcaagattgttttaccaggcaactttctgtattgtacattctatggacgaccgtacaagctgcaagtattgcgagtgaaaggggcagatggcatgatattgggagggcctcagagtgactctgacactgatgcccaaagaatggcctttgaacagtccagcatggaaaccagtagcctggagttatccttacagctaagccagttagatctggaggatacccagatcccaacatcaagaagtactccttataaaccaattgatgacagaattacaaataaagccagtgatgttttgctggatgttacacagagccctggagatggcagtggacttatgctagaggaagtcacaggtcttaaatgtaattttgaatctgccagagaaggaaatgagcaacttactgaagaagagagactgctaaagttcagcataggagcaaagtgcaatactgatactttttattttatttcttcaacaacaagagtcaattttacagagattgataaaaattcaaaagagcaagacaaccaattcaaagtaacttatgacatgataggaggattaagtagccagctgaaagcaattagagaaataattgaattgcccctcaaacagcctgagcttttcaagagttatggaattcctgcccctagaggagtgttactttatggtcctccaggtactggaaaaacaatgatcgccagggctgttgctaatgaagttggagcctatgtttctgtaattaatggtcctgaaattataagcaaattctatggtgagactgaagcaaagttacgtcagatatttgctgaagccactctacgacacccatcaattatttttattgatgagctggatgcactttgtccgaaaagagagggggcccagaatgaagtggaaaaaagagttgtggcttcactcttaacactgatggatggcattggttcagaagtaagtgaaggacaagtgttggttcttggggccacaaatcgccctcatgccttggatgctgctctccgaagacctgggcgatttgataaagagattgagattggagttcccaatgctcaggaccggctagatattctccagaaactgcttcgaagggtaccccatttgctcactgaggctgagctgctgcagctggcaaatagtgctcatggatacgttggagcagacttgaaagtcttgtgtaatgaagcaggtctctgtgccttgcggagaatcctgaaaaaacagcctaacctccctgatgtcaaggtggctggactggtgaagattactctgaaggatttcttgcaggcaatgaatgatatcagacccagtgccatgagggaaatagcaattgatgtcccaaatgtatcctggtcagatataggaggactggaaagtatcaaactgaagttggaacaggctgtggaatggcccttaaaacatccagagtctttcattcgaatgggtattcagccacctaaaggagttcttctctatgggccacctgggtgctctaaaacaatgatagcaaaggctttggccaatgagagtggactgaattttctagctataaaggggcctgaattaatgaataaatatgttggtgaatctgaaagagcagttagagagaccttccgaaaagcaagagcagtggcgccttccattattttctttgatgaactggatgccttagcagttgaaaggggcagttctttaggtgctgggaatgtagccgatcgtgttttggctcagctcttaacagaaatggatgggattgaacagctaaaggatgtgaccattttggcagctactaaccgtccagataggatagacaaggctttgatgcggcctggaagaattgatagaatcatctatgtgcctttaccggatgcagcaacaagaagggaaatatttaagctgcagtttcactccatgcctgtcagtaatgaagttgacctggatgaactcatccttcaaaccgacgcatactcaggagcagagattgtagctgtctgcagagaggcagctcttctggctctggaagaagacattcaagccaatctcatcatgaaaagacatttcactcaggccttgagcactgtgacacctagaattcctgagtcattgagacgtttttatgaagattatcaagagaagagtgggctgcatacactctga

SEQ ID NO: 46837 - DNA, 420 bp, Homo Sapiens
atgatgattgatgggctatcggagtatggaaacgttaaccactggctggaaaacggcggcgtgtggttcttcagtcttgattatgaaaaagaggtgctggctaaggctctggttcataaatcggccagcctgccattcgtcatcgagctggttaccgctgaacgtaaaatcgttatctgccacgctgactacccgcataacgaatatgcgttcgacaagccggtcccgaaagacatggtcatctggaatcgtgaacgggttagcgacgctcaggacggcattgtctcgccgatagctggtgctgatctgtttatcttcggccacacccctgcgcgccagcccctgaagtatgccaaccagatgtacatcgatactggtgccgtgttctgcggaaacctcacgctggtacaggttcaaggt

SEQ ID NO: 46838 - DNA, 891 bp, Homo Sapiens
tacctggtggtgttcacaccatactggcctgtcactgtgcttattcttacctggctggcttttgactggaagacccctcagcgaggcggccgccggtttacctgtgtgaggcactggcgcctgtggaaacactacagcgattatttccctctcaagcttctgaagactcatgacatctgccccagccgcaactacatcctcgtctgccaccctcatgggctctttgcccatggatggtttggccactttgccacagaggcctcaggcttctccaagatatttcctggcatcaccccttacatactcacactgggagcctttttctggatgcctttcctcagagaatatgtaatgtctacaggggcctgctctgtgagtcgatcctccattgactttctgctgactcataaaggcacaggcaacatggtcattgtggtgattggtggactggctgagtgcagatacagcctgccaggttcttctaccctggtgttgaagaaccggtctggctttgtgcgcatggcccttcagcatggggtgcctctaatacctgcctatgcctttggggagacggacctctatgatcagcacattttcactcctggtggctttgtcaaccgcttccagaagtggttccagagcatggtacacatctacccttgtgctttctatggacgtggcttcaccaagaactcctggggccttctgccctatagtcggcctgtaaccaccatcgtcggggagcctctaccaatgcccaagattgagaatccaagccaggagatcgtggctaaatatcacacactctatattgatgccctacgtaaactgtttgaccagcataagaccaagtttggtatctcagagacccaggagctggagataatttga

SEQ ID NO: 46839 - DNA, 4823 bp, Homo Sapiens
atgctcttctggcacacgcagcccgagcactacaaccagcacaactccggcagctacctgcgtgatgtgctcgctctgcccatcttcaagcaggaggaaccccagctgtcccccgagaacgaggcccgcctgccacccctgcaatatgtgttgtgtgctgccacgtccccagccgtgaagctgcatgaagagacgctgacctacctcaaccaaggtcagtcttatgaaatccgactactggagaatcggaagctgggagactttcaagatctgaacacaaaatatgtcaagagcatcatccgtgtggtcttccatgaccgccggctgcagtatacggagcaccagcagctggagggctggcggtggagtcggccaggggaccggatcctggacatcgatattccactgtctgttggtatcttggaccccagggccagcccgacccagctgaatgcagtcgagtttttgtgggaccctgcgaagagagcttctgcattcattcaggtacactgcatcagcacagaattcacccccaggaagcacgggggcgagaagggagtgccctttcgagtccagattgacacgtttaagcagaacgagaatggggagtacacggagcacctgcactcagccagctgccagatcaaggtgttcaagccgaagggagccgatcggaaacagaagactgaccgggagaagatggagaaaagaactgcccaagagaaggagaaataccagccgtcctatgaaaccaccatcctcacagagtgctctccatggcccgacgtggcctaccaggtgaacagcgccccgtccccaagctacaatggttctccaaacagctttggcctcggcgaaggcaacgcctctccgacccacccggtggaggccctgcccgtgggcagtgaccacctgctcccatcagcttcgatccaggatgcccagcagtggcttcaccgcaacaggttctcgcagttctgccggctctttgccagcttctcaggtgctgacttgctgaagatgtcccgagatgatttggtccagatctgtggtcccgcagatgggatccggctcttcaacgccatcaaaggccggaatgtgaggccaaagatgaccatttatgtctgtcaggagctggagcagaatcgagtgcccctgcagcagaagcgggacggcagtggagacagcaacctgtctgtgtaccacgccatcttcctggaagagctgaccaccttggagctgattgagaagatcgccaacctgtacagcatctccccccagcacatccaccgagtctaccggcagggccccacgggcatccatgtggtggtgagcaacgagatggtgcagaacttccaagatgaatcctgttttgtcctcagcacaattaaagctgagagcaatgatggctaccacatcatcctgaaatgtggactctgagcagcagtggacctcatacctgtctccagctcccagccctgtggatccccgtggatgtagacattgccccactgtaagctgtggcctcaccaggcaagctgaggccaggagggaccctgcccagtctgtgaaagctacagagcaccaaccagcagaagcctgtggacaccaagtacggtgtacagaaagccagtggctcctttctcccttcctcttggcctccagattttgaatggttccttgttcttttctattggtccaaccctgacgttctaaaagggcaaacagtggagacgtctgctctgaaatccctcatcccttagttggaagctgattgggtatcttggtgctgcctgtattggtcccttctgaccactctcctgcctccagagaaagctctgcttcaccctggaagctggtacctttacctcctcctctgggagttggctgcatggccagcactgccgacttgatgggagcagtttgccctcattctcctgtttcaggtttgcttcccttctcagtgaccctggtgagcatccgcctttcctgttcttggatgaattgatgggagtggggctattctgtgccttctacctctttcttctctacgttgtttctaaggatctgctgctgcggaacccaaagatgtgctcctgtctctgcactggcgcattggcatggtagatgccacaatgtatgtgcacggcctttctcagagacattagttctgaggccctttgtggggaggttagggggatggtaatagaaaaagactattttatttcctggcaatcacgggtaaggaggattaggaatgagtattccattcctaggtgtcatcagatgaccttgaccaccacaataccaggccctcttggatggacttatagaaagttagagaagaccttgttgaaccgctgctaaacttgccacaggagcgatgtgttttctctgagtgcccctcacttacatgtttatctttgtttgtagaggctatgtttaggatattttgcctgcatcagaatgggtgcatcatctttcttaatggcctaactatcgggaaatttgagtgtcagtaactgtggtagactcagaaattcgtctttgtcttgcctctggttcctgggatccagtgatctctactggcccagggcttcagctcttggttaatttaggttcatggggaaccctctgaccacctgaatgggatgtcatagcttctaaatggagcttctgtggaatgaagtgctagactgaaggactaccagaataaaacagggtctacaatggggagaacttgttttatagatgaggaaaccaaggctcagaggggcaaagtcacctgcatggtagcacatagtgatagggtagcgatataaatttatcatataaaccaggacatctcggaataaaaggggctctgttagtcattatgttgggtaatagccgtggcattcctacagaacagagtgaggacaggctcctgattcctcttccttctttagaggagaagcggggagtgggttaactaacagctttattgagatgtcattcacatgccattcagtttacccattgctagtgtccaattgtattcacagaaccaccatcaattcacagaattacagtcaacgttggtacattttcatcacccccagtaaaaccccgtacccttggtctgtcactcctgctttcctaactcctgcagtccaaggcagccatgaatctactttctatgtaagattaacctactctggacatttcatatatctggaatcatgtgatatctcttttgtgactggcttcttccactgaatgttttctagggccgtccaagttgaggatgtatcagtacttcattcttttgtattgctgaataatacttcattgtatagatagaccacatttgtttattgattcatcagttgatggacatttgtgtgtttttactttttggctactctgaatgatgctgctatgaacatatttctacaagattttgtgtggacatatgttttcatttcttttagcaatatacataggagtggaattgctaggtcttacagtaactccgtgttttaactttttgagaaactgccagactgttttctatagcagctgtaccattttacattcccaccagcaatgtatccaggtttcaatttgtctacatcctcatcaacacttgctattatctgtctttttgcttttagcatcctaatgagtatgaaatgctatcttgtggttttgatttgcattcccctgatggcaactgatgctgagtgtcttttcctgtgcttacgggccatgcgtatttctttggagaaaggtctatccaggtcctttgcctatttttaattgagttgtctttttttttttaagttttctgttttcctaaccactagactaccagggatgagccttctttttattattgagttgggtgagctatttgtatattctagacgccagtcttttatcaggtatatgactggtaaaaatgttctccccttctgtggattgttttcagtttcttgttggtgtcctttgagacacaaaactttttaactttgatgatttccaagatacgtattttttttctattgtcacttgtgcttttggtgccatatctagaaaaccattgcctaatccaaggtcaagaagattaatgcctgtgttttcttctaagaactatacttttagttctcacaatggtctttgatccatttcgagtatatttttatatatgatgtgatgtaggggtccagcttcattcttttgcttgtggatctccacttgtcccactgctgattattgagaaaaatatcctttctccacggaattgtcttggcatccttgctaaaggcctctgcttcttactggatcttctttcctgggacatggtgtcgttgggaagcttaccttttttttttttttacttagtctgtgtttggttccaccagttttatgctgcctttctactctgttcttgctgtctccctctttacctgagtcaacggtactgagtcctatctctctctgatgttccccagtcttccttggtgcatgttctagctccacacactagtccttggaggaaggttgagaccaatgatttcctgttatgagtcatgaggaaactgaatcacctagaagtggaataatgtgctcagggtcaccatagcccattagtggaaggaccaggactagacctttagtcttctgaggtccagccccttaggctgtctgtcatcactgtacccaagtgatgtcactaccaaggccaaatgatggtgggctaaattttaattctcaaaagtgtaggaggctaatattgtcttctaagttccaaaagaagatgtaataaaagtctgttacct

SEQ ID NO: 46840 - DNA, 1571 bp, Homo Sapiens
gtttgattgtttgttttttgttttttttttttcatgaccctgacagttttgaagagtctggtcaggtaccctgtaaaaattttcccagtctgaggtttatctgatgttttcccctcataattaggctcaaattaggggtgttttgaaagactaccctagaggtgatgtgtccttcttatcatatcatatcaggggtttttgataggtagccacatgccattactggagatgttaaccttcatcacttagttccggtagtgcttgcttaatttctcccctataaagttactatttttccttcttcatattttatgctttagaagcagagcactaagtctacccaaccttcaaggagaagggggaaagggaactcagccgcatctcccggaaaggggaacagccacatttattatttgaaattctcctgtatggaagatttgcccattattcctcacttatctctttattcaaacatttatttatttatatcagtacaaactcatggataattatatcatactttgtgtaataatccaaatactacgttatttattttattgttcaatttgttccagctttggctggtgggagctctttcaggttggctcctatattcctttgatatacccgtatcctttttttgagcactatcttactctctgccactacaagatgctgtacgctcaccttgtatttttccttccccagtgctagaatcagccatttctccaaggactctggctcctcttgttggagaatgatattagaaaccaagatttgtgccctgagtgttctaattgctagcaaggtgtcattgactctaggccctctcagttaacatagctaagaaatgcatgatttgtgtgaactaaccaatatatatacacatatctataaatatttatatatctatccatctgtatctacattaaactaaacatgagtttgtactaatacactgccacagggctcactgagtcacatttttaaaagatcgctccaaaaatattttataaaacaacagcaacaaaaagggataactaactgttccaagagtggaggcagtgagaccagtttaggctgttgtcatctaggcaagagatgatataggtttgaattaggatggtaacaaacaacaaggaggagatggagctgattccagacagactttgaagatacagctggtaggatttgatggtagtttggatatgaagtaggggtaggagaatgaggggaaatagaaggatgaaggacaactcatggattggaggtctgaaggaaatgtgtgcactgtgatgccatttgctgaggtggggaatactagggaaggcgcagctttggaggggaggatacagacatcaaaagttctgtttttatcttgctaagtttgagaagctctttagacaaggtgacaagtcaaatgagcgggcacacctaggagtgtggagctcctgcgaggagtctggactagagatataaattatagtgttatcagcatacagatggtaattgaagccagggggctagatgggataacccagggagaaggcaagagtgatgacagaaaaaaa

SEQ ID NO: 46841 - DNA, 480 bp, Homo Sapiens
caatcctccatccatgttgcttttactttccatctctccttctgtcattctaatgtggttaatcactttttttgtgatattccaccactcttagctctttcttgctctgatatttacgcacatgagattgtgctcttcatattggcagcatttaatatctttttcactctcttgattatcttgaactcttatgtttttatttttattgctatcctgaggatgcattcagctgagggacaaaagaaggtcttttccacctgtgcctatcacctcactactgtttccatcttctatgggacaatcacctttatgtacttacagccaagttctggtcattccatggacacagacaaaatctcatctgtgttctacaccatggtcatccccatgcttaaccctctagtctatagcctgaggaacaaagaagtccagagtgcattcaaggtggttattggaaaagcaaagtcttcattgggctta

SEQ ID NO: 46842 - DNA, 594 bp, Homo Sapiens
gcccaaggagagtcccaagtccagttcaaacttgtattggttggtgatggtggtactggaaaaactagatttatgaaatcagttggtgaatttgagacgtacatagctaccttgggtattgaggttcattgccttgtgttgcacaccaacagaggacccattattgtatgggatacagctggccagaagaaatttggtggagtgagagatggctattatatccaagcccagcatgccattataatgtttgatgtgatatcgagagttacttacaagaatgtgccgagatcctgtggagatctggtacgtttatgtgaaaacatccccattgtgttgagggcaactgtgggtataaaggacaggaaagtgaaggcaaaatccgttctcttccaccaaaagaagaatcttcagtactatgacatttctgccaaaagttactgcaactttgaaaagctcttcctctggcttgctaggaagcttattggagaccctaacttggagtttgttgccatacctgcccttgccccatcagaggctgtcatggactcagcatcaacagtgcaatatgagcacgatttaaatagaagttgttca

SEQ ID NO: 46843 - DNA, 717 bp, Homo Sapiens
attagtgcaaaaattaaacttgaaattatgactcacgctcaagaagagtatccccgcgaatgctgtggggtagttacccaaaagggacgagtgcaaaaataccatagagtcgataatgttcatcgcgatcctgaaaatcacttcatgatggacgcagtgcaatacgcatgtattgaggacgacgcagactcaaccacgattgcgatcgttcacagccacacaggagatggggctacaacgctaccaagcgctcacgatacgtgcatgtgcaatgagatggaagtgacttggattattgttagcgtaccggaaggagatatgcgatttgtgaagccggagaaattacctctgattggtcgtccgtggtcattaggatcattcgactgttacggtcttgttatggcgtggcacaaagagcacggcgtagaattacgcgatcgacgattgaattttgaatggtggaaacctgagtatggaattaatctctatcaggattattacaagcaagatggcttcgttgagattccagatcagaataatccgtcattaggtgatatggtaatcatgcagatagggcaaaacgttccggtatggaaccacgcagggatttacctcggtgataatcagatcttgcatcacgccttcggtaagctgtcgcgacgtgatatctattccggctggtatcaggatcacactgttttaattgttcgccataag

SEQ ID NO: 46844 - DNA, 1632 bp, Homo Sapiens
gcgcggagagcgcagcgtcgaccctttgtggacgccgagtggcggtcgctcgccccgccccgcgccgtcgggcgctccttcctcagcggcgggaagctggcggcagcggcggtggcggtggctgagcagaggacccggcgggcggcctcgcgggtcaggacacaatgtttgcacgaggactgaagaggaaatgtgttggccacgaggaagacgtggagggagccctggccggcttgaagacagtgtcctcatacagcctgcagcggcagtcgctcctggacatgtctctggtgaagttgcagctttgccacatgcttgtggagcccaacctgtgccgctcagtcctcattgccaacacggtccggcagatccaagaggagatgacgcaggatgggacgtggcgcacagtggcaccccaggctgcagagcgggcgccgctcgaccgcttggtctccacggagatcctgtgccgtgcagcgtgggggcaagagggggcacatcctgctcctggcttgggggacggccacacacagggtccagtttctgacctttgcccagtcacctcagcacaggcaccaaggcacctgcagagcagcgcctgggagatggatggccctcgagaaaacagaggaagctttcacaagtcacttgatcagatatttgaaacgctggagactaaaaaccccagctgcatggaagagctgttctcagacgtggacagcccctactacgacctggacacagtactgacaggcatgatggggggtgccaggccgggcccctgcgaagggctcgagggcttggctccggccaccccaggccctagctccagctgcaagtccgacctgggcgagctggaccacgtggtggagatcctggtggagacctgagcaggagccctgagtgctcacagccgcctctgacgcattgacactgagcatcactacagtctcagtcaacagtgtgaatgtatcatgttttactttaaatgtgtgtgtgatacttcttcattatgtcctgcgctgcagtgagacctgggtgaaaatcaggagccgcacacagccacatcttcctagacctaagagtaaattatggaggattttatttatgtctatttatatgtaaatgtcattgaagacaaaggtcaaatatttgtctgtttgtagatcacaggcaccagttggtcttcagggacctcatagcccctcggtggtgccttctcaaggcagtgttcctggaggctcccatcagggtcagcccatgcacctgccctgggtgaggaagtagcattgctgctggatgagaaacgcctgcgctgctctgttagactggtgctgaaacaaaaggttaaggctaggttgaagtctagaatgaaagaaatctgaatccatgtcattcataaccccttgatctgtagtgtcatgggtgctgccgcaggcagggagtgagctgggggtgcctgcagccttccactcctgccccgcctcaccccacatgctccctgtttctcatgctttctctaacttcctcaccccttaaccaaaaaggtgtgttttcttttgtgcatatagccattcttaaatatcagtgatgtaaacctcactttattaaaaaattatccagcaaacaaaa

SEQ ID NO: 46845 - DNA, 2384 bp, Homo Sapiens
gtccccggctgagcgctggcggtcggtgcggcgtcaggtgcgcccgccaggtgagcgcgctccctggcaccgttggcccccggagggtcgggcccagttgcggcgagcggattggtttatcttggaagctaaagggcattgctcatcctgaagatcagctgaccattgacaatcagccatgtcatccaggcctcttgaaagtccacctccttacaggcctgatgaattcaaaccgaatcattatgcaccaagcaatgacatatatggtggagagatgcatgttcgaccaatgctctctcagccagcctactctttttacccagaagatgaaattcttcacttctacaaatggacctctcctccaggagtgattcggatcctgtctatgctcattattgtgatgtgcattgccatctttgcctgtgtggcctccacgcttgcctgggacagaggctatggaacttcccttttaggaggtagtgtaggctacccttatggaggaagtggctttggtagctacggaagtggctatggctatggctatggttatggctatggctacggaggctatacagacccaagagcagcaaagggcttcatgttggccatggctgccttttgtttcattgccgcgttggtgatctttgttaccagtgttataagatctgaaatgtccagaacaagaagatactacttaagtgtgataatagtgagtgctatcctgggcatcatggtgtttattgccacaattgtctatataatgggagtgaacccaactgctcagtcttctggatctctatatggttcacaaatatatgccctctgcaaccaattttatacacctgcagctactggactctacgtggatcagtatttgtatcactactgtgttgtggatccccaggaggccattgccattgtactggggttcatgattattgtggcttttgctttaataattttctttgctgtgaaaactcgaagaaagatggacaggtatgacaagtccaatattttgtgggacaaggaacacatttatgatgagcagccccccaatgtcgaggagtgggttaaaaatgtgtctgcaggcacacaggacgtgccttcacccccatctgactatgtggaaagagttgacagtcccatggcatactcttccaatggcaaagtgaatgacaagcggttttatccagagtcttcctataaatccacgccggttcctgaagtggttcaggagcttccattaacttcgcctgtggatgacttcaggcagcctcgttacagcagcggtggtaactttgagacaccttcaaaaagagcacctgcaaagggaagagcaggaaggtcaaagagaacagagcaagatcactatgagacagactacacaactggcggcgagtcctgtgatgagctggaggaggactggatcagggaatatccacctatcacttcagatcaacaaagacaactgtacaagaggaattttgacactggcctacaggaatacaagagcttacaatcagaacttgatgagatcaataaagaactctcccgtttggataaagaattggatgactatagagaagaaagtgaagagtacatggctgctgctgatgaatacaatagactgaagcaagtgaagggatctgcagattacaaaagtaagaagaatcattgcaagcagttaaacagcaaattgtcacacatcaagaagatggttggagactatgatagacagaaaacatagaaggctgatgccaagttgtttgagaaattaagtatctgacatctctgcaatcttctcagaaggcaaatgactttggaccataaccccggaagccaaacctctgtgagcatcacagttttggttgctttaatatcatcagtattgaagcattttataaatcgcttttgataatcaactgggctgaacactccaattaaggattttatgctttaaacattggttcttgtattaagaatgaaatactgtttgaggtttttaagccttaaaggaaggttctggtgtgaactaaactttcacaccccagacgatgtcttcatacctacatgtatttgtttgcataggtgatctcatttaatcctctcaaccacctttcagataactgttatttataatcacttttttccacataaggaaactgggttcctgcaatgaagtctctgaagtgaaactgcttgtttcctagcacacacttttggttaagtctgttttatgacttcattaataataaattccctggcctttcatattttagctactatatatgtgatgatctaccagcctccctattttttttctgttatataaatggttaaaagaggtttttcttaaataataaagatcatgtaaaagtaacaaa

SEQ ID NO: 46846 - DNA, 322 bp, Homo Sapiens
gatggcaatcaggaattgtttccctgtgaagtctgtggaagacgttttgcagcagatgttctggaaaggcatggaccaatatgtaagaaactcttcaacagaaagcgtaaacctttcagttctttgaagcaaagattacagggcactgacattcctactgtgaagaagactccacaatccaagtctccacctgtgaggaagtctaactggagacaacaacatgaagactttattaatgcaatccgatcagcaaagcagtgtatgctagccattaaagaaggccgacccctcccacctccaccccctccatccttgaacccag

SEQ ID NO: 46847 - DNA, 1444 bp, Homo Sapiens
ccctgcacaggcacccacaggcttctacagcctcttctccacctaagcagagtgggatgttttcaaagtgcaacaccccagctagcagggcccctggaacagcctcggcgccccctggaacactaatggccctccctggaacagacacggcacccccaccgagaacagcctcggtgccccctggaacagcctcagcaccccctggaacactaatggccctccctggaacagacacggcacccccaccgagaacagcctcggtgccccctggaacagcctcagcaccccctggaacactaatggccctccctggaacagatacggccccccgccagaacagacatggtgcccgctggaacactaatggtcctccctggaacagcctcggtgccccctggaacactaatggccctccctggaacagacacggcgcccccccacagaacagcctcgatgccccctggaacagcctcggtgccccctggaacagcctcggtgccccctggaacagcctggtgctcctggaacagacacagcccccccagaacagacacagcaccccctggaacagcctggcgcttcctggaatggccacatccccccatcctttctgtgctgctttaggcatctgcccttacatggttcgtgtccagctctgtcaacaaggccagctccacaagaggccccagctcagccctccccagtgggctcccctactcaggctctgggtcagcttcttcccaggaggtgtcctggcccctgtgctggccccgcctcgctgcctggacacctgtccgtgccaccctggtcactgagcaggacatccgcgtctgtggcccctgggaccctgcccccgacagccaggcctgggtttgtccttttaggtagagtgcctggtccaggtcattggaggagagtccacatggccacctctggcgtgttctagagaggccctcccgcgctgggtcaggaggcatcatcgggacaggagaagggggctgagctcctgttcctctctccctcccccgaggccaagaaacattcccatccgaatgtccactgcgctcacagattcctttcctcctaaaacttcagccttggccaggctcacggccaggattatggtggctcacgcctgtaatcccagtactgtgggaggccgaggcaggaggatcacgaggtcagaagatcgagaccatcctggccaacatggtgaaaccccgtctctactaaaaatacaaaaattagctggacatggtggcgggcgcctgtattcccagctactggggaggctgaggcaggagaatggcttggaggcagtagaactgcttgaaccctggaggcggaggttacagttatccgaggttgtgtcattgcactccagcctggggaacagagcgagactccatctcaaaaaaaataaaaaacttcagcttttgcatga

SEQ ID NO: 46848 - DNA, 408 bp, Homo Sapiens
atggttgacattctgggcgagcggcacctggtgacctgtaagggcgcgacggtggaggccgaggcggcgctgcagaacaaggtggtggcactgtacttcgcggcggcccggtgcgcgccgagccgcgacttcacgccgctgctctgcgacttctatacggcgctggtggccgaggcgcggcggcccgcgcccttcgaagtggtcttcgtgtcagccgacggcagctcccaggagatgctggacttcatgcgcgagctgcatggcgcctggctggcgctgcccttccacgacccctaccggcaacggagtctcgctctgttgcccaggctggagtgcagtggcgtgatcttagctcactgcaacctttgcctcctgggttcaagtgattctctagccttagcctcctga

SEQ ID NO: 46849 - DNA, 3032 bp, Homo Sapiens
cgcgcctgagcgcagtggggcgagacaaagagacctgggcccccagcgcagcccgtctcgggccacgggcgccccagctccgcggagtcccgcagtcgctggcccgggacgcgcccggcccgggctcccttggaaggctccctaggcaatggccgggtctctgctccacccggctctcaggagcgctgctctctccatctgatcgccctccatcctccccattccctccggttccgggctctcccttcgctccaagcctcaggccaccggcttggatggacgctccgaggctacccgtgcgtccaggggtcttgcttccgaagttggtcctgctctttgtctacgcagatgattgccttgctcagtgtggcaaagattgcaaatcttactgctgtgatggaaccacgccctactgttgctcctactacgcttatattgggaatatcctctcgggcactgcaattgcgggcattgtttttggaatagtatttatcatgggggtcattgctgggattgccatatgcatctgcatgtgcatgaagaaccacagggcgacccgcgtgggcatcctcaggacgactcacatcaacaccgtctcctcctatcctggaccaccaccctacggtcacgaccacgagatggaatactgtgcagacttgcctcctccatactcccccaccccacagggtccagcacagcgttctccaccccctccttatcctggaaacgcaaggaaataatctatctcccagaacagaacatgtgccaatgggcgatcttgcctggaataaaatgcctctactcagaaacaggcaggaaagaattgctccaaggaatactttttggggtcagataatgtgtcaggtggaatatccctgctaggagatataggatttctactctgctcaaagctgaccccatctggagtattaatgtttggttctatggaaccacattttaagagatctgctgatccacctaagcacattcagggaagagtaatgtaattgacaaaatatctgataatcatgttgtttaagggctaggtgaagaaagtttcagtattgatcctggaaaaaaagaagatctaagtaggatgggagaatgatttggcccacacaaggaagcaactttattctatatagctttaaaagtcagaactagaattgttcattctttcattcatcaataaatgtattttgagtgcctaagagtttactatgtgcctagcactgtttgaggtcctgatggaagttacaggacgggtactctggttttagtacaagaaagagcaatgactagattgctttgtgaagctcttggtagagacacgctccagaagggataacaaaatcaaatagtagatgggttcattgggcctcagaagttctgctcgtattttaggtgggtgtgaagtgaatttctatatgtccaggagtgaatacaacagaaagagttggatcttatttatttaattagggagttaaaacaagaccaaaaagactcaacagccgcttgaagccaagaactcttcaatgccagctactgccacctaaaaatcatctggctttatagtggatcagaataaaggttattctaactgtggggagaaaaaaaaaattgtatcaagttccacaggtagcagacacttcacttccaagtaaaagatgagaaatcaattattcccacaggattttaggtcagggagcaaaaatctcagaacttgaccatgaagatacacaacagactcgcaaaaataaagtgggaaatgaagttcagattcccttctgtagatttccttaaaactattatttttttcttcttcgtaaaattttgataatctgttctcttaaaaaagttaatgacacaattaagatactgacatcaaattgttgccttttaccaaaatgcaaattttatgaagtgcctacctttatatgtataaagcatttaataaataattctaatgtgccatattttgctgtgagtgaccttaacatttatatttttatatgaattgtttcatgtatttataaaaattgtatattgaacattggaaatagatgattagatttttgtgtcattttacaattaaatctaaaatgcttaatccaatatcatcatcaaaattcagtgaaatcccaaaacagtgccaagaattttgctgaatgaaacaatcaaacaaagcattttaaggtgtaagttatagtacctgtacttgcagataagaagcttactatatcattattataagtagcatatattactttcaaatacctatattagaaagatattgatctgactgaaatataacctacctgccagtaaggtccaaaggctgaatttgttttgaatgagttccttgatctttaagcactgatgattttcttatatatgaggatgcaaagcattcaagagtttcagcctgttctggtgaggggctccctgacttacataaagttttcagtgcaattttaatagtacatatgctttaatttatttttcttctgcgtgtggtcagacccaattacactgtggctaagactctcaaagtgccagggtttctgtgatgattctgagaatgctgaatacaaatataccttatattctttaaggaaaacggaaaggaaagatcagcagaaatagggttttctcatcttcaccatcaataaacatttattgcgtacctcctatattctgcaaattttccccaaatagaagccagttcagtccacaccatctcttctttgagttgtttatggcctcccttaaggcattttacaaacccataagcctacaatagatgagtatttttactatttgtattaagtgtcataatagcatcaatgtgcacattaccagtatagactgttggagttcactgattgttttcatagatgatgcttcttggggaaaaatagtataggatgtgaaagttttgaattacggttatttaaaaactaacatttgctatggccaaagtgtttacaataagcaataaagtgaaagaacctattataacacagattata

SEQ ID NO: 46850 - DNA, 5113 bp, Homo Sapiens
agagcttcagtctgagtcccagcgccgagagcgtgtctgaccggttggacccctacagcagcggcggcggctcctcgtcgtcgtcggaagagctcgaggccgacgcagcctcggccccgacgggggtcccgggccagccccgccgtcccggccaccccgcgcagcccctcccgcttccccagacggcttcctcgcctcagccgcagcagaaagccccgagggccattgacagcccgggcggggccgtccgcgaggggtcgtgcgaggagaaggcagcggcagccgtggccccgggaggcctccagtctacccccgggaggagcggggtgaccgcggagaaggcgcctccgccgcccccgccgcccaccctgtacgtgcagctccacggagagaccacccggcgcttggaggcggaggagaagccattgcagatccaaaatgactacctcttccaactgggatttggggagctgtggagggtgcaggaggaaggcatggactcggagattggctgcctcatccgcttctatgcaggaaaacctcacagcacgggtagctctgaacggattcagctctcaggaatgtataatgtccgtaaaggcaagatgcagttgccagtgaaccgatggacaagacgccaagtcatcctatgtgggacctgcctgatagtatcatctgtgaaagacagcttgaccggaaagatgcatgttctgccactaattggtggaaaagtagaagaagtgaaaaagcaccaacactgtttagcatttagctcctctggaccccaaagccagacttactacatttgctttgatactttcacagaatacttaaggtggctgcgacaagtctccaaggttgcatcccagcgcattagctcagtggacctctcgtgttgtagcctggaacatctgcctgccaacctcttctacagccaagacctcactcatctcaatttaaaacaaaacttcctaaggcagaaccctagccttccagctgccagggggcttaatgaactgcaaaggttcaccaagttgaagagtcttaacctttccaataatcatttaggggacttcccactggcagtctgcagtattccaaccctggcagagctgaacgtgtcctgcaatgccctgcgatcagtcccggcagccgttggagtgatgcacaacttacagacatttttgttggatggaaactttctccaatcccttcctgctgagttggagaacatgaagcagcttagttatctgggtctttctttcaatgaatttactgacattcccgaagtattggagaaattgactgctgtggataaactttgtatgtctggaaactgtgtggagacccttaggctacaggctttaagaaaaatgcctcacattaaacatgtggatctaaggttgaacgtaattaggaagctgatagcagatgaagtggactttctacagcatgttactcagcttgacctacgagacaataagcttggtgatctagatgctatgattttcaacaacattgaagttttacactgtgaaaggaatcaactggtcacattagacatctgtggctatttcctaaaagcgctctatgcctcttctaatgaacttgttcaacttgatgtttacccagttccaaattatctgtcctacatggatgtttcaaggaaccgcttagaaaatgtgcctgagtgggtatgtgaaagccgaaagctagaagttttggatattggccataatcaaatatgtgaacttcctgcccgcttattttgtaatagcagtctccggaaactactggcaggacacaaccagttggcaaggctgcctgaaaggctagaaagaacctcggtggaggtcttggatgtgcaacacaaccagctccttgagctcccacctaaccttctgatgaaggctgacagcctgagattcctgaacgcctctgcgaacaaactggaaagccttcctccagccacgctttccgaagagacaaacagtatcttacaagagttgtatttgacaaataacagcctcacagacaaatgtgtgcccttgttaacgggacacccccatttgaagatccttcacatggcctataaccgacttcagagttttccagcaagtaaaatggcgaaactggaggaacttgaagaaattgatctcagtgggaataagctgaaagccatcccaacaacgatcatgaattgcaggcgcatgcacaccgtgattgctcactccaactgcatcgaggtctttcccgaagttatgcagctcccagagatcaagtgtgtggacctgagctgtaatgagctaagtgaagtcacattaccagaaaacctgcctcccaaactgcaggagctagacctgactggaaacccgcgccttgtccttgatcacaaaaccctggaactactgaataatatccgctgtttcaagattgatcagccttctacaggagacgcttccggagccccagctgtatggagtcatggttacactgaagcttcgggggtaaaaaacaagttgtgtgtcgcagccctgtcggtgaataacttctgtgacaaccgcgaagccctgtatggtgtgtttgacggagaccggaatgtggaggtgccctaccttctccagtgcactatgagtgacattttggctgaagagctgcaaaaaacaaaaaacgaagaagaatacatggtcaatacattcattgtcatgcaaaggaaacttggaactgctgggcagaagcttggtggtgccgctgtcctttgtcatatcaagcatgaccctgtggatccaggaggatccttcaccttgacctctgctaatgtgggcaagtgccaaacagttctctgtcgaaatggaaagccgctgcctctgtccagatcttacatcatgagctgtgaagaagagctgaagaggattaaacagcacaaggccattatcactgaggatggcaaggtgaacggagtgactgagtccacgcgcatcctgggctacaccttcctccatcccagtgtggtgcctcgcccccacgtgcagtccgtgctcctgactccccaggatgagttcttcatcctaggcagtaaggggttgtgggacagcctgtccgtcgaggaggccgtggaagccgtgcgcaacgtgcccgatgccctggctgctgccaagaagctgtgtaccctggcccagagctacggctgccacgacagcatcagcgctgtggtggtgcagctcagtgtcactgaggacagcttctgctgctgcgagctcagcgccggtggggctgtgccaccacccagtcctggcatctttcctccctcagtgaacatggtgatcaaggatcggccctcagatgggctgggcgtgccgtcctccagcagcggcatggcttccgagattagcagtgagctctccacttctgagatgagcagcgaggtggggtcaacagcctccgatgagcccccgcccggagccctaagcgagaacagccctgcctaccccagtgagcagcgctgcatgctccaccccatctgtctgtccaactccttccagcgccagctatccagcgccacgttctctagcgccttctccgacaacggccttgacagtgacgatgaggagcccatcgagggcgtcttcaccaacggcagccgggtggaggtggaggtggacatccactgcagccgggccaaggagaaggagaaacagcagcacctgcttcaggtgccagcagaggccagtgatgagggcattgtcatcagcgccaacgaggatgagccaggtctgcccaggaaggcagacttctctgccgttgggaccattgggcgccggagggccaatggctctgttgcgccccaggaaaggagccacaatgtgatagaggtggctacagacgcacctcttcgaaagcctggaggctattttgctgccccggctcagccggatcctgatgatcagtttatcatacccccggagctggaagaggaggtcaaagaaatcatgaagcatcaccaggagcaacagcagcagcagcagccgccaccaccccctcagctccagccgcagctgccgcggcactaccagctggaccagctgccagattattacgacacgccactatgacccagccgagctgtttaacaaataaactaaccacaaaagactgagttgcaagagtctcccaggctcacattaaaccaggggttttactccacatccttcccccagacactgttcccaacctgtcatcgcagctaatctgtaggttctctttctttgggttatttttttaagtaatcaccactttcttctagtgatgctttaccaatatgatttacatttgttaacttctccccctaacatatcagatatgtaaagacaaagaacaaaaggtttaatatattacagagaaacagttaatgataatgtaatattttttaaaatggctttttgttgtttgtttggaaggcagggcaggctgccgttgctaaatgatttaataatattgtaattctgtatttctttggggggaaaaggcttttgttttgttttgttttgttttgttttgtttttgtcttgaaaataatagacatttgtagaatatggagactaactcctaggagttgctttactctgtcaggtgacttaagtcactgggattcactaattttctctgagagaacagctgattgagaatttccattgtaaatagctcagtgttgtatagtgaggcttacgatgttttgtagtcttggcgtaaggacacagcccaagtaactgacgtttcccctccccctcccctctgaggagcctgcctgcctcacaactcaccctcacttcactgaatgaggaggctgagcagctgcagtgtttctgtccggaggaaatggatcttaggccactggacaagaacctgcacccaagggccctgaacccattttcctcccctgtcccagccttcccactttgacagacacttttaactgtgttccttactgctgccacaatcagcatggttgtatagtgccccattaggccatttacatacccagagttatactcaagcagaatgcacaaatggacatgtcataatttttgttacaataaatatgaaatttacaagt

SEQ ID NO: 46851 - DNA, 339 bp, Homo Sapiens
gtgcgctcggtcacctccctcctgctggctgccctcgggggcagcacctccctcagagccaaagacatcaagaggatcctggacagcgtaggcatcgaggcggacgacgaccggctcaacgaggttatcagtgagctgaatggaaaaagcattgaagatgtcattgcccagggtattggcaaggttgccagtgtacctgccggtggggctgtggctgtctctgctgccccaggctgtgcagctcctgctgctggttccacccccgctgcagcagaggagaaggaggaggaggaggaggtgtccaaagagtcagacgatgacatgggatttggtctcttt

SEQ ID NO: 46852 - DNA, 922 bp, Homo Sapiens
cttacagaactcccacggacacaccatgattaggaccctgctgctgtccactttggtggctggagccctcagttgtggggtctccacttacgcgcctgatatgtctaggatgcttggaggtgaagaagcgaggcccaacagctggccctggcaggtctccctgcagtacagctccaatggccagtggtaccacacctgcggagggtccctgatagccaacagctgggtcctgacggctgcccactgcatcagctcctccgggatctaccgcgtgatgctgggccagcataacctctacgttgcagagtccggctcgctggccgtcagtgtctctaagattgtggtgcacaaggactggaactccgaccaggtctccaaagggaacgacattgccctgctcaaactggctaaccccgtctccctcaccgacaagatccagctggcctgcctccctcctgccggcaccattctacccaacaactacccctgctacgtcacgggctggggaaggctgcagaccaacggggctctccctgatgacctgaagcagggccagttgctggttgtggactatgccacctgctccagctctggctggtggggcagcaccgtgaagacgaatatgatctgtgctgggggtgatggcgtgatatgcacctgcaacggagactccggtgggccgctgaactgtcaggcatctgacggccggtgggaggtgcatggcatcggcagcctcacgtcggtccttggttgcaactactactacaagccctccatcttcacgcgggtctccaactacaacgactggatcaattcggtgattgcaaataactaaccaaaagaagtccctgggactgtttcagacttggaaaggtcacagaaggaaaataatattatataaagtgacaactatgcaaatcac

SEQ ID NO: 46853 - DNA, 1221 bp, Homo Sapiens
atggaggaggcaggtgggcccatggcccgggccaaggcccgagtggtaagtgccacattgacatggcggcagcggccccccacccaggaagagatcaaacatggttttcacaaggtgtccctggtgtcaggggcccagatggaagccccgcagaaggagatgtttgagttcagccgtcgagaggaagtggaagtcaatggctttgcaacacaggaagaagagactgtgaattgccagggccctcgggatacagctggctccaagaacttccagagccatggacccatcttttccaagaagtacataccacctcccaaggagaaaaggcctgaggggaggctgaaggaggctgtggaccagagtgatggcagccgccaagctcccaggactgagcccccatgtgtgggagctatggccaggactgagcttttggttcccctgcctgggccccgagagccaagtccccacccaggtgtaggtctcaccagtggtagctcccggagcctcgaggaataccgagtgacacgcactgtgcggaccaccacagtggtgggaggtcatgtggaccggcggatgagcagctctgtgactgtgaggccagtgtcctcaggcgaggccctgccacggggccgtcaggtctcccgcatggtgccgccagtggtggtgggctccccaccaggctcgcccagccgcagccaggccgtgaaagtgctaagtaacctcgtgcctgctgggcacagcccccctgccagtcacctgcccaggcccacggctggcgggccaaggagcacaggtctgggcagcacagtgggggcagccttgaggcagctgcctgagaccgggacagcagagcttaaagacagctctgccctggcctctacaggcatcccagccagtgctcacctgcctaagaatcaggatgcccctgcagcctgtccggacagagaccagggcagagccccggatgccagggcctgtgagctctggcaggtgctgggagcccccagttccactgagctccctctccagacttctcagggtcaagcatcagtcccctcctctcccagactcgagacccatgtcccctctcctggcctaactcaccctgcaaagcagcctgtggtgcccactcaccccggggcccggctcactccccttgttctgccccctaaaaggacgggcccgtggacccccctgctgccaccgtcctgcccatggtga

SEQ ID NO: 46854 - DNA, 336 bp, Homo Sapiens
tggacctgcaagatcctcttcttggtggcagcagccacaggtgcccacttcctggtgcagctggtgcagtctggggctgaggtgaagaagcctggggcctcagtgaaggtctcctgccaggcttctggatacaccttcacctactgctacttgcactgggtgcgatgggcccctggacaagggcttgagtggacaggattttatggtgatagtggttacacaaactacgcagactctgtgaagggccgattcaccatctccagggacaacgccaataactcaccgtatctgcaaatgaacagcctgagagctgaggacacggctgtgtattactgt

SEQ ID NO: 46855 - DNA, 372 bp, Homo Sapiens
atggccctgaacaatgtgtccctgtcctccggtgatcagaggagcagggtggcctaccgctcttcccatggcgacctcagaccgcgggcgtcagcgttggcgatggtctccggagacggcttcctcgtttccaggcctgaagcgattcatctaggacctcggcaggcggtgcgaccaagcgttcgggccgagagccgtcgagtggatggtggcggccggagcccaagggaaccagatggccggggccggagccgccaagccagattctcaccttacccaatccctgccgttgaacccgatctcctaagaagtgtgctgcaacagcgtttgattgcattaggaggtgttatcgcagctcgaatttcagtttaa

SEQ ID NO: 46856 - DNA, 417 bp, Homo Sapiens
atgcaggcgagggagcagctgagggcagccaagcagcgcagcaagggggacaggctggtcattgcgtgccaggagcagacctactggctggtgaacaggcccccgaccaagagtgcagatttccataagcgggagatcgagtacttcaggaaagcgctgggcaggacccgagtgaagtcctccgtctgccttgaggcgtacctgagtttctgcggccagcgtggaccccacgatcccctcgtgtcggggtgcctgcccagcaatccctggatctcagacaatgacgcctactgggtcatgaatgcccccacggtggctgcccccacgaagctccgtgtggagagatggggcttcagcttccgggagctcctggaggaccccgtggggcgggcccacttcatggactttctgggaaag

SEQ ID NO: 46857 - DNA, 510 bp, Homo Sapiens
gagctggagatgtcatcgcctgaagatgaaggtcgtactaggatacttgtcacagcaaatgaaatggagattacagaaatagagccagcagtgcgtttggactccaatactcaggacaggctcatagcactgaaagcagtaacaaactttggcactccagttgaagttttgaactctgaaaaagctgtcatgttcaagaaacttgacaagaccaccaaattgttcaaggagctccaggaagcccagaatgagcttttgagcatcagacaccctcccaatatgatctgtctcttgggtccctcatatggagaaatgcgtctttctaaacaagtgaccaataatcttaaaaaatgtgcacagcatgtaactccacgtgatattgtaagcatgtatggagttcaaaaagcaatagggtccattatttgccttattgtagaaaacaacttcatagatttaacagaagattttgaagaacctaaaaagattgatgttgctgagtgtggattcgat

SEQ ID NO: 46858 - DNA, 502 bp, Homo Sapiens
tcagacagctcagctctctcaagccagcggaatagtttcccaacttccttttggaccagctcttaccagcccccacctgcaccttgtttggggggagttcatcctgacttccaggtcactggaccccctggcaccttttctgcagctgatcccagtccttggccgggacacaacctgcatcagactggcccagcccctccccctgctgtgtctgagtcctggccttatcctttgacatctcaggtgagcccatcctacagccatatgcatgacgtgtacatgcggcaccaccaccctcatgcccacatgcatcctgctggctctgccctggatccatcctatgggcctctgctgatgccttcagtgcatgcggccaggattcctgctccccagtgtgacatcacaaagacagaaccaactacagtcacctctgctacctcagcatgggctggagcctttcatggaacagtagacatagtgcccagcgtgggattcgatacag

SEQ ID NO: 46859 - DNA, 2436 bp, Homo Sapiens
atggcgaaatataacacggggggcaacccgacagaggatgtctcagtcaatagccgacccttcagagtcacagggccaaactcatcttcaggaatacaagcaagaaagaacttattcaacaaccaaggaaatgccagccctcctgcaggacccagcaatgtacctaagtttgggtccccaaagccacctgtggcagtcaaaccttcttctgaggaaaagcctgacaaggaacccaagcccccgtttctaaagcccactggagcaggccaaagattcggaacaccagccagcttgaccaccagagaccccgaggcgaaagtgggatttctgaaacctgtaggccccaagcccatcaacttgcccaaagaagattccaaacctacatttccctggcctcctggaaacaagccatctcttcacagtgtaaaccaagaccatgacttaaagccactaggcccgaaatctgggcctactcctccaacctcagaaaatgaacagaagcaagcgtttcccaaattgactggggttaaagggaaatttatgtcagcatcacaagatcttgaacccaagcccctcttccccaaacccgcctttggccagaagccgcccctaagtaccgagaactcccatgaagacgaaagccccatgaagaatgtgtcttcatcaaaagggtccccagctcccctgggagtcaggtccaaaagcggccctttaaaaccagcaagggaagactcagaaaataaagaccatgcaggggagatttcaagtttgccctttcctggagtggttttgaaacctgctgcgagcaggggaggcccaggtctctccaaaaatggtgaagaaaaaaaggaagataggaagatagatgctgctaagaacaccttccagagcaaaataaatcaggaagagttggcctcagggactcctcctgccaggttccctaaggccccttctaagctgacagtgggggggccatggggccaaagtcaggaaaaggaaaagggagacaagaattcagccaccccgaaacagaagccattgcctcccttgtttaccttgggtccacctccaccaaaacccaacagaccaccaaatgttgacctgacgaaattccacaaaacctcttctggaaacagtactagcaaaggccagacgtcttactcaacaacttccctgccaccacctccaccatcccatccggccagccaaccaccattgccagcatctcacccatcacaaccaccagtcccaagcctacctcccagaaacattaaacctccgtttgacctaaaaagccctgtcaatgaagacaatcaagatggtgtcacgcactctgatggtaaacgacaaaaacatattttatttatttattttgaaggagaaacatatgaagacatagaagcatccaaagaaagagagaagaaaagggaaaaggaagaaaagaagaggttagagctggagaaaaaggaacagaaagagaaagaaaagaaagaacaagaaataaagaagaaatttaaactaacaggccctattcaagtcatccatcttgcaaaagcttgttgtgatgtcaaaggaggaaagaatgaactgagcttcaagcaaggagagcaaattgaaatcatccgcatcacagacaacccagaaggaaaatggttgggcagaacagcaaggggttcatatggctatattaaaacaactgctgtagagattgactatgattctttgaaactgaaaaaagactctcttggtgccccttcaagacctattgaagatgaccaagaagtatatgatgatgttgcagagcaggatgatattagcagccacagtcagagtggaagtggagggatattccctccaccaccagatgatgacatttatgatgggattgaagaggaagatgctgatgatggctccacactacaggttcaagagaagagtaatacgtggtcctgggggattttgaagatgttaaagggaaaagatgacagaaagaaaagtatacgagagaaacctaaagtctctgactcagacaataatgaaggttcatctttccctgctcctcctaaacaattggacatgggagatgaagtttacgatgatgtggatacctctgatttccctgtttcatcagcagagatgagtcaaggaactaatgttggaaaagctaagacagaagaaaaggaccttaagaagctaaaaaagcaggaaaaagaagaaaaagacttcaggaaaaaatttaaatatgatggtgaaattagagtcctatattcaactaaagttacaacttccataacttctaaaaagtggggaaccagagatctacaggtaaaacctggtgaatctctagaagttatacaaaccacagatgacacaaaagttctctgcagaaatgaagaagggaaatatggttatgtccttcggagttacctagcggac

SEQ ID NO: 46860 - DNA, 3559 bp, Homo Sapiens
caaaaaaatccgagagaagttcaaccgttacttggatgtggtcaatcggaacaagcaagttgtagaagcatcctatacggctcacctaacctctcccctaactgcaattcaagactgctgtactatcccaccttccatgatggaattcgatgggaactttaataccaatgtgtctagaacaattagttgtgatcgactttctactactgttaatagccgggccttcaatccaggacgagacttaaattcagttcttgcagacaacctgaaatccaaccctggaattaagtggcaatatttcagttcagaagaaggaattttcactgttttcccagcacacaagttccggtgtaagggcagctacgaacaccgcagtagacccatctacgtctctacagtccggccgcagtcaaagcacatagtagtgattctggaccacggggcttcagtcacagacactcagcttcagattgccaaggacgctgctcaggtcatcctcagcgccatcgatgaacatgacaagatttctgtgttaactgtggcagataccgtccggacttgctcactagaccagtgctataagaccttcttgtctccagccaccagtgagacaaaaaggaaaatgtccacctttgttagcagcgtgaagtcttcagacagtcctacccagcacgcagtgggattccaaaaggcatttcagctgattcgaagtacaaacaataacacaaagttccaagcaaatacagacatggtcatcatttacctgtcagctggcattacatcaaaggactcttcggaagaagataaaaaagcgactctccaagtcatcaatgaagaaaatagctttctaaacaactctgtaatgattctcacctatgccctcatgaacgatggggtgactggtttgaaagagctggcttttctgagggatctagctgaacagaattcagggaagtacggtgtgccagaccggatggccttgcctgtgattaagggcagcatgatggtgctgaatcagttgagcaacctggagaccacagtgggcaggttctacacaaaccttcccaaccggatgattgatgaagccgtcttcagcctgcccttctctgatgagatgggagatggtttgataatgactgtgagtaaaccctgttattttggaaacctacttctgggaattgtaggtgtggacgtgaatctggcttacattcttgaagacgtgacgtattaccaagactctttggcttcctatacttttctcatagacgacaaaggatatacacttatgcacccatctcttaccaggccatatttattgtcagagcccccacttcatactgacatcatacattatgaaaatattccaaaatttgaattagttcggcaaaatatcctaagcctccctctgggcagccagattatcgcagtccctgtgaactcatccctgtcttggcacataaacaagctgagagaaactggaaaggaagcctacaatgttagctatgcctggaagatggtacaagacacttcctttattctgtgtattgtggtgatacaaccagaaatacctgtgaaacaactgaagaacctcaacactgttcccagcagcaagctgctgtaccaccggctggatctccttggccagcccagtgcttgcctccacttcaaacagctggcaaccctagaaagtcccaccatcatgctgtctgctggcagcttttcctccccctatgagcacctcagccagccagagacaaagcgcatggtagagcactacaccgcctatctcagcgacaacacccgcctcattgctaacccgggcctcaaattctctgtcagaaatgaagtaatggctaccagccacgtcacagatgaatggatgacacaaatggaaatgagtagcctgaacacttacattgtccgccgttacatagcaacacccaatggcgtcctcagaatttatcctggttccctcatggacaaagcatttgatcccactaggagacaatggtatctccatgcagtagctaatccagggttgatttctttgactggtccttacttagatgttggaggagctggttatgttgtgacaatcagtcacacaattcattcatccagtacacagctgtcttctgggcacactgtggctgtgatgggcattgacttcacactcagatacttctacaaagttctgatggacctattacctgtctgtaaccaagatggtggcaacaaaataaggtgcttcataatggaggacaggggttatctggtggcgcacccgactctcatcgaccccaaaggacatgcacctgtggagcagcagcacatcacccacaaggagcccctggtagcaaatgatatcctcaaccaccccaactttgtaaagaaaaacctgtgcaacagcttcagtgacagaacggtccagaggttttataaattcaacaccagccttgcgggggatttgacgaaccttgtgcatggcagccactgttccaaatacagattagcaaggatcccaggaaccaacgcgtttgttggcattgtcaacgaaacctgcgactctcttgccttctgtgcctgcagcatggtggaccgactctgtctcaactgtcaccgaatggaacaaaatgaatgtgaatgtccttgtgagtgccctctagaggtcaatgagtgcactggcaacctcaccaatgcagagaaccgaaaccccagctgcgaggtccaccaggagccggtgacatacacagctattgaccctggcctgcaagatgctcttcaccagtgtgtcaacagcaggtgcagtcagaggctggaaagtggggactgttttggggtgctggattgtgaatggtgcatggtggacagtgatggaaagactcacctggacaaaccctactgtgccccccagaaagaatgcttcggggggattgtgggagccaaaagtccctacgttgatgacatgggagcaataggtgatgaggtgatcacattaaacatgattaaaagcgcccctgtgggtcctgtggctggagggatcatgggatgcatcatggtcttggtcctggcggtgtatgcctaccgccaccagattcatcgccggagccatcagcatatgtctcctcttgctgcccaagaaatgtcagtgcgtatgtccaacctggagaatgacagagatgaaagggacgacgacagccacgaagacagaggcatcatcagcaacactcggtttatagctgcggtcatcgaacgacatgcacacagtccagaaagaaggcgccgctactggggtcgatcaggaacagaaagtgatcatggttacagcaccatgagcccacaggaggacagtgaaaatcctccatgcaacaatgaccccttgtcagccggggtcgatgtgggaaaccatgatgaggacttagacctggataccccccctcagactgctgccctactaagtcacaagttccaccactaccggtcacaccaccctacacttcatcatagccaccacttacaggcggccgtcacggtacacactgtcgatgcagaatgctaa

SEQ ID NO: 46861 - DNA, 1038 bp, Homo Sapiens
ttccagaagccagtcacctttgaggatgtggcagtgaatttcacccaggaagagtgggactgtctagatgccagccagagggtcctttaccaggatgttatgtcggaaacctttaagaatctaacatctgtggccagaatctttctgcataagccagagctaatcaccaagcttgagcaagaagaggaacagtggagagagtttgtccatctcccaaacacagaaggcctttcagatgaggggactagtgatgacaaggtcttccttgcatgcagaggggccggccagtgccccctatctgccccagctgggactatggacaggacccgggtgcttcaagcatcccaggctgggccaccctttttttgctacacctgtggcaaatgtttcagcaggcgctcctacctctatagccaccagtttgttcacaatcccaagctgactaacagctgcagtcagtgtgggaagttgtttcggagccccaagtccctcagctatcacagacgcatgcatcttggggagaggcccttctgttgcacgctctgtgacaagacctactgtgatgcttctggactaagtcgtcaccgccgcgtccatctgggttaccggccccattcatgctctgtgtgtgggaagagcttccgggaccagtctgagctcaaacgccaccagaagatacaccaaaaccaggagccagtggatggaaaccaggagacccaggcacccatcactggaaccctctgtcaggatgccagatccaactctcatccagtgaagccctcaagactcaatgtcttctgttgcccccattgttctttgacttttagcaagaaatcctatctctccagacaccagaaggcccacctcacagagccgcccaactactgcttccattgcagcaagtctttcagctcattttccaggctggtcagacaccagcagacccactggaagcagaagagctacctttgccctatctgtgacctctcctttggggagaaagagggccttatggatcactggaggggctataaaggc

SEQ ID NO: 46862 - DNA, 1320 bp, Homo Sapiens
atggaatgctgccgtcgggcaactcctggcacactgctcctctttctggctttcctgctcctgagttccaggaccgcacgctccgaggaggaccgggacggcctatgggatgcctggggcccatggagtgaatgctcacgcacctgcgggggtggggcctcctactctctgaggcgctgcctgagcagcaagagctgtgaaggaagaaatatccgatacagaacatgcagtaatgtggactgcccaccagaagcaggtgatttccgagctcagcaatgctcagctcataatgatgtcaagcaccatggccagttttatgaatggcttcctgtgtctaatgaccctgacaacccatgttcactcaagtgccaagccaaaggaacaaccctggttgttgaactagcacctaaggtcttagatggtacgcgttgctatacagaatctttggatatgtgcatcagtggtttatgccaaattgttggctgcgatcaccagctgggaagcaccgtcaaggaagataactgtggggtctgcaacggagatgggtccacctgccggctggtccgagggcagtataaatcccagctctccgcaaccaaatcggatgatactgtggttgcaattccctatggaagtagacatattcgccttgtcttaaaaggtcctgatcacttatatctggaaaccaaaaccctccaggggactaaaggtgaaaacagtctcagctccacaggaactttccttgtggacaattctagtgtggacttccagaaatttccagacaaagagatactgagaatggctggaccactcacagcagatttcattgtcaagattcgtaactcgggctccgctgacagtacagtccagttcatcttctatcaacccatcatccaccgatggagggagacggatttctttccttgctcagcaacctgtggaggaggttatcagctgacatcggctgagtgctacgatctgaggagcaaccgtgtggttgctgaccaatactgtcactattacccagagaacatcaaacccaaacccaagcttcaggagtgcaacttggatccttgtccagccaggtgggaggccaccccatggaccgcgtgctcctcctcgtgtggggggggcatccagagccgggcagtttcctgtgtggaggaggacatccaggggcatgtcacttcagtggaagagtggaaatgcatgtacacccctaagatgcccatcgcgcagccctgcaacatttttgactgccctaaatggctggcacaggagtggtctccggtaactgtgccttctttctttgttcattag

SEQ ID NO: 46863 - DNA, 5018 bp, Homo Sapiens
ggacacttgacatcagtggtgtcaagacaactctaagaaggttttccgtgatcctgcaagccctgcgttccttcctgggatcctgccttcaatttgattgcacaggtaccacagcaagccagtgctgtgtgctccgagttccagggcgtcctccagctcagccactgcactgagaacatggactctctgtggggcccaggagccgggagtcacccctttggggtccacaacacccggctgtccccagacttgtgtccagggaagatagtgttgagggccctcaaggagagcggggcagggatgcctgagcaggacaaggaccctagagtccaagagaatcctggtgatcagagaagggtccccgaggtcaccggggatgcaccgtctgcatttcggcccctgcgggacaatggaggcctctctccctttgtgcccgggcccgggcctctgcagacagacctccatgcccagaggtcagaaatcagatataacccgacatcccagacctcctggacgagctcctgcaccaaccgaaatgccatctccagctcctacagctccacgggaggcttgccggggctaaagcggaggagggggccagcctcatcccactgccagctgaccctcagttcctcaaagacagtgagtgaggacaggcctcaggctgtctcttcaggtcacacccagtgtgaaaaggcagcagatatagcaccagggcagacactcaccctcaggaatgactcctccacatccgaggcctctaggcccagtacacacaagtttcccctgctgccacgcaggcgaggggagcctttgatgctgccacctcccttagagctggggtaccgggtcactgttgaagacctggaccgggagaaggaggcggccttccagcgcatcaacagtgcactgcaggttgaggacaaggccatctcggactgcagaccctcacggccttcccacactttgtcctcacttgcaacaggggcttctggtctgcctgccgtttctaaagcacccagtatggatgcacagcaggagacacacaagtcccaagactgcctgggcctactggaccccttagcatctgctgcaggggtcccctctacagctcccatgtctgggaagaagcacagaccaccaggccccctgttctcctcctcagatccccttcctgccacctcttctgattcccaggactcagcccaggtcacctcgctgattcctgcccccttcccagctgcaagcatggatgcgggcatgagaagaacaaggcatggcacttctgctcctgcagctgccgcagcagcccctccccgctccacattgaaccccacgttggggtcactactggagtggatggaggcccttcacatttctgggcctcagccacagctgcagcaggtgcccagaggtcagaaccagagatcccagacctcctggaccagctcgtgccccaaatgaaatgccatctcgagcccctacagctctacgggaggcctcccggaacaaaagcggaagaggggccagcctcatcccactgccagctgaccctcagttcctcaaacacagacccagggtgcatgcccatctccagcccagggcagctcccctgtaagctgggtgagctactgaagccaaggtgggaggcagctgacaacaccacccacggcccatgcagaggtggtagaaaggctggactcagcaggaacaccaaatcccggaccaggcagaaaccacccaagactgaggggctcgtgccagagcggtggccacagggctgaatggtcgctgagacagagatggaagccaggacaagggagcccaccgggcccagatagagacttcagaacccactcctgagaacagcggagccaggcgcttagaggaagaccaaatgctgccaggacacggattgtccagggattacattccagcatcttattagaggacggaagcagagggtgctgtttcaacgccaccaccaggagagaggcagaggggctgtgccgtgctagagtcctcagggagggagtgacctcgaccctggctgtgctgcaagctgactccagccttgggctcagcagcacccggtgaacagcagcaggaggagccgctagagcagctgctcatgggcagagcagcccttgggcaactcctgccaccaccccctccccagggagcccaaggcaggggaggctcagcatggaatgaaacaggggagtgagggacacaaggaggtgggaagtgggagggtcccagccccaccaagtacgcagagacccccttgtcgtcctggacaccacaggggcacctgcaggctgggagaccaggtcctctgtgcatgggcccgggaggcagacctgccccaagggtgatgcagaggccacaggtgctgcacgctccagcgcccactctagacatcagcctccaggttgactaagggtcaggtcatgtttgaaaccatgcttggctggaccgggacccatggcaagagcacctgggcaccagtgtttagccctggtctgcaggaaggaggacagcagactttaggaccccacagcatggcagtgctgaccatttcacccacttggcctccttgaggaatagggatggggagccctctggggatgagcaaggccttccaggacaggctcggttctggtcccctgctttttgaggttgggttaaaatgccgaccatggcagaggggtcacagctcaggttcccacacctcacttttcacagcctccaagggcagcagtgcacatggaggagacgtctcccacgaggccaaggcctccaatgctcaccgatgccctctgcgaagctggggtagaactcgtcagtgaagaggggctcaggcagctcacggaagtacagcttcagcgtgcctgcgatggcgttcatgtccgtctcgctcatcatcaccgacatgtccttcttatctggaaagagcacggaaatgcagcggcctccttgaagatcctgataaatgaagaaaagacacagagaaggatgtgacatgcctgggccatggagcactctgagatctcatcgcggacaccactgcccacacctccatcccgtcctgcgcaggccaacactcactgacatcgaaggctgccttcagtgcctggatgtctgcggccacaccggccggacacgtggtagatgcccacctcctccatgcctcggcgctcgatctcctccacgcactggcgcacgatgtagggcaccttggacctctctctcctgtgggaggggggaatgttctcagtgtcctaacagccctgcttgggccataacacaggagacctgctccctatctgcgcacccggaggtggggtgaggacggtgacgaaggtacccaggtctggggctgcacacagagccttctgcatgcctgtcctccctctgcaagctctgtcttcacggcatgtgctttctcaggaacctttcaagcggccagaacccctgcgaatcacacatgacctttgcgggaaggtcaggaggcctgtctaagtcaagtcagcacgggaagggcatctgacagattccaggcctggggttagcagcctgtgcccccggctgggagatcagacccggtgttggtcctgccacccacgtgctgtgtgagaggagaatccctgacccctgccctgggccttaacacacatccgacgaatgaatgaagggttgcctcagtaccggtgctccaagtcctgcgatgctaagtgcttttctcctctgagtcttagcaatggacaattccaatacctccacacaggacactagagtaagaaaccttcacagttagaacgcagtgctgtgcggaggccttaacttgagttctgttttgcacctggatttaccagcacatcaaagctgcttcgcaagccccctcattagcagggcttatctgggggagctgctgatggagtcctcgctgctcatgcccacagccctcccagagtgctatgcgagtggctgccgtgcagttgggggtggggcgtggtgtttagacacagataggagtccagggtatgactgatggaggccccggcccacgtgaccagcaaggtcagaggcccagccagattccatcctggggaagcaaatgaattctcagaggaagtggtctgtgtctgcatgaactgctctcaaaccaacaaacaggcttctcttggcaacagactcatgacaaaggattcaagattgtttgaaaaaaaaaaaaggggagcagggaggcagaaagtcctggaaaagtaaattgtttattttacaataagaaagtgattacatatttttttttttacaatggtggaaaattagaagtcattgtgaaaatgatgtctacctgccttgctgatgagtaggatgtgatttggctctttaggaaactgaatttgcagaacttaagaatattgatttataaagggcatggccattgacccagtccatcttatgcaaatctggatgccataaataatatttaaaaatgaaagtattggggtggaggttgcagtgagcagagattgcccccgctacactccagcctggtcgacagagtgaactctgtctcaaaaaaaaaaaaaaaagaaaagaaagaagaagccattcccaacgttgctcatcaaattatgaccataaatttccaggatcagactaacggctaaagagactgatgcatcaacaccaggcagagaataaagcagatttttttgttgttgttctggagagcttctaggaacttgaaaaatacatatgccacactcttaagacccggtggttcttaatcagggatgttcattaaaatgctggaaaactgtaaagacttccaggtcccatccaaggagattttgcttctgattgactggctagtggcctggccattggtattttgaaaaatccctccaagtgattcttttacatcccagatagaaaaccctaaattaaaggtgaaaaaaccagacaccaagtggcatttaaataaatgtcaactttaactccacaaa

SEQ ID NO: 46864 - DNA, 645 bp, Homo Sapiens
atggggcgccgtccagctcgctgttaccggtattgtaagaacaagccgtacccaaaatctcgtttctgccgaggggttcctgatgccaagatccgcatctttgacctgggtagaaagaaggcaaaagtggatgagttcccactcggtggccacatggtgtctgatgaatatgagcagctgtcttctgaagccctggaggccgcccgtatttgtgccaacaaatacatggtgaaaagttgtggcagagatggctttcacatgcgagtgcggctccatcccttccatgtcatccgcatcaacaagatgttgtcctgtgctggggctgacaggctccagacaggtatgcgaggtgcctttggaaaaccccagggtactgtagcccgggtccacattggtcaagtcatcatgtccatccgcaccaagcttcagaacgaggagcatgtgattgaagccttgcgcagggccaagttcaagttccctggacgccagaagattcatatctccaagaagtggggcttcacgaagtttaatgctgacgaatttgaagacatggtggccaagaagtgcctcatccctgatggttgtggagtcaagtacgttcccagtcatggccccttggacaagtggcgggttctgcactcatga

SEQ ID NO: 46865 - DNA, 1915 bp, Homo Sapiens
ttatttacctttttactttttaaaaaattcttgtgaagttactttgtgagttttccaggatgtgtgtaaactacacacatcagccacctaggtagttttgagttgctttgaagttcagctgttgttgacttcaaaggcagcagcttatgaaagttggagaaatagaacattttccagtccctattcaggggttggtgacctccgtggcccccagcctcgtggctttgggctttggaaggctggtgtctggtctcactgatggctacaggctggactcacccccaccatctctgtcctcaccaaccctgtccccagccccctggctcatccccagtatcctctacaaacctgctcctactcgggtccagggcaggaggctgagcactgtgggccatcctgggagcctcaggctgcacaggttgctgaccttggactgtaagggccgaaggcagaaggtggggattctcaggcaatgcagcaggcctgcgagagactctggggaggagcaacagggctctctaaattgccacctgcaagtggctgcgtcctcctaccatggggcacccaggacccagctcaggcttgcacctgggttcttccttgttgaacctgtggcaaagcaaggaggagacttggtctactccctcctgggcagcctctgctgactgccctataggtgctgggcactgtgtctgggacacagagactgtgaaaggcctcctctcccacagtggagagctgccagcagcatgaggaggccgggttcatgcagggtccttggcaggcctgagggccagtggggatcctgggggctttctggggtgtaccctcagctctgcatgctttgaaaggcccctttaaagtcaggtcctggtcagatctagaagcgggcaagtctcagctgaggctgaaacctcggcctccctgagccttgtgacttgcccagggtcggaggcccaacgccccctgaggaattctcttcctggtacggcagagaaaggtgggggccagggaatcagggtggggaaatcccagctgcctctccctgcaccctggcccatctcccccaggtcatgagccatcccccttcgactgttttcccaccataagggactatgatttacatctaccaaactctgccaccgacaaggacagtgtgggaagagggtgagccctgagtggagccaggtgagctggattcaaagcccagttccgcagcagagagcctgggagagccatctcttaaccttgggtacaccacaggccctttctgcacccacaggtctgtcttgctcatgagtgggtctcagagtttacaaatatagactgaggatcagagaggctgcatgcgtgcctgaggtcacacagctcagatccccagaaagagagcagaatgcagctcagacattccgagtcagtgcttttaaccatagtgctgcattatataccctcagcaccagccccaggcttccatcctcagtagcctgtctacatttcaagggttagttctccttcccctccatttcaaatgcccccctttcaagttccctcagggaaggccagtggtttttggggtcacctgggccagggttttctgcagctcaacccatcaggggtctaggtgatgactgggatttctagggggaaacaagggaaataaacatggctttttctgccaaaaggctctctcagccgagacttgctggcacggatattgcccctgccctgggctggctggcgtgagttgtctgcgcctccctgaaggcagacttcaggggctagctgtgatgggctagctgcggtgaggagtcccctgagccctgagtcacatcagaagcacattgctccaccccagggctcggccttgcccagggcctcaaaggcaccaaacgtatacacctgagctagaaagtgt

SEQ ID NO: 46866 - DNA, 1209 bp, Homo Sapiens
tttcaggtgaggctgctgtcagaaaggaacttttacacagtttgccttcagagacagtctatcggcatgttgtagagttttattactaagaaaataaatgttacttacatgattgtggtggtgccatgcagcaagaatcagagagatgcagagttagagccagaaggcctgacatggcactttatgtacctaaagctcgtaggggtgcagtactccttaagacaggtgatgaagaagaaagctgtggttcacctaactctgtggtgaaagaaaagcaaaaagaaagttctctctcccaaaaagaagtctttaaagacaaaccggaggctcgaagactaaatatcaatcctgatagaaaggagcataattgtagagaagaaaagaaatcttcaacaaaattaagaatggacacatgccttcaaaaaacaaatagagtttgttctaagagaggaaccactgaatccaaagaagtattatcccaaggacaacagcagggagccccaaatgctggggttataactaatgcacctttgcagagacattttaaaccaaagaaggtggagtgtttggaagttgaaactacggatgtgacaggacatgagaggatacttctttcacaggcctgtttagaaatcagcgaggctcaagttccaagcaaaccattccaaaatgtggaattctgtgacttcagtaggcatgaacctgatggggaagcatttgaagacaaagatttggaaggcagaattgaaactgataccaaggttttggagatactatatgagtttcctagagtttttagttctgtcatgaaacctgagaatatgattgtaccaataaaactaagctctgattctgaaattgtacaacaaagcatgcaaacatcagatggaatattgaatcccagcagcggaggcatcaccactacttctgttcctggaagtccagatggtgtctttgatcaaacttgcgtagattttgaagttgagagtgtaggtggtatagccaatagtacaggtttcatcttagatcaaaaacagattccattcctgcaactatgggtcacatctctctgtcagagagcacaaatgacactgttagtccagtaatgattagagaatgtgagaagaatgacagcactgctgatgagttacatgtaaagcacgaacctcctgatacagctgtccttgctcatgaaacacatagagatag

SEQ ID NO: 46867 - DNA, 642 bp, Homo Sapiens
tcaatgaagaaagtagcagggatggatgtggagctgacagttgaagaaagaaacctcctatctgtttcatataacaatgtgattgaagctagaagagccttctggagaataatcagcattgaacagaaagaagaaaacaagggagaagacaagctaaaaatgatttgggaatatcagcaaatggttgagactgagctaaatttaatctgttgtcactttctgtatgtactggacaaactcattccagcagctaacactggtgagtccaaggttttctattataaaatgaaaggggactaccacaggtatctggcagaatttgccacaggaaatgacaggaaggaggctgtggagaacagcctagtgggttataaagctgctagtgatattgctatgacagaacttccacctgcgcatcctattcgcttaagtcttgctctcaatttttccttattctactacgaaattcttttccctgaccatgcctgcaggttggcaaaagcagcttttgatgatgcaattgcagaactggatacgctgagtgaaggaagctataatacactatggacttcaggcatgcagggtgatggtgaagaacagaataaagaagcgctgcaggacgtggaagatgaaaatcagtga

SEQ ID NO: 46868 - DNA, 1161 bp, Homo Sapiens
atgaccagcctgttccgccggagcagcagcggcagcggcgggggtggcaccgccggggcacgcgggggcgggggaggcacggccgccccccaggagctcaacaacagccggcctgcccgccaggtgcgccgcctggagttcaaccaggccatggacgacttcaagaccatgttccccaacatggattacgacatcatcgaatgcgtgctgcgcgccaacagcggcgctgtggacgccaccatcgaccagctgctgcagatgaacctggagggcggtggcagcagcggcggcgtctatgaggacagctccgactcggaggacagcatccccccggagatcttggaaaggactttggaacctgatagctcggatgaagagcccccacctgtgtactccccgccagcctaccacatgcacgtgttcgaccggccctaccctctggctcccccgactccgcctccccgtatcgacgcgctgggctctggagcccctacaagccagagacgctatcggaactggaacccaccactgctgggcaaccttccggatgactttctccgcatcctgccccagcagctggacagcatacagggtaacgctgggggccccaagcctgggagtggagagggatgtccacctgccatggctgggccagggcccggagaccaggagagccgctggaagcagtacctggaggacgagaggatcgcgcttttcctgcagaacgaggagttcatgaaggagctgcaacggaaccgcgacttcctcctcgctctggagagagatcgattgaaatacgaatcccagaaatctaaatccagcagcgtggctgtcggaaacgactttggcttttcctctcctgtcccaggaactggcgacgccaaccccgctgtgtctgaagatgccttattcagggacaagctgaaacacatgggaaagtccacccggaggaaactgtttgaacttgcccgagccttctcagagaagaccaaaatgaggaagtcaaagaggaaacacttgttgaagcatcagtcgctgggggctgccgcgtcaacagccaacctcctggatgatgtggagggccacgcgtgtgatgaagacttccggggcaggcgtcaggaggcacccaaggtggaggaaggcctgcgagaaggacagtaa

SEQ ID NO: 46869 - DNA, 855 bp, Homo Sapiens
atgacaactgctcacttttactgtcaatactgcacagcatcacttcttgggaagaaatatgtactaaaggatgacagtccatactgtgttacatgttatgatcgtgtattttctaactattgcgaggaatgcaaaaaaccaattgaatctgattctaaggatctttgttacaaagaccggcactggcatgaaggatgcttcaagtgcaccaaatgcaatcactctttggtggaaaagccttttgctgccaaggatgagcgcctgctgtgcacggagtgctattctaacgagtgctcctccaagtgcttccactgcaagaggaccatcatgcctggttcccgcaaaatggaatttaagggaaactactggcatgaaacctgttttgtgtgtgagaattgccgacaacctatagggacaaagcctttgatctccaaagagagtggcaattattgtgtgccatgttttgagaaggagtttgctcactactgcaacttttgtaagaaggtgataacttcaggtgggataacattttgtgaccagctatggcataaagagtgttttctgtgtagtggctgtaggaaagatctctgtgaagaacagttcatgtccagagacgactatccattctgcgtggactgctacaaccatctttatgccaacaagtgtgtagcctgttccaaacccattagtggtctcacaggtgccaagtttatctgctttcaagacagccagtggcatagcgaatgctttaactgcgggaaatgctctgtctccttggtgggtaaaggcttcctgacccagaacaaggaaatcttctgccaaaaatgtggctccggaatggacactgacatctag

SEQ ID NO: 46870 - DNA, 1698 bp, Homo Sapiens
ccacacggcgccaggccccacagctgccacagagacgggagccagccgcacgcagaggctcaagcccacggccctgggaggcgccctttcctgggcagggtgggcctgactgcctgctccatccaagcactggggcctcgggccgcgcggaggtcccacaggagggtcagagcggcatcttcccttcagggccctcgcccgggcaccccccggccaatggaccacagctgcacccggttcatccaccgccggggaccacccactcggacccgagccggcttcaagaggggcaagaggccaaggatccagcagaggcctcgggctcgagtctcagactcggatgacactaacgccgccgggccctcagctgccctcctggaggggctcctgctggggggtgggaagccatcgccccacagcacccggccggggcccttcttctacattggaggcagcaacggggccacaatcatcagctcctactgcaaaagcaagggctggcagcgcatccatgacagccgccgggacgactacacgctgaagtggtgtgaggtcaagagccgagacagctacggcagcttccgggaaggagagcagctgctgtaccagcttcccaacaacaagctcctcaccaccaagatcgggctgctcagcacccttcggggacgggcacgggccatgagcaaggccagcaaggtgccggggggggtccaggccagggtcctgagaatggaagagtttttcccagagacctaccgcctggacctcaaacacgagagagaggcctttttcaccttgtttgatgttcatgcagaagaagagccctctgtacatgctgctgaaggagcacacggtgtggagcatggaacacctcaaccgctacatcagtgacacgttctggaaggcccggggcctcgccaaggactgggtcttcaccaccctcaaggtgcgtccactgtgccctccagtctgggagtgagatccctcggggcgggggtgtgtggtcaggctgggcaccaggcacacagatgtccgtggcgtgcgtgggcggctgcgctgaagtgtgacctgaccgtgtggaaccaaacccttccagcgtctctgctcacttagctggcagtgcctgtccccagcagccagcaaaggcccggacggaaagcccagtcgggggtctgtcggcacgagtcccgcgggcagcctcgccgtagggtcaggggacagctcggcttcagtgacagccaccatgtgaagagtctttgttcctttcagatcctccacttggcaggcagggccaacagcagcccccgggccaggtgtcctggagcagcagcagctgcccgtgcaggcccggactctccctagctaagggccatgtgcggtggagtgtcctaattttgcagggttcctttctgtgggggtacctgtggggtacttcaaacagccctagcagcaaaggcccttgagcagcgcggtgtgaaactgggataaaaacggggcttggccgaaggacttttatctgtcttggtcaccccggccaggccccggaagcagcagccagggatggtccttcctcacccacaggcgtgtgtcactgtggctgggacggcagcgctcagaggagcctccagttactttcctcacatctcccaaactctctcttaattgcgataattcacagaacataaaattcacgatctt

SEQ ID NO: 46871 - DNA, 2859 bp, Homo Sapiens
gtgttcagaaaactcattagcttccaacctcctcaattaggcagaacaaacatgcattactccaaattgccccgcactgcgatagagacagagttcaagcagaatgttggcccaccacccaaggatctgaccgctgaagtttacttcccttcaatcaaatcgagatcacatcttcctgcagttttctataatcagtatttcaagcatccaaaatgtgtaggagaatatggacccaagaacggagcagagagacaaatagaggaacggaaagttttgcctacaaccatgatgttctcaatgttagctgactgtgttctaaaatccactccaattcccattttgggagttgctatgtgatgaaggtctgcccctgtggtgttgggacaacttgctcatggagttgcagttcttgcctaacaggaacccaccatggtaagaaaaagactcaagctggtttatttgtttttaaggttgcaaggtaatcaagtccataaccacacttgctctcacatttaccaaaataggccaatctcagaactaaatgataaaaatgaaaattaatcagggactcccatgggcctcacatatatggcagttttgaatctgttctttttttcactatcataattgtttttttaaactcattttctctgcttgaatacacaactgtaaaaaaaagtgggggtagtggtggtgatagaaatgaataaacccatggaaacagtgagacatctacagagacaaaattaggaaggaaggaaacaaaagcaatttcagtatctctgtgcaaggcctgcatacctttccttgccaatacccgtggattgggcttgtctcaggaggtagcaggtgtttccttgactcacacagaaaacaagcccttgggcttcttgtgctgttagggcaagttacgttcagcacatgaacactggaccctgctttgcctgtccgtccttcccagaagagacacagatcacagatgatcaagtagttgagaaaacagttcaagaggaggctttgtatcttttctttcttttctttccttttttttttttttttgaaacggagtctcgctctgttgcccaggctggagtgcagtggcattatctcggctcactgcagcctttgcctcccgggttcaagtgattctcctgcctcagcctcctgagtagctgggtttacaggtgcctgccagcacgcccagctaatttttgtatttttagtagagacggggtttcactgtgttagccaggatggtctcgatctcctgacctcatgatccacccgcttcagcctcccaaagtgctgggattacaggcataagccacagcacccggccctgtgtcttttcttaatttgagcgaacttaaagtaaaaacgcttcttaacattataaagtaggactatgtcccctccattgaatttttgtaaaaaagtcgaatagggatagaaagcaagcaaccagatagaatatcatgccccagaacatcatttaccttggtagaacattaccactttaacacatagaaaccttttcacactagttaacaaatagcattaagcatgattcaagtcaagattttaaaaacttggctgatgcctctcattaagagttgaaaactatataagactcttgctccaggaaactgtgttctgacattttaatagtattgcgttagcaagagcagaaaatccatgaacttagattcacagaaagtaaatcaagaatccatccaaaatggagtgcctcttgctgagtgatgggatggttttcatgtgagatgtcagtgcagcttctatacttgacataaaagttcccattaaaaaaaacggaactgctgctcaatttttttttcatcaagcagagttacctaaagtgctttttagaagagactattaggaaaggaatggaaagtagtcattatgactaatctgctttaggagttggggtaaccagtattacaggagggactttcagagccatggggaccttttaggcaactcaaattccttcaattgtttgcagtggtcctctcgaggggatgtaatgagttgacatgcaccagaacagatagaatgcactgccagctggtagtttactcttgtacaggaaggctgcttttctaacacacaactctttgttgtgttaaagagaaataaatatataaaagcctaaaagtaagctttcaattctttatgtctggcaaaattgtcagtacaatgtgccttgaggatatatccatggtgctgtcttacaaggttattacgaaagaataagctcatactataataaccaccccatacactttacagtttatgaagaacttacatatacattttctcagttgaacctcacaacatcagtgggaggcaggggaggcagatattattatctcttgagagggagtgaccctgctgctgctgctgtatatgtgtggcttttggtttaggaagactaagttgattgtgttgtattttcaagtattttatatcgtacaaggatgtttattgcagcactgtttataacaaggaaaaattggaacctactcgaatgcttgctaataggggactcattaaactatggtacaagcttagatatgactctgtagtcattaagaattttgatgaggtattagaaagaaatgtattgatgttgaagtatatttattgatgaaggaaattgttcacaatatttcagccaataaacaatagtatatgcatttttttgtaataggaaaaaatgcacacagtaaaatagtggttatctttgtgtgcggtgaatatgtatgatacttgttttctttttcatgctcacctatcaattctaatcttagtgtcaataaatattaaaaatgtact

SEQ ID NO: 46872 - DNA, 1595 bp, Homo Sapiens
aagatcaaccctcccccatgggctcctgcctgcctgccaggttttcctgtctcctggaggacaaggatgagggctttccacttgagtctccctggtggagcccagctcctgacatacctggtaaaagttctcaagagaagaacatggaggaggaatgtggataacaaccctggctgcctgtgtgttccaagctaggaagatgtaatgtccccacaaacggggtaaatggcttgcctgcgtcacagctgtctcaagcccaggccctgggtgccagcccaagcccaaggactaggtccagagccacacagcgccaggccacatccgcctcacctgggaccttttgtggggtacagtctccggccccacccagacctgctgaaggagagaccccatggcaaggactcagccacctgcagtttcataagcccccagtgggttcctaggcatgaagaccaccggttagaggctgaactggcaggaacctgtctccagccccttctcaccccagccgggccctgcctcagaggcagcacccaggacgtggccatgacccgtggactccactcaatccctcttctccaggagccatgcaaagtgtcagccagccaggcccctggaaggcagtcatcacctcttaaggcattgcgggtgtcggtcctgcaactgccaggtgcagcacacgacccatgtccggtgttcgatagcagggagccatgacctggcaacgattccacgctcaaaggggcacccggggggccctgggtcggggcggatcagctttccctgggcacatctgcctcattccagatctccagggctcatgtctgtgacagggagggaaggctctgccctggccttccgtcagctctgccagtgcaggctgggcagcctgggctttagagctggcttctgcccacactttctccgtgaaaggaaaacaactatgagtctgccaaacgcatctcagatgcgttttaaaaaattctggtccccgctctctgtcccatcatctgcctcggggacttcctctctccgtggttctcaccccatactctgtcactgccacattttcacctgggcctggcctttgtctccacctgaaactcctgaaaatcttgaaatggatttctaggtcactggggactccggcagcacattcggcttcagaataaagggcgcccgcggtcccccagcacctgcccaagccacacccctagcttccctccctatccctgcagcctgagggtcccttcagccacccctaagtccccacctgggctcctgccccgcccctggctagcagcgccttctccaccggggcccctctgctcacagagccccctcacctccctggggatgaggggccaggccatgaccctgaaagcctagccctggccttgacctcccaggagcgccctccccgccctctcccggccccggccccgtcctctgctgctggcctctgggtcgtgccccgcagactgagctgcgcttgggggtcctggcggcctgggccgtcccgcaccgaacccaggcggtcggagcccggcggggaggcgcgaggtccttctgggggctcctccgacgcctgaggg

SEQ ID NO: 46873 - DNA, 4042 bp, Homo Sapiens
atggaggccccgctgcggcctgccgcggacatcctgaggcggaacccgcagcaggactacgaactcgtccagagggtcggcagcggcacctacggggacgtctataaggccagaaatgtacacacaggagagctggctgcagtaaaaatcattaaattggagcctggagatgatttttctttgattcaacaagaaatatttatggttaaagaatgtaaacattgtaacatcgttgcctactttgggagttatcttagtcgggaaaaactatggatttgtatggaatactgtggtggcggatcacttcaagatatttaccatgttactggaccattatcagaattgcaaatagcctatgtatgcagagaaaccttacagggtcttgcctatttgcatactaaaggcaaaatgcatagagatatcaaaggtgctaatattttattgacagaccatggcgatgtaaaattagctgactttggtgtggctgcaaaaataacagctaccattgcaaaacgaaaatctttcattggcaccccttactggatggccccagaagttgcagcagtagagaagaatggtggctacaaccaactctgtgatatctgggcagtaggaataacagcaattgaacttggagaacttcagccacctatgtttgatctccacccaatgagggctctcttcttaatgtcaaaaagtaattttcagcctccaaaactaaaggacaaaacaaaatggtcatcaacattccataattttgtcaaaatagcactaaccaaaaacccaaaaaaaagaccaactgctgaaagacttctgactcacacttttgttgcacagccaggtctctctagagccctagcagttgaactgttagacaaagtgaacaatccagataaccacgcacattacactgaagcagatgacgatgactttgagccccatgcaatcattcgtcataccattagatctacaaacaggaatgccagagctgaacggacagcttcagaaataaattttgacaaattacaatttgaacctcctctgagaaaagaaacagaagcacgagatgaaatgggattgtcatcagacccaaatttcatgttacagtggaatccttttgttgatggtgcaaatactggcaaatcaacctcaaaacgtgcaataccacctcccctacctcctaagccaaggataagcagttaccctgaagacaactttccggatgaagaaaaagcatcaaccataaaacattgtcctgattcagaaagcagagctccccaaattctcagaagacagagtagcccaagttgtgggcctgtggcagagacttcttctattggaaatggtgatggtatttcaaaactgatgagtgaaaatacagaaggatcagcacaagcaccacagttaccacgaaaaaaggacaaacgagacttccctaaaccagccatcaatggccttccacccaccccaaaagttctgatgggagcatgcttttcaaaagtttttgatggctgtcctttgaaaattaattgtgcaacatcctggatacatcctgatacaaaagatcagtacattatttttggaactgaagatggtatttacacactgaatctcaatgagctacatgaggcaacgatggaacagttatttccacggaagtgtacttggctgtatgttatcaataatactttaatgtcattatcaggaaaaacctttcagctctactctcacaatcttatagctttgtttgaacatgccaaaaaaccaggattagctgcccatattcaaactcacaggtttccagaccgaatactaccaagaaaattcgctttaacaacaaagattcctgatacaaaaggctgccacaaatgttgcatagtcagaaacccttacacgggacataaatacctctgtggagctttacagtctggaattgttttacttcagtggtatgagccaatgcagaaattcatgttgataaagcactttgattttcctttgccaagtcctttgaatgtttttgaaatgctggtgatacctgaacaggaataccctatggtctgtgtagctattagcaaaggcactgaatcgaatcaggtagttcagtttgagacaatcaatttgaactctgcatcttcatggtttacagaaattggtgcaggcagccagcagttagattccattcatgtaacacagttggagagagataccgttttagtgtgtttagacaaatttgtgaaaattgtaaatctacaaggaaaattaaaatcaagtaagaaactggcctctgagttaagttttgattttcgcattgaatctgtagtatgccttcaagacagtgtgttggctttctggaaacatgggatgcagggtaaaagcttcaagtcagatgaggttacccaggagatttcagatgaaacaagagttttccgcttattaggatcagacagggttgtcgttttggaaagtaggccaacagaaaatcctactgcacacagcaatctctacatcttggctggacatgaaaatagttactaagcaacagaaactgatctcaaatgacaggaaaatgaatatactccattgaaaggaaaaataaggaaattcaatacaaactgcactatgatttgctttaactattatgggttatattgcaaatgatctgtactttagggtagaattcaatattttctgcagctggaaacagctagtctatctcttgccactgtgtggtggttatatcaagtttgcttaataaaagctatgagacaaatagtcctctagttccaggaaacacagtctttttttaaaaaaaacaatgtttgtaacaagggtgccatggtatttttagataactcgtgattatcttaagagaggtaaatttagtgatcattttatatcatgtcttattccttcttaatgaacataatttgttaaattctcaagcaaggttttcacttttatattggccattctgtatgtttttgtaaaacagaatatttaatccttatttattaatctcttgctggagtggtgtaatgtatctaacttttagcaaaggagggttgcagagcagcttaaattttttttataatgtataagaattttgtttatcttttaagagtagtaaagtactttgagtgtttgggggttcaacacacacatgcaattttgcttaacaaaagtattttataatacagtttcatacagaattaccttaaaagggagtcttatgttttcaactacagatagttgtaagggatcatacagaagatattgatgatagttgaaatattcttagaaggggtgtgtatgtctagctgtgtctaccatgtgtatgtattcttgacaagcagtataaaatacctgtgatttttctttacattagggataatgcataaggaattaatcttcatatatattatcatccctaatgtagcagggggaagtatttaattgcccatgatatgtattttacttatactatgccagagaggaaactataaagtaattacacatgtaatcttgggtttttcacatatgtaggtattcattttgagtaggttgaagaagaaaaaaaatatttaaatgaattgaattcctgatgggatagtatcaataagtatttaaaagccagtattctaaaaataataaagggtagggtcatttttgagtttgtttttcttttgctattgttaatattcaaaattaaagtgttacattggtacctgttgtcttaatgcatttattgagaacagcattgagatgatgaacaaggggttagcaatagcaaactctataattattttgactaattacttaagaggaaaacagtataagtatctcattcagtatttagcaattctgtaaaataagtattatctctatttttcagatgaggaagtaagggtttagcaaggttaagagatctatccaatttacacagcaagttagtagttgagcctgaccatgagtcttctgactctgttcttttcactatgcaatacgcaaacaataaaatgttatacaaatggaatataaa

SEQ ID NO: 46874 - DNA, 1394 bp, Homo Sapiens
tcagatccgccgagtatgaagcgctcggcttttcttttgtgtgaggagcacccacgacgccccgaccatgggcgcaggggcagaggcgaaggtcgtcgctccgtccgctaccccgtcccccagccgcaagcgccgaggagccggaagagaggcggaaagggcagcaggctccttacccagaccagcgaggggaggtcagctcgtcgcggggtgtggctcccgtccggggactcccgagctcattacgggtggccgtgtgtagccaagttcaagctctccctccgggaatgcctgccgcggcggcggaatacggcttcttcaggacattcagcaaagcggggaggcggggacctgcgggcggaggagcgacgccccagctgggaacgcggcggacgggcgagcggggggtgcgccctgggcgcgccaggccgcagaggctccggggaaagttctcttggccgcgcgagtggtggcgccccgggcgggagcagcccaggtgcatgtgggcccggtccaggcgtctgcaaaaagccctggaacgaagcggaccccccagtccagcgctggccgcggcaggggagccccttctgggcggggtatcagctgggggcggagggcggggcagagaccgtggtcccagcggcgaggtgccggcgagtccacgctgccaagccgcacactgcgcccaagccgcggggcagtccagcgctcgctgcgtccttcccccgagagacctggaggctgggtggggagaagaggacgcggtgctgctcggaccccacggttcggcggtcccaatcccacgccctccgcgcggtcggccgcgtccaggactgaggggcacaatagctctgaagctgcagtgacccctggtgggtcccgatgtccgtgcacaggcagccgaggttgagctgcggacgacactgagccccgctgggcttcggagcaggtgcaatctgtgctctccagctgggaaccagcagcgagttaatgcgagtcgcagttaggggagacacgaggggaggtgtcacagaaaaaaaactctatattgagttttagagttagagctttggcatcagacgtagttttgagttgactattctactgcttgttagctgggtagccaaagctcaaaaaaaattgcttaaaacctaggacgttagcccttaaaacaaaaccaggcttccgtagcacagtagaaatgaaatgaacaattggcgacttttgatggagtttcctctcatagtgatttgccacaaaggaccttctgtaggaagcctcggccttccctgctattgtgaccccatccaaacacaggatcagcataaccgccaaagtgcaatataaatttctgaactttacctaggctatgaataaaactattttatcttctg

SEQ ID NO: 46875 - DNA, 387 bp, Homo Sapiens
atgcggtgggccccagccctgcttctagctttcctgcctcttgccagtcagaaatcttccaacttgcaagggagaaggaagtcagtcaccaggccagctgggtcatctgctgtaatcacttgtgatcttactgtaataaataccttctacatccactggtacctgcaccaggcggggaaggccccacagcatcttccatactatgacccctactactccagggttgtgttggaatcaagaatcagtagaggaaagtattttacttatgcaagcatgaggaggagctggaaattgatactgcaaaatctaattgaaaatgattctggatctattactgtgccacctgggacaggcacagtgattcacacctgccctacaccacactga

SEQ ID NO: 46876 - DNA, 486 bp, Homo Sapiens
atgacttactttggtcacttcggcggtgccaaccatgcccataccctgggggagctggaggcctgcattgccatgctggtggagcagctgaggactcagggctgcggtgggaggaccctggggacctctgaggaggaggcagagttgcagcagaaggtggaagagaatgagcacctgaggctggagctgcagatggtagagaccgagagggtgcggctgtccctgctggaggagaagctggtggacgtgctgcagctcctgcagaggctccgggacctgaacatatcgaaaagagccctggggaagattttgctgagcacgctggacgctttcagggaccccacccacgagggaaggcccagccctgcagccatcctggatgccctgcaccaagccttggctgcctgccagctgttgcggagacagccctcggcaccagcctctgcagcagctgcgctcaccaaccccctcctcgtctcctgctga

SEQ ID NO: 46877 - DNA, 606 bp, Homo Sapiens
gagctgcaggtgattcagcctgacaagtccatatcagttgcagctggagagtcggccactctgcactgcactgtgacttccctgatccctgtggggcccatccagtggttcagaggagctggaccaggccgggaattaatctacaatcagaaagaaggccacttcccacgggtaacaactgtttcagacctcacaaagagaaacaacatggacttttccatccgcatcagtaacatcaccccagcagatgccggcacctactactgtgtgaagttccggaaagggagccccgaccacgtggagtttaagtctggagcaggcaccgagctgtctgtgcgtgccaaaccctctgcccccgtggtatcgggccctgcggcgagggccacacctcagcacacagtgagcttcacctgcgagtcccacggcttctcacccagagacatcaccctgaaatggttcaaaaatgggaatgagctctcagacttccagaccaacgtggaccccgcaggagacagtgtgtcctacagcatccacagcacagccaaggtggtgctgacccgcgaggacgttcactctcaagtcatctgcgaggtggcccacgtcacc

SEQ ID NO: 46878 - DNA, 657 bp, Homo Sapiens
actaggcctctccatggtgcagttgaaaatgattgtttggaaattgtccgcctcctcctttcctatggcgctggccccactttggccacctactcaggcagaaccattatgaaaatgacccacagcaaagttatggaaatgtttctaacagattacttaaatgacctacagggttgcagtgacagtaagctgaatagctcttgggagttctacggcagctctgtctgtgaaccagataatggaggggaatccaatgttttggcagaccccccaggaccagaggaccaggatgatgacaatgaggcttgcagtgatgtgtttgaatttaaattttcagataccccctcttaccttgttaacattcaagtttcatctttgcagggaccacaaaactggttattgctttcagatgtacttaagaaagtgaaaatgtcatcctgcatatttcgctggagttttccacatctgaaaattgtcccaattgcagaggcagagttttacagacaggtttcagcaagtatcttgttctcttcctccaaagacttggaagccttcaatctggaaagcaacaaactactagatttactagaatgtacaaatgaactccagattctccttggctcctctctggaatgcttaaatcccagggatgtggcc

SEQ ID NO: 46879 - DNA, 687 bp, Homo Sapiens
atggggctgagggactggctgagaaccgtgtgctgctgctgcgggtgcgagtgcttggaggagcgcgccctgcctgagaaggagcccctcgtcagtgataacaatccatattcctcatttggagcaactctggtgagggatgatgagaagaatttatggagtatgccccatgatgtgtcccacacagaggcagacgacgacagaaccctgtacaatttgatagtcattcgtaatcagcaggccaaagactcagaggagtggcagaagctcaactatgatatccataccctgcggcaggttcgaagggaagtaagaaacagatggaagtgcatcttagaagatttaggttttcaaaaggaagctgactctttgttgtcagtgactaaactcagcaccatcagtgattctaaaaacacaaggaaagctcgagagatgttgttaaaactggctgaagaaaccaatattttcccaacaagttgggagctctcagagagatatctctttgttgtggaccgtctcattgcacttgatgctgcagaagagttctttaagcttgctcgtcgaacttaccccaagaagcctggggttccatgcctggcagatggccagaaagaactgcactaccttccccacctgtggggggacctctcatgcagacttgcacatatgcagggagtattgcactga

SEQ ID NO: 46880 - DNA, 510 bp, Homo Sapiens
atgttaccgtctactatgttcctcgtgcaccttccactcagcacaaacaggctgcactgcctccgaaacacatcacttgaatcctacctctgctcctttgtccatctgaatcaccctctccacatttctgaccgtgtaatcctgatctcacttcatgaggcagttcgcttctcttttgcatttagctttccccggggtacactgtcaatagcctactgtctgatgtcatcagtcagcacttcatcagaggcaattatgtccacagagcttttggctaattactgtcactcctctttacatgtgtgcatatgcatatcatctttccctaatgagactggaaatcatgattcattccctggagcagtggtttccataagtgaccaacccacagaccagtgcaaactggctgcaaaagagcttcctctgaggaacttattagaatgcagattctttgactgcatgggagaggaggatctcataaatctgggtgtaataggcacagaacgttag

SEQ ID NO: 46881 - DNA, 2024 bp, Homo Sapiens
ttttcatcacagaaatgacctccaccttcaacccccgagaatgtaaactgtccaagcaagaagggcaaaactatggcttcttcctgcgaattgagaaggacaccgagggccacctggtccgggtggttgagaagtgtagcccagcagagaaggctggccttcaagatggagacagagttcttaggatcaatggtgtctttgtggacaaagaagaacatatgcaggttgtggatctggtcagaaagagtgggaattcagtgactttactagttctggatggggattcctatgagaaagcagtgaaaacacgggtggacttgaaagagttgggtcaaagtcagaaggagcaaggtttgagtgataatatactttcccctgtgatgaatggaggtgtgcaaacttggacccagccccggctctgctatctcgtgaaggaaggaggcagctatggcttctctctgaaaactgtccaaggtaaaaagggggtgtacatgactgatattacacctcaaggtgtggctatgagagctggagttctggctgatgatcacttgattgaagtgaatggagagaatgtagaggatgccagccatgaggaagtggttgaaaaggtgaagaagtcaggaagccgtgtcatgttcctgctggtggacaaagaaactgacaagcgtcatgttgagcagaagatacaattcaaaagagaaacagccagtttgaaactgttaccccaccagccccgaattgtggagatgaagaaaggaagcaatggctatggtttctatctgagggcaggctcagaacagaaaggtcaaatcatcaaggacatagattctggaagtccagcagaggaggctggcttgaagaacaatgatctggtagttgctgtcaacggcgagtctgtggaaaccctggatcatgacagtgtggtagaaatgattagaaagggtggagatcagacttcactgttggtggtagacaaagagacggacaacatgtacagactggctcatttttctccatttctctactatcaaagtcaagaactgcccaatggctctgtcaaggaggctccagctcctactcccacttctctggaagtctcaagtccaccagatactacagaggaagtagatcataagcctaaactctgcaggctggctaaaggtgaaaatggctatggctttcacttaaatgcgattcggggtctgccaggctcattcatcaaagaggtacagaagggcggtcctgctgacttggctgggctagaggatgaggatgtcatcattgaagtgaatggggtgaatgtgctagatgaaccctatgagaaggtggtggatagaatccagagcagtgggaagaatgtcacacttctagtctgtggaaagaaggcctatgattatttccaagctaagaaaatccctattgtttcctccctggctgatccacttgacacccctccagattctaaagaaggaatagtggtggagtcaaaccatgactcgcacatggcaaaagaacgggcccacagtacagcctcacattcttcttccaattctgaagatacagagatgtgatgaaaacaagtaatagctttggctgtttatttgatagctgtttctgggtatttaataggaatcctttctcaaggaatgagttgtgacctgtttactgtctctttagaagaaaaactccactggaaaccattcaccatgtgtgattgtcttctgttatcatttgtcttacaggcggctattgcagacggctaatttatgcttaacttaggaagagataaggcaagagctagatttttttcatgtgatcttttccaagcttcaacttaacttaactacatttctctgtatgatgatgtctcttacttctacaggttccttgagcaccaaagatgattcataactctgtataggtgacagctgcttataaaagcatcttagcagataagcctattaaaattgtgcttttgtaacaatgttgtggttgctagaataaataccattaacaaatgc

SEQ ID NO: 46882 - DNA, 702 bp, Homo Sapiens
aagcctgagttctgtcctctctctctcctccctggacagtatgagcttcaccactcgctccaccttctccaccaactaccagtccctgggctctgtccaggtgcccagctagctcggccagtcagcagcatgaccagtatctctgcaggggctgggggctctggttcccagatctccatgtccccctccaccagcttctggggtggcatggggtctggggccctggccgtggggatggccagggttctggcaggatggaagatccagaacaagaaggagaccatgcaaagcctgaatgactgcctggcctcctacctggacagagtgaggagactggataccaagaatcggaagctggagagcaaaatccgggagcacctggagaagaagggaccccaagtcagagactggagccattacttcaagaccgtggaggacctgagggctcagatcttcgcaaatactgtggacaatgcccgcatcgttctgcaagtcgacaatgcccatcttgctgatgactttagagtcaagtatgtgacagagctggccatgcgccagtctatggagagcgacatccatgggctccgcaaggtcattgatgacaccaatgtcactcggctgcagctggaaacagagatcgaggctctcaaggaggagctgctcttcatgaagaagaacgaagaaggggaaataaaaggccta

SEQ ID NO: 46883 - DNA, 147 bp, Homo Sapiens
atgctggatgcatctttaggctccgctctaggtatgtgtatcctttacgggatcagccaccggcagttgccttgcgagcacgatgacaaacctctgccggctcttttgggtctcatccctgtatctatacgttgcatcccaacataa

SEQ ID NO: 46884 - DNA, 591 bp, Homo Sapiens
ggtctgatctcagagctgaagctggctgtgccctggggccacatcgcagccaaagcctggggctccctgcagggccctccagttctctgcctgcacggctggctggacaatgccagctccttcgacagactcatccctcttctcccgcaagacttttattacgttgccatggatttcggaggtcatgggctctcgtcccattacagcccaggtgtcccatattacctccagacttttgtgagtgagatccgaagagttgtggcagccttgaaatggaatcgattctccattctgggccacagcttcggtggcgtcgtgggcggaatgtttttctgtaccttccccgagatggtggataaacttatcttgctggacacgccgctctttctcctggaatcagatgaaatggagaacttgctgacctacaagcggagagccatagagcacgtgctgcaggtagaggcctcccaggagccctcgcacgtgttcagcctgaagcagctgctgcagaggcagagaacagcattgacttcatcagcagggagctgtgtgcgcattccatcaggaagctgcaggcccatgtcctgttga

SEQ ID NO: 46885 - DNA, 966 bp, Homo Sapiens
caggtggtcatctgccgcctgcctccgggcctcaccaaggagcagctggaggagcagctgcgcccgctgccagcacacgactacttcgagttcttcgccgccgacctgagtctttatcctcatctctactcaagagcatacattaattttaggaatcctgatgacatccttctttttagagatcgttttgatggatatatcttccttgacagcaaagatccagaatataagaagtttttagaaacctactgtgtggaggaagagaagaccagtgccaaccctgagactctgctgggggagatggaggcgaagacaagagagctcattgctagaagaaccacacctcttttggaatatattaaaaatagaaaattgattaagcttcttaagaaaccagaaaagggagaggaaccaaccacagagaaaccaaaagaaagaggagaggagattgatactggaggtggcaagcaggaatcctgtgctcccggtgcagtcgtaaaagccaggcccgtggaaggctcgctgaaggagccccaggagacgtcacacagcggcagtgataaagagcacagggatgtggagagatctcaagaacaagaatctgaatcacaaagacaccatgtggatgacggcaggaggcacagagctcaccacgagcctgaccggctttccagaaggagtgaggatgagcagagatgggggaaaggacctggccaagacagagggaagaaggggagccaggacagcggggctccgggggaggccatggagagactgggaagagcgcagaggtgtgacgacagtccagcacccagaaaagagcgactggcaaacaaggaccggccagccttgcagctgtatgatccaggagctcacttccgagcgcgagagtgtggcggaaacaggaggatctgcaaggcagaaggttcggggactggtcctgagaagagggaagaggcagagtga

SEQ ID NO: 46886 - DNA, 678 bp, Homo Sapiens
ttcatcctggaacctggtgaataccctgacttgtccttctgggatacagaagaagcgtacattggatccatgcggcctctgaaaatggtaaaaatgaaatccaaatgtccttgtgttgtttatgaaaagcctttctttgaaggaaaatgtgtggaactagaaacaggaatgtgtagttttgtcatggagggaggtgaaacagaagaggcgactggagacgatcatttgccgtttacgtcagtggggtctatgaaagttctaagaggcatttgggttgcatatgagaaacctggatttaccggtcatcagtatttgctagaagaaggagaatacagggactggaaagcctggggaggttacaatggagagcttcagtctttacgacctatattaggtgatttttcaaatgctcacatgataatgtacagtgaaaaaaactttggatccaaaggttccagtattgatgtattgggaattgttgctaatttaaaggagactggatatggagtgaagacacagtctattaatgtactgagtggagtatgggtagcctatgaaaatcctgacttcacaggagaacagtatatactggataaaggattttataccagttttgaggactggggaggcaaaaattgtaagatctcttctgttcaacctatatgtttggtaaggagt

SEQ ID NO: 46887 - DNA, 966 bp, Homo Sapiens
atgtctggggacaacagctccagcctgaccccaggattctttatcttgaatggcgttcctgggctggaagccacacacatctggatctccctgccattctgctttatgtacatcattgctgtcgtggggaactgtgggctcatctgcctcatcagccatgaggaggccctgcaccggcccatgtactacttcctggccctgctctccttcactgatgtcaccttgtgcaccaccatggtacctaatatgctgtgcatattctggttcaacctcaaggagattgactttaacgcctgcctggcccagatgttttttgtccatatgctgacagggatggagtctggggtgctcatgctcatggccctggaccgctatgtggccatctgctaccccttacgctatgccaccatccttaccaaccctgtcatcgccaaggctggtcttgccaccttcttgaggaatgtgatgctcatcatcccattcactctcctcaccaagcgcctgccctattgccgggggaacttcatcccccacacctactgtgaccatatgtctgtggccaaggtatcctgtggcaatttcaaggtcaatgctatttatggtctgatggttgctctcctgattggtgtgtttgatatctgctgtatctctgtatcttacactatgattttgcaggctgttatgagcctgtcatcagcagatgctcgtcacaaagccttcagcacctgcacatctcacatgtgttccattgtgatcacctatgttgctgcttttttcacttttttcactcatcgttttgtaggacacaatatcccaaaccacatacacatcatcgtggccaacctttatctgctactgcctcctaccatgaacccaattgtttatggagtcaagaccaagcagattcaggaaggtgtaattaaatttttacttggagacaaggttagttttacctatgacaaatga

SEQ ID NO: 46888 - DNA, 2527 bp, Homo Sapiens
gggcgcgccgggcggcaggtgtcggcgtcggcggcattcggcggcgatggagcggccctggggagctgcggacggcctctcgcgctggccccatggcctcggcctcctcctcctcctgcagctgctgccgccgtcgaccctcagccaggaccggctggacgcgccgccgccgcccgctgcgccgctgccgcgctggtctggccccatcggggtgagctgggggctgcgggcggccgcagccgggggcgcgtttccccgcggcggccgttggcgtcgcagcgcgccgggcgaggacgaggagtgcggccgggtccgggacttcgtcgccaagctggccaacaacacgcaccaggtggtgtttgatgatctcagaggctcagtatccttgtcctgggttggagatagcactggggtaattctagtcttgactaccttccatgtaccactggtaattatgacttttggacagtccaagctatatcgaaggtgggattatgggaagaactttaaggatattacagatctcatcaataacacctttattcggactgaatttggcatggctattggtcctgagaactctggaaaggtggtgttaacagcagaggtgtctggaggaagtcgtggaggaagaatctttagatcatcagattttgcgaagaattttgtgcaaacagatctcccttttcatcctctcactcagatgatgtatagccctcagaattctgattatcttttagctctcagcactgaaaatggcctgtgggtgtccaagaattttgggggaaaatgggaagaaatccacaaagcagtatgtttggccaaatggggatcagacaacaccatcttctttacaacctatgcaaatggctcctgcaaagctgaccttggggctctggaattatggagaacttcagacttgggaaaaagcttcaaaactattggtgtgaaaatctactcatttggtcttgggggacgtttcctttttgcctctgtgatggctgataaggatacaacaagaaggatccacgtttcaacagatcaaggggacacatggagcatggcccagctcccctccgtgggacaggaacagttctattctattctggcagcaaatgatgacatggtattcatgcatgtagatgaacctggagacactgggtttggcacaatctttacctcagatgatcgaggcattgtctattccaagtctttggaccgacatctctacactaccacaggcggagagacggactttaccaacgtgacctccctccgcggcgtctacataacaagcgtgctctccgaagataattctatccagaccatgatcacttttgaccaaggaggaaggtggacgcacctgaggaagcctgaaaacagtgaatgtgatgctacagcaaaaaacaagaatgagtgcagccttcatattcatgcttcctacagcatctcccagaaactgaatgttccaatggccccactctcagagccgaatgccgtaggcattgtcattgctcatggtagcgtgggggatgccatctcagtgatggttccagatgtgtacatctcagatgatgggggttactcctggacaaagatgctggaaggaccccactattacaccatcctggattctggaggcatcattgtggccattgagcacagcagccgtcctatcaatgtgattaagttctccacagacgaaggtcaatgctggcaaacctacacgttcaccagggaccccatctatttcactggcctagcttcagaacctggagctaggtccatgaatatcagcatttggggcttcacagaatctttcctgaccagccagtgggtctcctacaccattgattttaaagatatccttgaaaggaactgtgaagagaaggactataccatatggctggcacactccacagaccctgaagattatgaagatggctgcattttgggctacaaagaacagtttctgcggctacgcaagtcatccgtgtgtcagaatggtcgagactatgttgtgaccaagcagccctccatctgcctctgttccctggaggactttctctgtgattttggctactaccgtccagaaaatgactccaagtgtgtggaacagccagaactgaagggccacgacctggagttttgtctgtacggaagagaagaacacctaacaacaaatgggtaccggaaaattccaggggacaaatgccagggtggggtaaatccagttcgagaagtaaaagacttgaaaaagaaatgcacaagcaactttttgagtccggaaaaacagaattccaagtcaaattctgttccaattatcctggccatcgtgggattgatgctggtcacagtcgtagcaggagtgctcattgtgaagaaatatgtctgtgggggaaggttcctggtgcatcgatactctgtgctgcagcagcatgcagaggccaatggtgtggatggtgtggatgctttggacacagcctcccacactaataaaagtggttatcatgatgactcagatgag

SEQ ID NO: 46889 - DNA, 1919 bp, Homo Sapiens
tttaatcaggaatgtaattttagatagaggcggtaatggagtggtaggccacacataacagaatgaagcttccccaacgtggattcccagactatggaagtgctggcctccctgctcccagctgagccgggaaaactctgccccactccaagaggtgcttctcaaagatgattcctgatcccaggcatgtcctgtgtcctgtcaccaatcctggtgcttcatcgtcctttaaaatccaaacgaggtgatctagtgttcttcctctgcgtcctctggtcttctagcatcctggataggccgtgtatgtttagaaagaggggctccaccctgtgcccgcctaagatgatggctcatttatcaagaccaggctggaggctcagctaccagagcttctgttgtttgggaggaaggctgccagcagcagatgtttgtcctcgcctcagctccctgcagcctttgagctccatctgccgcacactcgggcacagctgccagtgcttcccctccgtgctcacctttcacctctcacggaggctggggtttcatgcatctgggcccaacagagagatggtgacccagaccctgcgatcctggtgccacaatccttcccaacagctcgctgggcatctttctgcactagcctgtcagcatgctggaagcagcaccgatggaggttgttgagcagggttgcaattgtagcccgtcactttggtcttggtgttccatcttgttagggcaagagagtcagagcacacacagccatctcctggctggatcatctggtggagtgggagtgtgcacatgcccacccccatttctaaataagatatgcattgtctcagggcctttgcaatgtccactccctagtcctcaatgctcttccccattggtcatcccagagctcatctcaaatgtcaccctttagaggggcagctgtcagtcttcccagttaaagcatatgccaaccccctcatcactcctggtctcaacaacctctttatttccctcattgctattatcttcatctgtaattctcatctttataatatctcttgaatgaatctttaggaggattactcttcctagagtgtgcaaaacggattgcagggatggtgagaggtgggcggaaatgttggaaaggggacaagggtggaattggtagcactgatcttgttgagagaggattggccctggaaaaagaaagtagcaatggagcaggaagtaattagacatagaagagagctcttcacgtgggaggtgaggagaatcggtgttgggattgtgtgttaggactgaggaaggaggaggaggaggatgcccagctttctaaactgggtatttgagtggatgggggtgacttgccgaaaataaagaatggtttgagaagaaagatgctgtgctcatcttggaaatgttgagttttgggcccctgtagaagacccagctgagatttgcaggtctgcatcaaatggagaattcatcagagaggcaatggtactcaaaaccatgacagtgaaaggtgcttccctaggagagaggcaggataaaaaaataaggtggcccaaaattaggatggccacacatcccagttagccaggatattcctgccttatacctgttgttccaccataatttctaatggcccccgcccccctactttcactttcacttgtctcagtgaactatatcgtcaccctacccgcatgagaaggttggggaaattcagagttcataggagggcataagaacccactgaaaaaaactgagtatgagcagaagggtagaaagaaaaaccggggtagtgttgggtaatgtatgccaagggtagaaaattgacaagagaagaatcattcatgtcaaatgggtcacagaggtgaagtcatgcaagtgtcaagagctgtgcattggatttagctacc

SEQ ID NO: 46890 - DNA, 381 bp, Homo Sapiens
gcagcaacttatggcttcactaccccaggtaccagctccaagcttgagcattttgtggccatcctttataagtgcttcgattctccacggaccacctgcaccctgtcagaaacagtggccgagcagtcagtgaggcctctgaaactctccgagtccaagattttgctttcgtcctcagggtgttcaactgacatagattccagaaagcagtcattgccccacctgcagcgggctttggagtcagctggtatagaaagcccaacttccagtggcctggacaagaaggaggggcaagaggccacagccatctttgaaaaagtgagaagattccgcatgcacgtagagcagaaggacatcatttatagtgtgtatctgaagcag

SEQ ID NO: 46891 - DNA, 225 bp, Homo Sapiens
atggagcgcagtggctgggcccggcagactttcctcctagcgctgttgctgggggcgacgctgagggcgcgcgcggcggctggctattacccccgcttttcgcccttctttttcctgtgcacccaccacggggagctggaaggggatggggagcagggcgaggtgctcatttccctgcatattgcgggcaaccccacctactacgttccgggacaagaataccat

SEQ ID NO: 46892 - DNA, 570 bp, Homo Sapiens
ccatcttgtaccacttgtcgtggagcaggtcgatgaagccggaggacttgtagcggctgatgaactcggacaggttggagggaggtccccagagaccccggcgccccgcctcgcccaggtgcctctcaccctcaatggcgaagggctttcccacggtcagcagtttgcagtcggcgtcgatggagacctcgtagtccaggagcgacttgtccatgatgaaggcgttgagcttgggggggtcgctcctgctggggccgggggcgggggtcagccatcgccccgcccaccccacgccccgcccccgcctcaccccgcgcccgggctcacgtgagcatggcgacgccgcggggcgtggtgggcgcgctgtggcgccgcatgtgtgcgtgcatgtcggggaagctcttcttgatgtacgcctcggcgctgctctcccacacggtgccgaagcggaagccctgcgccgggtggtgcagctgcgcgggggaccccgtcagcgcctctgcctgcccctcaggacccctgaccattgaggggcgcgccgttctccggggtggggccgtcctgggcact

SEQ ID NO: 46893 - DNA, 1244 bp, Homo Sapiens
agtaacaccagttgtaaacccaaggccaagagaccatggccacgttagcccggctgcaagctaggtcgtcgactgtaggaaatcagtactactttaggaacagtgttgtagatccatttagaaaaaaggagaatgatgcagcagttaaaatccaaagctggtttcgaggatgtcaagttcgggcatatatcaggcatttaaacaggattgtaacaattattcaaaaatggtggagaagtttcttaggcagaaagcaatatcaactaactgtgcaggtagcatattatactatgatgatgaatctctacaatgcaatggctgtcaggattcagagacgatggcgaggctatagggttcggaagtacctctttaattattattatttgaaagagtacctgaaagtcgtttcagagaccaatgatgcaattaggaaggcactggaggagtttgcagaaatgaaagaaagagaagagaagaaggctaacctcgaaagggaagagaagaaaagagattaccaagcccgaaagatgcattacctcctcagcacaaagcagattccaggaatatacaattcacccttcagaaaagagcctgatccatgggagctgcaattacagaaggcaaagcctttaacacaccgaagacctaaagttaagcagaaggactccaccagccttactgattggctagcttgtacaagcgcccgttcttttcctcggtctgaaattctaccacctattaatagaaagcaatgtcaggggcccttccgagatatcaccgaagtattagaacaacgctacaggcctttggagccaacgttgcgggtggcagaaccaatcgatgagttaaagttggccagagaggagctcagaagagaggaatggctgcaaaatgtaaatgacaatatgtttttgccattttcttcataccataaaaatgaaaagtacatcccatcaatgcatttatcaagcaagtatggtcctatttcttacaaagaacaattccgaagtgaaaatcctaagaaatggatctgtgacaaggatttccagactgtattaccatcatttgagctcttctcaaagtatggaaaattatattcaaaagctggacagattgtataaaggcgtcagaagaagaaactgaagccatctgcattttaaaacttaacagttctgaaaggaaaacacagatgaagatcctgtaggaaatatacttgctatgattcaataaactataaaattttg

SEQ ID NO: 46894 - DNA, 2025 bp, Homo Sapiens
atggctgaagtcccggaggattatgattccggcccagatgaagatggagagctggagcctgagaggcctgaactgcctggacttcataaattgtatgaaaatgccgaaccagacaccatggcaaaggcagactcgaagctaccagcagagatttaccaagagccacagccagagaccgaggaagaggacttcaaagagggggagccagacagtgctaagaacgtgcagctgaaacctggcgggacgtcccaggaaggaattgccaaggagtccaagagagacgtaccaagcgaaactgaaccagggatacaccaagaggtaaagtcggaaacatccagagagatgggagagtttttcaaagatttggaggcccctatggatgaaacgcataaagagtcagacctagagccaccagaggaggctaaaccaaatgttacagaggatgtgttcctagagtcagctatggaaacagatccagatccagtgccaccaacggaaaccatgtctgaggtttcgggggccacagtcagagagagaaatttagaattactagaggaggagactgaaccgggggttccagaggaatcacttagagtgcaacatgaagagacaggtctagagcctccagagcagaccaaacaagattttccaagtgagaaactaggagaatcacttgaagagacagatcttcagccaccaaagatgaccaaaccagagactccagaggagacacaaagagagtcaactgagaagaaaaggacagagccacccgagcaggctagactggaatttctggagaaggaaccaagaaagtctagtgaggaggcaggtctagagcctccagaagagactcaaccagaggttccagaggagatgcaaagaaaggcaactgaggagaaagggacagaactacctgagcggactaaaccagactttccagaccacaagccaagaaagtctactgatgagaacgttcctgagccactagaagagatcaaattagagtttcctgaggaagaatcaagaaaaacaaatgaggaaacaattctagaacaatcagaaatgatgaaaccagaaagtccagaagagataagaaagtcaaatgagaaaaaaaatccacagccaccagaggagactggtccagtgctaccacaggagatcaacccacaagttgaagagaaaacacaaacaaagccaactgagaaaattctagagttaccagatgaaaccaaaccaagggagacacatgtagaattttccaaggaagacaggccagaaccaataaagtctaagtattctgtaggaaacgatgagctagagcaccgtgagcctaaaagaggaaagttgtcactaagtgacaaatttagaaaagaatattacgcattaggatctctcagagaaagtgaagaatcaattggtacacattatgagtttttgcaaccactccaaaaattgcttaatgtcagtgaagaatgctcatactcagatccctcagagtctcagacagaattaagtgagttcgttcatgaaaaggaagttgtagatttgtcccaagagttgaaggaacgggtctctgaagatgacgaaacccagccagaaaaagggactgagttacaatttgagcatcttaattgggatccagaggaagttgcagagtggattagccagctaggcttccctcaatacaaggagtgttttatcacaaacttcatcagtggccgaaaactcattcacgtcaactgctcaaacctccctcagatggggataacaaactttgaggacatgaaggcaatttctcggcatacgcaggagctcctggaaattgaagagccattattcaaacgctccatcagccttccctatagggatattatcggcttatatttagagcaaaaaggtcatactgggataaaatctgattccttgactttatctgaatttgtcaaagcagcaggattacaggattatgctccagaaataactgcccctgaagagaatgaggaattaccttgcactgaaccatag

SEQ ID NO: 46895 - DNA, 384 bp, Homo Sapiens
ttaagaagtagatgcccagatgcaaaagtgatgaaacagtccatttgtcataaagtaagatgcagctgtggcatgtcaaccagcttggaacaaaattgtatctgtttttctcagaagagaattccacaaggagattttcttctttctaccatcatcaagatcaagcaggcaagtttacttgctgtcatcttctgcaagtgtgggctgtgcatgcctttcttccaagaagtacagtacttccaagaagtgcagaagagttcggggagaagtaacttcacagtggagaaacctgacagccagtatggcctcacaaagattgattttactgctgctgaaaactgtctgaagatgagaagcagtttcagtaagaacaacagagagtaa

SEQ ID NO: 46896 - DNA, 2334 bp, Homo Sapiens
atgccggataatcggcagccgaggaaccggcagccgaggatccgctccgggaacgagcctcgttccgcgcccgccatggaaccggatggtcgcggtgcctgggcccacagtcgcgccgcgctcgaccgcctggagaagctgctgcgctgctcgcgttgtactaacattctgagagagcctgtgtgtttaggaggatgtgagcacatcttctgtagtaattgtgtaagtgactgcattggaactggatgtccagtgtgttacaccccggcctggatacaagacttgaagataaatagacaactggacagcatgattcaactttgtagtaagcttcgaaatttgctacatgacaatgagctgtcagatttgaaagaagataaacctaggaaaagtttgtttaatgatgcaggaaacaagaagaattcaattaaaatgtggtttagccctcgaagtaagaaagtcagatatgttgtgagtaaagcttcagtgcaaacccagcctgcaataaaaaaagatgcaagtgctcagcaagactcatatgaatttgtttccccaagtcctcctgcagatgtttctgagagggctaaaaaggcttctgcaagatctggaaaaaagcaaaaaaagaaaactttagctgaaatcaaccaaaaatggaatttagaggcagaaaaagaagatggtgaatttgactccaaagaggaatctaagcaaaagctggtatccttctgtagccaaccatctgttatctccagtcctcagataaatggtgaaatagacttactagcaagtggctccttgacagaatctgaatgttttggaagtttaactgaagtctctttaccattggctgagcaaatagagtctccagacactaagagcaggaatgaagtagtgactcctgagaaggtctgcaaaaattatcttacatctaagaaatctttgccattagaaaataatggaaaacgtggccatcacaatagactttccagtcccatttctaagagatgtagaaccagcattctgagcaccagtggagattttgttaagcaaacggtgccctcagaaaatataccattgcctgaatgttcttcaccaccttcatgcaaacgtaaagttggtggtacatcagggaggaaaaacagtaacatgtccgatgaattcattagtctttcaccaggtacaccaccttctacattaagtagttcaagttacaggcgagtgatgtctagtccctcagcaatgaagctgttgcccaatatggctgtgaaaagaaatcatagaggagagactttgctccatattgcttctattaagggcgacataccttctgttgaataccttttacaaaatggaagtgatccaaatgttaaagaccatgctggatggacaccattgcatgaagcttgcaatcatgggcacctgaaggtagtggaattattgctccagcataaggcattggtgaacaccaccgggtatcaaaatgactcaccacttcacgatgcagccaagaatgggcatgtggatatagtcaagctgttactttcctatggagcctccagaaatgctgttaatatatttggtctgcggcctgtcgattatacagatgatgaaagtatgaaatcgctattgctgctaccagagaagaatgaatcatcctcagctagccactgctcagtaatgaacactgggcagcgtagggatggacctcttgtacttataggcagtgggctgtcttcagaacaacagaaaatgctcagtgagcttgcagtaattcttaaggctaaaaaatatactgagtttgacagtacagtaactcatgttgttgttcctggtgatgcagttcaaagtaccttgaagtgtatgcttgggattctcaatggatgctggattctaaaatttgaatgggtaaaagcatgtctacgaagaaaagtatgtgaacaggaagaaaagtatgaaattcctgaaggtccacgcagaagcaggctcaacagagaacagctgttgccaaagctgtttgatggatgctacttctatttgtggggaaccttcaaacaccatccaaaggacaaccttattaagctcgtcactgcaggtgggggccagatcctcagtagaaagcccaagccagacagtgacgtgactcagaccatcaatacagtcgcataccatgcgagacccgattctgatcagcgcttctgcacacagtatatcatctatgaagatttgtgtaattatcacccagagagggttcggcagggcaaagtctggaaggctccttcgagctggtttatagactgtgtgatgtcctttgagttgcttcctcttgacagctga

SEQ ID NO: 46897 - DNA, 1340 bp, Homo Sapiens
aggaagtcctgcctgcagctctcacgagaactgaggacccgttttctttacttttctttttttttgtttttttgttttgttttttttgggacggagtctggctcttgctgcctaggctgcagtgcagtggtgtgatctgggctcactgcaacctccgcctcctgggttcaagcaattctcctgcctcagcttcctgagaggacccgttttctaagaggtcctagtggtgccgctgcctgcaggttctttgagggcgccacatcaggggtccctcaggttcggggatcgcctctagcttcccaggacaaccagccacggatcctgtgggcaggagggctgccaaggcccagttggaggctcaatttatggcggcctgggggaagaagcatgcaggaaaggatccagtccgtgatgaatgtgaggaaagaaaccgttttacagaaacaagggaggaagatgtaactgatgagcatggggaaagagaaccttttgctgaaacagatgaacacacgggggctaataccaagaagccagaagatactgcagaggatcttactgcaaaaagaaaaaggatgaaaatggataaaacttgcagcaaaacaaagaacaaaagtaaacatgctttgagaaaaaagcaacttaaaaggcagaaacgtgattatatacattctctgaagttgctaaatgtccttgaagaatacatcacagacgagcagaaagaggaagaagaagaagagggagaagaggaagaactaattagaatatttcaagaacaacagaagaagtggcaacaatatagaagtgttaggagagagaggctgaaagagatgaagctgctacgtgaccaattcgtaaaggctcttgaggactttgaagacctttgtgacagagttttttccgatgaagacagtgaacttgataactagacatgtttttaaataaaatcatgtcagaactcttttggaaaagttggcacttacccagttgtctcttcaacctctgttattctgatgactgaagaaagaacttgaacctatgttatatgatacaagcacaacttgagctacagtaaactacatgacagtgttttgataattgttgtataaatcggtatagctcctctgtcactcgtctgttaaatgccagacctcgtttctatgatctgttgaatgaatcctagacacttctgtgagaaagcagggattgcatagttatgtacacggtcaattaaattttaacattaaagataatttagatttcgatttggcctctgtggatttgtatcagttccaaaaatgtagaaagcacaggcatagaaaagtacatttttctctaataaa

SEQ ID NO: 46898 - DNA, 1509 bp, Homo Sapiens
atggagatgcaatcctattatgccaagcttttgggggagctgaatgaacagagaaagagggactttttctgtgactgcagcatcattgtggaagggcggatcttcaaggcccacaggaacattttgtttgctaacagcggctacttccgagccctgctcattcactatatccaggacagcgggcggcatagcaccgcctccttggacattgtcacctctgatgccttctccatcatcttagatttcctctattctgggaagttggatttgtgtggggagaatgtgattgaagtgatgtcggctgccagctacctgcagatgaatgacgtggtgaacttctgcaagacatacattaggtcatccctcgacatttgccgaaagatggagaaggaggctgctgtggctgcagcagtggcggcggcagcggcggcggctgcagcggcggcagcagcggcggctcatcaggttgacagtgaaagccccagttcaggccgggaggggacctcctgtggtaccaagagcttggtctcctctccagccgagggagaaaagagcgtggagtgcctgagagagtccccttgcggtgactgcggagactgccaccccttggaactggtggtgagagacagccttggcggtggctcggctgacagcaacctctctactccacccaaacggatagagcccaaggtggaatttgatgctgatgaagtggaggtggacgttggtgaacagctgcagcagtatgctgccccgctgaacctggcccacgtggaggaggccttgccaagcggccaggcggttgacttggcttacagcaactaccacgtgaagcagttcctggaggcgctcttgcgcaacagcgctgccccgagcaaggatgatgcagaccatcacttttctaggagtttggaaggaagaccagaaggtgcaggagtagccatgagttccatgatggatgtccaggctgactggtatggagaggactcaggtgatgtgctggtggtccccatcaagctccacaagtgtcctttctgcccttacactgccaaacagaagggcatcctcaagcggcacatccgttcacacacaggcgagcggccctacccctgtgagacctgcggcaagaggttcactcgacaagagcacctgcggagccacgcactgagtgtccacagatccaaccgtccaatcatctgcaagggctgcaggagaacattcacgagtcacctgtcccaggggctgcggcgcttcgggctgtgtgacagctgcacctgcgttacagacacacccgatgatgatgatgatttgatgcccatcaaccttagcttggtggaggcttcatctgaaagccaagaaaagagcgacacagacaatgactggccaatctatgtggagtcggagatcgggtctcattatgttgcccaggctagtctggaactcctggccttaagccaacctcctgcctcagcctcccaaagtgctggcattacaggtatgagccgctgt

SEQ ID NO: 46899 - DNA, 483 bp, Homo Sapiens
atgacgaagacaaagggaaagaggagaggcacccgatatacgttctctaggccttttagaaaacatggagttgttcctttggccacgtatatgcgaatctataagaaaggtgttattgtagacatcaagggaatgggcactgttcaaaaaggaatgcctcacaagtgtcaccatggtaaaactggaagagtctacaatgttacccagcatgctgttggcattgttgtaaacaaacaagttaagagcaagattcttgccaagagaattaatgtgcgtattgagcacattaagcactctgagagctgggatagcttcctgaaatacatgaaggaaaatgatcagaaaaagaaagaagccaaagagaaaggtacctgggttcaactgaagtgccagcctgctccacccagagaagcacactttgtgagaaccaatgagaaggagcctgagctgctggaacctattccgtatgaactcatggcataa

SEQ ID NO: 46900 - DNA, 762 bp, Homo Sapiens
atgcccctgctgcccagcaccgtgggcctggcaggcctgctcttctgggctggccaggcagtgaacgccttgataatgcctaatgctaccccagccccggcccagcccgagagcacggctatgcggctcctgagtggcctggaggtgcccaggtaccgccggaagcgccacatctctgtgagagacatgaatgccttactggattatcacaaccacatccgggccagtgtgtacccacctgccgccaacatggaatacatggtctgggacaagcggctggccagggctgccgaagcctgggccacccagtgcatctgggcacatgggccttcacagctgatgagatacgtgggccagaacctctccatccattctggccagtaccggtccgtagtggatctcatgaagtcctggtctgaggagaagtggcattacttgtttccggccccaagggactgtaacccacactgcccctggcgctgcgatggccccacctgctcccattatacccagatggtgtgggcatcctccaatcggctgggctgtgccatccacacctgtagtagcatcagtgtctggggcaacacctggcatcgggcggcatacctggtctgcaactatgccattaagggcaactggattggcgagtccccgtacaagatgggaaagccgtgctcctcctgtccccccagttatcaaggcagctgcaatagcaacatgtgcttcaaggggctgaaatccaacaagttcacgtggttctga

SEQ ID NO: 46901 - DNA, 357 bp, Homo Sapiens
atgctaagaagtttctctcagcgaatcccctcaaacgatggaaataattcccatttcacagatataaagcaggctccaaaactctttgaagttcctttgctaatcatgactagccaagcctctggcgttcaaacgcacaaattccggcctccagtgctggggttctcagccatggctacaatttctgtattgaaacttccacctcccctcgctgttctctgtgacttttcctcttggctgcattggttttggctggtactatccttactctttcaaggtcacggtcccctgagggtgataaccagaaccttaggcttcctttgtgttcccaggcggggacttagccactgcctctga

SEQ ID NO: 46902 - DNA, 2816 bp, Homo Sapiens
ctccaccgacagccaggcactgggcagcacgcactggagacccaggaccctgtgcaggagcagctccgggtgacacgaggggactgaagatactcccacaggggctcagcaggagcaatgggtaaccaaatgagtgttccccaaagagttgaagaccaagagaatgaaccagaagcagagacttaccaggacaacgcgtctgctctgaacggggttccagtggtggtgtcgacccacacagttcagcacttagaggaagtcgacttgggaataagtgtcaagacggataatgtggccacttcttcccccgagacaacggagataagtgctgttgcggatgccaacggaaagaatcttgggaaagaggccaaacccgaggcaccagctgctaaatctcgttttttcttgatgctctctcggcctgtaccaggacgtaccggagaccaagccgcagattcatcccttggatcagtgaagcttgatgtcagctccaataaagctccagcgaacaaagacccaagtgagagctggacacttccggtggcagctggaccggggcaggacacagataaaaccccagggcacgccccggcccaagacaaggtcctctctgccgccagggatcccacgcttctcccacctgagacagggggagcaggaggagaagctccctccaagcccaaggactccagcttttttgacaaattcttcaagctggacaagggacaggaaaaggtgccaggtgacagccaacaggaagccaagagggcagagcatcaagacaaggtggatgaggttcctggcttatcagggcagtccgatgatgtccctgcagggaaggacatagttgacggcaaggaaaaagaaggacaagaacttggaactgcggattgctctgtccctggggacccagaaggactggagactgcaaaggacgattcccaggcagcagctatagcagagaataataattccatcatgagtttctttaaaactctggtttcacctaacaaagctgaaacaaaaaaggacccagaagacacgggtgctgaaaagtcacccaccacttcagctgaccttaagtcagacaaagccaactttacatcccaggagacccaaggggctggcaagaattccaaaggatgcaacccatcggggcacacacagtccgtgacaacccctgaacctgcgaaggaaggcaccaaggagaaatcaggacccacctctctgcctctgggcaaactgttttggaaaaagtcagttaaagaggactcagtccccacaggtgcggaggagaatgtggtgtgtgagtcaccagtagagattataaagtccaaggaagtagaatcagccttacaaacagtggacctcaacgaaggagatgctgcacctgaacccacagaagcgaaactcaaaagagaagaaagcaaaccaagaacctctctgatggcgtttctcagacaaatgtcagtgaaaggggatggagggatcacccactcagaagaaataaatgggaaagactccagctgccaaacatcagactccacagaaaagactatcacaccgccagagcctgaaccaacaggagcaccacagaagggtaaagagggctcctcgaaggacaagaagtcagcagccgagatgaacaagcagaagagcaacaagcaggaagccaaagaaccagcccagtgcacagagcaggccacggtggacacgaactcactgcagaatggggacaagctccaaaagagacctgagaagcggcagcagtcccttgggggcttctttaaaggcctgggaccaaagcggatgttggatgctcaagtgcaaacagacccagtatccatcggaccagttggcaaatccaagtaaacaaatcagcacggttcccaccaggttctcctgccaccaagatgtgttctccttactccatctcctccccaaacacgctccatgtatatattcttctgatggccagcaaatgaaattctgcctagaaattaagcccgagctgttgtatattgaggtgtattatttacgtctctggtccagtcttttctggcaaataacagtaaagatggtttagcaggtcacctagttgggtcagaagagtcgatgatcaccaagcaggaaagggagggaatagaggaatgtgttcgggttaagtgatgaaaatggcagtggtggccgggcgtggtggctctcgcctgtaatctcagcactttgggaggccgaggcaggtggatcacctgaggtcaggagttcaagactagcctggccaacatcatgaaaccccgtctctactaaaaatacaaaaattagccaggcatggtggcacacacctgtagtcccagctactcgggagcccaacgcacgagaaccgcttgtacccaggaggtggaggttgcagtgagccgaagttgcaccattgcactccaccctgggcgacagagcaagattctatcaaaaaaaaaaaaaggcagtggcaagtaagttatagaagagaaatgctgctagaaggaattaagcgttgtagtaaatgcgtgcttatcctctaagcttgaagaagggagacgaaaatccatttgtttaaattcacatctcaaggagggagaacccgggctgtgttgggtggttgccaatttcctagaacggaatgtgtggggtatagaaaaaggaatgaataagcgttgtttttcaaatagggtccttgtaagttattgatgagagggaaaagattgactggggagggcttaaaatgatttgggaaaacaattgcttttgaggctcagtgacaacggcaaagattacaactt

SEQ ID NO: 46903 - DNA, 1293 bp, Homo Sapiens
acctcccctccagatggaggctggggctggatgattgtggctggctgtttccttgttaccatctgcacacgggcagtcacaagatgtatctcaattttttttgtggagttccagacatacttcactcaggattacgcacaaacggcatggatccattccattgtagattgtgtgaccatgctctgtgctccacttgggagtgttgtcagtaaccatttatcctgtcaagtgggaatcatgctgggtggcttgcttgcatctactggactcatcctgagctcatttgccacgagtctgaagcatctctacctcactctgggagttcttacaggtcttggatttgcactttgttactctccagctattgccatggttggcaagtacttcagcagacggaaagcccttgcttatggtatcgccatgtcaggaagtggcattggcaccttcatcctggctcctgtggttcagctccttattgaacagttttcctggcggggagccttactcattcttgggggctttgtcttgaatctctgtgtatgtggtgccttgatgaggccaattactcttaaagaggaccacacaactccagagcagaaccatgtgtgtagaactcagaaagaagacattaagcgggtgtctccctattcatctttgaccaaagaatgggcacagacttgcctctgttgctgtttgcagcaagagtacagttttttactcatgtcagactttgttgtgttagccgtctccgttctgtttatggcttatggctgcagccctctctttgtgtacttggtgccttatgctttgagtgttggagtgagtcatcagcaagctgcttttcttatgtccatacttggagtgattgacattattggcaatatcacatttggatggctgaccgacagaaggtgtctgaagaattaccagtatgtttgctacctctttgccgtgggaatggatgggctctgctatctctgcctcccaatgcttcaaagtctccctctgctcgtgcctttctcttgtacctttggctactttgatggtgcctatgtgactttgatcccagtagtgaccacagagatagtggggaccacctctttgtcatcagcgcttggtgtggtatacttccttcacgcagtgccatacttggtgagcccacccatcgcaggacggctggtagataccaccggcagctacactgcagcattcctcctctgtggattttcaatgatatttagttctgtgttgcttggctttgctagacttataaagagaatgagaaaaacccag

SEQ ID NO: 46904 - DNA, 1200 bp, Homo Sapiens
gattttttatgcatctctttagtaaatagttccgttcaacttcgctacaaccttggcgacagaactatcattctagaaactctccaaaaagtaactataaacggaagtacttggcatataataaaagcaggaagagttggtgcagaaggctacctggatctagatgggataaatgtaacagaaaaggcctccactaaaatgagttctctggacacaaatacagacttctatattggaggagtatcttctttaaatcttgtaaatcccatggcaatagaaaatgaacctgtaggttttcaaggctgtatccgacaagttatcataaataatcaagaattacaattaactgaatttggagcaaaaggtggctcaaatgtaggtgactgtgatgggacagcctgtgggtacaacacatgcagaaatggaggtgaatgtacagtaaatggcacaactttttcttgcagatgtttgccagattgggctggaaatacatgtaaccagtctgtgtcctgtttgaataatctttgcctccaccaatctttatgtatacctgaccaatcattttcttacagttgcctgtgtactttgggttgggtgggaaggtattgtgaaaacaaaacttcattttcaactgcaaaatttatgggtaattcttacattaaatacattgatccaaattatagaatgagaaacctccagttcactactatatccttaaatttcagtaccactaaaacagaaggtctaattgtatggatgggaatagctcaaaatgaagaaaatgattttctggcaattggtctccataatcagaccttgaaaatagcagttaacttgggagaaagaatctctgtgcctatgagctataacaatggcacattctgttgtaataaatggcaccatgtagttgtaattcaaaatcagactcttatcaaggcctacataaataacagtctaattctttccgaggatattgatccacataaaaactttgtggctctaaactatgatggcatttgttatctagggggctttgaatatggtagaaaggtaaatatcgttactcaagagatttttaaaaccaattttgttggcaaaattaaagatgttgtattttttcaggaaccaaaaaacattgaactaattaaattagaaggatacaatgtttatgatggagatgaacaaaatgaggttacataa

SEQ ID NO: 46905 - DNA, 483 bp, Homo Sapiens
gccagatttaaggaccatagtacagctatggatactgaaccaaacccgggaacatcttctgtgtcaacaacaaccagcagtaccaccaccaccaccatcaccacttcctcctctcgaatgcagcagccacagatctctgtctacagtggttcagaccgacatgctgtacaggtaattcaacaggcattgcatcggccccccagctcagctgctcagtaccttcagcaaatgtatgcagcccaacaacagcacttgatgctgcatactgcagctcttcagcagcagcatttaagcagctcccagcttcagagccttgctgctgttcaggcaagtttgtccagtggaagaccatctacatctcccacaggaagtgtcacacagcagtcaagtatgtcccaaacgtctgtaagttccctatttttttttcctggatttaaaattttaaagaattgttttccaaaagtaaactgttgttatttatga

SEQ ID NO: 46906 - DNA, 384 bp, Homo Sapiens
gagatgttggcacacctgaaaccatggccccaaccattgtggttcccccgggcaacagaagtgtggtggctggatccagtgagaccaccttggaatgtatagccagtgccaggcctgtggaggacctgagtgtgacctggaagaggaatggagtgagaatcaccagtggcctccacagctttggaagacgcctcaccatcagcaacccgacgtccgcggacaccgggccatacgtctgcgaggcggcgctgccggggagcgcttttgaaccggccagggcgacggcctttcttttcatcatagcatctcagatagcatccgacactgactcttctgcagaaacagcgtatttcagtggctttatttgtaactcggcaaatgaag

SEQ ID NO: 46907 - DNA, 1058 bp, Homo Sapiens
gccccgcagggtgaccctgtttgcagcacgatgtctgaagaagaggcggctcagatccccagatccagtgtgtgggagcaggaccagcagaacgtggtgcagcgtgtggtggctctgcccctggtcagggccacgtgcaccgcggtctgcgatgtttacagtgcagccaaggacaggcacccgctgctgggctccgcctgccgcctggctgagaactgcgtgtgcggcctgaccacccgtgccctggaccacgcccagccgctgctcgagcacctgcagccccagctggccactatgaacagcctcgcctgcaggggcctggacaagctggaagagaagcttccctttctccagcaaccttcggagacggtggtgacctcagccaaggacgtggtggccagcagtgtcacgggtgtggtggacctggcccggaggggccggcgctggagcgtggagctgaagcgctccgtgagccatgctgtggatgttgtactggaaaaatcagaggagctggtggatcacttcctgcccatgacggaggaagagctcgcggcactggcggctgaggctgaaggccctgaagtgggttcggtggaggatcagaggagacagcagggctactttgtgcgcctcggctccctgtcagcacggatccgccacctggcctacgagcactctgtggggaaactgaggcagagcaaacaccgtgcccaggacaccctggcccagctgcaggagacgctggagctgatagaccacatgcagtgtggggtgacccccaccgccccggcctgccctgggaaggtgcacgagctgtggggggaatggggccagcgccctccggagagccgccgccggagccaggcagagctggagacgctggtgctgtcccgcagcctgacccaggagctgcagggcacggtagaggctctggagtccagcgtgcggggcctgcccgccggcgcccaggagaaggtggctgaggtgcggcgcagtgtggatgccctgcagaccgccttcgctgatgcccgctgcttcagggacgtgccagcggccgc

SEQ ID NO: 46908 - DNA, 3233 bp, Homo Sapiens
atggcgcggccagacgatgaggagggggcggcggtggcgcccggacacccgctcgcgaaaggatacctcccgttgccgaggggcgcgcccgttgggaaggagagcgtggagctgcagaacgggcccaaagcgggcaccttcccggtgaatggggccccccgggacagcctcgctgccgcctcgggagttctgggcgggcctcagactccactggccccagaagaggagacccaggcccggctgctgcctgcgggcgcgggagctgagaccccgggggccgagagcagcccgctgccccttacggcgctctccccgcggcgcttcgtggtgctcctgatcttcagcctgtactcgctggtcaacgcctttcagtggatccagtacagcatcattagcaacgtcttcgagggcttctacggtgtcaccttgctgcacatcgactggctgtccatggtgtacatgctggcctacgtgcccctcatcttcccggccacctggctgctggacaccagaggcctgcggctcaccgccctgctgggctccggcctcaactgcctgggtgcctggatcaagtgcggcagtgtgcagcagcatctcttctgggtcaccatgttgggccagtgcttgtgctcggtggcccaggtgttcatcctgggcttgccctcccgcatcgcctcagtgtggtttgggcccaaagaggtgtccacagcttgtgccaccgccgtgctgggcaatcagcttggaactgcagttggctttttgctaccaccagttttagtacccaacacacagaatgacacaaatctcctggcttgtaatatcagcaccatgttttatggaacatcagctgttgccacacttttatttattttaacagcaattgccttcaaagaaaaacctcggtatccaccaagtcaggctcaagcagctcttcaagacagtccccctgaagagtactcctataagaaatcaataagaaacctgtttaaaaacattccttttgtccttctgttgatcacttatggtatcatgactggtgccttttattcagtctcaacgttattaaatcaaatgatattgacatattatgagggagaagaagtcaatgctggaaggattgggctaacgctagtagtagctggaatggtgggctctattctttgtggcttatggctggattatactaaaacatacaaacagactactctgatagtttatattttgtcttttattggaatggttatctttactttcacattggaccttagatatattatcatcgtgtttgttactggaggggtgcttggcttcttcatgactggttacctccctttgggttttgaatttgctgttgaaatcacttaccctgaatctgaaggtacttcatctggtcttcttaatgcttctgcacagatatttggaattttgttcacattggctcaaggaaagctcacatcagactatggtcctaaggcagggaacatttttctctgtgtctggatgtttataggcatcatattaacagcattaatcaagtctgatctgcgaagacacaacataaatataggaattacaaatgttgatgttaaagctataccagctgacagtcccacagaccaagaaccaaaaacggttatgttgtccaagcagtcagaatcagcaatttgaagagaaaggcaaagttactgtcctgtagtaattggggacaatgtgatcatccttggagagagatgtgagcaccaaggctgggtttgtatgtggtgggggaataaacacacttacttgaaaattaccatatgaactctaaatgcataattattattttgcttaattgttaaattaagggaaattttcttaaaattcttctgtttacatcatgttaacactactgtttatctaattagtatccggtttttagtctcatattgtatctgaaagtaagcttcttgacgtttactttttaaaagtcgatgtttttcttttttgtagaaaatggaagcttagaatactttttaaagtgataatatggggtgttcagtccccataagatataatagttcatgcagtttatatattaaagtatccagtggaactaaatgtacaatatattcctaattggctgcctttttcactgtgctgaccagctgttcaagccacttcagtttgagtacaacataccaacatgacactactcacccacaaaggacagcattgggatcaggctttcagatgacctctaagatttttcccatttattgtactcttgttacaaagtactttttaacacatgcagtcaatggctataaaaactattctgtgtacagattctacccagactttggtcttagaattatgttctaattaaggagcctggttacaggttcattctgtcttgagttcttttctgtgctgcctttctatcatggataaatgctaacgctgtattttttcactccaacttgagatagagtagttttgtacccattgccttttttttcttttaaactctctttttttttttttcctgatgtgtaactttctagtaagataatttcatcatgtatgttactggctatttcatgatttcatgtatcacatcgtatattttgccttgaagattcctgaaataaggaaatctataataacttcagatagcctacatgtccccatttagtggagacctcttgaatgctatttgaattctgcagtatcatttttatgaccattctcctttgaggaatactatgcccaggtacatgctctatcagtgtgccgggagagtggattcttttcttcactgcagagtcatcacactgttagaatagtctgctcttttacatgctcaggtagggaaaataggaccaaatatatttccacagtgcctaccactgtgtcatgtttacagtgagagtttaaatattgttgatgtcctgactctgtgagctcatagggagtatcttcatagtaatgacatttgatcagccataaaatttacattatgttcatatgcacccaaaaaagctagtcaggtaatgaatacccttgaagtgaatagcaattttgatttaggcagtgtgttaggccatccttgcattgctataaagaaatatttaggctgggcgtggtggctcacgcctgtaatcccagcactttgggaggctgaagcgtgtggatcacctgaggtcaggagttcaagaccagcctggccaacatggtaaaaccccatctctact

SEQ ID NO: 46909 - DNA, 1068 bp, Homo Sapiens
atgttgaaattggttattattgagaacatggcagaaattatgctattctcattagatctcttgcttttctccacagatatcctttgctttaattttccttctaagatgatcaaacttcctggttttattaccatcttcttttatccacaagccagctttggaatttcagcaaacaccatccttcttcttttccacatcttcacctttgttttcagtcacaggtctaagtccattgacatgataattagtcacctgtctctcatccacatactgctgctcttcacccaggcaatattggtgtccttagacttctttggttcacagaatactcaggatgatcttaggtataaggtcattgtctttttaaacaaggtgatgaggggcctctccatctgcaccccctgcctcctgagtgtgctccaggccatcatcagccccagcatcttctccttggcaaagctcaaacatccttctgcaagtcacatcttaggattcttccttttctcatgggtcctcaacatgttcattggtgtaatcttctgctgtacactgcggctacccccagtgaaacggggccagtcttctgtttgtcatacagcactgttcctttttgcccatgagctacacccacaggagactgtttttcacactaatgactttgagggatgtcacctttatagggttcatggtcctctcaagaggctacatggtgattattttatacagacaataagaggctatctcagtgccttcacacagccagcctgtccccgagtctcaccagtgaaaagagcctcccaggctatcttactgctggtgagttttgtcttcacatactgggtggactttacgttctcattttcaggaggtgtgacatggataaatgattctctgctagtgtggctccaggttattgtggccaatagctatgccgcaattagtcctttgatgctaatttatgctgataaccaaatattcaagactctgcaaatgttatggtttaaatatttgtctcctccaaagctcatgttgaaatttaatcgccaatgtggcagtactaagaagtga

SEQ ID NO: 46910 - DNA, 354 bp, Homo Sapiens
tgtattgaaaatgtgtcccgacagaattgtccaatatgtttggaggacattcacacatcccgtgttgttgctcatgtcttgccatgtggacatcttttacatagaggctacagatgtccattatgtatgcactctgctttagatatgaccaggtattggagacagctggatgatgaagtagcacagactcctatgccatcagaatatcagaacatgactgtggatattctctgcaatgactgtaatggacgatccactgttcagtttcatatattaggcatgaaatgtaagatttgtgaatcctataatactgctcaagctggaggacgtagaatttcactggatcagcaatga

SEQ ID NO: 46911 - DNA, 504 bp, Homo Sapiens
ttagccatggtcaaccccaccgtgttcttcgacattgccgtcgatggcgagcccttgggccgcgtctcctttgagctgttagctgacaaggtcccaaagacagcagaaaattttcatgctctgagcactggagagaaaggatttggttataagggttcctgctttcacagaattattccagggtttatgtgtcagggtggtgacttcacacgccataatggcactagtggcaagtccatctatggggagaaatttgaagatgagaacttcatcctaaagcatacaggtcctggcatcttgtccatggcaaatgctggacccaacacaaatggctcccagtttttcatctgcactgccaagactgagtggttggatggcatgcatgtgatctgtggcaaagtgaaagaaggcatgaatattgtggaggtcatggagtgctttgggtccaggaatggcaagaccagcaagaagatcaccattgctgactgtggacaactcgaataa

SEQ ID NO: 46912 - DNA, 1519 bp, Homo Sapiens
atggcggcgaaatccgatggcggtggcgtgggggtgggcttcgctcagctgcacaacctggacgaggcggtgggcagcggcggcgaggaggacggggagcccgggggaggcggctgcggcggcggcggcgacggcagcgagcccggcgagagcagctcgatgcacatctgccactgctgcaacacctcctcgtgctactggggctgccgctccgcctgcctgcgctccctcctgggcaggaagccgcgccgcagcgccgccgccgacgggggggaccagccgctgcagcctcccgcggcccccggcgccggccgccaacccccgacgccctcggccgcgcggccggagccgccgccgccgcaggtggagcggccgtggctcgactgcctgtggatcgtgctggcgctgctggtgttcttcggggacgtgggcaccgacctgtggctggccctcgactactaccgcaagggggactacgtctacttcgggctgaccctcttcttcgtgctggtgccgtcgctgctggtgcagagcctgagcttccgctggttcgtgcaggactacacgggcggcgggctgggcgccgtggaggggctcaccagccggggcccccccatgatgggggccggctacgtccacggcgcggcccgcggtggcccaggcgtgagggtctcccccacgccgggggcgcagcgcctgtgtcgcctctccgtgtggatctggcagtcggtcatccacctgctgcagatggggcaggtgtggagtgggcaagaccctttggtaccatcaaggaaaagaaggagcagatttaaccacatgaagttgcctcacctggtttcttcccttctccctcctcccatctgaaaaatccagaaatacttgcttagctgtgagggtaagtgggttaaattgagacagagatacttcctccaggagaatgaataagaagagaacatctctaaagatttatttcttgtttttgagtgaacagtaaccctaaaaacttgacatttatggtaaattttcaagggaaggggatgaaaaaatggcatgctttggagcgaaattgcaactggggatgcagcatagtatttccagaaggatccagaaacaaagtgtcaaaatctgtattgtaagaaggctggtgctcctgaaatctagcaggcaggtgcttactagaagtcacaagttgttcatttctgtcttcaacatcatttgatactatagacttattcataaggtcaattgcctagtcaggcttatgcaatgcagtggatagattctgtaatgttggaaagattctgtgggatggaaagattctgtgggatgcaaaaagaaactgtgtctctgatgttgccattttcaccccaggatgatttgctttacaacgtgctgtctgcaaataagtttgtggttaaaattttagtttactccccatgatgtgctattcatctagtttcttctcatcaggaattctggatttcttatttgcctcttaaaaagtaaaacttttaaaaaa

SEQ ID NO: 46913 - DNA, 927 bp, Homo Sapiens
gatatatcagagggaaataagactcttgtgacagagtttgttctcacaggacttacagatcgaccatggctgcacgtcctcttctttgttgtgtttttggtggtctatctcatcaccatggtgggcaaccttggactgatagttctaatttggaacgacccccatcttcatatgcccatgtacttattccttggtggtttagccttttcagatgcttgtacttcaacctctataacccctaggatgctggtcaatttcttagacaagactgcaatgatatccctagctgagtgcatcacccagttttacttttttgcttccagtgcaactacagaatgcttcctcctggtgatgatggcctatgaccgctatgtagccatatgtaatcccttgctttatccagtgatgatgtccaacaaactcagcgctcagttgctaagtatttcatatgtaattggtttcctgcatcctctggttcatgtgagtttactattgcgactaactttctgcaggtttaacataatacattatttctactgtgaaattttacaactgttcaaaatttcatgcaatggtccatctattaacgcactaatgatatttatttttggtgcttttatacaaatacccactttaatgactatcataatctcttatactcgtgtgctctttgatattctgaaaaaaaagtctgaaaagggcagaagcaaagccttctccacatgcggcgcccatctgctttctgtctcattgtactacggaactctgatcttcatgtatgtgcgtcctgcatctggcttagctgaagaccaagacaaagtgtattctctgttttacacgattataattcccctgctaaacccatttatttacagcttgagaaataaaaaagtcatgcatgcattgagaagagttataaggaagtaa

SEQ ID NO: 46914 - DNA, 713 bp, Homo Sapiens
cggagggcgctcatttccgggccgcccaccacccgcgtagcaccggcagccgctgtcccggcagtctccagccgtcccgcccgcttgtggccaactggctccagtcactccccgaaatgccagtcgacttcactgggtactggaagatgttggtcaacgagaatttcgaggagtacctgcgcgccctcgacgtcaatgtggccttgcgcaaaatcgccaacttgctgaagccagacaaagagatcgtgcaggacggtgaccatatgatcatccgcacgctgagcacttttaggaactacatcatggacttccaggttgggaaggagtttgaggaggatctgacaggcatagatgaccgcaagtgcatgacaacagtgagctgggacggagacaagctccagtgtgtgcagaagggtgagaaggaggggcgtggctggacccagtggatcgagggtgatgagctgcacctggagatgagagtggaaggtgtggtctgcaagcaagtattcaagaaggtgcagtgaggcccaggcagacaaccttgtcccaaggaatcagcaggatgtgtgggccaggatccccctctttgcacagcatgaggcaaaaatgtccagccacccccaggcatctgttagcagagtctgtctcttggctttgtcacttttccttttcttaaaacaaagccatgccaataaagtgatctgtgttcaaaa

SEQ ID NO: 46915 - DNA, 2233 bp, Homo Sapiens
atggaggcggagccgccgctctacccgatggcgggggctgcggggccgcagggcgacgaggacctgctcggggtcccggacgggcccgaggccccgctggacgagctggtgggcgcgtaccccaactacaacgaggaggaggaggagcgccgctactaccgccgcaagcgcctgggcgtgctcaagaacgtgctggctgccagcgccgggggcatgctcacctacggcgtctacctgggcctcctgcagatgcagctgatcctgcactacgacgagacctaccgcgaggtgaagtatggcaacatggggctgcccgacatcgacagcaaaatgctgatgggcatcaacgtgactcccatcgccgccctgctctacacacctgtgctcatcaggttttttggaacgaagtggatgatgttcctcgctgtgggcatctacgccctctttgtctccaccaactactgggagcgctactacacgcttgtgccctcggctgtggccctgggcatggccatcgtgcctctttgggcttccatgggcaactacatcaccaggatggcgcagaagtaccatgagtactcccactacaaggagcaggatgggcaggggatgaagcagcggcctccgcggggctcccacgcgccctatctcctggtcttccaagccatcttctacagcttcttccatctgagcttcgcctgcgcccagctgcccatgatttatttcctgaaccactacctgtatgacctgaaccacacgctgtacaatgtgcagagctgcggcaccaacagccacgggatcctcagcggcttcaacaagacggttctgcggacgctcccgcggagcggaaacctcattgtggtggagagcgtgctcatggcagtgttcctggccatgctgctggtgctgggtttgtgcggagccgcttaccggcccacggaggagatcgatctgcgcagcgtgggctggggcaacatcttccagctgcccttcaagcacgtgcgtgactaccgcctgcgccacctcgtgcctttctttatctacagcggcttcgaggtgctctttgcctgcactggtatcgccttgggctatggcgtgtgctcggtggggctggagcggctggcttacctcctcgtggcttacagcctgggcgcctcagccgcctcactcctgggcctgctgggcctgtggctgccacgcccggtgcccctggtggccggagcaggggtgcacctgctgctcaccttcatcctctttttctgggcccctgtgcctcgggtcctgcaacacagctggatcctctatgtggcagctgccctttggggtgtgggcagtgccctgaacaagactggactcagcacactcctgggaatcttgtacgaagacaaggagagacaggacttcatcttcaccatctaccactggtggcaggctgtggccatcttcaccgtgtacctgggctcgagcctgcacatgaaggctaagctggcggtgctgctggtgacgctggtggcggccgcggtctcctacctgcggatggagcagaagctgcgccggggcgtggccccgcgccagccccgcatcccgcggccccagcacaaggtgcgcggttaccgctacttggaggaggacaactcggacgagagcgacgcggagggcgagcatggggacggcgcggaggaggaggcgccgcccgcagggcccaggcctggccccgagcccgctggactcggccgccggccctgcccgtacgaacaggcgcaggggggagacgggccggaggagcagtgaggggccgcctggtccccggactcagcctccctcctcgccggcctcagtttaccacgtctgaggtcggggggaccccctccgagtcccgcgctgtcttcaaaggcccctgtctcccctcccccacgttggggacgcccctcccagagcccaggtcacctccgggcttccgcagccccctccaaggcggagtggagccttgggaacccctcggccaagcacaggggttcgaaaatacagctgaaaccccgcgggcccttagcacgcgccccagcgccggagcacggtcagggtcttcttgcgacccggcccgctccagatccccacagctctcggccgcggacccgggccgcgtgtgagcgcactttgcacctcctatccccagggtccgccgagagccacgattttttacagaaaatgagcaataaagagattttgtactgtc

SEQ ID NO: 46916 - DNA, 663 bp, Homo Sapiens
atgctggatgagtccttggcagtcaggaggtccaaaaaatgcaaagaaatgataatgcactgggagaagaaagaagatattgacatcgtgaacacagtagaccaattggacaaaacagctcctcgtatcacactcttgcattccccttctcaagtggggctcctgaaaaatggctgctacgggatttacatcacttcccgcgtgttgaaggcatcagaccctgacactgaggacgatcagatcatctttaaaattctacaaggcccaaaacatggacatctggagaacacaacaacaggtgaatttatccatgagaaatttagccaaaaggacttaaacagtaagactattctttacatcataaacccatctttggaagtaaattcagataccgtggaatttcaaatcatggaccccacagggaactcggccactcctcaaattttggaactgaagtggtctcatattgaatggtcacagaccgaatatgaagtctgtgagaatgtgggtttgttgcccttggaaattatcagaaggggatattccatggactcggcctttgtgggtataaaggtcaaccaagtgtcagctgcagttggaaaagatttcaccgtgattccatctaaactgattcagtttgacccaggtacattttgtgtctgc

SEQ ID NO: 46917 - DNA, 989 bp, Homo Sapiens
gcttcatttccgggtgaaactggcattgagggtactggggcgtgcgtgaggcgtttactgatgcttcctggtccggtggcctcggtcccggtaagccaggcatgaagatcacaaggcagaaacatgccaagaagcatcttggcttcttccgcaacaacttcggagtccgcgagccgtaccagatcctgctggacggcaccttctgtcaggcggcgctgcggggccgcatccagctgcgggagcagctgccccgctacctcatgggggagacgcagctgtgcaccacaagatgtgtgttaaaagagctagaaacattgggaaaggacttatatggggcaaaactgattgcacaaaaatgccaagttcgaaattgtcctcatttcaagaatgcagtgagtggatcagaatgtctgctttccatggttgaagagggaaatcctcatcattattttgtggcaacacaggatcagaatttgtctgtgaaagtaaaaaagaagcctggagttcctctcatgtttattattcagaacactatggttttggacaaaccttctcccaaaacaattgcctttgtaaaagcagtggagtcaggtcagcttgtctcagtgcatgagaaagaaagtatcaaacatctcaaagaggaacagggtttagtgaaaaacactgaacagagtagaagaaaaaagcgcaagaaaataagtggtcccaatcctcttagttgtttgaagaaaaagaaaaaggcaccggacacacaatcatctgcttctgaaaagaaaagaaaaagaaaaagaattcggaacagatctaacccaaaagtactttctgagaagcagaatgcagaaggagaatgaatcctttggatactttcaaggacattcaaatgtgaaaatgaattttttacaactagaagtatttataataaaagaccaaacttatttttgtaaatgaacccatatgctttagctaaaattaattataaaataaaaaca

SEQ ID NO: 46918 - DNA, 258 bp, Homo Sapiens
atgtctttcctctttgagtggatctacaatggcttcagcagtgtgctccagttcctaggactctacaagaaatttggaaaacttgtatttttcggtttggacaacgcaggcaaaaccactcttcttcacatgctcaaagatgacagattgggtcaacatgttccaacactacatccgacatcagaaaagctattaattgctggaatgacttttacaactcttgatcttggtggacacaagcaagtatgtcaggtttga

SEQ ID NO: 46919 - DNA, 2112 bp, Homo Sapiens
atgagtgcccgggccacgcggccccgaagccggcgagggaggcatgctccacccggtgaactggatcccgtggctgagagttcagaggaggtcgaggcagccagtgggagctccaagcccagctttgccccacctccggtgagctccgggctggagcagctgggccccatggaggaggtcagtggccaaggcctaggaagcaggactgacaagaagatggatgggggctctggcagggaactggcctcagcccccgaagtgccccacaaacctgcagtggaagcccaccaagccccagaagcagccctacagtacaaggagactgtgccccctgggaatggggcccccgatgtgtttcagaccctccagcacactctgagctccctggaggcagcggctgcagcctggcgccaccagccccccagccattctgggccgatggagttcgaaggcacaagcgaagggggagcaggttcccttgggaagcaggaaggggcagggagctgccagcgagaggcagctcgcctggccgagaggaatgcctggctccggctggccctgagtagccgagaggatgagctggtccgcacgcaggcctccctggaggccatccgagctgagaaggagacgctgcagaaagaggttcaagagctgcaggattccctcttgaggctggagccctgcccacatctttcccacaaccaagcaggtggctcaggcagtggttctagcagctctgaggcagacagggaaccctgggagactcaggactccttctccctggctcaccccctgcttcggcgcctccgcagccattccagcacccagatccttgggtctcttcccaaccagcccctcagtcctgagatgcacatcatggaagcccagatggagcaactccgggggagcattgagaagctcaaatgctttaatcgtctgctatcagctgtgctacagggatacaagggccgctgtgaaggcctcagcatgcagctaggccagcgggaggctgaggccacagcattgcatctggccttgcagtacagtgaacactgtgaagaggcatacagggttctgcttgctctgcgggaggccgactcaggagcaggagacgaagcccccatgagtgacctgcaagcagctgaaaaggaagcatggaggctgctggcacaagaggaggctgccatggatgcaggagcacagcagaatccacagccaagccctgaaggcagcagtgtggataagcccaccccacaggaagtggctttccagctccgaagctatgtccagcgtctccaggagcgccgttctctaatgaagattctctcagagcctggccccaccttggcacccatgcccactgtgccccgtgcagaagccatggtgcaggccattctggggacccaggctggcccagctcttccccgactggagaagacacaaattcagcaggacctggtggccgcaagggaggccctggcggacctgatgcttcggctgcagctggtgcggcgtgagaagcggggcctagagctgcgggaggctgccctccgagccctgggtccagctcacgtgctcctgctggagcagctgcggtgggaacgggcagagctccaggctggtggggcaaacagcagtggcggacatagcagcggaggtggcagcagcggggacgaggaagagtggtatcagggccttcctgctgtccctggtggcaccagtggcattgatggtggccaggtgggcagagcctgggacccagagaagttagcccaggaactggcagcatcgctcaccaggacactggacctgcaggagcagctgcagtctctgcgcagggagctggaacaggtggctcagaaggggcgagccagacggtctcagagtgccgagctgaacagggatttatgcaaagcccacagcgccctggtcctggccttccgaggagcccaccggaagcaggaagagcaacgccggaagttggagcagcagatggcactcatggaggctcagcaggccgaggaggtggcggtgctcgaagccactgcaagggccctggggaagcccaggcctcccctcccgcctccccagcttggggacacctttctgtag

SEQ ID NO: 46920 - DNA, 2490 bp, Homo Sapiens
tgagcaaatgaaagacaccaacaaaatccaacacataaagattcacacttgaaacagattaatcaggaatcaagtttcttactgggaaatgcccagattgtggattggcctgtagtttatagtaatgacggtttttgtaaactctctggatatcatcgagctgacgtcatgcagaaaagcagcacttgcagttttatgtatggggaattgactgacaagaagaccattgagaaagtcaggcaaacttttgacaactacgaatcaaactgctttgaagttcttctgtacaagaaaaacagaacccctgtttggttttatatgcaaattgcaccaataagaaatgaacatgaaaaggtggtcttgttcctgtgtactttcaaggatattacgttgttcaaacagccaatagaggatgattcaacaaaaggttggacgaaatttgcccgattgacacgggctttgacaaatagccgaagtgttttgcagcagctcacgccaatgaataaaacagaggtggtccataaacattcaagactagctgaagttcttcagctgggatcagatatccttcctcagtataaacaagaagcgccaaagacgccaccacacattattttacattattgtgcttttaaaactacttgggattgggtgattttaattcttaccttctacaccgccattatggttccttataatgtttccttcaaaacaaagcagaacaacatagcctggctggtactggatagtgtggtggacgttatttttctggttgacatcgttttaaattttcacacgactttcgtggggcccggtggagaggtcatttctgaccctaagctcataaggatgaactatctgaaaacttggtttgtgatcgatctgctgtcttgtttaccttatgacatcatcaatgcctttgaaaatgtggatgagggaatcagcagtctcttcagttctttaaaagtggtgcgtctcttacgactgggccgtgtggctaggaaactggaccattacctagaatatggagcagcagtcctcgtgctcctggtgtgtgtgtttggactggtggcccactggctggcctgcatatggtatagcatcggagactacgaggtcattgatgaagtcactaacaccatccaaatagacagttggctctaccagctggctttgagcattgggactccatatcgctacaataccagtgctgggatatgggaaggaggacccagcaaggattcattgtacgtgtcctctctctactttaccatgacaagccttacaaccataggatttggaaacatagctcctaccacagatgtggagaagatgttttcggtggctatgatgatggttggctctcttctttatgcaactatttttggaaatgttacaacaattttccagcaaatgtatgccaacaccaaccgataccatgagatgctgaataatgtacgggacttcctaaaactctatcaggtcccaaaaggccttagtgagcgagtcatggattatattgtctcaacatggtccatgtcaaaaggcattgatacagaaaaggtcctctccatctgtcccaaggacatgagagctgatatctgtgttcatctaaaccggaaggtttttaatgaacatcctgcttttcgattggccagcgatgggtgtctgcgcgccttggcggtagagttccaaaccattcactgtgctcccggggacctcatttaccatgctggagaaagtgtggatgccctctgctttgtggtgtcaggatccttggaagtcatccaggatgatgaggtggtggctattttagggaagggtgatgtatttggagacatcttctggaaggaaaccacccttgcccatgcatgtgcgaacgtccgggcactgacgtactgtgacctacacatcatcaagcgggaagccttgctcaaagtcctggacttttatacagcttttgcaaactccttctcaaggaatctcactcttacttgcaatctgaggaaacggggatggttctccatggcaaacgctctgtgaagggtgacctgctgggtgtgaaactgctgcacgacttcctacttcacccattcatctatccgagttttcacggagtccaggagaaagtataaaagttaccttgaggagcaggagagtggaatggttaagactgtttggaatctgaccccttggatttgcatcctggacacacagttgtgtgacctaagggaaaccacttaaactctttatgcctcaatttgcttctctgtgataaaagaataatatgacctgtgtcctacagtagagaataataggtcctagctcgtaaaatgttctcattccatgacacttaaatgagaaaatacgtgtgtggaagtgaccactttgctatatacagatattttattatcattttacaatgccattattttgttccatagtcaaaagtaaaataaaacaaatgtcaatttgtcttattctaatcct

SEQ ID NO: 46921 - DNA, 924 bp, Homo Sapiens
atgggccaacacaatctaacagtgctaactgaattcattctgatggaactcacaaggcggcctgagctgcagattcccctttttggagtcttcctcgtcatctacctaatcacagtggtgggcaacctaactatgatcattttgaccaaactggactcccacttacatacacctatgtacttttctatcagacatttggcttttgttgatcttggtaattctactgtcatttgtcccaaggtgctggcaaattttgttgtggatcgaaatactatttcctattatgcatgtgctgcacagctggcattcttccttatgttcattatcagtgaatttttcatcctgtcagccatggcctatgaccgctatgtggccatttgtaaccctctgctctattatgttattatgtctcagcgactgtgtcatgtactggtgggcattcaatatctctacagcacatttcaggctctgatgttcactattaagatttttacattgaccttctgtggctctaatgtcatcagtcatttttactgtgatgatgttcctttgctacctatgctttgctcaaatgcacaggaaatagaattgttgagcatactattttctgtatttaatttgatctcctcctttctgatagtcttagtgtcctacatgttgattttgttagctatatgtcaaatgcattctgcagagggcaggaaaaaggctttctccacatgtggttcccatttgacagtggtggttgtgttctatgggtctctactcttcatgtacatgcagcccaattccactcacttctttgatactgataaaatggcttctgtgttttacactttagtaatccccatgcttaaccctttgatttacagcttaagaaacgaagaggtgaaaaatgccttctataagctctttgagaattga

SEQ ID NO: 46922 - DNA, 876 bp, Homo Sapiens
atgaacgccagcggttctggctacccgcttgcctcgctttacgtgggcgatctgcaccccgacgtgaccgaggccatgctctatgagaagttctctcccgccggccccatcctgtccatccgcgtgtgccgcgatgtagccacccggcgctcgctgggctacgcctacatcaacttccagcagcccgcggacgcggagcgggcactggacacaatgaactttgagatgctcaaaggccagcctattcgcatcatgtggtcccagcgagacccaggacttcgcaagtcaggtgtgggcaacatcttcatcaagaacctggaggactccattgacaacaaggctttatatgataccttctccacctttgggaacatcctctcttgcaaggtggcgtgtgacgagcatggctcccggggtttcggctttgtccattttgagacccatgaggccgcacagcaggccatcaacaccatgaatgggatgctgctgaatgaccgcaaagtctttgtgggtcacttcaagtctcgacgggagcgggaggcggagctgggggcgcgggccctggagttcaccaacatctacgtgaagaacctcccggtggatgtggacgagcaaggcctgcaggacctcttctcccagtttgggaaaatgctgagtgtgaaggtgatgagggacaacagcggccactcgcggtgctttggctttgtcaactttgagaagcatgaggaagcccagaaggccgtggtccatatgaacgggaaggaggtgagcgggcggctgctgtacgcgggccgggcccaaaagcgcgtggagcggcagaatgaactgaagcgcaggtttgagcagatgaagcaggaccggctgaggcgttaccag

SEQ ID NO: 46923 - DNA, 756 bp, Homo Sapiens
gcaggagccgaggacggcatgtcccaggccccgggagcacagccgagcccacccaccgtgtaccacgaacggcagcgcctggagctgtgtgctgtccacgccctcaacaacgttctgcagcagcagctctttagccaggaggctgccgatgagatctgcaagaggttggccccagactcccggctgaaccctcatcgcagcctcctgggcaccggcaactatgatgtcaatgtgatcatggccgctctgcaggggctgggcctggccgccgtgtggtgggacaggaggaggcccctgtcccagctggccctgccccaggtactggggctgatcctgaacctgccctcgcccgtgtcgctggggctgctgtcactgccgctgcgccggcggcactgggtggccctgcgccaggtggacggtgtctactacaacctggactccaagctgcgggcgcccgaggccctgggggatgaggacggagtcagggccttcctggcggctgcgctggcccagggcctgtgcgaggtgctgctggtagtgaccaaggaggtggaggagaagggcagctggctgcggacagactgaccatggctgaccatcggcgcccacagcgcagtccctgcgcatccccctccggctgcgcacactgcatgcctgggaaaggccagcacttcatggaccctggggaggccccgccccctccccacacccctgctccccactgccgctgctgcctcaataaatctgctgatttgc

SEQ ID NO: 46924 - DNA, 401 bp, Homo Sapiens
gggtggggacctcccttgggagatcaatcccctgtcctcctgctctttgctccgtgagaaagatctacttacgacctctggtcctcagaccaaccagcccaaggaacatctcaccaattttaaatcggcttgctacaagtgccagaaatctggccactgggccaaggaatgccggcagcccgggattcctcctaagtcgtgtcccatctgtgcaggaccccactgttcaactcacctggcagccactcccagagcccctggaactctggcccaaggctctctgactgactccttcccagatttactcggcttagcggctgaagaccgatgctgcccgattgcctcggaagccccctagaccatcacggacgccaagctttgggtaactctcacagtggagg

SEQ ID NO: 46925 - DNA, 660 bp, Homo Sapiens
aaggttgctgcaaaattggctgcacgtacaggcttgccttttgtcactgctccaaataaatttgaagctctggctgctcatgacgctctggttgagctcagtggagccatgaacactactgcctgtagtctgatgacgatagcaaataatattcgttttctgggttctggcccttggtcaggtctgggagaactgatcttgcctgaaaatgaaccaggaagtagtatcatgccaggcaaggtgaaccctactcagtgtgaagcaatgaccatggttgtagcccaagtcatggggaatcatgttgctgtaacagttggaggcagcagtggacattttgagttgaatgttttcaagccaatgatgattaaaaatgtgttacactcagccaggctgctggcggatgcttcagtttcctttacagaaaactgcgtggtgggaatccaggccaatacagaaaggatcaacaagctgatgaatgagtctcaaatgttggtgacagctctcaatcctcgtatagcgtatgacaaggcagcaaagattgctaagacagcacacaaaaatggatcaaccttaaaggaaactgttattgaacttggctatctcacaccagaacagtttgatgaacaggtaaaaactaaggacatgctgagtccaaagtga

SEQ ID NO: 46926 - DNA, 1291 bp, Homo Sapiens
cactgatccaaattaactaggatggctccaagtggtagatggtactaacagcaagctgcagataaggagggtaggccctacttccatgtgaggtaattagatacagtttttgctgaaatctcaggtaaaggatatattagagacctaagcatagaattggaaggagcaaattgctgtctggttcaggcttctcagactataagttgctatgatctccacctcaggatcttgttaaaatgcagattctggtggtggtggtggccaggggctgtggggagggaaaatgaggagttacggtttaatgggcatagaatttcagttttggaagatgaaaagagttctagagatctgttgcatgacaaacgttacctgacagttaaggagaggagctgctaaatgggtcgtgtgtttctgaatgggttcctgatagtcctgtgaccatgcggaagccagcactcctcatccccaccaacataattcatcatgaggagagacagaaagaaacctttgtggtgtcaagcagcaaaacaaaacaaaaagattcaaattaagttggtttgggtggggcctgagattctgcatttttcccaagtccctaggtgctgccagtgctgctggtgcacagaccatctttgaatagcaaggctctagataactgggctacagatgaactctggaagcagctgaagaacggttggctgttccatcctaagcagttactctgatctagtccattatgctatatactgttttcgctcatctcttttcagattggaagcctgccttttacacattgctttttaccacacgtttccagaaagttaaaatgcggggtagagggaataaactacagggagacaaataaattaaagagatgagttgaggtggataaggatagcttaataacatgcaagctaatttacaaaatttccatataggttattattttgggcacagtggctcatgcctataatcccagcactttgggaggccaaggtgggaggatcacctgaggtcaggagttcaaggccagcctggccaacatgatgaaactccatctctacaaaaaatacaaaaagccaggcgtggtggcaaatgcctataatcccagctactcgggaggctgaggcatgagaattacttgaacccaggaggcagagatcgcagtgagttgagattgtaccactgcactccagtctgggcaacagacggagactgtgtctcaaaaaaaagtgttcttgtataccatgtttgaaaagcatagttgataaaggaagaacatgtaaggcaa

SEQ ID NO: 46927 - DNA, 1191 bp, Homo Sapiens
ggtattgtcttctctaagccagacctggtcacctgtctggagcaaaggaaaaagccatggagtatgaagcacccaggccttactcaacataacatagttcatactggagacaaaccctacaaatgtaaagattgtggcaaaatttttaagtggtcttcgaaccttactatacatcagagaattcatagtggagagaaaccctacaaatgtgaagaatgtggcaaagcctttaagcaatcttcaaaactgaatgaacatatgagagctcatactggagagaaattctacaaatgtgaagaatgtggcaaagcttttaagcacccttcaggccttactctacataagagaattcatactggagagaacccttacaaattcgaagaatgtgataaagccttttattgggttttaagctttactaaacatatgataattcataggggagagaaaccctacaaatatcaagaatgtggcaaagcttttaagtggtcttcaaaccttactatacacaagagaattcatacgggagagaaaccctgcaaatgtgaagaatgtggcaaagcttgtaagcagtctttggggcttactattcaaaagagaattcatactgaagagaaaccctacaaatgtgaagaatgtgggtcttcaaatcttactatatataagaaaattcatgctggagagaaaccatacaattgtgaaaaatgtggcaaagcgttttactgttcctcaaaccttattcaaaataacatagttcatgctgaagagaaacactacaaatgtcaagaatgtggcaaagcttttaagaagtctttagaccttaatgtacataagataattcatagtggagagaaaccctacagatatgaagaatgtggcaaaataactcatagtggagaggaatcctacaaatgtgaagaatgtggcaaaggcttttactgttcctcaagccttactaagcatatgatagttcatactgaagagaaactgtacaaatgtgaagaatgtggcaaagcttttaagtggtcctctgagcttactatacatcagagaattcgtactgaagagaaaccctataaatgtgaagaatgtgtcagagtctttaaacactcctcaaaactgaatgaacataagagaaatcatactggagagaaaccctacaaatgtgaagcatgtggcaaagctttttaa

SEQ ID NO: 46928 - DNA, 204 bp, Homo Sapiens
atggggccacttaccagcttccgaagggctccctcatccagcccagctaaggcctcgtccgccatctcgctggcccctagctccgtcggttcctttctggtgagatccccagtgcctgtggcacctgtcaccagctcagagaattctgcaggggacagacatgaatcaggcatgctggggcttccagaaaccacaggcacttag

SEQ ID NO: 46929 - DNA, 596 bp, Homo Sapiens
gagttctgggaccggggccatgtctccacacctcactgctctcctgggcctagtgctctgcctggcccagaccatccacacgcaggagggggcccttcccagaccctccatctcggctgagccaggcactgtgatctccccggggagccatgtgactttcatgtgccggggcccggttggggttcaaacattccgcctggagagggaggatagagccaagtacaaagatagttataatgtgtttcgacttggtccatctgagtcagaggccagattccacattgactcagtaagtgaaggaaatgccgggctttatcgctgcctctattataagccccctggatggtctgagcacagtgacttcctggagctgctggtgaaagaaagctctggaggcccggactccccggacacagagcccggctcctcagctgggactgtgccaggcactgaagcctccggatttgatgcaccatgaatgaggagaaatggcctcccgtcttgtgaacttcaatggggagaaataattagaatgagcaatagaaatgcacagatgcctatacatacatatacaaataaaaagatacgattcgcaa

SEQ ID NO: 46930 - DNA, 204 bp, Homo Sapiens
atgaggaaaccccaggctgggacgggggaagcagcacgggatcccagcctcaggcctgcccggacggtgttggttggggatcaagatgagtacactgcagccgagaacaagagccccagaggaactctttgtcccacaggagagcagcggatccacgccagagaagatgcttgtatcttttcacggctcttctctgagaaatga

SEQ ID NO: 46931 - DNA, 1914 bp, Homo Sapiens
cttagagtgggcagctggatccacgtctaccctaatggatccctgtttattggatcagtaacagaaaaagacagtggtgtctacttgtgtgtggcaagaaacaaaatgggggatgatctgatactgatgcatgttagcctaagactgaaacctgccaaaattgaccacaagcagtattttagaaagcaagtgctccatgggaaagatttccaagtagattgcaaagcttccggctccccagtgccagagatatcttggagtttgcctgatggaaccatgatcaacaatgcaatgcaagccgatgacagtggccacaggactaggagatatacccttttcaacaatggaactttatacttcaacaaagttggggtagcggaggaaggagattatacttgctatgcccagaacaccctagggaaagatgaaatgaaggtccacttaacagttataacagctgctccccggataaggcagagtaacaaaaccaacaagagaatcaaagctggagacacagctgtccttgactgtgaggtcactggggatcccaaaccaaaaatattttggttgctgccttccaatgacatgatttccttctccattgataggtacacatttcatgccaatgggtctttgaccatcaacaaagtgaaactgctcgattctggagagtacgtatgtgtagcccgaaatcccagtggggatgacaccaaaatgtacaaactggatgtggtctctaaacctccattaatcaatggtctgtatacaaacagaactgttattaaagccacagctgtgagacattccaaaaaacactttgactgcagagctgaagggacaccatctcctgaagtcatgtggatcatgccagacaatattttcctcacagccccatactatggaagcagaatcacagtccataaaaatggaaccttggaaattaggaatgtgaggctttcagattcagccgactttatctgtgtggcccgaaatgaaggtggagagagcgtgttggtagtacagttagaagtactggaaatgctgagaagaccgacatttagaaatccatttaatgaaaaaatagttgcccagctgggaaagtccacagcattgaattgctctgttgatggtaacccaccacctgaaataatctggattttaccaaatggcacacgattttccaatggaccacaaagttatcagtatctgatagcaagcaatggttcttttatcatttctaaaacaactcgggaggatgcaggaaaatatcgctgtgcagctaggaataaagttggctatattgagaaattagtcatattagaaattggccagaagccagttattcttacctatgcaccagggacagtaaaaggcatcagtggagaatctctatcactgcattgtgtgtctgatggaatccctaagccaaatatcaaatggactatgccaagtggttatgtagtagacaggcctcaaattaatgggaaatacatattgcatgacaatggcaccttagtcattaaagaagcaacagcttatgacagaggaaactatatctgtaaggctcaaaatagtgttggtcatacactgattactgttccagtaatgattgtagcctaccctccccgaattacaaatcgtccacccaggagtattgtcaccaggacaggggcagcctttcagctccactgtgtggccttgggagttcccaagccagaaatcacatgggagatgcctgaccactcccttctctcaacggcaagtaaagagaggacacatggaagtgagcagcttcacttacaaggtaccctagtcattcagaatccccaaacctccgattctgggatatacaaatgcacagcaaagaacccacttggtagtgattatgcagcaacgtatattcaagtaatctga

SEQ ID NO: 46932 - DNA, 2334 bp, Homo Sapiens
gtaatgtcttttcattttgcccaagacctttggccagagcagaacataaaagattctttccagaaagtgacactgagaagatacggaaaatgtgaatatgagaatttacagttaagaaaaggctgtaaacatgtggatgagtgtacggggcacaaaggaggtcataatacagttaaccaatgtttgacagctaccccaagcaaaatattccagtgtaataaatatgtgaaagtctttgataaattttcaaattcaaatagatataagagaagacatacaggaaacaaacacttcaaatgtaaagaatgtagcaaatcattttgcgtgctttcacaactaactcagcatagaagaattcatactagagtgaattcctacaaatgtgaagaatgtggaaaagcctttaactggttctcaactcttactaaacataagagaattcatactggagaaaagccctacaaatgtgaagaatgtggcaaagcctttaaccagtcctcacaacttactaggcataagataattcatactgaagagaaacccaacaaatgtgaagaatgtggcaaggcctttaaacaggcctcacaccttactatacataaaataattcatactggagaaaaaccttacaaatatgaagaatgtggcaaagtctttagccagtcctcacaccttactacacaaaagatacttcacactggagagaacctctacaagtgtaaagaatgtggaaaagcttttaacctattctcaaatcttactaaccataagagaattcatgctggggagaaaccctacaaatgtaaagaatgtggcagagcttttaacatatcctcaaaccttaataaacaggagaaaattcatactggagggaaactcaacaaatgtgaagaatgtgacaaagcttttaaccgatccttaaaacttactgcacataagaaaattctaatggaagagaaaccctacaaatgtgaagaatgtggcaaagtctttaaccagttctcaactcttactagacataagataattcatactggagagaaaccctacaaatgtaaagaatgtggcaaagcttttaaccaatcttcaaaccttactgaacataagaaaattcatactgcagagaaatcctataaatgtgaagaatgtggcaaagcttttaaccaacactcaaacctaattaaccataggaaaatttattctggagagaaaccatacaaatgtgaagaatgtggaaaagcttttaatcgatcctcaacccttactagacataagaaaattcatactggagagaaaccctacaaatgtgaagaatgtgacagagcttttagccagtcttcaaaccttactgaacataagaaaattcatactggagagaaaccctataaatgtgaggaatgtggcaaagcttttaaccgattctcaacccttactaaacataagagaattcatactggagaaaaaccctataaatgtgaagaatgtggaaaagcctttaatcaatcctatcaacttactagacataagatagttcatactaaagagaaactcaacaaatgtgaagaatttggcaaggcctttaaacagtcctcacaccgtactatacataaaattattcatactggagagaaaccctacaaatgtgaagaacatggcaaagtttttaaccagtcctcaaaccttactacacaaaagataattcatactggagagaacctctacaaatttgaagaacatggaaaagcttttaacctattctcaaacattactaaccataagataatttatactggagagaaaccccacaaatgtgaagaatgtggaaaagcttataaccgattctcaaacctaactatacataagagaattcatacgggagagaaaccttaccaatgtgcagaatgtggcaaagcctttaactgctcctcaacccttaatagacataagataattcatactggagagaaaccttacaaatgtaaagaatgtggcaaagcttttaacctatcctcaacccttactgcacataagaaaattcatactggagagaaaccctataaatgtgaagaatgtggcaaagcttttaaccaatcctcaaaccttactacacataagaaaattcatacttcagagaaaccctacaaatgtgaagaatgtggcaaatcctttaaccagttctcatctcttaatatacataagataattcatactggagagaaaccctacaaatgtggagattatggcagagctttcaacctatcctcaaatcttactacacataagaaaattcatactggagagaaaccctacaaatgtgagtatggcaaaacttaa

SEQ ID NO: 46933 - DNA, 141 bp, Homo Sapiens
aggaacagcaagaggaccttgtgcatgaataatttgtttccatactacagacagaagaatcccagacttcttagagaacccagtgactttttgcaccttaaatctgtgaaatcctcatgttttcttctgccgtatccatag

SEQ ID NO: 46934 - DNA, 1292 bp, Homo Sapiens
gaccggtgtatgggggacagcaggcgaaggtcactcgggaaccagcccagctctgaggctgcgggcaggtcggaaagggagcaggacggcgacccccgtggcctccagagctctgtgtacgagagccggcgggtcacagaccccgaacgccaggacctggacaatgcagagctgggaccagaagacccagaagaggagcttccccccgaggaggtggccggggaggagttcccggagaccctggatcccaaagaggcactttctgagttggagagagtcctggacaaggacttggaagaggacattcctgaaatcagccggctgtccatcagccagaagctccccagcaccaccatgaccaaagcaaggaagaggaggaggcggaggaggctcatggagctggcagagcccaagataaactggcaagtcctgaaagacaggaagggacgctgtggtaaggggtatgcctggatctccccatgtaagatgagcttgcacttctgtctctgctggccctctgtgtactggaccgagcggttccttgaggacaccaccctcaccatcacagtgcccgcggtgtcccgccgcgtggaggaactgtctcggcccaagagattctacctggaatattacaacaacaacaggacgactcctgtctggcccattcctcggtcctccctggaatacagagcgtcgagtcgcctgaaggaactggccgccccgaagattcgtgataacttctggagcatgcccatgtctgaggtgtcccaggtatccagggcagcccaaatggcagtccccagctcgcggatcctccagttgtcaaagccgaaggccccagccaccctcttggaagagtgggaccccgtgccaaaacccaagccacatgtgtcagaccataaccgcctccttcacttggccaggcccaaagctcagtcggacaagtgcgttcctgaccgagatcctcgctgggaggtgctggatgtcaccaagaaggtggtggccagcccccggatcatctccctggccaagcccaaagtgcgcaagggcctcaacgagggatacgacaggcgtcccctcgcctctatgagcttgccacccccaaaagcatcaccagaaaagtgtgatcaacccaggcctggcctctaagacctccgctcccagtaaacaccctcaggcaccctaaccctgtgtatgtgattattctgagctttttggcctggagaagggagggcgggctagaaggccaaaagaaggatgaggaggacaataatatttatttttgcatccaa

SEQ ID NO: 46935 - DNA, 728 bp, Homo Sapiens
gtaggtcccggcaaccgcaggctcgcggcgggcgctgggcgcgggatccgactctagtcgtaatggaggcgggcggctttctggactcgctcatttacggagcatgcgtggtcttcacccttggcatgttctccgccggcctctcggacctcaggcacatgcgaatgacccggagtgtggacaacgtccagttcctgccctttctcaccacggaagtcaacaacctgggctggctgagttatggggctttgaagggagacgggatcctcatcgtcgtcaacacagtgggtgctgcgcttcagaccctgtatatcttggcatatctgcattactgccctcggaagcgtgttgtgctcctacagactgcaaccctgctaggggtccttctcctgggttatggctacttttggctcctggtacccaaccctgaggcccggcttcagcagttgggcctcttctgcagtgtcttcaccatcagcatgtacctctcaccactggctgacttggctaaggtgattcaaactaaatcaacccaatgtctctcctacccactcaccattgctacccttctcacctctgcctcctggtgcctctatgggtttcgactcagagatccctatatcatggtgtccaactttccaggaatcgtcaccagctttatccgcttctggcttttctggaagtacccccaggagcaagacaggaactactggctcctgcaaacctga

SEQ ID NO: 46936 - DNA, 1194 bp, Homo Sapiens
ttacagattgaagatccaggttgcttctgggttattataaaagggtgtagtccctttttagatcatgatgtcgattatcaaaaattaaatagtgccatgaatgacttctacaacagcacgtgtcaagatatagaaataaaacccttaacattggaagaaggacaggtgtgtgtggtctattgtgaggagctaaagtgctggtgcagggccattgtcaaatcaattacgtcttccgcagaccagtacctggcagaatgtttccttgtggactttgccaagaacattccagtcaaatctaaaaacatccgagttgtagtagaatcgtttatgcagcttccctatagagcaaaaaaattcagcctgtactgcacaaagcctgtcacattacacattgacttctgccgagacagtactgacattgtacctgccaagaagtgggacaatgcagctattcagtactttcagaaccttctgaaagcaactacccaggtggaagccagattatgtgctgtggaagaagatacatttgaggtttacctttatgtaactataaaagatgaaaaagtttgtgttaatgatgatcttgttgcaaagaactatgcttgttatatgtcacctacaaagaataaaaaccttgattatttagaaaaaccaagattgaatataaaatcagcaccctccttcaataaactcaatccagcacttacactctggccaatgtttttgcaaggaaaagatgttcaaggaatggaagacaaagctgtaaaatgtaatatggattcattgagagattcacctaaagacaaatctgaaaagaaacaccattgcatctctttaaaagatacaaataagcgtgttgaatcctcagtgtactggccagcaaaaagaggcataaccatatatgctgatccagatgtaccagaagcaagtgctttaagtcagaagtcaaatgagaaacctcttagattgactgagaagaaagaatatgatgagaagaatagctgtgtgaaattactgcagtttttaaatcctgatcctttgagagctgacggaatctctgatctccagcagttgcagaagctgaagggcctgcagccgcccgtggtagtgctccggaacaagatcaagccctgcttaaccattgactcgtcgccgctgtcagcagacctgaagaaggtaaaagtgctcgtaaaa

SEQ ID NO: 46937 - DNA, 809 bp, Homo Sapiens
gcctgaggtaggcttcatagagttctaggacttccgtgtgcgttgccaccagatcctgcccagcaatggcctttcccttctaaggtcattagattcagccaaaagcgacctcttctctagtccggtgttacgaacagaagttctgagttgtgctacaaaagtagttccatctttttggtgtaattttcatgtttttaatttgaaaaaaaaaaaaaaaaaaaaacaactttttataagttttttaagggccctgcttagtcagtgtacagggtggagtcagaggcagttttcagaaaaaaacaaaaaacaatttcaccaagcggtagtaattgttgttttactagttatacatttagaatataaaggaggcatcagaaaacacactctctaaagccacttccttgtgcacagagtctgcacagggagagcacaggcatctccctggaaaagcacctgccaatgacgaatttcatggaagaacctaggcaagaaaggaagcctctttctgagacacagtctctgagaggtgagcctagctttgctcttcctacagggtatgcttgggccatacacaatgctcgccttactttaaagctattttgccacagtcctgttaaatagtgtggacgtccttttgcagtctggtgtgcatgccatatgatcaggacagcttttccactttactcggtttcctacaagcaagtaggaaatacagtgaatttaccctaaaatgtccaatctgtatttatgtaccttgtcagtgttttgctgttggttttctaaaacaatctgatcaataaatcttatcc

SEQ ID NO: 46938 - DNA, 932 bp, Homo Sapiens
ccatggagcagctgctgcgcgccgagctgcgcaccgcgaccctgcgggccttcggcggccccggcgccggctgcatcagcgagggccgagcctacgacacggacgcaggcccagtgttcgtcaaagtcaaccgcaggacgcaggcccggcagatgtttgagggggaggtggccagcctggaggccctcaggagcacgggcctggtgcgggtgccgaggcccatgaaggtcatcgacctgccgggaggtggggccgcctttgtgatggagcatttgaagatgaagagcttgagcagtcaagcatcaaaacttggagagcagatggcagatttgcatctttacaaccagaagctcagggagaagttgaaggaggaggagaacacagtgggccgaagaggtgagggtgctgagcctcagtatgtggacaagttcggcttccacacggtgacgtgctgcggcttcatcccgcaggtgaatgagtggcaggatgactggccgacctttttcgcccggcaccggctccaggcgcagctggacctcattgagaaggactatgctgaccgagaggcacgagaactctggtcccggctacaggtgaagatcccggatctgttttgtggcctagagattgtccccgcgttgctccacggggatctctggtcgggaaacgtggctgaggacgacgtggggcccattatttacgacccggcttccttctatggccattccgagtttgaactggcaatcgccttgatgtttggggggttccccagatccttcttcaccgcctaccaccggaagatccccaaggctccgggcttcgaccagcggctgctgctctaccagctgtttaactacctgaaccactggaaccacttcgggcgggagtacaggagcccttccttgggcaccatgcgaaggctgctcaagtag

SEQ ID NO: 46939 - DNA, 2348 bp, Homo Sapiens
catggggggaaagcagcgggacgaggatgacgaggcctacgggaagccagtcaaatacgacccctcctttcgaggccccatcaagaacagaagctgcacagatgtcatctgctgcgtcctcttcctgctcttcattctaggttacatcgtggtggggattgtggcctggttgtatggagacccccggcaagtcctctaccccaggaactctactggggcctactgtggcatgggggagaacaaagataagccgtatctcctgtacttcaacatcttcagctgcatcctgtccagcaacatcatctcagttgctgagaacggcctacagtgccccacaccccaggtgtgtgtgtcctcctgcccggaggacccatggactgtgggaaaaaacgagttctcacagactgttggggaagtcttctatacaaaaaacaggaacttttgtctgccaggggtaccctggaatatgacggtgatcacaagcctgcaacaggaactctgccccagtttcctcctcccctctgctccagctctggggcgctgctttccatggaccaacgttactccaccggcgctcccagggatcaccaatgacaccaccatacagcaggggatcagcggtcttattgacagcctcaatgcccgagacatcagtgttaagatctttgaagattttgcccagtcctggtattggattcttgttgccctgggggtggctctggtcttgagcctactgtttatcttgcttctgcgcctggtggctgggcccctggtgctggtgctgatcctgggagtgctgggcgtgctggcatacggcatctactactgctgggaggagtaccgagtgctgcgggacaagggcgcctccatctcccagctgggtttcaccaccaacctcagtgcctaccagagcgtgcaggagacctggctggccgccctgatcgtgttggcggtgcttgaagccatcctgctgctgatgctcatcttcctgcggcagcggattcgtattgccatcgccctcctgaaggaggccagcaaggctgtgggacagatgatgtctaccatgttctacccactggtcacctttgtcctcctcctcatctgcattgcctactgggccatgactgctctgtatcctctgcccacgcagccagccactcttggatatgtgctctgggcatccaacatcagctcccccggctgtgagaaagtgccaataaatacatcatgcaaccccacggcccaccttgtgaactcctcgtgcccagggctgatgtgcgtcttccagggctactcatccaaaggcctaatccaacgttctgtcttcaatctgcaaatctatggggtcctggggctcttctggacccttaactgggtactggccctgggccaatgcgtcctcgctggagcctttgcctccttctactgggccttccacaagccccaggacatccctaccttccccttaatctctgccttcatccgcacactccgttaccacactgggtcattggcatttggagccctcatcctgacccttgtgcagatagcccgggtcatcttggagtatattgaccacaagctcagaggagtgcagaaccctgtagcccgctgcatcatgtgctgtttcaagtgctgcctctggtgtctggaaaaatttatcaagttcctaaaccgcaatgcatacatcatgatcgccatctacgggaagaatttctgtgtctcagccaaaaatgcgttcatgctactcatgcgaaacattgtcagggtggtcgtcctggacaaagtcacagacctgctgctgttctttgggaagctgctggtggtcggaggcgtgggggtcctgtccttcttttttttctccggtcgcatcccggggctgggtaaagactttaagagcccccacctcaactattactggctgcccatcatgacctccatcctgggggcctatgtcatcgccagcggcttcttcagcgttttcggcatgtgtgtggacacgctcttcctctgcttcctggaagacctggagcggaacaacggctccctggaccggccctactacatgtccaagagccttctaaagattctgggcaagaagaacgaggcgcccccggacaacaagaagaggaagaagtgacagctccggccctgatccaggactgcaccccacccccaccgtccagccatccaacctcacttcgccttacaggtctccattttgtggtaaaaaaaggttttaggccaggcgccgtggctcacgcctgtaatccaacactttgagaggctgaggcgggcggatcacctgagtcaggagttcgagaccagcctggccaacatggtgaaac

SEQ ID NO: 46940 - DNA, 1989 bp, Homo Sapiens
atgaaggtggtgccaagtctcctgctctccgtcctcctggcacaggtgtggctggtacccggcttggcccccagtcctcagtcgccagagaccccagcccctcagaaccagaccagcagggtagtgcaggctcccaaggaggaagaggaagatgagcaggaggccagcgaggagaaggccagtgaggaagagaaagcctggctgatggccagcaggcagcagcttgccaaggagacttcaaacttcggattcagcctgctgcgaaagatctccatgaggcacgatggcaacatggtcttctctccatttggcatgtccttggccatgacaggcttgatgctgggggccacagggccgactgaaacccagatcaagagagggctccacttgcaggccctgaagcccaccaagcccgggctcctgccttccctctttaagggactcagagagaccctctcccgcaacctggaactgggcctcacacaggggagttttgccttcatccacaaggattttgatgtcaaagagactttcttcaatttatccaagaggtattttgatacagagtgcgtgcctatgaattttcgcaatgcctcacaggccaaaaggctcatgaatcattacattaacaaagagactcgggggaaaattcccaaactgtttgatgagattaatcctgaaaccaaattaattcttgtggattacatcttgttcaaagggaaatggttgaccccatttgaccctgtcttcaccgaagtcgacactttccacctggacaagtacaagaccattaaggtgcccatgatgtacggtgcaggcaagtttgcctccacctttgacaagaattttcgttgtcatgtcctcaaactgccctaccaaggaaatgccaccatgctggtggtcctcatggagaaaatgggtgaccacctcgcccttgaagactacctgaccacagacttggtggagacatggctcagaaacatgaaaaccagaaacatggaagttttctttccgaagttcaagctagatcagaagtatgagatgcatgagctgcttaggcagatgggaatcagaagaatcttctcaccctttgctgaccttagtgaactctcagctactggaagaaatctccaagtatccagggttttacaaagaacagtgattgaagttgatgaaaggggcactgaggcagtggcaggaatcttgtcagaaattactgcttattccatgcctcctgtcatcaaagtggaccggccatttcatttcatgatctatgaagaaacctctggaatgcttctgtttctgggcagggtggtgaatccgactctcctataattcaggacacgcataagcacttcgtgctgtagtagatgctgaatctgaggtatcaaacacacacaggataccagcaatggatggcaggggagagtgttccttttgttcttaactagtttagggtgttctcaaataaatacagtagtccccacttatctgagggggatacattcaaagacccccagcagatgcctgaaacggtggacagtgctgaaccttatatatattttttcctacacatacatacctatgataaagtttaatttataaattaggcacagtaagagattaacaataataacaacattaagtaaaatgagttacttgaatgcaagcactgcaataccataacagtcaaactgattatagagaaggctactaagtgactcatgggcgaggagcatagacagtgtggagacattgggcaaggggagaattcacatcctgggtgggacagagcaggacaatgcaagattccatcccactactcagaatggcatgctgcttaagacttttagattgtttatttctggaatttttcatttaatgtttttggaccatggttgaccatggttaactgagactgcagaaagcaaaaccatggataagggaggactactacaaaagcattaaattgatacatattttttaaga

SEQ ID NO: 46941 - DNA, 1935 bp, Homo Sapiens
gggagtacctgtacctttcagctgcgccggccgcgaggccacggagagctcgccttggagagcccaggagcaggggagacatggactcagtggtctttgaggatgtggctgtggacttcaccctggaggagtgggctttgctggattctgctcagagggacctctacagagatgtgatgctggagaccttccggaacctggcctcagtagatgatgggactcaatttaaagccaatgggtcagtttctctgcaggatatgtacgggcaagaaaaatctaaggaacagacaataccaaacttcacaggaaataattcctgtgcctacactttagaaaaaaattgtgaaggctatggcactgaagaccaccacaaaaatctgagaaatcatatggtggacagattctgtacacataatgaaggtaatcaatatggagaagccatccatcaaatgccagatcttaccctgcacaagaaagtttctgctggagaaaaaccatatgaatgcaccaagtgcaggacagtcttcacgcatctttcttctcttaaaaggcacgtcaagtctcactgtggacgaaaagcacctccaggtgaggaatgtaagcaggcctgcatttgtccctcacacctacacagtcacggaagaactgacactgaggagaagccgtataagtgtcaagcatgtgggcaaactttccaacatcctcgttacctctcccaccacgtaaagactcacacagcagagaaaacctacaaatgcgagcagtgtcggatggcgtttaatgggttcgcaagcttcactagacatgtgagaactcacacaaaagacaggccatataaatgtcaggaatgtgggagagccttcatttatccctcgacatttcaaagacacatgacaacacacactggagagaagccctataaatgtcagcactgtgggaaagccttcacttacccccaggcttttcaaagacatgagaagacgcacacgggagagaagccctatgaatgcaagcagtgtgggaaaacattcagttggtctgaaaccttgcgagtccacatgaggatccacactggggacaaactctataaatgtgaacactgtgggaaggcttttacctcttccagatcattccaaggtcatttgaggacgcacactggagagaaaccttatgagtgtaaacaatgtgggaaagccttcacttggtcctcaacgtttagagaacatgtgagaattcacacgcaagagcagctctataaatgtgaacaatgtgggaaggcttttacctcttccagatcattccgaggtcatttgaggacgcacactggagagaagccttatgagtgtaaacaatgtggaaaaaccttcacttggtcctcaacgtttagagaacatgtgagaattcacacgcaagagcagctccataaatgtgaacactgtgggaaggcctttacctcttccagagcattccaaggtcatttgaggatgcacactggagagaagccttatgagtgtaaacaatgtggaaaaaccttcacttggtcctcaaccttacataatcatgtgaggatgcacactggagagaaacctcacaaatgtaaacaatgtgggatgtccttcaagtggcactcctccttccggaaccatctgaggatgcacacaggacagaaatcccacgaatgtcagtcatactcaaaagccttcagttgccaagtcattctttctaaaaccagtgagagcacacactaaagagaaattctataactttaatggggtaacctcacattaattcatgtataatgctccagaaaattcacaccaggagagaaatcttacaagtatgatattgtctttgtcaatacctcatttgtaaaacagacccattagtcgtgaatttccagctctttcaaaaataaatgtttatgtgagaaaataa

SEQ ID NO: 46942 - DNA, 3267 bp, Homo Sapiens
gctccccgcccggctgcggggccagtggcaggagcgccgcgcaccgccagccgcagggggcgtgggatgggggcggccggggaggggggcgcccacactgactagagccaaccgcgcacttcaaaagggtgtcggtgccgcgctcccctcccgcggcccgggaacttcaaagcgggccgtgctgccccggctgcctcgctctgctctggggcctcgcagccccggcgcggccgcctggtggcgatgacccgggcgctctgctcagcgctccgccaggctctcctgctgctcgcagcggccgccgagctctcgccaggactgaagtgtgtatgtcttttgtgtgattcttcaaacttcacctgccaaacagaaggagcatgttgggcatcagtcatgctaaccaatggaaaagagcaggtgatcaaatcctgtgtctcccttccagaactgaatgctcaagtcttctgtcatagttccaacaatgttaccaaaaccgaatgctgcttcacagatttttgcaacaacataacactgcaccttccaacagcatcaccaaatgccccaaaacttggacccatggagctggccatcattattactgtgcctgtttgcctcctgtccatagctgcgatgctgacagtatgggcatgccagggtcgacagtgctcctacaggaagaaaaagagaccaaatgtggaggaaccactctctgagtgcaatctggtaaatgctggaaaaactctgaaagatctgatttatgatgtgaccgcctctggatctggctctggtctacctctgttggttcaaaggacaattgcaaggacgattgtgcttcaggaaatagtaggaaaaggtagatttggtgaggtgtggcatggaagatggtgtggggaagatgtggctgtgaaaatattctcctccagagatgaaagatcttggtttcgtgaggcagaaatttaccagacggtcatgctgcgacatgaaaacatccttggtttcattgctgctgacaacaaagataatggaacttggactcaactttggctggtatctgaatatcatgaacagggctccttatatgactatttgaatagaaatatagtgaccgtggctggaatgatcaagctggcgctctcaattgctagtggtctggcacaccttcatatggagattgttggtacacaaggtaaacctgctattgctcatcgagacataaaatcaaagaatatcttagtgaaaaagtgtgaaacttgtgccatagcggacttagggttggctgtgaagcatgattcaatactgaacactatcgacatacctcagaatcctaaagtgggaaccaagaggtatatggctcctgaaatgcttgatgatacaatgaatgtgaatatctttgagtccttcaaacgagctgacatctattctgttggtctggtttactgggaaatagcccggaggtgttcagtcggaggaattgttgaggagtaccaattgccttattatgacatggtgccttcagatccctcgatagaggaaatgagaaaggttgtttgtgaccagaagtttcgaccaagtatcccaaaccagtggcaaagttgtgaagcactccgagtcatggggagaataatgcgtgagtgttggtatgccaacggagcggcccgcctaactgctcttcgtattaagaagactatatctcaactttgtgtcaaagaagactgcaaagcctaatgatgataattatgttaaaaagaaatctctcatagctttcttttccattttcccctttatgtgaatgtttttgccattttttttttgttctacctcaaagataagacagtacagtatttaagtgcccataaggcagcatgaaaagataactctaaagttaagcatgggcaggagttgacttcatccaatctctatgttatgtttaattttattttgaaagcaacacctcaactcatctttttatttaataaggaagaaatatattacaaaagtataaaataagctctataaaaatgttatagtcattaagtttttattttacttgaaccaagagcacatgaatgaacaggaaaagatgtaaaaacatttttttctgagatgaaaacatattaattaaacatgcaaattagagcatgctatctttaggtgatgcaatctatgtttccccctttttaagttagcaggactttttaaaaataaatattgctctaaactttaatatatcgaacgtgagagtggagctgcttagtggaagatgtaagtgaggtgggtgtcccatgtgcttggtctccccttctgctgttctcctgttcttcataatccactactgcagcagtccctgaaccactaaacttgttcctttcatttacaaaagagatacctgacatcctgagacactgagaaatgtcctgaagtcacacagctaatggcagaactggcactaggtccaaatcttgtgataatgaacaccgtaaggttagctagcttcctactttcccttgaatagtgcttttctccctatgtaatatcttttattatgatatttgtggtttagaaggcatattgagttattttgcagaatcataatggacccgcacaaaatctcagaaccatatctgttgacattttttctcatagaaatatcatggttaccccatttgttaatgagcattaatgttttctgaacacttccaaagattaatcaaacataaatattcattgtctgaaaatgtctttaagatacaattcagaggtccctatttcctttgtacatacacacttagaaagaaaagacagaaaaggaagaggaaggaaggaaatattttgagaatatattgagaagaattaagaaaactcttcaatgaagtgttaacaaccaaaccctacagacggtatcagaaacagcaaatagatattcctctaccctttcacagtgagtgagtgagtacagaagaatgctcatgatagttttgccttcattctactttctgtggacacagagtaatgaatatttaatgggacattaaatatgcccttcaaatctataattttactttggtaaacgagatttaacatgatgtcttttatgctcctaaaacatcttttttcaaactccattccttagaacattcttctactgagatgatccaagaccaaaagtgttctttggtacttgcttataaagtgatagtacatgttagcatataatgtattttgaagagtgaagtaaatgctattgataacagtaaaaaaaaaaaaaaa

SEQ ID NO: 46943 - DNA, 5220 bp, Homo Sapiens
cagctcactccagttggtaccacaatattcacaggattttcaggagacaatggagctacagatatagatgatggaccaaatggacagatagagtatgttattcagtataatccagatgatccgacatccaatgacacctttgaaattcccctaatgttgactggaaatatagtgttaaggaagaggctcaactatgaagataagactcgctactttgtcataatccaagctaatgaccgtgcccaaaatctgaatgagaggcgaaccaccaccaccactctcacagtggatgttctggatggagatgacttgggtccaatgtttcttccttgtgtccttgtgccaaacactcgtgattgccgtccactcacttatcaagctgccatacctgagttgagaactccggaagaactgaaccccattattgttacgccaccaatccaagccattgatcaggaccggaatattcaaccgccatcagataggccaggaatcctctattccatccttgttgggactcctgaggattacccacgatttttccatatgcatcctaggacagcagaacttagtctcctggagccagtaaacagagactttcaccagaaatttgatttggttattaaggctgaacaagacaatggtcatcctcttcctgcctttgccggtctacacattgaaatactggatgaaaacaatcaaagtccatattttacaatgcccagttatcaaggctatatcctggaatctgccccagtgggagcaaccatttcggacagtaatgaactaatagctacattatttattcaacgtttgaaacgatgtcattttttttcaaagacaaaagacccagagcttcacctttttctgaatgactacacctcagtcttcaccgtcacacagactggtattactcgctacctcaccttacttcaaccagtggacagggaagaacagcaaacttacaccttttcgataacagcatttgatggtgtacaagaaagtgagccagtcatcgtcaatattcaagtgatggatgcaaatgataacacgccaaccttccctgaaatatcctatgatgtgtatgtttatacagacatgagacctggggacagtgtcatacagctcactgcagtcgacgcagacgaagggtcaaatggggagatcacatatgaaatccttgttggggctcagggagacttcatcatcaataaaacaacagggcttatcaccatcgctccaggggtggaaatgatagtcgggcggacttacgcactcacggtccaagcagcggataatgctcctcctgcagagcgaaggccatgctttaatctttattctttaacagtgtcatggacattctgtgctattagtttcaagcttttatattactctgtaatgagtgggcgccatatcaattacttgataaattatgttttctctctgaaggcaactgatcgagagggagactcaataacatatgccattgagaatggagatcctcagagagtttttaatctttcagaaaccacggggattctaaccttagggaaagcactggacagggaaagcactgatcgctacattctgatcatcacagcttcagatggcaggccagatgggacctcaactgccacagtaaacatagtggtgacagatgtcaatgacaatgctccagtgtttgatccttatctgccaagaaatttatctgtggtggaagaagaagccaatgcctttgtgggtcaagtaaaagcaacagaccctgatgctggaataaatggtcaagtgcactacagtttgggtaactttaataatctttttcgtatcacatccaatgggagcatttacacagcagtgaagcttaacagagaagtcagggactactatgaacttgttgttgtggcaacagatggagcagtacaccctcgtcattcaactctaaccttggccatcaaggttttggacattgatgataacagtcctgtgttcaccaattcaacatacactgtccttgttgaagagaatttgccagctgggactaccatccttcaaatagaggccaaagatgtcgaccttggagcaaatgtgtcttaccggataagaagcccagaagtgaagcacttttttgcactacatccatttacaggagaactatcgcttttaaggagtttagattatgaggcatttccagaccaagaagcaagtatcacttttctggtagaggcctttgatatttatggaacaatgccacctggtattgctactgtcacagtgattgtaaaggatatgaatgattatcctcctgtctttagtaaacgaatatacaaagggatggtggctccggatgcagtcaagggtacacctatcacaacagtttatgctgaagatgcagaccctcctggattacctgcaagtcgtgtgaggtatagagtagatgatgtacagtttccttaccctgccagtatttttgaagtggaagaagattctggaagagtaataacacgagtcaatcttaatgaagaacctacaacaatttttaagttggtggtggttgcttttgatgatggggagcctgtgatgtccagcagtgccacagtgaagattcttgtcttacatcctggtgagatcccacgcttcacacaggaggaatatagacctcctccagtaagtgaacttgccaccaaagggaccatggttggtgtaatttctgctgctgccattaatcaaagtattgtgtactccattgtttcaggaaatgaagaagatacatttggaattaataacatcacaggtgttatctatgtgaatggacctctggattatgagaccaggacaagctatgtacttcgagtccaagctgattccctggaagtggtccttgccaatctccgagttccttcaaaaagcaatacagctaaagtatacattgagattcaggatgaaaataatcatcccccagtgtttcagaaaaaattctacatcggaggtgtatctgaagatgcaagaatgtttacttctgtactcagagtgaaggctactgataaagatactggcaattatagtgtcatggcctacagactcataataccaccaattaaagagggaaaagaaggatttgtagtggaaacatatacagggcttatcaaaactgctatgctcttccataatatgaggagatcctacttcaagtttcaagttattgcaactgacgactatgggaagggactgagcggcaaagccgatgtactcgtctccgtggtcaatcagctggatatgcaagtcattgtttccaatgtgcctcctactctagtggaaaaaaagatagaagatcttacagagatcttggatcgctatgttcaggaacaaattcctggtgccaaggtcgtagtggagtccattggagctcgccggcatggagatgccttttccctagaagattacaccaaatgtgacttgactgtctatgcaattgacccccaaaccaacagagccatcgatagaaatgagctttttaaatttttggatggcaaactacttgatatcaataaagactttcagccgtattatggggaaggaggacgcattctggagatccggactccagaggcagtgaccagcattaaaaagagaggagaaagtctaggatacacagaaggggccttgttggctctggccttcatcatcatcctctgctgcattcctgccatcttggtggttttggtcagctacagacaacgtcaagctgagtgtacaaagactgcacgaattcaggccgcattacccgcggctaaaccagcagtgccggctcctgcaccactgtgtcacaacttgtttccttacatttcattatcttcttttctttcaagtcttttccttctctaccattttcaacaaagcaggggaaataactcagtctcagaagacaggaaacatcaacaagttgtgatgcccttttcttccaatactattgaggctcacaagtcagctcatgtagacggatcacttaagagcaacaaactgaagtctgcaagaaaattcacatttctatctgatgaggatgacttaagtgcccataatcccctttataaggaaaacataagtcaagtatcaacaaattcagacatttcacagagaacagattttgtagacccattttcacccaaaatacaagccaagagtaagtctctgaggggcccaagagaaaagattcagaggctgtggagtcagtcagtcagcttacccaggaggctgatgaggaaagttccaaatagaccagagatcatagatctgcagcagtggcaaggcaccaggcagaaagctgaaaatgaaaacactggaatctgtacaaacaaaagaggtagcagcaatccattgcttacaactgaagaggcaaatttgacagagaaagaggaaataaggcaaggtgaaacactgatgatagaaggaacagaacagttgaaatctctctcttcagactcttcattttgctttcccaggcctcacttctcattctccactttgccaactgtttcaagaactgtggaactcaaatcagaacctaatgtcatcagttctcctgctgagtgttccttggaactttctccttcaaggccttgtgttttacattcttcactctctaggagagagacacctatttgtatgttacctattgaaaccgaaagaaatatttttgaaaattttgcccatccaccaaacatctctccttctgcctcattttttccactttccgtttcaacgtctggtcccccaacaccacctcttctacctccatttccaactcctcttcctccaccacctccttctattccttgccctccacctccttcagcttcatttctgtccacagagtgtgtctgtataacaggtgttaaatgcacgaccaacttgatgcctgccgagaaaattaagtcctctatgacacagctatcaacaacgacagtgtgtaaaacagaccctcagagagaaccaaaaggcatcctcagacacgttaaaaacttagcagaacttgaaaaatcagtagctaacatgtacagtcaaatagaaaaaaactatctacgcacaaatgtttcagaacttcaaactatgtgcccttcagaagtaacaaatatggaaatcacatctgaacaaaacaaggggagtttgaacaatattgtcgagggaactgaaaaacaatctcacagtcaatctacttcactgtaa

SEQ ID NO: 46944 - DNA, 1983 bp, Homo Sapiens
atgaacccggacctgcgcagggagcgggattccgccagcttcaacccggagctgcttacacacatcctggacggcagccccgagaaaacccggcgccgccgagagatcgagaacatgatcctgaacgacccagacttccagcatgaggacttgaacttcctcactcgcagccagcgttatgaggtggctgtcaggaaaagtgccatcatggtgaagaagatgagggagtttggcatcgctgaccctgatgaaattatgtggtttaaaaaactacatttggtcaattttgtggaacctgtgggcctcaattactccatgtttattcctaccttgctgaatcagggcaccactgctcagaaagagaaatggctgctttcatccaaaggactccagataattggcacctacgcccagacggaaatgggccacggaactcaccttcgaggcttggaaaccacagccacgtatgaccctgaaacccaggagttcattctcaacagtcctactgtgacctccattaaatggtggcctggtgggcttggaaagacttcaaatcatgcaatagttcttgcccagctcatcactaaggggaaatgctatggattacatgcctttatcgtacctattcgtgaaatcgggacccataagcctttgccaggaattaccgttggtgacatcggccccaaatttggttatgatgagatagacaatggctacctcaaaatggacaaccatcgtattcccagagaaaacatgctgatgaagtatgcccaggtgaagcctgatggcacatacgtgaaaccgctgagtaacaagctgacttacgggaccatggtgtttgtcaggtccttccttgtgggagaagctgctcgggctctgtctaaggcgtgcaccattgccatccgatacagcgctgtgaggcaccagtctgaaatcaagccaggtgaaccagaaccacagattttggattttcaaacccagcagtataaactctttccactcctggccactgcctatgccttccagtttgtgggcgcatacatgaaggagacctatcaccggattaacgaaggcattggtcaaggggacctgagtgaactgcctgagcttcatgccctcaccgctggactgaaggctttcacctcctggactgcaaacactggcattgaagcatgtcggatggcttgtggtgggcatggctattctcattgcagtggtcttccaaatatttatgtcaatttcaccccaagctgtacctttgagggagaaaacactgtcatgatgctccagacggctaggttcctgatgaaaagttatgatcaggtgcactcaggaaagttggtgtgtggcatggtgtcctatttgaacgacctgcccagtcagcgcatccagccacagcaggtagcagtctggccaaccatggtggatatcaacagccccgaaagcctaaccgaagcatataaactccgtgcagccagattagtagaaattgctgcaaaaaaccttcaaaaagaagtgattcacagaaaaagcaaggaggtagcttggaacctaacttctgttgaccttgttcgagcaagtgaggcacattgccactatgtggtagttaagctcttttcagaaaaactcctcaaaattcaagataaagccattcaagctgtcttaaggagtttatgtctgctgtattctctgtatggaatcagtcagaacgcgggggatttccttcaggggagcatcatgacagagcctcagattacacaagtaaaccagcgtgtaaaggagttactcactctgattcgctcagatgctgttgctttggttgatgcatttgattttcaggatgtgacacttggctctgtgcttggccgctatgatgggaatgtgtatgaaaacttgtttgagtgggctaagaactccccactgaacaaagcagaggtccacgaatcttacaagcacctgaagtcactgcagtccaagctctga

SEQ ID NO: 46945 - DNA, 375 bp, Homo Sapiens
atgacacacatgtattatctcacagtttacctgcatcaggagtccaggctaggttgctgggtgctctgcctagggtctcacaaggcagaaactgaggtgtcatttggggctgaggcttgttggcagaatttgtttttttgcagtggtacgatggaggtttctgggtttttttttctggctattaactgggggctgctttcatccctggaggtcttctactgctccctggcatgggggtcccctctacaacaacttgtctttttaaggcaggagaatccctctcccttcaactctccaacgttaagtgcttgcctcattatatcagacctgcccaggaaaatctctcttttcatgaacccaaagtcatctgattag

SEQ ID NO: 46946 - DNA, 1142 bp, Homo Sapiens
tcttccttcccttgcttcccatttggttcagaagacacatgttttgtataattgagagtagcgatagaggggtgtgttctgaaattctggttaatttccctcagggaacaaaggacagcagagagcatggcttctactcaccagaatagactgcattgctttcgtagatatgtgaactggccttgatgtctagggttatggtgtagtattcatcaaaggtgaagcaggtgctactgtaccttataaaggtggcagaagaaagctgcagactgaggcacagaaacatccccagtggctgcagcagcatgtcatggaagactgccatggtctcagtctgtttggaaagtgctaggcctggaattgggtgaaactgacaactcacctcttgtttatatgccagggcttctgggtgaagtcatacatgcagatcttctccctgccccttctgaatatacattggattctggaatttggcccaagacatcaccaggaatgaatcaccagtcaccattacctgtcaccgatgattttgcaaattgcagttttgctcaagaaagggaatgtcctgaatatggttttcttttacgcctgtcatttcagcatctgctgtttgaagaaagccattgagaagatgtgaataccagcaagtgaaattcagagttgtgtaaaatgtaaaataaacccctgaggaatgagatgtctatagggggtttgaaaagcttggacgaatccctgggaatctaaaaagccatgtgcatgtgcagggctacacacattcccaggaaagacctgaggaggccctaattactcacctctggccgaccttgaggctctgcacaagtaagaagtaaaggctaaggtagagctgtaaactgcctatctgatcactgaaggcattccccaaaacacacatgcagaagtgcttagcaaagactgggagacttgttggttccagagttattagttaaagaaattttttaaaaatctatttattagctggtcaataagcaaacagaacagagactttggtggttacacatgataaagaatacagacttcacataattaatttaggaaagtcataaaacaaacagcagcaacaacaacaataaaaaagaataacaaacagcaacaaaaacaaa

SEQ ID NO: 46947 - DNA, 558 bp, Homo Sapiens
atggagagcctgctggagaatccggtgcgcgccgtgctctacctcaaggagctcacggccatcgtgcagaaccagcagagcctcatccacacccagcgagagcgtatcgacgagctggagcggcggctggacgagctgagcgctgagaaccgcagcctgtgggagcaccagcagctgctgcaagcccagcctccgcccgggctcgtccccccgtcatcggccccgctgccggccgctccggccaccgctcctgccgccgccgccagggcccaggaacctctccaggaccagggacagcgctcagcagccgcgccgcatcccgcgcccgatcggccgccgcgtcagcaccacggacagctcctggagcagccccagcggggccctggcagcagggctcacacaccccagtcgccccacaagcatctggggacacaaggggccgtgactgacaaggagaaggagcgtcccccgagttgctgcgctgctgccggagccctccttcagcacaaatccccctccgccctcggcaagggcgtcctgagcaggagacctgagtga

SEQ ID NO: 46948 - DNA, 522 bp, Homo Sapiens
atggtcaaccccaccgtgttcttcaacatggctgtcaatgatgagcccttgtgccacgtctcctttgagctgtatgcagacaagtttccaaagacagcagaaaactttcgtgctctgagcactggagagaaaggatttggttacaagggtttctgcttttacagaattattccagggtttatgtggtttatgtgtcagggcagtgacttcacacaccataatggcactggtggcaagtccatctatggagagaaatttgatgacgagaacttcatcctgaagcatacaggtcctgaaccctcacattcccaaaccaattacttatccatggcaaatgctggacccaacacaaatggttcccagtttttcctctgcactgccaagactgagtggttggatggcacacatgtggtctttggcaaggtgaaagaaggcatcaatattgtggaggccatggagcgctttggatctaggaatggcaagaccagcaagatcaccattgttgactgtggacaactctaa

SEQ ID NO: 46949 - DNA, 447 bp, Homo Sapiens
atgtatataatggaggaagacccctcccagccctctcagtcccccagctcaaagtgcctcagttcctccatctgctcccagatcccctggcactctagacaggcatgcccatgggaaggaccctgggatggagaggcaggcttcgcggcccttcatgcctgcccactgggattccagttaactcaccccagggtgtcaggggctctgcaggatggcaagtgttggggaggagggaggcagaccactctgtgccccacgggcactgacccaccctgccataggcttcctaagggagccccccaacccctcccccccctccctggtgctgctattgaaccccctgccagctccatttctgccctggcaaccctgggcccagcaggtgggtcgtcgttgtctggccctcactgccctggccccagcccaggctgcccagtagccacgtag

SEQ ID NO: 46950 - DNA, 837 bp, Homo Sapiens
gccatgtgggtagttgaaccaaactcacctacctgcctctctgctgccttgcccaccaggagacactcccaggaatccagcaacttggagtcatcacggatgtatgacgttttggaaccgcagcagggcagaggctgtggcagctcaggaagcggcccggggaactccatcacagcctgtaagaaggttcttcgcagcaatagcctgctggagtcaacagactactggttgcagaatcagaggatgccctgccaaattggttttgtagaagacaagtctgaaaactgtgcttctgtctgctttgtgaatcttgatgtgaacaaggatgaatgcagcacagagcacctgcaacagaaactggtcaacgtttcaccagatcttccaaaacttatcagttccatgaatgtccaacaaccaaaagaaaatgaaattgttgtcctaagtgggttagcctctggaaatctccaggcagattttgaagtttcacagtgcccttggctgccagatatctgcttggtccaatgtgcaagagggaacagaccaaacagtaccaactgcatcatctttgaaatcaacaaatttctgattggtctggaactggtgcaggagcgacagctccacctggaaacaaacatcttgaaactggaggatgacacgaactgttccttatcttcaatcgaggaagactttctcaccgcttctgagcacttggaggaggaaagcgaggtggatgaatctaggaacgattatgaaaatataaatgtctcagccaatgttttggaaagtaaacagctaaagggagccacccaggtggaatggaattgcaacaaggaaaag

SEQ ID NO: 46951 - DNA, 873 bp, Homo Sapiens
ctgtgcacaaggcactcagctccatgtctagcctccagcctgaggccagtgccagaggccatttccagggacctccaaaagaccacagtgcccacaagatcagtgtcacagtcagcagtagcgaggcccagtggctcaggccaggaggtcggaggtcaaactgcagtcaagaaccaagccaaggttgaatgccacactgaggcccagagtcaagtcaagatcagaaatcacacagaggccagaggtcacacagcctcaactgccccttccaccaggaggcaggagacatcaagagagtatttgtgccctcctcgggttttaccttccagccgagattctccctcctccccaacatttatctccatccagtcggccacaaggaagcctctagagactcccagctttaagggcaaccctgatgtctcagtgaaaagcacacaactggctcaggacataggccaggccctgctccaccagaaaggtgtccaagacaaaactgggaagaaggacatcacccagtgctctgtgcaacctgaacctgcccctccctcagccagtcccctgcccagagggtggcaaaagagtgttctggagctacagacggggccagggagctcacaacactatggagccatgagaaccgtgactgaacagtatgaggaggtggaccagtttgggaacacagtcctcatgtcttccaccacagtcaccgagcaggcagagccacccaggaacccaggctcccacctcgggctccacgcctcccccttgctgaggcagttcctgcacagcccagctgggttcagcagtgacctgacagaagctgagacggtgcaggtgtcctgcagctactcccagccagctgcccagtga

SEQ ID NO: 46952 - DNA, 798 bp, Homo Sapiens
atggaagattcgatgggcatgtatgtggacatgagccccctgaggccccagaactatcttttcggttgtgaactaaaggccgacaaagattaccactttaaggtggataatgatgaaaatggacaccagttatttttaagaacagtcagtttaggggcgggtgcaaaggatgaattggacattgtcgaagaggcaatgaattacgaaggcagtccaattaaagtaacactggcaactttgaaaatgtctgtacagccaacggtttcccttggggactctgaaataacaccaccagtgatcttacggttgaagtgtggttcagggccagtgcatattagtggacagcacttagtagctgtggaggaagacgcagagtcagaagacgaagaggaggaggatgtgagactcttaagtatatctggaaagcggtctgccactggaggtggtagcaaggttccacagaaacaagtaaaacttgctggaaaagcaccagtgaagaaatctatacaagatactccaaaaaatgcacaaaagtcaaatcagaatagaaaagacaaaccatcattaacaccaagaacaaaaggacaagaatttttcaaaaaacaggaaaaaactcctaaaacaccaaaaggacctagctctgtagaagacattaaagcaaaaatgcaagcaaatgtagaaaaaggtctttcttttcccaaagtggaagccaagttcttcaattatgtgaagaactgcttccggaggatttaccaggaggctattcaagatctctggcagtggaggaagtctctttaa

SEQ ID NO: 46953 - DNA, 666 bp, Homo Sapiens
atggcttggttggaagacgtggattttctggaagacgtacctttgttggaagacatacctttgttggaagacgtacctttgttggaagacgtacctttgttggaagacacaagtaggctggaagacattaatttgatggaagacatggctttgttggaagacgtggatttgctggaagacacggatttcctggaagacctggatttttcggaagctatggatttgagggaagacaaggattttctggaagacatggatagtctggaagacatggctttgttggaagacgtggacttgctggaagacacggatttcctggaagacccggattttttggaagctatagatttaagggaagacaaggattttctggaagacatggatagtctggaagacaggccattggaagatgtggattttctggaagacatggcttttttggaagacgtagattttcaggaagacccaaattatccggaagacttggattgttgggaagacgtggattttctggaagactggttactggaagacatggattttctggaagacatggattttctggaagacgtggatcttcaggaagacatatattggctggaagacctggattttttccggaagatgtggattgactggaagacctggatttggtggaagacgtag

SEQ ID NO: 46954 - DNA, 1488 bp, Homo Sapiens
gggccgaggagcgcggcggccagagcggggccgcggaggcgacgccggggacgcccgcgcgacgagcaggtggcggcggctgcaggcttgtccagccggaagccctgagggcagctgttcccactggctctgctgaccttgtgccttggacggctgtcctcagcgaggggccgtgcacccgctcctgagcagcgccatgggcctgctggccttcctgaagacccagttcgtgctgcacctgctggtcggctttgtcttcgtggtgagtggtctggtcatcaacttcgtccagctgtgcacgctggcgctctggccggtcagcaagcagctctaccgccgcctcaactgccgcctcgcctactcactctggagccaactggtcatgctgctggagtggtggtcctgcacggagtgtacactgttcacggaccaggccacggtagagcgctttgggaaggagcacgcagtcatcatcctcaaccacaacttcgagatcgacttcctctgtgggtggaccatgtgtgagcgcttcggagtgctggggagctccaaggtcctcgctaagaaggagctgctctacgtgcccctcatcggctggacgtggtactttctggagattgtgttctgcaagcggaagtgggaggaggaccgggacaccgtggtcgaagggctgaggcgcctgtcggactaccccgagtacatgtggtttctcctgtactgcgaggggacgcgcttcacggagaccaagcaccgcgttagcatggaggtggcggctgctaaggggcttcctgtcctcaagtaccacctgctgccgcggaccaagggcttcaccaccgcagtcaagtgcctccgggggacagtcgcagctgtctatgatgtaaccctgaacttcagaggaaacaagaacccgtccctgctggggatcctctacgggaagaagtacgaggcggacatgtgcgtgaggagatttcctctggaagacatcccgctggatgaaaaggaagcagctcagtggcttcataaactgtaccaggagaaggacgcgctccaggagatatataatcagaagggcatgtttccaggggagcagtttaagcctgcccggaggccgtggaccctcctgaacttcctgtcctgggccaccattctcctgtctcccctcttcagttttgtcttgggcgtctttgccagcggatcacctctcctgatcctgactttcttggggtttgtgggagcagcttcctttggagttcgcagactgataggagtaactgagatagaaaaaggctccagctacggaaaccaagagtttaagaaaaaggaataattaatggctgtgactgaacacacgcggccctgacggtggtatccagttaactcaaaaccaacacacagagtgcaggaaaagacaattagaaactatttttcttattaactggtgactaatattaacaaaacttgagccaagagtaaagaattcagaaggcc

SEQ ID NO: 46955 - DNA, 345 bp, Homo Sapiens
aagggtagtgagaagaaaaggggctattctgatgtcaatgaagtggtgaccagaaagcacatcatcaacagtcacaagggcagccatcgagtggacctcaagaagtgtggcccttgggcactcaaagagatccagaaacttgccatgaaagagatgggaattccagatgtgcacattgacaccagaatcaacaaagctctctgggccaaaggaatgaggagtgtctcatactgtgtccacgtgaggttgtccagaaaatataacgaagatgagggttcagcaaacaagctctgtgtgttggttacctacgcatctgtcaccactttgaaaaatctacacagtcaa

SEQ ID NO: 46956 - DNA, 5637 bp, Homo Sapiens
aggtctgtttatgatggtgaagaacatggacgtttcatggagaagcttgaaactcgtatccgtaatcacgaccgagaaattgagaaaatgtgcaactttcattaccagggctttgtggactctataactgaactgctgaaagtgagaggagaagcccagaaactcaaaaatcaagtgacggatactaatagaaaactacaacatgagggaaaggaactggtaatagcaatggaagagctgaagcagtgtcgactacaacagagaaatatttctgccactgttgataaattaatgctgtgtcttccagtcctagagatgtacagcaaactgagggaccagatgaaaactaaaaggcattatcctgcactgaaaactctggaacatctagagcatacctacctgcctcaagtaagccactatcgattctgcaaggtgatggtggacaacatccccaagcttcgagaagaaataaaagatgtttctatgtccgatctcaaagactttctggagagcatccgcaaacattcagacaaaattggagagactgccatgaagcaagtagctagaagtctctcagtcttctgtctttcttccaatatacctgggaagctgcagaaaaataagaaaatgtacaaggtcaatcatttagcgaatctgaggaggagtttcaaaattgtccattttactgttagtactgtacctggggcccaagatttggtggatttctctccagtttatcgatgtctacatatatattctgtcctgggtgcccgggaaacatttgagaattactaccgaaaacagaggcgaaaacaggctcgtttggtacttcaacctccatctaacatgcatgaaactttagatggctacaggaagtattttaatcaaattgtaggcttttttgtggttgaagatcacattttacatacaacccagggcttagtaaatagagcctacattgatgaactgtgggaaatggcactttcaaaaaccatcgcagcactccgtacccactcgtcttactgttctgatccaaaccttgtgttagatttgaagaacctcattgtgctttttgctgacacacttcaggtgtatggtttccctgtaaatcagctttttgacatgctgttagaaatcagagaccaatatagtgaaactctgctaaagaagtgggcaggtattttcagaaacatacttgattctgacaactacagtcctataccagtaacaagtgaagagatgtacaaaaaggtggtaggacaattcccatttcaagatatagaactggaaaagcaaccatttccaaaaaagtttcctttctctgaatttgtgccaaaagtttacaaccaaattaaagaatttatctacgcttgtctgaagttttcagaagatcttcatctaagctcaactgaagttgatgacatgattcggaaatcaacaaacctgttgctaaccaggactctgagcaactctctgcagaatgtaattaaaaggaagaatattgggcttactgagcttgttcagattattatcaatacaacacatttggagaaatcctgtaagtacttggaagaatttatcaccaacatcactaatgtgcttccagagacagttcacactaccaagctctatggcaccacaacttttaaggatgctagacatgcagctgaagaagagatttataccaacttaaaccagaagattgaccagttcctacagctggcagactatgactggatgaccggagatttgggcaacaaagctagtgattacctggtagacctcattgcctttcttcgtagcacctttgctgtattcacacaccttcctggaaaggtggcccagacagcgtgtatgtcagcttgcaagcatttagccacatccttgatgcaacttttgttggaagctgaagtgcggcagctcaccttgggagcattacagcagttcaacttggacgtcagagaatgtgaacagtttgccagatccggcccggtgcctgggttccaggaggacacgctgcagttggccttcatcgacttgagacaacttttggatcttttcatccagtgggattggtcaacctaccttgctgactatggtcagcccaactgcaagtacctccgggtaaacccagtgactgctctgaccctgcttgagaagatgaaggatactagccgcaagaacaacatgtttgcacagtttcggaaaaatgagcgagacaagcagaaactcattgacaccgtggccaagcagctccgaggactcatcagcagccaccactcatgaagggtgaccccggacccacagaggcgacctgctgcagcctctgtgtcagtctggggtccagccccagctgaccctgcatttgtgcattcttcttcaaagagagcatatgtatttttttattaacccctgtgcagtattcacataacatttccctatagtaaaagaggcacaagaataagcaagtacatgagatgttgctaggctgggactcaggggaagttattactacactatctgtgttatcttagagatggtggtatcatcaattccacagtgatgaaccacctttcatccatggctctaaagcttaggtctggggcttaggaaccataaaaagtgggtatctggcgctgggaggtagagtgagtaagcaaaaggatactaaaatatgtcctgttcactcttggatgcccattcaccacatagatgaggctgattcttctcaatacaaggaaagggcatggcaaacattactatttagtacactaagggcagctctggagggtcatctcctcagtctgctgactttcactggcttgtgaacaagcatggcatatggcaagatgacagcttcattccaatcccccaagaatggcggtttctttagcctgatctaaccccaggcttttattgcaattttttctagggcaggatacagctaagtagacagcagtaataattggatcccatgtttaactgcatattgccccagctctaggagtgttgagtctcaactcgaagagtttttctggatcttgaaagccagttttcatggaatcagagacccaatcccttccctgttcatctcatttccttcacttacagtcagagcacttggttcaggacataaatcaacagttacttccataggccttcacagggcgtttcagacttagcctcctccagtaatgccattgaaatagttcagatttcggaagcctaaaaatggcctttaccttacccttaggtgtaacctgaggattagttgggattgttcctttatgttttaaaaccagctttttggttatcatctttaaggaaatgtcaccagctctgcactgtgggggcagccatgcctggactggatgcctctagggatggagacattgttaccataaagtcgacagagccaaccatggcttgtggcttgttgcctctggcccaactgtccttcactaaataatatcctagatattattttgttgctcaagcccaaggttcccaccctcttttgagatccccaaagccatctttggccttgtctaagaaagattgcctataatcctgtcctccaaactctaaagcctggagcagcttagcgtggaggctgcactcattgacccagatggactcctgagacttaacgcaagggctttgctatgaggtcagtcgggggaaactgtactttaagacacttcagaaagatgctactggctagtagcagaaagatggctagtggcaagagtataattgtgcatcaccaaacaatgacaaataagccacacaggcatttccagcttggattgatgggaggagagactcatcaaacagaattcttcactacctttgtcagctactgagttgcttctggggagggaagtacttccttgcccctccccaacccccctacctcaccatatcctatcatatcttgatagtcatggggaagaggatgtgcacacagacatacaaatttcctcaaagctggagagaccaggctacatgtgagctcatagatgctgctgaggctcatcctgagggctggatggttggccagggtttcagaatgagggtaagggatgagcactgccacccagaacttgataagccaagagaaggcaggagccaaaatggcatcgccaagctctcatctttgttgaaacaagtgagaaacgattatattaatctgaagttctattgcttgagaagagttcaaaacacttctctttgctagtacccagtttgcagcaagatctcttcagctttaagtgctgagagactttgaagtggaaatggagagatgtgtaagcatggcacagtgtttgtctttttagaggatcatcattgctggtctggtctcaaacctctgccttggaagaactgtgctatacaggaaaaagtgaacaaggtggaggaataggggttattctgcacagaagtcccatgaaaggaaaagcttattcaagctcaagacataaagatggaccctttgatatatcttctctccattcttagtctgccttcaccttatctaacaaaaaacaacatgcagctactgagttgtatgtagagacatactcttggtgggccagggaaggtaaaaacagggaccagcaatgtcaagtttttgaactagaaaagtgggatgtttttagttttgtctataacctgtagctgggccaacccttgagaggacttgtgcaaagcatgtgtgcccagacccatcagactcctcagatatggcctcaaatacctagagatgtagaagtaccgtggagggcctcaataagagggcaagcacacagatggctagaagcctgtatggcttctggtcaggatgaacccttggccaagttcttgaggaaaccaggtctatattcctgaagggacagttcagtttgggactctattaggtttcagtagtaatataggctgcttgcatcattttaacattcatagggaaaatctctttgagcaggctataaatgaagctgttgcaggtagggaagaacaggacctgaaaatgggaaccaggaagtgagatcctgttggcaaagggaatgtagagcttccagggtgcattgcccactgttctcattgcataccagtcctccaagtcagtctagccttactgtacacttgacaagtgcttactcagcaagtcccagacccacggccttttatctcccaagactggctttggccatgaccttcctcatcaggcctctgagcacactctctaggaactgctgcagaaattcccctaccttagcctcccttctcccaggactcctctcttgactgcaattgcctcttcttcttcttcttcttcttcctttttgttttttttttttttgcctgcattcacaattacttttcacaaaggtgttggaaatggcatttttattttacacagatagttgcacatatatagagaaaattaggaaagtccatttttaactctaaagggaacttttttctctaaaacttacttgtaaagctactgatacagatgggccgcatggttaggggaaagctcctctgtgaaaagagcatgtttattcctcttgtacattttcctcttttaactgctattaaacaagaaagcctacatacctgtttcaaaagcca

SEQ ID NO: 46957 - DNA, 240 bp, Homo Sapiens
atggcgcgatctcggctcactgcaacctctgtctcccaggttcaggaaaatggctttgtaaagaagcttgagcctaaatctggctggatgacttttctagaagttacaggaaagatctgtgaaatgctcttctgtcctgaagcaatactgttgaccagaaaggacactccatattgtgaaaccggcctaatttttctgactcttacgaaaacgattgccaacacatacttctacttttaa

SEQ ID NO: 46958 - DNA, 3060 bp, Homo Sapiens
atggggtcgaaaagaggcatatcttctaggcatcattctctcagctcctatgaaatcatgtttgcagctctctttgccatattggtagtgctctgtgctggattaattgcagtatcctgcctgacaatcaaggaatcccaacgaggtgcagcacttggacagagtcatgaagccagagcgacatttaaaataacatccggagttacatataatcctaatttgcaagacaaactctcagtggatttcaaagttcttgcttttgaccttcagcaaatgatagatgagatctttctatcaagcaatctgaagaatgaatataagaactcaagagttttacaatttgaaaatggcagcattatagtcgtatttgaccttttctttgcccagtgggtgtcagatgaaaatgtaaaagaagaactgattcaaggccttgaagcaaataaatccagccaactggtcactttccatattgatttgaacagcgttgatatcctagacaagctaacaaccaccagtcatctggcaactccaggaaatgtctcaatagagtgcctgcctggttcaagtccttgtactgatgctctaacgtgtataaaagctgatttattttgtgatggagaagtaaactgtccagatggttctgacgaagacaataaaatgtgtgccacagtttgtgatggaagatttttgttaactggatcatctgggtctttccaggctactcattatccaaaaccttctgaaacaagtgttgtctgccagtggatcatacgtgtaaaccaaggactttccattaaactgagcttcgatgattttaatacatattatacagatatattagatatttatgaaggtgtaggatcaagcaagattttaagagcttctatttgggaaactaatcctggcacaataagaattttttccaaccaagttactgccacctttcttatagaatctgatgaaagtgattatgttggctttaatgcaacatatactgcatttaacagcagtgagcttaataattatgagaaaattaattgtaactttgaggatggcttttgtttctgggtccaggatctaaatgatgataatgaatgggaaaggattcagggaagcaccttttctccttttactggacccaattttgaccacacttttggcaatgcttcaggattttacatttctaccccaactggaccaggagggagacaagaacgagtggggcttttaagcctccctttggaccccactttggagccagcttgccttagtttctggtatcatatgtatggtgaaaatgtccataaattaagcattaatatcagcaatgaccaaaatatggagaagacagttttccaaaaggaaggaaattatggagacaattggaattatggacaagtaaccctaaatgaaacagttaaatttaaggttgcttttaatgcttttaaaaacaagatcctgagtgatattgcgttggatgacattagcctaacatatgggatttgcaatgggagtctttatccagaaccaactttggtgccaactcctccaccagaacttcctacggactgtggaggaccttttgagctgtgggagccaaatacaacattcagttctacgaactttccaaacagctaccctaatctggctttctgtgtttggattttaaatgcacaaaaaggaaagaatatacaacttcattttcaagaatttgacttagaaaatattaacgatgtagttgaaataagagatggtgaagaagctgattccttgctcttagctgtgtacacagggcctggcccagtaaaggatgtgttctctaccaccaacagaatgactgtgcttctcatcactaacgatgtgttggcaagaggagggtttaaagcaaactttactactggctatcacttggggattccagagccatgcaaggcagaccattttcaatgtaaaaatggagagtgtgttccactggtgaatctctgtgacggtcatctgcactgtgaggatggctcagatgaagcagattgtgtgcgttttttcaatggcacaacgaacaacaatggtttagtgcggttcagaatccagagcatatggcatacagcttgtgctgagaactggaccacccagatttcaaatgatgtttgtcaactgctgggactagggagtggaaactcatcaaagccaatcttccctaccgatggtggaccatttgtcaaattaaacacagcacctgatggccacttaatactaacacccagtcaacagtgtttacaggattccttgattcggttacagtgtaaccataaatcttgtggaaaaaaactggcagctcaagacatcaccccaaagattgttggaggaagtaatgccaaagaaggggcctggccctgggttgtgggtctgtattatggcggccgactgctctgcggcgcatctctcgtcagcagtgactggctggtgtccgccgcacactgcgtgtatgggagaaacttagagccatccaagtggacagcaatcctaggcctgcatatgaaatcaaatctgacctctcctcaaacagtccctcgattaatagatgaaattgtcataaaccctcattacaataggcgaagaaaggacaacgacattgccatgatgcatctggaatttaaagtgaattacacagattacatacaacctatttgtttaccggaagaaaatcaagtttttcctccaggaagaaattgttctattgctggttgggggacggttgtatatcaaggtactactgcaaacatattgcaagaagctgatgttcctcttctatcaaatgagagatgccaacagcagatgccagaatataacattactgaaaatatgatatgtgcaggctatgaagaaggaggaatagattcttgtcagggggattcaggaggaccattaatgtgccaagaaaacaacaggtggttccttgctggtgtgacctcatttggatacaagtgtgccctgcctaatcgccccggagtgtatgccagggtctcaaggtttaccgaatggatacaaagttttctacattag

SEQ ID NO: 46959 - DNA, 775 bp, Homo Sapiens
gttaaagattgctgtgtattcagggtaggcaacgtagggatgtcaacacatttattaatgtttgtgatggacaccatggaagttcagcaacttcagatttcctcagaacctttggaacagacaacaaccattaagattgaaaatatgccacttgatggtgaattccagagacaacaagttcagcaagaaagattgtctttcaatcaggaatgttgtagcttcaatccaaaccaaagaaggtctgaatctcaagttgataagtggagatgttctgtacatctgggccgatgtcattgtcaacagcgttcccatgaatcttcagcttggaggaggaccactatctcgggcatttttgcagaaagctggtcccatgctccagaaagagttagatgacagaaggcgggaaacagaggaaaaagtaggtaacatattcatgacaagcggctgcaatctggactgcaaagctgtgctccatgctgtggctccatactggaataatggagcagagacttcttggcagatcatggcaaatataatcaagaaatgtttgacaactgtagaagtgctatctttctcatcaatcacatttcccatgattggaacaggaagtttgcagtttcccaaagctgtttttgctaaactaatcctttcagaagtgttcgaatacagtagcagcacaaggccgataactagccctttacaagaagtccactttctggtatatacaaatgacgatgaaggctgtcaggaggctttggctggacctaagagatga

SEQ ID NO: 46960 - DNA, 1978 bp, Homo Sapiens
gagaagataagggagcaggagaagaagatacgggagcaggaggagaagatacgagagcaggaggagatgatgcaggaacaggaagagaagatgtgggagcaggaggagaagatgtgtgagcaggaagagaagatgcaagaacaggaggagaagatgcggaggcaggaggagaagatgtgggagcaggaagtgaggctgcggcagcaggaggagaagatgcaggaacactaggagcacctggaagctgccatctaatgagcacatgacaagaaggcaaagacaataaacatgtaaaagccggcagcaaggcctggagaagagtaagccgccatgtgactgtttagaatatagtctgagcacaaacctgaaaaaaaaattttatttattttaaattgtggcaaaatactggccaggcatggtagctcacgcctgtaatcctagcaatttgggaggccgaggtaaatggatgacctgaggtcaagagttcaagaccagcctggccaatacaaaaattagccgggcatggtggcgcatgcctgtaatcccagctacttgggaggctgaggcaggagaatcgcttgaacctgggaggcagaggttgcagtgagctgagatcgtgccactgcactcaagcctggtgacagagcgaaactccgtctcaaaaaaaaaagtttcttccttacatgtatgtttctattagttttcttcttggtctttctcatttagtcttgtgttgtcttttgacattcatagtaaacttttatctgcctccagagagtattgactttgagtttatggcacacaattggagtaagggcagatcgccttcatctactttgggactaagctggttcaaagcaggttttaggttttctgatggctggtctatgttttattcatttggactcccaggggtggcccttccagggtccccaccaaggtcccatctccttcctgggacccaaattctcattaggtcatttcagccctgtgagagtgccaaacattcagctaggctctccagcctcttaactaccacttcatactcagtttcttagcctcttagccctctactgttgaccaatcaccaaatgtgggaaagcactacagactgtcaggatcacctcctaggcctggtcactcaagtcctgactgaggtctccaattaccttccaacaattgtttttgattgggggcggggcacatttttatccagtttttctaactgctcttgtggggaggcgaatccgtaacaagctcctctgcctttactgaaagttgaaaaccttcatctgtcctttttttgttgtttttgagatggagtcttgcgctgttgcccaggctctagtgcaatggcacgatctctgctcactgtaacctctgcctcctgggttcaagcaattctcctgcctcagcttcccgagtagcgtgtgccaccatgcctggctaatttttttttatacctttaatagaggcaggatttcaccatgttttccaggctggtctcgagctcctgactcaggtgatctacctgcctcagcctcccaaagtgctgggattacaagtatgagccactgcatctggcccatctgtcttttaaaacatgtttttaattggaggtataatttctgttagtgaaatgcacaggtctggtttacattttgatgagttttaactcatttaacattactatggaacccacctcctttgaagatacagagtatttctatcatccagaaagttctcctgtgctttcatgctgtcccgcactcccccagcagctgatgaacatgctgaggacattggtactggattctggccgccccaaaagagccgctttgaccaggcttacccagcactaaatccctgcctgctctctcaaaatttccatctttaaactggttgtacctataaccctccctcatcaagtcaatagataaacaaaccctgaaaaataaacaactcttcctggcccagc

SEQ ID NO: 46961 - DNA, 2655 bp, Homo Sapiens
gggaggcggcggcgctggtggctgcagctggggtgaggcgcgaggcggcgcactcgacggctgactggagcagcggtaaaggcgaggatggagaccgaaggttttaagtcaaagagtacagcagaaaatgtctactgaacggacttcttggacaagcctgtccaccattcagaaaatagccctgggccttgggatcccagccagtgcaacagttgcctatatcctataccgcaggtatagggaaagcagaggtacgcggctgacatttgttggggaagatgacattgagatagagatgcgggttccccaggaggctgtgaaactcatcattggccggcaaggagccaatattaaacaggtaaggaaacagacaggtgctcggattgatgtggacacagaggatgtaggcgatgagcgagtgctgcttatcagtggttttcctgttcaggtgtctggagccaaaattacctgtgacaaagaatcagaagggacattactactatcaagacttataaaaatctcaggaacacagaaggaagtggcagcagccaaggcaacatttgatactggagaaagtttcagaagatgaagaacttcggaagagaattgctcattctgcagaaaccagggtcccacgcaaacagccaatcagtgtgagaagagaagacatgacagagccaggtggagctggagagccagcattatggaaaaacaccagttctagcatggagccgactgcacccctggtgactcctccacccaaaggaggaggcgacatggctgtggtagtgtcaaaggaaggttcctgggagaaacctagtgatgacagctttcagaagtctgaagcccaggccatcccagagatgcccatgtttgaaatccccagtcctgacttcagttttcatgctgatgagtacctagaagtctacgtttctgcttctgagcaccctaaccacttctggatccagatcgttggctcccgcagcctgcaattggataagcttgtcaatgagatgacccagcactatgagaatagtgtgcctgaagacttgactgtgcatgtaggagacattgtagcagcacctttacctacaaatggttcctggtatcgagcccgggtcctcggcaccttggagaatgggaacttggacctctattttgttgactttggagataatggagattgcccactgaaggacctcagggctctcaggagtgacttcctaagccttccatttcaagcaatagaatgtagtctggcacggattgctccctcaggtgaccagtgggaagaggaagctttggatgagtttgatagactcactcattgtgctgactggaagcctctggtagccaagatctctagctatgtccagactgggatctcaacttggccaaagatctacttatatgatactagcaatgggaagaaacttgatattgggctagaattagtacacaaaggatacgcaattgagcttcctgaagacatagaagaaaacagagctgtcccagacatgttgaaggacatggccacagaaacagatgcctctctcagcacgttgctcactgagaccaaaaagagctctggagagataacacataccctgtcctgcctcagcttatcagaagctgcttccatgtctggtgatgataaccttgaagatgactacttactctgaagtctgggcttcagtttgctcagccatctgctttgctgtgtgagtgcagctatcatctatctgtagcaacaggaaagtaatgagggcgacagtggggcacttgctttgattccctctttcccatgccctgtcttaatatacttctctgcagctgctttcctgcagcttaacttgctctcagattgagcactttcaagctttttgtgtatttctgtctttggcaggatttggcataggaattggtgcatggaggagaggagtgtatgataaaggatccatgcagtccttcctttattacacatatagtctggcttgctgtggaccaaattaatattctcctcccatcagactacaaaaaaattggactaccacgctacaagtgtgtctcccccattccacctccggatccctccccaaccctccagtgtttgaatactgctgtgttacttccaggccgttcaacgtcaggctcagtcccctctaccagtcatgattcacattactactaggctgtatcctttttgaggctgggaaacagtcaggctttcgtcattggaagtgattctgcagacttctgactcaccttatcaggtgactctggttaaggaaagcttttgagtggtgaactcaaagactccagttgaatcaggaggcaaaggcaaaaattagcataattatatttaaaagcctcaggaagtgggaagagaatactgcctcccagcctcaattgctgatatgttattggagacaggcttttgaaactgctccagctatttctctgtaacctttagttaaaatataagtagaaaggagacaggaggctcaggaaattttctaaattgctagtataatatctatatgtatacacacatatacacccgtggagagagaggaagagtatacagtcctgtttgaatcatttggaggatttttttgctgaataaagttctcaagaaaattttctaaaaccaaa

SEQ ID NO: 46962 - DNA, 129 bp, Homo Sapiens
gggatggcagcctaccctgtggcaacgcgggagtcgcgttgccgcagggggcgcattggggtccagccgtccccagaacgcagatcagaggtagtcggacctttcccgctggcgcgcagcctcagctag

SEQ ID NO: 46963 - DNA, 636 bp, Homo Sapiens
atccctctctacctgccaacatcctgtattagagaacttgtggccggaggtgtggctgtggagagctggccggggagggacgctgctcagctgctgctctgctcctgtctcctgtcccctcccccggtcatgacagagacccgtgagccagctgagactgggggctacgccagcttggaagaagatgatgaagacctttccccaggccccgagcattcctctgattcagaatacactctctcagagccggactccgaagaggaagaagatgaggaggaggaggaagaggagaccactgacgatcctgaatatgatcctggctacaaggtgaagcagcgccttggcgggggccgtggtggcccatcccgccgggccccccgtgcagcccagcccccggcccagccttgccagctctgtggccgctcaccccttggggaggccccaccgggaaccccaccctgctgcacgggcacttcatgctgcatgcccggggtgaggtgtaggcagagcccccatacggggagcttggcagaaggggtggggtgggaggagggggctgaggaaattggggttgtgacagtggtcatgggggatggggtactgccggtctgtgttgtcttagaagtagatgtgtga

SEQ ID NO: 46964 - DNA, 1092 bp, Homo Sapiens
tttctttgccagggttcagcggattcctacacaagcaggccgtctgactccgatgtctctttggaagaggaccgggaagcaattcgacaggagagagaacagcaagcagctatccagcttgagagagcaaagtccaaacctgtagcatttgccgtgaagacaaatgtgagctactgcggcgccctggacgaggatgtgcctgttccaagcacagctatctcctttgatgctaaagactttctacatattaaagagaaatataacaatgattggtggataggaaggctggtgaaagagggctgtgaaattggcttcattccaagtccactcagattggagaacatacggatccagcaagaacaaaaaagaggacgttttcacggagggaaatcaagtggaaattcttcttcaagtcttggagaaatggtatctgggacattccgagcaactcccacatcaacagggaagagcctcctcggtggggactttgataatcatttgtcgttcaacctgagaattatgaaattagaatgttgtggctgtggagaggcatgctcaacctcaccttgtcacgcgtgtcgaatcatctttttcacggagcacattcctccttacgatgttgtaccgtcaatgcgtccggtggtgttagtggggccgtcactgaaaggttacgaggtaacagacatgatgcagaaagccctctttgatttcctgaagcacaggtttgatgggaggatttcaataacgagagtgacagctgacatttctcttgctaagaggtctgtcctaaataatcccagcaagagagcaataattgaacgttcgaacacccggtccagcttagcggaagtacaaagtgaaattgaaagaatctttgagttggcaagatctttgcaactggttgttcttgatgcagacaccatcaatcacccagcacaacttataaagacttccttagcaccaattattgttcatgtaaaagtctcatctccaaaggttttacagcggttgattaaatctagaggaaagtcacaaagtaaacacttgaatgttcaactggtggcagctgataaacttgcacaatgcccccca

SEQ ID NO: 46965 - DNA, 2064 bp, Homo Sapiens
gggaggtcgcctgcgtggggtggtgtctgtgtgtgtgcacgcacgcctgccatcaaagcagcagggctgagggggtgcagcttgctggtgttcactgggggagggcctgtgggcacacatggcagagagagtggctcacacgtcgtgaggtctcccctgtgctctggtgacccgaggaggtcgtgcagcacagcgcagaagcccctgcccacgggatccggccccccagacaccgaccccacaggccgtcccggatctcagcggacacaggcaggagcgccccatcatttgacggtgagcaggactcaggctgtgtgtcctggagctacttctcaccaactgtggtcagtgcagggggaacgaggaggtcttttgggggcctggcgagggggctgctgcagtctagggagagggggtgcagcctgggggatgttggtggacatggatgtggaggtggaaggaggaggacgttgcgtggagtggtgggaggaggcgggagccgtgtgcgagagcaggtggaaagccttgaggggcaggaccaggatgcagctggcttgtagaagagctcaggagtgagcctggcactccagagggcgcggcgggtggggaggcagcaggcaccagtccaggagagcttcgtggacgtggctcctgcgcgcacacccccaggagcacagccacgggctgcaggtgtggctggcctcagcactcagtcctcacccggagcctttgcctgctcctccttccaagagcactgaggcaccagtgggcttggcactccaccttgggcttccttttcctggagagccgccttgagggtccctcctgtgactggggtctctgcagcgagagccgcgggggttgcggagcccctgcctgggggagctggcggaatgtgagccgccggccgggggccgccacataagacctgcaaggtggtgcctggggccctggctccttctcggctgcccctgcccacccagtaacagcccccaccagctacagagcccaggcgggtgccagccacgctgggagggcagaggacagacagccccggggctgcgacttggttctgtgtctactgttagaagttgagtgggaagctgcaggcccgccaggaccactgggtccctacagagcaaaggcctgcgtgttcccaaacagccgttgcccccgtggccgtggtaggtaatccatattggatgtcataaggaccagggggatatttaaagagagaaacagaaaatatatagagatataaaattatattcacagtttatctacagatttttcgtaacaatctttcttttccagtttgatactgtaaatctatcagagcagagccgggggcacgggcacaggtgggagttgggagcaaagcggaggcccgggctgcccgccgtcccccttcatctccccacggactgtaccaggcagctgggccccgcaggacaggccgcagcgggtggccggttctgtcccgtcttggggttcttggtgtccacgtcttgtgggccgtgggcttctacctgcccttggcctgcagtgctttgctggagaagggactccctggtccccagggtggacggagccgctgtcaccgcccagagctgggccggggaagcacggtgtgttctgcttttcttttcagattgttgaaatttcattgtcatgatttaatatatggatttttttatttaagaaaaagacgagggactctttgtcacgtgggtttgttttctgtctccgtgcctccggcttcccaaagagatccaggtctttgcgtttccagggcgtggggaccccggccccctatgccgccacgccgccacaccgcctcaccctggcttctgtgctacttggcagttccatttcattatttattttttgtgctgctttttatcatgatataaattattgaaaacagatcacatgtgggcccgtgtctggccgccgccgccctgccccgtccctgcggccaccacctaatttattgccgtgcgtcctgctgctgtgactgcttttgtacctttgcaataaagaattttctggtttcagaccctt

SEQ ID NO: 46966 - DNA, 627 bp, Homo Sapiens
atgggtgaggggacctggagaggtaaggggcctggaaatggccctgacagagaacttgtgctgaccgggagaaggtggtgcggaagggcaccgcaggcattacacaggccatttctcctcctccatgtgcacgcacatccaacacacaccttccatgtgactgcttctcagccaccactttctgaccaaagagaacaggcgctccaaggagaacctgtacccctgccccagcctcgccttcctaaaaagcagtgtctggagttggctgtttcccgcctccccagctgcatgtccagcccagtgggagacagggcctctggtgcagttcccaaaatgttcctcgccctttctccgtggtcaccattcataattcatgttcgctttaatgagttacatgcttatcagccacaggccattaccacccttatggatgggtctggggggcgacattcctggccaaccccttgtaggaaggaccagataatacccaggaagcaagtagctctaattttaacttcacaggaagtctgtgcatcctccttcatttcagcagggaaaactcctgtggagtgggccctatctggggcatttacaggcttccagctgtattccatccctggaagctga

SEQ ID NO: 46967 - DNA, 676 bp, Homo Sapiens
aataaatctgttcttcagcaaccctacctgcttctccaaactgcctaaagagatccagtactgatgacgctgttcttccatctttactccctggaaactaaccacgttgtcttctttccttcaccaccacccaggagctcagagatctaagctgctttccatcttttctcccagccccaggacactgactctgtacaggatggggccgtcctcttgcctccttctcatcctaatcccccttctccagctgatcaacccggggagtactcagtgttccttagactccgttatggataagaagatcaaggatgttctcaacagtctagagtacagtccctctcctataagcaagaagctctcgtgtgctagtgtcaaaagccaaggcagaccgtcctcctgccctgctgggatggctgtcactggctgtgcttgtggctatggctgtggttcgtgggatgttcagctggaaaccacctgccactgccagtgcagtgtggtggactggaccactgcccgctgctgccacctgacctgacagggaggaggctgagaactcagttttgtgaccatgacagtaatgaaaccagggtcccaaccaagaaatctaactcaaacgtcccacttcatttgttccattcctgattcttgggtaataaagacaaactttgtacctctc

SEQ ID NO: 46968 - DNA, 1514 bp, Homo Sapiens
ctggcgcacccgcgggagcggagccgtggcgcgctcgccccggacgccggccgcccctccgctcgccctactgagcgagcggcccggggcgccgaggggtccgcgccgcgcggggcgcaccgccctggccgccatgtgctcccagctctggttcctgacggaccggcgcatccgcgaggactacccgcaggtgcagatcctgcgcgccctccggcagcgctgctccgagcaggacgtgcgcttccgggcggtgcttatggaccagatcgccgtcaccatcgtcggcggccacctcggcctccagctaaaccagaaggccctcaccactttcccggatgtggtgcttgtacgggtacccacaccctcagtgcagtcagacagtgacatcactgtcctgcgacacctggagaagctgggctgccggttggtcaatcgcccacagagcatcttaaattgcatcaacaaattctggacgttccaagaactggctggacatggggtccccatgccagacaccttctcctatggtgggcatgaagacttttcaaaaatgattgatgaagctgagcccctgggctacccagtcgtggtgaagagcacacgaggccaccggggaaaagctgtttttctggcaagagataaacatcacctctctgacatctgccatctgatccgccacgatgtgccctacctgttccagaagtacgtgaaggagtcccatggaaaggacatccgggtggtggtggtagggggccaggtcataggctctatgcttcgctgctccactgatggacggatgcagagcaactgctctctcggtggcgtgggcgtcaagtgtccgctgacagaacaaggcaagcagttggctattcaggtgtccaacatcctaggcatggacttctgtggcattgatctccttatcatggacgatggctcctttgtggtgtgtgaggcaaatgctaatgttggcttcctagcctttgaccaggcatgcaacttagatgtgggtgggatcattgcagactataccatgtccttgctgccaaataggcagactggaaagatggctgtcctcccaggactgtcgagtccaagggagaagaacgagccggatggctgtgcttcagctcagggagttgcagagagcgtctataccatcaacagtgggtctacctctagtgaaagtgagcctgaactgggagagatccgggattcctcagcaagcacaatgggggccccaccctccatgctgcccgaacctggctacaacattaacaacaggattgcttctgagttaaaacttaagtgaattcctgctttttggcagcatttaaaccaaatcctactgcttccctagtagttttgagtgaataaaatctggactaatgtgatttcatttgcacagaaactagaaatcccatctgggcactcagcattttttctaacgatgatttaagcaaatggcctagctttgtggtttttacaaagacaaatataaaaacactcaagaacaa

SEQ ID NO: 46969 - DNA, 1944 bp, Homo Sapiens
cgccaggccacgtcgcggttggtggtcggagagggcgaggggtcccagggggcttcggggcctgcagccaccatgctccgctccctgctgcttcactccttgaggctctgcgcccagaccgcctcgtgcctcgtgctcttcccgcgcttcctcggcacggccttcatgctctggcttctcgatttcttgtgtatccgcaagcatttcctgggccgccgccgccgggggcagcccgagcccgaagtggagctcaacagtgaaggcgaggaggtgcctcccgatgacccgcccatctgcgtgtccgacgacaaccgcctgtgcaccctggcgtcgctcaaggcggtgtggcatggccagaagttggatttcttcaagcaggcgcacgagggcggtccggcgcccaactccgaggtggttctgcccgacggcttccagagccagcacatcctcgactacgcgcaagggaaccgcccgctggttctcaatttcggcagctgcccaccgttcatggcgcgcatgagcgccttccagcgcctggtcactaagtaccagcgcgacgtcgacttcctcatcatctacatcgaggaagcgcacccctccgacggctgggtcaccacggactctccctacatcatcccacagcaccggagcctggaggaccgggtcagcgcagcgagggtactgcagcaaggtgcacccggctgcgctctggtcctcgacaccatggccaactccagcagctcggcctatggcgcctacttcgagcgtctctatgtcatccagagtggcactattatgtaccagggcggccgtggccccgacggctaccaggtctctgagctgcgcacttggttggaacgctatgatgagcaactgcacggcgctcggccccggagggtgtaaacatccaacggacaattgactgaacttggtgggctgggccttcgagccttcgaagcccacgtgcaagcgcctcaaaccaagtcacgcttggcgaggccccagtgacactgatgtgctgagccaccatttcagactgagtctgcaccctcagccacatgaacaatctcccctacctccctgggactctgcttctgtaactgtctcattcacacctgcctggctcactggaaatcctcttttgagcgcgggatatggcttgcccttgtccgtgtgcccccaggactttgcctctacagcattttcttacaccccctccccagcgtgccctcagccaagtgctttggcccggtgcttcccgcagctgcacagagaccttggccacgcccgcgcgccctgagcgcagctgggttccaggagactctcagctcagctgagctagttgcctggcacccacctgtcgcgcgcggagagggggttccctgttgcttttgtgtctgtttcctgtccctggtaggggaagtgatgtcgtggatggggaggggtgggcagggtagtttcccccgcttgttttgggtgcacaggagccccactgctgatgacgaactatctctaactggtcttgaccacgagctagttctgaattgcaggggcctcaaagcagcacctaaaccttgagggggagggtgctctgggtttccgtgaggtaaccaccttaaatgggagggaagttggggtgtctgctttgggaccagaggaagatagcttgagaggcattggcgaggttcgcagcgccccagggagagagaaaaagctgagactcctggggaatgacgttggggtgatggagtccggggaaagagaggtggggggagagcctgaggtccccaagtgaggggagtcctaggcagagctgctgattgtggggctgggaggtggagggcccctgattcgaaggccatttggtgagtgttttgctggaaatatttcctgtatataaacttctttcaatctacaataataaaggcttgaggtaaactgctt

SEQ ID NO: 46970 - DNA, 297 bp, Homo Sapiens
atgagtgccgatgaccacgttttaaaggagaaagagagctcctggtggggccctcggggtggtctcaggtcccatttgcagtctgcaacagtgacgcgcagcccggtccggagcgtggtgagctttgtttgccttctgggtcagctttcgctgtgtctcctgtgtgtgttagaatccagagcccagaggaagtgcaagcgggtcctccgccaacggggagagcctcttcgcggcgctgttggcgacagcagcgctgtgattcgcgtagcaggggagttgtttgaaacaccttcctga

SEQ ID NO: 46971 - DNA, 495 bp, Homo Sapiens
atgtctgtggatcccctatccagcaaagctctaaagatcaagcgagagctgagcgagaacacgccgcacctgtcggacgaggcgctgatggggctgtcggtgcgcgagctgaaccggcatctgcgcgggctctccgccgaggaggtgacacggctcaagcagcggcgccgcacactcaaaaaccgtggctacgccgccagctgccgcgtgaagcgcgtgtgccagaaggaggagctgcagaagcagaagtcggagctggagcgcgaggtggacaagctggcgcgcgagaacgccgccatgcgcctggagctcgacgcgctgcgcggcaagtgcgaggcgctgcagggcttcgcgcgctccgtggccgccgcccgcgggcccgccacgctcgtggcgccggccagcgtcatcaccatcgtcaagtccaccccgggctcggggtctggccccgcccacggcccggaccccgcccacggcccggcctcctgctcctag

SEQ ID NO: 46972 - DNA, 720 bp, Homo Sapiens
atggtgctgctgctggtgatcctcatcccggtgctggtgagctcggccggcacgtcggcgcactacgagatgctgggcacctgccgcatggtctgcgacccctacgggggcaccaaggcgcccagcaccgctgccacgcccgaccgcggcctcatgcagtccctgcccaccttcatccagggccccaaaggcgaggccggcaggcccgggaaggcgggtccgcgcgggccccccggagagcccgggccacccggccccatggggcccccgggcgagaagggcgagccgggccgccaaggcctcgccgccacctacagcacggtgcccaagatcgccttctacgccggcctcaagcggcagcatgaaggctacgaggtgctcaagttcgacgacgtggtcaccaacctcggaaaccactacgaccccaccaccggcaagttcacctgctccatcccgggcatctacttcttcacctaccacgtcctgatgcgcggaggggacggcaccagcatgtgggctgatctctgcaaaaacaaccaggtgcgtgctagtgcaattgcccaagatgctgatcagaattacgactatgccagtaacagtgtggttcttcatttggagccgggagatgaagtctatatcaaattagatggcgggaaagcccatggaggaaacaacaacaaatacagcacgttttctggatttattatttatgctgactga

SEQ ID NO: 46973 - DNA, 213 bp, Homo Sapiens
atggatgtaaccacaaccttcactaggattggcaagtttgagtccaggttcctccatttggcctttgaagaagagttcagaagagtcaaggggcactttggacctatcaacagtgttgccttccatcctgatggcaagagctacagcagtggcagtgaggatggttacataatctactacttcaacctacagtactttgaatttttttttcaa

SEQ ID NO: 46974 - DNA, 1764 bp, Homo Sapiens
ctcgcctttctcgcacctgctcctgcgccaggcccggagacccccggggcggcttcccagaacctgcggagcacaactggccgaccgacccattcattgggaaccccgtcttttgccagagcccacgtcccctgccacctctagctcggagcggcgtgtagcgccatggagaagagcaacgagaccaacggctaccttgacagcgctcaggcggggcctgcggccgggcccggagctccggggaccgcggcgggacgcgcacggcgttgcgcgggcttcctgcggcgccaagcgctggtgctgctcaccgtgtccggggtgctggcgggcgcgggcctgggcgcggcgttgcgcgggctcagcctgagccgcacgcaggtcacctacctggccttccccggcgagatgctgctccgcatgctgcgcatgatcatcctgccgctggtggtctgcagcctggtgtcgggcgccgcctcgctcgatgccagctgcctcgggcgtctgggcggcatcgctgtcgcctactttggcctcaccacactgagtgcctcggcgctcgccgtggccttggcgttcatcatcaagccaggatccggtgcgcagacccttcagtccagcgacctggggctggaggactcggggcctcctcctgtccccaaagagacggtggactctttcctcgacctggccagaaacctgtttccctccaatcttgtggttgcagctttccgtacgtatgcaaccgattataaagtcgtgacccagaacagcagctctggaaatgtaacccatgaaaagatccccataggcactgagatagaagggatgaacattttaggattggtcctgtttgctctggtgttaggagtggccttaaagaaactaggctccgaaggagaagacctcatccgtttcttcaattccctcaacgaggcgacgatggtgctggtgtcctggattatgtggtacgtacctgtgggcatcatgttccttgttggaagcaagatcgtggaaatgaaagacatcatcgtgctggtgaccagcctggggaaatacatcttcgcatctatattgggccatgttattcatggaggaattgttctgccacttatttattttgttttcacacgaaaaaacccattcagattcctcctgggcctcctcgccccatttgcgacagcatttgctacctgctccagctcagcgacccttccctctatgatgaagtgcattgaagagaacaatggtgtggacaagaggatcagcaggtttattctccccatcggggccaccgtgaacatggacggagcagccatcttccagtgtgtggccgcggtgttcattgcgcaactcaacaacgtagagctcaacgcaggacagattttcaccattctagtgactgccacagcgtccagtgttggagcagcaggcgtgccagctggaggggtcctcaccattgccattatcctggaggccattgggctgcctactcatgacctgcctctgatcctggctgtggactggattgtggaccggaccaccacggtggtgaatgtggaaggggatgccctgggtgcaggcattctccaccacctgaatcagaaggcaacaaagaaaggcgagcaggaacttgctgaggtgaaagtggaagccatccccaactgcaagtctgaggaggagacatcgcccctggtgacacaccagaaccccgctggccccgtggccagtgccccagaactggaatccaaggagtcggttctgtga

SEQ ID NO: 46975 - DNA, 1891 bp, Homo Sapiens
atgcccctgtcccgcaggggaaggggatcccgcctggccggctctcgagcggcgactagtaacctcccgcgggcgacagccctctccccaaagcacgcgcaactcctcacccggcggcgccattcctccgagcaggtcccgccggagtccgagccgcgggctgacttccgctcgggaaagtggctccaagagcccgccacaggggacgccagggactcgcggcaggctctgcgggccaggatgagttctaagcacaggatctgtagtcaggaagaagtagtgatcccctgtgcctatgacagtgattcagaaagtgtggatttggagctgagcaacttagagattattaaaaaaggctcaagtagcattgaactgacagacttggacatccctgacatccctggactccattgtgagcccctgtcacatagccccagacacctgacccaacaggacccgctcagtgaggccattgttgagaaactgatccagtccatccagaaggttttcaatggtgagctaaagggtgaacttgaaaagctgaaattcctaggagatctgtcttctctcagccaagctttaccttatgatgaaaccgcaaaatcattcattcacagccacatagcagacattgtgcataccttaaatgtactggtacaagaggaacgcccgcattctctgtccagttccatgcgccaggaggtctttgtcaccatcgctgatctcagttaccaagatgtccatttgctgttgggctctgaagatcgagctgagttgttcagtcttaccatcaagagtataatcactctgccctctgtaaggacccttacccagatacaggaaatcatgcccaatgggacctgcaacacagagtgtctttacaggcagacgtttcaggcattctctgagatgctccagagtttggtggtaaaagacccacatttggaaaatcttgacaccattattaagcttccactgcgattccaaagacttggacacctagtggctctgatggcactgctctgtggggacccacaggaaaaggtggctgaggaggctgcagagggcattcactccctgctgcatatcaccctgaggctgaagtatatcactcatgacaagaaagatcagcaaaacttgaaaagagcattgacaaaatgtcgagaattcctggagctccacagctctgccgctaaatgcttctacaactgtcccttcagaattgcccaggtctttgaaggttttcttgattcaaatgagctctgccagtttataatgactacatttgataccctgaaaaccctgaaacatccctgcatccagcgatcagcaggagaattactgctaactttggcaaaaaatacagagtcccaatttgagaaggtgccagaaattatgggagttatctgtgcccagttatccataatcagccagcctagagtccgccaacaaatcataaataccgtgagtttatttatatccagacccaagtacacagatatagtgctcagcttccttctgtgtcatccagtgccgtataacaggcacctggctgaggtgtggagaatgctgtcggtggagcttcccagcacgacctggattctgtggaggctcctgaggaagctgcagaaatgccataatgagcctgcacaggagaagatggcatatgtggctgtggctgtaagcccttgagctttgcccctctaatgtcagcccctcccaggatgactgaccccacaccccagtggagagtgttccttttggtccctctcaaagcctgcatctgtcatccatttataagtctacagtgtttctgccaagggattgacatggagggagctggggagagtgaaggagtcagaatgccttaatacaaactcgtccaacctgc

SEQ ID NO: 46976 - DNA, 531 bp, Homo Sapiens
ctctcttgttccctgggctgtctcctccgcttgctttctggctctaccatgccctgctctgaagagacacctgccatttccctcaagaagcaggccagccctgcggaggagagtggcatgcagccccactttgcctggctccctgagcacaccgcagactcaactcagggatccacagggaccacagactatgacctatacagtgcctattattatacaatactacctatggacaaagttcttgtgaaaacagacatccagatatgtcttgcatgtggatgttatggaatagttgctctatggtctggcttggctgcaaaacactttatagatgtaggagctggtgtcataaaagactacagaggaaattttggtgatataatgtttaattttggcaaagaaaagtttgaagtcaaaaaaatgattggattgcacagctcatttatgaatgaattttttatacataaagagattcaagacttggatgatactgaagggggttcaggagattttggtttcactggaaaaaat

SEQ ID NO: 46977 - DNA, 1298 bp, Homo Sapiens
ggtgccgcaccggccgcgggcgcagggagtattatgggctgtgggtgccgctgagcaagatggagctgtctgcagtgggcgagcgggtcttcgcggccgaatccatcatcaaacggcggatccgaaagggacgcatcgagtacctggtgaaatggaaggggtgggcgatcaagtacagcacttgggagcccgaggagaacatcctggactcgcggctcattgcagccttcgaacaaaaggagagggagcgtgagctgtatgggcccaagaagaggggacccaaacccaaaactttcctcctgaaggcgcgggcccaggccgaggccctccgcatcagtgatgtgcatttctctgtcaagccgagcgccagtgcctcctcgcccaagctgcactccagcgcagccgtgcaccggctcaagaaggacatccgccgctgccaccgtatgtcccgccgtcccctgccccgcccggacccgcaggggggcagccccggactgcgcccgcccatttcgcccttctcggagacggtgcgcatcatcaaccgcaaggtgaagccgcgggagcccaagcggaaccgcatcatcctgaacctgaaggtgatcgacaagggcgctggcggcgggggcgccgggcagggggccggggcgctggcccgccccaaagtcccctcgcggaaccgcgttataggcaagagcaagaagttcagcgagagcgtcctgcgtacacagatccgccacatgaagttcggcgcctttgcgctgtacaagcctccgcccgcccccctggtagccccgtcccccggcaaggctgaggcctcagccccgggccctgggctacttctggccgcccccgccgccccctacgacgcccgcagctctggctcctccggctgcccctcgcctacaccacagtcctctgaccccgacgacacgccccccaagctcctccccgagaccgtgagcccatccgcccccagctggcgcgagccggaggtgctcgacctgtccctccctcccgagtcggcagccaccagcaagcgggcaccgcctgaggtcacagctgctgccggcccggcacctcccacggcccctgagcccgccggtgcctcctccgagcccgaggctggggactggcgccccgagatgtcaccctgctccaatgtggtcgtcaccgatgtcaccagcaacctcctgacggtcacaatcaaggaattctgcaaccctgaggatttcgagaaggtggctgctggggtagcaggcgccgctgggggcggtggcagcattggggcgagcaagtga

SEQ ID NO: 46978 - DNA, 2230 bp, Homo Sapiens
gttgtccaaagtcattccggctccaaagggcgaattctcttttcgccatctctcccagccctggaacagcttagggtccctctcgaagagcacagcgccagcccagaccccatacacccaccgtccctggcacccgaacgcgctgcgagccccgggcctcccacaggagcggagacgcgggtccctgcgcctcacgccggaacggacccgtcagagccgccgagccccgcacctggaagctgggaggccgcgaggacggagaatcgaggcggagacccagcccagcgcccgcgcagctcggtgccctcccgccagtgcccgcactcgggtcacaccgcttgctctcgggagaagccccaaggctcgcggtgcaccgagaggcgcccgggctggagcgccccggccgtgttggccacggagttcttcagctgcttgatgaccacgaagagcaggaggaaaagtaagaagagcaggaagaagaagagcgccaggtagagcagcaagttgagttcccactccatgctggaggcgccggcgctcgctggccctgcgcgctcggcgcgggctgcagctggagggcgagcgcgccgcccgcacacccacctcccgcactcccgcccctcgcgagggcgtcccgctatgggcgccgactccggggtccgtgctttgcctcccccggctccgaggaaacgcgccaaggagctgaggaaatccggcgcagactctcccagctggcaccaaagccttccgcttcgccgagatcctctcaggtgctcttgaggacgcgagcgacttccctaggagcgaacttccgcgggcacggacgccagaagaggtaacagctcagtcttccaggggaggtcgggactggtgttttgtaaatgatttaaaagttccacccccaacatccagtagggtccctagctccgctgcgttcccaattaatttatttcgttatatccctccgttcctgctttccgaaaggacaggggatgtcatggcccagagacccaaaagaatgaaaggtggcagtgaagatggggtctgaaaggctatgagatgatttcgtgctatgaggtgtctgagtgaattccagttcgagctgtcttgctcttcagagtagcagatacattcagtgttgagtgtacttttctatggacaacaggtcacttggaaacgcattaagaatacaatgtatttcagaagttatatagcacaaagatttcaaatattggcctcaaattcagtttatttggtgaaaagaggaaaacaagtttactcaaagtgtttcttgagtccctaaagcctttctgtatctggttgacgtgacccaaagcccatatcgcgcagctttaaaagctgttcagtgtatctattactgcagaacaaattacccccaaatttagtggcttcaaacagcataaacattgatcatctctcacagtttctgtgggtccgaaatgtgggagcactggctgggtgattctggtgtcgggttactcatgaggctccgttcagatgtcagccaggtctgccttcagctgaatgcttgtgtagaggtggaggatccacttccagggtggctcactcactgcttgccaggtagggctggttgttggtgggaggcctcagttcccttccatgggtgcttccaatacagctgcgggattcccccagaacaagtgatgaaagaaaacaaagcagaggctgcagtgctctttaccgccagcttcagaagtcacgtgccatcagatctgtaatatcctactggtcacacaggtcagccctattcagggtaggagtccaaggacacgaacgccaaggagtaaggatcactggggctcatcttagagtcggctatgacagctgttaatacagccagctatcattgcccatttgtaggcctaactttattttattctttatttgtgaagatgcagaattgcctcctggactgaattctggggatgagggctgacaacatcccagattgtaataagtggctgctccagggatgacaggggttcaaagagacagggtggtatgaaaacagtctgtgaactgcaagtctcatggacccgattctagtgtcagctctgtcagtggtcacttttgctcagtgactctcagtcccctcatctgtaacatgccttgcttatctttcccttggatttgttgtgaggctcaaaaatgagaaaatgttaaataaaaatgtgttttgctatataaa

SEQ ID NO: 46979 - DNA, 417 bp, Homo Sapiens
atgtgggtatatgtgtgttgtgtatgtatgtgtagatggtgtttgtgtatgtgtgtatatatatatgtgcgtgtgtgtgcctgtgtgtgtatgtgtgtatatgtatgtgtgtatgtgcgtatttgtgtgttgtgtatttgtgtgtttgtgtgtgtctgtgtatttgtgtgtgcgcatatgtgttcatgtgtatttgtgtatgtgtgtatttgtgtgtgtttgtatgtttgtgtatttgtgtgtgtatgtatgtgtgtgtatttgtgtgtttgtgtgtatgtgtttgtgtgtgtgcatatgtgtttgtgtgtgtgtgtgtgtgtatcctctcatttagtcctcacaatgacctgccgaggaagttctgttattaaccccactctgctcagcacgcggcccaggccatgccaacgctaa

SEQ ID NO: 46980 - DNA, 1814 bp, Homo Sapiens
agtgcctggcaacctagaccagtcagggacgcggcaggaaatggaagagcctccgcaagaggctctggctgaacccttgaaacatgaaagcccagccgctccctcaagtgctggccacactaagggccaggaagaagacgaccagaagaaccaggccgaaaggaaggcagataaccacactgctcacagaatagctgaccagactgccctaagagtgcctagccaggctgaatccagcatatttagccaagctaccaacggagtagctgaacaaaatgggcatagtacacctggtcaggctggccgcagagcatccaaccctgctgatgtttctgaccttagagcagatgatcaggttaatcaaacaccgtctgaacagactaaaggcaaggcatctagccaagctaataatgtacagcatgaacagagtgatggtcaggtgtctggcctgacggaggaaagaactgctgaacagactgaacgaagattacctacccaggctgagagaagaacttctgggcagattgatggtagactggctatgccatctgaccagagaggttccagacagaccgaccacagaatggcaggccagtctgagagaagagcttccgagcagatggaccgcagaatgtctggcgaggctgagcgaagaacttctgagcagattacacacagattatccaaactatctgagagaagaccttctgtgcagattgacagtgggtcatccgtcccatctgaccaaagtccttctgtacagattgacagtggatcgtccgtaccatctgaccaaagaccttccgtacagattgaccgcagaatgtcagggaaagttaggagaagaagttctgagaagactgactacagattggctggcctggctgacccaggaacttctgagcagactgacctcagattgtatggcctcgttgaccacaaaacatctgtaaagactcaccaccaagtgtacggccaagccactgaactagctgaacaccaggctattgaccaagctcatagtaatgctgatcaacctccagttgacaatgctcactacactgaatctgaccagactgaccacttagcagacagacaagctaatcataaagaccagctgtcttactatgaaacacgtggccagtctgaagacagaatatttccccagttaggcaacagcaaagaggacaaagaggctgactacagagtacaaccctgcaaatttgaggatagccaagtagacctcaattccaagccttcagttgaaatggaaactcagaatgcaaccactatcccaccctacaacccagttgatgccagattcaccagtaacttccaagcaaaagaccaagctcttttcccaagactcccctccatctcatccaaattgaactataccagcagtcaagaaaaaactcaagccatagtaaccaaatctgatgaattttcagaaattgaccaaggaaagggttatcatatacgcaatcaaacttatagaaggttcccttctatagtttatgaagatccttaccaagtttcactccaatacatggaaaaacaccacattctgcaaatattccagcagattactgaaaacttagtctatgaaaagccagaggaccccctgaattttatgctgtgccaggtatagaattggagaaaaagaacaacctttttattctctttattgtaaaatacagcacacatacagcaaagtgtatagaacaaagtacgtacaactctgaattcttatgaagtaaacatacctgtaactaccattcaagtttttaaaaaataaataaaacataaccagc

SEQ ID NO: 46981 - DNA, 363 bp, Homo Sapiens
atggcagcaggaggcatggagggcctgaagactgagggccgggctgccagtcccggaccagagtggggaatacttctgcctcttccgggcctgccccttcctgcccatgggccaatccacaggcacttcctcccttctgaggcctgtaaaagtcctgggcttagtcagacaaaggcagaggaccaccagaagttaagggaggcagagagagatgtctttggcagggacgaccagctgcagagagcagtaccttctctgctgatagctgggatgaccagctgcagagaggagtattcgaggagtacccactctgctgagaactgcagagacgatctgccagcagagaggagctaccctctctga

SEQ ID NO: 46982 - DNA, 171 bp, Homo Sapiens
atgatcctagaaagtgggagaaagaaaggaggtagtggaaggcctaggaaagagccagggcagtctattgaaaaggatataagaagcctttctctacaatgcaagtgttgtgaagacaggtctttatgggctatttcaaccccacccccaattgtcatattacatggttag

SEQ ID NO: 46983 - DNA, 2287 bp, Homo Sapiens
cgcagccactgaaccacaagcagcttcgcgttaactggagtgcctgggagtcgcgtgccaggagccgcacggccagggactgactgacagacagacacgcaccaccaccacaacacacgagacccgggcgggccgccgccgccgccgccggggctcttggcaaactcgccggtcgcagaggtcccccgcggagctgcgccacagtagcgccgggcttgcagctttcacgccgggcgaaggacccggcgctgcgctcgcagctgcgcggagattcccggcacaggccaaagtcacagcaacgctgaggcacagttagagccaactaagatgttcgtcaaatccgagaccttggagttgaaggaggaagaggacgtgttagtgctgctcggatcggcctcccccgccttggcggccctgaccccgctgtcatccagcgccgacgaagaagaggaggaggagccgggcgcgtcaggcggggcgcgtcggcagcgcggggctgaggccgggcagggggcgcggggcggcgtggctgcgggtgcggagggctgccggcccgcacggctgctgggtctggtacacgattgcaaacggcgcccttcccgggcgcgggccgtctcccgaggcgccaagacggccgagacggtgcagcgcatcaagaagacccgtagactgaaggccaacaaccgcgagcgaaaccgcatgcacaacctcaacgcggcactggacgcgctgcgcgaggtgctccccacgttccccgaggacgccaagctcaccaagatcgagaccctgcgcttcgcccacaactacatctgggcactcaccgagaccctgcgcctggcggatcactgcgggggcggcggcgggggcctgccgggggcgctcttctccgaggcagtgttgctgagcccgggaggagccagcgccgccctgagcagcagcggagacagcccctcgcccgcctccacgtggagttgcaccaacagccccgcgccgtcctcctccgtgtcctccaattccacctccccctacagctgcactttatcgcccgccagcccggccgggtcagacatggactattggcagcccccacctcccgacaagcaccgctatgcacctcacctccccatagccagggattgtatctagagctgccatttctgctacccacgccaggccttagtgggttccctttcctgtccccagtcgagccctcctcccttcccctgcccctcctttccacgccctggaaaccatctcacttcacagggcaggtgtagcctttctgattcctcggttgtttcttgcatttcttggctttgggtatccttcattcagacgggctctgatttactgaaggtgtgatggagcttattgtcaaagccaagggtggcgttttgggggcgcttcttgagacgaaaaagaccctgggaagagatgatggtggcatatctaaagagtttgcagagcggactgacgctcctcccctttctctttaacgccgaaggacttggtgcagttcgtgtgaatctcacagggggaatgcaactggttcctgtgatctcttcacctttgcttctacatagagatgttaatgtcgagtagaaagaaatgtatcttagcatctgaatgattttgctggtaataatattatccacagatttgcaatggctggcatctgctttattcccattgctgtctgcaggctgtgggaatttcacctgtcaaaccaaacttccctctctgatgtgcactttgttctgtttcccagattcgtcacaatgcctattgtcctgtccttctctttcctttttcttccccattttgccatctgtctcttatgatttataaggggaaaaaaacttgttttgttagaggggcaggttagaagtcattgtataatttgtaggctttgtaatgattgaatgcaagcgtggaaatttaggctgaactctctatcaaaaggaaaaatgtggaggaaaagggaaaaatcaggagggaggattgcctcatgtattatttatttcgaccttttaggggagaaggaactcccccattctttcaagagattaaaaataaatcaacagtctgaaaacctaagcagacacggagcattatccggatcagccacacacgtgttcccttctatttattataaagaaatttttcatgggaaaatatgtattttttgtatattctacagagtttattctagtatgtatttacatcttgaagaacaagaaagttgttcttgtgattaaactataaataaactatctaattttcataa

SEQ ID NO: 46984 - DNA, 477 bp, Homo Sapiens
atgacaaacacaaagggaaaaaggagaggcacccgatatatgttctctaggccttttagaaaacatggagttgttcctttggccacatatatgcgaatctataagaaaggtgatattgtagacatcaagggaatgggtactgttcaaaaaggaatgccccacaagtgttaccatggcaaaactggaagagtctacaatgttacccagcatgctgttggcattgttgtaaacaaacaagttaagggcaagattcttgccaagagaattaatgtgcgtattgagcacattaagcactctaagagccgagatagcttcctgaaacgtgtgaaggaaaatgatcagaaaaagaaagaagccaaagagaaaggtacctgggttcaactaaagcgccagcctgctccacccagagtagcacactttgtgagaaccaatgggaaggagcctgagctgctggaacctattccctatgaattcatg

SEQ ID NO: 46985 - DNA, 588 bp, Homo Sapiens
atggcagtgagccaaggagacgggaccctctgctttgtcctcctgctgtgctgttggcaagaaactgagctccggccgagaaccgtgattccaggttcacctactgaaataccattcagttcaaaacaggaggatatgtctgaattattagatgaaattctggtccaggagattttagatctgaataaaacaacaccgagcgaaatgccaagtacagcatcaacattatcaacaccgttacatgctggtattgatgagaattatcaagctggtggttctgagaattaccatgaattattagagaatttacaattctctcctggcattgaggtcaaaatttccaatgatgaagccaatgctaatgcaaatctccatggcgatccttctgagaattatcgtgggccacaggtgtctcctggcagtgagaagagtgtttccagtaaagaaaagaattcaaagaacactcagtatgaaaatctatccattctggaccaaatccttcaaaatattggaagatcttcaggaaacattttccataaagagcagcagaggaccagcgcacagaggaggagccaaggcagtcagtga

SEQ ID NO: 46986 - DNA, 537 bp, Homo Sapiens
ctctcatcacttctgagcacggagcaatggcctctcgctgggctgtgcagctgctgctcgtggcagcctggagcatgggctgtggtgaggccctcaagtgctacacctgcaaggagcccatgaccagtgcttcctgcaggaccattacccgctgcaagccagaggacacagcctgcatgaccacgctggtgacggtggaggcagagtaccccttcaaccagagccccgtggtgacccgctcctgctccagctcctgtgtggccaccgaccccgacagcatcggggccgcccacctgatcttctgctgcttccgagacctctgcaactcggaactctgaacccagggcggcagggcggaaggtgctcctcaggcacctcctctctgacggggcctggctccacctgtgatcacctccccctgcttcctgctgctgtggcacagctcactcatggggtctgaggggagagaagcacaccaggggcgccctctgccttccataccccacgcttataaaacataactaagccaagagtgga

SEQ ID NO: 46987 - DNA, 588 bp, Homo Sapiens
ccggctgaggtgcacgggagcccgccggactctctctgcccatgtctgtctgtgaaattctggccgggtctccccgtgatggccctcccgacaccttcggacagcaccctccctgcggttgcccagggacggggaaggcgaaggagactcgtttggaacctgagccaaagcgaggcccttcgagcctgctttgagcggaacacatactcgggcatcaccaccagagaacggctgacccaggccatcggcattccggagcccactgtccaaattcggtttcagaatgagagatcacgccagctgaggcagcagcaacgggaatctcggccctggcccaggacacgcggcctgcaagaaggcaggcgaaagcggaccgccgtcaccggatcccagaacgccctgctcctacgagcctttgagaaggatcgctttccaggcataactgccagggaagagctggccagagagacgagccacccggagtccaggattcagatcaggtttcagaatcgaagggacaggcacccgggacagactggcagggtgcctgcgcaggcaggcggcctgtgcaacgcggcccccggcggc

SEQ ID NO: 46988 - DNA, 902 bp, Homo Sapiens
atgagtccatcagcaaagaagaggcccaagaacagcagggtttccaagatgcaagatgagaaactgcgggacgagacagagcagcctgtgagcaaagtaattgagcggaaccgtctgagaacggtgttaaaaaacttgtcgctcttgaagctactcaagagctcaaaccgccggatccaagaactgcataagctggccaaaaggtgttggcattcactgctcagtgttccaaagattctccgcatctcctctggggaaaacagtgcctgcaataaaacaaaacaaaataatgaagagttccaggagatcgggtgctccgagaaggaactcaagtccaagaaattagagtccacaggggaccctaagaaaaaagagtacaaggagtggaagtcccaggtgcagtcagggatgaggaacaaggagaaaacgtcattggcggcaatgccacggaaagaaaagcatatagagcctgaggttccaaggacatcgagggatgatagcttgaaccctggagtccaggggaggcaaccactcaccgagggcccccgagtcatcttcattaagccctaccgcaatagaactcccatggggcacatgaagcagctggatgtagccgaccagtggatctggtttgaggggctgcccacacgaatccacctcccggcgcccagggtgatgtgcagatcctccaccctgcgttgggtcaagcgccgctgcacccgcttctgctccgcatcacttgaaatgcctatgtggcatccatacaaggttgatgtgacctggacgagagccagaggtgcgagcagagggtggagatcgcgccatcagctgaaggggaggaatgggtggcgaaattcacgagtctacaaataagatcttccatatggcacctaagacgaata

SEQ ID NO: 46989 - DNA, 396 bp, Homo Sapiens
atgctggtggtgggtgcagggccgctgggagctgctgcatggttcccagaggctggaggcaggtgccaactgaagctgctggggcagcatgggcaggatgttctgcacacaaaccttggagaagaagatgtgtgcatagcaggtccactgctgccctgccctgactcccagccctgcctgaccccacctcaacctgctcaggctctggcacaaccctggctgccctgccactgcctctgccccagagttggggccttgacagcctggttggaaggggacaccccagccctgcctcaacacctgggggtctccataactagcacaggcaggtgggcaaccccaaagatcccaggactcacagtaccccctgagaacatggacagtatgtgggggtag

SEQ ID NO: 46990 - DNA, 1005 bp, Homo Sapiens
atggacttatcaacagtaataactaaaattgataaacataattacctgactgcaaaggatttcctgaaagatattgacctcatctgtagcaatgctttagagtataatccagataaggacccaggagataaaataattaggcacagggcttgtaccctgaaggacactgcacatgctatcattgcagctgaattagatccagaatttaataaactttgtgaggaaattaaggaagcaagaataaaaagagagctaagtagtttttgtgtgttacatcagcatgggtttactttcttttgggtcctgtttaataaacataaattggtattgcattccaagttctacatatcttttttccttccttgtaaaacagttcgggttcggagaaaatcaaggcggagatcacagtggggtaaaggaattattaagaaaaggaaagttaataatttaaaaaaagatgaagaagacaccaaatttgcagactatgagaaccatacggaggacaggaaattattagagaatggagagtttgaggtaagcactgactgccatgaggaaaatggagaagagactggagacttatctatgaccaatgatgaatcatcctgtgacatcatggacttggaccaggggcagaggcttaacaatggagcaggcacaaaagagaactttgcatctactgaggaggaaagttcaaatgaatctctactggtcaacagcagcagttccttaaacccggagcagacctccaggaaagagactttccttaaaggaaattgtctaaatgagcaggcaaaaacgacaagcctggaactggttccagaagagccatctgagcctgtgcctcctcttatagttgatcgtgagagattgaagaaattgcttgatttgttggtggataaaagcaacaatctggcagttgatcagcttgagagattatattctcttcttagtcagtgtatctaccgtcatcgtaaagattatgacaaatcacaacttgtagag

SEQ ID NO: 46991 - DNA, 1045 bp, Homo Sapiens
gcgtctgccaggagctacggccggaagatggcggcggccgcagagttgtcgctactggagaagtccctgggactgagtaaggggaataaatacagtgctcagggcgagcgacagattccagttcttcagacaaacaatggtccaagtctaacaggattgactactatagcagctcatctagtcaagcaagccaacaaagaatatttgctggggagtactgcagaagaaaaagcaatcgttcagcagtggttagaatacagggtcactcaagtagatgggcactccagtaaaaatgacatccacacactgttgaaggatcttaattcatatcttgaagataaagtctaccttacagggtataactttacattagcagatatactattgtactatggacttcatcgctttatagttgacctgacagttcaagaaaaggagaaatatcttaatgtgtctcgctggttttgtcacattcagcattatccaggcatcaggcaacatctgtctagtgttgtcttcatcaagaacagactatatactaattcccactagaagctgtccatgccatacagaagatctattaaaaatgttttaaatggaaaatgtactctagaccacaggactaatgtaaattaatatacagtcattcattatttgttgaagttgatagaatttttgaagtgtaaacttgtgtctgaatgttttatttgttctttagctgaagttttgcaatttttatgtcaaaattcaattgctattaaacaagttgagatccagttataaattaaccttgtttttagtagatgacatttatttcaataaaagttgcaaatcgggcttaatcttaaaattggtggtcatttcaatggttgacatatttggctatttattaacctctctttcatattctaaaattcattttccccttatggatatttatggtagtttgttaagaactgataaattgtgccaaggaagccaaaagggaagacagatggatttgttttaaaatatttatgtgagctagtaaatgtggttgaaaaaa

SEQ ID NO: 46992 - DNA, 597 bp, Homo Sapiens
caggacagctggcacaagcaccacaagaccgggggcaagagaacgcccaacgacgagaagtggaagtatgagctggggcgccctgctgccaatgccaagatcagcccccaccacatccacacagtccgtgtgcagggaagtaacaaaaaatactgtgccctgaggctggatgtggggagtttctactggggctcagagtgttgtaattgcaaaaccagcatcatcgacgctgtcgacaatgtgtccaagaatgaactggtccgtaccgagaccccggtgaggagctgcatcacactcattgacaacacactgtatcagcagtggtacgagtcctactatgtgctgctcctgggccgcaagaaaggggccaaactgattcctgaggaggaagagattttaaacaaaaaagataacattcagaagaagtatgatgaaaggaaaaagaatgccaaaatcagtcttctggggaagcagttccaacagggcaagcttcctgcgtgcatcgcatcaaggccgggacattgtggccaagcagatggctacgtgctagagggcgaggagtcagagttctatcttaggaaaatcaaggcccggaag

SEQ ID NO: 46993 - DNA, 1231 bp, Homo Sapiens
atggcgcctgaggagaacgcgggtaccaaactcttgctgcagagtttcgagcgccgcttcctagcggcgcgcacactgcgctccttcccctggttagaagcaaaattaagagactcatcagattctgagctgctgcgggatattttgcagaagactgtgaagcatcctgtgtgtgtgaagcacccgccatcagtcaagtgtgcccagtgctttctctcagaactcatcaaaaatcacgaggctgtccacacggagcttttggacgagctgtacgaggcgctggcagagaccctgatggccaaggagtccacccagggccactggagctatttgctgccctcggaaggctcggtcacactctccgagacagccatcatctcccacggtaccacaggcctggtcacatgggacgctgcccgctaccttgcagaatgggccatcaagaacctggcagccttcactaacaggactgtcctagagcttggcagtggcgccggccttacaggcctgtccatctgcaagatgtgccacccccggacatacatcttcagcgactgtcacagccgggtcctcgagcagctccgagggaatgtccttctcaatggcctctcattagaggcagacatcactgccaacttagatagccccagggtgacagtggcccagctggactgggatgtagcgacggtccatcagctctctgccttccagccagatgttgtcattacagcagacgtgctgtattgcccagaagccatcgtgtccctggtcggggtcctgcggaggctggctgcctgctgggagcaccagcgggctcctgaggtctacatggcctttaccgtccgcaacccagagacgtgccaggtgttcaccaccgagctaggctgggctgggatcagatgggaagcggaagctcatcatgaccagaaactgtttccctatggagagcacttggagatggcaatgctgaacctcacactgtaggactcatacacgactccaacgggattgttagaatcaaatcactctcgtgggaagaatttttatatgggaaagcggataaaactttcattggactggaatgtttggagaatgttaaattccaaatcaggaaccacaatctgccctctaataagacatcggctatctaagcatgtgggtgccccctttctgccagcagttctggttcttaagaaaatcaccataaatcagacatgaaaattctggctcc

SEQ ID NO: 46994 - DNA, 282 bp, Homo Sapiens
atgccgctagcgtctcccatccagcaccatgaagtcaccaggggtgtggctccctccatggctctcagagatggcgtatgcagaatcccactttctgccgagtttacagctcagtgcactgattcccaggctcctcaaatgaagagagctcccagatgctgctgtcttgcagtagtggctcaatgtcctcatcactgccccgttctggggtgttggtcaggctgccgctgctgctgttactgtgtttttgaactccactggctttactgtattcaggaatga

SEQ ID NO: 46995 - DNA, 1878 bp, Homo Sapiens
atgagggaaagtggatggaaactgattgacccaatatcagactttgggcgtatgggaatacccaacagaaactggaccataacagatgccaacagaaactatgaggtaattttattcatgggcattgagaacatccatgtaatgcggagcagtctgcagaaactcttggaagtttgtgaattgaaaactccaacaatgagtgaatttcttagcggcctggagagctcagggtggttaagacacattaaagctattatggatgctggaattttcattacaaaggcagtgaaggtagaaaaggccagtgtcttagtccattgttctgatggatgggaccgcacagcacaagtctgctcagtggctagcatcctcctagatccattttataggacattcaaaggactcatgatcttgatagagaaggaatggatatccatgggccacaagttttcccaaaggtgtggccacctcgatggggactctaaagaagtgtcccctatcttcacccagttcctagactgtatctggcaattaatggaacagtttccctgtgcctttgagtttaatgaaaacttcctgctggagattcatgaccatgttttctcctgccagtttggaaacttccttggtaactgccagaaggatcgggaagatctaagagtctatgagaaaacacattctgtgtggcctttcttggttcagaggaaaccagacttcaggaaccctctctataaaggcttcactatgtatggggtactcaatcctagtactgtgccctacaacattcagttctggtgtgggatgtataaccgctttgacaaagggctgcagcccaagcagagtatgctagagagcctcctggaaattaagaaacagagagcaatgctggagacagatgtgcatgaactagaaaagaaactaaaagtccgtgatgagccaccagaagagatctgtacctgctctcaattaggaaacatattatcccagcatctgggaagtcctttgaccaatcctcttggctttatgggtatcaatggagacctgaataccctgatggagaatggcaccctatccagggaaggaggcctccgagctcagatggatcaagtaaaaagccagggtgcagacctccaccataactgttgtgagattgtgggcagccttagggccataaatatctctggggatgtgggcatctctgaggccatgggcatctctggagacatgtgcacctttgaggctacgggcttctccaaagacttaggaatctgtggggccatggacatctctgaggccactggcatctctggaaacttgggtatttctgaggccaggggtttctctggggacatgggcatcttgggggacacaggcatctccaaggccagcaccaaggaggcagactactccaagcatcagtgagttagttactcatcttccatgctaggtatacctacagcagctacaatgattcttgtcccagagagggctatgctgcttttccaattggtttaagtgggtgaagccagggcacccctctccccacttaagtctggaagggaattactttactgattaagtgaccaatatgttcatattaagcagtacagagtgtaggcaagagaaagaatatgttattgttctaaaatgggatttaactatagaaatgttgcctctcagctgagacacatattaagctggttctactgtctgttttccttaatgatcgacctgccctattttctatcctcactgcagtaatgtgaaagtgaagtggaaatattgtcacaatggtcaataatgacccttttgagggtatggagagatggtatacagcaggtaactgtgaattgcagaataaattgaaagaaaatttta

SEQ ID NO: 46996 - DNA, 357 bp, Homo Sapiens
gactatgatgagagaagccacctgcatgacaccttcacccagatgacccatgccctgcaggagctggctgctgcccagggatcctttgaggttgccttccctgatgctgcggagaaaatgaagaaggtcattacacagcttaaagaagcccaggcttgcatccctccctgcggtctccaggagttcgcccggcgtttcctctgcagcgggtgctactctagggtctgcgacctcccgctggactgcccagttcaggatgtgacagtgactcggggcgaccaggctatgttttcttgcatcgtaaacttccagctgccaaaggaggagatcacctattcctggaagttcgcaggagga

SEQ ID NO: 46997 - DNA, 312 bp, Homo Sapiens
gcgggggaagccgtgcctcctcgcggactaagagaaaaattcccgcgggcgctctttgggtgggccggagaacgcccctcagccctttgcgcctctaaccctcctcagctgagctgcagtgggcgcccccgttatttccgccttggggaggtgcttggaactgatgtagggagctcggttggtgatttcggtttctggcctttccagacccttgtaattgttttctcggtgcagagctcttttggggtctgggggtttccgtcgtcctgcgcgcgtcatcgcgaagcttggcctgagggtccggtttcctag

SEQ ID NO: 46998 - DNA, 1067 bp, Homo Sapiens
ggtggagcccgcgatggccgaacctgcgtctgtcgcggctgaatctctcgcgggcagcagggcgcgcgctgcacgcacagtactaggtcaggtggtgctcccgggtgaggagctgctcctgccggaacaggaggacgcggaaggccctgggggtgcagtggagcgaccgttgagcctgaatgctagagcgtgctcgcgggtgcgcgttgtatgcggtccgggccttcggcgctgtggggaccgcctgctggtcaccaagtgcggccgcctccgtcacaaggagcccggcagtggcagcggcggcggtgtttactgggtggactctcagcagaagcggtatgttccagtaaaaggagaccatgtgattggcatagtgacagctaaatctggagatatattcaaagttgatgttggagggagtgagccagcttctttgtcttacttgtcatttgaaggtgcaactaaaagaaacagaccaaatgtgcaggttggagatctcatctatggccagtttgtggttgctaataaagacatggaaccagagatggtctgtattgacagctgtggacgagccaatggaatgggtgtcattggacaggatggtctgctttttaaagtgactctgggcttaattagaaagctattagctccagattgtgaaatcatacaggaagtgggaaaactctatccactggagatagtatttggaatgaatggaagaatatgggttaaggcaaaaaccatccagcagactttaattttggcaaacattttagaagcttgtgaacacatgacgtcagatcaaagaaaacagatcttctccagattggcagaaagttgatataggtggacttttttacaggtcagttgaggcaaaaaactatgggttttttcaggtgaacctcccccatttaaatactcagaagataaggtgtgaatgtatgtattattagagtccgaaagtatttttataagttactggttttcacccacgcttttgtgggagagaaaatcattgcaaaatcattttttttgttcggtacaataaagtttactaaaaaacagta

SEQ ID NO: 46999 - DNA, 738 bp, Homo Sapiens
gtcaggctgcacccagtcattttggcctccactgtggacagctacgagagacgcaacaagggtgctgcccgagttatcgggaccctgttgggaactgtcaacaaacactcagtggaggtcaccagttgcttttcagtgtcacacaatgagtcagatgaagtggctgttgacatggaatttgctaagaacatgtatgaactgcctaaagtttctccaaatgagctcatcttggggtggtacgctgcaggccatgacatcacagagcactctgtgctgatccatgagtactacagccgagaggcccccaaccccatccacctcactgtggacacaagtctccagaacggccatatgagcatcaaagcctatgtcagcactttaatgggtgtccctgggaggatcgtgggagtgttcacacctctgacagtgaaatacgcattctatgacactgaatgcatcagagttgacctgatcatgaagacctgctttagccccaacagagtggttggactctcaagtgacttgcagcaagtaggaggggcatcagctcgcatccaggataccctgagcatagtgttgcaatatgcagaggatatactatctggaaaggtgtcagctgacaataccatcaggaaggtgggccacttcctgatgagcctggttaaccaagtaccaaaaatagttcccgatgacttcgagaccatgctccacagcaacatcaatgacctgttgatggtg

SEQ ID NO: 47000 - DNA, 1128 bp, Homo Sapiens
atggtggactacagcatgtggaaccacatagaggtgtctgatgatgaagacgagacgcatgccaacatcgacacggccagcctcttccactggcagcaccaggcccagggggagcgcatggagcagtcccagaaggaggaggaactggacaggggctgccacaagcgcaagcacaaggtggccaagtgccagaggaaactgaaggagctgaaggtggctgagggcggcaaggcagagctggagcagctgcaggccgaggcgcagcagctgcgcgaggatcggagctgggagcagaagctggaggagatgcacaagaaggagaagagcatgccctggaacgtggacacgcttagcaaagatggcttcagcaagagcatggtcaacaccaagccggagaagacggaggaggactcagaggaggtgagggagcagaaacacaagaccttcgtggaaaagtgcgagaaacagaccaagcactttggcatgcgccactgggatgacagccaagagtacctgtcggacaacgtccacctggtgtgcgaggagacagccaattacttggtcatctggtgcattgatctagaggtggtggagaaatgtgcactcatggagcaggtggtcccccagacaatcgtcatgcagtttatcctggagctggccaagagcctgaaggtggacccccgggcctgcttccggcagttcttcactgagattaggacagccgatcgccagtacgtggagggcttcaacgacgagctggaaaccctcaaagagcatgtgcagggccgtgccaagctgcccatcaagaaggccatgaaggagtacgaggaggaggagcgccagaagcagcttggccctggcggcctggaccccatcgaggtctacgagtccctccccgaggaactccagaagtgcttccatgtgaaagacgtgcagatgctgcaagatgccatcagcaagacggaccccaccaacgcgaagtaccacatgcagcgctgctttgactctggcctctgggtccccaactctaaggccagccaggccaaggtgggagaggaggcgggtcccggggacccgctgctggaagctgttcccaagacgggcaatgagaaggatgtcggcgtgtga

SEQ ID NO: 47001 - DNA, 178 bp, Homo Sapiens
catgaggattgctgtcctcttcttcaccattttcttctttatgagccaagttctaccagccaagggcaaattcaaggagatctgtgaacgtccaaatagctcctgtcgggacttttgcctcgaaacagaaatccatgtagggagatgtttaaatagccgaccctgctgcctgcctctg

SEQ ID NO: 47002 - DNA, 978 bp, Homo Sapiens
gaattacgcattctgcttcagaccaagaatgctggggcagtgattggaaaaggaggcaagaatatcaaggctctccgtacagactacaatgccagtgtttcagtcccagacagcagtggccccgagcacatattgagtatcagtgctggtattgacacaattggagaaattctgaagaaaatcatccctaccttggaagagggcctgcatgactttgactgcgagttgaggctgttgattcatcagagtctagcaggaggaattattggggtcgaaggtgctaaaatcaaagaacttcgagagaacactcaaaccaccatcaagcttttccaggaatgctgtccttattccactgacgttgttcttattggaggaaaacccgatagggttgtagagtgcataaagatcatccttgatcttatatatgagtctcccatcaaaggacgtgcacagccttatgatcccaatttttatgatgaaacctatgattatggtggttttacaattatgtttgatgaccgctgtggacgcccagtgggatttcccatgcggggaagaggtggttttgacagaatgcctcctggtcagggtgggcgtcccatgcctccatctagaagagattatgatgatatgagccctcgtcaaggaccacctccacctcctccaggacaaggtgaatggcagatggcttatgaaccacagggtggctccagatatgattattcctatgcagggggtcgtggctcatatggtaatcttggtggacttattattactacacaagtaacgattcccaaagatttggctggatctattattggcaaaggtggtctgcagattaaacaaatccgtcatgagtcgggagcttcgatcaaaattgatgagcctttagaaggattggaagattggatcattaccattagagaaacacaggaccagatacagaatgcacagtatttgctgcagaacagtgtgaag

SEQ ID NO: 47003 - DNA, 1283 bp, Homo Sapiens
aagatgcattatcatggctgtaaacacaggttctgcacgtgtctaagttcagccccaaacccacatgaagaacttatttccagacagctcctactcttatggtggctccagaccctgccccatgcagaaggcacttctcaagttccaggaccagggcttcagccacagcactcgcaaaaccccacagatacagtgccaatgacagaaattaagattaactgggggcgacacagatttctgtgaatgccagtgctgtcagatgcttcctgatagtactttctagagtaaaagaacttcgggaaaagtaaaagcagcaaatggtaacaccctcatggagatctcagggtgtagaggcaagcactgaaggcccatgatcagccgtgggagccacgggaatcaattgcttccagtacgactggatgcatcggaaagagcctggggcaaggctggaggccacaagaggagctgccaggccacataagcagggaacaaagccgatgatcacacgcccatcagtgagccaacttggtgaagggaaatgcccaagttctcagcacctgcagagcctaagacataacaagcagcatgccctgacgctcaccaaggccaggtgctgtggtgagtgctctacctgtttctgtacagaagagaaatcagaatgccagagacatgaagaaacttctccagggtcatgtaatcaccaaataatgtctgcttcgaccatctctgcattttgtgctacaccaagatttaagcagctgttcaaaggaactgtagaacagatgtcacagatgtaactattcttgaaaggaagtcagatttcatagatggaaagactgcccttttccatttgcctcctccagacccataactttggataggggggttttattgtccgtgaggcttatgcatatgtcagaagaatgtccaagcagaggaatctaagtggcagaccccccaggataggaaagaagaaggacgctcgtgctgacacttccagaacactcttcacgttttgtgacatatgtgcttgtcgagtgatcttaagacagctggatgtccgaaccatgcagtaatagcagagaacctgcggaaggagaagcttcccaggacgttctgagggcttatgccgggtgcaggctttccttcccgcaacatccctgagtccagagaagaaataatcccctgccctgtgggccaagcacttacagcaacagcactttgagtttgctgtgcttagattcacttgtggaacttgttaaaaatataaaattccagacccc

SEQ ID NO: 47004 - DNA, 444 bp, Homo Sapiens
catatttgtgctccttcacgggagggcagggaggttcaacggaccttaaaacatgaaggtcttttttctgtttgctgttctcttttgtttggtccaaacaaactcaggggatgttccactgggaatgagaaataccatctgccgtatgcagcaagggatctgcagactttttttctgccattctggtgagaaaaagcgtgacatttgctctgatccctggaataggtgttgcgtatcaaatacagatgaagaaggaaaagagaaaccagagatggatggcagatctgggatctaaaatataagctcccggaaggcagggatgttgaagtatcccaagggcttaaaggaatgtgtggcttatagtaggtgttcaataaatatttgttgaatgaatttagcaccaaaggtgaagagctgataaaagacatttttttaacttcctta

SEQ ID NO: 47005 - DNA, 430 bp, Homo Sapiens
atgggcaggacctggtgtgggatgtggaggagacggcgcccggggaggaggagcgctgtgcccaggtggcctcacttgtcatctcaaagtggcgtcgaaccccctgacaggtggacgggaacccccggctggccctccagagaccaggaggcccctggctcaatgatgccacctgcagctgcccaaccctccgcccatggtgcccttgttccacctgccaccgctcatgaacctgtggatcacccagctctgcactggcttgcctgctgctgctgtctcagtttacctgggcagttgcccctggctatccggctgggatgggacttggacttagaagcaggcccctcctctggaaagctgtgtcctcgggccaggaggtggcagcctctaccttcctgagacagggacccttttctgtccatcagaggtg

SEQ ID NO: 47006 - DNA, 390 bp, Homo Sapiens
atgtctggtcgcggcaaaggcggaaaaggcttggggaagggtggtgctaagcgccatcgtaaggtgctccgggataacatccagggcattacaaaaccggctattcgccgtttggctcggcgcggtggcgtcaagcgcatttccggtcttatctatgaggagactcgaggtgtgcttaaggttttcttagagaacgttattcgagacgccgtcacctatacggagcacgccaagcgcaaaactgtcacagccatggatgtagtatatgccctaaaacgtcaggggcgcactctgtatggcttcggcggctgaatctaagaatacgcggtctcctgagaacttcaaaaaacaaaaacaaaaaaacccaaaggcccttttcagggccgctca

SEQ ID NO: 47007 - DNA, 654 bp, Homo Sapiens
atgacctccagctacgggcacgttctggagcggcaaccggcgctgggcggccgcttggacagcccgggcaacctcgacaccctgcaggcgaaaaagaacttctccgtcagtcacctgctagacctggaggaagccggggacatggtggcggcacaggcggatgagaacgtgggcgaggctggccggagcctgctggagtcgccgggactcaccagcggcagcgacaccccgcagcaggacaatgaccagctgaactcagaagaaaaaaagaagagaaagcagcgaaggaataggacaaccttcaatagcagccagctgcaggctttggagcgtgtctttgagcggacacactatcctgatgcttttgtgcgagaagaccttgcccgccgggtgaacctcaccgaggcgagagtgcaggtgtggtttcagaaccgaagagccaagttccgcaggaatgagagagccatgctagccaataaaaacgcttccctcctcaaatcctactcaggagacgtgactgctgtggagcagcccatcgtacctcgtcctgctccgagacccaccgattatctctcctgggggacagcgtctccgtacagatcctcgtccctcccaagatgttgtttacacgaggggcttcataacggattctaa

SEQ ID NO: 47008 - DNA, 348 bp, Homo Sapiens
tccttagacctccaaattcaaagcagatcaatgccctgtgggtttaatttttttaaatcaattttattgagagatgatgtctatttaataaatgtaccctctttgcatgtacagttctatgagttttggcacatatatgtacctatgcagccagtaccctcatccaaatcaggagcacatccactctcctcccagaaagcccctcaggccctgccgagtcagcccccaccccagcagtcggcttccatcacatgggctgctttttcctgttccagacatcatggatacgaagcagaccctggtttcttttgctcagcagttttgaaacttattcatgatgtacaatag

SEQ ID NO: 47009 - DNA, 789 bp, Homo Sapiens
tcttggagtgaaaatatactggaatattttctgagaaatagccagattacagcagaagacggtgctgagatcacctggtatcatgcagctaaccacaaggcacaaacaaatgaggcactgaaaagtactgctcacatgatagaggctgatgtccttcttccaagtgatggatcagaacacagccagccaattatggcccatccccctgaaacaaacagtgataatactctacaggagtggctgactgaagttatgaaaagcaataaaggcatcaagctggatttcaaaagtctggcagttgtagaaccatccatgatgctcttggaaaatgtgaagaggcatctgaagcgtcctgtatggattaatgccgatattcttcctggtccaaatggaaatagcaaagtaatagatgcaaaaccatttttagacaccgtgatatccttctttccagacgtgacgttttccctgggttggacaacaggatggcatcctgagaaagtcaatgaagggtacagttggacaatggtgaaagagatggaatatatatgtaatgaactaagtcagcctgtaacgttccctgtcagagcagcattagtcaggcagtcttgttctcagttactttggctgttaaagaaatcaaacaggtacagcctgactatttggactggaaaaaatgataactattccgttgaagatttactttacattagagaccattttgacaaaaaacaagttttctatgacatcttggaaccacaaaaccatgaatttaaacaagccattggaatc

SEQ ID NO: 47010 - DNA, 767 bp, Homo Sapiens
cgttccccaaccctgccctctctcatgaccccgctccgggattatggccgggactgggctgctggcgctgcggacgctgccagggcccagctgggtgcgaggctcgggcccttccgtgctgagccgcctgcaggacgcggccgtggtgcggcctggcttcctgagcacggcagaggaggagacgctgagccgagaactggagcccgagctgcgccgccgccgctacgaatacgatcactgggacgcggccatccacggcttccgagagacagagaagtcgcgctggtcagaagccagccgggccatcctgcagcgcgtgcaggcggccgcctttggccccggccagaccctgctctcctccgtgcacgtgctggacctggaagcccgcggctacatcaagccccacgtggacagcatcaagttctgcggggccaccatcgccggcctgtctctcctgtctcccagcgttatgcggctggtgcacacccaggagccgggggagtggctggaactcttgctggagccgggctccctctacatccttaggggctcagcccgttatgacttctcccatgagatccttcgggatgaagagtccttctttggggaacgccggattccccggggccggcgcatctccgtgatctgccgctccctccctgagggcatggggccaggggagtctggacagccgcccccagcctgctgacccccagctttctacagacaccagatttgtgaataaagttggggaatggacagcctaa

SEQ ID NO: 47011 - DNA, 2040 bp, Homo Sapiens
caacctccccaaatacccccactgtgtgcaacctccgcaaatccccccactgtgtgcaacctccccaaatcccccccactctgtgcgacctccccaaatccccccactatgtgcgacctcctcaaatccccccagtatgtgcaacctcctcaaatccctccactctgtgcaacctcaccctatctttcccactgtgtgcaacccccccaaatacccccactatgtgcaacctcctcaaatccccccactgtgtgcaacctccccaaatccccccactgtgtgcaacctccccaaaaccccccactgtgtgcaacctccccaaatcccccccactgtgagcaacctccccaaatccccacactgtctgcaaccaccccaaatcgcccccactgtgtgcaaccgcctcatattccccccactgtcaacctccccaaatccccctactgtgtgcaacctccccaaatcccccccactctgtgcaacctccccaaatcagccccactccgtgcaacctccgcctatccctcccactgggtgcaacctccccaaatccccgtgtgccacttccccaaatcaccacattgtgagcaacctccccaaatccccccactgcgaagacctcctcaaattgccccgcagtgtacaacctcctcaaatcctccctcgctgtgtgcaacctcctcaaatccccccgtgcaacctccccacatgcccccagtgtgtgcaacctcccgaaatccacccagtgtgtgcaacctccccaaatccccccactctgtgcaacctcccgaaatccccccaactctgtgcaacctccgccatccctcccactgtgtgcaacctgctcaaatccccaaactgtgtgcaacctccccgaatccccccaactttgtgcaacctcaagtccccgaatgtgtgcaacccccccaaatcccgtgtgcaacctccccaaatcccccacactatgtgcaacctcctcaaatccccccactctgcacaatctccccaaatcccccccactctgcgcaacctcctcaaatccccccactgtgtgcaacctcctcaaatccccccactgtgtgcaaccttcccaaatccccccactgtgtgcaaccttcccaaatccccccattatgtgcaacctccccaaatcccccaatctatgcaacctccccgttccccccaatgtgttcaagccccccaaatccccccactgtgtgcaacctcccgaaatcgcccccactgtgtgcaacctccccaaatccccccaactgtttggaacctcctcaaatccccccactgtgtgcaacctcccgaaatccccccaactttgtgcaacctccccaaatgcccactgtgtgcaacgtcccgaaatcccccccactctgtgcaacctccccaaatccccgccactctgtgaaacctcccccatcccttccagtttgtgcacccccccaaatccccccactatgtgacacctcctcaaatccccccactgtgagcaacctcctgaaatccctctcactgcgtgcaacttcctcaaattcctcccccactctgaatcccccctatgtgcaacctccgcaaatacccccactctgtgcaagtgccccctatttccccaactgtgtagcaacctccccaaatccccccactgtgtgccacctccccaaatcccccaactgtttcgaaccacctcaaatccccccactgtgtgcaacctccccaaatcccccccaccctctgcaacgtccccaaacctactctgtccaacctccccaaatcctccactctgttcgacctccgcctatcgccctactgtgtgcaactccctcaaatccccccactgtgagcaacctccccaaaccctcccattgtgtgcaaactcccaaatctccccactgtgtgcaacctcctcaaattcttccactctgtgcagcctccccaaatccccccaactctgtgcaacctccgcctatcccccccagtgtgcaacctcctgaaatcccccaactgtgttcaacacccccaaatcccccc

SEQ ID NO: 47012 - DNA, 1499 bp, Homo Sapiens
gatttttatttgggtttattaaaaattttttcaaagtaatacatgcacaaggtaaaaaattaaatagtacagaaggacttaaaatgaaaaacacagtttcccatcccaccctttttaaatctaaatcccattccctagaggtaatgcttttaacaatatttattttagatcgtctggtaactttctaactttaaataatatgtttgagcaataatttcttgacttactgactttacaacatctttaataattccccattacaaaagataaggatttaacttacactatcgccactttcctttgtccatctctctccaaatgtctgatagttacatcactttttaatacatctattggtttgattttatagctttgaacaatacactaatcctctagttcttgttccattaactgaagatcttttcatccccactttgaatatataagtatctctacctttgattccacttctcttcctctaattctcaatctctttctgctttctttccctttgtcagcattaattactttcaacttcagttctgaataaaaaatgaaacctttcacactttgttaataggctgatctgaacattgaatactaataaatgatatccacattattttggctatttaaatacttcttactgggagcctagtataagctaggatattttcttccctacacacccaatatcatcatgcctgtgccatagaaaaggaaatgtacctatcaagcctcttcttattcttcatgaataactcaaaatcatgcctcattttattttgctctataattggacctgaattttttgacatattgttgatttgtctttcttttttcttgactaaataatcttctcaagcatcccagctcttcaatgatactatctatggcactgaatgcacattcttcccagaaagcccgagacagtatgctctcatctgaaattagtctgctggatagctgtcactctagggtgagatacccttttggctgtcactctagaatgagacatcctaagtaaggtccactgttttatggatcccatttcttcttctttcctggttttcatcctcattttgctggagaatttcctcaagatacttcctcagtaagggtgcaaaggagactttctgaaaatttgcctgacagaaaatgtcttcactttgatgttcttcttgacagtctgccttactatgaaattctaggtacaaaaattttccttaagctctgaagatgttgatccattgacttctggcattcagtgttgctgatgacaaatctgttagcagtctatttctcatccatttttgtgttgagctaatcgtgatgacctcatttgttttctccctggccactttaatatcttccttctatccttaatattccaaaattttacaatattgtgtctagatgtagattgtattgggccctctcaatctggagacttagcttgctctgttcttcaattctttttctttttatttcttcaccta

SEQ ID NO: 47013 - DNA, 1067 bp, Homo Sapiens
cacaggggcccctgcggccaccgcaatgcagaaataaaagaaactggagaagattggggaaggcacctatgggacagtgttcaaggccaaaaactgggagactcatgagattgtggctctgaaatgggtgaggctggatgacaatgatgacggtgtgccgagttctgccctccgggagatctgcctactcaaggagctgaagcacaagaacatcgtcaggcttcatgacctcctgcacagcgacaagaagctgactttggttttcaaattctgtcaccagcacctgaaaaagtattttgacagttgcaatggtgatctcgatcctgagattgtaaagtcatttctcttccagctgctaaaaggcctcggattctgtcacagccgcaatgtgctacgcagggacctgaagccccagaacctgctaataaacaggaatggggagctgaaattggctgactttggcctgtctcgagcctttgggtccccatctgctgttactgagggagtggtcacactgtggtaccacccaccagatgtcttctttggggccaagctgtactccacgtccattgacttgtggtcagctggctgcatctttgcagagctggccaatgctggatggcctctttttccaggcaatgacgtcgatgaccagttgaagaggatcttctggctgctagggatgctcaccaaggagcagtggccctccatgaccaagctgccagactataagctgtacccattgtacccggccacaacatccctggtgaacatcgtgcccaaactcagtgccacagggagggatctgctgcagaatcttctgaagtgtaacccctgccaatgtatctcagcagaagaggccctgcagtacccctacttttccgacttctgtccgccctgggcccagggacccccagccaccaggctggggcctggcctatttaagccttaggaggggtgggacagtgggggtgcccagtgtgctgagctccagctgtgctgggcccagccaggatgggatgcctgagcccaagtttctcacttcctttgtggactttaatttcttt

SEQ ID NO: 47014 - DNA, 414 bp, Homo Sapiens
atgcagtgcggcctggtgggcaagatcatcaagcgcttcgagcagaaggggttccgcctcgtggccatgaagttcctcccggcctctgaagaacacctgaagcagcactacattgacctgaaggaccgcccattcttccctgggctggtgaagtacatgaactcagggccggtcgtggccatggtctgggaggggctgaacgtcgtgaagacaggccgagtgatgcttggggagaccaatccagcagattctaagccaggcaccattcgtggggacttttgcattcaggttggcaggaacatcattcatggcagtgattcagtaaaaagtgctgaaaaagaaatcagcctacggtttaagcctgaagaactggttgactacaagtcttgtgctcatgactgggtctatgaataa

SEQ ID NO: 47015 - DNA, 1964 bp, Homo Sapiens
tcgatagccggaagtcatccttgctgaggctggggcaaccaccgcaggtcgagacagcaggcggctcaagtggacagccgggatggcagagcgtgcggcgctggaggagctggtgaaacttcagggagagcgcgtgcgaggcctcaagcagcagaaggccagcgccgagctgatcgaggaggaggtggcgaaactcctgaaactgaaggcacagctgggtcctgatgaaagcaaacagaaatttgtgctcaaaacccccaagggcacaagagactatagtccccggcagatggcagttcgcgagaaggtgtttgacgtaatcatccgttgcttcaagcgccacggtgcagaagtcattgatacacctgtatttgaactaaaggaaacactgatgggaaagtatggggaagactccaagcttatctatgacctgaaggaccagggcggggagctcctgtcccttcgctatgacctcactgttccttttgctcggtatttggcaatgaataaactgaccaacattaaacgctaccacatagcaaaggtatatcggcgggataacccagccatgacccgtggccgataccgggaattctaccagtgtgattttgacattgctgggaactttgatcccatgatccctgatgcagagtgcctgaagatcatgtgcgagatcctgagttcacttcagataggcgacttcctggtcaaggtaaacgatcgacgcattctagatgggatgtttgctatctgtggtgtttctgacagcaagttccgtaccatctgctcctcagtagacaagctggacaaggtgtcctgggaagaggtgaagaatgagatggtgggagagaagggccttgcacctgaggtggctgaccgcattggggactatgtccagcaacatggtggggtatccctggtggaacagctgctccaggatcctaaactatcccaaaacaagcaggccttggagggcctgggagacctgaagttgctctttgagtacctgaccctatttggcattgatgacaaaatctcctttgacctgagccttgctcgagggctggattactacactggggtgatctatgaggcagtgctgctacagaccccagcccaggcaggggaagagcccctgggtgtgggcagtgtggctgctggaggacgctatgatgggctagtgggcatgttcgaccccaaagggcgcaaggtgccatgtgtggggctcagcattggggtggagcggattttctccatcgtggaacagagactagaggctttggaggagaagatacggaccacggagacacaggtgcttgtggcatctgcacagaagaagctgctagaggaaagactaaagcttgtctcagaactgtgggatgctgggatcaaggctgagctgctgtacaagaagaacccaaagctactgaaccagttacagtactgtgaggaggcaggcatcccactggtggctatcatcggcgagcaggaactcaaggatggggtcatcaagctccgttcagtgacgagcagggaagaggtggatgtccgaagagaagaccttgtggaggaaatcaaaaggagaacaggccagcccctctgcatctgctgaactgaacaaactatcagaggaaaggaagtgggactggcactatttgaggttaagacaaactgcatatgtacttcaattgctttgcacttttccgtttcagcggaagacctgaagagtggtcagaacagagcctttgatttttattatggttattttattgattattactggcaaaaacggccaggtacaacacctttttcatacaaggcccaggaggcttagtccagtctgtgctcctgggctacaaggacccagcctgagatggtcccatctgcagggccccgcaccagttggagcagatgcctccccaccaccaattgccaaaggtccaataaaatgcctcaaccacgga

SEQ ID NO: 47016 - DNA, 549 bp, Homo Sapiens
ttcatagatggctgctgctcttctaccatggcccccaaaatgatatttaacttactcactgaaaggaaaatctccttcagtgcgtgcatgacccagctctttgcagaacatttctttgggagagttgagatcattctgctcgtggtaatggcctatgaccgctatgagacaatctgcaagcccctgtactacctgatcacaatgaacaggaaggtgtgtggcctactggtggccatggcatgggccgggggatttcttcatgctctgattcaaatgcttttaatagtctggctgcccttctgtggccccaatgtcattgaccatttaatctgtgaccttttccctctgctaaaactctcctgcactgacactcacgtcttcggactctttgttgccgccaacagtgggctgatgtttatgctcattttttctattcttattacctcttatgtcctaatcctctgcttactaaagactcacagcacagaaggacagtggaaggctctctctacttgcacctcccatatcactgtagtcatcctattcttt

SEQ ID NO: 47017 - DNA, 360 bp, Homo Sapiens
atggtatggatggaccacggtttgtttaatccatccgaggacctttttaaaatacttgtgcccagatgcagtggctcactcctgcggcacttggtgaggtcgaggcgggaggattgcttgaccccaggaattcgagaccatactgggcaacatggcaaaaccctgtctctacccaaaatacaaaaattagctgggcgtggtggtgcacacctgcagctacttgggagactgagatcagaggatggtttgagcctgggaggcagaggttgcagtaagctgagattgtgccactgcactccagcctgggcaacagagccaggccttgtctcaacaatcaatcaatcgatcgtgtgttcctga

SEQ ID NO: 47018 - DNA, 489 bp, Homo Sapiens
atggcgcagcgtacgtacggtcctgagtgtcaacgaaacctgaagggcgagagcccggggagtcccggccgcgacggctacggcgacttctttacaccagggacagggccgggcctcgccgtctcctccttgaggctgtgggcaagtccggacactcgtcctgagggtgtcggcgtcgccgccgccgcgtctctttcttccgggtgccactggctggcctcggccccccatccagccccgggagccgcggcggcgacgacaacggcagcaggtgaactgtgcgccaagggcgcttgcgcggcctacgtggagctcacagaggctaactacggagcaccggatgggacaagcacaatgtcgggtcccgcacatgcgcgctcggccggtcgcttccgaactcgctgcactggaggacgcaaggttcggtcctgcctgatttcgttgcgtgcggagaccgccgtcgcggctcagaaccggagcgtgggctag

SEQ ID NO: 47019 - DNA, 1413 bp, Homo Sapiens
atggacactaccatggaagctgacctgggtgccactggccacaggccccgcacagagcttgatgatgaggactcctacccccaaggtggctgggacacggtcttcctggtggccctgctgctccttgggctgccagccaatgggttgatggcgtggctggccggctcccaggcccggcatggagctggcacgcgtctggcgctgctcctgctcagcctggccctctctgacttcttgttcctggcagcagcggccttccagatcctagagatccggcatgggggacactggccgctggggacagctgcctgccgcttctactacttcctatggggcgtgtcctactcctccggcctcttcctgctggccgccctcagcctcgaccgctgcctgctggcgctgtgcccacactggtaccctgggcaccgcccagtccgcctgcccctctgggtctgcgccggtgtctgggtgctggccacactcttcagcgtgccctggctggtcttccccgaggctgccgtctggtggtacgacctggtcatctgcctggacttctgggacagcgaggagctgtcgctgaggatgctggaggtcctggggggcttcctgcctttcctcctgctgctcgtctgccacgtgctcacccaggccacagcctgtcgcacctgccaccgccaacagcagcccgcagcctgccggggcttcgcccgtgtggccaggaccattctgtcagcctatgtggtcctgaggctgccctaccagctggcccagctgctctacctggccttcctgtgggacgtctactctggctacctgctctgggaggccctggtctactccgactacctgatcctactcaacagctgcctcagccccttcctctgcctcatggccagtgccgacctccggaccctgctgcgctccgtgctctcgtccttcgcggcagctctctgcgaggagcggccgggcagcttcacgcccactgagccacagacccagctagattctgagggtccaactctgccagagccgatggcagaggcccagtcacagatggatcctgtggcccagcctcaggtgaaccccacactccagccacgatcggatcccacagctcagccacagctgaaccctacggcccagccacagtcggatcccacagcccagccacagctgaacctcatggcccagccacagtcagattctgtggcccagccacaggcagacactaacgtccagacccctgcacctgctgccagttctgtgcccagtccctgtgatgaagcttccccaaccccatcctcgcatcctaccccaggggcccttgaggacccagccacacctcctgcctctgaaggagaaagccccagcagcaccccgccagaggcggccccgggcgcaggccccacgtga

SEQ ID NO: 47020 - DNA, 1095 bp, Homo Sapiens
gccccagcgtgccggggaatgctgtgcggcttcggcgccgtgtgcgagcccaacgcggaggggccgggccgggcgtcctgcgtctgcaagaagagcccgtgccccagcgtggtggcgcctgtgtgtgggtcggacgcctccacctacagcaacgaatgcgagctgcagcgggcgcagtgcagccagcagcgccgcatccgcctgctcagccgcgggccgtgcggctcgcgggacccctgctccaacgtgacctgcagcttcggcagcacctgtgcgcgctcggccgacgggctgacggcctcgtgcctgtgccccgcgacctgccgtggcgcccccgaggggaccgtctgcggcagcgacggcgccgactaccccggcgagtgccagctcctgcgccgcgcctgcgcccgccaggagaatgtcttcaagaagttcgacggcccttgtgaccagtgcccggagccctgccggttcaatgccgtgtgcctgtcccgccgtggccgtccccgctgctcctgcgaccgcgtcacctgtgacggggcctacaggcccgtgtgtgcccaggacgggcgcacgtatgacagtgattgctggcggcagcaggctgagtgccggcagcagcgtgccatccccagcaagcaccagggcccgtgtgaccaggccccgtccccatgcctcggggtgcagtgtgcatttggggcgacgtgtgctgtgaagaacgggcaggcagcgtgtgaatgcctgcaggcgtgctcgagcctctacgatcctgtgtgcggcagcgacggcgtcacatacggcagcgcgtgcgagctggaggccacggcctgtaccctcgggcgggagatccaggtggcgcgcaaaggaccctgtggtcagtggcgggtgagggaccgctgcgggcagtgccgctttggagccctgtgcgaggccgagaccgggcgctgcgtgtgcccctctgaatgcgtggctttggcccagcccgtgtgtggctccgacgggcacacgtaccccagcgagtgcatgctgcacgtgcacgcctgcacacaccagatcagcctgcacgtggcctcagctggaccctgtggtgagtga

SEQ ID NO: 47021 - DNA, 1172 bp, Homo Sapiens
ggagaccccactggctttggtcccctaagaatggactctgctgcctgtgctgctgctgccacccctgttccagccctggctttggccctagctccagacctagcacaagccccactggcactccctggcctgttaagcccatcttgccttctctcctctggacaagaagtaaatgggagtgaaagaggaacttgtctctggaggccctggctgtcttccacaaatgactccccaaggcagatgaggaagctggtggatttggctgctggtggggcaacggctgctgaggtcaccaaggctgaatccaagttccatcaccctgtcaggctcttctggcctaaatcccgctccttcgactatctgtacagtgctggggagattttactgcagaactttcctgtccaggcaaccatcaacctatacgaggactcagacagcgaagaagaagaggaagatgaagagcaggaggatgaagaagagaagtaggaggccaatgaaaaggggccagaagggtgtgtgagggtaccagggtccataccctacagcgccacagctcatcccccttcctcacccctaacctatccaaatggaggcagccagagtctgattggggttcagtttgtctggcaagttttcacagacatcagttagccggaagtattagtccagcagatagagctttctggactgaaaattgggtcatctagctgcccagctcaccctggcttacctgaatggcctgtgagctcaggcctcttgcatctcattgtctgggctgctgttgtgttgaccatgggagggttctaggagctctagaaggaaggcttgctgaagcccccaggaagcagagcagggcagggaatgcccttgtggagggaagtagtcattcctcaggccctttgactccctagccttcccaggtggccatgtagtcccgtctctctgtggaaagcctgacttctggcttcaccccaaggaataccaacagcagatccatgcaaggttggggtgcctttttgatgagtcttacaggaagggaaggcagtgtgtagagaatcggcttgctctggggatgcctccccattttgcctgctgtccattgaagtctgtgtgttggcatgagatgaatcaggagaaaaataaactggatggtgttttcctttttcttggaa

SEQ ID NO: 47022 - DNA, 1765 bp, Homo Sapiens
aaagtggcgagagccacctcggcgcttgggcgctcagtcgcaggaggcgctccttggcggtgcctggagcccgggcgcaccccaccgctcccgggacctgttgggggctggcccgaaccgtcgtcgaagggagccgctcggccacccccgacgttcctcgccccgcccgacgttccctcaagtggccgaaccagccggacgagccaaactcgccgggcctcccggcggcagcaggtggccccgtccttccagggagggccctgcgccccgcggcgctccggagccctctcggccgcccccgccaggcgggatggaggcggatggggacggagaggagctggcccggctgcgctcagtcttcgccgcctgcgacgcgaaccgctcggggcgcctggagcgcgaggagttccgggcactgtgcacggagctgcgggtgcggccggccgacgccgaggcagtattccagcggctggacgccgaccgtgacggcgccatcaccttccaggagttcgcgcgtggcttcctcgggtccctccgcggggggcggcgccgggactggggtcctctggatcccgcgcccgccgtgtctgaggcggggccggagacacacgacagcgaggaggacgaaggcgacgaggacgcggcggcggcgctggccacctcgtgcggcccggcgagtcccggccgggcttggcaggatttccaggcgcgacttggggacgaagccaagttcattcccagatttggctacacaatttcaaaacctgcatttgtgttcgtgaggcatctcataacactgtgtgcattgtcatgggctaaaaaggaaggcagagaaacactttggacaatcgaggagggaggagccaagatggccgaataggaacagctccggtctacagctcccagcgtgagcgacgcagaagacgggtgatttctgcatttccatctgaggtaccgggttcatctcactacggagtgcgagacagtgggcgcaggccagtgtgtgcgcgcaccgtgcgcgagccgaagcagggcgaggcattgcctcacctgggaagcgcaaggggtcagggagttccctttccgagtcaaagaaaggggtgacggacgcacctggaaaatcgggtcactcccacccgaatattgcgcttttcagaccggcttaagaaacggcgcaccacaagactatatcccacacctggctcagagggtcctacgcccacggaatctcgctgattgctagcacagcagtctgagatcaaactgcaaggcggcaacgaggctgggggaggggcgcccgccattgcccaggcttgcttaggtaaacaaagcagcctggaagctcgaactgggtggagcccaccacagctcaaggaggcctgcctgcctctgtaggctccacctctgggggcagggcacagacaaacaaaaagacagcagtaacctctgcagacttaagtgtccctgtctgacagctttgaagagagcagtggttctcccagcacgcagatggagatctgagaacgggcagactgcctcctcaagtgggtccctgacccctgacccccaagcagcctaactgggaggcaccccccaacaggggcacactgacacctcacacggcagggtattccaacagacctgcagctgagggtcctgtctgttagaaggaaaactaacaaccagaaaggacatctacaccgaaaacccatctgtacatcaccatcatcaaagaccaaaagtagataaaaccacaaagatgggg

SEQ ID NO: 47023 - DNA, 1697 bp, Homo Sapiens
gagctcgggagcggggaccggtagccgactgcctctgggacagcggtggcgtctctgtgcccgtttagtggagttggagggaagctgcgaggaggcgcaggaagtccacctcagaaccccccccccggtctaggggcgcccgggcgttggaaccggcgggggaagggtgcgggggcgcatggggtgatcctgattcggctcccattttcccgaacgggcaccctgaggctcctggcccggggcatggtgttagaaatcatagctgcggagaagcccttgtgacaccttgctgcagattgggaagctgcagatgattgggaaggtggaaggtggagacgcggtccttaggtggtcgagcgcattttctcttcctcagagtccaggaaggagcgcgatggagaagtggggcgcacggcgggtttcgggtccgcccctgcccttccgactcctccgaccacgtctgcctttggctgaaagcaaatatggctccgtgtgcggtttctgcaacaaaggctgggcgggccgggtttccctagggatggggaccgcctccccggggagtcgtgggggtgagccaccggggcctccgagagaatcgctggtgtcgcttcgcacccaagggacacatctcgggttagaaaggagaaacgacgtggatctaaaggcgaagcccatgctgaggacttttcaaaatggcctcttatcggccccactcacaggagcttcaggcttcggtggccctgtaggacaaccctggggtgtcattggagagaagctgacggggttaatggcgggtgacaggtgaaagagaccccggaggggtggggccggtgtgtgtggctaagctgagtcccaggcacagggtggatgtgaatttatgggtggcagagctagagctaggccctgcccttacctaggtcctggcttcgaggtccactgttctgtcgcgtcttttgacgcatcggtggaagaactgaatttcaggatgctcacaaacctgcagctggaagctagacttccaaaccttagtttaaaaaagcaactctactgaaatactaaaataaattgccgacggaattagggtgatttcttgttcacggtttcatttaaaaatgcacctatgttatttacaggaaaaacgttttagtggtgctagagctacaagaataaggtaaacagaaggatgctgctagaccaggagtaccttacccagtctgggataggaggaggtcggggaagccctccctaagcaagacacgtgagctgagtttgaagaaaaagttaaaaggaaggtgaagtgcgggagagaaacagggaagggaatttggagcagagtgaacagcatatgcaaaggtgtggaaatgtggaaatgcatggcctgttaaagctgccttaagaaaatatgttgcctggggctgggcgcggtggctcatgcctgtaatcccagcattttgggaggccgaggcgggcggatcacttgaggtcggagttggagatcagcctggctaactaacatggctaaacccttctctactgaaaatacaaaaattagccgggcgtggtggcatgcgcctgtaatcctagctattctggaggctgaggcaggagaatcgcttgaacctgggaggcggaggttgcagtgagccgagatcgcgcctttgcactccagcctggaagacaaaacaaaactccgtctc

SEQ ID NO: 47024 - DNA, 858 bp, Homo Sapiens
tgctttctctctcccctgcagatgtccatgaaggaggtgggtgatggcttacaggatcagatgaactgcatgatgggtgcactgcaagaactgaagctcctccaggtgcagacagcactggaacagctggagatctctggagggggtcctgtgccaggcagccctgaaggtcccaggacccagtgcgagcacccttgttgggagggtggcagaggtcctgccaggcccacagtctgttccccctccagtcaaccttctcttggcagcagcaccaagtttccatcccataggagtgtctgtggaagggatttagcccccttgcccaggacacagccacatcaaagctgtgctcagcaggggccagagcgagtggaaccggatgactggacctccacgttgatgtcccggggccggaatcgacagcctctggtgttaggggacaacgtttttgcagacctggtgggcaattggctagacttgccagaactggagaagggtggggagaagggtgagactgggggggcacgtgaacccaaaggagagaaaggccagccccaggagctgggccgcaggttcgccctgacagcaaacatctttaagaagttcttgcgtagtgtgcggcctgaccgtgaccggctgctgaaggagaagccaggctgggtgacacccatggtccctgagtcccgaaccggccgctcacagaaggtcaagaagcggagcctttccaagggctctggacatttccccttcccaggcaccggggagcacaggcgaggggagaatccccccacaagctgccccaaggccctggagcactcaccctcaggatttgatattaacacagctgtttgggtctga

SEQ ID NO: 47025 - DNA, 1744 bp, Homo Sapiens
gcgcacagagctccctcccaggcccgcgaacttggccattcagccgccgctgtccccgctgcgcgccctcgcgcctctgcctgagaagccaggcgctgttcccccaccccagaagaggatggcaaaggtggctaaggacctcaacccaggagttaaaaagatgtccctgggccagctgcagtcagcaagaggtgtggcatgtttgggatgcaaggggacgtgttcgggcttcgagccacattcatggaggaaaatatgcaagtcttgcaaatgcagccaagaggaccactgcctaacatctgacctagaagacgatcggaaaattggccgcttgctgatggactccaagtattccaccctcactgctcgggtgaaaggcggggacggcatccggatttacaagaggaaccggatgatcatgaccaaccctattgctactgggaaagatcccacttttgacaccatcacctacgagtgggctccccctggagtcacccagaaactgggactgcagtacatggagctcatccccaaggagaagcagccagtgacaggcacagagggtgccttttaccgccgccgccagctcatgcaccagctccccatctatgaccaggatccctcgcgctgccgtggacttttggagaatgagttgaaactgatggaagaatttgtcaagcaatataagagcgaggccctcggcgtgggagaagtggccctcccggggcagggtggcttgcccaaggaggaggggaagcagcaggaaaagccagagggggcagagaccactgctgctaccaccaacggcagtctcagtgacccgtccaaagaagtggaatacgtctgcgagctctgcaagggagcggcccctcctgacagccccgtggtctactcggacagggcaggctacaacaagcagtggcaccccacctgctttgtgtgtgccaagtgctccgagccgctggtggacctcatctacttctggaaggatggtgcaccctggtgcggccgccattactgcgagagtctgcggccccggtgctccggctgcgatgagataatattcgctgaggactaccagcgtgtggaagatctggcctggcaccgaaagcactttgtctgtgagggttgtgagcagctgctgagcggccgggcgtacatcgtcaccaagggtcagcttctgtgcccaacttgcagcaagtccaaacgctcctgaagggctgcccacccacagccagaatccacaggatcccaccgagaaggagagccaggtgtgccgagaccatcctaagggtccgatgtgacagcaagcaagtgaaataaacaatgatttgcttttcagtgagaatatatatatgagatatatatagatatatattctaggttgggtggtggtagatccttgagggtcagtagtttcaaaaccaaaaatattctaagaagtcttaggatggagttccttttctttctgttgttgtttcccagctacaaccaactaaagacacaaatggcgttctgcaaggggactctgggaggagttttccagaatgcaattccgagtgagcaaatcgcatagctgtagaatgtgcgtgcttttttgtggacacaggagctcctccaggagcaggctgggatcccaactatcgcttgttgcctctttttcaagtggaatttgaattttaaataaacaactttttttggcatgataaacagatcaataaaagttttgtgaattccacataca

SEQ ID NO: 47026 - DNA, 446 bp, Homo Sapiens
atgcctgaaccagtcaaatctgctccagtccctaaaaaaggctccaagaaggccattaacaaggctcagaagaaggatggaaagaagcgcaaacgcagccgcaaggagagctactctgtgtatgtgtacaaggtgctgaagcaggtccaccccgacaccggcatctcttccaaggctatgggaatcatgaactccttcgtcaacgacatctttgagcgtatcgccggagaagcgtcacgcctggcgcattacaacaagcgctcgaccatcacttcgagggagatccagacggccgtgcgcctactgctacccggggaattggccaagcacgccgtgtccgagggcaccaaggccgtcaccaagtataccagctccaagtgagcctctcgctgcagtaacagttccgccgtgacccacaccccaaaggctcttttcagagccgtcca

SEQ ID NO: 47027 - DNA, 111 bp, Homo Sapiens
atggaggaacaaatgtctcataacgcagacgacgcggacaaacaaaagcgcaatgcccgacagatgcgaaaacagcctctgtcattaaaactgtgtgctagtgacacatga

SEQ ID NO: 47028 - DNA, 361 bp, Homo Sapiens
atgaggctccctgctcagctcctggggctgctaatgctctgggtcccaggatccagtggggatgttgtgatgactcagtctccactctccctgcccgtcacccttggacagccggcctccatctcctgcaggtctagtcaaagcctcgtatacagtgatggaaacacctacttgaattggtttcagcagaggccaggccaatctccaaggcgcctaatttataaggtttctaaccgggactctggggtcccagacagattcagcggcagtgggtcaggcactgatttcacactgaaaatcagcagggtggaggctgaggatgttggggtttattactgcatgcaaggtacacactggcctc

SEQ ID NO: 47029 - DNA, 573 bp, Homo Sapiens
atgtgtcactctcgcagctgccacccgaccatgaccatcctgcaggccccgaccccggccccctccaccatcccgggaccccggcggggctccggtcctgagatcttcaccttcgaccctctcccggagcccgcagcggcccctgccgggcgccccagcgcctctcgcgggcaccgaaagcgcagccgcagggttctaccctcgagtggtgagtatcgccgaagtgggcattcgcggggtgcgctgccctggagtcactggggaacgacccgactccagctcgacctgacctgtctcctgttttgtctccccttacggcgccagctgccagtcgaggaaccgaacccagccaaaaggcttctctttctgctgctcaccatcgtcttctgccagatcctgatggctgaagagggtgtgccggcgcccctgcctccagaggacgcccctaacgccgcatccctggcgcccacccctgtgtcccccgtcctcgagccctttaatctgacttcggagccctcggactacgctctggacctcagcactttcctccagcaacacccggccgccttctaa

SEQ ID NO: 47030 - DNA, 613 bp, Homo Sapiens
atggctgtgtttctgcagctgctaccgctgctgctctcgagggcccaagggaaccctggggcttctctggacggccgccctggggaccgggtgaatctctcctgcggaggagtctctcatcccatccgctgggtctgggcacccagcttcccggcctgcaagggcctgtccaaaggacgccgaccgatcctgtgggcctcttcgagcgggacccccaccgtgcctcccctccagcctttcgtcggccgcctacgctccctggactctggtatccggcggctggagctcctcttgagcgcgggggactcgggcacttttttctgcaagggccgccacgaggacgagagccgtacagtgcttcacgtgctgggggacaggacctattgcaaggcccccgggcctacccatgctctgtcccccccacatagctccacttgtgaaaaccgagccccagaggccagtaaaggaggaagagcccaagattccaggggacctggaccaggaaccgagcctgctctatgcggatctggaccatctagccctcagcaggccccgccggctgtccacagcggaccctgctgatgcctccaccatctatgcagttgtagtttga

SEQ ID NO: 47031 - DNA, 1477 bp, Homo Sapiens
ccccgcttccagtcagagttcaagttaaaacagaaaaaaggaagatggcaagaatattgttacttttcctcccgggtcttgtggctgtatgtgctgtgcatggaatatttatggaccgtctagcttccaagaagctctgtgcagatgatgagtgtgtctatactatttctctggctagtgctcaagaagattataatgccccggactgtagattcattaacgttaaaaaagggcagcagatctatgtgtactcaaagctggtaaaagaaaatggagctggagaattttgggctggcagtgtttatggtgatggccaggacgagatgggagtcgtgggttatttccccaggaacttggtcaaggaacagcgtgtgtaccaggaagctaccaaggaagttcccaccacggatattgacttcttctgcgagtaataaattagttaaaactgcaaatagaaagaaaacaccaaaaataaagaaaagagcaaaagtggccaaaaaatgcatgtctgtaattttggactgacgttttaagaatttgttaccttacagaagagcaagggcttaggggttggaggtggcagataaaagaggattttcaactcaaatcttgtttcctgctggcctggtctgcccacgagctagagcggggaaatgttgagctcaaatgggtaaattgagaccagaaaattattttttcaacctagagaatctcctcttacagggggatgcatataacagatcatgtatgtgtagttatttctaagtagtaattcttcccagctctttgatttgccatatataaaataggtgggtcgtatgtcttccctttagacatgatgttttctactcatttgtctctctggccaattgaattattaataaaaggtctgtattatcaaagagtattctagtatttttgttacttttaatatttgatgccttttggaggtaaagctgttgggggaagaagagtttttggacccatagatgtttggatgatgtctctaatttgtcatttagaaaaatctcaaaaatgatttcagttgaataacttgccttctaaatgatcaatttacttctcccccaattttaaagaagtatgtgtatatttaataggggaaggtagtttatggaaatatttttaatggaatagttttcccttaatatgtatccttgctggatattattcaagctgcaagtcatcaaaagacccagaaaaaaaaaagtctgtaggttattttctctacttctatttcaactttgaatttcctcttcctgtgcaaattcctctagtcaagtgtgatatatcaagaaatctgaggaggatgcaggttttgtggtcctgatgggcccacaagtttttctatatttaactggaaatatgctttgattttgtgttattaatataattcttttgatgtagtcatgagtttttctttgtttgcatataattaaaatgcctctacttaatgtca

SEQ ID NO: 47032 - DNA, 504 bp, Homo Sapiens
atgaaacatcagcgagttcacactggtgagcggccttatgaatgcaatgaatgtgggaagttatttagccagagctccagcctcaatagccatcggagacttcacactggtgaacggccttaccagtgcagtgaatgtgggaaattctttaaccaaagctccagcctcaataaccaccggagacttcacaccggcgagcggccttatgagtgcagcgaatgtgggaaaaccttcaggcagaggtccaatctgaggcagcacctgaaagttcacaaaccagacaggccttacgaatgcagcgaatgtgggaaagccttcaaccaaaggcctaccctcattcggcatcagaagattcacatcagagaaaggagcatggagaatgtgctccttccctgttcacagcacacaccagagataagctctgagaacagaccttatcagggcgctgtcaactacaagttgaaacttgttcatccaagtacccaccctggggaggttccctag

SEQ ID NO: 47033 - DNA, 1032 bp, Homo Sapiens
atgtctgtgctcaggcggatgatgcgggtttccaatcgctctctcctcgccttcatcttcttcttctccctctcttcgtcctgtctgtacttcatctatgtggccccaggcatcgattatcccgaaggcaataattcaagtgattatcttgttcaaacaacaacgtatctcccggaaaacttcacatactcaccatacctcccctgtccagaaaagctgccttatatgcgaggattcctcaatgtcaatgtaagcgaagtcagttttgatgaaattcatcaactcttctccaaggatttagatattgagccagggggtcattggaggccaaaagactgtaaacccagatggaaggtggcagttctcattcctttccgtaatcgccatgaacatcttccaatttttttcttacatctgattccaatgctccagaagcagcggctggaatttgcgttttatgtcattgaacagactggcacacaaccttttaaccgtgcgatgcttttcaatgtgggcttcaaagaggccatgaaagacagtgtctgggactgtgtaatcttccacgatgtggatcatctacctgaaaatgaccggaactattacggatgtggagaaatgccacgtcattttgctgcaaagctggataaatacatgtatattcttccatataaagaattttttggtggtgtaagtgggctgacagtggaacaatttagaaagatcaatggttttcctaatgccttctggggatggggaggagaagatgatgacctttggaacagagttcactatgctggatataatgtaaccagaccagagggagacttaggaaaatacaagtcaattcctcatcaccatagaggtgaagtccagtttttaggacggtataaattactaaggtattccaaggagcgtcagtacatcgatggactgaacaatttaatatataggccaaaaatactggttgataggttgtatacaaacatatctgtaaacctcatgccagagttagctccaatcgaagactattaa

SEQ ID NO: 47034 - DNA, 954 bp, Homo Sapiens
atgagctttgcccctaatgcttcacactctccggtttttttgctccttgggttctcgagagctaacatctcctacactctcctcttcttcctgttcctggctatttacctgaccaccatactggggaatgtgacactggtgctgctcatctcctgggactccagactgcactcacccatgtattatctgcttcgtggcctctctgtgatagacatggggctatccacagttacactgccccagttgctggcccatttggtctctcattacccaaccattcctgctgcccgctgcttggctcagttctttttcttctatgcatttggggttacagatacacttgtcattgctgtcatggctctggatcgctatgtggccatctgtgaccccctgcactatgctttggtaatgaatcaccaacggtgtgcctgcttactagccttgagctgggtggtgtccatactgcacaccatgttgcgtgtgggactcgtcctgcctctttgctggactggggatgctgggggcaacgttaaccttcctcacttcttttgtgaccaccggccacttctgcgagcctcttgttctgacatacattctaatgagctggccatattctttgagggtggcttccttatgctgggcccctgtgccctcattgtactctcttatgtccgaattggggccgctattctacgtttgccttcagctgctggtcgccgccgagcagtctccacctgtggatcccacctcaccatggttggtttcctctacggcaccatcatttgtgtctacttccagcctcccttccagaactctcagtatcaggacatggtggcttcagtaatgtatactgccattacacctttggccaacccatttgtgtatagcctccacaataaggatgtcaagggtgcactctgcaggctgcttgaatgggtgaaggtagacccctga

SEQ ID NO: 47035 - DNA, 1393 bp, Homo Sapiens
tgtatgtagcttctggcaagtatgaggcaaggatttcacagaagaacttggagcaaaaattcccactgtcatagctataggctgtccagtcttgagggagctgcaggaacaggaaaaagagaccttcagagaagacatggcttccagaaaagagaatgcgaagagtgcaaacagagtgctaagaataagccagttggatgcacttgaactaaacaaggccctggagcagctagtttggtcccagtttactcagtgctttcatggatttaaacctgggctgttagctcgctttgagccagaggtgaaagcgtgcttatgggttttcttgtggagattcaccatctactccaaaaatgccacagtgggacagtcagttttgaatattaagtacaaaaatgatttttcccctaacctgagatatcagccacccagtaaaaatcaaaaaatctggtatgctgtttgtacaattggtggcaggtggttagaagaacgatgctatgatttgtttcgaaaccatcatttagcatcatttgggaaagtcaagcagtgtgtgaattttgtgattggacttttgaaattaggtgggctgattaattttttgattttccttcagaggggaaagtttgcaactttgacagaacgtctcctaggtattcattctgtattttgcaagcctcaaaacatatgtgaagttggctttgaatacatgaatagggaacttctctggcatggttttgctgaatttctgatttttctcttaccacttatcaatgtccagaagttgaaagccaagctgtcttcatggtgtattcctcttactggtgcacctaatagtgacaatacattagccaccagtggcaaagaatgcgctctatgtggagagtggcccaccatgcctcacaccataggatgtgagcatattttctgttatttctgtgctaagagtagtttcttatttgacgtgtactttacttgtcctaagtgtggcacagaagtacacagtctgcagccactgaaatcaggaatcgagatgtcagaagtaaatgctctttagaaactaaaattgcttcctttgaggaaaaaaatgcaccgtgtttaaattcttaatattagtcatcctaagtataccatttatgtatcctttataaggaatgtgctcctagccactgtcttctcctttccaggcatgactgaaatctaatcactggaaaccatgtgattctaaatatattatgtaaatgttaatgtattatgttttttaaatcattgcattcaatttttaatgtcaagaataatggacagcttttgtcaggtgactactaacaatgctccttcattttactacttcttaaaacaaggttggattctaaagataaagattttggagactctg

SEQ ID NO: 47036 - DNA, 1769 bp, Homo Sapiens
atggagtcagctccggcagcccccgaccccgccgccagcgagccaggcagcagcggcgcggacgcggccgccggctccagggagaccccgctgaaccaggaatccgcccgcaagagcgagccgcctgccccggtgcgcagacagagctattccagcaccagcagaggtatctcagtaacgaagaagacacatacatctcaaattgaaattattccatgcaagatctgtggagacaaatcatcaggaatccattatggtgtcattacatgtgaaggctgcaagggctttttcaggagaagtcagcaaagcaatgccacctactcctgtcctcgtcagaagaactgtttgattgatcgaaccagtagaaaccgctgccaacactgtcgattacagaaatgccttgccgtagggatgtctcgagatgctgtaaaatttggccgaatgtcaaaaaagcagagagacagcttgtatgcagaagtacagaaacaccggatgcagcagcagcagcgcgaccaccagcagcagcctggagaggctgagccgctgacgcccacctacaacatctcggccaacgggctgacggaacttcacgacgacctcagtaactacattgacgggcacacccctgaggggagtaaggcagactccgccgtcagcagcttctacctggacatacagccttccccagaccagtcaggtcttgatatcaatggaatcaaaccagaaccaatatgtgactacacaccagcatcaggcttctttccctactgttcgttcaccaacggcgagacttccccaactgtgtccatggcagaattagaacaccttgcacagaatatatctaaatcgcatctggaaacctgccaatacttgagagaagagctccagcagataacgtggcagacctttttacaggaagaaattgagaactatcaaaacaagcagcgggaggtgatgtggcaattgtgtgccatcaaaattacagaagctatacagtatgtggtggagtttgccaaacgcattgatggatttatggaactgtgtcaaaatgatcaaattgtgcttctaaaagcaggttctctagaggtggtgtttatcagaatgtgccgtgcctttgactctcagaacaacaccgtgtactttgatgggaagtatgccagccccgacgtcttcaaatccttaggttgtgaagactttattagctttgtgtttgaatttggaaagagtttatgttctatgcacctgactgaagatgaaattgcattattttctgcatttgtactgatgtcagcagatcgctcatggctgcaagaaaaggtaaaaattgaaaaactgcaacagaaaattcagctagctcttcaacacgtcctacagaagaatcaccgagaagatggaatactaacaaagttaatatgcaaggtgtctaccttaagagccttatgtggacgacatacagaaaagctaatggcatttaaagcaatatacccagacattgtgcgacttcattttcctccattatacaaggagttgttcacttcagaatttgagccagcaatgcaaattgatgggtaaatgttatcacctaagcacttctagaatgtctgaagtacaaacatgaaaaacaaacaaaaaaattaaccgagacactttatatggccctgcacagacctggagcgccacacactgcacatcttttggtgatcggggtcaggcaaaggaggggaaacaatgaaaacaaataaaagttgaacttgtttttctcatgcata

SEQ ID NO: 47037 - DNA, 303 bp, Homo Sapiens
gctgctcgcccattgcctggatcgggggctactttgtaaaccaccaggaagactccagtgtttctgcttaatttttagatgtttgttaattgctcttggcctctcattaatcccctgtgggtcatccaggaaatatactcaccactgtctgttctctgagttttcatttccaggcatccgccctgcctggatctcctcacctgccaggaacttcctctccacaagccggccatcccagcaaaagttctaacaccaaaggatgactgccaggggcatgaaggggatgtgcttccagggcatttg

SEQ ID NO: 47038 - DNA, 1543 bp, Homo Sapiens
cccgacgcggcggagctgtggacaggagggatagtggcctgggagccagctctggagggtggtctggggcctgtggacagtgaactgtggcccactgttggggtggcttctctccttcctcctcccatagcccctctgccagagatgaaggtcagggacagttccctggagccggggactccctccttcccaaccccaggaccaggctcatgggacctgcagactgtggcagtgtgggggaccttcctccccacaaccctgactggcctcgggcacatgcctgagcctgccctgaacccaggacccaagggtcagcctgagtccctcagccctgaggtgcccctgagctctaggctgctgtccacaccagcttgggacagccccgccaacagccacagagcccctgagacccagccactgcctcccagcctggctgaagcggggccccccgcggacccgttggttgtcaggaacgccagctggcaagcgggaaactggagcgaggcaagtggttgctctaccacctgcggcctgggtgtggtctggaggccggtgcgctgtagctctggccgggatgaggactgtacccccgctggccggccccagcctgcccgccactgccacctgcagccctgtgccacctggcactcaggcaactggagtaagtgctcgcgcagctgcggtggaggttcctcagtgcaggacgtgcagtgtgtggatacacgggacctctggacactgcagcccttccattgtcagcccgggcctgccaaaccgcctgcacaccggccctgcggggcccagccctgcctcagctgttacacatcttcctggagggagtgctccgaggcctgtggcggtggtgagcagcagcatctggtgacttgcccggagccaggcctctgcgaggaggcgctgagacccaacaccacctggccctgcaacacccacccctgcacgcagtgggtggtggggccctggggccagtgctcagccccctgtggcagtggcgtccagcggcgcctagtcaagtgtgtcaacacccagacagggctgcccgaggaagacagtgaccagtgtggccatgaggcctggcctgagagctcccggccgtgtggcaccgaggattgtgagcccatcgagtctccccgctataagcgggaccacctgtccttcaggttctgcgagacgctgcacctagtgggctgctgccagctgcccactgtccgcacccactgctgccgctcgtgctctccgcccagccacggcgcccgctcccgaggccatcagcgggttgcctgccactgaccgtgccaggatgcacagaccgaccaacagacctcagtgcccaccatgggctgtggcggagctcctgccccctacgccctacgccctacgccctaatggtgctaaccccctctcactatccagcggcaggctggggacctcctcccccctcaaaaaaagtatttttttattctaacagtttgtgtaacatttattatgattttacataaatgagcatctaccattccaaagcaca

SEQ ID NO: 47039 - DNA, 1913 bp, Homo Sapiens
aaattcactgggtgcgctggaacgcggcacacagtagtagtatgccctgcttaatacatacaggacatatttgaggccccttccaggggtggggtgggaggacagagggatggggggtgcaccagacgacacagccagactgagaaaggtggtcccagagcagagacagggacctcgacgcatcctccatacccgctgcggggaaatggaccccaccagccagcacggggaggaaactgaggcctggcgaaagaaagatgcggcctgaggtgggacgtgaacccgcggccctgcagcccagacagcggccccggagtgaccaccagcttcaccgaagcccctttactgtgcccccgaggacacctgcctgccgttccccagggccgtcaccgccgatagcggtagcgcttgaagtgaaaccacagctggaagatgccgttggcaaactggcagcggaagccgtggcggtgcgagtattcccactcgcggttgacgatcttgaaagcgatgtcctcgtagggcggccccgcgtggaagcgcaggatggcgaaatccttgttgtcggcgcaggcctccaggaagtactcgggcgtggagcgcttgtcgatgaggtcggggtagaagatgttgaacttgtatccctgcacgatcttgggcggtgggttgtcaaagtcgtagtgcgtctggttgtacttgttccactcgaagcccgtgtgcacgcggttgaagaagcgcggcttgcgtggccggtacttgtcggcccacaggacggaggctgcccagggagtgctcggacagcggccggtaaaagcttccaccacctgtggccccaaggccagtgggccagcaagcccaggatgaatgaaggaacgccccagtgcgcgtgcaggtgacggaatgcacgctcagagacccgggggagaagcagcaagcagctccccactgacgccagcggcttcggccgggaaatgaggctggagaagccccgcccccagctcgccccactggccccaccccctggcctccagccccgcccttacccgtgacctggagctgctggcgcgagagctgcaggcgctgcaggtcctcatccggttccagcacgtgcgcgtccagtggcagctcgtgcgccgtgagcagccgcgggctgtacctgccggcgtcgtagtcgtccaggctctgctggatcaggtcctcctccatgagcaccgcctcgccctcgccctcgccctcaccgtccccgtcgccgtcgccctctgtcggggtcgcgccgtccacctcggcctccgcggggccgccctccgaggagggcccgggcggggtgggcgccgcgtcctcaggctccaggctgggaggagagagcgttggaggcgcggaggctgcccacggcccctccatcctgctccgcgtctgcatcggcgtccccggggtgccggccgggcctacctgcggctgggggactggggctcctgcttgaggatggggaacagcggctcgctctccacgccctgctcctgcttcagtttgtacagcttctgccgcagcacgtcctggtggcgctcacgcagcctgggacgcagagccggggtcacccgcatggaggcgaaggggctccgcgccccacccccaccgagattctcacgccccttattgctgcaaggaccctgagaaggtggcgagcagccacggctctggctgggacctttgcccaggcttggtcagttcagggtcaaggcttatgggagagaggacgagaggacgcaggtaccctggtgaaccatcccatggcagggagaggtgggtctctgtctcacgctgcagtctcagtgtcttgtggctggggctggccaggagaaggggcccagcaggacaccagccaacaagcatgataaatttagagacatttacaaatt

SEQ ID NO: 47040 - DNA, 392 bp, Homo Sapiens
tttttcccggccccccccaacccccccggacaggacccccttgagcttgtccctcagctgccaccatgagcgaccaagatcactccatggatgaaatgacagctgtggtgaaaattgaaaaaggagttggtggcaataatgggggcaatggtaatggtggtggtgccttttcacaggctcgaagtagcagcacaggcagtagcagcagcactggaggaggagggcaggagtcccagccatcccctttggctctgctggcagcaacttgcagcagaattgagtcacccaatgagaacagcaacaactcccagggcccgagtcagtcagggggaacaggtgagcttgacctcacagccacacaactttcacagggtgccaatggctggcagatc

SEQ ID NO: 47041 - DNA, 3521 bp, Homo Sapiens
atgatgctcaggttttccatgtgcaggggaaatgatgaaggttttgcaatggaacaaatatggttgctgctgcttctaacaattagagtgcttccggggtctgctcagttcaacggctacaactgtgatgccaacctccacagtagatttcctgctgaaagagacatcagtgtctattgtggagtgcaggctattacgatgaagattaatttttgcacggtacttttctcgggttattcggaaacagatctggcactgaatggaaggcatggggactcccactgcagagggttcatcaataacaacacctttccagcagtggtcatttttatcatcaatctcagcaccttggagggctgtggaaacaacctggtggtatccacaattcctggagtcagtgcttatggaaatgcaacttcagtgcaagtaggaaatatttcaggatatattgatactccagacccaccaacaatcatcagctatctacctgggcttctttacaaatttagttgtagttatccattggaatacctggttaataatacccagcttgcttcgtcctcagcggctatttctgtgagagagaacaatggcacatttgtcagcactttgaacctgctcctttataacgattcaacctacaaccagcagttaattatccccagtataggattacctttgaaaaccaaagtatttgcagctgtccaagccactaatttggatggcagatggaatgttttaatggattattgctatactaccccatcaggaaacccaaatgatgacattcgatatgatcttttccttagctgtgacaaggaccctcagaccaccgtcattgagaatggccgaagccagcggggccggttttcttttgaagtgttccgatttgtgaaacacaagaatcagaaaatgtccactgtcttcttgcactgcgttaccaagctctgcagagcagatgactgccccttccttatgccgatttgcagccacagagaaaggagagatgctgggaggaggacgacttggagcccccagagctcttctggcagcgcggtgctctctgctggtcccatcattactcggagtgatgagactccaaccaacaattcgcaacttggttctccaagtatgcctcccttccagctgaacgccatcaccagcgcactgatatcaggaatggtcattctgggagttacgagcttttctcttcttctgtgctcactggcccttctgcacaggaagggacccacaagtttagtgttgaatggcataagaaacccagtctttgactgactataacagattcctgctctctggagaaggcttcactgactaaactatgtgtgactgcagtcagtgttccgtctgaatttcatgtcagtccacattcaatatttgtaggtttgataaatttcacagtatagcttgtcagcataatgatagtgaaagaagtttattatattgctattgtcacttatgtacgtggcgagccgtatttttatgccaccagtgaatatattgacaataagtgaaaaatattcaggacttagggcttacaggatcagtaatatttcattttatttcagttttcttttgattgttggttaaaagataaaaggtgggagtagacaaaaaatgaaatgtgttgcatttcccccttaagcattaatggcatttagatttgcacacgtggtcctagaataaatgttgctttttgttttaatccggatattcccagcttcaggatgtgttttaataggactggccaatttggatacctgagatttaactactcattctatgacctcctgtgtttttggccgattttcatgtctgaccatattcattttaaaagaaactcttgggacatatctcttaacctggggcacccttttgtgtagaagatagtgaaaatagttgttagcttccaaggctactgctaagtggccctagatcattattcattagaataggaatggctgcgatcagttttcttcttctggttcaggtgagaacaccagcacatgttaactctcctcccaggtaaacagttcagctgctgttgcagctgtgcttccagcagtgaggtaactatgcaaagattatttttaattcaagaatcatcacatgtgaaaacaagctgtagttgtgaaaagagttcctagaagggtttttaacaatttagattccctttttcctaaaacaaaaaggaaacttaggttaagtgtagtttgcagaacattgttggaatctacataaaaagatattccttcccccatattttcgatgccaggcaataatcaggagagggtttctttttaaggtatcttcttgtaggtgtcataattgccatgaataaacaatattttcctctaacagtaaactgcaagaagcttctgatcctttatcagttttgcaaaaaagcaagctttaagcagcccatgttcttacaaaaaaaatcaacattctctttgtttaagctacctatgcactgaacaaacaaaacaatttaatagccaacaccaaaacccagcatgtgaagttactagaattgccatgttaactataagcaattgctgtaatcactaatttctattcaacatttgtgacccattagtccggacttaatttactatactgcatgcaaatcatcaagcaattgcttcaaaggaaatgtctacaatgtgagttaataattaaatcaatcctcaagttgaaaaacactttttctccaatttgcctgaatatttcaggaggaagtgtttatattataataattagctatataattgcatcaactttttatttcaaggtatagttgccaagtaaagtgggatctggaaagtctctggataatttctttacaaaaaaagtttaaatcacataaaaagccaatctactcttccctgtgttactttaaaataactttgaagtgactattctgagctttatctgtgttaacatgattaactgaccatactactaatgtgaccctgtatatacatggatagtattgaaatatgctggtaaatctatttcagatactttaagtgaattgccattgattctacgattaagttctgtgaataggacattatatcatttaagctgttttgtcaatttgatttttatgcttttggaacggctgctgtttcagctgttggccttttcaattctatactccattttatagaattgaataatggacacatgtcacttgggaagcaacgtaagtatcacattattttttgccaccctttcatcataaatggaagaatcagagttataatgagataaaccaggtctgttttttacaactttgttcttataaatctgcagttatatggagtatttagttatactgaattttacagttattatagtgtgaaaaaccttacaaaatatgtgcaaatgtttcttcagttttaatacctcaaactgttttttgcacttcaggggtaaggtctgatgacatgtaaaagatgatcgtttaataaaataattgtttaaaatgttta

SEQ ID NO: 47042 - DNA, 2207 bp, Homo Sapiens
ctatggtcaaatggacagaaaaggccagtgttatcattatgatcagacaaacagacaaggccagggttcccactacagtcaaccaaacagacaaggtcagagttcccactatggtcagccagacacacaagatcagagttctcactatggtcagacagacagacaagaccaaagttctcactatggtcagacagagagacaaggccagagttcccactacagtcagatggaccgacaaggccagggttctcactacggtcagacagacagacaaggccagagttcccactatggtcagccagacagacaaggccagaattcccactatggtcagacagacagacaaggccagagttcccactatggtcagacagacagacaaggccagagttcccactacagtcagccagacaaacaaggccagagttcccactatggtaagatagacagacaagaccagagttatcattatggtcagccagacggacaaggccaaagttcccactatggtcagacagacagacaaggccagagtttccactatggtcagccagacagacaaggccagagttcccactacagtcagatggacagacaaggccagagttcccactatggtcagacagacagacaaggccagagttcccactacggtcagacagacagacaaggccagagctatcattatggtcagacagacagacaaggccagagttcccactatattcaatcacagactggggaaatacaagggcaaaataagtacttccaagggactgaaggaacaagaaaagcctcttatgttgaacaatcaggaagatcagggaggctaagtcaacagactccaggacaggaagggtaccaaaaccagggacagggattccagtctagggactcacagcagaacggccaccaggtatgggagcctgaagaggatagccaacatcaccaacacaaactcttagcacaaatccaacaagaaagaccactttgtcacaaagggagagactggcaatcatgcagtagtgagcagggccacagacaggcccagaccaggcagagtcatggtgaggggctgagccactgggcagaggaagagcagggccatcaaacttgggatagacacagccatgagagtcaggaaggtccatgtgggacacaggacaggcgaacccataaagatgagcagaaccatcagagacgagacagacaaacccatgaacatgagcagagccatcagagacgagacaggcaaacccatgaagacaagcagaaccgtcagagacgagacaggcaaacccatgaagacgagcagaaccatcagagatgagacaggcaaactcatgaagaggatcaaaaccatcagcaacaacataatagacaaaactatgaggagaaagagaggtatcaaggatctcagaatcaaaaatcccaagtgacccacagaagctgtcctaacagagaaaaattccacatgaaagaggatgaccagagccaaggctcacagaaaagacacactgaaccatccttctatccaacccagagcagtgggaggccccaaaccagagaacagcgtggtcaccctgccaagggagctactgttcccaaccccccctatgactatgtgcaagagcagaaatcctacccatactaggctatgtgagcaccagaggtaaagcaacacaaagccaaaaaagaaacctatatgtcgagttcacctttaattcgatttaagagattgagaatgtatttcttccctctatcctctgctgtatctccctgcaaggatgtttttgagtactagcattcacgtaagggcttttgctttggctcctgtggataaaacatcaggaatttcaagcctcatagtctagactagaatgaaactcagttcaaggctgctacaagagccgagaacatagagtgcatctctgatgtttactacatctcccatgccaggctcttattccacaccagagggactgtccattagtgcctatcactagagctgaatggacccattccaattcaatacctttctagtttctgattatataaaataaagagaaagtatatgtcatatgtttgcaaattccaggggatcaagactattgattcatagctcctaagacctgaaaactcttctcaagaaaatctatgtgcagattatgaattgtattaaaatatctaataaataattgatgagc

SEQ ID NO: 47043 - DNA, 1539 bp, Homo Sapiens
gcacccgatcgggaagtggcgggcggagtcccgggtccagtcgccgcctcagctaccgccgctgccgccgccgccgccgccaccgccagtggtgagaccccgacctggcgggtcagcgctgggcgtgcgtgcgggcaggcgggggcgctgacgagaagcaggaagagggtgcagtgccggcgtgggcggccggccgaggcggaggcgcaggaagggggcggcgagtcgtgcgaggctgcccttctcactcagcattatggatccaagcctgttgagagaaagggagctgttcaaaaaacgagctctttctactcctgtagtagaaaaacgttcagcatcttctgagtcatcatcatcatcgtcaaagaagaagaaaacaaaggtagaacatggaggatcgtcaggctctaaacaaaattctgatcatagcaatggatcatttaacttgaaagctttgtcaggaagctctggatataagtttggtgttcttgctaagattgtgaattacatgaagacacggcatcagcgaggagatacgcatcctctaaccttagatgaaattttggatgaaacacaacatttagatattggactcaagcagaaacaatggctaatgactgaggctttagtcaacaatcccaaaattgaagtaatagatgggaagtatgctttcaagcccaagtacaacgtgagagataagaaggccctacttaggctcttagatcagcatgaccagcgaggattaggaggaattcttttagaagacatagaagaagcactgcccaattcccagaaagctgtcaaggctttgggggaccagatactatttgtaaatcgtcccgataagaagaaaatacttttcttcaatgataagagctgtcagttttctgtggatgaagaatttcagaaactgtggaggagtgtcactgtagattccatggacgaggagaaaattgaagaatatctgaagcgacagggtatttcttccatgcaggaatctggaccaaagaaagtggcccctattcagagaaggaaaaagcctgcttcacagaaaaagcgacgctttaagactcataacgaacacttggctggagtgctgaaggattactctgacattacttccagcaaatagggaacagttttgccctggaacagagttacagatacacaatcaagagtgttcttgctgatgctcggggtctgaagactgtcttcctatctgcttcttgcggctgaggagaggagcagttcagtttacaaaacaagtgcaaattaccaaactcaaagcttatttgagtagaatgggctcatgggcaatgtgatgttccctgttaaccttctgttactccctgggagaaaggcgctgagcgtggcatgcaggtgtctttgctgtgtttttctccacttctaaatggttcctggttcctttcttcctcgtttgttactttagagcaagtttgcccatagtcttgaatgcaatatttgtttattccaaaagaacatatttataataaaatcactgtagaaggatttttaaga

SEQ ID NO: 47044 - DNA, 632 bp, Homo Sapiens
cttcctcggaactgttgcccacatgcagccccggacacagcccctagcccaaaccctacccttcttcctcggaggggcccctcgagacactgggctgcgggtgcctgtcattaagatgggcacagggtgggagggcttccagcggaccctgaaggaagtcgcctacatcctcctctgctgctggtgtatcaaggaactgctggattaatggtagcagggaactgcctcctctccccaccagcaccatggctggcatcgctcagcccccagcccaattgccatcaagactcctgaagccagctgtgcttgaccaaggatgggccataaacaatgagtaaacagtaaagtgtggatcctgctttgagctgtgtcatctagcagacctgcctcatctctgagcctccttcattcccaacccctgcctctggtggacctctggtgggcaggagcttggactgctctggctaggaccccagtaagattgtggcaagacctggcactcctccaagcttggcacagtgagcccaccagctcagatggttgatcttaccataccctcatagtaccaagaatggactgccccctaagaaacctgtttgagaatcactgaattataaatataatccataggc

SEQ ID NO: 47045 - DNA, 732 bp, Homo Sapiens
atgtcacctgaccaattcctcctgactgttagcgccctgcagcacgcccgtaattccggggaatttgcctatccctgtaggccccaaacagaaattactgatgtctggggaccttcaatttcatacccaaggaaggtcttgaatttcaaaggaaaatcaatccaacgtgcagttgatcggttgagattgagcaatcctcctatagatgtgaaacgaaccagtattccccttgaaatccagaaactgcagcccaacttgaagatctctttgcacagtcctagagcccagtccaccatacccgagcccatgattatccgctccaggttctctggcagcttaaagggtggagaccaagtgaccagttcaattgaaagggctgtgtgcagtacgggtcccctgaccagtatgcaggtcattaaaccaaaccgcatgctagctccacaagtgggcacagccaccctgtctcttaagaaagaacggcctcgcatctatacagcccttgatccttttagagtgaacgctgagttcgtgctgttgaccgtgaaggaggagaaggagcaccaggaagccaagatgaaggaatatcaggccagggagtccactggagtggttgatccaggaaaagccagcaaagctgcatggatcaggaagatcaaaggcctgcctattgataatttcacgaagcaagggaaaacagcggcccctgaacttggacaaaatgtatttatctaa

SEQ ID NO: 47046 - DNA, 466 bp, Homo Sapiens
accactgctggctttttgctgtagctccacattcctgtgcattgaggggttaacattaggctgggaagatgacaaaacttgaagagcatctggagggaattgtcaatatcttccaccaatactcagttcggaaggggcattttgacaccctctctaagggtgagctgaagcagctgcttacaaaggagcttgcaaacaccatcaagaatatcaaagataaagctgtcattgatgaaatattccaaggcctggatgctaatcaagatgaacaggtcgactttcaagaattcatatccctggtagccattgcgctgaaggctgcccattaccacacccacaaagagtaggtagctctctgaaggctttttacccagcaatgtcctcaatgagggtcttttctttccctcaccaaaacccagccttgcccgtggggagtaagagttaataaacacactcacgaaaagtt

SEQ ID NO: 47047 - DNA, 615 bp, Homo Sapiens
ctaatacagtacatcagtgaaactaacataagcgttgaacatctggctaatgttctttctgaaaaaactaggagcagtagctgggtggtggtgttcaaagccctggttactgtacatcacctcatggtgcacggaaatgagcgtttcattaaacatgtttcatgtcagagctctttgttcactttacacaatttcctggataaaagtgtcatagaaggctatactatgtcattcatcagacgatacagcaagtacttgaatgaaaagtcactcgcatatagaatgatctcatctgacatcacaaaaaccaagagagggtcagtaaatatcattagtttgagaaataattttctaactgtggtgttattggttacgtttttatttaattttcaggcaaatcctgatgaactaactaatggtataatacatgctgcttttatgctcctctttaaagattctctttgtctctttgcagcttataatgaagggatccttaatctgctagacaaatattttgacatgaggaagaaccaatgcagggaaagtttggatatttacatcaggttccttagaggaacaaccaaattgacacagtttctgaaagttgcagaggta

SEQ ID NO: 47048 - DNA, 312 bp, Homo Sapiens
atttcaggatccagtggtgatactgtgatggcccagactccactctcctggcctgtcgcctctagagagacccccatatcctgtaggtctagtcagagcctcttgtccagtgatggatacacctattcgtattggttcctgcagaagccaggccagtctccacagctcctgatctattttgtttcaaaccgggcctctggagtcccagacaggttcaatggcagtgggtcaggcactgatttcacactgaaaatcagccgggtggctgaagatgttggggtttattactgcatgcaggctctgcagcttcct

SEQ ID NO: 47049 - DNA, 312 bp, Homo Sapiens
atgacatttccctatgagttttttgctcggcaaggaatccacgacatgctggaacacggtgggaacaagatcctacctgtccttccacagctcattatcccgataaaaaatgccttgaacctccgaaaccgacaggtcatctgtgtcactctcaaggtcctccagcatctggttgtgtcagctgagatggtgggcaaggccttggtgccttattaccgtcaaatcctccctgtcctgaacatctttaagaatatgaatgacctccctggttgcgcctgcccggagggaaggattattctgagttgtctgtaa

SEQ ID NO: 47050 - DNA, 414 bp, Homo Sapiens
aggaagtacgagtatttggatcatacggcggatgtgcagttacacgcatggggagatactctggaggaagcattcgagcaatgtgcaatggccatgtttggttacatgacagatactgggacagtggagcccctcccaacagtagaagtagaaacccaaggaaatgacttacagactcttctgtttcactttttggatgaatggctttataagttcagtgctgatgaattcttcataccccggaaagtgaaagtacttagtattgataagaaatttcaaattatgatcgggtggggagaagagttttcattgtccaagcatcctcagggaacagaagtcaaggcaataacatattcagcaatgcaggtctataatgaagagaagctggaagtttttgtgatcattggcatttaa

SEQ ID NO: 47051 - DNA, 2023 bp, Homo Sapiens
tctccctgggagtcgcgcagagtggagtcaaaggcaaccagtgctcgctgcggtctctggggatcgggaccgcggcggcggcccgcgagcgggatgttccggggcttgagcagttggttgggcttgcagcagccggtggcaggcggtgggcagcccaatggagatgctccacccgagcagccgtccgagacggtggctgagtctgcggaggaggagctgcagcaagcgggagaccaggagctcctccaccaggccaaagacttcggcaactatttatttaactttgcatctgctgccacaaaaaagataactgaatcagttgctgaaacagcacaaacaataaagaaatccgtagaagaaggaaaaatagatggcatcattgacaagacaattataggagattttcagaaggaacagaaaaaatttgttgaagagcaacatacaaagaagtcagaagcagctgtgcccccatgggttgacactaacgatgaagaaacaattcaacaacaaattttggccttatcagctgacaagaggaatttccttcgtgaccctccggctggcgtgcaatttaatttcgactttgatcagatgtaccccgtggccctggtcatgctccaggaggatgagctgctaagcaagatgagatttgccctcgttcctaaacttgtgaaggaagaagtgttctggaggaactacttttaccgcgtctccctgattaagcagtcagcccagctcacggccctggctgcccaacagcaggccgcagggaaggaggagaagagcaatggcagagagcaagatttgccgctggcagaggcagtacggcccaaaacgccacccgttgtaatcaaatctcagcttaaaactcaagaggatgaggaagaaatttctactagcccaggtgtttctgagtttgtcagtgatgccttcgatgcctgtaacctaaatcaggaagatctaaggaaagaaatggagcaactagtgcttgacaaaaagcaagaggagacagccgtactggaagaggattctgcagattgggaaaaagaactgcagcaggaacttcaagaatatgaagtggtgacagaatctgaaaaacgagatgaaaactgggataaggaaatagagaaaatgcttcaagaggaaaattagctgttcctgaaatagaagaataatccttaacagtctgcaaactgacattaaattctagatgttgacaattactgaatcagaaggcatgaaagagtataattttatgaaattcaaaattattcttttttcaagttgaaacttgcctcttctactttaaaaaagtatatagaacagttacttctaataatcagaaagagatgttttatagaacatttctttaatataaagttagagatgtcttcataggcagtatggctatctttgccacagaaacataagtaaaattttagagttctgttttccatgaggtcaaaaatataatttattcctcagtcatggttttctaaatatctgtactccacattccattttaattgatatgagggtgttaaagtacctacttaatgggttgattactatcaaaatgaccaaattataccaaagaacttaagaggaagcactttcagaactattcacttgccaggtattttctaaaattccacctgaaagccaaaagataaaataaataagttgattttaatgatataagcatcacacaattttacattaagaaatactgtgcaggccatgcgtggtggctcaggcctgtaatcccagcactttgggaggccgaggtgggcagatcaccggaggtcaggagttcgagaccagccttgccaacatagtgaaaccctgtctctactaaaaatacaaaaattagccgggcatggtggcaggcacctgtaatcccagctactagggaggcttttgaacccaggaggcagaggttgcagcgagctgagatcgcgccactgcactccagcctgggtgatagagtgagattcagtctcaaaaaaaaaaaaaaaaaaaa

SEQ ID NO: 47052 - DNA, 2100 bp, Homo Sapiens
agcgcggggcaggaggagtacctcggccaagaaaattatgcatgcgttagggaagctctgagagaatggctgtggaagctctccactgtggtttgaatccacggggtattgatcaccctgcccatgctgaaggtattaaactgcaaattgaaggtgaaggtgtggaatctcaatccattaaaaataaaaatttccagaaggtgcctgaccagaaaggaactcccaagcgactgcaggcagaagctgagacggctaagtcagctacggtgaagctatctaaaccggtggctctatggacccagcaggatgtctgcaagtggttgaagaaacattgtccgaatcagtatcagatctacagtgagtcattcaaacagcatgacataactgggcgagccctgctgagacttactgacaaaaagctcgagcgaatggggattgcccaggagaacctccggcagcacatcttacaacaggtgctccagctgaaggtgcgagaagaagtcagaaatctacagttactcacacaaggtaccctattgcttcctgatgggtggatggatggggagattagaagaaagaccaccttactattaggacagacaggagtcagggagaatttgttattgtttcttcacagaatttccatcatagaaaatagtatacagatttaagattacttccctttgaaaacttttttcatagctcactagggagaaggatgcacaaataagtaatggatgagcaaacagaattacctgagctaacttcaaggtggtcacgtacagttgtatggattgtgtactgcacaaccccagagaataccagtcacatcaatcagggtacgattgcactcactagagttgtataatgtgcagcctgcacaactgtacagtccagctgtagctatcttcacctgcgccaattgtgagggcgctttagcatttgagtgattcaatagttacgatgaccagtgatataagtggagtttttgttgtatttttgttttgcttttcaccggttagtgggagaaaaacattttagatatgtattactatacatgaatgtattatacacacacactttagagattgtaagaaccccatttagcttcttgaaagtggaataatttttataatagactatagtgaatctaaaactacactgttaagagtatataattcttaacaggaattataaataacttcaatatgatgagagcacttaagatctcaataactgtggaagtgacaaaataaagctagaattcgaagaaagccttaagttacactatatgtaactgatatgtctacatgagatttggatgctatcaaccttcattggctataaactttatttgttttattttagcgtccattgtacatcgttttaaatgaaaggatgataaaatatgtgtttttgagagccttgagtatttgtcattctgcagaatattgtaattgcatgcataccgatattggagaaatctgggtcagccaagtttcatgttattgcatttagattaacctagtaatagtccatttgcctagaggaaataatgtgctccctgaaagatgactattctagaaggataaatatagatttcaagtgatcgtaaaatagtattgtttgtctcatatgcattatttgcattttgtcctcagagatttccaatggtgaatttactggtatactaagtgatttaaatttgaatgtgaaatactgataggcttttaagcttcttttaagaagtagatagaaatacgaagattatgataagaaagtctgtcacagtgctatttggaaaacggaaaatttacaagcaacctagaggtccagcaatgtgaaaagaatcaagtaattctgcttaaattcataagattcagtataatgcccagttattaaaattacatctttaaagaatacatgacaacatgggaaattacgtaagtcatacaaggtgggaggaaaggtcatgtgtaaaattgtatgcataatataagcccaattttgtaaaaaccatatattcttatatgtacagaaaaaaaggactgcaagtaaatatgccaaccattttaataaaggatctctctggattgtggg

SEQ ID NO: 47053 - DNA, 1134 bp, Homo Sapiens
agtgcactggtatttcccaataagatatcaactgaacaccagtctttggtgttagtgaagaggcttctagcagtttcagtatcctgtatcacgtatttgaggggaatattcccagaatgcgcttatggaacaagatatctagatgatctttgtgtcaaaatactgagagaagataaaaattgcccaggatctacacagttagtgaaatggcagatgctaggatgttatgatgctttacagaaaaaatatgtatacacaaacccagaagatcctcagacaatttcagaatgttaccaattcaaattcaaatacaccaataatggaccactcatggacttcataagtaaaaaccaaagcaacgaatctagcatgttgtctactgacaccaagaaagcaagcattctcctcattcgcaagatttatatcctaatgcaaaatctggggcctttacctaatgatgtttgtttgaccatgaaacttttttactatgatgaagttacacccccagattaccagcctcccggttttaaggatggtgattgtgaaggagttatatttgaaggggaacctatgtatttaaatgtgggagaagtctcaacaccttttcacatcttcaaagtaaaagtgaccactgagagagaacgaatggaaaatattgactcaactatactatcaccaaaacaaataaaaacaccatttcaaaaaatcctgagggacaaagatgtagaagatgaacaggagcattatacaagtgatgatttggacattgaaactaaaatggaagaacaggaaaaaaaccctgcatcttctgaacttgaagaaccaagtttagtttgtgaggaagatgaaattatgaggtctaaagaaagtccagatctttctatttctcattctcaggttgagcagttagtcaataaaacatctgaacttgatatgtctgaaagcaaaacaagaagtggaaaagtctttcagaataaaatggcaaatggaaatcaaccagtaaaatcttccaaagaaaatcggaagagaagtcaacatgaatctgggagaatagtcctccatcactttgattcttctagtcaagagtcagtgccaaaaaggagaaagtttagtgaaccaaaggaacatatataa

SEQ ID NO: 47054 - DNA, 3142 bp, Homo Sapiens
gtggcccgagtcgggaaaatggctgcgagtacctccatggtcccggtggctgtgacggcggcagtggcgcctgtcctgtccataaacagcgatttctcagatttgcgggaaattaaaaagcaactgctgcttattgcgggccttacccgggagcggggcctactacacagtagcaaatggtcggcggagttggctttctctctccctgcattgcctctggccgagctgcaaccgcctccgcctattacagaggaagatgcccaggatatggatgcctataccctggccaaggcctactttgacgttaaagagtatgatcgggcagcacatttcctgcatggctgcaatagcaagaaagcctattttctgtatatgtattccagatatctgtctggagaaaaaaagaaggacgatgaaacagttgatagcttaggccccctggaaaaaggacaagtgaaaaatgaggcgcttagagaattgagagtggagctcagcaaaaaacaccaagctcgagaacttgatggatttggactttatctgtatggtgtggtgcttcgaaaactggacttggttaaagaggccattgatgtgtttgtggaagctactcatgttttgcccttgcattggggagcctggttagaactctgtaacctgatcacagacaaagagatgctgaagttcctgtctttgccagacacctggatgaaagagttttttctggctcatatatacacagagttgcagttgatagaggaggccctgcaaaagtatcagaatctcattgatgtgggcttctctaagagctcgtatattgtttcccaaattgcagttgcctatcacaatatcagagatattgacaaagccctctccatttttaatgagctaaggaaacaagacccttacaggattgaaaatatggacacattctccaaccttctttatgtcaggagcatgaaatcggagttgagttatctggctcataacctctgtgagattgataaatatcgtgtagaaacgtgctgtgtaattggcaattattacagtttacgttctcagcatgagaaagcagccttatatttccagagagccctgaaattaaatcctcggtatcttggtgcctggacactaatgggacatgagtacatggagatgaagaacacgtctgctgctatccaggcttatagacatgccattgaggtcaacaaacgggactacagagcttggtatggcctcgggcagacctatgaaatccttaagatgccattttactgcctttattattatagacgggcccaccagcttcgacccaatgattctcgcatgctggttgctttaggagaatgttacgagaaactcaatcaactagtggaagccaaaaagtgttattggagagcttacgccgtgggagatgtggagaaaatggctctggtgaaactggcaaagcttcatgaacagttgactgagtcagaacaggctgcccagtgttacatcaaatatatccaagatatctattcctgtggggaaatagtagaacacttggaggaaagcactgcctttcgctatctggcccagtactattttaagtgcaaactgtgggatgaagcttcaacttgtgcacaaaagtgttgtgcatttaatgatacccgggaagaaggtaaggccttactccggcaaatcctacagcttcggaaccaaggcgagactcctaccaccgaggtgcctgctccctttttcctacctgcttcactctctgctaacaatacccccacacgcagagtttctccactcaacttgtcttctgtcacgccatagttggctactctcaagccagcacattgttagacccatcttaattaagccttacctccatgtaaagaacagcacgtctgttccaaggacctcagctcttcttgtttctacagatggcaacagctccatagggacagcttgtataattaccttcagaggccaactgacagaatcctggcaggaacagacattatcttgccagttagaagtacttctgtctcacttatgtccaaagagtggctatagatcttggccttcttccctgaatgctttttttttttggcccccaagaaagtcccttttatagcactttagcacaggcaatgctacaggaacaaagtttcaatgctgctgagagtgaaagaaaggaggaaagtctgccactctaccctgagctggcagtagggcactgagtaccctaggaagaagtcagagcaatggatacaaatgaccttgctcttggatttgctgagcatgatccctattctgatgtcagagattaggtttaaatggaatagagctatccatttgttcttactctctagggagacaatcttccaaaacagttttgggggggtcttctaaagctttcaaattggaagtaactttattcaactagagttgaataaaagaagggcaaaaataatctcacagagcttggaactgctgatagcccttactgagggcaaaagatggctatattgttagctatactcctaccaaagcaagcaaggagataggattatagataatttcacggacatttggaaataacattggtgattatacagacaagaataaactcacttcaagctggtctgttttaataaattttcaacgtaattgtctatttttttccctcccatctgcaacagaatacatttttttcagcctttatctagatgaggtaaagggaatcattcttatggtgctcttggagagtttcaggcctgtgcatgtgtgtacagcaggaggtaatatgctataatgtctgctgtaatatatttgcacagtagatgctatggatcattctgagctcagggtccagactttattcttattcccagaattttgtgttacgtttttacctcctaacatatgacacttcatcttatattaaggaaggtttagaatatctaatacgacttgaattcatttgttactaagccttctcaggcaagctgtatactagttactggtctccactgccatgccttttcaaggttcccatggtccagaatgatgtttgattcttaatttttctgtcccttttataatttgttttaatgattttgctacatttggaattcaataaaaaatgtgaacaataata

SEQ ID NO: 47055 - DNA, 2100 bp, Homo Sapiens
ggagaggccgggctggccagggcttcggcctccggcgtcgggaaatggcggcggggggcaggatggaggacggttccttggatatcacccagagtattgaagacgacccacttctggatgcccagcttctcccacaccactcattacaagctcactttagaccccgattccatcctcttcctacagtcatcatagtgaatcttctgtggtttattcatctcgtgtttgttgttttagcatttttaacaggtgtgctttgttcttatcctaatccaaatgaggacaagtgcccaggaaattacacaaacccattgaaagttcagacggttataatccttgggaaagttattttgtggattctccatttactccttgaatgctacatccagtatcaccacagcaaaatcagaaaccgaggctataacttgatctaccgatcaacaaggcatctcaagagacttgcgttgatgatacagtcctctggcaacacagtgcttctcctcatactgtgcatgcagcactccttcccagagcctggcagattgtatcttgacctcattctggccatcttggcactggaactcatctgttccctgatatgtctcctcatttacacagtgaaaatccggagatttaataaagctaaaccagagcctgatatacttgaagaagaaaaaatctatgcttaccccagcaatattacctcggagactggattcagaactatttcaagcctagaagaaattgttgaaaagcaaggagacaccattgaatacctgaagcgacacaatgcgctgctgagtaagcgattgttggctctcacttcctcagacctgggctgtcagccaagtagaacgtgagaggctcacggtcatgacagcaattgcagaggaacccagagtaattgagactgactgaccacctgacaagctgccacggggaactgcagcttttgctgaatagcattttacagtgtttgttggaaacctgaatttggttctgacttctgtggctgtttaaaatatagggcttgtgggtcacttgaaaagtacctgtagaagcccggataacttgaggggaatgtctgtttgtacttttggaaattatttaactgcttggtttatcctaggatcagaggctaaacaactccatagtcaacacttttccacctgacattagaaccctgtaatgatttcattatggataggggaagtctaacaagacaatcgattttaaacagggttttaatcaaataagttcttcccacttttaagctgatgaaagaagtcattatttcttgtgaatattttttcctggagagccttatcatgtattttatatgcttatgtggtgttggatgacatcatggaccatatagcttttatagagaatttttctcaccataggactgaggtctcaccaggtgatctactatgcaaattcctacagttttctattcttaagaaataagggctgggcacggcggatcatgaggtcaggaaattgagaccatcctggctaacacggtgaaaccctgtctctactaaaaatacaaaaaaaattagccgagcatggtggcgggcacctgtagtcccagccacctgggaggctgaggcaggagaatggtgtggacccaggaggcggagcttgcagtgagccgagatcacgccactgcactccagcctgggcgacagagcgagactccgtctcaaaaaaacaaaaaagaaaaagaaaagaaataagatatgatgattgattacttggaccagtgttagaccgacctgtgttagacgaacctgtgttgcctattatattggcagcaccttccattagcaatagctgaaaaattcagagaagaatttagaactttcactttatttttgccattcttcaagaagttgctgtatatttcagtctggttataccttcaattgatcaataacttcaattataggaaaggcatcttctataattttaaattactgtaaaaaaaagataccttttaaagccttggattatacttaaaaattgtaatggaagaaatgcatattaagttatatgcagatattaaacatatctgattctgaagataaaactgaa

SEQ ID NO: 47056 - DNA, 702 bp, Homo Sapiens
atggcgctcaacaatttccttttcgctcagtgcgcctgctacttcttggccttcctgttcagcttcgtggtggtggtcccgctgtccgagaacggccacgacttccgcggccgctgcctgctcttcaccgagggcatgtggctgagcgccaacctcacggtgcaggagcgcgagcgcttcacggtgcaggagtggggcccgccggccgcctgccgcttcagcctgctcgccagcctcctgtctctgctgctggccgccgcgcacgcctggcgcacgctcttcttcctctgcaagggacacgagggctccttcttctccgccttcctgaacctcctggtcagcgccttcgtggtcttcctggtcttcattgccagcaccatcgtgagcgtgggcttcaccatgtggtgcgacaccatcaccgagaagggcaccgtaccccacagctgtgaagagctccaggacatcgacttggagctgggcgtggacaactccgccttctacgatcagtttgcaattgcccagtttggcctctgggcctcatggctggcctggctggccatcaccacgctggccttcctgaaggtctaccacaactaccgtcaggaggacctgctggacagcctgatccacgagaaggagctgctgctggcccggccgtccccacgcacctccttccaagaggagaagagcgctgtcatttag

SEQ ID NO: 47057 - DNA, 594 bp, Homo Sapiens
gtgacttgtcccacctgccagggcagtggcaagattccccaagagctggagaagcagttggtggctctcattccctatggggaccagaggctgaagcccaagcacacgaagctctttgtgttcctggccgtgctcatctgcctggtgacctcctccttcatcgtctttttcctgtttccccggtccgtcattgtgcagcctgcaggcctcaactcctccacagtggcctttgatgaggctgatatctacctcaacataacgaatatcttaaacatctccaatggcaactactaccccattatggtgacacagctgaccctcgaggttctgcacctgtccctcgtggtggggcaggtttccaacaaccttctcctacacattggccctttggccagtgaacaggtgactcccctctccctggccagccctgcccactggtgtgtggatgtgtgcaaaatctgtacctggctggaaatcaaagtccaccatgtgcttttgcacatccagggcaccctgacctgttcatacctgagccattcagagcagctggtctttcagagctatgaatatgtggactgccgaggaaacgcatct

SEQ ID NO: 47058 - DNA, 198 bp, Homo Sapiens
gctgagctcaggagtagcagccaaggttcccaaaaaatagtcgaggagttgcaggaacctgtctctccagataccatggaaaacatccagggaaatattgccagagaagctgcatccgaggaagctttaacagcagtccaaagtggaaatgttagtgaaccggaggtcgctggattttatgaattttgttttcagtct

SEQ ID NO: 47059 - DNA, 258 bp, Homo Sapiens
atggcaaaagacatcaagaccaaaatcaagaactacaggactgccccttttgacaggcgcttccccaaccagaaccagaccaggaatggctggcagaaatacctggacctccaccacttcaagaaggcaatgactgctaaaggagggggtgatgtctctgtttgtgaatggtaccagcatgtgtacaagtctctctgccctataccctgggcctcagcctgggatgaccatgggcagaaggcacatttcttgggaaga

SEQ ID NO: 47060 - DNA, 3404 bp, Homo Sapiens
cctttaagagcggctggccaggcacggcctccgcctctcagtacgcggagcgccggcggtcacctggggctcgcggagcggccagatcgcggcggagtcggcgcgcttccccgagggaaggtgggagaggggacccggacgcgaggtgccccgaagccctctcgagcgtaaccgtcccgcgcctctctgaggcggaggatgcgggagcgcatctgggcgccgccgctgctgctgctgctgccgctgctactgccgccgccactgtggggcggccccccggacagcccacgccgggagctggagctggagcccgggcctctgcagcccttcgacctgctctacgccagcggcgcggccgcctactacagcggagactacgagcgagcggtgcgcgacttggaagcggcgctgcgcagccaccggcgcctgcgggaaatccgcacgcgctgtgcccgccactgcgcggcgcgccacccgctcccgcccccgccccccggcgagggccccggcgctgagctgccccttttccgctccttgttggggcgggcgcgctgttatcgcagctgtgagacccagcgcctcgggggccccgcatcccgccaccgcgtcagcgaggatgtgcgcagcgacttccagcgcagagtgccctacaactacctgcagcgggcctacatcaagcttaaccagctcgaaaaagcagtggaagcagctcacacatttttcgtggctaaccctgagcacatggaaatgcagcagaacattgagaattacagggcgacagctggtgttgaagcattgcagttggtagacagagaagccaagccacacatggagagttacaatgcaggagttaaacattatgaggctgatgactttgagatggctatcaggcacttcgaacaagccttaagagaatatttcgttgaagatacagaatgccggaccctatgtgaggggcctcagagatttgaagaatatgagtatttagggtataaggctggtctgtatgaagctattgcagatcactacatgcaggtgcttgtttgtcagcatgaatgtgtgagggaacttgccacccgccctggccgcctctctcccatcgagaattttcttcctctgcactatgattacctacagtttgcctactatcgagttggtgagtatgtgaaagccctggagtgtgccaaagcctatcttctatgccatccagatgatgaggatgtcctagacaatgtggattactatgagagtctgctggatgatagcattgacccggcatccattgaggccagagaggatttaacaatgtttgtgaaacgtcataagctggagtctgagctgataaaatcagctgcagaaggtctggggttttcatacactgaaccgaattattggatcagatatggaggacgacaggatgagaatcgggtcccttcaggagtgaacgtagagggagcagaagttcatggattctcaatgggaaaaaagctatcacccaagatagatcgagacctaagagaaggtggtcctctactctatgagaacatcacattcgtctacaactcggagcagctgaacgggactcagcgggttctcctggataacgtcctgtcggaagaacagtgccgggagctccacagcgtggccagtggaatcatgcttgttggtgatggatacagaggaaaaacttcaccccatacacccaatgaaaagtttgaaggtgcaactgtcctgaaagcactcaaatctggttatgaaggtcgagtcccactgaagagcgctcgtctgttttatgacatcagcgaaaaggctcgaaggattgtagaatcttattttatgctgaactcaactctgtatttttcctatacacacatggtctgccgaacagccctgtctggtcagcaggatagaagaaatgacctcagtcatcccatccatgctgacaactgtttgttggatccagaggccaacgaatgctggaaggagcctcctgcttacacatttcgagactatagtgctctcctatatatgaatgatgactttgaaggaggagaattcatattcacagagatggatgctaagactgtgactgcctctataaaaccaaaatgtgggcgcatgatcagcttctcatctggaggagagaaccctcatggggtgaaggcagtcaccaagggaaagaggtgtgctgtggctctgtggttcaccttggacccactttatagagaattggagcgaatacaggctgatgaagtgattgcaattctggatcaagaacagcaagggaagcatgaactgaatatcaaccctaaagatgagctataaaaatgagaaagaatgttctatcaaatatttatttaaattgttaatcttatgagaacctttttatttttgtacagagccatggtataaattaacaggttaatgtcagtcatcagatcttccttctcttcctaaggatgcttgtgttgcctcaatctatcaatctatctttcttgttttgggttgttttctctctctctctctctctctctcttcttagagacatggtctaaccatgttgtctaggatatagggcagtggctattcacagatgtgatgatagcacactggagcctcaaactcttaggctcaggcgatccttcaagcctcccggggagctgggaccacaggcacgtgccaccacacccagctctctttcttggtttttcatcatttcatgtatctatcaaagcccagttcacctcctcccccaaacacacacacacacacacacacacacacacacacacacaattaagttgctgcaaattcaaaagcttagagagaataagcttcttggtggtgaaactacaactctcacgtgtgctccagttctaaaattaacctgtgcctggtctctgaagccctttcttgctctgtgcctttcagccacatccttaggtgctaacggccatgagctccgactctccaaagtgagctccactttgggtctgaggagcccctggcagagtccacgctgcctcaggtatcatgggcgtaatgatcacccaggctccgggagatctcatggatgattactgtatgagacagaggggacttcagtctttccagggccttggtggaatttttggctctggtgttttcgccagacaataaacttacactggaagctttgattcaccctccacagtactccagaaaggactgtcctataagttgtacactttaaaaggtcatgtagaggttgtagtagaatggcttttcaccctggtgactttggaagaaactcttgaatactgcctgcatccgggcaccatggccaggttgcctaggagtggggtccactgatgaaaagaggtgttttgtacttacataagaaaaataaatttctgattgatttt

SEQ ID NO: 47061 - DNA, 476 bp, Homo Sapiens
aattccatgaaggtgatgttcaaatgcctctggaaaaactgtgggaaggtgctgagcactgcagcaggtatccagaaacacatccgaaccatccatctggggcgcgttggagactctgactacagtgatggagaagaggacttttactacactgagatcaagctcaacacagactcagtggcagacgggctgagcagcctggccccggtctcaccttcccagtccctggcttcacctcctactttccccatcccagattcaagccgaacagaaactccttgtgccaaaacggagactaagttgatgacgccgttgagccgctcagctcccaccaccctctacctcgtgcacactgaccatgcttaccagcttgcaggggactgtgagagcaatcactttgaccttgaccaaaaccaggggccacctatgagtaaaagacaactcagtggaaaaacagcatcacacacggcagcccg

SEQ ID NO: 47062 - DNA, 258 bp, Homo Sapiens
atgatcctcttttcagcctgctgtatctgtggacttattgggggcatcctgaattttcagttcctccgggcagtcacaaagaaaacttcctccctatacccactgcaccttgcctccatgtctctcgcgtgcattgggatcgggggctgcactctctcttcctggctcacttgtcgactagccagttatgaacagaggaggatgttctcagaaagggagcattccctgcatcactctcatgaaatggctgagaaagtg

SEQ ID NO: 47063 - DNA, 1185 bp, Homo Sapiens
atggacagccagagcaggaaggtggtggtgtgcgacaatgacactgggtttgtgaagtgtggatatgcaggctccaactttccagaacacatcttcccagctttggttggaagatctattatcatatcaaccaccaaagtgggaaacattgaaatcaaggatcttatggttggtgatgaggcaagtgaattacgatcaatgttagaagttaactaccctatggaaaatggcatagtacgaaattgggatgacacgaaacacctgtgggactacacatttggaccagagaaacctaatatagataccagaaattgtaaaatattactcacagaacctcttatgaacccaaccaaaaacagagagaagatggtagaggtaatgtttgaaacttaccagttttccggtgtatatgtagccatccaggcagttctgactttgtacgctcgaggtttattgactgctgtagtggtagactctggagatggcgtgactcacatttacccagtattagaaggcttttctctccctcatcttaccaggagactggatattgctgggagggatataactagatatcttatcaagctacttctgttgcaaggatacaccttcaaccactctgctgattttgaaacggttcgcatgattaaagaaaaactgtgttacgtgggatataatattgtgcaagagcagaaactggccttagaaaccacagtattagttgaatcttatacactcccagatggaggaatcatcaaagttgggggagagagatttgaaacaccagaagctttatttcagcctcacttgatcaatgttgaaggagttggtgttgctgaattgctttttaacacaattcaggcggctgacattgataccagatctgaattctacaaacacattgtgctttctggagggtctactatgtatcctggcctgtcatcacggttgaaacgagaacttaaacagctttacttagaaagagttttgaaggatgatgcggaaaaacttcctaaatttaagatctgcattgaagacccatcccgcagaaagcacatggtattcttgggtggtgcagttctagcggatatcatgaaagacaaagacaatttttggatgacccgacaggagtaccaagaaaagggtgtccttgtgctagagaaacttggtgtgactgttcgataa

SEQ ID NO: 47064 - DNA, 678 bp, Homo Sapiens
ggaaatggtgtaaatgttttaaaaattgcaccagagacagcactcaaggttggggcctatgaacagtataagaaattgcttagttttgatggtgttcatttaggaattcttgaaagatttatatttggctcattggctggtgtaactgcccagacctgtatttaccccatggaggtactaaagaccagactggctataggtaaaactggagagtattcagggattattgattgtggcaagaagcttctaaaacaagaaggtgtcagatcctttttcaaaggttatactcctaacttgctaggcattgtaccttatgccggcatagatcttgctgtttatgagattttgaagaatttttggctagaaaattatgcaggaaactctgtgaatcctgggataatgattttggtgggatgtagtacattgtctaatacttgtggtcagttagccagtttctctgtgaaccttattagaactcgcatgcaggcttcagccccagtggaaaaaggaaaaacaacttctatgattcagctcattcaagaaatatataccaaagaaggaaaattgggattttacaggggtttcacctcaaacatcataaaggtgcttcctgcagtaggcgttggctgtgtggcctatgagaaagtgaagccactttttggattaacctggaagtga

SEQ ID NO: 47065 - DNA, 300 bp, Homo Sapiens
gacatccagatgacccagtctccatcttctgtgtctgcatctgtaggagacagagtcaccatcacttgtcgggcgagtcagggtattagcagctggttagcctggtatcagcagaaaccagggaaagcccctaagctcctgatctatgctgcatccagtttgcaaagtggggtcccatcaaggttcagcggcagtggatctgggacagatttcactctcactatcagcagcctgcagcctgaagattttgcaacttactattgtcaacaggctaacagtttccctcccacagtgttacca

SEQ ID NO: 47066 - DNA, 4007 bp, Homo Sapiens
gggaagcggcacagcaccagctaggcagagacgccccaggccatgttagagctttgagtgaggcctggtaacagggaggcgctgtcacctactggccttgccaatccagctccaagatgctgagcctgaagctccccaggctgtttagcatagaccagataccccaggtgttccatgagcaaggcatcctgttcggctaccgccatccacagagttctgccactgcctgcatcctcagccttttccaaatgaccaatgagactctcaacatttggactcacttgctgcccttctggttctttgcatggaggtttgtgactgcactgtatatgacagacatcaagaatgacagctactcctggcccatgcttgtgtacatgtgcaccagctgcgtgtacccacttgtgtccagctgtgcgcacaccttcagctctatgtccaagaatgcccggcacatttgctacttcctggactatggtgccgtcaacctcttcagcctgggctcagccattgcctactctgcatacacgttcccggatgcgctcatgtgcaccactttccatgactactacgtggccctggctgtactgaacaccatcctcagcacaggcctctcctgctactccaggtttcttgaaatccagaagcccagactctgtaaggtgattcgtgtcctcgcctttgcttatccgtacacctgggactccctccccatcttctacaggctattcctgttcccaggggagagtgcacaaaatgaagccacctcgtaccaccagaagcacatgatcatgaccctcctggcctctttcttgtactctgcacatctgccagaacgcctagcccctggacgctttgactacatcggtcacagtcaccagctgtttcacgtgtgtgtgatcctggccacgcacatgcagatggaagccatacttctggacaagactctgaggaaggaatggctcctggccacctccaagcccttctctttctctcagatagctggagccatacttctgtgcatcatcttcagcctcagcaacataatttatttctcagctgctctgtatcggattcccaagccagaattacataaaaaagaaacatgactcagaccataagcttttcatgccagatgtcaacattaagctgcaacatcctaaccaccataagccggaggtggttacagcttatcatggcctaaaatattcataatggttggtgtcttttgaatgaattcatgtcaaaaatgttattcagctggggaaatttctctaaatgtacactgattctgtgtgtgtgattttaaaaggagaatatggttcaagcaagtccttgttaaggcaaactattgatatttcattaattttaaatttacttaaaatgtggttttaaattctatttaaacatttggattaagcatattactctggagctttgtattattctttaaaaatgaatcttgcttcatttgatgaatttcatgtcacaaagcttctctcaagagctctcgtagtggcctgtcaaccactttcggagaatgagccaggtcagtcactgggaggacctgtgaaagaaagttggtcactgagtgccttggggactggcaaaacattccagaatgaagagagctgtctggggagagcccttcttcccttctccacctagtgaagggagaacagaaggggagtcctctcttcccacaagtccattctgccttcaaagtgtaagttctcatgtcattatggatttggagtttgtcagtttttttcttaaaagtccacagcggggtgtcatgtgttctgttatgttctgttttctggttgccagtttgatctgcaaagtatttttcagtgcaggtaaaatgtgttaaaccataagagttgactgagttaatcccaattggttgtgctcatatgccaccttttaaaccaatggaaattgctatatttggggatgtcatacatttgatattgcttcagcatttcaaatatgttgcaaaatttagtatccatatgcataagaagttaatcaccttgccagtggggtggtcacatatagtgttctcaagctttactgtgaatcagaaacatccagtaagcttgtgacaaatgcagactcctagggaaaaccagggggttctgcttcactaggttaaatgtaggttttgtagaggagatctgcactggagcaagtctcccagatgattctaatacaggagggccagaggccaaacttgaagaactgctggtgttacatgttccaaaaggcattagacctatcagctttgtttcgcctgatctcaagttttagcaactcaccaactaaggcgtaacctcattttatgttccagcgttttctactctgaatagttctaaaacactgagcattttctcatttgttgcattactgattaaagttcagtatttcatggtgttttcagggaacacagaaatgcggatgcaaaacaacttttgacagaggcccatcaaacccagatctgcacttggtaatgacttaggggggcttcctcacaatgcaggatcctctttgctgactcaggaatactccatattttagactactgcctctaccattaactagcccagacatttgaatggccttgtaaacagctcactgtctaatactcgaaggacaagtaacaatttatattggatgagagtggtcaagaaatatgatttcgttagttttattatctgtttacttcctctggggaaggcagactgataaaattatatgggctggtaaatttttggtacattaattgcaagctgcatgacaaaatttgtttttctggcaacaatctgacattattagtggaattccacaccaacagggcttgtgagcttccatttcatcttactgtaacttcaattttatggcaaaaaaaggtacaaagtttaaatacccctttctagtaatgccaaagacatacagtgttttacattctctcctttataggtaacaaaataatgtttagctcagtaagtactgaaataatgagtgaccaatttgaaggatttttagattatttaatctttgcttatgttgctttttcacatgcttaatgatggaaatgaaatgttaaatcaacaaaataagatccagtgtttcataacatttttataagtttggtaaactttagtcccattatatacttttggggacagtgttataaatcagaattttacgacagtttgcagaacactgatttgaaagcttcctatgcaaaatgagaaggggttcaaatatattaattatcattaagtattaaataataggcattagatgtctaatgtgagtataatttcatccaagccatctcagaaagtctaaaaggttggcagggggtcagctgaagacctcactggagtgggtcttaatttttaaaaagtgtctcactacatttaagacatgtgacacattcccattggtaacaattgctcaccatggcattgtctcaaaaaagactatggtggggagggtggcacattcctaatgggatgtacctctccccactccccttgcttgagaagcactactcaaaaatttaccagaccttacaactgtgataaaacttgaatgtgtatgatgaataaggccattcagttaactttacctccctttacccattgaaggggttccttttccattgctcagtttttagaaaataattctcatcttttttctaaagaaatgaatttgtggctggtctgaaggtagtgagttagctcaattgattgttcgcagtcagttatagatcaagctccttgttctactcttcccctcttctcactactgcacttgactagtcttaaaacaaagaaagaacgaatgaatgaatgaatctgtggctggatgcagtggctcatgcctgtaatcccagcactttgggaggctgaagtgggaggactgcttgggcccaagaattcaggaccagtctgggcaacagagccagacactgtctctataaaaaaaagttaaaa

SEQ ID NO: 47067 - DNA, 258 bp, Homo Sapiens
tatgggaacaagatggtgattctgggcaggcagtatgggtttattttgccaaagaaaacacagcagttgcatcctgttttgcaaaaaccgtcagtgtttgggaatgattctgatgatgatgatgagacctccatgagtgaaagccttcagagggaagctgctaagaagcaggccatgaaacagaccaaactggaacagaaggcccttgcagaaaatgctactgtgtatgaatatgacagtatttatgatgaaatgcag

SEQ ID NO: 47068 - DNA, 1857 bp, Homo Sapiens
atggtctccccacggatgtccgggctcctctcccagactgtgatcctagcgctcattttcctcccccagacacggcccgctggcgtcttcgagctgcagatccactctttcgggccgggtccaggccctggggccccgcggtccccctgcagcgcccggctcccctgccgcctcttcttcagagtctgcctgaagcctgggctctcagaggaggccgccgagtccccgtgcgccctgggcgcggcgctgagtgcgcgcggaccggtctacaccgagcagcccggagcgcccgcgcctgatctcccactgcccgacggcctcttgcaggtgcccttccgggacgcctggcctggcaccttctctttcatcatcgaaacctggagagaggagttaggagaccagattggagggcccgcctggagcctgctggcgcgcgtggctggcaggcggcgcttggcagccggaggcccgtgggcccgggacattcagcgcgcaggcgcctgggagctgcgcttctcgtaccgcgcgcgctgcgagccgcctgccgtcgggaccgcgtgcacgcgcctctgccgtccgcgcagcgccccctcgcggtgcggtccgggactgcgcccctgcgcaccgctcgaggacgaatgtgaggcgccgctggtgtgccgagcaggctgcagccctgagcatggcttctgtgaacagcccggtgaatgccgatgcctagagggctggactggacccctctgcacggtccctgtctccaccagcagctgcctcagccccaggggcccgtcctctgctaccaccggatgccttgtccctgggcctgggccctgtgacgggaacccgtgtgccaatggaggcagctgtagtgagacacccaggtcctttgaatgcacctgcccgcgtgggttctacgggctgcggtgtgaggtgagcggggtgacatgtgcagatggaccctgcttcaacggcggcttgtgtgtcgggggtgcagaccctgactctgcctacatctgccactgcccacccggtttccaaggctccaactgtgagaagagggtggaccggtgcagcctgcagccatgccgcaatggcggactctgcctggacctgggccacgccctgcgctgccgctgccgcgccggcttcgcgggtcctcgctgcgagcacgacctggacgactgcgcgggccgcgcctgcgctaacggcggcacgtgtgtggagggcggcggcgcgcaccgctgctcctgcgcgctgggcttcggcggccgcgactgccgcgagcgcgcggacccgtgcgccgcgcgcccctgtgctcacggcggccgctgctacgcccacttctccggcctcgtctgcgcttgcgctcccggctacatgggagcgcggtgtgagttcccagtgcaccccgacggcgcaagcgccttgcccgcggccccgccgggcctcaggcccggggaccctcagcgctaccttttgcctccggctctgggactgctcgtggccgcgggcgtggccggcgctgcgctcttgctggtccacgtgcgccgccgtggccactcccaggatgctgggtctcgcttgctggctgggaccccggagccgtcagtccacgcactcccggatgcactcaacaacctaaggacgcaggagggttccggggatggtccgagctcgtccgtagattggaatcgccctgaagatgtagaccctcaagggatttatgtcatatctgctccttccatctacgctcgggaggtagcgacgccccttttccccccgctacacactgggcgcgctgggcagaggcagcacctgctttttccctacccttcctcgattctgtccgtgaaatga

SEQ ID NO: 47069 - DNA, 1128 bp, Homo Sapiens
atggcgaacgcgagcgagccgggtggcagcggcggcggcgaggcggccgccctgggcctcaagctggccacgctcagcctgctgctgtgcgtgagcctagcgggcaacgtgctgttcgcgctgctgatcgtgcgggagcgcagcctgcaccgcgccccgtactacctgctgctcgacctgtgcctggccgacgggctgcgcgcgctcgcctgcctcccggccgtcatgctggcggcgcggcgtgcggcggccgcggcgggggcgccgccgggcgcgctgggctgcaagctgctcgccttcctggccgcgctcttctgcttccacgccgccttcctgctgctgggcgtgggcgtcacccgctacctggccatcgcgcaccaccgcttctatgcagagcgcctggccggctggccgtgcgccgccatgctggtgtgcgccgcctgggcgctggcgctggccgcggccttcccgccagtgctggacggcggtggcgacgacgaggacgcgccgtgcgccctggagcagcggcccgacggcgcccccggcgcgctgggcttcctgctgctgctggccgtggtggtgggcgccacgcacctcgtctacctccgcctgctcttcttcatccacgaccgccgcaagatgcggcccgcgcgcctggtgcccgccgtcagccacgactggaccttccacggcccgggcgccaccggccaggcggccgccaactggacggcgggcttcggccgcgggcccacgccgcccgcgcttgtgggcatccggcccgcagggccgggccgcggcgcgcgccgcctcctcgtgctggaagaattcaagacggagaagaggctgtgcaagatgttctacgccgtcacgctgctcttcctgctcctctgggggccctacgtcgtggccagctacctgcgggtcctggtgcggcccggcgccgtcccccaggcctacctgacggcctccgtgtggctgaccttcgcgcaggccggcatcaaccccgtcgtgtgcttcctcttcaacagggagctgagggactgcttcagggcccagttcccctgctgccagagcccccggaccacccaggcgacccatccctgcgacctgaaaggcattggtttatga

SEQ ID NO: 47070 - DNA, 2181 bp, Homo Sapiens
atgtgcgagagttactccaggtcgttgttgagggtctcggtggcgcagatctgccaggcgctgggctgggactcggtgcagctcagcgcctgccacctcctcacggacgtgctgcagcgctatctgcagcagctgggccggggctgccatcggtactctgagctctatggccgaacagacccaattttggatgatgttggtgaagctttccagctgatgggggttagtctacatgaactagaagactatattcacaacattgagcctgtcaccttcccacaccaaattccgtcatttcctgttagcaagaacaatgtacttcagtttcctcaacctggaagtaaagatgcagaggaaagaaaagaatacattcctgattacctgccacccattgtgtcttctcaagaagaagaagaagaagagcaggtgcccactgatggaggcacatcagcagaagccatgcaggttcccttggaagaagatgatgaattggaggaggaagaaattattaatgatgagaatttcctgggcaagagaccactggatagtcctgaagctgaagaactgccagccatgaagcggcctcggctattaagcactaaaggggacacgctagatgttgtgttattggaagctcgagagccactcagctcaataaatactcaaaagatcccaccaatgctttctccagtccatgtacaggacagtacagacttggcacctccctcacccgagccgccaatgttggctccagttgcaaaatcacaaatgccaactgcaaaaccattagaaacaaagtcatttacacctaaaacaaagactaaaactagctctccaggacagaagactaaatcacctaaaaccgcccagtcaccagcaatggtcggaagtcctattcgatcaccaaaaactgtatccaaagaaaagaaatcacctggacgttccaagagccccaagagtcccaagagccccaaggtcacgactcacattccccaaacacctgtgagacctgaaacgcccaacaggactccttcagctacactcagtgaaaaaatcagtaaagagactatccaggtaaaacaaatacagacaccccctgatgctgggaaactgaacagtgagaatcagccgaaaaaggctgtggtagcagataaaacgattgaggcctctatcgatgctgtgattgcacgagcctgtgctgagcgagagccagatcctttcgaattttcttctggatcggaatctgaaggagacatttttactagccctaagagaatttcaggcccggagtgtactactcccaaagcttccacttccgcgaacaatttcacaaagtcaggatccactcctctgcctctttccggtggaacctcaagttccgataactcatggacaatggatgcctccattgatgaggttgtacgtaaagcaaaactgggaacaccttcaaatatgccccccaactttccttatatctcttctccgtcagtgtctcctcccactcccgaacctctccacaaggtgtatgaggagaaaaccaagctgccttcctccgtggaggtaaagaagaagttgaaaaaggaactaaagactaaaatgaaaaagaaagaaaagcagagagatagggagagggaaaaagacaagaacaaggacaaaagtaaggagaaggataaagtgaaagagaaagagaaagacaaggaaactggcagggaaacaaagtatccctggaaggaatttcttaaagaggaagaggcagatccctacaagtttaaaatcaaagaatttgaagatgttgatcccaaagtgaaattgaaagatggacttgtgaggaaggagaaagagaagcataaagataagaagaaagatagagagaaaggcaagaaagataaagataagagagagaaagaaaaagtgaaagataaaggcagagaagataagatgaaagccccagcacccccactggtgttgcccccaaaagagttggccctgcccttgttcagccctgccacagcctccagggtcccagccatgctgccatctttgttgccagtgcttccggaaaaactgtttgaggagaaagagaaggtgaaggagaaagaaaagaaaaaggacaaaaaggagaagaagaaaaagaaggaaaaagagaaggagaagaaggagaaggaaagagagaaagagaag

SEQ ID NO: 47071 - DNA, 1407 bp, Homo Sapiens
agcagggccaacggccatgaagaacgtagcaaaaaaaggaaaaaaagcaagagcagaagtcgtagtcgtgaacgaaagagaagcaaaagtaaggaacggaagcaaagtacagatcgagaaaggaaaaagagcaaaagccgtgaaaggaagcgaagtcgaagcagagaggcgacggagccgctcaagaagtcgagaagatttagaggccgctacagaagtcctactgcggaccaaaatttaacagtgccatctggaaagactggattgccttatagtatcaaattaagcataggacgttcccgaagcaaaagtccactcagaaaagacaagagccctgtgagggaacctattgataatctaactcctgaggaaagagatgcaaggacagtcttctgtatgcagctggcggcaggaattcgaccaaaggatttggaagagtttttctctacagtaggaaaggctcgaggcgtgaggatgatttccgatagaaattcaagacattccaaaggaattgcttacgtggagttcgtgggtgttagttcagtgcctctaacaataggattaactggccaacgagttttaggagtgccaatcatagtacaggcatcacaggcagaaaaaaacagagctgcagccatggcaaacaatgtacaaaagggaagtgctggacctaagaggctttggactcattacacttttaacataactgaagatacgcttcgtgggttctttgagcctttcggaaggattgaaagtatccagctgacgatagacagtgaaactggtcgatccaagggatatggatttattacattttctgattcagaatgtgccaaaaagtctttggaacaatttaatggatttgaactagcagggaggccaatgaaagttggtcatgttattgaacgtgctgatgcttcgagtactagttcatttttggacagtgatgaactggaaaggactagaattgatttgggaacaactggtcgtcttcagttagtggcaagacttgcagaggatacaggtttgcagattccaccagcagcacagcaagctctacaaatgactttagctgcagctgcttctgttcagccacttgcaacacagtgtttccaactctctaacatgtttaaccctcaaacagaagaagttggatgggatacagagattaaggacgatgtgattgaggaatgtaataaacatggaggaattattcatatttatgttgacaaaaattcagctcagggcaatgtctatgtgaagtgctcatcaattgctgcagctattgctgctgtcaatgcattgcatggcaggtggtttgctggtaaaatgataacagcagcatatgtacctcttccaacttaccacaacctgtttcctgattctatgacagcaacacaactactg

SEQ ID NO: 47072 - DNA, 1527 bp, Homo Sapiens
atgaagatgcatttctgtatcccggtgtcccagcagcggtccgacgcgctggggggccgctacgtgctgtactccgtgcacctggacgggttcctcttctgcagggtgcgctacagccagctgcacggttggaacgaacagctaaggcgggtctttggaaattgcctgccacccttcccaccaaagtactatctggcaatgaccacagctatggctgatgagaggagggaccaactggaacaatatttgcaaaatgtaaccatggacccaaacgtgttgagaagtgatgtcttcgttgagtttttaaaactggcgcagctgaatacatttgacatcgccaccaagaaagcttatctggacatatttctgcccaatgaacagagtattagaatcgaaattataacatcagacactgctgaaagagtcctagaggtggtgtcacacaaaattggactgtgtcgagagctcttgggctacttcggcctctttctcattcggtttggcaaggagggcaagctctctgttgtgaaaaaattggctgactttgaactcccttatgttagtcttggaagttctgaggtggaaaactgtaaggttggactccgaaagtggtatatggctccatccctcgactccgtgctgatggactgcagggtggcggtagatttgctctacatgcaggcaatacaggacattgaaaaaggatgggccaaacccacacaggcacagaggcagaaattagaagctttccagaaagaagacagtcaaacaaagtttttggagctggcccgggaggtacggcactatggatacctgcagctggatccttgtacctgtgactacccagaatcaggctctggagctgttctttctgttggcaataatgagatcagctgctgcatcaccctgcctgacagccagacccaggacatcgttttccagatgagcagggtgaagtgctggcaggtcactttccttggaactctgctggatacggatgggccccagagaactctcaaccagaacttagagctcagatttcaatacagtgaggatagttgctggcagtggtttgttatttacaccaaacaggcttttttgctgagtagctgcttgaaaaagatgatctcagaaaagatggtaaagctagctgctgagaatacagaaatgcagattgaagttccggaacaaagcaaaagtaaaaaataccacattcaacaaagccagcagaaagactattctagttttctatcaagaaaaagcaagattaagatagctaaagatgactgcgtttttgggaacataaaggaagaagatctctgaagaaagctctcatattttaaaatatccttggaggctatctcaagacagtgaaagaacttggggattcaggtgggctacctaccatcagtggaggaaatttgacctcttcccatttttttggcattaacatggactgtattcatcaaggtattataccacagcactctatggaaatctcaagattagaaaaaaaaaaagaaccaa

SEQ ID NO: 47073 - DNA, 1007 bp, Homo Sapiens
caaatgcagaagtggttctcatctttttttgcagcttaagatctgccttggtatttgaagagatataaactagatcaatttctttcacaggatcaactaaacagtgtaccacaatgaattctgaacttgactattatgaaaagtttgaagaagtccatgggattctaatgtataaagattttgtcaaatattgggataatgtggaagcgttccaggcaagaccagatgatcttgtcattgccacctaccctaaatctgggatgacctggatcagtgaaatattggatttgatctttaacaatggggatgcagagaaatgtaaacgtgatgcaatatacaagcgagtgactttcatggaacttataattcctggactcacaaatggtgttgagcagttgcaaaacatgcagtctcctcaattagtgaaaacacacctgcctgttcaacttctcccttcttcattttggaagaataacttcctgctttttcaaatctctccacagatgatctacatggcatggaatgccaaagatgtggctgtgtcttattattatttccgccagatggcaaaaatgcacccagatcctggaacttgggaggagttcctggaaaaattcatgactggaaagttgtgttttggttcctggtatgaccatgtgaagggctggtgggaaaagaagaaagattatcgtatcctttacctattttatgaagacatgaaagagtgtgaaattcagaaggtgttaaagtttctggagaaagacaagccagaaacaattgtggataaaatcctccatcacagctcttttgatgtgatgaagcagaactcttgtacaaattatactactatgggaaagaatgagatggaccattatgtgtttcccttcataaggaagggtgtttcaggagactggaagaatcaattcactgtagcccagtatgagaaatttgaagattatgaaaaaaaaatgaaagagtccacactgcagtttcgatcagaaatctaa

SEQ ID NO: 47074 - DNA, 2888 bp, Homo Sapiens
gtgcagaacagaaggctggggtgagggtgggagtcgggtgctaaatatttctactaggctcctgcaaggctagtgatgcagcgggccccccgaccggcgctcgcccgggttctgcgcctaagagttggccgtgagcgacccgcgccgccgggagcctgggtctaggctctcccgacaaggattccaaggcgagaacactggtgcctctgcctgggccagggagagactgaaatcagagcaggggaggcgtttcccccatgggctgtcacccttaaggggccgggagccgaggtgggcgagctcgagagcagagttggagaggtggctgctgtgagttgcatcgggcgttgaggtatctgatgtctgcaccgtttatctaccagacgacgaggcgatttatgcaacagtatcctgtttcagcactgccaaggctatgcgagaacgcggccaggacagcctggcaggactcgtgctgtatgtaggactcttcgggcaccccgggatgctgcacagggccaagtacagccgctttcggaacgagtcgatcacgtccttggacgaaggtagctccggaggctcggtcgggaacaagggctcgccgcagcctccccaccccgccctggcacctcacctgccgactgaagatgccaccttgccgtcgcaggagagccccaccccactgtgcaccttgatcccccgcatggcaagcatgaagctggccaacccggccactttgctgagtctgaaaaacttttgcctgggtaccaaagaggtgcctcggctgaagctccaggaaagccgggacccaggttccagcggcccctcttccccagaaaccagtttaagtaggtccgggactgcacctccaccgcagcaggacctggtgggacacagggcaaccgccctaacccctgattcgtgcccgcttcctggccctggggagccaacacttaggagcaggcaggacaggcactttctacagcacctgttggggatgggcatgaactactgtgtgaggtacatgggctgtgttgaagtgctgcaatcaatgagatcactggattttggaatgagaacccaagttacaagggaagcaataagtcgcctgtgtgaagctgtccccggggcaaatggagccattaaaaagcgaaagcctccagttaagttcctatcaacagtccttggcaaaagtaatcttcagttttcaggaatgaatataaaactgaccatctcaacatgcagtctcacattgatgaatcttgacaaccaacagattattgcaaatcatcatatgcagtctatttcatttgcctctggaggggatcctgatactacagactatgttgcctacgtagctaaagatccagttaatcaacgagcctgtcacatattggaatgccacaatggaatggcccaagacgtcataagtaccatagggcaggcttttgaactccggtttaaacagtacttgaaaaatccttctttgaatacttcttgtgaaagtgaggaggtgcatattgatagccatgccgaggagagagaagatcatgaatattacaatgaaattccagggaagcagccaccagtaggtggtgtttcagatatgcggatcaaagttcaagccacggaacaaatggcttactgccccatacagtgtgaaaagttgtgctatttgcctggaaactccaagtgcagcagtgtatatgagaactgtttagaacaaagcagggcaataggtaatgtccatccaagaggggtgcagtcccagcgagatacctcattattgaagcacacgtgccgagtggatctctttgatgacccctgctacattaatacacaggctcttcaaagtacacctggctctgctggaaatcaaaggtcagcccaaccactggggagcccatggcactgcggaaaggcaccagaaactgttcagccgggtgccacagcccagcctgccagctcacattctttgccacacattaagcagcagctgtggagcgaagaatgctatcatggcaagctgagcaggaaggcggcagagagcctcttggtaaaggatggggactttttggttcgagagagtgcaacatcccctggccaatatgtgctgagtggactacagggaggccaagcaaaacatcttctcctggtggatcctgaaggcaaggtgaggaccaaggatcatgtatttgataatgtcggccaccttatcagataccatatggataacagtttgccaatcatctcctctggaagcgaagtaagccttaaacaaccagtgagaaaagataataatccagcacttttgcattccaacaaatgacagtattgaagcaccatcacactgatatttcaagaaaccccattttgtattaggacacaaagataatttaaactttgtttgtagataaaatagagcacaaactgtgaagtgcatctttccaagaccatcatggaccaggtcctctataaaatgaagaactaacaaaaattagtcttcagaaatgaaaatcagaaaagaggaagagggttggtcattttaaaagaaattatatgtatgcacggatgtcactttttaaggccatattgcattgataacaagctaaaagcacaactaaaatttcacatgctaacgacaacttgaatgaactgctggggcagtggtatgtgcctttcaacttgataatttgggggacattttcatattgggagattaattctaagtatcttcatgttctatgactatagaaccatttgccaaaaaaaaaagcttttcttgctacaaaaaataagcaattttcttgagccttattgactttattacattttctgtttagcagcatttttcactgcaatgttaaaataaatatgacattgaattcgaa

SEQ ID NO: 47075 - DNA, 2361 bp, Homo Sapiens
tctaaagctcacaatctatcttgcaaaaaatattttaaattccatctcaaataagccagggtgaaaagggagcctgtgcaccagacactgccagccttgcctggctctcgccttcttgctcttccttccccacctgctggggattttcttaacgatggagatgggtttgggtttgtcctgctgtgctctgctccccattcccggatccaaggtcctgcctctgtcctgtcccctgagccacctcagggatgcagggtcccccacctggtcaagtgcccagtgctgtgttgtcatttgcaagttcttcctgtgactgaactccaaatggcactgggactgctgactccacccactggacaacccgtgttcttgcttttggggtttctgaaacagccccaagactctgggcatcttgattttgctcccattgcttctcaggacaccctgctcctgtggtttgcagccccggccttctcttcgaggacgcctctgctcttctgcctcacactcggattggaccttcttcagcacagccagtggccgaggcttcctccctggggctcagtggagcaggacagatgctgcatccaaactcttccattgggttccagtctgttccagtcatgcccttgagcctctaaagctcctaggtgagagacgtagcagctgacagcacttcccacttgatttgggtggactccagcctccccagcaacaataagagatcaaaagcatcgttgaggaagcagcttgctgaaacgctgagtgcccgccactctcaggtcaggtgggaccggcaggccagcatgagttcctgaacacttggttctcaatactggccacagccacactgtaaggggaaacaagagggcactgtatgcaaacatctcttgaactctggagtctgctcaccttcctgcctcaagcccctctcccacgtggtccagtcaccattctccacagagactaccctaaaacccagcgactctcgtgtgcctgcagaatggcacagcccgttctcatagcagcactcctgtttaatcagagggatgttaacgaccaagtcatatttgctcgatttgtgttcaacatatttcatttgtaccgataaaacttaaaaatatccccacacatgcattgcctattaaagagtatcttccaggtacacctcccttacacatcagttaacttgataatttcttcccattcttgtgcaataaatttccttcctgatcagctctgtccagcagcaacaataatccacgtagagacatgcaaactaaaagtccgttagtggaggcacgaagctgatgaggcttggaaaaaaatgaccgatttgattaaaattaggacccatgggagtggagctctgcctattttagaggcaaagtaaatgcctgggagtccaatcaccgacattctgtttgaggtttctaatcacaaggaagatggagaaaatgcagaacaagtggtcaagaacagggagataataaatagaatatttatgggctgaggaaaacaattaccaggggaaagcccaagaagcaaagatgaacagagaacgtgctgactgcgctcgtttggaaaggcctcatggccaaaggaggagaggcattatgaggagcagtgaccgagtgggcaggacccccggggatcaggaaaggtgcacggggggaaatgagaggcctgagcggcttcccagcgaaggtttttgaagcacggtttgattttctctctccccctcaccatccccaaattttagttgtgactatctccaggtacatggcttgcgacaggcggtgtataaaaactaatgtcagtttaattttaaaaccttagccattttctggaacttaaatatcaaagagaaaatgtccacatatgatgttaattgaggtttgtctcactggtgatttgtgctgattcaattcctgtttctttttttttttcttaaggggtcagttttagaattgggagataggtgtataacatatgactatacagcgcaggttggttttttaacatagaaatatctgcctttaaatgagaactgaaaacggagcttcttggaggccacctgctggtggcagtgatctgaccgctgtttaagctttctttgaactcctttttttaaaacagcctccataatcaatggtgtacgatctactctcgtggtaaaacttactcagtgaagagtgtgttttattttctgaggagctgaactgttccaacctgagtattctgaataaggacagtggtcgagcatgagtgatgccatctgggcttagaaataagtgggcctaaaatctgattgttttcatacattgttcagatattgacgcaaatagcaatttattttgt

SEQ ID NO: 47076 - DNA, 1015 bp, Homo Sapiens
ccggctgctgaagcccgagctgcaggtgtgcgtgttctgccggaacaacaaggaggcgatggcgctctacaccacccatatcctcaagggccccgacgggcgagtgctgtgtcccgtgctgcgccgctacacgtgtcccctgtgcggcgccagcggcgacaacgcgcacaccatcaagtactgcccgctctccaaagtgccgccgccgcccgcccgcccgccgccccgcagcgccagggacggcccgcctggcaagaagctgcgctgaaggcccgggctcccggccgcccagggtcgccgccgcccctcgcaccgctaggtctgcgcaccatctcgcccccgccgtggggaggcgtgcggctcagcggtcggctcgacatgggacgtcgtcctggtggtttttgaaaagcagccgaccgtgtggagtacttccgtgctgaacgattgggactagacgctgaaatccccatttgtcttcagtttctagtttgcacatccagaacggcgaaggctgggtgtgtattccactaactgaaatatggcaacttagaggcgctgtttatttactgtatacgtcgacctattttagatgcgcatcagtatgaaattgtctcaatcttggatgtttcattttatgaatggaggcactttactaggtctagaatatttttttaaaagcctctgaactgagcttaaaactggcgattttatgaaatgtcggcaaaatgactattttattgtttgaagcgagttaatattctcagttgtctttaaaaatcagttactctaattccaggtgaagcaagccgctggtagcatcacccttatgagaagtgaaggttttgtaaactttccagtattaatttgggcgggtattccccgcttgtggcttgtttctgtcctagctggaggtgtaaaatgcacaatgtgtagcaggtagaatacagctccttatcgttctatgtaccaggtattttattactgaactagcaactagccttttccacctttaaaa

SEQ ID NO: 47077 - DNA, 1943 bp, Homo Sapiens
acctgcaggcccgggccgcggggttggtttccaccctggaggttgctgacaccctgtgccctcggctgacttccagccggtggcacagacgcctccagggggcagcactcaagcgcatcttaggaatgacagtaacagcgggaacatgaagccgccactcttggtgtttattgtgtgtctgctgtggttgaaagacagtcactgcgcacccacttggaaggacaaaactgctatcagtgaaaacctgaagagtttttctgaggtgggggagatagatgcagatgaagaggtgaagaaggctttgactggtattaagcaaatgaaaatcatgatggaaagaaaagagaaggaacacaccaatctaatgagcaccctgaagaaatgcagagaagaaaagcaggaggccctgaaacttctgaatgaagttcaagaacatctggaggaagaagaaaggctatgccgggagtctttggcagattcctggggtgaatgcaggtcttgcctggaaaataactgcatgagaatttatacaacctgccaacctagctggtcctctgtgaaaaataagattgaacggtttttcaggaagatatatcaatttctatttcctttccatgaagataatgaaaaagatctccccatcagtgaaaagctcattgaggaagatgcacaattgacccaaatggaggatgtgttcagccagttgactgtggatgtgaattctctctttaacaggagttttaacgtcttcagacagatgcagcaagagtttgaccagacttttcaatcacatttcatatcagatacagacctaactgagccttacttttttccagctttctctaaagagccgatgacaaaagcagatcttgagcaatgttgggacattcccaacttcttccagctgttttgtaatttcagtgtctctatttatgaaagtgtcagtgaaacaattactaagatgctgaaggcaatagaagatttaccaaaacaagacaaagctcctgaccacggaggcctgatttcaaagatgttacctgggcaggacagaggactgtgtggggaacttgaccagaatttgtcaagatgtttcaaatttcatgaaaaatgccaaaaatgtcaggctcacctatctgaagactgtcctgatgtacctgctctgcacacagaattagacgaggcgatcaggttggtcaatgtatccaatcagcagtatggccagattctccagatgacccggaagcacttggaggacaccgcctatctggtggagaagatgagagggcaatttggctgggtgtctgaactggcaaaccaggccccagaaacagagatcatctttaattcaatacaggtagttccaaggattcatgaaggaaatatttccaaacaagatgaaacaatgatgacagacttaagcattctgccttcctctaatttcacactcaagatccctcttgaagaaagtgctgagagttctaacttcattggctacgtagtggcaaaagctctacagcattttaaggaacattttaaaacctggtaagaagatctaatgcatcctatatccagtaagtagaattatctcttcatctgggacctggaaatcctgaaataaaaaaggataatgcaataaacacagttgcaggaaagtatgttagctatatactatgaagtactcttagtttacttatgttgaatggcttagctattaatactcaaattgagttaaaatgaaaattcctccttaaaaaatcaaacgtaatatgtattacatttcatggtacattagtagttctttgtatattgaataaatactaaatcacctaggtgtctatgttctatcacatctacaaacatgtcacttcctaattaacaaaatgttcttcctttagtttgcttttgcacttaaaatatatataattgacttttttggaaaaaaa

SEQ ID NO: 47078 - DNA, 585 bp, Homo Sapiens
aggcaccatgactcctgtgaggatgcagcactccctggcaggtcagacctatgccgtgcccttcatccagccagacctgcggcgagaggaggccgtccagcagatggcggatgccctgcagtacctgcagaaggtctctggagacatcttcagcaggtgggtgctgccactcacccccacctgatgagagggccatccctgtcctgggcaatcccagcaacacaccctctgggagcagcccccttggggaatcccggtcctggggaacccatctggcttccctgtgtgggaggggctgaagtgagagcccaacttggaagcttttactcctgggagtccgagagctcactcccttccaccccacttagcctcctggtttcctgtggtggctctgctctcacaactcatgcttttcctcccattggagggcctattccttcacgttttcctgcagccaacaaatatttacccagcagtgctcgtgtgcaaggcagtgtgggaatctctatatatccagccacggataaggcaacatacctctccacctggagcgcacattctggcaggagagaaagacctaaataa

SEQ ID NO: 47079 - DNA, 1448 bp, Homo Sapiens
ccgccgccttctacggctccgccgcgggggtcgcagcggctgccgcgccgtcctcgagtttccagcgtgaggaggaggctgagggcggagaggcgcatcgtgttcgaggcggagaccgagggggagccccgcgcgcggcgtcgctcattgctatggacagtgctatcaccctgtggcagttccttcttcagctcctgcagaagcctcagaacaagcacatgatctgttggacctctaatgatgggcagtttaagcttttgcaggcagaagaggtggctcgtctctgggggattcgcaagaacaagcctaacatgaattatgacaaactcagccgagccctcagatactattatgtaaagaatatcatcaaaaaagtgaatggtcagaagtttgtgtacaagtttgtctcttatccagagattttgaacatggatccaatgacagtgggcaggattgagggtgactgtgaaagtttaaacttcagtgaagtcagcagcagttccaaagatgtggagaatggagggaaagataaaccacctcagcctggtgccaagacctctagccgcaatgactacatacactctggcttatattcttcatttactctcaactctttgaactcctccaatgtaaagcttttcaaattgataaagactgagaatccagccgagaaactggcagagaaaaaatctcctcaggagcccacaccatctgtcatcaaatttgtcacgacaccttccaaaaagccaccggttgaacctgttgctgccaccatttcaattggcccaagtatttctccatcttcagaagaaactatccaagctttggagacattggtttccccaaaactgccttccctggaagccccaacctctgcctctaacgtaatgactgcttttgccaccacaccacccatttcgtccataccccctttgcaggaacctcccagaacaccttcaccaccactgagttctcacccagacatcgacacagacattgattcagtggcttctcagccaatggaacttccagagaatttgtcactggagcctaaagaccaggattcagtcttgctagaaaaggacaaagtaaataattcatcaagatccaagaaacccaaagggttagaactggcacccacccttgtgatcacgagcagtgatccaagcccactgggaatactgagcccatctctccctacagcttctcttacaccagcatttttttcacagacacccatcatactgactccaagccccttgctctccagtatccacttctggagtactctcagtcctgttgctcccctaagtccagccagactgcaaggtgctaacacacttttccagtttccttctgtactgaacagtcatgggccattcactctgtctgggctggatggaccttccacccctggcccattttccccagacctacagaagacataa

SEQ ID NO: 47080 - DNA, 1689 bp, Homo Sapiens
actgtggtcctggaaggtcctgatggaattggaaaaacaacccttttaagaaaagtgatgttggactgggcagagggaaacttatggaaggacaggttcacatttgtgtttttcctcaatgtctgtgaaatgaacggtatcgcagagaccagcttactggagctcctctctagggactggccggagtcttcagagaagatcgaagacattttttcccagccagagagaattctgctagagaggggagaagaccttgaaataaactcccaaaacaccacctatttatatgcatcctttttaacaactgtattcaaagcaggaagtcagagttttccacctaaggtgaacagagcccgactaaaaagcctgtgtgctttggctgcagagggaatttggacatatacatttgtattttcccatggggatctccggaggaatgggttatctgagtctgagggcgtgatgtgggtgggtatgagactcctccaaaggagaggggactgttttgccttcatgcatctgtgtatccaagagttttgtgccgccatgttttatttgctcaaacgacccaaagacgatcctaacccggccattggaagcataacccagcttgtaagagcaagtgtggttcagcctcaaaccctcttgacccaggtggggatattcatgtttggaatttcaacagaagaaatcgtcagcatgctggagacctcctttggttttccactgtcaaaagacctaaagcaggaaataacccaatgccttgaaagtttaagtcaatgtgaagctgatagggaagccatagctttccaggaactattcattggtttgtttgaaactcaggaaaaagaatttgtaaccaaagtgatgaatttctttgaagaagttttcatttatattggtaacatagaacatttggtaatagcttcattctgcctgaagcattgtcaacatttaacgacacttcgcatgtgtgtggagaatatctttccagatgactcaggatgcatctcagattacaatgagaagctcgtctactggcgggagctttgctcaatgttcattaccaacaagaacttccagattttagacatggaaaataccagccttgatgatccctccctggcgattctttgcaaagcgctggctcagcctgtttgtaaactccgaaaactcatatttacttctgtgtactttggacatgattcagaattatttaaggcagttcttcacaaccctcatctgaaacttctgagcctgtacggcactagcctctcccagtctgacatcagacacctgtgtgagacgctgaaacatccaatgtgcaagatagaagagctgatactgggaaagtgtgacatctccagtgaagtttgtgaagacatcgcctccgtcctggcctgcaacagcaagctgaaacacctctccttggtagaaaatcccttgagggacgaaggaatgacgttgctgtgtgaagccctgaagcactcacactgtgccctggagaggctgatgttgatgggctgtttccttacttccgattcctgtaaggacattgctgctgttcttatttgcaatgggaaactgaagaccctgaaacttgggcataatgaaataggagacactggtgtcagacagttatgtgcagctttgcagcatcctcactgtaaattagagtgtctcgggtga

SEQ ID NO: 47081 - DNA, 492 bp, Homo Sapiens
cccaaggagaactatgaatgctttaccagttgtgagttcctcaaatacaccctgttggtgaagcagggggactgtccagctcctgagaaagccagtggatttgcggccgcctgcgttgaaagctgcgaagttgacagtgagtgctctggggtaaagaaatgttctttgaatgggtgtggacccacctatcaagtacccaagactctgtacaaagataaggggcattactgggggtgtgtccccctgaagcccagagaagggttacaatttacagaattgccgtctggacagctggaggtatggtcctccaaattccatattcctattgagcctgtgatgtttgtggtacaaagaaggtggaattatggaatccatcctagagaagacaatgtcactcattggcagacagtggtacagtttcgagtggctgctgtgaatgtgcatggaactcgacgcttcactgcccccagcaaacacttctgttcttccaaa

SEQ ID NO: 47082 - DNA, 296 bp, Homo Sapiens
ttctgtttttcatatccaaaacttctaaatgctattttaggggcacagtagattagattccagcacttggtgaacagaattcacaagctgtgacaaaactgtcatcttcagggtgcaattttgtttatatacattgtatgtatatatttctttctcctatatttcttttagatttggctgtagtcgactggccatggttcaagtgggactatagcagtacgtgggtcagggacagtcattttggctatgtacacattcatagttggtccatggcttccaactagtagcgctatttc

SEQ ID NO: 47083 - DNA, 381 bp, Homo Sapiens
atgggaagcacagagcaggtggtggctgaaggtggggtatcctgtgaaaccatatttaagatcagagcccttggtccattgtgttgtaatcagctggctcaggaaagaacacctggctgtccagagctctacacctactgcactgggtgtgaaaggaggcctgagaacccatgggtcccaaacccaccccactccaaattatcatccagtattgagaactctgacaccaaattctcacagagcatatgtttatgcagttttacatttaatttctcattacattacaattgggaaactgaggccccagaagaggcagagactggtccagatctcaggaggtgggcaggctccagagcattagagagggctccagcttcctag

SEQ ID NO: 47084 - DNA, 1340 bp, Homo Sapiens
ccctacgatggggtcttcatagcgctgctggtggaggagggccacacccacgatatcctggccgccggatttgacggcatgtacacctactttgcctccaatggtttctcctttggttcttcccatcagaactggaaagctgtgaagaacttttgtgatgccaacaacctcatgttcatccccagtgtggggcctggctacatagacaccagcattcggccctggaacaaccacaatacgcgcaacagggtcaatggcaagtactatgagacggccctgcaggcggccctgacagtgaggcccgagatcgtttccattacctccttcaatgagtggcacgagggcacccagattgagaaggccattcccaagaagacacccacccgcctgtatttggactacctgcctcaccagcccagcctgtacctggagctgacacgccgctgggcggagcacttcatcaaagagaaggagcagtggctcatgtgaggggcctgtaaatgggcgtgaggtgctgatgtccttgccttgctggaagatgtcaccatgtggggttcagctgaggttgtagccactcactcgttcccaggtcagaggtcagcagatgggtgtttctgggtgggccgtcaggcatgggcctgtgcaacacagagcccgttcctcaggcgagtggtgctgaggtgctctgtggtgatgggaacggcagaggctggcaggtgactgaacttagcccagggcagctccacatcctgggaacactttcatgtaaccccttctagttttgaactctgcagcaggctgcctgcatcctctcctcaggcctccttcccacatcatctgtcttctctaagttagggaaccatatttgagactttcaaaaagggaacttctaggtttaagctcctcccagtagattcctgaacccaattatcaggaaatcatcctgagcactcacaggttcatttaacactcactcatcaagcaccttcctatgtgctaggtgctggggaaaacttgaccaaggaagagttcctgtcctgaagcttccaggacccagctttccttttctggtgtggccttgtagctagtgcctgggcacaggtgtttttctttttgcagttttacctagtgctgggagttcagttctttttcctctagaaaaatacctctgtgctccagagcctaatttttcccagatgcatatttagctctagggagaggactaggaggaaatccccctccctttagctgcctgaactgactgaggcccactcactagagccatgttcagtgctactgtgattagtagtaattaaatatgaactggtattctcaagtaa

SEQ ID NO: 47085 - DNA, 1940 bp, Homo Sapiens
gagtgccaagtacccgcgtgcatacggctgccggcatggcacattacaacttcaagaaaattacggtggtgccgtccgccaaggacttcatagacctcacgttgtcgaagactcaacgaaagactccaaccgttattcataaacattaccaaatacatcgcattagacatttttacatgagaaaagtcaaatttactcaacagaattaccatgatagactttcacaaattctaacagatttccccaaattggatgatattcatccgttctatgctgatttgatgaatattctctacgacaaggatcattacaagttggctctggggcaaataaatattgccaaaaatttagtggacaatgttgctaaagattatgtgcgactgatgaagtatggcgactctctctaccgctgcaaacagctgaagcgtgcggccctgggacggatgtgcacagtgatcaagaggcagaagcagagtttggagtatttggagcaagtgcgtcagcatttatcccgtttgccaaccattgatccgaataccaggaccctgcttttgtgtgggtacccaaatgttgggaagtccagcttcatcaacaaggtgacgagagcagacgtggatgtccagccctatgcgttcacaaccaagtctctgtttgttgggcacatggattataagtatctacgttggcaggttgtagacactcctgggatcctggaccaccctctggaggataggaacaccatcgagatgcaggccatcactgccctggcccacctccgtgctgcggtcctgtatgtgatggatttgtctgagcagtgtgggcatgggctgagggagcagctagaactcttccagaacatcagacctctcttcatcaacaagcctctcatagttgtagccaacaaatgtgatgtgaagagaatagctgaactttctgaagatgatcagaaaatatttacagatttgcagtctgaaggattccctgtaatagagaccagcaccctgactgaggaaggtgttattaaagttaaaacagaggcttgcgataggcttttggctcatcgagtggaaaccaaaatgaagggaaataaagtgaatgaggtgctgaatagactgcacctggctatcccaaccaggagggacgataaggagaggccccctttcatccctgaaggagtggtggctcgcaggaagaggatggaaactgaggagtccaggaagaagagggaacgagatcttgagctggaaatgggagatgattatattttggatcttcagaagtactgggatttaatgaatttgtctgaaaaacatgataagataccagaaatctgggaaggccataatatagctgattatattgatccagccatcatgaagaaattggaagaattagaaaaagaagaagagctgagaacagctgctggagagtatgacagtgtatctgagagtgaagacgaagagatgctggaaatccgacagctggcaaagcaaattcgagagaaaaagaagttgaaaattctggagtccaaagaaaagaatacacagggacccaggatgccgcgaactgctaagaaggcaagtttgacagttttggagaaggagatgcgtagtcttggtgttgacatggacgataaagacgatgcccattacgcagtccaggcaagaagatcccggagcatcactaggaaaagaaagcgggaagactctgctcccccgtcctctgtggcccggagtgggagttgctctcgaactccacgtgacgtttctggtcttagggatgtcaagatggtgaagaaagccaagactatgatgaagaatgctcagaagaagatgaatcggttggggaagaaaggggaggcggatagacacgtgtttgatatgaagcccaagcacttgctgtctgggaagaggaaagctggtaaaaaggacaggagatag

SEQ ID NO: 47086 - DNA, 252 bp, Homo Sapiens
tgttgcccaggctggagtgcaatggcgcgatctcgacccactacaacctccgcctccggggttcaagtgattctcctgtcagtctcccgagtagctgggattgcaggcatgtgttaccacgccaacctaatttttgtatttttagtagagacagggtttcgccatgttgaccaggctggtcttgaactcctgtcctcaggtgatctgcccagcttggcctcccaaagtgctgggattaaaggcgtgagccac

SEQ ID NO: 47087 - DNA, 582 bp, Homo Sapiens
gtgggcagtctggcgcctgtggcgtcgtgtttgctgagggcccggctgccgttgactgaggctgcgatggcggcggcaggccggggtcgggagcaggactcggcgcgcttcgtctatgtgacgcgcttcggctcgcatcagtgcagtggcgtcctgcaactgggcggccgtggagctcaaggcctttggggtcaggggcctggggcaggctgtcgccaggagaagccgagggaagcaatggcggtggcgggcgttcagggtggcagcgagctgcccctcggttcccagctcagggtccccacgacccctggtgtggaggctgcggcctctgcctcctcccagctgcgggcatcgagagttcagagcggcaccagacagtcggcgcgtgcaggtttaatccagaaggatgcagctaaaaagtatgattttcccataccattgaatgaagcttccaaaataatgaagaaaaagaaaaaggttttagtatggaatagagtatacaaagtcatttcaagaatgcttgaagaaaatgaaaaatatagacacaggctgaaatgccaaaggttatctagtgaaagtaag

SEQ ID NO: 47088 - DNA, 579 bp, Homo Sapiens
atggtaagaatggtgtctgtcctgctgtctctgctgctgcttctgggtcctgctgtcctccaggagacccgagatggtcattactctctgacctatctctacactgggctgtccaggtctggcaaaggcacccacaggctgcagggcactgtcttcctcaatggccatgccttcttccactacaacagtgaagacaggaaggctgagcccctgggaccatggagacatgcggaaggagtagaggactgggagaagcagagccaagttcagaaggccagggaggacatctttatggagaccctgaacaacatcatggagtattacaacgacggtaacgggtctcatgccttgcaggaaaggtttggttgtgagatccagaataacagaagcactggagcattctggaagaatgcctatgatggaaaggactacattgaattcaacaaagaaatcccagccagtccccttggtcccggaagcccagaacaccaagcagaagaggcagaaccagtctacgtgcagcgggccaaggcttacctggaggaggagtgccctgcaactctgcggaaatacctgaaa

SEQ ID NO: 47089 - DNA, 540 bp, Homo Sapiens
ctggtgctgctgcggcgcttggaccgagaggaggcggcggcgcaccggctgcagatcgaggcatgggacggcggccgaccccggcgcaccggcctcctgagcgtggagctgcgcgtgctggatgagaacgacaacccgccggtctttgagcaggacgagtaccgcgccgcggtgcgcgaggacgcccagccgggcgccgaggtctgtcgcgtgcgcgccaccgaccgcgacctggggcccaatggcttcgtgcgctacagcgtccgcgcccggcaagtgcctggggcggagtgtggaccatcttttgccattgattccgaaagcggtgcgatcagcactatccggactctagaccgagaggtccaggaggcggtggagctgaaagtggtggcccaggacctcggagagcccccactctctgccacctgcctggtgagcatcaccgtagatgatgtgaatgacaatgagcccatcttctggaggcaggtgtacaatgccaccattgcagagcatgccccggttggacactgctttctgcag

SEQ ID NO: 47090 - DNA, 639 bp, Homo Sapiens
atggcactcccagacgctgcttatcagcagtgtgcacaggctgttaaatgcacctgggccgcaattcctgaagagggagtcccagtacaatcctttttacatatgcaagggtcacaggaaccctatgtgcaatttcttacaagatcacaagaggcagtgaagcgtcagattcctcataccacggctgcagaaatgctaaccttaactctagcttttgaggatgcaaacgcggattgtaaacatgcactggcactggtgaggtgtataaaaaacttgggaagttttctcagagcttgtcaagatgtaggaactgagcttcatcactttgcaatattagcgcaagcagtggctaatttagcagttgacaaatctaaaaggagccaagggtcaaaccctaaagtgggaaaatgttataattgtgaaaaacctggacattttaaaaaggaatgccgccagatctcagtacagaaaggaccttacaatgcagtgccccacccagtggaaaaaatgccaggactttgtccttgcgtaacagaggaaataactgggctaatcagtgccgctcaaaatttcatcagaatggcacccccctgctgggaaatgagatgggggcctggacccaggccccacaaacaatga

SEQ ID NO: 47091 - DNA, 834 bp, Homo Sapiens
atgtcgtccaactgcaccagcaccacggcggtggcggtggcgccgctcagcgccagcaagaccaagaccaagaagaagcatttcgtgtgccagaaagtgaagctattccgggccagcgagccgatcctcagcgtcctgatgtggggggtgaaccacacgatcaatgagctgagcaatgttcctgttcctgtcatgctaatgccagatgacttcaaagcctacagcaagatcaaggtggacaatcatctcttcaataaggagaacctgcccagccgctttaagtttaaggagtattgccccatggtgttccgaaaccttcgggagaggtttggaattgatgatcaggattaccagaattcagtgacgcgcagcgcccccatcaacagtgacagccagggtcggtgtggcacgcgtttcctcaccacctacgaccggcgctttgtcatcaagactgtgtccagcgaggacgtggcggagatgcacaacatcttaaagaaataccaccagtttatagtggagtgtcatggcaacacgcttttgccacagttcctgggcatgtaccgcctgaccgtggatggtgtggaaacctacatggtggttaccaggaacgtgttcagccatcggctcactgtgcatcgcaagtatgacctcaagggttctacggttgccagagaagcgagcgacaaggagaaggccaaggacttgccaacattcaaagacaatgacttcctcaatgaagggcagaagctgcatgtgggagaggagagtaaaaagaacttcctggagaaactgaagcgggacgttgaggagattctcgttctgtccccaggctgg

SEQ ID NO: 47092 - DNA, 153 bp, Homo Sapiens
atgatatgttgtcaggagactgtgtattcctgtgaatactggagaacctttaaaagatattttagttcttggtttaaaatacggtcttggctaacttacctttcttggggtctcctgtgtacatcctggtattgtaaagtgaagatgtcttga

SEQ ID NO: 47093 - DNA, 2931 bp, Homo Sapiens
gaaccgatgggcgccccggcccgcgtcgccaacggagctgcggcgctgccccagcgctgaccgacgttagagtcgggctccgacagcgcggccgagtccccgcgcgtcatcctcctttgactcttgggggctccaaagggacctctctcttggcaccgggggtgtctgcgcccgccgcccgccccgcttggctttgcggcatctcggccctggctccagctccggctccggcgagggtcatgaagctggaagccagctgtggcacagccacctcagaggtccctaagccggaaaagaagactgcccgagatgcagagccaagctctgaaacccggccacaggaggtggaggccgagcccaggtcgggatcggggcctgaggctgaggccgagccattggacttcgtggtggccacggaacgggagtttgaggaagtgctggccatctcggggggcatctacggcggcctggactaccttcctagccgctaccacagctggctccgggaccccgaccgcacggtggtgctggccaagcgcaacggaggcgtgatcgcgctggagtcggtgaacgtgatcgacgccggggagacggtgctggtggaggggctgcgcgtggcgccctgggagcgcgggaagggcgtggccgggctgctgcagcgcttctgctcgcagctggtcaagagacagcacccgggggtcaaggtggcacggctcacccgggacgaccagctgggcccccgggagctgaagaaataccgcctaatcaccaagcagggcatccttttggtccgattcaacgcgtccgcgctgctggccgggctgggcgcgcggctggcggcgctgcggacctctggcaccttctcgccgctgcccaccgaggccgtgtccgaggcaggcggcgacgtggcacgcctcctgctgtcaccctccgtgcagcgcgacgtgcttccaggcgggaccatcatccaggactggcagccctaccggcctagcgaaagcaacctgcgcctgctggcggccaagggcctggagtggcgcgtggacagccgcgcgcgcccgcgcgtgctcacgctgtgcacgcgccccttccccatcccgcacggaggggacggcacttggcgctatctcaacatcgacgccttcggtagcgacggcgcgcaggtgcagagccagctgctgtggcacctgcagcgccaggccccgcgcctcgttggcctcaacgtcatgtgccagctcttcctggagccccagctgtggtcacagctggctgacttctgccaggtcgggctgggactggagctggtgaagggttatactgaacagtacctgctggaggccgacatctgaggcctctcctctggcggggagggggaaaaagacccgcccccttccgcagtttccccagccagcctctttcctgccatttccgacgctgcgtctcctgggaagtcccctctgactcctgccctcctgcccttaccggcgcaggtccccccactctgtcccttttgcccttactatcttgcctctagctcccccaaacaccattgcccactccctgacctgaacttgcggactattaggtgggggctgggggtgggggccttgagctgctgttatccaccctctgtttttccaaagaactggtccccgcacaggcttcagagtccttccttccctctccatcacctcacccggggcgtgaactccccctttcctggcttctcccttctgccccctcgtgggtggaagaactcaggagtgtgtgggatgcccagcctcgttcccgagcgcagccgcccaatccgcgtttcttttcttccttctgccctttctaaagccctaaaaactggtcctgcattgccctccacaccccaatcccctccccctgctcaagcttctggtgccagagatcagtgccctctccccacttctctctagcccctcatcctcatcctcgctggatctctacgacgcttaacaccgcagtgcccatttttctgtccctgttttccttcccatcaccagcccagtgtgcaatccagagagagagagagtgatactgtaaaatgaaatgtatttagaatgctcccccatttgggtccttgttcatctggtgatgcactttctgagcctgcctctctcactggggtttcctcctgctttgcacaactttgctatttcgcaggctcccccgtgccccagctcacccgagccgggcggggtggtggtggtggtggtggtgtgtgtgtggtgtggttctagctgaagagtttggtacagtggagggcgggtccctcagcctggcataggggctgtctcctggttccaaccaggccgccttctagtgcaactggaattcccacctcctggtatttctggacaccactccctttctctggatcatttatgcttttagaactttgagagtcttctatttaattgcaagtagtaacagctgcatctgcacagcgctgtctccaatactggttccccacatcaaaggcagagggagaaaacagaaggctgggaaagatcaaagtgacttctaagtcattcaaagtagctaggagcctcccagcgaatagaacccgggtgtcccaagcctagagcatgacctagaacttcactctgtgggatgatgttagcttgaacttcttgttgggcaatgcgtaggtgctaggagaatgttgacagtgagtttggggttcgctgggatgggatccgagatgtgggcagaggtggacaccagcaggtggaagaatgtggacaaggtggggggtaggggcagccgccgcttcgccactttccgcagctctggttttgctactgtgctgctctccttgggtgcatcctgtgcctggccacgctgccaccctccttgtcacggtgaccacgattgtatgacaataaaatggaccttttggcc

SEQ ID NO: 47094 - DNA, 792 bp, Homo Sapiens
atggaaccaccattcaccaggcttgaggggaggatgtcacggcgcgctgctcccttcggtgccagccaggatggggccgggtgggtgcagctggtgaaaagaaatgcagccccccagcccctgcagaccaagccgaacagcccagctcgcgggtggatcacagggcacccagcagccgccttccctccggaagagccaagaaggcttccaagaccagaaatgcccccagtgtggctgtgcctgtccccggtgccccgccagctggggggcagcatacccaaacagatgcaccctgcccatgatggcaccccagggacccccatcctcaggaccctccagtcgttcaagctggaattggcaggtttctgcctgtataggcatcggcttcagagtctcaggtgctgcttggcaggaaaatgcagggcaggaggggctgggcctcagctcgaggctcccaggtgcagccccccactccactgcagggcccaggggggccaagaacagccacaacaacaacaaaagccaaactgggaacggaatcgtggaaaaaaccctcataggcttttgggaacttacaaagaaatgcccacatccattctactaacatggcatctactaacgtggcatctactaggatgccacaaaacagacaaatccttccacgtaaggctggacacgtgtcagggcggtgtctcaaagctgggccacaggcagcatccacggccaggccactgggtggaggagacggtgctggggaggagccggagggaggggccggggctgttcccttag

SEQ ID NO: 47095 - DNA, 2284 bp, Homo Sapiens
cgcctccagcctctcacactctcctaagccctctcatctcctggaaccatggccagcacatccaccaccatcaggagccacagcagcagccgccggggtttcagtgccaactcagccaggctccctggggtcagccgctctggcttcagcagcatctccgtgtcccgctccaggggcagtggtggcctgggtggcgcatgtggaggagctggctttggcagccgcagtctgtatggcctggggggctccaagaggatctccattggagggggcagctgtgccatcagtggcggctatggcagcagagccggaggcagctatggctttggtggcgccgggagtggatttggtttcggtggtggagccggcattggctttggtctgggtggtggagccggccttgctggtggctttgggggccctggcttccctgtgtgcccccctggaggcatccaagaggtcactgtcaaccagagtctcctgactcccctcaacctgcaaattgaccccgccatccagcgggtgcgggccgaggagcgtgagcagatcaagaccctcaacaacaagtttgcctccttcatcgacaaggtgcggttcctagagcagcagaacaaggttctggacaccaagtggaccctgctgcaggagcagggcaccaagactgtgaggcagaacctggagccgttgttcgagcagtacatcaacaacctcaggaggcagctggacaacatcgtgggggaacggggtcgtctggactcggagctgagaaacatgcaggacctggtggaggacctcaagaacaaatatgaggatgaaatcaacaagcgcacagcagcagagaatgaatttgtgactctgaagaaggatgtggatgctgcctacatgaacaaggttgaactgcaagccaaggcagacactcttacagatgagatcaacttcctgagagccttgtatgatgcagagctgtcccagatgcagacccacatctcagacacatccgtggtgctatccatggacaacaaccgcaacctggacctggacagcatcatcgctgaggtcaaggcccaatatgaggagattgctcagaggagcagggctgaggctgagtcctggtaccagacaaagtacgaggagctgcagatcacagcaggcagacatggggacgacctgcgcaacaccaagcaggagattgctgagatcaaccgcatgatccagaggctgagatctgagatcgaccacgtcaagaagcagtgtgccaacctacaggccgccattgctgatgctgagcagcgtggggagatggccctcaaggatgctaagaacaagctggaagggctggaggatgccctgcagaaggccaagcaggacctggcccggctgctgaaggagtaccaggagctgatgaacgtcaagctggccctggatgtggagatcgccacctaccgcaagctgctggagggcgaggagtgcaggctgaatggcgaaggcgttggacaagtcaacatctctgtagtgcagtccaccgtctccagtggctatggcggtgccagcggtgtcggcagtggcttaggcctgggtggaggaagcagctactcctatggcagtggtcttggcgttggaggcggctttagttccagcagcggcagagccactgggggtggcctcagctctgttggaggcggcagttccaccatcaagtacaccaccacctcctcctccagcaggaagagctacaagcactgaagtgctgccgccagctctcagtcccacagctctcaggcccctctctggcagcagagccctctcctcaggttgcttgtcctcccctggcctccagtctcccctgccctcccgggtagagctgggatgccctcacttttcttctcatcaatacctgttccactgagctcctgttgcttaccatcaagtcaacagttatcagcactcagacatgcgaatgtcctttttagttcccgtattattacaggtatctgagtctgccataattctgagaagaaaatgacctatatccccataagaactgaaactcagtctaggtccagctgcagatgaggagtcctctctttaattgctaaccatcctgcccattatagctacactcaggagttctcatctgacaagtcagttgtcctgatcttctcttgcagtgtccctgaatggcaagtgatgtaccttctgatgcagtctgcattcctgcactgctttctctgctctctttgccttcttttgttctgttgaataaagcatattgagaatgtgaaca

SEQ ID NO: 47096 - DNA, 1908 bp, Homo Sapiens
gcagattttaagagtaatcttcacaaagtgtaccaggccatagaggaggccgacttcttcgccatcgatggggagttttcaggaatcagtgatggaccttcagtctctgcattaacaaatggttttgacactccagaagagagatgttttatttcccttttccagcattccatggactttttgctatttcagtttggcctttgcacttttaagtatgactacacagattcaaagtatataacgaagtcatttaacttctatgttttcccgaaacccttcaatagatcctcaccagatgtcaaatttgtttgtcagagctccagcattgactttctagcaagccagggatttgattttaataaagtttttcgaaatggaattccatatttaaatcaggaagaagaaagacagttaagagagcagtatgatgaaaaacgttcacaggcgaatggtgcaggagctctgtcctatgtatctcctaacacttcaaaatgtcctgtcacgattcctgaggatcaaaagaagtttattgaccaagtggtagagaaaatagaggatttattacaaagtgaagaaaacaagaacttggatttagagccatgtaccgggttccaaagaaaactaatttatcagactttgagctggaagtatccgaaaggcattcatgttgagactttagaaactgaaaagaaggagcgatatatagttatcagcaaagtagatgaagaagaacgcaaaagaagagagcagcagaaacatgccaaagaacaggaggagctgaatgatgctgtgggattttctagagtcattcacgccattgctaattcgggaaaacttgttattggacacaatatgctcttggacgtcatgcacacagttcatcagttctactgccctctgcctgcggacttaagtgagtttaaagagatgacaacatgtgttttccccagactcttggatactaaattgatggccagcacacaaccttttaaggatatcattaacaacacatcccttgcggaattggaaaagcggttaaaagagacacctttcaaccctcctaaagttgaaagtgccgaaggttttccaagttatgacacagcctctgaacaactccacgaggcaggctacgatgcctacatcacagggctgtgcttcatctccatggccaattacctaggttcttttctcagccctccaaaaattcatgtgtctgccagatcaaaactcattgaacctttttttaacaagttatttcttatgagggtcatggatatcccctatctaaacttggaaggaccagacttgcagcctaaacgtgatcatgttctccatgtgacattccccaaagaatggaaaaccagcgacctttaccagcttttcagtgcctttggtaacattcagatatcctggattgatgacacatcagcatttgtttcccttagccagcccgagcaagtaaagattgctgtcaataccagcaaatatgcagaaagctatcggatccaaacctatgctgaatatatggggagaaaacaggaagagaagcagatcaaaagaaagtggactgaagatagctggaaggaggctgacagcaaacggttaaacccccagtgcataccctacaccctgcagaatcactattaccgcaacaatagttttacagctcccagcacagtaggaaagagaaatttgagtcctagtcaagaggaagctggcctggaggacggagtgtcaggggagatttccgacactgagcttgagcagaccgattcctgtgcagagcccctctcagagggaaggaaaaaggccaagaaattaaaaagaatgaagaaggagctttctccagcaggaagcatctcgaagaacagccctgccacactctttgaagttcctgacacatggtaa

SEQ ID NO: 47097 - DNA, 2897 bp, Homo Sapiens
atgactaaaaaaagaaaacgccaacatgattttcaaaaagtaaaattgaaagttggtaaaaagaagcccaagttacaaaatgctactcctacaaactttaaaacaaagactatacatctgcctgagcaactcaaagaggatggaacacttccaacaaacaatagaaaacttaacataaaggatttgctgtcacagatgcatcactacaatgctggggttaaacaaagtgctcttcttggacttaaagaccttttgtctcaatacccatttataattgatgcacacctttcaaacatattaagtgaagtgactgctgtgtttacagataaagatgctaatgtacgattagcagcagttcaacttcttcaattcctggcccccaaaatacgagctgaacaaatttctccattttttcctttggtaagtgcccatctctctagtgccatgactcacattactgaaggaattcaggaggactctttaaaagttttggacattctgctggaacagtacccagctctaattactggccgtagcagcatattgcttaagaattttgtagaacttatttctcatcagcagctgtccaaaggactgataaatagagacagatcccagtcctggatactttctgtaaatcctaatcggagactcacttctcagcaatggaggctgaaagtcttagtgagactcagtaaattccttcaggccttggcagatggatccagtaggttgagagaaagtgaaggacttcaggaacagaaagaaaatccccatgccactagcaactccatttttatcaactggaaggaacatgccaacgaccagcaacacatccaggtttatgaaaatgggggttcacagccaaatgtcagttcacagttcaggctacggtatctggttggaggactgagtggtgtggatgaaggcctgtcatctactgaaaacctgaaaggatttattgagataataattccattgctaattgaatgctgggttgaagctgtacctccacaactagctactcctgttgggaatggtatagaacgagaacctctacaggttatgcagcaagttcttaatattatttcccttctgtggaaactctctaaacaacaggatgaaacccataaattggagtcatggcttcgaaagaactaccttattgattttaaacaccattttatgagtcgttttccatatgtcttaaaagaaataaccaagcacaaaaggaaagagccaaataaaagcatcaagcattgcacagttctctccaataacatagatcatctcttactgaatttaacactgtctgatatcatggtctccctggcaaatgcgtcaactttgcagaaggattgcagttggatagaaatgataaggaaatttgtaacagagacccttgaagatggctctaggctaaatagtaagcaactgaacagattgctgggagtatcctggaggttaatgcaaatacagccaaacagagaggacacagagactcttattaaggcagtttatacattatatcagcagaggggccttatccttccagttcggactttgttattgaagtttttcagtaaaatctatcagacagaagaactgagatcttgtagattcagatatcgtagtaaagtgttatcccgttggctggctggcttaccattgcaacttgctcatcttggctcccgaaatcctgagctctctacacagcttatcgatatcattcataccgctgcagcacgagcaaataaagaattactaaaaagtttacaagctactgccctccgaatttatgatccacaagaaggtgctgtggtggttctccctgcagactctcagcagcgtttggttcagcttgtatatttcctacccagtctgccggctgatttgctttctcggttaagtcgttgctgtattatgggaagactcagttcaagtttggctgccatgcttatcgggatactgcacatgagatcatcattttctgggtggaagtattcagctaaagactggttgatgagtgatgtagactatttcagcttcttattttccacacttacagggttttcgaaagaggagttgacttggcttcagagccttcgaggagttcctcatgtcatccagacacagctttcccctgtgcttctctaccttacagatttggatcaatttttacaccactgggatgtaacagaggcagtttttcacagtttattggttattcctgcccgaagtcagaactttgacatcttgcaaagtgccatcagtaagcatttggttgggttgactgtaattcctgacagcacggctggctgtgtttttggtgttatctgtaagctcctggatcatacttgtgtagttagtgagactctactgccatttctggcttcttgttgctacagtcttctttattttctgctcactatagagaaaggggaagcagaacatctaagaaagagggacaagctgtggggggtctgtgtctccatcctggctctcttgcctcgagtcctcaggttgatgctgcagagcctgcgggtgaacagagttgggcctgaggagctgcctgttgtgggccagctgcttcgactgctgcttcagcatgcacccctcaggactcatatgttgaccaatgcgatcttggtgcagcagatcatcaagaatatcacgacattgaagagtggaagtgttcaggaacagtggctcacagacttacattactgcttcaacgtgtatatcactgggcatccccaagggcccagtgcactggctacagtgtattgaagaggccatagtacctcctgtttgaagttgtttattcacatctatcttatttgaagaaaaagactgatgtaatagatctttgtcattaaagctgaacttttaaagaa

SEQ ID NO: 47098 - DNA, 3327 bp, Homo Sapiens
agaaaatgactgtggtgctagaagatcattacttttggaaagccggttaacatccatttcctaagagaaacttggccaccatttgctctggcatggcgcaaagcagcccacagcttgatattcaggttctccatgatcttcgacaacgtttccctgaaattccagagggcgtggtgtctcagtgcatgttacagaataacaacaatcttgaagcctgttgccgagccctttcccaggagagtagcaaatacttatatatggaataccatagtccagatgacaataggatgaatagaaatcgccttttacatattaacctgggtatccattctcctagtagctatcacccaggagatggagcccaacttaatggtggtcgaacactggtacatagctcaagtgatggacatattgatcctcagcatgcagcaggtaaacagctgatatgtttagttcaagaaccacactcagctccagctgttgttgctgctactcccaactacaatccattttttatgaacgaacagaacagaagtgcagctactcctccttcacaaccacctcaacagccatcttccatgcaaacaggaatgaatccgtctgctatgcaagggccttcaccaccaccgccacctccttcatacatgcacatacctcggtatagtacaaatccaattactgttacagtatcccagaacctcccttctggacagactgtaccaagagctttacaaattcttccacaaattccaagcaatctctatgggtctcctggttctatttatattagacagacatctcagagttcatcaggaagacaaactcctcagagtacgccgtggcagtcctcaccacagggcccagtgcctcactatagccagcgtcctttacctgtttatccacaccaacagaactatcagccttctcagtattctcccaaacagcagcagatccctcagtctgcttaccattcaccacctccttctcaatgtccttcacccttcagctctccacagcatcaagtgcaaccttcccagttgggccacatctttatgccacctagtccttcaactactccaccccatccatatcaacaaggacctcctagctatcagaaacagggaagccattcagtagcctatcttccatacacagcatctagtttatccaaaggttccatgaagaagatagaaattacagttgaaccttctcaaagacctgggacagcaattaataggagtccttcacccatcagtaatcaaccatctccatggaatcaacactcactgtacacagccaccacgccaccttcaagttctccttcaagagggatatctagtcaaccaaaacctccatttagtgttaatcctgtgtatattacatatacacagccaactggaccttcttgtactccatcaccatctcctcgagtgataccaaacccaactacagtttttaaaattaccgtaggccgagcaacgactgaaaatcttttaaatttagtggaccaagaagagcgctctgcagcaccagaacctattcagcccatttcagtgataccaggctctgggggagaaaagggaagccataaatatcagagaagttctagttctggatcagatgactatgcctacacacaagccttgctgttacatcaacgagcaaggatggagaggttagcaaagcaactgaaacttgagaaagaggagctagagcggttgaagtctgaagttaatggtatggagcatgacctgatgcagagacggctcagaagagtcagctgcaccactgcgatccctacgcctgaggaaatgacaagattgagaagcatgaacagacaactccagataaatgttgactgtacactgaaagaagttgacctccttcaatctagaggaaactttgatccaaaagccatgaataatttttatgacaacatagaacctggcccagttgtaccacccaagccatctaaaaaagactcctcagacccctgcacaattgagagaaaagcccgaagaattagcgtgacctccaaagtacaggcagacatccatgacacccaggcagcagctgcagatgagcatcgaactggctccacacaaagtcctcggacacaacctcgagatgaagactacgaaggggctccatggaattgtgatagctgcacctttcttaaccacccagcactaaatcgctgtgagcagtgcgagatgccacggtacacctgaattcagaaaagtctgcgccaggttgaaagtgaaactttgagcactaccagaagaaaaggaaacctcgggactctattcatccacccagccttttcattttcgattgcacagcggggaggaggaatggctttgtggtcgtcgttgtgctcacgaaaggaaaaatggggaggtcttttttttctcctttcttaactcactacagagtgagagatagaaagggatacttgaaactgggaaaggattcactctgtgaaagaatgtacacacagaagtcaagagctcttctgtggtggaatcccaattgttaaagttactgctgagtggcccttattttttaaagtagtactttgaatcatagtatgaaatgctacagtttatgcaaactgtgaattcccagagcagacttacctggtcaccgctctctggaaaaccaaggctccccgtgcttcttcccattgcttcctactaaagaggacaacaggaaaaagcacctagaatatttggggggggggggcaaattaattaagggtatttgtaattgctgcttttttcaggggtaatttccaacacacatacatgcacacaaacaaaatgttttaaaatgtgatttgtagcagtcaggaactaggcatatcatgcctttgtttaaaagtacaatcagaggtggtaagatgcctttggcttgtacagtgtgattcatcgagctctatcaacactggtaactaagacctacttatgccacataagagatgcatttttttaagttactgcatgtttttattaaggccattggttttcaaaataacaagtccttacaaagtatgattttataaatgatattctcgtaaaactgcgctttgccagtagcacagtgaatgtatgccaaatgcaagtccattccaaaatccatttggaaatcttgagctcagctgtggttcttaaacttttgcagtccatagggccttttttttttccttccaattttgtgataaattcatgatgtttacagcacagataaaactttgtgccataatcctaatttagctgaaatcaatattaactgttcaataaaaacttacttgcatatgttaacaaa

SEQ ID NO: 47099 - DNA, 2362 bp, Homo Sapiens
aggcgtgagccacggcgcccggcatccaggctagtcttgaactcctgacctcaagtgatccgtccgcctgggcctcccaaagtgctgggattacaggcgtgagccaccgcgcccggccaggttgtgggttttaatgggaccatctcactgcctaccgtttcctttttccgtccgaacagaaggggcctgagcagtgaactgacagtggcaacgccgggtgaggcgggatggaggagtttacgagcctgggtgacgccctgttccgcgtcctggccccgcccctcccggcagagccccttggcgcgtgacacaggccccgcccttgctgtacgccatcagccggcgccgcgccgccgggtgttactttgccccgccggcggggcggtcagcctcctgtcaccgcctgttccggctatggtcccgtccggtgttctgtaagttggcaacctaggctcctgacgcgaccctggtcctgatggcggcggcgacggccgcggcagccctggcggcggccgatccccctcccgcaatgccgcaggcggcaggggccggagggcccacaacccgcagagacttctactggctgcgctcctttctggccggaggtgggtccatgccacgaagagccagccgcgctctgagtggcgggggcaggactgtgggcaagtgggatgcaagcggcctctatgacattcctggactctggctgcttcaatgttctgttagatgtctgccctgacctgctgtaacctctttctagtaatcacttgactaatgacagctaggttatggggagtgggacctttggcactccggcagaggctggggaggtggaaggtctgaatcaggcacccattcttcagggctggataacagggaaaagaggaggatcccttacagagaccctggggttttatgtagacttggattttgctgtttgcttaaaggaaaacaaatattggagatcagctttttaatgactactggaaaattgtgcaaactgtctacagccaaaactggttccagtgattctagtaaactgtgacacagtacttgacaagccctattattgatgtgactttgggatcaaaaagttcatattgtctcttaggaatttcctgggccttcaagctccacccttccttaattacttctctgggttgtgtaggggtgggttgcccctccacacctgtgggtgtttctcgtaaggtggaacgagagacttaggaaagaaaaagacacagagacaaagtatagagacagaaataaggggacccggggaaccagcgttcagcatatggaggatcccgccagcctctgagttcccttagtatttattgatcatttgtgggtgtttctcgaagagggggatgtgtcagggtcacaagacaattgtggggagagggtcagcagacaaacacgtgaacaaaggtctttgcgtcatagacaatgtaaaggattaagtgctgtgctcttagatatgcatacacataaacatctcaatgctttacaaagcagtattgctgcccgcaggtcccacctccagccctaaggcggtttttccctatctcagtagatggagcatacaatcgcgttttataccgagacattccattgcccagggacaggcaggagacagatgccttcctcttgtctcaactgcaagaggcatgccttcctcttatactaatcctcctcagcacagaccctttacgggtgtcgggctgggggacgttcaggtctttcccttcccacgaggccgtatttcagactatcacatggggagaaaccttggacaatacctggctttcctaggcagaggtccctgcggccttccgcagtttttgtgtccctgggtacttgagattagggagtggtgatgactcttaaggagcatgctgccttcaagcatctgtttaacaaagcacatcttgcaccgcccttaatccattcaactctgtgacacagcacatgtttcagagagcacggggttgggggtaaggttatagattaacagaatctcaaggcagaagaatttttcttagtacagaacaaaatggagtctcctatgtctacttctttctacacagacacagtaacaatctgatctctcttgcttttccccacaggttgtcattacttaattatttaagattcaaaaatttaaaaattccacattgaagttgtgtgcagtggctcactactgtagtcccagttactagggaagctgaggcaggaagactgcttgagtccaggagatcgaggctccagtaagccatgatcacaccactaccctccagcctgagctacagagagagaccctctcctaaaagaagaaaaaaacaaaaacaaacaataaaaa

SEQ ID NO: 47100 - DNA, 165 bp, Homo Sapiens
agcacccctggctacatatttgggaaacgcatcatactcttcctgttcctcatgtccgttgctggcatattcaactattacctcatcttctttttcggaagtgactttgaaaactacataaagacgatctccaccaccatctcccctctacttctcattccctaa

SEQ ID NO: 47101 - DNA, 1907 bp, Homo Sapiens
acttgctctgcagctcccagaggtggtggttgtgttacgaaggctgaccctgccaatggccgacaaaatggtgcgcacccccaagtgctcgagatgcaggaaccatggcttcctggtgcccgtcaagggacacgcgggcaaatgccgctggaagcagtgcctctgcgagaagtgctacctgatctccgagcgccagaagatcatggccgcgcagaaggtgctcaagacgcaggccgccgaggaggagcaggaggcggccctgtgtgcgcaggggcccaagcaggcctccggggctgcggccgccgcccccgcccccgtccccgtcccggccgcgagcctccgcccgctgtccccggggactccctccggagacgccgacccgggacccgagggccgcgcggccgcttgcttcttcgagcagcccccgcggggccggaaccccggcccgagagccctccagccggttctgggcggccgcagccacgtggagccgagcgagcgagccgccgtggcgatgcccagccttgcgggacccccttttggggcggaggccgcaggcagtggctaccctggccccctagacctgcgcaggccgatgcggaccgtgcccggcccactgttcaccgactttgtgcgccctctgaacatcaacccggaccgtgcactgggccctgagtaccctggtggctccagcatgcacccctactgcccgttcccgctgggctacctggacgcccctcctggcgtccccctgcagcagggcttccggcatgtgtcccgcagccagtaccaaggcggaggcttggtgtcagaaccaggaggagacttccagccaagctactacctgccgccgccgccgccgccactgccgccccttccaccgcttccaccgcagccccagttcctcccgccaggctacctctctgcgctccacttcctccccccgccaccgccaccaccacctccatcatctttctcactgaccgtcctgtttgatactgacaaggagaacactgatgaccaggatgcagaggtactgtcgggtgagcccagccagccatcgtctcaggagcagtccgactaggccccaggcccgccctcctggccagcagagtggggcactggggggcaacagcaacagttttcttgtcttcattcagtgatatgtagggaggaaggaggttgatagcatagatggcaactgattcccagtttaagataggaggaaggagagcaatttctaagtttcaatcctgcgctgtacagttgaagaagagtgtggaggaagctattaccaggggagggccagggctctgaggagtgggcgctgggagaagctcccatttaggaatgaatttaactgtccttgggttacactaccatttattggaacaagccccagaggcagtatttgatttcctcaggccccactctaggacaggaggcaccatctatttcagccttctgctgcctttgcctggtcctccaggttgctgggggcaccacagacatcaagattccagttcatccaggtggctggagccagcagccaggaccagggtcgttgacagcaggttctgcagcatcctgccttgctgctctgtcccccacatcttcctggccacagccccttgcccctcctctaaggggttttactagcaagcatcctggctgctggggctacttcattccccctccataaagtttcagccattatgggcactggttttaaaaaatttattagtttgactatttgatgtttttatagtgattgccaactttaaaaagtaggctgttcataagcactgatgcagtccctagggaatagaatggtgcttctgatcacctgtgacatgaacagtttcttctgtgaggacagttggctattgaaataaaatgagcaatgg

SEQ ID NO: 47102 - DNA, 1281 bp, Homo Sapiens
atggcctccccgccgcggtgctccccgacagcccatgacagggaatgcaagttgccgccaccctccgcccccgccagcgagtattgtcccggcaagctgtcctgggggaccatggcgagggccttaggccgcttcaagctgtcgatcccgcacacgcacctgctggccaccctcgaccccctggccttggacagggaaccaccaccgcatctgttgcctgagaagcaccaggtgccggagaaattgatctggggcgaccaggaccctctctccaagatcccatttaaaattctgagtgggcacgagcacgctgtgagcacctgccacttctgtgtggatgacacaaagctcctcagtggctcctatgactgcactgtgaagctgtgggatccggtggacggttctgtggttcgcgattttgagcacaggcccaaagctcctgttgtagagtgcagcatcaccggcgacagcagcagagtcattgccgcatcctatgataagacagtgagggcctgggacctggagacaggcaagctgctgtggaaggtcaggtatgataccttcatcgtctcctgtaagttttctcctgatggtaaatacgtggtctcaggcttcgacgtggatcatggaatctgcataatggacgccgagaacatcaccaccgtttccgtcatcaaagatcatcacacaaggtccatcacgtcatgctgctttgaccccgacagccagagggtggcttctgtctcattggacaggtgcatcaagatctgggatgttacatcccaggccacgctgctcaccatcactaaggcacattccaatgcaatctcaaactgctgttttaccttcagtggccatttcctgtgtacaagctcctgggataaaaacttaaaaatatggaacgtccacacaggggagtttcgaaactgtggagcctgtgtgactctgatgcagggccatgaaggttctgtcagttcctgtcactttgccagagacagctcttttctcatttctggagggtttgataggactgtggctatttgggatgtagcagaaggctaccggaagctctctttgaagggccataatgactgggtgatggatgttgccattagcaacaacaagaaatggatcctgtctgcttccaaggataggaccatgagactgtggaatattgaagaaattgatgaaattcctttggtaatcaagtacaaaaaggccgtgggcttaaagttgaaacaggaaaagaaagaggcctacctgaagctgaagcaaggatga

SEQ ID NO: 47103 - DNA, 735 bp, Homo Sapiens
gcggctggcagctgtggcgccgacatggctgcgctggtggagccgctggggctggagcgggacgtgtcccgggcggttgagctcctcgagcggctccagcgcagcggggagctgccgccgcagaagctgcaggccctccagcgagttctgcagagccgcttctgctccgctatccgagaggtgtatgagcagctttatgacacgctggacatcaccggcagcgccgagatccgagcccatgccacagccaaggccacagtggctgccttcacagccagcgagggccacgcacatcccagggtagtggagctacccaagacggatgagggcctaggcttcaacatcatgggtggcaaagagcaaaactcgcccatctacatctcccgggtcatcccagggggtgtggctgaccgccatggaggcctcaagcgtggggatcaactgttgtcggtgaacggtgtgagcgttgagggtgagcagcatgagaaggcggtggagctgctgaaggcggcccagggctcggtgaagctggttgtccgttacacaccgcgagtgctggaggagatggaggcccggttcgagaagatgcgctctgcccgccggcgccaacagcatcagagctactcgtccttggagtctcgaggttgaaaccacagatctggacgttcacgtgcactctcttcctgtacagtatttattgttcctggcactttatttaaagatatttgaccctca

SEQ ID NO: 47104 - DNA, 4912 bp, Homo Sapiens
atggagcggcggagcgagagcccgtgtctgcgggacagccccgaccggcggagcggcagcccggacgtcaaggggcctcccccagtgaaggtggcccggctggagcagaacggcagccccatgggagcccgcgggaggcccaacggcgccgtggccaaggccgtgggaggtttgatgattcctgtcttttgtgtcgtggagcagttggacggctctcttgaatatgacaacagagaagaacacgccgagtttgtcctggtgcggaaagatgtgctttttagccagctggtggagactgcgctcctggccctggggtattctcacagctctgcggcccaggcccaaggaataatcaagctgggaaggtggaaccctctccccctcagttatgtgacagatgcacccgacgcgacagtggccgacatgctacaagatgtctatcatgttgtgacgttgaaaatccaattacaaagttgttcaaagttggaagacttgcctgcggagcagtggaaccatgccacagtccgcaatgccttaaaggaactgctcaaagagatgaaccagagcacattagccaaagaatgccctctctcccagagtatgatttcatccattgtaaatagcacatattatgccaatgtgtcagcaaccaagtgccaggagtttgggagatggtataaaaagtacaagaagattaaagtggaaagagtggaacgagaaaacctttcagactattgtgttctgggccagcgtccaatgcatttaccaaatatgaaccagctggcatccctggggaaaaccaacgaacagtctcctcacagccaaattcaccacagtactccaatccgaaaccaagtgcccgcattacagcccatcatgagccctggtcttctttctccccagcttagtccacaacttgtaaggcaacaaatagccatggcccatctgataaaccaacagattgccgttagccggctcctggctcaccagcatcctcaagccatcaaccagcagttcctgaaccatccacccatccccagagcagttaagccagagccaaccaactcttccgtggaagtctctccagatatctaccagcaagtcagagatgagctgaagagggccagtgtgtcccaagctgtctttgcaagagtggcattcaaccgcacacagggattgttgtctgagattctgcgtaaggaagaagaccctcggacagcctctcagtctcttctagtaaacctgagggccatgcagaatttcctcaatctgccagaagtggagcgagatcgcatctaccaggatgagagggagcggagcatgaatcccaatgtgagcatggtctcctcggcctccagcagtcccagctcctcccgaacccctcaggccaaaacctcgacaccgacaacagacctccctattaaggtggacggcgccaacatcaacatcacagctgccatttatgacgagatccaacaggagatgaaaagggccaaggtgtctcaagccctgtttgccaaagtggctgcaaataaaagtcagggctggctgtgtgaactgctccgctggaaggagaacccaagcccagaaaaccgcaccctctgggaaaacctctgtaccatccgtcgcttcctgaaccttccccagcatgagagggatgtcatctatgaggaggagtcaaggcatcaccacagcgaacgcatgcaacacgtggtccagcttccccctgagccggtgcaggtacttcatagacagcagtctcagccagccaaggagagttcccctcccagagaagaagcgcctcccccacctcctccgactgaagacagttgtgccaaaaagccccggtctcgcacaaagatctccttagaagccctggggatcctccaaagctttattcatgatgtaggcctgtacccagaccaggaagccatccacactctttcggctcagctggatctccccaaacacaccatcatcaagttcttccagaaccagcggtaccacgtgaagcaccacgggaagctgaaagagcacctgggctccgcggtggacgtggctgaatataaggacgaggagctgctgaccgagtcagaggagaacgacagcgaggaaggctccgaggagatgtacaaagtggaggctgaggaggaaaatgctgacaaaagcaaggcagcacctgccgaaattgaccagagataatgtgaacttctactaggcaaagcaatacatcggtccaaggattttctgctttcatttctttaaaagttttttgttagtttgttttttgtttttgtttttgggtttttttggctttatttttgtctttttatgtctgttttgtttttcttacccttttggacatttctttgttgcacaggatacacctatagactgaataagttcagtatttccgaatcagacatcgccttggcaaagacactaaagcgttacactttatcccgtctctatgactggatcatagtcattataatcacaggagactctgccttcattatccttgcacttaacggaagttacatcaggcaagtaccaggatgaaaagaactatgaaataaatgaaggaagctacaagtgtgtgtgtatatgtatatgtatatatctctatatttacatatatatattaaaattgcatgggacagagactttgcaatccgaaagaatagactgtgaaatgagttcttaaagaaaagacttgtttatgtattaaaaaaaccacttcacagtgagtcgctttggctttttgataaactgcggcctgctctcagggtggggtgactatttttgaattcctatttattttttgtgtttgtccctgattttttttttttaattctatggcttcctatctggcagcttaatgggtaatttttgaggtatgtatttaacaaaataaacgacactgccgaaaaaaaaaaaagtgaagtgaaaacaatcagggcacattaaaatgatacaagtcaaataaatcttaaagacacaatgcacacttaaaatgactcaataaaatgacttgctacgttccgttattcaatttgtcattactgtagtgaacagatgcatttctgtggaattccaaataagtaaaactgaaattcagtgcagagaaaactttgtccactagtgcaagtcttgatcaaatgacattttgacattggacatatggaattcatagtatgagccacattttgttgtgaaatttatttacctgcttgtggcttcaaatctgaaaattaataagcctgctcgtttaaaagttgtttgttgttgctgtttttttgtctttttgttttttactagaaaatagttcagtgtaatattaagttagaaaagaagttgctgcccagttaaaggggctccctctcaaataaatctccatccttccctctcccaaaagacatttctgatttctgcttcactttgggcttcctcttcttcgtacacattccatctacctaatcaaacattttcagtccctgatctctcctgtcccttttcctgggatgacagccctaacaagaactgtttttgaatcgttgtgcagctccaggcaatagagtatgtgaagcgatttcagtagaatcacttactcatcctaaaagaaaacattatcccagttacctacatcgcaattaccttatgtaaagcagaactaatgctgactggatgtttaatgggatgagcattaaagctgcaatctactatagtactccagatctctttcggcttcctatgagaaacaccagaagcattactttccacttctacttacagtaattgcaagaggagacctcacattcaggactggcctagtgaacgtaatccatgctttaaactggccattaaacagtcccacatggttggattttttttttttttttgagttgtgctttcacaaaaccttgtcaaagacctcatgcaatatcactttgaaagttattttctgtttactacacaaacattgtaatataactgttaatactatttatatatttgaaaggtataaaaggtaggagttaaaaaaaaaacctctatgtgtagatattaactcagaacttacaatatacagggagaagacatgttgcaatacaagctaattctagctgctcagtaacctctggagtttttaaagggacattttcctgtactttttcaaataatgatgtttaaaaattatcttgacataagcgtcatatacctttgcaaaaggatggttgtttgcagttagccctggccccatccttcctatttctgtagtatgctgcagctttaatcagaaagtccatggttgctgcttcctgatctccgagttactctttccaaattgtcttcttacactgttgctgaaggtcactctgtacacgtaatggaaactgattttgccaagctcttacaaggtggttcatctatcgatggcatccgcatttggtatcttttacacttcaaccaaaaatttattaggtatttttcaatgctaagtcttgccttttattttttaatttcactgccaagtttgcagtggttctaagtgaatctgtgggcattttagcctgtggtcttgccagatctttgcgaattacaatgcatatatgtctatttattcaatatctgtcatataatatctatttggaagaagaaactttctcttgtagtgcctcttgacaaagcacaatttcccgcctttttttttttttgtgaaatgaaaaaaacaaattgtgttttattgcggtatcaacaatgtgaataaggattaacatattgtaaatgttcttttttccatgtaaatcaactatctttgttatcactaagtgataattaatttttaacttatgtgcattgttaggctgttagaattttttggttgttaaaataaacgcattcaataaatatg

SEQ ID NO: 47105 - DNA, 483 bp, Homo Sapiens
gccggaatgagaatcaatgttgtcaataaccaccaggccaaacagaatttatatgacctggatgaagatgatgatggtatagcttccgttcctactaaacagatgaagtttgcagcctcaggcggctttctccaccacatggctgggctaagcagttccaagctttccatgtccaaggccctccctctcaccaaagtggttcagaatgatgcatacacagctcctgctctcccttcctctattcgaacaaaagccttgaccaacatgtcccggacactggtgaacaaggaagaaccccccaaagagctgccagctgctgagcctgttctcagcccattggaaggcaccaagatgactgtgaataatctgcaccctcgagtcactgaggaggacattgttgtaatcctgtgtcctcctccacttcccatgcctctatgttacccatctgtgtctcctgtgcagaaggagaggaaggggcattaa

SEQ ID NO: 47106 - DNA, 243 bp, Homo Sapiens
atggcgaccccgacccagacccccacaaaggctcctgaggaacctgacccattttactatgactacaacacggtgcagactgtgggcatgactctggcaaccatcttgttcctgctgggtatcctcatcgtcatcagcaagaaggtgaagtgcaggaaggcggactccaggtctgagagcccaacctgcaaatcctgtaagtctgagcttccctcttcagcccctggtggcggcggcgtgtaa

SEQ ID NO: 47107 - DNA, 375 bp, Homo Sapiens
atgtatgtttctattagttttcttcttggtctttctcatttagtcttgtgttgtcttttgacattcatagtaaacttttatctgcctccagagagtattgactttgagtttatggcacacaattggagtaagggcagatcgccttcatctactttgggactaagctggttcaaagcaggttttaggttttctgatggctggtctatgttttattcatctggactcccaggggtggcccttccagggtccccaccaaggtcccatctccttcctgggacccaaattctcattaggtcatttcagccctgtgagagtgccaaacattcagctaggctctccagcctcttaactaccacttcatactcagtttcttag

SEQ ID NO: 47108 - DNA, 828 bp, Homo Sapiens
tcagcagagggtttatgtggggaaagcccctctgcctgcatggtatgtgagaaagtcttcagccgcgtgtcattcaccgagcatgagcattttcacactagagagaaaccctttgaatgtaatgaatgtggaaaagcctttactaagcagtatgtcattaaccatctgaacgctcataacgagaagctttgtgaatataacaaatgtggaaaatccttttgccagaaggaaagtctccctaccagtcagaaaattcgcactgaagagagaccttttgagagtaaagactgtgggaaagttctcattcagaagtcaaacttcatccagtaccagagaatgcacacagaagagaaaccctttgtgtataaggagtgtggaaaaacctttagtggaaaatcaaaccttactgagcaagagaaatttcatattggagagaaaccctttaaatgtagtgaatgtggaacagctattggccagaagaagaagtacctcataagaaaccatactggagagaaatcctatgagtgtaaggaatgtggaaacatcttctgtcagcaaataccacttattgtagatgtgagatcagatgatcaaccctatgaactcactgtggaaaagccttgtctcagttcattgcttactgtgtgtgtgagcagccccgcaggtgagcagccctatggtttccatggctgtggggaagctttctcccaattctcaactcttgctctgtatgtaagaatacacacaggtaggaagctttatcagtatggtgaatgtgggaagttcagccagaagtcacaccacatcagactccagaaaagtcatact

SEQ ID NO: 47109 - DNA, 485 bp, Homo Sapiens
ctgccatgtgaccggcgggtgttctacaagggctgaccagtgggcgggacagaacgcaaagggcgatattaaaagccggactcttccggtgaagcggaggtgtggtggggcttgctgggatcatggcggggaatcactgcgagctcctgccgctggcccgtggcaggctcggggcggggttggggtggcttcttgtgcctcccttaaagcgcggggctcagcgtcctggcccagcgccccagcagcaggtccaagtgggtccggctctacagcggcggcacctacttcctcaccactgggcagacgccgctgtgtcaggacccgaaatccttcctgtacctcttgagccaggccgaccccgacccggactcggacaagacggagttttgttcttgttgcccaagctggagtacaatggcacaatcttggctcaccacaacctctgccacctgggttcaagcgagtctcctccttcagtctcctga

SEQ ID NO: 47110 - DNA, 372 bp, Homo Sapiens
atgaatttgctggagcaggcagaagagctcaaggcttttgagaggagacttactgaatatattcattgtttgcaacctgctactggatgttggagaatgcttcttctagtggtatctgtctgtacgactggtgcctggaactggttgatagatccagagacacaaaaggtgtccttcttcacatcattatggaatcatccattttttaccattagctatatcactctaataggcttgttctttgctggaatacacaagagagtagttgcaccatcaattatagctgctcaacgtcaaacgatattagcagaatacaatatgtcttgtgatgatacaggaaaactaattttgaaacctaggcctcatgttcaa

SEQ ID NO: 47111 - DNA, 1597 bp, Homo Sapiens
agtgtgctccccgccccctgccgcggcgcctcgcctcccggctcacctccccaccccacctgcccgctgcggctctccgcgggagatctcaccgttctggagacagggctcgctcgctctcacggtaggctggaagaacgggctgtctgggccttaggaaaggcccatgctgtataaggcatggggaaaggaaaggaagaaaggcaacgaacaagaaggagggcttccaactgcagcttcctgccggctgcaggcctcccttcctaagctgagctgaggcttcctctccatgggctggggagggggcgccaggaggcctcggcgggtccgcaattggccgggacagcttctcacgaaaggtcctgggccggcatcatcagcctcacctgggaactggttagaactacaaattccctcggccccacccagaccgacgccaagggcagctgtggagtggggcgcggcaatgcgccccttaacagccctccaggcttcttagcccgggcttggacagccgccttccggccagaggggatgaggttgcgctgcgctccgggagcgccgatggcgtgactggccccgcgcggagcagcgacagtaaggctgtgtggggggagctgggacctaagccgcgcgcacacccctttctctgcgtctggtggaggtgcacagaggcttttgagtcaggcccaagcgcagccaggtgacctccccgcggcctttcaagcctgagctcggtggacagctccctctcccgtgagtcccgctgtcctgtacgcgcccggtcgagccccgggctgcgcaccccgctaggaggtgggtactcgtcctccaggagttgccggtgagcccttgaccgtggcaggtcccctccagccgcgagcgacccctcagtacctgccgatgcctgctggtctctggcatcctccagtcgagggtcagggtcagggagcaaggcctcacgcgggcgccctccttgcagctgcccggccagcccgcttctctgcccggagccatgaatctcagtagcgccagtagcacggaggaaaaggcagtgacgaccgtgctctggggctgcgagctcagtcaggagaggcggacttggaccttcagaccccagctggaggggaagcagagctgcaggctgttgcttcatacgatttgcttgggggagaaagccaaagaggagatgcatcgcgtggagatcctgcccccagcaaaccaggaggacaagaagatgcagccggtcaccattgcctcactccaggcctcagtcctccccatggtctccatggtaggagtgcagctttctcccccagttactttccagctccgggctggctcaggacccgtgttcctcagtggccaggaacgttatggtaagtcagagcctgcgatcaggaaggtccatatatctctggaggagcaaagccctgtcaaacaagtcaaaaggctggtgccccagaagcaggcgagcgtggctaagaaaaaaaagctggaaaaagaagaagaggaaataagggtggggggtttcgtgtctgtaaagctgccttggggtaggcgtggactgacacccaaggcaggggcacctcctacc

SEQ ID NO: 47112 - DNA, 510 bp, Homo Sapiens
gtggtgcggagcgtgcgggccctgctctgcaccctgcacgccgtcccgtcacccgccgcgccctgcccgccaaggccctggcagctgggtgtggacgccgtccgtacgctgcgcactggacccgctctgctctgggtgcgtaaattcacagagaaacatgaatgcgtaacaacagaaaatggcattggaacagtgggaatcagcaatttggcacaggaagctttgggagatgttgtttactatagtctgcctgaagttgggacaaaattgaacaaacaagatgagtttggtgctttggaaagtgtgaaagctgctagtgaactctgttctcctttatcaggagaagtaactgaaattaatgaagctcttgcagaaaatccaggacttgtaaacaaatcttgttatgaagatggttggcagatcaagatgacactgagtaacccttcagaactagatgaacttatgagtgaagaagcttatgagaaatacataaaatctattgaggagtga

SEQ ID NO: 47113 - DNA, 2247 bp, Homo Sapiens
aagttggacgccccgacccgtgcgagggccaggtccgcgcctgccccgccaggcgaagcgaggcgacccgcgtgcggccatggcttcgctgctgggagcctacccttggcccgagggtctcgagtgcccggccctggacgccgagctgtcggatggacaatcgccgccggccgtcccccggcccccgggggacaagggctccgagagccgtatccggcggcccatgaacgccttcatggtttgggccaaggacgagaggaaacggctggcagtgcagaacccggacctgcacaacgccgagctcagcaagatgctgggaaagtcgtggaaggcgctgacgctgtcccagaagaggccgtacgtggacgaggcggagcggctgcgcctgcagcacatgcaggactaccccaactacaagtaccggccgcgcaggaagaagcaggccaagcggctgtgcaagcgcgtggacccgggcttccttctgagctccctctcccgggaccagaacgccctgccggagaagagaagcggcagccggggggcgctgggggagaaggaggacaggggtgagtactcccccggcactgccctgcccagcctccggggctgctaccacgaggggccggctggtggtggcggcggcggcaccccgagcagtgtggacacgtacccgtacgggctgcccacacctcctgaaatgtctcccctggacgtgctggagccggagcagaccttcttctcctccccctgccaggaggagcatggccatccccgccgcatcccccacctgccagggcacccgtactcaccggagtacgccccaagccctctccactgtagccaccccctgggctccctggcccttggccagtcccccggcgtctccatgatgtcccctgtacccggctgtcccccatctcctgcctattactccccggccacctaccacccactccactccaacctccaagcccacctgggccagctttccccgcctcctgagcaccctggcttcgacgccctggatcaactgagccaggtggaactcctgggggacatggatcgcaatgaattcgaccagtatttgaacactcctggccacccagactccgccacaggggccatggccctcagtgggcatgttccggtctcccaggtgacaccaacgggtcccacagagaccagcctcatctccgtcctggctgatgccacggccacgtactacaacagctacagtgtgtcatagagctggaggcgccccgtccggtcagccctcgcgccctctccttcttgtgccttgagtggcagaggagccgtccagccacaccagctttcctcccaccgctcagggcagggaggtctgaactgcggccccagagcctttggcctaagctggactctccttatccgagtgccgcctctatccccttccccacgttccagcccctgcagcccacattttaagtatattccttcaagtgagttttcctccagcccctgagagttgctgtctcccagtggaatgttcactgacgtcttttcttggtagccatcatcgaaactaatggggggacagacttgatagccaaggtcccttctggtccagttttctgatttagggttctctcaagattaataaaggaagatggggaaatttgactcattaatgagctcgctaacctacgatctggtgataattttgtgtgcacagcccaaggaccacgaggctttctgcactttctgcacccccttccaaagtgaccacaaaatttcaaagggactcatacaatttgagaaaaaacagtcaacctgatttgagaaattaaccagtatggctaactatatcacagaaaatgggattgagttaaaactattttattttaaatatacattttaaagcagttctttttttttgttaatttgtttattatacacacacttcaagagaatatgcacagtctaggccgggcacggtggctcacgcctgtaatcccagcactttgggaggccgaggcatgtggatcacctgaggtcaggagtttgagaccagcctagacaacatggtgaaaccttgtctctatgaaaaatacaaaatttgctgggagtggtggtgcatgcctgtaatcccagctacttggaaggctgaggcaggagaatgtcttgaacctaggaggtggaggttgcagtgagctgagattgcaccattgcactccagcctgtgcaacaagagtgaaactccatttcaag

SEQ ID NO: 47114 - DNA, 1176 bp, Homo Sapiens
cctcctgtcagcgtctacaggcccaacctctgccttatgggggcttctccaggcccacctcttcctcttggctgggtctacaggcacaactgctgcctcacaacagccttttttggcccagttcctgcccagctcccagcggccctggtagacccacaacttcccgaagccaagctccccaggcccaggtcaggcctcacggtggcctctccaagctcagctcctgccctccaatggcatctgcaggccccaaatggtctccagtcggtgggctcctccacgccaagcttgggcctcttggcgacctctgcaggcccaagttgtcctgaagtcggcctctcccggccctgcctcccagcaagtaagcaagctcttttggctcaactactgccgagctcccaacagcttggttgcagaaacttcggggtctacaaaggccggcgggagctgagccaaaagagcttgtttgctgggaggcaggagctgggccgggagatgcagccaggaggaacagctgggcctgaagaggcccccatgtgggaggcagaggccgggcctcctcaagtcggcctctccagacccacttgcagcctcccagcgtcctctccgggcccagctcttcctcccggctgcgtctccaggcccgactctggcctcccaacaacgtctttggactcagctcctgcccagctcccagcggccctggtagacccacaacttcctgaagccaagctccccaggcccagctcaggcctcacggtggcctctccaggctcagctcctgccctccgatggcatctgcaggccccaaatggcctccggtcggtgggctcctctaggcccagcttgggcctcccggcggcctctgcaggcccaaaacgtcccgaagttggcctctccaggcccagctccggcctcctggcggcctttgcaggcccaagtcgtcctcaagtcggcctggaattaggcctggaagagcagcaagtcagcctctccgggcccagctccatcctctcggcggcctctccaggtgcaaaacttcctcgagtcagcctctccaggcccagctcctcctgcctcccagtggcctctttccagcccagcccagctcatggctctcggcagccttcccaggccccgcttttgacttttggcggcctcttcaggcccagaact

SEQ ID NO: 47115 - DNA, 716 bp, Homo Sapiens
gagaaggtcttggaaaaggcggtgttcattagaaatctcaaaaccgagtcaccaagttccctctgttggagcccagtggagcctctgggagaaaagctggggtgacttttcctacaaggggcagagggactctgctagatttttgtttttcatttgtttttaattttgtaacatggaaactctttccttaggatataccagctctcattactcagctaggaattatacctctttaaagcctgaatttaaaagtctgacagttttaaatgcttactaactgtgggagttaaatcattacgaagtgaggaatacagagtgttgtccctgattctgggtttaatctggtaagaatctttacagaggacgaccacacgccgcttcctgtagcatgtgtcgtggttgtaattctctcatgtgcatattaagaagttgctgctcagatgtggctcttccctttgcagaggccggtgccctcgaccgcctcctggatctccccgcccctcctcagaagacatcgagcggtcctgagagcctcctgggcatgtttgtgtgctgtaacctgaagtcaaaccttaagataatggataatcttcggccaatttatgcagagtcagccattcctgttctctttgccttgatgttgtgttgttatcatttaagattttttttttttggtaattattttgagtggcaaaataaagaatagcaattacttg

SEQ ID NO: 47116 - DNA, 441 bp, Homo Sapiens
gcctaccaaaagcagccgaccatctttcaaaacaagaagaagctcctgctgggagaaactggcaagaagctcctgcagtactacagaatcaatctgggcttcaagacacctgaagaggcgattgagggcacctacattgacaagaaatgccccttcactggtaatgcctccattcgagggcggatcctctttggcatggtgaccaagatgaagatgcagaggactgtcatctgccgagactatctccactacacctgcaagtacaaccaccttgagaagcaccacaagaacatgtccgtaaacctgtccccctgcttcagggacatccagatcagcgacatcatcacagtgggcgagtgctggcccctgagcaagatggtacgcttcaacgtgctcaaggtcaccaagaccaccgggaagaagcagttccagaagttctga

SEQ ID NO: 47117 - DNA, 489 bp, Homo Sapiens
atgttctccaggttcagcagagccacccacacgttcagcttctcctgctcctctctggagggagagcaggccctctcagccacggcacgggccttctcgatctccgtggcctgcaggtggaaagccatgtactgcagccacagaatggagctgttgggggagctcagcaccagtcggtcaaaatcatccgcggactctggctgccgcccaggatccatcagcgcctcctcaatgcgggacagttccttctctgccttctgcttctccaactccctttctttcttgcttttctttatctgctatggaaagcagaaacaccgtgacaccgtggcttggtgtggcttctcatcctcctcgctgtctgagctctctgctagaggtggcaaggccggggtcagagagtctagtcccacattccaagcgaagcctgaagacagctgcagccggggcgcttctgctggcttggtttgcttctcctggaggaacaca

SEQ ID NO: 47118 - DNA, 351 bp, Homo Sapiens
gacgtgagggcccccactcagctcctggggctcctggggctcctggggctctggctgccaggtgccagatgtgacatccagatgacccagtctccatcctccctgtctgcatctgtaggaggcagagtcaccatcacttgccgggcgagtcagggcattagcaataatttaaattggtatcagcagaaaccaaggaaaactcctaagctcctgatctatgctgcatccagtctgcaaagtgggattccctctcggttcagtgacagtggatctgggacagattacactctcaccatcagcagcctgcagcctgaagattttgcaacttattactgtcaacagagtgacagt

SEQ ID NO: 47119 - DNA, 2369 bp, Homo Sapiens
aagcagaggatggtggatggcagaacaaggactatcatcaatgacattttcttcactgagcccaccccagaaatgagctcccttcctgtgcgctctcacagctccttgtcgttgaatctcgtatcactgatggtaatttgcagaggaataattaagttggtgattcactttaggatgtactgccctccgaggctgaaagctaaacacatagagcccacgttacgcccagtaccacttaaggaactgcggattagtcactggcccaatgaatgcatcagacactcagcttcagttcccatggcaacaggggctaatggcctagagactaaagatgagacaaagagaaacgcagagaaatgtgcgtgttctgtcttcctctgaggtacgcaagcccctattcagggattgaaaagaacattcgctttagttctaccctgccctcccctcaatgctgggtggaggagggcagaaacgcagacgggcctgacatgaatccagaatttctacatcctctcaatgcacctgcacggtttggagacaggcttctttgtccccgagccatcatgttaccaacaatgtattgtacctgcaaaccatgcctgtggaacctaggattcctgctaccccaactcaccttcctctttaccaccctctagcctctatcacagtaggggagttttttcagtcattcctattttctgacagaaagttccagccagcccaatttcagaagcgctgtctcaggagggctccctgatccttcctgccagagtcacacaggacacacctcctccctcttctcctctgtggcctgggagacctctgcccagaccatgggacaagttcctagggctcccccttcctgccacactcctgttccgccagggccttggggagactcagacgagggaggtttctgatagtctcccacttctggaagcagccaaactaatgagaggcctcttgcctgcccctcttcctgagaagcccaccacctcctgtgtattgactccccttaccagaggctggacaaacagcgtgccaggcccgacatgagacgtcccacactataaatttgtgataaacaacaactcaaaagctgggcatatgcccccaactttccctcccttctttccatttattccagtgagtctcagaagtccctttgtccagctgcactctcctctcctgggacccagctgccctccatttcccatgtcctggaacccctcagtccaaaatacctaagtaaactcgtcttcactgcaatgtgcaacccacacccacagccatgccctacgccagaaggaaccacatgaagttctgcccatcttcctgacctccacggatgttgcgcgacatccagtctcctctgggtcagggggtttgtctcatatgcactcctgagtgcccacctgccagtgactcccctgtgtttcacacccctctcgggggatctcagatccactcggctcctggtctctgtctggatgaccacgaccagtttcccttggagaaggaccaatggggaatggcaatgccaggaaggcaacgcttcgcttgactgctctgctccttaaatccccaaaagcaccactcacaggactgtagacgctatgccagttacagacttcagcgaagggtcaatagtgactacatgaaattatagtggaacaaactactagtgagcgatggctaagcatccatgctgctagaatccaaaaagaatcacccatcccctgcctcccacggaaaagataaggtcttctgaggacattccatttccggtgaattcccgttcatggcttttcttcctgttttgagcactgcccttttctctccctggaaagaaggaagtccctccattaatctgcttcattgtagggatttctttatctctcagtaatgggatctgtctatgtctccacctccctgtgaacatgtgaacacccagagacaatcaccaaacactaaggagctatgagtgtcacatcataatccctcacctagctctgcgcagtggctcacacctataaccccagctatgcaagacaccgaggcaggaggattggttgaggccaggagttggacacgagcctggtcaatgtagcgagacctcatctctaaaattataaaaatagaaaaaattagccttatatggtggcacgcatctgtggtcccagctactcgggagactcatgcaggaggatcacttgagcccaggagtttgaggctgcagtgagttatgacagcaccactgcacagagctttgggaggctgcactttgaaggcaggagttcaagaccagcttgggcatcacagcgagaccccaactgcagaaaaaaaataaaattaaatttaaaaaaatt

SEQ ID NO: 47120 - DNA, 483 bp, Homo Sapiens
atggcggccctcagcaagtccatccctcataactgctatgagatcggccacacttggcacccttcctgccgggtctccttcctgcagatcaccgggggcgccctggaggagtccctgaagatctatgctcctctgtacttgattgcagcaattctccggaaacggaaattagactattatttacacaaactactccctgagatcctacaatccgcttcatttctaactgctaatggggccttgtatatggctttcttttgcattttaaggaagatacttggaaaattctactcatggactcctggctttggtgccgctctgccagcatcttatgtggccattctcattgaaagaaaaagcaggagagggctgctcacaatttatatggccaacttgatggagtctcactgtcttccccaggctggagtgatttcagctccctgcagcctctgcctcccaggttcaagggattctcctgcctga

SEQ ID NO: 47121 - DNA, 744 bp, Homo Sapiens
atggccgcggccatcgctagcggcttgatccgccagaagcggcaggcgcgggagcagcactgggaccggccgtctgccagcaggaggcggagcagccccagcaagaaccgcgggctctgcaacggcaacctggtggatatcttctccaaagtgcgcatcttcggcctcaagaagcgcaggttgcggcgccaagatccccagctcaagggtatagtgaccaggttatattgcaggcaaggctactacttgcaaatgcaccccgatggagctctcgatggaaccaaggatgacagcactaattctacactcttcaacctcataccagtgggactacgtgttgttgccatccagggagtgaaaacagggttgtatatagccatgaatggagaaggttacctctacccatcagaactttttacccctgaatgcaagtttaaagaatctgtttttgaaaattattatgtaatctactcatccatgttgtacagacaacaggaatctggtagagcctggtttttgggattaaataaggaagggcaagctatgaaagggaacagagtaaagaaaaccaaaccagcagctcattttctacccaagccattggaagttgccatgtaccgagaaccatctttgcatgatgttggggaaacggtcccgaagcctggggtgacgccaagtaaaagcacaagtgcgtctgcaataatgaatggaggcaaaccagtcaacaagagtaagacaacatag

SEQ ID NO: 47122 - DNA, 539 bp, Homo Sapiens
ctgtctcccgccacccacaccagctgtcccactcaccatggagaagatcctgatcctcctgcttgtcgccctctctgtggcctatgcagctcctggcccccgggggatcattatcaacctggagaacggtgagctctgcatgaatagtgcccagtgtaagagcaattgctgccagcattcaagtgcgctgggcctggcccgctgcacatccatggccagcgagaacagcgagtgctctgtcaagacgctctatgggatttactacaagtgtccctgtgagcgtggcctgacctgtgagggagacaagaccatcgtgggctccatcaccaacaccaactttggcatctgccatgacgctggacgctccaagcagtgagactgcccacccactcccacacctagcccagaatgctgtaggccactaggcgcaggggcatctctcccctgctccagcgcatctcccgggctggccacctccttgaccagcatatctgttttctgattgcgctcttcacaattaaaggcctcctgcaaacctt

SEQ ID NO: 47123 - DNA, 2066 bp, Homo Sapiens
ccgacacccacgggcggagatcacctgctgccccgcagacccctgtcccttcctcccggaccagcagctagaggatgtccaaacggagttggtgggctggatccagaaagcccccaagagagatgctgaaactctcaggctctgactccagccaaagcatgaatggccttgaagtggctcccccaggtctgatcaccaacttctccctggccacggcagagcaatgtggccaggagacgccactggagaacatgctgttcgcctccttctaccttctggattttatcctggctttagttggcaataccctggctctgtggcttttcatccgagaccacaagtccgggaccccggccaacgtgttcctgatgcatctggccgtggccgacttgtcgtgcgtgctggtcctgcccacccgcctggtctaccacttctctgggaaccactggccatttggggaaatcgcatgccgtctcaccggcttcctcttctacctcaacatgtacgccagcatctacttcctcacctgcatcagcgccgaccgtttcctggccattgtgcacccggtcaagtccctcaagctccgcaggcccctctacgcacacctggcctgtgccttcctgtgggtggtggtggctgtggccatggccccgctgctggtgagcccacagaccgtgcagaccaaccacacggtggtctgcctgcagctgtaccgggagaaggcctcccaccatgccctggtgtccctggcagtggccttcaccttcccgttcatcaccacggtcacctgctacctgctgatcatccgcagcctgcggcagggcctgcgtgtggagaagcgcctcaagaccaaggcagtgcgcatgatcgccatagtgctggccatcttcctggtctgcttcgtgccctaccacgtcaaccgctccgtctacgtgctgcactaccgcagccatggggcctcctgcgccacccagcgcatcctggccctggcaaaccgcatcacctcctgcctcaccagcctcaacggggcactcgaccccatcatgtatttcttcgtggctgagaagttccgccacgccctgtgcaacttgctctgtggcaaaaggctcaagggcccgccccccagcttcgaagggaaaaccaacgagagctcgctgagtgccaagtcagagctgtgagcggggggcgccgtccaggccgagcgcagactgtttaggactcagcagacccagcaagaggcatctgccctttccccagccacctccccagcaagcaacctgaaatctcagcagatgcccaccatttctctagatcgcctagtctcaacccataaaaaggaagaactgacaaaggggatccatcggccacccctctgcaggggcttgtgatggctacaatggctcctagacactcaacgacttcatctgtggcagggagagaggaggccggaagaacaacccctgaacaatggaggcctttctttcccgctaggctcccagcctccttcccgctacagaatcgctcatcggcgaggctcagcagaaagaccctgaaggcaggctgcaaatgacccagaagagggacctgggagtcctggtggggacggggagggagtctcaatactcctttgcagtgcaaggtactctgagtcccctctgtagtgcctctgccagacacacactgcctgagttgaagagacacaggccacacatttcaggctggttgccagcggacgtcagcactcacggcctgcagggactcagcacagctctggattctggatctctcctgctgtaaccccacgcacaagcctgcaacccccagagctctttgacaggctcccaggcctcccagtcctggacaagcatgtgcagtcacgggagctcagctcaggccagggctgggctgtgcacctgcctcccactgacccagacccacttcctccagagaggcctctctccgcctgagctatttcccttgctagtgtgcagatatttccctaacatgtccttttttgtatttgtttgtacggaccataaatataactgtagctttaagactacaca

SEQ ID NO: 47124 - DNA, 195 bp, Homo Sapiens
ctgaaggtgaaggggaatgtgttcaaaaacaagtggattctcatggaacacatcctcaagctgaaggcagacaaggcccacaagaagctgcaggctgaccaggctaaggcccgcaggtctaagaccaaggaagcacgcaagcaccatgaagaccgcctacaggccaaggaggagatcatcaagactttgtctaag

SEQ ID NO: 47125 - DNA, 968 bp, Homo Sapiens
atggggcccccctcagcttgtccccacagagaatgcatcccctggcaggggctcttgctcacagcctcacttttaactttctggaacgcacccaccactgcctggctctttattgcatcagcgccctttgaagttgctgaaggggagaatgttcatctctctgtggtttatctgcccgagaatctttacagctatggctggtacaaagggaaaacggtggagcccaaccagctaatcgcagcatatgtaatagacactcacgttaggactccagggcctgcatacagcggtcgagagacaatatcacccagtggagatctgcatttccagaacgtcaccctagaggacacgggatactacaccctacaagtcacatacagaaattctcagattgaacaggcatctcaccatctccgtgtatacggagaatgttctaaatttgactctgagatctctgaggatgcagcatggccccaagacactttctgttggtcactctatccacagagtcagtggctcagccctccatccaagccagcagcaccacagtcacagagaagggctccgtggtcctgacctgccacacaaataacactggaacctctttccagtggattttcaacaaccagcgtctgcaggtcacgaagaggatgaagctgtcctggtttaaccatatgctcaccatagaccccatcaggcaggaggacgctggggagtatcagtgtgaggtctccaacccagtcagctccaacaggagcgaccccctcaagctgactgtaaaatcagatgacaacactctaggcatcctgatcggggtcctggttgggagtcttctggtggctgcacttgtgtgtttcctgctcctccgaaaaactggcagggccagcgatcagagtgacttcagggagcagcagcccccagcctccacccccggccatggaccctctgacagctccatctcctaggta

SEQ ID NO: 47126 - DNA, 192 bp, Homo Sapiens
ctccccagccacacatgtgggaacccagggaggctgcccaatggcatccagcagggttcaaccttcaacctcggtgacaaggtccgctacagctgcaaccttggcttcttcctggagggccacgccgtgctcacctgccacgctggctctgagaacagcgccacgtgggacttccccctgccttcctgcaga

SEQ ID NO: 47127 - DNA, 477 bp, Homo Sapiens
atgagtatactcaggcttcagaagaggctcgcctctagcatcctctgctgcggcaagaagaaggtctggttggatcccggtgagaccagtgaaatcgccaatgtcaactcacgtcagcagatccggaagctgataagagatgggctgatcatccttaagcctgtgcctgtccattcccaggctcaatgctggaaaaataccttggccggccgtaagggcaggcaaggcataggtaagcaaaagggtacagccaatgcccgaatgccagagaagatcacgtggatgaggagaatgaggattctgcgcctgctgctcagaagatactgtgaatctaagaagattgattgctacatgtatcacagcctgtacctgaaggtgaaggggaatgtgttcaaaaacaagtggattctcagggaacacagccacaagaagatagacagggcccgcaagaagctcctggctgaccaggctgaggcc

SEQ ID NO: 47128 - DNA, 267 bp, Homo Sapiens
ttttttttttttgagacagaatctcactctgtcacccaggctggagtgcaatggcatggtctcagctcactgcaacctctgcctcccgggttcaagtggttcttgcacctcagcctcccaagtagctgggactacaggcgtgtgccaccacacccggctaatttttgtatttttagtagagacgggtcactatgttggccaagctggtctcgaactcctgacctcgtgatccaccctcctctgcctcccaaagtgctgggattacag

SEQ ID NO: 47129 - DNA, 162 bp, Homo Sapiens
cacgagcttggtgatgaagtccttcagctgcgccacgccctggcgcacggtgggctgcagcggctccatccaagcctccttggccctggaagccggcgtgtccatgttgcccacgttctggactgcctggaggtgacagcaggaaggaccaggttctgctag

SEQ ID NO: 47130 - DNA, 621 bp, Homo Sapiens
atgaaaactacttatgaagaggttacaaccaaattagaagaatataaggaagcctttgcagcagcactgaaagctaacaattccatgtcaaaaaaattaacgaaatctaataagaaaatagcaatgatcagcaccaagctccttatggagaaagagcgggtgaaatattttctcagcactcttcctacaaggcgaggcccagagtcaccttgtgttgaaaatcttactagtataggactcaacagaaaatatattccccaaatgcccgtaagaattcctacttcaaacccccagacctcaaataactgcaagaactacttgactgaggtggagctggactgtgtagaacaaataattagagaaacaaagagaactgttgctgtgttggacacttgctcccatctattttcttctctagaatccactgaggtggagccactgaggaagcacaggcgagccctccccagcgtgtactcactggtccccaacagaagaacagctgccgcatccactgagagcaggacaaagaggccaggcgttgtcaggagcccaggtctccagctggagggaacgtcaaccctgcagtgggagcaggggcccattgcacatcctaggcagaga

SEQ ID NO: 47131 - DNA, 1362 bp, Homo Sapiens
atgatgttgggcaccaaaggtggcgaggggtttatgttgaaggtccacggcttgccctggtcttgcttggccgatgaagtgcagcgtttcttcgactgcaaaattcaaaataaggctcaaggtattcgtttcatctacaacagagaaggcaggctgggtgacaaggcttttgttgaacttgaatcagaaaatgaagtcaaattggccctgaaaaaggacagagaaactatgggacacagttttgttgaagcattcaagtcaaacaacgttgaaatggattgggtgttgaagcataccggtcgaaatagtcctgacacggccaatgatggctttgtacagcttagaggacttccctttgaatgcagcaaggaagaaattgttcagttcttctcagggttggaaatcgtgccaaatcggataacattgccagtggaccaggggaggagtataggggaggtcttcgtgcagtttgcttcgcagaaaataaccgaaaaggctctaaagaaacacaaggaaagaatagggcacaggtatattgaaatctttaaaagcagcagggctgaagttggaactcactacaatccaccaaaagcttatggccatgcggcggccaggtcccatgacagacctggttctggcagaggttttaacagcattggcagaggagctggctttcagaggatgaggcatggtgcttatggtggaggatatggagcctgtgacaattataatggctatggctatggatttgggtcagatagatttggaagagacctcaattattgtttttcaggaatgtctgatcacaaatatggggatggtggctctaccttccagagcacaacaggacactgtatatacgtgggattaccttacagagctactgagaatgacatttgtaatttttttgacctcaatgctgtgagggtacacattgaaattggtcctgatggcagagtaactggtgaagcagatgttgagtttgcaactcatgaagatgctgtggcagctatgtcaaaagacaaagcaaatatgcaacacagctatgtagaacccttcttgaattgtgcagcaggagccagcggtactgcttacggtagccaaatgatggggggcatgggcttgtcaatccagtccagttatggtggcccagccagcccgcagctgagtggtggttatggaggtggctatggtggccacagcagcatgagtggatttgaccaagttttacaggaaaactcatgtagccaaggagcaatgaacagcagctactacagtaatggaagctgtgcatctataggtgtgaatggaatgggagggatgtctaccatgtccagtatgagtggtggatggggaatataa

SEQ ID NO: 47132 - DNA, 882 bp, Homo Sapiens
atggtggcgctggtgagatccgacggggccctccgctcccccatgtattacttcttgggtcacctgagcctcgtggacgtctgctttaccaccgtcacggtccccaggctgctggccggcctgctccacccgggccaggccatatccttccaggcgtgctttgccgagatgtacttcttcgtggctctgggcatcaccgagagctacctcctggcggccatgtcctacgaccgcccgacggcggcgtgccggcccctgcgctacggcgcgctggtgacgccatggctgcgcctcgctggtgcgtgcgtcgtgggccgtgacgcacctgcactcgctgctgcacacgctgctcctctccgcgctctcctacccctaccccacccccgtgcgccccttcttttgcgacatgacggtgatgctgagcttggcgacctcggacacgtccgccgcggagacggccatcttctccgagggcctggccgtggtgttggccccgctgctcctcgtgttccttttcctacgcgcgcatcctggtcgcggtgctcggcttgccggcggccggcgccgcgccttctccacctgcggggcccacctagtggcggtggcggtggcgcttttctttggctctgtcctctccgtgtatttcccgccgtcgtctgcctactcagcccgctacgaccgcctggccagcgtggtctacgctgtcatcacgccgaccttgaaccctttcatcaacagccttcgcaacaaagaggtcaagggcgccctgaaaagggggctcagatggagggctgcaccccaagaggcgtgagggcaaatctggctcactggcattttcatgataacagttacagaaaaaaaccttgttttttggctttctaa

SEQ ID NO: 47133 - DNA, 522 bp, Homo Sapiens
atgcagttccccatgggccccgcctgcatcttcttgaggaaaggcattgctgagaaacagcgggaaagaccactgggacaagatgagattgaagagctgcgggaagcatttcttgagttcgataaggaccgagatgggttcatctcttgtaaggatctggggaatctcatgaggacgatgggttacatgcccacggagatggaactgattgagctcggccagcaaatccgcatgaacctgggtggccgtgtagactttgatgactttgtggagctgatgacccccaaattgcttgcagaaacagctgggatgatcggtgtccaggagatgcgggatgccttcaaggagtttgacacgaatggagatggggagatcaccctggtggagctacagcaggccatgcagagactcctgggggagcggctcaccccccgggagatctctgaggttgtccgggaggctgatgttaatggagacggcacagttgactttgaagagtttgtgaagatgatgtctcgctga

SEQ ID NO: 47134 - DNA, 609 bp, Homo Sapiens
atgggtttcagagatctgaaaagcccggctagcctccaggtgctcaacgattacctggtggacaagagctacatcgggtatgtgccatcacaagcacgtgtggcagtctatgaagcagtgtccggcccaccgcctgctgacttgtgtcatgccctatgttggtataatcagatcaagtcttatgaaaaggaaaaggccagcctgccaggagtgaagaaagctgtgggcaggtatggtcctgctaaggtggaagacactacaggaagtggagctacaaatagtaaagatgatgatgaaattgatctccttggatctgatgaggaggaaagtgaagaagcaaagagaggatcatcaaacctaaaagaaaaaaaacctgcacttgttgccaagtcttccatcttagacatgaaaccttgggatgatgagacagatatggcaaaagaaagggtcagaagcattcaagcagatggcttagtctggggctcatctaaactagttccagtgggatacagatttaagaaacttcaaatacagtgtgtggttgaagatgataaatttggaacagatatgctggaggagcagatcgctgcttttcaggattatgtatag

SEQ ID NO: 47135 - DNA, 933 bp, Homo Sapiens
atggaaccacagaacaccacacaggtatcaatgtttgtcctcttagggttttcacagacccaagagctccagaaattcctgttccttctgttcctgttagtctatgttaccaccattgtgggaaacctccttatcatggtcacagtgacttttgactgccggctccacacacccatgtattttctgctccgaaatctagctctcatagacctctgctattccacagtcacctctccaaagatgctggtggacttcctccatgagaccaagacgatctcctaccagggctgcatggcccagatcttcttcttccaccttttgggaggtgggactgtcttttttctctcagtcatggcctatgaccgctacatagccatctcccagcccctccggtatgtcaccatcatgaacactcaattgtgtgtgggcctggtagtagccgcctgggtggggggctttgtccactccattgtccaactggctctgatacttccactgcccttctgtggccccaatatcctagataacttctactgtgatgttccccaagtactgagacttgcctgcactgatacctccctcctggagttcctcatgatctccaacagtgggctgctagttatcatctggttcctcctccttctgatctcttatactgtcatcctggtgatgctgaggtcccactcgggaaaggcaaggaggaaggcagcttccacctgcaccacccacatcatcgtggtgtccatgatcttcattccctgtatctatatctatacctggcccttcaccccattcctcatggacaaggctgtgtccatcagctacacagtcatgacccccatgctcaaccccatgatctacaccctgagaaaccaggacatgaaagcagccatgaggagattaggcaagtgcctagtaatttgcagggagtaa

SEQ ID NO: 47136 - DNA, 438 bp, Homo Sapiens
atggctttgcctagaagccaaggccattggtccaacaaagacatcttgaggttactggaatgcatggagaataatcgcccatctgatgacaacagcacgtttagctcaactcagtcacacatggactggggaaaagtagcttttaaaaacttttctggtgaaatgtgcagactcaaatggttagagatttcttgcaacttgagaaaattcggcactttgaaagaattagtcctggaagctaagaaatgtgttaaaaagatgaacaaaagccaaaaatacaggaacggtccagactttccaaagaggccccttactgcttacaatcgcttcttcaaggagagttggccccagtactcccaaatgtaccctgggatgagaagccaggaactgaccaaaatcctgtcaaagaaatacagggaactcccagagcagatgaaa

SEQ ID NO: 47137 - DNA, 564 bp, Homo Sapiens
cattctttttctttattcagtggattgttagttcttctgctgttaggaagccactatgtctggacgtggaaagcaaggcggcaaagctcgggcaaaagctaaaacgcgttcttccagggccggtcttcagtttccagttggccgtgtgcaccgcctcctccgcaaaggcaactactccgaacgagtcggggccggcgctccagtgtacctggcagcggtgctggaatatctgacggccgagatcttagagctagctggcaacgcggctcgcgacaataagaagacccgcatcatcccgcgccacctgcagctagccatccgcaacgacgaggagctaaataagcttctaggtcgcgtgaccatcgcgcagggcggtgtcctgcccaacatccaggccgtattgctgcctaagaagacggagagccaccataaggccaagggcaagtgaaatgattactagtcaaatccgtcagtgatcccgagtcccagaaaccaaaggctcttttcagagccacccaccttttctgtaaagtgctggaatacacatacgatgcctgaaatctc

SEQ ID NO: 47138 - DNA, 1889 bp, Homo Sapiens
ccggcggctgttgtcgggcctccagcgggcggggccgttggcggagcagaggggaggcgcagccgggcggagggcccacgagggctcagccttcccggtcagcggtggtgacggtatcccagagtgccagagaaccgttgcttttccgagttgctcttcttccaggctccgttggtggtcggcatggcccgtggaaatcaacgagaacttgcccgccagaaaaacatgaagaaaacccaggaaattagcaagggaaagaggaaagaggatagcttgactgcctctcagagaaagcagagttctggaggccagaaatctgagagcaagatgtcagctgggccacacctccctctgaaggctccaagggagaatccttgctttcctcttccagctgctggtggctccaggtattacttggcttatggcagcataactcctatctctgcctttgtctttgtggtcttcttttctgtcttcttcccttctttttatgaggacttttgctgttggatttaggttccattctaacctaggatgatctcatttggaaatccttaatttcatctacaaaaactgttttcccaaataggtcacattcacgcatatcagatggacagatgtatcattttggggtccaccattcaacccactacaaggagttttttaaacaaaaataggaaacttagatgtaacttagcactttttttttttttttttgagatggagtctcactctgtcaccagactggagtgcagtggtgccatctcagctccatgcaacctctgcctcctgggttcaagcagttctcttgcctcagcctcctgggtagctgggattacaggcacgcgctgccacacccaggtaatttatttattttttttttgagacagagtctcgcactgttgcccaggctggactgcagtggcgtgatctctgctcactgcaacctccgcctcccgggttcaagcgattctccagcctcagcttcctgagtagatgggattacaggcgcctgccaccacgcccagctaattttttgtattcttagtagagatggggtttcaccatgttggccaggctggtctccatctcctgacctcgtgattcacccgcctcggcctcccaaagtgctgggattacaggcgtgagtcacagcccccggccataatttagcactttaaaaaataatagccatgttgggccaggcgtggtggctcatgcctgtaatctgagcactttgggagaccaaggcgggtagatcccttgtgcccaggagttcaagaccagcctgggcaacatggcgaaaccccatttctactaaaaatacaaaaattagctggggcgaggggataggccgagttccgggtgtaagggggccattagggagagcagagcgaggcagctgatcttccggattgggggccttgcccggaagctggacctcacggagatgaaacggaagatgcacgaggatatgatctccatacagaactttctcatctacgtggccctgctgcgagtcactccatttatcttaaagaaattggacagcatatgaagattggacatcacatgtgaatgcatgatatgaagagcctggttacagtttctactgttctctgcaagtaaataggcccagaaaggtataagagactctttgaatggacataaaaattctgcttgttaagaacaagttgagctctggtaactgatcttaatagctaaaatataaaaatatttgggaagtctgaaatgaggtctcctggccctggtgtgcccttaatgcctgtgacagttggcctctgtgaatattggtataattgtaaataatgtcaaactccattttctagcaagtattaataattaagggaagtatgtctgaaatggca

SEQ ID NO: 47139 - DNA, 1602 bp, Homo Sapiens
tctctccctgagaagtcaccactctcatctgaggcccgtgtcgacctctgtgatgatttggctcctgtggcaagacagcttgctcccaggaagaagcttcctctgagtagcaggagacctgctgcggtgggggctgggctccagaatatgggaaatacctgctacgagaacgcttccctgcagtgcctgacatacacaccgccccttgccaactacatgctgtcccgggagcactctcaaacatgtcagcgtcccaagtgctgcatgctctgtactatgcaagctcacatcacatgggccctccacagtcctggtcatgtcatccagccctcacaggcattggctgctggcttccatagaggcaagcaggaagatgcccatgaatttctcatgttcactgtggatgccatgaaaaaggcatgccttcccggccacaagcaggtagatcatcactctaaggacaccaccctcatccaccaaatatttggaggctgctggagatctcaaatcaagtgtctccactgccacgggatttcagacacttttgacccttacctggacatcgccctggatatccaggcagctcagagtgtcaagcaagctttggaacagttggtgaagcccgaagaactcaatggagagaatgcctatcattgcggtctttgtctccagagggcgccagcctccaagacgttaactttacacacttctgccaaggtcctcatccttgtcttgaagagattctccgatgtcacaggcaacaaacttgccaagaatgtgcaatatcctgagtgccttgacatgcagccatacatgtctcagcagaacacaggacctcttgtctatgtcctctatgctgtgctggtccacgctgggtggagttgtcacgatggacattacttctcttatgtcaaagctcaagaaggccagtggtataaaatggatgatgccaaggtcactgcctgtagcatcacttctgtcctgagtcaacaggcctatgtcctcttttacatccagaagagtgaatgggaaagacacagtgagagtgtgtcaagaggcagggaaccaagagccctcggcgctgaagacacagacaggcgagcaacgcaaggagagctcaagagagaccacccctgcctccaggcacccgagttggacgagcgcttggtggaaagagccactcaggaaagcaccttagaccactggagattcccccaagagcaaaacaaaacgaagcctgagttcaacgtcagaaaagtcgaaggtacccgagttggacgagcacttggtggaaagagccactcaggaaagcaccttagaccactggaaattccccaaaagcaaaacaaaacgaagcctgagttcaacgtcagaaaagttgaaggtaccctgcctcccaacgtacttgtgattcatcaatcaaaatacaagtgtggtatgaaaaaccatcatcctgaacagcaaagctccgtgctaaacctctcttcgacgaaaccgacagatcaggagtccatgaacactggcacactcgcttctctgcaagggagcaccaggagatccaaagggaataacaaacacagcaagagatctctgcttgtgtgc

SEQ ID NO: 47140 - DNA, 1476 bp, Homo Sapiens
atggcgggccagggcctgcccctgcacgtggccacactgctgactgggctgctggaatgcctgggctttgctggcgtcctctttggctggccttcactagtgtttgtcttcaagaatgaagattactttaaggatctgtgtggaccagatgctgggccgattggcaatgccacagggcaggctgactgcaaagcccaggatgagaggttctcactcatcttcaccctggggtccttcatgaacaacttcatgacattccccactggctacatctttgaccggttcaagaccaccgtggcacgcctcatagccatatttttctacaccaccgccacactcatcatagccttcacctctgcaggctcagccgtgctgctcttcctggccatgccaatgctcaccattgggggaatcctgtttctcatcaccaacctgcagattgggaacctatttggccaacaccgttcgaccatcatcactctgtacaatggagcatttgactcttcctcggcagtcttccttattattaagcttctttatgaaaaaggcatcagcctcagggcctccttcatcttcatctctgtctgcagtacctggcatgtagcacgcactttcctcctgatgccccgggggcacatcccatacccactgccccccaactacagctatggcctgtgccctgggaatggcaccacaaaggaagagaaggaaacagctgagcatgaaaacagggagctacagtcaaaggagttcctttcagcgaaggaagagaccccaggggcagggcagaagcaggaactccgctccttctggagctacgctttctctcggcgctttgcctggcacctggtgtggctgtctgtgatacagttgtggcactacctcttcattggcactctcaactccttgctgaccaacatggccggtggggacatggcacgagtcagcacctacacaaatgcctttgccttcactcagttcggagtgctgtgtgccccctggaatggcctgctcatggaccggcttaaacagaagtaccagaaggaagcaagaaagacaggttcctccactttggcggtggccctctgctcgacggtgccttcgctggccctgacatccctgctgtgcctgggcttcgccctctgtgcctcagtccccatcctccctctccagtacctcaccttcatcctgcaagtgatcagccgctccttcctctatgggagcaacgcggccttcctcacccttgctttcccttcagagcactttggcaagctctttgggctggtgatggccttgtcggctgtggtgtctctgctccagttccccatcttcaccctcatcaaaggctcccttcagaatgacccattttacgtgaatgtgatgttcatgcttgccattcttctgacattcttccacccctttctggtatatcgggaatgccgtacttggaaagaaagtccctctgcaattgcatag

SEQ ID NO: 47141 - DNA, 791 bp, Homo Sapiens
actcgtgtctcgctaccagctccccgctgccctgcgctcggcgggctggcatccggcccgggggaaagcggaccagcccttctgcaggtctgcggggccaagtgtcccggcggcgcacctcgtggcgagaatcgggagaaggaggagactacaaggataggcccaggagtaatggagtccaaagagaaacgagcagtaaacagtctcagcatggaaaatgccaaccaagaaaatgaagaaaaggagcaagttgctaataaaggggagcccttggccctccctttggatgctggtgaatactgtgtgcctagaggaaatcgtaggcggttccgcgttaggcagcccatcctgcagtatagatgggatatgatgcataggcttggagaaccacaggcaaggatgagagaagagaatatggaaaggattggggaggaggtgagacagctgatggaaaagctgagggaaaagcagttgagtcatagtctgcgggcagtcagcactgacccccctcaccatgaccatcatgatgagttttgccttatgccctgaatcctgatggtttccctaaagttattacggaaacagacccctgctttcgaatttacatgttcatgatgtgcccttgttgtaaacctttacctgtcacttgtttacgtgggtctcctattaccagcttctaattgaatattgtgtttttgaaccagtctgtaagatttttgttagcagaagaattttacctattgcatggaaagatgctcattatagtgaagttaataaagcacctttaaaaa

SEQ ID NO: 47142 - DNA, 417 bp, Homo Sapiens
ctcacagacatgtccaacaacagccccgagtatgctttggttttcaccatctcgggtgctatggccaccatggtctccagtggcctgggtgctgcctgtggcatggccaagaatggcaccggcatcatggccatgtctgtcatgtggccagagctgatccacatgaagtccatcatcccagtggtcatggctggtatcatcaccatctatggcctagtggcggctgtcccccctgccaactccctgaatgatgacaacagtctctatagcagtttcctccagctgggcgctggcctgagtggcctggcagccggctttgccatcgtcatcgtgggggacactggcaagtgtggcactgcccagcagccccgactatttgtaggcatgatactgatcctcatctttgccaaggtgctc

SEQ ID NO: 47143 - DNA, 792 bp, Homo Sapiens
ccgagatccctgaagcgggcccagctccgttcactgctcccccggcctcctgctgtttcccacacgcagccatggtacagggcagctcatcccaccacctccccaaccgcagcctccagggatgtacaccctgcctcaggggctgtgcctgggccctggctggtggagggcacagccgtcagggaaggccctcagctgcaggatgccgtgcctcagagaccaaccaggccctcgaaggcactgtggccggcccagatgtcagcagctccagcaattaggctgggacagatggtgcctggtgacacaaggggactgtgggggccacaggggaccctgctcacctggacctaccgtggaggccagggagggagatggactcgaagggcggaagggcccagagaaggcacatttgcagagcagcggccgcatttccagagctcgggagcccaacaggaatcccgtctggccatgggaccaccgcccttggggctgggggatgccgcaggggacggcagagggcagacaggccaggaaaaggggagggcagagggcagacaggccaggaagagcgcctgcaagtgcccaaggaagggaccaaacccaggcccctggaccagagcggccgcctggtggggcaggctggaaggggccaaggccagcgccaagggggagcaggtgagggaccctggtgggcatctgtgggaacaaggccacgtttctccctgcgcacgctttaatcaaggacattcctgtggttctccaaaagtgtcgcacactacatgggtgtcgtga

SEQ ID NO: 47144 - DNA, 485 bp, Homo Sapiens
gatgtgataaaaccttttcctgctcctcaactcttattaaacacaagagaaattatactggagacagaacctacagatgcaaagaaagtggaaaagcctttaaccattatgtagttatctctccttataaacataaaataattcattctggagagaaaccctatatctgtgaagaatgtggcaaagcctttacctactccttaacccttactagccacaaaataattcacatggaagacagaccttacaaatatgaagaatgtggcaaaacccttaagtgcttatcagaccataccaatcataagataattcacactggagagaaaccctacaattgtggagaatgtggcaaagcattgagctcattctcacatttcattagacataagataattcatactagagagaagctccacaagtgttcaaagtgtggaaaagtcttcaacaagtcctcattttgtgttcaacatcagagactttatact

SEQ ID NO: 47145 - DNA, 1699 bp, Homo Sapiens
aagtgtgggcgcagccgggacaatttcgagacaacttcgagacaatttcgaatggacaaattgcggagaagttgcttctgccgctcagaagccggttcacctccttctccaccgcggcatttccaaaacaacagggacaagtctccccggctcgccgcaggcctgaccgcccagctccgccaggatttgcagagagcagcgcgctccatttgcagaaaggaaatcgagactggactccttctgactccacgcggccccagctcctgaaccagcgcagtgagcctcagccgcttctcaaactgggtctcagaaaatttctcctcgagatggatttcagcggcaggaaagaggggccagtgacgcgaggagcaagaaaagagtaacatgggagatgaatgttcaaacccagatctcctcgctgagcctggaagctcgccaccgtgggatcacgggaaccagaggcaagaggctgcgaatgagtccaacacccgcgttcctcgagttttaaaagcacacctggggccagagactgcacagccaactaaacggagtaaacgcaacaggtggaggaggcagagttgtcaggggccaagcccggcgcgatctggccagttcttggggagcgcggacctgggactgcagagaggcgttttgaagagtgctgcgcgcacctgcctctcggagatatccaactccacccgggcgtctcctgagagcgcacagtccacagaccccgggagggctgcccgccctaggacacgtactctcccgacccctcactctttcaaaattggggaagaggcggaggagatgaaaaagaagaaagagagaaagagaagaaaagagagaaagaaggaaagaaattttaaaaaataataaaaggagggaagaatggaggtaaaacgcgggggagagaagaggggagaaactctcctcaccacaaccaaagcaggaggcctaagcttcctgaatttctacacatgacttgcattaagttccttcctagaacttaaactttttcatctcccgtcacccaagaaaacacccatttcctcttttaaataaagtttctttttctggagatgaacctttaaataagtcgtacgtttgggagcgagggacaggagaataattttgatccagaaccttggagattggagaagcaggtggaaaaattctaaaaagatgaaaactgaccatctccgacacagaaacccatcgaaaggggccaccgagacccgttgattagctggagggagcatgcggcagaagtgcagacccctcgctaacccgccaacctccaagagccctcttgcagaaagctgcccggctccccacggtggccctgcgcgcgcaccatcctcgcggtctcgcttcttcgccccggaaaactctatgaggggcaccccagcctcagccgggttaagacaagtagccccaagaggaaggagcctcagagagcctttcttcctgttcttcttcgtcttcttttttttctaaacgaaatctaatactatctggctgcaaaaatatattatcaccggctctcagcctaagagactaacatttggatatgtaggaaatgtaatctgcatggctaattgattctcagcgtatcagtttaaaggataaagatcgatatctacatgatggatattgtattaataggggcataaataaaggtcgaagagtcgttacc

SEQ ID NO: 47146 - DNA, 672 bp, Homo Sapiens
atggcttccaaactcctgcgcgcggtcatcctcgggccgcccggctcgggcaagggcaccgtgtgccagaggatcgcccagaactttggtctccagcatctctccagcggccacttcttgcgggagaacatcaaggccagcaccgaagttggtgaggtggcaaagcagtatatagagaaaagtcttttggttccagaccatgtgatcacacgcctaatgatgtccgagttggagaataggcgtggccagcactggctccttgatggttttcctaggacattaggacaagccgaggccctggacaaaatctgtgaagtggatctagtgatcagtttgaatattccatttgaaacacttaaagatcgtctcagccgccgttggattcaccctcctagcggaagggtatataacctggacttcaatccacctcatgtacatggtattgatgacgtcactggtgaaccattagtccagcaggaggatgataaacccgaagcagttgctgccaggctaagacagtacaaagacgcggcaaagccagtcattgaattatacaagagccgaggagtgctccaccaattttccggaacggagacgaacaaaatctggccctacgtttacacacttttctcaaacaagatcacacctattcagtccaaagaagcatattga

SEQ ID NO: 47147 - DNA, 357 bp, Homo Sapiens
atgatggctcctgcagggagtgcccccagtgcccagcacagggccaggcacacagtggtgcacgggaactctgctgatgcccaccctaaggccaatcaaggagccacggggctgggtcctggtcctcacatcctcttccatcttgcccttcttggagcgggcaccccggccgaaggcgccctgctgcagctcctggacgcggcggcggttgcgggcagagagctgcttgaggccaccacgctgcaggaagtgcagcttctgggcccggcgccgctgcttcaggatctgctgcttggtcttgagttccgggcgctcggcctgcaggggtgcctggggcgtggggccgggatgcacctg

SEQ ID NO: 47148 - DNA, 261 bp, Homo Sapiens
atgccgcagtaccagacctgggaggagttcagccgcgctgccgagaagctttacctcgctgaccctatgaaggcacgtgtggttctcaaatataggcattctgatgggaacttgtgtgttaaagtaacagatgatttagtttgtttggtgtataaaacagaccaagctcaagatgtaaagaagattgagaaattccacagtcaactaatgcgacttatggtagccaaggaagcccgcaatgttaccatggaaactgagtga

SEQ ID NO: 47149 - DNA, 1272 bp, Homo Sapiens
atggctttaaaagtgctactagaacaagagaaaacgtttttcactcttttagtattactaggctatttgtcatgtaaagtgacttgtgaatcaggagactgtagacagcaagaattcagggatcggtctggaaactgtgttccctgcaaccagtgtgggccaggcatggagttgtctaaggaatgtggcttcggctatggggaggatgcacagtgtgtgacgtgccggctgcacaggttcaaggaggactggggcttccagaaatgcaagccctgtctggactgcgcagtggtgaaccgctttcagaaggcaaattgttcagccaccagtgatgccatctgcggggactgcttgccaggattttataggaagacgaaacttgtcggctttcaagacatggagtgtgtgccttgtggagaccctcctcctccttacgaaccgcactgtgccagcaaggtcaacctcgtgaagatcgcgtccacggcctccagcccacgggacacggcgctggctgccgttatctgcagcgctctggccaccgtcctgctggccctgctcatcctctgtgtcatctattgtaagagacagtttatggagaagaaacccagctggtctctgcggtcacaggacattcagtacaacggctctgagctgtcgtgttttgacagacctcagctccacgaatatgcccacagagcctgctgccagtgccgccgtgactcagtgcagacctgcgggccggtgcgcttgctcccatccatgtgctgtgaggaggcctgcagccccaacccggcgactcttggttgtggggtgcattctgcagccagtcttcaggcaagaaacgcaggcccagccggggagatggtgccgactttcttcggatccctcacgcagtccatctgtggcgagttttcagatgcctggcctctgatgcagaatcccatgggtggtgacaacatctctttttgtgactcttatcctgaactcactggagaagacattcattctctcaatccagaacttgaaagctcaacgtctttggattcaaatagcagtcaagatttggttggtggggctgttccagtccagtctcattctgaaaactttacagcagctactgatttatctagatataacaacacactggtagaatcagcatcaactcaggatgcactaactatgagaagccagctagatcaggagagtggtgctgtcatccacccagccactcagacgtccctccaggtaaggcagcgactgggttccctgtga

SEQ ID NO: 47150 - DNA, 186 bp, Homo Sapiens
gactgggaggaggcccacgagaaaaacaggaagaacaagagaaaggctgaggctctagtggctgctttgcagacttgcagagtccaggatcccccaggaacttccactgattgctacctgttaccagtgttaaagccagggcactttaagaagaattgcccaagccacaagaaaaagccaccttga

SEQ ID NO: 47151 - DNA, 2211 bp, Homo Sapiens
gcctcttccacgtcctcagaatccagctgttactccgtccgcggcctctcagctctagggccctctgcacactggcccccccagtgtcacgggcatccagacgggatccagtgcatcctcttttagaagaaaggcctgtctccagatccccgagtccctctagcatctcccagaaggtgtcagacgcagcagtgtccagggagcggcagcagattgaggaagagtctggggacacaccagaaaaggacaggatcaagatactctgacccatggatcccctgggcccggccaagccacagtggtcgtggcgctgctgtctgaccacgctgctgtttcagctgctgatggctgtgtgtttcttctcctatctgcgtgtgtctcaagacgatcccactgtgtaccctaatgggtcccgcttcccagacagcacagggacccccgcccactccatccccctgatcctgctgtggacgtggccttttaacaaacccatagctctgccccgctgctcagagatggtgcctggcacggctgactgcaacatcactgccgaccgcaaggtgtatccacaggcagacgcggtcatcgtgcaccaccgagaggtcatgtacaaccccagtgcccagctcccacgctccccgaggcggcaggggcagcgatggatctggttcagcatggagtccccaagccactgctggcagctgaaagccatggacggatacttcaatctcaccatgtcctaccgcagcgactccgacatcttcacgccctacggctggctggagccgtggtccggccagcctgcccacccaccgctcaacctctcggccaagaccgagctggtggcctgggcagtgtccaactgggggccaaactccgccagggtgcgctactaccagagcctgcaggcccatctcaaggtggacgtgtacggacgctcccacaagcccctgccccagggaaccatgatggagacgctgtcccggtacaagttctatctggccttcgagaactccttgcaccccgactacatcaccgagaagctgtggaggaacgccctggaggcctgggccgtgcccgtggtgctgggccccagcagaagcaactacgagaggttcctgccacccgacgccttcatccacgtggacgacttccagagccccaaggacctggcccggtacctgcaggagctggacaaggaccacgcccgctacctgagctactttcgctggcgggagacgctgcggcctcgctccttcagctgggcactcgctttctgcaaggcctgctggaaactgcaggaggaatccaggtaccagacacgcggcatagcggcttggttcacctgagaggctggtgtggggcctgggctgccaggaacctcattttcctggggcctcacctgagtgggggcctcatctacctaaggactcgtttgcctgaagcttcacctgcctgaggactcacctgcctgggacggtcacctgttgcagcttcacctgcctggggattcacctacctgggtcctcactttcctggggcctcacctgctggagtcttcggtggccaggtatgtcccttacctgggatttcacatgctggcttccaggagcgtcccctgcggaagcctggcctgctggggatgtctcctggggactttgcctactggggacctcggctgttggggactttacctgctgggacctgctcccagagaccttccacactgaatctcacctgctaggagcctcacctgctggggacctcaccctggagggcactgggccctgggaactggcacccatggggccccacccatgagtgatggttctggctgatttgtttgtgatgttgttagccgcctgtgaggggtgcagagagataatcaccgcaccgtttccagatgtaatactgcaaagaaaaccgatgatgaggccgggtgcggtggctcacacctgtaatcccagcactttgggaggccgaggcaggcggatcacaaggtcaggagatcgagaccatcctggccaatatggtgaaacccgtctctactaaaaatacaaaaatttgccgggcgtggtggtgcatgcctgtaatcccagctacttgggaagctgaggcaggagaatcgcttgaaccagagagtcggaggttgcagtaagccgagatcgcgccactgcactccagcctggcgacagagcgagactctgtctc

SEQ ID NO: 47152 - DNA, 195 bp, Homo Sapiens
atggttaatagcaggttcttcggtgtctgcagtcgacgaacgactggtgtaggcgtttgctgtgagaatggagaatgcaggggaacgcccctgactgagaagcgggccctgggaaacgattgtgaacgcgtgaatgaattgatgactaaaatccgctgcgggggtcctacagcgcagatggtaatgccgttctga

SEQ ID NO: 47153 - DNA, 1041 bp, Homo Sapiens
tcagaagtccaaaccttcaaagagagaaaccgagggagtaacatgtttagtcatctctcggatgtcagcaaaagcctccctgcccttggctgcataactgtgccccccaacttgggtacttacgtcaacgagatgtgtgatgctgccaccttttacactaacagggtcttaaagggctacaaacatgatttacaccgtgtggattgggtgaggtcatatgtgaacatttggatcaaggagcaccacaccacgggcctcacgtggagcagaacaggtccgcagcacccacatcagcgctttctgttctctcctgagggcctgacctttctccacatcctcctcacctcctccagggcccctccactttttgagaatgaagacacaaaagaaaagtcctctccttcatgctcagctttatttgcccggtttaaccagggagaagcccctgcagaaccagggctctggcacatcactgatgaccagaaggccaagaatcccagcctgcaggctcacggagggcaaagtacgtctccccacagaagctacattccaagtcccacatctcccaaacctcatccttcccagcaacatgcacccgtgttcaagttggaaggaagtaaatggagagcagagtaccaagaagacaggaatgaccttgtgatttcagagactgagctgaaacaagtggcttacattttcaattgtgaaaaatcagctctcccgatgaaagggaaagtaaactccattccagtggaaaactgtaagaagtttggtctggtctttgacagtttggtgggcattggggaaatgaccaactccaagtacattcaaatccaggtaatggggagagtaccagcaatttccactaataagacagaaggttgccacacatacctaactcgggatgcattagactgtgagattgtgagcatcatatcatccaaaatgaatatacttattcgtcagggtggtaatgacagagaatttcctgtccctgagcagttcaagacagcatgggatggatccaagttggtcagtgaa

SEQ ID NO: 47154 - DNA, 1555 bp, Homo Sapiens
aggtgcaatgtagcaggacaactcatggagcccccccgggcccatcgagtaccggactggctgaccccctagggttggcagtagcccctgaccctcagtatggccaacactaccggagagcctgaggaggtgagcggcgctctgtccccaccgtccgcatcagcttatgtgaagctggtactgctgggactgattatgtgcgtgagcctggcgggtaacgccatcttgtccctgctggtgctcaaggagcgtgccctgcacaaggctccttactacttcctgctggacctgtgcctggccgatggcatacgctctgccgtctgcttcccctttgtgctggcttctgtgcgccacggctcttcatggaccttcagtgcactcagctgcaagattgtggcctttatggccgtgctcttttgcttccatgcggccttcatgctgttctgcatcagcgtcacccgctacatggccatcgcccaccaccgcttctacgccaagcgcatgacactctggacatgcgcggctgtcatctgcatggcctggaccctgtctgtggccatggccttcccacctgtctttgacgtgggcacctacaagtttattcgggaggaggaccagtgcatctttgagcatcgctacttcaaggccaatgacacgctgggcttcatgcttatgttggctgtgctcatggcagctacccatgctgtctacggcaagctgctcctcttcgagtatcgtcaccgcaagatgaagccagtgcagatggtgccagccatcagccagaactggacattccatggtcccggggccaccggccaggctgctgccaactggatcgccggctttggccgtgggcccatgccaccaaccctgctgggtatccggcagaatgggcatgcagccagccggcggctactgggcatggacgaggtcaagggtgaaaagcagctgggccgcatgttctacgcgatcacactgctctttctgctcctctggtcaccctacatcgtggcctgctactggcgagtgtttgtgaaagcctgtgctgtgccccaccgctacctggccactgctgtttggatgagcttcgcccaggctgccgtcaacccaattgtctgcttcctgctcaacaaggacctcaagaagtgcctgaggactcacgccccctgctggggcacaggaggtgccccggctcccagagaaccctactgtgtcatgtgaagcaggctggtaggcagacaggcagagagaaggtcatggccaccgtgatggggccaacagcaagggaggggtaggggcccatacaggagtcctcctttctgagctccagccccagcccctcgaaccacctgtaatctaggcacctttgccaacacctcccaaggatggaggactgggcgagggactgggaaagaggcatatttagttttgtggggcctgtctccgctgcctccttctccacttctacaatctcattctctctctctctctctctgtctctctctctctctctctctctctctcagaagtgacaattcagaaaaagaaaagaaca

SEQ ID NO: 47155 - DNA, 1669 bp, Homo Sapiens
tctgtgtccacaatggcctcaaccacaggctctgagagtacctcaacctctgagatcatcgccatctccaccatggactctgagacctccataggctcagaagccaccacaactattgttgcagcctctgaggttaccacaccctccagcatctgtgccactgtggcctcaaccaccggctctgagagcagcacagcctctgagatcatcacgtcctctacaatgtctgtgtcagccacagcctccagcacagcctccagcacagcctctgagatcaccatgagctctgcagccatcccagtctcctccacagcttatgagaccatcaggttctccactgcagtgtctgagccagtgacagcctctatcctggcccttgagtccaccctggccttcaccacggtctctaacaccaccacatcttccacagtaacatctgtgcccaccacagcttccacctcaggctctaagaacacaacagcctgtgaggccaccatgtctgaaactaccattgctgccatcacagcctccgaggacaccacagtctccactcaaacctctgtgatagctgcagagtctgtgccccacacagccaccaaaacacctactgacaccaccacagcatctgtgtccgccacagtccccaagaacaacacactctctgtgataacatctacaccttccacagctcccaacacagcctctaaaaccatgaccacagcttccaagaccgccacgacctctacgataacatctctgcccaccacagtcttcaccacaacctctaaaatcaccgcaggctctgagacccccacagcctccaccacagactctgcgaccactgcaatctccacaaaagcctctgggacaactgtagagtctgcgccctctacagcccctccaacacctgctgagaccaccacagcatctgtgcccaccacaacctctaccacaggctctgagaacaccggacaccacacagtatcatctgtgcccaccacagtcttcgctacagcctctgaaagcagcacaggctctgagaccaccagagcttccacctctgccactgaagtgactacagccatgaccacagccatgaccacagcctccactatggcctttgaggccacatcaacctctgagacccccactacctccacaatagtatctgtgcccacaacaacctccaaaataacctctgagaacactgcaggatttttatccatgatgggctctgagaccaccacagcctccactacaagatctgagaccactacagccactgaaacctccacggcttccctcacagattctgagacccccagtgcctccataatagtatctatgcccacaaccgcctcctccacagactctgagaccaccacagcctccactgcaatatccacgagcaacatggctgtgagcacagcctctgagttcacttcagggtctggaagcagcatggcttccaccacaggctctgaggccaccatgccatccacagcagcatctgtgacctccacagccttcgctttggcctcatcgcccttcttggcctctaccacagcctctggggccactgcaacctccaccactgtctctgccacttttgtgcccaacaaggtcactgacatttctactcagaccatcaccaaaacagttgtgtcag

SEQ ID NO: 47156 - DNA, 1788 bp, Homo Sapiens
cgtggagcgcgccggctcgctgcagctccgggactcaacatgcgctgctcgccgggaggcgtctggctggcgctggccgcgtcgctcctgcacgtgtccctgcaaggcgagttccagaggaagctttacaaggagctggtcaagaactacaatcccttggagaggcccgtggccaatgactcgcaaccactcaccgtctacttctccctgagcctcctgcagatcatggacgtggatgagaagaaccaagttttaaccaccaacatttggctgcaaatggcatattcaagagttcctgctacatcgatgtacgctggtttccctttgatgtgcagcactgcaaactgaagtttgggtcctggtcttacggaggctggtccttggatctgcagatgcaggaggcagatatcagtggctatatccccaatggagaatgggacctagtgggaatccccggcaagaggagtgaaaggttctatgagtgctgcaaagagccctaccccgatgtcaccttcacagtgaccatgcgccgcaggacgctctactatggcctcaacctgctgatcccctgtgtgctcatctccgccctcgccctgctggtgttcctgcttcctgcagattccggggagaagatttccctggggataacagtcttactctctcttaccgtcttcatgctgctcgtggctgagatcatgcccgcaacatccgattcggtaccattgatagcccagtacttcgccagcaccatgatcatcgtgggcctctcggtggtggtgacagtgatcgtgctgcagtaccaccaccacgaccccgacgggggcaagatgcccaagtggaccagagtcatccttctgaactggtgcgcgtggttcctgcgaatgaagaggcccggggaggacaaggtgcgcccggcctgccagcacaagcagcggcgctgcagcctggccagtgtggagatgagcgccgtggcgccgccgcccgccagcaacgggaacctgctgtacatcggcttccgcggcctggacggcgtgcactgtgtcccgacccccgactctggggtagtgtgtggccgcatggcctgctcccccacgcacgatgagcacctcctgcacggcgggcaaccccccgagggggacccggacttggccaagatcctggaggaggtccgctacattgccaaccgcttccgctgccaggacgaaagcgaggcggtctgcagcgagtggaagttcgccgcctgtgtggtggaccgcctgtgcctcatggccttctcggtcttcaccatcatctgcaccatcggcatcctgatgtcggctcccaacttcgtggaggccgtgtccaaagactttgcgtaaccacgcctggttctgtacatgtggaaaactcacagatgggcaaggcctttggcttggcgagatttgggggtgctaatccaggacagcattacacgccacaactccagtgttcccttctggctgtcagtcgtgttgcttacggtttctttgttactttaggtagtagaatctcagcactttgtttcatattctcagatgggctgatagatatccttggcacatccgtaccatcggtcagcagggccactgagtagtcattttgcccattagcccactgcctggaaagcccttcggagagctccccatggctcctcaccaccgagacagttggttttgcatgtctgcatgaaggtctacctgaaaattcaacatttgctttttgcttgtgtacaaacccagattgaagctaaaataaaccagactcactaaa

SEQ ID NO: 47157 - DNA, 678 bp, Homo Sapiens
ataatggctagcaatgttatcaacaagtcaaatcctcactccatgaaccccagagtattcattgggaatctcaacactcttgtggtcaagaagtctgatgtggaagcaatcttttcaaagtatggcaaaactgtgggtggctctgttcataagggctttgcctctgttcactgtgttcatgagagaaatatccagcctactgtggcaggaggggatggcagaatgattgccggccaagttttagatactaatctggctgcagagctgaaagtgaacaggaaaagccggcgtgagtctgcagcggagatgtatggctcctcttttgacttggtctgtgattttcaatgggattattatgacaggatgcaccgtgatccagcacatgcttctcctcctcctcctagtgcttgggctgtagtaccctcaaaacgccagcatgtatcaggaaacacctcacaaaggggcaaaagtggctttaattctaagagtgggcagtggggatcttccgaattgaaaggagatgaccttcaggccaagaaggaattgacccagataaaacaaaaagtggattctctactggaaaatctggagaaatttgaaaaggaggagagcctacaaggagtagagttgaaggatgtgaagacagatgacgggccgagcagcagctccgtgaagtaa

SEQ ID NO: 47158 - DNA, 1738 bp, Homo Sapiens
ccgttctgctctcgggggcaccttccggggttcctaagccgcggggcccctcgctgcccctcgaggccctttccctgacctaggctttggcctgggctactcgttccggagccgccatgtcgtccgacttcgaaggttacgagcaggacttcgcggtgctcactgcagagatcaccagcaagattgcgagggtcccacgactcccgcctgatgaaaagaaacagatggttgcaaatgtggagaaacagcttgaagaagcgaaagaactgcttgaacagatggatttggaagtccgagagataccaccccaaagtcgagggatgtacagcaacagaatgagaagctacaaacaagaaatgggaaaactcgaaacagattttaaaaggtcacggatcgcctacagtgacgaagtacggaatgagctcctgggggatgatgggaattcctcagagaaccagagggcacatctgctcgataacacagagaggctggaaaggtcatctcggagactagaggctggataccaaatagcagtggaaaccgagcaaattggtcaggagatgttggaaaaccttagtcatgacagagaaaagatacagcgagcacgtgaaagacttcgggaaacagatgctaatttgggaaaaagctccaggattctgacagggatgttgcgaaggggttgttctgtgaaaaaacaatgtaacctgtctctggccccaaaggcttgaaccagaaccagccagtggaaattactcaaacacgtattgtgccttcaatgagaagccttctcactgaaagagctgccctggacggaaaatgagtagtgagatgatgctggtggaagtatttatagatgcgcagtgcatgagtacttggcaaggatgctatcaaaggggaaactgacatcaaatgtgctgtggttctgggtgatttatctggtcccttcccatcccagagctttatgattctgtaataatcaagggagaaacccattacatagtggacaattttttttctttttttttctttttctttttttttttgagacagagtcttgccctgtcgcctggctggagtggagtggcacaatcttggctcactgcaacctccacctcccaggtccaagcgattctcttgcctcagcctcccaagtagctgggactacaggcacacaccaccacgcccagctaatttttgtatttctttttttttttttttgtagagatggagtttcaccatgttggccaggatggtctcgatctcttaaccttgtgagccaccgtgcccaaccctaacaattatttttaaaaggaggaatttaaatgagctgtggattattcattttgtcccataagaagataattaaaaaatgacaaaaatgaactgaacaaaaaagttctaacaaaataataaggctgaatttttaaagtctcttccgcatcttctgttccctgggatgccttagacggggtgtgcagtattttaggtacatcgtgagcaaggagcctgcattcccagggggcggcagggacagcatgtaaggtcttagtccagctctgtgatctgaaggcaaagcctctatgtgtgaaacacaggggtacctcaaaaatagaacaagagcactccatccatgtgcggatgactgtcaaggtcactgagacctacagtgatctggaaaattaaagctctctggccgcctttcctctcaggacatacttctggagatcaaaaaaaaaaa

SEQ ID NO: 47159 - DNA, 483 bp, Homo Sapiens
atggcggcctggactgcctcgcactggccagtgaaggggatcctgaagaacaaggcctctacagcttcctctatggtggcctcggctgaacagcccagcgggagtgtcgaggaggagctgagcaaaaaatcccagaagtgggaagaaatgaacatcctggcgacatatcatccagcggacaaagactatggtttaatgaaaatagatgaaccaagcactccttactgtcgtaagatgggtgatggtgaagatgcgtgtagtgatacagaaaccactgaagccgtggcaccagatatcttagctaagaaattagctgttgctgaaggcttgaacccaaagtatcgggttcaggaacaagaaagcagtggagaggaggctaggacctctcacctggaacgagaaaaaaggcgacaatttgaaatgaaaaggaagcttcactacaatgaaggactgaatatcaaactagctagagaattaatttga

SEQ ID NO: 47160 - DNA, 2243 bp, Homo Sapiens
gctggggcacgagtggctgcggagtgtgggtggttgggcgtgaggggccgacgggctcgcgcgcgcgccgtctgctgaggtccctcgggaaggaggagagcgcctgacgccgacccgcaggcgcagcccggcagtcggcggcgcgccgagggcggaggtggtgcgtgcgtgcgtgtgtgtgtgtgtgtgtgtgtgtgtgtgtgtgtgtgtgtggagctcgggtgccaagggcgagccgtcagtccccgggtgcgagtccctgctgtcttccacacccttcctccctccaggctcctttcctacatccttcccgcgcccccacggttgcggaccgagcgagaacccccttaagcaggtgtggggggcgtgcggggtggcacgagacaaaaggggcacgggggtaagcccgccatggcctcccggagcctggggggcctgagcgggatccgcggcggtggcggcggaggcggcaagaaaagcctgagcgcccgcaatgctgcggtggagaggaggaacctgatcaccgtgtgcaggttttctgtgaagaccctgattgatcggtcttgctttgagacaattgatgattcttctcctgaatttaacaattttgcagctattttggaacagattttaagccaccggctaaaagagatttcccaaagttgcagatggctggctcatctccaaatacctcttcaaggtcaagtaacctggtttggttatgaaagtcctcgtagcttctgggactatatcagagtggcttgccggaaagtttcacagaattgtatctgcagcattgaaaatatggaaaatgtcagttcttctagagctaagggtagagcctggatcagagtagcactcatggaaaaacatttatctgaatacatctctacagctctgagagacttcaaaacaaccaggagattttatgaagatggagcaattgtcttgggtgaagaagcaaatatgcttgctggcatgcttctaggactcaatgctattgatttcagtttctgcctaaagggagaggggctggatggcagttttcctgctgtaatagactatacaccatatttgaagtatatccaaagttctgatagtatcagcagtgatgaggaggagctaaggactttgggaagcagtggtagcgaaagcagtactccagagaatgtcggacctcctttcctcatggatgagaacagttggttcaacaagtgtaagagagttaaacaaaagtatcagcttaccctggaacagaagggttaccttgaagaactcttacgacttcgagagaaccaactatctgaatctgtctcccagaataaaatactacttcaaaggattgaagattccgatctggctcataaactggagaaggaacaattagaatatataattgtggagcttcaagatcagctgactgtgctaaagaataatgatttaagatcgagacaagagttaactgcccatctcaccaaccagtggccttctccaggagctctggatgtcaatgctgttgccttggatacgttgctttaccgaaaacacaataaacagtggtatgagaaaagttatcaaagtcttgaccagttatcagcagaagttagcctttctcagacttcactagatccaggccagtcacaagaaggagatggaaaacaagacacattaaatgtaatgagtgaaggtaaggaagatactccctcattacttggcctctgtggatctctaacgtcagtggcaagttacaagtctctaacaagcttaaaatctaatgactaccttgcaagtcctacaacagagatgacaagtccaggcctaactccatcctgaaaatttttgtgtaaaagccaaaactttttatgttgtaaatgtttaatttacatgtttgactgctgggaagacctttgaaattttatattgttctggtacatgtctgaaattctattgcttggagagaatcccctccagataagagattttgagtgaaaaacataatgatcctgccatttttcatttttaaaattcttacatttgtcattgagaaagttcaaaatggaataggctttaaaaaaaaaaaaactttcaaagatccgccaaatcattcatagcaaattgtacatattgttcagctgatttttatatatttaaatacaccttagtggccagagactgacttcaaggttttattccagagactccagagacttaagctaagtattttttcattctttcagattttc

SEQ ID NO: 47161 - DNA, 1148 bp, Homo Sapiens
gggagtggttaaatgttaaattttacgatgtacgtatttaacccccacacgccccaaacaaatctgacaaaagttaaagaccattccctaggtgtagctctgttcctacatgcaaaattttacatattgttccagggagctcacggtcttctcaggttcatctgtggaaccattcgacaaccaaatgttatggggaagccagtctcatgagctccaacacattcttcagtgcaatcagtggcaatccctgcccacttaggacttttcgaatagtgctcatccctgacttctggataaacttctttgcagaagcccatttgactccaaggacagaaaaaaagagtgcaggttgttattatgcaaagccacagcattaaggagctcaatattcttctagatatctgccctcctgtctgagaatcccatacttagagtatagcaggtcccatctccatttgggatggtggtggtggaaaagggggcgtctctgatgagcagagcatctttaatgcctgctcaggccagagcccctttccaaagacttcgagactgccgtgggcctgctgactcctctcacgctttcaagctacagtgcttcccatcacattgcagaaggccgccttgggtcatatctcgcaaaggaagagctattaacaaatattccatttgtatttcctgcgtggccctccatctggaaatatcttttatctggcaacttttgcaaaatgaaccaaatcttgaaggaggtcttggcaggtttatgctagcctctctatcactccaacaagtcatttccatcctcgccttcacaagggtcaagcaattgtgacttgggttgggagacggggctggcacggaatggtagcaagtcatctaggctctgaggcatctttttaaccctgaaaacgtccacttggagggcaagagccaaatctaaaaaattattatacacactgtctctcagctcaaatatgtatgctctcactccaagttcagatcacaatttacaattccgcattttgtaattgttaagtgcagtctggcttccccaaagacctcaagctcattctgcccaggattaaatccaagagccttcttagcccagtttctggcatgcaggaagcatacaataatggaagaaatgaatg

SEQ ID NO: 47162 - DNA, 1017 bp, Homo Sapiens
atggggggaaagcagcgggacgaggatgacgaggcctacgggaagccagtcaaatacgacccctcctttcgaggccccatcaagaacagaagctgcacagatgtcatctgctgcgtcctcttcctgctcttcattctaggttacatcgtggtggggattgtggcctggttgtatggagacccccggcaagtcctctaccccaggaactctactggggcctactgtggcatgggggagaacaaagataagccgtatctcctgtacttcaacatcttcagctgcatcctgtccagcaacatcatctcagttgctgagaacggcctacagtgccccacaccccaggtgtgtgtgtcctcctgcccggaggacccatggactgtgggaaaaaacgagttctcacagactgttggggaagtcttctatacaaaaaacaggaacttttgtctgccaggggtaccctggaatatgacggtgatcacaagcctgcaacaggaactctgccccagtttcctcctcccctctgctccagctctgggacgctgctttccatggaccaacattactccaccggcgctcccagggatcaccaatgacaccaccatacagcaggggatcagcggtcttattgacagcctcaatgcccgagacatcagtgttaagatctttgaagattttgcccagtcctggtattggattcttgttgccctgggggtggctctggtcttgagcctactgtttatcttgcttctgcgcctggtggctgggcccctggtgctggtgctgatcctgggagtgctgggcgtgctggcatatggcatctactactgctgggaggagtaccgagtgctgcgggacaagggcgcctccatctcccagctgggtttcaccaccaacctcagtgcctaccagagcgtgcaggagacctggctggccgccctctgccctcatctgagaatactgtctttccatatggctaagtgtggccccaccaccctctctgccctcccgggacattga

SEQ ID NO: 47163 - DNA, 897 bp, Homo Sapiens
atagagttcattctgcaaggactttcagggtacccaagagctgaaaaattccttttcgtgatgtgcttagtgatgtacctggtgattctcctaggtaatggcaccttgatcattctgacactcctggatgctcgtctccacacacccatgtacttcttccttgggaatctttccttcctagacatttggtacacatcctcctccatcccctcaatgctgatacacttcctatcagagaagaaaaccatctccttcactagatgtgtgattcaaatgtctgtctcttacactatgggatccaccgagtgtgtgcttctagcagtgatggcatatgaccgttatgtagccatctgcaaccctctgagatatcccatcatcatgggcaaggcactttgtattcagatggtggctgtctcttggggactaggctttctcaactcattgacagaaactgttcttgcaatacggttacccttctgtaaaaatgtcattaatcattttgtttgtgaaatattggcctttgtcaagctggcttgcacagatacttccttgaatgagattattataatgttgggcaatgtaatatttttgttttctccattactgctgatttgtatctcctacatctttatcctttctactgtactaagaatcaattcagctgaaggaaggaaaaaggccttttccacctgctcagcccacatgacagtggtgattgtgttttatgggacaatcctcttcatgtacatgaaggcaaagtccaaagactctgcttttgacaaactgattgccctgttctatggcatagtcacccccatgctcaatcctatcatctatagcctgaggaatacagaggtgcatggagctatgaggaaattaatgagtagaccctggttc

SEQ ID NO: 47164 - DNA, 795 bp, Homo Sapiens
gaggatgaggtggcccgcagtgctaagaagatggacgagatagtgcaggagaagaacacggccggagcactgggtttgttaaccgagcttcagaatgttctggaattactgcggtccacaggaactggaatgttacttaatgttagtctcaagcagagtacagatgaagaagttacatctctagcaaagtctttcgtcaaatcctggaaaacgttaccagatgagccatcaactgagaaagaccccaacgaaaagcgaatagaacctgcaatgacatcacagaatagcaaaagaaacgcttctaattctgtgcggatgaagtacagggagatgcttgctgcagctcttcgaacaggagatgactgcattgaaatgggagctgatgaggaagaattaggatctcgaattgaggaagctgtagatccagaaagagggaatacaggcatgaagtacaaaaatagagtccaaagtaagatatcaaatcttacagatgcaaagaatccaaatttaaggaaaaatgcatcgtgtgggaatattcctcctgacttacttgctagaatgtccgcagaagaaatggctagcgatgagctcaaagagatgcacaaaaacttgacgaaagaagccatcagagagcatcagatggccaagacaggtggaacccagcctgattcgctcacatgtggcaaatgtaaaaagaattgcacttccacacaggtacaagcctgcagtgttggtgaaccaatggcaacgtttgttgactgtaatgaatgtggaaatcaacagaagttctgttga

SEQ ID NO: 47165 - DNA, 300 bp, Homo Sapiens
gctgagcagtcagacaagggcataaaatactacaccctgggagagattaagaagcacaatcacagcaaaagcacctgggtgatcttgcaccacaaggtatatgatgtgaccagattttttgatgagcatttctgtggggaagaagtcttcagggaacaagctgtaggtgatgctcctgaaaacgaggatatcatgcactctacggatgctagagaattgtccaaaacatatatcattgggctttatccagatgacagatcaatcacaaatctttcagaaaccctttttactactgttgat

SEQ ID NO: 47166 - DNA, 1511 bp, Homo Sapiens
accacttttacatggtcacctacaggagagaggaggtgctgcaagactctctggtagaaaaatgaagagggtcctggtactactgcttgctgtggcatttggacatgctttagagagaggccgggattatgaaaagaataaagtctgcaaggaattctcccatctgggaaaggaggacttcacatctctgtcactagtcctgtacagtagaaaatttcccagtggcacgtttgaacaggtcagccaacttgtgaaggaagttgtctccttgaccgaagcctgctgtgcggaaggggctgaccctgactgctatgacaccaggacctcagcactgtctgccaagtcctgtgaaagtaattctccattccccgttcacccaggcactgctgagtgctgcaccaaagagggcctggaacgaaagctctgcatggctgctctgaaacaccagccacaggaattccctacctacgtggaacccacaaatgatgaaatctgtgaggcgttcaggaaagatccaaaggaatatgctaatcaatttatgtgggaatattccactaattacggacaagctcctctgtcacttttagtcagttacaccaagagttatctttctatggtagggtcctgctgtacctctgcaagcccaactgtatgctttttgaaagagagactccagcttaaacatttatcacttctcaccactctgtcaaatagagtctgctcacaatatgctgcttatggggagaagaaatcaaggctcagcaatctcataaagttagcccaaaaagtgcctactgctgatctggaggatgttttgccactagctgaagatattactaacatcctctccaaatgctgtgagtctgcctctgaagattgcatggccaaagagctgcctgaacacacagtaaaactctgtgacaatttatccacaaagaattctaagtttgaagactgttgtcaagaaaaaacagccatggacgtttttgtgtgcacttacttcatgccagctgcccaactccccgagcttccagatgtagagttgcccacaaacaaagatgtgtgtgatccaggaaacaccaaagtcatggataagtatacatttgaactaagcagaaggactcatcttccggaagtattcctcagtaaggtacttgagccaaccctaaaaagccttggtgaatgctgtgatgttgaagactcaactacctgttttaatgctaagggccctctactaaagaaggaactatcttctttcattgacaagggacaagaactatgtgcagattattcagaaaatacatttactgagtacaagaaaaaactggcagagcgactaaaagcaaaattgcctgatgccacacccacggaactggcaaagctggttaacaagcactcagactttgcctccaactgctgttccataaactcacctcctctttactgtgattcagagattgatgctgaattgaagaatatcctgtagtcctgaagcatgtttattaactttg

SEQ ID NO: 47167 - DNA, 1272 bp, Homo Sapiens
tgcagctgtggctgaggcccagaaatgtgaagggcctccatccactgccttgagtagtgaccccgacgtggggttcaatgtggaggggggaggggctgccgcggcagctgcaggagccgacgtgccaggccttgttcttctcatgccggcatccatgcttgcagctgtgaagggcgcaggaatcagcgaggtgacctgggctgagtcccgggagtgggaagaggtggcaggaaggggatctgaggaggagaacaggggtcctggtggtctgtgcttcttcccagacatgggagctgtagaggggacctctgcagcagatgcaaggggggccactaggcccaggcagtcttgggacttgggtctgtcctgctgtgcatccatagtgggtgctttagaaacaggaggcccaccagaagcccctgttgcaagtgaggacagagtgtgggaaggccatgagggtctgcagtccgagatggccttgtcctcaacctgcagcgcactgttgatccgctggaatgccgcctctttttccaggtgcaggtcttcagccgtgacccggtaccccagctctaagggaggtggcagcatcaaaggctcccctcgcctgcgtggcagcagggcaatcttgcgtctacggggcctagaggcctgggatctgggggagccaccccttggggcaagtgtctgccctggtgctgtatctgccgccttttcacaccgtgtgtgacccgaagagacagcctgaggcctgtcctcactcactgtctttgagtaactgagggtcagctggcagcgggatgaggctggccccctcctctgctttagccccggcaagcctcccgtggagctgtaggagctggagatggcatttcgtttggtgctcgagctcgtccaggaggtctgggatgtctgattatatctgatttctgagctctgggcatggaggtctgtctgcagaggcccgggcctgggcgcaaagggagagaggcctccattgtaccgcaggggccgaactggggccaaaatgcagaccgtgcatccccggtgacctcggggactcttctctgatcatcaggattcttttggactctagggtccttgtcctgcccaggcatccctgccccgctctccttgagggccctcgacactatcttccctggaaacaagtctggggacagctgggtgttgtggaccccaaaggggtgactacctgctcctgggccccacagagtccttgtgctcagtgtagtggctgagctgggggatgccctg

SEQ ID NO: 47168 - DNA, 327 bp, Homo Sapiens
gacaacaaaagtgaaagatgtaagttaaagctacagcagaagatgatgtctttgtggtcctgggtcaatcagcccagtgagctgagtaaattcaccaatcccttctttgaagccaacaacctggtcatctggccttcagttgctccacagcttccactgtgggaaggtattttcctacattggaatagatcctctaagtatttggatgaagcatatgaagaaatggttaacatcattgaatataatcaggaattacaagcaaaagtcaatatccttagaaggcagctggcagaactggaaacagaggacgagaggcaagagagtccc

SEQ ID NO: 47169 - DNA, 2947 bp, Homo Sapiens
tttaataggtggagagagaacctgtggagtacatgaacttatctgtattagaaaagtatctccagaggcagttggatttttgtcagctgttggggtgtttattatcttgatgctgctcctttttctctatattaataagaagttctgttttgaaaatgttggcgggtttccagatcttggttcagaatacagtacaaggaagaattcacaagataaaatttataattcctacatggacaaagatgagcatggttcatcctctgaaagtgaagatgaagcgctgggtaaatatcatgaggccttatccagaacacacaattccagactaccactggcagattctagacaaaggaactatgcttgggaaacaaggcagaaatacagtcctctatcggcagagtatgatggatacagtagtgaagcatcaatagatgaaggaaactgcattcagagaatgagaagaacacccccgctggatgaattgcagccaccaccatatcaggatgacagtggttctccccatctgtcatgtacaccctcagaaattggggacagtaaatgtgaattttcccactgcagcaacagtccaagatgctcatataacaagtgcccaagtgaaggaagcacaggtcatgaaatagaaagttttcataataaaggatatgaagaagatgttccaagtgacagcactgcagtcctgagccctgaagatatgtcagctcaaggatcatcttcgcagcttcctaaaccttttgatcctgagccagaagctaaatatggcacactggatgtgacttttgactatgactcacaagaacagaagcttctggtaacagtgacagctgtcacagacatcccaacatataacaggacaggtggcaactcatggcaagtacaccttgttcttctacctataaagaaacagagagcaaaaaccagcatccagagaggaccatgccctgtcttcacagaaacatttaaatttaatcatgttgaatctgagatgattggaaattatgcagttcggtttagactgtatggtgtacatcgcatgaaaaaagaaaagattgtgggggaaaagattttttatttaacaaaattgaatcttcaagggaaaatgtcattgcctgtgatattggaaccttcttacaatcattctggctgtgactcccaaatgagcgtgtcagaaatgtcgtgtagtgaaagtacatcctcatgtcagtctcttgaacatggctcagttccagaaattcttattggcctgctttataatgccacaactggaagactatcagcagaagtgataaaaggcagccacttcaaaaatttggcagcaaacagaccacccaatacatatgttaagttaactctactgaattccatgggtcaagagatgtccaaatgcaagacatccatccgcagagggcagccaaatccagtatataaggaaacttttgtctttcaagtggccctatttcagctttctgatgtgacactcatactgtctgtgtataacaaacgcagcatgaaaagaaaagagatgataggctggatttctttaggtctcaacagctctggagaagaagaactcaatcactggactgaaatgaaagagtcaaaaggacagcaagtatgtagatggcatgcgttgctagagtcatgatgaatagaataagcaagcagttaccatcaaaggcagcatatttccaattccaacattactgtttctaccaagtcccattagaagagctgttctttgaagaatcatattcaaccttctaccaaaatgctttaagttctatggaaagaacgtctcatactgacataaatgaagaaaatatgtgtatctagtagagcttgtttaggaaactgagaaacgtacactatcattgctaaactaacagtcctccagaaatttaataagatgtttttgatttgaagttaattttaatttagcaaaagagccagtcattttatgaaaaatcaaaattataagtgattttaaaaaccagaattttagttgcaatacaattttaatatcaccctacatattatttataaaacatagtttgactggccagtccctggtgtttgtaatgttctttaatatgaaaaagtagttctccaactctatcataagtcatatctaatggtgaagggtttcagtcacattgaaaattgttttatttcaggcatgttccctttgtgcacttaggttcattgtgcctcagttcctctcaaaagcactaaatctaagtgcaaacaagtattcattttcatacaggaatttttttaatatgttatttttttaaaagttcatttttcatttgcctccgctttcgcctgatccaaagagaccaagtcactgtactggtcccttgcaagtcttctagacaggttgtactgtagaactacgtaactttctgttgaaagcacttcctgtattcttgtattccaatgtaggaagctaatagagcaggactttactttcaaatttctttcagtgattgactcttcaaaattgcagtagtgtgaaaatacattttttacaaactgaaaatacagtagataagctgtcgaaaatggaaaacaattcaattttaattttctgctctgagtatttagtaaccaacactgcgtaaagcaggtagcattcaaaataagaaactgttctctctctaaatcttcactcttacttcaatttatatttgtgatatgaagactatccagttctcagtttgaattggaacatcatgttaaaaacagttatgagattccttatgaagtttctagtaacttgtaactagactttatgaaattaacagataaagttcttcaacgtgatgtcatcttgtgcctttcatgtaagttaaatttgctcatacagcttgaacgttgtatttgcaaaattaagccttcgatttttataaatgtaaagattcctcag

SEQ ID NO: 47170 - DNA, 1887 bp, Homo Sapiens
aaatttgaaattagtgtttcagctgaaccatccgttcatcttcaagccatcatgagctgtaagaagcagaggtcacggaagcactcagtcaatgaaaaatgtaatatgaaaatcgagcactatttttctccggtctctaaagagcaacagaataattgcagtacttctctaatgaggatggagtctagaggagacccaagagccacaactaatacccaggctcaaagattccattcacctaagaaaaatccagaagaccagaccatgccccaaaataggacaatatatgttaccttgaaggtaaaccacaggagaaaccaagatatgaaacttaagctcacacatagtgagaatagtagcttatatatggctctcaacactctccaggctgtcagaaaagagatagaaactcaccaaggccaagaaatgcttgtgcgtggcacagaaggaatcaaagagtacataaaccttggaatgcccctcagttgtttccctgaaggtggccaggtggtcattacattttcccaaagtaaaagtaagcagaaggaagataaccacatatttggcaggcaggacaaagcatcgactgaatgtgtcaaattttacattcatgcaattggaattgggaagtgtaaaagaaggattgttaaatgtgggaagcttcacaaaaaggggcgcaaactctgtgtttatgctttcaaaggagaaaccatcaaggatgcactgtgcaaggatggcagatttctttcctttctggagaatgatgattggaaactcattgaaaacaatgacaccattttagaaagcacccagccagttgatgaattagaaggcagatactttcaggttgaggttgagaaaagaatggtccccagtgcagcagcttctcagaatcctgagtcagagaaaagaaacacctgtgtgttgagagaacaaatcgtggctcagtaccccagtttgaaaagagaaagtgaaaaaatcattgaaaacttcaagaaaaaaatgaaagtaaaaaatggggaaacattatttgaattgcatagaacaacgtttgggaaagtaacaaaaaattcttcttcgattaaagtagtgaaacttcttgtacgtctcagtgactcagttgggtacttattctgggacagtgcaactacgggttacgccacctgctttgtttttaaaggattgttcattttaacttgtcggcatgtaatagatagcattgtgggagacggaatagagccaagtaagtgggcaaccataattggtcaatgtgtaagggtgacatttggttatgaagagctaaaagacaaggaaacaaactacttttttgttgaaccttggtttgagatacataatgaagagcttgactatgctgtcctgaaactgaaggaaaatggacaacaagtacctatggaactatataatggaattactcctgtgccacttagtgggttgatacatattattggccatccatatggagaaaaaaagcagattgatgcttgtgctgtgatccctcagggtcagcgagcaaagaaatgtcaggaacgtgttcagtctaaaaaagcagaaagtccagagtatgtccatatgtatactcaaagaagtttccagaaaatagttcacaaccctgatgtgattacctatgacactgaatttttctttggggcttccggctcccctgtgtttgattcaaaaggttcattggtggccatgcatgctgctggctttgcttatacttaccaaaatgagactcgtagtatcattgagtttggctctaccatggaatccatcctccttgatattaagcaaagacataaaccatggtatgaagaagtatttgtaaatcagcaggatgtagaaatgatgagtgatgaggacttgtga

SEQ ID NO: 47171 - DNA, 102 bp, Homo Sapiens
aatatggaacacatcacctgccacctgaagatcactctagctgagcagaacccagaaaaactcaacaaagcctgttccttcagcaagccttccaacagctgg

SEQ ID NO: 47172 - DNA, 335 bp, Homo Sapiens
tgagttcaactcatgcctacccaaagctggctccatatagaccagcaggacagctcctttctccccctttactgctttcaatatttttgaattcctgtttctcctgcattgtgcagatcagtgcatttctctatgtgaagcagcagccttggtattgtgaggtctaccaatacagaaactggactggaaatgcaactctgattcctggttcaattttaagttttgagaccaccacactgtggcccatcaccaccatcaactatatcacagtagcattcatcttttctaagggaaagccatttcgaaaacccatctatacaaactgtaagtatata

SEQ ID NO: 47173 - DNA, 3485 bp, Homo Sapiens
tccagctgggtagccgggggagcgcgcgtgggggctccgcgagtcgctcgcccttggtttctggggaagcctgggggacgcggctgtggcggaggcgccctgggactcaggtcgcctggagcgtggcacgcagagccccaggcgcggagctgaggccgcgcggccgcgcttggccccagcgggcgtgggactgagcagtctgctgccccccgacatgtgacccagccccgccgcccatgcgggctcccggccgcccggccctgcggccgctgccgctgccgccgctgctgctgttgctcctggcggcgccttggggacgggcagttccctgtgtctctggtggtttgcctaaacctgcaaacatcaccttcttatccatcaacatgaagaatgtcctacaatggactccaccagagggtcttcaaggagttaaagttacttacactgtgcagtatttcatatatgggcaaaagaaatggctgaataaatcagaatgcagaaatatcaatagaacctactgtgatctttctgctgaaacttctgactacgaacaccagtattatgccaaagttaaggccatttggggaacaaagtgttccaaatgggctgaaagtggacggttctatccttttttagaaacacaaattggcccaccagaggtggcactgactacagatgagaagtccatttctgttgtcctgacagctccagagaagtggaagagaaatccagaagaccttcctgtttccatgcaacaaatatactccaatctgaagtataacgtgtctgtgttgaatactaaatcaaacagaacgtggtcccagtgtgtgaccaaccacacgctggtgctcacctggctggagccgaacactctttactgcgtacacgtggagtccttcgtcccagggccccctcgccgtgctcagccttctgagaagcagtgtgccaggactttgaaagatcaatcatcagagttcaaggctaaaatcatcttctggtatgttttgcccgtatctattaccgtgtttcttttttctgtgatgggctattccatctaccgatatatccacgttggcaaagagaaacacccagcaaatttgattttgatttatggaaatgaatttgacaaaagattctttgtgcctgctgaaaaaatcgtgattaactttatcaccctcaatatctcggatgattctaaaatttctcatcaggatatgagtttactgggaaaaagcagtgatgtatccagccttaatgatcctcagcccagcgggaacctgaggccccctcaggaggaagaggaggtgaaacatttagggtatgcttcgcatttgatggaaattttttgtgactctgaagaaaacacggaaggtacttctctcacccagcaagagtccctcagcagaacaatacccccggataaaacagtcattgaatatgaatatgatgtcagaaccactgacatttgtgcggggcctgaagagcaggagctcagtttgcaggaggaggtgtccacacaaggaacattattggagtcgcaggcagcgttggcagtcttgggcccgcaaacgttacagtactcatacacccctcagctccaagacttagaccccctggcgcaggagcacacagactcggaggaggggccggaggaagagccatcgacgaccctggtcgactgggatccccaaactggcaggctgtgtattccttcgctgtccagcttcgaccaggattcagagggctgcgagccttctgagggggatgggctcggagaggagggtcttctatctagactctatgaggagccggctccagacaggccaccaggagaaaatgaaacctatctcatgcaattcatggaggaatgggggttatatgtgcagatggaaaactgatgccaacacttccttttgccttttgtttcctgtgcaaacaagtgagtcacccctttgatcccagccataaagtacctgggatgaaagaagttttttccagtttgtcagtgtctgtgagaattacttatttcttttctctattctcatagcacgtgtgtgattggttcatgcatgtaggtctcttaacaatgatggtgggcctctggagtccaggggctggccggttgttctatgcagagaaagcagtcaataaatgtttgccagactgggtgcagaatttattcaggtgggtgtactctggcctcttggttcattattttcaaacaagcacacttgtacaattattttctgggtacttcccatatgcacatagcactgtaaaaaatatttcccaaagatcactcattttataaataccactttttcagaattgggtttattgcgagcaggaggagatacttaaaacatgcacatataccaggttggtggtaagttggtcgcatgtgaaaacctcaactatttaatcatcatgattcatattttgagtgaatacatcaggcacagaccttcatgatatcacacactcttggctactttaagaggccatctttaatactttatgagtagttctggagtgtaaacataaacgagtattcttttgtagtcagaaaagtgtcctctcaataatttagtaggggcttattgtctctcaaaactaacctaaaagaaaatgacacattttataatagaatattacatttatttctggaagtgtgttttcaaaaagatatttacatagtctgtaaactagaaagtgttaggtaaagctctaggttactgtgttactattataatattaaacattcgaataggcagtcgttcaaagactctttggaatatctatgaatgaatatcctctattcttataatattaaaacccataagtaaatataggacatacaagagaaatgagttaaatgactatgtaagggagagtttattaaaatttgatgaaatttactgtaggaactaaactatgccataaaacaatagctttctagttcatttccagtaactgttcccatctcctttaccacttgttaagaaaattaaattcttcagtcacgctgctttaaaatgggacaaaatctattaagttgaaccatatataattgtggatatttggctgtttttaatctgacaagcagtaacttcatatggtttgccttaatatatatttgttttagtcatgaactcataatccattgatgctctttcatgagaagagatatcacccatatttccttattgatattattggtacaggcagacaaccctggtaggagagatggattctggggtcatgacctttcgtgattatccgcaaatgcaaacagtttcagatctaatggtttaatttagggagtaattatattaatcagagtgttctgttattctcaatctttatagaaacgattctgctggttttgaagaacagatgtattacactaactgtaaaagtagttcaagagtgagaaagaataaattgttattaagagcaaaagaaaaataaagtgattgatgata

SEQ ID NO: 47174 - DNA, 480 bp, Homo Sapiens
tggttccaaaactgttcacttcccaaatttgtctgcttcttctgttggggcttctggctgtggagggctcactccatgtcaaacctccacagtttacctgggctcaggggtttgacgtccatcagtaggaaccagctccaatgcaccaatgcaatgcgggtaattaacaattatcaacggcgatggaaaaaccaaaatacttttcttcttgcaacttttgctaatgtagttaatgtttgtggtaacccaactataacctgccctcataacagaactctcaacaattgtcatcatagtggagtccaggtgcctttaatgtactgtaacctcacaactccaagtccacagaatatttcaaactgcaggtatgcgcagacaccagcaaacatgttctatatagttgcatgtgacaacagggatcaacgacgggaccctccacagtatccagtggttccagttcacctggataccatcatctaa

SEQ ID NO: 47175 - DNA, 999 bp, Homo Sapiens
ttcctgattctcccaggactcatagacttcatagctgaggtggaccttacctcagccctgacccggaagatcacgctgaagacaccgctgatctcctcccccatggacactgtgacagaggctgacgtggccatcgcgatggctctgatgggagatactggtttcattcaccacaactgcaccccagagctccaggccaaggagctacggaaggtcaagaagtttgaacagggcttcatcacggaccccacggtgctgagcccctcccacactgtaggtgatgtgctggaggccaagatgcggcatggcttctctggcatccccatcactgagacgggcaccatgggcagcaagctggtgggcatcgtcacctcccgagacatcaactttcttgctgagaaggaccacaccaccctcctcagtgaggtgatgacgccaaggctcgagctggtggtagctccagcatgtgtgacgttgaaagaggcaaatgagatcctgcagcgtagcaagaaagggaagctgcctatcatcaatgatcgcaatgagctggtggccattatcaccggcagcgacctgaagaagaaccaagactaccctctggcctccaaggattccaacaagcagctgctgtgcggggcagctgtgggcacccgtgaggatgacaaatatcgcctggacctgctcacccaggtgggcgtcgacatcatagtcttggactcgtcccaagggaacttggtgtatcagatcgccatggtgcattacatcaaacagaagtacccccacctccaggtgattggcaggaacgtggtgacagcagcccaggccaagaacctgattgacgctggtgtggacgggctgtgtgtgggcatgggctgcggctccatctgcgtcacccgggaagtgatggcttgtggtcagccccagggcactgctgtgtacaaggaggccaagtatgcccggcgctttggtgtgcccatcatagccaatggcagcatccag

SEQ ID NO: 47176 - DNA, 768 bp, Homo Sapiens
cgcggccgcgcgcaccagccccacggtggccacgcagacgggcgcgtccgcgacgtccacgcgaggcaccagccccacgcgcagcgccgcgcctggagctcgcgggagccccccacggccgccgccgccgccgccgctgctgggcaccgtgttcgcccagctcgtcgcccacccacctgtggaccggcgaggtgagcgcggccccacccccagcccgcgtccggcatcggaggaggtctccggagcagagccgaagctcgccggagaagaggagccccagcgccccggtttgcaaagcaggtgacaaaacacgacagccttcttcaagcccctccagtattatccgacgcacttcctccctggatactcttgctgcaccgtatcttgctggacactggcctcgggatagccatgggcaagctgcaccttgcatgagggacaaagctacacagacagagagtgcatgggctgaagaatactctgaaaagaagaaagggtctcacaagcgctcagcatcttggggcagtacagatcaacttaaggaggtcagaaaaatggttctaagatagtgggtgtggaaatatgatccttttgttggctatttccttgatattatgggcagcaaggatttgtcgttttccattgatttcttttttctttttggcttctgaaataacaaaaacaattattgtgttgatttaataaagatttcaatagggatatttatatatcacttacctgattatgtatgtttgtctttttttagga

SEQ ID NO: 47177 - DNA, 492 bp, Homo Sapiens
ctgaccccgaccaccgcatataccagcaacggtgcgcccgggggcctgaccccgacccccgcatataccagcaacggtgcgcccgggggcctgaccccgaccaccgcatataccagcacgcccgggggcctgaccccgacccccgcatataccagcaacggtgcgcccgggggcctgaccccgacccccgcatataccagcaaagtgcgcccggggggcctgaccccgaccaccgcatataccagcaaagatgcgcccgggggcctgaccccgaccaccgcatataccagcaacggtgcgcccgggggcctgaccccgacccccgcatataccagcaacggtgcgcccgggggcctgaccccgaccaccgcatataccagcaacggtgcgcccgggggcctgaccccgacccccgcatataccagcaacgcccgggggcctgaccccgacccccgcatataccagcaacggtgcgcccgggggcctgacccc

SEQ ID NO: 47178 - DNA, 285 bp, Homo Sapiens
gcagccccagcattatgcagagacttgtgctgctattagccatttctcttctactctatcaagatcttccagtgagaagcgaatttgaattggacagaatatgtggttatgggactgcccgttgccggaagaaatgtcgcagccaagaatacagaattggaagatgtcccaacacctatgcatgctgtttgagaaaatgggatgagagcttactgaatcgtacaaaaccctgaaacgcagtagtgctggtccctagagtcgctggaagtaggacctcagtagctt

SEQ ID NO: 47179 - DNA, 552 bp, Homo Sapiens
aagttcctgaagatggtggagttgcagatcagcttgaagaactatgacccccagaaggacaagcgcttctcgggcaccgtcaggcttaagtccactccctgtcccaagtgtctgggggaacagcagcactgtgacgagaccaaggccacggatatccccgtggacactgaggtgccaaaaaaactcaagaataagaatctggtcaagaagctggccaagaagtatgatgcatttttggcttcagagtctctgataaagcaaatcccacgaatcctcggcataggcctaacaaaggcagtaaagttcccttccctgctcacacacgatgaaaacacggtggccaaagtggatgaggcgaagtccacaatcaagtttcatatgaacatgttatgtttggctgtggctgttggccacgtgaagatgacagacgatgagcttgtgcataacattcacctggctgttaacttcttggtgtcactgctcaaaaactggcagaatgtccgggccttatatatcaagagcaccacgggcaagccccagcgcctatattaa

SEQ ID NO: 47180 - DNA, 721 bp, Homo Sapiens
caggcagcctcagcacaagaaaagaacatggtctagactgaagtaccaactaaatcatctcctttcaaattatcaccgacaccatcatggattcaagcaccgcacacagtccggtgtttctggtatttcctccagaaatcactgcttcagaatatgagtccacagaactttcagccacgaccttttcaactcaaagccccttgcaaaaattatttgctagaaaaatgaaaatcttagggactatccagatcctgtttggaattatgaccttttcttttggagttatcttccttttcaccttgttaaaaccatatccaaggtttccctttatatttctttcaggatatccattctggggctctgttttgttcattaattctggagccttcctaattgcagtgaaaagaaaaaccacagaaactctgataatattgagccgaataatgaattttcttagtgccctgggagcaatagctggaatcattctcctcacatttggtttcatcctagatcaaaactacatttgtggttattctcaccaaaatagtcagtgtaaggctgttactgtcctgttcttgggaattttgattacattgatgactttcagcattattgaattattcatttctctgcctttctcaattttggggtgccactcagaggattgtgattgtgaacaatgttgttgactagcactgtgagaataaagatgtgttaaaat

SEQ ID NO: 47181 - DNA, 345 bp, Homo Sapiens
cagattgaggagagcaccacagtggtcatcacgcagtccaccgagatcagagctgctgagataacactcacagagctgagatgtccagtccagtccttggagattggcctggacttgatgagaaatctgaagatcagcttggagaacagcctaagggaggtggaggcctgctataccacgcagatggagcagctcaacagggtcctactgtacctggagtcggagctggcacagacctgggcagagggacagcgccaggcccaggagtacgaggcctggaacatccaggtcaatctggaggctgagatcaccacctaccaccgcctgctggaagatggggaggac

SEQ ID NO: 47182 - DNA, 2052 bp, Homo Sapiens
caggaaaggacctcggaagtcttctaaggagagtcatggcgtattaccaggagccttcagtggagacctccatcatcaagttcaaagaccaggactttaccaccttgcgggatcactgcctgagcatgggccggacgtttaaggatgagacattccctgcagcagattcttccataggccagaagctgctccaggaaaaacgcctctccaatgtgatatggaagcggccacaggatctaccagggggtcctcctcacttcatcctggatgatataagcagatttgacatccaacaaggaggcgcagctgactgctggttcctggcagcactgggatccttgactcagaacccacagtacaggcagaagatcctgatggtccaaagcttttcacaccagtatgctggcattttccgtttccggttctggcaatgtggccagtgggtggaagtggtgattgatgaccgcctacctgtccagggagataaatgcctctttgtgcgtcctcgccaccaaaaccaagagttctggccctgcctgctggagaaggcctatgccaagctgctcggatcctattccgatctgcactatggcttcctcgaggatgccctggtggacctcacaggaggcgtgatcaccaacatccatctgcactcttcccctgtggacctggtgaaggcagtgaagacagcgaccaaggcaggctccctgataacctgtgccactccaagtgggccaacagatacagcacaggcgatggagaatgggctggtgagtctccatgcctacactgtgactggggctgagcagattcaataccgaaggggctgggaagaaattatctccctgtggaacccctggggctggggcgaggccgaatggagagggcgctggagtgatgggtctcaggagtgggaggaaacctgtgatccgcggaaaagccagctacataagaaacgggaagatggcgagttttggatgtcgtgtcaagatttccaacagaaattcatcgccatgtttatatgtagcgaaattccaattaccctggaccatggaaacacactccacgaaggatggtcccaaataatgtttaggaagcaagtgattctaggaaacactgcaggaggacctcggaatgatgctcaattcaacttctctgtgcaagagccaatggaaggcaccaatgttgtcgtgtgcgtcacagttgctgtcacaccatcaaatttgaaagcagaagatgcaaaatttccactcgatttccaagtgattctgaaacactgtccaaagctcaaataataaattccgccgcaacttcaccatgacttaccatctgagccctgggaactatgttgtggttgcacagacacggagaaaatcagcggagttcttgctccgaatcttcctgaaaatgccagacagtgacaggcacctgagcagccatttcaacctcagaatgaagggaagcccttcagaacatggctcccaacaaagcattttcaacagatatgctcagcaggtatggtacctagcacccaggggccttacgtgggattggagaaaggggacctgagggagggacagctctcacaggcccttactgggatgcagagaggagaagtgacttgatggactattttacctgcctctcttcctggatcgtctccagaactgctgtggctgccaagctcggtagagacgtggcgccccacccagtgtcatccgggggacttcaagctggaatgcagagcttagaaagggaggggataattatggggtgtgaggtgcattgccctctaaatctttaaacaagcaattggcagtaccccgtgaaacctttccttctcctactcggccacctcccaccaacctggcatcgttcctcccgggagctagccagcttcagaaagcacatacagcatccttgctgccaaaccacctatgtgcacacaggatttccttaatggcttaataaactgttataaagaactccttgacttgtcagaataaaatagctgccaggggctctgcacaatgagcctcttaccgttaataa

SEQ ID NO: 47183 - DNA, 594 bp, Homo Sapiens
gccaccatcatgctctcctccccactcagggtggctgtggtgtgtgtgagcaacatcaacaggagcatggaggcccacagcatcctcaggagaaaagggctaagtgtccggtctttcggaactgaatctcatgtgaggctaccaggacgaagacccaatcatcctgtagtttacgattttgcaacaacatataaggagatgtacaatgacctcctcaggaaagatagagaatgctacacccacaatggaatcttacacatcttgggaagaaatgagagaatcaagcctggcccagaaagatttcaggaatgcactgaattctttgatgtcatctttacctgtgaggagcgtgtctatgacacagtggtggaagatctgtgttccagagaacagcagacctttcagcctgtgcacgtgatcaacatggacatcaaagataccctggaaggtgccatcctgggagctttcctcatctgtgagatttgccagtgcctgcagcagtccgacgacatggaagacagtctggaggagctgctgttgcaaatggaggagaaggcaggaaaaagctttcttcacaccgtctgcttctactga

SEQ ID NO: 47184 - DNA, 1297 bp, Homo Sapiens
aggtcccaggtgtgacaccttcagcaggtctcagggaagatggcagccctaggggacattcaggagtccccttctgtcccgtcccctgtcagtctctcatcaccagggacacctggaacccagcaccacgagcctcagcttcacctccatgggcatcaacatggctcccctggctccagccctaaggtgctctcccagccgtccgacctggatctccaagacgtagaggaagtggagatcggcagagacaccttctggcccgactccgagcccaagccggagcaggctccacgctctcctggctctcaggcccctgacgagggggcgggcggggcgctgcgcagcctcctgaggagccttccccgcagggcccggtgcagcgccggcttcgggcctgaatccagcgcggagcggccggcgggccagccgcctggggccgtcccttgcgcccagccgcggggcgcctggcgcgtgacgctcgtgcagcaagcagcggccgggcccgagggtgcgcccgagcgggctgccgagctgggagtcaacttcggtcggagccggcagggcagcgcgcggggggccaagccgcacaggtgcgaggcctgcggcaagagtttcaagtataactcgctgctcctgaagcaccagcgcatccacacgggcgagaagccctacgcctgccacgagtgcggcaagcgcttccgcggctggtcgggcttcatccagcaccaccgcatccacacgggcgagaagccctacgagtgcggccagtgcggccgcgccttcagccacagctcgcacttcacgcagcacctgcgcatccacaacggcgagaagccctacaagtgcggcgagtgcggccaggccttcagccagagctccaacctggtgcgccaccagcggctgcacacgggtgagaagccctacgcctgcagccagtgcggcaaggccttcatctggagctccgtgctcatcgagcaccagcgcatccacactggcgagaagccctacgagtgctccgactgcggcaaagccttccgcggccgctcgcacttcttccggcacctgcggacccacacgggcgagaagcccttcgcgtgtggcgcctgcggcaaggccttcggccagagctcccagctcatccagcaccagcgggtgcactaccgcgagtagccgggcgggggctcggggctcggcctcctacctgcccccaacccaccctccaccccgtcccccacggtgggcactgcccagcaccgcatgccacgtgtccggaataaattctttttgattgttggaa

SEQ ID NO: 47185 - DNA, 759 bp, Homo Sapiens
agcaagggcttccccataatcctggcaggcaggcctcccctggggttcccaacttctgacctcactgaagtgtttatcctcttctctaatcccagcctccttttccctgtttccatgtcctctgagagatgctcccgctcccccaggctccctctgcatccccctcatttgcttcctccccagtgtgtcaatggagtcctaacccccaccacattgtccccttttcctcctccagagtgggaccttattttcccccaagtggtcctgtctaggggtgccgctgccgggccccctctggtcttcctgctggagactggggccttttgggagtcagcaggcacccgggccaaccgcagccagcgaggggtgagcgatacttcaccggcgagtcatcagggtgagctggccgtgtgcgatgcagtcagtgtctgggtgacagacccccggaccgctgtggacttggttgtgctcgaggtggaggtgttgggtgaggtgcctgcagctggcagcagttccctccaccaacacttctttgtcacctgcttcaaggccgataactctgaagaaggtggcccaggggtaggtggaggggctgccgctggggtgtggaccggggggcactgggtgtctgagtgcaaggccaagcagtcctatgtgcgggcattgaccgctgatgcccagggccgtgtggactggcgatggattcaaactggcacagcctgtgtctgcacactcctcagccggactggccgggcctga

SEQ ID NO: 47186 - DNA, 537 bp, Homo Sapiens
atggcgccccatggaggaaacacactggaaatcgtgcagaagatgggaagatgcaggctggagtgcggagaaggactgagaccctgcctggtagacggcaccgtcacagcagccgtctgcctgctaggaggagcgtctccaccagcagcaggccggcccctgagggagacagcagagagctggagtcctggccagccaggcggggatccttcagcaggacacaggggacacagcaggcaacaggagctcagaacgctctcggcgaccctgctgagtaacttgtggactttgtcgtctggccagtcatgcaggatccggcacaggacgtacagctcagcgctggggagggggtccctgaaaaagtcacctggtttaaagacaaaacgagatacgtccgtcaggtatggaagaagcagtcctccccggacagatcctgggacggccacccgcatcctaaatcagggacagagaggggtgtgggcgggaatgggtcttcctgaagtacatccccgtggggacttgaacagagctccatga

SEQ ID NO: 47187 - DNA, 960 bp, Homo Sapiens
atggaaaaagccaatgagacctcccctgtgatggggttcgttctcctgaggctctctgcccacccagagctggaaaagacattcttcgtgctcatcctgctgatgtacctcgtgatcctgctgggcaatggggtcctcatcctggtgaccatccttgactcccgcctgcacacgcccatgtacttcttcctagggaacctctccttcctggacatctgcttcactacctcctcagtcccactggtcctggacagctttttgactccccaggaaaccatctccttctcagcctgtgctgtgcagatggcactctcctttgccatggcaggaacagagtgcttgctcctgagcatgatggcatttgatcgctatgtggccatctgcaacccccttaggtactccgtgatcatgagcaaggctgcctacatgcccatggctgccagctcctgggctattggtggtgctgcttccgtggtacacacatccttggcaattcagctgcccttctgtggagacaatgtcatcaaccacttcacctgtgagattctggctgttctaaagttggcctgtgctgacatttccatcaatgtgatcagcatggaggtgacgaatgtgatcttcctaggagtcccggttctgttcatctctttctcctatgtcttcatcatcaccaccatcctgaggatcccctcagctgaggggaggaaaaaggtcttctccacctgctctgcccacctcaccgtggtgatcgtcttctacgggaccttattcttcatgtatgggaagcctaagtctaaggactccatgggagcagacaaagaggatctttcagacaaactcatcccccttttctatggggtggtgaccccgatgctcaaccccatcatctatagcctgaggaacaaggatgtgaaggctgctgtgaggagactgctgagaccaaaaggcttcactcagtga

SEQ ID NO: 47188 - DNA, 2158 bp, Homo Sapiens
ggaggccagtgcgcggccgcggtgctctaccggcgtgtcgctccgccccagggagagccggcgctaccatggaggagtaccatcgccactgcgacgaggttggcttcaatgctgaggaagcccacaatattgtcaaagagtgtgtagatggggttttaggtggtgaagattataatcacaacaacatcaaccagtggactgcaagcatagtggaacaatccttaacacacctggttaagttgggaaaagcctataaatatattgtgacctgtgcagtggtccagaagagcgcatatggctttcacacagccagctcctgtttttgggataccacatctgatggaacctgtaccgtaagatgggagaaccggaccatgaactgtattgtcaacgtttttgccattgctattgttctttaactgactaaaaatgttgggctaaagccattaacttaagaatttgtcagtgtatcctttccaaaaagagtaatagttgtttactagtgtgctagatgaaaagcgtgcaatatgctttaaagctatcaacaaaaactgaatattataagcaagcaatatcatagtaattggcagattagctcatattctatacagcatcgtttaaataggaaaaatttaatgctagcaaaaaataaatttagaaatatggcatgacatgaaaatacaatcttatatttacaccagcttttcactaatattttgtacctaaggtgatggggaactccattcagataataaaattctctttcagctagagaagttaacaggaataaatatatgaacaaaaaagctgcaaggataaatgtggagaaaatgatgagaattagctaacatttttaagtttttttaaactttcttcccctcagttgtacttaatatttagtggaaagtaataatttttttaattttctatcaactaatagtatagtaacaactatgattaacttgtttactttttctgaggattagtaaatcaattttttttaatttcaaatttttggatttacacttgagggtaaattaaatctggtaaactgaatttcctagttaaataaaattagttgcagtatatgatgaacagtgtatgactcaaacagctgccttacaattcactcattccatgtggaacaaacatttatcagatgcctattatgggcatatgtctctgctaagcaccatagttgtcaatgtgctgtgcaaatgctaagttccttttagcaattgttcagttggaagacgtattaatatttggggaaggaaaagaaagtagttgttttacaagggaggaaaaaagtgaatctggttacacatatggaagtaagcaaaatgaaaagcacttattgctttctgacagaattatagatgtaattttaagagttgctcctagcaagttaaaagtgcatataaaatatgcaactcttagttaaaggccttattatcagtcttacctatacaagtagtaaattttgtcattgctttagttacaaccatctgtaaataacttaaaagacttattatgtggggttcaaattgagtggaataaagtatagattaaaagtatacaatccttagcacgttatctcagggcttatgaaatgtaattaaatttattaagaaaatagatgaaaaattagggtacacagctggccaccaaatgcgaagtcaatctgctacttaaccctgaaaacaaaatcagttttgcatattaccactaacactaatacatatagagagcggaaccataactcattgaattttggagaggaataagcttagcgttaatattgacaatattaaggcaatattcttgtaggaatactatgtgcatgtttgatattttgccaaataacaataattaataattgttcaatgtttaagaataatattaacaaaataaaggagtttaatgcagtgatctttgtttttggcacatcaaaaattctcagtcattattcatgtttctttatgctgctggcttttgtgccctggaagatcataatagtgaccaaaatatacatgcagacttgttttttattattgttgtttaagcataatttaagaaaaaaaatttttacctggtgaacttgctatctgctctgtttctagttaaaatataataaatattatcttcctgtgctgta

SEQ ID NO: 47189 - DNA, 2860 bp, Homo Sapiens
gtgctcgtcgccgcgctcgtggaccggggccgggcggactcggggaccggcggaggacgccgggcgcgcccggcccgaggctgggggagcggggcggcgtggcgggcgcgccgaggaccccaggccgggccgggccgagaggctgccatgggctccgtggggagccagcgccttgaggagcccagcgtggcaggcacaccagacccgggcgtagtgatgagcttcaccttcgacagtcaccagctggaggaggcggcggaggcggctcagggccagggccttagggccaggggcgtcccagctttcacggatactacattggacgagccagtgcccgatgaccgttatcacgccatctactttgcgatgctgctggctggcgtgggcttcctgctgccatacaacagcttcatcacggacgtggactacctgcatcacaagtacccagggacctccatcgtgtttgacatgagcctcacctacatcttggtggcactggcagctgtcctcctgaacaacgtcctggtggagagactgaccctgcacaccaggatcaccgcaggctacctcttagccttgggccctctcctttttatcagcatctgcgacgtgtggctgcagctcttctctcgggaccaggcctacgccatcaacctggccgctgtgggcaccgtggccttcggctgcacagtgcagcaatccagcttctacgggtacacggggatgctgcccaagcggtacacgcagggggtgatgaccggggagagcacggcgggcgtgatgatctctctgagccgcatcctcacgaagctgctgctgcccgacgagcgcgccagcacgctcatcttcttcctggtgtcggtggcgctggagctgctgtgtttcctgctgcacctgttagtgcggcgcagccgcttcgtgctcttctataccacacggccgcgtgacagccaccggggcaggccaggcctgggcaggggctatggctaccgcgtgcaccacgacgttgtcgccggggacgtccacttcgagcacccagccccggccctggcccccaacgagtccccaaaggacagcccagcccacgaggtgaccggcagcggcggggcctacatgcgctttgatgtgccgcggccaagggtccagcgcagctggcccaccttcagagccctgttactgcaccgctacgtggtggcgcgggtgatctgggccgacatgctctccatcgccgtgacctacttcatcacgctgtgcctgttccccggcctcgagtctgagatccgccactgcatcctgggcgagtggctgcccatcctcatcatggctgtgttcaacctgtcagacttcgtgggcaagatcctggcagccctgcccgtggactggcggggcacccacctgctggcctgctcctgcctgcgtgtggtcttcatccccctcttcatcctgtgcgtctaccccagcggcatgcccgccctccgtcaccccgcctggccctgcatcttctcactgctcatgggcatcagcaacggctacttcggcagcgtgcccatgatcctggcggcaggcaaagtgagccccaagcagcgggagctggcagggaacaccatgaccgtgtcctacatgtcagggctgacgctggggtccgccgtggcctactgcacctacagcctcacccgcgacgctcacggcagctgcctgcacgcctccaccgccaatggttccatcctcgcaggcctctgagccagccccgcccactgccagggacgccgagggcctgaccaggggccccgaggcctgagggcccctcccctgtccccacctcagtgcctgcggggccctgagcctccccctgtgccagcagccccactccctcagggtccagccatgccccaccctggactgaagttctgcaaagtcctccgaggaccggaacacgtttctgcgacccggggctctggccagcactgtgttctgcgtttggtctcatacctgcgtctaccttccatctgtgtccagcggccccggctccagcccagccagcactctgcagggtcacacgcaccgtgtccccacccaggacagcagacacccgccagagtgtgcgcgcccagtgactgcaccccggccctcatcacccaccggcactgatcggggcaccgcctggcccagcctccaccagggacccctcctcatgaactctggagccctgagaggagaggggcagccccccaccttgtcaccctcagggcttccccttctgtcctcattcttagagactgcttctcccaaacataacgcgttagccatgaaggagtcggagccctgggtccgaatggacccgcctgcggtctgcatcagcctctgggaaaccacagcagtgatgccagctgggcacgtcaggacctccccacacacccacacgatgccacaggtcagggggctgtgcctgactagggagccctcccattgccttcctggcccgggatagaagaggggaggtaagtctgggggctacgaagccgggcccccacaccctggctgaagtcagcttgacctaggtcttgaccctcatccagcaagggactcgacagacccaagggtccctggaacgtagggaggggctgggggtcagtccagcccgggcctcccagaacaccaggcccgtgtgggtggcaccctgaggtcaggggatcctaagggtgtccttccagagacggtgtttccagggggaggaccgcccccgcttccagatccccggccccggctgtgactgccctgtttcacccctgctgtgtcccatcccccgtctgtccactaactgtaccgcaccggccattaaaagatgaaggcagaccgctgc

SEQ ID NO: 47190 - DNA, 849 bp, Homo Sapiens
atggcggcgggcgggcagctgggaaaggaggctaccaagagcgcattggaccaggatggggctagacttcaagcacccgggggcagagggaaggggcctggcccgttgttctgcaaaggaagactgaagcaggcccggagagggggcggttcttgcccaggaccagacccgcgtgtccttggacctgccccttcctctgacccgggcatccgcagcccttcccagcgctggcttcggggtctggccacccagccagggaccccaagaccccgttcccacccagggaacttggggacgggagaaggaggggccacaaccaggccccgcccccgctgctcacagacccgcggccgtcgccatttcctgcgtctattcaggccccgccctcacattctcattggcgtggatgccaagaccacgtccacctgtcaggaaaaaaaaaaaaatcggtggagaccccgcccctacatgtctattggcctttggtgcctccggtcccccagcctgcggactcgctggacaggcgcgggcgcccacctggggagcgggcgggacagagcccgctctctgcggctttgtgacgttttcggcccggccaccgtgtctccgttccgctgttgctcccctctgcagcgaggtatatcttacggagctgcttccgccccggagcctctctggagccagcaaagaaagggaggcacagttcttatcccctgcttgcagagggggacacaggctgggcgggtttttttttttttttttcaagtcacttgtcctgccttacacactcagggcccattgctcctctctgttacagaaatagcagatgccaacggaatccaagaataa

SEQ ID NO: 47191 - DNA, 892 bp, Homo Sapiens
attcgtgaagcagttgagtgctgcagcggcagtcgtcgcccctgccgccgctgccaccgaaggaagcatcccagacaccgggaagatggaagatggtaccccaaagcatatcatccagatgacaggatttaagatggaagaaaaagaagcgctagtcaaattacttttaaaactagattgcacttttattaagagtgagaaatacaaaaattgtacacatcttatagctgaacgcctatgtaagagtgaaaaatttttagcagcttgtgcggcaggaaagtggatactaaccaaggactatataattcatagtgccaaaagtggcagatggcttgatgaaacaacttatgaatggggatataaaattgaaaaagattcccgttattcacctcaaatgcaatctgcacctaaaagatggcgtgaagaactgaaacgcactggtgctccaggagccttccacagatggaaagttgtcctccttgttagaactgataagcgaagtgattctcttataagagttttggaggctggaaaggcaaatgttattttaccaaaaagttcaccaagtggaataactcatgtgattgccagtaatgcaagaattaaagctgagaaagaaaaagataactttaaggctccattttatccaattcagtatctaggggattttcttttagagaaagaaattcagaatgatgaagattcccaaaccaattctgtttggactgaacatagcaatgaagaaacaaacaaagatttcaggaaagatgcaggatttcttgaaatgaaaggtgccttaagagagaccatgtatagaacccagaaagaaatgcaaaatcatgaagatgttaatgttggttctattttgattcaacatcacaaaaaagaaaaa

SEQ ID NO: 47192 - DNA, 1924 bp, Homo Sapiens
gttattgcgactttgatctaaacagctctgtaaagcccattttcacatttttaaaataatatgctttagcagcaggtgaggaaaacttaaggcatggcacatttattggaaaagcagcagtgggcggcttggtttaatggcaacaccactagataactgtctaaggccctttccagatccaatggtcaaggtaacagcagaaacaaagaaaatctcagaggtctcttcttatgtctctgctaacaataaaaagaacagcttttggggaagtgggctgctttatcctgtagccctcctcagatgccaagactgctgggctggccaccagactcacgtcctcagtaaggaatttacctcctacttttcttcgggggcaggtagggaagcacagcaccagccctcagctgtcttgggctccctgatctggttaaggagagtgtatttactcagggccatggtggtgcatggaggaagccaaccctgtcagcgctggctggtcatcagaatggaagtgggaggacatccttcatttccaggtcatgcctggttaacatttcaccttaactgaggggccaaagagaggctacgcagcctggatcagagctccgacagcccttacctggtggcttgttcgtggaatttatcacatcctgttgtaacgctctgtttacatctctgctgcccagccagactccgccttctgtgattttctcatcccaccacccagtactgtacatgctcaatggatgactataaacaagtgaacagacagcaggagtggctgcccttatgcccatggaactgggcctctcaattcagctcatgttggtcatttcagatcatctgaatgtaaagggtcctctctgtctctgaccaggcttcttgcaggcctttggcagccgtggagctctgagagagactggtttcctgagggctgggcaccccggtctatttattgggaggccacaaacagaaagagtgggcatcaggaccaacgggcacatggccaccacccagatacgtgactctggcatgtatttcacttctctggggccagatggcctcttcctaagattctcctcagtgctgagagttcttcagtcctgcctgctgacttccctccaggacagaacagatgcctcttcctcccatagatatgatgcaagaactgagctgtccaagcaaaaaaaaacctttgaaggaagaatttctgtgctgtgagtggtttactctgagaataggactcaagttttagaaatctttgttcaatgtcagagatagagcgactgtaatctgtgagccaagaaaaaaggtttgtaaaggctagaagaaaagaagcccatggctaagaacttgtaaaaacatctacagcaaacaagagttccaagagaaagactgtgaaacagcaggcccacaggagctggagagcgagctttgaaacgatacaaaattaattgtctaaggggcaaataaatggtgcagtacacaaatgcaggaggtgacacaaacgcacctggattcaacagaggacaagtagacacatctatgtcccaggctgcactaatgaggaaagtccaccaggtgggaagtaggtaccactgagagtttataaggctaaaaaccccagtcttgggatgcggagaaggagggaaggaagtgagaatgaacaggaatggcatattctgttcacttcactgacagctttgcactgtgcattcccagctgggcatgtcccagacatgatctcttgcatgggctgtactaacgaacatcaaatattcaggctggcaaccagttacatgaaccggtgtcaggagtgcacattaataggcatctgactagggcagggctgggcaaactacggcccctgcgctacatccagcctaaagcctgtttctgtaaataaagttttatcaaaacaccc

SEQ ID NO: 47193 - DNA, 486 bp, Homo Sapiens
atggaaagcagagctgcactgcggttagggcctagttccatcagcggctgcagccccatgggtcgcccatggggaccctggccttgggcacctgtggagtacgtggcgctgggtcgctgggtcgctggcgccagtgtgcaagatgctccgcaaggaggcagcggcgggctggatggtgcttggctgccggccctacctggcctttaccgccttgagcgtgcctggctcactcaacatcaacctctattcactggtgtgcgccagcccggggcggctgtggggtcagcgtgctacttgctgccagatgcctcggagcacgctgctgctgcaggagggcagcatcctggtggccgtgatggtgctgaactaggggagctgccacgggcagaagctgtgcgaggagagtgcccggcgggttgtcctcacctcactgctcgcctgcctgccctcctgctggcgggtctacttcctcaaagggggatatga

SEQ ID NO: 47194 - DNA, 3393 bp, Homo Sapiens
gcttggaaaccgcgcctccgcggaggtagccgttccctgacctagccatggcacagaacactgaaaaccacgaccctgtcggatccatcttaatccaggatccatgaagacctttatcagttaaaggagaaattaacaaaattctcacctgaggaaaaaggagagactctagacattcagagtcttgaaacagcaatcaaaaggactgaagtggggttaagaccactttcactatacctcgggaaccacctccatctccagcagaagtgaagttctttcccaagaaacaaagatcaaaggggaaaagcagaaggtcaagaggacatcatgataggaaggccatgaaagtcaaaacacctttgagagccctgaaatcactgtgggattatgactttttaatttatgatggtgtcatagacaatacagccccagacttcttagcattcaaggaacattttagcttagcttggggaggtattttttctctcttggaacacgtcgagaagtttctcaggaactatgctataccagaagtcaaaataaaagggaataatttggtggccctccttccagagtttgagctgacgaataaacttaccagatatgaccttctctcagtgttagaggacccagctcatgtccaaatgctgataaatcttccagggcaaaggtacaagggccaagatggaaattcggaggccgccatgaagatccaagccacatggaaatgctacaaagcaagaaaattcttcctcttttatcgccagcagaagtgggcatcaggtgtgattgccattgcttggctgttatattgccataagactcgactaaagaagatactaaaggaatcacgtcagagacacctggagaattttcgcattcgagccaagcatctggcagccaactggaatcgcatcaggacctccaggaggactattatccatatcccatcattagggtattcccagcctgtgagagaacatattgccgatttcaacacacagcagaacatgcagctggggaggctgtgtgacatcttagatgccaatgtgaatgtcatctacatctgctcccatcatatgaatgacgagttagtgctgtattacaaaaaaatcctaagtctacatgcagccgtcaaatctgggaaccttgaggacagaagtgacctgcaggacaggttcaaaattatcacacctgaagctgtaaacatcttccctatgatagagcagctgagtcagctgataactgatcacctgcaaatacagcgttggctctttaaaatggactctgagttccgaggaaatgggactgcattttgtgatattccttcctacctaaagtgctacaaatgggtgctaaaggagagtagcagatatggccttgaagactggagaaagaaatgggcacaagagccagctttggtgaagatctctgaggagctggcgggcattttagcacagcacgcacagccagtcaatgagaaacggttcccgacgtggaggaaattcctccaaacatttctcagtcaagggggtgtgatcgaagcattcccacctgcagacaatgtcaccaacctcacagtggacatgctgatagagcccaacgggaaaatcagcgtgctgtcgacaggggaccagcttcatgctgaaagccccttcatctcctctggtaccaccgtgcctcagacctcagtggatccccaagttctcacttatttgtgcctccaaattggaaaagcctgcagaatgagagatgtggttggttacttttcgatagatctggtgacttttatagatccaagcaccttggaacaacaggtgtgggcaaccggccttaacctcgcatatagtgaccagctggccctgactcaactcaccttatacctgacaaacggccatctggattgcagtttgagcaccctggaagtgccccgctttgttccaaaggaaaggaagaaaaccaaatgcatgagtgcgctgtcaatgccgatgctggcaaccagtcgctatgcagtgatgaccacccagctaagacacagcaatctctcactggttttccactatgtttttctccagatctgtagggcccatggcattggctatgatgttgagaacaatcggcgaggatctccagggggtcctcatgacctttgctcgccatctcttcatcatccatcaagaaatatcagcacctaatatgcaaggcgagaccaattttaaggaccaccattgctgatattgaaactattctaagagtaacaaaggaaaacaaaatgagatttgaagaggagcaacagtccaaagatgataaaaacctctctaaacccaagaaatgatcctggaatacagtacataacaatttggatcccagtctggaataaaaagggcaatttttttttctgttagaaataaaagccaggggaaattggtttgctttgtgtgctaggaggtgaatcagaacagattataatgaaatgctctttttaaaacattgtttattaagtgatcttattttatttattaaaccaaaacttatttgtgttttcatttgagagtgttgaacaatcccttcttcttctcaaactcagaaaaaagtaatctgataaaagaagaaagttaaaagtcttactgatatcacctccgcatttacttcctcataggcctcaggattatgtagcttttattttttatgttttataaagttttctcctatttctaatagtccatcgatcttctgcatttataggtttgaataaaggcttaagaattgctatttgtcaaaacacaaatgcctttttttcaaagcttcaaattatattgaaattatatttatatgaatttttaagtgactatcattcatcgtgtttttgttataccaagccactattgtctgctattgttgccatttttcaaaaagtaggataagccagcatctagttaaccaaagcatcagaatgtatctaggtggcagtatctgctcttagtttaagatggagtgtagctcgagctctgtagcttgaataaacatttgtattctctagttctccatttaatacagcagtaggattttttcaagtttagttcaacattatactacctttaaaaaggcagactgttaagattgtagtagtgctgactctaactttcagcattcacttcataattgtccaaaaatatttccacatcagtgagctttactgaagggtgaaataaaagcaaattacaacaccaaaaccattattgttttaaagaatgacctttatgtctataaaaatattttagtgtattggggaaaggaataggatttttacctgtggaatttcaataatttgttaactgtgattcagccacaggctaagagtttctgtaataaaattaacatttgtgtgtgtca

SEQ ID NO: 47195 - DNA, 930 bp, Homo Sapiens
atggaaagaatcaaccacaccagcagtgtctccgagtttatcctcctgggactctcctcccggcctgaggaccaaaagacactctttgttctcttcctcatcgtgtacctggtcaccataacagggaacctgctcatcatcctggccattcgcttcaacccccatcttcagacccctatgtatttcttcttgagttttctgtctctcactgatatttgctttacaacaagcgttgtccccaagatgctgatgaacttcctgtcagaaaagaagaccatctcctatgctgggtgtctgacacagatgtattttctctatgccttgggcaacagtgacagctgccttctggcagtcatggcctttgaccgctatgtggccgtctgtgaccctttccactatgtcaccaccatgagccaccaccactgtgtcctgctggtggccttctcctgctcatttcctcacctccactcactcctgcacacacttctgctgaatcgtctcaccttctgtgactccaatgttatccaccactttctctgtgacctcagccctgtgctgaaattgtcctgctcttccatatttgtcaatgaaattgtgcagatgacagaagcacctattgttttggtgactcgttttctctgcattgctttctcttatatacgaatcctcactacagttctcaagattccctctacttctgggaaacgcaaagccttctccacctgtggtttttacctcaccgtggtgacgctcttttatggaagcatcttctgtgtctatttacagcccccatccacctacgctgtcaaggaccacgtggcaacaattgtttacacagttttgtcatccatgctcaatccttttatctacagcctgagaaacaaagacctgaaacagggcctgaggaagcttatgagcaagagatcctag

SEQ ID NO: 47196 - DNA, 2822 bp, Homo Sapiens
agattcactggtgtggcaagttgtctctcagactgtacatgcattaaaattttgcttggcattactcaaaagcaaaagaaaagtaaaaggaagaaacaagaacaagaaaaaagattatattgattttaaaatcatgcaaaaactgcaactctgtgtttatatttacctgtttatgctgattgttgctggtccagtggatctaaatgagaacagtgagcaaaaagaaaatgtggaaaaagaggggctgtgtaatgcatgtacttggagacaaaacactaaatcttcaagaatagaagccattaagatacaaatcctcagtaaacttcgtctggaaacagctcctaacatcagcaaagatgttataagacaacttttacccaaagctcctccactccgggaactgattgatcagtatgatgtccagagggatgacagcagcgatggctctttggaagatgacgattatcacgctacaacggaaacaatcattaccatgcctacagagtctgattttctaatgcaagtggatggaaaacccaaatgttgcttctttaaatttagctctaaaatacaatacaataaagtagtaaaggcccaactatggatatatttgagacccgtcgagactcctacaacagtgtttgtgcaaatcctgagactcatcaaacctatgaaagacggtacaaggtatactggaatccgatctctgaaacttgacatgaacccaggcactggtatttggcagagcattgatgtgaagacagtgttgcaaaattggctcaaacaacctgaatccaacttaggcattgaaataaaagctttagatgagaatggtcatgatcttgctgtaaccttcccaggaccaggagaagatgggctgaatccgtttttagaggtcaaggtaacagacacaccaaaaagatccagaagggattttggtcttgactgtgatgagcactcaacagaatcacgatgctgtcgttaccctctaactgtggattttgaagcttttggatgggattggattatcgctcctaaaagatataaggccaattactgctctggagagtgtgaatttgtatttttacaaaaatatcctcatactcatctggtacaccaagcaaaccccagaggttcagcaggcccttgctgtactcccacaaagatgtctccaattaatatgctatattttaatggcaaagaacaaataatatatgggaaaattccagcgatggtagtagaccgctgtgggtgctcatgagatttatattaagcgttcataacttcctaaaacatggaaggttttcccctcaacaattttgaagctgtgaaattaagtaccacaggctataggcctagagtatgctacagtcacttaagcataagctacagtatgtaaactaaaagggggaatatatgcaatggttggcatttaaccatccaaacaaatcatacaagaaagttttatgatttccagagtttttgagctagaaggagatcaaattacatttatgttcctatatattacaacatcggcgaggaaatgaaagcgattctccttgagttctgatgaattaaaggagtatgctttaaagtctatttctttaaagttttgtttaatatttacagaaaaatccacatacagtattggtaaaatgcaggattgttatataccatcattcgaatcatccttaaacacttgaatttatattgtatggtagtatacttggtaagataaaattccacaaaaatagggatggtgcagcatatgcaatttccattcctattataattgacacagtacattaacaatccatgccaacggtgctaatacgataggctgaatgtctgaggctaccaggtttatcacataaaaaacattcagtaaaatagtaagtttctcttttcttcaggtgcattttcctacacctccaaatgaggaatggattttctttaatgtaagaagaatcatttttctagaggttggctttcaattctgtagcatacttggagaaactgcattatcttaaaaggcagtcaaatggtgtttgtttttatcaaaatgtcaaaataacatacttggagaagtatgtaattttgtctttggaaaattacaacactgcctttgcaacactgcagtttttatggtaaaataatagaaatgatcgactctatcaatattgtataaaaagactgaaacaatgcatttatataatatgtatacaatattgttttgtaaataagtgtctccttttttatttactttggtatatttttacactaaggacatttcaaattaagtactaaggcacaaagacatgtcatgcatcacagaaaagcaactacttatatttcagagcaaattagcagattaaatagtggtcttaaaactccatatgttaatgattagatggttatattacaatcattttatatttttttacatgattaacattcacttatggattcatgatggctgtataaagtgaatttgaaatttcaatggtttactgtcattgtgtttaaatctcaacgttccattattttaatacttgcaaaaacattactaagtataccaaaataattgactctattatctgaaatgaagaataaactgatgctatctcaacaataactgttacttttattttataatttgataatgaatatatttctgcatttatttacttctgttttgtaaattgggattttgttaatcaaatttattgtactatgactaaatgaaattatttcttacatctaatttgtagaaacagtataagttatattaaagtgttttcacatttttttgaaagacacaa

SEQ ID NO: 47197 - DNA, 405 bp, Homo Sapiens
taacacccatgcaacgagtctgcgaggccgaatggaagccagctggctgcaggggagagagcaagagagtctggcagaaggtgcacctggagaaggaagtagaggccaggccagtgtggagggaactgggaggacctgtctgaccacaaacaacccacctgaggaggccctgctgctcccggagggtgctcctgccagagttctcctagttccttgcaaggagccctggaaaaacaatcccaccctgggtctaacatagtctcggggacttttaaaccaatgcccagctagaaaaaacatctcaggcagttcgcggatagaagaggaaataatattaagagcctgccatatgttgaatgtttactatgtctcagcagcatataaatgctttagtttcttacagaa

SEQ ID NO: 47198 - DNA, 819 bp, Homo Sapiens
aggaaactggcccagtggatcaagcaggaagtgcggcaggaggtggaggagcaggtggcctctggcaacaaagggccatgcctgagcgtggctctggtcagcaaaactcctgcaagtctctgccatatcctcaacaaaaccagggcagctgcagatgtgggaatcaacagtgagataattgtgaaaccagcttcaatttcagaggaagaattgttgaatttaatcaataaattgaataatgatggtaatgtagatggcctccttctccacctgcctcttccagagcacattgatgagagaaagatctgcaattctgtttttccagataaggatgttgatggctttcatgtaattaatgtagggaatgtatctggaccagtattccgtataccagctactccatgcagtgtgtgggaaataattaagcaaactggcattccaaccctagggaagaatgtggttgtggctggaaggtcaaaaaatgttgtaatgcctattgcaatgtcactgcacacagatggggtgcatgaacgtcacggagagcagttgaggaaacatacaattcttgcagatattgtaatatctgttgcaggtgttccaaatctgatcacagcaaatatgaccaagggagaagcaataattgatgtgggaatagatacagttcaagatcctgtaactgctaaacctaagttggttggaaatgtggattttaaaggagttaggcaaaaagccagttatatcactccagtttctggaggtgttggccctatgacagtggcaatgctaatgaagaataccataattgccacaaaaaaaaag

SEQ ID NO: 47199 - DNA, 465 bp, Homo Sapiens
acccccaagagcaaggctggtgaagccaccgaagtggctattgatgcaggcttccgtcacattgatgcggcgttcttctaccaaaacgaggaggaggtcggaaaggccattcgagagaagattgctgatggccctgtgaagagagaggacattttctacaccactgaggtgaaatttctgtgtgtgcatggtgtggctaagctccttaggcgccagaaagggaattctcatagaaaaccttcttctttatcctctgttttccagcctggggaggaattgctgcctaaggatgccagtggaaacattatttttgatactgtggatcttcgtgacacatgggaggccctggagaagtgcaaagaagcaggtttaaccaagtccatcggggtgtccaatttcaatcacaaactgctggaactcatcctcaacaagccagggctcaagtacaagcccacctgcaaccag

SEQ ID NO: 47200 - DNA, 1377 bp, Homo Sapiens
atgagcttccaggccccacgcagactcctggagctggcagggcagagcctgctgagggaccaggccttggccatctccgtcctggatgagctgcccagggagctcttcccccgactgttcgtggaggccttcactagcagacgctgcgaggttctgaaggtgatggtgcaggcctggcccttcccctgcctccctctggggtccctgatgaagacgcctgatctggagatcttacattatgtagtggatgggattgattgcctgcttgcccaaaaggttcgccccaggagacacttccagactctgacggtgatggtgcaggcctggcccttcacctgcctccctctgggatcactgatgaagacgcttcatttggagaccttaaaagcattgctggaagggcttcatatgctgcttacacagaaggatcgccccagattcatcaagatgagcatcagggccccacccagactcctggagctggcaaggcagaggctgctgagggaccaggccttggccatctccaccatggaggagctgcccagggagctcttccccacactgttcatggaggccttcagcaggagacgctgtgaaaccctgaaaacaatggtgcaggcctggcctttcacccgcctccctctagggtccctgatgaagtcgcctcatctggagtcattaaaatctgtgctggaaggggttgatgtgctgttgacccaagaggttcgccccagccctgggttatggagagcatcatctctcaccctgaagtcatccccacctctctcctctaactacttcttgttctctcccaggtgtctccaggcctccttggagatggtcgttatgaccgactgcctgctgtcagagtcggacttgaagcatctctcttggtgcccgagcatccgtcaattaaaggagctggacctgaggggtgtcacactgacccatttcagccctgagcccctcacaggtctgctggagcaagttgtggccaccctgcagaccctggacttagaggactgtgggatcatggattcccaactcagcgccatcctgcctgtcctgagccgctgctcccagctcagcaccttcagcttctgtgggaacctcatctccatggctgcccttgagaacctgctgcgccacaccgtcgggctgagcaagctaagcctggagctgtatcctgcccctctggagagttatgacacccagggtgctctctgctgggggagatttgctgaacttggggctgagctgatgaagacactgagggacttaaggcagcccaagatcattgtgttctgcaccgtcccctgccctcgctgtggcatcagggcctcctatgacctggagcccagtcactgcctctgttga

SEQ ID NO: 47201 - DNA, 846 bp, Homo Sapiens
cccagggaaagacccgcccagaaaaaaagacccgccaagggaaagctccgcccagaaaaagacctgcccagggaaagccccgcccagaaaaaaggtcctcccagggaaagccccacccagggaaagctccacccagataaaagcccgcccagggaaagccccgcccagaaaaaaagatccgccaagagaagtctccgcccagataaaagccccgcccagaaaaagacccgccaaaggaaagcccagcccagaaaaaagacctgcccagggaaagccccacccagggaaagctccgcccagataaaagcccgcccagggaaagccccgcccagaaaaaagaccagcccaaggaaagctccgcccagggaaagccccgcccagaaaaaaagacctgcccagggaaagctctgcccagataaaagcccgcccagggaaagccccgcccagaaaaaagaccagcccaaggaaagccctgcccagaaaaaagaccgcccagggaaagccccgcccagaaaagacccgcccaggaaaagctctggccagataaaagctcagcccagggaaagcccccccataaaaaagccccgcccagataaaagccctgcccagcgaaagcctcgcccagggaaagccccacccagaaaaagacccgcccagggaaagcccagcccagagaaaagacccgcccagggaaaactctgcccagataaaagacccgcccagggaaagccccgcccagaaaaagtcccgcccaagccccgcccagaaaaaaaacccgcccagggaaagccccgcccagaaaaaagtcgcgcccggggaaagccctgcccagaaaaagtcccgccc

SEQ ID NO: 47202 - DNA, 749 bp, Homo Sapiens
acgagtcagccaaagatggctgcgcccaggtaatttgagcaaaggccacagtgaactccggcgtggctgaggaaggaggaggcacccacaggctgctgggaggagagcataaggctcaaaatggaaaatcataaatccaataataaggaaaacataacaattgttgatatatccagaaaaattaaccagcttccagaagcagaaaggaatctacttgaaaatggatcggtttatgttggattaaatgctgctctttgtggcctcatagcaaacagtctttttcgacgcatcttgaatgtgacaaaggctcgcatagctgctggcttaccaatggcagggataccttttcttacaacagacttaacttacagatgttttgtaagttttcctttgaatacaggtgatttggattgtgaaacctgtaccataacacggagtggactgactggtcttgttattggtggtctataccctgttttcttggctatacctgtaaatggtggtctagcagccaggtatcaatcagctctgttaccacacaaagggaacatcttaagttactggattagaacttctaagcctgtctttagaaagatgttatttcctattttgctccagactatgttttcagcataccttgggtctgaacaatataaactacttataaaggcccttcagttatctgaacctggcaaagaaattcactgattttaaacaaatatgtaaacaaaaataaaatggtaaaaaca

SEQ ID NO: 47203 - DNA, 1077 bp, Homo Sapiens
atgtttgccaaaggcagaggctcggcggtgccctcggatgggcaggcttgggaaaagttagcttcatacgtctacgaatatttactgcacgtaagagtacagaaatctgcagagaccttcttgtcggagattcgatgggaaaaaaacatcacgttgggagaaccgcctgggtttttgcactcgtggtggtgtgtatttggggacctttactgtgcagctcctcaaaggagagacacttgtgaacattcaagtgaagcaaaagcctttcatgattatagtgcagcagctgccccgagccccgtgcttggcaacattccccccaacgatgggatgccgggaggccccatcccgccaggtttctttcagggtcctccgggtcagccttttatgtcaccgcgatacgtaggcggccccgggcccccgatcagaatgggaaaccagcctccgggaggagttcttgggacacagccattgctgcccaattctatggatcccacacgacaacaaggccaccccaacatgggaggatcaatgcagagaatgaaccctccccgaggcatggggcccatgggtcccggcccacagaattacggcagcggcatgagaccaccacccaactccctcggcccgatgcccgggattaacatgggcccgggagctggcagaccctggcccaatcctaacagtgctaactcaattccatattcctcctcatcacctggtacctatgtgggacccccgggtggcggccctccaggaacacccattatgcccagtcccgcagattcaacaaattccagtgacaacatctacacaatgcctggcggcaggtccaacttcccgatgggtcccggctcggacggtccgatgggcggcatgggtggcatggagccacaccacatgaatggatcattagggtcaggcgacatagacggacttccaaaaaattctcctaacaacataagtggcattagcaatcctccaggcacccctcgagatgacggcgagctaggagggagcttcctccactcctttcagaatgacaattattctccaagcatgacgatgagtgtgtga

SEQ ID NO: 47204 - DNA, 3171 bp, Homo Sapiens
aggcttgccatcaccacagatggcctctgagacactgtttgaaccacatctgcacctgtgagaggccagtttgaggtatgagaacactgtttcaatttggacttgcctttgtcttggttcctgcttttcccagatagcacctacccaacccaggatgaatgagtgcagagaggtcaagtgccaggccatcttttgctgacacccttttctggtatttcaggtataagtccatcatccaaagactgctcaacatctcaccagaatatatttcaatcctcatggggcatgattctttcacaaaacccctttcaggaatggagtcagaagagtagtttccagagacaacctcacagtcttgaaacggctctgcctcccatgtgatctgaccatggagatggcatataagggccctaagtttgagacttttagggtactgcaatgcgttatcacaggcagcctttatcctgataccaagccagctctgcctgtaccattttcctctgcttaggcaggctgacagccctgacaccctggtgctccagtttgagtcactatatgtggatgtgctagtcttagggcaatggacctgagctgtgagctgtagctagtgtcacaatgaatgccagctttgctagtaacaattccctttggcttggtagagaaggagacctctgtggaggtacaatggtggtgcactgtcacctgtcttctctgtgggatccatgggacagttccatgatcctaggagagggtagatgtgagccagcctgaagaaatgtcaagcagagccccaggaatgaagcacaaaatcactacagatccaaaaggatctgcagaatttgtcaggcctgcctagacattgtaggggttagtcttattgaaatgtgtcccactgtaatttccaacttcagccttcctgtgttcccagcagtttctctctcccaggtggggctttctgcagaatgacacagcctcagaagctactgggctgtgtgttactgtgggagtgttgcgagtgttggatgtcagcatgtgtgtgtggctttgtgtgtttgtgtatgtgtctgtgtgtgtgtatgtaaatgaattctgtggatcaggaatcagcaatgactagttaagctgtctgtgaccagccgggttccccatcgtctgcccctgccaaaaaaacaggtactcttctacaaagaagaggagagcaccacacccaagaacagacatctcccagtgttgcattataaagcagccaacccacagacactagcactctggtctgcatagcccctttaatttacctagaattcagttcccagccaagtaggtgcttcatgtcctgagggtgcaatcctccatcatcttgagatttcatgctggtacagagagtgtgacagcaataaggtcagataggggtgagtatacaacctggtgaagggtggatggggtcccgtaccttcaccagcaaaaagggtgaaaatagatgacacagaatgtgcttccaactccatccccacattcccataattgcaaaatcagtcaacaacatggcctggtgtttaggtgggagtactccaacctgcaggaaaaatttggagtgcaaattgtggccaatctggaaaactcctggtttgagggttttaatacctgtagtcaaatggaagtggaatagattgatgctgggtgggttgtggcctccacatttgtgtcctcttttactgacttccattgtcctcattggtgtagggcttcctggatctggctcaacatcttccacactaaactcttccctgttcacagaagaccatcataaaaatgcattgtagaggccctgcaaggaccaggatgaagggagacagtgaggtcaagagcccagccatctttcactgacacccacttctgggttctcaggctggctgacaggtctgacagcccatcacgaaagcctgcatactcttagacacaaggactgagctatgggctccagctagcatcacaatgaaggccaccattgcctagggataagtccctgtgactttgtggataagaactccgtggagccaatccaaggagagacactatcattcatctctaccgggcctattaaatttacctcgaatttgattcccagaggagttggtgcttcacatcatcagggggaacttctccattgtcttgggatttcagtctgggatagagactttgaacagcaataagtttccttggtctggctcaacgtcttctaaactcaacattccccagttcatggaaaatgatcctcatgggattctattgtaaaagctgcatgattcctggagaatgttttattgtcctgaagtcaacccaaaaatcaacactaccagtcatgttgcagagctccttgaattaaccttgaattcagtttccagctgagcagctgcttcacgttgtgagggggcaatcctccatcatcctgggatttcattctgggacacagagtttgagcagcaataaggctgggtccacattgcccctcaacagcattagtggacatgattgtcagacttgcaatttccgcagacaccttctgtgaacatttttcaacatcatctacatgagtgagagacccgttcgacatgtaagaatactgcttgactttggacctgcctttgtcgtggttcctgcctttctcatagatcccctgccaggcccaggatgataggaggcaatgaagtcaagggccgagccccattcattgaaagctgactctggggtctcgggtataattccatcacataaaatcccctcaacaactcaccagactatattccaatctccatggaacctgattcttgcacacagcctctttcaggaatggagtcagaagagcagtcttcagagaccacctcagtttggaaaagcctcctccttcagtggttcccagccatggagtcatcgtgaaggggctccatggtcaataattttacggtactgcacttggttatcacagacagactttttcatgatagcatgccatctctgtctatatcattttcctctgcttaggcaggctgacaactctgacagccaggggcccgaatctacctggcaaatgtgcatgctctactctcagtgcaaaaggcctgtttgggagttctgactagtgtcacaataaatgccgccattgcctagtgacaa

SEQ ID NO: 47205 - DNA, 2607 bp, Homo Sapiens
atgccttcttcggtgacggcgctgggtcaggccaggtcctctggccccgggatggccccgagcgcctgctgctgctcccctgcggccctgcagaggaggctgcccatcctggcgtggctgcccagctactccctgcagtggctgaagatggatttcgtcgccggcctctcagttggcctcactgccattccccaggcgctggcctatgctgaagtggctggactcccgccccagtatggcctctactctgccttcatgggctgcttcgtgtatttcttcctgggcacctcccgggatgtgactctgggccccaccgccattatgtccctcctggtctccttctacaccttccatgagcccgcctacgctgtgctgctggccttcctgtccggctgcatccagctggccatgggggtcctgcgtttggggttcctgctggacttcatttcctaccccgtcattaaaggcttcacctctgctgctgccgtcaccatcggctttggacagatcaagaacctgctgggactacagaacatccccaggccgttcttcctgcaggtgtaccacaccttcctcaggattgcagagaccagggtaggtgacgccgtcctggggctggtctgcatgctgctgctgctggtgctgaagctgatgcgggaccacgtgcctcccgtccaccccgagatgccccctggtgtgcggctcagccgtgggctggtctgggctgccacgacagctcgcaacgccctggtggtctccttcgcagccctggttgcgtactccttcgaggtgactggataccagcctttcatcctaacaggggagacagctgaggggctccctccagtccggatcccgcccttctcagtgaccacagccaacgggacgatctccttcaccgagatggtgcaggacatgggagccgggctggccgtggtgcccctgatgggcctcctggagagcattgcggtggccaaagccttcgcatctcagaataattaccgcatcgatgccaaccaggagctgctggccatcggtctcaccaacatgttgggctccctcgtctcctcctacccggtcacaggcagctttggacggacagccgtgaacgctcagtcgggggtgtgcaccccggcggggggcctggtgacgggagtgctggtgctgctgtctctggactacctgacctcactgttctactacatccccaagtctgccctggctgccgtcatcatcatggccgtggccccgctgttcgacaccaagatcttcaggacgctctggcgtgttaagaggctggacctgctgcccctgtgcgtgaccttcctgctgtgcttctgggaggtgcagtacggcatcctggccggggccctggtgtctctgctcatgctcctgcactctgcagccaggcctgagaccaaggtgtcagaggggccggttctggtcctgcagccggccagcggcctgtccttccctgccatggaggctctgcgggaggagatcctaagccgggccctggaagtgtccccgccacgctgcctggtcctggagtgcacccatgtctgcagcatcgactacactgtggtgctgggactcggcgagctcctccaggacttccagaagcagggcgtcgccctggcctttgtgggcctgcaggtccccgttctccgtgtcctgctgtccgctgacctgaaggggttccagtacttctctaccctggaagaagcagagaagcacctgaggcaggagccagggacccagccctacaacatcagagaagactccattctggaccaaaaggttgccctgctcaaggcataatggggccacccgtgggcatccacagtttgcagggtgttccggaaggttcttgtcactgtgattggatgctggatgccgcctgatagacatgctggcctggctgagaaacccctgagcaggtaacccagggaagagaaggaagccaggcctggaggtccacggcagtgggagtggggctcactggcttcctgtgggatgactggaaaatgacctcgctgctgttccctggcatgaccctctttggaagagtggtttggagagagccttctagaatgacagactgtgcgaggaagcaggggcaggggtttccagcccgggctgtgcgaggcatcctggggctggcagcaccttcccggctcaccagtgccacctgcgggggagggacggggcaggcaggagtctgggaggcgggtccgctcctcttgtctgcggcatctgtgctctccgagagaaaaccaaggtgtgtcaaatgacgtcaagtctctatttaaaaataattttgtgttttctaaatggaaaaagtgatagctttggtgattttgtaaaagtcataaatgcttattgtaaaaaatacaggaaaccacccctcaccctgtccacttgggtgatcattccagacccctccccaaacatgcatatgtacctgtccgtcagtgtgtggatgtatgtttacagttctacataaatgggatcattttatacatggtgctctggaacccacatttttcatgcagtcatttgcagtgaattatttattgtgataataaatagcattagaatacaaga

SEQ ID NO: 47206 - DNA, 8492 bp, Homo Sapiens
tcgttacataatctcggaccggaggagcggcggcacatggcggcggagcggcgctggtggttcgcgtcctgcgccggcagtcgggtccctttacggacggccggggccgcgaccctttcccactgttctcccacgcgatggactcgttggcgggcctttccccgagggaagcggccggcgtgctgagcctgtcctgtgttggcgtgtgttccacatgcgcttgggcctggccacatggaagtatgcgagacttaagagctcaagtgactagtggtctcctgccatttccagaagtgactcttcaagcccttggagaagacgaaataacattagaatctgtgcttcgtggaaagtttgctgcagggaaaaatggacttgcttgcttggcttgtggtccacaacttgaggtagtaaactctataacaggagagcgattgtctgcttacagattcagtggagtcaatgaacagcctcctgtagttttagctgtgaaagaattctcttggcagaagagaactggattattaataggattggaagaaacagaagggagtgttctctgtctttatgaccttggaatatcaaaagtagttaaagcagttgttcttcctggaagggtaacagctattgaacctataattaatcatggaggagccagtgcaagcactcagcatttacatccaagtctgcgatggctttttggagtggcagctgtggtcactgatgttggacagatccttcttgttgacctatgtttggatgacttgtcatgcaatcaaaatgaagttgaagcatcagatcttgaagttctaactggtatcccagctgaagtaccacacattagagaaagtgtaatgagacaagggcgccatctgtgtttccagttagtaagtccaacaggaacagctgtttcaactcttagttacataagcaggacaaatcagcttgctgtaggtttttctgatggctatctagcactttggaacatgaaaagcatgaaaagagaatattacatacaattggaaagtggacaagttcctgtatatgctgtcacttttcaagaacctgagaatgatcctcggaattgctgttacttgtgggctgttcagtctacacaagatagtgaaggggatgttttgagtttgcatctgctgcagctggcctttggtaatagaaagtgtttggcatcaggacaaatcttatatgaggggttagaatactgtgaagaaagatacaccctggacctgacaggtggcatgttccctttgaggggacagacgagtaataccaaattgttgggatgccagagtatagagaaatttcgatctcatggtgacagggaggaaggcgtgaatgaagctctatcgcctgacactagtgtttcagtctttacctggcaggtgaatatatatggacagggaaagccttctgtatatttggggctttttgatataaatcgttggtatcatgcacaaatgccagattcgttaaggtcaggagaatatctacataattgctcttattttgcactgtggtcattggagtctgttgtaagtaggacttctccacatggcatcttggatatattagtacatgagagaagtttaaatagaggagtccctccttcatatccacctcccgagcagttttttaatccaagcacttataattttgatgccacttgtttgttaaactcgggagttgttcatttaacttgtactggctttcagaaggagactttgacttttttaaagaaatcaggtccatcactcaatgaactcattcctgatggttataatcgatgtcttgtagctggccttctttccccaagatttgttgatgttcagccttccagtttaagccaagaagaacagttagaagctatattgtcagcagcaattcagactagttccctgggacttttgactggttatatccgaagatggataacagaagaacaaccaaattctgccactaatttgcgctttgttcttgaatggacgtggaataaagtggttctcacaaaagaggaatttgacagactatgtgtgccattatttgatggttcgtgtcatttcatggatccacaaactatacagtctatccagcaatgctatttgcttcttagcaatcttaatatagtcttgagctgttttgcatcagaagcccgagagatcactgagagaggactgatagacttaagcaataagtttgtggtttcccacctcatctgtcagtatgcacaagtggttctttggttctctcattctgggcttttaccagaaggcatagatgattctgtgcagttgtcaaggttatgctacaactaccctgtaattcagaactactacaccagtcgtcgacagaagtttgagcgtttatcaagagggaagtggaatcccgattgcttgatgattgatggactggtttctcagttaggagagcgaattgagaagttgtggaaacgagatgaaggaggcacaggaaaatatcctcctgctagtctgcatgtagtacttgatatgtacctattagacggcgttactgaagcagccaaacactctattaccatttatttgctacttgatattatgtattcctttcccaacaaaacagacactcccattgaatctttcccaactgtatttgccatttcttggggccaagttaaacttattcaggggttttggttgatagatcataatgactatgagagtggtttggatcttttgtttcatccagctactgcaaaacctttgtcatggcaacattcaaagattattcaggcattcatgagtcagggcgagcacagacaagccctcagatatattcagacaatgaagccaacagtgtccagtggtaacgatgttatccttcacctcactgttttgctttttaataggtgtatggttgaagcctggaattttttgcggcaacattgcaataggttgaatatagaggagttactgaagcacatgtatgaagtctgtcaggaaatgggcttgatggaagatttactgaagttaccatttacagacactgagcaggaatgtttagtgaaatttttgcagtccagtgccagcgttcagaatcatgaattccttttagtgcaccatttgcagcgtgccaattatgtgcctgccttgaagctgaaccaaactctgaagattaatgttatgaatgatcgtgatcctcgtttgcgggagagatcactggctcgaaattctatattagaccagtatggaaaaatccttcctagagtccatcgaaaattagccattgaacgagctaagccttatcatctgtcaacatcatcagtttttcgattagtttctagacccaaaccattatcagcagttccaaagcaagttgtaacaggaactgtgttgacaagatctgttttcatcaacaatgtgttatctaaaattggagaagtttgggcaagcaaagaacctataaatagcaccacacctttcaatagttctaaaatagaagaaccatctcctatagtgtattcgctcccagctccagagctgcctgaggcattttttggaacaccaatttcaaaagcatcacaaaaaatttctagactgctagatttggttgttcagcctgtcccccggccttctcagtgttcggagtttattcagcaaagctccatgaaatctcctttgtacctagtatcccgttcactgccctcaagttcgcaattaaaaggatcgcctcaggccatctccagggcttcagaattacatttgcttgaaactcctcttgtagttaagaaagctaaaagtttggccatgtcagttactacttctggattttctgagttcactcctcagtccatcctgaggtctactcttcgatcaacacctttagcatctccctctccatcacctggaaggtctcctcaacgacttaaagaaactagaatttcatttgtggaagaagatgtccacccaaaatggattcctggggctgcagatgatagcaaattagaagtatttactacacctaaaaaatgtgcagttccagtggaaactgaatggctgaagagcaaagataggaccacatcttttttcctgaacagccctgaaaaggagcatcaagaaatggatgaggggtcacaaagtttagagaaactggatgtgagcaaaggaaacagcagtgtttcaatcacatccgatgagactaccttagagtatcaggatgcaccgtcaccggaagaccttgaagagactgttttcacggcctctaagcccaaaagctcttccactgcactaactactaatgtaactgaacaaactgaaaaggatggagataaagatgtatttgcatcagaagtaactccttcagacctacagaaacaaatggccaggcaatttagaagatgcagaaacaaaggatctcttagttgcagcagaggcattttcagaattgaatcacttaagcccgttcaaggaactgaagcttctctttgtgcaccatcagtctatgaagggaaaatcttcacccagaagtccaaggtaccagtgttggacgaaggattaacatctgttgaaacctacacccctgcaattagagcaaatgacaataaatctatggctgatgtccttggtgatggtggaaactcctcgctcactatctctgaaggtcctattgtctctgagcgcaggcttaaccaggaagtagcgctgaacttaaaagaagatcatgaagtagaagttggtgtactaaaagaaagtgttgacttaccagaagaaaagcttccaatttctgacagccctcctgatactcaagaaattcatgtgattgaacaagaaaagcttgaagctcaagattcaggagaagaggctaggaatctttcatttaatgagttatatccctctggaacacttaagcttcagtacaattttgatactattgaccaacagttttgtgacttagctgataacaaagacactgctgaatgtgacattgctgaagtagatggggaactttttgtggctcaaagcaactttaccttgatattggaaggtgaagaaggagaagttgagccaggtgattttgcatcatctgatgtgttacctaaagcagctaacacagcaactgaagaaaaacttgtatgcagtggggaaaatgataatcatggacaaattgcaaatttgccatctgccgtaactagtgaccaaaagtcccaaaaagtagacactttaccatatgtgcctgaacctattaaagtagcaattgcagaaaatttactagatgtaattaaagacacaagaagtaaagaaattacttcagatacaatggaacagtccattcatgaaacaatacctttagtgagccaaaacataatgtgtcccactaaattggtcaaatctgcatttaagactgctcaggaaacaagcacaatgactatgaatgtcagccaggttgatgacgtggtttcctccaaaactcgtacgagaggtcaacgtatccaaaacgtgaatgtcaaatcagcacaacaggaagcatcagcagatgttgctactcctaagatgccagggcagtcagtcaggaagaaaactaggaaggcaaaagaaatttctgaagcttctgaaaacatctattctgatgtcagaggactatctcagaaccagcaaatacctcaaaattctgttacgcctaggagaggaaggagaaagaaagaagttaatcaggacatactagaaaacaccagttctgtggaacaagaattacagatcactacaggtagggaatcaaaaagattaaaatcatctcagctgttggaaccagcagttgaagaaactactaaaaaagaagttaaggtttcatctgttacaaaaaggactcctagaagaattaaaagatctgtagaaaatcaggaaagtgttgaaattataaatgatctaaaagttagtacggtaacaagtcctagcagaatgatcagaaaattgagaagtactaatttagatgcttctgaaaatacaggaaataagcaagatgataaatccagtgacaagcagctgcgtattaaacatgttagaagggtcagagggagagaagttagtccatcagatgtgagagaagactccaaccttgagtcatctcagttgactgttcaagcagaatttgatatgtctgccatacctagaaaacgtggtagaccaagaaaaatcaatccatctgaagatgtaggatctaaggctgttaaggaagagagaagccccaagaagaaagaagctcccagcattagaaggagatctacaagaaataccccagctaaaagtgaaaatgttgatgttggaaaaccagctttaggaaaatccattttagtgccaaacgaggaactttcgatggtgatgagctctaagaaaaaacttacaaaaaagactgaaagtcaaagccaaaaacgttcattgcactcagtatcagaagaacgcacagatgaaatgacacataaagaaacaaatgagcaggaagaaagattgctcgccacagcttccttcactaaatcatcccgcagcagcaggactcggtctagcaaggccatcttgttgccggacctttctgaaccaaacaatgagcctttattttctccagcgtcagaagttccaaggaaagcaaaagctaaaaaaatagaggttcctgcacagctgaaagaattagtttcggatttatcttctcagtttgtcatctcacctcctgctttaaggagcagacaaaaaaacacatccaataagaacaagcttgaagatgaactgaaagatgatgcacaatcagtagaaactctgggaaagccaaaagcgaaacgaatcaggacgtcaaaaacaaaacaagcaagcaaaaacacagaaaaagaaagtgcttggtcacctcctcccatagaaattcggctgatttcccccttggctagcccagctgacggagtcaagagcaaaccaagaaaaactacagaagtgacaggaacaggtcttggaaggaacagaaagaaactgtcttcctatccaaagcaaattttacgcagaaaaatgctgtaatttcttgggaagattttaatgtacacctatttgtaaagtcatcagaatagtgtggattattaaatatctagtttggaagaaaataatttatataaattattgtaaatttttatgtaaacagaaggtcttcaataagtaaagtaactccatatggagtgattgtttcagtccaggcaatttttctattttatattaagacttcatacatttatatatgtaaatatggcttattaatggaatgttaaataaaatgtatacttcacagtcgtttgtgtcttggatttttgaaagggaggggatatctgtttaaatagttttatatgctcattggtctcattttctctataattaaaatactagaccagtcttaaaatggggatgattgaagtattgatatttctttttacagttactattttataatttatgcactttgattctgtgattcagatttctaatcagaaaatgtatttttttgtttttggctgttactatgttaaaattgaattatgggcatgtcattttgccatctttgtagtttcacaaattttgtgtaatctacctcaaatgaataatccaagtattggttaactataatgttggcatctcttattcggcaagcttaaaggctctttaaagtcttaattagtcaaagactaatccaggttagattgaccggttcactgctcacttgcaaccttatcaaagggtttgacaaagggaaatgtaaaataaatctgtttatggatattgagtgcatcttgtatgtgcctaatattgataggatgagatgtctgaacaaatttttataatattgctgtgaaggagcttgctattgaaccacagaaatcccttaatattcaggttttaaaactggcaaattctcacaggacctcaggcacagattattgaggttgggagagagtgagtagatgtagaaaaggagaaaaacaacacacgccctgttctctacagtacaactgtgtgcaattaagcaatggtacttgatgtaggctctaacactcatcaataaataagtgttgtaaaataatttataacaggtaatcgatagtgtgtaatgaatggactattaataattgattatctagaaacgaactgctttcgtgggcttttaatattttaatgtgaagcatatgcagtgtgctttctgcatttatttttctaccaaataatacagataatgagaaattggtgaaaatgcctacgcaaagtgttgacagtgtgaaagcagtgcgagtgcggccttttagtcaggttagtgatggatgttacgctgccttgttgaaaatttcactgactttgattttattacttttttaatgatagttatcaaacttgtatttaagctgcttgtcatttatggaatattgaacttatttaaatgaacttgttaaatgaataaagagctaaacataattcagtaaa

SEQ ID NO: 47207 - DNA, 2347 bp, Homo Sapiens
gcgcgctggcccggcacggcggtggtcttgcgggaggcgtgggctgggattgcggtgcctgtgcttcccggtgccagggtgtcatggaagggctgctgacaagatgcagagcattgcccgccctggccacctgcagccgccagctctctgggtatgttccttgcaggtttcaccactgtgccccaagaagagggcggcgcctgctgctgtctcgtgtgttccagccacagaaccttcgggaagaccgggtgctctccctgcaggacaaatctgatgacctgacctgtaagagccagcggctgatgctgcaggtgggcctgatctacccagcaagccccggctgttaccacctcctgccatataccgtccgtgccatggagaagctcgtgcgagtgatagaccaggagatgcaggccatcgggggccagaaagtcaacatgcccagcctcagcccggcagagctctggcaagccaccaaccggtgggacttgatgggcaaagagctgctaagacttagagacaggcatggcaaggaatactgcttaggaccaactcacgaggaagccattacggccttaattgcctcccagaagaaactgtcctacaagcagcttcccttcctgctgtaccaagtgacaaggaagtttcgggatgagcccaggccccgctttggtcttctccgtggccgagagttttacatgaaggatatgtacacctttgactcctccccagaggctgcccagcagacctacagcctggtgtgtgatgcctactgcagcctgttcaacaagctagggctgccatttgtcaaggtccaggccgatgtgggcaccatcgggggcacagtgtctcatgagttccagctcccagtggatattggagaggaccggcttgccatctgtccccgctgcagcttctcagccaacatggagacactagacttgtcacaaatgaactgccctgcttgccagggcccattgactaaaaccaaaggcattgaggtggggcacacattttacctgggtaccaagtactcatccattttcaatgcccagtttaccaatgtctgtggcaaaccaaccctggctgaaatggggtgctatggcttgggtgtgacacggatcttggctgctgccattgaagtcctctctacagaagactgtgtccgctggcccagcctactggccccttaccaagcctgcctcatcccccctaagaagggcagtaaggagcaggcggcctccgagctcatagggcagctgtacgaccacatcacagaggcagtgcctcagcttcacggggaggtgctcctggacgacaggacccatctgaccatcggaaacagactgaaagatgccaacaagtttggctacccctttgtgataatcgctggcaagagggccctggaggaccctgcacattttgaggtttggtgtcagaacactggtgaggtggccttcctcaccaaagatggagtcatggatttactgaccccagtgcagactgtctaaatgcccccagcccacccctgcccccatttgcagccttggtgttcgttctaacactgcattttcctacacccctttcctggactgctctctccagaaacagcacagctcatggagggtgagatcatgttagggaaatcaatttttatctagtcatttgttcagattatttgtatttaaagtcattaacttgatccctttctccagactggccatgccgccatatacctttccttttgtattccattgtggaagcttctaggaggctgagaagcaggagatccaagctccagtcctgggtgttaccctgaggggggaagtcacttcccttctctcagctgagtttttcacgtgtaagatgagaatggctgatggctgagagcccaccaaccttccccaccccgtatcagtttgaccacgggccttttgctacattctatccagagagcaggcctgccagcccctctccactgagaagttgggctgagagtatggggaaaagaatcaagagacctgactgccgccaactcactagtgacttagatacatcccctccccctgctggggcctcagtttccccatctgtaacttgagaaaatagaactagatctgtaaagtctggaactagatctgtaacgtccttataggtgtcactagggggttccatgagaggtgtgtgacaggcagtctgattcctctcattctccatagtctgtttcctggaaagtcgatgtaattaactgatggcccaaaaactacctcaagagacctggccctgttaagacggcttaaccactgagatcccgttctattgatttaataaagtcaaactattggaa

SEQ ID NO: 47208 - DNA, 729 bp, Homo Sapiens
atggctattgctactggtagtgcagtgtttggagaagaggggttaaccctaaatcttgaagatgctcagcctcatgactcaggaaaatttggagaggtcattgtggccaaagatgatgctatgctattaaaaggaaaagatgacaaagctttgaaaaatgtattcaagaaatcattaagtttagatatcataactagtggatatgaaaagaaaaaactgaatgaatatctggcaaaactttcagatggagtagccgtgttgatggttggtgagacaagtgatgttcaggtgaaagacaagaaagacagatttaccgatgtccttaatgctacaagagctgctattgaagatggcattgttctgcttcagtgcattccagccttggactcattaactccaactaatgacgatttaagtggtatagaaattattaaaagaacactcaaaattccttcaatgaccaatgctaagaatgcaagtgttgaaggatctttgatagctgaaaaaattatgcaagattcctctgaagttggttatgatgctatgattggagattctgtgaatatggtagaaaaaggaatcattgactcaacaaacattgtgagaactgctttactgcatgctgctgaggtggcctctctgttacctaccgcagaagttgtagtcatagaaattcctaaaaaagagaaccctggaatgagtgcaataggtggaatgggagatggtttg

SEQ ID NO: 47209 - DNA, 609 bp, Homo Sapiens
atgccgcgcgtctacataggacgcctaagctacaacgtccaggagaaggccatccagcgctttttcagtggctatggccgcctcctcgaagtagacctcaaaaatggctacggcttcgtggagttcgaggactcccgcgacaccgacgacgccctttacgagctgaacagcgaggagctctgcggcgagcgcgtgatcgtagagcacgcccggggcccgcataagccacgcacaagccataggcgatcttactctggaagcagatccaggtctcgatctagaagatggtcacgaagtaggagtcgcaggagcagccgcagtagatctggaagtgtctcaaaaagtcgctcccgttccaggtcgcggagcaaaggtcgatcacgttctcgatcaaaaggcaggaaatctagatcaaagagcaaatctaagcccaagtctgatcggggctcccattcacattctcgaagcagatctaaggatgagtatgagaaatatcgaagcaggtctcggtccggatcccccaaagaaaatggaaagggtcatacaaagtcaaaatccagatcaaggagccagtcccgttccaattcgccgctacctggtccaccctga

SEQ ID NO: 47210 - DNA, 1110 bp, Homo Sapiens
atgctctccagtttggggtgtctacttctctgtggaagtattacactagccctgggaaatgcacagaaattgccaaaaggcaagccaaacctcaaagtccacatcaataccacaagtgactccatcctcttgaagttcttgcgtccaagtccaaatgtaaagcttgaaggtcttctcctgggatatggcagcaatgtatcaccaaaccagtacttccctcttcccgctgaagggaaattcacagaagctatagttgatgcagagccgaaatatctgatagttgtgcgacctgctccacctccaagtcaaaagaagtcatgttcaggtaaaactcgttctcgcaaacctctgcagctggtggttggcactctgacaccgagctcggtcttcctgtcctggggtttcctcatcaacccacaccatgactggacattgccaagtcactgtcccaatgacagattttatacaattcgctatcgagaaaaggataaagaaaagaagtggatttttcaaatctgtccagccactgaaacaattgtggaaaacctaaagcccaacacagtttatgaatttggagtgaaagacaatgtggaaggtggaatttggagtaagattttcaatcacaagactgttgttggaagtaaaaaagtaaatgggaaaatccaaagtacctatgaccaagaccacacagtgccagcatatgtcccaaggaaactaatcccaataacaatcatcaagcaagtgattcagaatgttactcacaaggattcagctaaatccccagaaaaagctccactgggaggagtgatactagtccaccttattattccaggtcttaatgaaactactgtaaaacttcctgcatccctaatgtttgagatttcagatgcactcaagacacaattagctaagaatgaaaccttggcattacctgccgaatctaaaacaccagaggttgaaaaaatctcagcacgacccacaacagtgactcctgaaacagttccaagaagcactaaacccactacgtctagtgcattagatgtttcagaaacaacactgggtaattctaagaactttttttttaaaaaaacaaaagtaacaacgaaataa

SEQ ID NO: 47211 - DNA, 1086 bp, Homo Sapiens
atggcccccacagagccctggagccccagcccggggtcagcgccctgggactactcggggttggacggcctggaggagctggagctgtgtccggccggggacctgccctacggctacgtctacatccccgcgctctacctggcggccttcgccgtgggcctgctgggcaacgcctttgtggtgtggctgctggccgggcggcggggcccgcggcggctggtggataccttcgtgctgcacctggcggcagctgacctgggcttcgtgctcacgctgccgctgtgggccgcggcggcggcgctaggcggccgctggccgttcggcgatggcctctgcaagctcagcagcttcgcgctggcgggcacgcgctgcgcgggcgcgctgctgctggcgggcatgagcgtggaccgctacctggccgtggtgaagctgctcgaggcgaggccactgcgcaccccgcgctgcgcgctggcctcgtgctgcggcgtctgggccgtggcgctgctggccggcctgccctccctggtctaccgggggttgcagcccctgcctgggggccaggacagccagtgcggcgaggagccctcccacgccttccagggcctcagcttgctgctgctgctgctgaccttcgtgctgcccctggtcgtcaccctcttctgctactgccgcatctcgcgccgcctgcgacggccgccgcacgtgggtcgggcccggaggaactcgctgcgcatcatcttcgccatcgagagcacgtttgtgggctcctggctgcccttcagcgccctgcgggccgtcttccacctggcgcgtctgggggcgctgccgctgccgtgccccctgctgctggcgctgcgctggggcctcaccattgccacctgcctggccttcgtcaacagctgcgccaacccgctcatctacctcctgctggaccgctcattccgagcccgggcgctggacggggcctgcgggcgcaccggccgcctggcgcgaaggatcagctcagcctcctcgctctccagggacgacagttccgtgttccgttgccgggcccaggccgcgaacactgcctcggcctcctggtag

SEQ ID NO: 47212 - DNA, 609 bp, Homo Sapiens
gttaagacgcttattctcgaaggtaaaatggcaaaaaaattcggtaaacgcgttcagtttgatgttgccgacctgcgcgagatgctcagggccatgtgttcacaggttcccggattcaaaaaatatatgtctgaagctcatatgaaggggatccgtttcgccttttttaacggtggcaacaatatcgggctggaagagtttgatatgacccgcggtggaagcgtgtaccggatcgtgcccgtttatgagggggccaaaagttcgggcgtcctgcagatagttgtcggggctgttgcgctggtcgctgcattctttaccgctggtgcgagcatggcagcctggggcgcggcgatgagtgcaacagctatcagcgccacgtcaattctgacaggggtcggagtgtcgatgatgctggggggcgttgtccagatgctcacgccccagccatccttcggcgcgggtaaatcttccagcacggacaacacgcctaactatgccttcggggcgccggtcaataccgtcgctatggggcatcctgtccccctggcctacggtctgatcgaggctgggggagcgatagtcagcgccggtatgtactcgagcgatcag

SEQ ID NO: 47213 - DNA, 1299 bp, Homo Sapiens
atggattctaatggaatcaggcagttttgtgtccatgtgaacaactcaaacttaaactatttccagaagcttcaaaaggtcaatgcaaccaacttccaggccctggctgcagagtttggaggcgaatcattcacttcaacattccaaactcaatcaccaccatctttttacagggctggggaccccattcttacttacttccccaagtggtctgtaataagcttgctgagacaacctgcaggagttggagctgggggactctgtgctgaaagcaatcctgcaggtttcctagagagtaaaagtacaacttgcactcgttttttcaagaacctggctagtagctgtaccttggattcagccctcaatgctgcctcttactataacttcacagtcttaaaggttccaagaagcatgactgatccacagaatatggaggtcacctatgagatagagaccaatgggacttttggaatccagaaagtttctgtcagtttgggacaaaccaacctgactgttgagccaggcgcttccttacagcaacacttcatccttcgcttcagggcttttcaacagagcacagctgcttctctcaccagtcctagaagtgggaatcctggctatatagttgggaagccactcttggctctgactgatgatataagttactcagtatcctttttagagctgggtggcctccagggtaatggaagttgctctgttaaaagacatgaagtgcagtttggagtgaatgcaatatctggatgcaagctcaggttgaagaaggcagactgcagccacttgcagcaggagatttatcagactcttcatggaaggcccagaccagagtatgttgccatctttggtaatgctgacccagcccagaaaggagggtggaccaggatcctcaacaggcactgcagcatttcagctataaactgtacttcctgctgtctcataccagtttccctggagatccaggtattgtgggcatatgtaggtctcctgtccaacccgcaagctcatgtatcaggagttcgattcctataccagtgccagtctatacaggattctcagcaagttacagaagtatctttgacaactcttgtgaactttgtggacattacccagaagccacagcctccaaggggccaacccaaaatggactggaaatggccattcgacttctttcccttcaaagtggcattcagcagaggagtattctctcaaaaatgctcagtctctcccatccttatcctgtgcctcttactacttggagttctcaacctagagactatgtga

SEQ ID NO: 47214 - DNA, 714 bp, Homo Sapiens
atggaaaaagtcattaaagatgaaaatgttactctgtatgtgtgggcaaacctcaagaagaatccaaggcacagaagtgttagattctctgaaacacaaattggatttgagattccaaggatattagcaacaagtgacattgctgtacgactcctgcatacccactatgatcatgtttctgcactgcaccctgtttcaacaccatcaaaagaatacacttctgcagtaactgagcttgtcaaagatgatgttaagaatgtagaaaaagcaatcagcaaggaggtcgaagaagagtccaaacaacaagaaagagggtctcacttaattcaggaggaagaaataaaagttgaggaggaacaaggtgatattgaagtgaaaatgagttctgctgaggaagaatctgaagccataaaatgtgaacgagagatgaaagtattaagtgaaactgtttcagcagcacagttgttgctggtagagaattcttctgaaaagccagatttctttgaagacaatgtggtggatttatgccagttcacaactctgggtggagtataccacttggatattttggagcttcctccacagtgtaaaccagtgaagggatggatgattgtggaaatactcaaagaaggattacagaaatacacatatcctccggaaactacagaagagtttgagacagaaaatgctttcccacctatagaggtcacactt

SEQ ID NO: 47215 - DNA, 1956 bp, Homo Sapiens
attgttatcaactctttgatatctgatgatcaatgctccaaagaattggattaatatttttacacaatattgttgtagtcagtaactgtttctatttccaggcatttttagatgaattcactaactggtcaagaataaatcccaacaaggccaggattcccatggcaggagatacccaaggtgtggtcgggactgtctctaagccttgtttcacagcatatgaaatgaaaatcggtgcaattacttttcaggttgctactggagatatagccactgaacaggtagatgttattgtaaactcaacagcaaggacatttaatcggaaatcaggtgtgtcaagagctattttagaaggtgctggacaagctgtggaaagtgaatgtgctgtactagctgcacagcctcacagagattttataattacaccaggtggatgcttaaagtgcaaaataataattcatgttcctgggggaaaagatgtcaggaaaacggtcaccagtgttctagaagagtgtgaacagaggaagtacacatcggtttcccttccagccattggaacaggaaatgccggaaaaaaccctatcacagttgctgataacataatcgatgctattgtagacttctcatcacaacattccaccccatcattaaaaacagttaaagttgtcatttttcaacctgagctgctaaatatattctacgacagcatgaaaaaaagagacctctctgcatcactgaactttcagtccacattctccatgactacatgtaatcttcctgaacactggactgacatgaatcatcagctgttttgcatggtccagctagagccaggacaatcagaatataataccataaaggacaagttcacccgaacttgttcttcctacgcaatagagaagattgagaggatacagaatgcatttctctggcagagctaccaggtaaagaaaaggcaaatggatatcaagaatgaccataagaataatgagagactcctcttccatgggacagatgcagactcagtgccatatgtcaatcagcacggctttaatagaagttgtgctgggaaaaatgctgtatcctatggaaaaggaacctattttgctgtggatgccagttattctgccaaggacacctactccaagccagacagcaatgggagaaagcacatgtacgttgtgcgagtacttactggagtcttcacaaagggacgtgcaggattagtcacccctccacccaagaatcctcacaatcccacagatctctttgactcagtgacaaacaatacacgatctccaaagctatttgtggtattctttgataatcaggcttacccagaatatctcataactttcacggcttaaaaatatttttatcatcaaagagatgatttaagtcatctgtaagaacaacatgcaatctttgtctttgcttctggcctgtgtaagcagatgaaagtttcccttttaggtgccaaaatgctgaaaattacctttttaaagtgctctattgctgcgatttgtagcatacctttttttctcagcaaattgatgggtggaagctgagaaatgtatggtaaatgtcacagagctacaaccattcacagacaccaaatctctaggagaataaaaagcacattattctttttctatcagaaaaaaacaagatgcatcaccttaaaaccaagatgacattgttcttcttggaacatgttaagacatcgaatggtggcgggttaaactgtactgcttaagtggagcggctaccgttatgcatctatcacagttggggattttgccttattaaggaaaacttgtcaatagttcagctgaaatgactgaatcacagaatattaactctgttatggaacaaatcataacagattttacctgtttacatttcaggtaaaaatgtatcgcattgttatctaatattaaaaaattacccccaatt

SEQ ID NO: 47216 - DNA, 1980 bp, Homo Sapiens
atgtcattcccaagaggaagtcagacccagaaaataaagcaccccattggtacacgaaagggaccattggaggtgccacccccaacagagaaggactggcctaaagacgatgaacaggatcatgtcctcgtggatccagatgaggagctggattccttgcctcagccttatcgaatgatcaacaagctggtgaaccttctgtttgaccagtcttgggaaattattgaagagagaaacgcactgagggaagctgagagcagccagatccagcccaccgtctaccctccacttggagaaatccagctcaacaaaatgccaaattgtatggctgtttcccaagactatgtgtttattggaggagccaaaggattctcaatttataatctgtacagtgctaaacaaatatatgcgtgggagaagcttaaggttgatgtcacttccatctgggccacagatttagggaatgaaatactcattgctcctgtggatgaaatgggtatcattagactcttttatttttataaggaaggactttacctagtcaaagccatcaatgaagtggatgataccagcaagcaaactacctgtataaagatggagatctctcaaggaggggactttgcagccttcctcctacaaggcagagccggagatatttggctggatgtgtataaattgcccaaggagacttggctcaagaaactagagcacccccaactcacttcaaatccaaagaaaaaagtcagacagccgcaactgaactcccttggtcccatttctgcagatcctttagaaatggatgcaaatgttagttttaaaggagacattaaattgagtcttccagtttacataatgaagatcaaaccacctaagcctgttacaggcaccacattcaaaagccccctggaagtctttgcaaagatcaaggactgctacggactgggctccgggcagaatcatttcatcaaggacagtcagtgggagcagcaagctgagatcttcaacgcttcctacaagaagtacctagatagggagtgggaggaagagccactcagtacggccaccttctatttccttcttcctagctgcctatttgcaatgccaccggaagtcaagggcccctcaggaatggcctgtgtccttggtatacactggaccagaagtcacaatttcttcctgtattcactaaaccgaactctaaaggataaagctgaccccgagggtgtgtggccctgtgctgcgcccattgcagtctctcagctcagctgctcctcctcctacctggtgctggcctgcgaggatggtgtgctcacgctgtgggacctggccaaaggacagaatatgtatcctgaaggtcaagtgaaatcccaaatgaaatgtgtggtgctgtgcacagacgcctccctccatctggtggaggctagcgggacccaaggacccaccatcagtgtgcttgttgagaggcctgtaaagcacctggataaaaccatctgtgccgtggccccagtcccagccttacctggcatggtgctcatcttttccaagaatggctctgtgtgccttatggatgtggccaagcgtgaaatcatctgtgcctttgcccctccgggagcctttcctctggaggtcccctggaagccagtgtttgctgtgtctccagaccatccatgtttcctgctccgaggagactattcacatgaaactgcgtccaccgacgatgctggaatccaatattctgttttctattttaattttgaggcctgcccactcctggaaaatatctcaaaaaattgtaccattcctcaaagggacttggataacatggccttcccccaagcactgccactggagaagagatgtgagcgtttcctccagaagagctatcggaagctggagaagaacccagagaaggaggaggagcactgggcccggcttcagaggtactccttgtcgctccagagagagaacttcaagaagtga

SEQ ID NO: 47217 - DNA, 750 bp, Homo Sapiens
atgaagctgaacagctccttcctagccattggctgccagaaactcattaaagtggaagatgaacgcaaacttcgtactttttatgagaagcatatggccacagaaattgctgcttatgctctgggtgaagaatggaagggttatgtggtccgaatcagtggtgggaacaacaaacaaggtttcttgtttgttggtgggaacaacaagcagggtatcttgacccatggccatgcccgcctgcctgttacattcatatatagaccaaggaaagctggagaaagaaagagaaaattagttcgtggttgcactgtggatgccaatctgagcattctcaactttgttattgtgaaaaaagagaaggctatacctggactgactgatactagggtgcctcgtcacctggggcctaaaagagctagcagaatccgcaaacttgtctctaaagaagatgatgtctgccagtatgttgtaagaaagcccttaaacaaagaaggtaagaaacctaggaccaaagcacccaagattcagcatcttgttactccacgtgtcctgcagcacaaacagcagcctattgctctgaagaagcagtgtactaagaaaaacagggaagaggctgcagaatatgctaaactttcggccaagagaatgaaggaggctaaagagaagcgcaaggaacaagttgtgaagagacgcagactttcctctctgcgagcttctgcttctaagtctgaatctagtcaggaaaaagat

SEQ ID NO: 47218 - DNA, 648 bp, Homo Sapiens
atgaggatgctgaggctgtcctgtcctcgtccgtctcatcaaaggcaacgtgaccacaggcaagtgctcagctccctgctgtctggggccctggctggtgcccttgccaaaacagcggtagctcccctggaccgaaccaaaatcatcttccaagtgtcttcaaaaagattttctgccaaggaggccttccgggtcctctactacacctacctcaacgagggatttctcagcttgtggcgcgggaactcggccaccatggtgcgcgtggtgccctacgccgccatccagttcagcgcacacgaggagtacaagcgcatcctgggcagctactatggcttccgtggagaagccctgcccccttggcctcgcctcttcgccggcgcactggctggaacgacagccgcttcactgacctaccccctggacctggtcagagcgcggatggccgtaaccccgaaggaaatgtacagcaacatctttcatgtcttcatccgcatctcgagagaagaggggctgaagactctctaccatggatttatgcccaccgtgctgggggtcattccctacgctggcctgagcttcttcacctatgagacgctcaagagcttgcacagaggtaaggagagctgggagcatgaggaggggacg

SEQ ID NO: 47219 - DNA, 327 bp, Homo Sapiens
ggatccagtggggatattgtgatgactcagtctccactctccctgcccgtcacccctggagagccggcctccatctcctgcaggtctagtcagagcctcctgcatagtaatggatacaactatttggattggtacctgcagaagccagggcagtctccacagctcctgatctatttgggttctaatcgggcctccggggtccctgacaggttcagtggcagtggatcaggcacagattttacactgaaaatcagcagagtggaggctgaggatgttggggtttattactgcatgcaagctctacaaactcctcccacagtggtacaa

SEQ ID NO: 47220 - DNA, 405 bp, Homo Sapiens
atgatatttctcacacatactcccacacttacagtacatgtaaacactaatgaaaatatgcaactaaaatctaacccagcaattgcactcctggacatttatgccagagaaaagaaaacacagtcacacaaaaacatgaatgctcctagtggctgtatttgtaacagcaaaaaaagtaatcagcatcaatgtccttcaacaggtgaatggttaaataaactgtggcgcatacataccatgaaatactactctgtaatcaaaaggaggaaacaattgatacacacaagttggatgtatgtccagggaattttgctgggtgaaaaagaaagcccattccaaaagattacaggctatagattccatttacataaaatgacaaacttacagagatacacagcagattag

SEQ ID NO: 47221 - DNA, 2136 bp, Homo Sapiens
gattctctgcacaaagcccccaagaagaagagcatcaagtcatccataggccgtctctttggcaagaaagagaagggacgaatgggacccccaggccgggacagctcttctctggctggaacaccctcagatgagacactggccactgaccctctggggctagccaagctgacaggcccaggagacaaggaccgaaggaacaagaggaagcatgaactcctggaggaggcctgccgccagggcctaccttttgctgcctgggacgggcccaccgtggtgtcctggctggagctgtgggtgggcatgcctgcctggtatgtggccgcctgccgggccaatgtcaagagcggtgccatcatggccaacctgtcagacacggagatccagcgcgagatcggcatcagcaacccgctgcaccgactcaagctacgcctcgccatccaggagatggtctcgctcacctcgccctcagcccccgcctcctcccgcacttccacaggaaacgtgtggatgacacacgaggagatggagtcccttacggccacgaccaagcccgagaccaaggagatcagctgggagcagatcctggcatatggcgacatgaaccacgagtgggtggggaacgactggctgcccagcctggggctgccccaataccgcagctacttcatggagtcgctggtggacgctcgaatgttagatcaccttaacaagaaggagctccggggccaactcaagatggtggacagctttcacagggtgagtctacattatgggattatgtgcctgaaacggctcaactatgaccggaaggacctggagcggaggcgggaagaaagtcagacccagatccgagacgtgatggtgtggtccaatgagcgggtcatgggttgggtgtccgggctgggcctgaaggaatttgccacgaacctcacggagagcggggtacacggggcactgctcgccctggacgagaccttcgactactccgacctggccttgctcctgcagatccccacgcagaatgcacaggcccggcagcttctggagaaggaattcagcaaccttatctccttaggcacagacaggcggctggacgaggacagcgccaagtctttcagccgctccccatcctggcggaagatgttccgggagaaggacctccgaggcgtaactcccgactcagctgagatgttgccccccaactttcgttcggctgcagcgggagccctgggctctccggggctccctctccgcaagctgcagccagaaggccagacttctgggagttcccgggcagacggcgtttcggtccggacctattcctgctagtgcaggcctccaggtgacctcactcggacggaagaatcttcccgaggctgggctgttccctctcctgcccggactgtggcctcgccggggagagcgggcgggggagctcgcgccgaggactggaccatctgtacagaccagcgggagtgcgcgcgcccgcctcgcacagggccggggcctggaccaaaccacatgaactggactgagagggggaagaagcggggaggaagaaatcccgccccaaacgtccgctttccttttctctactttgtaatttattgatcagtttctgttgggagacgggtgtcctttacccgcgggaagggggcggggcttccctcccgggccgcatgcggggagaggctgctccctcccctttttcctgcccagtcgcggggcccaagtcttccttcttcgtccgaaaggaggggaggggggactcgctgctacaagcctcgccccctgtgccactcagctccgccccgccgcgtccggtcgccggtcccccgggtcatctgcgggcgggttcccctctccctcccccgtgtctcgtgtccccggggcctcaccgccccccgtgctgtggccgtgtccgtgccccgggggtagggggcgcagaatggcgcttccccttctcctctggctccggggtttgcatgggagaatcctctttccacgatgccgctgggcgacgtggcgtgggggcagggggacggtgggggagccctcgcccccgactctcggtcggcctccccgccccaggcgtcactcagtgatcacgggtaaagagaactgtttcaaaaa

SEQ ID NO: 47222 - DNA, 2087 bp, Homo Sapiens
ctttgcgtgagtcactgccgggctcggcgtgagtcgctgcggggctgacggggtggcagtgcggcgggttacggcctggtcagaccataatgacttcagcaaataaagcaatcgaattacaactacaagtgaaacaaaatgcagaagaattacaagactttatgcgggatttagaaaactgggaaaaagacattaaacaaaaggatatggaactaagaagacagaatggtgttcctgaagagaatttacctcctattcgaaatgggaattttaggaaaaagaagaaaggcaaagctaaagagtcttccaaaaaaaccagagaggaaaacacaaaaaacaggataaaatcttatgattatgaggcatgggcaaaacttgatgtggaccgtatccttgatgagcttgacaaagacgatagtacccatgagtctctgtctcaagaatcagagtcggaagaagatgggattcatgtagattcacaaaaggctcttgttttaaaagaaaagggcaataaatacttcaaacaaggaaaatatgatgaagcaattgactgctacacaaaaggcatggatgccgatccatataatcccgtgttgccaacgaacagagcgtcagcatattttagactgaaaaaatttgctgttgctgagtctgattgtaatttagcagttgccttgaatagaagttatacaaaggcttattccagacgaggtgctgctcgatttgctttgcaaaaattagaagaggccaaaaaagattatgaaagagtattagaactagaaccaaataactttgaagcaacaaatgaactcaggaaaatcagtcaggctttagcatccaaagaaaactcatatccaaaggaagctgacatagtgattaagtcaacagaaggagagcgaaagcaaattgaagcacaacagaataagcagcaggccatttcagagaaagatcgggggaatggatttttcaaagaggggaaatatgaaagagcaattgaatgctatactcgagggatagcagcagatggtgctaatgcccttcttccagctaacagagctatggcctatctgaagattcagaaatatgaagaagctgaaaaagactgcacacaagccattttattagatggctcatattctaaagcttttgccagaagaggaactgcaagaacatttttgggaaagctaaatgaggcaaaacaagattttgaaactgttttacttctggaacctggaaataagcaagcagtaactgaactctccaaaattaaaaaggaattaattgagaaaggacactgggatgatgtctttcttgattccacacaaagacaaaatgtggtaaaacccattgataatccaccgcatcctggatcaactaaaccactcaagaaggttattattgaagaaactggtaatttgatacagactattgatgtgccagatagcactactgctgctgctccagagaataatcctattaatctagcaaatgtaatagcagccacaggcaccacaagtaagaagaattcaagccaagatgacctttttcccacaagtgatactccaagagcaaaagtattgaaaatagaagaagtcagtgatacttcatccctgcaacctcaagccagtttgaagcaggatgtatgtcagtcttacagcgagaaaatgcccatagagatagaacaaaaacctgctcagtttgccacaactgttcttcctccaattcctgcaaactcgttccagctcgaatctgatttcagacaattgaaaagttctccagatatgttgtatcagtatttaaagcaaattgaaccatctttgtatcctaagttgtttcagaaaaatctggatccagatgtattcaaccagatcgttaaaattctgcatgacttttacattgagaaagaaaagccattactcatctttgaaatcttacaaagactttctgaactaaaaaggtttgatatggcagtgatgtttatgtcagaaacagagaaaaagattgcacgtgcattatttaatcacatagacaagtcaggattgaaggatagttctgtcgaagaactcaagaaaagatacggtggttga

SEQ ID NO: 47223 - DNA, 1968 bp, Homo Sapiens
aattttagctgggattatgctgtgattatgtttggcttaacagtaatgaaaataagtttaggctgggtgcggtggctcatgcctgtaatcccagcactttaggaggctgaggcaagcggatcacctgaggtcaggggttcgagacaagcctgaccaagatggagaaaccccgtctctaccaaaaatacaaaattagccgggtgtggtggcgtctgcctgtaatcccagctactggggaagcggaggacaatcgcttgaacccagaaggcagaggttgtggtgagccgagatctcgccattgcactccagcctggacaacaacagcgaaacttcatctcaaaacaataataagtttacaacctctgaatatgtaccaaatggagccaggggtggggagtattaggacaagccccgcactgcagagccccccagctctcactcgtggaccaagtgcatgggacacagccattcggaaagctctttcttttggagtgggtctgggtgttctggttttggtttgcttgttttatcattttgtgacattggcgcctattcttcagtttgcatccctgccttgcttgcttgaagctggagcacaaatgtcccgtcaccctgtaacaacacaagtatgcgtcatgcctgcgaggcttagcttgggaagtggaatctccaggaatctccttcggttgtctgtctgccactttacactgttgctcccatttcggtcactgaggccctgtcccttatcctccagggacatggtgctgtcctatgagctctggctcctttgtgacttttacattgctcctccagatagcagtggcagtggcatttgcaaaaaggctatttgagaacaaataagaaaaaatcttcaaagcgaagatgatagtaaaacagccctcatttttcaaagtccattcttttttctggtccgtgcactgccagctcacttctctggctaaaacccgggggcggcgggggtgtgtgtgggggttagttttgcaaaaagtactgatggcaccgctgtgctccaagttaaccagaacacaagaatcgaaaaagcctgtgagatactggtgctcgtgatcgtaagctccaggtcggggggttttcagatgaacacaaaaagggggctgctcccgtcccaagatgagtgataaatgagtcacttctcatactcgcactcacactcgctccatttcctctgggatgactgtcttccgtcctaccgctgtggctgctgttatttgcctgataaacttctttccctctccctccctctgacacagaaacacacacacacacacacacagacacacacacacacacacagcccgctggatctataagcagtttgtaacaggatgcaccagttctaatcacgtttcaagtcaaatgaaccagtcgcagcttcctaataagtgaatggctgacataaggagttaattcagaagcagctcaatactatggacaatactagtggacaatattagcatactgctcgtacaacaaagataccgtagtctctggtgctgcctcttcaggacgaatttgctgaaagtgagttgtaattagagatgttaaaaaaaacattggctgcgcgcgatggcttactcctgtaatcccagcacttttggaggcgaggcaggtggatgacctgaggttaggagttcgagaccagcctggctaacatggcgaaaccccatctctactaaaaatacaaaaaattagccaggcatcgtggtgggcacctgtaatctcagctacttgggaggctgaggccgaagaatttcttgaacctgggaggtggaggttgcagtgacccgagatcatgccattgcactccagcctgggcaacaagagtgaaattgtgtctcaaataataataataataataataaactgagatttatcattcctcctctctccttttccttgagaacttaataaaaatggaaaatatccatt

SEQ ID NO: 47224 - DNA, 1838 bp, Homo Sapiens
gtcactgcgtgggttggtttgtgtagagaggcgtgagcgagcccgttgtccggagtgcacctgctgcctgttctgtccctcccgggagcccccgccgctgtcgccgtcgagtcgccatggaagtgcagaaagaggcacagcgcatcatgaccctgtcggtgtggaagatgtatcactcccgcatgcagcgcggtggcctgcggctgcaccggagtctgcagctgtcgctggtcatgcgcagcgcccgggagctctacctctcggccaaggtggaggccctcgagcccgaggtgtcgttgccggccgccctcccctctgaccctcgcctgcacccgccccgagaagccgagtccacggccgagacagcgacccccgacggtgagcacccgtttccggagccaatggacacgcaggaggcgccgacagccgaggagacctccgcctgctgtgccccgcgccccgccaaagtcagccgcaaacgacgcagcagcagcctgagcgacggcggggacgctggactggtcccgagcaagaaagcccgtctggaagaaaaggaagaagaggagggagcgtcatccgaagtcgccgatcgcctgcagccccctccggcgcaagcggagggcgcctttcccaacctggcccgcgtcctgcagaggcgcttctccggcctcctgaactgcagccccgcggcccctccgacggcgccgcccgcgtgcgaggcaaagcccgcttgccgcccggcggacagcatgctcaacgtgctcgtgcgggccgtggtggccttctgaggaccccgagcggcgctgccggagcccagagcgcgcgtcgaaccgtcggcccgagggcgcagacctgaggcgaggccacccccctccatcctgggggaagcgcccgcgaaaaccgtggagagaagccgccgcccgggctgctgagaggcccggagagggactctgtccccggggagccatcgccttcagtgtgcagggacggcaccgaggagtctgagccgggggcgcgggcgccttccgcagagacctgcgcccacaggtgctgtcttagtggactgggacgtgaacctttcgctctccttctggactgggagaagggaggcttgggtgttgtgttttttgttttgtttgtttgtttgtttttaaagatctcctcagggtcggacttcattttgtactgtgggctgtgctggccctttcaaggtttttcaagagttggttttgcgtttccaacctcggagaattccaggcactccccttccccctccgctgacatacttgtataagcggtcatcgttgcgtcatggggcaggcgtggggagcttcctgtcgccttgcgtgggtgtggggcctgggaggaggtcctggggcgtgcacccgccctgggcagtggggaggagagtggcctgagttacttcacccccgcgtgctgctggttaatgtcccgcgtctctgcaccttcgggtgggagcggggactgatctactttcacattctcaagtttttctcatctgcattagaggtgcccagtaggttcccaggttccagcgtgcccctccctcagacacacggacacaatcagccgagaagttcctggtctgaatcacgagaatgtggaggggtggggggtgtcagtggaaaggcataaggctgagctgagaccagttgctggtgaaactgggccaatctggggaggggaacatccttgccagggagtttctgagggtctgctttgtttacctttcgtgcggtggattctttttaactccgtctacctggcgttttgttagaaatgtcagataggaaaataaaaaccatttgagtaaaaaa

SEQ ID NO: 47225 - DNA, 444 bp, Homo Sapiens
atgggcttgctttctctaatattgtttctgggtgctaaggttacaacagcaaacaagactgactcattccttttctccacgggacttactgtcttatcatcccctggactcaagatgagggtgctaggatgccctcccacaccaccccagcttacccaggggcacacctcagggtatgtggacctgcacaaaggtcccttccttagccccatgagacaccccaggggacacacaggtccacagatcctgccacaggcctgggaacccattggcaggagagtaagacagtgcaggggtccacaaacatttcttaaggggccagagagtaaatacttcaggctttgcaggccagacgttctctgttgcaaaacgcaattctgctattgtagctcaaaggcggctatagacaactcagaagttaatgagtgtgttgtgtcccaatga

SEQ ID NO: 47226 - DNA, 2221 bp, Homo Sapiens
tgaaagaaccatctggttgagtctaaagttggaagatcaccatatccaccagaagacccaggatggatctgcaacaaagcaccaccatcacttccctagagaaatggtgtttggatgagtcactgtctggctgcagaagacattatagtgtcaagaaaaaactgaagttaattcgagtcttaggccttttcatgggtctggtagccattagcactgtctcattttcaatcagtgccttttctgagacagatacacagagcacaggagaggccagtgttgtaagtggccctagggtagcacagggttaccatcagagaactctcttagatttaaatgacaagattctggattatactccacagccacctctttctaaggaaggcgagtctgagaatagtacagatcacgcccaaggagactacccgaaagacatcttttcccttgaggagagaagaaaaggtgcgatcattctgcatgtcattggaatgatctacatgttcatagccttagccattgtctgtgatgagttctttgttccttctttgactgtcatcactgaaaaactgggcatctctgatgatgtggctggagccaccttcatggctgcaggagggtcagccccagaacttttcacatctctcataggggtatttatcgctcacagcaacgttggcataggcacaattgtaggttcagcagtattcaacatcctctttgttattggcatgtgtgctctgttttctagagaaatcttaaacctgacatggtggccgctctttcgagatgtgtctttctacattgttgacttgatcatgctgatcatatttttcctggataatgtcatcatgtggtgggaaagcttgcttctcttaacagcttatttttgctatgtggttttcatgaaattcaacgtccaagtagaaaaatgggtgaagcaaatgataaaccgcaataaggtcgtcaaggtgacagcaccagaagcccaagcaaagccatctgcagccagggacaaggatgaaccaactctaccggctaagccgcgtctccagcgaggtggaagctctgcctccctccacaacagtctcatgaggaatagcatcttccaactcatgatacacacccttgacccactcgccgaagaacttggatcatatggaaaactaaaatattatgacacaatgactgaagaagggaggttcagagaaaaggcttcaattctccacaagatcgccaagaagaaatgtcatgtggatgagaacgagaggcagaatggggctgccaaccacgtggaaaaaattgagcttccaaacagcaccagcacagatgttgaaatgacaccatccagtgatgcttcagaacctgtacaaaatggaaatctctcccacaacattgaaggtgcagaagcccagaccgctgatgaggaggaggaccagcctctcagccttgcctggccttctgaaacccgcaagcaagtcacgtttctgattgttttccccatagtgtttcctctctggattacgttacctgacgttcgcaaaccttcatcgaggaagttttttcccatcacgttctttggctccattacctggattgcagtattctcttacttgatggtctggtgggcgcaccaggttggagagacaattggcatcagtgaagagattatgggcctgaccatcttggctgctgggacctccatccctgatcttatcaccagtgtcatagtggcccggaaggggttaggggacatggctgtgtccagctctgttggaagcaacatttttgacatcactgtagggctcccactgccctggctcctgtacaccgtcattcacagattccagccagtggctgtcagcagcaatggccttttctgtgccatcgtccttctcttcatcatgctgctcttcgtcatcctctctatcgccctctgcaagtggcgaatgaacaaaatcctgggcttcatcatgtttggcctctactttgtgttcctggtggtgagcgttctcctagaagacagaattcttacatgccccgtctccatctagcaggaaaagccatatcttgcaccagcagcatgaatggtccctccacactctgggctctgggctccttgacctcttgagaagaggcagctggcacacagccctgggtgccaagtgtccctccttggtgaatttgaggagagatggattcacactgggcccattcacttcacagg

SEQ ID NO: 47227 - DNA, 696 bp, Homo Sapiens
gctgtgaggcgccagtgcggagcgggcgggcgggcgggcggcgtgaggcggagcgcgggcggccggcgaaactccaagggcggaccgcggcagggagcgatcggcctcgggctgcgggagccggagaccgcggcggcggcggctgctgcagctgcaggaggagcccagggaacaccgcccctgcctgtgctctgcctcgggccatcgctcctccccagggcccagtgcggactcgcctccgtgaagtgtcacaccatgtctgaccggaaggcagtgatcaagaacgcagacatgtctgaggacatgcaacaggatgccgttgactgcgccacgcaggccatggagaagtacaatatagagaaggacattgctgcctatatcaagaaggaatttgacaagaaatataaccctacctggcattgtatcgtgggccgaaattttggcagctacgtcacacacgagacaaagcacttcatctatttttacttgggtcaagttgcaatcctcctcttcaagtcaggctaggtggccatggtgaaggtgtcagtggcggcggcagcgatggcaagcaggcggcgttgctgggactgttttgcactggagccagcatcaggatgtcctctccaatggctgtgctactgcatggactgtatactcgatttcatgtgtatgtcgcagtaaacaaaaccaaacctc

SEQ ID NO: 47228 - DNA, 897 bp, Homo Sapiens
ctgtgtgaggaaggtgatgccatgattatggcagaaacagggaaaatcttcaagaaagtaaaggaaatgaagaaaagtattgcttttcccaccagcattttggtaaataactgtgtgggtcacttctctcctttgaagagtgacaaagactgtattctcaaggaaggtaacctggtaaaaattgaccttggtgtccaagtggatggcttcatcgctaatgtaactcatacttttgtggtggatgtagctcaggggatccaaataacaaggcagaaagcagatgttattaaggcagcccacctttgtgttgaagctgccctatgcctggtcaaacctggaaaccataacacacaagtgacagaagcctggaacaaagttggtcattcatttaactgcatgccagtagaagatatgctgtcacaccaattgaagcaacatgtcattgatggtgagaaaactgttacccagaaccctgcagaccagcagaagaaggaccatgaaaaagctgaatttgatgttttcatcagcataggagagggcaaggccaaggatgcaggactactatttacaaaggagacccctctatatggactacaaatgcaaacttcacgtgccttcttcagcgaggtggaaaggtgttttaatgctttgttgtttactttaagattgaagatgagaagtaggcttatgggtgtggtggagtgcaccaaacatggactgctgcaactatttaatgttctgtatgaaaaaaagggtgaatctgttgaccagtttaaatttacagttctgctcatgcccagtggctccatgctgataaccagtggtccctttgagcctgacctctacaagtctgagatagaggtccaggatccagagctaaagaccctcctacagagt

SEQ ID NO: 47229 - DNA, 285 bp, Homo Sapiens
ggacaagcgtttagaaagtttcttccactctttgaccaagtattggttgaaaggagtactgctgaaactgtaaccaaaggaggcattatgcttcaaggaaaagtattgcaagcaacagtagtcgctgttggatcgtgttctaaaggaaagggtggagagattcaaccagttagagtgaaagttgaagataaagttcttctcccagaatatggaggcaccaaagtagttctagatgacaaggattatttcctgtttagagatggtgacattcttggaaagtacgta

SEQ ID NO: 47230 - DNA, 1551 bp, Homo Sapiens
atgagcataaccagtgacgaggtgaactttctggtttatcggtatctccaggagtcaggtttttctcactcggctttcacgtttgggatcgagagccacatcagccagtccaacatcaatgggacactagtgccaccgtctgccctcatctccattctccagaagggactgcagtatgtagaggctgagataagcatcaacaaggatggcacagtgttcgacagccgccctatagagtccctgtccctgatagttgctgtgattcctgatgtggtgcagatgcggcagcaggcatttggagagaagctcactcagcagcaagccagtgcagcagccacagaggcatcagcaatggcaaaggcggcaaccatgaccccagctgctatttcccagcaaaatcctccaaagaaccgagaggccacagtgaacggggaagagaatggagcacatgaaatcaataatcactcaaagccaatggaaatagatggggatgttgagattccacccaacaaagccacagtccttcggggccacgagtctgaggtgttcatttgtgcctggaaccctgtcagtgatttgctagcctctggatctggagactcaactgcaaggatatggaacctgaatgagaatagcaacgggggctccacccagctcgtgttgagacattgtatacgagaaggggggcacgacgtcccaagtaataaagatgtcacctcactggactggaacagtgatggaacactattggctatgggttcatatgatggtttcgcaagaatatggacagaaaatggtaacctggccagcaccttaggccaacataaaggccccatcttcgctctgaaatggaacaaaaaggggaattatgttttgagtgctggtgtagacaaaacaacaataatttgggatgctcacacaggagaagccaaacagcagtttccttttcattcagcccccgcccttgatgtggactggcagaacaacatgacctttgcctcctgtagcacagacatgtgtatccatgtgtgcaggctcggctgtgaccacccagtcaaaaccttccagggacacacaaacgaggtcaatgccatcaaatgggatccttctggaatgttgctggcgtcctgctcggatgacatgacattgaagatctggagtatgaagcaggatgcatgcgtccacgatcttcaggctcacagcaaagagatctacaccatcaagtggagccccaccgggcctgccaccagcaacccaaactccagcatcatgttggcaagtgcttcatttgattctacagtgcgactgtgggatgtggagcaaggtgtctgcacccacacactcatgaagcatcaagagcctgtctacagtgtagctttcagccccgatggaaagtacttggctagtggatcctttgacaagtatgttcatatctggaatactcagagtggaagtctcgtccacagctaccaaggcactggcggtatcttcgaggtgtgctggaacgcccgaggagataaagtgggcgccagcgcgtctgatggctctgta

SEQ ID NO: 47231 - DNA, 384 bp, Homo Sapiens
atggccggaggcaaagctggaaaggacagtgggaaggccaaggctaaggcagtatctcgctcacagagagctgggctacagtttcctgtgggccgcatccacagacacttgaagactcgcaccacaagccatggaagggtgggtgccactgctgccgtgcacagggctgcgattccggggtacctcactgcagaggtgctggagctggcaggtaatgcttctaagggtctcaaagcaaagcgtatcactccgcgtcactggcagcttgcagtccgtggtgatgaagagttggattctcttatcaaggctaccacagctgggggtggcgtgcctcacatccacaaatctctgactggaaagaagggacagcggaaaactgcttag

SEQ ID NO: 47232 - DNA, 717 bp, Homo Sapiens
cttttcggttgtgaactaaaggccaataaagatgatcactttaaggtggataatgatgaaaatgagcagttatctttaagaacggtctgtttagggactggtgcaaaggatgaactgcacattgttgaagaagaggcaatgaattacaaaggcagtccaattaaagttctggcaactttgaaaatgtctgtacagccaaagctttcccttgggggctttgaaataacaccaccagcgctcttacagttgaagtgtgattcagggccagtgcatattagtggacagcacttagtagctgtggaggaagatgcagagtcagaagatgaagaggaggagaatgtgaaactcttaagtatatctggaaagcagttggtccctggaagtggtagcaagtttccacagaaaaaagcaccagtgaagaaatctatacaagatactacagccaaaaatgcacacaagtcaaatcagaatggaaaagactcaaaaccatcatcaacaccaaaaaaggacaagaatccttcaaaacaggaaaaaactcctaaaacaccaaagggacctagttctgtagaagacgttaaagcaaaaatgcaagcaagcatagaaaaaggtggttctcttcccaaagaagccaagttcatcagttatgtgaagaattgcttctgggtgactgaccaggaggctattcaagatctctggcagtggaggaagtctctttaa

SEQ ID NO: 47233 - DNA, 3821 bp, Homo Sapiens
gcggggctagagctgtcggagaagcgggaccgcgaggccggcgcgcggcgctctgcgcggtcagagggagcgcctggcagcagcaggagcagcagcagcagcccgcggcggggccgccgccagccgccgcgaccgccgcggctgcagcctccgaagggaggccgggtgagccggcgtacgcactttcccgcggactttcggagtgtttgtggatatacatgccaagccgccacgatgatgtccatgaacagcaagcagcctcactttgccatgcatcccaccctccctgagcacaagtacccgtcgctgcactccagctccgaggccatccggcgggcctgcctgcccacgccgccgctgcagagcaacctcttcgccagcctggacgagacgctgctggcgcgggccgaggcgctggcggccgtggacatcgccgtgtcccagggcaagagccatcctttcaagccggacgccacgtaccacacgatgaacagcgtgccgtgcacgtccacttccacggtgcctctggcgcaccaccaccaccaccaccaccaccaccaggcgctcgaacccggcgatctgctggaccacatctcctcgccgtcgctcgcgctcatggccggcgcgggcggcgcgggcgcggcggccggcggcggcggcgcccacgacggcccggggggcggtggcggcccgggcggcggcggcggcccgggcggcggccccgggggaggcggcggtggcggcccggggggcggcggcggcggcccgggcggcgggctcctgggcggctccgcgcaccctcacccgcatatgcacagcctgggccacctgtcgcaccccgcggcggcggccgccatgaacatgccgtccgggctgccgcaccccgggctggtggcggcggcggcgcaccacggcgcggcagcggcagcggcggcggcggcggccgggcaggtggcagcggcatcggcggcggcggccgtggtgggcgcagcgggcctggcgtccatctgcgactcggacacggacccgcgcgagctcgaggcgttcgcggagcgcttcaagcagcggcgcatcaagctgggcgtgacgcaggccgacgtgggctcggcgctggccaacctcaagatcccgggcgtgggctcactcagccagagcaccatctgcaggttcgagtcgctcacgctctcgcacaacaacatgatcgcgctcaagcccatcctgcaggcgtggctcgaggaggccgagggcgcccagcgcgagaaaatgaacaagcctgagctcttcaacggcggcgagaagaagcgcaagcggacttccatcgccgcgcccgagaagcgctccctcgaggcctacttcgccgtgcagccccggccctcgtccgagaagatcgccgccatcgccgagaaactggacctcaaaaagaacgtggtgcgggtgtggttttgcaaccagagacagaagcagaagcggatgaaattctctgccacttactgagggggctgggaggtgtcgggcgggacagaatggggagctgaggaggcatttttggggggctttcctctgcttgcctcccctcggatttggagtgtccgttatcctgcctgcatttggggagtcccttctcgctctctttcctccacccattctctgattttcctgcctttgctgtcccctagccttgaggactggggtgctgggtgtggggattggagtatagggtaggggagaagggggggagcattcgggggagtggggagtggggggaaggaaagcggagacccgagcaggggttttaaggagcaggatggttctggggtttgggtggggggagacgcgggaagggtaggaaaatggactgtttctgaccagagacacttacctaaatatcctggggaccaaggaactatgtacaaaaacaaacctaccaaccaccaaaaactagacaaataaagacaaactaaaacaaaacagaacaaaagcaaaggaaaatgctttagaaattttaactccggggagccataatctgcaacttcattttcccccatagaagagaaaaaagagcaccaccattattaccacctccccaaccctacacgcacgaactgagtcgaaaaacgaaaaccaaacgagcgagaagttgaagttctgggtatcaaagctagttgttctgtctgcgtgtttaatttttccctctctcacctccaccccatccatatcctctttatttcctccgttccaatgagaggcctatggctgctctccaatcccgggaagtgagtgggagcacagctgaaaagagagggtcagggggaggctggctgcttgcttaggtggaatccaagttttcccgtggccctgcctatactctggtggcctggtcctgttggggtgggggtctttggagagaagggcatagtctttgagctactaaaaagcagaattccggagcttcgagatatcttattctaggaaaatgaaacaattttaacaacagttttttttcctcttatgtcgaagatctagttttagacaatttcaaaataagcttttcccactcatagaactttaacttgccctttcagttttatcttttttttagagagaggtttaaactactgatttttcctgttgattcaaatagactaatggggtgaaagttattaggagagatactctctcctgttttctccactgaacgagactcatcttgctcttctaggtcccgtttcttcctctcttggaggacatgaaattatagaaatgttgagaagttcctgctttcttttgcggtaggacttggctgtgagaaaatcacctaaatcccagaaaagaggaagacagatttaaagtgcccccacccccatttgtttcaaagaggtctgcatgttgggcgaaaacagaacaactgtgtttccttttacttgttcttattattcaagagtcatttattacaggggataaatgttgggtagcaagaactttaatttgcactaccagtctcccaaatagaaaatcatgtatagtatttcatagtaataatcaggtaccttacaagctgctggtggattttaaaaaattaagatagttgaaggtggttaggtaaaatgcctgctttgtgtacaagatactctttggatctctcgtagagatggtttgttaccatcctttaatcataactaaaacattgaaaacagaacaaatgagaaaagaaaaaaaacctgccgattaacaagactgaaatcatgcatgatctgaaaggtgtggaaagaaacacaattaggtctcactctggttaggcattatttatttaattatgttgtatatcattgtttgcagggcaaacattctatgcatttgaaactgagcactaaactgggctagctttctggtagaccgttttgtggctagtgcgatttcacagtctactgcctgtttccactgaaaacatttttgtcatattcttgtattcaaagaaaaaggaaaaaagattattgtaaatattttatttaatgcacacattcacacagtggtaacagactgccagtgttcatcctgaaatgtctcacggattgatctacctgtccatgtatgtctgctgagctttctccttggttatgttttttctcttttacctttctcctcccttacttctatcagaaccaattctatgcgccaaaatacaacagggggatgtgtcccagtacacttacaaataaaacataactgaaagaagagcagttttatgatttgggtgcgtttttgtgtttatactgggccaggtcctggtagaacctttcaacaaacaaccaaacaaaaagaaa

SEQ ID NO: 47234 - DNA, 1551 bp, Homo Sapiens
atggcagtacccaactatctgatcccctcaggcagcagagagtataaagagaagagagaacaatactctgactttaatcaagtgtttactttcatttttggtcttctaaatgcaaacaggagaaagattcttgagacatcctttggataccagctaccgatggtagacagcttcaagtggtactcggtgggatacatgaaacatttggaccgtgacccggaaaagttgacgcaccatatgcctttgttttactgtctctatgagaatcgggaagaagaatttgtgaagacgattgtggatgctctcatggaggttacagtttaccttcaatcagacaaggatatgatggtctcattatactgtctggattactgctgtcacctgaggacacttaagttgagtgttcagcgcatctttcaaaacaaagagccacttataaggccaactgctaggttgtcctatgtctcgactgcttctggttttgaagacttactcaaggctttggctcgtaatcggagcctgacatacctgagtatcaactgtacgtccatttccctaaatatgttttcacttctgcatgacatcctgcacgagcccacatgccaaataagtcatctgagcttgatgaaatgtgatttgcgagccagcgaatgtgaagaaatcgcctctctcctcatcagtggcgggagtctgagaaaactgaccttatccagcaatccgctgaggagcgacgggatgaacatactgtgtgatgccttgcttcatcccaactgcactcttatatcactggtgttagtcttctgctgtctcactgaaaattgctgcagcgcccttggaagagtgcttctgttcagcccaactctaagacaactagacctgtgtgtgaatcgcttaaaaaattacggagtgttgcatgtgacgtttcccttgctgtttccaacctgtcagttagaggagcttcatctgtctggctgtttctttagcagcgatatctgtcaatatattgccatagttattgctactaatgaaaaactgaggagcctggagattgggagcaacaaaatagaagatgcaggaatgcagctgctatgtggtggtttgagacatcccaactgcatgttggtgaatattgggctagaagagtgcatgttaaccagtgcctgctgtcgatctcttgcctctgttcttaccaccaacaaaacactagaaagactcaacttgcttcaaaatcacttgggcaatgatggagttgcaaaacttcttgagagcttgatcagcccagattgtgtacttaaggtagttgggcttccattaactggcctgaacacacaaacccagcagttgctgatgactgtaaaggaaagaaaacccagtttgatctttctgtctgaaacttggtctttaaaggaaggcagagaaattggtgtgacacctgcttctcagccaggttcaataatacctaattctaatttggattacatgtttttcaaatttcccagaatgtctgcagccatgagaacgtcaaatacagcatctaggcaacccctttga

SEQ ID NO: 47235 - DNA, 525 bp, Homo Sapiens
acagcaaataatatgagaaaaaagggaaaaccaaatccagaccagagatacttcatgttggtggttggactgtatgctgctaaccaagaccagttctatctgttgtctgcccacatctctgaaaggatcattgtaagggcctctaaccctgggcagtttgaaaatgacagtgatgcattgtggcagcgaggacaagttccagaatctattgtctgtcacggtcgagtaggaatcaacacagatgcgccggacgaagccctggttgtctgtggcaacatgaaagtgatggggaccatcatgcatccctctgacagccgggcaaagcagaatatccaggaggttgacacgaatgaacagctgaaaagaatagcccaaatgagaattgttgaatatgactacaaacctgaatttgcatctgcaatgggaataaacactgcccatcaaacaggaatgattgcccaggaggtgcaagaaatcctgcccagagcagtaagagaggttggtgatgtcacctgcggaaacgga

SEQ ID NO: 47236 - DNA, 1265 bp, Homo Sapiens
ccggcggctgcggcggctggagcaggcgagcggcggcggccgatagcgagtgtcagggccggccggggcggcgcttctcggcctgtcgctggtcggcctcctactgtacctcgtgcctgctgcggctgcgctggcctggctggccgtggggactaccgcggcctggtggggactgagccgcgagccccgaggttcgcgccccttgtcctccttcgttcagaaggcgcgacatcggcgaacactgttcgcttcgcctccggccaagtcgacagccaacggaaacctcctagagccgcggaccctgctcgaaggacctgaccctgccgaactgctcctcatgggcagttacctgggcaagcccgggccgccgcagcccgcccccgctccggagggccaggacctgcggaataggcctggccgccgcccgcccgcccggcgccgcgctccacaccgccctccccgccgacccatcgcgttcaccacttttacccctctctccccactcctcttctccgaccctccgggaggccttccccacgggatcgtgggactttaccagatcggtttgtaataacacctcgaagacgctatccgatccatcaggcccagtattcctgtccgggggtacttcccacagtgtgctggaatggttatcacaagaaggctgtgctgtcccctcgcaactccaggatggtgtgtagcccagtgactctgaggatcgcccctcctgacagaagattttcgcgttctgcgataccagagcagataatcagctcaacactgtcctcaccatcaagtaatgccccagacccatgtgcaaaggagactgtactgagtgccctcaaagagaagaagaagaaaaggacagtggaggaagaagaccaaatattccttgatggccaggaaaataaaagaagctgtcttgtcgacggtctcactgatgcctcttctgcattcaaagttcctcgacccgggccagatacactccagttcacagtggatgtcttccactttgctaatgactccagaaacatgtgacagaagaagcagatgtcaccgtggggccactgatcttcctggacaggaggggtgaccatgaagtagagcagtgggctttgccttctgacacctcagtggtgctgctgggcgtaggcctggctgtggtggtgtccctgactctgactgctgttatcctggttctcaccaggaggtgtcgcactgcctcccaccctgtgtctgcttccgaataaaagaagaaagcaata

SEQ ID NO: 47237 - DNA, 477 bp, Homo Sapiens
aagcctcaggctcttcaaggccctccgtcaagcaatgatgccatggtcatggatgaaaaggtcaagagaagctttgtgctggacacggcttctgccatctgcaactacaatgcccactacaagaatcaccccaaatactggtgccgaggctatttccgtgactactgcaacatcatcgccttctcccctaacagcaccaatcatgtggccctgagggacacagggaaccagctcattgtcactatgtcctgcctgaccaaagaggacacgggctggtactggtgtggcatccagcgggactttgccagggatgacatggattttacagagctgattgtaactgacgacaaaggaaccctggccaatgacttttggtctgggaaagacctatcaggcaacaaaaccagaagctgcaaggctcccaaagttgtccgcaagaccgctccaggacgtccattctcatcatttgcatactga

SEQ ID NO: 47238 - DNA, 314 bp, Homo Sapiens
aatcaggaattgcaaaaatcaaagtcagagcttatatgcctttataatgaagttcacaatcttccaggggaatcagaaagcaaagaccattttttaatagcatgtgacctgttacaaagagagaattctgaattagaaacaaaggtcttgaagctttcacaagaatttgcacaattaaatcattttactctagggggaaaaactgcaccttctaatttaattacaagtgaaaatacctgtaaagatcctgaatctaatgaaccaattttggaaacagaaattcaaagccgaaaggaagagacagaggaactctg

SEQ ID NO: 47239 - DNA, 387 bp, Homo Sapiens
cacacaccacatatccacacacatacataccacacatacacacacatgcacacacaccacacatatacataccgtacacatacatgccacacacatacacatgcacacacaccacacacacgcacaccacacctacatgcacacaccatacacatgtacatacatatacaccacacacatatgcacacacaccacacacatacacatgcacacatacattcacacacatacgtgtcatatgtgtacacaagccacataccatatcacacacacaccagacacttggcacacacacacatcacacacatgtacagacacacaccagagatgcaccacacactcatacacacatatcacacgtgccacacacaccacacacacattcat

SEQ ID NO: 47240 - DNA, 2613 bp, Homo Sapiens
atgtcttctgctcagtgcccggcactagtgtgtgtcatgtcccggctgcgtttctggggcccatggcccctccttatgtggcaactattgtggctactagttaaggaggctcagcctctggagtgggtcaaggacccgctccagctcacctctaatcccctggggccgcctgagtcctggtcttcccactcctcccatttcccacgggaatctccccatgcgcctactctcccagcagacccgtgggactttgatcacctggggccctctgcttcctcagagatgccagccccaccccaggaatcgactgaaaatttggttccattcctggacacctgggattcagctggagagcagcccctggagccagagcagttcttggcttcacagcaggatttaaaggacaagctgagtccacaggaaagactccctgtttcgcccaagaagctgaagaaagatccagctcagcgttggagccttgctgagattattggaattgcacgccaattatccacacctcagagtcagaaacagactttgcagaatgaatattccagtacagatacaccgtatcccagtagcctgcctccagaactccgggtgaagtcagatgagcctccagggccctctgagcaagttggaccttctcaattccatctagagcccgaaactcaaaatccagagacccttgaagacatccagtcctcttcactccagcaagaagccccagcacagcttccacagctccttgaggaagaaccttcttcaatgcagcaggaggccccagctctgcctccagagtcctctatggagagtctaactctaccgaatcatgaggtgtcagttcaacctccaggtgaggatcaagcttattatcacttgcccaacattacagttaaacctgcagatgtggaggttaccataacttcagagcctaccaatgagacagaatcttcccaagcccagcaggagaccccaattcagtttccagaggaggtggaaccttctgcaacccaacaggaggccccaattgagcctccagtttctcctatggagcatgaactttccatcagtgagcagcagcagccagttcagccttctgagtcttctagggaggtcgaatcttctctgacccagcaggagaccccaggtcagcctccagaacatcatgaagtcacagtttcacctccaggtcaccatcaaactcatcatttagattcacccagtgtctctgtgaagcctccagacgtgcagctcaccatagcagcagagcctagtgcagaggtgggaacttctctagtccaccaggaggctacagctcggctctcagggtcaggtaatgatgtagaacctcccgccatccagcacgggggcccacctctgcttccagagtcatcagaagaagctggacctttagcagttcaacaggagacttcatttcaatctccggaacctattaataatgagaacccctctccaacccagcaggaggctgcagctgagcatccacagaccgctgaggagggtgagtcttccctaacccatcaggaggccccagctcagactccagagttccctaatgtagttgtagctcaacctccagagcattcacacctgactcaagccacagttcaacctttggatctggggtttaccatcactccagaatccatgacagaggttgaactttctccaaccatgaaggagaccccaactcagcctcctaagaaagttgtaccccaacttcgagtatatcaaggggtaacaaatccaacaccaggtcaggatcaagctcagcatccagtgtcacccagcgttacagttcaacttttggacctgggacttaccatcactccagaacccactacggaggttggacattctacagccccgaagaggactatagtttctccaaagcatcctgaggtgacacttccacatccagaccaggttcagactcagcattcacacctgactcgagccacagttcaacctttggacctggggtttaccatcactccaaaatccatgacagaggttgaaccttctacagccctgatgactacagctcctcctccaggacaccctgaggtgacacttccaccttcagacaagggtcaggctcagcattcacacctgactcaagccaccgttcaacctctggacctggagcttaccataactacaaaacctactacagaggttaaaccatctccaaccacagaggagacctcaactcagcctccagacctgggacttgccatcattccagaacccactacagagactggacattctacagccctggagaagactacagctcctcatccagaccgggttcagagtctgcatcgaagcctgactgaagtcacaggtccacctactgaactagaacctgctcaggattcactggtgcagtctgaaagttacacccaaaataaggctttaactgcaccagaggaacagaaggcctccacaagcaccaacatatgtgagctctgtacctgcggagatgagatgttgtcatgtattgatctcaacccagagcagaggctccgccaagtgcctgtgccagagcccaacacccacaatggcaccttcaccatcttgtaa

SEQ ID NO: 47241 - DNA, 1473 bp, Homo Sapiens
ggaggtcacaatcacattgagccaaaacgcatccagtgttttctccagttacaaataaaacgaatatgcccatgctgctaccacatcctcaccagcatttcctaaaaggccttttaagagcacctttccgatgttaccacttcatctttcactcaagtactcatctcggatcaggaatcccatgtgctcagccgtttaattctcttggactccattgtacaaagtggatgctgctgtcagatggcttaaagagaaaattatgtgtacaaacaaccttaaaggaccacacagaaggactttctgataaagagcaaagatttgtggataaactttatactggtttaatccaagggcaaagggcctgtttagcagaggccataactcttgtagaatcaactcacagcaggaaaaaggagttagcccaggtgcttcttcagaaagtattactttaccacagagaacaagaacaatcaaataaaggaaaaccactagcatttcgagtaggattgtctgggccccctggtgctggaaaatcaacatttatagaatattttggaaaaatgcttactgagagagggcacaaattatctgtgctagctgtggacccttcttcttgtactagtggtggatcactcttaggtgataaaacccgaatgactgagttatcaagagatatgaatgcatacatcaggccatctcctactagaggaactttaggaggcgtgacaaggaccacaaatgaagctattctgttgtgtgaaggagcgggatatgacataattcttattgaaaccgttggtgtgggtcagtcggagtttgctgttgctgacatggttgacatgtttgttttactactgccaccagcaggaggagatgagctgcagggtatcaaaaggggtataatcgagatggcagatctggtagctgtaactaaatctgatggagacttgattgtgccagctcgaaggatacaagcggaatatgtgagtgcactgaaattactccgcaaacgttcacaagtctggaaaccaaaggtaattcgtatttctgcccgaagtggagaggggatctctgaaatgtgggataaaatgaaagatttccaggacctaatgcttgccagtggggagctgactgccaaacgacggaagcaacagaaagtttggatgtggaatctcattcaggaaagtgtgttagagcatttcaggacccaccccacagtccgggaacagattccacttctggaacaaaaggttctcattggggccctgtccccaggactagcagcagacttcttgttaaaagcttttaaaagcagagactaataaaattcatcctgtataataattttacatatcatttcataaagtattttaatagaaaaatcacttgtatgcttatattttcagtaattattgtatggtgctcttgtcttctttgtttgtgacccatgcttgaaaacttgaaggaagttag

SEQ ID NO: 47242 - DNA, 569 bp, Homo Sapiens
aggccgcgctcgcgccgaggggctgcgagagtgaccgcggctgctccagcgctgacgccgagccatggcggacgaggagcttgaggcgctgaggagacagaggctggccgagctgcaggccaaacacggggatcctggtgatgcggcccaacaggaagcaaagcacagggaagcagaaatgagaaacagtatcttagcccaagttctggatcagtcggcccgggccaggttaagtaacttagcacttgtaaagcctgaaaaaactaaagcagtagagaattaccttatacagatggcaagatatggacaactaagtgagaaggtatcagaacaaggtttaatagaaatccttaaaaaagtaagccaacaaacagaaaagacaacaacagtgaaattcaacagaagaaaagtaatggactctgatgaagatgacgattattgaactacaagtgctcacagactagaacttaacggaacaagtctaggacagaagttaagatctgattatttactttgtttattgtctatatgccttttaaaaaaataaacttgttatgcaaaataaaaca

SEQ ID NO: 47243 - DNA, 717 bp, Homo Sapiens
atggcggccgccgaggtcgtgaactgcatcatggaggtgtcctgtggccaggcggaaagcagcgagaagccgaacgtcgagggcatgacgtccaaagattactactttgactcctacgcccacttcggcaactccatgtttcacaaccgccacctctttaaagacaaggtggtgctggatgtgggctcggacacaagcatcctctgcatgttcgccgccaaggccgggcgcaaggtcatcggcatcgagtgttccagtagctctgattatgcggtgaagattgtcaaagccaacaagttagaccacttggtgaccatcaccaaggggaaggtggaggagatagagctcccggtggaaaaggaggtagacatctacaccgtcaaggtggaagacctgaccttcacctccccgttctgcctgcaagtgaagcagaatgactacgtgcacacccaggtggcctacttcaacatcgagtttacgcactgccacaagaggaccggagggaccggcttctccaccatacccgagtccctgtacacgcactggaagcagacggtgttctacatggaggactacctgaccttgaagacgggcgaggagatcttcggcaccatcggcatgcggcccaacgccaagaactgggaccgggacttcaccatcaacctagatttcaggggccatctgtgcgacctgtcctgctccacagactacaggatg

SEQ ID NO: 47244 - DNA, 774 bp, Homo Sapiens
tgctccacgtggggggctggtcacttctccaccttcgaccaccacgtgtacgacttctcggggacgtgcaactacatcttcgcggccacctgcaaggacgccttccccaccttcagtgtccagctgcggcgaggcccagacgggagcatctcgcggatcatcgtggagctgggggcctccgtcgtcactgtgagcgaagccatcatctcagtcaaggacatcggggtcatcagcctgccctataccagcaatggactccagatcacacccttcggccagagcgtgcggctggtggccaagcagctggagctggagctggaagtcgtgtggggtcctgacagccacctcatggttctggtggagcggaagtacatgggtcagatgtgcgggctctgcgggaactttgacgggaaggtgaccaacgagtttgtcagtgaggagggtaggtacgtggcatccagcgagctggagttggtgaactcgtggaaggagagcccgctgtgcggggacgtgagcttcgtgacagacccctgcagtctcaatgccttccggcgctcctgggccgagcgcaagtgcagcgtcatcaacagccagacctttgccacctgccacagcaaggtataccacctgccctactacgaggcctgcgtgcgcgacgcatgtgggtgtgacagtggcggggactgtgagtgtctgtgcgatgccgtggctgcctacgcccaagcctgtctggacaagggtgtgtgcgtggactggaggaccccggccttctgc

SEQ ID NO: 47245 - DNA, 2861 bp, Homo Sapiens
ctgctcctgcgcggcagctgctttagaaggtctcgagcctcctgtaccttcccagggatgaaccgggccttccctctggaaggcgagggttcgggccacagtgagcgagggccagggcggtgggcgcgcgcagagggaaaccggatcagttgagagagaatcaagagtagcggatgaggcgcttgtggggcgcggcccggaagccctcgggcgcgggctgggagaaggagtgggcggaggcgccgcaggaggctcccggggcctggtcgggccggctgggccccgggcgcagtggaagaaagggacgggcggtgcccggttgggcgtcctggccagctcaccttgccctggcggctcgccccgcccggcacttgggaggagcagggcagggcccgcggcctttgcattctgggaccgcccccttccattcccgggccagcggcgagcggcagcgacggctggagccgcagctacagcatgagagccggtgccgctcctccacgcctgcggacgcgtggcgagcggaggcagcgctgcctgttcgcgccatgggggcaccgtggggctcgccgacggcggcggcgggcgggcggcgcgggtggcgccgaggccgggggctgccatggaccgtctgtgtgctggcggccgccggcttgacgtgtacggcgctgatcacctacgcttgctgggggcagctgccgccgctgccctgggcgtcgccaaccccgtcgcgaccggtgggcgtgctgctgtggtgggagcccttcggggggcgcgatagcgccccgaggccgccccctgactgccggctgcgcttcaacatcagcggctgccgcctgctcaccgaccgcgcgtcctacggagaggctcaggccgtgcttttccaccaccgcgacctcgtgaaggggccccccgactggcccccgccctggggcatccaggcgcacactgccgaggaggtggatctgcgcgtgttggactacgaggaggcagcggcggcggcagaagccctggcgacctccagccccaggcccccgggccagcgctgggtttggatgaacttcgagtcgccctcgcactccccggggctgcgaagcctggcaagtaacctcttcaactggacgctctcctaccgggcggactcggacgtctttgtgccttatggctacctctaccccagaagccaccccggcgacccgccctcaggcctggccccgccactgtccaggaaacaggggctggtggcatgggtggtgagccactgggacgagcgccaggcccgggtccgctactaccaccaactgagccaacatgtgaccgtggacgtgttcggccggggcgggccggggcagccggtgcccgaaattgggctcctgcacacagtggcccgctacaagttctacctggctttcgagaactcgcagcacctggattatatcaccgagaagctctggcgcaacgcgttgctcgctggggcggtgccggtggtgctgggcccagaccgtgccaactacgagcgctttgtgccccgcggcgccttcatccacgtggacgacttcccaagtgcctcctccctggcctcgtacctgcttttcctcgaccgcaaccccgcggtctatcgccgctacttccactggcgccggagctacgctgtccacatcacctccttctgggacgagccttggtgccgggtgtgccaggctgtacagagggctggggaccggcccaagagcatacggaacttggccagctggttcgagcggtgaagccgcgctcccctggaagcgacccaggggaggccaagttgtcagctttttgatcctctactgtgcatctccttgactgccgcatcatgggagtaagttcttcaaacacccatttttgctctatgggaaaaaaacgatttaccaattaatattactcagcacagagatgggggcccggtttccatattttttgcacagctagcaattgggctccctttgctgctgatgggcatcattgtttaggggtgaaggagggggttcttcctcaccttgtaaccagtgcagaaatgaaatagcttagcggcaagaagccgttgaggcggtttcctgaatttccccatctgccacaggccatatttgtggcccgtgcagcttccaaatctcatacacaactgttcccgattcacgtttttctggaccaaggtgaagcaaatttgtggttgtagaaggagccttgttggtggagagtggaaggactgtggctgcaggtgggactttgttgtttggattcctcacagccttggctcctgagaaaggtgaggagggcagtccaagaggggccgctgacttctttcacaagtactatctgttcccctgtcctgtgaatggaagcaaagtgctggattgtccttggaggaaacttaagatgaatacatgcgtgtacctcactttacataagaaatgtattcctgaaaagctgcatttaaatcaagtcccaaattcattgacttaggggagttcagtatttaatgaaaccctatggagaatttatccctttacaatgtgaatagtcatctcctaatttgtttcttctgtctttatgtttttctataacctggattttttaaatcatattaaaattacagatgtgaaaataaagcagaagcaacctttttccctcttcccagaaaaccagtctgtgtttacagacagaagagaaggaagccatagtgtcacttccacacaattatttatttcatgtctttactggacctgaaatttaaactgcaatgccagtcctgcaggagtgctggcattaccctctgcagaacagtgaaaggtattgcactacattatggaatcatgcaaaaggaa

SEQ ID NO: 47246 - DNA, 474 bp, Homo Sapiens
atgaatcttgatggctctgcacaagatcctgaaaagagggaatattcttctgtgtgtgtgggcagagaagatgacattaaaaaatctgaaagaatgacagctgttgtccatgatagagaagtggtcattttctaccacaagggagaatatcatgctatggatattcgctgttaccactcaggaggacctttacatttgggagatatagaggattttgatggacgaccgtgtatagtttgcccctggcataaatacaaaattactttggcaacaggagaaggtctgtaccagtctataaaccctaaagatccatcagcaaaacccaagtggtgctccaaaggaataaagcaaaggattcacacagtgacagtagacaacggaaatatttatgtgactctttctaatgaaccttttaagtgtgactctgatttttatgccactggagacttcaaagtaattaagagttcttcctga

SEQ ID NO: 47247 - DNA, 1136 bp, Homo Sapiens
ggttttccaccacatccactcacctctacatggcgaaaaccaagggttcactctctgtcttcagggagctccacccagcagcagcgtttgacagagctgttcacttcctcttcctggagctgtggcttccagagcccatgctcagcagttcccctccttcttcgactgctcctctcttaggctcagagccactcagacattgggaagcaagtttgtcaagatgacagagaaccgaggtaatggattcgagtgatgaaacaggaagttcattcatgagtttttggccacacctccaaagtgacgacttagccagaaatgggataactgggtttccctacttctcttttatcatcctcaatgagagtgaccaaatattagagctagatggaaccttagtgaaaatctggctactcgtcccgtcccaccagcctgccacccatttcaagtttgaagagacaaagacacatggaccttatgtaattactggggattaccccaggagtctgtggcaaaagtcagcttcttccctccctgcttccccgccctgtctctggtactttctaccaacactgggctgtttctgtgatcacacttaagcgtacctaacctgcgaatgctgtatagaaggtgctaatgaacatgatttagctttaacactcagttttctaaagggacacgtgggggcagcaaatgtttaggcaaaaacaattccagttctagcctctactgtctacatatgtgtatacatttgggaaacgtttgggaaagggatatttgagagcttctttttcttttttgtggtttagttatttgatgatattgagattgtttctgagccatgtgcttcaacatcggattggggatttcagaaaaagttttagtcactgtgattccatttagcttccaaatgtgtctctgctaagagacttaaaagcactcataaatagcacgtgtgtcttctttgcagtgtttgctaattttgagtcacatctttttagaaaatcatgagatttggtgtcacagagactggaataaatatagtcaaacttattggtgaagatttcctttagctgttttcataatccatttccattgttatgattattgatgaataaaacattttctttaggtagata

SEQ ID NO: 47248 - DNA, 681 bp, Homo Sapiens
agagtcacatggctgggacatgccacggtaatggtggaaatggatgagctcatatttctcacggatcccatctttagctctcgtgcttcaccatcgcagtacatgggtccaaagcgatttcgtcgttccccgtgcacaataagtgaactccctccaatagatgcggtccttatcagtcacaaccactatgaccatctggactacaattctgtcattgctttgaatgagcgatttggtaatgagttgagatggtttgtgcctttgggtctccttgactggatgcaaaaatgtggctgtgagaatgtgattgagttggactggtgggaggagaattgtgtccccggacatgataaggtcacttttgtctttacaccttcccagcactggtgtaaaaggactctaatggatgacaacaaggtgctatggggcagctggtctgtcttggggccttggaatcgattttttttcgcaggagatactggttattgccctgcttttgaagagataggaaaaagatttggaccttttgaccttgcagctattcccatcggagcttatgaaccgaggtggtttatgaaataccagcatgtagacccagaagaagctgtaaggattcacactgatgtccaaacaaagaaatctatggcaattcactggggaacttttgccttagcaaatgag

SEQ ID NO: 47249 - DNA, 483 bp, Homo Sapiens
atgcggtgccacgcccatggaccttcttgtctcgtcacggccataactagggaggaaggagggccgaggagtggaggggctcaggcgaagctggggtgctgttgggggtatccgagtcccagaagcacctggaaccccgacagaagattctggactccccagacgggaccaggagagggacggcatgagcgacacacacaaacacagaaccacacagccagtcccaggagcccagtaatggagagccccaaaaagaagaaccagcagctgaaagtcgggatcctacacctgggcagcagacagaagaagatcaggatacagctgagatcccagtgcgcgacatggaaggtgatctgcaagagctgcatcagtcaaacaccggggataaatctggatttgggttccggcgtcaaggtgaagataatacctaaagaggaacactgtaaaatgccagaagcaggtgaagagcaaccacaagtttaa

SEQ ID NO: 47250 - DNA, 1559 bp, Homo Sapiens
ggactctccatttctaagcccaacatgatctccttactggagcaagggaaggaaccgtggatggtggagagaaagatgtcacagggtcactgtgcaggctgggagcctatatgtgagactgaagaattaaccccaaagcaggatttttatgaagaacatcaatcccagaagataatagaaacacttacaagctataaccttgaatactccagtttgagagaagagtggaaatgtgagggctattttgaaaggcaaccaggtaatcagaaggcgtgtttcaaggaagagataatcactcatgaagaacccctttttgatgagagagaacaagaatataaatcttggggaagttttcatcagaacccactgctttgtacacaaaagataatccccaaagaggagaaagtacataaacatgacacacaaaagagaagctttaaaaaaaatttaatggctattaagcccaagagtgtctgtgcagagaagaaacttttgaaatgtaatgactgtgaaaaagtcttcagccagagttcatcccttactcttcatcaaagaattcatactggagagaaaccctataaatgtatagagtgtggaaaagccttcagccagagatcaaatcttgttcaacatcagaggattcatactggagaaaaaccctatgaatgtaaggaatgtaggaaagccttcagtcagaatgcacacctagttcaacatctgcgagttcatactggagaaaaaccttacgaatgtaaggtatgtcgaaaagccttcagccagtttgcctaccttgctcaacatcagagagttcacacgggagagaaaccctatgaatgtatcgaatgtgggaaagcatttagcaacagatcatccattgctcaacaccagagagttcatacaggagagaaaccctatgaatgtaatgtctgtgggaaagcatttagccttcgtgcataccttactgtacatcagagaatacatactggagagagaccctatgaatgtaaggaatgtgggaaggcctttagccagaattcacaccttgctcaacatcagagaattcatactggagaaaaaccttataagtgtcaggaatgtaggaaagcattcagccagattgcctaccttgctcagcatcaaagagttcatactggagagaaaccctatgaatgtattgaatgtgggaaggcttttagcaatgactcgtcccttactcaacatcagcgagttcatactggagagaaaccttatgaatgtactgtttgtggaaaggcttttagttactgtggatcccttgcccaacatcagagaattcatactggagagagaccctatgaatgtaaggaatgcaaaaaaaccttcaggcagcatgcacaccttgctcatcaccagagaattcacattggggagtcactgtcaccacccaacccagtcaatcaccaagtcctatagatcctgagtcctaaatgtttctagaatttatactgttttttatctttaatgttgtcaccttggtctgattcatctcactctgattactaatatagctttcaaacagg

SEQ ID NO: 47251 - DNA, 1674 bp, Homo Sapiens
atggacagcacagtcccttcagccctggagctgccccagcggctggcactgaacccaagggagagcccgaggagtccagaagaggaggagccccacctgctgagcagcttggctgcagtccagaccctggccagtgtcatccggccttgctatggcccccacggccggcagaagttcctggtgaccatgaaaggagaaacagtgtgcacggggtgtgccactgccatcctcagggccctggagctggagcacccagcagcatggctcctccgggaagcaggacaaacccaggcagagaatagtggggacggcacagccttcgtggttctgctgacggaagccttgctggaacaggcagagcagctgctgaaggctggcctgcctcgcccgcagctccgggaggcctacgccacggccactgcagaggtcctggccacactgccctccctggccatccaatctctggggcctttggaagatccatcctgggccctccattctgtgatgaatacccacaccctgtcccccatggaccacttgaccaagctggtggcccacgcctgctgggctatcaaggaactagacggcagcttcaagcctgagcgtgttggggtgtgcgcgctgcccggggggacactggaggattcctgcctcctcccggggttagcaatatctgggaagctctgtgggcaaatggccacagtgttaagtggtgccagggtggctctctttgcttgcccctttggtcctgcccatccaaatgcaccagcaacggcccgtctttctagtcctgctgatctagctcaatttagtaaaggaagcgatcaattactagaaaagcaagtaggccagctagcagctgcaggaattaatgtggcagtggtgttgggggaggtcgacgaggagaccctcacactggcggacaagtatggcatcgtggtgattcaagctaggtcttggatggagatcatttacctgagtgaggtgttggacacacctctgctgcctcgtctgctccctccccagaggccaggcaagtgccagagggtttacaggcaggagctgggagatggtttggctgtggtatttgaatgggaatgtacaggcacacctgccctcactgtggttctcaggggagccaccacccaggggctgcggagtgcagagcaggccgtctaccacggcattgatgcctatttccagctatgtcaagatcccagactgattccaggagctggggccacagaaatggctttggcaaaaatgctttctgataaaggaagcagattggaagggcccagtgggcctgcattcctagcatttgcctgggccctgaagtatcttcctaaaactttggcagagaatgcaggcttagctgtctcagacgtgatggcagaaatgagtggagtgcaccaaggtgggaacctcctaatgggtgtgggaactgaagggataataaatgtggcccaggaaggggtgtgggacaccctaatagtcaaagcccaaggatttcgagcagtggctgaggtggtgctacagctcgtgactgtagatgaaatcgtagtggccaagaaaagtcccacacatcaggagatctggaatcctgactctaagaagacaaagaaacacccacctcctgtggaaacaaaaaaaatccttggattgaataactag

SEQ ID NO: 47252 - DNA, 831 bp, Homo Sapiens
atggacgccgacagcctcctgctgtctctggagctggcgtccggcagtgggcagggcctcagcccggaccgtcgggcctcgctgctcacgtctcttatgctggttaagcgcgactaccgctatgatcgggttctcttctggggccgcatccttggcctcgtcgccgattactacatcgcgcagggcctgagtgaggaccagctcgcaccgcgcaagacgctctatagcctgaactgcacagagtggagcctcttgccccctgccacagaggagatggtggcgcagtcgtctgtggtgaagggccgcttcatgggggacccatcatacgaatatgaacacactgagctgcagaaggtgaatgaaggtgaaaaagtctttgaagaagaaatagtggtccagatcaaggaagagacccgcttggtgtctgtcattgaccagattgacaaggctgtggccatcatcccccgaggcgccctcttcaagaccccttttggacccacccatgtcaatcggacctttgaaggactgtccttgtctgaggccaagaagctcagctcctacttccatttcagggagcctgttgagctaaagaataagaccttgcttgagaaggctgacctggacccctccctggatttcatggactccttggagcatgacattcccaaagggtcctggagcatccagatggagaggggcaatgccctggtggtgctgcgcagcctgctctggccgggcctcaccttctaccatgctccccgcaccaagaactatggctacgtctacgtgggcactggcgagaagaacatggacttgcccttcatgctatag

SEQ ID NO: 47253 - DNA, 411 bp, Homo Sapiens
atggctcgtactaaacagacagctcggaaatccaccggcggtaaagcgccacgcaagcagctggctaccaaggctgctcgcaagagcgcgccggctaccggcggcgtgaaaaagcctcaccgttaccgcccgggcactgtggctctgcgcgagatccgccgctaccaaaagtcgaccgagttgctgattcggaagctgccgttccagcgcctggtgcgagaaatcgcccaagacttcaagaccgatcttcgcttccagagctctgcggtgatggcgctgcaggaggcttgtgaggcctacttggtagggctctttgaggacacaaacctttgcgccatccatgctaagcgagtgactattatgcccaaagacatccagctcgctcgccgcattcgcggagaaagagcgtaa

SEQ ID NO: 47254 - DNA, 1362 bp, Homo Sapiens
gtgtgtgaatggaggcctcctgaacaactgaaacagcttcttgatttggagatgagagactcaggcgagccaccccataaactattggaactctgtcgggatgtcatacactacagtgtcaaaactaaccacccaagatttttcaaccaattgtatgctggacttgattattactccttggtggcccgatttatgaccgaagcattgaatccaagtgtttatacgtatgaggtgtccccagtgtttctgttagtggaagaagcggttctgaagaaaatgattgaatttattggctggaaagaaggggatggaatatttaacccaggtggctcagtgtccaatatgtatgcaatgaatttagctagatacaaatattgtcctgatattaaggaaaaggggctgtctggttcgccaagattaatccttttcacatctgcagagtgtcattactctatgaagaaggcagcctcttttcttgggattggcactgagaatgtttgctttgtggaaacagatggaagaggtaaaatgatacctgaggaactggagaagcaagtctggcaagccagaaaagagggggcagcaccgtttcttgtctgtgccacttctggtacaactgtgttgggagcttttgaccctctggatgaaatagcagacatctgcgagaggcacagcctctggcttcatgtagatgcttcttggggtggctcagctttgatgtcgaggaagcaccgcaagcttctgcatggcatccacagggctgactctgtggcctggaacccacacaagatgctgatggctgggatccagtgctgtgctctccttgtgaaagacaaatctgatcttcttaaaaaatgctactctgccaaggcatcttacctcttccagcaggataaattctatgatgtgagctatgacacaggagacaagtctatccagtgtagcagaagaccagatgcattcaagttctggatgacctggaaggccctgggtacattaggccttgaagaaagagttaatcgtgctcttgctttatctagtatttcattgcattctaagataaatcttaagataacaactttatattttttctctcagcctgaatatgccaatatttgcttttggtacattccaccgagcctcagagagatggaagaaggacccgagttctgggcaaaacttaatttggtggccccagccattaaggagaggatgatgaagaagggaagcttgatgctgggctaccagccgcaccggggaaaggtcaacttcttccgccaggtggtgatcagccctcaagtgagccgggaggacatggacttcctcctggatgagatagacttactgggtaaagacatgtag

SEQ ID NO: 47255 - DNA, 138 bp, Homo Sapiens
tcagggcatatgttgctaaacttaagtcgtggcaagcaagattttttaaaagaggttgttgaaacttttgccaacaaaagcgggcagtctgtgttatataatgctctgttttctagtcagtcatctaaggatacatct

SEQ ID NO: 47256 - DNA, 180 bp, Homo Sapiens
gagcacatgggcccgcgggccgggcgggctcggggcggccgggacgaggaggggcgacgacgagctgcgagcaaagatgtgccccgggacccccggcaccttccagtggatttccttgcggaaaggatgttggcggtccctgtgacctgtggagacacggccagatctgccctccagtaa

SEQ ID NO: 47257 - DNA, 897 bp, Homo Sapiens
cagcccgacaacaccgccttcactcagcagcgcctccccgcctggcagccgctgctgtcggccagcatcgcgctgccgctcttcttctgcgcgggcctggccttcatcggcctgggcctgggcctctactactcctccaacggcatcaaggagctggagtacgactatacaggcgacccgggcaccgtgtacctctactacgagctgaccaacttctaccagaacaaccggcgctacggcgtgtcccgcgacgacgcgcagctgagcggactccccagcgcgctgcgccaccctgtcaacgagtgcgccccctaccagcgcagcgcggccggcctgcccatcgcgccctgcggcgccatcgccaacagcctcttcaacgactccttctcgctttggcaccagcgccagcccggcgggccctacgtcgaggtgccgctcgaccgctccggcatcgcctggtggaccgactaccacgtcaagttccgcaacccgccgctggtcaacggcagcctggcgttggccttccagggcacggcgcccccgcccaactggcgccggccagtctacgagctcagccccgaccccaacaacaccggcttcatcaatcaggacttcgtggtgtggatgcgcacggcggcgctgcccacgttccgcaaactgtacgcgcgcatccgccagggcaactactcggccgggctgccgcggggcgcctaccgcgtcaacatcacctacaactacccggtgcgcgcgttcggcggccacaagctcctcatcttcagcagcatctcgtggatgggtggcaagaaccccttcctgggcatcgcctacctggtcgtcggctccctctgcatcctcaccggctttgtcatgctggtcgtctacattcgctaccaggac

SEQ ID NO: 47258 - DNA, 1445 bp, Homo Sapiens
ctgcgggccacaccctggttcctgacctccctcggccgtgcggcactggacctcgctattattttcctttcgtgtgtgatgaagagcaagatgagacaggccttaggatttgccaaggaagccagagagagccctgacacccaagcccttttgacctgtgcagagaaagaggaagaaaaccaggagaatttggattgggtgcctctcaccacactgtcacactgcaagtcactgaggacaatgacagcaatcagtcgctacatggagctgaccatcgagcctgtgcagcaggcaggctgcagtgccaccaggctgccaggtgacgggcagacgagcgccggagatgcgtccctgcaggaccccccgtcgtaccctcccgttcaggtcatccgggcccgggtgtcttccggcagctcctctgaggtctcctccatcaactccgacctggagcagaagtattgggaggccctaaactcggagcagtgggaccctgaagatgtgaacctcgaaggcagcaaagaaaatgtggagctactgggatcccaggtgcaccaggactctgtgaggacagcacacctgagtgatgatgattaacaccttctggagccagctcatcagctcagagcccagggtcaggagttcgttcagtaacgcagcgggaatcaatctgcactgacaccgcggcaggaactgaagctgccctggcaagtgaggaaccaggagccgtcactgagtgtggctgggctacatcatagctcatcacggagctacgactttgggtactgcggacagacctggataggcccagcattcgttctgaagatcacagttcacagaagcttttgcttcgtaaagataatccaaaggatctcagacccgctcttccttttcccttcattcccttgagagtcagccatgaacggaatacctgctaggttccaggaatgagctcacctaacagatagcaaatgtgtctggttagatctcagcagagcccattctgcaagacctggctgagccagatgagagggtgggccctgtgctggggggccttgggtcacacacaggaaccgagacctggcttccaccccccagtcacccacttgggttatctgctggaagttatcgataggactgtgtggccaaccaagtgcttgtgagatcactgacactgcaaaaacaaagcaaactgctccgggtaccaggacttcctccaacctggcaagggtgtgcgctgaggcggggcttgcaggtgagggggctgtatgcttcaggaactaactaaatgcatgcagaaggtaagaggcatgatgggaggtgttcaagcacagcaatcccatttgggagttattttgatactgcgatgagtaagggtaagggcgcatggaatggggctaaggtgggagtgaacactggggtgaataaattttaaatcaattcaagta

SEQ ID NO: 47259 - DNA, 1469 bp, Homo Sapiens
atggaaacatctgccccacgtgccggaagccaagtggtggcgacaactgcgcgccactccgcggcctaccgcgcagatcctctacgtgtgtcctcgcgagacaagctcaccgaaatggccgcgtccagtcaaggaaactttgagggaaattttgagtcactggaccttgcggaatttgctaagaagcagccatggtggcgtaagctgttcgggcaggaatctggaccttcagcagaaaagtatagcgtggcaacccagctgttcattggaggtgtcactggatggtgcacaggtttcatattccagaaggttggaaagttggctgcaacagctgtgggaggtggattttttctccttcagcttgcaaaccatactgggtacatcaaagttgactggcaacgagtggagaaggacatgaagaaagccaaagagcagctgaagatccgtaagagcaatcagatacctactgaggtcaggagcaaagctgaggaggtggtgtcatttgtgaagaagaatgttctagtaactgggggatttttcggaggctttctgcttggcatggcatcctaaggaagatgacctcatgttcattgttcctggttttttccagccagcagcctctacactccatcataggacatcgagtccctcctcctcttctcccatgccttcttccctgccatggcaaatctgagtggcttctctaagcatctgctggtacaagtcaatgtggcaccatgagcttcatggtggcagaagagacaatagtccttagctctcctcccagtacaccccctacttggccagtctgtaggccaacaagaaggttcctttacccccatgcaagacacttatgagaacacattacaagatggctgaccgtggaggatgagtggatcctgaaaggttgtcccaaactgttgatttggaaaagaaataagcacatagataaccttattgtgtgctgcatggaaaggaactgaatacatttgcctttaagcatgaaagattttggtatcttggtgtctactttcttttttagttggttttacattacagaaagctatttaaatgtgttataattatgccgacaaaattggcagcataattactgtaattgaaaaatctgatattgtccaggaatgctttctaccgtacaggataatgtatctcatggctgtttccaaagggtttatttattgtaaaacaagtgatttaggtgggaaagggaagattttggatttttattttgtagaaaaggttttaagctttgaaatgtgaatgaaatatccttatcaaaacattaggggtggccataactcctctgtgccacttctactatttttttttttaatctagttagtatgaaatacaacatttaaaccggaattttaaagaagtagctttccagggattcagaattaagaaagatagtgataggacatgagaaataaatttccatcaagtgt

SEQ ID NO: 47260 - DNA, 1449 bp, Homo Sapiens
atgccaaaggaaaaatatgatcctccagatcctcgcagaatttataccatcatgtcagcagaggaggtagccaatgggaaaaaatctcactgggcagaattagaaatctcggggaattgcttgttacgggttttgccttatgaacttggtgggctcttccagctacaaactctaggtttgaaaggcaatcctttatcacaggatattctcaacttataccaggacccagatggaacccgaaatctactgaacttcatgcttgacaatctcgcagttcatccagagcagcttcctccgaggccatggattacattaaaagaacgagaccaaattctgccatcagcatcattcacggttatctgttacaatgtgttatgtgataaatacgctacccggcagctatatggttattgcccatcctgggcattaaacttggaatacaggaaaaagggaattatggaagaaattgttaactgtgacgcagatatcattagtcttcaggaagtggaaacagagcaatacttcactctctttctgccagcattgaaggagcgtgaatatgatggatttttttctccaaagtcacgtgccaaaatcatgtctgagcaggagagaaagcatgtagatggttgtgcaatatttttcaaaagagaaaaatttacattggtgcagaagcatgcagtggaatttaaccaagtggcaatggctaattcagatggatccgaagctatgctgaacagagtgatgacaaaagataacattggtgtcactgtggtattagaggtccacaaagaactatttggagcaggtatgaagcctattcatgctgcagacaaacagctgcttatagtggcaaatgcccacatgcattgggacccagagtattctgatgtgaagctcatccagaccatgatgtttgtctcagaggttaaaaccattctggagaaagcctctagtaggtctggcagcccaactgcagatcctaattccatcccgctggtgctatgtgcagatcttaactcattgccagattcaggtgttgtggaatacttaagcaatggaggaatagctgacaaccataaagacttcaaggaactaaggtacaataagtgtcttatgaacttcagctgcaatggaaagaatggaagctcagaagggagaatcacacatggcttccaacttaagagcgcctacgaaaataacttgatgccttacaccaattacacctttgatttcaaaggcgtgattgactacattttctattccaagactcatatgaatgtgcttggtgtcctggggcctttagatcctcaatggctggttgagaacaacatcactgggtgtccacaccctcacatcccttcagaccacttctcactgttaacacaacttgaactccaccctccactcctgcctcttgtcaatggtgttcacttgcctaatcggagg

SEQ ID NO: 47261 - DNA, 2781 bp, Homo Sapiens
gggcagatgatgatctatgcgaagtttgacaaaaatgtgtatcttcctgaagatgctgagttttactttacttatgacggatctcatcagcgacatgtcatgattgcagagcgcatcgaggataacgttctccagtccagcgtcccaggccatgggcttcaggagacggtgacggtatctgtgtgcctctgctcggaaggttactctccggtgaccatgggctctggctcagtgacctacgtggacaacatggcttgcaggctggctcgtctgctggtgacgcaggccaatcgcctcacagcctgcagccaccagaccctgctgaccccatttgccttgacggcaggagcactgcctgccttggatgaggagctcgtgctggctctgacccatctggaattgcctctagagtggactgtgttgggaagttcttcacttgaagtatcttctcacagagaatctcttctacacctggctatgagatggggcctggctaaactttcccagttcttcttgtgtctcccggggggagtccaggccttggctttacccaacgaagagggtgccacaccattagacttagctttacgtgaaggacactccaagctggtggaagacgtcacaaattttcagggcagatggtccccaagcttctcccgagtgcagctcagtgaagaagcctccttgcattacattcactcatcggaaacgctgaccctgaccctgaaccacacagccgagcatttgttggaggcagatattaaactcttccggaaatacttttgggatagagcctttcttgtcaaggcctttgagccagaagccaggccagaggaaagaacagctatgccctccagcggtgcagaaactgaagaagagattaagaattcagtgtccagcagatcagcagctgaaaaggaagatataaagcgtgtcaaaagcctggtggttcaacacaatgaacatgaagaccagcacagcctagatttggatcgctccttcgatatcctaaaaaaatccaagccgccctcgacattgcttgctgcaggccggctttcagacatgctgaatggaggtgatgaagtctacgctaactgtatggtgattgatcaggttggtgatttggatatcagctatattaatatagagggaatcactgccactaccagccctgaatccagaggttgcactctgtggcctcagagcagcaaacacacccttcctacagaaaccagtcccagtgtgtacccacttagtgaaaatgtcgaagggacagcacacactgaagcccagcagtccttcatgtcaccatcaagttcgtgtgcttccaacttgaatctttcttttggttggcatggatttgaaaaggaacaaagtcatctaaagaaaagaagttctagccttgatgccttggacgccgacagtgaaggggaagggcattctgagccatcccacatctgttacactccagggtctcagagctcctcaagaactgggattcctagtggggatgaattggactcttttgagactaacactgaaccggattttaatatctccagggctgaatcccttcctctatcaagtaatctacagtcgaaggaatcactgctttctggagttcgctcacgttcttattcttgctcatcacccaaaatttctttaggaaaaactcgtttggtgcgtgaattaacagtatgcagttcaagtgaagagcaaagagcttacagcttatcggagccaccaagagaaaacagaattcaggaagaagaatgggataaatacatcatacctgccaaatcagagtctgaaaaatataaagtgagtcgaactttcagtttcctcatgaataggatgactagccctcggaataaatcaaagacaaaaagcaaggatgccaaagataaagagaagctgaatcgacatcagtttgccccaggaacattctctggggttctgcagtgtttggtttgtgataaaacactcctggggaaagagtcactgcagtgttctaactgtaatgcaaatgtgcacaaaggttgtaaagatgctgcgcctgcatgcaccaagaaattccaagagaaatataacaagaacaaaccacagaccatccttggaaattcttcatttagagacatcccacagcctggtctctccttgcacccttcttcctccgtgcctgttggattgccgactggaaggagggagactgtgggacaggtccatccattgtccagaagtgttccaggcaccaccttggaaagcttcaggaggtcagccacatccttggagtctgagagtgaccataacagctgcagaagcaggtctcattctgatgagctgctacagtccatgggctcttctccctctacagagtctttcataatggaagatgttgtggattcttctctgtggagtgacctcagcagtgatgcccaggagtttgaagcagaatcttggagtcttgtggtggatccctcattttgtaataggcaggagaaggatgtcatcaaaagacaggatgtcatttttgagctaatgcaaacagagatgcatcacatccagaccctgttcatcatgtctgagatcttcaggaaaggcatgaaagaggagctgcagctggaccacagcaccgtggataaaattttcccctgtttagatgagttgcttgaaatccacaggcatttcttctacagtatgaaggaacgaaggcaggaatcctgtgctggcagcgacaggaattttgtgatcgaccgaattggagatattttggtacaacag

SEQ ID NO: 47262 - DNA, 1038 bp, Homo Sapiens
taagtgtacatgcttaggccttctgaagcagcatttgaagctgcagtcctgaaaaccatgcaggccggaagagtagataaagaaatatttatttgagatggcacatgtttcttcagaaactcaagatgtttcccccaaagatgaattaactgcttcagaagcctccactaggtctccattgtgtgaacacaccttccctggggactcagacttacggtcaatgattgaagaacatgcttttcaggttttgtcacaaggatccttgttagaaagtccaagttacacagtttgtgtctctgagccagataaagatgatgattttctttctctgaactttcccaggaaactttggaaaatagtggaaagtgaccaattcaagtctatttcatgggatgagaatggaacttgcatagtgattaatgaagaactcttcaagaaagaaattttggaaacaaaggctccttacagaatatttcaaactgatgctatcaaaagttttgttcgacagctcaacctttatggatttagtaaaattcaacagaattttcaaagatctgcctttctagccacctttctgtcagaagagaaagaatcgtctgtcttaagcaagatacgcttcaccaaaatgaaactttccagatcttcaacttatgaaaacaggtatttatgttgcaacttacatttaaaagatgagtcgaattactcataatccttagaagttagcttgtccgcatctgaaaattcacttttaccttgaagttcaatctgtctctgggaaagactagattggaagaataaaattcaagaatgtgatgttttagtaatggaaaagccaagagcgtcaggtggcaaaagtccttctgttactcaagaaaatgctctgaaaaattccttttctcttttttttttgtaaagattaactccacctcaccaccacaatgaggtatttttctcagcaattgacacctgtttactcagttactccctgtaactatgttatgctgtgaagtaggcaatacagttgttaaagaagaataa

SEQ ID NO: 47263 - DNA, 1924 bp, Homo Sapiens
agccttaccccttactggaggctgcaggaccctctacacacagacagctgtccagcacggaaggtgggctgaggcccagggtgaacatgccagctaatgggacatcaccccagagattccctgccctgattccaggagaacctggcagatcttttgaggggtccgtgtcattcgaggatgtggctgtggatttcacccgacaggagtggcacagactggaccctgctcagaggaccatgcacaaggatgtgatgctggagacctacagcaacctggcatctgtgggcctctgcgtggccaaaccagagatgatcttcaagttggagcgaggagaagagctgtggatattagaggaggaatcctcaggccatggttactcaggatctctctcactgctgtgtggcaatggttctgttggggataatgccctcaggcatgataatgaccttcttcaccatcagaagattcaaacattggatcaaaatgttgaatataatggatgcaggaaagccttccatgagaaaacaggctttgttagacgtaaaagaacacccagaggagataaaaactttgaatgtcatgaatgtgggaaagcttactgtaggaagtcaaaccttgttgaacatctgagaatacacacaggagagagaccctatgaatgcggtgaatgtgcaaaaaccttcagtgcaagatcatacctcattgctcatcagaaaactcacacaggggagaggccctttgaatgtaatgaatgtgggaaatcttttggcaggaagtcacaactcatcctacatacaagaacacacactggagagagaccctatgaatgtactgaatgtgggaaaaccttttctgagaaggcaaccctcacgattcatcagagaactcacacaggggagaaaccctatgaatgtagtgaatgtgggaaaacatttcgtgtaaagatatcccttacccaacaccacagaactcatacaggggagaaaccttatgaatgtggggagtgtgggaaaaacttccgtgcaaagaaatccctaaatcagcatcaaagaattcacacaggtgagaaaccctatgagtgtggtgaatgtgggaaattcttccgaatgaagatgactctcaataatcatcaaagaactcacacaggtgaaaagccctatcagtgtaatgaatgtgggaaatctttcagggtgcactcatctcttgggatccatcagagaattcacacaggagagaaaccttacgaatgtaatgagtgtggtaatgctttctatgtgaaagcacgcctaattgaacatcagaggatgcattcaggagagaaaccctacgaatgtagtgaatgtgggaaaatcttcagtatgaagaaatccctttgtcaacaccggagaactcacacaggagagaaaccttatgaatgtagtgaatgtggaaatgccttctatgtgaaagtacgcctcattgaacatcagcgaattcacacaggagagagaccctttgagtgtcaagaatgtgggaaagctttctgccggaaagcacacctcacagaacatcagagaactcacataggctggtcctggcgttgtacaatgaagaaagcctctcactgaagacttccctcaccattggatcaagctccttgggggcatatgatcaccagggcacacagtgtgcctgtgaaaatttggcacctacatttgtatcaaagtatgtcctgatccccttaggggatagctcattgtttttattcagatttccctaattagtggtgtgtgaacatcttatctgttgattggctatttgggttttttcttctgtgcattgactgttcatgtcctctgctcattgttttcaaatgggctgttcatctcttgctttttggtttaaatgttgttttttaacatatgagaatataaaaatccttttt

SEQ ID NO: 47264 - DNA, 800 bp, Homo Sapiens
agcgactgaagcagcatggccaagccttgtggggtgcgcctgagcggagaagcccttaaacaggtggaggtcttcaggcagaatcttttccaggaggctgaagaattcctctgcagattcttgccacagaaaatcatatatctgaatcagctcttgcaagaggactccctcaatgtggctgacctgacttccctccggtccccactggacgtccccatcccagaccctccacccaaggatgatgagatggaaacagataagcaggagaagaaagacgtccctaagtgtggatttctccctgggaatgagaaagtcctgtccctctttgccctggttaagccagaagtctggactctcaaacagaaatgcattctggtgattacgtggatccaacacctgatccctaagattgacgatggaaatgagtttggggtagcaatccaggagaaggtgctggagagggtgaatgccgtcaagatcaaagtggaagctttccagacaaccatttccaagtacttctcagaacgtggggatcctgtggccaaggcctccgaggagactcatgtaatggattaccgggccttggtgcttgagccagatgaggcagcctatggggagctcagggccatggtgctggacctgagggccttctatgctgagctttatcatatcatcagcagcaacttggagaaaattgtcaacccaaagggtgaagagaagccatctatgtactgaacccaggactagaaggaaaataaatgatctacatgttgtgtggaaaaaaaaattaaacttaaaaa

SEQ ID NO: 47265 - DNA, 150 bp, Homo Sapiens
atgcaagaactacttctgcagtatagaatcgtgcccatttttcaggcacatcatagttgctcattaagtttacaagatctccaccaggcatgtattccatcaccatgtagagataacgatcatcttggaatgcataaaaaagctatacaa

SEQ ID NO: 47266 - DNA, 702 bp, Homo Sapiens
aatgctactcaggaagaattgaaaaaggcttataggaaactggccttgaggtaccatcctgataagaatccaaatgaaggggagaagaaacagatttctcaagcatatgaagttctctctgatgcaaagaaaagggaattatatgacaaaggaggagaacagacaattaaagaggatggagcaggtggcggttttggctcccccatggacatctttgatttttttggaggaggaggaaggatgcacagagaaaggagaggtaaaaatgttgtacatcagctctcagtaaccctagaagacttatataatagtgcaacaagaaaactggctctgcaaaagaatgcaatttgtgacaaatgtgaagatagaggaggtaagaaaggaggagtagagtactgtcccaattgccgaggtactggaatgcaaataagaattcatcagataggacctggaaaggttcagcaaattcagtctgtgtgcgtggagtgccagggccatggggagcagatcagtcctaaagatagatgtgaaagctgcaatggaaggaagatacttcgagagaagaagattctagaatttcatattgacaaaggcatgaaatatggccagaagataacattccatggtgaaggataccaagaaccaggactggagggagaagatattatcattgtgttagatcagaaggacgatgctgttttt

SEQ ID NO: 47267 - DNA, 495 bp, Homo Sapiens
aagcacttcacagggcagaagctggaggtcttcggggactgtgacaacttccaggaccggggctttatgaaccgagtgaactccatccacgtggagagcggagcctgggtctgcttcaatcaccccgacttccggggccagcagttcatcttggagcacggcgactaccccgacttcttccgctggaacagccacagtgaccacatgggctcctgtcggcctgtaggaatgcacggagaacatttccgcctagaaatcttcgagggttgcaacttcacgggccagtgcctggagttcctggaggacagccccttcctccagagcaggggctgggtcaagaactgtgtgaacaccatcaaggtgtacggggacggagcgtgggtcctgtatgaggagcccaactaccacggccgcatgtacgtggtggagagtggcgacttccgcagcttctcggactgggaggcccacagcgcacgagtgcagtcgctccacaag

SEQ ID NO: 47268 - DNA, 2845 bp, Homo Sapiens
aatcatccagttttctaaattatggaaattttgtggaagacgttgacctggattttgagcctcatcatggcttcatcggaatttcatagtgaccacaggctttcatacagttctcaagaggaattcctgacttatcttgaacactaccagctaactattccaataagggttgatcaaaatggagcatttctcagctttactgtgaaaaatgataaacactcaaggagaagacggagtatggaccctattgatccacagcaggcagtatctaagttattttttaaactttcagcctatggcaagcactttcatctaaacttgactctcaacacagattttgtgtccaaacattttacagtagaatattgggggaaagatggaccccagtggaaacatgattttttagacaactgtcattacacaggatatttgcaagatcaacgtagtacaactaaagtggctttaagcaactgtgttgggttgcatggtgttattgctacagaagatgaagagtattttatcgaacctttaaagaataccacagaggattccaagcattttagttatgaaaatggccaccctcatgttatttacaaaaagtctgcccttcaacaacgacatctgtatgatcactctcattgtggggtttcggatttcacaagaagtggcaaaccttggtggctgaatgacacatccactgtttcttattcactaccaattaacaacacacatatccaccacagacagaagagatcagtgagcattgaacggtttgtggagacattggtagtggcagacaaaatgatggtgggctaccatggccgcaaagacattgaacattacattttgagtgtgatgaatattgttgccaaactttaccgtgattccagcctaggaaacgttgtgaatattatagtggcccgcttaattgttctcacagaagatcagccaaacttggagataaaccaccatgcagacaagtccctcgatagcttctgtaaatggcagaaatccattctctcccaccaaagtgatggaaacaccattccagaaaatgggattgcccaccacgataatgcagttcttattactagatatgatatctgcacttataaaaataagccctgtggaacactgggcttggcctctgtggctggaatgtgtgagcctgaaaggagctgcagcattaatgaagacattggcctgggttcagcttttaccattgcacatgagattggtcacaattttggtatgaaccatgatggaattggaaattcttgtgggacgaaaggtagcagcaaaacttatggcagctcacattactgcgaataccaatcctttttcctggtctgcttgcagtcgagactacatcaccagctttctagagaagtgtgtagagagctctggtgtctcagcaaaagcaaccgctgtgtcaccaacagtattccagcagctgaggggacactgtgtcaaactgggaatattgaaaaagggtggtgttatcagggagattgtgttccttttggcacttggccccagagcatagatgggggctggggtccctggtcactatggggagagtgcagcaggacctgcgggggaggcgtctcctcatccctaagacactgtgacagtccagcaccttcaggaggtggaaaatattgccttggggaaaggaaacggtatcgctcctgtaacacagatccatgccctttgggttcccgagattttcgagagaaacagtgtgcagactttgacaatatgcctttccgaggaaagtattataactggaaaccctatactggaggtggggtaaaaccttgtgcattaaactgcttggctgaaggttataatttctacactgaacgtgctcctgcggtgatcgatgggacccagtgcaatgcggattcactggatatctgcatcaatggagaatgcaagcacgtaggctgtgataatattttgggatctgatgctagggaagatagatgtcgagtctgtggaggggacggaagcacatgtgatgccattgaagggttcttcaatgattcactgcccaggggaggctacatggaagtggtgcagataccaagaggctctgttcacattgaagttagagaagttgccatgtcaaagaactatattgctttaaaatctgaaggagatgattactatattaatggtgcctggactattgactggcctaggaaatttgatgttgctgggacagcttttcattacaagagaccaactgatgaaccagaatccttggaagctctaggtcctacctcagaaaatctcatcgtcatggttctgcttcaagaacagaatttgggaattaggtataagttcaatgttcccatcactcgaactggcagtggagataatgaagttggctttacatggaatcatcagccttggtcagaatgctcagctacttgtgctggaggtaagatgcccactaggcagcccacccagagggcaagatggagaacaaaacacattctgagctatgctttgtgtttgttaaaaaagctaattggaaacatttcttgcaggtttgcttcaagctgtaatttagcaaaagaaactttgctttaattatattatattccatttgttttcaacctcatgtaatttgtgcagatttgttggtaaaatacatcttggcacaatgagtgtctctgctggtgcttctcccaagactatcttgaaggtgggctgtttgcctttcgtgaacacattcttggtaaagaacatcaaaagttttaaaaaagaaaatgagcaagaatcagacatcacagatgcaacttcttgtaatgggagatgagaatgtacggctgtg

SEQ ID NO: 47269 - DNA, 402 bp, Homo Sapiens
atggcctgtggacagccccatgggcacacccacctcgtctgtcttctctaccccttgctcaactccacgcagcccatccgccttcccagaacgtgcttggcagctccgacctcacacccatgtttcggccgggaacgttcacctgccattgtctgtgtgactcagtcctctcctcgtgcaggtctttactcaacgtcatttcacagagacccttcaggaccagcaaagccctccctgccgccccacccagcactccccacctccctcctctgcttagtttgtttcatgggagtcacctggtgtatttcatattatattcttctgctttcttgtctgtctcgtgcatctggacctctgcacaaaggatgggttttgtctctttggctgactgcagtgtcctaa

SEQ ID NO: 47270 - DNA, 1089 bp, Homo Sapiens
ctgtcggttgcagggctgaaaaagcagttctacaaggcaagccagctggtcagtgagaaggtcggaggggctgaggggaccaagctggacgatgacttcaaagagatggatgtcatcagcaaggcggtgacggaaatgctggcaaggaccatcaagtacctgcagcccaacccagcctcacaggctaagctgaccatgctcaacacagtgtgcaagatccagggccaggtgaagaaccccggctacccgcagttggaggggctcctgagcgagtgcctgatccgccaccagaaggagctgggcaacgagtccaacttcagtgacgcactgctggatgccggcgagtccatgaagcacctggcagaggtgaaggactccctggacatagaggtcaagcagaacttcattgacctcctccagaacctgtgtgagaaagacctgaaggggatccagcaccacctgcagaagctggagggccgccgcctggactttgacaaaagacggcagggcaagatccccgatgaggagctgcgtcaggcgctggagaagtttgaggactccaaggaggtagcagaaaccagcatgcacaacctcctggagaccaacattgagcaggtgagtcaactccgggccctggcggaggcgcagctgaactaccactggcaggccatgcagatcctggacgagctggcagagaagctcaagcgcaggatgcgggaagcttcctcacgccccaagcgggagtataagcccaagttctgggagccctttgacctcggagagcctgagcagtccaatgggggcttcccctgcaccacagtccccaagattgcagcttcatcccctttccgatcttccgacaagtccatctggactcctagcaggagcatgccgcccctagaccagccaagctgcaaggtgctgtatgacttccagcctgagaaccatggggagctgggcttccatgagggtgacgtcttcacgctgatcaaccagatcaacgagaactggtaccagggcatgctggacagccagttgggcttcttcctgctcagctacatggacgtgctcatgcctctgcccagtgac

SEQ ID NO: 47271 - DNA, 420 bp, Homo Sapiens
caggaatggtcctgctttggtgtccctggtgtgacccatcacccggaacagcctgagagaagtagggcctctgcaccaatgctgctgaggatgtcagagcacaggaacgaggccttgggaaattacctggaaatgcgactgaaatcttccttcctgaggggtctgggctcttggaaatcaaaccctctcaggttgggtggctggacgattctcctcacacttacaatgggacaaggggaaccaggaggcccccaaatccctgggttccacacgaactcctcctaccctcattgtgtgacagcagccatgcctcctcctggggatcaggatctattacctgtgcctggagaggaggggactcctcttctcacccgctggtctctggacacatactgtccaattcccctgtggcagctgtaa

SEQ ID NO: 47272 - DNA, 2490 bp, Homo Sapiens
tcaggttccactgggctgattcccccctcccactttcaagctcggcccctttcaactctgccaagaatggctcccacctggctctcagacattcccctggtccaacccccaggccatcaagatgtctcagagaggcggctagacacccagagacctcaagtgaccatgtgggaacgggatgtttccagtgacaggcaggagccagggcggagaggcaggtcctgggggctggaggggtcacaggccctgagccagcaggctgaggtgatcgttcggcagctgcaagagctgcggtggctggaggaggaggtctggctcctgcgggagacctcgctgcagcagaagatgaggctagaggcccaggccatggagctagaggctctggcacgggcggagaaggccggccgagctgaggctgagggcctgcgtgctgctttggctggggctgaggttgtccggaagaacttggaagaggggaggcagcgggagctggaagaggttcagaggctgcaccaagagcagctgtcctctttgacacaggctcacgaggaggctctttccagtttgaccagcaaggctgagggcttggagaagtctctgagtagtctggaaaccagaagagcaggggaagccaaggagctggccgaggctcagagggaggccgagctgcttcggaagcagctgagcaagacccaggaagacttggaggctcaggtgaccctggttgagaatctaagaaaatatgttggggaacaagtcccttctgaggtccacagccagacatgggaactggagcgacagaagcttctggaaaccatgcagcacttgcaggaggaccgggacagcctgcatgccaccgcggagctgctgcaggtgcgggtgcagagcctcacacacatcctcgccctgcaggaggaggagctgaccaggaaggttcaaccttcagattccctggagcctgagtttaccaggaagtgccagtccctgctgaaccgctggcgggagaaggtgtttgccctcatggtgcagctaaaggcccaggagctggaacacagtgactctgttaagcagctgaagggacaggtggcctcactccaggaaaaagtgacatcccagagccaggagcaggccatcctgcagcgatccctgcaggacaaagccgcagaggtggaggtggagcgtatgggtgccaagggcctgcagttggagctgagccgtgctcaggaggccaggcgttggtggcagcagcagacagcctcagccgaggagcagttgaggcttgtggtcaatgctgtcagcagctctcagatctggctcgagaccaccatggctaaggtggaaggggctgccgcccagcttcccagcctcaacaaccgactcagctatgctgtccgcaaggtccacaccattcggggcctgattgctcgaaagcttgcccttgctcagctgcgccaggagagctgtcccctaccaccaccggtcacagatgtgagccttgagttgcagcagctgcgggaagaacggaaccgcctggatgcagaactgcagctgagtgcccgcctcatccagcaggaggtgggccgggctcgggagcaaggggaggcagagcggcagcagctgagcaaggtggcccagcagctggagcaggagctgcagcagacccaggagtccctggctagcttggggctgcagctggaggtagcacgccagtgccagcaggagagcacagaggaggctgccagtctgcggcaggagctgacccagcagcaggaactctacgggcaagccctgcaagaaaaggtggctgaagtggaaactcggctgcgggagcaactctcagacacagagaggaggctgaacgaggctcggagggagcatgccaaggccgtggtctccttgcgccagattcagcgcagagccgcccaggaaaaggagcggagccaggaactcaggcgtctgcaggaggaggcccggaaggaggaggggcagcgactggcccggcgcttgcaggagctagagagggataagaacctcatgctggccaccttgcagcaggaaggtctcctctcccgttacaagcagcagcgactgttgacagttcttccttccctactggataagaagaaatctgtggtgtccagccccaggcctccagagtgttcagcatctgcacctgtagcagcagcagtgcccaccagggagtccataaaagggtccctctctgtcctgctcgatgacctgcaggacctgagtgaagccatttccaaagaggaagctgtttgtcaaggagacaaccttgacagatgctccagctgcaatccccagatgagcagctaagcagctgacagttggagggaaagccagcctgggggctgggaggatcctggagaagtgggtggggacagaccagcccttccccatcctggggttgccctgggggataccagctgagtctgaattctgctctaaataaagacgactacagaagga

SEQ ID NO: 47273 - DNA, 1672 bp, Homo Sapiens
agaggccagtcacttggacgtcagcgccagcagccggctcaccgcatggccagagcaatcctcgtcgtcagccagcacgtcacaggaggggcctagaccagcagctgcccaggccgccggggaagccatggtgggtgcctcaaggccaccccccaagccgctgcgtccgcggcagctgcaggaggttggccgccagagctcctcggacagcggcatcgccactggcagccactcctcttactccagcagcctctcgtcctacgcgggcagcagcctggacgtgtggcgggccacagatgaactgggctcactgctcagcctgccagcagcgggggcccccgagcccagcctgtgcacctgcctgcccgggacagtcgagtaccaggtgcccacctccctgcgggcccactatgacacaccacgcagcctttgcctggctcctagagaccacagccccccctcacagggcagccccggcaacagtgcggccagggactcaggcggccagacgtccgccgggtgtccctctggctggctgggcacgagacggcggggcctggtgatggaggccccccagggcagcgaggccacactgcctggccctgcccctggcgagccctgggaagcaggcggcccccacgcggggccacccccggctttcttttcggcatgtccagtctgtggaggactcaagggagcggcagcctcagccccaggacctgcgacagcacattcaggatccccaggacccgtggctgtggacagcccaggaccagagaggccgcgcggcgagtcgcccacttacgtgaacatccccgtcagcccatcctccagaaagcagctgcactacatgggcctggagctccaggaggccagcgagggtgtccgaggggctggcgcctccctctacgcccagatcgacatcatggccaccgagacggcgcacagagtgggggtgcggcacgcacgggcccgggaggagcagctgtcggagctggagcagaggaaggcagccccgcagtgaggtcacagcgccaggagctgaccgcaaacccggtgcgctgtgcggccccgtggcccccggcaggccagccccttctgttgggcgtggtctggtccccagggagctcccagtcgcaggagcaggcatggccggtctccgggccatggtgcaaacaggaagttttcagggcccacggccaggcctcctgcctcacaggtgtccggggctgacccttcggcctgaaagagttgctctggaccccaggctgactgaggccctgcttccaggcatcaggcagctctggtagctgctgtggcatctcaggcagaggctgctgcccaggagtttgggagcatggtttgtggtgcctgggatgcaaaccgccctctcaccctgggggtgactgcatggatgacagccgtgtcctggcaaaatgctcatcccttcacctgggtgttgtggccctgcagagccaggacccagtgcccgctcccactgtcggcaccatgcccgctcctgagactggcggctcagacactcccggaatcccctccccgcctcccggctgtcctgcctgggccaccgccaccctgcacctggggacggagcctggactctcccagccacctgaccgctccacttcttgggacctattacagccagtcatgt

SEQ ID NO: 47274 - DNA, 3644 bp, Homo Sapiens
gcgggagcccgcggcgagcgtagcgcaagtccgctccctaggcatcgctgcgctggcagcgattcgctgtctcttgtgagtcaggggacaacgcttcggggcaactgtgagtgcgcgtgtgggggacctcgattctcttcagatctcgaggattcggtccggggacgtctcctgatcccctactaaagcgcctgctaactttgaaaaggagcactgtgtcctgcaaagtttgacacataaaggataggaaaagagaggagagaaaagcaactgagttgaaggagaaggagctgatgcgggcctcctgatcaattaagaggagagttaaaccgccgagatcccggcgggaccaaggaggtgcggggcaagaaggaacggaagcggtgcgatccacagggctgggttttcttgcaccttgggtcacgcctccttggcgagaaagcgcctcgcatttgattgcttccagttattgcagaacttcctgtcctggtggagaagcgggtctcgcttgggttccgctaatttctgtcctgaggcgtgagactgagttcatagggtcctgggtccccgaaccaggaagggttgagggaacacaatctgcaagcccccgcgacccaagtgaggggccccgtgttggggtcctccctccctttgcattcccacccctccgggctttgcgtcttcctggggaccccctcgccgggagatggccgcgttgatgcggagcaaggattcgtcctgctgcctgctcctactggccgcggtgctgatggtggagagctcacagatcggcagttcgcgggccaaactcaactccatcaagtcctctctgggcggggagacgcctggtcaggccgccaatcgatctgcgggcatgtaccaaggactggcattcggcggcagtaagaagggcaaaaacctggggcaggcctacccttgtagcagtgataaggagtgtgaagttgggaggtattgccacagtccccaccaaggatcatcggcctgcatggtgtgtcggagaaaaaagaagcgctgccaccgagatggcatgtgctgccccagtacccgctgcaataatggcatctgtatcccagttactgaaagcatcttaacccctcacatcccggctctggatggtactcggcacagagatcgaaaccacggtcattactcaaaccatgacttgggatggcagaatctaggaagaccacacactaagatgtcacatataaaagggcatgaaggagacccctgcctacgatcatcagactgcattgaagggttttgctgtgctcgtcatttctggaccaaaatctgcaaaccagtgctccatcagggggaagtctgtaccaaacaacgcaagaagggttctcatgggctggaaattttccagcgttgcgactgtgcgaagggcctgtcttgcaaagtatggaaagatgccacctactcctccaaagccagactccatgtgtgtcagaaaatttgatcaccattgaggaacatcatcaattgcagactgtgaagttgtgtatttaatgcattatagcatggtggaaaataaggttcagatgcagaagaatggctaaaataagaaacgtgataagaatatagatgatcacaaaaagggagaaagaaaacatgaactgaatagattagaatgggtgacaaatgcagtgcagccagtgtttccattatgcaacttgtctatgtaaataatgtacacatttgtggaaaatgctattattaagagaacaagcacacagtggaaattactgatgagtagcatgtgactttccaagagtttaggttgtgctggaggagaggtttccttcagattgctgattgcttatacaaataacctacatgccagatttctattcaacgttagagtttaacaaaatactcctagaataacttgttatacaataggttctaaaaataaaattgctaaacaagaaatgaaaacatggagcattgttaatttacaacagaaaattaccttttgatttgtaacactacttctgctgttcaatcaagagtcttggtagataagaaaaaaatcagtcaatatttccaaataattgcaaaataatggccagttgtttaggaaggcctttaggaagacaaataaataacaaacaaacagccacaaatacttttttttcaaaattttagttttacctgtaattaataagaactgatacaagacaaaaacagttccttcagattctacggaatgacagtatatctctctttatcctatgtgattcctgctctgaatgcattatattttccaaactatacccataaattgtgactagtaaaatacttacacagagcagaattttcacagatggcaaaaaaatttaaagatgtccaatatatgtgggaaaagagctaacagagagatcattatttcttaaagattggccataacctgtattttgatagaattagattggtaaatacatgtattcatacatactctgtggtaatagagacttgagctggatctgtactgcactggagtaagcaagaaaattgggaaaactttttcgtttgttcaggttttggcaacacatagatcatatgtctgaggcacaagttggctgttcatctttgaaaccaggggatgcacagtctaaatgaatatctgcatgggatttgctatcataatatttactatgcagatgaattcagtgtgaggtcctgtgtccgtactatcctcaaattatttattttatagtgctgagatcctcaaataatctcaatttcaggaggtttcacaaaatggactcctgaagtagacagagtagtgaggtttcattgccctctataagcttctgactagccaatggcatcatccaattttcttcccaaacctctgcagcatctgctttattgccaaagggctagtttcggttttctgcagccattgcggttaaaaaatataagtaggataacttgtaaaacctgcatattgctaatctatagacaccacagtttctaaattctttgaaaccactttactactttttttaaacttaactcagttctaaatactttgtctggagcacaaaacaataaaaggttatcttatagtcgtgactttaaacttttgtagaccacaattcactttttagttttcttttacttaaatcccatctgcagtctcaaatttaagttctcccagtagagattgagtttgagcctgtatatctattaaaaatttcaacttcccacatatatttactaagatgattaagacttacattttctgcacaggtctgcaaaaacaaaaattataaactagtccatccaagaaccaaagtttgtataaacaggttgctataagcttggtgaaatgaaaatggaacatttcaatcaaacatttcctatataacaattattatatttacaatttggtttctgcaatatttttcttatgtccacccttttaaaaattattatttgaagtaatttatttacaggaaatgttaatgagatgtattttcttatagagatatttcttacagaaagctttgtagcagaatatatttgcagctattgactttgtaatttaggaaaaatgtataataagataaaatctattaaatttttctcctctaaaaactgaattcaaa

SEQ ID NO: 47275 - DNA, 1087 bp, Homo Sapiens
gccgcccaacctgtctccagccaccttctgtggagtctcaaactccatcatctgtgggaccctgtaggccgaagggagaaacaagagtgcagccaccacccctgagccacctgtggctctgctacccacaatttcactgtgaagagtcagctgcctgggccgtgaggtcactgccaccatgagtctgggcatcatggaagaggaagacctggccgagtacttccggctgcagtatggggagcggctgctgcagatgctccagaaactccccaatgttgagggggcgtcggagtccccatccatctggctactggagaagaaaaaggagacagaaatcatgcatcaaactatggtgcagaagaagaagatgtttcagcgcagaatggaaaccctgaacctgcgctgggaggaactgggcgttaaggaagcccaactgaaggctcacatccagaagtctgagcagttcatccaggagaacgaccagaaacggatccgcgccatgaagaaagccaacaaggagcgagaactcaagtgccagcacatgcaggagctgaccaagcgcaagcaggagatggtggcgctgcggctggagcaccagcggctgagcgccaagctgaaggactactacatcttcaacaagtacctagagaaggtggtggagaactccgaggaatctcgctgggcgcacatccagaacaccgcagccaagaagaccctcctgcttggcaccattaagatggccacgctgaacctcttccagatcgtgagcaagcacctgaaggaggtgactgaggtggcactggaggacacccacaagcagctggacatgatccagcaatttatccaagaccggtcggacatctgggcagaggtgaaaaagaaggaacaacagcgagtccggatttaaggaggcagccttgttccagaatgtcctgagacagagatcgtgaaagaagaagtcgtgagcctgcggtccagtcagtccagctcgggaccgatgcctgctgtgccttcctgctgagggacacctgcttattttcccccgtgggcctcactctatccctgaaaacagtgaatgttatatgaa

SEQ ID NO: 47276 - DNA, 1503 bp, Homo Sapiens
atgccttccagcggcagagcgctgctggactcgccgctggacagcggctccctgacctccctggactctagtgtcttctgcagcgagggtgaaggggagcccttggcgctcggggactgcttcacggtcaacgtgggcggcagccgcttcgtgctctcgcagcaggcgctgtcctgcttcccgcacacgcgccttggcaagctggccgtggtggtggcttcctaccgccgccccggggccctggccgccgtgcccagccctctggagctttgcgacgatgccaaccccgtggacaacgagtacttcttcgaccgcagctcgcaggcgttccgatatgtcctgcactactaccgcaccggccgcctgcatgtcatggagcagctgtgcgcgctctccttcctgcaggagatccagtactggggcatcgatgagctcagcatcgattcctgctgcagggacagatacttcagaaggaaagagctgagtgaaactttagacttcaagaaggacacagaagaccaggaaagtcaacatgagagtgaacaggacttctcccaaggaccttgtcccactgttcgccagaagctctggaatatcctggagaaacctggatcttccacagctgcccgtatctttggcgtcatctccattatcttcgtggtggtgtccatcattaacatggccctgatgtcagctgagttaagctggctggacctgcagctgctggaaatcctggagtatgtgtgcattagctggttcaccggggagtttgtcctccgcttcctgtgtgtgcgggacaggtgtcgcttcctaagaaaggtgccaaacatcatagacctccttgccatcttgcccttctacatcactcttctggtagagagcctaagtgggagccagaccacgcaggagctggagaacgtggggcgcattgtccaggtgttgaggctgctcagggctctgcgcatgctaaagctgggcagacattccacaggattacgctcccttgggatgacaatcacccagtgttacgaagaagtcggcctactgctcctatttctatccgtgggaatctctatattttcaactgtagaatactttgctgagcaaagcattcctgacacaaccttcacaagtgtcccttgtgcatggtggtgggccaccacctctatgactactgtgggatatggggacattagaccagacaccaccacaggcaaaatcgtggccttcatgtgtatattatcgggaattcttgtcttggccttgcctattgctattattaacgatcgcttctctgcttgctacttcaccttgaaactcaaggaagcagctgttagacagcgtgaagccctaaagaagcttaccaagaatatagccactgactcatatatcagtgttaacttgagagatgtctatgcccggagtatcatggagatgctgcgactgaaaggcagagaaagagcaagtactaggagcagcgggggagatgatttctggttttga

SEQ ID NO: 47277 - DNA, 888 bp, Homo Sapiens
atgagcccgaacaaatgctctggaatgcgtttcccccttcaagaagagaactcggttacacatcacgaagtcaaatgccaggggaaaccattagccggaatctacaggaaacgagaagagaaaagaaatactgggaacgcagtacagagcgccatgaagtccaagaaacagaagatcaaagacgccaggagaggtcccctggtaccttttccaaaccaaaaatctgaagcagcagaacctccaaaaactccaccctcatcttgtgattccaccaatgcagccatcgccaagcaagccctgaaaaagcccatcaagggcaaacaggccccccgaaaaaaagctcaaggaaaaacacaacagaatcacaaacttacggatttctaccctgtccgaaggagatccaggaagagcaaagccgagctgcagtctgaagaaaggaaaagaatagatgaattgattgaaagtgggaaggaagaaggaatgaagattgacctcatcgatggcaaaggcaggggtgtgattgccaccaagcatttctcccggggtgcctttgtggtggaataccacggggacctcatcgagatcaccgacgccaagaaacgggaggctctgtatgcacaggacccttccacgggctgctacatgtactattttcagtatctgagcaaaacctactgcgtggatgcaactagagagacaaatcgcccaggaagaccgatcaatcacagcaaatgtgggaactgccaaaccaaactgcacgacatcgacggcgtacctcacctcatcctcatcgcctcccaagacatcgcggctggggaggagctcctgtatgactatggggaccgcagcaaggcttccattgaagcccacccgtggctgaagcattaa

SEQ ID NO: 47278 - DNA, 2321 bp, Homo Sapiens
cttcctgaaaggatctggagacaccagctccacaagtcctggtgtctttaaaaggatcagcttgaggaataaggctcgtctgagagctgtgacattcatctgactctagtgaaagtccaacagccactccctttttggcctccaactgggcaccatgagggcctgcatctccctggtattggccgtgctgtgtggcctggcctgggctgaggaccacaaagagtcagagccattgccacagctggaggaagagacagaagaggccctcgccagcaacttgtactcggcacccacctcctgccagggccgctgctacgaagcctttgacaagcaccaccaatgtcactgcaatgcccgctgccaagagtttgggaactgctgcaaggattttgagagcctgtgtagtgaccacgaggtctcccacagcagtgatgccataacaaaagaggagattcagagcatctctgagaagatctacagggcagacaccaacaaagcccagaaggaagacatcgttctcaatagccaaaactgcatctccccgtcagagaccagaaaccaagtggatcgctgcccaaagccactcttcacttatgtcaatgagaagctgttctccaagcccacctatgcagccttcatcaacctcctcaacaactaccagcgggcaacaggccatggggagcacttcagtgcccaggagctggccgagcaggacgccttcctcagagagatcatgaagacagcagtcatgaaggagctctacagcttcctccatcaccagaatcgctatggctcagagcaagagtttgtcgatgacttgaagaacatgtggtttgggctctattcaagaggcaatgaagagggggactcgagtggctttgaacatgtcttctcaggtgaggtaaaaaaaggcaaggttactggcttccataactggatccgcttctacctggaggagaaggagggtctggttgactattacagtcacatctacgatgggccttgggattcttaccccgatgtgctggcaatgcagttcaactgggacggctactataaggaagtgggctctgctttcatcggcagcagccctgagtttgagtttgcactctactccctgtgcttcatcgccaggccaggcaaagtgtgccagttaagcctgggaggatatcccttagctgtccggacatatacctgggacaagtccacctatgggaatggcaagaagtacatcgccacagcctacatagtgtcttccacctaatagaacttcgagccagaaaggggcatgagggctcttgcgagactgaagtgctatcttctctggactagagagaagagggagaggactggaagggatcaccaaatctcaaagcaatgagaagcattcctaaatcccaaagtgcccacatgggaaagagataaaatgtacaaattagaaaaatgtggataaacagtcaaacctttatcctctagaattttggcaatgttgactaagaaacagagtccaagcagagaaggtaggaaccctccatagctctctgccctgatgtgtgggggaactaggaagaagtcctttgacctcaccaggcctcatgcttccctttaatgtaaagggaaggggtttgcccactttcctctttttggggttggtgagagggcaaaccctgatatttttactgtgaaggtgttttcagttgttcttaggaagaacagctgatagaaattcaagattactataatggctgttattatacacagctctgtaaactaccactcagccctgtgttggggtcctcaaagaagtaaggccacagtaatcaagcaagggcctttggttttttccagagttagatcctctcagaacagagtctgggagaactccaatgctgaatggagaagggtaataggttggtgcagtgaatgggctgggggtggggtggccttctccaggcctgagtgtttttgtgtccagctcagtatctgcaacaagaagtttcccacttgtggatgtttagtgcagccacagacttgtattttgatccccaatttttttttgaaagagttctcctcataggaggatgattcagcatcagaagaagaaggaacccatagcttggtgtcattaacataattattttaagccttatccagcagccataatttgaataactctacgagaccagagagactgtagttccctattttaacctcaattatgcatttgtcccccaaccccactgagaactaaatgctgtaccacagagccgggtgtgaactatggtttagaaggttcaagtttccaattaaagtcattgaag

SEQ ID NO: 47279 - DNA, 1086 bp, Homo Sapiens
ctgctgagcctgacgcccaagaagtgctcgatcctgggcctgggacaggcccggccccttgagttcctgaggacgtgctacggggatagcttcctggtgcacgagtcgttcctctacaagcgggagaaggccgtgggggagaaggcgtattggacctgccgggaccacgcgctgcacagctgccggagccgggccatcacccagggacagcaggtgaccgtgatgcgtggccactgctacccgcccgacgtggagggcctggaggcccggcggcagcaggagaaggccatggagacgctgcaggctgtgcaggccggccctgggagccaagtggacactctcctccaaggcgtgaacagttttctctgcctcaggggccccggccccctgactctcaccaggccccggcccagaaagcgagcgaaggtcgaagaccaggagctgccaacccatccccaagccctggaaggattcctggacgaggaccaggacatggatgccgaccccggaagccctgagttcctgcggaccccgctggagggcagcttcctggtatacgagtccttcctctataagcaggtgtattggacctcccgggaccaggtccgcatgggctgccgcagcctcgccatcacccagggccggcgggccatggtgatgcgcaggcactgccgcccaccggacgtgggtggcctggaggcactgcggcagcgggagcacttctccatcttggcgcagtgggactgcccagaacccctccggcccctggagttcaagactttcctggggggcaggttcctggtgcccgagtccttcctctacaggaaggagaaggcggccggggagaaggtgtactggatgtgccgggatcaggctcggctgggctgccacagccatgccatcacccagggccagcgggttatggtcatgcgcagccgctgccaccagcccaacctggatggcctagaggccttgaggcagcgggagcggctccccagcatggcccagcaggaggacccagaaaagattcaagttcaactgtgcttcaagacatgttttcctgaaagccagccgatttatgggtaa

SEQ ID NO: 47280 - DNA, 1864 bp, Homo Sapiens
atggaaaaatccaaaaatttccgcatcccctgctggcggtggaccccccacgagccgcctctgcgcagagcgctggccttggtcacgtcgctcgccgccgccgcatctggcaccggaggtggcggcggcggcggcggggcgagcggcgggactagcggcagctgcagccccgcgtcctcggagccgccggctgcgcccgccgaccgcctgcgcgccgagagcccgtcgccgccgcgcctgctggccgcgcactgcgcgctgctgcccaagccgggcttcctgggcgcgggcggcggcggcggcggcacgggcggcgggcacggggggccccaccaccacgcgcatccgggcgcagcggccgctgccgccgccgccgccgccgccgccgccgctgggggcctggcgctggggctgcaccctgggggcgcgcagggcggcgcgggcctcccggcgcaggcggcgctctacggccacccggtctacggctactccgcggcggcggcggcggctgcgctggcgggccagcacccggcgctctcctactcgtacccgcaggtgcaaggcgcgcaccccgcgcaccccgccgaccccatcaagctgggcgccggcaccttccagctggaccagtggctgcgcgcgtccaccgcgggcatgatcctgcctaagatgcccgacttcaactcccaggcgcagtcgaacctcctggggaagtgccgccggccgcgcaccgccttcaccagccagcagctgctggagctggagcaccagttcaagctcaacaagtacctgtcgcggcccaagcgcttcgaggtggccacctcgctcatgctcaccgagacccaggtgaagatttggttccagaaccggcggatgaaatggaaacgcagcaaaaaggccaaagagcaggcggcgcaggaagcggagaaacagaagggcggcggcgggggcgcggggaagggcggcgcggaggagccgggagccgaggagctgctggggccgccagcgcccggagacaagggcagcggacgccgcctgcgggacttgagggacagtgaccccgaggaggacgaggacgaggacgacgaggaccatttcccctacagcaacggcgccagcgtccacgccgcctcctccgactgctcctcggaggacgactcgccgcccccgcggcccagccaccagcccgcgccccagtaggagccccgcggcccagcaggtgcggcgcgcacggagcgccccggccggcggcttctcccggaggccccggcgcccgcacccacccggcccggccccgagagcaggctcgaccgccgccccatggacccctcgcccaggccggggctggagggattcggccgcggctccggtcctgggcgcttcccttttaagcaagggcgcctcacctgctcttcaagaaacagcgagagggagacccagggggctgaaacttgaactctggttcttttaaaattaattttggttggtgttgggggaggcgcgagtgcgtgtgagaagaaccgacccaccccgcgcaaggggaagcctcctgtctcccctttccccgcgtccgagaaggcggaaacccacagtgttacctgacttatgaaacttgaaaccgcctctggagccgccattctgcagagtatttggaaaaagaaaaaagggtttatgcttacgtctctggggtcggggggattatgtcacgagcgttcaaactgctggaaatctcaaaactgtactgtctttatttttgtatattgtatttatatataaaaagaaacgtctacgtatgcatgctaaattattatttagcttctcccatcgcccacgatggaatgtaaaataaattggttttgtactggat

SEQ ID NO: 47281 - DNA, 1173 bp, Homo Sapiens
cattttctcttgccaccactaagtaagaagagccttttgcctcccaccatgattctgaggccttaccagccatgtggaactgttaaagaatttgacaccaattttacatatgtgcaacagtcagaattctacttggagccaaacattaagtacgtatttcaagtgagatgtcaagaaacaggcaaaaggtactggcagccttggagttcactgttttttcataaaacacctgaaacagttccccaggtcacatcaaaagcattccaacatgacacatggaattctgggctaacagttgcttccatctctacagggcaccttacttctgacaacagaggagacattggacttttattgggaatgatcgtctttgctgttatgttgtcaattctttctttgattgggatatttaacagatcattccgaactgggattaaaagaaggatcttattgttaataccaaagtggctttatgaagatattcctaatatgaaaaacagcaatgttgtgaaaatgctacaggaaaatagtgaacttatgaataataattccagtgagcaggtcctatatgttgatcccatgattacagagataaaagaaatcttcatcccagaacacaagcctacagactacaagaaggagaatacaggacccctggagacaagagactacccgcaaaactcgctattcgacaatactacagttgtatatattcctgatctcaacactggatataaaccccaaatttcaaattttctgcctgagggaagccatctcagcaataataatgaaattacttccttaacacttaaaccaccagttgattccttagactcaggaaataatcccaggttacaaaagcatcctaattttgctttttctgtttcaagtgtgaattcactaagcaacacaatatttcttggagaattaagcctcatattaaatcaaggagaatgcagttctcctgacatacaaaactcagtagaggaggaaaccaccatgcttttggaaaatgattcacccagtgaaactattccagaacagaccctgcttcctgatgaatttgtctcctgtttggggatcgtgaatgaggagttgccatctattaatacttattttccacaaaatattttggaaagccacttcaataggatttcactcttggaaaagtag

SEQ ID NO: 47282 - DNA, 2270 bp, Homo Sapiens
gtcaggtccatgagctgcccaccgtcctggccttactgtgccccctgccccaccaacataggtgaaagcacctcccctctaaggaagaccatagagaccccaacactgtgggaccccaaagctccttcatgctcactggagctcccaccgtgggtgcttgcaagtcctcagcgctcccggggtacagccctccccttcctgccctctaatgtcctcccctcccttgcccttccctccacttcctttctctgccgtcccctcctctcccatcttgtgacctctttactggcggggcctggagcccatgatggacacttgcggaaggaggggtggcggagcacccctgagatgacatcgctgcctgccccagagcaccccgcctctccctgtgactcagttctttgcagcccagatgtgagcatgtgcaccctgggacctgctgcccgttgggatgcccaggccaaatcagcccctctgcctccatgctgcactgattgcaagagtttcccacatctgcagaggccgtgggctcagccccacaccagccaggccaccagtgttgatagcggtgaggcggggacaaagggaatgtctcagttcacagtgtggacatggtggaggtctcggccttgcgagacaaggcagggggaggggataggaaattgggggtattctgtgactcctgggccaccggggagccagaatcttccagccagactggatgggcagggcttagcttcctgatgccgcccattcaccactttcaccccgggaacctacctgggcatcatgggaggcagagcctgaaccccaacccaaccctaactctaatgctaacccctaaaccatcccccaccctaacccaatcctcgccctaaccctaatgctaacccctgacccgacccaatcctaaccctgatgctaacccctgactcaactctcaccctaaccctgatgctaacccctgacccaatcctcaccctaaccctgatactaacccttaacctaacccaacccagccctaactccaactctaaagctaactcctaaccctaggagaggagcccaggccgggccctctccctgctggtttcctgttgggctttggagccccagatgcctgcccagaggcttccttgtgcggggtggggtccagcagtgggggatgggcccagagctggtatagccaccagcagagccatcctgatccacaggaccatccctggtggggtggggccccctggggcaggaaggccactgaggccagggagactcccaggcccactcacggcgcaggccccacaggagctggctggaggctatgggtgcggggcgtgggcctgccgggggttgcgtgacaggcagtggggagtgggttgtgctggcagctgtgggtgagtgaggaggctcctctcatgaagggccctggggaagtggaatctggccctgagagacccccggcctcctctgcaggggctgctggcaggaggggaaccggggaccacctcccgccacagagcctggggcccccagccttgcctacagggagggtagatgagagtgtaaactgcatatgaggttgggctaaacctggacatgtgtttcataaccaaagcagccaggaatctccggctctgcccagtgatcatctgggcaggacatggggacgagtgtccaggctgaagtcagggcccggccagcagagggccattttgtattgagctccacagctggtcacattctgtggaatgtgcagacgtgcacggcccatcagacagggtctggagtggggctgccgtcttgggcagctcctcccgggtgtctgcaaaatgcagaggtcaccagagccaaggcagcaaggcaaggagcccggcttctaaggaactctgagcaggtgtggtccatggctgggaggcagctggccccacagcacatagcacggagggcggcgcggagtcctggacgctcttggcaggtcccctcatggaggatgtgggggattggcttaggcctggtctggctggccttcctggaccgcagtggccaggagctgaaaaccgtgaccccagtctccctgcagctgttcttgatgggatttctgttcgccagtcagatgcatttgcacaggacttggatcctgaactgtgtaacctggagaggcaggtgtgagcgggccatgctgctggcccagcctgtgccggtgtctgtttctgttgtctctcggcccttctgtgagccctcagtaaagctcttcgtgcttcagtcagcaa

SEQ ID NO: 47283 - DNA, 252 bp, Homo Sapiens
atgttttacttgactctggaatcttaccttgtactctcacatttacatggaagtatagcttatttcaccaattatactatcaaaagcagaagtagttacttacacctgaaaatttgtactgagaatgtagctgtgaatatgtttaagaaagtatacttaaagcagaaatccaaggaagtatatttaaatcaaagcaagaaatcccatttccaaatggcaataaagcatgtgttacatagaatcagtgcatga

SEQ ID NO: 47284 - DNA, 1161 bp, Homo Sapiens
atgttcccggagcccccaaccccggggcctccatcgcccgacacgcctcccgactccagtcgcatcagccacggcccagtgcccccctgggccctggccaccatcgtgctggtctcaggcctcctcatcttcagctgctgtttctgtctctaccggaagagctgtcggaggcggacaggcaagaagagccaggcccaagcccaggtccaccttcaggaagtgaaggggctgggccagagttacatagacaaggtgcagccagaagtagaggagctggagccagcaccatccgggccagggcagcaggtggcagacaagcatgagctaggacgactgcagtactccctggattatgacttccagagtggccagctgctggtgggcattctgcaagcaatgggattggcagccttggatcttggtggctcctcggacccctatgtgcgggtctacctgctgccggacaaacggaggcggtacgagaccaaggtgcatcggcagacgctgaaccctcactttggggagaccttcgccttcaaggtcccctacgtggagctggggggcagggtgctggtcatggcggtgtacgacttcgaccgcttctctcgcaatgacgccatcggggaggtgcgggtccctatgagctccgtggacctggggcggccagtgcaggcctggcgggagctgcaggcggctccgcgggaggagcaggagaagcttggggacatctgcttctccctccgctatgtccccacggccgggaagctcaccgtcatcgtcctggaggctaaaaacctgaagaagatggacgtaggaggactgtcagatccatacgtcaaggtccacctgctgcagggcggcaaaaaggtgcggaagaagaaaaccaccatcaagaagaacactctgaacccctattacaacgaagctttcagcttcgaggtgccctgtgaccaagtccagaaggtgcaggtggagctgaccgtgctggactacgacaagctgggcaagaacgaggccatcgggagggtggccgtgggggcggccgccggcggggctggcctgcggcactgggcggacatgctggccaacccgcggcggcccattgcccagtggcactcgctgcggcccccggaccgagtgaggctgctgcctgcgccctga

SEQ ID NO: 47285 - DNA, 399 bp, Homo Sapiens
gctttctgagagtcatggatctcatgtgcaagaaaatgaagcacctgtggttcttcctcctgctggtggcggctcccagatgggtcctgtcccagctgcagctgcaggagtcgggcccaggactggtgaagccttcggagaccctgtccctcacctgcactgtctctggtggctccatcagcagtagtagttactactggggctggatccgccagcccccagggaaggggctggagtggattgggagtatctattatagtgggagcacctactacaacccgtccctcaagagtcgagtcaccatatccgtagacacgtccaagaaccagttctccctgaagctgagctctgtgaccgccgcagacacggctgtgtattactgtgcgagacacacagtga

SEQ ID NO: 47286 - DNA, 2409 bp, Homo Sapiens
ggcggcggcggcagcagacccctctccagggagtccaggacctgccagcgctggggattcttcccgaacaggcgcttgccctctcttttatggagcttgggcccctgccgcagcccggtagaggctgtggaggtctaccgtccggaagcctggttcccagccccgtggcccattcctggctacggggagtggaggctcccacgaggtagcggtggcctgcagcggcctcctccccgcagtgaagcatgggccagaagctctcggggagcctcaagtcagtggaggtgcgagagccggcgctgcggccggccaagcgggagctgcggggtgcagagcccgggcggccggcgcggctggaccagctgttggacatgccagcggcggggctggctgtgcagctgcggcacgcgtggaaccccgaggaccgctcgctcaacgtcttcgtcaaggacgacgaccggctcaccttccaccggcaccccgtggcccagagcaccgacggcatccgcggcaaggtgggccacgcccgcggcctgcacgcctggcagatcaactggccggctcggcagcgcggcacccacgctgtagttggtgtggccacggcccgtgctcccctgcactccgtgggctacacggcgctggtaggcagtgacgccgagtcgtggggctgggacctgggccgcagccgcctctaccacgacggcaagaaccagcccggcgtggcctacccggcctttctggggcccgacgaggcctttgcgctgcccgactcgctgctcgtggtgctggacatggatgagggcacactcagcttcatcgtggatggccagtacctgggcgtggccttccgaggtctcaagggcaagaagctgtacccggtggtgagtgccgtgtggggccactgtgaagtcaccatgcgctacatcaacggccttgaccccgagcccctgccactgatggacctgtgccggagatccatccgctcggccctgggccgccagcgcctgcaggacatcagctccctgcccctgcctcagtctctcaaaaactatctgcagtaccagtgagccaagcctgatgggcagcacagacacagacacacaccgcagggcccgaccctcctgtcattcacagtcccatggcacataggggaaaggatctacccttctcctggctccccaggacactcagttctttcaaagaccaggatgtggtaccaactttggaaacgaaaggtctcttgccaacagtatctactgccctcgaggcagccctcccaagtcagacacctccttcggagccacagagagcctggagtctgcacctcctggaaatcctgccaccaaccaggacacagcagccaccgtattgatcagagagcctgtttccttattcaagagaatgaataaaacatttaggcaggagactttctattgtgtgccccgttgcagacagggccagggagaaattagccagtgcagggggaaaattgcctctgaataatgaatgatgaaagcctgacgccgtgcccctcctggcccatacgccttgccagggcggcaggattgtcacaccgttttaggactctgtgccactttgagagactgttcccaggaggcccaaccgcagacctggcaagtggacagtgcagtgtggagacaccttccggcttacctctttgaacgttgtttacctacccctttccacgtgctccccttcccagccactgactcacagttctctggatgcccagacacctctcttcagggaagatgagtctgactggtttgccccagggaagagcatatccttaccattattttaagtagcatttgcattttaaaagaggaatgcggagaggacagtacttagtccaaaggtgctaacgggggaactgggggcattgtgacacccaagtctgatgtgtcctgggttggggggccttcctggagtgtcagggtctctgggcaacgtccattcagggtgcggcatggctgtcacaaagctttatttgagcaaattattttttcactttaggagacttctacaagtttgtttcctgtttcaaatgtgtgtgtgatgtgctgtttatttatcagcttgaggtccatgggggcagccttgtgactggaagggtggatatgggagacacattctctacctgctccgagcctggtcctctcgcaggaatgctgctgctgcctccgccgccactgctgctgccacctcttatatgtttcagacactctctgcccagactcatttttaactggaaatcatcacagcagtgggatatcagagccccagacagcactgcctcttcctccccaccccactgcccccaccttaatgtgaatttgactgatgaatgaagagcgtttctaataaagtttgtcattcagtccttca

SEQ ID NO: 47287 - DNA, 450 bp, Homo Sapiens
ctgcagattttcgtgaaaaccctaagggggaagaccatcacccttgaggttgaaccctcagatgcgatagaaaatgtaaaggccaagatccaggataaggaaggaattcctcctgatcagcaaagactgatctttgctggcaagcaactggaagatggacgtactttgtctgactgcaacattcaaaaggagcctactcttcatcttttgctgagactttgtggtgttgctaagaaaaggaagaagtcttaccccactcccaagaagaataagcacaagagaaagaaggtgaagctggatgtcctgaaatgttataaggtggatgagaatgacaaaatttgcccttctgacgaatgtggagctggagtgtttctggtaagccactttgacagacattattgcggcaaatgttgtctgacttactgcttcaacaaaccagaagacaagtaa

SEQ ID NO: 47288 - DNA, 705 bp, Homo Sapiens
atgagaggctgtggcagcaggagactctgtgggagctggagaggatgctggagctggagtgggaagccctctacaagcagcaggccgagccccacagcagctttgaggagctggtgtaataatgagaacaagagtgcactgcagttggagcggcaagtaaaggagctgaagcttggagaacctggaagctaccagccagcagaaacagcagctaaagcccagttgagcctcatggctctccctggggaaggatatggaggaggacatctggacaatgaggaggaggcacctcggcccatgctgaacattccaggggacctggagagccgggaggccatggtggcatttttcaactccgctggagccagtgcccaggaggagcaaagcgtgtgctgccagcccctggctcacccagtggcctcatcccagaaaaagccagaggcagcggccccagccccagagactgggggtgaatctgtgtgtggggacacccactgggccctgcaggaggccatggagaagctgcagcaactttatggaaggagaagatggacctgaaggagctggtggagaaactagagcttcagttcatccacctctcaggacagacagacaccatgagaaagtacatcagccagggggcagtgccaaagacgcagcactgggagaggaggacatcgtcaggctggcccaggaccaggagga

SEQ ID NO: 47289 - DNA, 924 bp, Homo Sapiens
atgaataccactctatttcatccttactctttccttcttctgggaattcctgggctggaaagtatgcatctctgggttggttttcctttctttgctgtgttcctgacagctgtccttgggaatatcaccatcctttttgtgattcagactgacagtagtctccatcatcccatgttctacttcctggccattctgtcatctattgacccgggcctgtctacatccaccatccctaaaatgcttggcaccttctggtttaccctgagagaaatctcctttgaaggatgccttacccagatgttcttcatccacctgtgcactggcatggaatcagctgtgcttgtggccatggcctatgattgctatgtggccatctgtgaccctctttgctacacgttggtgctgacaaacaaggtggtgtcagttatggcactggccatctttctgagacccttagtctttgtcataccctttgttctatttatcctaaggcttccattttgtggacaccaaattattcctcatacttacggtgagcacatgggcattgcccgcctgtcttgtgccagcatcagggttaacatcatctatggcttatgtgccatctctatcctggtctttgacatcatagcaattgtcatttcctatgtacagatcctttgtgctgtatttctactctcttcacatgatgcacgactcaaggcattcagcacctgtggctctcatgtgtgtgtcatgttgactttctatatgcctgcatttttctcattcatgcataggtttggtcggaatatacctcactttatccacattcttctggctaatttctatgtagtcattccacctgctctcaactctgtaatttatggtgtcagaaccaaacagattagagcacaagtgctgaaaatgtttttcaataaataa

SEQ ID NO: 47290 - DNA, 1492 bp, Homo Sapiens
cttgtttcctgagttgtcctgtgctggaggtctgctcagacgaaggtctccatggcgttagaagtcttgatgctcctcgctgtcttgatttggaccggtgctgagaacctccatgtgaaaataagttgctctctggactggttgatggtctcagttatcccagttgcagaaagcagaaatctgtatatatttgcggatgaattacatctgggaatgggctgccctgcaaatcggatacatacatatgtatatgagtttatatatcttgttcgtgattgtggcatcaggacaagggtagtttctgaggaaactctcctttttcaaaccgagctgtactttaccccaaggaatatagatcatgaccctcaggaaatccatttggagtgttccacctctaggaaatcagtgtggcttacaccagtttctactgagaatgaaataaaattggatcctagtccttttattgctgactttcagacaacagcagaagagttaggattattatcttctagtccaaacttgctctgagctaaaggagaaatggaaacttgaagctggtgttatgtattttgcaggaaaacagtttcattttttcatagcaaaaatatagttggtgtatatctctccttaagtctctggtttctaaaaaccctacttcagtaaaggtcctgattagttgattagtgaatgtgtatttctaaatatttgtattcagtaggggtatggctgattaatttaacattaactattaggtaattcatattatacatttaagttctttctgttctgtgtagaagattcagaaatatgtcttcaaagacaatgacttgatctaattgataagaacctccaataaatatgttctaatatttttcaggaagaataaagaatagagagagacatataaatgtgcaagaggcaaaactttgagcatagtgtaaaatttaacatattaactctcacgaaaggcaaaatccttttatgtgcagatactttaattcatgtagattttcctattaatcagtaaagttgaatcctaacaataatgccatgtgacaacctatttagattattccagaattaaattcaatttattttctagagctcaagtaaccactaccttaactgaaatttgatgttaggtttcccttgttcctccgaatggttcttccacactcaaaataattgaatggttgagttggttaagcaaagagttatcctgccacctaagagcattcattaaatgattatttattaccacctactttatactatcttcctttctttaaacatggagtctaaatatgtaatatatcaaaaaatacttctgatttggtagatttcttatatcaagggtgagaattgaactgtgccattggctattcaatagcttattgaatgtatgttttggatgccacatcctcctggaagcaaattttgccaagatactgtttattattatttttaattaaagtgatactattccattttc

SEQ ID NO: 47291 - DNA, 886 bp, Homo Sapiens
gtgacctagagcaggcatggaattttgggtgtcaccaggtaaacagagccctcagcatctgaatagaaactgaacaggaacagaagagattacactacatctgagatggagacctttcctctgctgctgctcagcctgggcctggttcttgcagaagcatcagaaagcacaatgaagataattaaagaagaatttacagacgaagagatgcaatatgacatggcaaaaagtggccaagaaaaacagaccattgagatattaatgaacccgatcctgttagttaaaaataccagcctcagcatgtccaaggatgatatgtcttccacattactgacattcagaagtttacattataatgaccccaagggaaacagttcgggtaatgacaaagagtgttgcaatgacatgacagtctggagaaaagtttcagaagcaaacggatcgtgcaagtggagcaataacttcatccgcagctccacagaagtgatgcgcagggtccacagggcccccagctgcaagtttgtacagaatcctggcataagctgctgtgagagcctagaactggaaaatacagtgtgccagttcactacaggcaaacaattccccaggtgccaataccatagtgttacctcattagagaagatattgacagtgctgacaggtcattctctgatgagctggttagtttgtggctctaagttgtaaatcccacagagctttaggactagggtcttactaaagaaggacctcttcttgttcattcttgtttaaacctttccttaatatctactctttagcactatagtgaactcctgattatttattctaactggaggagtgaaaaatccaaaattgtggataattcaattaaaagttatgactgata

SEQ ID NO: 47292 - DNA, 480 bp, Homo Sapiens
atggcgtccactctggccacgcttgaggagcccttcagcccactgctgcactgtgggagcccctctctgggctggctgaggccagagccggctccctctgcttgtggggagatgtggagggagatgcgcgggtgggaaccggggctgcgcactgcactcgcaggccagtgtgagttccaggtgagcccaggagtgtcggccctgggcagtgaggggcttagcacctgggccaacagctgcggagggtgcaccgggtcccccaacactgccagcccacccacgtcgtgcttgaattcttgccgggtctcagccaccttcccgccaggcagggctcgggacctgcaacccaccatgcctgagccccgcactccccccccacccccgcccccaccaaatgggctcctgccaggcctgagcctcccctacgggcaccgccccctgctctgcggcacctgctcccatcaactgcccaagggctga

SEQ ID NO: 47293 - DNA, 516 bp, Homo Sapiens
atgcctgtaggagctggcctccccactagtctcacctctcccccatccacagaagctcccaagtcatcattactcagaaagcagacccagccccctaagaagcagagttctcctgcagtccatcttcggtgcaccatggaccctgtgatgatgactgtgtccccgcccccagctcaccgccatcgccgtcgaggctctcccacacgctgtgctcactgcccagtagcttgggctcctgacactgatgacgagaagcctcatcagtacccagccatctgctcctaccactgggatgtccctgaggactgggaaggcttccaacacactcaggggacctgggttccctggtctcaggatgccccagagtcccctccccagaccatccgcttccagcctacccctgggcaacagagcgagactccatctcaaaaaaaaaaaaagaagagaaatattggggcccccctcaagaggtacctcactgtaacatcacagctctctgtgacctcactcctttga

SEQ ID NO: 47294 - DNA, 2106 bp, Homo Sapiens
atgcggctccctgacctgagaccctggacctccctgctgctggtggacgcggctttactgtggctgcttcagggccctctggggactttgcttcctcaagggctgccaggactatggctggaggggaccctgcggctgggagggctgtgggggctgctaaagctaagagggctgctgggatttgtggggacactgctgctcccgctctgtctggccacccccctgactgtctccctgagagccctggtcgcgggggcctcacgtgctcccccagccagagtcgcttcagccccttggagctggctgctggtggggtacggggctgcggggctcagctggtcactgtgggctgttctgagccctcctggagcccaggagaaggagcaggaccaggtgaacaacaaagtcttgatgtggaggctgctgaagctctccaggccggacctgcctctcctcgttgccgccttcttcttccttgtccttgctgttttgggtgagacattaatccctcactattctggtcgtgtgattgacatcctgggaggtgattttgacccccatgcctttgccagtgccatcttcttcatgtgcctcttctcctttggcagctcactgtctgcaggctgccgaggaggctgcttcacctacaccatgtctcgaatcaacttgcggatccgggagcagcttttctcctccctgctgcgccaggacctcggtttcttccaggagactaagacaggggagctgaactcacggctgagctcggataccaccctgatgagtaactggcttcctttaaatgccaatgtgctcttgcgaagcctggtgaaagtggtggggctgtatggcttcatgctcagcatatcgcctcgactcaccctcctttctctgctgcacatgcccttcacaatagcagcggagaaggtgtacaacacccgccatcaggaagtgcttcgggagatccaggatgcagtggccagggcggggcaggtggtgcgggaagccgttggagggctgcagaccgttcgcagttttggggccgaggagcatgaagtctgtcgctataaagaggcccttgaacaatgtcggcagctgtattggcggagagacctggaacgcgccttgtacctgctcgtaaggagggtgctgcacttgggggtgcagatgctgatgctgagctgtgggctgcagcagatgcaggatggggagctcacccagggcagcctgctttcctttatgatctaccaggagagcgtggggagctatgtgcagaccctggtatacatatatggggatatgctcagcaatgtgggagctgcagagaaggttttctcctacatggaccgacagccaaatctgccttcacctggcacgcttgcccccaccactctgcagggggttgtgaaattccaagacgtctcctttgcatatcccaatcgccctgacaggcctgtgctcaaggggctgacgtttaccctacgtcctggtgaggtgacggcgctggtgggacccaatgggtctgggaagagcacagtggctgccctgctgcagaatctgtaccagcccacagggggacaggtgctgctggatgaaaagcccatctcacagtatgaacactgctacctgcacagccaggtggtttcagttgggcaggagcctgtgctgttctccggttctgtgaggaacaacattgcttatgggctgcagagctgcgaagatgataaggtgatggcggctgcccaggctgcccacgcagatgacttcatccaggaaatggagcatggaatatacacagatgtaggggagaagggaagccagctggctgcgggacagaaacaacgtctggccattgcccgggcccttgtacgagacccgcgggtcctcatcctggatgaggctactagtgccctagatgtgcagtgcgagcaggccctgcaggactggaattcccgtggggatcgcacagtgctggtgattgctcacaggctgcagacagttcagcgcgcccaccagatcctggtgctccaggagggcaagctgcagaagcttgcccaggagggacaggacctctattcccgcctggtgcagcagcggctgatggactga

SEQ ID NO: 47295 - DNA, 513 bp, Homo Sapiens
tcaggcacaacgtgtttgattgctctgctatcagataaagacctcactgtggccaacgtgggtgactcgcgcggggtcctgtgtgacaaagatgggaacgctattcctttgtctcatgatcacaagccttaccagttgaaggaaagaaagaggataaagagagcaggtggtttcatcagtttcaatggctcctggagggtccagggaatcctggccatgtctcggtccctgggggattatccgctgaaaaatctcaacgtggtcatcccagacccagacatcctgacctttgacctggacaagcttcagcctgagttcatgatcttggcatcagatggtctctgggatgctttcagcaatgaagaagcagttcgattcatcaaggagcgcttggatgaacctcactttggggccaagagcatagttttacagtcattttacagaggctgccctgacaatataacagtcatggtggtgaagttcagaaatagcagcaaaacagaagagcagtga

SEQ ID NO: 47296 - DNA, 999 bp, Homo Sapiens
atggtgaactccacccaccgtgggatgcacacttctctgcacctctggaaccgcagcagttacagactgcacagcaatgccagtgagtcccttggaaaaggctactctgatggagggtgctacgagcaactttttgtctctcctgaggtgtttgtgactctgggtgtcatcagcttgttggagaatatcttagtgattgtggcaatagccaagaacaagaatctgcattcacccatgtactttttcatctgcagcttggctgtggctgatatgctggtgagcgtttcaaatggatcagaaaccattgtcatcaccctattaaacagtacagatacggatgcacagagtttcacagtgaatattgataatgtcattgactcggtgatctgtagctccttgcttgcatccatttgcagcctgctttcaattgcagtggacaggtactttactatcttctatgctctccagtaccataacattatgacagttaagcgggttgggatcatcataagttgtatctgggcagcttgcacggtttcaggcattttgttcatcatttactcagatagtagtgctgtcatcatctgcctcatcaccatgttcttcaccatgctggctctcatggcttctctctatgtccacatgttcctgatggccaggcttcacattaagaggattgctgtcctccccggcactggtgccatccgccaaggtgccaatatgaagggagcgattaccttgaccatcctgattggcgtctttgttgtctgctgggccccattcttcctccacttaatattctacatctcttgtcctcagaatccatattgtgtgtgcttcatgtctcactttaacttgtatctcatactgatcatgtgtaattcaatcatcgatcctctgatttatgcactccggagtcaagaactgaggaaaaccttcaaagagatcatctgttgctatcccctgggaggcctttgtgacttgtctagcagatattaa

SEQ ID NO: 47297 - DNA, 225 bp, Homo Sapiens
tctcctagtgttttgacgaaacctcaggtgtatggccttctagccaagtacctgtggtttcacattgttggagcatttgtggtattctggctggtggcagctctctatcaaattgctgtggctgaaccaagaaagaaggcatacacagatttctacagaaattacgattccatgaaagattttgaggacatgaggaagactggtacttttcagagtgcaaagtga

SEQ ID NO: 47298 - DNA, 2565 bp, Homo Sapiens
ggaggaggaagcaagcgagggggctggttcctgagcttcgcaattcctgtgtcgccttctgggctcccagcctgccgggtcgcatgatccctccggccggagctggtttttttgccagccaccgcgaggccggctgagttaccggcatccccgcagccacctcctctcccgacctgtgatacaaaagatcttccgggggctgcacctgcctgcctttgcctaaggcggatttgaatctctttctctcccttcagaatcttatcttggctttggatcttagaagagaatcactaaccagagacgagactcagtgagtgagcaggtgttttggacaatggactggttgagcccatccctattataaaaatgtctcagagcaaccgggagctggtggttgactttctctcctacaagctttcccagaaaggatacagctggagtcagtttagtgatgtggaagagaacaggactgaggccccagaagggactgaatcggagatggagacccccagtgccatcaatggcaacccatcctggcacctggcagacagccccgcggtgaatggagccactggccacagcagcagtttggatgcccgggaggtgatccccatggcagcagtaaagcaagcgctgagggaggcaggcgacgagtttgaactgcggtaccggcgggcattcagtgacctgacatcccagctccacatcaccccagggacagcatatcagagctttgaacaggtagtgaatgaactcttccgggatggggtaaactggggtcgcattgtggcctttttctccttcggcggggcactgtgcgtggaaagcgtagacaaggagatgcaggtattggtgagtcggatcgcagcttggatggccacttacctgaatgaccacctagagccttggatccaggagaacggcggctgggatacttttgtggaactctatgggaacaatgcagcagccgagagccgaaagggccaggaacgcttcaaccgctggttcctgacgggcatgactgtggccggcgtggttctgctgggctcactcttcagtcggaaatgaccagacactgaccatccactctaccctcccacccccttctctgctccaccacatcctccgtccagccgccattgccaccaggagaaccactacatgcagcccatgcccacctgcccatcacagggttgggcccagatctggtcccttgcagctagttttctagaatttatcacacttctgtgagacccccacacctcagttcccttggcctcagaattcacaaaatttccacaaaatctgtccaaaggaggctggcaggtatggaagggtttgtggctgggggcaggagggccctacctgattggtgcaacccttaccccttagcctccctgaaaatgtttttctgccagggagcttgaaagttttcagaacctcttccccagaaaggagactagattgcctttgttttgatgtttgtggcctcagaattgatcattttccccccactctccccacactaacctgggttccctttccttccatccctaccccctaagagccatttaggggccacttttgactagggattcaggctgcttgggataaagatgcaaggaccaggactccctcctcacctctggactggctagagtcctcactcccagtccaaatgtcctccagaagcctctggctagaggccagccccacccaggagggagggggctatagctacaggaagcaccccatgccaaagctagggtggcccttgcagttcagcaccaccctagtcccttcccctccctggctcccatgaccatactgagggaccaactgggcccaagacagatgccccagagctgtttatggcctcagctgcctcacttcctacaagagcagcctgtggcatctttgccttgggctgctcctcatggtgggttcaggggactcagccctgaggtgaaagggagctatcaggaacagctatgggagccccagggtcttccctacctcaggcaggaagggcaggaaggagagcctgctgcatggggtggggtagggctgactagaagggccagtcctgcctggccaggcagatctgtgccccatgcctgtccagcctgggcagccaggctgccaaggccagagtggcctggccaggagctcttcaggcctccctctctcttctgctccacccttggcctgtctcatccccaggggtcccagccaccccgggctctctgctgtacatatttgagactagtttttattccttgtgaagatgatatactatttttgttaagcgtgtctgtatttatgtgtgaggagctgctggcttgcagtgcgcgtgcacgtggagagctggtgcccggagattggacggcctgatgctccctcccctgccctggtccagggaagctggccgagggtcctggctcctgaggggcatctgcccctcccccaacccccaccccacacttgttccagctctttgaaatagtctgtgtgaaggtgaaagtgcagttcagtaataaactgtgtttactcagtgaacaaaga

SEQ ID NO: 47299 - DNA, 1015 bp, Homo Sapiens
ggctccatctcctttttcttgacagtctctcaggtagggccgcggcgctcagcggctggaggtcgacgggattcggaggaagcctacagagtctcggccttgcccagcggtggcgtcgctgctccaggccgatcttcgagccagcagaaaagccacagagggcagcgaatgcggcagcgggcggcagaacacagggaagaacagcccgcgcaataggcggcgactgatgcgacttccatcctggcggggaaggaggttccctagtcggctcgacgcttcaacaccatggataggagtccccccacggcctcggcgatggttttccgactgacagagggttgaaaagcccctgagcaacgcgataccggaaggactgggtaggccggctggtgcggtggaagcgaagcccaaaatggccgcagggcccgcgcgccggcaggacacccccctagacgccggaagagacgcaggactgttgggcgtctacgtccctagcgccgcgccgcccaacgtcactcgcaaaatccccggggggcgggcctttccgcccacttccgtgtggccgccgattggttttgccagatttccctgtcggcttccttactcgaggtagagccgcacggcagcgtgaggttgcatcagccggggcgggggggggggggggggggggggggggaatgcacgcatgcgcagtcgtttctgtgtggtctcctaggagaccgccccaacagccctctaggttaaaggtcttggggaggggaggggttttcaaaataacccgagaatttcccggaggcgttttgatggcctaatacacactgacgtgtgtacagtcatcccctctcatgaaatggggattagttccaggaccccgtagacaccagaatccgcagacggtcaagtcccttatgtaaaatggtatagtgtttgcatataacctgcatacaccttcccagatatttaaaccatcccctagattaagtataatacctaatacaatgcaagtgctatggaa

SEQ ID NO: 47300 - DNA, 318 bp, Homo Sapiens
aaaattaatcataactggcggaaacccggaggtactaacaacagggttcatagaaggttcaagggccagaccttgatgcccaacactggttatgagagcagcaaaaaaacaaagcacatgctgcccagtggcttctggaagttcctgatctacaacgtcagggagctggaagtgctgctgatgtgcaacaaatcttactgtgctgctatcactcacaatgtttcctccaagaaccgcaaagccatcctggaaagaggagcccagcgggccatcgtcaccaatcccaatgcgaggctgtacaacgcagaaagtgaatag

SEQ ID NO: 47301 - DNA, 339 bp, Homo Sapiens
atgagctggggcacggagctgtgggatcagttcgacagcttagacaagcatacacaatggggaattgacttcttggaaagatatgccaaatttgttaaagagaggatagaaattgaacagaactatgcgaaacaattgagaaatctggttaagaagtactgccccaaacgttcatccaaagatgaagagccacggtttacctcgtgtgtagccttttttaatatccttaatgagttaaatgactatgcaggacagcgagaagttgtagcagaagaaatggcgcacagagtgtatggtgaattaatgagatatgctcatgatctgaaaactgaaagaaaa

SEQ ID NO: 47302 - DNA, 1347 bp, Homo Sapiens
atgctgtcccggtcccactgtgtcccgggcgttcactcgctctctgccttccagaaggggaactgccctctagggagacattccctgcctggggtctccttatgccagggaccaggttaccctaacagcaggaaggttgtcattaacaacagtgtcttcagtgttcgcttcttcagaactacaactgtatgcaagtatgacttggttacagtcaaaaccccagcgtttgcagaacctgtcacagagggagatgtcaggtgggagaaagctgttggagacacagttgcagaagatgaagtggtttgtgagattgaaactgacaagacattggtgcaggttccatcaccagcaaatggcatgattgaagctcttttcgtacctgatgggggaaaagtcgaaggaggcactccgcttttcacactcaggaaaactggtgctgctcctgctaaggccaagccggctgaagctcctgctgctgcagccccaaaagcagaacctatagcagcggcagttcctccccatgcagcacccatacccactatgccaccagtgccctcgccctcacaacctccttctagcaaacctgtgtctgcagtaaaacccactgctgtcccaccactagctgagccaggagctggcaaaggtctgcattcagaacatcaggagaaaatgaacaggatgcggcagtgcattgctcagcgtctgaaggaggcccagaatacaccaatgctgacaatttttaatgagattgatgtgagtaacatccagaagatgagggctcggcacaaagaggcttttttgaagaaacataacctcaaactaggcttcatgtcggcatctgtgaaggcctcagcctttgccttgcaggaacagcctgttgtaaacgcagtgattgatgatataaccaaagaggtggtatatagggattatattgacatcagtgttgcagtggccaccccacagggtctggtggttccagtcatcaggaatgtggaagctatgaattatgcagatattgaacagaccatcactgaactgggagagaaggcccgaaagaatgaatttgccattgaagatatggatggtggtaccttcaccattagcaatggaggtgtttttggctcactctttgaacacccattatcaacccccctgtctgccatcctggggatgcatggcatctttgacaagccagtggctataggaggcaaggtagaggtgcagcccatgatgtacgtggcactgacctatgatcaccggctgattgatggcagagaggctgtgactttcctccgcaaaatcaaggcagcggtagaggatcccagagtcctcctctttgatctttag

SEQ ID NO: 47303 - DNA, 1107 bp, Homo Sapiens
atgcaaaagtggttttctgctttcgatgatgcaatcattcagcgacagtggcgggcaaacccctcccggggcgggggaggtgtgagcttcacgaaggaggttgacaccaacgtggccaccggcgcccctccacgccgccaacgagtccccgggcgtgcgtgcccttggagggagccaatccgcggccggcgtggggcccggcctggcggaggtgatgctggagggacgcccggggagaccgtacgtcactgctctgcgccggaagaccctattttcaggttctcttccctccattcctaccccttccccggtaccataaaatcccgggatatgagctggaagaggcatcacctgatcccggagacctttggagttaagaggcggcggaagcgagggcctgtggagtcggatcctcttcggggtgagccagggtcggcgcgcgcggctgtctcagaactcatgcagctgttcccgcgaggcctgtttgaggacgcgctgccgcccatcgtgctgaggagccaggtgtacagccttgtgcctgacaggaccgtggccgaccggcagctgaaggagcttcaagagcagggggagatcagaatcgtccagctgggcttcgacttggatgcccatggaattatcttcactgaggactacaggaccagagtatgtgactgtgtcctcaaggcctgtgatggccgaccgtatgctggggcagtgcagaaatttctagcttcagtacttccagcctgtggggaccttagtttccagcaggaccaaatgacacagacctttggcttcagggactcagaaatcacgcatctggtgaatgctggagtcctcaccgtccgagatgctgggagctggtggctagctgtgcctggagctgggagattcatcaagtactttgttaaagggcgccaggctgtccttagcatggtccggaaggcaaagtaccgggaactgctcctatcagagctcctgggccggcgggcgcctgtcgtggtgcggcttggcctcacctaccatgtgcacgacctcattggggcccagctagtggactgcatctctaccacttcaggaaccctcctccgcctgccagagacatga

SEQ ID NO: 47304 - DNA, 4773 bp, Homo Sapiens
ttttgtcagcctggcgggtggcagctgtccagagagaggaagcagccaacgttctttgtggttgtcctgacagacattgactcagatcgacattactgctcatgcctaaccttctatgaggcagagatcaatcttcagggaacaaagaaggaagagattgaaggtgaagcaaaagtgtctggtttaattcagcctgcagaagtgtttgctcccaaaagcctggtgttggtatccagattatattatccagaaatttttagggcttgcctgggtttgatctataccgtgtatgtggacagcctgaatgtctccttggaaagtctaattgcaaacctttgtgcctgccttgtcccagcggctggagggtctcagaagctgttttctttgggtgcaggagatagacagttgatccagactcctttacatgatagtcttcctatcacgggcactagtgtggctctcctgttccagcaattgggaattcaaaatgtcctcagcctcttttgtgcagtcctcacagaaaataaggttctcttccattctgcaagtttccagagacttagtgatgcttgtagagccctggaatctttaatgtttcctcttaaatatagttatccttatatccctattctcccggctcagctactggaagttctaagttccccaacgcctttcattattggagtacattctgtctttaaaactgatgtccatgaacttttagatgtaatcatagcagatttggatggaggcactattaaaattcccgaatgtattcacctctcttccctcccagaaccacttctacatcagactcaatcagctctttctttgattttacacccagatttggaagtagcagatcatgcttttcctcctccacgaacagctttatcccactcaaaaatgctggataaagaggtgcgagccgttttccttagattatttgcacaactcttccaaggatatagatcctgcctgcaacttataagaattcatgcagagccagtaatacatttccacaagacagcattcttggggcagcgtggtttggtcgagaatgatttcctcactaaagtactcagtggaatggcatttgcaggttttgtttcagaaagaggtcctccttatagatcttgtgatctctttgatgagttggtagcctttgaagtagagagaattaaagttgaagaaaataacccagtgaagatgataaagcatgtcagggaacttgctgagcaactattcaaaaatgagaatccaaatcctcatatggcattccagaaagttccacggccaacagaaggatcccatttgcgagttcatattcttcctttcccagagattaatgaagcccgggttcaggaattaatacaggaaaatgttgctaagaaccagaatgcacctcctgccacacgaatagaaaagaaatgtgttgtgccagcaggtccacctgttgtttcgataatggacaaggtgacgacagttttcaacagtgcacaaagactagaagttgtcagaaactgtatctcattcatatttgaaaataaaattttggaaactgaaaagacccttcctgctgcactcagagcccttaaaggaaaggcagcaagacagtgtctcactgatgaattgggtttgcatgtccagcaaaaccgggcaatattagaccatcaacagtttgactacataataaggatgatgaattgtactctacaggattgttcaagtttagaagaatacaacattgccgcagcattactccctttgaccagtgctttctataggaaacttgcccctggagtcagccagtttgcttacacgtgtgtacaagaccaccccatttggacaaatcagcaattttgggagacaaccttttacaatgcagtgcaggaacaggttcgctccctttatctctcagccaaggaagacaatcatgccccgcatctgaagcaaaaggataagcttcctgatgaccattatcaggagaagacagcaatggacctggcagctgagcaactacgcctttggcctaccctgagcaagtcaactcagcaagagctagtgcaacatgaggaaagcactgtctttagtcaggccattcactttgcaaacctcatggtgaacctgctagttccactcgacacaagtaaaaacaagctcctaagaacatcagcgccaggtgactgggagagcggaagcaacagcattgtcacaaacagtattgcaggaagtgtagctgagagctatgatacagagagtgggtttgaagattcagagaatactgacattgccaattctgttgtgcggttcattacccgatttattgacaaagtttgtacagagagtggagttactcaggatcacatcaagagccttcattgcatgataccaggaattgtagctatgcacattgagaccctagaagcagtacatcgagaaagcagaagacttccgcctattcagaagcccaagattcttagacctgctctgctgccaggagaagaaattgtctgtgagggtcttcgagtcttgctggatcctgatggaagagaagaagctactggaggtcttcttggaggccctcagctcctgccagcagaaggagccttgttcctcaccacatacagaattctcttcagaggaacaccccatgatcagttagtgggtgagcagacagttgtgcggagctttcccattgcctccatcaccaaggagaagaagattacaatgcagaaccagctacagcagaacatgcaagaaggactgcagatcacatcagcatcttttcagttgattaaggtagcatttgatgaagaagtcagtccagaagtagtagagatctttaagaaacagctgatgaagttccgttatcctcagtccattttcagtacctttgcttttgctgctggacaaactaccccacaaataattttaccaaaacagaaggaaaagaacacttcttttcgtaccttctcaaaaacaattgtgaaaggtgccaaaagggcagggaaaatgacaattgggcggcaatatttactgaagaagaagacagggacaattgtggaagaaagagtaaatcgtcctggatggaatgaagatgatgatgtatctgtttcagatgagagtgagctccccacaagtaccaccctgaaggcctccgagaagtctacaatggaacagttggtggaaaaagcttgtttcagagactatcagcgtttaggtttaggaaccataagtggcagctcttcccgttcaagacccgagtattttagaattactgcctccaacaggatgtattcactctgccggaggtaagtgtgtcagtgggctccaaaaagaggtcttccttcctttcttcttatttgaatctttaataggccatttgcatccatagccctgagatagataaaaatgcctgaaaataagaacaaggtctccaggatacgagcaagcatctcattggcattctcggaacaattaccttactgaaagtacctctagtaggtgagaaggtgaaaggtaaagtactcaccccctatgaatttctcttgtctttctcttcccagtttgcttcttttctagcatgactaaagataacttgaagaacaggattttcccagcccaatagaggacatgaaagtcttttgtaggctggggagccacaaactctttctataaagggtcagttggtaaatattttcagtttatgagccatagagtctcttgttgcagctattcaactgtgccgcaaaagcagccacagacagtaaggaaatgagtaggcatggccagttttggcccacaggctataatttgctgacccaggtgtaggcaaggctttcttatgcggtctaattggaatgttttcaagggaatattacttaaaggatgtaaataaagaggcattttcttttttcagttcttgtcatctctcactgtttttcaaatatgttgagtcttattccatgctttactatatgtaaatatatattttctaaaattacattttcaccatccacaagtttagtcattttcatctccaggtaagatttttctttgcatttataaattcctgcttaaacagctctgaaatcactttgtaaattgtaagctttgtacatattttagaaagttatcttaatgttactttcaaccctgttgctcttgaagatagatatgtcattttaaatggcaatttaagtttacaaatattaatatgaaacttcagaaacaagttgggaatatagttttgagattgtggccaaataaacattttgcatgaagttctgaaaaattggcactctgagtatgcagtaatttttctggaattctccgtcattctaactaaattttctctgaagatgagtcatgttgtcggggtgtgatgtcctgctgtttggaaagtttgctatcaaaattatgccagccattgagaaaacagactcatttatcattccaatctgtcagaagtaaaataaaattttaatagatgacttattagaacactggttataaagcatttatgatggtaaaaagtaatatatatccattaagttattagcaggaaggaaatggaataataaaaaataatccaaaagaaggcaagaaaggaaaaaaaaggggacatagaacaaatggaataaataacaagtagtaagatggtagatttaaattcaaatatatccataattgcattaattattaattgactaaatgttccaattcaaagaaagagatcagggtttgctttaaaaaaaaaaaaaaaaaaaa

SEQ ID NO: 47305 - DNA, 2253 bp, Homo Sapiens
atggcagcgcgcccgctgcccgtgtcccccgcccgcgccctcctgctcgccctggccggtgctctgctcgcgccctgcgaggcccgaggggtgagcttatggaaccaaggaagagctgatgaagttgtcagtgcctctgttgggagtggggacctctggatcccagtgaagagcttcgactccaagaatcatccagaagtgctgaatattcgactacaacgggaaagcaaagaactgatcataaatctggaaagaaatgaaggtctcattgccagcagtttcacggaaacccactatctgcaagacggtactgatgtctccctcgctcgaaattacacggtaattctggcacggcactgttactaccatggacatgtacggggatattctgattcagcagtcagtctcagcacgtgttctggtctcaggggacttattgtgtttgaaaatgaaagctatgtcttagaaccaatgaaaagtgcaaccaacagatacaaactcttcccagcgaagaagctgaaaagcgtccggggatcatgtggatcacatcacaacacaccaaacctcgctgcaaagaatgtgtttccaccaccctctcagacatgggcaagaaggcataaaagagagaccctcaaggcaactaagtatgtggagctggtgatcgtggcagacaaccgagagtttcagaggcaaggaaaagatctggaaaaagttaagcagcgattaatagagattgctaatcacgttgacaagttttacagaccactgaacattcggatcgtgttggtaggcgtggaagtgtggaatgacatggacaaatgctctgtaagtcaggacccattcaccagcctccatgaatttctggactggaggaagatgaagcttctacctcgcaaatcccatgacaatgcgcagcttgtcagtggggtttatttccaagggaccaccatcggcatggccccaatcatgagcatgtgcacggcagaccagtctgggggaattgtcatggaccattcagacaatccccttggtgcagccgtgaccctggcacatgagctgggccacaatttcgggatgaatcatgacacactggacaggggctgtagctgtcaaatggcggttgagaaaggaggctgcatcatgaacgcttccaccgggcaagtaccattgcttccatctgctttgacagtgtacccatttcccatggtgttcagcagttgcagcaggaaggacttggagaccagcctggagaaaggaatgggggtgtgcctgtttaacctgccggaagtcagggagtctttcgggggccagaagtgtgggaacagatttgtggaagaaggagaggagtgtgactgtggggagccagaggaatgtatgaatcgctgctgcaatgccaccacctgtaccctgaagccggacgctgtgtgcgcacatgggctgtgctgtgaagactgccagctgaagcctgcaggaacagcgtgcagggactccagcaactcctgtgacctcccagagttctgcacaggggccagccctcactgcccagccaacgtgtacctgcacgatgggcactcatgtcaggatgtggacggctactgctacaatggcatctgccagactcacgagcagcagtgtgtcacgctctggggaccaggtgctaaacctgcccctgggatctgctttgagagagtcaattctgcaggtgatccttatggcaactgtggcaaagtctcgaagagttcctttgccaaatgcgagatgagagatgctaaatgtggaaaaatccagtgtcaaggaggtgccagccggccagtcattggtaccaatgccgtttccatagaaacaaacatccccctgcagcaaggaggccggattctgtgccgggggacccacgtgtacttgggcgatgacatgccggacccagggcttgtgcttgcaggcacaaagtgtgcagatggaaaaatctgcctgaatcgtcaatgtcaaaatattagtgtctttggggttcacgagtgtgcaatgcagtgccacggcagaggggtgtgcaacaacaggaagaactgccactgcgaggcccactgggcacctcccttctgtgacaagtttggctttggaggaagcacagacagcggccccatccggcaagcagaagcaaggcaggaagctgcagagtccaacagggagcgcggccagggccaggagcccgtgggatcgcaggagcatgcgtctactgcctcactgacactcatctga

SEQ ID NO: 47306 - DNA, 345 bp, Homo Sapiens
atgaaggtgtatatctattcctctgggagtgtagaggcacagaaactgttattcgggcagtctgcgaagggaaagattcttgagcttgttgatggtccctttgataccaagattggacacaaagtagagaatgaaagttatcaaaggattgcagactgcactgggggctcaaccaacaacattttgtttctgacagatgttactcaagaggccagtgctgctgaggaagcagatgtgcacgtagcggtggtggtgagacttggagacatattgaaagatgatgagaagacttactacagcctcatcacatccttcagcaaactgtacctgccctcctcaacctaa

SEQ ID NO: 47307 - DNA, 387 bp, Homo Sapiens
gttgtgacaaagacctttcacggtacaggcctggttcctccagtagataaaaatgttgttggatacagagagctccctgaaacagatgctgacctcaagagaatttgcaagacaatagttgaggctgcaagtgatgatgagagacgaaaagcttttgctcccattcaggaaatgatgacttttgtgcagtttgctaatgatgaatgtgattatggtatggggcttgagttgggaatggacctcttttgctatggctcacattattttcataaagttgctggccagcttttacctcttgcatataatctgttgaagaggaatctgtttgcagaaattatgaaggatcatctggcaaacagaagaaaagagaacatagaccaatttgct

SEQ ID NO: 47308 - DNA, 1125 bp, Homo Sapiens
atgaagaagaggagaaaggttacttcaaatcttgagaagatccatctaggctatcataaagattcttcagaaggaaatgttgcagtggagtgtgaccaagtgacctatactcattctgcaggaagaccaactcctgaagctcttcactgttaccaggaacttcctccctctccagatcagagaaagcttttaagttctttgcagtataataagaatttgctaaaatatttaaatgatgataggcagaagcaaccatctttttgtgatttacttatcatagtggaaggaaaagaatttagtgcacataaagtagtcgttgctgtcggcagtagttattttcatgcgtgtttgagcaaaaatccaagcactgatgttgtcaccctggatcacgtaacacattcagtttttcagcatttgcttgaatttctttacacatcagaattttttgtgtacaaatatgaaatacctcttgttttagaggctgcaaaatttttggacattatagatgcagtgaagttgttaaataacgaaaatgttgccccttttcattcagagctaactgaaaagtcatcaccagaagaaacactaaatgaattaactggaagactatcaaataatcatcagtgcaaattctgtagtagacatttttgttataaaaagtctttagagaatcatttggctaaaacccataggtcccttttattagggaaaaaacatgggttaaaaatgctggagagaagtttctccgcaagaagatcaaaaaggaatcggaagtgccctgttaagtttgatgacaccagcgatgatgaacaggaaagtggtgatgggtcagacaatttgaatcaagaaaattttgataaggaaaagtcagatagaaatgattctgaggaccctggaagtgaatataatgctgaagaagatgagctagaggaggagatgtcagatgagtactctgacattgaagaacaaagtgaaaaggatcataatgatgcagaagaagaacctgaggctggtgattctgtaggaaatgttcatgaggggttaactccagtggtcattcagaacagcaacaaaaaaatattgcagtgtcctaaatgtgataaaacatttgaccgaataggtaag

SEQ ID NO: 47309 - DNA, 1852 bp, Homo Sapiens
gaaatggagtttcaaaatcacaagcttctttcccacatgaacataagactaggagcacatatggaagagtaaagttgaagggaatttggatgatgatttggcaagatgctgtgggatagtaacatctttttgagggaagaattggcttcctttcttgaaagtggtgaaggtacagcatatagctgcatggaagaaacagtaatcggatggctaccttctacattttgtattaggaaacaaagtccattgtaagagtccatgttgatcttggaaatagaaggattgaaaaaagctaaatttccacaaagaacaagaacttgaccatctcctttttgatctgaagactaggggacaatggatatcatagagacagcaaaacttgaagaacatttggaaaatcaacccagtgatcctacgaacacttatgcaagacccgctgaacctgttgaagaagaaaacaaaaatggcaatggtaaacccaagagcttatccagtgggctgcgaaaaggcaccaaaaagtacccggactatatccaaattgctatgcccactgaatcaaggaacaaatttccactagagtggtggaaaacgggcattgccttcatatatgcagttttcaacctcgtcttgacaaccgtcatgatcacagttgtacatgagagggtccctcccaaggagcttagccctccactcccagacaagttttttgattacattgatagggtgaaatgggcattttctgtatcagaaataaatgggattatattagttggattatggatcacccagtggctgtttctgagatacaagtcaatagtgggacgcagattctgttttattattggaactttatacctgtatcgctgcattacaatgtatgttactactctacctgtgcctggaatgcatttccagtgtgctccaaagctcaatggagactctcaggcaaaagttcaacggattctacgattgatttctggtggtggattgtccataactggatcacatatcttatgtggagacttcctcttcagcggtcacacggttacgctgacactgacttatttgttcatcaaagaatattcgcctcgtcacttctggtggtatcatttaatctgctggctgctgagtgctgccgggatcatctgcattcttgtagcacacgaacactacactatcgatgtgatcattgcttattatatcacaacacgactgttttggtggtaccattcaatggccaatgaaaagaacttgaaggtctcttcacagactaatttcttatctcgagcatggtggttccccatcttttatttttttgagaaaaatgtacaaggctcaattccttgctgcttctcctggccgctgtcttggcctcctggctgcttcaaatcatcatgcaaaaagtattcacgggttcagaagattggtgaagacaatgagaaatcgacctgaggagcaaaacaaaggcatcagctcttacaccaaaagagttaacgctgtaaccaaaggtatagttttgttttttattttaggagaactgactggtaaatgaagaaatggaccaaattttgtgtaaacgattagaaagatgaacaaagtattgccctttgactggttttcttcttcatcctgagaaagatacattctcttgcagctcttcattcattggtgacaagcccccaccccgggactttactaatgagcttgttaaagaggtgccaaagaacatattcctcctttctttattctttctccaccaaaaccctctacttcagaattttttcaggatatttttcagcccaaggtcagaagaatgtgttaatattttaaataaaatatctggacatctaca

SEQ ID NO: 47310 - DNA, 1499 bp, Homo Sapiens
ttttggggctgtgcttggcgcgtaccgtgcggtccctgtagttggaggacgggcggtcgcgcggcctttcccactagccggaggtcggagataagtacccgccgcccggctcctctcgggaaagcggggtggtcctcgaaccttcagcgagggtggggagttgcccagtagcctctagttcgttagtcaaaacgtgaaaaaaaagacctgctttgccctgggaaatagtaaccctgccaaatacatcagcttgtaggagacagaggatgtgatggagctgcttgaagaagatctcacatgccctatttgttgtagtctgtttgatgatccacgggttttgccttgctcccacaacttctgcaaaaaatgcttagaaggtatcttagaagggagtgtgcggaattccttgtggagaccagctccattcaagtgtcctacatgccgtaaggaaacttcagctactggaattaatagcctgcaggttaattactccctgaagggtattgtggaaaagtataacaagatcaagatctctcccaaaatgccagtatgcaaaggacacttggggcagcctctcaacattttctgcctgactgatatgcagctgatttgtgggatctgtgctactcgtggggagcacaccaaacatgtcttctgttctattgaagatgcctatgctcaggaaagggatgcctttgagtccctcttccagagctttgagacctggcgtcggggagatgctctttctcgcttggataccttggaaactagtaagaggaaatccctacagttactgactaaagattcagataaagtgaaggaattttttgagaagttacaacacacactggatcaaaagaagaatgaaattctgtctgactttgagaccatgaaacttgctgttatgcaagcatatgacccagagatcaacaaactcaacaccatcttgcaggagcaacggatggcctttaacattgctgaggctttcaaagatgtgtcagaacccattgtatttctgcaacagatgcaggagtttagagagaaaatcaaagtaatcaaggaaactcctttacctccctctaatttgcctgcaagccctttaatgaagaactttgataccagtcagtgggaagacataaaactagtcgatgtggataaactttctttgcctcaagacactggcacattcattagcaagattccctggagcttttataagttatttttgctaatccttctgcttggccttgtcattgtctttggtcctaccatgttcctagaatggtcattatttgatgacctggcaacttggaaaggctgtctttcaaacttcagttcctatctgactaaaacagccgatttcatagaacaatcagttttttactgggaacaggtgacagatgggtttttcattttcaatgaaagattcaagaattttactttggtggtactgaacaatgtggcagaatttgtgtgcaaatataaactattataaaatc

SEQ ID NO: 47311 - DNA, 1928 bp, Homo Sapiens
gcggccgcgcgcccgtgtgcacgcgccggtgctccaggaaattggagttccagctgaaggccttgccgcactccgggcactcgtagggcttctcgcccgtgtgcgtgcgtcggtgctgcaccagcgtggtgcttcggccgaaggacttgccgcagtccgggcagcggaagggcttcaggccgctgtgtgtctcctggtggtggatgagctgcgagtgcgcgcggaaggccttgccgcactccctgcaagcgtagggcttctcgccgctgtggatgcgctggtgctggctgaggttggagctccaggcgaaggccttgccgcactcggggcacgtgtacggcttctcgcctgtgtgcacgcgccgatgctgcagcaagtaagagccctggctgaacgccttgccgcactccccgcaccggcagcccggctcctctgggagaggcgaagggcgcaacgcccggtctgcaggctcgctcctgggcccagccccgtcccgcccaccgtctgcggggcccagctccctgccggggcctccctgttcgtccgccgcccccagtgtggcttgctgccgctggccgtcccctgcctccctcggaacctccgtggagttttcccaggccccccagcctccagacacagccccctcagagaggcccctcgtggcagtcttcacattgcagaggacctggccttcctctggggccacctgcagggtccaccctcttggggactccatctcgcgcctgtgacctaaaacaggagagaaaaggcaagggtggggccccaagtgtcaagaaggtggagactccagtttgtgaggaacacgatggacccgtctccattcctgaaggctggaggacaccgcctgacccaaacacagctatgtctgcctcacccactccaccctggccggatccctgggtagtcccctccacacagtatgggcagcatgtccaggctggaggatctcagtggctgttacccaggcaatgtccacaccaggcctctgtgcagttctcaggacacaatgcggagcacacaggtgtggactggagatctctgactctgccgtccaagccaagaccaccaaactcccacctgtcaccatcactttcccacagcccccaggccctctcagccaccaacccacgactggccccagtgctggctcagctggggtcgtgagcaggggaagcacacccagcccccagaccagcccccactcatctggagtcctggcccagctgactcctgctgtagccgctctgccagggcagtggcctcctcagggctgcctagccactgctcctgcgtgtaggcctggatctctgggagcagtgtgcccaataactgctccagcaccaagagctccagcatctgctccttggagcaggcctcaggcatcagccactggcaacacagctcacgcagctgagccagggcccctcggggccctgctgccttctcatagcagaacccccagaagcactggccagggctcttggagctgggctcacccaccatcagttccagtggactcgggaagacctggggggccagggctgatgcctcactcatctgggcagccatcctgcccctttcctgggaggggagtgcagctgcatggcccagggtactttctctgcagctggaaacacaaaggtgagcctgtgagcacagcaaggccacgaaggtcccctccttgggaccacctgagactgagtaaaaatggaagaatgggggtatcggcgtttctggcccccagtgtcagcatctttgcccacctgtgtgtccaggtgcctgagggacacactgaggtgccatggctgcttgtaccatcccttccccccgcctccccgcttttcttgagggtccctgccctgccctgtctccttggcacccttcatcccacacacagaacaactaag

SEQ ID NO: 47312 - DNA, 166 bp, Homo Sapiens
gatgccttgttgagctttgaagcacattgagaagaatctgaaatccttcctcattatggggtgtgttcaggctgctgaggtgcccattctcaagattttcactggacattctggggtcccagttcaagtattttccaatgtgagtcaaggtgaaccagagcctgaa

SEQ ID NO: 47313 - DNA, 763 bp, Homo Sapiens
tgggcagcctccctgggactaggtttcagcggccgctgcgatgaccaaaataaaggcagatcccgaagggcccgaggctcaggcggaggtgtgttccggggagcgcacctaccaggagctgctggtcaaccagaaccccatcgcgcactggcttctcgccgcctcaagcggaagctctacaaatgcattaagaaagcggtgaagcagaagcagattcggcgcggggtgaaagaggttcagaaatttgtcaacaaaggagaaaaagggatcatggttttggcaggagacacactgcccattgaggtatactgccatctcccagttaggtgtgaggaccgaaatctgccctatgtctatatcccctctaagacggacctgggtgcagccacaggctccaagcgccccacctgtgtgataatggtcaagccccacgaggagtaccaggaggcttacgacgagtgcctggaggaggtgcagtccctgcccctacccctatgaggagctccggtagcacctgggcacctgccgctggaagctactgggctgacggcaggacgactggctgtcctcctgcccacccacactgacggcatcttcccagttccccaaggcacgccttcttaccaggcagctctaacagccctttcatgaaggtaatgctagtcttctgtccatcagtgccatttcctgtagaactaaaggctgttccaagaatgtagggtggagaaagtaaatgctaagactaaaaaaaaaaaaaaaaaaa

SEQ ID NO: 47314 - DNA, 615 bp, Homo Sapiens
atgaggaaggcgccacgcagcccgcgacggagccggcccgccgaggacgctgtggccagggtcgggctcgagctgaggcagtctgagcccgcggggccgccgccgccccctccctcgtcctcggcgtcctcgctgctgctgctgccgccgccgcggcctccgcattccgacattacatgctcccagtcgccggctttataccgccgccgccgcctcgggcccgaaggcccggcccggcccgttgctccccaatcccgcagctcgccgcacccgctaacccggacgctccacgtcagccgcgccgccgccgcggggtccgccccacctcacaccccagagcacgcagctccgcccaccgctcacggagtccgggcgggcaccgacaccgcccaaatccccgcccccaacgggccacgccctgcaccctacgtaaatgcacggaagccttccccgcccgcagcccagtcttggccccaccggtcacgaccccgctcacggagtctgcgcaggcgccgtcgcggggcgtggagaagctgctcccttgggataaggcccgcggggaatacttggaaccttgacaccgctgtagtctgctctcgccgcgctgggttttag

SEQ ID NO: 47315 - DNA, 363 bp, Homo Sapiens
atgctgaggatcttttcacacgtttcacggccacttggatttcttctgaggaaattatcactgtttcaggaggagagttacttcaggaaccctgcggacagagggacagcccaccagactaccatctgttgtttgaataatttttttccttatcaattggattcattttggtatcctgtttttgaactcagcttaagaacttctcatctcaaatcctatggccttctggaagatccaccactatccaaaggaaaaagtagattaatatgcctcaagggatatgacatctatggcatagggctactggtctcatcccagcgatcgggacagaaattgctaatagctcatgcaactctttcatga

SEQ ID NO: 47316 - DNA, 753 bp, Homo Sapiens
cagtgtcaaaagaaagaaattgaacaaatgtgtcaaaatgaacaaagcagagtaaataaatatactggagtggaaacctatgaagacagattttctcaactacaaagtgaaaataatttgctttggcagcaactggatgatgctgacaagaaagctgagagtcaagaaaagacaatcagtactatccaagagcaattccatgctgttgtcagaaatcttctagctgagagtataaagcttctgctggaagaggaaaacgaggagataatcaatgtacgtaatcccttgaaagaaagaatatatcaatgtgaaaaagagacagtgggaaaaaagattatgagacaacttctacaagaaccggctgataccctgaaaaaaaacctgtcagagccttccctagaggctacaccacattgtcacattaatttagaagagacacaagattcaaagaaggaattagctactgcattatcaagctgtattatttcattcatgcagtttgatgatctcacagcagaattggaagctgtatctttacaatgtgtctatttggctgaaaacaatcaagttactcaacaggagttatctatgaaaaaagtacaacaggaatgtgaaaaacttgaggaaaataaaaagatgttggaagaaggaatagtaaatcttatgacacatatggaaaatatggtagaacttggtaaagtacaagaatataaattggagctagaagaaaaagcaatgccagcaatagaaaaa

SEQ ID NO: 47317 - DNA, 2708 bp, Homo Sapiens
gttcccgcgcctgggggtgcgcgggagaggcgcgaatccgagtgccgcgcgcggcccggggacttgcacgggcgtgcggggtggaaccgcaggaagcggagctctcgggttcccgccccgccccgccccgccggcggcggaggcagcgagcgcgagagcccagcggagtcgctgggagcctgaggcaccgagacacaaaggcaggcgggatgcgggagcaggcaaagggaaagcgaaagccgcgcgcccggccggtgactgggtgaaggcgccgcgcagctttcccgacgccggctgtacccggacctcctggtcgagcctggcgcgccgcagccatggccatcgctcaactggccacggagtacgtgttctcggatttcttgctgaaggagcccacggagcccaagttcaaggggctgcgactggagctggctgtggacaagatggtcacgtgcattgcggtggggctgcccctgctgctcatctcgctggccttcgcgcaggagatctcgattggtacacagataagctgtttctctccaagttctttctcctggcgtcaggctgcctttgtggattcatattgctgggcggctgttcagcagaagaactcactgcagagcgagtctggaaacctcccactgtggctgcataagtttttcccctacatcctgctgctctttgcgatcctcctgtacctgcccccgctgttctggcgtttcgcagctgctcctcatatttgctcagacttgaagtttatcatggaagaacttgacaaagtttacaaccgtgcaattaaggctgcaaagagtgcgcgtgaccttgacatgagagatggagcctgctcagttccaggtgttaccgagaacttagggcaaagtttgtgggaggtatctgaaagccacttcaagtacccaattgtggagcagtacttgaagacaaagaaaaattctaataatttaatcatcaagtacattagctgccgcctgctgacactcatcattatactgttagcgtgtatctacctgggctattacttcagcctctcctcactctcagacgagtttgtgtgcagcatcaaatcagggatcctgagaaacgacagcaccgtgcccgatcagtttcagtgcaaactcattgccgtgggcatcttccagttgctcagtgtcattaaccttgtggtttatgtcctgctggctcccgtggttgtctacacgctgtttgttccattccgacagaagacagatgttctcaaagtgtacgaaatcctccccacttttgatgttctgcatttcaaatctgaagggtacaacgatttgagcctctacaatctcttcttggaggaaaatataagtgaggtcaagtcatacaagtgtcttaaggtactggagaatattaagagcagtggtcaggggatcgacccaatgctactcctgacaaaccttggcatgatcaagatggatgttgttgatggcaaaactcccatgtctgcagagatgagagaggagcaggggaaccagacggcagagctccaaggtatgaacatagacagtgaaactaaagcaaataatggagagaagaatgcccgacagagacttctggattcttcttgctgatgatttttttccttgagctgtaaatctgtgacttctgcgacatgggatttaatttggctaaagcacccctgttggtttcacagctggtttgcaataaatggttcttggtggagatactgagcatgtcttattgagtccctaatggaaatggtgatcaacaaaaggttatggaagaatggtttatgaacttcccataggaagcacctgagagatagtaaactgcagcaagtaactatgtgtaagtcctcatcaaatgaaaagcagaaagacaagaacaattagtcaagagcagtagccctgtcagagcctcggagcaatacctttctgtacccgtggtgagacaagacccagagctactggaaaacaagcactttggaagatttgttttgttttcatggaataataatatgtcagggtataatttaacgtgagtttcttatgtgcccttaaagactgttagacaagaaaagcattcactggctaataatccataggtcgacctatgtcctaagttaggtgtaaggtccgatgccttggcccacactcgagctctctttacattgttagttgtcaaccttggctgatggaaatcccgtaaccactatttgttgcactgtgccttgaagggcagcaggcccaagtgctgctctgactgaaaactgagttaacaagatgaaatctaaaggatattcacagtgacttcaattcaggaagaatgcttccaaaagagcccagtggggaaatctgacatcacagaagacattaattcagtcactttcaaagagtttgtctacaggcggtttctctgttatcaaaggcatttgaaataggattttacttaaacaataatggaacacaggagtatttaaagtgaagaacactttgcctgaatgtgatcagggcacataagtgacattggcatgcttcatatggcgtgcttggagccagaaaaacttagcggtttattttgtttatatttaagcacagctttaaaaaattcattatcgtttattcagtgtccgaattgaggccatttgggaagaaaattctagcactggtggagaattatagaataaagattataaatggttg

SEQ ID NO: 47318 - DNA, 2463 bp, Homo Sapiens
cagatcctgaattccagcaaaacagccgacaccaaccagtttgaagacccccacagaggaatgtgatcagcatgaaaatacagcttcgtctccctctcccatgactccaccctgcacacttcgaccaatcaaccatctccacactccagtctccactcccaaacccttaaaaaccccagccccaaactcctcagggagatggatttgacgtttcctcccatttcctccttcggtggccctacgatgaaacctctttctctgctacaaccctatgcctcggcgtattcactttctggtcccatccagcgatggacccatcgtggttaccgtggctggccaagcctgctgtgcttcacagaccccactcaggatcacaccacttcgttccactgtttggagatgccatgtttgcttatcccttcatcagctgatgagcatttgtgctgttttcactttttggctattacgaaaatgttgctacgagcatccatgatattcgcccatttaaaaaagtgtttttcaccattactgctgtgggaaatttctccctggctctgtcctttctttgtagcccagccttcccccaggttttggctctccctctctggctcaatgtcagctccttgtctcacctcctagagcaattccactctcccacctcctgctgcggcatttccaaagcctctgcttagcaagggaccacccattctgcacctctccccttagggctgcaagcacctgcacaaacttggtggttatcctatgcctcaactcaatcaaattctctcagttttccatcagcaatctttttaagccaaagggaaggcaaggacttgatcttcacatcacatgaatcatgacacctgccttagaaggcagaagcaactgtagttggaatagcaattgtttttcaacatatgggatgatatcaaggctctttcctccccatatgtcctgccctgttagtggctggggctgagggttttcccaggaagccagattgtcctcacaagttcctcaggaccctagggcttccacagatagtaggactgttatcagaaagaagtctcgatccagacgccgagagagggttcttggatatcgcccaagaaagaattcagggggagtccatagagtgaagtgaaagcaagtttgttaagaaaacaaaggagtaaagaatggctactccataggcagagcagctccgagggctgctggttgcccatttttttttttttttctttgagatggagtctggctctgtcgcccaggctggagtgcggtggcacaatctcggctcactgcaagctccgcctcccgggttcacgccattctcctgcctcagcctcccgagtagctgggactacaggcgcccgccaccatgcccggctaattttttgtatttttagtagagatgaggtttcacatgttagccaggatggtctcgatctcctgacctcgtgatccacccgcctcggcctcccaaagtgctgggatgacaggcgtgactcgtgatccacccgcctcggcctcccaaagtgctgggattacaggcgtgagtcaccacgccgggccggttgcccatttttatgattatttcttgattatatgctaaacaagggctggattattcatgagggaaaggggtgggcaattcctggaacggagggttcctcccccttttagaccgtgtaggataacttcttgacattgccctggcatttgtaaactgtcatggcgcaggtgggagtgtctcttagcatgctaatgcattataattagcatataatgagcagtgaggtcgaccagaggccactctcatcaccattttgggtttggtgggttttggccacttctctactgcaacctgttttatcagtaaggtctttatgacctgtatcttgtggtgacctcctgtctcatcctgtgacttagaatgcctaacaggctggggacgcagcccagcagatctcagcctcattttactcagcccctcatcactctgattcaaatgcctctgacatgaccacgcagatttgagaaacaggccctcagccaaccagactctggctctacgacacacttaatactgtgaaaagaagattacgggtcatagtcacaaataccaggggtgcaaaacttcagattagaagacacttgtcagactcagaggctcatccaactccacggagatcattatcaccacaagttcttcagacaggtgtggaggttttctaagggatatttttattttctggattgcaattttgtttaggaagagatgaaagtgaggatcaactactttgaggattgtacaactttgtaaattgcacaaatatgacggcatatttatatctgcctgcatttgtgaaaacaaacttgtcaaggagcttatttctggaaagggtcaatgattctagaaaaaaaaaaaagataaatatgagacccttcagtaaaaagaaa

SEQ ID NO: 47319 - DNA, 3735 bp, Homo Sapiens
agcggcgggcaggccgggcatggcgtccatggcggcggcgatcgcggcttcgcgctcggcggtcatgagcgggaaccggcctctggacgaccgggagcgaaagcgcttcacttacttctcgtcgctgagccccatggccaggaagatcatgcaggacaaggagaagatccgcgagaagtacgggcccgagtgggcgcggctgccgcccgcgcagcaggacgagatcatcgaccggtgcctggtggggccgcgcgccccggcgccccgagaccccggggactcggaggagctcacgcgcttccccggcttgcgcgggcccacgggccagaaggtggtgcgcttcggggacgaggatctaacttggcaagatgagcactctgcccctttctcctgggaaacaaagagtcagatggagttcagtatctccgccctatccatccaggagccgagcaacggcaccgccgccagcgagcccagaccactgtccaaagcttcccagggctcccaggccctcaagtcctcccaaggcagcaggtcctccagcctggacgccctgggccccaccaggaaggaggaggaagcgtcattctggaagatcaatgctgagcggtcccgaggggaggggcctgaggccgagttccagtcgctgacccctagccagatcaagtccatggagaagggggaaaaggtcttgcctccctgctaccggcaggaacctgccccgaaggacagggaggccaaggtggaaaggcccagcaccctccgtcaggagcagcgtcctcttcccaacgtgagcaccgaacgtgagagaccccagcctgtccaggccttcagcagtgcactgcacgaggctgccccctcccagctcgaggggaagctgccatctcctgatgtcaggcaggacgatggggaagacaccctgttctcggaacccaagtttgcacaggtcagctcaagtaatgtcgtcttgaagacgggatttgattttctggacaattggtaaaatgtattagaaaaatacaatgaagaaccctaaaatgttttccaaagtggtgtggtggaggaggataaaaagggccaccttttcctatgtattttactggtttcttgacactcttttcttaatcatttggaaactggtcaatattgccagatttttttcttttttggtagaaccagatatatatgctattttcagtgatttgataacagaagttttccatttggaatttttaaggtctgttaataattcaggagatcttgtaaataaaacttctgttcccagctccacccaactttccccctcctcaaaggatgtgtttcaaccatgtcacaaaaatcatataagtgatttccatctccttctccattattccccctcccccctccgctttttaccgtatgggttccttttggtgggtgattgagggtgatgttatcagccatgacatcagcatgctggctgtgaccccggaaagactggcccccagcgacgttctcagccagcgctcgcagctgtccggggcttctctggcagaagccatgtctctcacatcatgtgccagcctccaccctcacgccatttccagggaacagactgcgggtatgtagcagtgtagtctttaacctgctctgatacatattcagagtatggattgttgtttaaaaagagttgcatgtttaaagagttttgtactagcttttcattattttgtatctagattatcaacaatggggctaccactttccttggttttatatccatttcctcttggaagttcttgttgcttatgtgacctgttggttgttccccggactgggcacctacaggagtcagggcagacggcagatgtggctggaggtcagggctcttctgcttagttgtgttagagtcttccagcatgggactgatgggagcagtgggcattctttatcccaagggctagccaggttgcgtcatgacggaccttccccagccctgaccaccaccagaagtggaagagtggagtttgcggtcaactcagcagtgcccatggagacctgcgtggtgtcagagcagcagtatctcttggagctggtgcagacaccaaggctgcccagtggtacaacgtggtccacctcccctagggaagctgctgcactcagaggctgtcctgcccagtggcccctgagccgtgtgagcctgcaggaggcgtctgagcagagcctcaagcccggtatggcgccatctccatgttgccatcactgcgttctcacctgaagccttaatctttgcgacacctgccagtgagcgctcggtttcaataccaaagtgtgtcttcttcttttttttttttttttaaatgcctgtttcataggaccttctgaaatgatttccagaatattttatctggctccaaaataaagcacatagcaactcacctcaacccctcatcatctccaggaaagtttctgccaaagctgtggcatagccaacttttgatttggttcttgccaattgttttatgtccctaaacctcatttggatccttggggtatagttttatctttctgcttcagtgatttactgtaacttttcaaatattggttctttctgtaccatttaagtatagttgatatatgtgaggcaaaaaaaggtttcagcatggtggtgagggaaaaaggagcttagaaatcccagttggcacagcctgggcaagcgccagctcccctcagggctaacggcactgttcacacagggatcctcagaatcagcggccacctgcctccaccttctgcctggagggcatggggctgttgtagaacctatggtagcaaatgtatatgtatgagtttgtattctgtagtgttggtgtagcacagaagaaagacctgtgtcctagagagtaggccaaggtgatctgcctcttctattgggagaaattctaatttctttcccactttctcaacaagcccaatattccctccaagttcttcttggtgctgagggctgtaggaattattgaaagcttctgcctcacttagtatcgtctggggcccagcacccagcaataactctaataatgtttcttaatggtatagcctcctgagattaaatgtaaaatcaaaaattaggaaatcttggagggagtcctcaagttgtattgctttgctgtgcttttggaagaagggacgacctggaggacacaggctcctgtgtgggtcttcatcctgcctgaccggcagatcttcctctacaccttgggcaaagtctatgcgaagatggtttcttagctctccatttgccatgattttcctcccattcatcatgagggagtttctcaaaccaggagtttatatttattttttagaaaatacacacttttcaggagaaacctgagcatgattttggattctccacctccccccagtctctgcacctgggattcagctcaaggattcagtgtcttcatttttacaaaagttcccccaagaaatcagcaaccagcctctgtttcatctgggagcccctcccttggccccctgggtttgggggtgctgccctactgggaacagcgggggtctgtcacccgtctgagccgcacccccctgtgtggatttcaggaagagcctccctttctttgcgtctccctttctttaattaacattttcaaaagtaataaattcttactgacgacttgtaacttagtcatattttatacttgtagcctttaataaagccatttaaaaaatgct

SEQ ID NO: 47320 - DNA, 1689 bp, Homo Sapiens
actccagtccagagtcctactaatctcttgacactgtctccagctccaagccaggaaaaaaatgagaatgagaatttggatgagattaaaaccaacctttcaaagcctctagatgtccaccagatcctaataggaaatcaagatcctccactacttcctgtagaaatccccgatattcacccgcttctggcctgcattgatcctcttggccaagaggagcagcctggttctgaaaatgccaatctaagaaataagagcctgagtcttgaggaccaagggatatttgaaaatgggattgagtctagcagtgatttggcagacatcactacatgggtggaggatacttacctccccccgatcttcagttccttacaagatcttgaccaacctgaaagtccctcagcaaagaaagccaaagataccagtgccatcaaggtaaatcaggtgcaggaaaagtcatgtgtcataaagggtcactctgatcaagtcaggaagaacaagcataaagcttccgagcctatccagggtgctcccaaggccaaaatccagccaaagaacccagagtgcctattagagagagaagtggttgttggcagtgctacagtcagtaacagcgcttctgtgaacaaggccaagcattctagcaacaaacctcacaaggctgcatccagcaggatcagcaaaactaagagccatgggcaggaaaagaccaaagggaacagaaagaacagctccaagaaatctgaagagagtaagcagtcagggaaaaaagtcaaggtagaagagaagcaaaccattcccaatatgaaacggaagaaaaatcaacctgagcttagccaaaagacccttaaaaagccccgaagctccctaggcatgcacatgctagagtccgtgcaagttttccatgcactcgggaaaaagatcgatatgaaaactggattctcttcctccaggaccctgggaagctcaagcaacacccaaaaccgccagccattcccagctctcaaaccatggctggatatccaacatgagggtaaaggcccggagaaaattcaagtcaaggcccagaaactagatggtagtgctgaaaaagagtgtacatctccatcccactctgagttgccaccacctgggaaggtcaagttgatacctttgccctttctgaccctggaccaacctcaagctcgacatgtttctcggcggccaaaccctctagcctcacgtaggcctgctgtggcttaccctgctcgacctgattctactaactcagctcaatcgaatgcagtcaatccatcccgaccagctcctaccaacacatctttgacagctgtccctcaatctgctgcttctaggccatcagcctacaaaacatcatcttgttcttctctgcagcgggagcctgtttccactgctgtgaccagtctccggtcactgcccaagcctcaaaatcaatttctaatccaagacttcagcctccaaccccgtccatggaggaaacccactgttcctgagccagtaatgtcaacgcccatcacagaagagcagaggccagagcgtgaggccatgaagagaaaggctcaacaagagcgtgagaatgctgccaaatacacctctttggggaaagtgcagtttttcattgaaagggaaagagatatggaaattgctgaatactatggctacacaatctaa

SEQ ID NO: 47321 - DNA, 1821 bp, Homo Sapiens
ccgacaagtgcgctgcaccagtggcaccggctgggggcgagccgacctcgagcagccgccgccgccgccgtcgttgctactgccgcagcggagttcagagggcccggaggtgggagacttcccacacggtgactgagatgtcgtccactgcggctttttaccttctctctacgctaggaggatacttggtgacctcattcttgttgcttaaatacccgaccttgctgcaccagagaaagaagcagcgattcctcagtaaacacatctctcaccgcggaggtgctggagaaaatttggagaatacaatggcagcctttcagcatgcggttaaaatcggaactgatatgctagaattggactgccatatcacaaaagatgaacaagttgtagtgtcacatgatgagaatctaaagagagcaactggggtcaatgtaaacatctctgatctcaaatactgtgagctcccaccttaccttggcaaactggatgtctcatttcaaagagcatgccagtgtgaaggaaaagataaccgaattccattactgaaggaagtttttgaggcctttcctaacactcccattaacatcgatatcaaagtcaacaacaatgtgctgattaagaaggtttcagagttggtgaagcggtataatcgagaacacttaacagtgtggggtaatgccaattatgaaattgtagaaaagtgctacaaagagaattcagatattcctatactcttcagtctacaacgtgtcctgctcattcttggccttttcttcactggcctcttgccctttgtgcccattcgagaacagttttttgaaatcccaatgccttctattatactgaagctaaaagaaccacacaccatgtccagaagtcaaaagtttctcatctggctttctgatctcttactaatgaggaaagctttgtttgaccacctaactgctcgaggcattcaagtgtatatttgggtattaaatgaagaacaagaatacaaaagagcttttgatttgggagcaactggggtgatgacagactatccaacaaagcttagggattttttacataacttttcagcatagaaaaagaggtacttagaagtattgaaggaaaaaatgaagacctaagaaaaaaatatttcatgatcatttccctaagccatttccagaatggtaaaaggtttaatcagtttttattacctcatttttaagcctgtatgagaatgtagaaactatatattatatgtatatttattttaaataatattgtatattttatgtttgtaaattgtttagaaagataattggttatgagatgtaagttttaatttcttaatgtgcatttttgtttctagatcttatacagaaatcttgattaataacatacacagaaatgtacatactacatcatctacagaaatcttgatcaataacctagaaactaggttatctaggttattgatcaagatttctgtagatgatgcagtgttctatcataagtaattctggaatcaaagactattggatacatttggcattgggctgagtgtggtggctcatgcctgtaatcccagcactttgggaggctgagacaggcggatcatctgaagtcaggagttaaagaccagcctggccaacatggcaaaaccccatctctaccaaaaatacaaaaattaaccatgcgtggtggtacacgtctgtcatcccagcagctcttaaggctgaggcacaagaattgcttgaacccgggaggcagaggctgtagtgagccaagatagcaccactgcactccagcctgggagacagagtgagactccgtctc

SEQ ID NO: 47322 - DNA, 884 bp, Homo Sapiens
agtcgctgtttgggacgctgggtgtgcggtgttctgtctccgctcccgtttcgctgtcacagcccgttccttcccggagcccgggacaggctgggcgcgcgcccgtgtgagtgagcgggactcagggcagaagtgtcccctcactgcgtttttttttccttttatccaaagaacggggcagttagtacgcttgccttcctgtcgcccggttgggagcggggttggtgtgcggagtggttcgcctttttttctttagaacttgtgagccttttttttttttttttttttttttctttttttaggctcagtgctgtccgggctggtttgcccggtccctgactaacggctttctgccccttctctcgccacccctgcccaaggtcgcccctctgccttcgcccctgtcccgggagggtgggaagctttgaccccgccctgcccactcgcgtctccgcagccgtagccgcgcctgtcccaatatgaatagggtcaacgacccacttatttttataagagatattaagcccggactgaaaaacttaaatgtcgtctttattgtcctggagataggacgcgtgaccaaaaccaaagacggccatgaagtgagatcgtgcaaagtagcagataaaacgggcagcatcactatttccgtgtgggatgagatcggaggtcttatacagccaggggatattattcggttgaccagagggtatgcatccatgtggaaaggatgtctgacactttatactggaaggggtggtgaacttcaaaaaattggggatctaggtgcggtgcaggcagccgcaatgcgagattccatacactactaccctggtaatgatctccaccctgacctggaggagccatcctctctaggggtgtaa

SEQ ID NO: 47323 - DNA, 1246 bp, Homo Sapiens
cccccaacaggcgagaagcagccgcgtccacatggcttcaggtgttcacatggcagtaaacgggcccctgctctcctgggcgccccagcgcggcgccctcccgcccacatcccggcccagccccgctggcctcgcctccagcccgtagccaagaggcgagcgcggccggtgcccccggggctgccaggggccccgaagcaggcggcgctgactcccggacgccgcccgctcacacccgccgcctttgcacccaaggcctcgcgcgaccagcaggtcactgattctactaccatctgtcagcgtggattgattgaggagactggccctgctcggcagatcagtgacttgtgcgaagtgagccagggtgtcggtgccttcagagcaggcggatgtccttcctcacttgccagctctcgtgagcagacacacagccctcacctttatccttcaccaagctccagctctccttcctcttgggaggcgccgcctgctaactcagtcacaccaagagggaggcctggaattcctgctcacaagctcggggcttcatctgcagtctgccaggaggcaacttacaaaagcctctggctaacagagcgggaaactccccacagcctcctgctgtgcctgtccccaagccacgcactgtccccttgcaaagcacaaggatactgagagtgcacaaacagcaggggtggagagcctctgtgggcacgccctcattctgtgccctcattccacaggagcccctgctttgtgcaagtctctgagcccgcatggagggagcatgggggctcagaacagttctttctggggcaaggtcaggggaggctctaaagttatggtggtggggagggccttaaaacagaggaccagagaataccaagacttaggggtgtgggggagagccacctgctgtgcccaggaggactgtgcccagtgcaggggaaaaagatgaagctgcggagttgggcaagggtgggatcctgcagggccttagagcattgacatgtttggcatggatttgtttcacagggtcccacagaaacttctgctctccaggtttgcccctccactctgccctccaggatagaagtgtggcatcctaatctgggatgcatccatctctccccctggactgtgagcatatgcagggcagagacacctctgcttctcttgggtctccggcatcctgtgcagggtagggcaccatgtccattaaaatgatgttaatgaggatgataca

SEQ ID NO: 47324 - DNA, 1705 bp, Homo Sapiens
gggagctggtggcgcggcgcaggtcccggccgagtgtggcgcagcagtggcggcgcttcccattcgccatgcgccgggggtgggtgcccgaaggttgcatgatggaatttgaacattacttcaagaggttttgtattttggattagttaattgggtttgtcctctgctgactgtttcttcggatgcattttttggtgtgctcttgagggattaaatgcaaagagatcacaccatggactacaaggaaagctgcccaagtgtaagcattcccagctccgatgaacacagagagaaaaagaagaggtttactgtttataaagttctggtttcagtgggaagaagtgaatggtttgtcttcaggagatatgcagagtttgataaactttataacactttaaaaaaacagtttcctgctatggccctgaagattcctgccaagagaatatttggtgataattttgatccagattttattaaacaaagacgagcaggactaaacgaattcattcagaacctagttaggtatccagaactttataaccatccagatgtcagagcattccttcaaatggacagtccaaaacaccagtcagatccatctgaagatgaggatgaaagaagttctcagaagctacactctacctcacagaacatcaacctgggaccgtctggaaatcctcatgccaaaccaactgactttgatttcttaaaagttattggaaaaggcagctttggcaaggttcttcttgcaaaacggaaactggatggaaaattttatgctgtcaaagtgttacagaaaaaaatagttctcaacagaaaagagcaaaaacatattatggctgaacgtaatgtgctcttgaaaaatgtgaaacatccgtttttggttggattgcattattccttccaaacaactgaaaagctttattttgttctggattttgttaatggaggggagctttttttccacttacaaagagaacggtcctttcctgagcacagagctaggttttacgctgctgaaattgctagtgcattgggttacttacattccatcaaaatagtatacagagacttgaaaccagaaaatattcttttggattcagtaggacatgttgtcttaacagattttgggctttgtaaagaaggaattgctatttctgacaccactaccacattttgtgggacaccagagtatcttgcacctgaagtaattagaaaacagccctatgacaatactgtagattggtggtgccttggggctgttctgtatgaaatgctgtatggattgcctcctttttattgccgagatgttgctgaaatgtatgacaatatccttcacaaacccctaagtttgaggccaggagtgagtcttacagcctggtccattctggaagaactcctagaaaaagacaggcaaaatcgacttggtgccaaggaagactttcttgaaattcagaatcatcctttttttgaatcactcagctgggctgaccttgtacaaaagaagattccaccaccatttaatcctaatgtggctggaccagatgatatcagaaactttgacacagcatttacagaagaaacagttccatattctgtgtgtgtatcttctgactattctatagtgaatgccagtgtattggaggcagatgatgcattcgttggtttctcttatgcacctccttcagaagacttatttttgtga

SEQ ID NO: 47325 - DNA, 204 bp, Homo Sapiens
atggttcagccagtggaaacacctccaagaaggtctgagttatttattttgccacaagatgacctagacccaccaaacttcccctgctccagacctgaaagcagtgtttctcaaagaacccttgggtccattcttgtggagaatagctgctccaaagtcttctcagtggacagagcaagtggatatatatgtgtatgtacataa

SEQ ID NO: 47326 - DNA, 372 bp, Homo Sapiens
tgtgaggagacgattgaaaaacccaaaaagaagaaaaagcaaaagccccaggaggttcatcaggagaatggaatggaagacccatctatctctttctccaaacccaagaaaaagaaatctttttccaaggaggagttgatgagtagcgatcttgaagagaccgctggcagcaccagtcttcccaagaggaagaagtcttcacccaaggaggaaacagttaatgacaccgaagagtcaggccacagaagtggctccaagaaaacgaggaaattctccaaagaggagctggtcagcagtgggcctgaagaggcggctggcaagagcagctccaagaagaagaaaaagttccataaagcatcccaggaagattag

SEQ ID NO: 47327 - DNA, 750 bp, Homo Sapiens
atggacaagttgaaatgcccgagtttcttcaagtgcagggagaaggagaaagtgtcggcttcatcagagaatttccatgttggtgaaaatgatgagaatcaggaccgtggtaactggtccaaaaaatcggattatcttctatctatgattggatacgcagtgggattaggaaatgtgtggagatttccatatctgacctacagcaatggtggaggcgccttcttgataccttatgcaattatgttagcattggctggtttacctttgttctttctggagtgttcactgggacaatttgctagcttaggtccagtttcagtttggaggattcttccattgtttcaaggtgtgggaattacaatggtcctgatctccatttttgtgacaatctattacaatgtcataattgcctatagtctttactacatgtttgcttcttttcaaagtgaactaccatggaaaaattgttcttcgtgtaaagtggcgctccaacggtcaagtggaatgaatgagactggagtaattgtttggtatttagcactttgtcttcttctggcttggctcatagttggagcagcactatttaaaggaatcaaatcgtctggcaaggtggtatattttacagctcttttcccctatgtggtcctactcatcctgttagtacgaggtgcaactctggagggtgcttcaaaaggcatttcatactatattggagcccagtcaaattttacaaaacttaaggaagctgag

SEQ ID NO: 47328 - DNA, 693 bp, Homo Sapiens
atgttttgttgcttaggatatgaatggctgagcggaggctgtaaaacctggcactctgcttgggttatcaatactctgtctgaccatcatcatcgtgggactgactttggtggaagtccttggttacatgtcattattgcgtttccgacaagttataaagttgtcattaccctctggatagtttacctttgggtgtctctcctgaagactatcttctggtctcgaaatggacatgatggatccacggatgtacagcagagagcctggaggtccaaccgccgtagacaggaaggaaataaaattggcctgaaagacgtcattactctacggagacatgtggaaacaaaagttagagctaaaatccgtaagaggaaggtgacaacgaaaatcaaccatcatgacaaaatcaatggaaagaggaagaccgccagaaaacagaaactaagcgtgaaagaatgtgagcatgcagaaaaggagaggcaggtatcagaggcagaggaaaatgggaaattggatatgaaagaaatacacacctacaagaaaatgtttcaacgtgcgcaagagttgcggcggcgggcagaggactaccacaaatgcaaaatccccccttctgcaagaaaggctctttgcaactggtgcacttacaatttggtattacctgggagtgaaaagaaatattacagccatgcctaa

SEQ ID NO: 47329 - DNA, 225 bp, Homo Sapiens
atgagccagcggaatctgaatgcaaagacagaacaagggccgaccggagtcacaatgacatccaaccccataacatggggacagatcaagaaaacgacacaagaagctgagaaactactggagcgccagggtcaggcaaaaacccctgactccatgttcttggccatgctagctgtagtgtcctgtgcgtctataggatcgggtgaaccaccaaccggcaattga

SEQ ID NO: 47330 - DNA, 807 bp, Homo Sapiens
atgtcggctgcgcccggcctcctgcaccaggagctgtcctgcccgctgtgcctgcagctgttcgacgcgcccgtgacagccgagtgcggccacagtttctgccgcgcctgcctaggccgcgtggccggggagccggcggcggatggcaccgttctctgcccctgctgccaggcccccacgcggccgcaggcactcagcaccaacctgcagctggcgcgcctggtggaggggctggcccaggtgccgcagggccactgcgaggagcacctggacccgctgagcatctactgcgagcaggaccgcgcgctggtgtgcggagtgtgcgcctcactcggctcgcaccgcggtcatcgcctcctgcctgccgccgaggcccacgcacgcctcaagacacagctgccacagcagaaactgcagctgcaggaggcatgcatgcgcaaggagaagagtgtggctgtgctggagcatcagctggtggaggtggaggagacagtgcgtcagttccggggggccgtgggggagcagctgggcaagatgcgggtgttcctggctgcactggagggctccttggaccgcgaggcagagcgtgtacggggtgaggcaggggtcgccttgcgccgggagctggggagcctgaactcttacctggagcagctgcggcagatggagaaggtcctggaggaggtggcggacaagccgcagactgagttcctcatgaaatactgcctggtgaccagcaggctgcagaagatcctggcagagtctcccccacccgcccgtctggacatccagctgccaattatctca

SEQ ID NO: 47331 - DNA, 301 bp, Homo Sapiens
gagccgccgccagagccgacagccgagcagccgctgggcgctcccgcggcgcaggaggatgggctgcggcgggagccgggcggatgccatcgagccccgctactacgagagctggacccgggagacagaatccacctggctcacctacaccgactcggacgcgccgcccagcgccgccgccccggacagcggccccgaagcgggcggcctgcactcggcccattaccctcttgcctttgcacttgcctggagagacaacagtttaggggctctgctggttcaagaaggactgtgcaggtag

SEQ ID NO: 47332 - DNA, 1287 bp, Homo Sapiens
ctctctgatgagaccctcttggagatctctaagcggttccgcaaggagatagagaaagggcttggatccaccactcaccccactgcagcagtgaagatgctgcccacctttgtgaggtccacttcagatgggacagaacacggagagttcctggctctggaccttggagggaccaacttccgtatgctttgggtgaaagtaacggacaatgggctccagaaggtggagatggagaaccagatctatgccatccccgaggacatcgtgaggcaggacaccgagctgtttgaccacattgtcgaatggctggctaacttcatggataagctacaaatcaaagacaagaagctcccattgggttttaccttctcgttcccctgccgccagactaaactagacgagagtttcctggtctcatggaccaagggattcaagtccagtggagtggaaggcagagacgttgtggctctgatccggaaggccatccagaggagaggggactttgatatcgacattgtggctgtggtgaatgacacagttgggaccatgatgacctgtggttatgacgaccacaactgtgagattggtctcattgtgggcactggcagcaacgcctgctacatggaagagatgcgccacatcgagatggtagaaggcgacgaggggcagatgtgtatcaatatggagtggggggccttcggggacgatggctcgctcaatgacattcgcactgagtttgaccaggagattgacatgggctcactgaacctggggaagcaactgtttgagaaggtgatcagtgggatgtacatgggggagctgatgaggtttatcctggtgaagatggccaaggaggagctgctctttagggggaagctcagcccagagcttctcaacaccggtcactttgagaccaaagacatctcagacactgaaggggagaaggatggcatccggaaggcccgtgaggtcctgatgcggttgggcatggacccgactcaggaggactgcgtggccactcaccggatctgtcagatcgtgtccacacactccgccagcctgtgcacagccaccctggcccccgtgctgcagcgcatcaaggagaacaaaggtgaggagcagcttcgctctactattggggtcgacggttccgtctacaagaaacacccccattttgccaagcgtctacataagaccgtgtggcggctggtgcccgactgctatgtctgcttcctccgctccgaggatggcagtggcaaaggtgcagccatggtgacagcagtggct

SEQ ID NO: 47333 - DNA, 4246 bp, Homo Sapiens
gatgagattgatgattctttctcctggaaaacctttcatcacagagattcatctcagcattaaagggcagtatttaaagtcagttggcaagcagtggaataagatttttgtaaagaaaccttgtgcagcatggattctctaccagatgaattttttgtgaggcatcctgctgtggaggatcagaggaaggaagaaactgagaataagctagaaaaatcatctggtcaactgaacaaacaggaaaatgacatacctactgatcttgtccctgttaacctactattagaagtgaagaagttattaaatgcaattaatactctaccaaaaggtgtggttcctcacattaagaagttcttacaagaagatttttccttccaaactatgcagagagaagttgcagctaacagccagaatggtgaggaaattgttcctgctttgactttacgtttcttgattacacagctagaagcagcacttaggaacattcaagctggcaattataccgcacaccagattaatattggttattatttgacattactgtttttatatggagtagcactcactgaaagaggaaagaaagaggattatacagaagctgagaataaatttctggtgatgaagatgatgatccaagaaaatgaaatttgtgaaaactttatgtctttagtttattttggacgtggtttactgcgatgtgctcaaaagagatataatggaggactgctagaatttcataaaagcttacaagaaattggagacaaaaatgaccattggtttgacatagatcctacagaagatgaagatttacctacaacttttaaagatcttcttaataattttatcaagacaactgaaagcaatataatgaagcagacgatttgtagttacctagattgtgaacgatcttgtgaagctgacattttgaagaacaccagttataagggattttttcagttaatgtgcagtaaaagttgctgtgtttatttccataaaatttgctggaaaaagttcaagaatttaaagtatccaggtgaaaatgatcagagttttagtgggaaaaaatgtttgaaggaaggatgtacaggtgacatggtaaggatgctgcaatgtgatgtacctggaattgttaaaattttgtttgaagttgtgagaaaggatgaatatatcaccattgaaaatttaggagcaagttatagaaagttgatatctctgaaaataactgatactgatataagaccgaagatcagtttaaaatttaatacaaaagatgaaatgcctatcttcaagcttgattataattatttctatcatctgcttcatataattattatttctggtactgacattgttcgacaaatatttgatgaggctatgccacctcctcttttgaaaaaagagcttcttatacacaagaatgtgctggaatcctactacaaccatctttggaccaatcatcctttgggtggatcatggcatctgctttatcctcctaacaaggagttaccgcaatccaaacagtttgacttatgcctcctgttagctcttataaaacatttaaatgtgttccctgcacccaaaaaaggatggaatatggaaccgccatcttctgacatctctaaatctgcagacatcctgagactgtgcaaatacagggatatcctccttagtgagattttgatgaatggtctcactgagtcacagttcaattcaatttggaaaaaagtttcagatattcttctgcgccttgggatgatgcaagaggatattgacaaagtgaaggagaatcccattgagaatatctcccttgattaccatcagctatctgtctacctaggcataccagtaccagaaatcatacagaggatgttatcctgctatcaacaaggaattgctctacagtcaataacaggcagtcagcgtattgaaatagaagagttacagaatgaggaagaagaactaagtccacctctcatggagtacaatataaatgtgaaatcacaccctgagatacagtttgcagaaattaataaagatgggacctcaatacccagtgaatcttcaacagaatctcttaaagatctccaggaagttaagagtaaacaaaggaaaaagaagaagactaagaataaaaagaataaagactcaaaagaagaccaagtcccatatgtggtagaaaaggaagagcagttgaggaaagaacaagcaaatccacactcagtcagtagacttataaaagatgatgcaagtgatgttcaagaggattctgcaatggaagacaagttctatagcctggatgaattgcatattctggacatgatagagcagggctcagctggcaaagtaactacagactatggagaaactgaaaaggaaaggcttgctcgtcaaaggcagctttataaattgcactatcagtgtgaagatttcaaaagacagttgagaacagtgacttttcggtggcaagaaaaccaaatgcagattaaaaagaaagacaaaattatcgcatctcttaatcaacaagttgcttttggaatcaataaggtttccaaattacagcgtcaaatccatgctaaagataatgaaatcaagaaccttaaagagcaactttctatgaaaagatctcagtgggaaatggaaaaacataatctggaaagcacaatgaaaacatacgtaagcaaactgaacgcagaaactagcagagctttaacagccgaggtgtatttcttacagtgtcgtagggattttggtttgcttcatctagagcagactgaaaaggaatgtctcaatcagcttgccagggtgactcacatggcagcaagcaacctagaatcacttcaattaaaggctgcggtagacagttggaatgccattgtggcagatgttagaaacaagattgcattcctcaggacacagtacaatgaacaaataaacaaagtcaagcaaggatttgccttgagtaccttgcctccagtccagcttcctcctccaccacccagtcctgagatactgatgcagcagttcttaggaagacctcttgtgaaagaatctttctttagacccatacttactgttcctcaaatgcctgcagtttgcccgggagtcgtctctgcaactggccaacctagagcccccctgatgactggcatagcctgggctctgccagcgcctgtgggagacgctgtgcctcccagtgcaggtctgcggagtgatccctccatcatgaattgggagagaattacagacaggctgaaaactgcctttccacagcaaaccagaaaggaacttacagatttcttacggaaattgaaggatgcttatggaaaatccttgtctgaactgacatttgatgaaattgtttgcaagatttcccagtttattgaccccaaaaagtctcagagtcaaggaaaatcagtgtcaaatgttaattgtgtttcacctagtcattctccatcacagcctgatgctgcccagcccccaaaaccagcctggaggccactcacttcacagggtcctgccacatgggaaggagccagtaatccagatgaggaagaggaagaagaagagccttgtgtgatctgtcatgagaatctgtctccagaaaatctttcagttttgccttgcgctcacaaattccatgctcagtgcattagaccatggttgatgcaacaggggacatgtccaacgtgcagactccacgttttgctaccagaagaattccctggtcaccccagccggcagttgcccaagatctgatacaaggtcggggtgtctatgcaaaggaagctcagttttcttttattatgagctgcttgtttgagtggtgtaaaactatgtgctcttcaatatagtgctaaagaagccagctaattttatcaaagcagcagccaaagaagtcaggacaaatcttcaggacttgtgaaatgaactgaaagagcttgaagcagatggaattttaatagttacactatatatgctcttagtaggtttttttcttgtagtggaaacataactgttagcatatttcttaggatgttttttcttgtctttttaaattcttatttcactcatcctttactctcccctcaagtattctacactttaatttcctgaaataaatttaaggaaaagggaaatagtaaagaagtaggaatgggtgcagcacaccagcatggcacatgaatacacatgtaactaacctgcacattgtgcacatgtaccctaaaacttaaagtataataataat

SEQ ID NO: 47334 - DNA, 1432 bp, Homo Sapiens
cgcctttgcccgaagcccggggacgaaccgacggaccgaccgcctggcgcacggacgcgggcgctcgctttgtgttcggggctagcgtcggcgaggcttgagcttgcagcgcgcggcttccctgctttctcgcggccaccccggctccggcggcctcggcgcgcgaggggctggaggtgcgggagccgctctccgccggtcggtccccgcgcggctgagcccaggccgccagcgccgcggccccgtgcggtgtccctgagctcctgctccccgccgggctgctccgagcaacggtgcttcggagctccaaactcgggctgccggggcaagtgtcttcatgaacccagaggatgtccgggaagcactacaagggtcctgaagtcagttgttgcatcaaatacttcatatttggcttcaatgtcatattttggtttttgggaataacatttcttggaattggactgtgggcatggaatgaaaaaggagttctgtccaacatctcttccatcaccgatctcggcggctttgacccagtttggctcttccttgtggtgggaggagtgatgttcattttgggatttgcagggtgcattggagcgctacgggaaaacactttccttctcaagtttttttctgtgttcctgggaattattttcttcctggagctcactgccggagttctagcatttgttttcaaagactggatcaaagaccagctgtatttctttataaacaacaacatcagagcatatcgggatgacattgatttgcaaaacctcatagacttcacccaggaatattggcagtgctgtggggcttttggagctgatgattggaacctaaatatttacttcaattgcacagattccaatgcaagtcgagagcgatgtggcgttccattctcctgctgcactaaagatcccgcagaagatgtcatcaacactcagtgtggctatgatgccaggcaaaaaccagaagttgaccagcagattgtaatctacacgaaaggctgtgtgccccagtttgagaagtggttgcaggacaatttaaccatcgttgctggtattttcataggcattgcattgctgcagatatttgggatatgcctggcccagaatttggttagcgatatcgaagctgtcagggcgagctggtagaccccctgcaaccgctgctgcaagacactggacagacccagctttcgggaccctcccgcgtgccgaactgatcttcgagctgcatggacctaatcacagatgcagcctgcagtctcgcctaatggagctgccattaggggagtgtaaaactgggaaatgctgctcactgacagaattaaaaaaaaaaataaccagtatgaaagtcgttgcgccgtgaatctctactgtagccatgaatttatggacagttagatgcttaccaaaaaagaaaaaaa

SEQ ID NO: 47335 - DNA, 249 bp, Homo Sapiens
atgtatcttagtgtctttaaagctattaaaatacactgggctttttgccaccatgtaaaaatggacacagcatggtatgctctcataacttttcctttccttatattaactgtcattgctgtgtttgctcttgctgtcttattttacacacaaaagtctggcaaggttctaaactcaattctgcctccaaagcagaataaaatacatggacttggttacaattcagaagtcttttccacttatttctga

SEQ ID NO: 47336 - DNA, 417 bp, Homo Sapiens
gcctggatgctcggcaggcgcaggtcgtggccctgtcctcggggaccaagtgcatcagcggcgagcacctcagtgaccaggggctggtggtgaatgactgccacgcggaggtcgtggcccggcgggcgttcctgcacttcctctacacgcagctggagctgcacctgagcaagcggcgcgaggactcagagcgatcgatattcgtgcggttaaaagaaggtggctaccggctgcgagagaacatcctcttccatctctacgtgagcacctccccctgtggagacgcaagactccactctccctacgagatcaccacagaccgtaagagaccatgcttttactctgtaggccaacagcccccagctccctctatctgggactctgtcctgggctttcacagcccagggcaggggcgcg

SEQ ID NO: 47337 - DNA, 936 bp, Homo Sapiens
atgtccaacgccagcctactgacagcgttcatcctcatgggccttccccatgccccagcgctggacgcccccctctttggagtcttcctggtggtttacgtgctcactgtgctggggaacctcctcatcctgctggtgatcagggtggattctcacctccacaccaccatgtactacttcctcaccaacctgtcgttcattgacatgtggttctccactgtcacggtgcccaaattgctgatgactttggtgttcccaagtggcagggctatctccttccacagctgcatggctcagctctatttctttcacttcctagggggcaccgagtgtttcctctacagggtcatgtcctgtgatcgctacctggccatcagttacccgctcaggtacaccagcatgatgactgggcgctcgtgtactcttctggccaccagcacttggctcagtggctctctgcactctgctgtccaggccatattgactttccatttgccctactgtggacccaactggatccagcactatttgtgtgatgcaccgcccatcctgaaactggcctgtgcagacacctcagccatagagactgtcatttttgtgactgttggaatagtggcctcgggctgctttgtcctgatagtgctgtcctatgtgtccatcgtctgttccatcctgcggatccgcacctcagaggggaagcacagagcctttcagacctgtgcctcccactgtatcgtggtcctttgcttctttggccctggtcttttcatttacctgaggccaggctccaggaaagctgtggatggagttgtggccgttttctacactgtgctgacgccccttctcaaccctgttgtgtacaccctgaggaacaaggaggtgaagaaagctctgttgaagctgaaagacaaagtagcacattctcagagcaaatag

SEQ ID NO: 47338 - DNA, 1406 bp, Homo Sapiens
cgggcctcatgttgcgccgcctgcgcaagggcaacctgcccatccgctccatcatccccaaccacgccgacaaggagcgcttcgccacgcgctgcaaggcggccaccgtgctgctctacgacgaggccacggccgagtggcagcccgagcccggcgctcccgcctccgtgctcggcctgctcctacagaagctgcgcgacgacggctgccaggcctactacctccaaggtggtttcaacaagtttcaaacagagtactctgagcactgcgagaccaacgtggacagctcttcctcgccgagcagctcgccacccacctcagtgctgggcctggggggcctgcgcatcagctctgactgctccgacggcgagtcggaccgagagctgcccagcagtgccaccgagtcagacggcagccctgtgccatccagccaaccagccttccctgtccagatcctgccctacctctacctcggctgcgccaaggactccaccaacctggacgtgctcggcaagtatggcatcaagtatatcctcaatgtcacacccaacctacccaacgccttcgagcacggcggcgagttcacctacaagcagatccccatctctgaccactggagccagaacctctcccagttcttccctgaggccatcagcttcattgacgaagcccgctccaagaagtgtggtgtcctggtgcactgcctggcaggcatcagccgctcagtgacggtcactgtggcctatctgatgcagaagatgaacctgtcactcaacgacgcctacgactttgtcaagaggaaaaagtccaacatctcgcccaacttcaacttcatggggcagctgctggactttgagcggacgctggggctaagcagcccgtgcgacaaccacgcgtcgagtgagcagctctacttttccacgcccaccaaccacaacctgttcccactcaatacgctggagtccacgtgaggcctggtgcacggggggcatggcaccaggcccctgctcggctctccacagggctaggtgggagagcccaagcccgccacctctggcctgaggaacccccagatgtcacctgtgcccagaggcccaggctgatcggtgtcggagcgcccctcaccatccttgggggcagggcccgcaggcaaggtctcccactgcagggcttgctggagaggcctcggctcttggacacgtggctttgggcgtccaccagggcctcatcctgtccaggacgctcctttctgctgacagcccagccagtttggctgttttttaaagacacatccacggacctgagtttactttttacttttggcaggtaaatccaagctccctggagcacaaagagtgtttgagctcttcttgatttttcttttttttttttttttttaacaaaaa

SEQ ID NO: 47339 - DNA, 546 bp, Homo Sapiens
atggtgatatttgagcagatgagagccaatgtgggcatgttgctccaggttgtcctgaagctgtaccagtccaacccagtgttttttcagaccacggacactgcccagatccagctgaaggccctcaccaacctgccacataccaacttcaccccgtgtaagtgcatgattggccaggcacatcaagaagagtggccatctcagattttgtatctcaaggacctgctggagaccagcctctttcaggccttctgggaagccctggatgaaaacgtggacctcttggaaggtataactggctttgaagactctgtccgaatgtgtatctgccctgtcgtgggtatcacttaccagcacatcgaccactggctgctggccgagatgcctgggtatctgtcggacagccagctgaaggtgtggatgagaaaatacacctggagggctgatgagtcccagcagatcttcatctgtagccaggaagagaacattaagcccaagaaccctgtggagaagatagactttgacagtgtgtccagcatcatggcc

SEQ ID NO: 47340 - DNA, 826 bp, Homo Sapiens
cagaaacgaggatgaattgccacatcatctggttctgagttctgagatattcacaagtccccttagaaaacaactcaggcaagagagttacatcacctaggagcccgttccacccttatgtcacagtgcttcatgtgtacaggactaagaagaaagtcacatcacctagatgatagacccagagacacgtcacaaagccttcctgaaagcatggccctggcaaaatagtacaatcacctttgtacctggtctagcaatatgtcattattcaagtgtgcaggtaccaaggagaggagccatactacctatgttatatgccctgtgctatgtcaaaatgccttcttttcagcatggccctggaagaatgtatcatctcatatgtgactggcctaggaagatgtcactatcctgccatgtgtgcagggcccattttagagattagagttatgtcttcttctaagtcatggacccagtgatatatcactatgatgtctgtgagaatgggcaggcaggaatgtaatgtcacttgcattctagatccagtgatgtcacaattcttactgagggcagagcccagtcagaagagtcatatcttttacaggttggcccaagtagatgtcaaaaacccctatggattagatttacaataccacacatctcttgttttcatgtaggagagttgcctgcattcatctgtgatgatgaaagtccttactgtcagccaagtgtgcatatgagactcacaatttcctctgtttgctaaccactattatgacactctctattcaacccaacggttttataaaacatttgtcattgttataaa

SEQ ID NO: 47341 - DNA, 213 bp, Homo Sapiens
atgcattcaagcttctgcagcctaggggacagggctgcttgttcagttattactgcctcggagaaatcccaccaaagtcctgactccaggtctttcctaatgcacagtagtcagtctcagcttcggcagtattctcggctgtatgttctctggcagagagaggcagatgaacatagttttagggagaaagctgatgggaaacctgtgagttaa

SEQ ID NO: 47342 - DNA, 291 bp, Homo Sapiens
atgacatcagggtgcttgctgcttcctccagtggcccgagctctgtgtgcctttgttgaacaaggttttcgtggagctgaggtgactctcatgaacagagaatacctgtccttcatacagagaagcacccaaatgcaaacatctactttttctggtgttcaaccaggtaaacctctgtttagcaagaaacatcatccccagagtggggactgtcttgtcctttcagaagctagtaccctaagcaagactcataaggaaggtcgggcctccctaggtctctgtttcttctga

SEQ ID NO: 47343 - DNA, 3284 bp, Homo Sapiens
gtgcttttcttctttaggttacataaagaaaggatgatatctctaaaggtatgtggattcatccaaatttggagccagaagactgggatgactaagctgaaagaagctctcattgaaacagtgcaaagacaaaaggaaattaaactggtggtcactttcaaatctggaaaatttataagaatttttcagctgagcaacaacattagaagtgtggtccttagacattgtaaaaaaagacaaagtcacctgcgtttaactttgaaaaacaacgtgttcttgtttattgacaaattatcctacagagatgctaaacagttgaatatgttcctggacataatccaccaaaacaaatctcagcaacccatgaaatctgatgatgattggagtgtgtttgaaagcaggaatatgctgaaggaaattgacaaaacttcattttacagcatttgtaacaagccaagttatcagaagatgcctttgtttatgtcaaaatcaccaacacatgtgaaaaaggggatattagaaaatcaaggtgggaaggggcaaaacacactatcatctgatgtacagacaaatgaggacattctgaaggaagataaccctgtaccaaacaagaaatataagacagattccttgaaatatatacaaagcaataggaagaacccatcaagtttagaggatttagaaaaagatagagatttgaaactcgggccttcattcaataccaactgtaatggaaatcctaacctagatgagactgttcttgcaacccagactctcaatgccaaaaatggtttgacatctccattggaaccagagcacagccagggtgacccaagatgcaacaaagcccaggtgcctcttgactctcattcacagcaactgcagcaggggttccccaatttgggaaacacctgttacatgaatgcagttttacaatcgctatttgcaattccatcttttgctgatgacttactcactcaaggtgtcccatgggaatatattccctttgaggctcttattatgaccttgacccagctgcttgctttgaaagatttctgtagtacaaagatcaagagagaattacttgggaatgttaaaaaagtcatttcagcagttgcagaaatattttctggcaacatgcagaatgatgctcatgagtttttaggtcagtgtttagaccagctgaaagaagacatggaaaaattaaatgccactttgaatactgggaaagaatgtggggatgaaaattcatctccacaaatgcatgttggtagtgctgccaccaaagtgtttgtttgccctgttgttgctaattttgagtttgaattgcagctctcccttatttgtaaagcttgtggtcatgctgttctcaaggtagaacctaataattatctctccatcaacctgcaccaagaaacaaaaccacttcctttgtccattcagaattctttagatcttttctttaaagaagaagagcttgaatataactgtcagatgtgtaagcagaagagttgtgttgcaaggcatacatttagtaggctctccagggtccttatcattcatctgaaacgctatagcttcaacaatgcttggttgctggtgaagaataacgagcaagtttatattcccaaatctttaagtttatcttcttattgcaatgaaagcaccaaaccacctcttcccttgagcagtagtgcacctgttgggaaatgtgaagtcctggaagtctctcaggagatgatttctgagatcaacagcccattgacaccatcaatgaagctgacctcagaatccagtgattccctggttctacccgttgaaccagacaagaatgccgacctacaaagattccagagagactgtggagatgcaagccaagagcagcatcagagagacctggaaaatggctctgcactagagtcagaattggtccactttagagatagggcaatcggtgaaaaggagcttccagtggctgactcactgatggaccagggagacatttctcttcctgtgatgtatgaagatggagggaagctgatcagcagcccagacacaaggcttgtcgaggttcatcttcaagaggtgcctcaacatccagaacttcagaagtatgagaaaaccaatacattcgtagagttcaattttgacagtgtcactgagtccaccaatggcttttatgactgtaaagaaaacaggattccagaaggatctcaaggaatggctgaacagctccagcagtgtattgaggagagcatcatagatgaatttcttcagcaggcaccacctccaggtgttaggaagctggatgcccaggaacatacagaagagaccctcaatcagtctacagaattaagacttcaaaaggctgacctgaatcaccttggggcactgggttctgacaacccaggaaacaaaaacattttagatgcagagaacacaagaggtgaagccaaggaactaacaagaaacgtgaagatgggggatcctctccaggcctacagactcatcagtgttgtcagccatatcgggagctccccaaattcaggccattacatcagcgatgtgtatgactttcagaagcaggcctggttcacatacaacgatctatgtgtatcagaaatctcagagaccaaaatgcaggaggcgaggcttcactctgggtatatcttcttttacatgcacaatgggatttttgaggagctgttaagaaaagcagagaactctcggctacctagcacacaggcaggggtgatccctcagggggaatacgaaggtgactctttgtacagacctgcttgacagactcactcggcctcacttcatccttgcaaagagaatcctgtacttcatccttgcaaagagaatcctgtacttcactcagaatgaaggaacaagtatctcaggatgaaatctcaatgaaaaacacttattttgggggaatatctattttaactgcttcagacacctagatcccagaactcaggcgcatatgcatattttccctgcaagattagaatggtgctcttcacgttttgacggtggttttcaaaatgttgttcttcaaccagcaacagcaacagctagggactgattagaaatgcaaattcttgggtcactctctagaccaactgatgcagaaacaggaggtgtgagccagcaatcagatggagattctagtgctcatgaaagtttgaagaacactggtaatgtgtggagtatcttggtgtattttgctactgttgatatggattgcttatgttatataaacgattttcattaaa

SEQ ID NO: 47344 - DNA, 324 bp, Homo Sapiens
atgagtgagtcgagcttgaagtccagccagcccttggcctccaagcaggaaatggacagcactgagaagcggggccggggcaggccccgcaagcagcctctggtgagttccgggacagcactggtagggagtcagaaggagcccagtgaagtgccaacacctaagagaccttggggccaaccaaagggaagcaaaaacaagggagctgccaagacccggaaaaccaccacaactccaggaaggaaaccaaggggcagacccaaaaaactggagaaggaggaagaggagggcatctggcaggagtcctcagaggaggagcagtga

SEQ ID NO: 47345 - DNA, 435 bp, Homo Sapiens
atggaatcactcgggcgtcctcctgggaaagagctgcctgctcccccgccgccgccagtacaccggcgcccatgccccgggggctggagagagcagccaggcacaggtaactcaagaactccagtcccctcacgggtgccgtgctgtggggcgccctcacccccacactttgggtccctgggcctcctcatcaaagcagggctgagtggcaggaacacccctgtgtgcagaatagtgccccctgcagcccccacaggtcacctctttgaggacctaggtggggcctgccctggggactggggtgaagagggcaggtccagccttcagcagcccctcccccatgacttcagtggaattacaaggggaacacccagggcagctcccgtaggctgcacaagggaagaggggagggcttctactgaggtgaaacagtga

SEQ ID NO: 47346 - DNA, 636 bp, Homo Sapiens
atgaaaacagcttatgaagatgttacaactgaattagaagagtataaggaagcctttgcagtagcattgaaagctaacagttccatgtcagaaaaaataacgaaatcggataagaaaatagctgtgatcagcaccaagctctttatggagaaagagcggatggaatattttctcagcactcttcctatgaggccagacccagagttaccttgtgttgaaaatcttaatagtatagaactcaacagaaaatatattcccaaaatggccataagaattcctacttcaaacccacagacttcaaataactgcaagaactccttgactgaggttagttatatgaccatttctcttttggaacaaataattacagaaacaaagaaaacttttgctgcgttgggcccttgctcctatctactttcttctctagaatccactgagttggagccaccgaggaagcacaggcgagctcttcccatcatgcgctcactagtccccaacagaagaaccactgtcgcatccactgagagcaggacaaacaggccaggtggtgtcaggagcccaggtctccagctggagggaacgtcaaccctgcagtgggagcaggggcccatcgcacatcctaggcacagatgctaa

SEQ ID NO: 47347 - DNA, 1359 bp, Homo Sapiens
atgggaggcatgaaatacatcttttcgttgttgttctttcttttgctagaaggaggcaaaacagagcaagtaaaacattcagagacatattgcatgtttcaagacaagaagtacagagtgggtgagagatggcatccttacctggaaccttatgggttggtttactgcgtgaactgcatctgctcagagaatgggaatgtgctttgcagccgagtcagatgtccaaatgttcattgcctttctcctgtgcatattcctcatctgtgctgccctcgctgcccagaagactccttacccccagtgaacaataaggtgaccagcaagtcttgcgagtacaatgggacaacttaccaacatggagagctgttcgtagctgaagggctctttcagaatcggcaacccaatcaatgcacccagtgcagctgttcggagggaaacgtgtattgtggtctcaagacttgccccaaattaacctgtgccttcccagtctctgttccagattcctgctgccgggtatgcagaggagatggagaactgtcatgggaacattctgatggtgatatcttccggcaacctgccaacagagaagcaagacattcttaccaccgctctcactatgatcctccaccaagccgacaggctggaggtctgtcccgctttcctggggccagaagtcaccggggagctcttatggattcccagcaagcatcaggaaccattgtgcaaattgtcatcaataacaaacacaagcatggacaagtgtgtgtttccaatggaaagacctattctcatggcgagtcctggcacccaaacctccgggcatttggcattgtggagtgtgtgctatgtacttgtaatgtcaccaagcaagagtgtaagaaaatccactgccccaatcgatacccctgcaagtatcctcaaaaaatagacggaaaatgctgcaaggtgtgtccaggtaaaaaagcaaaagaagaacttccaggccaaagctttgacaataaaggctacttctgcggggaagaaacgatgcctgtgtatgagtctgtattcatggaggatggggagacaaccagaaaaatagcactggagactgagagaccacctcaggtagaggtccacgtttggactattcgaaagggcattctccagcacttccatattgagaagatctccaagaggatgtttgaggagcttcctcacttcaagctggtgaccagaacaaccctgagccagtggaagatcttcaccgaaggagaagctcagatcagccagatgtgttcaagtcgtgtatgcagaacagagcttgaagatttagtcaaggttttgtacctggagagatctgaaaagggccactgttag

SEQ ID NO: 47348 - DNA, 1194 bp, Homo Sapiens
atgcgctgccccaagtgccttctctgcctgtcagcactgctcacactcctgggcctcaaagtgtacatcgagtggacatccgagtcccggctcagcaaggcctaccccagccctcggggcaccccgccaagccccacgccagccaaccctgagcccaccctacctgccaacctctccacccgcctgggccagactatcccgctgccctttgcttactggaaccagcagcagtggcggctggggtccctgcccagtggggacagcactgaaacggggggctgccaggcttggggggccgccgccgccaccgagatccctgacttcgcctcctaccccaaggacctccgccgcttcttgctgtcagcagcctgccggagcttcccacagtggctgcctggaggtggtggcagccaagtctccagctgctcagatactgatgtcccctacctgctgttggccgtcaagtcagaaccagggcgctttgcagaacgacaggccgtgagagagacgtggggcagtccagctccagggatccggctgctcttcctgctagggtctccggtgggtgaggcggggcctgacctagactcactagtggcctgggagagccgtcgctacagtgacctgctgctctgggacttcctcgacgtcccattcaaccagacgctcaaagacctgctgctgctggcctggctgggccgccactgccccaccgtgagttttgtcttgcgagctcaggacgatgcctttgtacacacccctgccctgctggctcacctgcgggccctgccacctgcctcggcccgaagcctctacctgggtgaggtctttacccaggccatgcctctccggaagccaggaggacccttctatgtgcccgagtccttcttcgaaggtggctacccagcctatgcaagcgggggtggctacgtcattgccgggcgcctggcaccctggctgctgcgggcggcagcccgtgtggcacccttcccctttgaggacgtctacactggcctttgcatccgagccctgggcctggtgccccaggcccacccaggcttcctcacagcctggccagcagaccgcactgcggaccactgtgctttccgcaacctgctgctggtacggcccctgggcccccaggccagcattcggctctggaaacaactgcaagacccaaggctccagtgctga

SEQ ID NO: 47349 - DNA, 411 bp, Homo Sapiens
gtctttgcctatggtcagacgggctcagggaagacatacaccatgggggaggccagtgtggcctccctccttgaggatgagcagggcattgtcccgagggccatggccgaggccttcaagctcatcgatgagaacgacctgcttgactgtctggtacatgtgtcctacctggaagtgtacaaggaggagttccgagacctgctcgaggtgggcactgccagccgtgacatccagctccgggaagatgagcgcgggaatgttgtgctgtgcggggtgaaggaggtcgacgtggagggcctggatgaggtgctgagcctcctggagatgggcaacgcggcgcggcacacgggagccacgcacctcaaccacctgtctagccgctcacacacggtcttcaccgtgaccctggag

SEQ ID NO: 47350 - DNA, 2539 bp, Homo Sapiens
gtcagccagaaagggctatctgctcccttcgccaaattatcccacaacaatgtcatgctcggagagccccgccgcgaactcttttttggtcgactcgctcatcagctcgggcagaggcgaggcaggcggcggtggtggtggcgcggggggcggcggcggtggcggttactacgcccacggcggggtctacctgccgcccgccgccgacctgccctacgggctgcagagctgcgggctcttccccacgctgggcggcaagcgcaatgaggcagcgtcgccgggcagcggtggcggtggcgggggtctaggtcccggggcgcacggctacgggccctcgcccatagacctgtggctagacgcgccccggtcttgccggatggagccgcctgacgggccgccgccgccgccccagcagcagccgccgcccccgccgcaaccaccccagccagcgccgcaggccacctcgtgctctttcgcgcagaacatcaaagaagagagctcctactgcctctacgactcggcggacaaatgccccaaagtctcggccaccgccgccgaactggctcccttcccgcggggcccgccgcccgacggctgcgccctgggcacctccagcggggtgccagtgcctggctacttccgcctttctcaggcctacggcaccgccaagggctatggcagcggcggcggcggcgcgcagcaactcggggctggcccgttccccgcgcagcccccggggcgcggtttcgatctcccgcccgcgctagcctccggctcggccgatgcggcccggaaggagcgagccctcgattcgccgccgccccccacgctggcttgcggcagcggcgggggctcgcagggcgacgaggaggcgcacgcgtcgtcctcggccgcggaggagctctccccggccccttccgagagcagcaaagcctcgccggagaaggattccctgggcaattccaaaggtgaaaacgcagccaactggctcacggcaaagagtggtcggaagaagcgctgcccctacacgaagcaccagacactggagctggagaaggagtttctgttcaatatgtaccttactcgagagcggcgcctagagattagccgcagcgtccacctcacggacagacaagtgaaaatctggtttcagaaccgcaggatgaaactgaagaaaatgaatcgagaaaaccggatccgggagctcacagccaactttaatttttcctgatgaatctccaggcgacgcggttttttcacttcccgagcgctggtcccctccctctgtcttcaggctctgcccaggaactcgcacctgtgctggagccctgttcctccctcccacactcgccatctcctgggccgttacatctgtgcagggctggtttgttctgactttttgtttctttgtgtttgcttggtgctggtttatttgttgttttctgggggaaaaagccatatcatgctaaaattctatagagatagatattgtcctaagtgtcaagtcctgactgggctgggtttgctgtcttggggtcccactgctcgaaatggcccctgtcttcggccgagctggtttcctgcccagcctggggcaaacctagccggaaggccgaggtcccattgttggcgctgaggtgtctggcctgaggtcaatggtgcaaaggagccgccaccgggcatgtctgcctggagtgctgtgctgtgtttaatcaggggatacaggcccctgggtttcttttttctttcttcctttcttccttggccaagagaagggcttacaggcatggacatgcaggttggcaaacgggcttgactttggctgatttaaaaagtgagaaagaaagtaaaaaaggttaatttttccttcctctgtaagatatcccagctttaaaaagaaaaaaaaagaattaccaagagaaggggacttctcttccagtttctgtaaggtcttacattgcctgactaaaatgtttcatttacctctaaatttccatatccttctggctgtagataaataatgtagttttgtttatgcatttggaattagtggatttttttgtcattaaaattgttaccactggtaacatgtgacaagcacaccacaattctccctatcttgtgaagttgtttttttaaatcgccttgaacaaaaagttttttttttgtttgtttttgctttctgaaattcacagaagcctaggaggactggggtaagcggaataaactagagaagggagacattgtttggatttcctttatactgtgaagttacatgcataaaagggtcaaacctgtagatgcagaaaaagaaaaaaactataaatacaaatctgtataaatgtctattattatgaagaattgccaatcttgttttaagcaaatgcattctatcgttattataaatgttagttctagctctatttacttctaatcttaaatcagaataaattaatattgtattgctgctgtgcgtggaaaaagacgatgtttatgttcttatagaataaaagctgtggaatgaagctttttaatttta

SEQ ID NO: 47351 - DNA, 1635 bp, Homo Sapiens
atgtctgacggtctggataatgaagagaaacccccggctcctccactgaggatgaatagtaacaaccgggattcttcagcactcaaccacagctccaaaccacttcccatggcccctgaagagaagaataagaaagccaggcttcgctctatcttcccaggaggaggggataaaaccaataagaagaaggagaaagagcgcccagagatctctcttccttcagactttgagcatacgattcatgtggggtttgatgcagtcaccggggaattcactggaattccagagcaatgggcacgattactccaaacttccaacataacaaaattggaacagaagaagaacccacaagctgttctagatgttctcaaattctatgattccaaagaaacagtcaacaaccagaaatacatgagctttacatcaggagataaaagtgcacatggatacatagcagcccatccttcgagtacaaaaacagcatctgagcctccattggcccctcctgtgtctgaagaagaagatgaagaggaagaagaagaagaagatgaaaatgagccaccaccagttatcgcaccaagaccagagcatacaaaatcaatctatactcgttctgtggttgaatccattgcttcaccagcagtaccaaataaagaggtcacaccaccctctgctgaaaatgccaattccagtactttgtacaggaacacagatcggcaaagaaaaaaatccaagatgacagatgaggagatcttagagaagctaagaagcattgtgagtgttggggacccaaagaaaaaatacacaagatttgaaaaaattggtcaaggggcatcaggtactgtttatacagcactagacattgcaacaggacaagaggtggccataaagcagatgaaccttcaacagcaacccaagaaggaattaattattaatgaaattctggtcatgagggaaaataagaaccctaatattgttaattatttagatagctacttggtgggtgatgaactatgggtagtcatggaatacttggctggtggctctctgactgatgtggtcacagagacctgtatggatgaaggacagatagcagctgtctgcagagagtgcctgcaagctttggatttcctgcactcaaaccaggtgatccatagagatataaagagtgacaatattcttctcgggatggatggctctgttaaattgactgactttgggttctgtgcccagatcactcctgagcaaagtaaacgaagcactatggtgggaaccccatattggatggcacctgaggtggtgactcgaaaagcttatggtccgaaagttgatatctggtctcttggaattatggcaattgaaatggtggaaggtgaacccccttaccttaatgaaaatccactcagggcattgtatctgatagccactaatggaactccagagctccagaatcctgagagactgtcagctgtattccgtgactttttaaatcgctgtcttgagatggatgtggataggcgaggatctgccaaggagcttttgcagcatccatttttaaaattagccaagcctctctccagcctgactcctctgattatcgctgcaaaggaagcaattaagaacagcagccgctaa

SEQ ID NO: 47352 - DNA, 378 bp, Homo Sapiens
aaggcagcctgggtcatcctagaaaagtactacatgtgcctcggcaatgacttccacaggaacgagtgtgtgggcaaggagatcaccattatctctggcaagaagctccgcaacaagagggcaggctacatcctgcatctgatggaggatatttggagaggcccagtgagaggcatctccatcaagttgtgggaggaagagagagaaaaaaggagagataattatgttcctgagatcttagccctggacctggagatcactaaagtaggtcctgacactgaggaaacactgagactttggggctttcacagactgtccaacctgcgggtcactcagcctacagttgggataaatttcaaaacaccacgtggagctgtt

SEQ ID NO: 47353 - DNA, 867 bp, Homo Sapiens
atgatcaccaagacatacaaagtagacctgggccctgggctcccagagaagaaaaagaagaagaaagtggtcaaagaaccagagactcaatattcaattttaaacaatgatgattactttgccaatgtttctcctataagagccacatccccttctaagagtgtagtccataggcaggcacctgagatgcctctagcgaagaaaaaggagaaaaagaagggtgtcagcgccctttgcgaggagcatgtggaacctgagaccacgctgtgtgccagacagacagagaagtcacccagccccaggaagcaggtacttggccacttgaagttcctcagtggggagaagaaaaagaagtcacctcaggctatgtcccatgcctccagggtgaaaacctcctcagacctcagacatagagacccttggaaggaggaaacaaacatggacttagaggtggtgttggaaaggaaaggcaatatggacgaggcgcacatagaccaggtgaggcgaaagtccttgcaagaagaggtccatcaggagtcaagcaaaacggaagcttctgaaacctggaagtggacgggaacccagtttggccagtgggatactgctggttttgagaacgaggaacagaaactgaaatttctcaaacttatgggtggcttcaaaaatctctgcccaccccccccaacccccagcacgattgcaaggcccaacatggccctcagcaagaaggcagcccacagcctgcagcagaacctgcagcaggactacgaccgggccatgagctggaagtacagccgccgagcctgctttggcttctccaccgccaacaagatcttttatattgacaggaacacttccaagtcagtc

SEQ ID NO: 47354 - DNA, 495 bp, Homo Sapiens
gtcaaccccaccgtgtccttcaacatcgctgtcaatggtgagcccttgggctgtgtctccttcaagctgtttgcagacaagtttccaaagacagcagaaaactttcgtgctctgagcactggagagaaaggatttgattataaatgttcctcctttcacagaattattccagggtttatgtgtcagggtggtgacttcacacgccataatggcactggtggcaagtccatctacggggagaaatttgatgatgagaacttcatcctaaagcatacaggtcctggcatcttgtccatggcaaatgctggacccaacacaaatgattcccggtttttcatctgcactgccaagactgagtggttggatggcaagcccatggtctttggcaaggtgaaagatggcatgaatattgtggaggccatggagcacttcgggtctgggaatggcaagaccatcaagaagatcaccatcgctgactgtacacaacttgactaa

SEQ ID NO: 47355 - DNA, 522 bp, Homo Sapiens
atgtttgtctttttgtttctggcttatttcacttataatatttttgaggttcggtgggcacagtggctcacgcctggatttccagcactttgggaggctgaagcagagccccacagtcttcgttataacctcacggtgctgtcctgggatggatctgtgcagtcagggtttcttgctgaggtacatctggatggtcagcccttcctgcgctatgacaggcagaaatgcagggcaaagccccagggacagtgggcagaagatgtcctgggaaataagacatgggacagagagaccagggacttgacagggaacggaaaggacctcaggatgaccctggctcatatcaaggaccagaaagaaggcttgcattccctccaggagattagggtctgtgagatccatgaagacaacagcaccaggagctcccagcatttctactacgatggggagctcttcctctcccaaaacctggagactgaggaatggacagtgccccagtcctccagagctcagaccttggcc

SEQ ID NO: 47356 - DNA, 2674 bp, Homo Sapiens
gggacagctcccgggcgccgtggaatgcacacgtcccgcacccggaccttccggtcagcttcccggctcgctgtctgatgcccgcggtagccaatgagctagtggtgtttgtcctgctccgtccccgccctccaggggaaccaatcccattgcaggagaggcaggacgcgcaaaggcccgaaagaggagctgggcggggtggggggaaggcggaggcagtctagtaatgtaaagctccgctgagagggagagtgctgaagaaggggacagcctctgtacctgcggcgcggcccgaggggcggacgcgagcggagtgacgcgctggaggctgtttatagcgctgtcaggacagcgcggggagtggaggcagaggcctgagagctccccggattatggtgcactgagaaggcatctggaagcctgggccctcatggcatccaacgataaaggcatggcaccctcgctgggctctccctgggcctcccagatggggccctgggatgccatcctcaaggctgtcaaagaccagctcccgtctctggactcagactcccctttgtcggactatggggaagaggagctgttcatcttccagcgaaaccaaacctccctgattccagacctgtcggaggagctggctgaagatcctgccgatggcgacaagtccagggcctgggtcgctgcagctgaagagtcccttcccgagccagttctggtgcctgcagaattggccacagaacctgggtgcagacagaacacaaggacaaaggatgcatcctctcaggaaggaagagaccctggcaggccttttgaaagctctggtgaggtcagcgctcttcttgggatggccgaggagccccccaggtggctggaaggcgaccttggaagcctgtctttcaacaccaaaggatcccagggtcctccctgggacccacaggccgaagccactctctcctgccatgaaggagacccaaaggcagagcccctcagcactgcctcacaagaatctgtgaaccgccgggccctccgacaggagagaaggaagatgatagagacggacatcctccagaaagtcacccgggatgcctgcggcccgaccagcagtgacaaaggtggggtgaaggaggcgccctgccacgctgcggagtcagctcccagatccaaaatgcccctcgtggagcctccggagggaccaccagtgctctcgctccagcaacttgaagcgtgggatttggatgacatccttcagagtctggcgggacaagaagacaaccagggaaatcgtgcacctggaactgtgtggtgggcagctgaccaccgccaagttcaagaccgcatggtgccgagcgcccacaacaggctcatggaacagctggccctcctgtgcaccacgcagtccaaggcctctgcttgtgcccggaaggtgcctgccgacactccccaggacaccaaagaggcagattcaggaagcagatgtgcctcaaggaagcagggctcccaggctgggccaggcccgcagctggcccagggcatgaggcttaacgcagagtcccccaccatctttattgacctgcggcagatggagctaccagaccacctgtccccagaaagctccagccacagctcctctgacagtgaggaggaggaggaggaagagatggcagctctgggagacgcagagggggcatctccttcctccctggggctacggacctgtaccgggaaaagccagcttctccagcagctcagggcctttcagaaggggacagcccagcccgagctgcctgccagcaaggggcccgcgggtgggagggctcaggcccctgaagacacagctggatcacgaactgggaggaagcaacacatgaagctctgtgccaaggggcagagcgcccaggctcgactcccaagaggcaggcccagagccctgggggatgttcctgagccaggggcagccagggaggccctgatgcctcctctggagcaactatagctgcctcaggatgtgtcctgctgtctgccccgtgggaagagcagagaaatcatcaccaccttgggccccacggtgccacgggctcaggcagcacagtagggcgccgggcctttgggacagtgtcccagcttcccctggggttcacccctggctgccaggccactgaggatgggcaggggtctcttctcatcaagccttgtaccaggcaaaagacaggccctgcttggccgtggtcactggccgccaagatcagggctacagatgtctgctctctggaccccacgtgatctggccactggggacccccacccgaccccactcccaatgatgaggggcattttcattgcaagtcaaaggcaagacaggcttccataaagtcccaggaggtccctcctgtagggcacaaggccaggctgcctcccagcccccaggccctctcccacctacagagaccctcccctgccccctccactccggggcctgtgccgccagaaccgggctctgcccccatacgctgccctcgcagcctggcggcctccgctgtggctgcctagctgtcaagagcaaaggctttttttttcttcaaccccattttcttccatttctcccacctttttaatgccagtaacctcactgagaatgttttacagtgatggaaaataaactctgttccaagttcaa

SEQ ID NO: 47357 - DNA, 1371 bp, Homo Sapiens
atggcagagaaatttgaaagtctcatgaacattcatggttttgatctgggttccaggtatatggtcttaaaaccattggattgtggaggcaatggcttggtttctgctatagacaatgactgtaacaaaagagtggccatcaagaaaatggttctcaccaatccccagaatgtcaaacacgctgtacgtaaaatcaaaattattagaagacttgaccatgacaacactgtgaaagtgtttgaaattcttggtcccaggacagacgatgtgggctctcttacagagctgaacagtgtttacattgctcaggagtacatggagacagacctagctaatgtgctggagcagggcactttactggaagagcatgccaggcttttcatgtatcagctgctacggggggtcaagaatattcactctgcaaatgtactgcacagagatctcaaaccagtgaatcttttcattaatactgaagacttggtgctgaagatatgtgactttggtcttgcacggattacgaatactcattattcccataagggtcatctttctgaaggattggttactaaatggtacagatctccacgtcttttactttctcctaacaattatactaaagccattgacatgtgggctgcaggctgcatctttgctgaaatgctgactggtaaaatcctttttgcaggtgcacatgaacttgaacagatgcaactgattttaatcgattcctgttttgaagatcatcaggagcttctcagtgtaattccagtttacattagaaatgacatgactgagccacacaaacctttaactcaggtgtttccaggaattagtcgagaagcactggatttcctggaacaaatttttacatttagctccatggattggttaacagcagaagctctctcccattcttacatgagcatatactcttttccaacggatgagccaatttcaagccatccttttcgtattgaagatgaagttgataatattttgcttatggatgaaactcacagttacatttataactgggaaaggtaccatgatagtcagctttcagattgtgattggcctgtacataacaactttgatattgatgaatttcagcctgatccaagagctctgtctgatgtcactgatgaaaaagaagtacaagttgatccccgaaaatatttggatggagattgggaaaagtatctggaggaccttacttttgataccaattattctactgagccttgttggcaccatacttgtaactacaaaacgaggtcatcatcatatttagataacttagcttggagagggagtgaagttaaccattactatgaactcaggcttgttatagatctttccaattggaaagaa

SEQ ID NO: 47358 - DNA, 1040 bp, Homo Sapiens
cttaaatctgtcgtttgaatttaggaccacctcggttcacaatggtccgtagtggaaaaaatggtgaccttcatcttaaacagattgcatattacaaacgaactggtgaatatcattcaactacactgccaagtgagagaagtggcataagaagagcagcaaaaaaatttgtcttcaaagaaaaaaagctgttttatgttggaaaagacagaaaacaaaatcgtttggtaattgtttcagaagaggaaaaaaagaaagtcttaagagaatgccatgaaaatgacagtggagctcatcatggtatatccaggaccctcactctggtagaatccaattattattggacatctgtgaccaatgatgtcaaacagtgggtatatgcttgtcagcattgccaagtggcaaaaaatacagttattgtagcaccgaaacagcaccttctcaaggtggaaaatccatggagtttagttactgttgatctgatggggccttttcatacaagcaacagaagtcatgtatatgctataatcatgacagatttgttcaccaaatggattgtgattttgcctctatgtgatgtttcagcatcagaagtttctaaagctattatcaatatatttttcttatatggacctcctcagaaaataataatggaccaaagagatgaattcattcaacagaaagtctttatctcttgcaaggttcagtagtggcagatcatgactacattggattgcctgaaattccgattggagcatatcaagcaaatattctggtggaagatgcaactattggtatagtcgataatgaattactgacatcaagcaaggatcgtgaactattagaatatagaaatacgaaaatctctccattgatagacgatcatagttctcttgaaaagcagactttcagtctgttggactcttcaaaccaggttcttgaatacttaagttagtaaataccaaaatttatttaaattgtttgtttagaatataaattcttaatgatatcttattcattaaaaacgttgtatagaagaa

SEQ ID NO: 47359 - DNA, 228 bp, Homo Sapiens
atggccctaaagctcatccacaaggagttcctcgaactggcccgcgacccccagccccactgctcagcagggccagtgtgggacgatatgctccactggcaggccaccataacgaggcccaacgacagctcctacctgggaggggtcttcttcctaaagtttccctccgactacctattcaaaccacccaagatcaaatttaccaacggaatttaccatcaacgttaa

SEQ ID NO: 47360 - DNA, 1080 bp, Homo Sapiens
atggccttggggaatcacagcaccatcaccgagttcctcctccttgggctgtctgccgaccccaacatccgggctctgctctttgtgctgttcctggggatttacctcctgaccataatggaaaacctgatgctgctgctcatgatcagggctgattcttgtctccataagcccatgtatttcttcctgagtcacctctcttttgttgatctctgcttctcttcagtcattgtgcccaagatgctggagaacctcctgtcacagaggaaaaccatttcagtagagggctgcctggctcaggtcttctttgtgtttgtcactgcagggactgaagcctgccttctctcagggatggcctatgaccgccatgctgccatctgccgcccactactttatggacagatcatgggtaaacagctgtatatgcaccttgtgtggggctcatggggactgggctttctggacgcactcatcaatgtcctcctagctgtaaacatggtcttttgtgaagccaaaatcattcaccactacagctatgagatgccatccctcctccctctgtcctgctctgatatctccagaagcctcatcgccttgctctgctccactctcctacatgggctgggaaacttccttttggtcttcttatcctacacccgtataatctctaccatcctaagcatcagctctacctcgggcagaagcaaggccttctccacctgctctgcccacctcactgcagtgacactttactatggctcaggtttgctccgccatctcatgccaaactcaggttcccccatagagttgatcttctctgtgcagtatactgtagtcactcccatgctgaattccctcatctatagcctgaaaaataaggaagtgaagggggaaagaagcctccgggacagcagtcatttgcctcagctgcacaaaggccaggccagatggaagagaccagccttcaccgaaggccgcagggagcccggacacccggagctgagcattccggtcacgcctcaaccccaaggggcctgcgcatgctccgcgctgcgcgcggcgcccacggccctgccctga

SEQ ID NO: 47361 - DNA, 468 bp, Homo Sapiens
ctaagagatagctgcaatgatgtactgtcccttttggaaaagttcttgatccccagtgcttcacaagagagcaaattcttctatttgaaaatgaaaggagatcactaccattacttggctgaggttgccgctggtgatgataagaaagggactgtggatcagtcacaacaagcacaccaagaagcttttgaaatcagcaaaaaggaaatgcaaccaacatatcctatcagactgggtctggcccttaacttctccgtgttctattatgacgttctgaattccccagagaaagcctgctctcttgcaaagacagcttttgatgaagccattgctgaacttgatacattaagtgaagagtcatccaaagacagcacactaataatgcaattactgagagacaacttgacattgtggacatcggatacccgaggagacaaagctgaagcaggagaaggaggggaaaattaa

SEQ ID NO: 47362 - DNA, 1395 bp, Homo Sapiens
cagctccatgctcgctacgtcttgaaccttttgtatgaaaccaagaaacatctggtacagctgccaaacatcaaccgggtctcaacctgttacagtgaggagatcacagtgtgtggagacttacatggccaattggatgacttaatctttatattttataagaatggcctcccgtcgccagaacggtcatatgtgttcaacggtgactttgtggatcgaggcaaggattcagtagagatcctgatgattctttttgccttcatgctggtttaccccaaagagttccatcttaacagaggaaaccatgaggaccatatggtgaacttacgatatggcttcaccaaggaagtgatgaataaatacaaggtacacgggaaggaaatactaagaaccctgcaagatgttttctgttggcttccactggccactctgatagatgagaaagttctaattcttcatggtggggtgtcagacataactgatctggagcttttggacaaaatagagaggagcaaggaaatcatctcttggtcttctcaggttgtagatatcctgtggagtgatcccatggctcaagagggctgcaaggccaacactattcgaggaggaggctgttattttgggcctgatgtgacacaacagttgctacaaaaatacaacatgcaattcctgatccgttcacatgaatgcaaacctgaaggctatgaattctgtcacaaccgcaaggtattaacaatcttttctgcctccaactactatgaagttggcagcaacagaggggcctatgtcaaactggggccagccctgaccccacatattgtgcagtatcaagctaacaaggtgacccacacactcaccatgaggcaaaggcaagacttttcaatgatggaggagtcggctctgagagctctgagggagaagctgtttgctcattcttcagatcttctcagtgaatttaagaagcatgatgcagataaagtcggtttaatcaccttgagtgactgggcagcagcggtggagtctgtgttgcacctaggactgccatggcggatgctgaggccacagctggtgaacagctcagcagacaacatgctggagtacaagtcttggctgaagaacttggccaaggaacaactgagtcgcgagaacatacaatcaagtttgctggaaacattgtatcgaaaccgatccaacctagagaccatttttaggatcatagacagtgatcattcagggttcatctcactggacgagttcaggcagacctggaagctgttcagctctcacatgaatatcgacattacagatgactgcatctgtgaccttgctcggagcattgatttcaacaaagatggccacattgatatcaatgagttcctggaggccttccgcctt

SEQ ID NO: 47363 - DNA, 1152 bp, Homo Sapiens
gacgtcaccgtggtcctgcctagtgggctggagaagaggagcgtgctcaatgggagccatgcgatgatggacctactggttgaactttgccttcagaaccacctgaatccatcccaccatgcccttgaaattcggtcttcagaaacccaacaacctttgagttttaagccaaatactttgattgggaccctgaatgtgcatactgtgtttctgaaagaaaaagttcctgaagagaaggttaagcctggtccccctaaggtgcctgagaaatctgtgcgtttggtcgtgaattacctgcggacacaaaaagctgttgtgcgtgtgagccctgaggttcctctccagaatattctcccagtcatttgtgcaaagtgtgaggtcagcccagagcacgtggttctcctcagggacaacattgccggagaggagctggagctgtccaagtccctgaacgagctcgggataaaggagctctacgcgtgggacaacagaagagaaacctttaggaaatcatcacttggcaatgatgagacagataaagagaagaaaaaatttctgggatttttcaaagttaataaaagaagcaatagtaaggctgagcagctcgtgctgtcgggtgcagacagcgatgaggacacctccagggctgccccaggaaggggtttgaacggctgtttaacgacccccaactccccatccatgcactcacgttctcttacgctgggtccatccctctcgctgggcagcatctcaggggtgtccgtgaagtcggagatgaagaagcgccgagcccctcctcctccaggttcagggccacctgtgcaagacaaggcatcggaaaaggtatctcttgggtcacagattgatttacagaagaagaagcggcgagcgccagctccccctccaccacagccaccaccaccgagtcccctgatccccaaccgcactgaggataaggaggagaacaggaagagcacgatgggtggtggacggcaggtgccacaaaagcctcccagaggcactgctcggggtccaccccagttagtgcttcccccacccccgccctaccctcctcccgacacagacgtggtggagcctctcagctttcccggggaaggcgctggttccgaggcctcagacccgatacccaaa

SEQ ID NO: 47364 - DNA, 3846 bp, Homo Sapiens
atggtccggaaaaagaacccccctctgagaaacgttgcaagtgaaggcgagggccagatcctggagcctataggtacagaaagcaaggtatctggaaagaacaaagaattttctgcagatcagatgtcagaaaatacggatcagagtgatgctgcagaactaaatcataaggaggaacatagcttgcatgttcaagatccatcttctagcagtaagaaggacttgaaaagcgcagttctgagtgagaaggctggcttcaattatgaaagccccagtaagggaggaaactttccctcctttccgcatgatgaggtgacagacagaaatatgttggctttctcatctccagctgctgggggagtctgtgagcccttgaagtctccgcaaagagcagaggcagatgaccctcaagatatggcctgcaccccctcaggggactcactggagacaaaggaagatcagaagatgtcaccaaaggctacagaggaaacagggcaagcacagagtggtcaagccaattgtcaaggtttgagcccagtttcagtggcctcaaaaaacccacaagtgccttcagatgggggtgtaagactgaataaatccaaaactgacttactggtgaatgacaacccagacccggcacctctgtctccagagcttcaggactttaaatgcaatatctgtggatatggttactacggcaacgaccccacagatctgattaagcacttccgaaagtatcacttaggactgcataaccgcaccaggcaagatgctgagctggacagcaaaatcttggcccttcataacatggtgcagttcagccattccaaagacttccagaaggtcaaccgttctgtgttttctggtgtgctgcaggacatcaattcttcaaggcctgttttactaaatgggacctatgatgtgcaggtgacttcaggtggaacattcattggcattggacggaaaacaccagattgccaagggaacaccaagtatttccgctgtaaattctgcaatttcacttatatgggcaactcatccaccgaattagaacaacattttcttcagactcacccaaacaaaataaaagcttctctcccctcctctgaggttgcaaaaccttcagagaaaaactctaacaagtccatccctgcacttcaatccagtgattctggagacttgggaaaatggcaggacaagataacagtcaaagcaggagatgacactcctgttgggtactcagtgcccataaagcccctcgattcctctagacaaaatggtacagaggccaccagttactactggtgtaaattttgtagtttcagctgtgagtcatctagctcacttaaactgctagaacattatggcaagcagcacggagcagtgcagtcaggcggccttaatccagagttaaatgataagctttccaggggctctgtcattaatcagaatgatctagccaaaagttcagaaggagagacaatgaccaagacagacaagagctcgagtggggctaaaaagaaggacttctccagcaagggagccgaggataatatggtaacgagctataattgtcagttctgtgacttccgatattccaaaagccatggccctgatgtaattgtagtggggccacttctccgtcattatcaacagctccataacattcacaagtgtaccattaaacactgtccattctgtcccagaggactttgcagcccagaaaagcaccttggagaaattacttatccgtttgcttgtagaaaaagtaattgttcccactgtgcactcttgcttctgcacttgtctcctggggcggctggaagctcgcgagtcaaacatcagtgccatcagtgttcattcaccacccctgacgtagatgtactcctctttcactatgaaagtgtgcatgagtcccaagcatcggatgtcaaacaagaagcaaatcacctgcaaggatcggatgggcagcagtctgtcaaggaaagcaaagaacactcatgtaccaaatgtgattttattacccaagtggaagaagagatttcccgacactacaggagagcacacagctgctacaaatgccgtcagtgcagttttacagctgccgatactcagtcactactggagcacttcaacactgttcactgccaggaacaggacatcactacagccaacggcgaagaggacggtcatgccatatccaccatcaaagaggagcccaaaattgacttcagggtctacaatctgctaactccagactctaaaatgggagagccagtttctgagagtgtggtgaagagagagaagctggaagagaaggacgggctcaaagagaaagtttggaccgagagttccagtgatgaccttcgcaatgtgacttggagaggggcagacatcctgcgggggagtccgtcatacacccaagcaagcctggggctgctgacgcctgtgtctggcacccaagagcagacaaagactctaagggatagtcccaatgtggaggccgcccatctggcgcgacctatttatggcttggctgtggaaaccaagggattcctgcagggggcgccagctggcggagagaagtctggggccctcccccagcagtatcctgcatcgggagaaaacaagtccaaggatgaatcccagtccctgttacggaggcgtagaggctccggtgttttttgtgccaattgcctgaccacaaagacctctctctggcgaaagaatgcaaatggcggatatgtatgcaacgcgtgtggcctctaccagaagcttcactcgactcccaggcctttaaacatcattaaacaaaacaacggtgagcagattattaggaggagaacaagaaagcgccttaacccagaggcacttcaggctgagcagctcaacaaacagcagaggggcagcaatgaggagcaagtcaatggaagcccgttagagaggaggtcagaagatcatctaactgaaagtcaccagagagaaattccactccccagcctaagtaaatacgaagcccagggttcattgactaaaagccattctgctcagcagccagtcctggtcagccaaactctggatattcacaaaaggatgcaacctttgcacattcagataaaaagtcctcaggaaagtactggagatccaggaaatagttcatccgtatctgaagggaaaggaagttctgagagaggcagtcctatagaaaagtacatgagacctgcgaaacacccaaattattcaccaccaggcagccctattgaaaagtaccagtacccactttttggacttccctttgtacataatgacttccagagtgaagctgattggctgcggttctggagtaaatataagctctccgttcctgggaatccgcactacttgagtcacgtgcctggcctaccaaatccttgccaaaactatgtgccttatcccaccttcaatctgcctcctcatttttcagctgttggatcagacaatgacattcctctagatttggcgatcaagcattccagacctgggccaactgcaaacggtgcctccaaggagaaaacgaaggcaccaccaaatgtaaaaaatgaaggtcccttgaatgtagtaaaaacagagaaagttgatagaagtactcaagatgaactttcaacaaaatgtgtgcactgtggcattgtctttctggatgaagtgatgtatgctttgcatatgagttgccatggtgacagtggacctttccagtgcagcatatgccagcatctttgcacggacaaatatgacttcacaacacatatccagaggggcctgcataggaacaatgcacaagtggaaaaaaatggaaaacctaaagagtaa

SEQ ID NO: 47365 - DNA, 237 bp, Homo Sapiens
gcactcactgtgggcctcgtgcgacagtgtcaaacaatccatggacgagaccggacgtgcatccctccccggcttcccccggagtgggtcaccacactgttttttatcatcatgggaatcatttcattgactgtcacatgtggtttgctggtggcttcccactggcgaagagaagctacaaaatatgctcgatggatagcattcactggaaagtgtgtgcattcttctcatacctaa

SEQ ID NO: 47366 - DNA, 1785 bp, Homo Sapiens
atggaatctggacccaaaatgttggcccccgtttgcctggtggaaaataacaatgagcagctattggtgaaccagcaagctatacagattcttgaaaagatttctcagccagtggtggtggtggccattgtaggactgtaccgtacagggaaatcctacttgatgaaccatctggcaggacagaatcatggcttccctctgggctccacggtgcagtctgaaaccaagggcatctggatgtggtgcgtgccccacccatccaagccaaaccacaccctggtccttctggacaccgaaggtctgggcgatgtggaaaagggtgaccctaagaatgactcctggatctttgccctggctgtgctcctgtgcagcacctttgtctacaacagcatgagcaccatcaaccaccaggccctggagcagctgcattatgtgacggagctcacagaactaattaaggcaaagtcctccccaaggcctgatggagtagaagattccacagagtttgtgagtttcttcccagactttctttggacagtacgggatttcactctggagctgaagttgaacggtcaccctatcacagaagatgaatacctggagaatgccttgaagctgattcaaggcaataatcccagagttcaaacatccaattttcccagggagtgcatcaggcgtttctttccaaaacggaagtgtttcgtctttgaccggccaacaaatgacaaagaccttctagccaatattgagaaggtgtcagaaaagcaactggatcccaaattccaggaacaaacaaacattttctgttcttacatcttcactcatgcaagaaccaagaccctcagggagggaatcacagtcactgggaatcgtctagagagcctggtgctgacctatgtcaatgccatcagcagtggggatctaccctgcatggagaacgcagtcctggccttggcccagatagagaactcagccgcagtgcaaaaggctattgcccactatgaaaagcagatgggccagaaggtgcagctgcccacagaaaccctccaggagctgctggacctgcacagggacagtgagagcaaggccactgaagttttcatcaggagttccttcaaagatgtggaccatctatttcaaaaggagttagcggtaatttttgtctcaaatttatatgacaaaaagcgggatgacttttgtaaacagaatcaggaagcatcatcagatcgttgctcagctttacttcaggtcattttcagtcctctagaagaagaagtgaaggcgggaatttattcgaaaccagggggctatcgtctctttattcagaagttacaagacctggagaaaaagtactatgaggaaccgaggaaggggatacaggctgaagagattctgcagacatacttgaaatccaaggagtctatgactgatgcaattctccagacagaccagactctcacagaaaaagaaaaggagattgaagtggaacgtgtgaaagctgagtctgcacaggcttcagcaaaaatgttgcagcaaatgcaaagaaagaatgagcagatgatggaacagaaggagaggagttatcaggaacacttgaaacaactgactgagaagatggagagcgacagggtccagttgctggaagagcaagagaggaccctcgctcttaaacttcaggaacaagagcgactactaaaagagagatttgaaaacgtaagcagaagaatccaaaatgagatacagaatctccagaggacaatgatacaaccaaggacatgtaccata

SEQ ID NO: 47367 - DNA, 496 bp, Homo Sapiens
atgtgaagaatgtggcaaatcctttaagtgcttctcagaccttactaattataagagaattcatactgctgagaaatcctacaaatgtgaagaatgtaacaaagcctatagtaaacataaaatagttcatactggagagaaaccccacatccatgaagaatgtggcaaagcctttacccgctcctcaacccttattaaccacaagagaattcgtatggaagagagaccttacaaatacaaagaatgtggcaaaacctttaagtgcttctcagaccttactagtcataagacaattcacactggtgagaaaccccacaaatgtgaagaatgtggcaaagcattgagctcattctcacacctcatcagacataagataactcatatagagaagctccacaagtgttcaaaatgtggaaaagccttcaataagtcctcattttgggttcaacatcagagactttatactgaaccaatacggtataaagttaatgactgt

SEQ ID NO: 47368 - DNA, 276 bp, Homo Sapiens
atggcagcctccagtcgcgcacaagtgttatctctgtaccgggcgatgctgagagagagcaagcgtttcagcgcctacaattacagaacatatgctgtcaggaggataagagatgccttcagagaaaataaaaatgtaaaggatcctgtagaaattcaaaccctagtgaataaagccaagagagaccttggagtaattcgtcgacaggtccacattggccaactgtattcaactgacaagctgatcattgagaatcgagacatgcccaggacctag

SEQ ID NO: 47369 - DNA, 387 bp, Homo Sapiens
aatgccaaaggagagacagcatccaactttgagtggctgaagaatctaaatcatgtcagctatggctgtttgaccttcaaatatgaaagggagtgtaactaccacttgctaatatctgttcaagagaatttagcaagaaaatttggaaagcacagtggaactattctcattatacccacagcagagttccaagacaggatatcaggtgcatcagagaaagacaccatgcatgctgacttggtgtacgcaatggagagttctgccaggcaaattttgtgcatagccatgaggtataacctgggattggacatgaggaccaccgtctatgtcaacgccattgagaaagtgttcaaagtatacaatgaagccagagtgaccttcacgtag

SEQ ID NO: 47370 - DNA, 1679 bp, Homo Sapiens
aaacttggttccagctgcgtgtggtgaaagcaactagaggcagagctatcaagggctgtgacagatgagcagtggtctgtctgcaatgagcatgtgctcaagctaacatggataccatcttggtcttcagcctaatcattgcatcctatgatgccaacaagaaagacctcagagatagcagttgccgactggaacagctgcctgggatcttcccaaaagacgtgagaagcatcagagaattgcaaatgcaagaaactcacacagaaaccaaaaggacaacattcattcaaaaccggactatagctaccctgcagtgccttggctctgacagcaaagtaaaagtcaaccttgtatatttggagagaaggccaaaggtcaagcatattttgaagaacctgagaatcattgctgctccccgcagaaacagctctgcctcctcaagctgtcacctaatccccacatccaagtttcagactggatctcttctaaaaggcaaagtatcaatgcctaggagccaggaagctgtgccaatgccagtggttgtggagatggcaaaagaagggaggccagccacctgggacagctgaatccaagcctgactctcagccccagaaggaaagttggacaagatgctgccaattcatcaaacccaaagaaagctgcagagatcactgttatccaccagacatacttctgaaaagttctgctctatctcaaagactgaatgatactacacagtcctctccctattaatatgggcacattcttgccaatttcacacttgtatcttcagcagggacattacaatcaaacaccaattcctggttaatgaagggagagtgtgggcttagcagagttaccctcatgcccctatctgagccacaaccttctgtaattcacttcatacatccatctaaatggatacctttccatcccctcaaacgagaacaaaaagtattccctgcaagcactatgaatggaccttactactctctttgacagaagactcaaacacagcctctaagaaacaaggcagctgttagtgtgacatagcttccagctcctctgttatcttcacagctgacttcacactcactggccctcaatagcttagagtgggactcctgatctccctggttgacgtttataaggttttgtaatttagcttctggtactacatgtatctatccacacactgctgaagggaacttgaccctacgcattccaaaagccttcctcataagttatccccaaggggttcagggactacagaccattagtacccaagtgaagtcttctgacgatccagaattcctaaggtggctctgatattatatcatactttaatagagagttgcataccttttggacaaagattccagagcaaaataattatgataatgctgtttctcacaggagaatagctatgagtcaaatctaacctgcttaaataagagtttggtgagaaagtgaaaccacctgatcttgaatcaatgttgaggtgaaaaaggaaatgtcaggagggataagacagggtgaggccctgcttcttttcctaagagtctgaaaccattccatttcattttggtgaaatgtgtctgtttctaagaaattctgttttcttagttctctggttaaaaaaaaaaatacataaactgtatccttctttctttcacttc

SEQ ID NO: 47371 - DNA, 507 bp, Homo Sapiens
ccgcgagctcgggatacgctcttcgaagtccgcagaagacttaactgatggttcatatgatgatgttctaaatgctgaacaacttcagaaactcctttacctgctggagtcaactgaggatcctgtaattattgaaagagctttgattactttgggtaacaatgcagccttttcagttaaccaagctattattcgtgaattgggtggtattccaattgttgcaaacaaaatcaaccattccaaccagagtattaaagacaaagctttaaatgcactaaataacctgagtgtgaatgttgaaaatcaaatcaagataaagatatacatcagtggattcatcattcctttccctttatgacagccacgtagcaaaggagattcttcttcgagtacttacgctatttcagcatataaagaactgcctcaaaatagaaggccatttagctgtgcagcctactttcactgaaggttcattgtttttcctgttacatggagaagaatgtgccc

SEQ ID NO: 47372 - DNA, 3780 bp, Homo Sapiens
atggatggcccgacgcggggccatggactccgcaaaaagcggcggtcgcggtcgcagcgagaccgggagaggcgctcccggggcgggctgggggccggcgcggccggcggcggcggggctggccggacccgggcgctctcactcgcctcgtcgtcgggctccgacaaggaagacaatgggaagcccccgtcctccgccccgtcccggcccagacccccgcggaggaagcggagagagtccacctcggcagaagaggacatcattgatggatttgccatgaccagctttgtcacttttgaagcgctggagaaagatgtagcacttaagcctcaggaacgtgtggagaaacgccagacgcccctgaccaagaagaaacgagaagcacttaccaatggcttgtcctttcattcaaagaagagcagactcagccacccacaccactacagctcagatcgagaaaatgaccgcaatctctgccagcaccttgggaagagaaagaaaatgccgaaggcactcagacagctcaagccaggacagaacagctgcagggacagtgacagtgaaagtgccagtggagaatccaagggcttccaccggagcagctctcgggaaaggctcagtgatagttcagctccttccagcttgggaacaggctacttctgtgacagtgacagtgaccaggaagagaaggcatcagatgccagctctgaaaaactcttcaacactgttattgtaaacaaagatccggagttaggtgttggcacgctaccagaacatgacagccaggatgcagggccgattgtccccaagatatcgggtctagagagaagccaggagaagagccaggactgttgcaaagagccaatctttgagcctgtggtgcttaaagacccctgccctcaggtcgcacagccaataccccagccgcagacggagccccaactccgagctccttctccggaccctgacttggtgcagcgcacagaggccccacctcaacccccacctctgagtacacagccaccacagggccctcctgaggcccagctccagcctgccccgcagcctcaggtgcagaggccacccaggccacagtcccccacccagctgctccatcagaacctcccacctgtgcaggcccacccctctgctcagagcctctcccagccattgtcagcctacaacagcagtagcttaagcctcaacagtttaagcagcagcagaagcagcactccagcgaagactcagcccgccccacctcacatctcccaccacccctctgcctccccgttccccctctccctgcccaaccacagccccctgcacagcttcacacccaccctccagccccccgcacactcacatcaccccaatatgtttgcccctcccactgctctgcctcctccaccaccactgacatcaggaagtctgcaggtggccggacacccggccgggagcacttactcagagcaagacatcttgcgacaggaactgaacactcgttttttggcctctcagagtgctgaccgcggggcttccctgggccctccgccctacctgcggaccgagttccatcagcaccagcaccagcaccagcacacccaccagcacacgcaccagcacaccttcacgccgttcccccacgccatcccacccaccgccatcatgccgacgccagcacctcccatgtttgacaaataccctacaaaagttgacccattctaccggcacagtctcttccattcctatcctcctgcagtgtcgggcatcccccctatgatcccacccactggcccttttggttcactacaaggagcatttcagccgaagacatccaaccctatcgatgtcgctgctcggcctgggacagtcccacacactttactccaaaaggacccgaggttgacagatcctttcagacctatgttaaggaaaccagggaagtggtgtgctatgcatgttcacatcgcctggcagatttaccaccaccaacagaaagtcaagaaacagatgcagtcagacccacataagctggactttggactgaaacctgagttcctgagccgccctccaggccccagtctttttggagccatccaccacccccatgacctggcacggccttcaactttgttctctgccgctggtgctgcacacccaactgggaccccttttgggccacctcctcatcacagcaacttcctcaaccctgctgcccacctagagccttttaatcggccgtctacattcacaggcctagcagcagttggtggcaatgccttcgggggacttggaaatccttccgttacacccaactcaatgttcggccacaaggatggccccagtgtgcagaactttagcaaccctcacgaaccctggaaccggctgcaccgaacgcctccgtcgttcccgacccctccgccctggctgaagccaggggagctggagcgcagcgcgtccgctgcagctcatgacagagatagagatgtagataaacgagactcatctgttagtaaagatgacaaagaaagggaaagcgtcgagaagagacactccagccacccttcaccagcacctgtcctcccggtgaatgccctgggacatacccgcagctccactgaacagatccgggctcatctgaacactgaggctcgggagaaggacaaacccaaagagagggagagagaccactcggaatcccgcaaggacctggccgccgacgagcacaaggcgaaagagggccacctgcccgagaaggacgggcacggccacgaggggcgcgccgcgggcgaagaggccaagcagctggcccgggtgccgtctccctacgtgcggaccccggtggtggagagtgccaggcccaacagcacctcgagccgggaggccgagccgcgcaagggtgagccggcctacgagaaccccaagaagagctccgaggtcaaggtgaaggaggagcggaaggaagaccatgacctgcctccagaggccccgcagacccaccgggcctcggagccgccgcctcccaactcctcgtccagcgtgcacccggggcccctggcctcgatgcccatgacggtgggggtgacgggcattcaccccatgaacagcatcagcagcctggacaggactcgcatgatgacccccttcatgggcatcagccccctcccgggcggagagcgcttcccgtacccttctttccactgggaccccatccgggaccccttgagggatccttaccgagaacttgacattcaccggagagacccgctgggcagggacttcctgctaaggaacgacccgctccaccggctctcgactccccggctgtacgaagccgaccgctccttcagggaccgggagcctcacgactacagccaccaccaccaccaccaccaccacccgctgtctgtggaccctcggcgggagcacgagcggggaggccacctggacgagcgggagcgcttgcacatgctcagagaagactacgagcacacgcggctccactccgtgcaccccgcctccctcgacggacacctcccccaccccagcctcatcaccccgggactccccagcatgcactatccccgcatcagccccaccgcgggcaaccagaacggactcctcaacaagacccctccgacagcagcgctgagcgcacctcccccgctcatctccacgctggggggccgcccggtctctcccagaaggacgactcctctgtccgcagagataagggagaggcccccttcccacacgctgaaggatatcgaggcccgataa

SEQ ID NO: 47373 - DNA, 549 bp, Homo Sapiens
aatcctttgcgggtccggcctccgatccctgtgtggctgtttggcgggtgggcgctgtgttcctctctcgtaaagccgtgcggtctgtgggccgccattcagaaactggatggacagcttcggcggtgggaagggaagggacatgctgcaggccaccctccggctagaaggagggagtacttgaggaacaaggtctgcgaaaattggctgtgctctgttctaaaacttaatggcctcagtacctggggaatgtgtttaaaatgcagacttaaatgtccgtttctccattctaatttcagtaggtatgaatctgcgtttttactcctcacaagccttccaagtgattctgaggcaggtgcttgtacttggattatcacagggttagattatcaggctatttatgatttagctgtatctaaaccacctttccctctctttcctcctttgaactgtttgaaacggatttgttcccttctgtctcttatttttcagtgctgtaagctgttaacacacatgagactgtcttcactaccaaaccaagtctcctaa

SEQ ID NO: 47374 - DNA, 2971 bp, Homo Sapiens
gcggagggaagtgtggggagagcagaggcgcagctctgctggagagacctgaggcttgcagcgctgggcccggccgggtcgctgcggctgggctggagggtcaaggatgcattccaggaaagttctataaaaatataccatcaactccaacctgatatttgacctagccatggaaaacctcattggctcctcactggatcagaccataaaaatgatccaggaatgaaaatctaagataaattcccaccacttcaagatgttcttatacaagtcaacagtctagcagatcagccagtctctttcatcatcaagcagacatactcaaggtaccaacacagcaaaggcacaaaatgtctctatatcagtatttttcatggtatatgtgagacccattagtgaggcatgaaatcaattctgtgagtcacaatgaacatttgtctaaaaaacaaaataaaatgtaaaataccaaagtgttttgcatgaatcctttgcctgaattgtgcacattgcaaggaatgctgaggtcaatttcaatatgcgagaggggtatttgatggaggagatatgatgaatagaatgtatattggctaagaaatggttttcagtcattgattcctgggtgtcttgcttgattttcataatagcacggttaatgttctatagtcaagttttatattacaattacttgcaactagttgtgaagtctgaaatattcgattcaattgcaaactttgagtgtagtttttgaaaagatgttatttagactgtatatttttttcttcttttttgagttagtgccaattataacattttaatcaaactggaacaaattgctattaaaatggatcatttctttattaaaagaaagaggaatagtgaagtgaaatatacagaagcatgttcaagttcatctgttgaatctggaattgtgaatagtgacaatattgagaaaaatactgactccaatctgcaaacttcaacttcatttgagccacatttcaaaaagaaaaaagtaagtgcaagacgttataatgaagattacttaaaatatggctttatcaaatgtgaaaaaccctttgaaaatgacagacctcagtgtgttatttgtaataatattcttgcgaatgaaagcttaaaaccttcgaaattaaaaaggcacttagaaactcagcatgctgaacttattgataagcctcttgaatattttcaaagaaagaaaaaagacataaagttatcaacacaatttcttagttgttctactgctgttagtgagaaagccttattatcatcatatttagttgcatatcgtgtggcaaaagagaaaatagctaacacagctgctgaaaaaattattcttccagcatgtttggatatggtgcgtacaatatttgatgataaatcagctgataaattaaaaactatacctaatgataacacagtatctcttcgaatttgtactattgcagaacatttagaaacaatgcttattactcgtttacagtctggtatagattttgcaatccagcttgatgaaagcactgatattggaagctgcacaacacttttagtttatgtcagatatgcgtggcaagatgattttttggaggattttttgtgttttttaaatttaacctcacacctaagtggattagatatttttacagaattagaaaggcgcatagttggccaatataaattaaactggaaaaactgtaaaggaattacaagtgatggcacagcaaccatgactggaaaacatagcagagtaattaaaaaattactagaagttactaataatggtgctgtgtggaatcattgttttatacatcgtgaaggtttagcatccagagaaattccacagaatctcatggaggtattgaaaaatgcagtgaaagttgttaattttattaaaggaagctcattgaatagccggcttcttgaaacattttgttcagagattggaactaatcatacccacttactatatcataccaaaattcgttggttgtctcaagggaaaatactaagcagggtttatgagctcaggaatgagattcacttttttctcattgaaaaaaaatctcatttggcaagtatttttgaagatgatacttgggtaacaaaattggcatatttaactgatatttttagcattcttaatgaactgagtttaaaactacaggggaaaaacagtgatgtattccaacatgttgaacgtatccagggatttcgaaagacattattgttatggcaagtaagacttaaaagtaatcgtcctagctattacatgtttccaagatttttgcagcatattgaagagaatattattaatgaaaacattttgaaagaaataaaattagagatattgttgcatctcacttctctgtctcaaacttttaaccatttctttccagaagaaaaatttgaaacattaagggaaaacagttgggtaaaagatccatttgcttttcgacaccctgaatcaataattgagctaaacttggtgcctgaagaagagaatgaattattgcagcttagttcttcatatacattgaagaatgattatgaaaccttaagtttatcagcattttggatgaaggtaaaggaagactttccattgttaagtagaaagagtgtcctgctattgctaccattcacaacaactagtttgtgtgaactagggttttccatcttaacgcagttaaaaacaaaggaaagaaatgggctgaattgtgcagcagttatgcgggtagcattatcttcctgtgttccagactggaatgaacttatgaacaggcaagcacacccatcatagtaaataaaaatcttacctagcttttgtctttgtatttcttattttgtagtatttttctatgttatatttaaatggtactataatactgtgatacttttgttatgttttaatttttgttatatttaataaaattattttatgttcattgaacaaaaa

SEQ ID NO: 47375 - DNA, 369 bp, Homo Sapiens
atgccctgtggggacctacaaacccaaaggcaactagcctcttcaggcaataacatacaggacataggaatgggcaaagacttcatgactaaaacaccaaaagcaacagcaacaaaagccaaaattgacaaatgggatctaattaaactaaagagattctgcgcagcaaaggaaactatcatcagagtgaacaggcaacctacagaatgggagaaaatttttgcaatctatccatttgacaaagggctaatgtccagaatctataaagaacttaaatttacaagaaaaaaacaaccccatcaaaaagcgggcgaaggatatgaacagacacttctccaaagaagacatttatgcagccaacaaacatga

SEQ ID NO: 47376 - DNA, 345 bp, Homo Sapiens
atgctggaggctggaggcagtgacgcagcaacagcgcgaggcgactttggagcggcctcatatagcgacctcgccttccgctgcgcgtcctcccagagcccaagaagcccggaacctgtggcatccatctctgaaaggagaagacggcaacccagccgaggcactactgggttggggtctccacgaccgagctggtctcatcaagtggcgtccaacaaggggctcaaacccgggttgaggggttgctggagcgacggagaacgtggaactacactggaggacaccagagtactcttaagcaatcccttgtctgcagatgtggatcccgaatcctgcgagaagtag

SEQ ID NO: 47377 - DNA, 699 bp, Homo Sapiens
ctgagcaagaatgagctgaagagatccctgaaagccaagaagaaagtggcagagaaggaggccaagcaggaagaactcagtgagaaattaaaccaggccacagctgctgtcaccaaccataccactgacagtggtgtgggtactgaggagaagagcctggacccaaatcaacactacaagatccatagtcaggcagtttatcaactgaatgtcaatggggaacacccatacccacacaagttccatgcagacatctcattcaatgacttcatccaagaatatagtcaccagcagcctgggggtcacctgaatgatgtcaccttaaaggtggcaggtaggatccatgctaaaagagcttctgagggaaagttcatcttctatgaccttcaaggagagggggtcaagttgcaagtcatggtgaatcccagaaattataaatcagaagaatttattcatattagtaagaaactgcatcaaggagacataattggagttcaggggaaccctgggaaaaccaagaagggtgagctgagcatcattccttatgagatcacactgctgtctccccacatgcatatgttacctcatcttcactgtggcctcaaagaccaggaaacaaggtatcatcagaaatacttggacttgatactaaatgattttgtgaggcagaaatttatcatctgctctaagatcatcaca

SEQ ID NO: 47378 - DNA, 483 bp, Homo Sapiens
atgagcagcagggtctctggcgacacttggtaccaggcagtgcaaagagtcctgggagggaaccagcacaagcgccagaagtttttggagaccgtggagttgcagatcagcttgaagaactatgatccccagaaggacaaatgcttctcacttaagtccactccccactccaagttctccctctgttctttgggggaccagcagcaccgtgaagaggcaagggccgtgggtatccccgacgtgaacatcgagatgatgaaagaactcaacgagagtaagaaactggtcaatacgctggacaagaagaatgacgcatttgtggcttcagagtctctgatcaagcagatcccacgaatcctcggcccaggcctaaataaggcaggaaagttcccttctctgctcacacacaacgaaaacatggtggccaaaggggacgaggtgaagtccacaatcaagttccaaatgaagaaggtgttatgtctg

SEQ ID NO: 47379 - DNA, 1272 bp, Homo Sapiens
ctgcccctgggtggtggctgcccacgggactgtgtgtgctacccggcgcccatgacggtcagctgccaggcgcacaactttgcagccatcccggagggcatccccgtggacagcgagcgcgtcttcctgcagaacaaccgcatcggcctcctccagcccggccacttcagccccgccatggtcaccctgtggatctactcgaacaacatcacctacatccaccccagcaccttcgagggcttcgtgcacctggaggagctggacctcggcgacaaccggcagctgcggacgctggcacccgagaccttccagggcctggtgaagcttcacgccctctacctctacaagtgtgggctcagcgccttgccggccggcgtctttggcggcctgcacagcctgcagtacctctacctgcaggacaaccacatcgagtacctccaggacgacatcttcgtggacctggtcaacctcagccacctgtttctccacggcaacaagctgtggagtctgggcccgggcaccttccggggcctggtgaacctggaccgtcttttgctgcacgagaaccagctgcagtgggtccaccacaaggcgttccacgacctccgcaggctgaccaccctcttcctcttcaacaacagcctctcggagctgcagggtgagtgcctggccccgctgggggccctggagttcctccgcctcaacggcaacccctgggactgtggttgtcgcgcgcgctccctgtgggaatggctgcagaggttccggggctccagctccgctgtcccctgtgtgtcccctgggctgcggcacggccaggacctgaagctgctgagggccgaggacttccggaactgcacgggaccagcgtccccgcaccagatcaagtcacacacgctcaccaccaccgacagggccgcccgcaaggaacaccactcaccccacggccccaccaggagcaagggccacccgcacggcccccggcccggccacaggaagccggggaagaactgcaccaaccccaggaaccgcaatcagatctctaaggcgggcgccgggaaacaggcccccgagctgccagactatgccccagactaccagcacaagttcagttttgacatcatgcctacggcccggcccaagaggaagggcaagtgtgcccgcaggacccccatccgtgcccccagcggggtgcagcaggcctcctcggccagttccctgggggcctccctcctggcctggacactggggctggcggtcactctccgctga

SEQ ID NO: 47380 - DNA, 771 bp, Homo Sapiens
cggcagggttcctgtggcgtgggtcgggcagcacaggtggtggtctgtgggagtccggagaagggcactgtcttcaggatggaggctctacaggagggagctccaggggcgcagagcgaggaggcagcctgggtggaggaggcggtgctggtgttggatgacataatcacggaggtggaggtggtggcccaggaggaggccgacgtggagcgtctggaggaggaccagcgggcacagcttggccctgggcccatgaccccagagtcgacactggaggaactactggccattcaggtggagctagagccggttaatgccggagccagtaaggccttttctcagcagaggggaaagatggagcggaggcgcaagccccacctggaccgcagaggctcattcatccagagcatccctggcttcttggccagtgtaattgcaaaccacctccagatgtcagccctgatctctgaccaagatgaagacatgctgagctacatgatcaacttggaggtgaaagaagccaagcattccgttcatctctgcaagatcatgttgttcttttggagtaacccctacttccagaatcaagtgattaccaaggaatatctcatgaacctcacagaatacagggcttcccattccactccaattcagcggtatccgaattatgaagtggaggcctatcgccacagacaccacaacaggagacttaacttcttcaactggttttctgaccacgactttgcaggatctaataggattgctgaggtg

SEQ ID NO: 47381 - DNA, 2341 bp, Homo Sapiens
actgactggcccccgagcccggggcatctgagaaacctcctgcgaatggctacagaggaaattttcaggtgcgagagatctgaagaaagttctggaacccgcgcctggaccggtttggaccctcagtggaaacacatcaaagagaaggaaaaccagctggggaaggatcctggcagcggtggctcagggtgctgggcggaggccccgtttttcaccaaccgacggctgggagagcccgtgccacccactgtgccctgagacccgcacaggacggcgactcacagatgccttttgctgccctgcccgggtcctggcacggcgcgaggtgcgtcaggccaggcagccacgcaaaggccccggctcctggcttctgccatctattctgtcctgcaactctatcctggagcctcccatcccttcaaaagctgcaggaagaggcctgcaggcaagagaagaggactgcaggagtgagcaatttaagaaatggaaggccgaggttttccaatctaattaacagcatgacaagccaggatgggctgctgacccgcgtggagccttgcacagccagaaacgcggtgtcctgctccgctcctgagacgccagggctgtcactgcaacacagcccccaacacttccacacgggcggactctggctctccaggcaccgcagtgccctctccttcccttcccagctctcctgaggcctgtggttctgggagtctctgccccgtgcaagcgtgaccgtggccctcctcccatgtccagccgcaccaggccctgggatcccagatctggcttcacctttgcaaggggctcaaagcaagcacctatgggggtgggggcggcaaagccgtctggccaaggtcccttctctagagtgcctgtctgtccgtctgtccttgaggagcctgaggagtgcagggcaggacaggcaggcaccagctgacccggtaccgggcagggaccagtgcaggacctcgaggcagggctgggtggggtgggggtggccagagtctcctggctcggagcagacacgggtgagtggcacagactgtcctcacaccctcctgggacagaggtaggaatccgtgaccaggacagacacaggcaggactgggagaggcagagcaggtgcctgagcttggccacgcacagcttccaatgaggttgggccatccacagctccccaaggttccccgccactgttcaccccaccccagcacagccgagagctgtggtttctcctcccatggagtcctgcatggctgcccactgcaggcccagcccaagggcaccgccttctccaggctgccttccctgcacatgccacacctccagccccagaaggttctgaggaggggaggagctggggcccccactcgccctcctgttgccaggatacaggcccaggaaaaaatgccacagtgctggattaatgtctagacaacgtgacctttcccctggttctctagatataattgggacccaaattgtccggtgtcatgagctgacagcagggatgaaggaggggtctgttctcggtgccccgaggggactccgggagagggagagggcagcccactacctgcgtgggggctgcagggggacgagccagggtcgcccacaaaggcgctttctgtggaggggacgtcacctcttccatcagcgatgacgcagctctgagatcacagtgtcctcgcagtggctcccgttaactccctgctgcccgtcctgccaggctggtgccacgagaccctcggggctgggccgtgggacaggtgcctgcccagccctgcaaacacatccagcaggtgtcgagggctgccaagcacagacttctgctgccagccatgcacagtgccagctgcgacagcaacgcctctgccaggagactcggaggagaccggccctgacgctcctgtcggggggagctgctgcacactcaggcaggatgcaggggtcctgagggggaccctcggctcacccacggctcccgtggccggtctggtcctggtatttatctcaacttcattgttgtccagaagctgctttttattatttgtgaccatgaaaggatggaaacaaattcctgttttgagtcaaagctacctgcgtccaccgggccacagagcggggacacggccgtaatgtggagtcagtaagccaaggttgtgagaagattctcaggaggggggtccagggagggagaactgagggctggggttccgggggacattttactttttattccaggcagcgctgtactggctggggcctcaaatgctgaataatgctcctgttggacttcagtaattttaaaaaataaaactgtttaaaaatc

SEQ ID NO: 47382 - DNA, 606 bp, Homo Sapiens
cccggggtctcggaggagctcacggcggcggcggcagcggcggcggcggacgagggccccgcccgagaggagcagcgtcccatccagccctctttcaccaagtccctctgccgtgagtcccactggaagtgcctcctgctctcgctgctcatgtacggctgcctgggggcagtggcctggtgccacgtcaccacagtgacgcgcctcaccttcagcagcgcctaccagggcaacagcctcatgtaccatgacagcccctgctccaacggctatgtctacatccccctggccttcctgctcatgttgtacgccgtctacctggtggagtgttggcactgccaagcccgccatgagctgcagcaccgtgttgatgtgagcagtgtgcgggaacgtgtgggccgcatgcagcaagccacgccctgcatctggtggaaggccatcagctaccactatgtccgccgcacccgccaggtcaccagataccgcaatggagacgcctataccaccacccaggtaccaggctgcctaggaagccaggtggtgcctttaagatctccatggagaaacgcacagctcgacgcaggatccgacgaagaaccagcctaa

SEQ ID NO: 47383 - DNA, 1761 bp, Homo Sapiens
atggcgactgcgacccccgtgccgccgcggatgggcagccgcgctggcggccccaccacgccgctgagccccacgcgcctgtcgcggctccaggagaaggaggagctgcgcgagctcaatgaccggctggcggtgtacatcgacaaggtgcgcagcctggagacggagaacagcgcgctgcagctgcaggtgacggagcgcgaggaggtgcgcggccgtgagctcaccggcctcaaggcgctctacgagaccgagctggccgacgcgcgacgcgcgctcgacgacacggcccgcgagcgcgccaagctgcagatcgagctgggcaagtgcaaggcggaacacgaccagctgctcctcaactatgctaagaaggaatctgatcttaatggcgcccagatcaagcttcgagaatatgaagcagcactgaattcgaaagatgcagctcttgctactgcacttggtgacaaaaaaagtttagagggagatttggaggatctgaaggatcagattgcccagttggaagcctccttagctgcagccaaaaaacagttagcagatgaaactttacttaaagtagatttggagaatcgttgtcagagccttactgaggacttggagtttcgcaaaagcatgtatgaagaggagattaacgagaccagaaggaagcatgaaacgcgcttggtagaggtggattctgggcgtcaaattgagtatgagtacaagctggcgcaagcccttcatgagatgagagagcaacatgatgcccaagtgaggctgtataaggaggagctggagcagacttaccatgccaaacttgagaatgccagactgtcatcagagatgaatacttctactgtcaacagtgccagggaagaactgatggaaagccgcatgagaattgagagcctttcatcccagctttctaatctacagaaagagtctagagcatgtttggaaaggattcaagaattagaggacttgcttgctaaagaaaaagacaactctcgtcgcatgctgacagacaaagagagagagatggcggaaataagggatcaaatgcagcaacagctgaatgactatgaacagcttcttgatgtaaagttagccctggacatggaaatcagtgcttacaggaaactcttagaaggcgaagaagagaggttgaagctgtctccaagcccttcttcccgtgtgacagtatcccgagcatcctcaagtcgtagtgtacgtacaactagaggaaagcggaagagggttgatgtggaagaatcagaggcgagtagtagtgttagcatctctcattccgcctcagccactggaaatgtttgcatcgaagaaattgatgttgatgggaaatttatccgcttgaagaacacttctgaacaggatcaaccaatgggaggctgggagatgatcagaaaaattggagacacatcagtcagttataaatatacctcaagatatgtgctgaaggcaggccagactgttacaatttgggctgcaaacgctggtgtcacagccagccccccaactgacctcatctggaagaaccagaactcgtggggcactggcgaagatgtgaaggttatattgaaaaattctcagggagaggaggttgctcaaagaagtacagtctttaaaacaaccatacctgaagaagaggaggaggaggaagaagcagctggagtggttgttgaggaagaacttttccaccagcagggaaccccaagagcatccaatagaagctgtgcaattatgtaa

SEQ ID NO: 47384 - DNA, 396 bp, Homo Sapiens
gagtccctggtgggaaaagtccacaatttcccattgatagctttttactgttgtgaaaaagggaagcgtcagccacacaaaagcctgcatgaccgctgcttcggagaagctctcgaccctaactgcagtcactgttacttggatcagatcaagcgcagtgactttttgggattcagtggttattctccacacttcgtagccatttcaaccaactctgagcacaaaatgcagccatcctctatgcagcaagccctgcccagtccctactggacagatccaaggccagccctggttccctgctgcagccaccgtcctgacgttcatcggagcaggccggggcctggccttcccggcacaagtggctgttctgacaggcccccagtttgtcccatctga

SEQ ID NO: 47385 - DNA, 657 bp, Homo Sapiens
gagaagcctcacgagtgcagggactgtgggaaggccttcaagaccaggaaccgtctctgtatgcatcagcttatccacaccggggagaagccttacaaatgtaactgctgtgggaaggccttccagtttaagcattcccttaccatccatggcagaatccacactggggagaagccatatgaatgtgaggagtgcgggaagcttcagtgggagttcagacctcaccaaacacataagaatcacactggggaacgaccttatgagtgcagcaagtgtggaagggccttcagtcggagctcagacctaagcaaacacaaacgaatccatactcgggagaaacactatgggtgtccccagtgtggaaaagacttcagcatcaaggcagaactcaccaaacacagaaggatccacactgaagagaaacgttacaggtgtgaggagtgtgggaaagcctttcgtcataactgtaagcgcagggctcatgaacgagagcatacaggggagaagccctatcaatgcagggattgtgggaaaaccttccaagataagcactgccttaccatccatcagagaatccacactggagagaaaccttacaaatgtttagagtgtgggaaagctttcagtgggaagtcaaacttgaccaatcatcgaaga

SEQ ID NO: 47386 - DNA, 2037 bp, Homo Sapiens
aatagagacagggtttctccactgtcaggctggtcttctccattgtcaggctggtctcgaactcccgacctccagtgatctgcctgccttgacctcccaaagtgctgggattacaggtgtgagccaccgcgcccagccagagaaccttttgtgacctaccaataaaattcttaggagacatgttttccttagaagccattatagattttttttttttccatctcactaagaaaatctggactaggttttcttcatcaattcattagttatgatggaggacctactatgttggtaatcagaaacactggataggctttttgtcagtgtttctgaattggctaatgaatgcaatacctgtcttactgaagcgactcccttacttaataagaatgccatacagagagtattatgcctgttgtacagaatttaaggagccactcattctcagtgttgtgcaagctgatcctgcaattgcacagagtaagagcctctttaaattttgcattctagacacctctcttgtcttgtgttagtcaagaacctgctgtactagtaggtaaaatgcatactttaacatagttaccaaggtcattatattctcagagatcctttgtgccattaagtaatttgatttttatatgccaaatccttttgatttttcttgttttgatttcctattgggccatttttcttttcttgtagaaccgtattgctgttaataagaattatccttgaatattgccagtgtgtggataacatcccatctgttactactgacatgcttactcgtctgtcagatttattgaaggtgctgaacatgactgaggccacttaggtcaaaaaacctggactggcttcaaatgtgcatggaaggaattcactgaactttacaaaattcatctcactaagtacttcaattcaagaagttgccagttagttcttggagctggtgcactgcaagttgttggactaaaaacgataactacaaaaaatttggctctttcttcacgatgtttgcagttaattgtgcactacattcctgtgatccgggctcattttgaagctcgactaccacctaagcaatatagcatgcttaggcattttgatcatatcactaaggactaccatgatcacatagctgaaatatcagctaagcttgtagcgataatggatagcttatttgacaagctgttatctaagtatgaagtgaaggctcctgttccttctgcctgtttcaggaatatttgtaagcaaatgacaaaaatgcacgaagctatatttgatctccttccagaagaacaaacacagatgttatttttaagaattaatgcaagttataaactccacttgaaaaagcagttatctcacttaaatgtgataaatgatggaggacctcaaaatgggttggtcacagcagatgtagctttttacactggaaatcttcaagccttaaaaggccttaaagatttggacctaaatatggccgaaatttgggagcagaagaggtgatgtcatcctggaaaactgggtagttcatctgaccatgggatgtgtttgttatgaagaaaatctggatgcctgtgattcgagaattgaacctgaaacccaaagtgaactggggtgggggaagggaaaaaggaaagtatcaagtgttgggaaactggattcagtgggatctacaaggaatgtcatttttgtgcatcctacagtgaggagtaactgatcaggtgtctataacatttttcattctctctggaaacagactcaggtttctttggaccaaatccaaaagaacacatagctgtaacacagctgtagttgactagaatgctctgtatactttatattaaaaaatgctttgcatttcttccagtgcaatgaaattcatatggtgtcccaccttatttaatgatggtacaatttaaaatcttagtcaacttctgtagaaagttttctctatgaaagtaaagctgtttgaaaaattattatttttttacagatctttctataaaaaataaacatcttttgattgcttgg

SEQ ID NO: 47387 - DNA, 2668 bp, Homo Sapiens
ttagctatgggagtaaatttgcctgctcacctagtagttataaaatctacaatgcattatgctggaggactgtttgaagagtacagtgaaacagatattctacagatgattggtagagctggtcgacctcaagttttgcatctggattgaacaaagatggaattgaagcaaaattacaagaattatgtttgaagaatctgaatgatttatcatccctggacttaataaagatggatgaaggtgttaatttcaaaccaactgaagcaggaagattgatggcttggtattatattacatttgagacagtgaagaaattttatacaatcagtggaaaagaaaccttatcagatctggttacattgatagctggctgcaaggaatttctagatatacagttaaggataaatgaaaagaaaacactgaatactttgaacaaagatccaaatcggataactatcagatttccaatggaaggaagaattaaaacaagagaaatgaaagtaaattgtcttattcaggctcaactaggatgcattcccatacaagattttgctttgacacaagataccgcaaagattttcagacatggctcccgaattacaagatggttgtcagattttgtagctgctcaagaaaagaagtttgctgtactattgaatagtttgattttagctaaatgttttaggtgtaaactttgggaaaactctctgcatgtatccaaacaactggaaaaaattggtataacattgtcaaatgcaatcgtaaatgctggtttgacttcctttaaaaaaatagaagagacagatgcaagggaacttgaattgattttaaacagacatcccccctttggaacccagataaaagaaactgtgatgtatctaccaaaatatgaacttaaagtggaacagattacaagatatagtgatacgacggcagaaatattagtgactgttatattaagaaattttgaacagctacaaactaaaagaacagcatcggattctcactatgttaccttaatcataggtgacgcagataatcaagtagtttatctgcacaagattacggattctgttttgctaaaagctggaagttgggctaaaaagattgctgtgaaaagagctcttaaatctgaagatcttagcataaatctaataagttctgaatttgttgggcttgatattcagcagaaacttacagtcttttacttagaacccaagaggtttggaaatcaaatcactatgcaaagaaaatctgaaacacagatttcccattctaaacattcagacatatctacaatagcaggacctaataaaggaacgactgccagcaaaaaacctgggaaccgagaatgcaatcatctttgtaaaagtaaacatacatgtggacatgactgctgtaaaattggagttgcacagaagtcagaaattaaagagtcaacaatttcttcatatttatctgatttaagaaacaggaatgctgtttcatctgttcctccagttaaacgtctgaagatacagatgaataaatctcaaagtgtggaccttaaagagtttggttttactccaaaaccttcccttcctagtatatcaaggtcagaatatttaaacatatctgaattgcctataatggagcagtgggatcagcctgaaatctatggaaaagttagacaagaaccatctgaatatcaagacaaagaagttttgaatgtgaactttgaattgggaaatgaagtttgggatgattttgatgatgaaaacttagaagttactagcttttcaactgatactgagaagacaaaaatatcagttttgtttcatcacatgagatgtcggatatttctttatcaaattctgctatgcccaagttcagtgcatcctccatgacaaaattacctcaacaagccggaaatgcagttattgtccattttcaagaaagaaaaccacaaaatctgtcaccagagattgagaagcaatgctttactttctctgaaaaaaacccaaattcttcaaattataaaaaagtggatttttttattagaaacagtgaatgtaaaaaggaagttgatttcagtatgtatcatcctgatgatgaagctgatgaaatgaagtctttattgggaatatttgatggtattttctaaaacaaacaaatactttttatattgataagagaaagaataaagacacctaatcacaaagcatgctttttatttttaaaaagtagttcataattgttcggatttttttctcctgtatttgattagctttgttcactttttgcaacaaaatgtatgggccgatttattttcccattatattgtaacttcttgaaaagctcttttacagtggctttgtttcaataagcccttaagttaagggctgattgcacttagaaataagttgcacttagaaataattatttggctattaattggattttgacaagaaccaatgtaaaatttcatttttatattttcttaacaagaagaaaaatattctatgaaagcaaagtaatgctaacttaatgaatctgcttattgtatggattaatcactaatattattcccatgtattttgttttactaaagatttttaagaatccagtggctatttgaacctactgttatctaactttgagcaacaataaatgaaacattaatcagtat

SEQ ID NO: 47388 - DNA, 3249 bp, Homo Sapiens
gattttgtgccactgtatcaagactttgaaaatttttatacaagaaacctttacatgcgaatcagagacaactggaaccggcccatctgcagtgccccagggcctctgtttgatttgatggagagggtatcagacgactataactggacgtttaggtttactggaagagtcatcaaagatgtcatcaacatgggctcctataacttccttggtcttgcagccaagtatgatgagtctatgaggacaataaaggatgttttagaggtgtatggcacaggcgtggccagcaccaggcatgaaatgggcaccttggataagcacaaggagttggaggaccttgtggctaagttcctgaatgtggaagcagctatggtctttgggatgggattcgcaactaactcaatgaatatcccagcattagttggaaagggatgcctcattttaagtgatgagttaaaccacacatcgcttgtgcttggggcccgactctcaggtgcaaccataagaatcttcaaacacaacaacacacaaagcctagagaagctcctgagagatgctgtcatctatggccagcctcgaacccgcagagcttggaaaaagattctcatcctggtggagggtgtctacagcatggaaggttccatcgtgcatctgccccagatcatagctctaaagaagaaatacaaggcttacctctacatagatgaagctcacagtattggggccgtgggcccaaccggccggggtgtcacggagttctttggactagaccctcatgaagttgatgtgctcatgggcacattcaccaaaagttttggagcttcaggaggttacatagctggaaggaaggacctcgtggattatttacgggttcactcgcatagtgctgtttatgcttcatccatgagcccaccgatagcagagcaaatcatcagatcactaaaacttatcatgggactggatgggaccactcaagggctgcagagagtacagcaacttgcgaaaaacacaagatacttcagacaaagactgcaggaaatgggattcattatctatggcaatgagaatgcttctgttgttcctctgcttctttatatgcctggtaaagtagcggcttttgcaaggcatatgctagagaaaaaaattggagtggtggtcgtgggatttccagccactcccctcgcagaagctcgggctcggttttgtgtttcagcggcacatacccgggagatgttagacacggttttagaagctcttgatgaaatgggtgatctcttgcaactgaaatattcccggcacaagaagtcagcacgtcctgagctctatgatgagacgagctttgaactcgaagattaagtttcctggtcctgaatgacacataaagactttgcgagaaagacctccctccttgcctcacaaggaatataaatggatttctcccccttcctcaggacaattttggttcccagaccagcttgattgaactgagggagacgttgttgtttttaatgtctccagcttggactgcagagacaaaaacatgattccagatttaagtctctcttcttccaagtattctactagaaatacacacacacacacacacacacttctgagaatatttttaatggcaataagcctgtgttttagctgctactgtgcagaccctttcagggattccaaccaaatgcaaatgagagaatttaaaatttttattcagtaagttcactatgtgtttacttattccatctgcagatgtaagtgagtgtggtggacagtagccaccttccttgttccactcataaaagcatcagctagatctcatctgtatcatgggaagttccaggcaggagggtaaagaaatgttgtttctaccatttgtcacatttggacgtttttcacagacaagtgtcaaaagacatagttaatgtttcgagggggaaagcagaactgatcaactgcgactagagacgtctttgaaggaaattttccttttcctcttgctggtctcctacagttttacagctgagcttttgaggtttggaaaattcaagatgtttgtttcataagaaaaggggcagaaagcaagcacaagacacttttaggtctagactaaaatggtagttacaacaatttgaaccttgttggtgcagtgcacggtgaatgcttaccctgcacagcctctattaccttaaggaattagttgtcattttcctattgaattttgagtaaatggtgaaattcagtgtcctttagaatcgactcccaagactatatttgaagaatgcattgattcaagaaggacatttaaaagcaaattctgactttttcaagaccaacacacttgtttaggcctattaaattgtactatcacttgttacatgccctctgaattgggagaaagtgggcttgcacactttgaggtaactaactgtaatttacttgtgttctctctttcttgctctccttctcaacatgaacacaaacctctatggaaaagtagcctcttgttaatctgatctagtttgtatggaaaaagcccatggagaaccttatctttaacaagctcccagagggtgcccagatttggaaattctagagagcagtggtgaccttttagcaaagcttctgtaacagttcgaatgagttgcagaacattccactccatcaaatgacactgtaaacaaatcacttcaagagaggcttggttttgtgtggcacagatggacccaagctttcatgctgtgcactgagatagaaactccacccgcagcgcctgcgatggatggagcagtgtgccctgatgctcaaagcgtattaaaggaaaaaaagtgatcagcatggaaagtttttatggggaaattataactccaagtgggtgcattggtttaaaaatggatcacaatgatagagttcttcatgaatgtttacaagttgtaaggaataccgttagtgaaagaggaaaagaagtgggttctgaaaatgcagtttcccatccaatgattttgataacaaaattccaacttttctcaatgaaactgatgcagtattatttgtgcaaataaaatgtgtcataaatatgcaaagaaagggagacatactgttcttatcttgaatatgtgcatttaaatgaattgtccaaaatgcataaatgccttgcgttctataaaggaaacaggaggtcaaaaagacagcgagatatctagtccttccacaaggtatggaaagcaataaacatcttcctttctt

SEQ ID NO: 47389 - DNA, 213 bp, Homo Sapiens
gactggctgaggggcaaggtggaagtcaatcaagagactatccagcggctccttgaggagaatgaccaactgatccgctgtatcgtggagtatcagaacaagggcggagcgaacgagtgcgtccagtgccagcttgtgttacacagaaatctcatttatttggctaccatcgcagatgccagcccaaccagtacttcaaaagcaatggaataa

SEQ ID NO: 47390 - DNA, 1583 bp, Homo Sapiens
gggctcgggagaggagtggacgccgctggccaggatggtgctggagagcgtggcccgtatcgtgaaggtgcagctccctgcatatctgaagcggctcccagtccctgaaagcattaccgggttcgctaggctcacagtttcagaatggcttcggttattgcctttccttggtgtactcgcacttcttggctaccttgcagttcgtccattcctcccgaagaagaaacaacagaaggatagcttgattaatcttaaaatacaaaaggaaaatccgaaagtagtgaatgaaataaacattgaagatttgtgtcttactaaagcagcttattgtaggtgttggcgttctaaaacgtttcctgcctgcgatggttcacataataaacacaatgaattgacaggagataatgtgggtccactaatactgaagaagaaagaagtataataataataacaatattttctcattctttgtgtatagaaaattttaaaatggtggtcttaattattactactggttgaacaattatttcttccaatttattttcttcctgcactactgtttgtatttgatcctttgtctattcagtcacttaattagaaattaaattgtcaagcctcttattctgacttcaaagaattaatgtatcttccaacaataaaatcacttctgattttaatctaggaaaacctaaattgtggctatggatccaaagctgtttgtttctttgaatatcaatattttcaacaggatcttgtatttaaaattcccacctacattgttaaatatgttattttttcatatctcttttggttttgataatctgaagtgtttttttctcgttttggccttccaaactgcatttggttaggtgaattaagaaaaatattgccatcaagaattacttgtgttttcacagagatagactctttgctttatagagattgttgtgtatttaatatgaatatcccagctttagaaaagaagtaaactggatacaaaaagttccattgaggaacagttatttacagtataaaagatttgtttactttacaaaaggcttgtgtctgtgtgtgtgtgtgtgtgtgtgtgtgtattttaaactgactcagtgacagctggggtggaatggcaagaacacttacaaccaaactcatgggctgctgcaatttgaagatcaattggtaataaacataagacattaattcatattaaaatagttcagtgttcaaaattgtgtttatgtggatatttttctctttttaacactataaaccattaaaatacagtcatcccttgtatacgctagggactggttccagggccacacatataccaaaatctgcccatactcaagtcccacagaaagtcttgcagaacccatatgtagaaaagttggccctccagttgaccctccgtacacatgagtttcacatcccatgcacaaatgctgatctgtgtgacctcacctgcatttgattgaaaaaagtatgcgcgtaagtgtacccacccagttcaaacccgtgtgtaagggtcaactgtacaaaaaagtttgtgaaataaacgtactggagaatctttaaaa

SEQ ID NO: 47391 - DNA, 306 bp, Homo Sapiens
atggtgaacgttgctaaaacccgccggactttctgtaagaagtgtggcaagcaccaaccccacaaaacgacacagtacaagggcaaggattctctgtatgcccagggaaagcagcgttatgacatgaaacagagtggctatggtgggcaaactaagccgatcttccggaagaaggctaaaactacaaagacgactgtgctaagacttgagtgcgttgagcccaaaagatctaagagaatgctggctaaaagatgcaagcattttgaactggaaggagataagagaaagggtcaagtgatccagttc

SEQ ID NO: 47392 - DNA, 945 bp, Homo Sapiens
atgctgggtctcaatggcacccccttccagccagcaacactccagctgacaggcattcctgggatacaaacaggcctcacctgggttgccctgattttctgcatcctctacatgatctccattgtaggtaacctcagcattctcactctggtgttttgggagcctgctctgcatcagcccatgtactacttcctctctatgctcgctctcaatgatctgggagtgtccttttctacacttcccactgtgatttctactttctgcttcaactacaaccatgttgcgtttaatgcttgcctggtccagatgttcttcatccacactttctccttcatggagtcaggcatactgctggccatgagcttggatcgctttgtggctatttgttatccattacgctatgtcactgtgctcactcacaaccgtatattggctatgggtctgggcatccttaccaagagtttcaccactctcttccctttcccttttgtggtgaaacgactgcccttctgcaaaggcaatgttttgcatcactcctactgtctccatccagatctcatgaaagtagcatgtggagacatccatgttaacaacatttatgggctcttggtgatcatttttacctatggtatggactcaactttcatcctgctttcctacgcattgatcctgagagccatgctggtcatcatatcccaggaacagcggctcaaggcactcaacacctgcatgtcacacatctgtgcagtgctggccttttatgtgcccataattgctgtctccatgattcaccgcttctggaaaagtgctccacctgttgttcatgtcatgatgtccaatgtctacctgtttgtaccacccatgctcaaccctatcatctacagtgtgaaaaccaaggagatccgcaaagggattctcaagttcttccataaatcccaggcctga

SEQ ID NO: 47393 - DNA, 528 bp, Homo Sapiens
atgaattctgaaattttgcaagtcttccagagggaactcacctgtcccatctgcatgaactacttcatagacccagtcaccatagaatgtgggcacagcttttgccggccctgtttctacctcaactggcaagacatggcagttcttgctcagcgctctatatgcaagaagacaacacggcagagaaacctcaaaactgacatttgtttgaagaatatggcttcctttgttagaaaagctagcctctggcaattccttagatctgaggagcaaataagtgggatgcacggagagacaaagaaaatgttctgtgaagtggacaagagcctgctctgtttgctgtgctccaactctcaggagcaccggaatcacagacactgtcccattgagtgggctgcagaggaacgccgggaggagctcctaaaaaaaatgcagtctttatgggaaaaagcttgggaaaatctcagaaacctgaacatggaaaccaccagaacaagaagctggaaggttagtaccgtattactctac

SEQ ID NO: 47394 - DNA, 1107 bp, Homo Sapiens
atgggtctaggaaagacaatccaggcaattggaattacttacttctataaagaggaatggcctctgttaatagtggtcccttcgtctctgaggtacccttggacagaagaaattgaaaaatggatcccagagctaagtccagaagaaatcaatgttattcagaataaaactgatgttaggagaatgtcgaccagtaaagtgacagttctgggttatggtctcttaaccgcagatgcaaagactttgatagatgcactgaataatcagaacttcaaagtagttatagtggatgaatcacactacatgaaatccagaaatgcaactcgcagcaggattttattgccaatagtacagaaagccagacgagccattcttcttacaggaacaccagctttaggaaggcctgaagagctttttatgcagattgaagctctctttccacaaaaatttggaagatggaccgactatgcaaaaagatactgtaatgcacacatcagatattttggtaaaagacctcagtgggattgtagaggggcatcaaatcttaatgaacttcaccagctattaagtgacataatgattagaagattaaagactgaagttttaacccagctaccccctaaagtcagacagcgtattccatttgatcttccatcagcagctgccaaggaattgaataccagctttgaagagtgggaaaaaataatgagaactccaaattcaggtgccatggagacagtcatggggttgataactcgcatgtttaaacaaactgctattgccaaggcaggtgctgtaaaggattatattaagatgatgcttcagaatgattcgcttaaatttctggtttttgctcaccatttaagcatgctccaagcttgcacagaagcagtcatcgaaaataagactcgttacattaggatagatggaagtgtttcatcttcagaaagaatacatctggttaatcagtttcaaaaggatcctgacactcgcgtggctatcctaagcattcaggctgctggccaggacctgtatgacaaggtggcctgggggaaaagaactcttgtctcaggactttttatggagtgcttctgttttgtcccttag

SEQ ID NO: 47395 - DNA, 867 bp, Homo Sapiens
atgtctgccacaggggaccgacacccgacccaaggggaccaggaggccccggtaagccaggagggagcacaggccgaggcggccggagctggtaaccaggagggcggcgactccggccccgacagcagcgacgtggtgcctgcggccgaggtggtcggagtcgcagggcccgtggaaggcctcggggaggaggagggtgagcaggcggcaggcctggccgcagtcccccggggcgggagcgccgaggaggactcagatatcgggcccgcgacggaggaagaggaggaggaagaggggaacgaggcggccaacttcgacttggcggtggtcgcccgtcgctacccggcgtcgggcattcacttcgtgctcctggacatggtccactcccttctccaccgcctctctcacaacgaccacatcctcatagagaaccgtcaactcagccgcctgatggtggggccacacgctgctgcgcgcaacctctggggcaacctccccccgctgctgctgccccagaggctgggtgcaggggccgcagcccgggcgggcgagggcctgggcctgatccaggaggccgcatcggtcccagagcctgcagtgccagctgacctggccgagatggccagggagcccgcggaggaggccgcagaggagaagctctcagaggaggccacagaggaaccagacgcagaggaaccggccacagaagaaccgaccgcacaggaggccacggccccagaggaagtcactaaatctcagcccgaaaagtgggatgaagaggcccaagatgctgcaggcgaggaagagaaagaacaagaaaaagagaaggatgcagaaaacaaggtgaagaactccaaagggacctag

SEQ ID NO: 47396 - DNA, 2898 bp, Homo Sapiens
gccatggctgtgagaagggactccgtgtggaagtactgctggggtgttttgatggttttatgcagaactgcgatttccaaatcgatagttttagagcctatctattggaattcctcgaactccaaatttctacctggacaaggactggtactatacccacagataggagacaaattggatattatttgccccaaagtggactctaaaactgttggccagtatgaatattataaagtttatatggttgataaagaccaagcagacagatgcactattaagaaggaaaatacccctctcctcaactgtgccaaaccagaccaagatatcaaattcaccatcaagtttcaagaattcagccctaacctctggggtctagaatttcagaagaacaaagattattacattatatctacatcaaatgggtctttggagggcctggataaccaggagggaggggtgtgccagacaagagccatgaagatcctcatgaaagttggacaagatgcaagttctgctggatcaaccaggaataaagatccaacaagacgtccagaactagaagctggtacaaatggaagaagttcgacaacaagtccctttgtaaaaccaaatccaggttctagcacagacggcaacagcgccggacattcggggaacaacatcctcggttccgaagtggccttatttgcagggattgcttcaggatgcatcatcttcatcgtcatcatcatcacgctggtggtcctcttgctgaagtaccggaggagacacaggaagcactcgccgcagcacacgaccacgctgtcgctcagcacactggccacacccaagcgcagcggcaacaacaacggctcagagcccagtgacattatcatcccgctaaggactgcggacagcgtcttctgccctcactacgagaaggtcagcggcgactacgggcacccggtgtacatcgtccaggagatgcccccgcagagcccggcgaacatttactacaaggtctgagagggaccctggtggtacctgtgctttcccagaggacacctaatgtcccgatgcctcccttgagggtttgagagcccgcgtgctggagaattgactgaagcacagcaccgggggagagggacactcctcctcggaagagcccgtcgcgctggacagcttacctagtcttgtagcattcggccttggtgaacacacacgctccctggaagctggaagactgtgcagaagacgcccattcggactgctgtgccgcgtcccacgtctcctcctcgaagccatgtgctgcggtcactcaggcctctgcagaagccaagggaagacagtggtttgtggacgagagggctgtgagcatcctggcaggtgccccaggatgccacgcctggaagggccggcttctgcctggggtgcatttcccccgcagtgcataccggacttgtcacacggacctcgggctagttaaggtgtgcaaagatctctagagtttagtccttactgtctcactcgttctgttacccagggctctgcagcacctcacctgagacctccactccacatctgcatcactcatggaacactcatgtctggagtcccctcctccagccgctggcaacaacagcttcagtccatgggtaatccgttcatagaaattgtgtttgctaacaaggtgccctttagccagatgctaggctgtctgcgaagaaggctaggagttcatagaagggagtggggctggggaaagggctggctgcaattgcagctcactgctgctgcctctgaaacagaaagttggaaaggaaaaaagaaaaaagcaattaggtagcacagcactttggttttgctgagatcgaagaggccagtaggagacacgacagcacacacagtggattccagtgcatggggaggcactcgctgttatcaaatagcgatgtgcaggaagaaaagcccctcttcattccggggaacaaagacgggtattgttgggaaaggaacaggcttggagggaagggagaaagtaggccgctgatgatatattcgggcaggactgttgtggtactggcaataagatacacagctccgagctgtaggagagtcggtctgctttggatgattttttaagcagactcagctgctatacttatcacattttattaaacacagggaaagcatttaggagaatagcagagagccaaatctgacctaaaagttgaaaagccaaaggtcaaacaggctgtaattccatcatcatcgttgttattaaagaatccttatctataaaaggtaggtcagatccccctccccccaggttcctccttcccctcccgattgagccttacgacactttggtttatgcggtgctgtccgggtgccagggctgcagggtcggtactgatggaggctgcagcgcccggtgctctgtgtcaaggtgaagcacatacggcagacctcttagagtccttaagacggaagtaaattatgatgtccagggggagaaggaagataggacgtatttataataggtatatagaacacaagggatataaaatgaaagatttttactaatatatattttaaggttgcacacagtacacaccagaagatgtgaaattcatttgtggcaattaagtggtcccaatgctcagcgcttaaaaaaacaaattggacagctacttctgggaaaaacaacatcattccaaaaagaacaataatgagagcaaatgcaaaaataaccaagtcctccgaaggcatctcacggaaccgtagactaggaagtacgagccccacagagcaggaagccgatgtgactgcatcatatatttaacaatgacaagatgttccggcgtttatttctgcgttgggttttcccttgccttatgggctgaagtgttctctaga

SEQ ID NO: 47397 - DNA, 550 bp, Homo Sapiens
tcgatgcagctgtagtgacaatctcagagcagcttctacaccacagccatttccagcatgaagatcactgggggtctccttctgctctgtacagtggtctatttctgtagcagctcagaagctgctagtctgtctccaaaaaaagtggactgcagcatttacaagaagtatccagtggtggccatcccctgccccatcacatacctaccagtttgtggttctgactacatcacctatgggaatgaatgtcacttgtgtaccgagagcttgaaaagtaatggaagagttcagtttcttcacgatggaagttgctaaattctccatggacatagagagaaaggaatgatattctcatcatcatcttcatcatcccaggctctgactgagtttctttcagttttactgatgttctgggtgggggacagagccagattcagagtaatcttgactgaatggagaaagtttctgtgctacccctacaaacccatgcctcactgacagaccagcattttttttttaacacgtcaataaaaaaataatctcccagaaa

SEQ ID NO: 47398 - DNA, 394 bp, Homo Sapiens
ggctcgagaaggtgctttagtctgaagatggcggcctcagcagcgagaggtgctgcggcgctgcgtagaagtatcaatcagccggttgcttttgtgagaagaattccttggactgcggcgtcgagtcagctgaaagaacactttgcacagttcggccatgtcagaaggtgcattttaccttttgacaaggagactggctttcacagaggtttgggttgggttcagttttcttcagaagaaggacttcggaatgcactacaacaggaaaatcatattatagatggagtaaaggtccaggttcacactagaaggccaaaacttccgcaaacatctgatgatgaaaagaaagatttttgagactgcagcctattaataaagttaacataactgagaa

SEQ ID NO: 47399 - DNA, 792 bp, Homo Sapiens
atgtctaagtcagcgtctccaaaagagcccgaacagctgaggaagctcttcattggagggttgagctttgaaacaactgatgagagcctgaggagccattttgagcaatggggaacgctcacagactgtgtggtaatgagagatccaaacaccaagcgctccaggggctttgggtttgtcacatatgccactgtggaggaggtggatgcagctatgaatacaacgccacacaaggtggatggaagagttgtggaaccaaagagagctgtctccagagaagattctcaaagaccaggtgcccacttaactgtgaaaaagatatttgttggtggcattaaagaagacactgaagaacatcacctaagagattattttgaacagtatggaaaaattgaagtaattgaaatcatgactgaccgaggcagtggcaagaaaaggggctttgcctttgtaacctttgacgaccatgactccgtggataagattgtcattcagaaataccatactgtgaagggccacaactgtgaagttagaaaagccctgccaaagcaagagatggctagtgcttcatccagccaaagaggtcgaaggggttctggaaacttctacaatgattttggcaattacaacaatcagtcttcaaattttggacccatgaagggaggaaattttggaggcagaagctctggcccctatggcggtggaggccaatactttgcaaaaccacaaaaccaaggtggctatggcgtttccagcagcagcagtagctatggcagtggcagaagattttaa

SEQ ID NO: 47400 - DNA, 945 bp, Homo Sapiens
atgagacagaataacaatattacagaatttgtcctcctgggcttttctcaggatcctggtgtgcaaaaagcattatttgtcatgtttttactcacatacttggtgacagtggtggggaacctgctcattgtggtggatattattgccagcccttccttgggttccccaatgtatttcttccttgcctgcctgtcatttatagatgctgcatattccactaccatttctcccaagttaattgtaggcttattctgtgataaaaagactatttccttccaaggttgcatgggccagctatttatagaccatttctttggtggggctgaggtcttccttctggtggtgatggcctgtgatcgctatgtggccatctgtaagccactgcactatttgaccatcatgaatcgacaggtttgcttccttctcctgtgcattctcctggtggcagtggcctgggtgggaggatttcttcatgcaactattcagattctctttacagtatggctgcccttctgtggccccaatgtcataggccacttcatgtgtgacttgtacccattgttaaaacttgtttgcatagacactcatacccttggtctctttgttgctgtgaacagtgggtttatctgcttattaaacttccttatcttggtggtatcctatgtgatcatcttgagatctttaaagaacaatagcttggaggggaggtgtaaagccctctccacctgtatttctcacatcatagtagttgtcttattctttgtgccctgtatatttgtgtatctgcgctcagtgaccactctgcccattgataaagctgttgctgtattttatactatggtggtcccaatgttaaatcccgtggtctacacactcagaaatgctgaggtaaaaagtgcaataaggaagctttggagaaaaaaagtgacttcagataatgattaa

SEQ ID NO: 47401 - DNA, 3819 bp, Homo Sapiens
agtgactgctggcggcctgggctgctggggccgacgcctgggtggctgccgccgccgcacctgctgcgagatagtgatcttcgtcgcggaagggtgagggcgcccactgcaggaggaggtgcaggtgccgcggccgcctggctgccgggagccgaaagcttcgcgcctgggttgtgagctccttgaaacagggaatcgtgtcttactcatctttgtatctccagtgtctagcagttcctgatacatagttttagctgaattttggaacatggccactgcctcaccaaagtcagatactactaataaccacagtggaaggttgcagttacaggtaactgtttctagtgccaaacttaagagaagaaagaactggttcggaacagcaatatatacagaagtagttgtagatgaggaaattaggaaaacagcaaaatccagtagttcttctaatctaaaatgggatgaacagctaactgtaaatgttacgccacagactacattggaatttcgagtttggagtcatcacactttaaaagcagatgcttaattaggaaatgcaacgacagatctgaaacaagctctgttgatacacaatagaaaactggaaagagtgaaagaacaattaaaactttccttagaaaacaagaatggcatagcacaaactggtgaattgacagttgtgcttgatggattggtgattgagcaagaaaatataacaaactgcagctcaactccagccatagaaatacagcaaaatggtgatgccttacatgaaaatggagagccttcagcaaggacaactgccaggttggctattgaaggcacgaatggaatagataatcatgtacctacaagcactctagtccaaaactcatgctgctcgtatgtagttaatggagacaacataccttcatctccatctcaggttgctgccagacccaaaaatacaccagccccaaaactactcacatctgagcctgccgatgacactgttaatggagaatcatcctcatttgcaccaactgataatgcttctgtcatgggtattccagtagtgtctgaagaaaatgccttgtctccaaattgcactagtactactgttgaagatcctccagttcaagaaatactgacttcctcagaaaacaatgaatgcattccttctaccagtgcagaattgggatctgaatctagaagtatattagaccctgacacctctaattctggaagtagttctgcttttgaaacagccaaatcaagacagccagatgggtgtatggatccagtatagcaggagtctgggaatgccaacacagaaaccttgccatcagggtgggaacaaagaaaatatcctcatggtagaacctattatgtggatcataatactcaaactaccacacgggagagaccacaacctttaccttcaggttgggaaagaagagttgatgatcgtggaagagcttattatgtggatcataacaccagaagaacaacatggcagcggcctaccatggaatgggtcagaaattttgaacagtggcaatctcagcagaaccaacctcagggagctatgcaacagtttaaccaatgatacctctattcagcttcaatgttagccgcagaaaatgaccctcatggacctttgccaccaggccgggaaaaaagagtggattcaacagacagggtttactttgtgaatcgtaatacaaaaacaacccagtgggaagatccaagaactcaaggcttacagaatgaagaacctctgccagaaggctgggaaataagatatactcgtgaaggtgtaaggtactttgttaatcacaatgcaagaacaacaacattcaaagatccttgcaatgggaagtcatccataactaaaggtggtccacaaattgattatgaacacagctttaggcggaaacttgctcacttccgttatttgtgccagtctaatgcactacccagtcatgtaaagatcaatgtgtcccggcagacattgtttgaagattccttccaacagattatggcattaaaaccttatgacttgaggaggtgcttatatgtaatatttagaggagaagaaggacttgattatggtggcctagcaagagaatggcttttcttgctttcacatgaagttttgaacccaatgtaatgcttatttgagtatgtggggaagaacaactattctctgcagataaatccagcatcaaccattaatccagaccatctttcatactactgtttcattggtcgttttattgccatggcactatttcatggaaagcttatagatactggtttctctttaccattctacaagcatatgttaagtaaaaaacttactattaaggatttggaatctattgatactgaattttataactcccttatctggataagagataacaacattgaagaatgtggcttagaactgtacttttctgttgacatggagagttggggaaaagttacttcacatgacctgaagttgggagtttccaatattctggtgactgaggagaacaaagatgaatatattggtttaatgacagaatggcatttttctcgaggagtacaagaacagaccaaagctttccttgatggttttaatggagttgttcctcatcagtggctacagtacttcaatgaaaaagaattagaggttacgttgtgtggcacacagcaggttgacttggcagattggcagagaaatactgtttatcaacattatacaagaaacagcaagcaaatcattcggttctggcagtttgtgaaagagacagacaatgaagtaagaatgctactattgcagttcgtcactggaacctgccgtttatctctaggaggatttgctgagctcatgggaagtaatgggcctcaaaagttttgcattgaaaaagttggcaaagatacttggttaccaagaagccatacatgttttaatctcttggatctaccaccatataagagttatgaacaactaaaggaaaaacttctttttgcaatagaagagacagagggatgtggacaagaatgaatgtggcttcttattttggaggatctcttgcattcaaataccccagccaagaaaaattgcacatagtgtatataagctgttcattctgtacagtgaattttctgaacctctcaaagtatgttttccattcttccacagcaatatgcaaaacatatttcatccttttctactttatttgttgtcctttgaaatgattgaccaggaaaaagatcatccttaaattttgaagcaagtgagagactttattaaaaatacatatgtatctatataagcatatgtgatagtggctctagttttatagagttgcaagtgtattaaacatgacagctgttcattcataaagatctggatttgctttaccttgttaatattatctaggcgaaaaagtgcaaattgctccatgttcttctctcccttgtgtaacatctcctgagggtgtttatttgtatgtctgttcaggaaggtattaagggcttaggccaaatcttactttgagtatgttaaaaaaaaaatgctgctggcttttctgaagacaggtgcttgaacctgtcagttggttttaaataaatagttgaaaatttttctttctctgttacatcagtaatattgtcaaagtaatggataaaaccataacttacacatgaaagtcatataccagatctgatactatttagtttattatcaaaattggaaggattcattgagcagcaaagaagtttgtttacatgatactttgagatgctagatatttgtggaattaaaaagaatcaggcactgctgta

SEQ ID NO: 47402 - DNA, 669 bp, Homo Sapiens
gccccggtcacgcggcaggttagcggcgccgccgccctggtcccggccccgagcggccccgacagcgggcagcccctggcggccgccgtggccgagctgccggtgctggacgcccgcgggcagcgggtaccgttcggcgcgctgttccgggagcgccgcgccgtggtggtgttcgtgcggcatttcctgtgttacatctgcaaggaatacgtagaggatctggccaaaatccccaggagtttcttacaagaagcaaatgtcacccttatagtgattggacagtcatcctaccatcatattgagcctttttgcaagctgactggatattctcatgaaatctatgtcgatcctgagagagaaatttataaaagattgggaatgaaaagaggtgaagaaattgcttcctcaggacagagcccccacataaaatcaaatctactctcaggaagccttcagagcctgtggcgggcagtgactggccctctctttgattttcaaggagacccagctcagcaaggtggaaccctcattttaggtccaggtaacaacatccattttatacaccgcgataggaataggttggatcacaaacctatcaactctgttttacagcttgtaggagttcagcatgtgaactttacaaacagaccttcagttatccatgtgtga

SEQ ID NO: 47403 - DNA, 522 bp, Homo Sapiens
gtttttaaagatagttctcagaaagacctgctgaattttactggcacaattcctgtgatgtatcagggtaatacatataacataccaattcgtttctggattttggattctcaccctttcgctccccctatttgcttcttgaagccaactgcaaatatgggaatcttagtcggaaaacatgtggatgctcaaggcagaatatatttgccctatctccaaaactggagccatcctaaatctgtcattgttggattaattaaagaaatgattgccaagtttcaagaggaacttcccatgtattctctatcatcatctgatgaggcacggcaggtagacttgctagcctatattgcaaaaatcactgaaggtgtttcagatacaaattcaaagagctgggcaaatcatgagaataaaacagtcaataaaattactgtggttggaggtggagaactcggtattgcctgcacattagcaatttcagcaaaggtggagtctcgctctgttacccaggctggagtgtag

SEQ ID NO: 47404 - DNA, 993 bp, Homo Sapiens
atttacaggagacagcaatggaaacctggtcagttgagcaggtctgcagttggttggtggagaaaaatttaggagagctagttcatagatttcaagaggaagaagtaagtggggccgctcttcttgcacttaatgatcggatggttcagcaactggtaaagaaaattgggcaccaggctgttctgatggatttaattaaaaaatacaagcagaacactcaaggactgaagtccccagaaaaccccaaaaaggcagccctggtcatgcaaacagaagcagctcgagattacagggatgaagagtcctccagtccagccaggcatggggagcagatgccatctttctatccagctgaaaaccttgataatggactaattgaccaaagagtattgaaacagagaagaaatgtgaaacaaattctagcaagaagcaaagcattacagtggacgaagtcctatgttttaccagagtttccctatgatgtcaaatgcatgttagcagagcagaagtgcccggatcacagcatgaggataaggatcattgagtttctccaggccgacatgactaagtatctggaaggctcactgtaccccagcacccagcagtacaatgacgtggttaatgccctgctgcaggcccaccctttcctggatgaggatggctgtggcttcgctggagtatagtggcgcgatctcagctcactgcaacctccgcctcctgggttcaagcaattctctggggcagcagttctaagctctggttgcacattaggattcctagagattcagattgaattaatttgaggatgggattattctaatgtacaaccacggctgagaaccactgccgctgacgtttcaacacaaagtttgctgtttgaacctgcctgtctcctggatttcaaagaccactgtcttcattgcacaacaatgtgaatataatcaacactattgaactgtacctaagaatagttaataaaaaactgagtgttta

SEQ ID NO: 47405 - DNA, 1990 bp, Homo Sapiens
caaggagccatgccagctggacacacacttcttccagggcctctggcagccaggacagagttgagaccacagctgttgagaccctgagccctgagtctgtattgctcaagaagggccttccccagcaatgacctcctcattgcttctggcctttctcctcctggctccaaccacagtggccactcccagagctggcggtcagtgtccagcatgtggggggcccaccttggaactggagagccagcgggagctgcttcttgatctggccaagagaagcatcttggacaagctgcacctcacccagcgcccaacactgaaccgccctgtgtccagagctgctttgaggactgcactgcagcacctccacggggtcccacagggggcacttctagaggacaacagggaacaggaatgtgaaatcatcagctttgctgagacaggcctctccaccatcaaccagactcgtcttgattttcacttctcctctgatagaactgctggtgacagggaggtccagcaggccagtctcatgttctttgtgcagctcccttccaataccacttggaccttgaaagtgagagtccttgtgctgggtccacataataccaacctcaccttggctactcagtacctgctggaggtggatgccagtggctggcatcaactccccctagggcctgaagctcaagctgcctgcagccaggggcacctgaccctggagctggtacttgaaggccaggtagcccagagctcagtcatcctgggtggagctgcccataggccttttgtggcagcccgggtgagagttgggggcaaacaccagattcaccgacgaggcatcgactgccaaggagggtccaggatgtgctgtcgacaagagttttttgtggacttccgtgagattggctggcacgactggatcatccagcctgagggctacgccatgaacttctgcatagggcagtgcccactacacatagcaggcatgcctggtattgctgcctcctttcacactgcagtgctcaatcttctcaaggccaacacagctgcaggcaccactggagggggctcatgctgtgtacccacggcccggcgccccctgtctctgctctattatgacagggacagcaacattgtcaagactgacatacctgacatggtagtagaggcctgtgggtgcagttagtctatgtgtggtatgggcagcccaaggttgcatgggaaaacacgcccctacagaagtgcacttccttgagaggagggaatgacctcattctctgtccagaatgtggactccctcttcctgagcatcttatggaaattaccccacctttgacttgaagaaaccttcatctaaagcaagtcactgtgccatcttcctgaccactaccctctttcctagggcatagtccatcccgctagtccatcccgctagccccactccagggactcagacccatctccaaccatgagcaatgccatctggttcccaggcaaagacacccttagctcacctttaatagaccccataacccactatgccttcctgtcctttctactcaatggtccccactccaagatgagttgacacaaccccttcccccaatttttgtggatctccagagaggcccttctttggattcaccaaagtttagatcactgctgcccaaaatagaggcttacctacccccctctttgttgtgagcccctgtccttcttagttgtccaggtgaactactaaagctctctttgcataccttcatccattttttgtccttctctgcctttctctatgcccttaagggctgacttgcctgagctctatcacctgagctcccctgccctctggcttcctgctgaggtcagggcatttcttatccctgttccctctctgtctaggtgtcatggttctgtgtaactgtggctattctgtgtccctacactacctggctacccccttccatggccccagctctgcctacattctgat

SEQ ID NO: 47406 - DNA, 709 bp, Homo Sapiens
tgcagctgtggctgaggcccagaaatgtgaagggcctccatccactgcattgagtagtgaccccgacgtggggttcaatgtggaggggggaggggctgccgcggcagctgcaggagccgacgtgccaggccttgttcttctcatgccgacatccatgcttgcagctgtgaaggccgcaggaatcagcgaggtgacctgggctgagtcccgggagtgggaagaggtggcaggaaggggatctgaggaggagaacaggggtcctggtggtctgtgcttcttcccagacacgggagctgtagaggggatctctgcagcagatgcaaggggggccactaggcccaggcagtcttgggacttgggtctgtcctgctgtgcatccatagtgggtgctttagaaacgggaggctcaccagaagcccctgttgcaagtgaggacagagtgtgggaaggccatgagggtctgcagtccaagatggcctttccttgtgctcagtgtagtggctgagctgggggatgccctggaactcggagcagacagcactggcttactgtggtacctgtacagtgaaattgaaggcagaatcaccaggatggaacacaggttttgcaggatcacggaaaaccttcttagagttgtcttgacaccactgatgtcgagtgtccgggtgcttgtaggatggcctgccactcagtccaggggcaggagcaa

SEQ ID NO: 47407 - DNA, 1463 bp, Homo Sapiens
gcatcccggtggggagaagggccaggcagagaaaagtagtcagaaacagagcaacaggtgaggctgaggcaggagattgagctgacactcaagccaaggaagggggaattaggaaacaattagaaaaaaagtaaagacagtgaaaaagtcagagacagctgcctgcacctacacacacattcagagacagagtcccagagggtggcatacacagagggagaaggggagggaacaggtgtggagaggagctgcggaagcagagaaatctcaagtcagagattcagggacacttggtccccgtggcgagccatggaagcagaaaggaggcgccaggctgagaagccaaagaaggggcgagtcggcagcaacctgttgcctgagagacacccggccactgggaccccgaccaccacggtggactcgagtgctccaccctgcagaaggctccctggtgcaggaggggggagatcaaggttctccccgcaaggaggacagaggggccgcccgcactcccggcgccgccaccgcaccaccttcagcccagtgcagttggaacagctggagtcagcctttgggaggaaccagtaccccgacatctgggcccgagagagtcttgcccgggacactggcctcagtgaggcccgaatccaggtctggttccagaaccgcagagctaagcaacggaagcaagagcgctcactgcttcagcctctggcccatctgtctcctgccgccttttccagcttcttgccagagtccactgcttgcccctattcttacgcagcaccaccaccaccagtgacctgcttccctcacccctacagccatgccctcccttcccagccctccacaggaggcgcctttgctttgtcacaccagtctgaggactggtaccctaccttgcacccagcccctgccggccatctgccctgccccccaccccctcccatgctccccctcagccttgagccatccaagtcctggaactgaggtcaaacaagtaccaccaaggtgatccccagcctgcggccctcgtgaaaagacaagaaaatggggtggcttcctttccatctatgggtgaagcagatgcatggtgagggtcagctcagcgattagaaatttaaaaatgggagatcatggtgaattctcactggggtgattagtggaggaagtctggggaggtgagctactggaagagacagggcaagatgcctcggtggagctgcctgctgaagggtgatattgatgaagacagttgctggtgagtggagatgattgaagggctaggaggtgagggccttcattaattgagatcacgattgaagaagatcccagctctttctggctgatttcagtaaggcttctgacttaagagtctacctatacatcccttccccattgcccaccccgccatctcaatcagtcactgacttttgtttattctgtcctagaaataccttttt

SEQ ID NO: 47408 - DNA, 681 bp, Homo Sapiens
gctgagcaatatgatgacactgcagtctgcatgaagtccctaactgagaaagaaggcgaattatccaatgaggagaggaatcgtctttcagttccttataaaaatgttgtaggagtctgtaggtcatcttgcagggtcatctcaagtattgagcaaaagacagaaggtgctgagaaaaaaacagcagatgccgaatacagagagaaaattgagaaggagctaagagatatctacaatgatgtgctactatgtcttttggaaaagttcttgatctccaatgcctcagaagcagagagcaaaatattctatttaaaaatgaaggagactactatttttacttggcctgaggctgctgctggttatgacacaaaagggatcctagatcagtcacaacaagcataccaagaagcttgtgaaatcaccaaaaaggaaatgcaaccaacagatcctatcagattgggtatggctctaaacttctctgtcttctattatgagcttctgaactccccagagaaatctcattcacttgtaaaggcagcttttgatgaagcccttgctgaacttgatacattaagtgaagagtcatacaaagatcgcctgctaatgcagttactgagagacaacttgacactgtggacattggatactcaaggagatgaaactgaagcaagaggaagaaaa

SEQ ID NO: 47409 - DNA, 1095 bp, Homo Sapiens
agccgctggcggcgggcggccagcatcgtcctggcggctggctggtcgcgcccggagaccgccaccccgccgtcgcgcccgccgccggccgagggcttccggctgctgctgctgcagcgctccccgcaccaaggcttcatgccgggcgcgcacgtcttctccggcggagtgctggatgcggccgaccgctcggcggactggctgggcctcttcgcgccgcaccacgggccgccgcgcttcggcctgggcccggcgccattcagccgcaccgctttcccgtcgctgcccgacaccgatgaccacaagaccgacaacactgggacgctgcctgaggacgtagccttccgcatctgcgccgtgcgggaggcctttgaggaggcgggcgtgctgctgctgcggcccaggacttccccaccaggcccagcacccgggcctggcctcgccctggagccaccgccgggcctggcctcctggcgcgaccgcgtgcgccaggacccgcgccacttcctgcggctgtgcgcccacctcgactgcacacccgacatctgggcgctgcacaactggagcgcctggctcacccctttcttgcggggcaccactcgccgctttgacacggccttcttcctgtgctgcctgcgcgagccgccgcccgtctaccccgacttggcggaggtggtgggctaccagtggtcatctccatcagaggcaactgaaagtttcttatcaaaagaaatttggttgccacccccacagttctacgaagtgagaagacttgcaaactttgcctctctctctgacttgcacaaattttgtttgggtcgtgcattagaaggactggaaaggtggctgccgatcatcttgttaactgctgatgggatggtccatcttttaccaggtgatgagctatatttagaagattcagactttttggaaaatcttatgtctactgaaaaaaagactgaggaaatcatgaaggaaggcaagcagtttcaccggatagtgacataccatcgccacctttatgatatccacgtgactgttcagccaaagtataaacacgtttatcctaagaactctgtagtaagaaaaagccat

SEQ ID NO: 47410 - DNA, 2239 bp, Homo Sapiens
cagggaccattgcaatttagagatgtggccatagaattctctctggaggagtggcattgcctggacactgcacagcggaatttatatagggatgtgatgttagagaactacagaaacttggtcttccttggtattgttgtctctaagccagacctggttacctgtctggagcaaggaaaaaaacctttaactatggaaagacatgagatgattgccaaacccccagttatgagttctcattttgcccaagacctttggccagagaacatacaaaattctttccaaatagggatgctgagaagatatgaagaatgcagacatgacaatttacagttaaaaaaaggctgtaaaagcgtgggtgagcataaggtgcacaaaggaggttataatggacttaaccaatgtttgacaactacccagaaagaaatatttcaatgtgataaatatggaaaagtctttcataagttttcaaattcaaacacatataagacaagacatactggaataaatcttttcaaatgtataatatgtggcaaagcttttaaacggtcctcaacccttactacacataagaaaattcatactggagagaaaccttacagatgtgaagaatgtggcaaagcttttaaccaatctgcaaaccttactacacataagagaattcataccggagagaaaccctacagatgtgaagaatgtggcaaagcctttaagcagtcctcaaaccttactacacataagaaaattcatactggagagaaaccctacaaatgtgaagaatgtggcaaagccttcaaccgatccacagaccttactacacataagatagttcatactggagagaaaccctacaaatgtgaagaatgtggcaaagcctttaagcacccctcacacgttaccacacataagaaaattcatactagagggaaaccctacaactgtgaagaatgtggcaaatcctttaagcactgctctaaccttactatacataagagaattcatacaggagagaaaccctacaaatgtgaagaatgtggcaaagcctttcacctatcctcacaccttactacacataagatacttcatactggagagaaaccctacagatgtagagaatgtggcaaagcttttaaccattccacaacccttttttcacatgagaaaattcatactggagagaaaccctacaaatgtgatgaatgtggcaaaacctttacctggccctcaatcctctccaaacataaaagaactcatactggagagaaaccctacaaatgtgaagaatgtggcaaatcctttactgcatcctcaactctaactacacataagagaattcatactggagagaaaccttacaaatgtgaagaatgtggcaaagcttttaactggtcctcagaccttaataaacataagaaaattcatattgaacgaaaaccctacatagtgaagaatgtgacagatcttttaaatgttcctccacttttaattagcataagataattcatactggagagaaaccctatgaatgtgatgaatgtgggaaagcctttaaccagccctcgactcttagtaaatttgagagtttatatggaacacaaaccctacaaatataaagaatgtgacaaagctttttaaggaagttctcaacccttattacacataattcataccaaacagaagccctacaagtgtgaagaatgtggcaaaacctataaacctataacaagttctcaattcctttttttttgagatggagtttcactcttgtcaccgaggctggagtgcaatgacatgatctccgttcactgcaatctctgcctcctgggtttaagccattcttctgcctcagcctcccaagtagctgggattacaggtgcccaacaccacgcctggctaatttttggatttttagtagagatggggtttcacaatgttggccaggctggtctcgaactcctgacctcaggtgatccacctgccttggccttccaaagtgctggggttacaggcgtgagccaccatgcctggctacaagttcttaattcttaagagacaccatgcctggctacaagttcttaattcttaagagacatggcgataattcatgctgaagaggaaatctggaaacctgaaagatgcgacattgcttttaccaacacctccacatttcctatacataaaaataaattatactagtgtaataccctagaaatgtataaaatgtgacaaagcctttata

SEQ ID NO: 47411 - DNA, 795 bp, Homo Sapiens
atatctgcatgtattcaggtaactagagacaagaattatgagcccattgaaataccatcagaagatgatagaacagtgctgctgcccacggttacagtccagtttccaggggcatgtgggctcccctacaggattccagtgtctcaggtattaggagtgctggtagaaggaattctgcatgcccccagtgctggctggggaaatttggtgtacgttgtcaactattctgtagataactacagaaaaagggaaaagacagatacttcattagccataaaagtgaaaagagcagtccagaaaacatctgctttagcagtgttgggtctcccatggaaaacaactgaacaggatctgaaagaatatttcagtacctttggagaaattcttatggttcaggtcaagaaggatgttagaactggctattcaaaggggtttggctttgttcattttataaaatatgaaacccaggtgaaagaatgtcacagcaacataagacagatagatgatggtgtgactgtacagttcctaactctaaagcaaacactgaatgagactttgagaagcaaaaagatgtttgtggggtgttgtacagagattatgaattctgataagctgcagcagttctttggtcattgcagagaagtgatagatgtcttcatttccaaaccattcagggactttgcctttcttacattgcagatgattcttgcccagtctctttgtggagaggacttgattattaagggaatcagcatacatatatccaatgcaagtaagcacaatagcaatagacag

SEQ ID NO: 47412 - DNA, 1489 bp, Homo Sapiens
attttcagtggctgtgaataagctaagaatggtaatgcagtttcaggggttagaaaatccaattcaaattagtcctcactgcagctgtacgccgtcaggatttttcatggaaatgatgagtatgaagcccgcgaaaggtgttttaacagaacaagtggcaggtcctctgggacagaacctggaagtggaaccatactcgcaatacagcaatgttcagtttccccaagttcaaccacagatttcctcgtcatcctattattccaacctgggtttctacccccagcagcctgaagagtggtactctcctggaatatatgaactcaggcgtatgccagctgagactctctaccagggagaaactgaggtagcagagatgcctgtaacaaagaagccccgcatgggcgcgtcagcagggaggatcaaaggggatgagctgtgtgttgtttgtggagacagagcctctggataccactataatgcactgacctgtgaggggtgtaaaggtttcttcaggagaagcattaccaaaaacgctgtgtacaagtgtaaaaacgggggcaactgtgtgatggatatgtacatgcgaagaaagtgtcaagagtgtcgactaaggaaatgcaaagagatgggaatgttggctgaatgtatgtatacaggcttgttaactgaaattcagtgtaaatctaagcgactgagaaaaaatgtgaagcagcatgcagatcagaccgtgaatgaagacagtgaaggtcgtgacttgcgacaagtgacctcgacaacaaagtcatgcagggagaaaactgaactcaccccagatcaacagactcttctacattttattatggattcatataacaaacagaggatgcctcaggaaataacaaataaaattttaaaagaagaattcagtgcagaagaaaattttctcattttgacggaaatggcaaccaatcatgtacaggttcttgtagaattcacaaaaaagctaccaggatttcagactttggaccatgaagaccagattgctttgctgaaagggtctgcggttgaagctatgttccttcgttcagctgagattttcaataagaaacttccgtctgggcattctgacctattggaagaaagaattcgaaatagtggtatctctgatgaatatataacacctatgtttagtttttataaaagtattggggaactgaaaatgactcaagaggagtatgctctgcttacagcaattgttatcctgtctccagatagacaatacataaaggatagagaggcagtagagaagcttcaggagccacttcttgatgtgctacaaaagttgtgtaagattcaccagcctgaaaatcctcaacactttgcctgtctcctgggtcgcctgactgaattacggacattcaatcatcaccacgctgagatgctgatgtcatggagagtaaacgaccacaagtttaccccacttctctgtgaaatctgggacgtgcagtga

SEQ ID NO: 47413 - DNA, 960 bp, Homo Sapiens
atgctccaaccttttggccccagttttcctctggggctcttccctcccttggactctctctcccagaatcctctctccccctcccaagctggggacagccccctggccactgagggcaggctttcagtctcttggaccctctgtcttccccagaagcggagcagttccagccgcgggcccacacaggagcctcctatgtcagggcctcccagcgcacctcagggcgcactggctgcgccccgtagtccagcagtgcggcgaaaaggacttcaggctcccagttgggggagtcctggacggcctgcagcgcacagtccatgggcgtgtggcccgccccattggggacctcagcgcgggccccgtaacgcagcagcagctcggccaggcccccgcagccgttggcacaagcgttgtgcagcggcgtgtggcgcttgcgcccggccgcccgggcatcagctccagcctccaggagccggcgcgccgcagcctggtgtcgcctgcagctacccctcggccccagcgcacgccgtgttcagcgcagtctcgccctggctggtgcgcaggcccacgtcggcgccatgctccaggtacagagccacatgttgctccaggccgcgcgccgccgccacgtgcaggggcgtctcctggctctcgcctgctgccaggttcaccgtcgctcctgcttccagcagcaacttggcgcacctggggacaagagagcaaggtcctgaggaaaatcctgaaggcttgggaccccttcagcttgctgtgacactcccttgcctttccacccctctcagcttgaggtcctacctggtgtcctccatgagaatcatacaagccccgctacagacaacagaattggaaggtcctgagagctaccagaagcatcttcagttttcatatgaaaaacttaagcccaggagtgatttgtgcagccaaggacacacagcaagttag

SEQ ID NO: 47414 - DNA, 1294 bp, Homo Sapiens
accagaatctttcccaacttgtctaagtcctctcaggccagccttggtgggaggtttctaggattcgctccctgcccttcccatcttagggtgtcgtctgagacagactcttattccctcaataaagagagagactcttattccctcagcggccagctcctcgcctcccctcggccgtagccacctcagtggtcaccgtcttcaccgtggtcgcctcagcccgctcgccaccccagttgaggcgctgctggtgtcatgtctgccacaggggaccgacacccgacccaaggggaccaggaggccccggtaagccaggagggagcacaggccgaggcggccggagctggtaaccaggagggcggcgactccggccccgacagcagcgacgtggtgcctgcggccgaggtggtcggagtcgcagggcccgtggaaggcctcggggaggaggagggtgagcaggcggcaggcctggccgcagtcccccggggcgggagcgccgaggaggactcagatatcgggcccgcgacggaggaagaggaggaggaagaggggaacgaggcggccaacttcgacttggcggtggtcgcccgtcgctacccggcgtcgggcattcacttcgtgctcctggacatggtccactcccttctccaccgcctctctcacaacgaccacatcctcatagagaaccgtcaactcagccgcctgatggtggggccacacgctgctgcgcgcaacctctggggcaacctccccccgctgctgctgccccagaggctgggtgcaggggccgcagcccgggcgggcgagggcctgggcctgatccaggaggccgcatcggtcccagagcctgcagtgccagctgacctggccgagatggccagggagcccgcggaggaggccgcagaggagaagctctcagaggaggccacagaggaaccagacgcagaggaaccggccacagaagaaccgaccgcacaggaggccacggccccagaggaagtcactaaatctcagcccgaaaagtgggatgaagaggcccaagatgctgcaggcgaggaagagaaagaacaagaaaaagagaaggatgcggaaaacaaggtgaagaactccaaagggacctagacgcagcagaggtgaagccaagaaaatccagatgcctgtgggaattgtaacacatatcattccaaagttcgttacatcaaaagtgatatccagtgacatctaactttcatggatgtatgtgacagtgttcaagttaaaaaataaaagtttgttttaaatgaataaactgaaa

SEQ ID NO: 47415 - DNA, 768 bp, Homo Sapiens
tctataggtgcctggtgctacgactcccaggaccccaagtgtgtccccacccactggaagaagctggcccctgcctgtgggggcccaggccagtccctcatcgacattgactttcacagggtccggcggaactctaccctagggcccttcatcttccgaggctatgactcagcacctccaggcccttggaccctggagaatgacagccacacaggtcagcaccctgtgaaccacctggagatttgggaggctgggctgctgttgcctgtctaccgcgcactgcggctgcacatcagctgggggcggggggggggcccgaggcgagcagactcagagcacagcctggacaggcagcgccaggctatggagatgcatgtggtccacagtaacacaaagtaccagagcatggaggaggcaccacgccacggtgatgggctcgaaaccccttgcacttggagcccctcccaggagcaggactgtagcaacaccaacttctgcgccatagtgtcgggcttgaggaaggtgcctgagccagtgaatctgatgtccaccttcctgctggcgtcgatgcggcccaacacctcgagctactgtcgcttcgctgggtcactgaccccgcctgactgcgagcccacggtgctctggaccgtcttcgaggaccccatacccatccggtgggtgcagatgaccctgttccacaccgtgccccaggctggaccctcccactttcaccccataccgctcacgggtaacttccgcccacagcag

SEQ ID NO: 47416 - DNA, 1724 bp, Homo Sapiens
atggttcagctgattgcacctttagaagttatgtggaacgaggcagcagatcttaagccccttgctctgtcacgcaggctggaatgcagtggtggaatcatggctcactacagccctgacctcctgggcccagagatggagtctcgctattttgcccaggttggtcttgaacacctggcttcaagcagtcctcctgcttttggcttcttgaagtgcttggattacagtatttcagttttatgctctgcaacaagtttggccatgttggaggacaatccaaaggtcagcaagttggctactggcgattggatgctcactctgaagccaaagtctattactgtgcccgtggaaatccccagctcccctctggatgatacaccccctgaagactccattcctttggtctttccagaattagaccagcagctacagcccctgccgccttgtcatgactccgaggaatccatggaggtgttcaaacagcactgccaaatagcagaagaataccatgaggtcaaaaaggaaatcaccctgcttgagcaaaggaagaaggagctcattgccaagttagatcaggcagaaaaggagaaggtggatgctgctgagctggttcgggaattcgaggctctgacggaggagaatcggacgttgaggttggcccagtctcaatgtgtggaacaactggagaaacttcgaatacagtatcagaagaggcagggctcgtcctaactttaaatttttcagtgtgagcatacgaggctgatgactgccctgtgctggccaaaagatttttattttaaatgaatagtgagtcagatctattgcttctctgtattacccacatgacaactgtctataatgagtttactgcttgccagcttctagcttgagagaagggatattttaaatgagatcattaacgtgaaactattactagtatatgtttttggagatcagaattcttttccaaagatatatgtttttttcttttttaggaagatatgatcatgctgtacaacagggtagaaaatgataaaaatagactattgactgacccagctaagaatcgtgggctgagcagagttaaaccatgggacaaacccataacatgttcaccatagtttcacgtatgtgtatttttaaatttcatgcctttaatatttcaaatatgctcaaatttaaactgtcagaaacttctgtgcatgtatttatatttgccagagtataaacttttatactctgatttttatccttcaatgattgattatactaagaataaatggtcacatatcctaaaagcttcttcatgaaattattagcagaaaccatgtttgtaaccaaagcacatttgccaatgctaactggctgttgtaataataaacagataaggctgcatttgcttcatgccatgtgacctcacagtaaacatctctgcctttgcctgtgtgtgttctgggggaggggggacatggaaaaatattgtttggacattacttgggtgagtgcccatgaaaacatcagtgaacttgtaactattgttttgttttggatttaaggagatgttttagatcagtaacagctaataggaatatgcgagtaaattcagaattgaaacaatttctccttgttctacctatcaccacattttctcaaattgaactctttgttatatgtccatttctattcatgtaacttctttttcattaaacatggatcaaaactga

SEQ ID NO: 47417 - DNA, 2116 bp, Homo Sapiens
agtaagcaaagatcgcaccactgcactccagcctaggcgacagagctagactgcagaagaaaaagagaaagagaggggagaaggtgaggagggggagaggagagggagagagggagagagggggagaggaagagagaggggaagagggggagacggggagagggggaggtggctcatgcctgtaatcccagagagaggtgacagctgctggcagccctcgcttgctcttggtgcctcctcggcctcggcgtccgctctggccatgctcagggagcccttcagcccgcctctgcgctgtcggggcccctctctgggctggttgaggccggagccggctccctcagcctgctgggaggtgtggagggagaggcacggaaaggaactggagctgcgcgcggcgcttgccggccagctagagttccgggtgggcgtgggcttggctggccccgcactcggagcggccgggcgaccccgccggccttgggcagtgaggggcttagcccccaggccagtagatgtggagggtgcacggggtcccccagcagtgccggcccaccgaggctgcgctcgatttctcgccaggccttagctgcctccccgcggggcagggctcaggacctgcagcccgccatgcgtgagcctcccctgccccacgctgtcggctcctgcaaggcccgagcctccccgacgagcgtggctctctgctccgaggcgcccagtcccattgaggacccaagagcagaggagtgcgggcgcagggagcgagactggcaggcagctccacctgcggccccagtgcgggatccactgggtgaagctagctgggctacccagtctagtggggacttggagaacctctatgtctagtcaagggagggtaaacacaccaatcagcactctgtgtctagctcggggtttgtggatgcaccagtgggcactctgtatttagctaatctggtggggacttggagaatctttatgtctagctaagggattgtgaatacagcaattggcactctgtatctagctcaaggtttgtaaatgcaccaatcagcaccctgtgtctatttcaaggtttgtaaatgcaccaatctgcactctgtgtctagctgatctggtggggacttggagaacctttatgcctagctaagggattgtgaatgcaccaatcagcactctgtgtctagctcggggtttgtaaatgcaccactcagcaccctgtgtctagctcaaggtttgtaaatgcaccagtcagtgctctgtgtctagctaatctagtggggacttagagaacttttgtgtctagctcaaggtttgtaaacgcaccaatcagcaccctgtcaaaacggaccaatcagttgtctgtaaaacagaccaattggctctctgtaaaatggaccaatcagtaggatgtgggtggggccagataagagaataaaagcaggccgccggagcaggcggtggccatttggtgaggttgtgttatgtggtgtgggtggtttgtttttactttgtaatgaattttactgttgctcaatgtttgggtcaacactgcctttgtgagttataacactcactgcgaaggtttgcagtttcaataatgaagccagtgagactgtaaacccactgggagcaactaataatgcgtcgccctaacagctgggacgcccaccacaaaggtctgtagcttcagtcctgagctagagaccacgaacccactaaaagcaaaaaaactgaacgcagctgagctatcagtagggagaaacgctggtggacacgctgcctttaagaactgtaacactcactgtgaggttccatagcttcattttggaagtctagaccaagaacacgctaattctggtcacgctagcactttgagaggccaaggtgtgtggattacttgaggccaggagttcaagaccagcttggccagcatggtaaaaccctgtctctaccaaatatacaaaaattagcctggcgcatggcagcacgttcctgtaatcctaactagtggggagactggcaggagaatcatttgaaccggggaggtagagactacagtgaggcgagattatgccactgcactccagcctgggagacaataagactccatctc

SEQ ID NO: 47418 - DNA, 393 bp, Homo Sapiens
cagacatataggaggtccaggcagcatgaacagctccctggtcagagacacatggatttgctcactggttactcaaagctgattcaaagccgattaaagctgctgcttcatctggggtcccaacctccagtgggaaaaacattcttcttttcctgctggtgtcacccactgttccacggatccaaaacaacacccaatgtttggtacaaatttagtgaaacagctctttccattcttaactcatgccaagcatctcagcttggggtcaggaaaatgccaggggacatgagctcttctcctagagttagagaattctctgccttagttgcaataaaggaaaagatacacattcttcctacaaatgccaaagtaggctcaaaatttggttcctag

SEQ ID NO: 47419 - DNA, 414 bp, Homo Sapiens
gcgagccacgggcctcgctgcgggttcaagtgcgtccgggtttggacgtcgcggctccaggagtgtgctctctctcctgcccatcccctccccggagttcagcgcatccggggccccggggacccctcttcccggccctcctggccgcgctggcccgcccgcatggggccgaggttcctggccgacgcgcgagggcgcgggcgggtaccgggttcccgtttttcccaggccccgatccccgcccacgcacgaggcccccggcccacgcacgaggcgcccacgcccatcgtggaggctccgcctggaaaagaagtccgacttcctctccaagctgctccgaggggaatggggaatcggcaggaaatgacccgaactgccagcctgcgcctttgcagccggccctcgctttgctga

SEQ ID NO: 47420 - DNA, 1329 bp, Homo Sapiens
atggcgagtgtagtgctgccgagcggatcccagtgtgcggcggcagcggcggcggcggcgcctcccgggctccggctccggcttctgctgttgctcttctccgccgcggcactgatccccacaggtgatgggcagaatctgtttacgaaagacgtgacagtgatcgagggagaggttgcgaccatcagttgccaagtcaataagagtgacgactctgtgattcagctactgaatcccaacaggcagaccatttatttcagggacttcaggcctttgaaggacagcaggtttcagttgctgaatttttctagcagtgaactcaaagtatcattgacaaacgtctcaatttctgatgaaggaagatacttttgccagctctataccgatcccccacaggaaagttacaccaccatcacagtcctggtcccaccacgtaatctgatgatcgatatccagaaagacactgcggtggaaggtgaggagattgaagtcaactgcactgctatggccagcaagccagccacgactatcaggtggttcaaagggaacacagagctaaaaggcaaatcggaggtggaagagtggtcagacatgtacactgtgaccagtcagctgatgctgaaggtgcacaaggaggacgatggggtcccagtgatctgccaggtggagcaccctgcggtcactggaaacctgcagacccagcggtatctagaagtacagtataagcctcaagtgcacattcagatgacttatcctctacaaggcttaacccgggaaggggacgcgcttgagttaacatgtgaagccatcgggaagccccagcctgtgatggtaacttgggtgagagtcgatgatgaaatgcctcaacacgccgtactgtctgggcccaacctgttcatcaataacctaaacaaaacagataatggtacataccgctgtgaagcttcaaacatagtggggaaagctcactcggattatatgctgtatgtatacgatccccccacaactatccctcctcccacaacaaccaccaccaccaccaccaccaccaccaccaccatccttaccatcatcacagattcccgagcaggtgaagaaggctcgatcagggcagtggatcatgccgtgatcggtggcgtcgtggcggtggtggtgttcgccatgctgtgcttgctcatcattctggggcgctattttgccagacataaaggtacatacttcactcatgaagccaaaggagccgatgacgcagcagacgcagacacagctataatcaatgcagaaggaggacagaacaactccgaagaaaagaaagagtacttcatctag

SEQ ID NO: 47421 - DNA, 1566 bp, Homo Sapiens
atggagaccaacgagtctacggagggatcgcggtcgcggtcgcgatctttagacatacagcccagctccgaaggactggggcccacttcggaaccgtttccttcttcagatgacagtcccaggtcggccctggcagctgcaaccgcagcagctgcagcggctgcatcagctgctgcagctactgcagccttcaccactgccaaagcagctgcattatctacaaagaccccagcgccctgttctgagttcatggagccgtcctctgaccccagccttcttggggagccctgtgcgggacccggctttacccacaatatagcccatgggagtcttggctttgagcccgtctatgtttcctgtattgctcaggacacttgcactacaactgaccatagttctaatcctggccctgttccaggctctagctctgggcctgttcttggttccagctcaggtgctggccatggctctggctctggctctggtcctggctgtggctctgtccctggctctggctctggtcctggtcctggctctggtcctggctctggtcctggtcatggctctggctctcatcctggtcctgcctctgggcctggtccagacactggccctgactctgagctcagcccctgtattcctccagggttcagaaacctggtggcagatcgggtccctaactatacctcctggagtcagcactgcccctgggagccccagaaacaaccaccttgggaatttttgcaagtcttagaaccgggtgcccgaggactatggaaacccccagacattaaagggaagcttatggtttgctatgaaactttgccgcggggccagtgcctcctctacaactgggaggaagagagagccaccaaccacctggatcaagtcccaagcatgcaggatggctctgagagttttttcttccgacacggacaccggggactgctgactatgcaactaaagtcacccatgccctccagcaccacccagaaagactcgtaccagccaccaggaaacgtctattggccacttcgagggaagcgtgaagccatgctggagatgctcctgcagcatcagatctgtaaagaggtgcaggcagaacaggaacccacaaggaagctcttcgaggttgagtctgtgacacaccatgactaccgaatggagctggcacaagcagggactcctgccccaacaaagcctcacgactaccgccaggagcaacctgagaccttctggatacagagggcaccacagctgccggtgtgtgagggtgacttgggggcagagcggggcaggaaaggtagggcagagttgttttgttctggcttggggagagtgggatccatcctcatcctggcactcctccagggtgtcagtaacatcaggacattggacacaccattccggaagaactgcagcttctcaacaccagtacccttgtctctggggaaacttttgccctatgaacctgagaattacccctaccaattgggagaaatatcttcccttccctgtcccggaggaaggctgggtggtggaggggggagaatgactcctttctga

SEQ ID NO: 47422 - DNA, 357 bp, Homo Sapiens
atggagtctcgctctgttgcccagactggagttcactggcacaatctcagctcactgcaacctctgcctcccaggttcaagcaattctcctgcctcagcctccggagtagctgggattacacacacctaccaccatgcttggctaatttttttgtatttttagtagagacggcgtttcgccatgttggccaagctggtctcaaactcctgacctcaggtgatcaacccacctcggcctcccaaagtgctgggattacaggcataagccaccgcactcagcctgttgggaggtttttgattactgactcaatcttcttatttgttactgatctgctcaagttttctatttcttcatga

SEQ ID NO: 47423 - DNA, 219 bp, Homo Sapiens
atgtcttatcaacagcagcagtgcaagcagccctgccagccacctcctgtgtgccccgcgccaaagtgcccagagccatgtccacccccgaagtgccctgagccctgcccaccatcaaagtgtccacagtcctgcccacctcagcagtgccagcagaaatgtcctcctgtgacaccttccccaccctgccagccaaagtgtccacccaagagcaagtaa

SEQ ID NO: 47424 - DNA, 1562 bp, Homo Sapiens
gtgaaatcagatcagccagagcagttcgctgtgactgatctctcctcccaccctacattctcttggctggaccctatcctcctggctgattctggtcgccctggacactccctcagttctttcccaggagtgcggtggctgctggcgccgagtcccagcgggcacggacgtcagacgcatcgtttcttctcctctacaggtcctcccggcccggcccgaacatgctggacggcctaaagatggaggagaacttccaaagcgcgatcgacacctcggcctccttctcctcgctgctgggcagagcggtgagccccaagtctgtctgcgagggctgtcagcgggtcatcttggacaggtttctgctgcggctcaacgacagcttctggcatgagcagtgcgtgcagtgcgcctcctgcaaagagcccctggagaccacctgcttctaccgggacaagaagctgtactgcaagtatgactacgagaagctgtttgctgttaaatgtgggggctgcttcgaggccatcgctcccaatgagtttgttatgcgggcccagaagagtgtataccacctgagctgcttctgctgctgtgtctgcgagcgacagcttcagaagggtgatgagtttgtcctgaaggaggggcagctgctctgcaaaggggactatgagaaggagcgggagctgctcagcctggtgagcccagcagcctcagactcaggtaaaagtgatgatgaagaaagtctctgcaagtcagcccatggggcagggaaaggaactgctgaggaaggcaaggaccataagcgccccaaacgtccgagaaccatcttgacaactcaacagaggcgagcattcaaggcctcatttgaagtatcctccaagccctgcaggaaggtgagagagactctggctgcagagacagggctgagtgtccgtgtcgtccaggtgtggttccaaaaccagagagcgaagatgaagaagctggccaggcgacagcagcagcagcagcaagatcagcagaacacccagaggctgagctctgctcagacaaacggtggtgggagtgctgggatggaaggaatcatgaacccctacacggctctgcccaccccacagcagctcctggccatcgagcagagtgtctacagctcagatcccttccgacagggtctcaccccaccccagatgcctggagaccacatgcacccttatggtgccgagccccttttccatgacctggatagcgacgacacctccctcagtaacctgggtgattgtttcctagcaacctcagaagctgggcctctgcagtccagagtgggaaaccccattgaccatctgtactccatgcagaattcttacttcacatcttgagtcttcccctagagttctgtgactaggctcccatatggaacaaccatattctttgaggggtcactggctttaggacagggaggccagggaagaggtgggttggggagggagttttgttggggatgctgttgtataatgatatggtgtagctcagcatttccaaagactgaatacattatggattgcatagtt

SEQ ID NO: 47425 - DNA, 942 bp, Homo Sapiens
atgcctaagggaggagctcccccatggatcatggcgttaatgtttacaggacatttactattcttagcattattgatgtttgctttctctacttttgaggaatctgtgagcaattattccgaatgggcagttttcacagatgatatagatcagtttaaaacacagaaagtgcaagatttcagacccaaccaaaagctgaagaaaagtatgcttcatccaagtttatattttgatgctggagaaatccaagcaatgagacaaaagtctcgtgcaagccatttgcatctttttagagctatcagaagtgcagtgacagttatgctgtccaacccaacatactacctacctccaccaaagcatgctgattttgctgccaagtggaatgaaatttatggtaacaatctgcctcctttagcattgtactgtttgttatgcccagaagacaaagttgcctttgaatttgtcttggaatatatggacaggatggttggctacaaagactggctagtagagaatgcaccaggagatgaggttccaattggccattccttaacaggttttgccactgcctttgactttttatataacttcaagaagtctttgtcttctgaagggcaccacatggatcttcctgatgttgtcattacctcacttcctggttcaggagctgaaattctcaaacaactttttttcaacagtagtgattttctctacatcagggttcctacagcctacattgatattcctgaaactgagttggaaatcgactcatttgtagatgcttgtgaatggaaggtgtcagatatccgcagtgggcattttcgtttactccgaggctggttgcagtctttagtccaggacacaaaattacatttgcaaaacatccatctgcatgaacccaataggggtaaactggcccaatattttgcaatgaataaggac

SEQ ID NO: 47426 - DNA, 4084 bp, Homo Sapiens
aggctgagggatgggaagagctggaacagcaggaggcggaggtgcaggggccgcccgaggcgttggaggagactggggagggccggcggggcgcggaggaggaggatctgggggaagaggaggaggagggccaggcgcacctggaggactggagggggcagctcaggggccgatcgtcctgggcccgaggaaaagagagaagaaggggacacggagcctctcctgaaacaagaggggccggtggaagccgcgcagcctccggtggagaggaaagaagccgccgcccttgaacaaggccgcaaggtggaggagctgcggtggcaggaggtggacgagagacagaccatgccccggccctacacgttccaggtgtcctccggagggaagcagattctctttcccaaagtcaacctgagccccgtgacgcccgcaaaggacacggggctcaccgctgctccccaggaaccaaaggcccccaaagccagcccagtccagcacgccctaccgtcgtccctgagcgttccccacaccgccattctggtcacgggcgcgcagctctgtggcccggcagtcaacctgagccagatcaaggacaccgcgtgcaagtccctcctgggcttggaggagaagaagcacgcggaagccccagctggggagaaccctccccgaggccccggcgacgcgagggcgggcagcgggaaggctaagccccgccaggagtctcccagcagcgcgtccgcactcgcagaatgggcttccattcggtccagaatcctgaagaacgcagagagtgacccgcgcagcagcgagagggaccagttgaggcccggtgatgagtccactcccaggggccggtgtgattcccgcgggaaccaacggaagactccgccagtcaatgcaaagttctctattatgcctgcctggcagaaattttccgatggtggcacggagacctccaaacagagcacggaagctgaaagcatacgaaaaagacccatgctgggacccagcgaagagacagccccccagcctcctcctgctggtgttcgcgagctcgggaagggtccggagaagtcggagatgcaccgggagcccgcagacaccaccgagggatgcaaatttgccaaagacctcccgtctttccttgtcccaagccttccttaccctccgcagaaagtggtggcccacacagagttcacgacctcgtcggacagcgagactgcaaacgggatagcaaagccagaccctgtgatgccaggtggagaggaaaaagcctcaccgtttggaataaaattgagaaggaccaactattccttgcgcttcaactgcgaccaacaggcagaacagaagaagaagaagaggcacagcagcaccggagacagcgcggatgcagggccgcctgcagcggggagcgctcgtggagagaaagagatggagggtgtggccctcaagcatggtccatccctcccccaagagcggaagcaagccccttccacccggagggactccgctgaaccttccagcagccgctctgttcctgtggcccaccctgggcctccaccggccagcagccagaccccggctccggagcacgacaaggcagcaaacaaaatgccactggcacaaaagccagcactggctcccaagcccaccagtcagaccccaccagcatccccactttccaaactgagcaggccctacttggtagagctgctgtctcgccgagcggggaggccggacccagagccaagtgagccgtccaaggaggaccaggagagcagtgaccgccggccaccctcgcccccaggccccgaggaaaggaagggacagaagagggacgaggaggaagaggcgacagagaggaaacctgcttccccacctctgcctgccactcagcaagagaaaccttctcaaacacccgaggccgggaggaaagagaagccgatgcttcagagcagacactccttagatggctccaaacttacagagaaagtggaaactgctcagccgctgtggataacgttagcactgcaaaagcaaaaggggtttcgggagcagcaggcgacgcgggaggagagaaagcaagccagagaggccaaacaggcagaaaagctctccaaagaaaatgtcagtgtcagcgtgcagcctggaagcagcagtgtcagcagagcaggttccctgcacaagtccactgctctgccagaagagaagaggcccgagactgcagtgtccaggcttgagcgcagagaacagctgaaaaaggccaatactcttcctacgtctgtgacagtggagatctccgactcggctcccccagcgccgctggtaaaagaagtcaccaagaggttttccaccccggatgctgcccccgtgtcaacagaaccagcctggctggctttggccaaaaggaaagcaaaggcttggagcgactgtccacagattattaagtaaagagtgactctcacccatccctactgccagttattggctcctctcttgccctttttatttatttattttttatatggggtaaagaaatcaagctagggaaaagaagcatgttttataggctccaaaataatgtttagaaactgaactggtggtgttcattgtaaagagtggatttgcacaaccctaggtcctggtgcctcgagctcctcctagttctcaagagaaaattccgtccacaggaccacatgaagcaaaatctctaagctaagaactcgtgagagcctgccatgcccatttcatggccttgcacacacacccacccacacaccattcagaacatgtacttttgccaacctttggtaatggttttttgattctatgcactaattttctttgtccaaaacatttactctaccatatgtctgggaatgtttatcctttctacagtaatggtgaaaggatcatatctagctaaaagcaagaacacccattctcctgaatgcagtgagtaattgggaatcacaaggaacattctggcacccaactgtgcccatcttagttttcatgagttttccccactctgaagctgtaacccagaaggcacatccattcacatttttaccgcactgtggattcatagtgtggggccctgttattccaataccctccttaaggacatgtgaagcatttggcccagttggctcccagggaacattttaatttaatgtagtgaagaaagacaattctagatcagagctacaagttcactttctgtctctgagaatctccatctagggcagtagttcttatgatgtgtaggctccctcctagggcctactcaatcagagcctgtggggactgggccaggaatatgtattctggcaaaaactcttcaggtcagttctgatagatcccaaaggttaagaactgtgagaaacactgatcctaatgcaatctaatttttcagacttcgaaggggaggctcattcactcaaaaagcaacagtgagacaggaaaaataataaaacaaccccccaagccagccatttattacaagaagcaacaggttattgacattacatgtttgaaaattccctttggtctttagggaaaataaacaggaagccaagatttggagcctttgtaataaggacttcctgcagaaagtcttttctttactataattgagtaattcatatttagagtcacatgtccagtagcatttctaattttgagcattcaccttgctacctttaaaaaacatctgagttttaagtggcctttttatcatcatacacatgtgcatacaaagaagggacttggcagtttaaaagccacatatattcacttttattgccctaaatttacatgaaacagacatactggcaaactcacatattgctggtgctaaccttatatttcatagtgttggcatattccccttttcttagattcttactccgaaatataggtacacatcctttgctctgtgcagagggaattacatcctttttcctctcctacaaaaacatgctttattaagtatccatcattactttcctttatgctcgctcaatatgcaatgtgctgttattctaccatgtaccttaaataaaggatgatggcaaagtta

SEQ ID NO: 47427 - DNA, 1371 bp, Homo Sapiens
atgggaaagaaaaagactcatatcaacatcatcatcactggacatgtagattcattcaagtccattactacttgccatccagtctataaatgtggtggaattgaccaaagaaccattaaaaaatgtgaggacaagactgctgagatgggaaaggggtccttcaggtatgcctgggtcttggataaattgaaagctgagtttgagcatggtatcaccactgatatctccacatgggaatctgagaccaccaaatactactatgtgactatcattgatgccccaggacacagagaatttaccaaaaacatgattacagaaacatatcaaattgactgtgctatccttactgttgctgctggtgctgatgaatctgaacttggtatctccaagaatgagcagactcatgagcatatccctctggcttccacattgattgtaaaacaaccaactgttcatgttaacaaaacagattccaccgagtcaccctacagccagaagagatatgagaaaatcattaaggaaatcagcacccatattaagaaaactggctacggacctgctacagtagcatttgtgccaatttcttttttaaatggtgacaatatgctggagtcaagtgctaacataccttggctcaagagatggaaagacacctgtaaagatggcgataccagtgaaaccatgctgcttaaagctctgaattgcatcctaccatcaattcattcagttgacaagctcttgtgtctgcccctacctgatgtctacaaaggtgatattggcattgtccctttggggctagtggagactgctattctcaaacccagcatgtggtctacttttgcaccagttaacactacaactgaagtagagtctgttgaaatgcaccaaaaagctttgagtgaagctcttcctaaggataatgtgggcttcgatgtcaagaatgtgtctgtcaaagatactcgtcatggcaatgttgctggtgacagcaaaaatgactcaccaatggaagcagctgactgcactgctcacatgattatcttgagccaaccaggccaaataggttctggttatcctcctatacttgactgtcacacagcttatgttgcttgcaagtttgctattgaaaagattgattgccactctggtaagaagctggaaggtgaccctaaattcttgaaatctagtgatgctgccatcgttcagatggttgctggagttgagagcttctctgaccatctccctcttggtcattttactgttcataatatgagacagacagttgctgtgggtgtcttcaaagcagtggacaagagggctgctagagttgggaaggtcagcaagtctgcctggaaagttcaggaggctaaatga

SEQ ID NO: 47428 - DNA, 5774 bp, Homo Sapiens
gtaagagtcgaggcctgagtcgcagtagaagccgaagtagggggcgcagcaaagaccgggatccaaataggaatgttgagcacagggaaagatcgaagtttaagagtgaaaggaatgacctggagagttcctatgtgcctgtgtctgcaccacctccaaactcttctgagcagtattcctctggggcacagtctattcccagcactgttactgtgatcgcacctgctcaccactctgaaaacacaactgagagttggtctaattactataacaatcatagctcttccaattcttttggtcgaaacctaccaccaaagaggcgatgcagagattatgatgaaagaggattttgtgtacttggtgacctttgtcagtttgatcatggaaatgatcccctagttgttgatgaagttgctctgccaagtatgattcctttcccaccccctcctcctgggcttcctcctccaccacctcctggaatgttaatgcctccaatgccaggtccaggcccaggcccgggcccaggtccaggcccaggcccgggcccaggtccaggtcctggccatagtatgagacttcctgttccccaaggacatggtcagcctccaccatccgttgtgcttcccataccaagaccacctataacacaatcaagcttgataaacagccgtgaccagcctgggacaagtgcagtgcccaatcttgcatcagtgggaacaagactacctcctcctttaccccagaacctcctttacacagtatcagaacgacagcccatgtactctcgtgaacatggtgctgctgcatctgagcgacttcagttggggacaccgcctcctctgttggcagctcgtttggtgccacctcgaaacctcatgggatcctccattggataccatacctcagtctccagccctacccctctggttccagatacatatgaaccagatggttacaacccagaagctcctagtattactagttctggtagatctcagtacagacagttcttttcaagaactcagacacagcgtcccaatctgattggcctaacatctggagatatggatgtaaatccaagagctgctaacattgtgatccagactgaaccaccagttcctgtttcgattaatagcaacataaccagagtagttcttgaaccagatagtcgaaaaagagctatgagtggtttggaagggccactcacaaagaaaccttggctgggaaagcaaggaaataacaatcaaaataaaccagggttcttacgaaagaatcagtatacaaacaccaaattagaagtcaagaaaatccctcaggaattgaacaacattaccaagctcaatgaacacttcagcaaatttggaactattgttaatatccaggttgcttttaagggtgacccagaagcagccctaatccaatatcttaccaatgaggaggccaggaaagccatttctagcacagaagcagttctaaacaaccgattcattcgagtcttgtggcatagggaaaataatgagcaaccgacactacagtcctcagcacagctgctcctgcaacaacagcaaacacttagtcacctctcacagcagcaccatcacctgccacagcatctacatcagcagcaggtgctagtggcccagtctgctccttcaacagtgcacggaggtatccagaagatgatgagcaaaccacagacatcaggtgcatatgttcttaacaaagttcctgttaaacatcgtcttggacatgcaggtggtaaccagagtgatgcatcacatttgttgaatcagtctggtggtgctggagaagattgccagatattttcaactccaggccatccaaaaatgatttacagctcctcaaacttaaagacaccttcaaagctctgttcagggtctaaatctcatgatgttcaagaagtgcttaaaaaaaaacaggaagcaatgaagttacaacaagatatgaggaaaaaaagacaggaagtgttagaaaagcaaatagaatgccaaaagatgttaatatccaagttagaaaaaaacaaaaacatgaaaccagaagaaagagcaaatataatgaagactttgaaagagcttggagagaagatctcacaattaaaagatgaattaaaaacatcttctgcagtctccacaccatctaaagtgaagacaaaaacggaggcccagaaggagttattagatactgaactggacctccacaagaggctgtcctcaggagaagacaccacagaattacggaaaaaactcagtcagttacaggttgaggctgcacggttaggtattttacctgtgggtcgaggaaagaccatgtcctctcaaggtcgaggaagaggccgagggcgtggaggaagaggaaggggctcactaaatcacatggtggtggaccatcgtcccaaagcactaacagttggaggattcattgaggaagaaaaagaagacttgcttcagcatttctcaaccgcaaaccaagggccaaaatttaaagaccgtcggctacagatatcatggcacaagcccaaggtaccatctatatccactgagactgaagaagaagaagtcaaggaggaggaaacagaaacctcagatttgtttttgcctgatgatgacgatgaagatgaagatgaatatgagtctcgctcatggcgaagatgaaatctgatgctagctgtataatttttaggaatattgtttagaagaacaacttttaaaaattatttaaaagaagtcaatgagccaaaaaaaatttttttatttttcttttcaacacagtaggttcaagaacagcaagtttgctatttaaacacatctcataactgtacatgatattaaagcaccaaaggcctagtgacttttacacagttgtgaagatccacagcaatgacatggataatctctagagccttattttccacaccaccttttttttgttgctgttggtgttggattatgatgtaaatgacagggtgttcagaaattttattttggattataatctactgataaaatttaattaaatgtcaaaatcacctgtaatcttttaactctcagttgttatggatgggtcatcagacagtaggaaatatttgtaattaaaatacccttttgctttcaagagtggtcttggaagaaaaatatgtttattttaattttaatttttttttttttttactttggaggagcccaatttgtattcagtctaaatttgtttttcatggtttttatgtgtggtagtactagttcagtgaaaatcacaacaaactgtgtgttcttaaatgctacagcaatggtagctagctctatagtatttccattctcttgtcatatgaactcctggacttttcctgctactgattcttagtttgctttgatatttagtgagcgctggttcggctggtctttttaaaaatttttataactcagaatgtaaaaggctttcacctattgcccctttctcgtcccccttttcttcctcttgcctttctattaataggcctgacttagtcatcattgatataagtggttcatttgggcaaccgcaggcagtctccaataaaaggttcaaaccagcacctggataaataagtgatgttttgatgagaatgatggaaggattttggggagaagagaatcaccagctttattttttccctcttttgaagcttcagttcagtatagttacacagaagggtttaaaaatgtctgaaattcttttcctaaatttaaaccatgatggtgaggtgactggggggtggggggtggaggtgggagggggttgagggctgagtatgctagtaataaatgggagtcatatatgactttgttcagatgaccttattttttcataattttgtagcttgttgctatccatgaacatacgcatccctcagtagacagtttcctttactgtgtgcatttttactgtacactgtatagagtagagtatctgttaagtaaaatatatatgtaaatttatgtcttcgtgttctgaatgttagatggaaaagcagaggagcaacactacactgtactgacccctgggaaaataaaatgattaatgtacctaggctgtcactttttcaaggatatacacatctgtgtttttatatatgtgtggtatgaaaatttgaaacctcctgttgtctccaaaagggtcttggtgaccactatatcaaggattttgtttgctgaggtaaagacaatttctcaatatagaaactattcactaagaacttaaaaccatcaggattctagatttacttagctataagaagttaaatcccacgttctgataatctttattcttctacatgttttcctggaatgatgtgtcaaaccagggtcatttttaagttcatataattttctttcataataatgaggacttcctttttctaggttattgttatatttctagtaacactgaaggtaaaataagcttataaaagaaggaaaacatcagaatggtgtatctagaatacacaatcttgctccttactcctccatcatctctaatgaaatttttcttgatgtctgtggctcagtcagtatatattttgaaagattcattgtggtgaatattttgagtcctgacagtttaaacgtgatagagggaacaaaggatttatatattttttgtacaaagttttttcttaaactgtataattttgtaaataatttgtttgggttttttttttgtgtactaaaactaccagcgtatagatttcaataagaattgttgtatttttgtatttggaaactgaaaattacagtaaataaatggaactctaagaaaaatttcagtagacagttcaacagaatgagattccttttcatatgatttttttgacctcaaaatggacatcttatttcactctcagtaaaaagttgaaaatttgactttttagtattgggggcagaagatagaagtgtgttaaagtgaaaaacagttttttcagtaaggtttgaggccctttctataagttttcagtacaccttaaacaggactaaaaatactttaaaagtgtgctttcaaagaattttaaaacatgtttgactcaaagatgaatttgaagtgagttaattataatactggaaaacttcaggttagcataaaatagtttatatatatcccctgccccctttgggatttacttccaccatcaaatcttcaactgttagaatttcacttaaaagtgaataactgccatacatgttttcttggcatcttcatttacagaaataacatacagcatctaaagcaagttctgtccctcttaatgtgtatgacatctttttaagtagctgatcagcaataatagccaccagttgactaggtcagcctgatatactagtggatcactgtccaagataaaaaggtaaccccaagtattgcaaaatttccctcaatttctttatgtaacattgaagaaatgttgttaccagctaagatgataaattggaaaacagtcttgttaaggtgaaaggggtccttggtgatggatcattatttcaaaaaagaaaaaaatcatgtgaaaaggaatagtggttcctcttgatgtatagtatgcctgtattatagtttttacaaaattgtgaacttgtgtaatagtataataggagatattgttgaatttctaactgtttatacatttaaattcatatatgtaatgtttgttttatcaattacaatctgaatttctaagaagcatgttgacttttgcaataaagatgcaatatggaatggttcacaattgg

SEQ ID NO: 47429 - DNA, 294 bp, Homo Sapiens
gatcttgtgaatgaatgggatcaaaacttgactctcttctcttacacccttgaggaatggatgaattgtcaaagaaattggctttatcttgaaccagtctttcattcttcagaaatacgaaggcaactcccagcagaaacagaacttttctctcaagtgatttccatgtggaaaaaaataatgtcaaaaatacaaaacaaacagaatgctttgcagataaccacttctgcaggagtccttgaaattctgcaaaattgtaatatacatcttgaacatataaagaaaagccttgag

SEQ ID NO: 47430 - DNA, 417 bp, Homo Sapiens
atggagccgatctacagggtactctccagaaagaaaataagcatcaccaacctcctcacaactgacttccactgctgctacgaaaacaccatgggcactaaaaagtcctcagccatgaaaaaaaatgagccaaagaacaacaaagatgtggccttgggctctcttcccaaccacaaggagctatctacctctggggaacaagggaacccagagccagcactcaaggacaaacctggccacacagaggcgggttaccggctaactcttctgtgccacctgcacattcacccagtcctgcagacattgtgcgtgctacccagcctcacaaagagaagtccttcacacaaggaatctcctctgcacaggagcacctactgccctgtgactccctttgatccaaagtggaccccatcctaa

SEQ ID NO: 47431 - DNA, 1410 bp, Homo Sapiens
atgtctattttccctaagatatctttgagacctgaggttgaaaactatcttaaggaaggctttatgaataaggagattgtgactgctttaggtaaacaagaagcagaaaggaagtttgaaactttgttaaagcacctgtcacatcctccatcatttacaactgtcagagtgaatacacatttagcctcagtacaacatgtgaaaaatctgttacttgatgaacttcagaagcagtttaatggattaagtgttcctattcttcaacatccagaccttcaagatgtgttacttattcctgttattggacccagaaagaatattaaaaaacaacagtgtgaagccattgttggagcccagtgtggcaatgcagttttaagaggagcccatgtctatgccccaggaattgtgtcagcatcacaatttatgaaagctggagatgttatttctgtatactctgatattaaaggaaaatgtaagaaaggagccaaagaatttgatggaacaaaagtatttcttggaaatgggatttctgaactaagccgcaaagaaatcttcagtggattacctgaactgaaaggcatgggcataagaatgacagaaccagtatatctcagcccttcatttgacagtgtactgccccgttacttatttttacaaaatttgccatctgccttagtaagtcatgtactaaatcctcaacctggagagaagattctagacttgtgtgcagcacctggagggaaaacaacacacattgcagcactaatgcatgatcagggagaagttatagcactggataaaatcttcaacaaagtagaaaaaatcaaacagaatgccttattgttagggctgaattccatcagggcattttgttttgatggaacaaaggcggttaaacttgatatggtggaggacacagaaggagaacctccatttctaccagaatcctttgaccgaattcttctggatgcaccctgtagtggaatgggacagagaccaaacatggcctgtacttggtctgtgaaggaagtggcatcatatcagccattacagcgaaaactcttcactgcagcggttcagctgctgaagccagagggtgtgctggtttatagcacgtgcactataacactggccgaaaatgaagaacaggttgcctgggccctgacaaaatttccttgccttcagcttcagccccaggaaccgcagattggaggagaaggaatgaggggagctgggctctcatgtgaacagttgaaacagctgcagcgatttgatccatcggctgtgccattaccggacactgacatggactctcttagagaggccagaagagaagacatgttgcgtctggctaataaggactctataggtttttttattgcaaaatttgtaaaatgcaaaagcacatag

SEQ ID NO: 47432 - DNA, 928 bp, Homo Sapiens
cccaaggttgttatatcttcatgtcctcatttcttagggaggtaccttcagaaccaatagtgacccctaacttctctggtggtcggttccatgaaaggcaaaggagtgtgagagaggagtggatggtcaacctcccactgccatggtaacatgggtgctggctgatgggagcagaaaataatttagtgaaagtctgtgggggcagtcacaagatgtctgagaaaactggcgagccagctgctgaaaacagggacaaggaagcctccgtggctggagcccaaatcacactgcagacccagacaccgtgaccaccaccatggactccagagagagcagcttatagtactcaatcagctgccactaccaccatccagaacaccagatgttgtagccatggctgcagcaggaatggatgtcccactgtccctgctcctcggtgtgacttgctcccaagttcagggcaggtccatctgattggctgagtctggaatatctgcctgtgcctcagctgtgagggaggcagggaaagtaagccttttcagcttctgtcgtgggaggtgggctctgcctcctaccaagaatcaaagggtggaggatcttcaaacacaggaaaagaacccggatcctggcacccccaaattttcagagtccatttcagagcataagaaattgagggtccaagatcattcatgtaagaagtttagagggggaagaaaagaatgataaacgaaaagaacagcaatagtaaaggatcttttctttgtttcagtaagatgaagaggcctgagcagtttcgtggaggggaagaaacaggaaaacctcttcaaaagacaaaaagctggcactgcattctctctctgtagcaggacagaactgtctaaagacaagacccctttggccaaaataaaggaacctgaaacattactaa

SEQ ID NO: 47433 - DNA, 3028 bp, Homo Sapiens
atggggaacctgtgtggctgcattcaaggtgactcgaagaagccttccaaaaagcatgtgaaaaggaagccctactctactaccaaggtagcctcatcttctctgatagagaatacaagaagatatgctgtgcacaccaaccagtgtaggagacctcatggctcccgggtaaagaagaagaggtacccacaagaagatgacttccatcatacagtcttcagcaaccttgaaagattggacaagcttcagcccactcttgaagcctctgaggagtctctagttcacaaggacagaggagatggagagaggccagtcaacgcgagggtggtgcaggtggcccctctgaggcttgaatctactccccatgaggacaccgtacacgacatcactaacgaggacgccacacacgacatcgctaacgaggatactgtacacgacatcgctaacgaggccgccgacaagggcatcgccaacgaggacgccgcccacggcatcgccaacgaggacgccgcccacggcatcgccagcgaggacgccgcccacggaatcgccagcgaggacgccgcccacggcatcgccagcgaggacgccgcccagggcatcgccaacgaggacgccgcccagggcatcgccaaggaggacgccgtccacggcatcgccaacgaggacgccgcccagggcatcgccaacgaggacgccgcccagggcatcgccaaggaggacgccgcccagggcatcgccaacgaggacgccgcccagggcatcgccaaagaggacgccgcccagggcatcgccaaggaggacgccgcccagggcatcgccaacgagggcgccgcccagggcatcgccaaagaggacgccgcccatggcatcgccaacgaggacgccgcccagggcatcgccaacgaggacgccgcccacggaatcgccagcgaggacgccgcccacggcatcgccagcgaggacgccgtccagggcatcgccaaggaggatgccgcccagggcatcgccaacgaggacgccgcccagggcatcgccaacgaggacgccgcccagggcatcgccaaagaggacgccgcccacggcatcgccaacgagctgtatacgacatcgctaacgaggacaccctacaagccgtcgctaacaagtacactgtacacaacatcgctaatgagggcactgtacaagacatcaccaatgagggcgctttatacgacattgctaatggcaccgacaaggcacgctaacgtggacgctgtacacgacattgctaatgaggacagcgtataagacatcgctagtaactatcgcaagaacaaaaaaccaaacaccgcatattctcactcatagatgggaattgaacaatgagatcacatggacacaggaaggggaatatcacactctggggactgttgtggggttggggggggagggatagcatcgggagatatacctaatgctagatgatgagttagtgggtgcagcgcaccagcacggcacatgtatacatatgtaactaacctgcacaatgtgcacatgtaccctaaaacttaaagtatatatatataaaaaaagacatcgctagtgagcacgctgtatacgacatcgctaatgaggacaccatacaaggcatcgctaacgatgacgctgtacacaacatcactaatgatgacaccgtataagacatcgctaattatgacgctgtatacgacatcgctaatgacaccgtacaaggcacgctaacgaggatgctgtacacgacatcactaatgaggacagtgtacaagccatcactaatgaggacactgtatatggcatcgctaacgaggacactgtacaaggcattgctaacgaggacgctgtacacaacatcgctaatgaggacaccatataagacatcaccaatgaggatgctgtatatgacatcgctaatggcacccacaaggcatgctaacgaggacgctgtagacgacattgcttataaggacaccgtacaagacatcgctaacgaggacgctgtatacgacatcgctaatgaggacgttgtatatgacatcgctaatgaggatgctttacaagacatagcgaatgaggttgctgtatatgacatcgctaatgaggacattgtatatgacatcgctaatgaggacgctctatacgacatcactaatgaggacgctgtatacaacatcgctaatgaggacgctgtatatggcatcgctaatgaggatgctgtatacgaattcgctaataaggacgctgtatatgacattgctaatgaggacactgtacaagacatctgtaaaaaagaagatgctgccaatgagccattgacactggagaatgatacgtaccctgaaataactcacttcctgaggaaaaagcgccatctctaggatttgattgtggagagcatatctgatgatggggatttgtaggactttaaaaagcactcatgtttccatcctcactgttgactcctggcttaaagggatctcccggggtgagtgaggaggcgggatcggaccctggcagtctgacggcagcacctgtgttcctctgcactgggccgtggatgacattacacaccttgccactcccacggtcctgtgtgttccggatattttaaaataatggctataaggttgagcacttcaggatacgctgttttgctgtgtgcagatggaggcagtggctggagtgaatgaacggcaacacttgctggcaaccggcagaagctgagagacagggaacaggctctcctccagagcctccaggagccaggcctttggccaccttgaatgtgggcttctgggagaccatgcgtttctgttataagcagcccagtctctggcagtttttacggctgccccggaacactcatctatacctgtctgacaaggtcaagctccaaggaagggactctctacatatctacattgtttgcagattttacaataatcatttattcttgcatggctgatcattgttaaccaatacaaataaaataataaagaaatgacccaca

SEQ ID NO: 47434 - DNA, 273 bp, Homo Sapiens
ccatgcatcttccctgactctcctaggggtacctcctatgtgacacacgagtgctacaaggtcccagaatggtgcttagatgactggcatccttctgagaaggcaatgtatcctgattactttgccaagagaaaacagtggaagaaactgcggagggaaagctggaaaagagaggttaagcagctgcaggaggaaacgccacctgccggaaaggaaggtgatttgcccccactgtggtggcatattgtgaccagaccctgggagcagcccgtg

SEQ ID NO: 47435 - DNA, 516 bp, Homo Sapiens
actgccaccgccgggagccccgtactatcagccatggtcaaccccactgtgttcattgatggtgagtccttgggccacgtctccttcaagctgtctgcagacaagtttccaaagacagcagaaaactttcgtgctatgagcactggagagaaaggatttggttataagggttcctgctttcacagaattattccagggtttatgtgtcggggtggtgacttcacgcaccataatggcactggtggcaagtccgtccaccaggagaaatttgatgatgagaacttcatcctaaaacatacaggtcctggcatcttgtccacggcaaatgctggacccaacacaaattgttcctggtttttcatctccattgcgaagactgagagtttggatggccagcacgtggtctttggcaatatgaaagaaggcatgaatgttgtggaggccatggagccctttgggttcaggaatggcaagaccagcaagaagatcaccattgctgactgtggacaactccaa

SEQ ID NO: 47436 - DNA, 255 bp, Homo Sapiens
gccttgctgctgccttgcagtttgatctcagactgctgtgctagcaatcagcgagactccgtgggcgtaggaccctccaagccaggtgaaagagcttatgatcctaagcacttccataatagggtcagtagaatcatgatcgatgatcataatgtccccactctacgggagatggtagcattctccaaggaagtgttggagtggatggctcaagattctgaaaacatcgtagtgattcactgtaaaggaggcaaa

SEQ ID NO: 47437 - DNA, 753 bp, Homo Sapiens
ccctccacccgcaccagccactccctgcctgagtcctcagtgccatccaccgtgggctgctcctcccagcacacaccggaccaggccaactctgaccgtgccagcattggccgacggaggaccgagctgagacgcagtggcagcagccggtcacccgggagcaaggcccgggcagagggccgcggccctgtcaccccactgcacctggacctgacccagctgcacaggctgagcctggagagcagcccagatgcccctgaccacacttcggaaacatcacactcgcccctctatgccgacccctacacaccacccgccacctcccaccgcagggtcacagatgtccggggcctggaggagttcctcagtgccatgcagagtgcacgtggacccacgccctcgagcccactcccctcggtgcctgtgtctgtgcctgcctctgaccctcgctcctgctcctccggccccgctggcccctacttgctctccaagaagggagccctgcagtccagagccgctcagagacaccggggctcagccaaggatggggggccgcagcccccagacgcccctcagcttgtgagtagcagcccccacgcccgtgtgccccgggctccgggctggccgggggtctggaggagccgggaccccggctacgaccacctctgggacgagactttgtcttcctcccaccagaagtgcccccagcttggagggcctgaggccagtggggggcttgtgcagtggatctga

SEQ ID NO: 47438 - DNA, 1068 bp, Homo Sapiens
atgaggctgctgtgtggcctgtggctgtggctctccttgctgaaagtcctgcaggcccagaccccaacccccctgccactcccgcccccgatgcagagcttccaaggaaaccagttccagggggaatggttcgtcctgggcctggcgggcaacagcttcaggccggagcacagggcgctgctgaacgctttcaccgcaacttttgagctaagtgatgatggccgctttgaggtgtggaatgcgatgactcgaggccagcactgtgacacatggtcttatgtgctgataccggcagcccagcctgggcagttcactgtggaccacggtgtggagcccggggcggacagagaggagacccgggtggtggacagcgactacacccagttcgccctgatgctgtcccgcagacacacgagcaggctggccgtcctcaggatcagcctgctgggcaggagctggttgctgcctcccgggacgctggaccagttcatctgcctgggcagagctcagggcctctcggatgacaacatcgtcttcccagatgtgactggtaacatggttcacctgcaggcatgctgggcagtaggcacggggcccgcaggaatgagtttggttgaccctagaggagctggacccagtgtctacccagggagctcagccccagcctgcgctcaggggtctccaggctcctgggtccctgtgctcaacccaggctctgagccacctcctgccgccccgggtcccctgtcctgggccacctcctcccaccccgggtctcctgtcccgggccacctcctcccgccccaggtcccctgtcccgggccacctccccctgcccctcccgccccaggtcccctgtcccggcccacctcctcccaccccgggtctcctgtcctgggctacctcctcccaccccaggtcccctgtcccgggccatctcctccctctgggtcccctgtcctgggccacctcctcccctcacccatccctgctcacaaggagcttggactcatcccaggaggtgccctggacctcagcagcctgccctgggtggcagccccagcctga

SEQ ID NO: 47439 - DNA, 1074 bp, Homo Sapiens
caggcatcagttttgaatgtcaaggaatccaaagctcctgaaagaacggttgtagttgctggtcttccagttgacctttttagtgatcaattattggccgtattagtgaagagccacttccaagacattaagaatgagggcggagatgttgaagatgtgatatatccgacaagaaccaagggagttgcatatgtaatattcaaagaaaaaaaagttgcagagaatgtcatcagacaaaagaaacactggctagcaaggaagactagacatgctgaactcacagtctctctcagagtctctcattttggtgacaagatcttcagctctgtaaatgccatccttgatctttctgtttttggaaaagaagttactctagaaactctggtaaaagacctgaaaaaaaaaatcccgagtttaagcttcagtcctttgaaacccaatggaagaatctccgtggaaggatcatttctggctgtcaagaggctcagagaatctttgctagcaagagcatgttctctcttagaaaaagacagaaattttaccagtgaggagagaaagtggaatagacaaaatccccagaggaatctacagagaagtaataactctttggcatcagtcaggaccttagtacctgagactgctagaagtggagaaatgcttgtgcttgacacagatgtttttctttacctgaaacacaagtgtggatcttatgaaagcacactgaaaaaattccacattctgagtcaggagaaagtggatggtgaaatcaccacaatttgtctaaaaagcattcaagttggttctcagccaaacaatgcaaaacatgtaaaagagctcattgaggaatggtcacatgctctttacttaaagcttagaaaagagacatttattttggaaggaaaggaaaatagagagaaaagaatgatcaaaagggcatgtgaacaattaagttcgagataccttgaagtcctgattaacctttataggacacacattgacattataggatcttcttctgacacttacctgtttaaaaaaggggtcatgaaattaatagggcaaaaggttagttaa

SEQ ID NO: 47440 - DNA, 390 bp, Homo Sapiens
atgaagctggcattcctcttccttggccccatggccctcctccttctggctggctatggctgtgtcctcggtgcctccagtgggaacctgcgcacctttgtgggctgtgccgtgagggagtttactttcctggccaagaagccaggctgcaggggccggatcaccacggatgcctgctggggtcgctgtgagacctgggagaaacccattctggaacccccctatattgaagcccatcatcgagtctgtacctacaacgagaccaaacaggtgactgtcaagctgcccaactgtgccccgggagtcgaccccttctacacctatcccgtggccatccgctgtgactgcggagcctgctccactgccaccacggagtgtgagaccatctga

SEQ ID NO: 47441 - DNA, 444 bp, Homo Sapiens
atggcgctgaaacggattaataaggaacttagtgatttggcccgtgaccctccagcacaatgttctgcaggtccagttggggatgatatgtttcactggcaagccacaattatgggacctcatgacagaccatatcaaggcggtgtattcttttggacaattcgttttcctacagactaccccttcaaaccatctaaggttgcatttacaacaagaatttatcacccaaatattaacagtaatggcagcatttttcttgacattctaagatcacagtggtcgcctgctttaacactttctaaagttcttttatccatttgttcactgctatgtgatccaaacccagatgatcccctagtgccagagattgcacggatctataaaacagacagagataagtacaacagaatatctcgggaatggactcagaagtatgccatgtga

SEQ ID NO: 47442 - DNA, 882 bp, Homo Sapiens
atggcggatgacgccggtgcagcggggaggcccggaggccctggtggccctgggatggggaaccgcggtggcttccgcggaggtttcggcagtggcatccggggccggggtcgcggccgtggacggggccggggccaaggccgcggagctcgcgaaggcaagcccgaggataaggagtggatgcctgtcaccaagttgggccgcttggtcaaggacatgaagatcaagtccctggaggagatatatctcttctccctgcccattaaggaatcagagatcattgactttttcctggggacgtctctcaaggatgaggttttgaagattatgccagtgcagaagcagacccgtgccggccagcgcaccaggttcaaggtgtttgttgctatcggggactacaatggccacgtcggtctgggtgttaagtgctccaaggaggtggccaccgccatccgtggggccatcatcctggccaagctctccattgtccccgtgtgcagaggctactggggcaacaagatcggcaagccccacaccgtcccttgcaaggtgacaggccgctgcagctctgtgctggtgcgcctcatccctgcacccaggggcactggcattgtctccgcacctgtgcctaagaagctgctcatgatggctggtatcgatgactgctacacctcagcccggggctgcactgccaccctgggcaacttcgccaaggccacctttgatgccatttctaagacctacagctacctgccccccgacctctggaaggagactgtatttaccaagtctctctatgaggaattcactgaccacctcatcaagacccacaccagagtctccgcgcagcggactcaggctccagctgtggctacaacatag

SEQ ID NO: 47443 - DNA, 537 bp, Homo Sapiens
cttgagacttcacttcagcttcactgacttcttgactctcctcttgagtaaaaggactcagccaactatgaagttttttgtctttgctttagtcttggctctcatgatttccatgattagcgctgattcacatgaaaagagacatcatgggtatagaagaaaattccatgaaaagcatcattcacatcgagaatttccattttatggggactatggatcaaattatctatatgacaattgatatccttagtaatcatggggcatgattatagaggtttgactggcaaattcactttttactcatttattctcattcatcataccgcatcacactaccactgctttttgaagaattatcataaggcaatggagaataaaagaaagaccatgatttagtgaattctgtgtttcatgatacttcccttcctaattatcatttgattagatacttgcaatttaaactgttaagctgttttcactgctgtttctgagtaatagaaattcattcctctccaaaagcaataaatttctagcaca

SEQ ID NO: 47444 - DNA, 1801 bp, Homo Sapiens
ttttgtagagacaggggtcttactatgttgcccagactggtcttgaactcctgtcaagtgagcctcccacctcagcctcccaaagtgctatgattacaggtgtgagcctccatgcttggatgagatgttgtttttaatgtttttggttttttggttttgttgttttgtttttttgagacagggtctcactctgtggcccaggctggagtgcagtggcaccataatggctcactgcagcctcgacctcccaaggctcaggtgatcctcttgcctcagccaccccttccccggccaccaagtagctgggactatgggcttgtgccaccatgcctggctaatttttttatttttagtagagatggggttttaccacgttggccaggctagtgtccaactcctgacctccaaacagctaatttttgtatttttaatagagacaggttttcgccatgttgcccagcctcgtctcgaactcctgggctcaaatgatccacccacctcggcctcccaaagtgctgggattataggcatgagccaccacacctggccttttcagtttttttatttttattttttctttgagacggagtctcgctctgtcgcccaggctggagtgcagtggcgtgatcttggctcactgaaacctccatctcctgggttcaagcagttctcctgcctcagcctcctgagtagctgggattacaggtgcctgccaccatgcctggctaatttttgtatttttagtagagacagggttttgccacattgcccaggctggtgttgaactcctgggctcaaatgatccacctgccttggcctcccaaagtgctgggattacaggcgtgagccactgcacccggccctttgtagtgtttttaactaaagaatttgtagagttgcccaggccaggaagcctggtggctctaaagggtaatagaccttgtcagtaacagataaggagtggtaagaggacattactcatattgaagatgaagaccagactttgctgcttcacaggccatgcgctgggttgggccacttcagctccactccattcgttttcctttcctaacttgacaatcagctcactcaccctcccttagtgcctccagtgcctactcctgtcactccaatgtcaacccattgggagttgaggcctgtcactccaatgtcaacccgtgggctgttactttgcgtcatatgatgctgtgagaggccttgctggaatgtcctaggaatccctagtagcagtggctattagtcttctagaaaagaactattgctgctgccttgtgcacatgccccaccttctgggcaagtggcagcattgcgctcatgaggggctttgcattcttagccaagggcaataaactgggtgggtgatctggcccaaacttgcccctaggctctgctagccctgaatcagcaggcttcagagacgagggtgggtgttataaaagccagtctgtaaagggtaaattccaaatcttgtgccttgttataccaatccttcctgattcccgtttaaaccaactactctatttctgtgctgcctacattttcaatcctcccacgcattagcaaattcctgaaatttcctcatttggtaggccttccataggagtcagctatggacttccataggagttggcagctaaaaccagactgtgagcttctgtctccgttctgatttttgctgcacctcccaggggacagtccccacatgattacaaaagccaggtgccctcatcacccgttacccctgacctgtccacttgttttgaataaaccttcattctcc

SEQ ID NO: 47445 - DNA, 792 bp, Homo Sapiens
caggcccggggccccaagaagcacttgaagcgtgttgcagcgccgaagcattggatgctggataaactaactggtgtatttgcacctcgtccatcgacaggtcctcacaagctgagggaatgtcttcccctgatagtcttcctcaggaatagactcaagtatgcattgactggagatgaggtaaagaagatatgtatgcaacacttcctcaaaattgatggcaaggttcgagtggacatcacataccctgctggattcatagatgtcatcagcattgagaaaacaggtgagcatttccgcctggtctataataccaagggctgttttgctgttcatcgtatcacagtggaagaggcaaagtacaagttgtgcaaagtgaggaagattactgtggggacaaagggaattccacacctggtgactcatgatgctcgaaccattcgctacccagatcctctcatcaaggtgaacgatactgtgcagattgatttagggactgggaagataaccagctttatcaaatttgacacaggcaatgtatgtatggtgattgctggagctaacctcggtcgtgttggtgtgatcacaaacagggaaagacatcctggttcttgcgatgtggtacatgtgaaggatgccaacggcaacagctttgccacaaggatttccaacatttttgtcattggcaatggtaataaaccttggatttccctgcccaggggaaagggcatccgacttactattgctgaagagagagacaagaggctggctgccaaacagagcagtggctaa

SEQ ID NO: 47446 - DNA, 1416 bp, Homo Sapiens
tgtcctccggacacctttgggaagaactgcagcttctcctgcagctgtcagaatggtgggacctgcgactctgtcacgggggcctgccgctgccccccgggtgtcagtggaactaactgtgaggatgagtgcccggtggggacgtttggcgtgaactgctcgagctcctgctcctgtgggggggccccctgccacggggtcacggggcagtgccggtgtccgccggggaggactggggaagactgtgaggcagattgtcccgagggccgctgggggctgggctgccaggagatctgcccagcatgccagcacgctgcccgctgcgaccctgagaccggagcctgcctgtgcctccctggcttcgtcggcagccgctgccaggacgtgtgcccagcaggctggtatggtcccagctgccagacaaggtgctcttgtgccaatgatgggcactgccacccagccaccggacactgcagctgtgcccccgggtggaccggctttagctgccagagagagtgtccccagggccactttgggcccggctgtgagcagcggtgccagtgtcagcatggagcagcctgtgaccacgtcagcggggcctgcacctgcccggccggctggaggggcaccttctgcgagcatgcctgcccagcccacacctacgggcacaattgcagccaggcctgtgcctgctttaacggggcctcctgtgaccctgtccacgggcagtgccactgtgcccctggctggatggggccctcctgcctgcaggcctgccctgccggcctgtacggcgacaactgtcggcattcctgcctctgccagaacggagggacctgtgaccctgtctcaggccactgtgcgtgcccagagggctgggccggcctggcctgtgagaaggcctgtccccctgggcgctacggagccgcctgccatctggagtgctcctgccacaacaacagcacgtgtgagcctgccacgggcacctgccgctgcggccccggcttctatggccaggcctgcgagcacccctgtccccctggcttccacggggctggctgccaggggttgtgctggtgtcaacatggagccccctgcgaccccatcagtggccgatgcctctgccctgccggcttccacggccacttctgtgagagggggtgtgagccaggttcatttggagagggctgccaccagcgctgtgactgtgacgggggggcaccctgtgaccctgtcaccggtctctgcctttgcccaccagggcgctcaggagccacctgtaacctggattgcagaaggggccagtttgggcccagctgcaccctgcactgtgactgcgggggtggggctgactgcgaccctgtcagtgggcagtgtcactgtgtggatggctacatggggcccacgtgccgggaa

SEQ ID NO: 47447 - DNA, 531 bp, Homo Sapiens
atggacggagatgaggctgccacagcatgggtgactgtcgcatggaagcacagcagggaggagatttctcactgccacaccctctgggtcccccctcgtggattgcccggggcagctgtggcggggcggccacaacactgtttagcagaggctccaagacgggggaggggagggaggcttcactgtgggaacagggaggctccaggtggtcctgaggaggccgttggcttaagggagccggaggtagggaccggacagacgcatggcctcccaggtgactggcgggtaccttggctctctcaggctcgtcttgggttggaggctgctgtcataaccgaggcctgtggccgtcccaggccccccacgtgccctgtgcttgagctgcaggatgtggggatgccctgggcaggaggcgggcagagccctggagggaggggttccacccctcatgtcccctccagggccccgcacccaggggctgcctggcaggtgctcttcccggaaagcatctggttcccgagagcccattag

SEQ ID NO: 47448 - DNA, 963 bp, Homo Sapiens
atgaactcagagaacctcacccgggccgcggttgcccctgctgaattcgtcctcctgggcatcacaaatcgctgggacctgcgtgtggccctcttcctgacctgcctgcctgtctacctggtgagcctgctgggaaacatgggcatggcgctgctgatccgcatggatgcccggctccacacacctatgtacttcttcctggccaacctctccctgctggatgcctgctattcctccgccatcggccccaagatgctagtggacctgctgctgccccgagccaccatcccttacacagcctgtgccctccagatgtttgtctttgcaggtctggctgatactgagtgttgcttgctggcagccatggcctatgaccgctacgtggccatcagaaacccacttctctatacaacagctatgtcgcagcgtctatgcctggccttgctgggagcatcaggcctgggtggggcagtgagtgcctttgttcacacaaccctcaccttccgcctgagcttctgccgctcccggaagatcaatagcttcttctgcgatatccctccactgctggccatctcgtgcagtgacaccagtctcaatgaactccttctcttcgccatctgtggcttcatccagacagccacggtgttagctatcacggtgtcttatggcttcatcgctggggctgtgatccacatgcgctcggtcgagggcagtcggcgagcagcctccaccggtggttcccacctcacagccgtggccatgatgtacgggacactcattttcatgtacctgcgccccagctccagctatgccctggacactgacaagatggcctctgtgttctataccctggtcatcccgtctctcaacccactcatctacagcctccgcaataaggaggtcaaggaggccctcaggcagacctggagccgattccactgtccagggcaggggtcccagtga

SEQ ID NO: 47449 - DNA, 255 bp, Homo Sapiens
atgcctctcgcaaaggatctccttcatccctctccagaacaggagaagaggaaacacaagaagaaacgcctggtgcagagccccaattcctacttcatggatgtgaaatgcccaggatgctatataatcaccacagtctttagccacgcacaaacggtagttttgtgtgttggctgctccactgtcctctgccagcctacaggaggaaaagcgaggcttacagaaggttattccttcacgaggaagcagcactaa

SEQ ID NO: 47450 - DNA, 1668 bp, Homo Sapiens
atgccttcttggatcggggctgtgattcttcccctcttggggctgctgctctccctccccgccggggcggatgtgaaggctcggagctgcggagaggtccgccaggcgtacggtgccaagggattcagcctggcggacatcccctaccaggagatcgcaggggaacacttaagaatctgtcctcaggaatatacatgctgcaccacagaaatggaagacaagttaagccaacaaagcaaactcgaatttgaaaaccttgtggaagagacaagccattttgtgcgcaccacttttgtgtccaggcataagaaatttgacgaatttttccgagagctcctggagaatgcagaaaagtcactaaatgatatgtttgtacggacctatggcatgctgtacatgcagaattcagaagtcttccaggacctcttcacagagctgaaaaggtactacactgggggtaatgtgaatctggaggaaatgctcaatgacttttgggctcggctcctggaacggatgtttcagctgataaaccctcagtatcacttcagtgaagactacctggaatgtgtgagcaaatacactgaccagctcaagccatttggagacgtgccccggaaactgaagattcaggttacccgcgccttcattgctgccaggacctttgtccaggggctgactgtgggcagagaagttgcaaaccgagtttccaaggtcagcccaaccccagggtgtatccgtgccctcatgaagatgctgtactgcccatactgtcgggggcttcccactgtgaggccctgcaacaactactgtctcaacgtcatgaagggctgcttggcaaatcaggctgacctcgacacagagtggaatctgtttatagatgcaatgctcttggtggcagagcgactggaggggccattcaacattgagtcggtcatggacccgatagatgtcaagatttctgaagccattatgaacatgcaagaaaacagcatgcaggtgtctgcaaaggtctttcagggatgtggtcagcccaaacctgctccagccctcagatctgcccgctcagctcctgaaaattttaatacacgtttcaggccctacaatcctgaggaaagaccaacaactgctgcaggcacaagcttggaccggctggtcacagacataaaagagaaattgaagctctctaaaaaggtctggtcagcattaccctacactatctgcaaggacgagagcgtgacagcgggcacgtccaacgaggaggaatgctggaacgggcacagcaaagccagatacttgcctgagatcatgaatgatgggctcaccaaccagatcaacaatcccgaggtggatgtggacatcactcggcctgacactttcatcagacagcagattatggctctccgtgtgatgaccaacaaactaaaaaacgcctacaatggcaatgatgtcaatttccaggacacaagtgatgaatccagtggctcagggagtggcagtgggtgcatggatgacgtgtgtcccacggagtttgagtttgtcaccacagaggcccccgcagtggatcccgaccggagagaggtggactcttctgcagcccagcgtggccactccctgctctcctggtctctcacctgcattgtcctggcactgcagagactgtgcagataa

SEQ ID NO: 47451 - DNA, 643 bp, Homo Sapiens
cctactcgcacagcccagggagtggggaggataaggcgctgtcatggaggacgccgccgcgccggggcggaccgagggggtccttgaaaggcaaggagcgccgccagctgcaggccagggaggagccctggtggagctcaccccgacccccggcggcctggccctggtgagcccctaccacacccaccgggccggggaccccttagacctcgtggcgctcgcagagcaggtgcagaaggctgatgaattcatccgagcaaatgccaccaacaagctgacagtcatagctgagcaaatccaacatttgcaagaacaagccaggaaggtactggaagatgctcacagagatgccaacctgcaccatgtagcttgtaatatagtgaaaaaacctggcaacatttactatctctataaacgggagagtggtcagcagtatttttccatcatttctccaaaggaatgggggacaagttgtccacatgacttccttggtgcctacaaactacagcatgacttgtcctggactccgtatgaggacattgagaagcaagatgctaaaatcagcatgatggacacgttgctaagccagtcagtggccctgcctccgtgcactgaacccaacttccagggactgactcactga

SEQ ID NO: 47452 - DNA, 655 bp, Homo Sapiens
gtgacttttgaagatgtagctattgacttcacccaggaagagtgggacatgatggacacatccaagagaaagctgtacagagatgtgatgctggaaaatatcagtcacctggtgtccctcgggtaccagataagcaaatcctatataattttgcagctggagcaaggaaaagagctgtggcgggaaggaagagtatttcttcaagaccagaatccagtggaaagaaaccctgtgtcagcaaacagtgtggaaaatcccttcgtaatcttttcccctaaaccacgtaaacaaattcatactaaaggtaaatcatatcaatgtaatctatgtgaaaaggcctatactaattgcttttaccttagacggcacaagatgactcacactggagagaggccatatgcatgtcatctatgtggaaaagccttcactcagtgttctcaccttagaagacatgagaaaactcacacgggagagagaccatataagtgtcatcaatgtgggaaagcctttattcaatcctttaaccttcgaagacatgagagaactcaccttggacaaaagtgttatgaatgtgataaaagtgggaaagcctttagtcaaagctctggctttagaggaaacaaaataattcacattggagagaaaccacatgctt

SEQ ID NO: 47453 - DNA, 513 bp, Homo Sapiens
tgggtccacctggatgtcatggatgggcactttgttcccaacgtcacctttggttatcctgtggtagaaagctttcaaaagcagctagtccaggaccttttctttgacatacatgtgatggtgtccaagctggaacagtgggtaaaatcaatagctatagcagaagccagtcagtacacctttcatcttgaggctactaagtactcagaggctttgattgaagacatttgggagaatgggatgaaggttggccttaccatcaaaccaggaactacagttgagtatttggcaccatggactaatcaaatagatacggccttggttatcacagtggaacctgggtttggaaggcagaaattcatggatgatatggtgccaaacattcactggttgaggacccagttcccatctttggatgaggtcgatggtggagtaggtcctgacactgtccacaagtgtgcagaggcaggagctaacatgattatgtctggaagcgttgttatgaggagtgag

SEQ ID NO: 47454 - DNA, 761 bp, Homo Sapiens
agaccgaaggctgggggcgcaggcggcgcgtaatgcaggccgggcccgggcgcgccgaaaccagggccaccgaaaggcggcgggaaggaggcgcgcggaccgggcgcgggcaggcgcgcggggccgtcggggctgagcggcggtgtgtcgggcggcggcggggggcggcccccgggacctcgcatgcacgaagccgccgggcccggggcgccctcgcgcttgaggccgcgcggtccacgggtcagcccgggggcgcagccgtagccgccgccgccgtccgcttcagggggctcggccttgaccaggcggccgggcggcgccagcagaaagcggccgtgcagtgcgggccccagcggcgcatccagctcgggtcgcagcagctcagacaccaggccacccgcgggggcgctgtagggcgggggcgcgccgggttcggggtaatagaacgcaggcggcgggggcggcggcggcggctccggggcggcctcggcgcccaggccatccagccccatggacaggatgaagtccagcacgctgttgaggtcgtcgtcggtgccgccggactcgggttcggcgcgcggccagcgctgcgggcgacagggcaatgggcgccgcgctcgcggcacgggctggcgaaagtggagaaggacggcaggatgggttcactcagcgccatggccgggacccggggagaaaggacgcggacggggacaccggtgagtggctgcccgaggccgggctggtcggggcgcgggcgggcg

SEQ ID NO: 47455 - DNA, 765 bp, Homo Sapiens
atgggtgacaagggaacaggcaaccattcagatgtaactgatttcattcttgaaggcttcagggtccgcccagagttctacattctcctcttcttcctgttcctgctgatctatagcatggttcttttggggaacattagtgtgatgacaatcattgtaactgattcccagctgaacacaccaatgtatttttttctaggcaacctctccttcattgacgtctcctactccactgttattgctcctaaagccatggcccacttcctgtctgaaaaaaagacagtctcttttgcaggttgtgttgcccagttattcctttttgccctgttcattgtaacagaggggtttgtcctggcagccatggcctatgaccgcttcagtgccatctgcaatcctcttcttcatagtgttcacatgtcaagacgcctctgcactcagttggttgctggttcttatttctgtggctgggccagttccatcctccaagtcagtgtaacattctcagtgtccttctgtgcttccagagtcattgctcacttctactgtgattcttatcaaattgaaaagatttcctgttctaatctctttgtcaataagatggtatctctgagtttgagtgtcatcattattttgcctacaattgttgttattatagtatcttacctgtatattgtatcctcagtcttgaagatcccctccagtgaagggagaaagaaagacttttccacttgcagctcccatctgggtgttgtaagtttgctctaa

SEQ ID NO: 47456 - DNA, 2020 bp, Homo Sapiens
gtgtcaggcgacccgcagctaagctgaggggggaaagtgggcttaggaccgcctgcccagggcaaccctgaatcaagctttagccgccgaggcctcgtgtcccaaaggccagtcatccctcctctgtgttgccatgggtattcaaggcctggccaaactaattgctgatgtggcccccagtgccacccgggagaatgacatcaagagctactttggccgtaaggtggccattgatgcctctatgagcacttatcagttcctgattgctgttcgccagggtggggatgtgctgcagaacgaggagggtgagaccaccagccacctgataggcatgttctaccgcactattcgcgtgatggagaacggcatcaagcccatgtatgtctttgagggcacgccaccacagcacaagtcaggcgagctggccaaagtgaactgcggggctgaggcagagaagcagctacagcaggctcaggctgctggggccgagcaggtggtggaaaaattcactaagtggctggtgaaggtcactaagcagcacaacgataagtgcaaacatctgctgagcctcatgggcatcccttaccttgatgcacccatcgaggcagaggccagctgtgctgccctggtgaaggctggcaaagtctatcctgtggctaccgaggacatggactgcttcaccttcggcagccctgtgctaatgcaacacctgactgccagtgaagccaaaaagctgccaatccaggaattccacctgagctggattctgcaggagctagaaccagaacagtttgtggatctgtgcatcctgctaggcagtgactactgtaagagtatctggagtattgggcccaagcgggctgtggatctaatccagaagcacaagagcatcgaggagatcgtgcagcgacttgaccccaacaagtaccctttgccagaaaatcggctccacaaggaggcttaccagctcttcttggaacctgaggtgctgggcccagagtctgtggagctgaagtggagcgagccaaatgaagaagagctggtcaagttcgtgtgtggtgaaaagcagttctctgaggagcgaatccacagtggggtcaagaggctgagtaagagtcattaaggcagcacccagggccgcctggatgatttcttcaaggtgactggctcactctcttcagctaagtgcaaggagccagaatcaaagggatccactaagaagaaggcaaagactggggcagcaaggaagtttaaaaggggaaaataaatgtgtttccccattatacctccttgacaccagaatatttgccctcttgtacccttaagagctacagctagagaaaccttcacaggggtggagagagcattctaaggtttttctagcgtgacccttttcagtagtgctagtcccttttttacttgatcttaatggcaagaaggccacagaggtacttttccttttttagctcaggaaaatatgtcaggctcaaaccacttctcaggcagtttagtggatggacaataagtccattgttacatgaaagtgatagatagcaacaagttttggagaagagagagggagataaaagggggagacaaaagatgtacaaaaatgatttcctggctggccaactggtggccagtgggaggtgatggtggacctagactgcttttctgtcttgttcagccttgacccaccttgagagacagccatcaggaaggcgcatcttagcagatgggaggaactgctgagagaagataggcagagagctggagcccctggagttgactgtgtctatgtctgtgactgattgctggctgtgtcttgggtgggcagacactcgaacttgctatgtaatttgtgtctagttattcagaggagtaagacggtgatgttcatctggcaatcagctgagttgagactttgggataagacactggttttcatgtgctgtttttgttttaaagttataaagaaaaaagtcaataaaattataaaagtaaaaaaaaagaagaagaa

SEQ ID NO: 47457 - DNA, 576 bp, Homo Sapiens
tactttttcctctccaacctctccttcttggacctctgtttcaccataagttgtgtccccgggatgctggtcaacctctgggagccaaagaagaccatcatcttactgggctgctctgtccagttcttcatcttcctgtccctggggaccactgagtgcatcctcctgacggtgatggcctttgaccgctacatggctatcttcaagcccctgcgccatgccaccatcgtccacctctgcctgtgctggcagctggcatctgtggcctgggtcattgggctggtagagtcagtggtccagacaccatccaccctgcgcctgcctttctgcccccatcagcaggtggatgattttgtctgtgaggtcccagctctaattcgactctcctgtgaagacacctcctacaatgagatccagatggctgttgccagtgtcttcatcttggctgtgcctagcctcatccttgtctcttatggagccattgcctgggcagtgctaaggactaacgcaaaagggcagaggaaagcttttgggacctgctcctcccatctcactgtggtcaccctcttctacagc

SEQ ID NO: 47458 - DNA, 963 bp, Homo Sapiens
atgtcatttctaaatggcaccagcctaactccagcttcattcatcctaaatggcatccctggtttggaagatgtgcatttgtggatctccttcccactgtgtaccatgtacagcattgctattacagggaacttcggccttatgtacctcatctactgtgatgaggccttacacagacctatgtatgtcttccttgcccttctttccttcacagatgtgctcatgtgcaccagcacccttcccaacactctcttcatattgtggtttaatctcaaggagattgattttaaagcctgcctcgcccagatgttctttgtgcacaccttcacagggatggagtctggggtgctcatgctcatggccctggaccactgtgtggccatctgcttccctctgcgttatgccaccatcctcactaattcagtcattgctaaagctgggttcctcacttttcttaggggtgtgatgcttgttatcccttccactttcctcaccaagcgccttccatactgcaagggcaacgtcataccccacacctactgtgaccacatgtctgtggccaagatatcttgtggtaatgtcagggttaacgccatctatggtttgatagttgccctgctgattgggggctttgatatcctgtgcattacaatctcctacactatgattcttcaagcagttgtgagtctatcatcagcagatgctcgacagaaggccttcagcacctgcactgcccacttctgtgccatagtcctcacctatgttccagccttctttaccttctttacacaccattttgggggacacaccattcctctacacatacatattattatggctaatctctacctactaatgcctcccacaatgaaccctattgtgtatggggtgaaaaccaggcaggtacgagaaagtgtcattaggttctttcttaagggaaaggacaattctcataacttttaa

SEQ ID NO: 47459 - DNA, 414 bp, Homo Sapiens
ggaaagacctacaccatgataggaactcatgagaacccaggattgtatgctctagctgccaaagatatcttcaggcaactagaagtgtcccagccaagaaagcacctctttgtgtggatcagcttctatgaaatttactgtggacagctttatgacctcctaaatagaagaaaaaggctctttgcaagagaagatagcaagcacatggtgcagatagtgggactgcaagagcttcaggtggacagtgtggagctcctcttagaggtgatcttaaagggcagcaaggagcgcagcactggggccactggagttaatgcagactcctcccgctcccatgccgtcatccaaattcagatcaaagattcagccaagaggacatttggcaggatctcttttattgacttggctggcagt

SEQ ID NO: 47460 - DNA, 2228 bp, Homo Sapiens
ttcagtggcggtcatttttgcagcgcttgggtgcatccagaccgtcagagctttgggagcgctttgtttggcgacagtcggaaggcgcgaggggaggggtcctcccgctgaacagtgggggttctaagggtcggcggcggcggggttgacggctttgcctaggtccctccgcccgtagctgtcgggtcccggccccgctctgcccacagactccgatggctgcggccgcgctgagggccccgactcaggttactgtgtctccagaaacacatatggacctcacaaagggctgtgtgacctttgaggacatcgccatttacttctcacaggacgagtggggacttcttgatgaggctcagagactcctgtaccttgaagtgatgctggagaactttgcccttgtagcctcactgggttgtggccatggaacagaggatgaagagacaccttctgaccagaatgtttctgtaggagtgtcacagtcaaaggcaggttcatccacacagaagactcaatcctgtgagatgtgtgtcccagtcctgaaagatattttgcatctagctgatctccctgggcagaaaccatacttggttggagaatgtacaaaccatcaccagcaccagaagcatcacagtgcaaagaaatccttgaagagggacatggacagagcctcatatgtgaagtgctgcctattctgtatgtcattgaagccctttcgcaaatgggaggttggaaaggaccttccagccatgttgcggcttctgaggtccctggtctttcctggaggcaagaaacccggcacaattactgaatgtggggaggacattcgcagtcaaaaaagtcattacaagtcaggtgaatgtgggaaggcttccaggcacaaacacactcctgtttaccatccaagagtctacactggaaaaaagctttatgagtgtagcaaatgtgggaaagccttccgtggcaagtactcacttgttcagcaccagagagtccatactggagaaaggccttgggagtgcaatgaatgtggaaaattctttagccaaacctcccacctgaatgatcatcggagaatccacaccggagaaaggccttatgagtgcagcgaatgtggaaaattatttagacaaaactccagccttgttgaccaccagaaaatacacactggagcaaggccttatgagtgtagccagtgtgggaaatcctttagccaaaaagccacccttgttaaacaccaaagagttcacactggagaaaggccttataagtgtggtgaatgtgggaattcctttagtcaaagtgccattcttaatcaacaccgaagaattcacactggagcaaagccttatgagtgtggccagtgtgggaaatcctttagtcaaaaagctaccctcattaaacaccagagagttcacactggagaaaggccttataagtgtggtgactgtgggaaatcctttagtcaaagctccatccttattcaacaccggagaattcatactggagcaaggccttatgagtgtggccagtgtggaaagtcctttagccaaaagtctggtctcattcaacaccaagtggttcacactggagaaaggccttatgagtgcaacaaatgtgggaattcctttagccaatgctccagcctcatacatcaccaaaaatgtcataacacatagaggcctcatgaatgcagcaaatgtggaagcgccttcaactcaagatctatcatcatttagctcctgaaagtccacacttaagtagagccttagacctacagggaaagtgctgtctctgtagtattgtagcagtagagagcctttgtgagggagccatctgcctgaagttgaacctcattcttccttgtttctctggtagaaaccatctaccctctaccaccttgcacagtgggcactggtcactcctatgtgctaagacaaggcagacatctgtgtgttctcttaagtctttggaggaaatcttgagcagtctaagcctttagagaaaattcattcttttttctgactgatcacagcatacgtgtgacccagtttgggtcaggagggcccagccttggttctgctggacacttatgtgcaaggattcccttcatgtaaattcttggtctcacatgacacttggtcattcttccagcctccatgtcaccacgtggtgaatggctgcctcacattgctccagtttgtgcactaataaaagccttatatttg

SEQ ID NO: 47461 - DNA, 5750 bp, Homo Sapiens
gaggttgtaatggaaaaacctagagcaaacgaaaccaatattccttccgagcaatcactaccaggaaaagaggctaccttactagattttggctggagaagtgcatttaaagaagtgtctcttcccatggcgcactgcgtagtaactgcaattgaaggtttttccacaaaaattctccaacaggaacagaatgaaaggtcttcagctgtgagctatgctatgaaccttgtaaatgtccagcaagtttggcaagacagccatatgtttcctgaggaggaacaaccaaagaaaattggaaaagcaatttgttctgacatcatggaaaaacttgacacaatgcttccactggctctggcatgcagagatgattcttttcaggaaattagagcaaacttggtggaggcctgttgtaaagtggcaacagctgtcctgcagagactgcaagagagagccaaggaggttccttccaaagcacccctgaaaaacttgcacacatacctctccacagcggtgtatgtcttccagcatttcaagcgatatgataatttgatgaaggaaatgactaaaaaacccatattcctggtgcttgtccaacgatatcaggaattcatcaacactctacagtttcaggttacgaactactgcgtcagagtttgtgctacaagcattttacaggatgctgagagccaccactgggatgactacaaagctttttatgagggggaaagatgttccttctcgatccagatgtggcattatttctgctggtctcttcattacgatctctggaccattctgcctcctaagttagcccaggagattctagtggaagtgctggagaaatctttgagtctactggcctccagatacgctcgggcccaccccagccgtaaaagaactccacagttaagacttgatgtcacaacaattttgatatgcactgagaacatgttatggtcagtttgtacatctgtacagaaacttttgaatcctcatcagcatacagatgataaaatttttaaaattcacactcattgtaataatctgtttacaacattagtcattttgacttcaccattaacagaattatataagacttttcagcatggcctggatgagtctgcttcagattccttaaaatcattttttaagcaaccattatattgggtttcttgcatatcacatttctacccttctttactcaggactccatcagctggaggactgaaagccgagggtcagttgaaactgctcttatcccagccacgttgtaactggaacttgcttctggaaaccctactgcatcatgatggacttttactgagaatcttgctgaagagctcaaaacgtacctttcaagaacaagtttccgacacagaaaataacctgaaccaaggacccagcttgatggaagccatctttaaaatattgtaccattgcagtttttctccacaaacatttgcaaacgtttttgtgagctacatggaagaagagcaattatgggactttttatataacatcccaggtatgagacatttactgtttgtaaaagaaatgttctatagatacttatatgtacctttaaagatgtttagaagttgtattgatactggttttgctgaatctgttgttggtgaaagtttaccttacattttttcagtataaagccttctgttgggaatcattaattattggttcctgtaaaatttcatatactttgggacaagatgcaagggaggtggaagggaaaagattttctttttttattaattagggaatgttctatcataaaaatttattttaatatttatcacagattatgttttgctattgagcatataagatattagtaagatgtgaaaagtattttgtgattcttgggtgcatttattcagcaaattaatggacaatactattggtcgattttcttcagatgtataaggcatttattattatgaccatagtgtgtctctctacaaggcaagcatatcctgtgattcctttggagagaatatatttttcccatctgtattgttcttcttccttcagctagagagaataataaaggcagtgcaggttgtatatttgaacaggaagttttgatgggttgccccaccctctggcaggcgtaaaaattctcacattgtcttatccttaatattctgcctttaaattttcatatttaatatcttgtgaaaacaaaggatgaaaacttagacaatgatttttattattatcctgctattcaaatagtgatttttatcatttacatttagttttcaacctgtaagctttcttttatcctgctttggaacctgaattttcataaaatatttcctaggctccatataaaagatctaactagttcataatcatggtttcactcctcccagactttttgactatcctccagatattacttgaatatcattctagctgttttacagtcattatgtttcattttctcttggccattatccctataaactagcaatagataactttatgttatgatttccaaagtccaaatctgtcatttaaagtttctgtaataatgatctctttttaaaatgttatctcctagttgccatgcattcccttactgcttcttgcttcccaaaggaagggcatattcctaggtaaaaaggctgaattagaagcttgttgtgtttctgatgtagtctttattgaattgaaagaaaaacgaacttgaaagttctgccaccctctgctgattttagttgtttctggggaagtaagagctggattttctcacaagattataaagaatcagtgaccctcatgcttcaatcactatttatctttcaactattaggttcttgaaccatctttgacactcagcacaaaactatacttaaaataacctagaagatataaatggatttcaggtgctgctaggcaaaataaaactgtttcttgctcctaatttgacatctctccatgtatgtagtgagcaaaccctcccctacatggtcagacaagtctctggaaacagacgttatacatattcacagagcctgaattatatgtgaaagctcaaaggggcagaacttcaaatgggtgaaactcccttctcctttatacaagttgttgctccataaacattaaatattctctggaacctgatacctgcagtggttatgagggtctgaagttttctcttttctctcccatttaagtctttgaaaatatctttttttttttctgttagcaatcatggttattttaaaaaccctaataagataatacaaggtactaattcataacgaaattaagccttttactatgacttttgtttaatttggaaacataacattgttacaagtaatacagctgagacatgtaatcataatcccgcaatatttacattttattactaatagatctatgcttcagtatctataattaacctacccagattaactaaagtacattattttaaaacttcactgctgtagtttcctcctgctaaatcactgtctatgatttctgcacagtttacccataaaacatcacagtcttatcattttagggtaaaaggacaaagatgaagtggtatcttcatcttattgttgagtaaacaaaaagcagaaatattaagagagttgcctaagactgtccaccaattaagttggacaagacttagcacaagaaaccagatctcctctctcctaaggcagcagtccccaacatttttggcaccagggaccagttttgtggaagacagtttttccaccaggagggggatggatgaaaccgttccacctcagatcatcaggtattggttagattctcataaggagcaaacaaccaagatcccttgcatgtgcagttcacaataggatttgtgctcctatgagaatctaacatgcttctgatttgacaggaggggaagctcaagcagtaatgctcacccacctgctgctcacctcctgctgtgcggcccagttcctaacaggtcacgaacctgtactggtctgcagtctaggggttggggaccctgtcctaggccatgttatttctcatttttttctattagactaaattttttgagacactacttttatgaacatacgaattcagtaatgaattatacaatctgattttatacttagaattctatctaacacataactctttagactggacataagctagggagggatgacaagaaggaaaatacccacttaagattactacaaaagctataagtacaacaaataattaagtcagtgacctaatgtgggtgtttctaaggccaatgcactctgtaagaaataaatttgctaacaatcattggacacctatgttttcaaagtagatcaagcattattcagttagacaaatgaaaatatcaaagcatacattacctcagctggtttttaagacaatgtcagaacaggcttgtaaatgaggcaaatactgtcaaaaatgcccatctaatatgatagtaatatactcaaaaagtattgtttacttggctcctcgataatggcattgggcttacttttgttttctgaatcagttttcttaactttctcccaacctttgggaaaaaagttttccataacctagcaaaattaagggttgagattcaaagtttccactttggttttctactcctcctcagcctcataaagacctttaagaagtgttgtctagagagcatatatatgctatattgtctgcctgttgccaaaattaatttacagtgccttaccttcctatcagacacagtgattgtctctattacctacataaatacctgcgccatagtataggtagattttaaatgtaagctttcacatattgaaaggctgtctttgttctatgttgtaactaatcatgtattctgagccttttgtcaccagtttgtttgcaatccaccttaaaaatgttttaaaatatatttattgattgaatacaataaaattcactcatttcaagtgaagagttcagtaagtttgaccaatgtataaatctgtgtgacaaccacaacgataaagatatggaacattttatgtcatctccaaaggttctttcattccccctttgccgtccattctcctttcaactctcagccccaggaagacactgacctgctttttgtcgtgatagtttacttttgatattctagaatttcatataaatagaaatctatatattcttttgtgtctagcttcttttgctcagcttaatgtttttgataattttatattatgctttatcattagtttatttctgctcattgctgagcagtatttcactgagtagtactttttttatccacttaccagttgggtggacattttgattatttctagtttttggctacgatgaataaagctgctatgaatactagtgtataagtctttgtgggactacagtcatccctcagtatatgtgaggaattcattccaggaaccattccccttcttaaaaaatccatatactcggccaagcatggtggctcacgcctgtaatcccagcactttgggaggccaaagtgggagatcatctgcggtcgagagtttgagaccagcttgaccaacatggagaaacctcgtttctactaaaaatacaaaattagctgggcatggtggcatgtgcctgcaatcccagctactcaggaggctgaggcaggagaatcacttgaacccgggaggtggaggttgcagtgagccaagacgccattgcaccccagcctgggcaatgagtgaaacttcatc

SEQ ID NO: 47462 - DNA, 2280 bp, Homo Sapiens
atgaggctgctgcggcgctgggcgttcgcggctctgctgctgtcgctgctccccacgcccggtcttgggacccaaggtcctgctggagctctgcgatgggggggcttaccccagctgggaggcccaggagcccctgaggtcacggaacccagccgtctggttagggagagctccgggggagaggtccgaaagcagcagctggacacaagggtccgccaggagccaccagggggcccgcctgtccatctggcccaggtgagtttcgtcatcccagccttcaactcaaacttcaccctggacctggagctgaaccaccacctcctctcctcgcaatacgtggagcgccacttcagccgggaggggacaacccagcacagcaccggggctggagaccactgctactaccaggggaagctccgggggaacccgcactccttcgccgccctctccacctgccaggggctgcatggggtcttctctgatgggaacttgacttacatcgtggagccccaagaggtggctggaccttggggagcccctcagggaccccttccccacctcatttaccggacccctctcctcccagatcccctcggatgcagggaaccaggctgcctgtttgctgtgcctgcccagtcggctcctccaaaccggccgaggctgagaaggaaaaggcaggtccgccggggccaccctacagtgcacagtgaaaccaagtatgtggagctaattgtgatcaacgaccaccagctgttcgagcagatgcgacagtcggtggtcctcaccagcaactttgccaagtccgtggtgaacctggccgatgtgatatacaaggagcagctcaacactcgcatcgtcctggttgccatggaaacatgggcagatggggacaagatccaggtgcaggatgacctcctggagaccctggcccggctcatggtctaccgacgggagggtctgcctgagcccagtgatgccacccacctcttctcgggcaggaccttccagagcacgagcagcggggcagcctacgtggggggcatatgctccctgtcccacggcgggggtgtgaacgagtacggcaacatgggggcgatggccgtgacccttgcccagacgctgggacagaacctgggcatgatgtggaacaaacaccggagctcggcaggggactgcaagtgtccagacatctggctgggctgcatcatggaggacactgggttctacctgccccgcaagttctcgcgctgtagcatcgacgagtacaaccagtttctgcaggagggtggtggcagctgcctcttcaacaagcccctcaagctcctggaccccccagagtgcgggaacggcttcgtggaggcaggggaggagtgcgactgcggctcggtgcaggagtgcagccgcgcaggtggcaactgctgcaagaaatgcaccctgactcacgacgccatgtgcagcgacgggctctgctgtcgccgctgcaagtacgaaccacggggtgtgtcctgccgagaggccgtgaacgagtgcgacatcgcggagacctgcaccggggactctagccagtgcccgcctaacctgcacaagctggacggttactactgtgaccatgagcagggccgctgctacggaggtcgctgcaaaacccgggaccggcagtgccaggttctttggggccatgcggctgctgatcgcttctgctacgagaagctgaatgtggaggggacggagcgtgggagctgtgggcgcaagggatctggctgggtccagtgcagtaagcaggacgtgctgtgtggcttcctcctctgtgtcaacatctctggagctcctcggctaggggacctggtgggagacatcagtagtgtcaccttctaccaccagggcaaggagctggactgcaggggaggccacgtgcagctggcggacggctctgacctgagctatgtggaggatggcacagcctgcgggcctaacatgttgtgcctggaccatcgctgcctgccagcttctgccttcaacttcagcacctgccccggcagtggggagcgccggatttgctcccaccacggggtctgcagcaatgaagggaagtgcatctgtcagccagactggacaggcaaagactgcagtatccataaccccctgcccacgtccccacccacgggggagacggagagatataaaggtcccagcggcaccaacatcatcattggctccattgctggggctgtcctggttgcagccatcgtcctgggcggcacgggctggggatttaagtaa

SEQ ID NO: 47463 - DNA, 906 bp, Homo Sapiens
ctcctgacagttcgccccaggagcgggcgccgctggccgagatgctcctccgggacttggtgctgcgccgtggctgctgctggtcctcgctgctgctgcactgcgcgctccacccgctctggggcttcgtgcaggtgacgcatggtgagccccagaagtcctgctccaaagtgactgacagctgccgacacgtctgccatgacctccccacgcctctgttggtgtcacccatgatggtcccacctctgctgctcctgtctttttcagctcccaactctacctcttgccccactgaggaaagctggtggtcggggctggtgatcatcattgccgtatgctgtgcctccctggtgtttctgactgtgcttgtcatcatttgctacaaagccataaaaaggaaaccactgagaaaagacgaaaatggcaccagcgttgctgagtatcccatgagtgcttcgcagagcaacaaaggagtagacgtgaacaacgcagtggtgtgagtctgcaggccctggacccgctggccagagggacaccttggtggcactggtggacatgggaaagcaggtggacatgagctaaccctgagcttgtccaggacttcattgcctcacaggccctgagcctcccgaaggagaaaccattgtcttcccaggcttgcccctggtcagcctgcgggcccaggcagctcggacaccaggctgagcccggcgcagcacctgggcagtgtccccaccccaggccctccacatcctcctccctgtctggtgtctggtctgtcgactgcccccagctgctgtctaaagcatgcgcactggcgaagccagagggatctgtctttctactgtggcagggaggcttccccctttagccaaaagaaagatggtccggagcccactccctgcc

SEQ ID NO: 47464 - DNA, 1047 bp, Homo Sapiens
atggatctggggaactcagggaatgattcagttgtgaccaagtttgtcctgctgggcctcacagagactgcagctctacagcccatcctctttgtcatcttccttcttgcttacgtcactaccattggaggcaccctcagcatcctggcggccatccttatggaaaccaaactccacagccccatgtacttcttcctggggaacttgtccctgccagatgtggggtgtgtcagtgtcactgtccctgccatgctgagccatttcatatccaacgacagaagcattccctataaggcctgcctctccgagctcttcttcttccacctcctggctggggcagactgcttcttgctgaccatcatggcctatgaccgctatctggccatctgccagtccctcacctacagcagccgcatgagctggggaatccagcaagccctggtgggcatgtcatgtgtcttttccttcaccaatgcactgacccaaactgttgccctgtctcctcttaacttctgtggccccaatgtgatcaatcacttctactgtgacctcccacagcccttccagctctcctgctccagtgttcatctcaatgggcagttgctgtttgtagcagcagctttcatgggtgtggcccccttggtcctcatcactgtgtcctatgcccatgtggcagctgcagtcctgcgaatccgctctgcagagggcagaaagaaagccttctccacgtgtagttcccacctcactgtggtgggcatcttctatgggacgggcgtcttcagctacacaaggctgggttcagtggagtcttcggacaaggacaagggcattggcatcctcaacactgtcatcagccccatgctgaacccactcatctactggacatctctgctggacgtcgggtgcatcagtcactgttcctccgatgctggcgtgtctccaggcccaccagtgcagagttccctatgctgcctgcagttcacagctcttctttccccacctcctggctggggtggactgtcacctcttaatagccatggcctatga

SEQ ID NO: 47465 - DNA, 852 bp, Homo Sapiens
atgaaagaaagaaacatacaatttcaaaggtataacaaactgaggcattctgtaatatacattcaggctatttttaggggaaagaaagctagaagacatttaaaaatgatgcatatagccgcaactctcattcagaggagatttagaactctaatgatgagaagaagattcctctctctcaagaaaactgctattttgattcagagaaaatatcgggcacatctttgtacaaagcatcacttacagttccttcaggtacaaaatgcagttattaaaatccagtcatcatacagaagatggatgataaggaaaaggatgcgagagatgcacagggctgctactttcatccagtctactttcagaatgcacagattacatatgagatatcaggctttgaaacaggcctccgttgtgatccaacagcaataccaagcaaatagagctgcaaaactgcagaggcagcattatctcagacaaagacactctgctgtgatccttcaggctgcattcaggggtatgaaaactagaagacatttgaagagtatgcattcctctgcaacccttattcagagtaggtttagatcattactggtgaggagaagattcatttccctcaaaaaagctactatttttgttcagaggaaatatcgagccaccatttgtgccaaacataaattgtaccaattcttgcacttaagaaaggcagccattacaatacagtcatcttacagaagactgatggtaaagaagaagttacaagaaatgcaaagggctgcagttctcattcaggctactttcaggatgtacagacatatattacatttcagacttggaaacatgcttcaattctaa

SEQ ID NO: 47466 - DNA, 273 bp, Homo Sapiens
atgcccaagagaaaggctgaaggggatgctaaagaagataaggccaagataaaggacaaactacagggaagatccacaaagttgtctggaaagcctgctctgccaaagccacagctgaagcctaaaaaggcccctacaaaaaagggagagaaagtatccaaaggggaaaaaggaagagccaactctgacaaagaggtgaataaacctgcagaaaatggagatgccagaacggagaaggcacagaaagctgaaggtgctggagatgccaagtga

SEQ ID NO: 47467 - DNA, 2761 bp, Homo Sapiens
gcgccgggccgggccgggcagggcgcgggcggctaggggctccgagagcggcggccccggcccgcggccccaccatgccccagctcggcggcgggggcggcggcggcggcggcggcagcgggggaggcggcggctccagcgccggggcggccggcggaggggacgacctcggggcgaacgacgagctgatccccttccaggacgaggggggcgaggagcaggagccgagcagcgatagcgcctcggcgcagcgggacctagacgaggtcaagtcgtccctggtcaacgagtcggagaaccagagcagcagctcggactcggaggcggagaggcgcccgcagcccgtccgggacactttccagaagccgcgggactatttcgccgaagtgagaaggcctcaggacagcgcgttctttaaaggacccccgtaccctgggtaccccttcctgatgatcccggacctgagcagcccgtacctctccaacggacccctgtctcccggaggagcgcgcacctacctgcagatgaaatggcccctcctcgatgtcccctccagcgccacagtcaaggacacgaggtcaccatctccagcacacttgtctaataaagttcctgtcgttcagcacccgcatcacatgcatccgctgactcccctcatcacctacagcaatgaccacttctcccccggctcccctcccacccacctctccccagagatcgatccaaagacaggaatcccccggccccctcacccatccgagctgtcaccgtattacccactctctcccggagctgtcggacaaatcccccaccccctcggctggctcgtcccacagcaaggccagcccatgtactcccttcctcccggtggcttccggcacccttaccccgccctcgccatgaacgcctcgatgtccagcctggtctccagtcggttctctcctcacatggtggctcctgcccaccctggcctgcccacctcagggatcccccaccctgccatcgtctcccccatcgtcaagcaggaaccggcaccccccagcctgagccctgcagtgagcgtgaaatcaccagtcaccgtgaaaaaggaggaggaaaagaagccccacgtgaagaagcctctgaatgccttcatgttgtatatgaaggagatgagggccaaggtggtggctgagtgcaccctgaaggaaagtgcagccattaaccagatccttggaagaaagtggcacaacctgtctcgagaagaacaggccaagtactacgagctggcccggaaggagcggcagcttcactcgcagctctacccaacctggtcagcccgggacaactatggtaagaaaaagaagaggaagagagaaaagcagctgtcccagacacagtcacagcagcaagtccaggaggcagagggtgccctggcctccaagagcaagaagccatgtgttcagtacctgccccccgagaagccctgtgacagccctgcctcctcccacgggagcatgctggactccccggccactccctctgcagctttggcctcaccagctgcccctgctgccacccattcggagcaagcccagcccctctccctcaccaccaaaccagaaacccgggcccagctggctctccactctgccgccttcctgtcggctaaggctgcagcctcctcctctgggcagatgggcagccagcctcccctcctgtcccggcccctcccccttgggtccatgcccacagctctgctggcctctcccccgtccttccccgccacgctccatgcccaccaggccctcccggtgctacaggcccagcctctttccctggtcaccaagtctgcccactaagctccccccgacccctgcaggctgtcacatgactcattgagtagtaatgattcagaagaaaaagaaaaaggagactttattggtcaatatttgaccactctggactgttctgtaaagtggctggtaacaacagcactttacagtttgtagatgtaaccagtagctgatcttaaggcttttttaaaaaacaaaacaaaacaacaaaaaaaaatctttataagaaagagaactgaaaagtagcgtgctattcgtcctgtaggtgctgtggtggatggacctgggcagagggcacttctctctcttacctctcttgcactttctgtctcctgtctcttctcgcccctgccgcctgccccagcttccccgactccatctgcagctctgccattgtgacatttcctgttacccagcccaagttttcatcgtctgctcaataccgtgggttcttcttcgtcctctgtcctctgcccagtgtgaggccatcaccatgtgagaagacatcttggcctgatttgctgccaccagcgtcccctccctcagtgggcccgaactcgccagccccagctttcagtggagaaagcggtcctctgaaatggtttcctcccaacccccgcatttaaagggactcaaggtgcctgccacttcctcagcgaagaagtctgtgttcctccccgtccttgccagtggcgatcatcccttcacaatcccagagtggcaggcgggaccggccccatggtctggctcctgtcacctgggtccgtgccagcacaatctgccaaagttctagagaccctgttcccttccccatcacctcacatgcttcttctgtgtgtatttctttttgtttttatggtttttggagcaatttaaactcccagttgtttattttcacaaaagaaaataaaattgcagttgcaaga

SEQ ID NO: 47468 - DNA, 1591 bp, Homo Sapiens
gtgcctccagtttgctcatatcctcaatacagcaggacatccaggactgaccacgtatatcaggggtgactccaacagcacagagaacagccaacgggttcagggaacggcttcacaggtttgagacaccataactaggacaaagaccaactaaagaccatggacccaaattgtggatggagggatttaagatgaacttccaaccatttggatgagctccaggaggtcatctctatctccctggaaatgcccatggtttgtatattgttttgagagaccaatttcaagagaagctgggcctgttgtccatcaaagccccacggtgctttatcttcattctgagctggctgctcgtcagacgcagggcaggctgctgccaagagagcccgctgccgaggacctccgtctatcactgcctgggggacacgctgccttgggattgttcaaactccagggaaaggacagttatccacacccacccactgtgctccttggagaagatctgagctcttctggttggaattcttgggtctttgggattctcaacatttccagagatgaggaggctataggaatacttacaaccattttacagcttagggaaacagagtcaagtgccgtaaaatggacacacacaaaacactctcgggagctgggtccctaagttacacagagaacctggcttccctggtcttagcagatctcacagccccttcaccccggcctgtgacacacacagccctccagaccttcctccacctgcaccactaggtttatgctagaaggttcccagtgtgcccacttctaagcagtctttgctgagggggatgaagaaaaggggacctgccaagaggccactgaggtggaggagtcctcggagactaaagcagcagaagtttggagaacctcttcaaaagagacaggagaagcaaggctgcgtgcgagtcaggaagaacaggcatggtttaaatcttttttcttggagagtaaacattgtcacatttctgcctctgctgcttcagaggatgcgcctctctggacagcccttcaggcatcagcctgttggcagccgcgcgtcctggaatacggggtcgctggacataaatccatctgtactggccggggctgacagcgactgtcagtccccaggacagggtcaccacctttctctcccttcttctctctcctcttcccactgtttcaaggacagcagagtcttatggatttttcttctcctgtcttgaatgtgcaaaggtccaggggaccacagcaatgccaccttctggtgtcaagagggaggtggaggcaggcactgaataaggtcccaggcgctccttgccctggaattttgattcttcaaagggcatcagaatgcggtgaccagcagcacacagcaaccagtctctcagcggggctttaggcatggtcacttgggcttgcccagggaacctcatcccggaggatcttccaggaagcctgaggtctcctactaatggaactgtgactggctcacccagagggggtcaggttgggaccttggagtgggcactagatgaagcaaatgggattgactctaataaaaacatggaag

SEQ ID NO: 47469 - DNA, 318 bp, Homo Sapiens
atgtggctttcaacttcaccctacaggaaaggtagtcaatgtggagaagccttcagccagattccaggtcataatctgaataagaaaacgcctcctggagtaaagccacctgaaagccatgtgtgtggagaggtcggcgtgggctatccatccactgaaaggcacatcagagatcgccttggacgcaaaccctgtgaatatcaggaatgtagacagaaggcatatacatgtaagccatgtgggaatgcctttcgttttcaccactcctttcacatacacgaaaggcctcacagtggagaaaacctctatgaatgttag

SEQ ID NO: 47470 - DNA, 249 bp, Homo Sapiens
atgtgtctgcgttcacatttcaaagtggctttcactcagaggaaggtggagcttagcaaagaattgcgcagatcaaggagcagcagaaatgggggcctccccctgcaggagcagcccatgggtcagaagtggggctggcatcggggtgagccaggacatcccaggatggaagaactaaatgaatggccacagaacggggatcactggagcaggaagtggcctcccccatgcgccttcacgcctggctga

SEQ ID NO: 47471 - DNA, 1266 bp, Homo Sapiens
ggggagtgcgtgccagatacacacgtcgagaggccgttccgggttgcttccctgtgctggcacccgacgcggctggtgctggctgtgggctgggagactggagaagtgacggtgtttaacaagcaggacaaggagcagcacacgatgcccctgacacacacagccgacatcaccgtgctccgttggagccccagtggaaactgcctgctgtctggggacaggcttggtgtcttgctcttgtggaggttggaccaaaggggccgagtgcaagggacgcctctgctgaaacacgagtatgggaaacacctcacgcactgcatcttccggctcccccctcctggcgaggacctggttcagttggcaaaggcagctgtgagcggtgatgagaaagccctggacatgtttaactggaagaagagcagttctggaagtttgctgaagatggggtctcacgaggggctgttgttctttgtcagtctgatggacgggacagtgcactatgtggatgagaagggcaagaccactcaggtggtgtccgcagacagcacgattcagatgctgttctacatggagaagagggaggcactggtggtggtcacagagaacctccggctgtccctgtacacggtgcctcctgagggcaaagcagaagaagtgatgaaggtcaagctgagcgggaaaaccggccgccgggcagacatcgctttgattgaaggcagccttctcgtgatggccgtcggggaggctgccctcagtttgtttctacctgtaggtcttctggccgctggtaccgacagagggcgagtagccatgtggaggaaagtaccagacttcctgggcagccccggggcagagggcaaggacaggtgggcccttcagacccctaccgagctccaaggaaacatcacgcaaatccagtggggttccaggaagaacctgctggcagtgaacagcgtcatctccgtggccatcctcagcgagcgggccatgtcgtcacacttccaccagcaagtggccgccatgcaggtctccccgagtctgctgaatgtgtgcttcctgtccacgggggtcgcacacagcctgcgcaccgacatgcacatcagtggagtgtttgccaccaaggatgctgtcgcagtctggaacggaaggcaggtggcgatcttcgagctttctggagccgcgatacggagtgcagggaccttcttgtgtgagacgcctgtgttagcaatgcatgaagaaaacgtttacacggtggagtcaaaccga

SEQ ID NO: 47472 - DNA, 108 bp, Homo Sapiens
caggaaaccttccttgactgcctgctctctgccctgcgaggactctcgggagcagactttgaggagcaggctccagggcagaggttcttggccttggctacaaattag

SEQ ID NO: 47473 - DNA, 365 bp, Homo Sapiens
tgttttcattttactacagagatatggatggagcacaaaataaaagattcattccaaaaagtgactataaaatatgaaagctgtgactttaataacttacttttaaagaaacactaccaaagtgtgggttattgcaagcagaaaagcagttttaatggctttcctcaatgtctgtcatctactcatagcaaaacaaatgtggcaaaccttttgagttcctttaagtgcttctcagaccttactaatcataagagaattcacactggagagaaaccctacaaatgtgaaaaatgcggccaaacattgagctcattctcacacctcattagacataagaaaattcatactacagagaaagtccacaa

SEQ ID NO: 47474 - DNA, 645 bp, Homo Sapiens
atgagcatgtatcaacgcattaatggcgctgactggcgcaatattttcgtcgtcggcgatctgcatgggtgctacacgctgctgatgaatgaactcgaaaaggtttcgttcgaccctgcgtgtgatttgctgatttcggttggagaccttgttgaccgcggcgcggaaaacgtcgagtgcctggagctgattactatgccttggttccgggctgtgcgaggtaaccatgagcagatgatgattgatgggctatcggagtatggaaacgttaaccactggctggaaaacggcggcgtgtggttcttcagtcttgattatgaaaaagaggtgctggctaaggctctggttcataaatcggccagcctgccattcgtcatcgagctggttaccgctgaacgtaaaatcgttatctgccacgctgactacccgcataacgaatatgcgttcgacaagccggtcccgaaagacatggtcatctggaatcgtgaacgggttagcgacgctcaggacggcattgtctcgccgatagctggtgctgatctgtttatcttcggccacacccctgcgcgccagcccctgaagtatgccaacaagatgtacatcgatactggtgccgtgttctgcggaaacctcacgctgttacag

SEQ ID NO: 47475 - DNA, 300 bp, Homo Sapiens
atgctgaagtatgtcatcaaaaggtacaggagcttcctccctgagattttcaagaaagcctctgacctccccgagttagtctttgggttctatctgaaggaacttgatccagcagagcactcctatgtcttgatcagaaaaatcgatcctgccctggtttggggcctgacaggcgaccagggcacaccaaagacccggctcctgatgattactctggactcgatcttcatgcaggccagctgtgtccccgaggaggtggtctgggaggtgttgagggtgttggaggcacatttcgtctaa

SEQ ID NO: 47476 - DNA, 803 bp, Homo Sapiens
cgcgctcgcgcacactacgccagaacaagatggccgacgcggcggccacagctggggccggtggctccggaacgagatcgggaagtaaacagtccactaaccctgccgataactatcatctggcccggaggagaaccctgcaggtggttgtgagctccttgctgacagaggcagggtttgagagtgccgagaaagcatccgtggaaacgctgacagagatgctgcagagctacatttcagaaattgggagaagtgccaagtcttactgtgagcacacagccaggacccagcccacactgtccgatatcgtggtcacacttgttgagatgggtttcaatgtggacactctccctgcttatgcaaaacggtctcagaggatggtcatcactgctcctccggtgaccaatcagccagtgacccccaaggccctcactgcagggcagaaccgaccccacccgccgcacatccccagccattttcctgagttccctgatccccacacctacatcaaaactccgacgtaccgtgagcccgtgtcagactaccaggtcctgcgggagaaggctgcatcccagaggcgcgatgtggagcgggcacttacccgtttcatggccaagacaggcgagactcagagtcttttcaaagatgacgtcagcacatttccattgattgctgccagacctttcaccatcccctacctgacagctcttcttccgtctgaactggagatgcaacaaatggaacagattcctcggagcaggatgaacagacagacacagagaaccttgctcttcatatcagca

SEQ ID NO: 47477 - DNA, 1355 bp, Homo Sapiens
ctctcgagcctgctgcctgctcccccgccccaccagccatggtggtttctggagcgcccccagccctgggtgggggctgtctcggcaccttcacctccctgctgctgctggcgtcgacagccatcctcaatgcggccaggatacctgttcccccagcctgtgggaagccccagcagctgaaccgggttgtgggcggcgaggacagcactgacagcgagtggccctggatcgtgagcatccagaagaatgggacccaccactgcgcaggttctctgctcaccagccgctgggtgatcactgctgcccactgtttcaaggacaacctgaacaaaccatacctgttctctgtgctgctgggggcctggcagctggggaaccctggctctcggtcccagaaggtgggtgttgcctgggtggagccccaccctgtgtattcctggaaggaaggtgcctgtgcagacattgccctggtgcgtctcgagcgctccatacagttctcagagcgggtcctgcccatctgcctacctgatgcctctatccacctccctccaaacacccactgctggatctcaggctgggggagcatccaagatggagttcccttgccccaccctcagaccctgcagaagctgaaggttcctatcatcgactcggaagtctgcagccatctgtactggcggggagcaggacagggacccatcactgaggacatgctgtgtgccggctacttggagggggagcgggatgcttgtctgggcgactccgggggccccctcatgtgccaggtggacggcgcctggctgctggccggcatcatcagctggggcgagggctgtgccgagcgcaacaggcccggggtctacatcagcctctctgcgcaccgctcctgggtggagaagatcgtgcaaggggtgcagctccgcgggcgcgctcaggggggtggggccctcagggcaccgagccagggctctggggccgccgcgcgctcctagggcgcagcgggacgcggggctcggatctgaaaggcggccagatccacatctggatctggatctgcggcggcctcgggcggtttcccccgccgtaaataggctcatctacctctacctctgggggcccggacggctgctgcggaaaggaaaccccctccccgacccgcccgacggcctcaggccccgcctccaaggcatcaggccccgcccaacggcctcatgtccccgcccccacgacttccggccccgccccgggccccagcgcttttgtgtatataaatgttaatgatttttataggtatttgtaaccctgcccacatatcttatttattcctccaatttcaataaattatttattctcca

SEQ ID NO: 47478 - DNA, 261 bp, Homo Sapiens
cctgtaatcccagcactttgggaggccgaggggggcgatcacctgaggtcgggagttcgagaccagccagaccaacatggagaaaccccgtctctactaaaaatacaattagccgggcgtggtggcacatgcctgctagctattctgaggctgaggcaggagaatcgcttgaacgcaggaggcagaggttgcagtgagccgagatcgtaccgttgcactccagcctgggcaacaagagccaaactctgtctcaaaaaacaa

SEQ ID NO: 47479 - DNA, 1620 bp, Homo Sapiens
atgagcaagagggttggcatcatcggagctggagtcagtggcttggctgccatatggtgctgtctggaggaggggctggagcccacttgctttgaaaggagcgatgatgttggaggcctgtggaaattctcagaccacacagaagaaggcagagccagcatttaccagtctgtattcacaaactcttccaaagaaatgatgtgctttccagacttcccttatccggatgattacccaaactatatacaccacagcaagctccaggaatatataaagacatatgctcaaaagaaggatcttttaagatacatacagtttgagaccctggtttccggtataaagaaatgtcccagcttcttagtcacgggccaatgggttgttgttactgaaaaggatgggaaacaggaatctactatttttgatgctgtaatgatttgttcaggacatcacgtataccccaatctgccaacggattcctttcctggcctggaccagtttcgaggcaactacctccatagccgggattataagaatccagaagccttcaaggggaagagggtcctcgtgattggtctggggaattcgggatctgacattgctgttgagctcagccgtctggctacacaggtcattatcagtaccagaagtgcttcctgggtcatgagtcgggtctgggatgatggctatccttgggatatgatgtatgttacccgctttgcatcctttctccggaatgtccttccttcattcatctctgactggttatatgtccagaagatgaacacgtggtttaagcatgagaactatggcctgatgcctttaaatggttccctgagaaaagagcctgtgttcaatgatgagctcccatcccgcatcctgtgtggcactctgtccatcaagcccagtgtgaaggagttcacggaaacctcagctgtgtttgaggatgggaccatgtttgaggctatcgactctgtcatctttgcaacaggctatgattattcctaccccttccttgatgagaccatcatgaaaagcagaaacaatgaggttaccttgtttaaaggcatcttccccccactaatggagaagccaaccttggctgtgattggcttggttcagtcccttggagctgccatccccacagcagacctgcaagcctggtgggctgctaaagtatttgcaaactcatgtaccctgccaaccacgaatgaaatgatggatgacactgatgagaaaatggggaaaaaactcaagtgtatgttctcttctttcttcatgtttggccagagccagactttgcagacagattacatcacatatgtggatgagctgggctctttcataggggccaagcctaacataccatggctcttcctgacagatccccgcctggccctggaggtgtactttggcccttgcagcccataccagtttcgactgatgggaccagggaagtgggatggggccagaaatgccatcctgacccagtggaaccggacagtgaagccaaccaggacaagagttgtcagtgaagttcagcgaccccatcccttttacaatttgcttaaaatgctttcattcccattactccttctggctgttacacttacattttattaa

SEQ ID NO: 47480 - DNA, 477 bp, Homo Sapiens
ctaaaggctgtgctgctggggcctcccagggccggtaaaggcacccaggcacccagattggctgaaaacttctgtgtctgccatttagctactggggacatgctgagggccatggtggcttctggctcagagctaggaaaaaagctgaaggcaactatggatgctgggaaactggtgagtgatgaaatggtagtggagctcattgagaagaatttggagacccccttgtgcaaaaatggttttcttctggatggcttccctcggactgtgaggcaggcagaaatgctcgatgacctcatggagaagaggaaagagaagcttgattctgtgattgaattcagcatcccagactctctgctgatccgaagaatcacaggaaggctgcaccccaagagtggccgttcctaccacgaggagttcaaccctccaaaagagcccatgaaagatgacatcaccggggaacccttgatccgttga

SEQ ID NO: 47481 - DNA, 765 bp, Homo Sapiens
gcggtcgggcccacggccgcggcagtggatggggttgagctcgtcctgggggaaggcgtgagccatgtagttgtcgtagccaaagacgaacatgccccgtgccaggtcgcgcatctgggcacgcagctgcggagggaaggcgccgctgtagcgcttctcgtactcgtccgggccgcggccccggccgcccagcacgtagccccagttggctgggccgcacatccccggcccaggacgccgcggagccttgcgcgggctctgcgctgccccggtccccggcggctgcagccacgacggcccggatacccccccaggccggcccacgggccccgaggtgggcgacgcggggccgtcggggctcctcagacgctggaagccgaagctgagcggaaagcgctggtagaagcccatgctgggccccagcccgaagacgagccacaatactccatggaggccaagccggaggagcaccagccccaggacgagcgctcgccattgcatggtcgcgcgggcgccgcgggcattattttaaagcgcgggggcctccccgccgaccaccgcaccccgcgctcgccccgtagcccggctcgcttcccctttaaggaactcccccgtgacgcaccaggaactagcccatcgtccccaacccccaggctctccggcgggccggccaggccccacggtcgcccgcccagtggcccgggattggcccggcctgggcccggcctcgcggggcgcggcccaggactccctcccacgcagtag

SEQ ID NO: 47482 - DNA, 1726 bp, Homo Sapiens
agttctacggtgcggatgggggatggggcaggatggggcaggacaccgatatgctaaatacctaccaacagttggttaggaccccgtcggtgcgaccagggcaggacgtgcggctccaggctccaggaaccagaacggggctgctcaagctgctgtcgaccgtctctcaggacaagcagggctgcctggggagtggtgatggtgtgccaaatcaagacctgcagcagaggtctcagagctcaaggcagacagcaaagaaggaccgcaagcccaggggccagagcaagaaaggacagggctctgaagagtctgaagatcacttcccgcttcttcctcggaaaccctccttccccttccagtgggcctgggagagcatcgccacagatgtccgggctgtgcttcagccaagctccccaacccctggccaccaagccctgcccatgccctcctcgttctcccagcgtcagtccaggcgcaagtccacggccaacctcccagaggcccatggctgctgctggaagacagaggcgcaaaacctgaaggcgagacagcagctgggagcctggggcggtgtctccatccctactggcaaaggggagctaggatcagagccccccagtggtctccagctgcctgggaggaggccaggatcaggatcggtgtccgacaagcaggtccagctgcaaagcctgggtgctgaggaggccgagaggggtctgagttctggggtgctgccccagcgccccaggagggggtcgatctcagaggaggagcaattttcagaggccacagaggaggctgaggagggagagcacaggactccctgcagaaggagggctggttgtcagagaaaggggcagatttctggagaggaagcctccgatgagggagaagtgcagggccagagccaggggagcagccccagcttcaacaacctccgaaggcgacaatggaggaagacaagggccaaggagctgcaggggccatgggacctggagaagctgcacaggcagctacagagagacctggactgtggcccccaaaagctgccctggaagactttgagggctgccttccaggcctccaagcggaatggaaaggcctatgcctcgggatacgatgaaactttcgtgtctgccaacctccctaatcgcaccttccacaaacgacaggaagccaccaggagcctgctgcaggcctgggagcggcagcggcaggaggagcggcagcaggccgagctgcggcgggcccggacacagcatgtacagcggcaggtggcccactgcctggcagcctacgcacccagagggagccggggccctggggcggcccagcgcaagctggaggagctgaggcgccaggagcgacagcgctttgctgagtaccaggcggagctgcaaggcatccagcacagggtgcaggcccggcccttcctgttccagcaggctatgcaggccaatgcccggctcaccgtcactcggcgcttctcccaggtgctgtcagcactggggctggatgaggagcagctgctgtctgaggcaggaaaggtggacagagagggcacccccaggaaacccaggagccacaggtcaatgggggtgagaatggagcactctcctcagaggcccccaaggacagaacccaccggcagccagcctgacaggcactacaaccccagcctggacccggagtgcagtccctgagataaaattaaaggctttatggc

SEQ ID NO: 47483 - DNA, 1686 bp, Homo Sapiens
ggcctggcgcagtggctcacacctgtaatcccagcactttgggaggccgaggtgggcggatcacgaggtcaagagatggagaccatcctggctaacacaaaaccccatctctacaaaatacaaaaattagctggagtggcgcatgcctgtaatcccagctactcaggagaggcaggagaatcgcttgaatccagagcggaggttgcagtgagccgatctggcatcactgcactccagcctgggcaacagagcgagactccatcttcaaaaaaaaaaaaaagaattttcattttttgcggtgggtgcggtggctcacgcctgaagcactttgggaggctaaggcgggtggatcacagatcaagagatcgagaccttcctagccaacataacctcgtctctactagcaatacaaaaattagccaggtgtggtggcgtgcgcctgtagtcccagctactcaggaggctgaggcaggaaaatcgcttgaaccggggaggcaggtttcagctgagatcatgccaccgcactccagtggtgacaaagcgaaactctttaataagaaagtactggctggcgcggtggctcacgcctgtaatcccaccactttgggaggccgaggcgggtggatcatgaggtcaggagttcgagaccagcatgggcaatatggtgaaaccccgtctctactaaaaatacaaaagttagccgggcgtggtggtgtgcgactgcagctgctcgggaggctgaggcaggagaattgcttgaacccaggagacagaggttgcagtgagctgagatcgtgccactgcactccagcctgggtgacagagcaagactccgtctcaaaaaaaaaaaaaaaaaaaagaaaacggagtctcgctgtatcgcccaggctggagtgcagtggcgggatctctgctcactgcaagctccgcctcccgggttcacgccattctcctgcctcagcctccggagtagctgggactacaggcgcctgccaccaggcccagctaattttttttttagtagagacagggtttcacttagctgatggtctcgatctcctcacctcggcccacctgggcctcccaaagtgctgggattacaggcatgagccacctcacccggcccaaagacctttgaacatacctaaatgcctgccggacactgcagtggcgcaatctcggctcactgcaagctctgcttcccgggttcatgccattctcctgcctcagcctcccctgggactacaggcgcccgccaccgcgcccggcttttgtatttttagtagacggggtttcaccttgttagccaggatggtctcgatccctcgtgatccacccgcctcggcctcccaaagtgctgggattacaggcgtgagccaccgcgcccggctaagtaaaatggggtttctttctttttttttctttttttttttttttgagatggagtctcgctctgtcgcccaggctggagtgcagtggcgtgatctcggctcactgcctccgcctcccgggttcacgccattctcttgcctcagcctcccgagtagctgggactacaagcgcctgccaggacgcccggctaattttctgtattttagtagagacggggtttcaccgccaggatggtctcgatctcctgacctcgtgatccgcccacctccgcctcccaaagtgctgggattacag

SEQ ID NO: 47484 - DNA, 552 bp, Homo Sapiens
atgaattctggaatcttgcaagtcttccagagggaactcatctgtcccatctgcatgaactacttcatagacccagtcaccatagactgtgggcacagcttttgccggccctgtttctacctcaactggcaagacatggcagttcttgctcagtgctctaaatgcaagaagacaacacggcagagaaacctcaaaactaacatttgtttgaagaacatggcttccattgccagaaaagccagcctccggcaattccttagctctgaggagcaaatatgtgggacgcacagagagacaaaggagatgttctgtgaagtggacaagagcctgctctgtttgctgtgctccaactctcaggagcaccggaatcacagacactgtcccactgagtgggctgctgaggaacgccgggaggagctcctaagaaaaatgcagtctttatggagaaaaatgtgtgaaaatcacagaaacctgaatatggcaaccaacagaatcagatgctggaaggttagtagtgtgttactctaccttctccaggaacttatggtgaac

SEQ ID NO: 47485 - DNA, 216 bp, Homo Sapiens
atgtcagagaaaaagcagccggtagacttaggtttcttagaggaagatgacgagtttgaaaagttccctgccgaagactgggctgacttagatgcagatgaacatgcacatgtctgggaggataattgggatgatgacaatgtagaggatgacttctctaatcagttacgtagagctgaactagagaaacatggttataagatggagacttcatag

SEQ ID NO: 47486 - DNA, 1191 bp, Homo Sapiens
atggacctgagcgccgccgccgcgctgtgcctttggctgctgagcgcctgccgcccccgcgacgggctggaagcggccgccgtgctgcgagcggcgggggctgggccggtccggagcccaggggggaacggctcggtggtgccgcaccacttcatgatgtcgctttaccggagcctggccgggagggctccggccggggcagccgctgtctccgcctcgggccatggtcgcgcggacacgatcaccggcttcacagaccaggcgacccaagacgaatcggcagccgaaacaggccagagcttcctgttcgacgtgtccagccttaacgacgcagacgaggtggtgggtgccgagctgcgcgtgctgcgccggggatctccagagtcgggcccaggcagctggacttctccgccgttgctgctgctgtccacgtgcccgggcgccgcccgagcgccacgcctgctgtactcgcgggcagctgagcccctagtcggtcagcgctgggaggcgttcgacgtggcggacgccatgaggcgccaccgtcgtgaaccgcgccccccccgcgcgttctgcctcttgctgcgcgcagtggcaggcccggtgccgagcccgttggcactgcggcggctgggcttcggctggccgggcggagggggctctgcggcagaggagcgcgcggtgctagtcgtctcctcccgcacgcagaggaaagagagcttattccgggagatccgcgcccaggcccgcgcgctcggggccgctctggcctcagagccgctgcccgacccaggaaccggcaccgcgtcgccaagggcagtcattggcggccgcagacggaggaggacggcgttggccgggacgcggacagcgcagggcagccgctgcagccgcaagccgttgcacgtggacttcaaggagctcggctgggacgactggatcatcgcgccgctggactacgaggcgtaccactgcgagggcctttgcgacttccctttgcgttcgcacctcgagcccaccaaccatgccatcattcagacgctgctcaactccatggcaccagacgcggcgccggcctcctgctgtgtgccagcgcgcctcagccccatcagcatcctctacatcgacgccgccaacaacgttgtctacaagcaatacgaggacatggtggtggaggcctgcggctgcaggtag

SEQ ID NO: 47487 - DNA, 2804 bp, Homo Sapiens
gcgtgcggctggccatggcgctgttctacgtcgcgcggtacccgggccccgatgcggcagctgcggcggggccggagggcgcggaggccggggcgcacggcagggcccgcgcgctgctcgagcggctgcagagccgggcccgcgaacggcagcagcagcgggagcccgcgcagaccgaggcggctgcatcgaccgagccggcgaccaggaggcgacggcggccccggcggcggcggcgggtgaacgacgcggagccggggagcccggaggcgccgcagggaaagcgacggaaggcggacggcgaggacgcgggcgcagaaagcaacgaggaggcgccaggggagcccagcgcagggagcagcgaggaggcgccaggggagcccagcgcagggagcagcgaggaggcgccgggggagcgcagcaccagcgccagcgccgaggcggccccagatggaccggccctggaggaggcggccggacccctggtccccggcctggtgctgggggggttcgggaagaggaaggcgccgaaggtccagcctttcctgccaaggtggctggctgagcctaactgtgtcagaaggaatgtcaccgaagacctggttcctatcgaggacatccctgacgtccatcctgacctgcagaagcagctgcgggcacacggcatctcgtcctactttccagtccaggcagctgtgattcctgccctcctggagagcgcagcctgtgggtttctggtgggcagaggtggctaccggcctagcgacctctgtgtttctgccccaacaggcagtgggaagacactggccttcgtcatccctgtggtgcaggccctgctttcgagagtggtctgccacatccgtgccctggttgtgctgcccaccaaggagctggcccagcaggtgagcaaagttttcaacatctacacagatgccacacctctgagagtctccctggttacgggacagaagtctctggccaaggagcaggagagcctcgtccagaaaacagctgatgggtaccgctgcttggctgacatcgtggtagccacccccggccgcctggtggaccacatcgaccagaccccaggattcagcctccagcagctccgcttcctgattatcgacgaggctgaccggatgattgacagcatgcatcagtcctggctgccgcgggtggtggcggccgccttccagagcgaggaccccgcggacccctgtgccctgctccagcgaaggcaggcccaggctgtgacagccgccagcacctgctgtccccagatgcccctgcagaagctgctcttctcagctactctgacccagaaccctgaaaagctgcagcagctgggcctccaccagccccggcttttctccacagggctagcacacaggggcctggaagatacagatggggacggggattcggggaagtatgcctttcctgttgggctcacgcaccactacgtgccctgcagcctcagctctaagccgctggtcgtcctgcacctggtcctggagatgggcttctcgagggttctctgcttcactaactcccgagagaactcccacaggctcttcctgctggtgcaagcttttgggggtgtggacgtggctgagttctcctcgcgctacgggcctggccagaggaggatgatcctgaagcagtttgaacaggggaagatccagctgctcatcagcacggacgccaccgcgcgaggcatcgacgtgcagggtgtggagctggtggtgaactacgacgccccccagtacctgagaacctacgtgcaccgggttgggaggacagctcgcgctgggaaaactggacaggccttcacactgctcctgaaagtgcaggagaggagattcctccgaatgctaactgaagctggggcacctgagttgcagcggcacgagctctccagcaagctgctgcagccgctggttcctcggtacgaggaggccctgtcccagctggaggagtctgtcaaggaagagcgcaagcagagggcggcctaggctggggctcagagggccggagggactgaacgctcaccaccctgaccctccttccagagcagtgctgatcactggatcctgtatgtgaggaaaggaatcccccagtggacacagccttcctccccaagcacgtggtctctgcgccaggcagcccgggcgtcagagctcaagcacctgccccgactggagacttcagggcttgtcactttcagagtgtggaggtcaggatggctgcgggcaatgaagccttagtaaaacggtgaaaagtactcccagacggacgcgggcacccgtcatgcttttgctgagagttgggggcattaaccttgagctaatgttaaaaatcaagctcttggccaggcatggtggctcatgcctgtaattccagcactttgggaggccaaggcgggtggatcacctgaggtcacgagttcgagaccagcctgaccaacatggagaaaccctgtctctactaaaaatacaaaattagccaggcgtggtggtgcatgcctgtaatccagctacttgggaggctgaggcaggaaaatggcttgaacccgggaggtggaggttgcagtgagctgagattgcgccactgcactccagcctgggcaacaagagcaaaactccgtctcaaaaaaaaaaattgccgggcgcggtggcaaatgcctgtaatcccagcactttgggaggccgaggcaggtggatcacaaggtcaggagatagagaccatcattgctaacatggtgaaaccccgtctctactaaaaatacaaaaaaaaaaaaaaaa

SEQ ID NO: 47488 - DNA, 2257 bp, Homo Sapiens
gccggcccgccttcccgggggttccgttatcatgtcgctgaggcagcgcctggcccagctggttggccgtctgcaggacccgcagaaagtggcccgtttccagcggctgtgcggggtggaagcgccgccgcgccgctcagcagaccggagggaggatgagaaagcggaggcgcctctcgccggagaccctcgactgcgagggcggcagccaggggcgcctggaggcccccagcctcccgggagcgaccgcaatcagtgcccggccaagccggacggcggcggcgcccccaacggcgtgcggaacgggctggcggccgagctgggcccggcctcgccgcggcgcgcgggcgctctgcgccgcaactcgctgacgggcgaggagggccagctggcccgcgtgagcaactggccgctctactgcctgttctgcttcggcacggagctgggcaacgaactcttctacatcctgttcttccccttctggatctggaacctggaccctctggtgggccggaggctcgtggtcatctgggtgctggtcatgtacctgggccagtgcaccaaggacatcatccgctggccgaggcccgcctcgccgcccgtggtcaagttggaggtcttctacaactctgagtacagcatgccctccacccatgccatgtccggcaccgccatccccatttctatggtcctcctcacctatggccgctggcagtaccctcttatatatggactgattcttattccctgctggtgttctctagtttgcctaagtagaatttacatgggaatgcactctattctggatattattgctggattcctatataccattttaatcttagctgtcttctatccatttgtggacctgattgacaacttcaaccaaactcacaaatatgctccattcatcatcatcgggcttcatttagctttggggatcttttctttcactcttgacacctggagcacatcccgaggagacacagccgagatactaggaagtggtgctggaattgcatgtggatctcatgttacttataacatgggtctagtattagatccttctctagatacattacctttagctgggccccccattactgtgactctgtttggaaaagccatattgcggatcctcatagggatggtatttgtactaataatcagagatgtaatgaaaaagatcaccattcctttagcctgcaaaatcttcaatataccgtgtgatgatattcgaaaagcaagacagcacatggaagttgaacttccttatcggtatattacctatggaatggttggtttctccatcacattttttgttccttacatatttttctttattggtatctcttgatggagaagtattgtttatgataagaaaggagggtatcagttactgatacccaaaaatatattccaggtaaagccaggtcagaattaggcttttgcaggaatttaacttaaataattatttaagtaaattcataagagtcagtgcattttatcattgcacatccagatactgttttaggtgagctgagctatttcgttactgagaaaatgataagtatccatttagaatgttcatgtaatgtttggagagttttgtattatggattcaacttatatataatatatataaggtacataatatgcaattatatatctgatatatattatatataaaataatatacctaagtgtttttttaaactatgggagtgtattataaaatcaataataatatgcaaacagttgtgcctgtgtatttgaactacatacaggtatgttgttattaacagatatatttaacatttatttactatgggagccatttcctaattgaattgcgtaattactagaccagaatgcatatgctactatacattgatttactgcctgtttttacactgccattacctttcatgttatccatgatgttgaacatgggaggcatttttaatggaccaaatttttagaaaaattagtttttggatttttttttaagttctgtatactgttttgaatgaactttatttgcagctattctggatgtcagtttaataattcaggtactgaattttattgcttgctaattgtgcctttccgttgctaaattaagaaatgctatgtgtactgtgatgtaaaaataagacattaactttatcttaagttacatataatcaagcaaatattttaaaaaatgtatgtcagggtgacaggcataaaagtaaattacccttaactctttagc

SEQ ID NO: 47489 - DNA, 729 bp, Homo Sapiens
atgctcctccttgctccccagatgctgagcctgctgctgctggcgctgcccgtcctggcgagcccggcctacgtggcccctgccccaggccaggccctgcagcaaacgggcattgttggggggcaggaggcccccaggagcaagtggccctggcaggtgagcctgagagtccgcggcccatactggatgcacttctgcgggggctccctcatccacccccagtgggtgctaaccgcggcgcactgcgtggaaccggacatcaaggatctggccgccctcagggtgcaactgcgggagcagcacctctactaccaggaccagctgctgccggtcagcaggatcatcgtgcacccacagttctacatcatccagaccggggcggacatcgccctgctggagctggaggagcccgtgaacatctccagccacatccacacggtcacgctgccccctgcctcggagaccttccccccggggatgccgtgctgggtcactggctggggcgacgtggacaataatgtgcacctgccgccgccatacccgctgaaggaggtggaagtccccgtagtggaaaaccacctttgcaacgcggaatatcacaccggcctccatacgggccacagctttcaaatcgtccgcgatgacatgctgtgtgcggggagcgaaaatcacgactcctgccagggtgactctggagggcccctggtctgcaaggtgaatggcacctaa

SEQ ID NO: 47490 - DNA, 126 bp, Homo Sapiens
gatcttggttggcatttttcaaactgtgatgaagacactttttatagccctgttcagaatacagaaggagacctactcttctttgatcacaatctaaagacagacagaggacatgtggaaaggtaa

SEQ ID NO: 47491 - DNA, 514 bp, Homo Sapiens
gaaggctgaggtgtgcgccttttttttttttccttcttagtcgtgtgtacatcattgggaatggagggaaataaatgactggatggtcgctgctttttaagtttcaaattgacattccagacaagcggtgcctgagcccgtgcctgtcttcagatcttcacagcacagttcctgggaaggtggagccaccagcctctccctgaataactgggagatgaaacaggaagctctatgacacacttgatcgaatatgacagacactgaaaatcacgactcatccccctccagcacctctacctgttgcccgccgatcacagccggaatgcagctgaaagattccctggggcctggttccaactgcccactgtggactctgaggcctctgcatttgcgggtggtctgcctgtgatattttggtcatgggctggtctggtcggtttcccatttgtctggccagtctctgtgtgtcttaatcccttgtccttcattaaaagcaaaactaaagaaaacagaa

SEQ ID NO: 47492 - DNA, 442 bp, Homo Sapiens
gagctctccggtccgtgcctccaagatgacaaagaaaagaaggaacaatggtcgtgccaaaaagggccgcggccacgtgcaacctgttcgctgtactaactgtgcccgatgcgtgcccaaggacaaggccattaagaaattcgtcattcgaaacatagtggaggccgtagcagtcagggacatttctgaagcaagcgtcttcgatgcctatgtgcttcccaagctgtatgtgaagctacattactgtgtgagttgtgcaattcacagcaaagtagtcaggaatcgatctcgtgaagcccgcaaggaccgaacacccccacccagatttagacctgcgggtgctgccccacgtcccccaccaaagcccatgtaaggagctgagttcttaaagactgaagacaggttattctctggagaaaaataaaatggaaattgtaaaaaa

SEQ ID NO: 47493 - DNA, 183 bp, Homo Sapiens
atgaaagcagaagccacagttattcccagccgttgtgctagggggctcccatcatggcaagtcctcagcccagtccagccctggcagacaagtgcaccccagaacacgacccagcccaagctcctggctccacaccagcacgagaagtcccagaagaagagcagccttcttaaggagctgggg

SEQ ID NO: 47494 - DNA, 1410 bp, Homo Sapiens
ttagattttaaaatggaaattatcaaggaaacaaagacagtttcacgctcaaataggaaaatgtccttgctcaaaagaactcttgtaaggaagccatcaatgagacccagaaacttgacagaagtcctcttaaatacacagcacttggagttcttcagggagttcctcaaggaacggaaggctaaaatcccattgcaatttctcacagctgtacagaagatcagtatagagaccaatgaaaagatttgcaagtctctcatagaaaatgtaatcaagactttcttccaaggccaactctctcctgaagaaatgctgcagtgtgatgcccctattatcaaagaaatcgcttccatgcgtcatgtcaccacaagcacactgttaacgctccagggacatgttatgaaatctatagaagaaaagtggtttaaagattatcaagacctgttcccacctcaccatcaggaggtggaagtgcaaagtgaagtacaaatttcgtctaggaagccctcaaagatagtgtcaacttacctacaggaatcccagaagaaaggctggatgagaatgatcagctttatcaggagtttttgcaagtaccgcagatttatgttgaatcctagtaagcgccaggaatttgaagactatcttcaccaggaaatgcaaaatagcaaggaaaatttcaccacagcacacaacacatcgggacgttcagctccaccctccacaaatgtccggagtgcagaccaagagaatggagaaataacccttgtaaagcgtcgtatatttggccacaggattatcactgtcaactttgcgatcaatgatctatatttcttttctgaaatggagaaatttaatgatctggtcagttcagcccacatgctgcaggtcaaccgggcatataatgagaatgatgtgatcctaatgcggtccaaaatgaacattatccaaaaactcttcctgaattctgacatccctccaaagctgagggtgaatgtccctgagttccagaaggatgccatccttgctgccatcacagagggctacctagatcggagcgtcttccatggggctatcatgtctgtcttccccgttgttatgtacttctggaaaaggttttgtttctggaaggcaacccgctcttacttacagtatagggggaagaagttcaaggacagaaaaagccctcctaaatctacggacaagtatcctttctcgagtggaggagacaatgccatcttaaggttcaccttgctcagaggtattgagtggttgcagcctcaacgggaagcaataagttcagttcaaaattcttcatcaagcaaacttactcagccaagactcgtggtatctgccatgcagctgcatcccgtccagggacaaaaattatcctacatcaaaaaagagaagtaa

SEQ ID NO: 47495 - DNA, 2487 bp, Homo Sapiens
ttctttgattgtttaaccttacaaaaatttagactagtaacttatttcacactgaaaagtgagttccaggaaggttagaggccacagagtataaaaggtaaaaccataaagcctctagatgctaacatagattgctaaaaacttcagggaaaggaaagatttcttaaaactaaacagtggaacaatggtatatttaactacattaaaactaaaactttaatttgtcaagacatcatttgagagcgaaaaggccggtcaaggacatgggtaagatgtttacaaatacacagttatcatttgctagcatttaaaatatataaagagttcctaaaaataaggaaggaaaagacagaaaaggctactgaaaattggacagaagcctgaagagcgacaccccagaagagctgacgtaatggccagaagtggtggaaagggctccaccttgcatgtcaccaggcaatgcatgacaaagcccaggccttccccgcagaggccaacgctgaccctcctgacagtggcaggactggaagcctcagtactctggggccctgcagtgaggacacgccctgcccagtcccatggggagaccctagcatatccttgaagggagctgtgtaagcattaggaacccagtccctgcactggaggagctcgtgcacggagggtttgtcacaactgccccgcctggaatagcccatggcactgcacagtggatggagaaactgtgattcttgtgctgggaggtggtggggcttctcccagctacatggccagtgccaagcttgggaaggttctgtttctcctactttcttgtctaggccctcctaccctagggtggtcttcctgacctgggcagtatctttgacctcgtgtgtccctccttgtccatccccagagcccaaggtggtgtttgccaaggagcagccagcacacagggaggtgcaggctgaggcgggggccagtgccacgctgagctgcgaggtggcccaggcccagacagaggtgacgtggtacaaggatgggaagaagctgagttccagctcgaaagtgcgcgtggaggccgtgggctgcacacggaggctggtggtgcagcaggcgggccaggcagaggccggggagtacagctgcgaggcagggggtcagcagctctccttccgcctgcaggtggcaggtcagtgctttggggatgctgagtgagccctgtttgtagctgctgctgtgactggagtagaaccactgctgacccagtgggctttccattagactccatccctcaacttctcccatcctctcacctcctatttttatgcctgtggtggagctgggctgcttagtggggaagggagtgaacggaagggtcagggccctccttgtccatgttgggtggtgtttctgtgcagacatgctgggtcacattttcccagtaccttctccaaactaccgatgtcccgaggtgtccaggactctggtcctatctaatgcatgagatggcggtaagccagacgtccctccctcggggatactcctgcagtccctgcacggcctcatctggccccatgtgagggctctccctgtggaaagagattttaattcgttgagtcagggtgtagggaaattccagccacacagtcttatttggaattatatcaacactgaacactgggttcccaaagttttcagtgttctgggacacacttctgtccttccctgtggatgtagaagccctgtcagagccctgactaaaacccagatccacagcgttagtgtgtgcaaaacgagtaaagagcagcacattggcaggtgcgcacacgtgacgttggaattccatttcggaagccaatctcactttccttttgcattctgttagaatgttctgtgtctgaattccccttggaatttggatagatttaaaagtgataggaataagtagctggtgtttctagcctccgcctccaggcgggtgaggaggtgacacctgagaattcctccctctcacccctgaccctgccggaaagcgaaactgagatgcgggcattgggccctgggaagcgtggggaaggggaaaggagaaagccaggtgggtttttaggtcccttccagtgccacactgtggggtgttgaggggccgcgcgaggcaggcccttccatgaggcctggactggaggccttctctaggcgccggcgtggcctgggccgcctgccgccacgcaggggccgcacgcctgggccccagggcccctttgccggcgggaggccggggggaccgactgctcttggcgcccggggtcaggggaggccgggaaacctcggctcccgggcgacaggcacccaggcccttctcagccccccggccgcggccgcgccgggcctcgcttcagccgggcgattcttcccctcatttgttgcattgtttgcattaatatgaatatcttgttctgtttgttttgtctcctgagagccaataaagctgtgttttttctttacacc

SEQ ID NO: 47496 - DNA, 1542 bp, Homo Sapiens
aaatacattaaaaggaacactaaggagaataaagattgtgagatgcccactttagagccaggaaatgtcatttcaattcttatttcttcggagtttttaaaaatggattcactagttgaacagtgtattcagtattgccacaaaaatatgaatgccatagtagctaccccatgcaacatgaactgtattaatgcaaatcttctcacacgtatagctgatctgttctcacacaatgaagttgatgatttaaaggacaaaaaagataaatttaaaagcaaacttttttgtaagaagattgaaagactgtttgatcctgagtacttgaatccagattctcggagtaatgcagcaacattgtatagatgctgtttgtgtaagaaacttttaacaaaagaaacagaaagaagaattccttgcattcctggaaaaatcaatgtggatcgacgtggaaatattgtctatattcacataagagataagacatgggatgttcatgagtatttgaatagtcttttcgaagaattaaaatcttggagagatgtatactggcgattgtggggaacaatcaattggctgacttgttcaagatgttatcaggcctttctctgtattgaattttcacattgtcaataccactcagaaacagtggtttatcctactgcagcaagttcattgaatactgttggcactggaatttatccctgctgtaaccaaaaggttcttcggtttgatcctactcagcttacaaagggctgtaaagtgagggaccacatggttacacttcgtgatcaaggtgaaggcggagatttgccgtcctgtcccactgctagaatgttggacgatttgcacaagtacagagatgtcattgttgtgcctttttcaaaagatacagttagtgatgttggggttggcctctgtgatgaaaagggtatagaatgtgatgttttactggagccaaatacaccatggggtcccaaaactggggagctcaatgctttcttgtcattgaaaaactggactctacaactgaaacaacagtcactgttttcagaagaagaagaatataccactggatctgaggtcactgaagatgaagttggagatgaagaagaagtatccaagaaacaaaggaaaaaggagaagccaaagaagttcactagacaaccaaaaaagcaggtatcttcaccctgtgcccagaggaaagaaaaggcattggagaagtcagcttctagagatgtgtctcctttcgttatgagtatgcagaagaataagtgggatgccacaagatccttgagattcaaccaggatgcacaaagagaagacgatcaacggcgaatgactgaaattacagggcacctaataaaaatgagattgggggatctggaccgagtcaagtcaaaggaagcaaaagaatttgcaggaggtatttattccaggctggaagcacaaatcaaggcctcagtgccagttagtgcacgccaaagcagctcagagaaaaacacaaggtctaaaagtcgttttggtcaagggcgtcctgcataa

SEQ ID NO: 47497 - DNA, 2597 bp, Homo Sapiens
gtcgggaagatggcgctacgtctgctgcggagggcggcgcgcggagctgcggcggcggcgctgctgaggctgaaagcgtctctagcagctgatatccccagacttggatatagttcctcatcccatcacaagtacatcccccggagggcagtgctttatgtacctggaaatgatgaaaagaaaataaagaagattccatccctgaatgtagattgtgcagtgctcgactgtgaggatggagtggctgcaaacaaaaagaatgaagctcgactgagaattgtaaaaactcttgaagacattgatctgggccctactgaaaaatgtgtgagagtcaactcagtttccagtggtctggcggaagaagacctagagacccttttgcaatcccgggtccttccttccagcctgatgctaccaaaggtggaaagtcctgaagaaatccagtggtttgcagacaaattttcattccacttaaaaggccgaaaacttgaacaaccaatgaatttaatcccttttgtggaaactgcaatgggtttgctcaattttaaggcagtgtgtgaagaaaccctgaaggtcgggcctcaagtaggtctctttctagatgcagtcgtttttggaggagaagactttcgagccagcataggtgcaacaagtagtaaagaaaccctggatattctctacgcccggcaaaagattgttgtcatagcgaaagcctttggtctccaagccatagatctggtgtacattgactttcgagatggagctgggctgcttagacagtcacgagaaggagccgccatgggcttcactggtaagcaggtgattcaccctaaccaaattgccgtggtccaggagcagttttctccttcccctgaaaaaattaagtgggctgaagaactgattgctgcctttaaagaacatcaacaattaggaaagggggcctttactttccaagggagtatgatcgacatgccattactgaagcaggcccagaacactgttacgcttgccacctccatcaaggaaaaatgatctgttaaatgaagctgtcatcagggaatgctgagctgcaatgaccattactgtagagttacaacaagagggtaaagttcatacatggcgacctgtgtcaaatccgtccattgatctgccctccagcacacatttactgagcttctgttacgtgcctgtggttcttggaaagagctttttccttctctacaaggaggaatctgatgcaactgacatcctcaatagctacagagaacttgcaaaggagtagagagaatgtttgaggtccagccttggtgtagagaagcggcagaaacagaaatcccaaaaggtgtcatgcttggctccagctctgtgctctcagaactcccttccctctgggcagaggcccatctgctctgtttacacacctggacctggtgtgaagggaggtttggaggagggtagctccctgaccatttgtggaatcgttcctgcttccaagcagcatgctacaggccagccttcaaagaaagaccagaagccaagtgtactctgtcatcacttaataatgcttgaagcttttcatataacaaaaggaatgaagcagccccgcctcgcagtgtggaagcctgatcattcttccatcagctctgcaccaaaaagcttttcctgagctttgaatattagatctgaccaatatgggtaaccaatgcccttaggtaaggtaaaataggaataaaatagctgtttgcaatgttatttcaccacacagtgtggtagggagggaactgatatgttgcaatgcaaagtaatctagtagtactgtttgtagaacagacaagtgtgtccaatttaaagaatatcaacatcatttttctatatcatactcttgtgaggttggatttaaccacagaggcagaaagttggtctactttgctcgttcctggcaactagcatggtgcctgcccctaatacattttcactgaatgaatgaatcagtgagttaatgaataaataaacaaatgggaggtgttctcctttatattgtgttagaggctgaggatatagaaatatgtaactcagagtcccattccacaagcccatgctagtgagccaacacaaacaaaaaacaactcaaattcaatgtgattaattcctaaaatcatagcactaacattcagtagtcatgtccagctcttcctttatgtcaggtacctagacatagcggaacagaaaacccttcaaaagttcagtctagtctggaaaacaaacatgaagcaaagaaggcacaacaccatatggaaaagcaagacagaaatatgtacagggcagagaggctgcactgtgtcatttaatcacgaagactctgttattagactgctcgaatacacaaagctgtgttaccttggacatgttacttcacctctctgggcttcagttgtctcattctgtaaaatggtgatattactggaactcatctcatagggttgttagtgagtgaatgtttgtaaaacaggatagtgcccagcacatactagtaacaaatgtaaaatacatgaaacaaataaatatttcctgtgtcctctgaactttaaactctcatc

SEQ ID NO: 47498 - DNA, 807 bp, Homo Sapiens
cggagcctgctgagggaccaagccttggccatgtccaccctggaggagctgcccacagaacttttccccccactgttcatggaggccttcagcaggagacgctgtgaggccctgaagctgatggtgcaggcctggcccttccgccgcctccctctgaggcctctgataaagatgccttgtctggaggccttccaagctgtgctcgatgggctggatgcactgcttacccaaggggttcatcccagctgtctgaagacctcgttaaaggtcctcacaataactaactgtgtgcttttggaatcagacttgaagcatctatcccagtgcccgagtatcagtcaactaaagaccctggacctgagtggcatcagactgaccaattacagtcttgtgcctctccaaattctcctagaaaaagttgcagccacccttgagtacctggatttagatgactgtggcatcatagactcccaagtcaacgccatcctgcctgccctgagccgctgctttgagctcaacaccttcagcttctgtggaaatcccatctccatggccaccctggagaacctgctgagccacacaatcatactcaaaaacttatgcgtggagctgtatcctgccccccgggagagttatgatgctgatggtactctctgctggagcagatttgctcaaattagggctgagctgatgaagagagtgagggacttaaggcaccccaagaggatcttgttctgtactgactgctgccctgactgtggcaacaggtcattttatgacctggaggcagatcaatgctgctgttga

SEQ ID NO: 47499 - DNA, 1535 bp, Homo Sapiens
gcgctttgcgacagagccgtaaaggcgcgcgggaacatggggctgtacgctgcggtggcaggcgtgctggccggcgtggagagccgccagggctctatcaaggggctggtgtactccagcaacttccagaacgtgaagcagctgtacgcgctggtgtgcgaaacgcagcgctactccgccgtgctggatgccgtgatctccagcgccggcctcctcagtgcgaagaagctgcagccgcacctggccaagggtgctagtgtatgagttgttgggaaagggctttcgagggggtgggggccaatggaaggctctgttgggacggcaccaggcgaggtgttgagttggctcggctcaaggttcttcggggtgtgagctggcatgaggacctgttggaagtgggatccaggcctggtccagcctcccagctgcctcgatttgtgcgtgtgaacactctcaagacctgctccgtttatgtagttatttcaagagacaaggtttctcctatcagggtcgggcttccagcctcgatgacttacgagccctcaaggggaagcattttctcctggaccccttgatgccggagctgctggtgtttcccgcccagacagatctgcatgaacacccactgtaccgggccggacacctcattctgcaggacagggccagctgtctcccagccatgctgctggacccccgccaggctcccatgtcatggatgcctgtgccaccccaggcaataaagaccagtcacttggctgctcttctgaagaaccaagggaagatctttgcctttgacctggatgccaggcggctggcatccatggccacgctgctggcctgggctggcgtctcctgctgtgagctggctgaggaggacttcctggcggtctcccccttagatccgcgctatcgtgaggtccactatgtcctgctggatccttcctgcagtggctcgggtatgccgagcagacagctggaggagcccggggcagggacacctagcccgcggctcgtctactccatgtgctccctctgccaggaggagaatgaagacatggtacaagatgcgctgcagcagaacccgggcgccttcaggctagctcccgccctgcctgcccggccccaccgaggcctgagcacgttcccgggtgccgagcactgcctccgggcttcccccaagaccacgcttagcggtggcttcttcgttgctgtaattgaacgggtcgagatgccgacctcagcctcacaggccaaagcatcagcaccagaacgcacacccagcccagccccaaagagaaagaagagagcaaaaagctgcagccggtgcttgcacaccgccttgcacatagcagaggctccgggctcactccttcctggtgggaaaggaagatgcctgtcctctccgtggaagaccctgggccctcaccgcaggcagcagtttgcgttttgaaaggttattgggtcccttcctcgggctgtgttcttgctggtgagcaaaagtgttgcctgcagaaataaaatgcagaacgtactct

SEQ ID NO: 47500 - DNA, 411 bp, Homo Sapiens
ggccccgcccccgtcatggcgcccgaggagaacgcggggagcgaactcttgctgcagagtttcaagcgccgcttcctggcagcgcgcgccctgcgctccttccgctggcagagcttagaagcaaagttaagagactcatcagattctgagctgctgcgggatattttgcagaagacgtgctgtattgcccagaagccatcgtgtcgctggtcggggtcctgcggaggctggctgcctgccgggagcaccagcgggctcctcaattctacatggcccttaccgtctgcaacccagagatgtgccagctgttcaccaccgagctatgctggactgggatcagatgggaagcggaagctcatcatgaccagaaactgtttccctacagagagcacttggagatggcaaagctga

SEQ ID NO: 47501 - DNA, 408 bp, Homo Sapiens
atggtccagacttggatagacccaggaggttttgctcatttctacagagtaagtaaagcagagatagcagccaggtgtgccatgaacaggcctggccctaaagtatgtatcctggggaacaccaatgaaagcctgacccacagttcccatcccaccctgggttctgtgcccctgcacaagcatcctgcaaatgtgggcgggaacatcggtgcaaacatctctactcagtgcacacccttgaaaacagctgcccctttggcccagtgtgcacactggcctagatatggagagaggaccaggcaggcctgggcaggaggcttttggctgtttgggaaggaaacaaggggtcctgggagcccagagattacaagtgggaagatggactctgtgcatcatagcttttcactc

SEQ ID NO: 47502 - DNA, 369 bp, Homo Sapiens
gccgcggcggcctgtggcgccttcgccttcctgggctattgtatttacctcaaccggaagcggcgcggggaccccgcgttcaagcgccgcctgcgggacaaacttttcttgcaagaggtacggatgggagaactttggttatctagaggtaagaatgtaaatgttcttttaatgtctgttttaaagaacttcaaaattttgctcaaaacttgtcattctgtttcaggagagcacagaatggggattcaacacctcggcaatgcccttttagtgtgcgagcaaccacgggaacttctgaaagttttcaaacacactctccctcccaaggtatttgagatgctgttgcacaaaattccccttatttgccag

SEQ ID NO: 47503 - DNA, 1120 bp, Homo Sapiens
tttaggaaattgaaaaatggacctttgaaaatgctagatttacaatgagaaatgccataattcaaggtttattctatgggtccttgacatttgggatctggacagctctgttattcatatatttgcaccataatcatgtgagcagctggcagaagaaaagccaggagcctctgtcagcttggtcccctggaaaaaaagtgcatcagcaaattatctatggctcagagcaaataccaaaacctcatgtaatagtcaaaaggactgatgaagataaagcaaagtctatgttaggtacagattttaaccatacaaacccagaacttcataaagaacttttaaaatatggatttaatgtgattatcagtagaagcttgggcatcgaaagagaagtgccagataccaggagggatgttctggtgttcctggacagccactgtgaggtgaacagagtatggctggagcccctgctgcatgccattgccaaggaccccaaaatggtggtgtgccccctgatagatgtcattgatgatagaactctggagtataagccctctcctcttgtaaggggaacttttgattggaacctacaatttaaatgggataatgttttctcttatgagatggatggaccagaaggatctactaaaccaatccggtcacctgcaatgtctggaggaatttttgctatacgtcggcattattttaatgaaattggacagtatgacaaggatatggatttttggggaagagaaaatttggaactttcactaaggatctggatgtgtggaggccaactctttataatcccctgctctcgagtaggacatatcagtaagaaacaaactggaaaaccttctacaatcatcagtgctatgacacataactacctaagactggtgcacgtttggctggatgaatataaggagcagttttttcttcgaaagcctggtctgaaatatgtcacctacggaaatattcgcgagcgtgttgagttaaggaaacgactgggttgcaagtcatttcagtggtatttggataatgtcttcccagagttggaggcatctgtgaacagcctgtgaaaggaaaacaaatcactttcattaataaagggttaaaagtc

SEQ ID NO: 47504 - DNA, 1564 bp, Homo Sapiens
cccctgcctctgaggatgagtcactgcagcagccgcgccctgaccctgctgagcagcgtgtttggtgcgtgtggcctgctcctggtaggcatcgcggtcagcactgactactggctgtacatggaagaaggcacagtgctaccgcagaaccagaccaccgaggtcaagatggccctgcacgccggcctctggcgagtctgcttctttgcaggtcgggagaaaggtcgctgtgtggcctcagaatattttcttgaaccggagatcaatttggtgacggaaaacacggagaatattctgaagacagtgcgcacggccacccccttccccatggtcagcctcttcctcgtgttcacggccttcgtcatcagcaacatcggccacatccgcccgcagaggaccattctggcttttgtctctggcatcttcttcatactatcgggcctctccttggtggtgggcttggttctttacatctccagcatcaacgacgaggtcatgaacaggcccagcagctctgagcagtattttcattatcgctacgggtggtcttttgccttcgccgcttcctccttcctactcaaagagggggccggcgtgatgtccgtgtacctgttcaccaagcgctacgcggaggaggagatgtaccgtccacacccggccttctaccgcccgcgtctcagcgactgctccgactactcgggccagttcctgcagcccgaggcgtggcgccgcggccggagcccctccgacatctccagcgacgtgtccatccaaatgacgcagaactaccctcccgccatcaagtacccggaccacctgcacatctccacctcgccctgctgaggcccgcccctcggagctccccctgcctcctcctcctcctcgtcttaggggggtctccctgcaatgcagcgcccccttccgtcctcgggactcctcgctcccacccggaggaggctgcgccagctttaggccccgccctcctcccaatggctccgcccacagactcccttatttcaatggccgcgccctcttttcccgacctctccttttcattggtccctctcactcccaaatgactcctccccttcgttggcccgcccctttcctctggcccctcctctccaagaaaattagctcctccctcgttctccacctgctctgagctgggagcagccagaggcggtgcaagcgcccagctccccagagctccccaacctcggacctcaccgcaggggcgctgggctggagagcaggttcgggcagccgtcgggaataccgaccatcctcttctcccttctaacctgggcttcctttttccctgcctaatctcacctcctgacctgctgggtcctccggtgcagtgggagggccggcttgctccacccgcagccccggggtggcgtagggaagggggctggaagccacgggtacggttaacctggcccttccctccccatctcccctacttccctggaaggtcccattctttctcaccggctgggctcttttctgcttcctgaaggttacctgccttttagggggctcttgtctaaaggatctt

SEQ ID NO: 47505 - DNA, 923 bp, Homo Sapiens
ggtatgggggtgtgcgctgttccgcataaccactgcctcccatgtcctcctcgagggccgaaccgagagggtgctggcagggctggatcccacgggtgtccgcaggagacaaaggcgaattccggagaaaaggctggggctgagaaaggcgctccgggagcggctggcagggcaattcggcaggctgcaccgaagccgagtgcccggagggacttgccgcccggaagggggaggtccaacagccgagcttagcccaccgggctctgggaaagacccgactgaggctaaagccgccccggaaggccaagtccgagttccatttcttgaagaggccggcgcgcgtaaggctgtgacattggccctggcgactggcttcccaggagctgttctttctcaggagctccacagcgcgggccatctccagaaaactgtcttcagagtgtatttccttttatcgtcaacccagagccccaccgcggctaatgcaagaggccaaaaaatgtttggaggaagaaaaacaaaggcaggaagtggcggcggcctgacggtgcgtgtgtgtctgcagagaagggagggagccggctcagtctcttcttgtttttccaaacttcaaggtccaggcagccctctgcagggccgggccccattgctccccgcgcggcattggaggtggccgcccggagaggagaaggccaacgcctgcgccaggcttgtcaggcggaaacggctaacaaggagatttggtcagcaaaacagacccagcctttccgaggcttcgtctgacttggcccgaaaggttggggagggggggcttgcgcagagcctcagggaccctcctctctggggactaccatccctgagccttacgcttctttccacagcctttgcaggcggaatatcggaataaagtgggtccaggcgcc

SEQ ID NO: 47506 - DNA, 1116 bp, Homo Sapiens
atgaattctggaatcttgcaagaattccagatggaactcacctgccccatctgcatgaaatacttcatagacccggtcaccgtagactgtgggcacagcttttgcaggccctgtttctacttcaagtggcaagacatcccaatttttactcagtgctttgaatgcatgaagacaacatggcagagaaacctcaaaactaacattcatttgaagaagatggcttcccttgccagaaaagtcagtctctggctattcctgagctctgaggagcaaatgtgtggcactcacagggagacaaagaagatgttctgtgaagtggacaagagtctgctctgtctgctgtgctccagctctcaggagcaccggtatcacagacaccgtcccgttgagtgggctgctgaggaacaccgggagaagcttttaaataaaatgcagtctttatgggaaaaagcttgtgaaaatcagagaaacctgaacatggaaaccgccagaatcagccactggaaggtttttccttgcaggagtgagtccgtgctgttgcacatgccccagcctctgaatctagagctcagtgcagggcccatcactggactgagggacaggctcaattctgaggtaatggatattactctgaataatgatgagccaacagtcgtatctttttgtggagatttgagaagcatgtgtattggatgtgaccgtcaaaatccaccccatatcactgcaacacctacaagttttcttgcatggggtgctcagactttcacctccagcaaatattactgggatgtccatgtgggggacacttggaattgggcttttggtgtctgtaataagtattggaaagggaagaatcagaatggcaatatatatggagaggagggactctttagtcttggatgtgtcaagaatgacattcagtgcagtccctttaccacctccccacttacactgcaatatatcccaagacctaccagcctcataggattattcctggattgtgaagctagaactgtgagcttcgttgatgttaatcaaagctgccttatatacacgatccctaattgctccttctcgcctcctgtcaggcctatctttcggtgtgttcacctctga

SEQ ID NO: 47507 - DNA, 437 bp, Homo Sapiens
tgtccctcttgtggtaaatgtgatttggaaaaccaaagagacatgatggtggagaataaggagagttgtcagaaaggtttccctgcagataaacttttaaagatctcaacctgtggacgggaaatttggggttggagcccccacacagagtccccactggcacagtggctcatgcctgtaatcccaacacttctagaggctgaggcgggtgtattgcttgagcccagaagtttgagagcagcctgggcaacatggtgaaaccctgtctctacaaaaaatttaaaaaattagccaggcatgagggtacacacctgtagtcccagctactcagggggctgaggcgggaggattgcttgagcctgggaagtggaggctgcagtgagcctaggtggtgccactgcactccaacctgggggacagaggagacgctgtctcaa

SEQ ID NO: 47508 - DNA, 303 bp, Homo Sapiens
ccgcacagtccctactacattcacgtccagcacagaggccacggcgtcctcccccagcgcctccagcggccccagcaggcccaggcctgcgttacacactgcggagacaagaggcccgaccagcccgcctcagcatcaccctcagcacggcctgtcccctcgtgctccctgggcctgggaacatgttggtttcaacgcagggcggagaaggctcctaggagcccatatgcttccaggaggctcacccagcacgtccacgcggccctcagtcacgcgttcccgggcagcggccacggattttga

SEQ ID NO: 47509 - DNA, 723 bp, Homo Sapiens
atggcggcccccttggaactcagttgctggggaggcggctggggactcccatcggttcacagcgagtccctggtggtgatggcttatgccaaattttctggtgcacccttgaaagtcaatgtgatagataacacctggagaggttcaagaggcgatgtaccaattttgacaactgaagacgacatggtttctcagccagcaaaaatactaaactttttaagaaaacagaaatataatgctgattatgaactctcagcaaaacaaggggcagatacattggcttatattgctctcctcgaagagaagcttctccctgcagtgcttcacacattctgggttgagagtgacaattactttactgtgacaaagccatggtttgcttcacaaattccttttcctttgagtttgatcctgcctggaagaatgtctaagggagcactgaataggattctcctgaccagaggacagcctcccctctaccacctccgagaagtggaagcacagatatacagagatgccaaggagtgcctaaatcttctatcaaacagattgggaacatctcagtttttctttggagatacgccttctaccttggatgcctatgtttttggttttcttgcacctctttacaaagtacggtttcctaaagttcagctacaagaacatctgaaacagctctccaacctctgtcgcttttgtgatgacatcctgagcagttatttt

SEQ ID NO: 47510 - DNA, 408 bp, Homo Sapiens
atgcagcaggggcagctggcacctgggtctaggctttgctcagggccctggggcctccccgagctccaacccgctgcgccctcctcatcagccgctcagctgccctggggcgagagctggggggaagaagcagacactcctgcatgtctttctgcttctggggtgtggttccagaaccgcaggaccaagtggcggaagaagagcgccctggagccctcgtcctccacgccccgggccccgggcggcgcgggtgcaggcgcaggcggggaccgcgcaccctcggagaacgaggacgacgagtacaacaagccgctggaccccgactcggacgacgagaagatccgcctgctgctgcgcaagcaccgcgccgccttctcggtgctcagcctgggagcgcacagcgtctga

SEQ ID NO: 47511 - DNA, 864 bp, Homo Sapiens
atgacactattaaaaattgcccttttttcccaagctggtattggactcacagccaacaccttcctccttttcttctgtatctgcacactccctctggactgcaggcctaagcccactgacctcatcacctgtcacctggcccttgtccacttagtgatgctcctcactgtgagcttcttggcatctctggacctctttgagtcacagtattttcagaatgacttcaagtgtaaggtattcttctacatgcatagagggatggggctctccatctgcaccacctgcctccggagtgtgctccaggctgtcaccattacccccggcacctcctggtttaaacataaatcttcaaattacattatccatgttttcttcttcttatggttcctcaacttgtctttcagtagtaacaggatcttctacactgtagctgcttccagtgtgagccagacaaatgtactgaatataggtaagtactgctcagttttctccatgagcttcatcctcagggccacgtttcttattctgacaacacttagggatgctttcctggtaggaatactgctgttcttaattgcatacatggtgactctcttattcaggcctcagagcaatggtccttccccaggagcttcccctgagaaacgggccatccagaccatactgctgctggtaagtttctctgtggtcctctgttgggtggatttcatcatctccttctcctcagcaatgttgtgggcatatggcccaatcaaccagcaagttcagagtcttgtagtcaatgtctatgccgtgatcagtcctctggtgctcctcacttcagataaaagaagaaccaatattctgaaaaatacacaacagaag

SEQ ID NO: 47512 - DNA, 1377 bp, Homo Sapiens
atgagcctccaggccccatccagactgctggagctggcagggcagagcctgctgaggaaccagttcttgaccatcttcaccctggatgagctgcccagggaggtcttccctctgatgttcatggaggccttcagcatgagacgttttgaggccctgaagctgatggtgcaggcctggcccttcctcagcctccctctgggatccctgatgaagacacttcatctggagaccttgcaagctgtcctgaggggacttgatacactggtggcccagaaggttcgccccaggaggtggaaacttcaagtgctggatttgcgggatgttgatgagaatttctggaccatatggtctggagccagggtcctctcctgctccccagaggccatgagtaagaggcagacagtggaggactgtccaaggatgggagagcaccagcccttgaaggtgttcatagacctctgcctaaaggaaagtacactggatgaatgcctgagctacctttttgggtggatccactacagaagaggcctagtgcacctgtgttgtagtaaggtgcagaattactcaatgcccacttcaagtttcagaaatctattggaaaggatatacccagacagtatccaggagttggaagtctggaaaaagtgctctctcaataaaacgggaaagtttgccccttacctgagccagatgagcaatcttcgtgaactctttttagccttcggttatgagcgtgagttgtacgtgagcgtccagtggccgtgcattcctgacttggactctccattcctctgcctgtactacccccagatgctttatataaaaaagatcagtaatatcaaagagcacctggagcacctgctcaggtacctcaagaaccccttgggggcctttatattcagtgatgcttacctaactgatcgggacatggagtgtctgtctcagtacccaagcctcagtcagctaaaggagctgcgtctgattcatatcctaatgtggaccacccatcttgagccccttggagttctgctggagaaagttgctgctactctcaagaccctcgtcttaaaggactgtcggatccaggacccccaactcagggtcctcctgcctgccctgagccactgttcccagctcaccaccttcaactttcatggaaatgagacctccatgaatgctctgaaagacctgctgcgtcacacaggcgggctgagcaagttaggcctggagttgtatcctgcccctctggagagtcttgactacaagggtcatgtcaattgggagatcctcaccccaattcgggctgagctgatgcgtacactcagggaagtcaggcagcccaagaggatcttctttggtcccgtcccttgccctaac

SEQ ID NO: 47513 - DNA, 1361 bp, Homo Sapiens
gcaggtggattcttgggcatttgctattaacttccttccaaaatgtcaccattcctgtatctggttctcttggtacttgggcttcatgctacaatccactgtgcatcacctgaaggcaaagtaacagcctgccattcatcccaaccaaatgccactctctacaagatgtcatccattaatgctgactttgcattcaatctgtaccggaggttcactgtggagaccccagataagaacatcttcttttcccctgtgagcatttctgcagctttggttatgctttcctttggggcctgctgcagcacccaaactgagattgtggagaccttggggttcaacctcacagacactccaatggtagagatccagcatggcttccagcatctgatctgttcactgaattttccaaagaaggaactggaattgcagataggaaatgccctcttcattggcaagcatctgaaaccactggcaaagttcttgaatgatgtcaagaccctctatgagactgaagtcttttctaccgacttctccaacatttctgcagccaagcaggagattaacagtcatgtggagatgcaaaccaaagggaaagttgtgggtctaattcaagacctcaagccaaacaccatcatggtcttagtgaactatattcactttaaagcccagtgggcaaatccttttgatccatccaagacagaagacagttccagcttcttaatagacaagaccaccactgttcaagtgcccatgatgcaccagatggaacaatactatcacctagtggatatggaattgaactgcacagttctgcaaatggactacagcaagaatgctctggcactctttgttcttcccaaggagggacagatggagtcagtggaagctgccatgtcatctaaaacactgaagaagtggaaccgcttactacagaagggatgggttgacttgtttgttccaaagttttccatttctgccacatatgaccttggagccacacttttgaagatgggcattcagcatgcctattctgaaaatgctgatttttctggactcacagaggacaatggtctgaaactttccaatgctgcccataaggctgtgctgcacattggtgaaaagggaactgaagctgcagctgtccctgaagttgaactttcggatcagcctgaaaacactttcctacaccctattatccaaattgatagatctttcatgttgttgattttggagagaagcacaaggagtattctctttctagggaaagttgtgaacccaacggaagcgtagttgggaaaaaggccattggctaattgcacgtgtgtattgcaatgggaaataaataaataatatagcctggt

SEQ ID NO: 47514 - DNA, 957 bp, Homo Sapiens
atggcagcgccaccttctccaggaaggacggccgaccaagcagaccaggtatgcaccttcctcttcaaaaagcctggacggaaaggggctgcaggcctcagaaagcgcccggcctgcgaccccgagcacggagagagcagcagcagcggggacgagggcgacacagtggctcagcccccgcgggtggcaccgaggccccggggcctccacagctggcagaaggcggctcacggcgacaggaggggcgaggaggcggcgcctgagagcctcgacgtggtgtacaggtccacccgctcggcgaagcctgtggggccagaggacatgggggccaccgctgacttcgagcaggacaccgagaaggagcaccatacgccgaccatcctcaagtgcagccagcgggtccaggaggcactgcggggtcgggagcacgaccacatctaccggggaatccacagctacctgaggtacctgaagcccaaggacacgtccatgggcaactcctcctcggggatggcgaggaagggccccatacgtgcgccagggcatctgcgcgccactgtgcgctgggattaccagcctgacatctgcaaggactacaaggagactggcttctgtggcttcggggacagctgcaaattcctccacgaccgttccgattacaagctcgggtgggagattgaacgggagcttgaagagggtcgctactgtatctgcgaggacgaaaaccatgaagtgggaagcgaggaagaggaaataccattcaggtgtttcatatgtcgccaggccttccaaaacccagtcgtcaccaagtgcaggcattatttctgcgagagctgcgcgctggagcacttccgggccaccccgcgctgctacatctgtgaccagccaaccggcggcatctttaaccccgccaaagaactgatggcgaaactgcaaaagcttcaggctgcagaaggt

SEQ ID NO: 47515 - DNA, 132 bp, Homo Sapiens
atgttaaccaatgtatttatttctgtggttctgtttccttgttccaatttgacaaaacccactgttcttgtattgtattgcccagggggagctatcactgtacttgtagagtggtgctgctttaattcataa

SEQ ID NO: 47516 - DNA, 618 bp, Homo Sapiens
atggcggcagcggctgggggcgcggcgagccgccggggtgccgggcggccctgccccttctccatcgagcacatcctctccagcctgcccgagcggagcctcccggcccgggccgcctgcccaccgcagcccgccggtcgccagagccccgcgaagccagaggagcccggggcgcccgaggctgcgccctgcgcctgctgctgctgctgcggcccccgcgcggcgccctgcgggcccccagaggcggccgccgggctgggcgctcgtctggcgtggccgctgaggctgggaccggcggtgcccttgtctctgggtgcgccagccggaggttccggggcgctcccgggcgcggtcggcccgggttcgcagcggcgcacgaggcgccaccgcaccatcttcagcgaagagcagctgcaggcgctcgaggcgcttttcgtgcagaaccagtatcctgacgtgagtacgcgcgagcgcctggccggccgcatccgccttcgcgaggagcgcgtggaggtctggttcaagaaccgccgggccaaatggcgacaccagaagcgcgcgtcggcttccgcgaggctcctgcccggcgtcaagaagtccccgaaggggagctgctga

SEQ ID NO: 47517 - DNA, 1131 bp, Homo Sapiens
atgttaccggctgttggatctgtggatgaggaagaggatcctgcggaggaggattgtcctgaattggttcccattgagacgacgcaaagcgaggaggaggaaaagtctggcctcggcgccaagatcccagtcacaattatcaccgggtatttaggtgctgggaagacaacacttctgaactatattttgacagagcaacatagtaaaagagtagcggtcattttaaatgaatctggggaaggaagtgcgctggagaaatccttagctgtcagccaaggtggagagctctatgaagagtggctggaacttagaaacggttgcctctgctgttcagtgaaggacaatggccttagagctattgagaatttgatgcaaaagaaggggaaatttgatgacatactgttagagaccactggattagcagaccctggtgcagtgacttctatgttttgggttgatgctgaattagggagtgatatttaccttgatggtatcataactattgtggattcaaaatatggattaaaacatttaacagaagagaaacctgatggccttatcaatgaagctactaggcaagttgctttggcagatatcattctcattaataaaacagacttggttccagaagaagatgtaaagaaattaagaacgacaattagatccataaatggactaggacaaatcttagaaacacaaagatcaagtttgcagaaaaaacttcagcatgtgccaggaacacaacctcaccttgatcagagtattgttacaatcacatttgaagtaccaggaaatgcaaaggaagaacatcttaatatgtttattcagaatctcctgtgggaaaagaatgtgagaaacaaggacaatcactgcatggaggtcataaggctgaagggattggtgtcaatcaaagacaaatcacaacaagtgattgtccagggtgtccatgagctctatgatctggaggagactccagtgagctggaaggatgacactgagagaacaaatcgattggtcctcattggcagaaatttagataaggatatccttaaacagctgtttatagctactgtgacagaaacagaaaagcagtggacaacacatttcaaagaagatcaagtttgtacataa

SEQ ID NO: 47518 - DNA, 2391 bp, Homo Sapiens
ggggttgggaagatggcggctcccagcctcctcaactggaggcgagtttcttccttcacggggccggtcccccgcgcccggcacggacaccgagcggtggccatccgggagctgatgatcatctttggagggggaaatgagggcatcgcggatgagctgcacgtctacaacacggctacgaatcagtggtttctgccagctgttagaggagatatccctccaggctgtgctgcccatggatttgtctgtgatggtaccagaatattagtatttgggggaatggttgaatatggaagatacagcaatgagttatatgagttacaagcaagtcgttggttatggaaaaaagtgaaaccccatccccctccttctggtttacctccttgtcctcggcttggacatagcttctctttatatggtaacaaatgctatttgtttggtggcctggcaaacgaaagcgaagattcaaacaataatgttcccagatatttaaatgatttttatgagttggagctacagcatggctctggtgttgtgggttggagcattccagtgactaaaggggttgtgccttctccaagagaatcccacacagctgttatatattgcaaaaaagattctggaagtcctaaaatgtatgtttttggtggaatgtgtggtgctcgcctggatgacctatggcagcttgacttagaaactatgtcatggtcaaaaccagaaactaaagggacagtgccacttccacgaagccttcatacagccagtgttataggaaacaagatgtacatttttggtggatgggtcccacataagggggaaaatactgagacttcacctcatgattgtgaatggagatgtaccagttcattttcttacctaaatctggatacaacagagtggaccaccctagtatcagattctcaggaagataaaaaaaattcaagaccaagaccaagagctggccactgtgctgttgcaatcggcactcgattgtatttttggagtggaagagatggctacaaaaaagcactgaatagtcaagtttgctgcaaggatctttggtatcttgatactgagaaaccaccggcaccatctcaagtacagctgatcaaagccactaccaactcctttcatgtcaagtgggatgaagtgtctacagttgagggctatcttttgcagttgagtacagacttgccataccaagctgcatcatcagattcttcagcagcaccaaatatgcaaggagtcaggatggaccctcacagacaaggcagtaataacatcgttcctaacagtatcaatgatacaataaacagcacaaaaactgaacagccagccacaaaagaaacttcaatgaaaaacaaaccagactttaaagcactgacggattctaatgccattttatatccatctttggcatcaaatgcttctaatcataatagtcatgtggtggatatgctaaggaaaaatgaaggtcctcacacttcagcaaatgtaggtgttctaagtagttgcctggatgtaagaacagtaattcctgaaacatctgtatccagtactgtttccagcacacaaactatggtaacccagcagaccattaaaactgaatcatccagtacaaatggggcagttgttaaagatgaaacttcactaacaacattcagtaccaaatctgaagttgatgaaacatatgcactgcctgcaacgaagatcagccgtgtagagacacatgctacagcaacgccgttttctaaagagactccttcaaatccagtggccacagtgaaagcgggagaacgacaatggtgtgatgtgggaatttttaaaaataatacagctttggtgagccagttttatttgctgccaaaagggaagcaaagcatctcaaaggtaggaaatgcagatgtacctgactacagcttgcttaagaaacaagatcttgttccaggcacaggatacagattcagggttgctgcaatcaatggttgtgggataggtcctttcagcaaaatcagtgaatttaaaacttgtattcctggttttcctggagctccttctgcagtcagaatttcaaagaatgttgaaggtatccacctttcctgggaacctccaacctcaccttctggaaatattttggaatattcagcctacttggctatccgcacagcacagatacaagataatccaagtcaacttgtgttcatgaggatttattgtggtcttaagacatcatgtatagtaactgctgggcaacttgcaaatgcacatattgattatacatccaggcctgccattgtgttcaggatatcagcaaagaatgaaaagggatatggaccagctacacaagttcggtggcttcaaggtaacaataagaaagcacctttaaattga

SEQ ID NO: 47519 - DNA, 918 bp, Homo Sapiens
atggtgactgaattcatttttctgggtctctctgattctcaggaactccagaccttcctatttatgttgttttttgtattctatggaggaatcgtgtttggaaaccttcttattgtcataacagtggtatctgactcccaccttcactctcccatgtacttcctgctagccaacctctcactcattgatctgtctctgtcttcagtcacagcccccaagatgattactgactttttcagccagcgcaaagtcatctctttcaagggctgccttgttcagatatttctccttcacttctttggtgggagtgagatggtgatcctcatagccatgggctttgacagatatatagcaatatgcaagcccctacactacactacaattatgtgtggcaacgcatgtgtcggcattatggctgtcacatggggaattggctttctccattcggtgagccagttggcgtttgccgtgcacttactcttctgtggtcccaatgaggtcgatagtttttattgtgaccttcctagggtaatcaaacttgcctgtacagatacctacaggctagatattatggtcattgctaacagtggtgtgctcactgtgtgttcttttgttcttctaatcatctcatacactatcatcctaatgaccatccagcatcgccctttagataagtcgtccaaagctctgtccactttgactgctcacattacagtagttcttttgttctttggaccatgtgtctttatttatgcctggccattccccatcaagtcattagataaattccttgctgtattttattctgtgatcacccctctcttgaacccaattatatacacactgaggaacaaagacatgaagacggcaataagacagctgagaaaatgggatgcacattctagtgtaaagttttag

SEQ ID NO: 47520 - DNA, 839 bp, Homo Sapiens
atgatctgcctggtgctgaccatcttcgctaacctcttccccgcggcctgcaccggcgcacacgaacgcaccttcctggccgtgaagccggacggcgtgcagcggcggctggtgggcgagattgtgcggcgcttcgagaggaagggcttcaagttggtggcgctgaagctggtgcaggcctccgaggagctgctgcgtgagcactacgccgagctgcgtgaacgcccgttctacggccgccttgtcaagtatatggcctccgggccggtggtggccatggtatggcaggggctggacgtggtgcgcacctcgcgggcgctcatcggagccacgaacccggccgacgccccgcccggcaccatccgcggggatttctgcatcgaggttggcaagaacctgattcacggcagcgactcggtggagagtgcccgccgcgagatcgctctctggttccgcgcagacgagctcctctgctgggaggacagcgctgggcactggctgtatgagtagcccggcagatgcgcgtcacagaggctctcacactccagcctcctccagggcccaggtgggcgggcttctggccccaccccacagcgcttggagcatccctttggacgggctgctgaacatccacctgtctggacgttgcatggagggtggcgcaggcctctccaatccctggcgtacagggtttcctgcccgaggagctgctccaggagcctgcgcggctcgcctggaaacgtgccaggacactgtcctggtgcccagcccaacgtggtccaacgtttttttataataaagtcctcgttttcgtttcgatttgggcccaggaacaggca

SEQ ID NO: 47521 - DNA, 1524 bp, Homo Sapiens
caccagcccagacagctgcaagtcaccatggacgctgaaggcctggcgctgctgctgccgcccgtcaccctggcagccctggtggacagctggctccgagaggactgcccagggctcaactacgcagccttggtcagcggggcaggcccctcgcaggcggcgctgtgggccaaatcccctggggtactggcagggcagcctttcttcgatgccatatttacccaactcaactgccaagtctcctggttcctccccgagggatcgaagctggtgccggtggccagagtggccgaggtccggggccctgcccactgcctgctgctgggggaacgggtggccctcaacacgctggcccgctgcagtggcattgccagtgctgccgccgctgcagtggaggccgccaggggggccggctggactgggcacgtggcaggcacgaggaagaccacgccaggcttccggctggtggagaagtatgggctcctggtgggcggggccgcctcgcaccgctacgacctgggagggctggtgatggtgaaggataaccatgtggtggccgccggtggcgtggagaaggcggtgcgggcggccagacaggcggctgacttcactctgaaggtggaagtggaatgcagcagcctgcaggaggccgtgcaggcagctgaggctggtgccgaccttgtcctgctggacaacttcaagccagaggagctgcaccccacggccaccgtgctgaaggcccagttcccgagtgtggctgtggaagccagtgggggcatcaccctggacaacctcccccagttctgcgggccgcacatagacgtcatctccatggggatgctgacccaggcggccccagcccttgatttctccctcaagctgtttgccaaagaggtggctccagtgcccaaaatccactagtcctaaaccggaagaggatgacaccggccatgggttaacgtggctcctcaggaccctctgggtcacacatctttagggtcagtggccaatggggcacatttggcactagcttgagcccaactctggctctgccacctgctgctcctgtgacctgtcagggctgacttcacctctgctcatctcagtttcctaatctgtaaaatgggtctaataaaggatcaaccacatggggttctgcggtgataatgagcacatagtgaggggtcagcaaatgtcagaagttacctgggacagccgggcacgatggctcacacctgtaatcccagcactttgggaggctgaggcgggaagatcacttgagttcaggagtttgagaccagcctggccaacatggtgaaaccccatctctaccaaaaatagaagaattagctgggtgtggtggcacgcgcctgtaatcccagctacttaggaggctgaggcaggagaatcgcttgaacccaggaagtggaggttgcagtgagctgatggtgccactgcactccagcctgggtgatagagcgagactctgtctccaaagaagaaacaaaggaaagaaagagagaa

SEQ ID NO: 47522 - DNA, 1083 bp, Homo Sapiens
tttgcttccttcatagagaaggtacggttcctggagcagcagaacaagttggagaccaagtggagcctcctgcagcagcagcagatggcttggagcaacatggacatgttcgagagctacatcaataaccttaggtggcagctggagactctgggccaggagaagctgaagctggaggcagagtttggcaacatgaaggggctggtggagaacttcaagaacaagtatgaggatgagatcaataagcgtacagaggtggggaatgaatttgtcctcatcaagaaggatgtggatgaagcttacatgaacaaggtagagctggagtcttgcctggaagtcctgactgacgagatcaacttcttcagtcagctatatgaagaggacatccaggagctgcagtcccagatatcggacacgtttgtggtgctgtccatggacaacagccgcaccctggacatggacagcatcatcactgaggtcagggcgcagtatgaggagatcgccaactgcagccaggctgaggagaccatgtaccagatcaagtatgaggagctgcaggcgctggctgggaagcacgggggtgacctgtggcgttcgaagacaatctctgagatgaacgggaacatcagccggctccaggctgagattgagggcctcaaaggccagagggcttccctggaggccaccctcgcagatgccgagcagtgtggggagctggccgttaaggatgccaacgccaagctgtccaagctgggaggctgccccacagccggccaagcgggacatggcacggcagctgcgtatcaggggctgataaacttcaagctggccctggacgtcgagatagccacctacaggaagctgctggagggtgaggagagccggctggagtctgggatgcgtaacatgagtatccattcgaagaccaccagtggctatgtaagtggtctgagctcggccggggggcctacaagctactgcctgagctccagctttggttctggcgccggctccagctccaccaaggccgtggttgtgaagaagcttgagacccgtgatgggaagctggtgtccgagtcctga

SEQ ID NO: 47523 - DNA, 1071 bp, Homo Sapiens
atgtctgaatatattcgggtaaccgaagatgagaacgatgagcccattgaaataccatcggaagacgatgggacggtgctgctgtccacggttacagcccagtttccaggggcgtgtgggcttcgctgcaggaatccggtgtctcaatgtatgagaggtgtccggctggtagaaggaattctgcatgcccccgatgctggctggagaaatccggtgtatgttgtcaactatccgaaagataacaaaagaaaaatgggtgagacagaagcttcatcagcagtgaaagtgaaaagaccagtcgatttaatagtgttgggtctcccatggaaaacaactgaacaggacctgaaagagtactgtagtacctttggagacgttcttatggtgcggcaaagccaagatgagcctttgagaagcagaaaagtgtttgtggggcgccgtacggaggacatgactgaggatgagctgtgggagttcttctctcagtatggggatgtgatggatgtcttcgtccccaagccgttcagggcctttgcctttgttccatttgcagatgatcagattgcgcggtctctttgtggagaggactcgatgaaaggaatcagcgttcacatatccaatgccgaacccaagcgcaatagcaatagacagagaagtggaagatttggtggtaatccaggtggctttgggaatcagggtggatttggtaagagtagagggggtggagctggtttgggaaacaatcaaggtagtaatatgggtggtgggataaactttggtgcgttcagcattaatccagccatgatggctgccccccaggcagtgctgcagagcagttggtgtacgatgggtgtgttagccagccagcgacagccaggcccatcggatgataaccaaagccaaggcaacatgcagagggagccaaaccaggccttcggttctggaaataactcttgtagtggttctaattttggtgcaacaattggttggggatcagcatccaatgcagggtcgggcagtggttttaatggcggctttggctcaagcatggattctaagtcttctggctgg

SEQ ID NO: 47524 - DNA, 2760 bp, Homo Sapiens
ttcatattaaaaaaatagctggtaaatctttctaggtagtaacttatccaaacaatactttgagtatcatattttgtgaatgacttgcttaaactgggaaactgaatattctttttaaatcatataattcctgtattaaatgtgaaacacacagtctccaaagtcacctgattctctgtggaaaatgaaaggcattgaaggaaaccagatacattaatacttagttttggttgaaagtgcaacattactgtacttagaaggggcttggtttatttttagatatttaagctatcattaattttagaccaatggctaataataagagagatttttggttgctcatttatggagagacaaagaacagcatggcataaacaaacatcccagaaataaatgaaaagttttaagtgataaaattgtgttttctatgaaccagtgttgtacatgaaccaacattgtgtttcttagctctgacctgtacagtgaggtacctgtcaggacccctagtcttggcactggaaatgacaaagttctcctattactaaattctcatgccttccttttctgacttagtagattgaaattggtaggtactaatgatttatgtttgataaacttaagttctgctgatatcctgttactggtaattctggtaccaaaatttcaaacggtttgattattagtagcattttgagtacctaggtgcatataatacagttagcagacccttacagagtcaaaagagattttggaatctggtgatactgttgtttattacactagcctattacattttctttctttataataactgtttatgtgagtttcattgaaaatcgtggctctattgctttattcatggtttccacaactctttttgtaacaccttaattttctctcttaggtattttcctgttaaataagatatcaaaagcatcaatcacaagacagagaaaacgtattaggaaaaacttgtattagtatattctaaactgaaatggaaaaactcattattcatattttaataaataaaactcccaaatgatcttgctaaattatcccactatttagaagtagaaaataagagaagagtgctttcaaggaaatttgtcatattctcccttctatctagaagttgacaatgaattgcaataaaactaagaaataactgaatgctgaaaaataccatgaattaatgttatggcttctttatttttgtatatccattcccacaaaattgaatttaagattattaatgaaaattctatattaagtaataatgcttgtattagtaatgggtaaagaagtctttctttgttacattaaccgttagtaaaagatgtactttgacatttctgatgtaaaacctatatgtaaatattgtaatttaaatatgattggacagctgttaagttttggggagggaagcagatgccagcgttctctgctgaaaagacaagatggcgcttgacggaccacagcagatggagctggaggaggaaaaggcaggcagtggactctgccagtattatctgtccaagattgaagaactccagggtcaactgcaatataaattggatgggggaaagccacaaggaacagttctgaactccaggtgcatttgcagctgattttgaatgataagacccaaaacctctggaggcggcaggtgcacgggaatgaactaaatgttaaagtgtgcctattacaggaggagctacagctgctgcaggaataggactcctgtgtcagggaagtagtccaggccatgggtaagaagaaagtgttggtcaaggtgcatctcaaggacaagtttgtcatagatgtggacaaaaatatcagcatcagtgatgtgacacccagttccttggtggttctaagaaatgacagctacactttgcacaagatcctacccaacaaggtggactcattggtgtcactgatgatggtgaagaaagtaccagattcagcttatgaaatgattggtagactggataggcagatcaagaagatcaaagaagtgatcgacctgcctgctaagcatcccgagctcttcaaagcactgggcattgcacagcccaagggaatgctgcttggaagagactgttggcctgggctctggctcatcatagggactgtgtacctttattcatgtctctggctctgaattggtacagaaattcattggggaatttctgtgatggcagagaaaatgctcatctgtcatcttcatggatgaaattgactcttttggctcctcagagctggagggggatgctggagggaacagtgaagtgcagcagatgatgcttcgagggtggctttgaggccaccaagagtatcacggtttatcacggctgctaatacgattgatatcctggactcggcactgctttgcccagggcacattgacagaaaaattgaattcccaacctgcaatgagtaggcctggctggtcactttgaagattcattctcagaaatgaacctgacccaggggatcaacctgagaaaaattgctgagcttatgccaggagcatcaggctgaagtgaagggcatgtgcacagaaaccggcatgtatgccctgagtagcgagtccatgtcactcagaaggactttgaggtagtccaaagtcctatctcatgccaaaggacagtgaggaaaaacatgtccatcaagaaactatggaattgagggcacatcctttgtgtgtatccctacaataaaactcagtgggacaagcaaaaaaaaaaaaaaaaa

SEQ ID NO: 47525 - DNA, 927 bp, Homo Sapiens
atgaccctccggcggcgcggggagaaggcgaccatcagcatccaggagcatatggccatcgacgtgtgccccggccccatccgtcccatcaagcagatctccgactacttcccccgcttcccgcggggcctgcccccggacgccgggccccgagccgctgcacccccggacgcccccgcgcgcccggctgtggccggtgccggccgccgcagcccctccgacggcgcccgcgaggacgacgaggatgtggaccagctcttcggagcctacggctccagcccgggccccagcccgggtcccagccccgcgcggccgccagccaagccgccggaggacgagccggacgccgacggctacgagtcggacgactgcactgccctgggcacgctggacttcagcctgctgtatgaccaggagaacaacgccctccactgcaccatcaccaaggccaagggcctgaagccaatggaccacaatgggctggcagacccctacgtcaagctgcacctgctgccaggagccagtaaggcaaataagctcagaacaaaaactctccgtaacactctgaaccccacatggaacgagaccctcacttactacgggatcacagatgaagacatgatccgcaagaccctgcggatctctgtgtgtgacgaggacaaattccggcacaatgagttcatcggggagacacgtgtgcccctgaagaagctgaaacccaaccacaccaagaccttcagcatctgcctggagaagcagctgccggtggacaagactgaagacaagtccctggaggagcggggccgcatcctcatctccctcaagtacagctcacagaagcaaggcctgctggtaggcatcgtgcggtgcgcccacctggccgccatggacgccaacggctactcggacccctacgtgaaaacgtga

SEQ ID NO: 47526 - DNA, 1901 bp, Homo Sapiens
cagctgtttggaaaagccgccggtatttctccacctggctctcctctacctccaggcaggcgcacccgaggtccccctcccaccccaccttctgccctcccgcacacttggaccagtgctgttgacccggaagcggacatttctgcagctattctaagcacacgtcggcggagggagcgggacgtggccagcggtcagcggcgaaggaggcaggccctgcgcggggatcacggaagccctgtgattcaccatgaagttccagtacaaggaggtccatccctttgagtatcggaaaaaggaaggagaaaagatccggaagaaatatccggacagggtccccttgattgtagagaaggctccaaaagcaagggtgcctgatctggacaggaggaagtacctagtgccctccgaccttaccgatggccagttctaccttttaatccggaagagaatccacctgagacctgaggacgccttattcttctttgtcaacaacactatccctcccactagtgctaccatgggccaactatatgaggacagtcatgaggaagatgattttctgtatgtggcctacagtaatgagagtgtctatgggaaatgagtggttggaagcccagcagatggaagcacctggacttaggggtaggggaggggtgtgtgtgtgacttggggaaagagagggcggctcccaccgtgaggagacagaaggtgaagacatatagaaactttacaccgcacacaccgtcaacgcattttcacatgctcaactgatattttttgttgcttccttggcccagggagaaagcatgtcaggacagagctgttggattggctttgatagaggaatggggatgatgtaattttatggcattcctgagatttaatttttgtgcagtttcatagaaaggtcggtcaggaggtggacaagttggggtcagagatgatggcagtccagcagcaactccctgtgctcccttctctttgggcagagattctgtttttgacagttgcacaagacaggtagggaaaggggacttgtggtagtgggccatacctggggacgaaaagagacccactgtaattgatgcatcgtggcccccgatcttccgtatcccacacttcttttctcccatcccagttgcaatctcactcacaaacatcacagtaccaccccaggggcggcagtagacaccaacccagaaatttagacagggatctcttatctttggaaaataggggttaggcatgagggtggttatgattaagaagataattttgttgttaaatagcattaaactggaattgacagagtgagttgagcatctctgtctaacctgctctttctctctggtgctcctcatctcacccctaccttggaatttaataagcttcaggcatttccaattgcagactaaaaccacttctaccatctcctctagtattttccatgtatcaggacagagatgtcttatgtagggaaggggcaggtatgaagtgaggtagattatctatacctctcactcattcaggattctcgctcccatgctgctgtcccttcattctcacactcacaggaatgctatgtgatggccagctgcttcccttcttggttatccactgcagctgctagttagaaaggtttgcagggatgacttttagtaaatcatggggattttattgatttattatcacttataggattttgtggggtgggagtggggagcaggaattgcactcagacatgacatttcaattcatctctgcaaatgaaaagggttcttcctcttgggggaaatctgtgtgtcagttctgtcagctgcaagttcttgtgtaatgaagtcaatgctgtcaggccaagaaatgaaataattgcttaccttaaaaaacaaaacaaaaca

SEQ ID NO: 47527 - DNA, 354 bp, Homo Sapiens
gacatgagggcccccactcagctcctggggctcctggtgctctggctgccaggtgccagatgtgacatccagatgacccagtctccatcctccctgtctgcatctgtaggagacagagtcaccatcacttgccgggcgagtcagggcattagcaataatttaaattggtatcagcagaaaccagggaaaactcctaagctcctgatctatgctgcatccagtctgcaaagtgggattccctctcggttcagtgacagtggatctggggcagattacactctcaccatccgcagcctgcagcctgaagattttgcaaattattactgtcaacagagtgacagtacccctcccaca

SEQ ID NO: 47528 - DNA, 375 bp, Homo Sapiens
ttttgtttccagtttcaggtatgtctttatcagcagcatgaaaatgaactaatacagttaattggtaccaggagtggtgtgatgctgaaaagacacctgaaaatgtgcaagaggctttggaactgggtaacaggcaaaggttctaacagtttggagggctcagaagaagacaggaaaatgtgggaaagtttggaacctcctagagacttgttgaatgcctttgaccaaaatactgatggtgatatgaacaataaggtccaggctaaggtggtctcatatggagatgaggaacttgttaggaactggagcaaagatgactcttgttatgtttttagcaaagagactggcagcattttgatcctgccccagagattt

SEQ ID NO: 47529 - DNA, 2439 bp, Homo Sapiens
gccgccccaggctccgccatggggaatgtgccatccgcggtgaagcactgcctcagctaccagcagcttctccgggagcatctctggatcggggattcagtggcaggggcgctcgaccccgcgcaggaaacatcccagttatctggactccctgagtttgttaaaatagtagaagttgggcctagggatggattgcagaatgaaaaggttatagttcctacagatataaaaattgaatttatcaatcgactttcccaaactggcttgtctgtaatagaagtgactagctttgtgtcttccagatgggtaccacaggttgctgctggagctactgagatatcagtttttggagctgcatctgaatcctttagcaagaagaatattaactgttccattgaagaaagtatgggaaaatttgaggaggttgttaagtctgcaagacacatgaatattccagcacgagggtacttatgaaatcccacaaattctgttttgttaatgtttattgttaaagcttactcaaaaattatctagagattcttatatcatttataaaaatatacatagaatatcatatttctattttgtttaatcagggtaatcactatatagttacatctcattaacatcactgctgattattagtgagtatctagcttgtggaatgtgtcatgcagttgaaatcagaggaactagcatgcaaatctggcattattaactattttattaacactctagcacccaaatgcagccctcttatctcagcctacatgtgctgataagttggtataaactcacaacagcttttggaaaagaatcacctaatgtggttttcaaattttttttaaaacatgactttttcttcaaagagtattttatgtagaacttcaatagaatacagcagatataaaattgagctgctctgggaaatcattttatccattctttctccccctcaatggctgacttttctacttcctctgggtgatcccaaatcacctccatagtatcttgcagaacactgtttaaaaatacttgataaattgcttatagaagataaatataaactttcagttctctactattttctattatatgtgatttctataaatttaggagtatcagagatatcaatccctttctcctcgccttgcctttttcttgtggaaacttatcagctgttcattctaagagatgttgattacaggacatggaaaataaaaactgacccaagatccacaaacctaattttctctctcaggagtttagaaatggtataccaaacatggttacttgtattgaaagattatgtgattttgtcactgagttcactattttggggttcctaggatggagccacatgcaaaccagtgacaggacagagtagtagaaagcagaaatggaaaaaggaggctcctagcggtgatgagaggtatgggggagggaggagagggaaaaatctgccttggtgcttgtctgcttccaggaccaatagttgcctcaagtattataaccaggcctatgggttgtgaaacctataatgcatttttgtgtgtgtttgtttcttaaggaagaatttgtttctaagacattagctactttttctattaattttataaatatggagatatgatgaacacacatcgtaacaagttaaagtgcatagcgattggtaatagaaggttgaaagctggggatggatttgggtgcaggctgtacttcccttagttgaggtgagcaaagttcatggtagcgggaaagattcaacagttaatgagaaagataagtgagtcaattgtgactgaaaatattagtgaaatgattggaatttcaatcaaggtgttttgggggaacaattagagttagactatacctagtaaaatattttgttagtttgttttctatttatatttttcctgtcctccatagtaagtctacatgagtttctaaaatttgaaattacttttgtaattaagatagatgcatatcatgtaaggactatatgagaaaaatttaaaatccaaggcaatgtacttccaaagacataaaataaaggatatttatttttcaggcaaaagttacaaaaccacaatcaaaaaggagagatatactattggtttctcaattcgaatataaataagttgtctcaattttctttaaaataaagagaaagatgaagaccctattctacttcaatatgtgtttaaagtgtggagtataagctttaaagtaattctcattggaaagttaaaaagtatgtgactataagaagtaaattgcttatgtagcttgctcttcaaataggaagggtttttttagtgttgaaagatggatgcaaatataagttgtaggaagtaaccttttattatcttagctttctgttgtaaaatggaatagttaatgtaactgggctaataaaaatcttaaaccctcttaata

SEQ ID NO: 47530 - DNA, 402 bp, Homo Sapiens
atgctttttgggatacgtattctcgtaaacactcccagccctttggtcactgggctgcatcactacaatcccagcatacatcgggatcagggagagtgcgctaatcagtggagaaaggggcgaggctctgcacacctcgctggtcttgctgggagatgcagtctcataaacactcccagccctttggtcactgggctgcagcgctacaatcctagcatggaccgggcgcagggaatgtgcgcgtcactggaggaagaggcagggttgtgcacgcctctctgggcttggtgggagttgcagtctcataaacactcccagacctctcatcaccgggctgcaggactacaatcccagcatgcacccggctcagggagagtgcgcattactggaggaaaagtctag

SEQ ID NO: 47531 - DNA, 2862 bp, Homo Sapiens
agctgcttcccgaaaatcatgtgtgtcgactctctggtcagaatttgctccggactctcttatggcagaatcagaaatattaaaagtttgtcagatatccagattgtacaggttgcttgtggttactatcattcacttgcactttctaaagcaagtgaagtcttctgttggggacagaataaatatggccaattgggtttaggtactgactgtaaaaagcaaacttcaccgcagctgcttaagtctttgcttggaatccctttcatgcaagttgcagcaggaggagcccatagttttgtactcaccctttctggagctatctttggatggggacgcaacaagtttggtcagctaggtcttaatgatgaaaatgataggtatgttcctaatttactaaagtcactaagatctcagaaaatagtttatatttgttgtggagaagatcatactgctgctctaaccaaggaaggtggagtgtttacttttggagctggagggtatggtcagttgggccataattctaccagtcatgaaataaacccaaggaaagtttttgaacttatgggaagcattgtcactgagattgcttgtggacggcagcacacttctgcttttgttccttcatcaggacgaatttactcttttgggcttggtggtaatgggcagctgggaaccggttcaacaagcaacaggaaaagcccctttactgtaaaaggaaattggtacccctataatgggcagtgtctaccagatattgattctgaagaatatttctgtgtaaaaagaattttctcagggggagatcaaagcttttcacattactctagtccccagaactgtgggccaccagatgacttcagatgtcccaatccgacaaagcagatctggacagtgaatgaagctctaattcagaaatggctgagctatccttctggaaggtttcctgtggagatagccaatgagatagatggaacgttttcttcctctggttgcctaaatggaagttttttagctgttagcaatgatgatcactatagaacaggtaccagattttcaggggttgatatgaatgctgctaggcttttattccacaaacttatacaacctgatcatccgcagatatctcagcaggtggcagctagtttggaaaagaatcttattcctaaactgactagctccttacctgatgttgaagcattgaggttttatcttactctaccagaatgtcccctgatgagtgattccaacaatttcacaacaatagcaattccctttggtacagctcttgtgaacctagaaaaggcaccactgaaagtacttgaaaactggtggtcagtacttgaacctccactattcctcaagatagtagaactttttaaggaagttgtggtacatcttttgaaactctacaagatcggtattcccccttctgaaagaagaattttcaacagttttcttcatactgcattaaaggttttagaaatactacatagggtaaatgagaaaatgggacagattatacagtatgataaattttatatacatgaagtacaagaattgatagacataagaaatgattatatcaactgggtccaacagcaggcctatggaatggatgtcaaccatggattaactgagttggcagatatccctgttacaatctgtacatatccatttgtatttgatgcccaagcaaaaactactctgttacagaccgatgcagtcttacagatgcagatggctattgatcaggcccacaggcagaatgtctcctctctttttctcccagtgattgaatctgtgaatccctgcttaattctagtggtgcgtagagaaaatattgtaggagatgcaatggaagtccttaggaaaacaaagaacatagattacaagaagccactcaaggttatatttgttggagaagatgctgtggatgcaggaggggtgcgcaaagaatttttcttgctcatcatgagggaattattggatcctaaatacggcatgtttaggtattatgaagattccaggctcatttggttttctgataagacatttgaagacagtgatttgttccatttgattggtgttatctgtggcttagcaatttataattgtaccattgtggacctccattttcctttggctttatataagaaactactgaaaaagaagccatccttggatgatttgaaagaactaatgcctgatgttgggagaagcatgcaacagttactggattatccagaagatgacatagaggaaacattttgtcttaattttacgatcacagttgaaaactttggtgcaacagaagtgaaagagctggttctaaatggtgcagacacagctgttaacaaacaaaatcggcaagagtttgtcgatgcttatgtggattacatattcaataaatcagtggcttccttatttgatgcttttcatgcgggctttcataaggtctgtggaggaaaagtccttctgctctttcagcctaatgaactacaagcaatggtcattggaaatacaaattatgattggaaggaactggaaaagaatacagaatacaaaggggaatattgggcagaacatcctacgataaaaattttttgggaagtatttcacgaattaccattggaaaagaagaaacagtttctgttatttttgacaggtagtgatcgcattcctattcttggtatgaagagtctgaaactagtcatccagtccacaggaggtggtgaggagtatctcccagtttcccatacttgttttaatcttctggatcttccaaaatatacagaaaaagaaactctacgctctaaactgatccaagctattgatcacaatgaaggcttcagtttaatataa

SEQ ID NO: 47532 - DNA, 1745 bp, Homo Sapiens
atggcggccagcggggctgtggaaccagggcccccgggggctgccgtcgccccgtcgcccgccccggccccgccgcctgcccctgatcacctgttccggcccatcagcgccgaggacgaggagcagcagcccaccgagatcgagtcgctatgcatgaactgttactgcaatggcatgacgcgcctcctgctcaccaagattcccttcttcagagaaataatagtgagctccttttcctgcgagcactgtggctggaacaacacggagatccagtcggcaggcaggatccaggaccagggagtgcgctacactttgtctgtcagggctctggaggacatgaacagagaagtggtgaagactgactctgctgccacaaggattcctgagctagattttgaaattcctgcctttagccagaaaggagctctgaccactgttgaaggattgatcacccgtgctatctctggcctggagcaggaccagcctgcacgaagggcaaacaaagatgctacagctgaaagaattgatgagttcattgtcaaactgaaggagctaaagcaagtagcctcccctttcactctgatcattgatgatccctcagggaacagttttgtggaaaacccacatgctcctcagaaagatgatgccctggtgatcacacactacaaccggacccgacagcaggaagagatgctggggcttcaagaagaagcaccagcagagaagccagaagaggaagatctcagaaatgaagtgctccagttcagcacaaactgcccagaatgcaatgcccccgctcagaccaacatgaagctagtacaaatccctcactttaaggaggttatcatcatggctaccaactgcgagaactgtgggcatcggaccaatgaggtgaaatctggaggagcagtagaacccttgggcaccaggatcaccctccacatcacagatgcctcagatatgaccagagacctcctcaagtctgagacttgcagtgtggaaatcccagagctagaatttgaactgggaatggcagtcctcgggggcaagttcaccacactggaagggctgctgaaagacatccgggaactggtgaccaaaaatcctttcacactgggcgacagttccaatcctggacagacggagagactacaggagtttagccagaagatggaccagatcatcgaaggtaacatgaaggcccactttattatggatgatccagcaggaaacagttacttgcagaatgtgtatgcgcctgaagatgatcctgagatgaaggtggagcgttacaagcgcacctttgaccaaaatgaggagctagggctcaatgacatgaagacagagggctatgaggcaggcctggctccgcaacggtagcagtgggtggctcaagggccagcctccagcgctgctctttctgtaggttatttattagtattggatgaaggcgaaggctgggagtgtctttcccaccagcccttgcccatggtggggaggacatctggtctgagtcagagatctgtgcacactttctaaacagcttgtgatgcaagtgtgagcctattgtgttacttgaccttattttggaagttttgaattggcctaggaggaaacccagaaatgaaccaggggtatgtcatcacttttttcatatcaagtcctcaccctccttccacataatgctctatcctctaaggttggaactctgaagttggagaaggtggaataaagttacacctgga

SEQ ID NO: 47533 - DNA, 438 bp, Homo Sapiens
atgtgtcttcgaggcaataaacaattgttttgtgatgtctggggaaagatacccccaaagcagaagtctgggtccctcacaatcaaaagcctccaaacaacaatgatcacagacatcctctggtcaccaggtcttggcatggcacctggaacccagcaggcacaaaaatgctgggtggacacagccatgggcacaagagcaaccatttatacggggcaagcttttggggtttgtggcagaagtcctcctgacttttgggtccaggcctttggcctccatgccacaggagtcccagggtcttgcataggagcctctgccttgagtaggagacagcaatggaatgcaagttccagatgggtcttctgcgataacaggataaaaatagagaacgatgagaatctcaaggacaccattttcaggtttaagacctatttttaa

SEQ ID NO: 47534 - DNA, 3773 bp, Homo Sapiens
tccctggtccgtgtgtagtaaggtgcgcagcctcggctgcttctgggcatagactccacagatttttcacagttgccctggaacacatcatcgcacaaaccggaaggagggcactgtgacccgaaagagaccaagtgtgtttgctgtgcggctgacagcctgactcccgggtcctgttgctctctgtcctgtaaattaagagcagatggagtggataaactgagagcgcaggagaaggtaacacaagtcagaacttccaccaagggcattactgagacatggagaacgttgataattctctggatggcagtgatgtgtcagaaccagcaaaaccagaagccggacttgaagtggctcagtcgatcctgagtaagttctctatgaaatccctatttgggtttacgagtaaattagaatctgtgaatccagaagaggaagatgctgtgctgaaagcattccatagtttagacgtgaatcccacatctcagcaggatgattccagcaatggcttggatccacaggaagcagggtctcgggtttcacctgacctcggaaatgatgagaaaattgcaagcgtggagacagaatcagagggaagtcagagaaaagaagcagggacatctctccttgctcaagagctgcttccactgtctactttgaaagggacaaaagacgatgtcatttgtgttcgtgggaccctggtgcacaccaccagtgattctgactctgatgatggtggccaggagccagaggagggaagcagcaccaatggcccaaagtcccctagtggtgttttatctgagccatctcaggagtccaaagaaaacccaggaggtttcagggaaaatactgtcactggggaaatgaatggtgcagagctctgtgcagaagatcctcaaaggattccacctgagatgagcagcaaactggaagctggcaacggtggtcttcagacagagcgtcgccccagccaggaccaggtgggagaagaagggtcccaagacctacctgcagtaacaaaccagaattcgagtgttggtatcactgagagtgcctcttctaaaaaagaagtctctggagagaagtcattccaacttccagcttttttcagtgggcttcgtgtgctgaagaagggggctaccgctgagggaggagagaccatcacggaaattaaaccaaaggatggggacttagctttgctcaaattgacgcagcctgtgcagaagtccttagtgcaggcagggctgcagacagtgaagagtgagaagaaagcaactgatccgaaggccactcccactctcctggagcagctctctctgctgctcaacattgacatgcccaaaactgaaccgaagggagcagaccctgagtcgcccaggagagaagagatgggctgcaatgctgaccaagagagccagagcggccctggagtaccacaaacccagggtggtgaggtcaagccaaagtcgccagagacagccctggaggcttttaaagccctattcatccggccccccagaaaggggaccacagctgacacctctgagctggaagctctcaagcgcaagatgagacatgagaaggagtcgctaagagctgtgtttgaacggtccaattctaagccagcggatggcccctctgattccaaaagtcctgaccacagcctgactgagcaggatgacaggactcctggcagacttcaagctgtctggccacccccaaagacaaaagacacagaagaaaaagtgggactgaagtacactgaagcagaataccaagctgctattttacacttgaagagggagcacaaagaagaaattgaaaacctgcaggcacagtttgaacttcgggcatttcatatccggggcgagcatgcaatgataacagcgagactagaagaaaccattgaaaatctgaaacacgagctagaacacagatggcgagggggttgtgaagagaggaaagatgtgtgcatttccaccgatgatgactgccctccaaagaccttcagaaatgtgtgcgtccagacagacagagagaccttcctcaagccctgtgaaagtgaaagcaagacaaccagaagtaatcaattagtacccaaaaagctgaatatctcctctttaagccagctctcacccccaaatgaccacaaagacatccatgcagcactccagccaatggagggcatggcatcaaatcagcagaaggcattgcctccgcctcccgcatccatccctccccctccgcccctcccctcaggacttggatctttgtctcccgcacctccaatgccacctgtgattcctaactcccctgccccacccaaccctggagggcctcctcctgctccaccacccccaggacttgcacccccacctccccctggactcttctttggacttggctcttcttccagtcaatgtcctcgaaaaccagccatcgagcccagttgtcccatgaagcctttatattggactaggatacaaataagtgataggagccaaaatgctacaccaaccttatgggactccttagaagaacctgacattcgggaccccagtgaatttgagtatttattctccaaagacacaactcaacagaagaaaaaacctctgtcagagacttatgagaagaaaaacaaggtcaaaaagatcatcaaattgttggatggaaaacgatctcaaactgtgggaatcttgatatctagtttacatttagaaatgaaggatatccaacaggccattttcaatgtggatgactccgtggttgatctggagaccctggcagccttatatgaaaacagagcccaagaggatgagctggttaaaataagaaagtattacgagacatccaaagaagaagaactgaagctgctggataaacctgagcaatttttacatgagttagcccagattcctaattttgctgaacgtgcccagtgcataatcttcagatctgtcttttctgagggtatcacctccttgcacagaaaggtagagatcatcacgcgagcttctaaggacttgctgcacgtgaagagcgtgaaggatattttagctctcatcttggcttttggaaattatatgaatggaggaaataggactcggggacaagccgatggatatagcttagaaattctgcccaaactcaaggatgtcaaaagtcgggataatgggattaatctggtggactacgttgttaagtattacctgcgttactatgatcaggaagctggaacagaaaagagtgttttccccttgccggaaccacaggatttctttctggcctcccaagtcaagtttgaagacctcataaaagatttgagaaaactgaagaggcaactagaagcaagtgagaaacagatggtggtggtgtgcaaggagtccccaaaggagtatctccagcctttcaaggacaaactagaggagttcttccaaaaagccaaaaaagagcataagatggaagaaagtcacttggagaatgcacagaaaagttttgaaacaacagtacgatattttgggatgaagccaaagtctggtgagaaggagatcacacccagctacgtgtttatggtgtggtatgagttctgcagtgacttcaagacaatttggaaacgggagagtaaaaacatatctaaagaaagattgaaaatggctcaggaatcagtcagcaagttgacttcagagaagaaagtggagacaaagaaaatcaatcccactgctagcctgaaagaaagactgcgtcagaaggaagccagtgtgaccactaactaa

SEQ ID NO: 47535 - DNA, 2238 bp, Homo Sapiens
atgccggtgctctccaggccccggccctggcgggggaacacgctgaagcgcacggccgtgctcctggccctcgcggcctatggagcccacaaagtctaccccttggtgcgccagtgcctggccccggccaggggtcttcaggcgcccgccggggagcccacgcaggaggcctccggggtcgcggcggccaaagctggcatgaaccgggtattcctgcagcggctcctgtggctcctgcggctgctgttcccccgggtcctgtgccgggagacggggctgctggccctgcactcggccgccttggtgagccgcaccttcctgtcggtgtatgtggcccgcctggacggaaggctggcccgctgcatcgtccgcaaggacccgcgggcttttggctggcagctgctgcagtggctcctcatcgccctccctgctaccttcgtcaacagtgccatccgttacctggagggccaactggccctgtcgttccgcagccgtctggtggcccacgcctaccgcctctacttctcccagcagacctactaccgggtcagcaacatggacgggcggcttcgcaaccctgaccagtctctgacggaggacgtggtggcctttgcggcctctgtggcccacctctactccaacctgaccaagccactcctggacgtggctgtgacttcctacaccctgcttcgggcggcccgctcccgtggagccggcacagcctggccctcggccatcgccggcctcgtggtgttcctcacggccaacgtgctgcgggccttctcgcccaagttcggggagctggtggcagaggaggcgcggcggaagggggagctgcgctacatgcactcgcgtgtggtggccaactcggaggagatcgccttctatgggggccatgaggtggagctggccctgctacagcgctcctaccaggacctggcctcgcagatcaacctcatccttctggaacgcctgtggtatgttatgctggagcagttcctcatgaagtatgtgtggagcgcctcgggcctgctcatggtggctgtccccatcatcactgccactggctactcagagtcagatgcagaggccgtgaagaaggcagccttggaaaagaaggaggaggagctggtgagcgagcgcacagaagccttcactattgcccgcaacctcctgacagcggctgcagatgccattgagcggatcatgtcgtcgtacaaggaggtgacggagctggctggctacacagcccgggtgcacgagatgttccaggtatttgaagatgttcagcgctgtcacttcaagaggcccagggagctagaggacgctcaggcggggtctgggaccataggccggtctggtgtccgtgtggagggccccctgaagatccgaggccaggtggtggatgtggaacaggggatcatctgcgagaacatccccatcgtcacgccctcaggagaggtggtggtggccagcctcaacatcagggtggaggaaggcatgcatctgctcatcacaggccccaatggctgcggcaagagctccctgttccggatcctgggtgggctctggcccacgtacggtggtgtgctctacaagcccccaccccagcgcatgttctacatcccgcagaggccctacatgtctgtgggctccctgcgtgaccaggtgatctacccggactcagtggaggacatgcaaaggaagggctactcggagcaggacctggaagccatcctggacgtcgtgcacctgcaccacatcctgcagcgggagggaggttgggaggctatgtgtgactggaaggacgtcctgtcgggtggcgagaagcagagaatcggcatggcccgcatgttctaccacaggcccaagtacgccctcctggatgaatgcaccagcgccgtgagcatcgacgtggaaggcaagatcttccaggcggccaaggacgcgggcattgccctgctctccatcacccaccggccctccctgtggaaataccacacacacttgctacagttcgatggggagggcggctggaagttcgagaagctggactcagctgcccgcctgagcctgacggaggagaagcagcggctggagcagcagctggcgggcattcccaagatgcagcggcgcctccaggagctctgccagatcctgggcgaggccgtggccccagcgcatgtgccggcacctagcccgcaaggccctggtggcctccagggtgcctccacctga

SEQ ID NO: 47536 - DNA, 312 bp, Homo Sapiens
ctgccaagagcaaaaagaaaccattcatatcaccttagataccacggctcttcctactccaggtgcttcctggagaggtatagatgcaaaactataggagtctttagaagaagcaaccagccggactgtcttgaaacgcgatcagaaaaagccaagaatagagatggggttgttcaggaaaaatctgtgaggaccctcttttctgaatgtgtgaatcaatgtgacatacgtagaagacccacaagatttttgagaatgttctaccatcagaaacacttccaactgggcctaaaagggacagagacagaaaaa

SEQ ID NO: 47537 - DNA, 2513 bp, Homo Sapiens
tatttgaggctgactggggagaaagctgcctggaggaagctgctggggtgcggggggctgagggatttggctccccgccctctcccctagatggcggagaaatcgggctagctggaagggcgcagctcctctcccagagctcattctggagtcggagaactgggagagcggcccccgaggcggagcctccctcccgccccgagtcgcgctgccccccacctgggggagaggggcgggcgccgcgctgccttccctccgcgcctcggccgcgtggcttgcggcttattttcccagctggcaagcgtcgcgctgcagacaagggaatgcctgtgggaaggctgcactggtttcctgagataaatggacaggaagcgcattacctccgcgcgctggcaagcggctcccaaatgctttttgcacctgccgttttgagcggtgagagcagcggcggagcccgcagggattgcgggggcccgttgtctacgagcgggtgatgagccccccgcaagccccgggctctctccctccgcgagtgcattgctcacgccaagctttgggactcttctctcacacccaggtcctgcgtgttccgaagttcaggggccccctgatcccgctgagccccctccaggagcgaaagggttaagaatgataaggaagaagaggaagcgaagcgcgccccccggcccatgccgcagccacgggcccagacccgccacggcgcccgcgccgccgccctcgccggagcccacgagacctgcatggacgggcatgggcttgagagcagcaccttccagcgccgccgctgccgccgccgaggttgagcagcgccgcagccccgggctctgccccccgccgctggagctgctgctgctgctgctgttcagcctcgggctgctccacgcaggtgactgccaacagccagcccaatgtcgaatccagaaatgcaccacggacttcgtgtccctgacttctcacctgaactctgccgttgacggctttgactctgagttttgcaaggccttgcgtgcctatgctggctgcacccagcgaacttcaaaagcctgccgtggcaacctggtataccattctgccgtgttgggtatcagtgacctcatgagccagaggaattgttccaaggatggacccacatcctctaccaaccccgaagtgacccatgatccttgcaactatcacagccacgctggagccagggaacacaggagaggggaccagaaccctcccagttaccttttttgtggcttgtttggagatcctcacctcagaactttcaaggataacttccaaacatgcaaagtagaaggggcctggccactcatagataataattatctttcagttcaagtgacaaacgtacctgtggtccctggatccagtgctactgctacaaataaggcaagtataccttcttttttccctctccctactcaactttcaaaagatgtttgattcttcagataacttttgaaatgtgctataaagggcctagtttaaaaggaacttcttttgaaaagcaattaacagttgataaagggttaaataaaaattatctagtaaggaatttcttattggaatgtaaacgtggttctaattttaaatagacagtgatataaagaataaaaagtaaacagtgaaattgagttctccagggaaaaggcagacctgtttagtaaaaaaaggatgcttttttcagtgatgtctttttttgagtgcatatgtgtgtgactcttgaagaaatccatgttcagatttatcagatgattgaagtgggtgttctgaataaagaaagctgtgaggcctgaggcagtgacgtatcaggaaacatattttattggagatttggaagctatagtaaaacataatggcaataagccaacttcccagtggtaaacccacagtggtggtttagttactaacctcttgatgaccgaggaggttaataattggatattgcagagcagcaatatgtaacctgtgtgtaatctcagggcctcaggttaacagtttcagtcagaagctaagagaaacactgacaaaatttagcttaccatgactagctgccagtttatgtggtctgtgttcgtttgttttaaagaaactaatactgtacagagatctttgacaccaacttcaaggcaccagtgtttagtgcaagcaggtagagaggacctatgaactaggtttctaattggcagtcagtgctaattcagccattagtaagtaaagtcacttttccactaaaatagtgtcccgactaaccacctccttccgtgtcttttccaaccacaaaaccacacacatagaccatctcatcttactttatttcttgcatttattgtatccaaaaaaattggtttagttttttaatgtaattgacaagactcaagcttttgaaatacttacgactgttctcttgattccaggacaccctcccctgtgtctaaacatgtgtggtatactttttaaataaattaaagcttattttacttggc

SEQ ID NO: 47538 - DNA, 1252 bp, Homo Sapiens
ggagccactgcatccagcacatggggtgcctgggcctcagatggggaccccaaagaagcagaagctgaagaagggccaccagactcctggagagatcaagcaaggagaacctggggctgccatggccaaagcaactcaacagatgccaatgccaattccaaggccagccacaaccctgccaccttggggaatccagcctggaggcatcccctaagcagccagccatggcctgggtggaggcacctgaagacgtctgtcccaaactcccccagccctgagctgggagatgacagggggaaagaggccctctcaagggtgccagatgcctgggtctcccaagaggggtcccccaactcaccgttcccgggacaggctgccccctgttccaggaagctcatcctcacctgtgtaggcccctgtagtgacccacgcgtccagcagacgcccacccaccgctagccgttgttcctgtgcaaagtagtgtgctatgcacccacccaggtggccgcctctgggcccaaggcacatgctgtgagcttcctgtgagcccaggctctgctcactgctgtcccgcgtcatgagcaccacctctgctttccctgtgtagatctaggccagtggctgcttgttcttgtggagctgtgtgtgttcttctctgagcagctcctccccggagtcccccagcacagtcccaggagatgacaggaaggaagcaccagggcaaggcggacgctcaccctgtgaccacgatggtgaccgtgactgtgggaggaagaactggacccaggacggagcggggctgccctgcctgaggctcccgaggagctttgtgctttggtgttccacccctgttgttactcatgactcagtttccttgacctggtagggtgttccctgctgtgttttccagtgtcctgtgactgtcctgtgcgggccatagggcagggccctgtcccagcagatgggcttgggagggggctccctaaagccagtggacactgccagagtctaccttcctggcaagaggcagaccccggggccctcaggaaggagggagttggcagcgggggctgcagcaggagtaggagcagatgaggcgtcttgccaggaacctcaggaggagggggcccgggacctgtgtgggacctgtgtcctgtggtggccgtttgcagtttctctctgtgttgtgattcccttctcttcaacgttttcagtacgtgtttctcttcaataaacttcattcagtgttcca

SEQ ID NO: 47539 - DNA, 792 bp, Homo Sapiens
tggctgaagccatactattttatagaattaatggaaagcagaaaagacatcacaaaccaagaagaaatttggaaaatgaagcctaggagaaatttagaagacaacgattatttgcatgaggacacgggagagaccagcatgctaaaaagacctgtgcttttgcatttgcagcaaacagcccatgctgatgaatttgactgcccttcagaacttcagcacgcacaggaactctttccacagtggcacttgccaattaaaatagctgctgttatggcatctctgacttttctttacactcttctgagggaagtaattcaccctttagcaacttcccatcaacaatatttttataaaattccaatcctggtcatcaacaaagtcttgccaatggtttccatcactctcttggcattggtttacctaccaggtgtgatagcagcaattgtccaagttcataatggaaccaagtataagaagtttccacattggttggataagtggatgttaacaagaaagcagtttgggcttctcagtttgttttttgctgtactgcatgcaatttatactctgtcttacgcaatgaggcgatcctacagatacaagttgctaaactgggcatatcaacaggtccaacaaaataaagaagatgcctggattgagcatgatgtttggagaatggagatttatgtgtctctgggaattgtgggactggcaatactggctctgttggctgtgacatctattccatctgtgagtgactctttgacatggagagaatttcactatattcag

SEQ ID NO: 47540 - DNA, 579 bp, Homo Sapiens
atgaatcaaggtattttcctgaacttggaagtcatctgctcccttctcccccaggaatgcaccagaataagcatttcacttttgaaagtttgcaatatgtatttttttcttttctttacagtattcctcccacagatgaggaaactggagcttggagggaatgaattgctggacgtcacagagatgagctgggacttgagtttcatgcttctcattccagagggtgccctagcttcgcctccatcacatggcctgggacactggaacctgatgagaacccaggagaagggaccttgggctggccaggtactttccctttgcccatgcagtgctgctggtggcaacagcttccatgtcatacaggagggaacggaggctcggaactgccaaagctccacacggatacacccttgtagagagcccccatggaagggtcacctcaaccactttctgctggttcccttgcagacatttcaaactttgtcacctattcaaagatggctttctacggactacatgagcaaccaacaagctaacccattgggtgccatgaaaaaacatgaagcaacagccacatag

SEQ ID NO: 47541 - DNA, 2823 bp, Homo Sapiens
ccggtcgcgtgcggacacaaggatggggacctcccagcgaggagcgctctgggcggggctccggacgcatgcgcggccctcgtacggaagcccggaaggaggggcagggggcggtggctcaggtttctccgggcggcggcggcggcggcggcggcgacggcgacggcgacggcagcggggacggcagcagtagcgggagcagcagcgtggacgcggctggcgctggcgccatgaacccgctgtaaggcgcaggctgtgcagcacggggtgcgggggaggaggaggaggacgccgcggtgaagttctccgccatgaacctgaggggcctcttccaggacttcaacccgagtaaattcctcatctatgcctgtctgctgctgttctctgtgctgctggcccttcgtttggatggcatcatacagtggagttactgggctgtctttgctccaatatggctgtggaagttaatggtcattgttggagcctcagttggaactggagtctgggcacgaaatcctcaatatcgagcagaaggagaaacgtgtgtggagtttaaagccatgttgattgcagtgggcatccacttgctcttgttgatgtttgaagttctggtctgtgacagaatcgagagaggaagccatttctggctcctggtcttcatgccgctgttctttgtttccccggtgtctgttgcagcttgcgtttggggctttcgacatgacaggtcactagagttagaaatcctgtgttctgtcaacattctccagtttatattcattgccttaagactggacaagatcatccactggccctggcttgttgtgtgtgtcccgctgtggattctcatgtcctttctgtgcctggtggtcctctactacattgtgtggtccgtcttgttcttgcgctctatggatgtgattgcggagcagcgcaggacacacataaccatggccctgagctggatgaccatcgtcgtgccccttcttacatttgagattctgctggttcacaaactggatggccacaacgccttctcctgcatcccgatctttgtccccctttggctctcgttgatcacgctgatggcaaccacatttggacagaagggaggaaaccactggtggtttggtatccgcaaagatttctgtcagtttctgcttgaaatcttcccatttctacgagaatatggaaacatttcctatgatctccatcacgaagataatgaagaaaccgaagagaccccagttccggagccccctaaaatcgcacccatgtttcgaaagaaggccagggtggtcattacccagagccctgggaagtatgtgctcccacctcccaaattaaatatcgaaatgccagattagatgccacttccggggacagagcttaagtggactgggacgcactctctccgccttcctctgccccctcgttcaccccgcagaccagaaccagtactggagctgggtctccaggtacgtccatctcatgccttgtttgcatccagcgcctatcagccactcaccacgacgggacgcggaagtggcaggtgacgggggtgtgtgccagcagatgcggatgccaggaagagtgtgagaacaggggtgggattaccgtctgtctgggaggggctccaggtacccctcttccccgtcagacccactgggagatggctgcttgccaggcccccagaaggaacatctgtctatacggtgctgaaatcccaatcaaaagtattgtttagaaatgtatttctccacagggctgacctcctgcagctcgctgagcactcccaggtcctcagcactcccaggtcgtggctggggcagtcagtaggaactgtaactatgtctctgatgcaccacgtgtttagacacagcacagtccttttttctgttcctactgtggaagtagtttctctttgggcatgctgacagcagtttttcatagcctcacggatgagccctttctacgggagtgactccatgcttgtatacagagtatttatacaaatgttttagcatcttcatatgcggtgttaacccctagttctgtacagcatattctgttcaagtatttttttacaagcttgtgctgtaggcacatgccttctgctgcagaagtggacgcccgtggcacactccccccccccccccgtggggtgccacgccttcatgggacattgccacttctgccctggaactcgtgcaggtacgtagtagctgctactgccacaacggcaacaccaagcaagagatggtccatgcttttctgacgttctcagaatagtggctagcttcaaacctgacaagcgctgcttgaagccggaacactagagaatgttgctgagagcagaaacggccacgcgggtcacgactatgcgtgggaaagtctcaagcttccctcctgccagcaacaagaaggctttggagtaggcatgatgttttcacgtgtgcgtgccgtttctccaagcactgcaggttccaccgtgtgtcagaggctgcaagtttaacatcctcctgcctgaaaacaaataggtcctttgctgaaaagagggtaaaaaaagagctttgatcttctcagccaggagaagagggtggtgttttcacgcgggcaactgctcgccggcctacatggggttaattcaagtctgctgcgagcacgactccgcccttggcactggcctccagcaagccctgttctctttggggtacaggggaacgggatggtttagactttcctgctcagtgtgtaaaaaatgtagctaaagccactatttttgctctccttaagctgttcaataaaccggttcctcattttaca

SEQ ID NO: 47542 - DNA, 723 bp, Homo Sapiens
gttggagggaggggcggccggctcgcggtgacctcgatgggagggggcctcgcccgcggctcagggcgcccccggctccctgcgcccggcccttcgcctccgccgagcgcgccagcacaggaaggcggcggtcagaagccccaggcccgcactgagcgcggccagcgacgagccctgggccaggtccaggcggggtccccgcagcgagaaggtgatggccgtggcagccgcaccagccagcacggccacggcaccgaacggcagaatgcagcgaggccacgagcccccagcgccgccggtggccaagagcagggcgcgcagggccccggggggttccgggtgcgccagacccggcccggggggcgaggcgggcgccgctgggggaggctcgagcgcgctcatgccgccaacgcggtggccgcgctcggtgggtggtgtggacgcccgcgcagtcccagtggcgttccaggctcgccacgtcagagcccattggctccagaggcggtgacgccagccgggagcccgaggagtcagctgctacctctgggttttggcggggaatcggggtgggcgggcgttagtccgaggaggcggcttgtctttcccgccctggactcctgtgttggggcctcctcaggacccccacaaagctatctaggccgcctccctgctccaggacaccactgtcctctgggttggcccccgggattggtggatcattga

SEQ ID NO: 47543 - DNA, 819 bp, Homo Sapiens
atggaggcgcccgggccggcccaggcggccgcggcggagagcaactcccgagaggtgacggaggatgccgccgactgggcgcccgcgctctgccccagccccgaggcgcggtcgccggaggcgcctgcctaccgcctgcaggactgcgacgcgctggtcaccatgggcactgggacgttcgggcgggtgcacctggtgaaggagaagacagccaagcatttcttcgccctcaaggtgatgagcattcccgacgtcatccgccggaagcaggagcagcacgtgcacaatgagaagtctgtcctgaaggaagtcagccacccgttcctcatcaggctgttctggacgtggcatgaggagcgcttcctctacatgctcatggagtatgtgccgggtggcgagctcttcagctacctgcgcaaccgggggcacttctccagcaccacggggctcttctactctgcggagatcatctgtgccattgagtacctgcactccaaggagatcgtctacagggatttgaagccggagaacatcctgctggatagggatggtcacatcaagctcacggactttgggtttgccaagaagctggtagacaggacttggaccctctgtggaacacccgagtacctagcccccgaagtcattcagagcaagggccacggaagggccgtggactggtgggccctcggcatcctgatattcgagatgctttcggggtttcctccattttttgatgacaacccgtttggcatttatcagaaaattcttgcaggcaaactatatttccccagacatttggatttccatgtaaagtaa

SEQ ID NO: 47544 - DNA, 1666 bp, Homo Sapiens
gagacagcaaggtgctgtgcggcagagcatttggggtctcaaagaagcagtggccaccaccatggatacaggccccgaccagtcctacttctccggcaatcactggttcgtcttctcggtgtaccttctcactttcctggtggggctccccctcaacctgctggccctggtggtcttcgtgggcaagctgcggtgccgcccggtggccgtggacgtgctcctgctcaacctgaccgcctcggacctgctcctgctgctgttcctgcctttccgcatggtggaggcagccaatggcatgcactggcccctgcccttcatcctctgcccactctctggattcatcttcttcaccaccatctatctcaccgccctcttcctggcagctgtgagcattgaacgcttcctgagtgtggcccacccactgtggtacaagacccggccgaggctggggcaggcaggtctggtgagtgtggcctgctggctgttggcctctgctcactgcagcgtggtctacgtcatagaattctcaggggacatctcccacagccagggcaccaatgggacctgctacctggagttctggaaggaccagctagccatcctcctgcccgtgcggctggagatggctgtggtcctctttgtggtcccgctgatcatcaccagctactgctacagccgcctggtgtggatcctcggcagagggggcagccaccgccggcagaggagggtggcggggctggtggcggccacgctgctcaacttccttgtctgctttgggccctacaacgtgtcccatgtcgtgggctatatctgcggtgaaagcccggtgtggaggatctacgtgacgcttctcagcaccctgaactcctgtgtcgacccctttgtctactacttctcctcctccgggttccaagccgactttcatgagctgctgaggaggttgtgtgggctctggggccagtggcagcaggagagcagcatggagctgaaggagcagaagggaggggaggagcagagagcggaccgaccagctgaaagaaagaccagtgaacactcacagggctgtggaactggtggccaggtggcctgtgctgaaaactaggtcctccgggggaggagggtgtagctggcgtgtcatcctcagggcgcttcctcgctcacgccaggagggacttggagtggcgagctggggcccgatggggcttgggggcagagtagacatctagcctccctaagggtatgcgcgctaaagcccagctctcgatctcacctccatccccatccacccacacactatggattgggctctgggaaggggtcagggtgagaggctgctctggagaacaatgaggtcctcatagcagcaggcagctcctgtgttttcttgagggtggcagaggagctaagagcagtgcccaggtctgagggggctgcccagtgagtggcaggggcaggagaggggagaaccccatcctcagagctgctcccagccagcgagtcaggagcgggggagacagggctccagggatgaggccgcattctgctcccacagtgccttttccagaaagttcccattgctcaataaatgtggatcatcagagacatttatgaacaatgacagaagaaaaattacccaaataaatgtggaagcaagcaaaagagaaca

SEQ ID NO: 47545 - DNA, 1609 bp, Homo Sapiens
gcaagggcgcggtctggtactcgtgcgtcttttatcgcctcagtttccctccgccgactagcgcgcggggcccggttctccatcgcgcgcacggcagcctagcgcaatgaggcgggcagcactgcggttcgagataagttgcgggagatagtaggagcatccacaaactggaggagaccatgtgaaggcaatggaagaaaggaaattacttcatagtttcttggctaaatcacaggatggactgcctcctaggagaatgaaggacagttatattgaagttctcttgcctttgggcagtgagcctgaattacgagagaaatatttgactgttcaaaacaccgtaagatttggcaggattcttgaggatcttgacagcttgggagttcttatttgttacatgcacaacaaaatccactccgccaagatgtctcctttatcgatagttacagccctggtggataagattgatatgtgtaagaagagcttgagcccagaacaggacattaagttcagtggccatgttagctgggtcgggaagacatccatggaagtgaagatgcaaatgttccagttacatggtgatgaattttgtcctgttttggatgcaacatttgtaatggtggctcgtgattctgaaaataaagggccggcatttgtaaatccactcatccctgaaagcccagaggaagaggagctctttagacaaggggaattgaacaaggggagaagaattgccttcagctccacgtcgttactgaaaatggcccccagcgctgaggagaggaccaccatacatgagatgtttctcagcacactggatccaaagactataagttttcggagtcgagttttaccctctaatgcagtgtggatggagaattcaaaactgaagagtttggaaatttgccaccctcaggagcggaacattttcaatcggatctttggtggtttccttatgaggaaggcatatgaacttgcgtgggctactgcttgtagctttggtggttctcgaccgtttgtggtagcagtagatgacatcatgtttcagaaacctgttgaggttggctcattgctctttctttcttcacaggtatgctttactcagaataattatattcaagtcagagtacacagtgaagtggcctccctgcaggagaagcagcatacaaccaccaatgtctttcatttcacgttcatgtcggaaaaagaagtgccattggttttcccaaaaacatatggagagtccatgttgtacttagatgggcagcggcatttcaactccatgagtggcccagcgaccttgagaaaggactaccttgtggagccctaagaacaccacatttgttgaaaactagcactctacccacagtgacgtggtatctgatgaagacctgatcgagtgtattgattttagtattgcttcgtgtcctccacacaggaggaggatgtattcagcctttaggatgatcagaaaagcagaaagagagagtggccggatggggctgaggggagaaagaattattaaacaataaatactttcaagacaattttaattgtgaacctaccatgttgcctcccatcttctgaaaaaacaaaaaaattgagaggc

SEQ ID NO: 47546 - DNA, 2657 bp, Homo Sapiens
tggggaggggaaggagcggcacatggggttgagcagaggagaaaatcagaaagatggcttagagaagtcagcagtctgcgagtctggggaggatggagagtggtttggggttttgggtcggggtctaaggtgatcagatgcagaagcattacacagtggcctggtttctttactcagcccctggggtagatcccagccccccatgtaggtcccttggctggaaaaggaagagggagtggtcagatgaatctgaggaggagccggagaaggagctcgcccctgagcctgaggagacctgggtagtggagacgctgtgtgggctcaagatgaagctgaagcaacagcgagtgtcacccatcctccttgagcaccacaaggacttcaacagtcagcttgcccctggggtagatcccagccccccgcataggtccttttgctggaaaaggaagatggagtggtgggacaaatctgaggagtcggaggaggagccacggaaggtgctcgcccctgagcctgaggagatctgggtggcggagatgctgtgtggcctcaagatgaagctgaagcgacggcgagtgtcgctcgtgctccctgagcaccacgaggccttcaacaggctgcttgaggatcctgtcattaaaagattcctggcctgggacaaagatctgagggtgtcggacaagtatctccttgctatggtcatagcgtatttcagccgagccggcttcccctcctggcaataccaacgccttcatttcttcctggctctctacctggccaatgacatggaggaggacgacgaggactccaaacaaaacatcttccacttcctgtatgggaagaaccgctctcgcatacccttgctccgtaagcgtcggttccagttataccgttccatgaacccgagggccaggaagaaccgctctcacatacccttggtccgtaagcgtcggttccagttacgccgttgcatgaacccgagggccaggaagaaccgctctcagatagtcctgttccagaaacgtcggttccacttcttctgttccatgagctgcagggcttgggtttccccagaggagttggaggagatccaggcttatgacccagagcactgggtgtgggcgcgagatcgcgctcgcctttcctagagctccagggaccgtggaggcctgaggtcatcggcctgagagaagaacaccggacccaggggagatgtggattttcagcaggaactttattccaatgctaatggcagacaccaggaaggaggagaggaaccatttgtgcagatcatctagaagaacctggaccattcttgatggagctgaatacagtgatcacgttgtcctcctaggagcaggggtggggggagggggatggggtccttctaggagtccttggagaaaagtaagaaaccaggagtgtttccagttccaccctttcctggggcaccaccaccctttttatattgctgaattccaacctccctggggcggaacctggaggtcctgtttcttacggacttggttgccacagtccaggagcatttgaaggcacaatgcaggggctcagattggcacagaattcttttgtgaaatatcagtgccacagattgtaacagatagcttcatgcacactctgcattttattggtttgtttggaaaatgttggccattgaattattcatagatttatttcaaatagtttggaaattgttgtacttttgaaaacatgctgttcctgtagttttttgatgagagttatagttgttatatatacataaagataattttcttttcatttttgagacaattctttttatcctaaatattttatcatctttaaatttgtttctgtattattatatgtgctcctgaagcgagcactctttttatctatgatacttccataataatctcttctatttatagctattggtagttcccctaaattctgacgatagaaatttttatttgctgtttaggtttgtgactgaattgtgagaattcagttgtgatttttaacatgtgtcagatatatatactaacacgtctaatatatactattttattggtttattttgaaaaacatgggtatagaattatttaaatattattttatttatttaaatatttattaaatatatttatttatttaaatgttattattactttaaatattattttaaatattttggaaatactggtatttttgaatagatgctgtttctataaagctgtgtgatggtattataactgttatatacacatacatataattttgttttcctttttaagagaggattcttttcatcctaaatcttttacctttcaatctttgtatctattattacacgtgctgctgaagggagcatggtttttatctatgatacttagttaacatatatattacatttatagctatgtagtagttcccctaaattcttgtaaaaataaatttttatttgatatttcatctatgtttgaaatgtgagaattcagatgtaattttttaccttgatttggcatgtttgtatgttactttaaagaggatgtgtgttctaaaggaggacatgagctgtgtgttttcaagagaacaatagagtgtgtctcttggggaaacgtaataaaaatgaacttttctcaccttcacagcaa

SEQ ID NO: 47547 - DNA, 4152 bp, Homo Sapiens
ccaggttttcaaattaaagctttcacagcactgcgcttcctctcagaaccttctgatgccgtcacaatgcggggaggaaatgtcctcctcgactgctccgcggagtccgaccgaggagttccagtgatcaagtggaagaaagatggcattcatctggccttgggaatggatgaaaggaagcagcaactttcaaatgggtctctgctgatacaaaacatacttcattccagacaccacaagccagatgagggactttaccaatgtgaggcatctttaggagattctggctcaattattagtcggacagcaaaagttgcagtagcaggaccactgaggttcctttcacagacagaatctgtcacagccttcatgggagacacagtgctactcaagtgtgaagtcattggggagcccatgccaacaatccactggcagaagaaccaacaagacctgactccaatcccaggtgactcccgagtggtggtcttgccctctggagcattgcagatcagccgactccaaccgggggacattggaatttaccgatgctcagctcgaaatccagccagctcaagaacaggaaatgaagcagaagtcagaattttatcagatccaggactgcatagacagctgtattttctgcaaagaccatccaatgtagtagccattgaaggaaaagatgctgtcctggaatgttgtgtttctggctatcctccaccaagttttacctggttacgaggcgaggaagtcatccaactcaggtctaaaaagtattctttattgggtggaagcaacttgcttatctccaatgtgacagatgatgacagtggaatgtatacctgtgttgtcacatataaaaatgagaatattagtgcctctgcagagctcacagtcttggttccgccatggtttttaaatcatccttccaacctgtatgcctatgaaagcatggatattgagtttgaatgtacagtctctggaaagcctgtgcccactgtgaattggatgaagaatggagatgtggtcattcctagtgattattttcagatagtgggaggaagcaacttacggatacttggggtggtgaagtcagatgaaggcttttatcaatgtgtggctgaaaatgaggctggaaatgcccagaccagtgcacagctcattgtccctaagcctgctatcccaagctccagtgtcctcccttcggctcccagagatgtggtccctgtcttggtttccagccgatttgtccgtctcagctggcgcccacctgcagaagcgaaagggaacattcaaactttcacggtctttttctccagagaaggtgacaacagggaacgagcattgaatacaacacagcctgggtcccttcagctcactgtgggaaacctgaagccagaagccatgtacacctttcgagttgtggcttacaatgaatggggaccgggagagagttctcaacccatcaaggtggccacacagcctgagttgcaagttccagggccagtagaaaacctgcaagctgtatctacctcacctacctcaattcttattacctgggaaccccctgcctatgcaaacggtccagtccaaggttacagattgttctgcactgaggtgtccacaggaaaagaacagaatatagaggttgatggactatcttataaactggaaggcctgaaaaaattcaccgaatatagtcttcgattcttagcttataatcgctatggtccgggcgtctctactgatgatataacagtggttacactttctgacgtgccaagtgccccgcctcagaacgtctccctggaagtggtcaattcaagaagtatcaaagttagctggctgcctcctccatcaggaacacaaaatggatttattaccggctataaaattcgacacagaaagacgacccgcaggggtaggaatacttggtgcatagtaactttcttcccccctgtggaaaattctttcataggactggagaaaggaagtcagtacagtttccaggtgtcagccatgacagtcaatggtactggaccaccttccaactggtatactgcagagactccagagaatgatctagatgaatctcaagttcctgatcaaccaagctctcttcatgtgaggccccagactaactgcatcatcatgagttggactcctcccttgaacccaaacatcgtggtgcgaggttatattatcggttatggcgttgggagcccttacgctgagacagtgcgtgtggacagcaagcagcgatattattccattgagaggttagagtcaagttcccattatgtaatctccctaaaagcttttaacaatgccggagaaggagttcctctttatgaaagtgccaccaccaggtctataaccgatcccactgacccagttgattattatcctttgcttgatgatttccccacctcggtcccagatctctccacccccatgctcccaccagtaggtgtacaggctgtggctcttacccatgatgctgtgagggtcagctgggcagacaactctgtccctaagaaccaaaagacgtctgaggtgcgactttacaccgtccggtggagaaccagcttttctgcaagtgcaaaatacaagtcagaagacacaacatctctaagttacacagcaacaggcctcaaaccaaacacaatgtatgaattctcggtcatggtaacaaaaaacagaaggtccagtacttggagcatgactgcacatgccaccacgtatgaagcagcccccacctctgctcccaaggacttgacagtcattactagggaagggaagcctcgtgccgtcattgtgagttggcagcctcccttggaagccaatgggaaaattactgcttacatcttattttataccttggacaagaacatcccaattgatgactggattatggaaacaatcagtggtgataggcttactcatcaaatcatggatctcaaccttgatactatgtattactttcgaattcaagcacgaaattcaaaaggagtggggccactctctgatcctatcctcttcaggactctgaaagagccgccaattggacaaatgcaccccccgcatggcagtgtcactcctcagaagaacagcaacctgcttgtgatcattgtggtcaccgttggtgtcatcacagtgctggtagtggtcatcgtggctgtgatttgcacccgacgctcttcagcccagcagagaaagaaacgggccacccacagtgctggcaaaaggaagggcagccagaaggacctccgaccccctgatctttggatccatcatgaagaaatggagatgaaaaatattgaaaagccatctggcactgaccctgcaggaagggactctcccatccaaagttgccaagacctcacaccagtcagccacagccagtcagaaacccaactgggaagcaaaagcacctctcattcagggagctctatgtccactctggagaggtcgctggctgcacgccgagccccccgggccaagctcatgattcccatggatgcccagtccaacaatcctgtaaccgtgcagaacctcttcaactaccgtaatctgcctgaaaattacaaggtttactatcaaagaggaaaaattgcaattccgcattcaggcaacttgttctggcagagtcatctctcatataactttttagctagatgtgcctccattttgttatggaagataatgatagtggttattatttcagtgagtgaaggaccaactacccaacaaccacctatgctgcccccatctcagcctgagcattctagcagcgaggaggcaccaagcagaaccatccccacagcttgtgttcgaccaactcacccactccgcagctttgctaatcctttgctacctccaccaatgagtgcaatagaaccgaaagtcccttacacaccacttttgtctcagccagggcccactcttcctaagacccatgtgaaaacagcctcccttgggttggctggaaaagcaagatcccctttgcttcctgtgtctgtgccaacagcccctgaagtgtctgaggagagccacaaaccaacagaggattcagccaatgtgtatgaacaggatgatctgagtgaacaaatggcaagtttggaaggactcatgaagcagcttaatgccatcaca

SEQ ID NO: 47548 - DNA, 174 bp, Homo Sapiens
aactgtgttgtgcctctgggctctcccctgaactatggctgtggatgcaatggctacagctccctgggctacagctttggtggtagcaacatcaacaacctgggcggctgctatggtggtagcttctataggccatggggctctggctctggctttggctacagcacctactga

SEQ ID NO: 47549 - DNA, 1968 bp, Homo Sapiens
acactcagttgcctctggccagtgcagggctcagccagggatggcttctagctgacagtgggaggaattaattcatctgaccggaatattcttttctcttctgggctgttggtttttcaagtgcaacaaagattccatacagctccaaggaaggagccaagaaaaacattctgtgccaaagtgagatcctggaagtgaaaccccggaataaagctgaaaaacgggctccagttgggtgccaggaaatgcaggactggaatgtgacttgacttccggcagcgcgcaggtgctcccgggtcacctgctttgaggtccagcctcctgccctgcctcaggtgaccacatgaccactgtggactttgccctgaaaccttctgggaggagaagaggcctgaccttggcgctggggtccagtgggcattgctctggtccgaggctgctgctcttgacctctgctctgcggctgttttccattggagtagaggctcctcctgtcctgtcctgcctgtggagggaagcaaaccttcccctggaccagagagaggagaaagcggagacaggtagcaacgctgtggactggtgatgacaggctcttcagctccctgcaagtgaccgggcctggggaacagggcatggcacaggcacacaggaccccccagcccagggctgcccccagccagccccgtgtgttcaagctggttctcctgggaagtggctccgtgggtaagtccagcttggctcttcggtacgtgaagaacgacttcaagagtatcctgcctacggtgggctgtgcgttcttcacaaaggtggtggatgtgggtgccacctctctgaagcttgagatctgggacacagctggccaggagaagtaccacagcgtctgccacctctacttcaggggtgccaacgctgcgcttctggtgtacgacatcaccaggaaggattccttcctcaaggctcagcagtggctgaaggacctggaggaggagctgcacccaggagaagtcctggtgatgctggtgggcaacaagacggacctcagccaggagcgggaggtgaccttccaggaagggaaggagtttgccgacagccagaagttgctgttcatggaaacttcggccaaactgaaccaccaggtgtcggaggtgttcaatacagtggcccaagagctactgcagagaagcgacgaggagggccaggctctacggggggatgcagctgtggctctgaacaaggggcccgcgaggcaggccaaatgctgcgcccactaggtgcagccactcctgggggctgtggggaagacaccccctgcctgggccatggccagctctaggtggattctgattcactgtcaatgctgggttgctcccgagccctagatgttcctggaagttggccccctttatgaaaaccacttcccacagccagtgggaactgccagaggaagatctggcgtcacatggctcccaggaaagtgctgtgccctatccccactgataccatctgattccccgatgcctgtgcctgttccacctggacggtggccccctcagcctggcagcctctggacagagaggaaggaaggattggaaaagtccccgcagcacagcgacggtgggaagatgccttacgtctgatcttgatgggggcactggcctggagcctgggcccacctgcttctggggggttggggagcaggccagatggaggtggtggtgccaggaagaaatggagcgatgactgactgtggggtgggcccaggatttccacatcttggtgaagttgcccctgggaagggcagctgggggcagtggcgccagttcccttccatggtctcccggctggcaatgtggtgaagctgagtttctgtccaatgagcaggaagattctgagacatttcgcctgagatataagttgtactgcgtatgcagtttttcctccaaaaattaaattgcttttgacaatctg

SEQ ID NO: 47550 - DNA, 1146 bp, Homo Sapiens
atggtctccaaatccgaccaattgctcatcgtcgtgtccatcctagaaggtcggcatttccccaaacgtccaaagcatatgcttgtagtggaagcaaagtttgatggagaacagttggctactgatcctgtggaccacactgaccagccagaatttgctactgagttagcttgggaaattgacaggaaagcgcttcatcagcacaggctacagcgtactcctatcaaactccaatgttttgccttggatcctgtaacttcagccaaggaaaccataggttacatcgttctggatttaagaaccgctcaagaaacaaagcaggcaccaaaatggtaccagttgctgagtaataaatacaccaaattcaagtctgagatacagataagtattgctttggaaaccgatacaaagccaccagtggatagctttaaagcaaagggggctccccctcgagatggaaaagtacctgccatcctggctggacttgaccccagggacattgtggctgtgctgaatgaagagggaggctaccatcagattggaccagcagaatactgtactgactcctttattatgtcagtgaccatagcatttgctacccagttggaacagttaattccatgtaccatgaaacttccagaaagacagcctgagtttttcttttactactctttactgggaaatgatgttacaaatgaacccttcaatgatttaatcaacccaaactttgagccagagagagcatcagttcgcatccgtagcagtgtagaaattcttcgtgtttacctggctcttcagtctaaactgcagattcacctctgctgtggagaccagtcacttggaagtacagaaatacctttaactggattacttaaaaagggcagtacagaaatcaaccagcacccagtcacagtcgaaggtgcttttacccttgaccctccaaacagagccaaacagaagcttgcacctattcctgtggagctagccccaactgtgggagtgtctgtggctctgcagagagaaggcatagactcccaggcaagagcattttggtattcagctctggatatcatatttcctctgttcatcttcctttttctggtcctagatgctataaggaaatttgcaaattacgaagaaaaatag

SEQ ID NO: 47551 - DNA, 449 bp, Homo Sapiens
ctaaaaagctgctaccaagacagccacgaagatcctaccaaaatgaagcgcttcctcttcctcctactcaccatcagcctcctggttatggtacagatacaaactggactctcaggacaaaacgacaccagccaaaccagcagcccctcagcatccagcaacataagcggaggcattttccttttcttcgtggccaatgccataatccacctcttctgcttcagttgaggtgacacgtctcagccttagccctgtgccccctgaaacagctgccaccatcactcgcaagagaatcccctccatctttgggaggggttgatgccagacatcaccaggttgtagaagttgacaggcagtgccatgggggcaacagccaaaataggggggtaatgatgtaggggccaagcagtgcccagctgggggtcaataaagttacccttgtacttgca

SEQ ID NO: 47552 - DNA, 1057 bp, Homo Sapiens
gcgcgtgagaggtcccagatacgtctgcggttccggctccgccaccctcagcttctcttccccaggtctgggagccgagtgcggaaggagggaacggccctagctttgggaagccagaggacacccctggctcctgccgacaccgccctccttcccttcccagccgcgggcctcgctcggtgctaggctactctgccgggaggcggcggcggctgccagtctgtggagagtcctgctgccctccagccgggctcctccaccgggccttgcaggggccgagagagctcggtgcccgcccttccgctcgcctttttcgtcagctggctggagcagcatcggtccgggaggtctctaggctgaggcggcggccgctcctctagttccacaatgtccacgggcggagacttcgggaatccgctgaggaaattcaagctggtgttcctgggggagcaaagcgttggaaagacatctttgatcaccagattcatgtatgacagttttgacaacacctatcaggcaacaattggcattgactttttatcaaaaactatgtacttggaggatcgaacagtacgattgcaattatgggacacagcaggtcaagagcggttcaggagcttgattcctagctacattcgtgactccactgtggcagttgttgtttatgatatcacaaatgttaactcattccagcaaactacaaagtggattgatgatgtcagaacagaaagaggaagtgatgttatcatcatgctagtaggaaataaaacagatcttgctgacaagaggcaagtgtcaattgaggagggagagaggaaagccaaagagctgaatgttatgtttattgaaactagtgcaaaagctggatacaatgtaaagcagctctttcgacgtgtagcagcagctttgccgggaatggaaagcacacaggacagaagcagagaagatatgattgacataaaactggaaaagcctcaggagcaaccagtcagtgaaggaggctgttcctgctaatctcccatgtcatcttcaaccttcttcagaagctcactgcttt

SEQ ID NO: 47553 - DNA, 681 bp, Homo Sapiens
atgggccagaatatttctcttcctgtgtataaaggggagattcaggcctggaacctgggcatggccgtggatgcgtggaatgaggaaggaaaggcggtctgggggagcagcaagctggtgtgtactaagccgatcccttgccagcccacacacttctggaacaatgagaacggcaacaagtacaggaaggcgtatttctccaaattcccaggtatcagggctcatggcgactgctgcagcatcaacccgaagaccgggggcgtcatcatgctcggctggaggcccgatcctgcactgaggggccccctgtgtgaatgtgtgccctctcctgtctccacagtggactcctttgaggaggtggaggacagcctgtatgtcccccagtataacaagtacggggaagagagggtgatcgtcttcctgaagacagcctctgggcacgccttccagcctgacttggtgaagaggatctgtgacgccatccgcgtgggcttgtctgtgcggcatgtgcccagcctcatcctggaaaccaagggcatcgcgtacacgctcagtggcaataaagtggaagttgccgtcaaacagatcatcgctcgaaaagccatggagcaacgaggtgctttctcgaaccccgaggccctgcatctgtactgggacatccctgagctgaatggcttctga

SEQ ID NO: 47554 - DNA, 921 bp, Homo Sapiens
cttcagtgtcagtactttgggaagatctacatcgggacccttccccagaagttcaccttggtgtttgatacaggctccccggatatctgggtgccctctgtctactgcaacagtgatgcctgtcaaaaccaccaacgcttcgatccgtccaagtcctccacccacagaacaggcaagtccctgtccatccagtatggcacaggcagcatgcggggcttgctgggctatgacactgtcaccgtctccaacattgtggacccccaccagactgtgggtctgagcacccaggaacctggcgacgtcttcacctactccgagtttgatgggatcctggggctggcctatcctctcttgcctctgagtagtccagtgtttgacaacacgatgcagaggcacctggtggcccaagacctgttctcagtctacatgagtaggaatgaccaggggagcatgctcacgctgagggccattgatctgtcgtactacacaggctccctgcactggatacccatgactgcaagatactggcagttcactgtggacagtgtcatcattgacggcgtggtggtggcctgtgacggtggctgtcaggccatcctggacaccggcacctccctgctggtggggcctggtggcaacatcctcaacatccagcaggccattggagccactgcgggccagtacaatgagtttgacatcgactgcgggcgcctgagcagcattcccacggctgtcttcgagatccacggcaagaagtaccccctgccaccctccgcctataccagccaggaccagggcttctgcaccagtggtttccagggtgactatagttcccagcagtggatcctggggaatgtcttcatctgggagtattacagtgtctttgacaggaccaataaccgtgtggggctggcgaaggct

SEQ ID NO: 47555 - DNA, 543 bp, Homo Sapiens
atgcaacgcgggccgctgtcgcccagtcccagtgacggtcttggcgcgctcggaactacgtatcccggcgtgcaccgcggacagagcatggcgggactacgagtcccagcgttcaacgcaggcctgcgtgccattaccccatcacgcgctgagacccagcatcccgagactacgagttccggcatgcaccgcgagccgctctcctccactcccatcgcgcactgggaaggcgcccagtccccaggagcacaatctgtcctggccatgcttgtccaccgaactgcagcttacactctgcaggtcctggagcccaagaaagaccccgggagggagctcccggccacgcccaggtcctgggccccggcgaggcagccatcaccacttcacagcatccgacagacaatgccggcaaaacccagcctggtaaagagggagagaaggaaccaggctttggcaagagaggcgccgtggtttccccagagaacacagtggaagacttccgaagggccaggttcctcctcagggcggagggggcggcgctga

SEQ ID NO: 47556 - DNA, 1471 bp, Homo Sapiens
catcaacgccggcggctgcaacttcaactccttcctgcggcgtacggtgcggtttgtgggtgtccacgtgttcggcctgtgtgccacagccctggtgacggacgtgatccagctggccacgggttaccacactcccttcttcctcaccgtctgcaagcccaactacactctcctgggcacgtcctgcgaggtcaacccctacatcacgcaggacatctgctccggccacgacatccacgccatcctgtctgcacggaagaccttcccgtcccagcacgccacgctgtcagccttcgccgcggtctatgtgtcgatgtacttcaactcggtcatctcggacaccaccaagctgctgaagcccatcctggtcttcgcctttgccatcgccgcgggcgtatgcgggctcacgcagatcacgcagtaccgcagccaccctgtggacgtgtatgccggcttcctcatcggggcgggcatcgctgcctacctggcctgccacgcggtgggcaacttccaggccccacctgcagagaagcccgcggccccggcccccgccaaggacgcgctgcgggccctgacgcagcggggccacgactcggtttatcagcagaataagtcggtgagcaccgacgagctggggcccccagggcggctggagggcgcgccccggcccgtggcccgcgagaagacctcgctgggcagcctgaagcgcgccagcgtggacgtggacctgctggccccgcgcagccccatggccaaggagaacatggtgaccttcagccacacgctgcccagggccagcgcgccctcgctggacgaccccgcgcgccgccacatgaccatccacgtgccgctggacgcctcgcgctccaagcagctcatcagcgagtggaagcagaagagcctggagggccgcggcctggggctgcccgacgacgccagccccgggcacctgcgcgcgcccgccgaacccatggcggaggaggaggaagaggaggaggacgaagaggaagaggaggaggaggaagaggaggaggacgagggcccggccccgccctcgctctaccccaccgtgcaggcgcggccggggctggggcctcgggtcatcctcccaccgcgcgcggggccgccgccgctggtgcacatcccggaggagggcgcgcagacgggggccggcctgtcccccaaaagcggcgccggggtgcgcgccaagtggctcatgatggccgagaagagcggggcggcagtggccaaccctccgcggctgctgcaggtcatcgccattccacgctgcggcgccacgcgggcggcctggggctggcggagcgcgaggcggaggcggaggccgagggctacttccgcaagatgcaggcgcgccgcttccccgactagcgcggcggggccgggggcgggcggggggcgggccgagggcgcgggcggccgcgcggatgctcaataaagcggcagaaaccga

SEQ ID NO: 47557 - DNA, 2218 bp, Homo Sapiens
gcagcccactcttcccgagaggccccgacatctcccggataatctggagctttcaaaatgtttgccaaagcaaccaggaattttcttagagaagttgatgctgatggtgacctgattgcagtatcaaatctgaatgactctgataagttacagcttctaagtctggtgacaaaaaagaagagattctggtgctggcagagacccaagtaccagtttttatccctcacccttggcgatgtactcatagaagaccaatttccgagtccagtggtcgtggagtcggactttgtgaaatacgagggcaagtttgcaaaccacgtgagtggaaccctggagactgcactggggaaggtcaagctgaacctggggggcagcagccgcgtagagagccagtcttcatttggaaccctgaggaagcaggaggtggatttgcagcagctcatcagagactctgccgagagaacaataaatctgagaaaccctgtgctccagcaggtgctggaaggaaggaatgaggtcctgtgcgttttgacacagaagatcacgacgatgcagaagtgtgtgatctctgagcacatgcaggtcgaggagaagtgtggtggcatcgtgggcatccagaccaagacggtgcaggtgtcagcgacggaggatgggaatgtcaccaaggactccaacgtggtgctggagatcccagctgccaccaccattgcctacggtgtcattgagttatacgtgaaactggacggccagttcgagttctgccttctccgagggaagcaaggtggcttcgagaacaagaagagaattgactctgtctacctggaccccctggtctttcgagagtttgcattcatagacatgccagatgctgcgcatgggatatcttcccaggatggaccattaagtgttttaaagcaagcgaccctgctcctggagaggaatttccatccatttgcggagctgcctgagccacaacagacagctttgagtgacatcttccaggcggtcctatttgatgatgaactactcatggtcctggaaccagtgtgcgatgacctggtcagcggcctctcgcccacagtggcggtgctgggggagctgaagccccggcagcagcaggaccttgtggccttcctgcagctggtggggtgcagcttacagggtgggtgtccgggccccgaggatgcaggcagcaagcagctgtttatgacagcctacttcttggtcagtgccctcgcagaaatgccagatagcgcagcagctctgctgggcacttgctgcaaactccagatcattcccacactgtgccacttgcttcgtgctctgtctgatgatggagtatctgatcttgaagacccaaccttgactcccctgaaagatacagaaaggtttgggattgtgcagcgcttgtttgcctcagctgacattagtctggagagactgaagtcatctgtgaaagctgtcattctgaaggactctaaagtcttcccactgcttctttgtataaccctgaatggactctgtgctttaggcagagaacattcatgatgtcatatgtgaactagaagtacgtgttactggccaaggctatttttcagaactgttaaaggtcatatgcacgttaaaagttgaccaatgaaatgaatttacagaacagtttaagaagtggtgacattttgcatgatgaatgacctgacttttagccaccaggtactctttaaacagttttccttatcagaggccctcctgtgctggtgacccagcatctgagttaggttccagcatgtaaagagctgggagggcggagaattcttagcatacattcagacgttttttctgcacaataataagtccatctgtcacttgcattccactttttgttacatagaaagagtctgaccctttaatccaaaaggtctttttacattgtgaatgctgtgggaaggcaatttctctgcacacaagaggctacgttttggaagtgatgtatgttatttgatgactgaaaatgaactgtaaatgctcctagagtatattcctctgctgaacaaaattaaacttcaaaaaaatctaacagtaacacacccctgcttgggaccctagctatatgcattttatgtgaccttgccatgcttcagtgaacatactaattctatgtctagcacatgttgatttcctatgtattctgggtattctattaaaggaaactttgaactat

SEQ ID NO: 47558 - DNA, 957 bp, Homo Sapiens
atggaatgggaaaaccacaccattctggtggaattttttctgaagggactttctggtcacccaagacttgagttactcttttttgtgctcatcttcataatgtatgtggtcatccttctggggaatggtactctcattttaatcagcatcttggaccctcaccttcacacccctatgtacttctttctggggaacctctccttcttggacatctgctacaccaccacctctattccctccacgctagtgagcttcctttcagaaagaaagaccatttccctttctggctgtgcagtgcagatgttcctcagcttggccatggggacaacagagtgtgtgcttctgggcgtgatggcctttgaccgctatgtggctatctgcaaccctctgagatatcccatcatcatgagtaaggatgcctatgtacccatggcagctgggtcctggatcataggagctgtcaattctgcagtacaaacagtgtttgtggtacaattgcctttctgcaggaataacatcatcaatcatttcacctgtgaaattctagctgtcatgaaactggcctgtgctgacatctcaggcaatgagttcatcctgcttgtgaccacaacattgttcctattgacacctttgttattaattattgtctcttacacgttaatcattttgagcatcttcaaaattagctcttcggaggggagaagcaaaccttcctctacctgctcagctcgtctgactgtggtgataacattctgtgggaccatcttcctcatgtacatgaagcccaagtctcaagagacacttaattcagatgacttggatgccactgacaaacttatattcatattctacagggtgatgactcccatgatgaatcctttaatctacagtcttagaaacaaggatgtgaaggaggcagtaaaacacctactgagaagaaaaaattttaacaagtaa

SEQ ID NO: 47559 - DNA, 2071 bp, Homo Sapiens
gagagacctccctcccgcccctcccgcccgcctccctcccctcgccgccgccgccgccgccagcatctgggaccggccgattctgcacctccgtccggcgctgccctttgattcggatttccatcttgcattctccggctgatcgcgggacctggctcgtgcagaggaggggggccgatcgctatggagtatttcatggtgcccactcagaaggtgccctctttgcaacatttcaggaaaacagagaaagaagtgataggagggctctgtagccttgccaacattccactaacccccgagactcagcgggaccaggagcggcggattcggcgggagatcgccaacagcaacgagcggagacgcatgcagagcatcaacgcgggattccagtccctcaagaccctcatcccccacacagacggagagaagctcagcaaggtggccattctccagcagacagccgagtacatcttctccctggagcaggagaagaccaggctcttgcagcagaacacacagctcaagcgcttcatccaggagctgagcggctcgtcccccaagcgacggcgggcagaggacaaggacgaaggcataggctccccggacatctgggaggacgagaaggcggaggacctgcggcgggagatgattgagctgcggcagcagctggacaaggagcgctcggtgcgcatgatgctggaggagcaggtgcgctcgctggaggcccacatgtacccggaaaagctcaaggtgattgcgcagcaggtgcagctgcagcagcagcaggaacaggtgaggctgctgcaccaggagaagctggagcgggaacagcagcagctgcggacccagcttctgccccctccggcccccacccaccaccccacggtgatcgtgccagcaccgcctcctcctccctcccaccacatcaatgtcgtcaccatgggcccctcctcggtcatcaactctgtttccacatcccggcaaaatctggacaccatcgtgcaggcaatccagcacatcgagggcacccaggaaaagcaggagctggaggaggagcagcggcgagctgtcatcgtgaagcctgtccgcagctgcccggaggcccccacctctgacaccgcctccgactccgaggcctcagacagtgacgccatggaccagagccgggaggagccgtcgggggacggggagcttccctgactacccccccagccctcctctcccttctgggggctggagggagccggggcagccacagggagagacatgggcgaatgagtgagaaatttttacaaaattacgatgtcatttgggtctcttttatgacctctttttcaatactgtaaatcgacctttgaacgaagccactcaacccgaggtcccggggctggggtgtcgcagagcgtgtgggagcatcggcaccccagggcggggcctcggccccgggggctggaggaagctgacacggagatgcctggcctctctctgccaaaaagcattttttcctttaaatatgttttttaagaacagggaaaattaaacaaaaccccaggttatttcttccctgcccagagccagcctgggattgtcagccttcaatcccctttccttcctctttttgggttttcttctttctcctttaagcacttacatggttgggggtaagactaggctggggcattctgggggcccggaggtctccgttgcttcttggttggggtttgctgctgctgtgcccccctcccccttccccatctcggcactagaattcgccactctcccaccccccagcccccacctctgcctccaggtctcatcttccaccccaaaaatgtctgtctctctctttttgttttgtttgttgttggttttttatttctttttggtttgctttctgtttttgttttgtttttcttttttttctttcttttttttttttttttacaattttgaggtcttcgtgttcaaggagaagctattatattttgttaagaaagtggggagaaaaaaaccaagaggccaccgtgcctttgtaaagaaacaaaataaagtttgtactttgttttttaga

SEQ ID NO: 47560 - DNA, 867 bp, Homo Sapiens
ctagatgaagaagtagaggatatgtaccttgtggatttcacacagaagatcatagacaagcgcaaagaaatggaggcatctggtgcccatagagattctcaaaaggcaggagggacgacgatgaggaaaaccttcctgagggagagatccctcctccccaagaccccagtgaagaatgggtggattacgtggactctttggggctcccggcgctgtatgagaaaggatttgccagatctgctggagatggataaaaatcttcaggggagactttttattagtcctgctaatgaaaaaaccctattatctgaagatatgagaaaagaacttcagcgccagcaatgggaggaagaagaaagagaggccctgaagaggcccatggggcccgtacattatgaagacattcgggaaaatgatggagatgttattgggcctttgccaccggagccagaggctgtgccaaccccacgtcctgctgcccagagtagcaaagtagaagtcattgtccaggagaggaaggacaccaagcctggagtgccacacatccgggagtgggaccgcggaaaagaattttcctttggatactggtcgaagaggcagtcagatctccgggctgagagagatcctgagtttgccccgccgtcagattactttgtgggtcagaagagaactggtttttccagcagccaggcatggagcagacctgggccagcacagagtgacccagggcagtgccctgaccagagccacggacctagccctgaacatacgtcacccactcctgcccccgacaacccaccacaagcccccacagttactttcaaaactctggatgacatgatttcctattacaaacaagtgacatga

SEQ ID NO: 47561 - DNA, 573 bp, Homo Sapiens
atgtctttcatctttgagtggatctgcagtggcttcagcagtgtgccccaattcctaggactcaacaagaaatctggaaaacttttattcgtaggtttaaacaatacagacaaaaccattcttcttcacatgatcaaagatgacagattgggccaacatattccaacactacatctgacatcaaaagagctaacaattgttggaatgacttttacaacttttgaccttggtcagcatgaacaagcatgtcgagtttggaaaaattgtctcccagcaatgaatggggttatctttctggtggactgtgcagatcattcttgccttatagaatccaaagttgagcttaattctttaatggctgatgaaacaatatccactatgccaatccttatcttgggtaacaaaattgacagaacagatacaatcagtgcagaaaaactcggtgagatatttgggctttatggacagaccacaggaaaggggaatgtgaccctgaaacagctgaatgttcgccccgcggaagtgttcacgtgcagtgtgctccagaggcaaacctacagggagggtttctga

SEQ ID NO: 47562 - DNA, 2126 bp, Homo Sapiens
cccaagccagcactggctcatactgattcattttgatctctgctaataccagagtcctgcgtggcagagccattggcaccagaaattacaagagaacatggccaagcgagttgccattgtgggagctggggtcagcggcctggcctccatcaagtgctgtctggaagaaggactggagcccacctgctttgagaggagcgatgaccttggggggctgtggagattcaccgaacatgttgaagaaggcagagccagtctctacaagtctgtggtttccaacagctgcaaggagatgtcttgttactcagactttccattcccagaagattatccaaactatgtgccaaattctcaattcctggaatatctcaaaatgtatgcaaaccactttgaccttctgaaacacattcaattcaagaccaaagtctgcagtgtaacaaaatgctcagattctgctgtctctggccaatgggaggtggtcactatgcatgaagagaagcaagagtcagccatctttgatgctgtcatggtctgcactggctttcttactaatccttatttgccactggattcctttccaggtattaatgcctttaaaggccagtactttcatagccggcaatataagcatccagatatatttaaggacaagagagtccttgtgattggaatgggaaattctggcacagacattgctgtggaggccagccacctggcggaaaaggtgttcctcagcaccaccggagggggatgggtgatcagccgaatctttgactcgggctacccatgggacatggtgttcatgacacgctttcagaacatgttgagaaattccctcccaaccccaattgtgacttggttgatggagcgaaagataaacaactggctcaatcatgcaaattacggcttaataccagaagacaggactcagctgaaagagtttgtgctaaatgatgagctcccaggacgcatcatcactgggaaagtgttcatcaggccaagcataaaagaggtaaaggaaaactctgtcatatttaacaatacttcaaaggaagagcctattgacatcattgtctttgccactggatacacatttgctttccccttccttgatgagtctgtagtgaaagttgaagatggccaggcctcactgtacaagtatatcttccctgcacatctgcaaaagccaaccctggccattattggcctcatcaaacccttgggctccatgatacctacaggagaaacacaagctcggtgggctgttcgagtcctgaaaggtgtaaataagttaccaccaccaagtgtcatgatagaggaaattaatgcaaggaaagaaaacaagcccagttggtttggcttgtgctactgcaaggctttacaatcagattatatcacatacatagatgaactcctgacctatatcaatgcaaaacccaacctgttctctatgctcctaacggatccacatctggctctgaccgtcttctttggcccatgctcaccataccagttccgcttgactggcccaggaaaatgggaaggagccagaaatgccatcatgacccagtgggaccgaacattcaaggtcatcaaagctcgagttgtacaagagtctccatctccctttgaaagttttcttaaagtctttagctttctggctttgcttgtggctatttttctgattttcctataagtaaaagatctcctaaatggaagatgcacagagtagatttacaatgctccaattcctctcttacagcaatattgccttcacagttataaactgtattcaaatagtaaaggccaccctctcgcttccctggctggccccagggctaccactggtattcctgagcctctcccagctccacttctaatgctagagaatgataactaagacttctgtgcatttgaaggttgttggaaagttacaggttcattttagaaagaaagctgttcttgacagcactctgagccatcatacctctttcccatataaactattttcacagatctcaactaaaaccccttacttcacaaatgattgtgttgtgctgaaatggtgctcttatagtactggcttattaaaagtaaaaaataaacctaaaaattgattgttttaa

SEQ ID NO: 47563 - DNA, 2301 bp, Homo Sapiens
atggatcgagatttagaacaggctctggatcgcgcagagaatatcattgaaattgcccaacagagacctcctagaaggagatactcacctagggcgggaaaaactctgcaggaaaaactttatgacatttatgttgaagaatgtggaaaagagcctgaggatcctcaggaattgagaagcaatgtaaacttgttagaaaagcttgttaggagagagtccttgccatgtttactggtcaatctatacccaggcaatcaggggtattctgtgatgctccagagagaagatgggtcctttgcagagaccattcggctgccttatgaagaaagggcattgctggactacttggatgcagaagaattaccccctgctttgggtgatgtcctggataaagcttcggttaacatttttcatagtgggtgtgtcatagtagaagttcgtgactacaggcagtccagtaatatgcaacctcctggttaccaaagcaggcatattcttctacgtccaacgatgcagactttagcccatgatgtgaagatgatgacaagagatggccagaaatggagccaggaagacaagcttcagcttgagagccagctgatcttagcgacagctgaaccactgtgtcttgatccttctgtagcagttgcctgcactgcaaacaggctgctgtacaacaagcaaaagatgaataccgacccgatgaaacggtgcctccagaggtattcgtggccctctgtaaagccacagcaggagcagtctgactgtccacctcctcctgagctgagagtgtcgacttctggccaaaaagaagaaagaaaagtaggtcagccttgtgagctgaacattgctaaagcaggaagttgtgtagacacgtggaaaggcagaccctgtgatttggccgtgccttcagaagtggatgtggagaaacttgctaaagggtatcagtccgtcacagctgctgacccacagctcccagtctggccagcccaggaggtagaagacccttttggatttgcgttggaagctggctgtcaggcctgggacaccaagccaagcatcatgcagtcgtttaatgatccgcttctctgtggtaaaatacggccacgtaaaaaagccaggcagaagagccagaagtctccctggcagcccttcccagatgaccattcagcttgtctcaggcctgggtcagagactgatgctgggagggcagtgagtcaggcccaggaatcggtgcagagcaaagtcaaaggtccaggcaagatgtcacacagctccagtggcccagccagtgtcagtcagctctcttcatggaaaacaccagaacagcctgatcctgtgtgggtccagtcttcagtatcggggaagggagagaaacatccacctccccgcacccaacttccctcaagctcaggaaagatttcctcaggtaacagttttcccccacaacaggcaggcagccctcttaagcgtccattttctcattctcagaagccctctgtgcctctcattcaagctagcaggccctgtccagctgcccagccccccaccaaattcataaaaatagcgccagccattcagttgaggacaggctccactggcctaaaggccatcaatgtggagggcccagtccagggagcccaggctttggggagcagtttcaagcctgtgcaggcccctggctcgggtgcccccgctcctgcaggaatcagtggcagtgaccttcagtcctcaggaggtccactaccagatgcaaggcccggtgcagtgcaggcatcttctccagcaccccttcagtttttcctaaatactccggaaggtctcaggcctctgacactcctccaggttccgcagggctcggcggttctgaccggcccgcagcagcagtcccatcagctggtttccctgcagcagctccagcagcccacagctgctcatcctcctcagccagggccacagggttccgcactaggtttgagcacgcaagggcaggccttccctgctcagcaacttcttaaggtgaaccccactagagccagaagtggtctgcagccccagccccagcctgctgtgttgagtctgcttggctctgcccaggttcctcagcagggtctccagactcagcagttgagagtcttgcagcagccgcagcatatccagctccagactcagcagttgagagtcctgcagcagccagtgtttttggcaacaggcgctgttcagatagtgcagccacatccaggtgtgcaagtagggagccagttggtagatcagaggaaggaaggcaagccaacccctcca

SEQ ID NO: 47564 - DNA, 1696 bp, Homo Sapiens
caaagggcacaaaattcagaagacgagtgatctgaaacccagccagactggaccaaaggaaaagcctttccaaaagcctaggtccttggattcctcaagaatctttgatggtaaagccaaagagccatatgctgaacaacctaatgataaaatggaagcagaatccatttacataaatgaccctactgtcaaacccatcaatgatgacttcagaggtcacctcttcagtcaccctcaacagagcatgttgcaaaatgatggtaaatgctgtccctttatggaaagcatgttgagatatgaagtgtatggtggagaaaatgaggtaattcctgaagtcttgaggaaaagtcattcccactttgacaaattaggggagaccaaacagactccgcatagtctgccatcacgaggtgcctccttttcagaccgaacaccctctgcttgtagattagtggataacacaatacaccagtttcaaaatcttggccttttggattacccagttggcgtgaaccctttaagacaagctgcaagacaagacaaagactcagaagaattattgagaaaaggatttgtccaggatgcagagactacaagcctagaaaatgaacagctttctaacgatgaccaggccttgtatcagaatgaagtggaagatgatgatggtgcctgtagttcattatatctagaggaggatgacatttctgagaatgacgacttacgtcaaatgctgcctggccacagtcagtattccttcacaggtggaagccagggaaatcatttaggaaaacaaaaagtgattgagagatctctgaccgagtacaacagcacaatggagagggttgagtctcaggtgcttaaaagaaatgaatgctacaaacccactgggctgcatgctaccccaggtgaaagccaagaacctaacctctctgctgaaagttgtggcctaaattcaggggcccagtttggttttaactacgaagaagaacccagtgttgctaaatgtgtacaggcctcagcacctgctgatgaaagaatctttgattactatagcgcaagaaaagccagttttgaagctgaagtcatacaagacactattggtgacacaggaaagaagccagctagctggagtcagagtcctcagaatcaggaaatgagaaaacatttcccacaaaagttccaacttttcaacacttcacatatgccagtgttggctcaggatgtccaatatgaacacagtcacttggaagggacagaaaatcacagcatggcaggagatagtggaatagattctccacggacacagagtctgggatctaataattcagtcattttggatggactaaaaagaagacagaattttctgcaaaatgtcgaaggcacaaagagcagtcaaccactcacatctaattccttactaccgctaactccagtcataaacgtttaattttcttttggaaacctacttttttctttataaaaaggagatggggttttgccatgttgcgcaactaatgaagtccatctaattttgccactggatgcattatgacactctccctgttttaaaggaatgtattaaatgaatcaagctcattatgaaaccagtaaaattttctcctatgaaactcatcatataacacagacattaaagatgggaatatgtgcgattaaattgtttgggagattctactct

SEQ ID NO: 47565 - DNA, 1243 bp, Homo Sapiens
atgaggctcctggctttcctgagtctgctggccttggtgctgcaggagacagggacagcttctctcccaaggaaggagaggaagaggagagaggagcagatgcccagggaaggcgattcctttgaagttctgcctctgcggaatgatgtcctgaacccagacaactatggtgaagtcattgacctgagcaactatgaggagctcacagattatggggaccaactccccgaggttaaggtgactagcctcgctcctgcaaccagcatcagtcccgccaagagcactacggctccagggacaccctcgtcaaaccccacgatgaccagacctactacagcagggctgctactgagttcccagcccaaccatggtctgcccacctgcctggtctgcgtgtgcctcggttcctctgtgtattgcgatgacattgacctagaggacattcctcctcttcctcggaggactgcctacctgtatgcacgcttcaaccgcatcagccgtatcagggccgaagacttcaaagggctgacaaagttgaagaggattgacctctccaacaacctcatttcctccatcgataatgatgccttccgcctgctacatgccctccaggacctcatcctcccagagaaccagttggaagctctgcccgtgctgcccagtggcattgagttcctggatgtccgcctaaatcggctccagagctcggggatacagcctgcagccttcagggcaatggagaagctgcagttcctttacctgtcagacaacctgctggattctatcccggggcctttgcccctgagcctgcgctctgtacacctgcagaataacctgatagagaccatgcagagagacgtcttctgtgaccccgaggagcacaaacacacccgcaggcagctggaagacatccgcctggatggcaaccccatcaacctcagcctcttccccagcgcctacttctgcctgcctcggctccccatcggccgcttcacgtagctcggagcccttccactcctcccaggtcatctcttggaccagcgggcatcacattctccagcagccgccatctcacacgcctccctcctgtggccgccggcagcatggacaaaggtctccatgcagggggaggaggcctgcttctttccccacagctctcacgtctcccttctccctgcgggtgacaaagaagcccaaggaccacctccttcctgcctcattgtaataaaattccccacactga

SEQ ID NO: 47566 - DNA, 2262 bp, Homo Sapiens
atgggggaacacagtccagacaacaacatcatctactttgaggcagaggaagatgagctgacccccgatgataaaatgctcaggtttgtggataaaaacggactggtgccttcctcatctggaactgtttatgataggaccactgttcttattgagcaggaccctggcactttggaggatgaagatgacgacggacagtgcggagaacacttgccttttctagtagggggtgaagagggctttcacctgatagatcatgaagcaatgtcccagggttatgtgcagcacattatctcaccagatcagattcatttgacaataaaccctggttccacacccatgccaagaaatattgaaggtgcaaccctcactctgcagtcggaatgtccggaaacaaaacgtaaagaagtaaagcggtaccaatgtacctttgagggctgtccccgcacctacagcacagcaggcaacctgcgaacccaccagaagactcaccgaggagagtacacctttgtctgtaatcaggagggctgtggcaaagccttccttacctcttacagcctcaggatccacgtgcgagtgcacacgaaggagaagccatttgagtgtgacgtgcagggctgtgagaaggcattcaacacactgtacaggctgaaagcacatcagaggcttcacacagggaaaacgtttaactgtgaatctgaaggctgcagcaaatacttcaccacactcagtgatctgaggaagcacattcgaactcatacaggggaaaagccatttcggtgcgatcacgatggctgtggaaaagcatttgcagcaagccaccaccttaaaactcacgttcgtacacatactggtgaaagacccttcttctgccccagtaatggctgtgagaaaacattcagcactcaatacagtctcaaaagtcacatgaaaggtcatgataacaaaggacactcatacaatgcacttccacaacacaatggatcagaggatacaaatcactcactttgtctaagtgacttgagccttctgtccacagattctgaattgcgagaaaattccagtacgacccagggccaggacctcagcacaatttcaccagcaatcatctttgaatcaatgttccagaattcagatgatacggcaattcaggaagatcctcaacagacagcttccttgactgaaagttttaatggtgatgcagagtcagtcagtgatgttccgccatccacaggaaattcagcatctttatctcttccacttgtactgcaacctggcctctccgagccaccccagcctctactacctgcctcagctccgtctgctcctccgcctgctccctccctaggacctggctcccagcaagctgcatttggcaacccccctgctctcttacaacctccagaagtgcctgttccccacagcacacagtttgctgctaatcatcaagagtttcttccgcacccccaggcaccgcagcccattgtaccaggactttctgttgttgctggggcttctgcatcagcagcggcagtggcatcagctgtggcagcaccagccccaccacaaagtactactgagcccctgccagccatggtccagactctgcccctgggtgccaactctgtcctaactaataatcccacaataaccatcaccccaactcccaacacagctatcctgcagtccagcctagtcatgggagaacagaacttacaatggatattaaatggtgccaccagttctccacaaaaccaagaacaaattcagcaagcatctaaagttgagaaggtgttttttaccactgcagtaccagtagccagtagcccagggagctctgtccagcagattggcctcagtgttcctgtgatcatcatcaaacaagaagaggcatgtcagtgtcagtgtgcatgccgggactctgcaaaggagcgggcatccagcaggagaaagggctgctcctccccaccccctccagagccgagcccccaggctcctgatgggcccagcctgcagctcccagcgcagactttctcttcagcccctgttcccgggtcatcatcctctaccttgccctcctcctgtgagcaaagccgacaagcagagactccttcagaccctcagacagaaacattaagtgccatggatgtgtcagagtttctatccctccagagcctggacaccccgtccaatctgattcccattgaagcactactgcagggggaggaggagatgggcctcaccagcagcttctccaagtga

SEQ ID NO: 47567 - DNA, 915 bp, Homo Sapiens
atggtgcagcctgtgagatgtaagaaaccaatcaattactcacagtttggcgactctgacagtgatgatgattttgtttctgcaactgtacctttaaacaagcaatccagaacatcaaaggagttaaaacaagataaaccaaaacctaatttgaacaatctccagaaagaagaaatcccactagaagagaaaacccctaaaaaaaaaaggatggctttagatgataagctctaccagagagacttagaagttgcactagctttatcagtgaaggaactttcaacagtcaccactaatgtgcagaagtctcaagataaaagagttgaaaaacatggcaatagtagaacagaaacagtgagtaagtctcctcgtatctctaattgcagtgtagccagtgattatttagatttggataagattactaagaaagacaatggtggtattcaagggaaaagaaaagcagcatctaaagctgcggtacaacagaggaaaatttttctggaaggcagtgatggcaatagtgctaataacaccaaaccagacttggcaactggtgaagattctgaggatgattctgattttggtgagagtgaggataatgacaaagactcctctatgagaactaaatccaaatgtaatgctttagtgactttggtagacgctctggctgccatcaaatcagaatctcagtcctcgccaaaagagatttatctttcttcagatgccactaggaaaccattacaaatatgcagtccttcagctgaaagcaagagacctaaatggttcccagcatctggaagtagcagcaatagcagcagcgcactggcaggagtgtccatgaagtctccaaatcagagtctctgctgtggcttgtccagatcagcaccagttaaacctttgcatccaaatgctact

SEQ ID NO: 47568 - DNA, 762 bp, Homo Sapiens
atgcaggttcagtgccagcagagcccagtgctggcaggcagcgccactttggtcgcccttggggcactggccttgtacgtcgcgaagcctggctacgggaagcacacggagagcctgaagccggcggctacccgcctgccagcccgcgccgcctggttcctgcaggagctgccttccttcgcggtgcccgcggggatcctcgcccggcagcccctctccctcttcgggccacctgggacggtacttctgggcctcttctgcctacattacttccacaggacatttgtgtactcactgctcaatcgagggaggccttatccagctatactcattctcagaggcactgccttctgcactggaaatggagtccttcaaggctactatctgatttactgtgctgaataccctgatgggtggtacacagacatacggtttagcttgggtgtcttcttatttattttgggaatgggaataaacattcatagtgactatatattgcgccagctcaggaagcctggagaaatcagctacaggattccacaaggtggcttgtttacgtatgtttctggagccaatttcctcggtgagatcattgaatggatcggctatgccctggccacttggtccctcccagcacttgcatttgcatttttctcactttgtttccttgggctgcgagcttttcaccaccataggttctacctcaagatgtttgaggactaccccaaatctcggaaagcccttattccattcatcttttaa

SEQ ID NO: 47569 - DNA, 525 bp, Homo Sapiens
atgacctgctgccagaccagcttctgtggatatcccagcttctccatcagtgggacctgtggctccagctgctgccagccaagctgctgtgagaccagctgctgccagccacgcagctgccagactagcttctgcggatttcccagcttctcaaccagtgggacctgcagctccagttgctgccagccaagctgctgtgagaccagctgctgccagccaagctgctgtgagaccagctgctgccagccaagctgctgccagatcagctcctgcggaactggctgtggcattggtggtggcatcagctatggccaggagggcagcagtggagctgtgagcacccgtatcaggtggtgccgcccagacagtcgtgtggagggcacctacctacccccctgctgtgtggtgagctgcacgcccccatcctgctgccaactgcaccatgcccaggcctcctgctgccgcccgtcctactgtggacagtcctgctgccgcccagtctgctgctgtgagcccacttgctga

SEQ ID NO: 47570 - DNA, 1125 bp, Homo Sapiens
atctacttcaaccgtttcctgcagtggaagtggctggaaaggcagccagtgaccaaaaataccttcaggcagtaccgagtcctgggcaaaggtggctttggggaggtgtgcgcctgccaggtgcgggccacaggcaagatgtacgccttcaagaagctagaaaaaaagcggatcaagaagcagaaaggggaggccatggcgctgaacgagaagcagatcctggagagagtgaacagtaggtttatagtgagcttggcctacacctgtgagaccaaggaggcgctgtgcctggtgctgacgctgatgaacgggggcgacctcaatttccacatctgccacatgggccgggctggcttccccgaagcgcaggccgtcttctacgtcccgagatctgcttgcggtctggaggacctgcaccgggagcgcatagtgtacagggacctgaagccaaacatcttgctggatgaccacggccacatcctcgtctccgacctgggactggctgtgcacgtgcccgagggccagaccatcaaaggccgtgtgggcaccgtgagctacatggctccagaggtggtgaagaatgaaccgtacactttcagctctgactgttgggcgctaggctgcctcccgcaggagatgattgcaggccagtcgctcttccagcagaggaagaagatgatcaagcgggaggaggtggagcggctggtgaaggaggaccccgaggagtattccgagcgcttttccccgcaggcctgctcacagctcctctgcaaggaccccgctgaacgcctggggtgtcgtgggggcagtgcccgcgaagtgaaggagcaccccctgttgaagaagctgaacttcaagcgggtgggagccggcatgctggagccgcccttcaagcctgaccctcgggccatttactgcaaggatattctggacattaaacagttctctagggtcaagggtgtggagctggaggctaccgaccaagacttctaccagaagtttgccacaggcagtgtgcccatcccctggcagaaggggatggtggagactgagtgcttccaggagctgaatgtctttgggctggatggctcagttcccccagacctggactggaagggccagcca

SEQ ID NO: 47571 - DNA, 384 bp, Homo Sapiens
atgggcacctccagcatcttcctctgcgtgctgttcctctgtggggcactgggtctcaccatgtcccctgcccggggaaggctccgctgctacatctgtggcttcaccaaaccctgccaccctgttcccaccgagtgtcgggacgatgaagcttgtggcatcagtattggcacttcagtgaaaaagctgcctctcaagggcccagtgccctctgccaggctatgccacctactggctgcactcctacactctgtggcaccactgctgcgagcaggacctgtgcaacatagccgcttccccacagcagctcaccagcctcctcgcctccctgcccctctttgtggccagcttcgctgggagaggacacctcctccactagcttcc

SEQ ID NO: 47572 - DNA, 761 bp, Homo Sapiens
agagtggactgagcagccagtaggggagagagcagttaaggcacacagagcaccagctccctcctgcctgaagatgttccaccaaatttgggcagctctgctctacttctatggtattatccttaactccatctaccagtgccctgagcacagtcaactgacaactctgggcgtggatgggaaggagttcccagaggtccacttgggccagtggtactttatcgcaggggcagctcccaccaaggaggagttggcaacttttgaccctgtggacaacattgtcttcaatatggctgctggctctgccccgatgcagctccaccttcgtgctaccatccgcatgaaagatgggctctgtgtgccccggaaatggatctaccacctgactgaagggagcacagatctcagaactgaaggccgccctgacatgaagactgagctcttttccagctcatgcccaggtggaatcatgctgaatgagacaggccagggttaccagcgctttctcctctacaatcgctcaccacatcctcccgaaaagtgtgtggaggaattcaagtccctgacttcctgcctggactccaaagccttcttattgactcctaggaatcaagaggcctgtgagctgtccaataactgacctgtaacttcatctaagtccccagatgggtacaatgggagctgagttgttggagggagaagctggagacttccagctccagctcccactcaagataataaagataatttttcaatcctca

SEQ ID NO: 47573 - DNA, 723 bp, Homo Sapiens
atggcttggcaggtgagcctgctggagctggaggactggcttcagtgtcccatctgcctggaggtcttcaaggagcccctgatgctgcagtgtggccactcttactgcaagggctgcctggtttccctgtcctgccacctggatgccgagctgcgctgccccgtgtgccggcaggcggtggacggcagcagctccctgcccaacgtctccctggccagggtgatcgaagccctgaggctccctggggacccggagcccaaggtctgcgtgcaccaccggaacccgctcagccttttctgcgagaaggaccaggagctcatctgtggcctctgcggtctgctgggctcccaccaacaccacccggtcacgcccgtctccaccgtctacagccgcatgaaggaggagctcgcagccctcatctctgagctgaagcaggagcagaaaaaggtggatgagctcatcgccaaactggtgaacaaccggacccgaatcgtcaatgagtcggatgtcttcagctgggtgatccgccgcgagttccaggagctgcaccacctggtggatgaggagaaggcccgctgcctggaggggatagggggtcacacccgtggcctggtggcctccctggacatgcagctggagcaggcccagggaacccgggagcggctggcccaagccgagtgtgtgctggaacagttcggcaatgaggaccaccacaagttcatc

SEQ ID NO: 47574 - DNA, 1559 bp, Homo Sapiens
ctcgctcggaaagcggcagcggatcatagaaaagcgccgcggtggcgtagacaggccccgcgaagccgccggacgtgtccttggcgcaagggaggctgggatcgcggaggaccgagcgcgggctggattaaccgcagccagtgcctagcgcaaggttaggtgcatgcaggcggccagcttcggccggggaaggaatggcctggataactggggcatcgcggcgctcctcggcctcctgcagctgcgtttcaaagcagagccgacccttggtgggtagtccggggaccctgcggaccctccttgtgttgttgaaacctagtgttttaattgggactacacccagcagtgccgggagacttggcggggacgttccactgcgcaggaagtggcttcaaataacttacacgcgtcactgtgtcgattagctgctccgtgacaggcactatggtaggagctgaggctacaaagatagaacggatgggttgcaaaaaaaaaaaaggaaaaaggaaaaaagaaaggatgggttgcaaattcaggtgtccaagcaggaaacacaccttccttctataggagaaatctcctctggtggctttatagctcacaattgaaaccctaccttctttaacatacgatgagcttttttcatgaagctgccctcacccaagtagttgaaaaacggacaaccgtttttcaaaatgactcgttagaagacagcagggcaacttaatagagaagtgccgtttagtgtcaacgctcctatggtattggcggcactagctatgcaagtgcccacacctccctcagtccttagttacccacactggctgtaacacacagagtcctaccttgcttgcttccttccctaaaggaagaaaggttgtcatgtgactttcaagcaattggtgcaggatacgtggacacacagcatctagccagggagacttccacattttttggtttcaaaaggatatgatagatctgcagttcttttaagcatagcaataagtatactggcatctttcactttgattatattcacaagaggggctatcacagattgcacagtttgtgaacagaacattgggaatgcctccagtatttgggatctgatggcaccaggcagtagtaattctccgtgaaagctgaattttttttttttaaattttattttttgagatggagcctcgctctgtggcccaggctggagtgcaatggcgggacctaggctcactgcaacctcgtctcccgggttaaagcgattctcctgcctcaggctcccaagtagctgggactacaggcgcccattcttcattttactaatgagaaaccagtgcccagaaatgttaagtaacccatccaaggtcatacagctagtaagtgacagacccaggcagtcaggcgttggagtctgcacatctaaccgctgggctgtgatgttcacatgaatgcagggacagcatttaataaacacttccagaatgagatgtgaattttattttaagcacattcagatatccagtgtgactccgggatgtaaaaaaaaaaaaaaaaaaaaaaaa

SEQ ID NO: 47575 - DNA, 369 bp, Homo Sapiens
atgcaactgttacatagtctctcccaagatccatttttcagggagccacacaggtcacacaagtcttggaagtcaaaaggaaatcataagtgcaggactagagtcacatgggtaagcatgactaaccccaatcacttagttcctctggttccatggctgggggtcacacctgcaaccatgggaggcatgtttaacaagatgctgggacccaggaaccaaggagggaaaacagtaggggtggcgccctcactgtcttccccttcccctcctctggagtgcgttctgaagcactgggactcctttgactctgagatttggaagaaaaaacagctcattttcttttgcacaagagcatggccttcttactag

SEQ ID NO: 47576 - DNA, 578 bp, Homo Sapiens
gagcccggaaggtccggcgcccagagctaacgggagtcccaggttaaacactttaagatgagaaaaattgatctctgtctgagctctgaagggtccgaagtgattttagctacatcaagtgatgaaaaacacccacctgaaaatatcattgatgggaatccagaaacgttttggaccaccacaggaatgtttccccaggaattcattatttgtttccacaaacatgtaaggattgaaaggcttgtaatccaaagttactttgtacagaccttgaagattgaaaaacgtctaaagagccagttgattttgagcaatggattgaaaaagatttggtacacacagaggggcagcttcaaaatgaagaaattgtggcacatgatggctccgctacttacttgagattcattattgtatcagcctttgatcattttgcatctgtgcatagcgtttctgcagaaggaacagtagtctcaaatctttcctcataatgataacaaaatgctcttgcatgattttttaacaatatatttaaacaggaagttgtcactgatatactttattaaaaggatttttatcaa

SEQ ID NO: 47577 - DNA, 294 bp, Homo Sapiens
atgaaaaagccaagtgaacgtggcagagtgaggaggagacaggagcgtgtgcaccttccatctgtgagaggcacacttcagtctgggttcaagatgcagaatggtgcctacaaaaaaaaaaaaaaaaacaccctcctcccttctttaccatttgaatggacattttccttacctgtgatcccaacagaaacagatccagacctatcatgtgaagtccacgttccaggatcagaagtaaccagtttatggactgagcttacacgggaaagtctacccccgactccttctggatag

SEQ ID NO: 47578 - DNA, 420 bp, Homo Sapiens
ctccaggctgcggattttattgagagaacggagactgctggtgaactctcaagagggttaattggagttttatcaagccagatttcatggtgtctgcttaatgttaatctctccaagcttcccaccagactgcaaaggctgagctgcagtgttctgaatagcagtccagctatgaggggaggtgcccgtggcaggcctcagctgaccctggagaggccattaagacctggctgtcgcctccacagctgctcggaggcagagaaaggtggctttgtaagaagaaaagagatcattctttttccaccatgtgaggacccagcaagagggtggctgtctgcaaacccagggagagagccctcaccaggaatctgctggcaccttaatcttggacttcccagcctccacaactgtgaggaataa

SEQ ID NO: 47579 - DNA, 1662 bp, Homo Sapiens
aaccaggggcggtgcggcctggtccggggaggagaacatgcctgccgccggaccgcctttgctgctgctcggtacaccaggatctggaaaaacagcgctgctatttgctgcggccctagaggcggcgggggagggccaaggcccagtcctcttcctgacacgaaggcctcttcaaagcatgccccgcgggaccggaacgactctagacccaatgcgactccagaagatccgcttccagtacccaccctcaacccgagagcttttccggctcctgtgctctgcccatgaggccccggggccagccccctcccttctgctgctcgacggcctagaagagtacctagcggaagacccagagccccaggaagccgcctacctcattgccttacttctagacacagctgcccacttcagccaccggcttgggcctggccgggattgtgggctcatggtggccctccagacccaggaggaagcaggtagtggggacgtcctgcacctggcactgctccagcggtattttcctgcccagtgctggctgcagccagatgcaccaggtccaggagagcacggcctccgagcctgcctggagccaggcgggctgggccccagaacagagtggtgggtgactttccgatcagatggagaaatgatgatcgctccgtggcccacccaggctggtgaccccagctcaggcaagggttcaagctctggaggccagccctgagctttggtgggtgactacctctctgtgcttcagtttcccatggctggaatacttacctcagggacatatgcagatccaaagacctaaacaatgtaaagtgctttttctcttttaaaagtatagcattatcttgtatatattttacccaatcaatatgttgtttatagtttcattgctttaaactttataaaaagagcttcaggccaggcgtggtggctcacgcctgtaatcccagcactttgggaggctgaggcggtcagatcaccagaggtcaggagttggagaccagcctgcccaacatgatgaaaccctgtatcaactaaaagtacaaaaaaaattagctgggtgtggtggcaggtgcctgtagtctcagctactcaggaggcttaggcaggagaattgcttgaacccaggaagcggaggttgcagtgagccgagattgtgccactacactccagcctgggtgacaaagcgagactccatctcaaaaaaaaaaaaaaaaaaaagtttgagacttccttctttttgcactcaacgttgttactaagattcatctacatttttttagttcattcctttttccatattgcatataattccatgggtgactataccctgatttcttcatcagattgccttatttactgctgcgaacattcttgcacacatgccctggtacgtgtgtgtgtttttaggggccgagacaggtggatcacctgaggtcaggagttcgaggtcagcccggcctacatggtgaaaccccgtctctactaaaaatacaaaatttagccaggcatggtggcatgcacttgtactcccagctacttgggaggctgagacaggagaattgcttgaacccgggaggcagaggttgcagtgagctgagatcgagccactgcactccagcctgggtgatgaagacgagactctgtctc

SEQ ID NO: 47580 - DNA, 1105 bp, Homo Sapiens
ctggaataggtctggctctgggtccaggaggcttcagggatcagacaatgtcatcaggatctggtctctctctctctttgcctggctttttctcaggcacatatagtgactcaatggccactgcatttctaacctctcatcctcccaggttcaagtccaatgggaaagaaatatcttccttcaacagctgaatatgttactggaagtttggagaatcattactagatggcaaaaacaaaagatgttccttccattttgtgaactgcataagagatcttggggggtgggcgatgaagagaggtatactgtggtctcactagtcaaggacagctaatagctgtaaaacaggtggctttggatacctctaataaattagctgctgaaaaggaataccggaaactacaggaagaagtagatttgctcaaagcactgaaacatgtcaacattgtggcctatttggggacatgcttgcaagagaacactgtgagcattttcatggagtttgttcctggtggctcaatctctagtattataaaccgttttgggccattgcctgagatggtgttctgtaaatatacgaaacaaatacttcaaggtgttgcttatctccatgagaactgtgtggtacatcgcgatatcaaaggaaataatgttatgctcatgccaactggaataataaagctgattgactttggctgtgccaggcgtttggcctgggcaggtttaaatggcacccacagtgacatgcttaagtccatgcatgggactccatattggatggccccagaagtcatcaatgagtctggctatggacggaaatcagatatctggagcattggttgtactgtgtttgagatggctacagggaagcctccactggcttccatggacaggatggccgccatgttttacatcggagcacaccgagggctgatgcctcctttaccagaccacttctcagaaaatgcagcagactttgtgcgcatgtgcctgaccaggtaagaaactgaaagcaagaggaggaagataaatgcccggagattccaagtggcagacatttccctttcaatttatggcccattaaaagctctgttttggttatgaa

SEQ ID NO: 47581 - DNA, 2767 bp, Homo Sapiens
atggcacccaagaaggagaaaggaggaactgtgaacaccagttctaagatatgggaaccctcgctcatagctgcacagttcaatcagaacgattggcaggcctccattgcttttgtggttgggaaccagattgaagatgatcttctcatccaagcccttaccgtggctgtccaggtccctcagcgtaaactcttcagtatggtgtcgtggcaagacattctccagcagattaatgaaataaatacacttgttggatctgcttcatctaaaaaggcaaaaaaacctgtaggtggtaatgctcctttatattatgaggtgttaacggcagcaaaagcaattatggatagtggagagaaattaaccttaccactgatagggaaactcttgaaatttcaacttctccagattaaatttaaggaccaacagcgacgggaaaatgaaaagaaggtaatagaagacaaacctaagttagaaaaggataaagggaaagcaaaatctcccaaggagaaaaaggctccaagtgccaagcctgccaaaggaaagggaaaggatcagcctgaggcaaatgcaccagtgaaaaagaccacccagttaaagcggagaggagaagacgaccacaccaatcgttacattgacgatgagccagatgatggtgcccaacattacattatagttgtgggctttaacaatcctcagctattagcaattatggctgagcttggcattcctataaccagcgtgattaaaatatcttcagagaattatgaacctctgcagacacacctggcagcagttaaccagcagcaggaagttcttcttcagtcagaagatctagaagcagaaaaattgaagaaagaaaatgccataaaagagcttaaaactttctggaagtacttggaaccagtcctgaataatgagaaacctgaaacaaatctctttgatgttgctcgacttgagtacatggtcaaagcagctgattttccttctgactggtcagatggtgagatgatgctgaaattgggcactgatatttttgaaaatattgcctgcttgatgtatgacatcctggattggaaaaggcagcaccagcactatttggaaagcatgcagcttattaatgttccacaagtggttaatgagaaacctgtattagaagccatgccaacttcagaggctccacaacctgctgtaccagctcctggaaagaagaaagcacagtatgaagaaccgcaagctccaccaccagtgacttcagtcatcacaactgaagtagacatgagatattacaattatttgctgaatccaattcgagaggaattcatttctgtgcccctgatactgcattgtatgctggaacaggttgttgcaactgaagaagatctcgtcccacccagtctgcgggagccatcccccagagcagacgggctagaccacagaatcgcagctcacattgtgtcccttctgccctcactctgtctctcagagagggagaaaaagaatcttcatgacatatttttatctgaagaagaaaatgaaagcaaagcagtgcccaaaggccccctcctactgaactatcatgatgcacacgcccacaagaagtacgcactacaggaccaaaagaattttgatccagttcaaattgagcaggagatgcagtccaagttgccactgtgggaatttcttcaattccctctacccccaccatggaacaacactaaacgtctagctacaattcatgagcttatgcacttttgtacgagtgatgtcttgagctggaatgaagtagaacgagccttcaaggtgtttacttttgagagcctgaagctctctgaggttgatgaaaaagggaaactgaaaccttctgggatgatgtgtgggtcagattctgaaatgttcaacataccgtgggacaaccctgccagatttgctaaacagataaggcagcaatatgtcatgaaaatgaatactcaagaggccaagcagaaagcagatattaaaatcaaagacagaacactatttgtggatcagaatttgtcaatgtctgtgcaagataatgaaagcaaccgagaaccttcagatcctagtcagtgtgatgctaacaatatgaagcattctgacttgaataatctcaaactctcagtccctgataatagacagctgttagagcaggagagcatcatgaaggctcagccccaacatgagtctctggagcagaccacaaacaatgagatcaaagatgatgcagtcacaaaggctgattctcatgaaaagaaacccaagaagatgatggtggaagcagatttagaggacataaagaaaacacagcagcgcagtctaatggactggagttttactgaacattttaaaccgaaagtactgcttcaggtccttcaagaagcccataagcaatataggtgtgttgattcttactaccacacccaagacaactctttacttttagtctttcacaatccaatgaatagacaacgtttgcattgtgaatattggaacattgctctccactccaatgttggattcaggaattatttggaacttgttgcaaaatctattcaagattggattacaaaagaagaagctatatatcaggaatctaaaatgaatgagaaaatcatcaggaccagagctgagctggaattgaaatcttctgctaatgccaaacttacttctgctagcaaaattttttccattaaagaatctaaaagtaacaaaggaatcagcaaaacagagatatcagatcaagaaaaag

SEQ ID NO: 47582 - DNA, 816 bp, Homo Sapiens
cagggcctgctcaccgcttgcaaactgaaggtgttcgatttgttaaaagatgaagcaccccagaaggctgcggatattgccagcaaagtggacgcctctgcgtgtggaatggagaggcttctggacatctgtgctgccatggggctcctggagaagacagagcaaggttacagtaacacagagacagcgaacgtccacctggcatcggatggcgaatactctctgcacggcttcatcatgcacaataatgacctcacatggaacctctttacatacctggagtttgccatccgagagggaacaaaccagcaccacagggcgttggggaagaaggcggaagatctgttccaggatgcgtactaccagagcccggagacgcggctgaggttcatgcgggccatgcacagcatgacgaagctgactgcgtgccaggtggccacggccttcaatctgtcccgcttctcctccgcctgcgacgtgggaggtgactttttcagggaccccctccccagcgctgagctgtacgtcctgtgccggatcctgcatgactggccagacgacaaagtccacaagttactcagcagggtcgccgagagctgcaagccaggggccggcctgctgctggtggagacgctcctggatgaggagaagagggtggcgcagcgcgccctgatgcagtcactgaacatgctggtgcagactgaaggcaaggagcggagcctgggcgagtatcagtgcttgctggagctgcacggcttccaccaggtgcaggtggtgcacttggggggtgtcctggatgccatcttggccaccaaa

SEQ ID NO: 47583 - DNA, 513 bp, Homo Sapiens
atggagacccacaaagaactgaaaccccttctgagcccgtcttctgagaccacagtgaccgtggaactgccagaggcagacagagcaggcgcgggcaccggtgcccaggccggccaactgatgggcttctttaaggggattgaccaggatattgagcgtgcagtgcagtcagaaatctttctacatgaaagttactgcatggacacctcccatcagccactgctcccggcacctccgaagacgcctatggatggtgcagattgtggcattcagtggtggaatgctgttttcatcatgctgctgattggtattgtcttgcctgtcttttatttggtctactttaaaatacaagctagtggtgagacccctaatagcttgaacacaactgtcatccccaatggctcgatggcaatgggtacagttccagggcaagcccccagactagcagttgcagtgccagccgtcacttctgcagacagccagttcagtcagaccacccaagcggggagctaa

SEQ ID NO: 47584 - DNA, 715 bp, Homo Sapiens
ttaccatatcagattcacattcagtcctcagcaaaatgaagggctccattttcactctgtttttattctctgtcctatttgccatctcagaagtgcggagcaaggagtctgtgagactctgtgggctagaatacatacggacagtcatctatatctgtgctagctccaggtggagaaggcatcaggaggggatccctcaagctcagcaagctgagacaggaaactccttccagctcccacataaacgtgagttttctgaggaaaatccagcgcaaaaccttccgaaggtggatgcctcaggggaagaccgtctttggggtggacagatgcccactgaagagctttggaagtcaaagaagcattcagtgatgtcaagacaagatttacaaactttgtgttgcactgatggctgttccatgactgatttgagtgctctttgctaagacaagagcaaatacccaatgggtggcagagctttatcacatgtttaattacagtgttttactgcctggtagaacactaatattgtgttattaaaatgatggcttttgggtaggcaaaacttcttttctaaaaggtatagctgagcggttgaaaccacagtgatctctattttctccctttgccaaggttaatgaactgttcttttcaaattctactaatgctttgaaatttcaaatgctgcgcaaaattgcaataaaaatgctataaacca

SEQ ID NO: 47585 - DNA, 294 bp, Homo Sapiens
ggtgatgttgagaaaggcaagaagatttttgttcagaagtgtgcccagtgccacaccgtggaaggaggcaagcacaagactgggcctaatctccatggtctcttcaggcaggagacaggtcaggccattggattctcttacacagatgccaataagaacaaaggcatcacctggggggaggatacactgatggagtatgtggagaatcccaagaagtacatccctggaacaaaaatgatctttgccggcattaagaaggcagaaagggacttgatagcttatctcaaaaaagct

SEQ ID NO: 47586 - DNA, 590 bp, Homo Sapiens
cagcaagtgaactgtcaggcggccgtgaactcagacaccagagatgaagcccctgctcctggccatcagcctcagcctcattgctgccctgcaggcccaccacctcctggcctcagacgaggagattcaggatgtgtcagggacgtggtatctgaaggccatgacggtggacagggagctccctgagatgaatctggaatcggtgacacccatgaccctcacaatcctggaagggggcaacctggaagctaaggccaccatgctgataagtggccagtgccaggaggtgaaggtcatcctggagaaaactgacgagccgggaaaatacacggccaacaggggcaagcacgtggcatacatcatcaggtcgcacatgaaggaccactacatcttttactgtgagggtgagctgcacgggaagccgatccgaggggcgaagctcgtgggcagagaccccgagaacaacctggaagccttggaggactttgagaaagctgcaggagcccgtggactcagcacggagagcatcctcatccccaggcagagcgaaacctgctctccagggagcgattagggtgagcgaacaactt

SEQ ID NO: 47587 - DNA, 3062 bp, Homo Sapiens
atggccggcgcccccggcccgctgcgccttgcgctgctgctgctcgggatggtgggcagggccggcccccgcccccagggtgccactgtgtccctctgggagacggtgcagaaatggcgagaataccgacgccagtgccagcgctccctgactgaggatccacctcctgccacagacttgttctgcaaccggaccttcgatgaatacgcctgctggccagatggggagccaggctcgttcgtgaatgtcagctgcccctggtacctgccctgggccagcagtgtgccgcagggccacgtgtaccggttctgcacagctgaaggcctctggctgcagaaggacaactccagcctgccctggagggacttgtcggagtgcgaggagtccaagcgaggggaaagaagctccccggaggagcagctcctgttcctctacatcatctacacggtgggctacgcactctccttctctgctctggttatcgcctctgcgatcctcctcggcttcagacacctgcactgcaccaggaactacatccacctgaacctgtttgcatccttcatcctgcgagcattgtccgtcttcatcaaggacgcagccctgaagtggatgtatagcacagccgcccagcagcaccagtgggatgggctcctctcctaccaggactctctgagctgccgcctggtgtttctgctcatgcagtactgtgtggcggccaattactactggctcttggtggagggcgtgtacctgtacacactgctggccttctcggtcttatctgagcaatggatcttcaggctctacgtgagcataggctggggtgttcccctgctgtttgttgtcccctggggcattgtcaagtacctctatgaggacgagggctgctggaccaggaactccaacatgaactactggctcattatccggctgcccattctctttgccattggggtgaacttcctcatctttgttcgggtcatctgcatcgtggtatccaaactgaaggccaatctcatgtgcaagacagacatcaaatgcagacttgccaagtccacgctgacactcatccccctgctggggactcatgaggtcatctttgcctttgtgatggacgagcacgcccgggggaccctgcgcttcatcaagctgtttacagagctctccttcacctccttccaggggctgatggtggccatattatactgctttgtcaacaatgaggtccagctggaatttcggaagagctgggagcgctggcggcttgagcacttgcacatccagagggacagcagcatgaagcccctcaagtgtcccaccagcagcctgagcagtggagccacggcgggcagcagcatgtacacagccacttgccaggcctcctgcagctgagactccagcgcctgccctccctggggtccttgctgcaggccgggtggccaatccaggtgggagagacactcccagggacaagggaaggaagggacacacacacacacacacacacacacacacacacacacatacatcctgctttccctccccaaacccatcagacaggtaaatgggcagtgcctcctgggaccatggacacattttctcctaggagaagcagcctcctaatttgatcacagtggcgagaggagaggaaaaacgatcgctgtgaaaatgaggaggattgcttcttgtgaaaccacaggcccttggggttcccccagacagagccgcaaatcaaccccagactcaaactcaaggtcaacggcttattagtgaaactggggcttgcaagaggaggtggttctgaaagtggctcttctaacctcagccaaacacagagcgggagtgacgggagcctcctctgcttgcatcacttggggtcaccaccctcccctgtcttctctcaaagggaagctgtttgtgtgtctgggttgcttatttccctcatcttgccccctcatctcactgcccagtttctttttgaggggctttgtttgggccactgccagcagctgtttctggaaatggctgtaggtggtgttgagaaagaatgagcattgagacggtgctcgcttctcctccaggtatttgagttgttttggtgcctgcctctgccatgcccagagaatcagggcaggcttgccaccggggaacccagccctggggtatgagctgccaagtctattttaaagacgctcaagaatcctctggggttcatctagggacacgttaggaatgtccagactgtgggtgtagattacctgccacttccaggagcccagagggccaagagagacattgcctccacctctccttggaaatactttatctgtgaccacacgctgtctcttgagaatttggatacactctctagctttaggggaccatgaagagactctcttagggaaaccaatagtccccatcagcaccatggaggcaggctccccctgcctttgaaattcccccacttgggagcttgtatatacttcactcacttttctttattgctgtgaatagtctgtgtgcacaatgggcaattctgacttctcccatctagtggaaatgagcgaaatcatggttgtagtgatgttgtttgggagagtgcagtagtaattgatttgacccactcacacttggagctaattaaggtttgccctgcctgcagcctcccccacaaataatgaacagcagaaagactggacggggaaacctatcaatcctgcccccagccatggtgaggaagccccaagccatggtgacacacagcagcactgcagatagccagacacatggctatcctagagaggctggcaaggagttcgtggctgcaaaagaagtttctggagcaagagagagctcgctcttgggagtcaggacctccggggagagcagagggttccgacggattcctttatgagtcagtctctctctcccttttaaatggtgggaaccctccccaaaacctttccccagacacattctcctgtgcccctcagagaggcatgtgatgtgcaaggaaaataataggatataaaacacatcaagtagaaaatttcttatacttc

SEQ ID NO: 47588 - DNA, 2126 bp, Homo Sapiens
aagttcccctgcagttgtttgggctgtccctgtggctggttctggggtgtgcggccagccatggagcgctctgggcccagcgaagtgacaggctcagacgcgtcgggaccggacccgcagcttgcggtcaccatgggcttcacggggttcggtaaaaaagctcgcacatttgacttggaagcaatgtttgaacaaactcgaaggacagctgtggaaagaagtcgcaaaacactggaagcaagagaaaaagaggaagaaatgaacagagagaaagaattaagaagacaaaatgaagatattgagccaacatcctcaagatcaaatgtggtcagagattgctccaaatcatcttccagggatacgagcagcagtgaaagtgaacagagttctgactcttctgatgatgagttaattggccctcctttaccccctaaaatggtaggaaaaccagttaattttatggaggaagatatcctcggtcctttacctccacctcttaatgaagaagaagaagaagcagaggaagaagaagaggaagaggaggaagaggaaaatcctgttcacaagattcctgactcgcatgagataacgctgaagcatggcactaaaacagtgtctgctttgggtctggatccctcaggtgcccgtttggtgacaggaggatatgactatgatgttaagttttgggattttgctggaatggatgcttcttttaaggcatttcgatcccttcagccctgtgagtgccatcagatcaagtcattacagtatagtaacacaggagacatgattcttgttgtatctggaagctctcaggccaaggtgattgacagagatggttttgaagtaatggaatgtataaaaggagaccagtatattgtggacatggccaacaccaagggtcatacagcaatgcttcatactggctcatggcatcccaaaataaagggagaatttatgacttgctcaaatgatgcgactgtgaggacgtgggaagttgaaaatccaaagaagcaaaaaagtgtgtttaaaccacggacgatgcaaggcaaaaaagtcattcccactacgtgcacatatagtagagatggaaacctcatagcagctgcctgccagaatggaagcatacagatctgggaccgaaatttgactgttcatcctaagttccactataaacaggctcatgactcgggcacagacacttcttgcgtgactttttcctatgatggtaatgtccttgcctctcgtggaggtgacgattcattaaaattatgggacatccgacaatttaataaaccacttttttcagcctcgggtcttcccaccatgttcccaatgactgactgctgtttcagtccagatgataagctcatagtcactggtacatctattcaaagaggatgtggcagcggcaaacttgttttctttgagcgtaggactttccaaagggtgtatgaaatagacatcacagatgcgagtgttgttcgctgcctgtggcatccaaagctgaaccagatcatggttggaactggaaatggattggctaaagtctattacgaccccaacaagagtcagaggggagcaaaattatgtgtggttaaaacccagcggaaggcaaaacaagctgagactctaactcaggactacatcatcacccctcatgccttgcctatgttccgtgagccccgccaacggagtacaaggaaacagctggagaaggacagactggatcccctgaagtcgcataaacctgaacctcctgtagcaggcccaggtcgtggtggccgagttggaacccacgggggcactctctcttcctatattgtgaagaacattgctttggacaagaccgatgacagtaatcctcgggaagccattttgcgtcatgccaaagcagcagaagacagcccatattgggtttctccagcatattccaagactcagcccaaaaccatgtttgcccaagttgaatctgatgatgaggaagcaaagaatgagccagaatggaaaaaacgtaaaatttgaagaatctcatttgagagctgtttgcatgagtgggaggggtatgggacaggtttgggttttttttttatgctcatgaaattaaaaattcatttttatgaaca

SEQ ID NO: 47589 - DNA, 345 bp, Homo Sapiens
atggcctccgtctccaagctcgcctgcatctactcggccctcattctgcacgacgatgaggtgacagtcacggaggataagatcaatgccctcattaaagcagccggtgtaaatgttgaacctttttggcctggcttgtttgcaaaggccctggccaacgtcaacattgggagcctcatctgcaatgtaggggctggtggacctgctccagcagctggtgctgcaccagcaggacgtcctgccccctccactgctgctgctccagctgaggagaagaaagtggaagcaaagaaagaagaatccaaggagtctgatgatgacatgggccttggtctttttgactaa

SEQ ID NO: 47590 - DNA, 1212 bp, Homo Sapiens
ctagaggggcggaaagtaacaaggaggtgggggtacaaatcctcagctcctgcttccgcaagcactaacctgctctgaagtgagccaggcagctctggccatcttttcccagccacagaatcaggtgatggtccagaattaagagctgtcacctgtgtcattcactcacaatggaagaaatgaagaagactgccatccggctgcccaaaggcaaacagaagcctataaagacggaatggaattcccggtgtgtccttttcacctacttccaaggggacatcagcagcgtagtggatgaacacttctccagagctctgagcaatatcaagagcccccaggaattgaccccctcgagtcagagtgaaggtgtgatgctgaaaaacgatgatagcatgtctccaaatcagtggcgttactcgtctccatggacaaagccacaaccagaagtacctgtcacaaaccgtgccgccaactgcaacttgcatgtgcctggtcccatggctgtgaatcagttctcaccgtccctggctaggagggcctctgttcggcctggggagctgtggcatttctcctccctggcgggcaccagctccttagagcctggctactctcatcccttccccgctcggcacctggttccagagccccagcctgatgggaaacgtgagcctctcctaagtctcctccagcaagacagatgcctagcccgtcctcaggaatctgccgccagggagaatggcaaccctggccagatagctggaagcacagggttgctcttcaacctgcctcccggctcagttcactataagaaactatatgtatctcgtggatctgccagtaccagccttccaaatgaaactctttcagagttagagacacctgggaaatactcacttacaccaccaaaccactggggccacccacatcgatacctgcagcatctttagtcaagttggaggagaaagacaacacttggtctaagacacggcagcaagacatccctgcatattgttccagataaaaatgaaagctgctcacacccacttgcctccccaatctgttaaacagcttcgtgtctagtatgagctcagtacttgccctgtgaaaatcccagaagcccccgctgtcaatgttccccatccacaccctgcttgctcctgtgtaacagctcagatgatgaataataataaaactgtacttttttggatggtg

SEQ ID NO: 47591 - DNA, 2260 bp, Homo Sapiens
aagcccagcagccccggggcggatggctccggccgcctggctccgcagcgcggccgcgcgcgccctcctgcccccgatgctgctgctgctgctccagccgccgccgctgctggcccgggctctgccgccggacgcccaccacctccatgccgagaggagggggccacagccctggcatgcagccctgcccagtagcccggcacctgcccctgccacgcaggaagccccccggcctgccagcagcctcaggcctccccgctgtggcgtgcccgacccatctgatgggctgagtgcccgcaaccgacagaagaggttcgtgctttctggcgggcgctgggagaagacggacctcacctacaggatccttcggttcccatggcagttggtgcaggagcaggtgcggcagacgatggcagaggccctaaaggtatggagcgatgtgacgccactcacctttactgaggtgcacgagggccgtgctgacatcatgatcgacttcgccaggtactggcatggggacgacctgccgtttgatgggcctgggggcatcctggcccatgccttcttccccaagactcaccgagaaggggatgtccacttcgactatgatgagacctggactatcggggatgaccagggcacagacctgctgcaggtggcagcccatgaatttggccacgtgctggggctgcagcacacaacagcagccaaggccctgatgtccgccttctacacctttcgctacccactgagtctcagcccagatgactgcaggggcgttcaacacctatatggccagccctggcccactgtcacctccaggaccccagccctgggcccccaggctgggatagacaccaatgagattgcaccgctggagccagacgccccgccagatgcctgtgaggcctcctttgacgcggtctccaccatccgaggcgagctctttttcttcaaagcgggctttgtgtggcgcctccgtgggggccagctgcagcccggctacccagcattggcctctcgccactggcagggactgcccagccctgtggacgctgccttcgaggatgcccagggccacatttggttcttccaaggtgctcagtactgggtgtacgacggtgaaaagccagtcctgggccccgcacccctcaccgagctgggcctggtgaggttcccggtccatgctgccttggtctggggtcccgagaagaacaagatctacttcttccgaggcagggactactggcgtttccaccccagcacccggcgtgtagacagtcccgtgccccgcagggccactgactggagaggggtgccctctgagatcgacgctgccttccaggatgctgatggctatgcctacttcctgcgcggccgcctctactggaagtttgaccctgtgaaggtgaaggctctggaaggcttcccccgtctcgtgggtcctgacttctttggctgtgccgagcctgccaacactttcctctgaccatggcttggatgccctcaggggtgctgacccctgccaggccacgaatatcaggctagagacccatggccatctttgtggctgtgggcaccaggcatgggactgagcccatgtctcctcagggggatggggtggggtacaaccaccatgacaactgccgggagggccacgcaggtcgtggtcacctgccagcgactgtctcagactgggcagggaggctttggcatgacttaagaggaagggcagtcttgggcccgctatgcaggtcctggcaaacctggctgccctgtctccatccctgtccctcagggtagcaccatggcaggactgggggaactggagtgtccttgctgtatccctgttgtgaggttccttccaggggctggcactgaagcaagggtgctggggccccatggccttcagccctggctgagcaactgggctgtagggcagggccacttcctgaggtcaggtcttggtaggtgcctgcatctgtctgccttctggctgacaatcctggaaatctgttctccagaatccaggccaaaaagttcacagtcaaatggggaggggtattcttcatgcaggagaccccaggccctggaggctgcaacatacctcaatcctgtcccaggccggatcctcctgaagcccttttcgcagcactgctatcctccaaagccattgtaaatgtgtgtacagtgtgtataaaccttcttcttctttttttttttttaaactgaggattgtcattaaacacagttgttttct

SEQ ID NO: 47592 - DNA, 429 bp, Homo Sapiens
atgaactgcagcgagagccagcggctgcgaacccttctgagccgcctgttgctcgagctgcaccaccggggtaatgccagcggcttgggcgctggccctcgtcccagcatgggcatgggggtcgtgcctgaccctttcgtgggccgcgaggtgaccagcgccaagggcgacgacgcctatctctacatcctgctcatcatgatcttctacgcctgcttggccggaggcctcatcctggcctacacccgctcccgtaagctcgtcgaggccaaggacgagccgtcccaggcttgcgccgagcacgaatgggccccgggaggcgccctgaccgccgacgccgaggctgccgcgggctcccaggccgagggccgccgccagcttgcctccgaggggctgcctgccctcgcccagggcgctgagcgggtctaa

SEQ ID NO: 47593 - DNA, 2161 bp, Homo Sapiens
gcccctcaaggacgcatcacctaatgccgcggtcacggccaccgtcacaagcgcccccagccccaccccaccccggcctgcccgccgtccttctcccgcccccgcccctgcctgccagctccaccgggccgtaggttgtgcctttttagccaagaagcatggaagtcattcacggcaggccctactgttgcagggagcttgaaggagctgacatactgtccaacaccttttactctaatgaattgcacaaccccctccagacggttactcgcccaactgcctcagaggacaggtatcaggaattaagggagtcacttcaacaatgtaggcttccttggggcgctgaaagagagtatggtgggataataccgatttcactccccgaggaccacaggccaaagtatgagcctcctcgtgtcatgggcaaaggacatcagcattatggatttggtggagaaacctggccaagaaagcttcctgttgaacaattttattatttgacccagaacaaaaaaagtgatgtctatggaaatgattctttgatacccaagccgcctaattcaacagtaggagagatctgcttgccatatccaattgaacacccctaccacacacacatctgtcgcggcgccatgttccccaccttcacgtcacctgaggacctctacacgggcattaaagcccgcacccagcagccctttcctcccacggtgccaaccaaggcttatgattcaacagttttgaagacaagaggtaatccttatagatatgaactgattgatattcccatggattcaaagaagaaagcactgacttggccaggtcaaggtgtatattatgattttcccagaggtgttgagaaaaataagccagtattctacccaaaacctcctaaaaccttcgctcctaacacttctttaaattcatgggaccctatttgctctgccaaagaagccaacatacaaagaaatcttgagaggtcccactggctcacttcgtacactcatgattttacaggtctggggcccatggacccccttgaactggatgattaccatgaaaagatggtagcagagttaacacgaaagataggatttgacccagagccgcaagaaaaattccaccctgtcttcaaacctcccagaccgttggaaggacgaattgcccgattaattcagaaccgacgttctctggaggctatagtccagcaaagaccacgttcctgtccagattgtactcctagagttttgtgtaattttcatacctttgtacccagttctaaagaaatggtggcacttagtgataacataccagccggtgtgacccataaaaaccaggatattgaagagaagatcatagaagaacagagcttgctgtctacctatgaactcccatcttgttacccaacaaaagacctaactagcatttatgacataaagccatttccaaaaatcacagatactaaaaagacagaagatttatactggagacagcagtcactaaaaacccaacccacaccttactgtaaaccagaccactggattcactatgaaaatcttaaatctcccctacgtgatcagtataatatgtgtccagaccctgttagccttagtaaacctagtgttttacaaaataaacaagacacggaagctttcactttagaacattttttaagtaagccagaagaagagttgttcttgaatatggaaaacaatgaagaaacaagacctgttcttggttggattcctagagctggagtgaccaaacctcagaccaacctgctggagcttaagaactctttttcaaaaactggtgcacaaaagcgtttccataaatcaattctagaagaccataaagacctcagggataatgagcattcggggatgaagcaccaattctatggccataattcctattatttctataattgagatactcattcttcccttcaaaacccagcctcttgcaagaagctaaaaaatataacagaatttccttcgtattgctggattctgttttctagattaaaccacaaggaccttgttagtgaggtttacattttcaggaatttaagttagtatctggttggaggaacccagaaaaggtgatgttatgacttcttgaaaagtttaacaatttggcaataaaatattagaactag

SEQ ID NO: 47594 - DNA, 648 bp, Homo Sapiens
atggctgagggctccaggactcaggcccctgggaaagggcccccactcagcatccagttcctgcgagcccagtatgaaggcttgaagaggcagcagaggacccaggcccacctcctggtgcttccaaaaggaggaaacacacctgctcctgcagaatcgatggtcaatgctgtttggattaacaaggagagaagaagctcactgtccctggaagaggcagattctgaggtggaggggaggctggaggaggctgcccagggctgccttcaggcccccaagtctccatggcacacgcacctggagatgcattgtttggtccaaacctccccccaggacaccagtcatcaagtacatcataggggcaagcttgtgggatctgatcaaaggctccctcctgaaggagacacacacttgtttgaaaccaatcagatgactcagcaaggaaccggaatcccagaggctgcccagcttccatgccaggtgggcaatacccaaacaaaggcagtggaatctggcttaaaattcagcactcaatgtcctctttccataaagaacccacacaggtctggcaaaccagcttactatccatttccccagaggaaaacacccaggatctcccaagctgcccggaacctgggcttatatggc

SEQ ID NO: 47595 - DNA, 723 bp, Homo Sapiens
actgtgaagcatcctgtgtgtgtgaagcacccgccgtcagtcaagtatgcccggtgctttctctcagaactcatgaaaaagccctcgggaggctcggtcacactctccaagagcacagccatcatctcccacggcaccacaggcctggtcacatgggacgctgccctctaccttgcagaatgggccgagaacccagcagccttcactcacaggactgtcctaaagcttggcagtggcgccggcctcacaggcctggccatctgcaagatgtgccgcccccgggcgtacatcttcagcgactgtcacagccgggtcctcgagcagctccgagggaatgtccttctcaatggcctctcattagaggcagacatcactgccaacttagacggccccagggtgacagtggcccagctggactgggacgtcgcgacggtctgtcagctctctgccgtccagccagatgttgtcattgcagcagacgtgctgtattgcccagaagccatcgtgtcgctagtcggggtcctgcggaggctggctgcctgccgggagcaccagcgggctcctgaggtctacgtggcctttaccgtccacaacccacagacgtgccagctgttcaccactgagctagttgagatcagatgggaagtggaagcttgtcatgaccagaaactgtttccctacaaagagcacttggagatggcaatgctgaacctaatactgtag

SEQ ID NO: 47596 - DNA, 510 bp, Homo Sapiens
atgctgttggctctagctctgcttctagctttcctgcctcctgccagtcagaaatcttccaacttggaagggagaacaaagtcagtcaccaggccaactgggtcatcagctgtaatcacttgtgatcttcctgtagaaaatgccgtctacacccactggtacctacaccaggaggggaaggccccacagcgtcttctgtactatgactcctacaactccagggttgtgttggaatcaggaatcagtcgagaaaagtatcatacttatgcaagcacagggaagagccttaaatttatactggaaaatctaattgaacgtgactctggggtctattactgtgccacctgggataggcacagtgattcagacctgtgctacaccacactgaaaatctgccttgtgactactcctggtacacaagatagaccagcctcatctcatttcctgcccatgaattcactgtattctgtacaaagagaaacacagcttaactcctcatctctcccctaa

SEQ ID NO: 47597 - DNA, 354 bp, Homo Sapiens
tattgtttcgaaatgcattgtaaacatgttagattcctgatgaatttaaaattgtgtgatgcttctaatcattgtgatcgtcatggagtttgcaacaattttaaccattgccattgtgaaaagggatataatcctccttactgccaaccaaagcaaggagcatttggaagtattgatgatggacacttagtaccaccaactgttacatggaggagggaagatgccacttttcaaaaacaacggtttcaactcattttctacatttctctacctgtgcttcttattactactgccattttaataaaacagaaaaaattgagagagctatgctatagaggggaaaatgaaagtgag

SEQ ID NO: 47598 - DNA, 918 bp, Homo Sapiens
atggcctccaaggattttgcaataggcatgatcttattatctcagatcatggtcggattcctggggaatttctttcttctctaccactatagtttcctttgtttcaccagaggtatgttacagtccacagatctgattctcaagcacctgaccatagccaactccttggttatactctctaaaggaatcccacaaacaatggctgcttttgggttgaaagattccctcagtgatattggatgcaaatttgtgttttatgttcacagagtgggcagggctgtgtgcctgagtgtcttccaggtcatcaccatcagccccagtgaattcaggtgggcagagctgaagctacatgctcacaaatacatcaggtcttttatcctggtcctgtgctggattctgaacacgctggtaaatattactgttcttctacatgtgactggcaagtggaacagcataaatagcacaaagacaaatgattatggatattgttctggaggaagtaggagcagaattccacattcattacatattgtcttgttatcatcccttgatgttttgtgtttggggctcatgaccttggccagtggctccatggtttttatcctgcacaggcacaagcagcaggtccagcacattcatgggaccaacctctccgccagatcctcccctgagtccagagtcacccaaagcatcctggtcctggtgagcaccttgtgttactttactcgctctcctccatctttacatatgtctctttttcctaatcccagttggtggctgttgaacacctctgcactgatcactgcctgttttcccatggtcagcccctttgtgctcatgagccgccatcccaggatacccaggctgggctctgcctgctgtggaaggaatccacagtttcctaagctggtcagatag

SEQ ID NO: 47599 - DNA, 495 bp, Homo Sapiens
ccaatgaagattccagcgggatggcctgaccagcggggccggcactttggagccgtgggtgcagccaggtaccccgtgcagggcctgggaggctctccaggccacagtcctcagagcgtgttgggtcccatgttgtgtgtgggttccatgccctccacacagcaggagagggcttccctgaccacacctgccccctcagtcctgcttctccccagtaagcctgcactgtggggtctccataggaggagctggggaagctggggccctcccaggggtcctgatcgaccctgggggctcttggcctggtttcgtaagatggagcactgcaaaaggccatgctcagaaagcaaacgcagggcagggtgggcctcgagccggggctggaggggtctccacccttgctggcctgagagatggcccacatttcttacttgtgaccgccctgctcttcctggcccccccaggtggctgaacagggtgattttgttgtggtga

SEQ ID NO: 47600 - DNA, 1620 bp, Homo Sapiens
ccgagctgccacctgcggctcgagtgggtgtacggctaccggggccaccagtgccgcaacaacctctactacactgcggccaaggagatcgtatacttcgtggcgggggtcggcgtggtgtacagcccgcgggagcacaggcagaagttctaccggggccacagcgacgacatcatcagccttgcattgcatcctgaacgagtgttggtagcaacaggacaagttgggaaagagccttatatttgtatttgggattcatacactgtgcagaccatatcagttttaaaggatgttcatacacatggtatagcttgcttggcgtttgacttagatggacaggtatgtgacagtttttcatttttttctaaatttattttaatcatgaatctgatttgtttacagatatttgatatttcttgggatttgtaccagccaaataaacttgtcagctgtggtgtaaaacatatcaagttctggagtttatgtggaaatgctctgaccccaaaacgaggtgtctttggtaagacgggtgaccttcagacaatactgtgcctagcctgtgcaagggatgaattaacatattctggtgcactcaatggggatatatatgtttggaaaggaatcaatcttatacgaacaatacaaggagcccatgctcattatatattaaatacaatttactttttactaggtttgtctgtaaggagtgtgtgttggcgaggtgaccacattctagttggaacacaggacagtgaaatttttgaaattgtggtgcaagaaagaaataaaccttttctaattatgcaagggcattgtgaaggtgaactttgggcacttgctgtccatcctactaaacctttggctgtgactggaagtgatgatcgttcggtcaggatatggagcctagtagatcatgcattaatagcaaggtgtaatatggaagaaccaattcgttgtgcagctgtcaatgcagatggaatccatcttgcccttggaatgaaggatggctcattcactgtacttagagtaagagatatgacggaagttgtacatattaaagataggaaggaggcaattcatgagttaaaatattcaccagatggaacttaccttgctgttggatgcaatgacagctcggttgatatttatggagttgctcagcgttataaaaaagttggcgagtgtttgggatcccttagtttcatcactcatctggactggtcttcagacagtagatatttgcagacaaatgatggaaatgggaaaagacttttttatagaatgccaggaggaaaggaagtgacaagtacagaagaaataaaaggtgttcattgggcttcatggacatgtgtttcaggccttgaagtaaatggaatttggcccaagtattcagatatcaacgatataaattcagtagatggaaattatattggccaagttttagttacagctgatgactatggaattataaaattattccgatatccatgtttaagaaaaggggccaagtttagaaaatatattggccattcagctcacgtaactaatgtcagatggtcacatgattatcagtgggttatttctattggtggagcagatcactctgtctttcagtggaaa

SEQ ID NO: 47601 - DNA, 427 bp, Homo Sapiens
cttatcaaaagaaggaccagtactcaagtatcagaaaagggtagccctgtacattgctgctttttgtgggtacattgaactcactgaatgggccctgaagcagggtgcgcggccccacgaggcagtcggtgttcacccctatcgagcatggtgccatgaagcccttcatgcagatgtctctaaatgccccattcatgcagccgcagaagcaggccaactgttgattctgaaggcctttgtcaactacagtgtgctgtgcctggaatgcaaaaatgcagcaggacaaactcccctgaccattgtgttcaaacacaagcataaagactgtgtattatatttgctcagtaaaatgtggtccacagtttcttttccaaaaatttcagtcccaatgaggatttatattaaaataaaacaatggatcctcaga

SEQ ID NO: 47602 - DNA, 1155 bp, Homo Sapiens
aaggctctacaattgaatgagctcaccatggatgatgataccgccgtgctcgtcattgacaacggctctggcatgtgcaaggccggctttgcgggcgacgatgccccccgggctgtcttcccttccatcgtggggcgccccaggcagcagggcatgatggggggcatgcatcagaaagagtcctatgtgggcaaggaggcccagagcaagagaggcatcctgaccctgaagtaccccatggaacacggcatcatcaccaactgggatgacatggagaagatctggcaccacaccttctacaacgagctgcgtgtggcccctgaggagcaccccatcctgctgaccgaggcccccctgaaccccaaggccaaccgcgagaagatgacccagatcatgtttgagaccttcaacaccccagccatgtacgtggccatccaggccatgctgtccctgtacacctctggccgtactactggcatcgtgatggactctggtgacggggtcacccacactgtgcccatctatgatgggaatgccctcccccatgccaccctgcgcctagacctggctgggcgggaactgactgactacctcatgaagatcctcaccgagcgtggctataggttcaccaccatggccgagcgggaaatcgtgcgtgacatcaaagagaagctgtgctatgttgccctggacttcgagcaggagatggccatggcggcctccagctcctccctagagaagagctacgagctgcccgatggccaggtcatcaccatcggcaacgagtggttccgctgccccgaggcgctcttccagccttgcttcctgggcatggaatcctgtggcatccatgaaactaccttcaactccatcatgaagtctgatgtggacatccgcaaagacctgtacaccaacacagtgctgtctggcggcaccaccatgtaccctggcatggcccacagaatgcagaaggagatcgctgccctggcgcctagcatgttgaagatcaggatcattgctcctcccaagcgcaagtactccgtgtgggtcggtggctccatcctggcctcgctgtccaccttccagcagatgtggatcagcaagcaggagtatgatgagtcaggcccctccattgtccaccgcaaatgcttctag

SEQ ID NO: 47603 - DNA, 664 bp, Homo Sapiens
atggaggccgcccgggactatgcaggagccctcatcaggcgagcccctgacatttatgggatcacagactaagcgagtcctgttcaccccgctcatgcatccagctcgccctttccgggtctccaaccatgacaggagcagccggcgtggggtgatggcaagcagcctgcaggagctcatcagcaagactctggatgccctcgtcatcgctaccggactggtcactctggtgctggaggaagatggcaccgtggtggacacagaagagttctttcagaccttgggagacaacacgcatttcatgatcttggaaaaaggacagaagtggatgccgggcagccagcacgtccccacttgctcgccgccgaagaggtcgggaatagcgagagtcaccttcgacttgtacaggctgaaccccaaggacttcatcggctgccttaacgtgaaggccaccatgtatgagatgtactccgtgtcctacgacatccggtgcacgggactcaagggcctgctgaggagtctgctgcggttcctgtcctactccgcccaggtgacgggacagtttctcatctatctgggcacatacatgctccgggtgctggatgacaaggaagagcggccatccctccggtcacaagccaagggcaggttcacgtgtggatag

SEQ ID NO: 47604 - DNA, 1687 bp, Homo Sapiens
ggcgtcttgcaccaaagggaggtcgggatctcggttttccggccccgagagggaccaggtgcctccgccatagcttctgtcgctccatcgcccgcactgtgactggactgttagagggatccgtggagaggaggccaggacacctggaagccgggaaatggattcagtggtctttgaggatgtagatgtgaacttcacccaggaggagtgggctttgctggatccttcccagaagaatctctacagagatgtgatgcaggaaaccttcaggaacctggcttctgaaaaaaatggaaagatcagaaaattgaagatgagtacaaaaatcccaggagaaacctaagaggtcttatgggagagagactcttagaaagtaagaaagatcatcagcatggagaaattttgacccaggttccagatgacatgctgaagaagaaaactccccgagtaaaatcatgtggagaagtcagcgtgggtcatgcatcccttaataggcaccacagagctgacactggacacaagccatatgagtatcaggaatatggacagaagccatataaatgtacatactgtaagaaagccttcagtgatctcccctactttcgaacacatgaatgggctcacactggggggaaaccttatgattgtgaggaatgtggaaaaagctttatttcccgttcaagcattcgaagacacaggataatgcacagtggagatggaccctacaaatgtaacttttgtgggaaagccttgatgtgtctcagtttgtatcttatccacaaacgaactcacactggagagaaaccatatgaatgtaaacagtgtggtaaagcctttagtcattctggtagccttcgaatacatgaaagaactcacactggagagaagccttatgaatgcagtgagtgtgggaaagcattccatagttccacatgcctccatgcacataaaataactcacactggggagaagccgtatgaatgtaaacagtgtgggaaagcctttgtttctttcaattccgttcgatatcatgaaagaactcacactggagagaagccctatgaatgtaagcaatgtgggaaagccttcagatctgcctcgcaccttcgaacacatggaaggactcacactggagagaaaccctatgaatgtaaacaatgtggtaaagcctttggatgtgcctcgagcgttaaaatccatgaaaggactcacactggagaaaaaccctgtagctccaacacttcgaaaggccaaggcgagaagattgcttaattcacataagattcctagaagccaccgaatccaatcatggtaaaaatgtgtttccctcaaatcatgggaaccatcgcaaaattattctgaagcttctgcagtcactgtcatttgacagcattcagaaataaatgccagtagcccaggagcaaaaatttttgggagtagtttagctggggcctcactcagatacctaggacacagagttggaaataactcttaagagagacacacctccagtaagaccttaagacagttctgtcataaaaaaaatacgaggtttggccgggtgcagtggctcatgcctataatcccagcactttgggaggccgaggcaggcggaccacgaggtcagtagttcgagaccagcctggtcaatatggtgaaaccccatctctactaaaaaatacaaaaa

SEQ ID NO: 47605 - DNA, 268 bp, Homo Sapiens
tctcttgcctcctgcagggctggtgaattaccagatctccgtcaagtgcagtaaccagttcaagttggaagtgtgtcttttgaatgcagaaaacaaggtcgtggacaaccaggctgggacccagggccagctgaaggtgctgggtgccaacctctggtggccgtacctgatgcacgaacaccccgcctacctgtactcgtgggaggatggtgattgctcacaccaaagccttggacccctcccagcctgtgacctttgtgaccaactc

SEQ ID NO: 47606 - DNA, 471 bp, Homo Sapiens
atggtcaaccctactgtgttcttcgacatcaccgtcgatggcgagcccttgggcagcgtctccttcgagctgtttgcagagaagtttccaaagacagaagaaaactttcatcttctgagcactggagagaaaggatttggttataaaagttcctgctttcacagaattattccagggtttatgtgtcggggtgatgacttcacatgccataacagcactggtggcaagtccgtctatggggagaagtttgttgacgagaacttcgtcctgaagcatacagatcctggcatcttgtccagggcaaatgctggacccagtacaaatggttcccagttttttacctgcactgctaagaccgagtggttcggcaaggtgaaagaacgcatgattattgtggaggccatggggcgctttgcggggaatgggaagaccagcaagaagatcgctgttgctgactgtgggctactctaa

SEQ ID NO: 47607 - DNA, 2622 bp, Homo Sapiens
attgttccctcccagaggatctaagagtattggaagtttccaaccattggtggtactctatgctcatcctacctcctttgctgaaagacagtgtggcagcgcccctgctgtctgcctactaccctgactgtgttggcatgagcccctcctgcaccagcacaaaccgcgccgctgccactggcaatgccagccctgggaagctggagcactccaaggctgccctctccgtgcacgttccaggcatgaaccgatacttccagcctttctaccagcccaatgagtgtggcaaagccctctgtgtgaggccggatgtgatggaactggatgagctctatgagtttccagagtattcccgagaccccaccatgtacctggctttgagaaacctcatcctcgcactgtggtatactaactgcaaagaagctcttactcctcagaaatgtattcctcacatcatcgtccggggtctcgtgcgtattcgatgcgttcaggaagtggagagaatactgtattttatgaccagaaaaggtctcatcaacactggagttctcagcgtgggagccgaccagtatcttctccctaaggactaccacaatgtagtcatcattatcggggctggtccagcaggattagcagctgctaggcaactgcataactttggaattaaggtgactgtcctggaagccaaagacagaattggaggccgagtctgggatgataaatcttttaaaggcgtcacagtgggaagaggagctcagattgtcaatgggtgtattaacaacccagtagcattaatgtgtgaacaacttggcatcagcatgcataaatttggagaaagatgtgacttaattcaggaaggtggaagaataactgaccccactattgacaagcgcatggattttcattttaatgctctcttggatgttgtctctgagtggagaaaggataagactcagctccaagatgtccctttaggagaaaagatagaagaaatctacaaggcatttattaaggaatctggtatccaattcagtgagctggagggacaggtgcttcagttccatctcagtaacctggagtacgcctgtggcagcaaccttcaccaggtatctgctcgctcgtgggaccacaatgaattctttgcccagtttgctggtgaccacactctgctaactcccgggtactcggtgataattgaaaaactggcagaagggcttgacattcaactcaaatctccagtgcagtgtattgattattctggagatgaagtgcaggttaccactacagatggcacagggtattctgcacaaaaggtattagtcactgtaccactggctttactacagaaaggtgccattcagtttaatccaccgttgtcagagaagaagatgaaggctatcaacagcttaggcgcaggcatcattgaaaagattgccttgcaatttccgtatagattttgggacagtaaagtacaaggggctgacttttttggtcacgttcctcccagtgccagcaagcgagggctttttgccgtgttctatgacatggatccccagaagaagcacagcgtgctgatgtctgtgattgccggggaggctgtcgcatccgtgaggaccctggatgacaaacaggtgctgcagcagtgcatggccacgctccgggagctgttcaaggagcaggaggtcccagatcccacaaagtattttgtcactcggtggagcacagacccatggatccagatggcatacagttttgtgaagacaggtggaagtggggaggcctacgatatcattgctgaagacattcaaggaaccgtctttttcgctggtgaggcaacaaacaggcatttcccacaaactgttacaggggcatatttgagtggcgttcgagaagcaagcaagattgcagcattttaagaattcggtggacccagctttcttctgtaccccagatggggaaatttgaatcacatgttaaacctcagttttataagagggggaaaaaaccgtctctacatagtaaaactgaaatgtttctaaggcgatatgataatgcaaacctatttcatcactctaaaagcactgacctcaaaaaaccttataagcacttagatttaattgcattttccataggttcaactactgctgaaagtctggatttcagaataaagcagaatgtaagtttcagttgaggccatggatttgattgttccatggctggaagttccctttagatttcacattttatatggctgatcaattttcatacattgagaaaccaagtcaatcaagcaggaatcatttaaaaaccagataaagccatgtttttcttctgtgacaatttatcagtatctttaccaatgagccttaatttttatataggtccaatattgagcttttacttaaaatttagatagaacttttttttggatacagcacaaactccagttgacagtaaaatgaagcttctaggtattttgtattgtacatatttcctcctactgggtgttcaaaagaaatttaaattcaagtaccttttgtgataaaatgttttagatttgtgcacccattggcaaaacaggaaagtttccagataggtattgtatcattgagaatgcagcac

SEQ ID NO: 47608 - DNA, 645 bp, Homo Sapiens
gctgagagatatgatgacatcgcagcctgcatgaaatctgtaactgagcaaggagctgaattatccaatgaggagaggaaacttctctcagttgcttctaaaaatgtaggcgcctataggtcattttggagtgttgtctcaagtattgaacaaaagacggaaggtgctgagaaaaaacagcagatggctcgagaatacagagagaaaattcagacagagctaagagatatctgcaatgatgtactgtctcttttggaaaagttcttgatccccagtgcttcacaagcagagagcaaagtcttctatttgaaaatgaaaggagattactaccgttacttggctgaggtcgttgctggtgatgacaagaaagggattgtggatcagtcacaacaagcataccaagaagcttttgaaatcagcaaaaaggaaatgcaaccaacacatgctatcagactggatttactcctctcctgttctcttgcaaagacagcttttgatgaagccattgctgaacttgatatattaagtgaagagtcatacaaagacaacacgctaataatgcagttactgacagacaacttgacattgtggacatcggatacccaaggagacaaagctgaagcaggagaaggaggtgaaaattaa

SEQ ID NO: 47609 - DNA, 2347 bp, Homo Sapiens
caaccctgaatgtcatagttagctactttcaactggaagctacaacatggatttatggaatctgtcttggtttctgttcttggatgctcttctcgtgatttctggcttggttttctccttttataaacataatgttcaattttttgttgttgttgttttaatcaaagatgtagatggcggaatggaccaggacatatttgatatcaatgaaggtttgggactggatctttttgagggtgacatcagacttgatagggcacaaattagaaattccatcattggagaaaagtatagatggcctcataccattccatatgttctagaagatagcttggaaatgaatgctaagggagttatcctcaatgcatttgaacgttatcgccttaaaacatgtattgactttaagccttgggctggagaaacaaactatatatcagtgttcaagggcagtggctgctggtcttcagtaggaaataggcgggttgggaagcaagaactttccatcggggcaaactgtgaccgaatagcaacagttcaacacgagttcctccacgctctgggattctggcatgagcagtcgcgttctgaccgggatgactatgtcaggataatgtgggacagaattctgtcaggcagagagcacaattttaacacctatagtgacgatatatcagattccctgaatgttccctatgattacacttcagtaatgcactacagtaaaactgcattccaaaatggaacagagccgacaattgtcacaagaatctcagactttgaggatgtgatcggccaacgaatggatttcagtgactctgatctcctaaagttgaatcaactgtataactgctcctcttccttgagttttatggactcgtgcagttttgaactggaaaatgtgtgtggcatgatccaaagttcaggagataatgctgactggcaacgggtttcacaggttcccagggggccagagagtgatcactccaacatgggccagtgccaaggttctggtttcttcatgcatttcgatagcagctctgtaaatgtgggggccacagcagtgctggaaagtagaacgctgtaccctaaaagaggatttcagtgcctgcaattttacttatataacagtggcagtgaaagtgatcaactgaacatctatatcagggagtattctgcagacaatgtggatggcaatttaacccttgtggaagaaataaaagaaatacccactgggagctggcaactttatcatgtaacattgaaagtgaccaagaagtttagagtggtgtttgaaggacgcaaaggctctggtgcatcactgggtggtctgtctattgatgacatcaatctttcggaaacacggtgccctcatcatatctggcatataaggaatttcacacagttcattggcagcccaaatggaactctgtatagccctccattttactcttctaaaggttatgcctttcagatttacttaaatctagcccatgtgactaatgcagggatatatttccacttgatctctggagccaatgatgatcaattacagtggccatgtccttggcaacaagccacaatgacacttttggatcaaaatcctgacattcgacagcgtatgtccaatcagcggagtataactacagacccatttatgaccaccgataatggaaactatttctgggacaggccttctaaagtgggaacagtggctttgttctctaatggaactcagtttagaagaggtgggggctatggaaccagtgcctttataacccacgaaaggctgaaaagcagagattttataaaaggagatgatgtttatatcctactgacagtggaagacatatctcacctcaactctacacaaatccagctaacaccagcccctagtgttcaagacctctgctcaaaaaccacctgtaaaaatgacggtgtctgcactgttcgagatggcaaagctgagtgcaggtgccagtcaggggaagactggtggtacatgggagaaaggtgtgaaaagagaggctccacccgagacaccatagtcattgctgtttcatctactgttgctgtgtttgccttgatgctgatcatcacccttgtcagtgtctattgcaccaggaagaaatatcgtgaaaggatgagctcaaatcgaccaaatttgactccgcaaaatcatgctttttgaagattaactcgacaatatggccagctaatgaaattaaaaaggattcttcatcatggatttcgcctaagtgatattacagccacctcattcttctaaaagtggatatttttctgtaaatagctggaaatattataaatcactattttggtcaaagtcaaa

SEQ ID NO: 47610 - DNA, 2544 bp, Homo Sapiens
atggagccgtggaagcagtgcgcgcagtggctcatccattgcaaggtgctgcccaccaaccaccgggtgacctgggactcggctcaggtgttcgaccttgcgcagaccctccgcgatggagtcctgctctgccagctgcttaacaacctccgggcgcactccatcaacctgaaggagatcaacctgaggccgcagatgtcccagtttctctgtttgaagaacataaggacatttctcacggcctgttgtgagacgtttggaatgaggaaaagtgaacttttcgaggcatttgacttgtttgatgttcgtgactttggaaaggttatagaaacattatcacgactttctcgaacacctatagcattggccacaggaatcaggcccttcccaacagaagaaagcattaatgatgaagacatctacaaaggccttcctgatttaatagatgaaacccttgtggaagatgaagaagatctctatgactgtgtttatggggaagatgaaggtggagaagtctatgaggacttaatgaaggcagaggaagcacatcagcccaaatgtccagaaaatgatatacgaagttgttgtctagcagaaattaagcagacagaagaaaaatatacagaaactttggagtcaatagaaaagtatttcatggcaccactaaaaagatttctgacagcagcagaatttgattcagtattcatcaacattcctgaacttgtaaaacttcatcggaacctaatgcaagagattcatgattccattgtaaataaaaatgaccagaacttgtaccaagtttttattaactacaaggaaagattggttatttacgggcagtactgcagtggagtggagtcagccatctctagtttagactacatttctaagacaaaagaagatgtcaaactgaaattagaggaatgttccaaaagagcaaataatgggaaatttactcttcgagacttgcttgtggttcctatgcaacgtgttttaaagtaccaccttctcctccaggaactggtcaaacataccactgatccgactgagaaggcaaatctgaaactggctcttgatgccatgaaggacttggcacaatatgtgaatgaagtgaaaagagataatgagacccttcgtgaaattaaacagtttcagctatctatagagaatttgaaccaaccagttttgctttttggacgacctcagggagatggtgaaattcgaataaccactctagacaagcataccaaacaagaaaggcatatcttcttatttgatttggcagtgatcgtatgtaagagaaaaggtgataactatgaaatgaaggaaataatagatcttcagcagtacaagatagccaataatcctacaaccgataaagaaaacaaaaagtggtcttatggcttctacctcatccatacccaaggacaaaatgggttagaattttattgcaaaacaaaagatttaaagaagaaatggctagaacagtttgaaatggctttgtctaacataagaccagactatgcagactccaatttccacgacttcaagatgcataccttcactcgagtcacatcctgcaaagtctgccagatgctcctgaggggaacattttatcaaggctatttatgttttaagtgtggagcgagagcacacaaagaatgtttgggaagagtagacaattgtggcagagttaattctggtgaacaagggacactcaaactaccagagaaacggaccaatggactgcgaagaactcctaaacaggtggatccaggtttaccaaagatgcaggtcattaggaactattctggaacaccacccccagctctgcatgaaggaccccctttacagctccaggccggggataccgttgaacttctgaaaggagatgcacacagtctgttttggcagggcagaaatttagcatctggagaggttggattttttccaagtgatgcagtcaagccttgcccatgtgtgcccaaaccagtagattattcttgccaaccctggtatgctggagcaatggaaagattgcaagcagagaccgaacttattaatagggtaaatagtacttaccttgtgaggcacaggaccaaagagtcaggagaatatgcaattagcattaagtacaataatgaagcaaagcacatcaagattttaacaagagatggcttttttcacattgcagaaaatagaaaatttaaaagtttaatggaacttgtggagtactacaagcatcattctctcaaggaagggttcagaaccttagatacaactctgcagtttccatacaaggagccagaacattcagctggacagaggggtaatagagcaggcaacagcttgttaagtccaaaagtgctgggcattgccatcgctcggtatgacttctgtgcaagagatatgagagagttgtccttgttgaaaggagatgtggtgaagatttacacaaagatgagtgcaaatggctggtggagaggagaagtaaatggcagggtgggctggtttccatccacatatgtggaagaggatgaataa

SEQ ID NO: 47611 - DNA, 2244 bp, Homo Sapiens
ctggcttgctgctggtcaataaagaatcccatgtggccagaacgtatttatcagagtccatatggagttactgctgtggatttttcaattggagcacctaaccttttagccgttggctatcacaatggcacaattgcaatttacaatgtacggagcaacagtaatgttccagttctggatagtagtgaatcacctcaaaaacatttgggacctgtatggcaactacagtggatagaacaagatcgaggaacaacaggagatggcaaaagagaaatactagtttctatatcagcagatggaagaatctccaaatgggttatacgaaaaggactagactgttatgatttgatgcgattaaagagaactacagctgccagtaacaaaaaaggaggggaaaaggaaaagaaagatgaagctttgatatctcgacaggctcctggaatgtgttttgcttttcatcccaaggacacaaatatctatttggctggcactgaagaaggtcatattcacaaatgttcttgttcatataatgaacaatacttagatacctacagaggacataagggtccagtgtataaagtgacatggaatccattttgtcatgatgtatttttaagctgttctgcagattggggtgttattatatggcaacaggagaatgtcaagccatctttgagtttttatccagctacttctgttgtttacgacgttgcctggtctccaaaatcatcctatatatttgcagctgcaaatgagaacagggtggagatttgggaccttcatatcagcactttggaccctctgattgtgaatactgctaaccctggaatcaagttcacaaccattctctttgccaaacaaacagattgccttctggtaggagacagtgatggacaggtttctgtgtatgaactgagaaatatgcctactgttttggaaactggccggggagatataatggatactttgcttggatccaagtcaaaccaatcagcataattcatcattcctaatatttttcttgtagttgttttaaaaaaggaattaacatccaatattctgtattacatactgtacaccagattttgatttcagaaaacaatatttgatgtataacttccacttaatttaaatttaataaacttttatttcagagatatttgattagtttacaatctaagagttattcttaagagtttcagtggaattttcttaatttttctaaagatattcctactctcttgatcatattctaagtacatatgagtacatgtacattcttatacaatgtctaaatgggttagaaaattattatacctatagaagcgaaacttggaaattaatagaatcacttaaaccaaaatctttataagacacaattctattgattttaaagcttctgctttccaggctctgttttccagagtttataattacgtagtttttagtagatgaaaataatggattcttgtacctaacattttatcctcttagatctaagagccgaagctatagaactttgttagactatttggcaagcaaaatatatgacagtaaatatcagaattttatggtttgaccagcgcttatcacattcccaattcagtgagaaaaattcatctgggacacaacagggtactcttctctgtttgcccagaatcagctctggattttaagcccagacttcagtggacccagatagaaaatataaagtctctgatctataggccacatcaggatgttattttatgaagagttctagagcaaggttgcggaaatcggggtggagatggggagcagtgactcctccaaatattcattgctaacaggccattctatgcagtttgttttaacaaatcctgggttaaactgaggccacaggacatgatgggctgttctataaagcattctaagtggagaggagacgatagggcatatgaaattcactaaactctctggaaaaaaaatatgtatatattaaaaaccaagactggaatcagtgcaacagtgggaactaccttttacaagtatccattgcttcataaactccatttgtttggaccaatcccttaaacaaaagcaaggcaaattttacatggatttagagcctaggtcaggttattaggattataaattttccactggtatgtcattgtgattatctttgtttttgtctttctgaaagattggattttctataacaccttgtgtaagaaaataaaaaacttgatctaactgaaaaaa

SEQ ID NO: 47612 - DNA, 2374 bp, Homo Sapiens
gcagactgatgctttaagactcagggagaggtctttcccttatctccaccccagcaagcaccccagagaccttggagatttgtcttgtttctagacacgtgtactccaatgttgtgcggaggaggccttaaatattcgagaagagagtgggaactcctggaattttaagggatttctgtgtatttccaaaactgacttttaactaccggcagcgtgggatttcgtgattgtttttcgccatcgtgtggctccaacatgtacttcccttcttggttaagtcagctgtacaggggtttatccagacccatcagaaggaccacccaaccgatctggggttctctctacagaagtctgttgcagagttcacagaggagaattccagaattcagtagctttgttgtccggaccaacacatgtggagagttgcgttcgtctcacttaggccaagaagtcaccttgtgtggatggattcagtaccgaaggcaaaacacattcttggtcctaagagatttcgatgggcttgttcaagttatcattccccaggatgagtcggcagcctctgtgaagaagattttatgtgaagcccctgtggaatctgtggtgcaagtgtctggtacagtcatttcccgtcctgcaggacaagagaatccaaaaatgccaacaggtgagattgaaatcaaagttaaaacagctgagcttctgaatgcctgcaagaagctgccctttgaaattaagaacttcgtgaagaaaacagaggctcttcggttgcagtatcgctacttagacttgcgtagtttccaaatgcagtataacctgcgactgaggtcccagatggtcatgaaaatgcgggaatatctctgtaatctgcatgggtttgtggatatagaaacccccacattgtttaagaggaccccagggggtgccaaagagtttttagtaccatccagggaacctggaaagttttattctctccctcagagtcctcaacagtttaagcaacttctgatggttggcggtttagacagatattttcaggttgcccgatgttatcgagatgaaggttcaagaccagacagacagcctgagtttactcagattgacatagagatgtcatttgtagaccagactgggatccagagtttaattgagggtttgctccagtattcctggcccaatgacaaagatcctgtggttgttccttttcctactatgacttttgctgaggtgctggccacctatggaactgataaacctgacactcgctttggaatgaagattatagatatcagtgatgtgtttagaaacacagagattggatttcttcaagatgcacttagtaagccccatggaactgtgaaagccatatgtatccctgaaggagcaaaatacttaaaaaggaaagacattgaatccattagaaactttgcagctgaccattttaatcaggaaatcttacctgtattccttaacgccaatagaaactggaattctccagttgctaatttcataatggagtcacaaagactggaattaatcagactaatggagacccaagaggaagatgtggtcctactaactgctggagagcacaataaagcatgctctttgttaggaaaattacgactggaatgtgctgaccttctagaaacaagaggagtggtgctccgtgaccccactctgttctctttcctttgggtggtagatttcccactcttcctgcccaaggaggaaaatcccagagagctggaatcggcccaccacccatttactgctccccaccccagtgacatacatctcctgtacactgagcccaaaaaggcccgtagccaacactatgacttggttttaaatggcaatgaaataggaggtggttcaattcgaattcacaatgcagagctgcagcgttatatcctggcaaccttactaaaggaggatgtgaaaatgctctcccatctgctccaggctttagattatggggcaccccctcatggaggaattgccttagggttagacagactgatatgccttgtcactggatctccaagcatcagagatgtcatagccttcccaaagtccttccggggacatgacctcatgagcaataccccagattctgtccctcctgaggaactgaagccctatcatatccgagtctccaagccaacagactccaaagcagaaagagctcattgaatcatgcataccatgcagaaagttgagcttttaggttttgtcctctttgcttccccaaggctaaagtcagatctagagttctgccacaggtctaacaatcaagtctttagatggaaggaatccaggcaacattcttcaccacaacgaagaaacagataaaagatacccaattttgacttga

SEQ ID NO: 47613 - DNA, 303 bp, Homo Sapiens
gtgcccaagaggatggtcagctcagcagaagaggtggtgaaggaagagcccaagaggacatcagcgcggttgtctgttaaacctgctgctgcaaaagtggaaatgaagccaaaaatgaaaacaagagagaataaatcttcagacaaaaaagtacaaacaaaagggaaaaaaaacggtgcaaagggagaacagggtgacatggctaaccaagaaactaaagaagatcgacctgcagaaaatagtgacatgaaaaccgaggagaatccagcctttgatgaaatgagagagaaagaagccaagtct

SEQ ID NO: 47614 - DNA, 861 bp, Homo Sapiens
aagatcttacagatggacctgtacgcgctgctagacattgaggagaaggtggcagacaaagaggtggagaaggcatataggcagaaggcctcctcctgctaccctgaaccactggcagctgaactcttccaccagcattctcaggccttggaggtgctgaccgatgctgcagccggggctgcgtatgacaaggtcaggaaagccaagaagcaggcagcagagaggactcagaaactagatgaaaaaaggaataaagtgaagcttgatctggaggcccggaagcgggagcggcagcaccacctgagcaccaggacactagagcgagagatcaaacgcctgagtgaagagggttcccggcagctggaggaagagcagaggctgatctgggagcagatacaccaggagcgtgaccagaggttgagaggaaagcaaaatactaaaggccaaggaacccccaaactaaagctaaaatggaagcgcaagaaggctcggggggagtcaaaaggtggctactccaaagacgtcctcctatggcttttgcaaaagtatggtgaggttctcaacctggtgctttccagtaagaaggtaggcactgctgtggtggagtttgcgactgccaaggctgcggagctggctgtccagaatgaagttggcctggtggataaccctctgaagatttcctggttggagggacagccccagagcaccgtgggccccagccgcccagcactgtcaaagggctcagtgctgtcggtgagggaatacgagagcgtcatcgtgatgcacatgcgccatgcggccgagctgcaatggctgatctcagacatgcaccagcaagaccgagaggggcagcccacgtaa

SEQ ID NO: 47615 - DNA, 366 bp, Homo Sapiens
cagttggaggaggtggtgaagcaaaacttcttgaaggaactgtgtctagtaatccatgggcgactctacgatgttccccactttgaggatccccctggcagagaaaaggttctgctggaacaagctggtgcagatgcaactgaaagttttgtagatgtaggccactcctctgatgccagagaaatgctaaagcagtactataatggtgctgtccatttgagtgacctcaaacctgaaaattgtaaggattcttcaaaaaatgacacatgcaaaagtttctggccatattggattttccctatcataggtgctatcctcttaggttacctgtctcactcctacatattggaaagcaaatcctcctga

SEQ ID NO: 47616 - DNA, 360 bp, Homo Sapiens
ggccgcggcaagactggcggcaaggcccgcgccaaggccaagtcgcgctcgtcgcgcgccggcctccagttcccagtgggccgtgtacaccggctgctgcggaagggccactacgccgagcgcgttggcgccggcgcgccagtgtacctggcggcagtgctggagtacctcaccgctgagatcctggagctggcgggcaatgcggcccgcgacaacaagaagacgcgaatcatcccccgccacctgcagctggccatccgcaacgacgaggagctcaacaagctgctgggcggcgtgacgatcgcccagggaggcgtcctgcccaacatccaggccgtgctgctgcccaagaagaccagc

SEQ ID NO: 47617 - DNA, 4180 bp, Homo Sapiens
gaaatagaacagaattcagccatggccccaagaaagagaggtggacgaggtatttcattcatcttttgctgtttccgaaataatgatcacccagaaatcacgtatcggctgcgaaatgatagcaactttgcgcttcagaccatggaaccagcattgcccatgccccctgtggaggagctggatgtcatgttcagtgaactggtggatgaactggacctcacagacaaacacagagaagccatgtttgcacttccagctgagaaaaaatggcaaatatactgtagcaagaaaaaggaccaggaagaaaacaagggagctacaagttggcctgaattctacattgatcagctcaattccatggctgctagaaaatctctgctggctttagagaaggaagaagaagaagaaagaagtaaaactatagagagtttaaagacagcactgaggacaaaaccaatgaggtttgtaaccagattcatcgacttggatggcctatcatgtatcctcaactttctaaagaccatggactacgagacctcagagtctcgaatacatacttctctcattggctgtataaaggcgttaatgaacaactctcaaggccgggctcacgtcctggctcattctgagagtattaatgtaattgctcagagtctgagcacagagaacattaaaacgaaggtggccgtgctggaaatcttgggcgccgtgtgcctggttcccgggggccacaagaaggttctgcaggccatgctgcactaccagaagtatgccagcgaaaggacccgctttcagacattaattaacgacttggataaaagcactgggcggtatcgagatgaagtgagtctcaagactgccatcatgtccttcattaatgcagtgctcagccaaggtgcaggagtggagagtttggactttagacttcatcttcgctatgaatttctgatgttaggaattcaacctgtaatagataaattaagggaacacgaaaattcaacattagataggcatttagacttttttgaaatgctccgaaatgaagatgaactagaatttgccaaaagatttgaactggttcacatagacacaaaaagtgcaactcagatgtttgagctgaccaggaagaggctgacacatagtgaagcttacccgcatttcatgtccatcctgcaccactgcctccaaatgccttacaagaggagtggcaacactgttcagtactggctactactagatagaattatacagcagatagttatccagaatgacaaaggacaggaccctgactccacacctttggaaaactttaatattaagaatgtcgtacgaatgttggttaatgaaaatgaagttaagcagtggaaagaacaagcggaaaaaatgagaaaagagcacaatgagctacaacagaaactggaaaagaaagaacgagaatgtgatgctaagactcaagagaaggaagagatgatgcagaccttaaataaaatgaaagagaaacttgaaaaggagactactgagcataagcaagtcaagcagcaggtggcggacctcacagcacagctccatgagctcagcaggagggccgtctgtgcttcaatcccaggtggaccctcgcctggagcaccaggagggccctttccttcctctgtgcctggatctctccttcctcccccaccacccccacctctaccaggtgggatgcttccccctccaccgcctcccctccctccaggtggccctcctcctcccccagggcctcctcccttaggggcaatcatgccacctcctggtgctccaatgggcctagcactgaagaagaaaagcattcctcagcccacaaatgccctgaaatccttcaactggtctaaactgcccgagaacaaactggaaggaacagtatggaccgaaattgatgatacaaaagtcttcaaaattctagatcttgaagacctggaaagaaccttctctgcctatcaaagacagcaggatttctttgtgaacagtaactccaagcagaaagaagcagatgccattgatgacactctgagttccaaacttaaagttaaagagctttcggtgattgatggtcggagagctcagaattgcaacatccttctatcgaggttgaaattatccaatgacgaaatcaaacgggcaattctaacaatggacgaacaggaagatctgcccaaggacatgttggaacagctcttgaaatttgttcctgaaaaaagtgacattgacctattggaggaacataaacacgaactggatcggatggccaaggctgataggttcctttttgagatgagccgaattaatcactatcagcaaaggttgcaatcgctgtacttcaaaaagaagtttgcagagcgtgtggcagaagtgaaacctaaagtggaagcaattcgttctggctcagaagaggtgtttaggagtggtgccctcaagcagttgctggaggtggttttggcatttggaaattatatgaataaaggtcaaagagggaatgcatatggattcaagatatctagcctaaacaaaattgctgacacaaaatccagcatcgacaaaaacattacccttttgcactatctcatcactattgtggaaaataagtaccccagtgttctcaatctaaatgaagaattgcgagatattcctcaagctgcgaaagtaaacatgactgagctggacaaagaaataagtaccttgagaagtggcttgaaagcagtagagacagagctggaatatcagaagtctcagcccccacagcccggagataagtttgtgtctgttgtcagccagttcatcacagtagccagcttcagcttctctgatgttgaagaccttctagcagaagctaaagacctgtttactaaagcagtgaagcactttggggaagaggctggcaaaatacaaccagatgagttctttggcatttttgatcaatttcttcaagctgtgtcagaagccaaacaagaaaacgaaaatatgagaaagaaaaaggaggaagaagaacgtcgagctcgcatggaagctcagctcaaagaacaacgtgaaagggaacgtaaaatgagaaaagctaaagagaatagtgaagaaagcggagagtttgatgaccttgtttcagctttacgctcaggagaagtgtttgacaaagacctttctaaattgaaacggaatcgcaaacgtattaccaaccagatgactgacagcagcagagagagaccaatcacaaaacttaatttctaattttccatgaatacttttttttagaaagctcattagcagccctctaaagtgactagaacgtttcattacactgccttgcaatccaaacagtggcaattttttccttcatctgtgagtgaatgtgtgaacgtgtgtatgtaaatgtatgtgtgtatatattaaaaaatgtatatagatgtctgagtgttgtctggagacctatacgtatggttaaaaagatttatgttaatgtatgtgctccaaaacctttcgtgtatgcattcacattgagtgtggctcattttctttccccgaacgccatgactgttcagaagcacaatactatctcctgaaagagataagagacattccctagattcaaaggcaaaacagaagaaacaaacaaacaaacaaaaaaagcttgcaaaatattttatggtttccaagcttgatatcctttaaaattattttcattgatggaactggagttgttggaaaaacatagatttaaaatgatttttgatagctgacattgtgatgttgatgtatcacatcagtaataggaccagctttgaatttctgacattggtgtggggatacagtctgtaaatgtttattgagaacatcttgcacacaatttgaattatgtagaatgtcaatcaagtttttgtatatttaaaagttggacatcaattttttcccctgatttcatcaagttatctctgccaagtgctcttgataatttcttcagatttttggaaaaaaacactatataaatgcaatccatgctttttttaaagaacaacattgccagagtatgcttgttctaacaatatagatatataaaccttaaaaataataaaatatctcacccaagacttaaaggaagaattctctgaagggataaagattactaaaaaaaaaaaaaaaaaaaaaaaattaa

SEQ ID NO: 47618 - DNA, 741 bp, Homo Sapiens
tcggcggttttccggctgcaaacctgcaggggaaataaaatgcgtgaaaaattgctggatgctatccgtcagcacgtcgctgctgaataccccaaagaagcctgcggcctgattgttcagtcaggccagcaacaaatctttattccctgccgcaacattgccgataagcccgaggagacattcacgctctccccggaagaccagctcgctgcccgcgcgcgcggtgagatcatcatgctcattcattcccatccggatgtggttcggctggtgccctcggagctggaccggatccagtgcgactggtcggggattgagtgggggatcatgtcctggccggacggggatttttgtacgatttccccgcgtgaagaccgggattatgccgggcggcagtgggtgctgggttacgccgactgctggtcgcttatccgtgaattttatctgcgcgaatacggcattgttctcggcaattattcagtaccttacgaatggtgggagagcggcaaagagcggctctacgatgacaactgggagcgtgaggggttcgttgagattgacgccggtgctatgcagcccggggacatcatcatgatgagtgtgcaggcatcggtgaccaatcacgccgcttatctgggtgataacatcattctccataatttttttgggcacctttcttcgcgaacgccttatggaaaatattatcgcgacagaacggtccgggtggtcaggcataaggac

SEQ ID NO: 47619 - DNA, 741 bp, Homo Sapiens
atggggtttattaaagttgttaagaataaagcctactttaagagataccaagtgaaatttagaagacgacgagagggtaaaactggttactatcctcagaaatgcttggtgatacaggataaaaataaatacaacacacccaaatataagatgatagttcgtgtaacaaacagagatatcatttgtcagactgcttatgcccgtatagagggggatatagtctgcgcagcatatgcacacaaactgccaaaatgtggtgtgaaggttggcctgacaaattatgctgcaacttattgtactggcctgctgctggcccgcaggcttcccaataggtttggcatggacaagatctatgaaggccaagtggaggagactggcaatgaatacaatgtggaaagcattgatggtcagccaggtgcctttacctgctatttggatacaggtcttgccagaactaccactggcaataaagtttttggcaccctgaagggagctgtggatggaggcttgtctgtccctcacagtaccaaacgattccctagttatgattctgaaagcaaggaatttaatgcagaagtacaccagaagcacatcatgggccagaatgttgcagattacatgcactacttaacagaagaagatgaagatgcttacaagaaccagttctctcaatgcataaagaagagcgtaactccagacatgatggaagagatgtataagaaagctcatgctgctatatga

SEQ ID NO: 47620 - DNA, 1773 bp, Homo Sapiens
gggcgccgctgctgctgttcttcggctcggttctgtctaccgggcagcgccggggccggcggctgcggcggcagaggaacaggagccgggagccgcgttccgccgagagttgggcagaggagcgcccgcgccccggcggcgtcatgggccccctccccgcgcttcagagggcaccagccgcgggaacccccgggcctcctcgcgcccgagcctgagcgaccctcgggttctccggcgccccctccctcgccctattttttttcctactctcgctgccgttaccgcttctgctctccgttatggcaacagagccaccatcccccctccgggtcgaggcgccgggccccccagaaatgcggacctcaccggcgatcgagtccacccctgagggcaccccgcagccggcgggcggcagactccgcttcctcaacggctgcgtgcccctctcgcatcaggtggccgggcacatgtacgggaaggacaaagtgggtatactgcaacatccagatggcacagttttgaaacagttacaaccacctccaaggggcccaagagagctggaattctataatatggtttatgctgctgactgttttgatggtgttcttctagagctacgaaaatatttgccaaaatattatggcatctggtcacctcccactgcaccaaacgatttatacctaaaactggaagatgtgacccataaatttaataagccctgtataatggatgtaaagatagggcaaaaaagctatgatccttttgcctcatctgagaagattcagcaacaggtcagcaagtacccattaatggaagagattgggttcttggtgcttggcatgagggtttatcatgttcattccgatagctatgagacagaaaaccagcattacggaagaagcttaacaaaagaaactataaaggatggagtctccagattttttcataatgggtactgcttaagaaaagatgctgttgctgccagtattcagaagattgagaaaattctgcagtggtttgaaaaccagaagcagcttaatttttacgcaagttcattactctttgtttatgaaggttcatctcagccaaccactacaaaattgaatgacagaactttggcagaaaagtttttgtccaaaggacaactgtcagacacagaagtactagagtacaataataactttcatgtgttaagttccacagctaatggaaaaatagagtcttcagtgggcaaaagcttgtccaagatgtatgcgcgtcacaggaaaatatatacaaaaaagcatcacagtcagacttcattgaaagttgaaaatctggagcaagacaatgggtggaaaagcatgtcacaggaacatttaaatggaaatgtactttcccaactggaaaaagttttctaccatcttcccactggttgccaagagattgctgaagtagaagtgcgaatgatagattttgctcatgtgttccctagcaacacaatagatgagggatatgtttatgggctaaagcatttaatttctgtacttcgaagtattttagacaattgaatcctctgttgcagtctttttaaggggtgggccaatcataatgaagaggggcagtcaatatctgcacctttaatgctatgtaaaaaatttgtattatgagtcgacattttatttgtctttatacttttggaagaatggttaacttttttataatcttactcaggaaaactaactatttgttcattagaaaactatgaagaataaagaaacttaggaatgttaa

SEQ ID NO: 47621 - DNA, 1393 bp, Homo Sapiens
ggccagggccggcgagcgcagtgcagcgccgcgcggtgcgggcggccgagtgggggcgtcatggaggatgagcggagcttttcggatatctgcggcggccgcctggcgctgcagcgccgctactactccccgtcctgccgggaattctgcctcagctgccctcggctctcgctgcgttcgctcaccgctgtcacctgcacggtgtggctggcggcctacggactcttcaccctctgcgagaacagcatgatcctctctgctgccatcttcatcaccctcttaggtctgcttggttatctccattttgtgaagattgatcaggagactctgttaatcattgattcccttggcattcagatgacttcatcttatgcttcaggcaaagaaagcactaccttcatagaaatgggcaaggtcaaggatattgtcatcaatgaggccatttacatgcagaaggtgatttactacctctgcatcttattgaaagatccagtggaaccacatgggatatcccaagtagtacccgtcttccagagtgccaagccccggctggactgcttgattgaagtatacaggagctgccaggagatcctggcacaccagaaagccacatcaacaagcccatgagccccagcgttcagaaggccagcattgtcttccatgggagatgactcttaagccataggggctggttttccgtactccaaaccatcaggtggacacagtcctaggaaccattatggatgtagtgcatcttagagccatagagcaggtgactggaaatctaactcagtatatttccgtgtattatagtgttttccttgtaaggttttgcctactttaccaaaggaggggagaccttaagaattttgacacagtatgtcaaaagtaatgtcagcaaagaacactttcggaaattgctaagcatgttcaggtttactttgttgatgtttgtgaagcaaaacaatgggaaactgacatcagatgtcttgagaaagctatattttccaatagtaccccttgtgtaaagttacgaaaaaaacaagcccttcagtactggttagcaggaagaaatgtcctacaaaagacgagtctgtcaacctagtgcctgtgttctgtacagggcttatttatttactgttaataaacagatcttccaaaacacacagttacctggttcacagatagctgctttttattgacaaacaagatcatagtatttcagtcatggtgtcaagcacattaatacttttctgttactcagcatttttttttatatcagttcaaaagctacttttgccaagaaggatgagacaaaaggccagacagaaattggactttggttttcagacatgggactctcatgttaacaaagaataaataagcaaatatt

SEQ ID NO: 47622 - DNA, 435 bp, Homo Sapiens
atgcagtgcctcctgctcaccctgagcatggccctggtctgtgccatccaggccagggacatcccccagaccaagcaggacgtggagctcccaaagttggcagggacctggtactccatggccatggtggccagtgacttctccctcctggagaccgtggaggcccctctgagggtcaacatcacctcgctgtggcccacccccgagggcaacctggagatcattctgcacagatgggaacaccacagatgcgttgagaggaccgtcctcgcccagaagactgaggacccggctgtgttcatggtcgaccgtcgcgggacaagaaagatctctgtgttggacacagacgacaggagctacgtgttcttctgcatggggaccaccacacccagtgctgaccaccacacgatgtgccagtacctggggatgacacag

SEQ ID NO: 47623 - DNA, 1878 bp, Homo Sapiens
ggcccgtttccggcggcgtcgcgcgtttgcgagcctcgggtggtcctcagggagggtctctcggccagaacacgtggatgcccacccaccactgagcctcatggaggtggtaacatttggcgatgtggctgtgcacttctctcgggaggagtggcagtgtctggaccctggccagagggccctctacagggaagtgatgctggagaaccacagcagtgtggctggactagcaggattcctggttttcaagcctgagctgatctctcggctggagcagggagaagagccatgggtcctcgacctgcagggagcagaggggacagaggcaccaaggacctccaagacaggctttctgggccgcccaaccatgggacaagagccaaggcacccacatgcaccgcctgcaactcctgttcctggccttccaaaacactgctcacaaagactgaccctgcctcctcctgggctctcgtcatctcctcttggccacttcctggttcatgatcaggacagaaggaggggaacgtcagccatatggatggtctgaaaattccagattctgtgctaaccataatgctgtgttcttttcactaacagcaaccagccaaaaaggggctggggtgcaagcttcattctgcttcagcacctggattctctctggattgacatggtcctaagtcaggggctggcaaaccattcgtagctttttacatttctgaatggttggggagaaaataagagacttgtgacatttgaaaactatgttaaaatcgaatttgactgtgcacagtgtccctgggcttggtgatgcccaagcgtcttcatggagcctctggcggctttcttgctgcagcagtgtttaccacaccagccaagtcaccttgaacttggaaaatgacttcatgccctccagccactgaaggattatttttcctctcagcccttagtggtttctttacctaaatgtcacggtacaactgagaataaggcagctgggtcagttcaatagaagtaaacctaaagtccaacaatccaggttagatattagccacggagggatgggaggaggagtcttctttttttttgagacggaatctcgctctgtccctcaggctgaagtgcagtggtgcggtctcggctcactgcaagctccgccacctgggttcacgccattctcctgcctcagcctcccgagtagctgggactacaggtgcctgctaccacgcccggctaatttttttgtatttttaatagagacggggtttcactgtgttagccagctggtctcgatcttctgacctcgtgatccgcccgcctcggcctccctaagtgctgggatgacaggcgtgagccaccatgccgagctgaggaggagtcctcttctagctgcacgatgtggaaatgacacatcatgtccatggggcagcttgctgagagccaagggtgtgagcacatgacttaaattcaagctactgcacagctttgagatctgagtatcacatggaagcatccaggtggcccctggcacacaggctggtggttcttttgtggagagggagaggaagaggggctgctcatggggtagtgcaggtgctagaatatcctgttaacctgttcacactgcactgcaattcgggcttcggtaagctcatctaaagagtttccaggccaggcacggtggctcacgcctgtaattccagcactttgagaggccaaggaaggatcacgtgaccccaggagttcggagaccacagtgagctgtgatcgcaccactgcactctagcctgggtgacagagtgaggccctgtctccacaatatataaataaaaacattttgggtttctgttttggagacaataaattaaatctataacctag

SEQ ID NO: 47624 - DNA, 855 bp, Homo Sapiens
ctgggacttggtggtgctacccttggcctcccacagtcctgccaccctgctgccgccaccatgctgccccctgggactgcgaccctcttgactctgctcctggcagctggctcgctgggccagaagcctcagaggccacgccggcccgcatcccccatcagcaccatccagcccaaggccaattttgatgctcagcagtttgcagggacctggctccttgtggctgtgggctccgcttgccgtttcctgcaggagcagggccaccgggccgaggccaccacactgcatgtggctccccagggcacagccatggctgtcagtaccttccgaaagctggatgggatctgctggcaggtgcgccagctctatggagacacaggggtcctcggccgcttcctgcttcaagcccgagacgcccgaggggctgtgcacgtggttgtcgctgagaccgactaccagagtttcgctgtcctgtacctggagcgggcggggcagctgtcagtgaagctctacgcccgctcgctccctgtgagcgactcggtcctgagtgggtttgagcagcgggtccaggaggcccacctgactgaggaccagatcttctacttccccaagtacggcttctgcgaggctgcagaccagttccacgtcctggacgaagtgaggaggtgaggccggcacacagctccagtgctgagaagtcagtgccccgagagacgaccccaccagtggggtgcccgctgcctgtcctccgtgaaaccagcctcagatcagggccctgccacccagggcaggggatcttctgccggctgccccagaggacagtgggtggagtggtacctacttattaaatgtctc

SEQ ID NO: 47625 - DNA, 153 bp, Homo Sapiens
atggtgtcccaggtgctgcagctgctccggcagggcgtgtgggccgcgctcaccgggggctggtaccacgacccggagcagagcaagttcaccaacagctgccacctctacctgtggctgttcctcctgctgctgcccctggccctgcacctg

SEQ ID NO: 47626 - DNA, 384 bp, Homo Sapiens
gatctgaggctgtcagagatgactctggttctgtccatgaatagattctgcgagcccattgtctcggaaggagctgctgaaattgctgggtaccaaacactatgggaggctgacagctacggaggcccaagccccccagggccagcacaagctcctttgcagggagaccggggagctggtcccccactggcagctccacttggtgacttcctttctgtgtatcaggagcagagcagaggacaacttgtagaagacatgaccattaagagacatcaacttcgcaacaaatataagacaaggatacaaggattcctatgtgatgcagctaggtttttatatccttctaacaaatgtatctgtgacaggctgaagaacgatgactaa

SEQ ID NO: 47627 - DNA, 438 bp, Homo Sapiens
tattcactttacctggaaaaccccacaaaatcatgcaaatcaagaggttcaaatctttgtgttcactgtaagaacactcgtgaaactgcccaggctatcaaggttggtaggtgtacccaggccaagcagtgggactggacacaaggttggtggcccaaaaagagtgctgaatttttgctgcacatgcttaaaaatgcagagagtaatgctgaacttaagagtttagatgtagattctctggtcattgagcatctccaagtgaacaaagcacctacgatgtgccaacggacctacagagctcatggtcggattaactcacacgtgatctctccctgccacatcgaaatgatctttagtgaaaaggaacaaattgttcctaaaccagaagaggcggttgcccagaagaaaaagatatcccagaagaaactgaagaaacaa

SEQ ID NO: 47628 - DNA, 528 bp, Homo Sapiens
atgagaagtaatcctcgcaaaaaagctgaaaactcaaaaagccagagtgtcttttctcctccaaatgattgcaacacttctccagcaagggcacagaacttggcggaggctgagatggatgaaatgacagaagtaggcttccgaaggtgggtaataacgaacttcactgagctgaaagaacatgttttaacccaatgcaaggaagctaagaattatgagaaaacattacaggagctgataaccagaagagccattttggaaaggaacataaatgacctgacagagctgaaaaacacaacacaaaaacttcacaatgcaatcacaagtagcaacagctggatagaccaagtggaggaaagaatctcagagcgtgaagactatctttctgaaataagacagagaggaatagagaaaaaaagaatgaaaaggaatgagcaaaacactgtggcaatttctcaaagacctaaaaacagaactaccattcaaccaagcaatcccattactgagtatatactcaaaggaatataa

SEQ ID NO: 47629 - DNA, 1077 bp, Homo Sapiens
agaccagattcgaatccttatggattaccatgggaattggtgatatgtgccgctgtcgttggattttttgctgttccctttttcttgtggagaagttttagatcggttaggagtcggctttatgtgggaagagagaaaaagcttgctgtagcactttctggactaattgaagaaaaatgtagactacttgaaaaatttagccttgttcaaaaagagtatgaaagctatgaaatagagtcatctttagacgattccagctttgagaaggaggcaacagaagcacagagtttggaggcaacctgtgaaaagctgagcaggtccaattctgaactggagcatgaaataccctgtctagaaaaggagttaaaagaagagaaatctaaacattctgaacaagatgaggtgatggcggatatttccaaaaggatacagtctctagaagatgagtcaaaatccctcaaatcccatgtagctgaagccaaaatgaccttcaagagatttcaaatgaatgaagaaagaatgaagataggaatacaatatgctttaaatgaaaattctcaacttcaggaaagccagaaacagcttttgcaagaagctgaagcatggaaagaacaagtgagtgaacttaataaacaacagaaaataacatttgaagactccaaagtacacgcagaacaagttctaaatgataaagaaaatcacatcaagactctgactgaacgcttgctaaagaaagatcaggctgctgtgctggaagaagacataacagatgatggtaacttggaattagaaatgaacagtgaatcagaagatggtgcttacgtagataatcctccaaaaggagctttgaagaaactgcttcatgctgctaagttaaatgcttctttaacaaccttagaaggagaaagaaaccaaatttatattcagttatctgaagttgataaaaccaaggaagagcttagagggcatattaaaaatcttcagacggaacaagtatctttgcagttggaaaacacacattttgaaagtgagaatcagaagcttcaacagaaacttaaggtaatgacagaattatat

SEQ ID NO: 47630 - DNA, 2645 bp, Homo Sapiens
acacacacacacacacacacacacacacacacacacacactcactctattttgtgctgtcgtaaaacccacgtgtccagccgggaagctgccagagcgtggaaccaaggagccaggacgcggcagcggccaagcgcagcagcccacggcggttgagtcgggcgcccaggtccgtccgcactctcgcgccctccgcgggcctcccaattttctcgcttgcaggtcgggaggtttccgggcggcacaatctctaggactctcctcccgcgctgctcaggggcatgtagcgcacgcagggcgcacactctcgcgcacccgcacgctcaccgagacacccgcacgcacccaccggcagcaccgagttttcaggctggctggtctctcggccctgccggtgtcgcagctgccggtgttcgcgcctctagccgccgctgccgtcgccgccgagccgctgccccccaaggaactgtgcctcggcgccacctccggccccgggcccgtcaagtgcggtggtggtggcggcggcggcggggagggtcgcggcgccccgcgcttccgctgcagcgcagaggagctggactattacctgtatggccagcagcgcatggagatcatcccgctcaaccagcacaccagcgaccccaacaaccgttgcgacatgtgcgcggacaaccgcaacggcgagtgccctatgcatgggccactgcactcgctgcgccggcttgtgggcaccagcagcgctgcggccgccgcgcccccgccggagctgccggagtggctgcgggacctgcctcgcgaggtgtgcctctgcaccagtactgtgcccggcctggcctacggcatctgcgcggcgcagaggatccagcaaggcacctggattggacctttccaaggcgtgcttctgcccccagagaaggtgcaggcaggcgccgtgaggaacacgcagcatctctgggagatatatgaccaggatgggacactacagcactttattgatggtggggaacctagtaagtcgagctggatgaggtatatccgatgtgcaaggcactgcggagaacagaatctaacagtagttcagtacaggtcgaatatattctaccgagcctgtatagatatccctaggggcaccgagcttctggtgtggtacaatgacagctatacgtctttctttgggatccccttacaatgcattgcccaggatgaaaacttaaatgtcccttcaacggtaatggaagccatgtgcagacaagacgccctgcagcccttcaacaaaagcagcaaactcgcccctaccacccagcagcgctccgttgttttcccccagactccgtgcagcaggaacttctctcttctggataagtctgggcccattgaatcaggatttaatcaaatcaacgtgaaaaaccagcgagtcctggcaagcccaacttccacaagccagctccactcggagttcagtgactggcatctttggaaatgtgggcagtgctttaagactttcacccagcggatcctcttacagatgcacgtgtgcacgcagaaccccgacagaccctaccaatgcggccactgctcccagtccttttcccagccttcagaactgaggaaccacgtggtcactcactctagtgaccggcctttcaagtgcggctactgtggtcgtgcctttgccggggccaccaccctcaacaaccacatccgaacccacactggagaaaagcccttcaagtgcgagaggtgtgagaggagcttcacgcaggccacccagctgagccgacaccagcggatgcccaatgagtgcaagccaataactgagagcccagaatcaatcgaagtggattaacggattgactggttggaattaaactgcaaggaaagtcatgattaaatgtcacggacacttaagcaaaaccaaagatttcctctgagcaactttcaatcagtcccagaaaaccaaaagcagtaataaaataagtaagatgttaagagatattgatcctggcatggaagtcagaccaggaaagagattatttatttatgacttagggatgagacttatttcagtggacaactaacctgggatggttaacatttccagtcccaccatgtattttgctttgtttctaaaaagctttttaaaaactgttatttaataccaaagggaggaatcgtatgggttcttctgcccaccgttgtgactaagaatgcacagggacttggttctcgttgcacctttttttagtaacatgtttcatggggacccactgtacagcccttcattctgctgtgtcagtttggcctggcctgacactggctgccccagcggggaccacggaagcagagtgagagccttcgctgagtcaatgctaccttcagccccagacgcatcccatttccatgtcttccatgctcactgctcatgcactttttacacggtttcttccaaacagcccggtcttgatgcaggagagtctggaaaaggaagaaaatggtttcagtttcaaaattcaaaggaaaaagttgaggacttattttgtcctgtcaagattgcaagaacatgtaaaatgtacggagcttcataatacgttatattgttccgaagcagctcgttgagaaacatttgttttcaataacattttagct

SEQ ID NO: 47631 - DNA, 1707 bp, Homo Sapiens
atggcctccaagccggctgccgggaagagcagaggggagaagcggaagagggtggtgctgacactgaaggagaagattgacatctgcacgcgcctggagaagggcgagagccggaaggcactgatgcaggagtacaatgtgggcatgtccaccctctacgacatcagggcccacaaggcgcagctgctccggttcttcgccagctccgactccaacaaggcgctggagcagcggcgcacgctgcacacgcccaagctggagcacctggaccgcgtcctgtacgagtggttcctggggaagcgctccgagggcgtccccgtgtcaggccccatgctcatcgagaaggccaaggacttctacgagcagatgcagctcactgagccctgcgtgttctccggagggtggctttggcgctttaaggccagacacggcattaaaaagctagatgcatccagtgaaaagcagtcagccgaccaccaggccgcggagcagttctgtgcgtttttcaggagcttggctgctgagcacgggctgtccgccgagcaggtttacaacgctgatgagaccggccttttctggcggtgcctgccaaatcccactccggaaggcggggctgtgcctggccccaagcagggcaaggaccggctgaccgtgctgatgtgtgccaacgccacgggctcccacaggctcaagcccttggccatcgggaagtgcagcggtcccagggctttcaaaggcatccagcacctgcccgtcgcctataaggcccaggggaacgcctgggtggacaaggagattttttccgattggttccatcatatctttgtgccctcggtgagagagcacttcagaaccataggtttgccggaagacagcaaagccgttctcttgctggacagctcccgggctcacccgcaggaggccgagctggtgtccagtaacgttttcaccatcttcctgcctgccagcgtggcctcattggtgcagcccatggagcagggcattcggagagatttcatgaggaacttcattaaccctccggtccccctgcagggcccccacgcccgctacaacatgaacgatgccatattcagcgtggcctgtgcctggaacgcagtccctagccacgtcttcaggcgggcctggaggaagctgtggccgtcggttgcgtttgccgaaggctcctcctctgaggaggagttggaggcagagtgcttcccagtgaagccccacaacaagtcctttgcacacatcctggagcttgtgaaggaaggctcctcctgcccgggccagcttcgccagcgccaggccgccagctggggggtagcgggaagggaggcagaagggggacggccccctgctgccacgtcgccagcagaggttgtgtggagttcagaaaagactccgaaagctgaccaggacggcagaggagatcctggtgagggcgaggaggtggcctgggagcaggcggccgtggcctttgacgcagtcctgcgctttgcggagcggcagccatgcttcagtgcgcaggaagtggggcagctgcgggcgctgcgtgccgtgttccggagccagcagcaggtgaggaggcggcgtggtgccctcggggctgtggtcaaggttgaagccctccaggagggccctggtggctgtggggccacagctcagtctcccttgccctgctcatccacagcaggtgacaactga

SEQ ID NO: 47632 - DNA, 772 bp, Homo Sapiens
atggggcagccctgccagcccagcccaggctggcccagcttagccacacatgcgccatgaagtaccctttgatgccgctggtgaacgacctcacattttctttcctggttttctggttctgcctccctgtgggtttgctgttgttattgatcatctggctacgcttcttacttagccaagattcagaggaaaatgactccagtgtgtgcttggattgggagccctggagcaaaggcccagctgagttttgctggaaggggacactccacggccaagagaaggagaggccctgctggtgagcctgctgtgccaggtgaggcccttccaggggccagggggagcctcaaggcccacccaaagccttgggcagctgctatgtgggcaagaggctgcctccaccatattagagtttggttttcctggagtcagcagggcagtggcaatggcagaagtggatgggagagacttgccagggaggcaagaggactttggcaactgtggtgcctccctggaacccccaactcatctcctcttcagaccgacatgtgaaagcctccagaggtcccagcccttctccagcatcacagatgacctccagccctgcagggagccgctcaagtctgggagggcatgggagcagtgagcaggcccatggggagaaattggccaatttaattcagaggggtcttaaagcagggctgggccggagggtgtgggtccatattaaagaagcaagggtcttcccatacccgggggacccctgacaaaccta

SEQ ID NO: 47633 - DNA, 816 bp, Homo Sapiens
ctaccctgtaccgaagacagaggctgtggggacagcctaggggcctggatctattgcctacttagagagaggccaactcagacacagccgtgtatgctcccagcagcaacggagctccgcctgcagggacagaaagacatggtctggaaatggatgccacttctgctgcttctggtctgtgtagccaccatgtgcagtgcccaggacaggactgatctcctcaatgtctgtatggatgccaagcaccacaagacaaagccaggtcctgaggacaagctgcatgaccaatgcagtccctggaagaagaatgcctgctgcacagccagcaccagccaggagctgcacaaggacacctcccgcctgtacaactttaactgggaccactgcggcaagatggagcccgcctgcgccacttcatccaggacacctgtctctatgagtgctcaccctggggccctggatccagcaggtgaatcagagctggcaaagaacgcttcctggatgtgcccttatgcaaagaggactgtcagcgctggtgggaggattgtcacacctcccacacgtgcaagagcaactggcacagaggatgggactggacctcaggagttaacaagtgcccagctggggctctctgccgcacctttgagtcctacttccccactccagctgccctttgtgaaggcctctggagtcactcatacaaggtcagcaactacagccgagggagcggccgctgcatccagatgtggtttgattcagcccagggcaaccccaacgaggaagtggcgaggttctatgctgcagccatgcatgtga

SEQ ID NO: 47634 - DNA, 1330 bp, Homo Sapiens
ggtttttcgcaacccgggcggcgagatggcgctttggtgtaagcgaggaggacagtacaggacatgagtcctggtgagggacccgaggagcaggacagagaagacggcccctgaatcccatttggccccttgctggctggaggtgtgaaaaccagcggtggaggcagccttcggggcctgcatttgagaataagggtgtcactagttccaggcgtctgctgaaagatttggaacagaagatgatggccactccgaaccagaccgcctgtaatgcagagtcaccagtggccctggaggaggccaagacctctggtgccccggggagcccccaaacaccccctgagcgtcatgactctggtggttccctgcccctgacaccgcggatggagagccactcagaggatgaagatcttgctggggctgtcggtggcctgggctggaacagtaggagtccccggacccagagcccagggggctgctcagcggaggctgtgctggcccggaagaaacaccgtcggcggccatcgaagcgcaaaaggcactggcgaccctacctggagctgagctgggctgagaaacaacagcgggatgagaggcagagccagagggcctcccgggtccgcgaagagatgttcgccaaaggccagcccgtggccccctacaacaccacccagttcctgatgaatgacagggacccggaggagcccaacttggatgtgccccatgggatctcccacccaggttccagtggggagagtgaggccggggacagtgatgggcggggccgagcgcacggtgagttccagcggaaggacttctctgagacttacgaacgcttccacaccgagagcctgcagggccgcagcaagcaggagctggtgcgagactacctggagctggagaagcggctgtcgcaggcggaggaggagactaggaggctgcagcagctgcaggcgtgcaccggccagcagtcctgccgccaggtggaggagctggctgccgaggtccagaggctccggaccgaaaaccagcggcttcgtcaggagaaccagatgtggaaccgagagggctgccgctgtgatgaggagccgggtacctaggggtgcctcccagcctggtggacccaaggagaaggtcccatttcgtgcacactcaggccagctgggtctcaaggaggcaggtggcagatgaaaaccaccgtcaacaccctgtgcgccctgagaacagctaaatcggttcagactcccacctcaccgtttccatagttggctcttttgtgtcatcttaccctttacagagaaattaaatggccttggtgggaccaaatggg

SEQ ID NO: 47635 - DNA, 729 bp, Homo Sapiens
atgagtggtgtcataaagctcccaagagtttacgtcttttgtgattggctaccagcagaccatgtgtcaacatatgcagagtttgtgcagacgcacagaccctctggggagtatatgtttgaatttgatgaggaggagcagttctacgtgaacctggatgagaaggagatggtctggcctctaccagagtttattcacacctttgactttggtgctcagaggggtattgctggcatcgtcatggcaaggaagcacttgaacacccggatctggtccaaacagacttgggccacaaatgcccccaccgaggtaagcgtctttcccaaggagcctgtggatctgggccagcccaacaccctcgtctgccatgttgacaagttcttcccaccagtgctgaacatcacgtggctgtgcaatggggagccagtcattgagggtattgcagagaccatcttcctgcccagcaagaaactcagattccacaggttccactatctgaccctcgttcccatggccgaggacacctgtgacctccagggggagcactggggcctgcaccagcctctcctcaggcactgggaggtccatgaactaatccaggtgcctgagaccatggagatgctggtctgtgccctgggcctgctggtgggcctggcgggggtccttaatggcaccattgtctcaaagaccaagcgatctcagcatccccgggtccaggggctcctatga

SEQ ID NO: 47636 - DNA, 905 bp, Homo Sapiens
ttaactgaagggcactgactgggtcactggtgaagttccccgcaggaactgagtcagaccccatctcagggccctgcacaagataggtacctgctctaaggcgtggaccctcgccacagccctggcccgtcttgacgggcgagggttactgtacttgtcccaaccgtacagatgagaaagctgagactcagggccagcaacccgggtcccagcggagcgcccggcacgcgccaacacttcagcaccagtcgcggtggccaccactgtgcgcggagatggctgcgacgcgtgcgcaggtaaagtccatccgtgccttgcctcccaccggcgccttccccggcctctggtttttgtccccgccagcggctccgactccatcgcgtcctcttccagtctagtgcttttttccagatctcgatcccaaactccctcctaccagaatctggacccgaatccacccattgtccgttttccgctgccgctggagagaatctctgaggtccccaggagagcctgcctgcacggaagagacgcctcctcgggaaatttgtgcacagagataacacaggggatatgccatatgaagatgaaggcagaattctacaagcccagggatgccaaagattgccagcaaaccaccagaagctaggagagaagtgtggattagattcttcctcacagccctcagaaggatccagccctgccaagaacttgatctcagacttctagtctccagaactgtgagacagtgcattttgttttgtaagtcagccatatggtttgtggcactttgttatggcagccctaggagatgaagacaatatgcaacatggtatgtccattataggacactgtgggccataaatgtgttctttggcctgaagaaataaaacttggtggtccaa

SEQ ID NO: 47637 - DNA, 3900 bp, Homo Sapiens
atggaagaagcgagcctgtgccttggagtgtcttcggcggagccggaagctgagccccacctgagtggccccgtcctcaacggccagtatgccatgagtcagaagctgcaccagatcacctcccagctcagccatgccttccccgagctccatccccggcccaaccccgaggagaagccccccgcatccctggaggagaaggcccacgtgcccatgagcggccagcccatgggcagtcagatggcgctcctggccaaccagctgggccgggaggtggacaccagcctcaacgggagggtggacttgcagcagttcctcaacgggcagaacctgggcatcatgtcccagatgagcgacatcgaggacgacgcccgcaagaaccgcaagtacccgtgcccactctgcggcaagcgcttccgcttcaacagcatcctctccctgcacatgcgcacgcacacgggcgagaagcccttcaagtgcccgtactgcgaccacagggcggcgcagaaggggaacctcaagattcacctgcggacccacaagctgggcaacctgggcaaggggcgtgggcgtgtgcgcgaggagaaccgcctgctgcacgagctggaggagcgcgccatcctgcgggacaagcagctgaaaggcagcctgctgcagccccggccggacctgaagcccccgccgcacgcccagcaggccccgctggccgcctgcaccctggccctgcaggctaaccacagcgttcccgacgtggcccacccggtgccctcgcccaagcctgccagcgtgcaggaggacgcggtggccccggcggcgggcttccgctgtaccttctgcaagggcaagttcaagaagcgcgaggagctggaccgccacatccgcatcttgcacaagccctacaagtgcacgttgtgcgacttcgcggcttcgcaggaggaggagctcatcagccacgtggagaaggcacacatcacggccgagtcggcccagggccagggccccaacggcggtggcgagcagtcggccaacgagttccgctgcgaggtgtgcggtcaggtgttcagccaggcgtggttcctcaagggtcacatgcgcaagcacaaagactcctttgagcactgctgccagatctgcggccggcgcttcaaggagccctggttcctcaagaaccacatgaaggtccacctcaacaagctgtcggtgaagaacaagtcccccagcgaccccgaggtgcctgtgcccatgggcggcatgtcccaggaggcccacgccaacctgtactccaggtacctctcctgcctgcagagtggcttcatgaccccggacaaagccggcctgagcgagcccagccagctctatggcaagggcgagctgcccatgaaggagaaggaagcgctggggaagctgctgtctcccatctccagcatggcccacggcgtcccggagggggacaagcactccctcctgggatgcctcaatctcgtgccgccgctgaaatccagctgcatcgagcggctgcaggcggctgccaaggctgcggagatggaccccgtgaacagctaccaggcttggcagctcatggccaggggcatggccatggaacatggcttcttgtctaaagagcatccgctgcagcgcaaccacgaagacactttggcaaacgccggggttctgtttgataaggagaagcgggagtacgtgttagtgggagcagatggctccaagcagaaaatgcctgctgatttggttcacagcactaaagtgggcagccagagagacctgccaagtaagctcgaccctttagaaagcagtcgggattttttgtcacacgggctgaaccagactctcgagtataacctgcagggtcctgggaacatgaaggagaagcccaccgagtgccccgactgcggccgggtgttccgcacttaccaccaggtggtcgtgcactcccgtgtccacaagcgggaccgcaagggcgaggaggatgggctgcacgtgggcctggatgagcggcgtggctcgggcagtgaccaggagtcccagtcggtgagccgctccaccacgccgggctcctctaacgtcaccgaggagagcggggtcggaggcggcctctcccagaccgggagtgcccaggaggacagcccgcacccctcctcgccatcctcctcagacattggcgaggaggctgggagatctgccggcgtccagcaaccagcgctgcttcgcgacagaagcctgggctcggccatgaaggactgcccgtactgtgggaaaactttccggacatcccatcaccttaaggtgcacctgaggatacacacaggtgagaaaccctacaagtgtccgcactgtgactatgccggcacgcagtcagcatccttaaaataccacttagagcgacaccatcgggagcggcagaacggggctgggccgctgtctgggcaacccccaaatcaagaccacaaggatgagatgtcaagcaaagcttctctgttcatcaggccagacatcctgaggggggccttcaagggtctccctggaatcgacttcagaggaggccctgcatctcagcagtggacatcaggggttctctcctctggagatcactcggggcaggccacgggcatgtcttcggaggtcccctcagatgctctgaaaggcactgaccttccttccaaaagcacccacttctctgagatcggaagagcttatcaaagcattgtgagcaacggtgtgaatttccaagggtccttgcaagctttcatggacagttttgtcctcagttccttgaagaaggagaaggacatgaaggacaaagccctggctgaccccccttccatgaaagtccacggagtggatggtggtgaggagaaacccagtggcaagtcctcccagaggaagtccgagaaatctcagtatgaacccctggacttgtctgtgcggccagatgccgcctccctcccgggctcctcggtaactgtgcaggacagcattgcatggcacggctgcttgttttgtgctttcacaacgtcctccatggagctcatggcccttcatctccaggccaaccacctgggcaaagcgaaacgcaaagataacaccatcggggtcacagtcaactgcaaagaccaagcccgggaggcgagtaagatggccctgctgccctcgttacaatcaaacaaagacctgggcctctccaatatgatcagctctctagactctgcttctgagaagatggcccaaggtcagctcaaggagactctgggagagcagaagagcggtgcatggaccggccacgtggaccctgcattttgtaacttcccatcagacttctacaagcagtttggtgtttacccaggcatggttggctcaggggcctccagttcctgccccaacaaggagcctgatggaaaggcccactctgaagaggatgtccccatcctgatccccgaaaccacgagtaagaacactactgatgacctctctgacattgcctcctcagaggacatggactcctccaagggggagaacaacgatgaagaggatgttgaaaccgaaccggaaatgatgaccaagccactgtctgccctcagcaaagacagcagcagcgatggcggggacagcctgcagcccacaggcacctcccagcccgtccagggactggtctcacctttatcccaagcaccggagaagcagtggcacagccagggtcttctccaagcccaggaccccttggcgggcctgccaaagccggagcgggggccccagagcctggacaagccgatgaacatgctgtcggtcctcagggcctacagttctgatggcttagcagcctttaacggacttgcaagtagcacagcaaattctggatgtatcaagaggccagacttgtgtggtaag

SEQ ID NO: 47638 - DNA, 705 bp, Homo Sapiens
gtcctgccaatgaaggaggaggacgtcctcaagttcctttcagcaggaacccacttaggtggcaccaaccttgacttccaaatggaacagtacatctatatgaaaagtgatggcatctacatcctaaatcagaagaagacctgggagaagtttctgctggcagctcatgccattgttgtcattgaaatccctgctgatgtcagtgtcatatcctccaggaaaactggccagaaaggcacgccgatattggctgctgtcactggagccactcttgttactggctgcttcactcctagaatattcactaaccagatccaggcagccttccaggagccatggcttctggtggttactaatcccagggaccaccagcccctcacagaggcatcttatgttaacctacctaccattgctttgtgtcacacagattctcctctgtgctatgtggaagttgtcatcccatgcaacaacaagggagctcactcagggggtttgacatggtggatgctggcccagaaagtcctgcacatgcctggcaccatttcccacaaacatccgtgggatgtcatgcctgatttctacatctgcagagatcctgaagagatggaaaaagaccaggctgctgctgaaaaggctgtgaccaacgaggaatttcaggatgaacggactatgccagctcctgagctctccgctactcagtctgag

SEQ ID NO: 47639 - DNA, 3463 bp, Homo Sapiens
cgcagatggacaagggaagagagagaatggccgctgccgccgccgctgctgccgccgccgccgccgccgctcagtgccggagccctcggtgcgcggcggagagaagaggattccggcgggaactcgactcttggcgccaccgcctcatgcactgtgtaggttttgagagtattttagaagggctttatggaccacggctacgaagagacctcagtttatttgaagactgtgaaccagaagagctgactgactggtctatggatgaaaaatgttcattttgtaacctacagagagaagcagtcagtgattgtataccatctcttgattcttcacagtcaacaccaacagaggagctatcatctcagggccagtccaacactgataagattgaatgccaagcagaaaattacctaaatgcactctttcgaaagaaagatcttcctcagaactgtgatcctaacattcccctagttgctcaggaattaatgaaaaagatgatacgtcaatttgcgattgagtacatttcaaaaagtggtaaaactcaagagaatagaaatggttcaattggaccaagtatagtatgtaaaagtatccaaatgaatcaagcagaaaactcccttcaggaagagcaggaaggccccttagacctcactgtgaatcgaatgcaagaacaaaatactcagcaaggggatggagtgttagatctctctacaaagaaaaccagcataaaatctgaagagtcatccatatgtgatccttcttctgaaaattcagtggctggcatgctacaagtgaaaactgatgagaaactgaatgtgtctgatgagaatacagcaagttgccctttgagccccattaagatgtgccttaatcgtcccattgaatggaatctgaatttgacaacagcatctctaacgagctgtacagttcataaccaaaatctcaaaagcgaagagaaatagattgcagttcttcttgcactatctttattttgtatgtcagtattccttctgaacaataagcatttatcaattgatcttgaagtatttctagtcctgtgatttgtctttatattaaatcattagcattaatcattttgattatattctttatatgttttttttacatgttttacatcagatcattgtggaattttgtaaacggattttgatgtttctcttttagtggtattatgtgaattttttatgccctaagtttaaatacgtaattgtccctagttttatttctgtgcacaaagttttaatatataacacattgtgatttataaagctagtattgtaaagatttgtgatgataacctgacccatgagcagttgtaaaacaggtggataccaactacctcgaagcaaattggtgaaagaaaaggcaaaggtatctcttagaagtaaatctccttcaacgttatatatgtacagaagaaaaaaagttgatcatagctttttgtcaagtagcatgtttcccattcacaggaaaatgtgagcttatcagttctttctctgtattttaaatctaagtctgtgggctttaagagcaatggcacaattgcatgtttactgttcagcaaatctgtgcctcttgatagagaaaaatactatgtggtttctgtaagttaccagttttgaatgaaaaatggtaaatggatttacatctgttttattgtaccttagccttttattttaaagttaaagggatgacttttaaaagcaggacattccctacctttaatagtgcaaagcacagtttcagcaatggctacatgactatgtctaaaaactgaatactcagaatactaaaggtttggtgcttaaatttatttttcccatgccagagaaagcaagctttggtatggtaaaccacatgagaacatggctcctttctttttggatagcctggccatgtgtgaatgggattttagcttattatgtttctaagacttttccttacagcacacttaatgtaccttttcagtccttctcccaaccccctgcaaattgtctttaaaacaacaacacataaggaatctgaagcacaggagaacacagagccaacaaacagaatgaagaacaatcatctatttttaactgactttctatcattaccatttttccttttgcttaataactatcttgctttgaaactttgactccttttataagttctatgaggcacatatgtatagcaatttggttctaaaaaccagtgatcttactttagctccatcttaaaatttcaccttaagtaaatggcctctagtagatgataagcctaaaaaaagcacaattattaaaacaaacagatccatgttaggacatttctgaataataaagagaaaaggtgtttcgttgggtattgcagaaaagaggaccaatttcatatagtacaagtttcgtaagtcaggccaagtgtcaatttcaaaagacaagaaatgaaattgacagtgaatagtgctcataaattggtagcgtatataaagagaagttcctgtcacattatattcccactagaattattatccacagtaaataaatattattttgttatgccaaaaatatagcgagcagcttcatggttaataatacatttatgttgacacctccctaatccaggaaacattcacaaacaaggactcccatatacaaatactttaggaagagagatttcccaggcagatatcaccaaaaatgttttcactgtaggaatcacaaaataagtttttgtcaaaataactgttgttgaacgttatactggtcttcctcactggtgattgataagctcctttctagccagtttgtggtacttccttcattttccctagaaatgttacttgttaaatgtgtcctcaggcggtttcatctttgttgattctgcccatctaagtcataagcttctcaaatgcaagctactagctagttacacttgtaagttttccataatgacatgattttaaacataaagagttcataagaatcacttggagagactatttaaaaatgagattcctaggcccacctcagattgtgataaatctgtgtgactgactgatgcacactttttctggactataataactgatgctgctctactgctttaatacaggccaaagtaacgtggaagcgcacagcagaaaatcttcagaaagacatcaggtttgttctgattttgacaagggtaacttcttctttattaaagcaaataactggacataatcttaaaggattccacctccatcgtctttcctaacttagatcttcattgagaaattgggcaaggttaagtttacttttttctagtgctgcggttttggctcgtcttggtagtctcatcttcatttctgattctggttctggaacttcatgatcactaaatagatgttgaaaatacacgaatttagatacaagctttaaaaccagtttatttataaataaaacttttttgtttctga

SEQ ID NO: 47640 - DNA, 1080 bp, Homo Sapiens
aggcggtggggcccacagccatggcggagcctgtgcaggaggagctctcggtcctggccgcgattttctgcaggccccacgagtgggaggtgctgagccgctcagagacagatgggaccgtgttcagaattcacacaaaagctgaaggatttatggatgtggatatacctctggaattggtgttccatttgccagtcaattatccttcatgtctacctggtatctcgattaactctgaacagttgaccagggcccagtgtgtgactgtgaaagagaatttacttgagcaagcagagagccttttgtcggagcctatggttcatgagctggttctctggattcagcagaatctcaggcatatcctcagccaaccagaaactggcagtggcagtgaaaagtgtactttttcaacaagcacgaccatggatgatggattgtggataactcttttgcatttagatcacatgagagcaaagactaaatatgtcaaaattgtggagaagtgggcttcagatttaaggctgacaggaagactgatgttcatgggtaaaataatactgattttactacagggagacagaaacaacctcaaggtgccaaaaagttaaatgtttctggcatttgaagtcaaagagtattcagcgttggatgaattacaaaaggaatttgaaactgcaggacttaagaagcttttctccgaatttgtacttgctctggtaaaatgaaatggaagacaggaatcttttagtaaaatagcagtgttttttgttgtttttgcattggatttggggagtggttaattgaaatagtcaattttaaagtttctctgaagcaaaatgataggcatcattctaacttcaggaacaaaagccagttctgttttatgaaatattaaacatgaagaaaacttgtatattctaatgtttgccaggaaaggctaggttcagtagatgagacattatttaaaagataaatttaaaaagatggtaaatgaacacttgtttttatagacaatatttgtttgaaactatgtaattttctggctaattttcttgtaattaaatgattttttaaaaaaga

SEQ ID NO: 47641 - DNA, 2228 bp, Homo Sapiens
ccagtgcctgccgcccacggccgcaggagtcgggcttcggtcgcaccagagacagcggactttcctccgatggttgcagcagagggatcatgacggggaaaaagtcctcccgggagaaacggcgcaaacgtagcagtcaggaggcggccgcagcgctcgcggccccggacatcgtacccgcgttggccagcggcagcagtggaagcactagcggctgcgggagcgccgggggctgcgggagcgtcagctgctgtgggaacgccaattttagtggaagtgtcaccggcggtgggagcggcggcagctgttggggcgggagcagcgtggagcgcagcgagcgccggaagcggaggagtaccgactcttccagcgtctcgggctccttgcagcaggaaactaaatatattttgccaactttggaaaaagaattattcttggcagagcacagtgaccttgaagaaggtggactggacctgactgtgtcattgaaaccagttagtttctatatatcagacaaaaaagaaatgcttcagcagtgcttctgtattataggagagaaaaagttacagaagatgcttcctgatgtgttaaagaactgttcaatagaagaaattaaaaaactatgccaggaacagttagagctcctgtctgaaaaaaaaattttgaagattcttgagggtgacaatggaatggactctgatatggaagaggaagcagatgatggttctaagatgggatctgatttagtcagtcagcaagacatctgtatagattctgcttcatccgtgagagagaataagcaacctgaaggtttggaattaaaacaaggaaaaggggaagatagtgatgtactcagtataaatgcagatgcttatgacagcgacatagaaggcccatgcaacgaagaagcagctgctcccgaggcaccagaaaatacagtccaaagtgaagctggtcagatagatgacctggagaaagacattgagaaaagtgtgaatgagattctaggactggcagagtctagcccaaacgaacccaaagcagccaccctggctgttcctccaccagaagatgttcaaccttctgcacagcaactggagctgctagaacttgagatgagggcaagagcgattaaagccctaatgaaagctggtgatataaaaaagccagcctaggtatttaacttgattttgaattttaggtatgtttgaacaaagccacatcatttaattttgtatctaaaatttatttggggtcttatatgttatttctcatgtaacccttattaggactcattttagccctaaattacctgtggctgtttctttttatttttttgactacttttatattataaatgtgtgttactgtcttatgaattcatggcaatatagttggatagcctggatactttgttagatgagtatttagctgtgtctgcaaatcttaaaagccattagcaaagagtcgtggtatttttttctttatttttaaatgtttgggcaccaaacctaaaagcaaaagattgacgaagcatgtttctcttaaggctacttgtattttacaatacaatattaaattatttaatttgagaaatttagttttgcttatatgcactttttaaatatatactattttgaagattccttatgtaaatgcaaatttcctagttaaaaccgaataacagagatctgaaatgactgagaaaaacttttttattaaaggaaggaattaatttaaggcaatttttaactatgtagaactaattgcccatgtttaattatagcagacacgccattctaacaggtatttgataccattggatgcattattctaggttttttctttaataaaaatggaacaagttttcatttacattccaagctgtcaggaaatgaagaatattttattatctaggattttatctgatgtagttgcttaaagatctgatgtgctataattccatgaatcagaaataataaaatgctatcattctggatctgaagacttttgatactttttcaaaagcaaaattaatttcaggaacctttgataagttgttgttataattaatctaattttgtatagtttttgtaaataaattaccatccttccacaattagggatgcttttatccccccatcactaattgcagttgtttgataccaaaataaatttacgtagagatccttaacttaaaataaattaattttttcaaaaaacataaa

SEQ ID NO: 47642 - DNA, 435 bp, Homo Sapiens
gccccacgcagactcctggagctggcagggcagagcctgctgagggaccaggccttggccatctccgtcctggatgagctgcccagggagctcttcccccgactgttcgtggaggccttcactagcagacgctgcgaggttctgaaggtgatggtgcaggcctggcccttcccctgcctccctctggggtccctgatgaagacgcctgatctggagatcttacattatgtagtggatgggattgattgcctgcttgcccaaaaggttcgccccaggaggtggaaacttcaagtgctggaaatgcgggatgttgatgagaatttttggaccatatggtctggagccaggcccctgtcctgctccccagaggccatgagtaagagacagacagtggaggactgtccaaggacaggagagaagcagcccttgaaggtg

SEQ ID NO: 47643 - DNA, 672 bp, Homo Sapiens
atggctccttatcacatccgcaaataccaggagagcgaccgcaaggtgggcttgctctcccgggggatggccgaacacgccccagccaccttccggcgattactgaagctgcctcgaaccctcatactcttacttgggggggcccttgccctactcctggtctctggctcctggattctggccctcgtgttcagcctcagcctccttcctgccctgtggttccttgccaaaaaaccctggacgcggtatgtagacatagcattgcgcacagacatgtctgacatcaccaaatcctacctgagtgagtgtggctcctgcttctgggtgggtgaatctgaagagaaggtggtgggcacagtaggagctctgcccgttgatgatcccaccttgagggagaagcggttgcagctgtttcatctctctgtggacaatgagcaccgtggtcaggggatagcaaaagccctggtcaggactgtcctccagtttgcccgggactacagtgaagttgtcctggacaccagcaacatccagctctctgccatgggcctctaccagagcttgggcttcaagaagacgggccagtccttcttccacgtgtgggccaggctggtggatcttcatacagttcatttcatctatcacctcccttctgctcaggcagggcgtctatga

SEQ ID NO: 47644 - DNA, 2633 bp, Homo Sapiens
attatatgagggacaatgactattcccagcttgatgctttggaaagtgcgtttggatttttccattttagacaaatgtcagctttcccccgaagtggcctccatcgtgcttgtttgttccaaatcatttttcaatgctgtgatttcccttctctttgctttaaacactcagtcacgtggcttgtctccaccgtgtggaggtgccgggtgcctggttgggtctctctgcatttctggcaggaagaaggcatttgtgaatactgtcagtacttgtgacaggttggtcacattggaacctttgcccctgttgtttaaaaccgaagaagactgtgactgtggaggtgccccgtgtgctcagcgctcaaatgggaaatggagaagattcccggaacgtgtttggcagtcacttctgagttttccattgagacccgaacatgaagaaaatcttctggctcctgccagttggccaacctctgtctgccttccccagctcacagggctgcacactgcattggggctgtcctccgctgctggaaaatcacgccggtgctcttcacaaacactgaacactggccctctgcttgatccatggaaccaagatgacaggatctcctgcctgttcttgataacagctgtagttttatttcagattttcatttaaacaaatagtttaaggcctcagctgggaaagaggattgaagtatccccaatggacaaagcctctggcacgccagaaagacatgtgactaagcctgagtgactttccttccttcccctcccaggttgctgggagaaataactatgggtttttgacaactctttcccaaaatgaatagtggaaggctgggaaacactgaattatgaaataaagcaaggcagttcattttgtcatccttggcacctgaatcctaaactacggtaatgagatcagccccttaacggagtactccagggtaccttgctcttaggcaatttgtttttctgtgtgtgctcttcaacagactctgcaggaagtggctgacttgatgcaaatgacttttttgttttgttttgtttgagacagagtctcactcttgcccaggctgtagtgctgtggcacgatctcagctcactgcaatcttcacctcctaggctcaagagattctcctgcctcagcctcctgtaatcccgggattacaggtgtgtgccaccacacctggctagtttttgtattttcagtagagacggggtttcaccatgttggccaggctggtcttgaacttctgacctgaagtgatccacctgcttccgcctcccaaagtgctgggatgacaggcgtgagccaccgcgcccagcctgattttggagggttatagttgggaaactatttagtgcgcagatattgtctctgtggtaaacgaggaaactgacaggattccaaaagcctgctgtttgaaggggctcattcagttccaaaaagagatgggagaggcaggaaacgtgaacatatgtgctgcctgccctccattggtttgtttaataacaaattcaccctgtctgggcttgtgacccccctctcatgtttggaagcgctactgcggggttgtagagacaaatgagtcattttctgagctctaatcctgaccccagaggggcatgtggccacttctccctgacttttcccgggggtgacttgcttccgacacctgccgccttactgtttttcctcctcaagcaagcttgttgcaggcacttcttccttacttggtgctgaacttagccacaaggagctgtcatcacgagtgtgggagagggaggagaggggatcacaggggtttcagagggctcactttgagacttgctgatactgacaacagagttgacctggcccaggattcttctaatgctgcgtgtgactgtgtgtctgtgccatagtttttcagtgtgtattcatgcatgatgtatgtgtgtggggtgttgggggtggggggagggcaagagcgttattttctgggtcagaataaccttttaaaatggtaagttttccgctaggagaggaaacccattttgctcatctgtctagatgtttttcttcacctgggccatggagggctttgtttcacaagcttttctcctgtttcgtcgttcaggtggcagagatcgttgctccgccctgtgacacacagcccaccctccatgtcccacgttgggatggattacagaggatgtgccctcctagtggcccccgccagccaccagagtgaagttgatgcttgggtgctattgtgtcggaaattggtgggttcttggtctcactgccttcaagaatgaagccacggaccctcgcggtgagtgttacagttcttaaagatggtgtgtctggagtttgttccttctgatgttcggacgtgttcagagtttcttctttctggtgggttcgtggtctcgctggcttccggactgaagctgcagactttcgcggcaaatggttatagctcttaaggctgcgctcttggagttgttcattcctcccggtgggttcgtggtctggctggcctcagaagtgaagctgcagatcttcgtgttgggtgttacagctcataaaggcagtacagacccaaaaagcgagcagcagcgagatttattacaaagagc

SEQ ID NO: 47645 - DNA, 2332 bp, Homo Sapiens
gtctgcatagaaagaccaacaaccagcaccacttccttgctttttccagccatgaatgcttccagtcggaatgtgtttgacacgttgatcagggtgttgacagaaagtatgttcaaacatcttcggaaatgggtcgtcactcgcttttttgggcattctcggcaaagagcaaggctagtctccaaagatggaaggtgcaacatagaatttggcaatgtggaggcacagtcaaggtttatattctttgtggacatctggacaacggtacttgacctcaagtggagatacaaaatgaccattttcatcacagccttcttggggagttggtttttctttggtctcctgtggtatgcagtagcgtacattcacaaagacctcccggaattccatccttctgccaatcacactccctgtgtggagaatattaatggcttgacctcagcttttctgttttctctggagactcaagtgaccattggatatggattcaggtgtgtgacagaacagtgtgccactgccatttttctgcttatctttcagtctatacttggagttataatcaattctttcatgtgtggggccatcttagccaagatctccaggcccaaaaaacgtgccaagaccattacgttcagcaagaacgcagtgatcagcaaacggggagggaagctttgcctcctaatccgagtggctaatctcaggaagagccttcttattggcagtcacatttatggaaagcttctgaagaccacagtcactcctgaaggagagaccattattttggaccagatcaatatcaactttgtagttgacgctgggaatgaaaatttattcttcatctccccattgacaatttaccatgtcattgatcacaacagccctttcttccacatggcagcggagacccttctccagcaggactttgaattagtggtgtttttagatggcacagtggagtccaccagtgctacctgccaagtccggacatcctatgtcccagaggaggtgctttggggctaccgttttgctcccatagtatccaagacaaaggaagggaaataccgagtggatttccataactttagcaagacagtggaagtggagacccctcactgtgccatgtgcctttataatgagaaagatgttagagccaggatgaagagaggctatgacaaccccaacttcatcttgtcagaagtcaatgaaacagatgacaccaaaatgtaacagtggcttttcaacgggagtaaagcaaagtctctaaagctcctagtacctagaagcattatgaagcagtcaacaatttaggggtacgaaagtaggatgagagccttcaaagtctaccagcacaaagacccctgagccccgcaattgtgatcccacaagacatgcatctccacaaggctactgtattagaacgtgcaatgcatttatatgaaactggtgtatggaagacataggtgctctcttgaaatcttaaatatgattatttgagctcatataaggtggattggagcagataaaattatcaaaagtttcatgaacaggccaaacaaaatattttttaaagtttccttaaagaagttatgaactttagaaaggatcaggggacaataataatctcattttgattctactgataagaatgactccacttttaatgtggacttttactcatggaaaaattgtctcctaatttggggagatgaaccaaccaatcaatgacaagaaaacgcttacacaaagaacaatttgaggctctaagcttctcatgtggtacgtttagacagaggctaaatctgcacactagaatcttgatgataccttcctgcaagacagaatgctttagttaaaagtggtgatgatatttctttcaatctgtattggatggcttaaagggctataaatctgtttataaagagcatttcctgctcttcgaagacagcaatgaggagttggaaggtgcaaagtcagtagagaagggaatgtatcattaatgcacctgagaagaaacagtttcatgtgttcctccacctagagtttgtactggaatgctatttctaaagaagaagtgggaaagagagaggaatgggatggagccccacagtcagaatgttactatgtctttctttccctgacagcccatcttcctaaaagggaccagcttatggaaggctcgaccttgaggggaaagttttactgtgaaagtcttcttcagatccccacctgcatcattccgaatgtgtcctggaaaaaaactggtactcaaagctgcttaggaatcaaaatgttttcagtgtgttgattaatatagtaaatttctgaaactgtg

SEQ ID NO: 47646 - DNA, 3275 bp, Homo Sapiens
aaaggcaggcattctctttccttttccttctctcctgagcgctcctgcagttcctggggcgtagtaggggatccacaagcgtttgtgaccagtgaagttctttacaagggtgagatctgcacgggaggacccgagcgagggtctcggcttgccaggaagccggggttccccgggaagcgtggagttcacccgcgcactcgaagtgcctttgcaaaattatatctgggtgttggcacccagccactattctgccaatgaagtacatcctggtcacgggtggggtcatctcaggcattggtaaagggatcattgccagcagcattggaacgattctaaaatcatgtggactccgagttactgccataaaaatcgacccctatattaacatcgatgctggcactttttcaccttatgaacacggtgaagtcttcgtcttaaatgatggtggagaagttgatttagaccttggaaattatgaaagatttttggatattaatctttataaagacaacaatatcaccacggggaagatatatcagcatgtgatcaataaagagaggcgtggtgattacctggggaaaacagtgcaagttgtccctcacattactgatgctgtccaggagtgggttatgaatcaagccaaggtgccggtggatggtaataaggaagagccccaaatatgcctgggaggcaccattggagacatcgaaggaatgccgtttgtggaggcgtttagacaattccagtttaaggcgaaaagagagaatttctgtaatatccacgttagccttgtcccacagctcagtgctaccggagaacaaaaaaccaaacccacccaaaacagcgtccgcgcactgaggggtttaggcctgtctccagatctgattgtctgccgaagttcaacgcccattgagatggccgtgaaggagaagatttctatgttttgtcacgtgaaccctgaacaggtcatatgtatccatgatgtttcttccacataccgagttcctgtgcttttagaggaacaaagcattgtgaaatattttaaggagagattgcacctgcccatcggtgattctgcaagtaatttgctttttaagtggagaaatatggctgacaggtatgaaaggttacagaaaatatgctccatagccctggttggcaaatacaccaagctcagagactgctacgcctctgtgttcaaagccctggaacactcagccctggccatcaaccacaagttgaatctgatgtacatagactccattgatctggagaagatcactgaaaccgaggaccctgtgaaatttcatgaagcttggcagaagctatgcaaagctgatggtattcttgtgcctggaggctttggaatcagaggaacattgggaaaactccaggcgatttcttgggcaaggacaaagaagattccttttctgggagtttgtcttgggatgcaactagcagtgatagagtttgcaagaaactgccttaacttgaaagatgctgattccacagagtttaggccaaatgccccagttcctctggtgattgatatgcccgagcacaaccctggcaatttgggaggaacaatgagactgggaataagaagaactgttttcaaaactgaaaattcaatattaaggaaactttatggtgatgttccttttatagaagaaagacacagacatcggttcgaggtaaaccctaacctgatcaaacaatttgagcagaatgacttaagttttgtaggtcaggatgttgatggagacaggatggaaatcattgaactggcaaatcatccttattttgttggtgtccagttccatcctgagttttcttctaggccgatgaagccttcccctccgtatctggggctgttacttgcagcaactgggaacctgaatgcctacttgcaacagggttgcaaactgtcttccagtgatagatacagtgatgccagtgatgacagcttttcagagccaaggatagctgagttggaaataagctgaaatgaatacatgactgggaataatggggactgcctgtgaggcctctgaaataattgaaggcaagatgaaggaactatctgaagaaatcactacactcttagagaatccctctgttctccagcaaacatgggatgtaaagcctcacagggaatctgataatacatacttctgtcaaccagaaccagaggggtagttttcttttccctccagaggcagcctttggtacttaaaatatctgtagctgattaaatttttcccaacaacctcactggggagaaagtgtgttcatgttttgtccagcggatcaggatgttaggatgacgagcaagagtccaggtcactgtgcctttgctgtgttgtatggaaaggatggcagggaacatgctgtaagtaattttgagtaagaaaatgagtcactgtgttacctggaactcagccacagatttgtgtgtggtccaagatcattgcagtttctcaccctgtttatttcctggtaaaagtaaaattgaataggtccaagacttgggggtggcaagtaaggctttgcctcaggcacaaaatttaagggggctccaaaaaactcaggaatcaagatcagcaatacagtctgagtatcccttatgtgaaatgcttggggctagaagtgttttgaatttcagattttggaatatttgcatatacatgcgatatcttggggatgagactcaagactaaacatgaaattcatttatgcttcatatacaccttatatacatagcctaaaggtaatttgatacaatattttaaataattttgtgcatgaaacaaagtttcgactgcattttgactgtgatttctggcatgagatcagttatggaattttccacttctagcgtcatgttggcattcagaaattttgaaattttggagcattttggattttcagattagggatgctcaacctgtatatatattttttaatcgacgtgaaattcacgtaacatagaattaaccattttgaagtgaacaatttggttgcattcactgatgttgagcaaccaccacctttaactatttccaaaacattttcatcactccaaaataaatgcctgtacacactagcagtcactccctatcttcccctccacctgtccgctggcaaccactgatctcctttttatttctgtggctttttctattctggatatttcatataagtggaattacacaatatatgtggtcttttgtgtctggcttcttctgagacagtaggaaggggggcttggcttt

SEQ ID NO: 47647 - DNA, 231 bp, Homo Sapiens
tccttagcttgctcatcagtttggaaggaatttggctccgtgggacgttgtaatgtgcacagacatttccaaggaaattctaaacagtcacccttcccttttgcattcccccaaatcttaagtgtatacataaaaccctgggtacatattgttgtggtaatagaagggaattggttaaacagtacacttgtttatggaactttctgtggccacctacgaaagacaagttaa

SEQ ID NO: 47648 - DNA, 951 bp, Homo Sapiens
atgcaaggagaaaacttcaccatttggagcatttttttcttggagggattttcccagtacccagggttagaagtggttctcttcgtcttcagccttgtaatgtatctgacaacgctcttgggcaacagcactcttattttgatcactatcctagattcacgccttaaaacccccatgtacttattccttggaaatctctctttcatggatatttgttacacatctgcctctgttcctactttgctggtgaacttgctgtcatcccagaaaaccattatcttttctgggtgtgctgtacagatgtatctgtcccttgccatgggctccacagagtgtgtgctcctggccgtgatggcatatgaccgttatgtggccatttgtaacccgctgagatactccatcatcatgaacaggtgcgtctgtgcacggatggctacggtctcctgggtgacgggttgcctgaccgctctgctggaaaccagttttgccctgcagatacccctctgtgggaatctcatcgatcacttcacgtgtgaaattctggcggtgctaaagttagcttgcacaagttcactgctcatgaacaccatcatgctggtggtcagcattctcctcttgccaattccaatgctcttagtttgcatctcttacatcttcatcctttccactattctgagaatcacctcagcagagggaagaaacaaggctttttctacctgtggtgcccatttgactgtggtgattttgtattatggggctgccctctctatgtacctaaagccttcttcatcaaatgcacaaaaaatagacaaaatcatctcgttgctttacggagtgcttacccctatgttgaaccccataatttacagtttaagaaacaaggaagtcaaagatgctatgaagaaattgctgggcaaaataacattgcatcaaacacacgaacatctctga

SEQ ID NO: 47649 - DNA, 480 bp, Homo Sapiens
gtgctcgcctcgcagctgcgcccgccggcttcagcaccttccgctgtccgccgctgcagccgcctcctcctccaggcaaacatgtcccaggtaaggcaagtgggattgctggctgctggatgtcagccatggaacaaggatgtatgtgctgccagtggagacaggtttgcatattgtgcgaccctggctatctatatttatcagttggatcaccgttataatgaattcaaacttcacgcaattatgtctgaacataaaaaaacaatcacagcaatttcttggtgtccacataatcctgatctgtttgcaagtggcagtactgataatttagtgatcatttggaatgttgcagaacaaaaagtcattgctaaactcgacagtacaaaagcaagaccaccatctccaaaaattatatatataaaaataattaatattatagaagagaatatacacaactcagagatgcaatggataatataa

SEQ ID NO: 47650 - DNA, 414 bp, Homo Sapiens
ccactcctgcctgtctatgaactagacggagctcccacggctgcccaggtgctgatcatgggacctgatgacttcattgtggccatggttagctccctgaaccagccctttggcagcggccttatcaccccctcggggatcctgctcaacagccagatgctggacttctcctggcccaaccggacagctaaccactctgcacccagcctggagaattcagtgcagccagggaagcggccactctctttcctgctgcccacagtggtccgacccgcggaggggctctgtggaacctacctcgctctgggggccaatggagctgcgcggggcctcagcggcctgacacagcatctgaatagacaaccagccctctttagggtgggatttgaaaggaagggcctgcttttctccaga

SEQ ID NO: 47651 - DNA, 1536 bp, Homo Sapiens
atggatgtgtgtggctggaaagaaatggaggttgcgctggtcaattttgataattcagatgaaatccaagaagagccaggctatgccacagacttcgactcaaccagcccaaaaggccggcctgggggcagctccttctccaacgggaagatcctcatcagcgaaagcaccaaccatgagacggccttctccaagcttccgggagactatgctgaccccccagggcctgagccagtggtcctaaatgaaggaaaccagcgggtgatcatcaacattgctgggctgagatttgagacccagctcagaacccttagtcagttcccagagactctcctgggagaccgggaaaaaaggatgcagttctttgactccatgagaaatgagtatttctttgatcggaaccggcccagttttgatggaatcctatattattaccaatctggtgggaaaattcggcgcccagccaatgttcccattgatatctttgctgatgaaatctccttctatgagctgggtagtgaggccatggaccagttccgggaggatgaaggcttcatcaaagaccctgaaacactgctacccaccaatgacatccaccgtcagttctggctcctctttgagtaccctgaaagttccagcgctgcccgtgctgtggccgtggtctcggtgttggttgtggtcatctccatcaccatcttctgcctggagacactgccagagttccgggaggatagggagctaaaggtggtcagagaccccaatctcaacatgagcaagacagtcctctcccagaccatgttcaccgaccctttcttcatggtggagtctacctgcatcgtgtggttcaccttcgagctggtgctccggttcgtggtctgccccagcaagactgacttcttcaggaacatcatgaacatcattgacatcatctccattatcccctactttgcaactctcatcacagagctagtccaggagacagagccgagtgcccaacagaacatgtccctggccatcctgaggatcatccgcctggtgagggtcttccgcatcttcaagctctcgcgccactccaaggggctgcagatcctcgggcaaacactgaaggcgtccatgcgggagttggggttgctcatcttctttctcttcattggagtcatcctcttctccagtgcagtctactttgctgaggtggatgagccagagtcccatttctctagcattcctgatggcttctggtgggcagtggtcaccatgacaactgtaggctatggggacatgtgcccgaccaccccaggggggaagattgtgggcactctgtgtgccattgcaggggtcctcaccattgccctccctgtgcctgtcattgtctccaacttcaattacttctaccaccgggagactgagaatgaagaaaagcagaacatcccaggagaaattgaaagaatcctcaacagtgtaggctcaagaatgggcagcacagactctcttaataagaccaatggtggctgttccacagagaagtctaggaaatga

SEQ ID NO: 47652 - DNA, 1647 bp, Homo Sapiens
atggcggcaccgctgcttcacacgcgtttgccgggagatgcggccgcttcgccctctgcagtcaagatgctgggcgcgtcgaggactgggatttcaaatatgcgtgcattagagaatgattttttcaattctcccccaagaaaaactgttcagtttggtggaactgtgacagaagtcttgctgaagtacaaaacgggtgaaacaaatgactttgagttgttgaagaaccagctgttagatccagacataaaggatgaccagatcatcaactggctgctagaattccgttcttctatcatgtacttgacaaaagactttgagcaacttatcagtattatattgagattgccttggttgaatagaagtcaaacagtagtggaagagtatttggcttttcttggtaatcttgtatcagcacagactgttttcctcagaccgtgtctcagcatgattgcttcccattttgtgcctccccgagtgatcattaaggaaggcgatgtagatgtttcagattctgatgatgaagatgataatcttcctgcaaattttgacacgcacagagccttgcaaataatagcaagatatgtaccattgacaccgtggtttctcatgccaatactggtggaaaaatttccatttgttcgaaaatcagagagaacactggaatgttacgttcataacttactaaggattagtgtatattttccaaccttgaggcatgaaattctggagcttattattgaaaaactactcaagttggatgtgaatgcatcccggcagggtattgaagatgctgaagaaacagcaaatcaaacttgtggtgggacagattccacggaaggattgtgtaatatggttagcagtttattaatgaaagtggagatgaagtttatcataatcaaagggtggaaacagctagtgctgctcatctttattatcttaggcattaaaaaatatcacaccgacgccctctctttttatggattcgcagaggcatttttggaacctctttggaaaaaattgcaggatccaagtaatcctgccatcatcaggcaggctgctggaaattatattggaagctttttggcaagagctaaatttattcctcttattactgtaaaatcatgcctagatcttttggttaactggctgcacatataccttaataaccaggattcgggaacaaaggcattctgcgatgttgctctccatggaccattttactcagcctgccaagctgtgttctacacctttgtttttagacacaagcagcttttgagcggaaacctgaaagaaggtttgcagtatcttcagagtctgaattttgagtggatagtgatgagccagctaaatcccctgaagatttgcctgccctcagtggttaacttttttgctgcaatcacaaataagtaccagctcgtcttctgctacaccatcattgagaggaacaatcgccagatgctgccagtcattaggagtaccactggaggagactcagtgcagacctgcacaaacccactggacaccttcttcccctttgatccctgtgtgctgaagaggtcaaagaaattcattgatcctatttatcaggtatgggaagacatgagtgctgaagagctacaggagttcaagaaacccatgaaaaag

SEQ ID NO: 47653 - DNA, 351 bp, Homo Sapiens
atggtggtggcagctgccgctgggcctagcccggggtgtggacctgggaactccccagaagggcccgagggggagcctgagcgacggcggaaggcgcacaggctgctaaagctttactacggcctctctgaaggggaggcggtgggactccccatggggcctaaccccctggaccccactgatctgaacggggcgcatttcgacccggaagtttacctagacaagctgcatagagagtgccctctggcccagctgatggacagtgagacagacatggtgcggcagatccaggctctagacagcgacatgcagaccctggtctatgagaactacgacaagttcatcccagcc

SEQ ID NO: 47654 - DNA, 942 bp, Homo Sapiens
atgaaaaaagaacaagattctaatgtgacagaatttgttcttctgggcctatcatcttcttgggagctgcagctatttctcttcttactatttttgtttttttacattgctattgtcctgggaaacctcttgatagtggtaacagtgcaagcccatgctcacctgctccaatctcctatgtattattttttaggtcatctctctttcattgacctatgcctgagctgtgttactgtgccaaagatgttaggggatttcctacagcagggcaagagcatctctttttcaggatgcctggcccagatctacttcctccactttctaggagccagtgagatgtttttgctgacagtcatggcctatgacaggtatgttgccatctgtaaccctttgcgctaccttacagtcatgaacccccagctatgcctttggttggttcttgcctgctggtgtgggggttttatccactctatcatgcaggtcatactagtcatccagctgcctttctgtgggcccaatgaactggacaacttctactgtgatgtcccacaagtcatcaagctggcctgcatggacacctatgtggtagaggtgctggtgatagccaacagtggtctgctgtctcttgtctgcttcttggtcttactattctcttatgctatcatcctgatcaccctgagaacacacttctgccagggccagaacaaggtcttctctacctgtgcttctcacctgacagtggtcagcctgatcttcgtgccatgcgtattcatctatttgaggcctttctgcagcttctctgtggataagatattctccttgttttacacagtgattacacctatgttgaaccccctcatctacacactcagaaatactgatatgaagacagctatgaagaagctgaggataaaaccatgtggcattccattgccttgttaa

SEQ ID NO: 47655 - DNA, 1222 bp, Homo Sapiens
gcagcccgaagcagccagaccagcccctgagcctcccgggtgctggcagctgtcatggggctaccctgggggcagcctcacctagggctgcagatgctcctcctggcgttgaactgtctccggcccagcctgagcctgggtgagtgggggtcctggatggacgcgtccagccagacccaaggggctgggggccctgctggagtgattggaccctgggcgcccgcccccctccgattgggagaggcagccccagggacccccacgcccgtctccgtggctcaccttttgtcccccgtggccacagagctggtgccctacacaccacagataacagcttgggacctggaagggaaggtcacagccaccaccttctccctggagcagccgcgctgtgtcttcgatgggcttgccagcgccagcgataccgtctggctcgtggtggccttcagcaatgcctccaggggcttccagaacccggagacactggctgacattccggcctccccacagctgctgaccgatggccactacatgacgctgcccctgtctccggaccagctgccctgtggcgaccccatggcgggcagcggaggcgcccccgtgctgcgggtgggccatgaccacggctgccaccagcagcccttctgcaacgcgcccctccctggccctggaccctatcgggaagacccccggatccatcgacacctggccagggcggcgaagtggcagcatgatcgtcattacctccatcctctcttctctggccggcctcctactcttggccttcttggcagcctctaccatgcgcttctccagcctgtggtggccggaggaggccccggagcagctgcggatcggctccttcatgggcaagcgctacatgacccaccacatcccacccagagaggccgccacactgccggtgggctgcaagcctggcctggaccccctccccagcctcagcccctagcctggcctctttgcatggggctgggggagatggggcgctgggagtgagtgcatggtgctttgtcccagctcctgcacccacaggccccctcagggctccttgcctttcccccccaccagcacaccccgtaccctgcctggaatcccagcaccagcccccctgcctctcctctgcctttctggtttctctccctctccaagcatctgtaagttgcactcaggagggtttaggggagggccatgggcaggctgg

SEQ ID NO: 47656 - DNA, 2076 bp, Homo Sapiens
ttttttttttttttttaacaatcggatctttcaggaactaatagagcgagaagtcactcattaccacaacagtgccacttatgtggaatctgctcccatgacccaagcacctcacaccaggtcatacctccaacatgaggatcaaatttcagcatgaaatttgaagggagaaaatacccaaactgtattcaatactaagaaactgcatatgagaatattactgtattgttaatagctataggggagggagccatgttgtagactaatcaatccatttatgttcaatttgtttatgttagaaaacctgcactttctctgatattggtagcagtgtaagttcagacttagtaataaaagaaaataactaataaaccattaatgatggggttgtcattttttgcagaagtcatatgatagacatactgtgtaaaattaaataagtcagtgtagaaaaacctccagatgccaaattttaatctgaacaaaaaaattcctgctagagtaaaaccacatgaatgcattgtgtgtgaaaaattcttcataccattcatcccttcataggcacatcatatctcattctggaaacaacccatatgggtgtgaggaatgcggaaagaagccatgtacatgtaaacaatgtcagaaaacttccctttctgtcacaagggttcacagagacacagtaatgcacactggaaatggacattatggttgtacaatatgtgagaaagtttttaatattcccagttcatttcagatacatcagagaaatcacactggagagaaaccctatgaatgtatggaatgtgggaaagccttaggtttttcccgttctcttaatagacataaaaggattcacactggagaaaaacgctatgaatgtaagcaatgtgggaaagccttcagtcgttccagtcaccttcgtgaccatgaaagaactcatactggagagaaaccctatgaatgtaagcactgtgggaaagccttccgttactccaattgccttcattaccatgaaagaactcacactggagagaaaccttatgtgtgcatggaatgtggcaaagctttcagttgtctcagttccttgcaaggacatataaaggctcatgctggtgaagaaccctatccatgtaagcaatgtgggaaagccttcagatacgccagttcccttcagaaacacgagaaaactcatattgcacagaaaccctatgtatgtaacaattgtggtaaaggcttcagatgttccagttcccttcgtgaccatgaaaggactcatactggagagaaaccctatgaatgtcagaaatgtggcaaagcctttagtcgtgctagtaccctttggaagcataaaaaaactcatactggagaaaagccctataaatgtaaaaaaatgtaaaggctttaatcactacagtttttgtcaaaaacatgaacagtcacatacttgagagaaactgtgaatgtaaggtgtaggaaagtacttaattttcccagatttcctcaaatacatgaaacgaatcaaactggagataaaccctatgactataagcaataaggtaaagcattcaatttttccatttctttttgaaaacttgaaaggactcactgaagaaaatccatatgaatgtttaaaatgtggtaaggcctgcagttgttccagtggtatttgatggtataacataactcattctagagaaaaactttatgaaggtatcgaatgtgagaatgccttcatttatcctataactcactcagagacacatggtaacacatactccagattgaccttataaataaaagaatgcccaccagattgaaatcctagaaatacagaaaattctgaattttaacaattactttaaaggtcatgtgaaaactcccactggaaataaatcctgtaaatgtaaatattatggaaaaccttatggaaaataattatagtacaattctcaagaaaattcactatgtgaatgagatgttttaggagctataaataaattgaatatattggttgctcatttttgaagagagtctctagaatatagattttcacttcttttgaaaaaaaaaaaa

SEQ ID NO: 47657 - DNA, 1266 bp, Homo Sapiens
atgtgcaacctcaaggacatccccaacctgacggccctggtgcgcctggaggagctggagctgtcgggcaaccggctggacctgatccgcccgggctccttccagggtctcaccagcctgcgcaagctgtggctcatgcacgcccaggtagccaccatcgagcgcaacgccttcgacgacctcaagtcgctggaggagctcaacctgtcccacaacaacctgatgtcgctgccccacgacctcttcacgcccctgcaccgcctcgagcgcgtgcacctcaaccacaacccctggcattgcaactgcgacgtgctctggctgagctggtggctcaaggagacggtgcccagcaacacgacgtgctgcgcccgctgtcatgcgcccgccggcctcaaggggcgctacattggggagctggaccagtcgcatttcacctgctatgcgcccgtcatcgtggagccgcccacggacctcaacgtcaccgagggcatggctgccgagctcaaatgccgcacgggcacctccatgacctccgtcaactggctgacgcccaacggcaccctcatgacccacggctcctaccgcgtgcgcatctccgtcctgcatgacggcacgcttaacttcaccaacgtcaccgtgcaggacacgggccagtacacgtgcatggtgacgaactcagccggcaacaccaccgcctcggccacgctcaacgtctcggccgtggaccccgtggcggccgggggcaccggcagcggcgggggcggccctgggggcagtggtggtgttggagggggcagtggcggctacacctacttcaccacggtgaccgtggagaccctggagacgcagcccggagaggaggccctgcagccgcgggggacggagaaggaaccgccagggcccacgacagacggtgtctggggtgggggccggcctggggacgcggccggccctgcctcgtcttctaccacggcacccgccccgcgctcctcgcggcccacggagaaggcgttcacggtgcccatcacggatgtgacggagaacgccctcaaggacctggacgacgtcatgaagaccaccaaaatcatcatcggctgcttcgtggccatcacgttcatggccgcggtgatgctcgtggccttctacaagctgcgcaagcagcaccagctccacaagcaccacgggcccacgcgcaccgtggagatcatcaacgtggaggacgagctgcccgccgcctcggccgtgtccgtggccgccgcggccgcc

SEQ ID NO: 47658 - DNA, 897 bp, Homo Sapiens
tttattttagttggattttctaattggcctcatctggaagtagttatctttgtggttgtcttgatcttctacttgatgacactgataggaaacctgttcatcatcatcctgtcatacctggactcccatctgcacacaccaattcccatgtacttttttgtctctaatctatcctttctggacctctgctataccaccagcactgtcccacagatgctggtcaacctccggggaccagaaaagaccattagctatgggggttgtgttgcccaactctatatatttttggccctgggttctactgaatgcatacttctagccatcatggcctttgaccgttacgctgccatttgcaagccccttcactacccagtcatcatgaaccatagacgctgtatccacatggctgctggcacttggatcagtggctttgctaactcccttgtccagtccactctcacagtggtggccccaagatgtggacagagggtgttggaccatttcttctgtgaagttccagcccttttgaaactagcctgtattgatattcgtgtgaatgaaatggagctcaatgtactaggcgctttgcttctcctgatgccactcaccctcatcctgggcacttatgtgttcattgctcaggcagtaatgagaatctgctctgctgaaagtcgctggaaggctttcaatacctgtgcctcacatttgctggtggtctccctcttctacttcacagccatcagtatgtatgtccagcctccctctagctattctcatgaccgggggaagatcatggctctcttttatggcattgtcacacccaccctcaacccattcatctacacattgagaaacaaggatgtgaaagctgccctgagaaggtcactgactaaagag

SEQ ID NO: 47659 - DNA, 1008 bp, Homo Sapiens
atggccgcagcctcgcctctgcgcgactgccaggcctggaaggatgcgaggctcccgctctccaccacaagcaacgaagcctgcaagctgttcgatgccacgctgacccagtatgtaaaatggaccaatgacaagagtctcggtggcatcgagggctgcctgtcaaagctcaaagcagcagatccaacctttgtgatgggccacgccatggctactggccttgtgctgattggcactggaagctccgtgaagctggacaaagagctggacctggctgtgaagacaatggtggagatttcaagaacccagccgctgacaaggcgggagcagctgcacgtgtctgcagtagagacatttgccaatgggaactttccgaaagcctgtgaactatgggaacagattctccaggaccacccgacagacatgttggccctgaaattttcccatgatgcttatttttacctgggctatcaggaacagatgagagattctgttgctcgaatttaccccttctggacacctgacatccccctaagcagctatgtgaaaggcatctactcttttggcttgatggaaaccaacttctacgaccaggcagaaaaactcgccaaagaggctttatctattaacccgacagacgcatggtcggtgcacaccgtcgctcacatccacgagatgaaagcagagatcaaggatgggttggaattcatgcagcactcagagaccttctggaaggactctgatatgttggcttgtcataactattggcactgggctttatatctgattgagaagggcgaatatgaggccgcgctgaccatctacgatacccacatccttcccagcctgcaggccaacgatgcaatgctggacgtggtggacagctgctccatgctctaccgcctgcagatggaaggagtgtctgtgggcggtggcaggatgtcctgcctgtggcccggaagcacagccgagaccacatcctgctgttcaatgacgcacacttcctga

SEQ ID NO: 47660 - DNA, 318 bp, Homo Sapiens
atgacgaaggggaaggaaaatccccatcaaggcaaaaacacagtccaaggctctgaggcccaaattccggggagaggggtgaaggttgtttgtcgcacctgggttaaagggtgggggtggagagtaggagaagaggctacacaggtgagaaggtgtcagatcacaaagggccttgtatgccaaactaagaagactgaacttgaccatgaagttaggcagaccctctggagagttttaaagcaaggagtcgtgtggatgaacaaacctgtgatgggctggggttaccaaggagggcttcctggaggaggtcagacttga

SEQ ID NO: 47661 - DNA, 1970 bp, Homo Sapiens
gaggccgcgccgggagcgcggtggggctaggcgtggggcgctcccggcatgtccctgtaccgcagcgtcgtgtggttcgccaaggggctgcgcgagtacaccaagagtggctatgaatctgcatgtaaagactttgtccctcatgacttggaggtccagattcctggaagagtctttttggtcactggaggaaacagcggcattggcaaagcaactgcccttgaaatcgccaagcgagaacatttttctgcacattgtggacttgtctgatcccaagcaaatctggaaatttgttgaaaatttcaagcaggaacataaactccatgttctgatcaataatgcaggttgcatggtcaataaaagagagctcacagaagatggacttgaaaaaaactttgctgccaatactctgggtgtgtacattctcacgaccggcctgatccctgtgctggagaaagaacacgacccccgagtgataaccgtctcctcaggaggaatgttggttcagaaactgaacaccaatgatctccagtccgaaagaacaccatttgatggaactatggtctatgcacaaaacaagaggcagcaagtggttctgacggagcggtgggcccaagggcacccggccatccatttttcttccatgcatcctggctgggccgacaccccaggtgtgaggcaggcgatgccggggttccacgccaggttcggggaccgcctgcgctccgaggcccagggcgcggacaccatgctgtggctggccctctcctctgccgcagccgcacagcccagcggccgcttctttcaaggtgacttcctccctggctgtgaaggcagctgacacagggctaggggcagcagctgggccttcgaggcgcaccttcccctccgtgaaacctggggtgggactgtcccctggggggtgcctgggcttctttggcgagatgattgctttgcctgctgaggttagttttgggaagcgcttcactccaggttggtagcttctttggagacttgtgataaccctgtcatcaaggtcctgtgagaacgggagaggcagttcctaccttgggaatggaagattttctctgcagtttgctgaggcccaggaggggcgctattcaaagctgcactgcaaagggagtaacggactctgcttctctgcagtgcaaagggtgtaagggactctgcttctctatttttggaagcagtgatctgttcacgtctctccccagtgggctcctaagggggcaggcgtgtgagtggacgccatccgaagacagcacttgacctcgggtggaagccaggctctttgcttggcttctctttcctctgttcttgatgagaaccacccttgcttgaggaattctgaagcgctggtgacccctggggtatccgggaggatggccgcaccccttcctgctgatcacccaaacgtggtctcccgtccagccctggctgcagcctcccagttcccaaactgcactttacatatcaatccatgctgcctgatccctgtgggacctttgacagcagggatgggggtctaacagctgtagggtgctgccactccagcaggcgtcggttcaaggcctgagcagcacagggacatggacccagccacgctgcagcagctcacacctctctgcggttccctctcacttttagatcggaagccagtttctacacacttgcctctcgctacagcgtcctcctcaccggccgaagaggagaaactcattgaaatcctggaacagctggctcagacatttaaataggccaacccagacacagtgcggtaccagaattgccttagaagataccagaaggtgcggtctagggaccagtgaataagaagaccccacttcaacttcccctcgaagacgttgtgcctcacagcgaggcctacaagggatgggaacttttatttcaaaataaatactaccgaggctgtgatcaggctcaccttg

SEQ ID NO: 47662 - DNA, 411 bp, Homo Sapiens
atgggtccgcgggccacgcgaacgggcctcggcccggcggcagcacgggagagatgtgaggagcgcgcggaaggggagcgcggccggggagatcccagcgcggtcaggcccgggagccgaggctcgggggcccgggaactgggcttcccacagcagaagacccaacaaagacaccaggggagcccggcgggctgggcgcgagaagacgtggtagcaggttcgctcctccgagcagacgggaggcgccatcatggggggggtcgcggcccgccccgcgcagaaagagcccccttcccgccgctgcccgcgcccccagcccagcacgaccgcggcggccccacgcgtgcagagacggcggcggcggcgctggaaagcccggggcgccgaggggagggctgggacgcggcatga

SEQ ID NO: 47663 - DNA, 887 bp, Homo Sapiens
caccgcgtcgtcgtcggccgagacattgcgcacggtcaggcggcgctcggtgccctcctcctcgatgccgtacttggcgctcgcccacaaccgcgtctcctccttgaaccacgcggcctcagtggacggctggggcacctcacataggaacgtggccgactccttctcccgcacctccagatcttgcagccgctttttgaagggaaccgcgggctctgccaggagagaagactgctattttgaagcatacatgggaagctggttcctggacccccgcatataccaaaatctgtgcatactcaagttctacggtcagccctgtggaacccaagcataggacaagccggccctccctatacacacaggtttgacatcctgagaacactgctggttcccttcccatttggttccagaaaatctgcgtataagtggactcagtggtgcaaacctatgttgttcaagggtcaactatatatgatgaattattgttacctacagtcactctaccatgctactaaacactagaactgattcattttctctgactgtgtgtctctacccattaaccagcccctcttcatctcccttcccgcttccctccccagcctctggtaaccatcattcagttctctacctccgtgaaatcaacatgagtaagaactggtgaaacccaaacatagtctcgaatttagctttttttttttttttaactgtaagaggctaaacattcttgaggaggacacaaaaaagtctgaagacaactgtccagatgagaatcttgcacttgcacaagtagagaggagagttagtttttataccatcgcatccccaatcccagctttattgatgcataacaaataaaaattgtacatatttaaagtgtacaa

SEQ ID NO: 47664 - DNA, 642 bp, Homo Sapiens
attctagatctgtgtttctccacaaatttcactcccaaaatgctagaaaatttcttatcagagaagaagaccatttcctatgcaggttgtttgatgcagtgctatgttgtcattgctgtggtccttgcagagcactgcatgttggcagtcatggcatatgaccgctatatggccatctgtaatccattgctctacagtagcaaaatgtcccaaggtgtttgtgtccacctggtcattgtcccttatgtctatggctttcttctcagtgtgatggaaaccttaaggacctacaacctctccttctgtggaacaaatgaaatcaaccatttctactgtgctgatcctcctcttatcaaactggcatgctctgacacgtacagcaaggagctgtccatgtacatagtagccggctacagcaacgtccagtctcttctgatcattctcacatcctacatgttcatccttgtcgctatcctcagaagccattctgcagagggaaggaaaaaagctttttccacatgtggttcccacctgacagttgtcacaatcttctatggaaccctcttctgcatgcatttgagacgtcccacagacgagtccgtggagcaggggaaaatggtggctgtgttttacaccacagtg

SEQ ID NO: 47665 - DNA, 888 bp, Homo Sapiens
gctgcgctccttccagggcccaaggactcacagcttcctccgctgccttcccggaccaacaaccccccaaaagttgtgatgcttttctttacccagtgctttggggctgtattagatctcattcatctccggtttcagcactacaaggctaaacgggttttctccgctgccgggcaacttgtctgtgtcgtcaaccccacacacaacctaaagtatgtgtccagtcggcgcgccgtcactcagagcgctccagagcaaggcagcttccaccctcaccatctctcccaccaccactgccaccaccgccaccaccaccacctccgccaccacgcccacccccaccaccttcaccaccaggaggcggggctgcacgccaacccggtgacgccctgcctgtgcatgtgtcccttgttctcctgccagtgggaaggccgcctggaggtggtggtgccccacctgcggcagatccatagggttgacatcctccagggagccgagatcgtcttcctggccacggacatgcacctccccgcgccggctgattggatcatcatgcactcctgccttggccaccactttctgttggtgctgaggaaacaggagaggcatgaagggcacccccagttctttgccaccatgatgctgattgggacccccacccaggccgactgcttcacctatcgcctggagctcaacagaaaccatcggcgcctcaagtgggaggccacgccccggtctgttcttgagtgcgtggactcggtgattacggacggggactgcctcgtcctcaacacctcgctggcacagctcttctctgacaacggcagccttgccattgggattgccatcaccgcgacagaggtcctcccctcagaagctgaaatgtga

SEQ ID NO: 47666 - DNA, 688 bp, Homo Sapiens
cacaagcagaatcttcagaacaggttctccttccccagtcaccagttgctcgagttagaattgtctgcaatggccgccctgcagaaatctgtgagctctttccttatggggaccctggccaccagctgcctccttctcttggccctcttggtacagggaggagcagctgcgcccatcagctcccactgcaggcttgacaagtccaacttccagcagccctatatcaccaaccgcaccttcatgctggctaaggaggctagcttggctgataacaacacagacgttcgtctcattggggagaaactgttccacggagtcagtatgagtgagcgctgctatctgatgaagcaggtgctgaacttcacccttgaagaagtgctgttccctcaatctgataggttccagccttatatgcaggaggtggtgcccttcctggccaggctcagcaacaggctaagcacatgtcatattgaaggtgatgacctgcatatccagaggaatgtgcaaaagctgaaggacacagtgaaaaagcttggagagagtggagagatcaaagcaattggagaactggatttgctgtttatgtctctgagaaatgcctgcatttgaccagagcaaagctgaaaaatgaataactaaccccctttccctgctagaaataacaattagatgccccaaagcgattttt

SEQ ID NO: 47667 - DNA, 465 bp, Homo Sapiens
agaggcgggttaacggccgcggacctggcagttctcaggcttctccaagggagaagcccccttgccagggtctcgatttcccgccaaccaacaaaggttcatttgcctcttatggcctgcgcgggagggttgccatgttttttagattaagtactgcacgactactcgcttctgaaactgtcataagaaactgcctcagctccctgcagggtggacacacaagagcagaatctccgtgggacatctctttggagcatcaatattactacagtatttggaagacacaaatttaaataatttctaaggtaaagaatggaacatttaagacaaggctggaaagtcatctgcctttaataactcatctgtgcctcacatgtcagactttctccaagaaaaaaactaaggagaacttatttccattcttataagtagtaaaaataataaatcatatcaagtcaattgaaa

SEQ ID NO: 47668 - DNA, 363 bp, Homo Sapiens
atgactatcttccactggtggtcagggaagaagggatggagaccgttaatgaggagacctggtcctccaggtgtcttagggttcattataacccaagtcttaatggacttcaccgagtccatgcccaagcctcttttgagcacccactatgtcccaggcactcccaccacagcccggtcactgagaggtttaggggtctcaccagaggtcaaaggcaaaaagcaccccaggacgcccagctttctttgcagcagaagcaagaaatggggagtggcagcttcgtttccagggaagccaggagaggtgactctcatcacccagtcagcctccgtaattagtatgcgtggagtggaaagtaattaa

SEQ ID NO: 47669 - DNA, 1492 bp, Homo Sapiens
tctctacatccaaataaaataaaataaaataaaaaggtaaaaaaaaaagagagagagagagcacgataatttttgtaccaggaatgaaaagggagcccaaaaatctaagcagtgagcaggtgctgaaaccaacgtactcacagagcaagccaaacaggattagactttattactggggactgggcttgaacctccgggctgcagcatcagaggctaacagaatggagagtaaaaaggtgggcaaaagacttggggctggaaagcagcagatgggagcagaattgacagaacagcacatggccaggatatccctccccgctaaaatactaggatactgacttagaaaagcagagggtcagggaaatctaaaaaaaaaagactgacatttctatttaagagacattgcctaaattgctgattaaataaacagatccaaccagatctaaataatattggacatttaattagttttcctattacactgcaggtacagcctcaggaatacttataggcaaaattaaagtgctacttttctatctgcctctctgagttggagtgagttaaatgtgtaacccccacattgtatataataatctcttacaatcttgttcatagtgccacctatggtcacgaccaattagagctggtaaggcagctgtactgtttgcttcagccaatgagggtaaatgtactatgttgctaaaactctcagcccatgagtactctcctgagctatcctcagccaggcatgcactgcaagatgggtcatttgtgcttctttggcttaactttctgccattgactttgggttctagggaacagattgaccccaaacatctgacataacctacgtaagtgacagtgttggcttagaataaagaaacaaagactatcatggcatttttttaataaagcaagtgttacagtgacctgttttggggactgccagagattaggtggcagttgccttctagatctagccacaggagaaaaaattaaagagccatatgactgtgaggcagatcctcatcagggaggaggcgcagtgtctttttaaccactttgaagaccaacagccaagacatcttgagctagttgtggtggacagagagttccaaacacctcagccaccaggaaaagggagtggccaggaagaggctgcaggctcaagggctgggattctcccacccacctaaggaacctactgagcatcgaaccactccaacttgccttgggaggaggacttgaatgctaccaaagactgctcgacaggcctgcaaggcaggactacttttgtgagaatttgaagaccatgccgacctgtcatttaaagcacccatctctgcctgagctgtcagatttgccaagttctgggttgtctcataattatttactcagtacaaaataataccagccatgatcctcagtggtaagtagcagaaatcaactgtatttgtttgctaaggctgtgctaataaagtgctgtaaacca

SEQ ID NO: 47670 - DNA, 2121 bp, Homo Sapiens
gctctgagcgggaggcctgagcgggaagcattggcgtccgagcgacttctaggagcctggggttcggcgctatggaggagctcgatggcgagccaacagtcactttgattccaggcgtgaattccaagaagaaccaaatgtattttgactggggtccaggggagatgctggtatgtgaaacctccttcaacaaaaaagaaaaatcagagatggtgccaagttgcccctttatctatatcatccgtaaggatgtagatgtttactctcaaatcttgagaaaactcttcaatgaatcccatggaatctttctgggcctccagagaattgacgaagagttgactggaaaatccagaaaatctcaattggttcgagtgagtaaaaactaccgatcagtcatcagagcatgtatggaggaaatgcaccaggttgcaattgctgctaaagatccagccaatggccgccagttcagcagccaggtctccattttgtcagcaatggagctcatctggaacctgtgtgagattctttttattgaagtggccccagctggccctctcctcctccatctccttgactgggtccggctccatgtgtgcgaggtggacagtttgtcggcagatgttctgggcagtgagaatccaagcaaacatgacagcttctggaacttggtgaccatcttggtgctgcagggccggctggatgaggcccgacagatgctctccaaggaagccgatgccagccccgcctctgcaggcatatgccgaatcatgggggacctgatgaggacaatgcccattcttagtcccgggaacacccagacactgacagagctggagctgaagtggcagcactggcacgaggaatgtgagcggtacctccaggacagcacattcgccaccagccctcacctggagtctctcttgaagattatgctgggagacgaagctgccttgttagagcagaaggaacttctgagtaattggtatcatttcctagtgactcggctcttgtactccaatcccacagtaaaacccattgatctgcactactatgcccagtccagcctggacctgtttctgggaggtgagagcagcccagaacccctggacaacatcttgttggcagcctttgagtttgacatccatcaagtaatcaaagagtgcagcatcgccctgagcaactggtggtttgtggcccacctgacagacctgctggaccactgcaagctcctccagtcacacaacctctatttcggttccaacatgagagagttcctcctgctggagtacgcctcgggactgtttgctcatcccagcctgtggcagctgggggtcgattactttgattactgccccgagctgggccgagtctccctggagctgcacattgagcggatacctctgaacaccgagcagaaagccctgaaggtgctgcggatctgtgagcagcggcagatgactgaacaagttcgcagcatttgtaagatcttagccatgaaagccgtccgcaacaatcgcctgggttctgccctctcttggagcatccgtgctaaggatgccgcctttgccacgctcgtgtcagacaggttcctcagggattactgtgagcgaggctgcttttctgatttggatctcattgacaacctggggccagccatgatgctcagtgaccgactgacattcctgggaaagtatcgcgagttccaccgtatgtacggggagaagcgttttgccgacgcagcttctctccttctgtccttgatgacgtctcggattgcccctcggtctttctggatgactctgctgacagacgccttgccccttttggaacagaaacaggtgattttctcagcagaacagacttatgagttgatgcggtgtctggaggacttgacgtcaagaagacctgtgcatggagaatctgataccgagcagctccaggatgatgacatagagaccaccaaggtggaaatgctgagactttctctggcacgaaatcttgctcgggcaattataagagaaggctcactggaaggttcctgagaactgcttcaatgtggtatctttgtatggcaatgtatatagatttttttaaaagaataaatgttgttttgcaaatgta

SEQ ID NO: 47671 - DNA, 1556 bp, Homo Sapiens
aatgaaccaaaaaatttatgttgggtggtgggatgaaattaaagaataagtcaactgacttcacaaaactgctgagcagaggagccactatttacagcaagcagctcttcccaccaagtctcacacatacaccaacatttactggggccaccatcttattaataatctacccatgcatacagcattccttgaacaaagtgggacctaaccctgaaagggcacccaaatattacccacgttacactctctatgggagggctttatccactagccctttcctcaaagaaagaaaaatacgtccaatttctcagactaaagaaaccaggtcaagtcaacaggagaagagaaaggaaaggcaaaaagatccaaccctgacgcacaagaatgactcacattagaccgatgataaaaaccaaagaagcacaaatcactgcctgtcacttaacgggaagatacctgctaaagctttactctgtattttctcaacctctccttatttccttactagatccaaaggcatacaagacaagcaggaaatatataaggaactccattatggcagataaggaggcacgtcaggcaatgacacaccattcctagtaactccatttcataaaggcactgatctgtcacccactgatccccagggctgattaaaggcaatgagttctgagaccaattactagaggtatctacagagactgtggaccatttctgaaacctgtcccacaaaaagacaaaagattttcttggcaaaatatttctatattattaatagtaaaaacaaccaagattcaggtgatagcagctttggctgatcaggacaacttaaaagattttgcagatgagctggcaaaggtccaagccccaaccaaggggattcttcgatcgtgcaagtcctagggacactgtgctcagtttatcttcctaggacaaggtactcattacccaaatgttcagactcctgacctttgccaagtgagtcatatatcctatctctatatagataccacaaaaggagtggaaaaaactgccatacaagccaattccctaggctgaaggcagaaattacttaaatcccattctgacatctttctgctttgagttttaagagaagttttctttaaaacaactagtctgttcctatcttacagataatgtgactcttgtgatgttttcctttggccaccaggaatccctgagccaaatgttacaggccaaatctagcaactggattgaacttaaagattcagtgatgatatctgaagagtcttagcgtttgtgtcgtgtttcctaaaacaaagactccatcataagccatgtgaattcctacttcaggacggacaagagtcagaagtggtaatacagggaatggcataagtgattttcccttgacactacagatgcgttctgaaccatattttatgacacctgacaaagcagaatttgtcaagccttgtttaagagtcccagttggagcacccagttggaaaccccatttgccattcaattacccataactgtcaatagtgttgattttacaatgtgtggttttg

SEQ ID NO: 47672 - DNA, 972 bp, Homo Sapiens
gagctgtgctgtggctgcttgcagctccccggtcgccaggagctgctcgtagccgtgcatatgctgagggacagcgcctccgactcacagaggctcggcttcctggccgaggccctcacgctgggccagtttgaccatagccacatcgtgcggctggagggcgttgttacccgaggaagcaccttgatgattgtcaccgagtacatgagccatggggccctggacggcttcctcaggcggcacgaggggcagctggtggctgggcaactgatggggttgctgcctgggctggcatcagccatgaagtatctgtcagagatgggctacgttcaccggggcctggcagctcgccatgtgctggtcagcagcgaccttgtctgcaagatctctggcttcgggcggggcccccgggaccgatcagaggctgtctacaccactatgagtggccggagcccagcgctatgggccgctcccgagacacttcagtttggccacttcagctctgccagtgacgtgtggagcttcggcatcatcatgtgggaggtgatggcctttggggagcggccttactgggacatgtctggccaagacgtgatcaaggctgtggaggatggcttccggctgccaccccccaggaactgtcctaaccttctgcaccgactaatgctcgactgctggcagaaggacccaggtgagcggcccaggttctcccagatccacagcatcctgagcaagatggtgcaggacccagagccccccaagtgtgccctgactacctgtcccaggcctcccaccccactagcggaccgtgccttctccaccttcccctcctttggctctgtgggcgcgtggctggaggccctggacctgtgccgctacaaggacagcttcgcggctgctggctatgggagcctggaggccgtggccgagatgactgcccaggacctggtgagcctaggcatctctttggct

SEQ ID NO: 47673 - DNA, 1558 bp, Homo Sapiens
acatttcattgtaaacgactgggagtatctgagcaaattatttcttacgtgactttagagaaaacggctacctatctgaccccaaaacgacttgaggaaactgtttccacggtcctgctgcagaggggaagcacagtcgtcaagaagagagtggggtcaggatcaaaacacatttagtgtgacttagggaaagaaaacattttccctctttgaacctctctggatacagtcattttgcctctacttgaggatcaactgttcaacctcaatggcctttcaggacctcctgggtcacgctggtgacctgtggagattccagatccttcagactgtttttctctcaatctttgctgttgctacataccttcattttatgctggagaacttcactgcattcatacctggccatcgctgctgggtccacatcctggacaatgacactgtctctgacaatgacactggggccctcagccaagatgcactcttgagaatctccatcccactggactcaaacatgaggccagagaagtgtcgtcgctttgttcatcctcagtggcagctccttcacctgaatgggaccttccccaacacaagtgacgcagacatggagccctgtgtggatggctgggtgtatgacagaatctccttctcatccaccatcgtgactgagtgggatctggtatgtgactctcaatcactgacttcagtggctaaatttgtattcatggctggaatgatggtgggaggcatcctaggcggtcatttatcagacagtagccgagtgggcaacacacagattccaggccatgggaattacattgggaatgtgcccttctggtattgcatttatgaccctggcaggcctggcttttgccattcgagactggcatatcctccagctggtggtgtctgtaccatactttgtgatctttctgacctcaagttggctgctagagtctgctcggtggctcattatcaacaataaaccagaggaaggcttaaaggaacttagaaaagctgcacacaggagtggaatgaagaatgccagagacaccctaaccctggagattttgaaatccaccatgaaaaaagaactggaggcagcacaaaaaaaaaaaccttctctgtgtgaaatgctccacatgcccaacatatgtaaaaggatctccctcctgtcctttacgagatttgcaaactttatggcctattttggccttaatctccatgtccagcatctggggaacaatgttttcctgttgcagactctctttggtgcagtcatcctcctggccaactgtgttgcaccttgggcactgaaatacatgaaccgtcgagcaagccagatgcttctcatgttcctactggcaatctgccttctggccatcatatttgtgccacaaggagaaaagaccccagagaaccaaagcaagaggatccgagagtggaagtgacgcagttttaaggaattccaggagctgactgccgatcaatgagccagatgaagggaacaatcaggactattcctagacactagcaaaatctagaaaataaataacaa

SEQ ID NO: 47674 - DNA, 315 bp, Homo Sapiens
atgcggctgacaggggcacctggggctggggggctagggggtttggggggcggcttcggcacagtaggcaaagagatgttccaagatgagaaaatgtcccagtgcccacaggtggagcccaggagcaggccacaggcctcagatgggctcagcactgagcgtctccacacctccaccatgtcatcctcaaagaggtggacaatggattggcacacggcaggtggtgctatcttcagcagattgcacagcttgatggccacggagcccacgcgagccacattgggttccttctgcagtgggaggagcgcatggtga

SEQ ID NO: 47675 - DNA, 1554 bp, Homo Sapiens
aacttcgaccccaccggcctggagcgcgccgccaaggcggcgcgcgagctggagcactcgcgttacgccaaggaggccctgaatctggcgcagatgcaggagcagacgctgcagttggagcaacagtccaagctcaaagagtatgaggccgccgtggagcagctcaagagcgagcagatccgggcgcaggctgaggagaggaggaagaccctgagcgaggagacccggcagcaccaggccagggcccagtatcaagacaagctggcccggcagcgctacgaggaccaactgaagcagcagcaacttctcaatgaggagaatttacggaagcaggaggagtccgtgcagaagcaggaagccatgcggcgagccaccgtggagcgggagatggagctgcggcacaagaatgagatgctgcgagtggagaccgaggcccgggcgcgcgccaaggccgagcgggagaatgcagacatcatccgcgagcagatccgcctgaaggcgtccgagcaccgtcagaccgtcttggagtccatcagggacggtgggggccggtgcgccagtgcggtgtctctgctgcaggtggctgggctgacgctgctggctgtcggggtctactcagccaagaatgcgacagccgtcactggccgcttcatcgaggctcggctggggaagccgtccctagtgagggagacgtcccgcatcacggtgctggaggcgctgcggcaccccatccaggtcagccggcggctcctcagtcgaccccaggacgtgctggagggtgttgtgcttagtcccagcctggaagcacgggtgcgcgacatcgccatagcaaccaggaacaccaagaagaaccggggcctgtacaggcacatcctgctgtatgggccaccaggcaccgggaagacgctgtttgccaagaaactcgccctgcactcaggcatggactacgccatcatgacaggcggggacgtggcccccatggggcgggaaggcgtgaccgccatgcacaagctctttgactgggccaataccagccggcgcggcctcctgctcttcatggatgaagcagacgccttccttcggaagcgagccactgaggagataagcaaggacctcagagccacactgaacgccttcctgtaccacatgggccaacacagcaacaaattcatgctggtcctggccagcaatctgcctgagcagttcgactgtgccatcaacagccgcattgacgtgatggtccacttcgacctgccgcagcaggaggagcgggagcgcctggtgagactgcattttgacaactgtgttcttaagccggccacagaaggaaaacggcgcctgaagctggcccagtttgactacgggaggaagtgctcggaggtcgctcggctgacggagggcatgtcgggccgggagatcgctcagctggccgtgtcctggcaggccacggcatatgcctccaaggacggggtcctcactgaggccatgatggacgcctgtgtgcaagatgctgtccagcagtaccgacagaagatgcgctggctgaaggcggag

SEQ ID NO: 47676 - DNA, 981 bp, Homo Sapiens
atgaatgctttaactaaggtgaagctgatcaacaagctgaatgagggagaggtccagcttggggtggccgataaggtgtcctggcactccgagtacaaggacagcgcctggatcttcctgggagggcttccttatgaactgactgaaggggacatcatctgtgtattctcacaatatggggagattgttaacattaatcttgtgcgggacaagaagactgggaaatccaaaggattctgtttcctctgctatgaagaccagaggagcacaattctggccgttgacaattttaatgggatcaagatcaaaggaagaactatccgagtggatcatgtgtctaactatcgggctcctaagaactcggaagaaatggatgatgcgaccaaagagctccagaagggctcctgtgggcctcatacctactcatcaagttcgtctgagagctctgaagatgaaaaaccaataaaaaagcacaagcaaccatcctcttcgtcacccacaagcaagacagtaaaggaaaaagatgaccctggccctaagaagcacagcagcaagaactcggagagagctcagaagtcacagcccagggagaggcggaagctccccgaagccaggactgcctgctacggtggagcagaggacctagagagggagctgaagaaggagaaacccaagcacgagcacaagtcctcaagcaggaaggaggcaagagaagaaacaaccggggatagggacagagggcagcagacacactttctagcccgtacaactggcgttccgaagggcgtagtcacagaactcgaagtaggagccgagataaatcccataggcataaaaaagcccgtcgctcctgggagtgagagtcttcgaatcccagcgaccgtaggcgtcactgaattcagttgctcagtagatttggaaataattatgttttttaaatgcagtaaaattcaattgggttgttactatttttgtatctaa

SEQ ID NO: 47677 - DNA, 915 bp, Homo Sapiens
atgcttcataccaacaatacacagtttcacccttccaccttcctcgtagtgggggtcccagggctggaagatgtgcatgtatggattggcttccccttctttgcagtgtatctaacagcccttctagggaacatcattatcctgtttgtgatacagactgaacagagcctccaccaacccatgttttacttcctagccatgttggccggcactgatctgggcttgtctacagcaaccatccccaagatgctgggaattttctggtttaatcttggagagattgcatttggtgcctgcatcacacagatgtataccattcatatatgcactggcctggagtctgtggtactgacagtcacgggcatagatcgctatattgccatctgcaaccccctgagatatagcatgatccttaccaacaaggtaatagccattctgggcatagtcatcattgtcaggactttggtatttgtgactccattcacatttctcatcctgagattgcctttctgtggtgtccggattatccctcatacctattgtgaacacatgggcttggcaaagttagcttgtgccagtattaatgttatatatggattgattgccttctcagtgggatacattgacatttctgtgattggattttcctatgtccagatcctccgagctgtcttccatctcccagcctgggatgcccggcctaaggcactcagcacatgtggctctcacgtctgtgttatgttggctttctacctgccagccctcttttccttcatgacacaccgctttggccacaacatccctcattacatccacattcttctggccaatctgtatgtggtttttccccctgctcttaactctgttatctatggggtcaaaacaaaacagatacgagagcaggtacttaggata

SEQ ID NO: 47678 - DNA, 963 bp, Homo Sapiens
atggaaacaggaaatcaaacacatgcccaagaatttctcctcctgggattttcagcaacgtcagagattcagttcattctctttgggctgttcctctccatgtacctagtcactttcaccgggaacctgctcatcatcctggccatatgctcagactcccacctccacacccccatgtacttcttcctctccaacctgtcttttgctgacctctgttttacctccacgactgtcccaaagatgttactgaatatactgacacagaacaaattcataacatatgcaggctgtctcagtcagattttttttttcacttcatttggatgcctggacaatttactcttgaccgtgatggcctatgaccgcttcgtggccgtctgtcaccccctgcactatacggtcatcatgaacccccagctctgtggactgctggttctggggtcctggtgcatcagtgtcatgggttccctgctcgagaccttgactgttttgaggctgtccttctgcaccgaaatggaaattccacactttttttgtgatctacttgaagtcctgaagctcgcctgttctgacaccttcattaataacgtggtgatatactttgcaactggcgtcctgggtgtgatttccttcactggaatatttttctcttactataaaattgttttctctatactgaggatttcctcagctgggagaaagcacaaagcgttttccacctgtggttcccacctctcagtggtcaccttgttctatggcacgggctttggggtctatctcagttctgcagccacaccatcttctaggacaagtctggtggcctcagtgatgtacaccatggtcacccccatgctgaaccccttcatctacagcctgaggaacacggacatgaagagggccctggggagactcctcagtagggcaacattttttaatggtgacatcactgcaggactttcataa

SEQ ID NO: 47679 - DNA, 513 bp, Homo Sapiens
atgccggtcatgaggctgttcccttgcttcctgcagctcctggccgggctggcgctgcctgctgtgcccccccagcagtgggccttgtctgctgggaacggctcgtcagaggtggaagtggtacccttccaggaagtgtggggccgcagctactgccgggcgctggagaggctggtggacgtcgtgtccgagtaccccagcgaggtggagcacatgttcagcccatcctgtgtctccctgctgcgctgcaccggctgctgcggcgatgagaatctgcactgtgtgccggtggagacggccaatgtcaccatgcagctcctaaagatccgttctggggaccggccctcctacgtggagctgacgttctctcagcacgttcgctgcgaatgccggcctctgcgggagaagatgaagccggaaaggaggagacccaagggcagggggaagaggaggagagagaagcagagacccacagactgccacctgtgcggcgatgctgttccccggaggtaa

SEQ ID NO: 47680 - DNA, 2165 bp, Homo Sapiens
atggctgtgcgcggcgccaacaccttgacgtccttctccatccaggcgatcctcaacaagaaagaggagcgcggcgggctggccgcgccagaggggcgcccggcgcccgggggcacagcggcatcggtggccgcggctcccgctgtctgctgttggcggctctttggggagagggacgcgggcgcgttggggggcgccgaggactctctgctggcgtctcctgccggtaccagaacagctgcggggcggactgcggagagcccggaaggctgggactcggactccgcgctcagcgaggagaacgagagcaggcggcgctgcgcggacgcgcggggggccagcggggccggccttgcggggggatccttgagcctcggccagccggtctgtgagctggccgcttccaaagacctagaggaggaagccgcgggccggagcgacagcgagatgtccgccagcgtctcaggcgaccgcagcccaaggaccgaggacgacggtgttggccccagaggtgcacacgtgtccgcgctgtgcagcggggccggcggcgggggcggcagcgggccggcaggcgtcgcggaggaggaggaggagccggcggcgcccaagccacgcaagaagcgctcgcgggccgctttctcccacgcgcaggtcttcgagctggagcgccgctttaaccaccagcgctacctgtccgggcccgagcgcgcagacctggccgcgtcgctgaagctcaccgagacgcaggtgaaaatctggttccagaaccgtcgctacaagacaaagcgccggcagatggcagccgacctgctggcctcggcgcccgccgccaagaaggtggccgtaaaggtgctggtgcgcgacgaccagagacaatacctgcccggcgaagtgctgcggccaccctcgcttctgccactgcagccctcctactattacccgtactactgcctcccaggctgggcgctctccacctgcgcagctgccgcaggcacccagtgaacccgcttgggctgaggcagcgagtgattcccgcgctccggctccggaccggcgctgacagctgtaggctgtagcctgcacggggcgccccgccaaggaggcacctggaggtgaaacccagctccagctcccgttagccaggacttgtcccctggcagctgggctgagtctgccctgagggggcgcctttttctaatttgaacagaggcaccctatggcctaggggccctgatcgcccacctgcctggaagcccctgggctctatttattatcatgacaatgttggaattaaattttgattcgaatatgtctgcctgggggtggggttttccctgagcggcaactcctggagaccacatagcctgaatcctcagaatttcaggcctgctgggagctttctgcactaggccacactagttcatggtatccatgctaccaatctatgtgtatctacatatcttttatttttggaaattgcatttgtaaccaaggggtgcgaaaccctggcagtcccaggcagcaccaggccaggggttgatttgaaacgtgaaggattgggttttcaggccctctgctccacccctcctgtgtgtcagagctagggtgggggtgcccgattcgggtgctgaatgtaaggaggggagcctccaagtgtggtgcaagccgggggtctccacatcttccttctctgaagtccaggtacctgcacaagcaggaagcgcctgggagtcccggaaggaggagagcgcacacccaggcagccctctgcggaaactttccttggtttctttttatttgtgtaaaggaggttaagacgtgtcgcacttttcagttgtttgtattcaaatgacgattatttttctactcaatgtgaatatccctggccagcctttccacggcgcccaccgcagtgccgctgcctggccctcagtgtctaccttctgccctctgcgactccagtgctctggcccgggactcccctatccgcccctcacttacccttaaacaggtgatcccacctgtcttgtcaacctcgccgcttttcgcctccttaatggcactgtgcactcaactagagtattaactgtaaaaagatttgtgaagtttggaagctctattcgctgtattttttctttaatttataaacttttagtttaacatgc

SEQ ID NO: 47681 - DNA, 748 bp, Homo Sapiens
gagaagctgaagaaaaccaagatcatctttgtggtgggtgggcctggctcagggaagggcacccagtgtgagaagatcgtgcagaagtatggctacacccacctctccaccggggacctcctgcggtccgaggtcagctcaggctcggccaggggcaagaagctgtcggaaatcatggagaaggggcagctggttccactggagacagtgttggacatgctccgggatgccatggtggccaaagtcaatacttccaaaggcttcctgattgatggctacccgcgggaggtgcagcaaggagaagagtttgagcgacggattggacagcccacactgctgctgtatgtggacgcaggccctgagaccatgacccagcggctcttgaaacgtggagagaccagcgggcgtgtggacgacaatgaggagaccatcaaaaagcggctggagacctattacaaggccacagaacctgtcatcgccttctatgagaaacgtggcattgtgcgcaaggtcaacgctgagggctccgtggacagtgtcttctcccaggtctgcacccacctggacgccctaaagtagcaacgctggagccgcttccccagctcagagccccgccccaccccgtcctgattcgaggtcctcctggcctgagcgcagcgcctccaccctgccctgctgagcacagacggaggaagccgcttatcctgttttcatggacagctgagcactaaaggaatttctaaggaca

SEQ ID NO: 47682 - DNA, 438 bp, Homo Sapiens
ggggagtctgaagatgtgactcaattcctgcaatctcataagaaaactttaactaatgagaagttgtttcttatggacgggaaaagaacgtggtttcttgagatggaatctactcctggtgaagatgctatgaacactgtcaaaatgacaacaaaggatttaaaatatgacagaagcttaattgataaagcagggtttgagaggactgactccaattttgaaagaagtcatactgtgggtaaaatgctatcaaatagcatcatgtgctatagagacatcttttatgaaagggagagtcaactaatgcagcaaacttcattattatcttatgaaattgcgatagccaccccaaccttcagtaactactaccctgattggtcagcacccatcaacattgtggcaagaccctctaccagcaaaaagattatgacttgctga

SEQ ID NO: 47683 - DNA, 1766 bp, Homo Sapiens
aattcagagccaccgcgggcaggcgggcagtgcatccagaagcgtttatattctgagcgccagttcagctttcaaaaagagtgctgcccagaaaaagccttccaccctcctgtctggctttagaaggaccctgagccccaggcgccagccacaggactctgctgcagaggggggttgtgtacagatagtagggctttaccgcctagcttcgaaatggataacgtcctcccggtggactcagacctctccccaaacatctccactaacacctcggaacccaatcagttcgtgcaaccagcctggcaaattgtcctttgggcagctgcctacacggtcattgtggtgacctctgtggtgggcaacgtggtagtgatgtggatcatcttagcccacaaaagaatgaggacagtgacgaactattttctggtgaacctggccttcgcggaggcctccatggctgcattcaatacagtggtgaacttcacctatgctgtccacaacgaatggtactacggcctgttctactgcaagttccacaacttctttcccatcgccgctgtcttcgccagtatctactccatgacggctgtggcctttgataggtacatggccatcatacatcccctccagccccggctgtcagccacagccaccaaagtggtcatctgtgtcatctgggtcctggctctcctgctggccttcccccagggctactactcaaccacagagaccatgcccagcagagtcgtgtgcatgatcgaatggccagagcatccgaacaagatttatgagaaagtgtaccacatctgtgtgactgtgctgatctacttcctccccctgctggtgattggctatgcatacaccgtagtgggaatcacactatgggccagtgagatccccggggactcctctgaccgctaccacgagcaagtctctgccaagcgcaaggtggtcaaaatgatgattgtcgtggtgtgcaccttcgccatctgctggctgcccttccacatcttcttcctcctgccctacatcaacccagatctctacctgaagaagtttatccagcaggtctacctggccatcatgtggctggccatgagctccaccatgtacaaccccatcatctactgctgcctcaatgacaggttccgtctgggcttcaagcatgccttccggtgctgccccttcatcagcgccggcgactatgaggggctggaaatgaaatccacccggtatctccagacccagggcagtgtgtacaaagtcagccgcctggagaccaccatctccacagtggtgggggcccacgaggaggagccagaggacggccccaaggccacaccctcgtccctggacctgacctccaactgctcttcacgaagtgactccaagaccatgacagagagcttcagcttctcctccaatgtgctctcctaggccacagggcctttggcaggtgcagcccccactgcctttgacctgcctcccttcatgcatggaaattcccttcatctggaaccatcagaaacaccctcacactgggacttgcaaaaagggtcagtatgggttagggaaaacattccatccttgagtcaaaaaatctcaattcttccctatctttgccaccctcatgctgtgtgactcaaaccaaatcactgaactttgctgagcctgtaaaataaaaggtcggaccagcttttcccaaaagcccattcattccattctggaagtgactttggctgcatgcgagtgctcatttcaggatg

SEQ ID NO: 47684 - DNA, 474 bp, Homo Sapiens
gaagaagtcttaagccctcccacgtacttaaagccttcaccaaaacacccagaatcaaatactgctggaatggacatctttgccaaattctctgcatatatcaagaattcaaggccagaggctaatgaagcactggagaggggtctcctgaaaaccctgcagaaactggatgaatatctgaattctcctctccctgatgaaattgatgaaaatagtatggaggacgttaagttttctaaacgtaaatttctggacagcaatgaaatgacattagctgattgcaatctgctgtcaaagctgcatattgtcaaggttgtggccaaaaaacgcaactttgatattccaaaagaaatgactgtcatctggagatacctaactaatgcatacagtagggatgagttcaccagtacctgtcccagtgatgaggaggttgaaatagcatatagtgatgtagccaaaagactcaccaagtaa

SEQ ID NO: 47685 - DNA, 1720 bp, Homo Sapiens
acaatcaggtctaccccaggagaggtcctagggctggtggacatggccgccctggagaatggggagctggggccccttctctcccctggcaccctgcggggtttggaggatgaatgcgtcacagatgttaaggctcagacccgggctgcccttctccgtgtgctgcaggaggacgaagagcactgggggagcctggaggaccagcccagcagcctggcccaggatgtgtgtgagctgctggaagagcacacagagcgagcaccccgcatcagccaggagtttggggagcggatggcccactgctgcctaggcgggctggcagagttcctgcagagcttccagcagcgtgtggagcgattccatgagaacccagcagtccgggagatgctacctgacacctatatcagcaagaccatcgccctggtcaactgcggccccccactgagagctctggccgagcgcctggcccgggtggggcccccagaaagcgagccggcccgggaagcatctgctagtgctctggaccatgtgacccggctctgccaccgtgtcgtggccaacctgctgttccaggagctgcagccacacttcaacaagctgatgcgccggaagtggctgagcagcccggaggccctggatggcatcgtgggcacgctgggtgcccaggccctggccctgcgcagaatgcaggacgagccttaccaggcgctggtagccgagctacaccggcgggcgctggtcgagtacgtgcggcccctgctccgtgggcgcctgcgctgcagctcggcgcggacccgcagccgcgtggccggcaggctccgggaggacgcggcgcaactgcagaggctgttccggcggctggagtcccaggcctcgtggctggatgccgtggtgccccatttggctgaagtcatgcagctggaagacacgcccagcatccaggtggaggtgggagtgttggtgcgcgactacccagacatcaggcagaagcacgtggcagccctcctcgacatccgtggcctgcgcaacacagccgcccgccaggagatcctggccgtggcccgggacctggaactctctgaggagggagccctgtcaccccctcgggaccgtgccttctttgcagacatccctgtgccccgcccatctttctgtctcagcctccctctcttcctgggccgcctccccctctcccggctggccaggcccagtttggcctgtctgcctcggccccggcctccgtctctagcgcgacctcgggcccagcgctgagggtcacccaaccgccggccttagtgaccccatctatgctgctgacaagccaacctcccgtacggcgcccctcctgactccctgcctgggaccacacacccctgggatagaaagacccttagatgtcttttcacccaaccccaaactccctgtacagaagggaaacaaacgccaggcacggtggctcatgcctgtaatcccaacactttgggaggctgaggccggaggattgcttgagcccaggagttcaagaccagcctgggcaacatagtgagacctgccccctatctctacaaaaaataaaaaattagctgggcacggtggtgtgtgcctgtagtcccagctactggtgaggctgaggctggaggatcactggagttcgaggctgcagtgagctatgactgtgccactgcactccagcctggtcaacaaagcaagaccctttctc

SEQ ID NO: 47686 - DNA, 1431 bp, Homo Sapiens
atgcgacccagaaccgagggcttctttccccccgccggggcctccctcccgttctccactcggaacaaacagcctgcagttcccgcagctgcagcacgggccgcggaacatgcgccgggagcggggcccgggcgggactccggagctggtactgctccccccgcgctccggcgccgggcctcgccgtgcggcctccttcctcccttccctccgcattcgaacctccctcgcaaagacagtctccgccccacaatgcaccgcggcgggcagcctttgaaaaagcggcgcggctcgttcaagatggcggagctcgaccagttgcctgacgagagctcttcagcaaaagcccttgtcagtttaaaagaaggaagcttatctaacacgtggaatgaaaagtacagttctttacagaaaacacctgtttggaaaggcaggaatacaagctctgctgtggaaatgcctttcagaaattcaaaacgaagtcgacttttttctgatgaagatgataggcaaataaatacaaggtcacctaaaagaaaccagagggttgcaatggttccacagaaatttacagcaacaatgtcaacaccagataagaaagcttcacagaagattggttttcgattacgtaatctgctcaagcttcctaaagcacataaatggtgtatatacgagtggttctattcaaatatagataaaccactttttgaaggtgataatgacttctgtgtatgtctaaaggaatcttttcctaatttgaaaacaagaaagttaacaagagtagaatggggaaaaattcggcggcttatgggaaaaccacggagatgttcttctgcattttttgaggaagagagatcagcattaaaacagaaacggcagaaaataaggctcttacaacaaaggaaagttgcagatgtttcacaattcaaagatctcccagatgaaattcctttgcctctggttattggaacgaaagttacagcacgattacgtggtgttcatgatggtttgttcactggacaaatagatgctgtggatactcttaatgctacttatagagtaacttttgataggacagggcttggaacccataccatccctgactatgaagttctcagtaatgaacctcatgagacaatgccaattgctgcctttggacaaaaacagcggccttctcgattttttatgaccccaccacggttacattatactcctcctctccagtcaccaattatagataatgatcctttattaggacagtcgccgtggagaagtaaaatttctggctctgacactgaaacattaggtggttttccagtagaatttcttatccaagtgaccagattatcaaaaattctcatgattaaaggaacatatcaagaaattaagggaaatgaacacagaagcagaaaaattggtaagaatttctct

SEQ ID NO: 47687 - DNA, 197 bp, Homo Sapiens
gtgccccagggctcaccgcctctccagtccctgtccccctgatctcattctttctacactcagttgatgattctctttgtgaaaatgtatgggataaccttgtgaaacatcttcctgagcagaagatactcaacgaattagcagagcttaagaatgaatatgatgacctctgtgagcctgaacaatttggagttgtg

SEQ ID NO: 47688 - DNA, 840 bp, Homo Sapiens
atagttctccctgagtgagacttgcctgctgctctggcccctggtcctgtcctgttctccagcatggtgtgtctgaggctccctggaggctcctgcatggcagttctgacagtgacactgatggtgctgagctccccactggctttggctggggacaccagaccacgtttcttggagtactctacgtctgagtgtcatttcttcaatgggacggagcgggtgcggtacctggacagatacttccataaccaggaggagaacgtgcgcttcgacagcgacgtgggggagttccgggcggtgacggagctggggcggcctgatgccgagtactggaacagccagaaggacctcctggagcagaagcggggccgggtggacaactactgcagacacaactacggggttgtggagagcttcacagtgcagcggcgagtccatcctaaggtgactgtgtatccttcaaagacccagcccctgcagcaccataacctcctggtctgttctgtgagtggtttctatccaggcagcattgaagtcaggtggttccggaatggccaggaagagaagactggggtggtgtccacaggcctgatccacaatggagactggaccttccagaccctggtgatgctggaaacagttcctcggagtggagaggtttacacctgccaagtggagcacccaagcgtgacaagccctctcacagtggaatggagagcacggtctgaatctgcacagagcaagatgctgagtggagtcgggggcttcgtgctgggcctgctcttccttgggacggggctgttcatctacttcaagaatcagaaaggtgaggagcttttg

SEQ ID NO: 47689 - DNA, 1656 bp, Homo Sapiens
gcccccgccgcccccgggccctgatggactgaatgaaggctgcctacaccgcctatcgatgcctcaccaaagacctagaaggctgcgccatgaacccggagctgacaatggaaagtctgggcactttgcacgggccggccggcggcggcagtggcgggggcggcggcgggggcggcgggggcggcggcgggggcccgggccatgagcaggagctgctggccagccccagcccccaccacgcgggccgcggcgccgctggctcgctgcggggccctccgccgcctccaaccgcgcaccaggagctgggcacggcggcagcggcggcagcggcggcgtcgcgctcggccatggtcaccagcatggcctcgatcctggacggcggcgactaccggcccgagctctccatcccgctgcaccacgccatgagcatgtcctgcgactcgtctccgcctggcatgggcatgagcaacacctacaccacgctgacaccgctccagccgctgccacccatctccaccgtgtctgacaagttccaccaccctcacccgcaccaccatccgcaccaccaccaccaccaccaccaccagcgcctgtccggcaacgtcagcggcagcttcaccctcatgcgcgacgagcgcgggctcccggccatgaacaacctctacagtccctacaaggagatgcccggcatgagccagagcctgtccccgctggccgccacgccgctgggcaacgggctaggcggcctccacaacgcgcagcagagtctgcccaactacggtccgccgggccacgacaaaatgctcagccccaacttcgacgcgcaccacactgccatgctgacccgcggtgagcaacacctgtcccgcggcctgggcaccccacctgcggccatgatgtcgcacctgaacggcctgcaccacccgggccacactcagtctcacgggccggtgctggcacccagtcgcgagcggccaccctcgtcctcatcgggctcgcaggtggccacgtcgggccagctggaagaaatcaacaccaaagaggtggcccagcgcatcacagcggagctgaagcgctacagtatcccccaggcgatctttgcgcagagggtgctgtgccggtctcaggggactctctccgacctgctccggaatccaaaaccgtggagtaaactcaaatctggcagggagaccttccgcaggatgtggaagtggcttcaggagcccgagttccagcgcatgtccgccttacgcctggcagcgtgcaaacgcaaagagcaagaaccaaacaaagacaggaacaattcccagaagaagtcccgcctggtgttcactgacctccaacgccgaacactcttcgccatcttcaaggagaacaaacgcccgtcaaaggagatgcagatcaccatttcccagcagctgggcctggagctcacaaccgtcagcaacttcttcatgaacgcccggcgccgcagcctggagaagtggcaagacgatctgagcacagggggctcctcgtccacctccagcacgtgtaccaaagcatgatggaaggactctcacttgggcacaagtcacctccaaatgaggacaacagataccaaaagaaaacaaaggaaaaagacaccggattcctagctggggcccttcactggtg

SEQ ID NO: 47690 - DNA, 333 bp, Homo Sapiens
atggcgcactcggctgccgccgtgccgctgggcgcgctggagggctgccccatccgcgtggagcacgaccgccggcgccgccagttcactgtccggctcaacggatgtcatgaccgggccgtcctgctctatgagtacgtgggcaagcggatcgtggacctgcagcacaccgaggtcccagatgcctaccgtgggcgtggcatcgccaagcaccttccgcccctggacttcgtggtggaggaggacctgaaggcccatctcacctgctggtacatccagaagtacgtcaaggagaaccccctgccgcagtacctggagcgcctgcagccgtaa

SEQ ID NO: 47691 - DNA, 693 bp, Homo Sapiens
atgggagctgaaagcaatgaaagtcttgacctcctatctgtcttcctgactggcatcccaggactggaggcccaacatggttggctctccatccctttcttcaccatgtacattgtggccattgtgggaaacatcctaattatggcagcagtgcaggaagactctgccctacatgagcccatgtacttatttctctccatgttggctgtcactgaggtgggcgtctctgtgtctacactgactgttacaggcattctttggtttgatgcccacagagttgactttgatggctgcctggcccagatgttcttcattcacaccttctcctgcatggagtcaggggtcctactagccatgagctatgaccgctttgtagccatctacaacctcctgcgctatacagccatcctgaccctgccccgtattatctgcatgggtctgggcattacactgaagagtgtggcactcatggccccacttccaatccttttgaggcaactgccctattgccacactaatgtcctctcacactcctactgcctccactcagatctgatccagctgccttgtgcagatactaaactcaacagcatcctgggcttagccattgttctcgcaaatttcgggctggactcattgcttatcgtggtctcttatgtcttgattctttatacagtgatgggcattgcttct

SEQ ID NO: 47692 - DNA, 1866 bp, Homo Sapiens
tttggggctgaagttccctgtgggaggctgttttctgagggagctgagtgtttacagccactcagccctgctctgctcagctgaagcagaaaacagagaccttttgcattactttggttcaagagcaagacaggaggcgactgcatgagaccatggctgagacacctagtcctccaggcactgaggaactccagggcattctgtgggtctcatgggaagccagcacctctacctgttcctcagaagatcgtggccacctgggaagccatcagcctgggaaggcagctggtgcctgagtacttcaacttcgcccatgatgtgctggatgtgtggagtcggctggaagaggctggacaccgccccccaaatcctgccttctggtgggtcaatggcacaggagcagagatcaagtggagctttgaggagctggggaagcagtccaggaaggcagccaatgtgctggggggtgcatgcggcctgcagcctggggacagaatgatgctggtactcccacggctcccggagtggtggctggtcagtgtggcttgcatgcggacagggactgtgatgattccgggtgtgactcagctgacagagaaggacctcaagtaccggctgcaggcgtccagggccaagtccattatcaccagtgactccctagctccaagggtggatgccatcagtgccgaatgcccctccctccagaccaagctgctggtgtcagacagcagtcggccaggctggttgaacttcagggaactcctccgggaggcttctacagagcacaactgcatgaggacaaagagtcgagacccgctggccatctactttaccagcggaaccaccggggcccccaagatggtcgagcactcccagagcagctacggactgggttttgtggccagcggaagacggtgggtggccttgaccgaatctgacatcttctggaacacgactgacactggctgggtgaaggcagcctggactctcttctctgcctggcctaatggatcttgcatttttgtgcatgagctgccccgagttgatgccaaagttatcctgaatactctctccaaattcccgataaccaccctctgctgtgtcccaaccatctttcggctgcttgtgcaggaggatctgaccaggtaccagtttcagagcctgaggcactgtctgaccggaggagaggccctcaaccctgacgtgagggagaagtggaaacaccagactggtgtggagctgtacgaaggctatggccagtctgaaacggttgtcatctgtgccaatccaaaaggcatgaaaatcaagtctggatccatggggaaggcgtccccaccctacgatgtgcagattgtggatgatgagggcaacgtcctgcctcctggagaagaggggaatgttgccgtccgtatcagacccactcggcccttctgtttcttcaattgctatttggacaatcctgagaagacagctgcatcagaacaaggggacttttacatcacaggggaccgagctcgcatggacaaggatggctacttttggttcatgggaagaaacgacgatgtgatcaattcttcaagctaccggatcgggcctgttgaagtggaaagtgccctggcagagcatcctgctgtcctggagtcggctgtggtcagcagcccagaccccatcaggggagaggtggtaaaggcatttatagtccttactccagcctactcctctcatgacccagaggcactaacgcgggaactccaggagcatgtgaaaagggtgactgctccatacaaataccccaggaaggtaaatatcagggtttccagggcacaaactgccaaagacggtttctggaaagatccaaaggagtaa

SEQ ID NO: 47693 - DNA, 690 bp, Homo Sapiens
ctgcacgtggctcccaaggagcacccagtgctgctgcctgaggccccgctgaaccccagggccaacagaaagaagatgactcggattgagaccttcaacaccccagcaaggtacacagccatccaggctgtgctgtccctgtacacctctggttacaccactggtattatcatacacagcgagacccacacggtgcccgtctacaagggctatgccttcccccatgccatcctgcgtctggatgactggcacctgaccaaccaccccatggagatcttcagggagcccagctactgcttcaccaccacagccaaacgggagatcttgtgcaacatcaaggagaagctgcggaaatggccaccacagcgtcctcctcctccctggagaagatctgagctgtccaagtggttccagtgtctggaggcgctgttccaggcctccttcctgggtatggaatcttgtggcatccaccaggccaccttcaactccataaagtgtgatgtgcacatccgcaaggacctgtttgccaacatggtgctgtctggtgacacccccgtgtacctgggcatcacctacatgatgcagaagatcacgaccctggtgcccagctccaagaagatcatcaccttccctgagcgcaagtccgtgtggattggcagcaccatcctggccgccttccagcagatgtgg

SEQ ID NO: 47694 - DNA, 3504 bp, Homo Sapiens
tcggagcaggcgagcgcgccgctggccaaggacaagcagatcgaagagctgcggcaggagtgccacctcctgcaggcgcgtgtcgcctcgggtccctgcagcgacctgcatactggaaggggcggcccctgcacccagtggctcaacgtcagagacttagaccgcctgcagcgcgagtcccagcgggaagtgctgcgcctgcagaggcagttgatgcttcagcagggcaacggtggcgcttggcccgaggcgggcggccagagcgcaacctgcgaggaggtgcgacggcagatgctggcgctggagcgcgagctggaccagcggcggcgcgagtgccaggagctgggcacgcaggcggccccggcgcggcgacgtggcgaggaggccgagacacagctgcaggcggcgctgctcaaaaacgcctggctggcggaggagaatgggcggctgcaggccaagaccgactgggtgcggaaggtggaggctgagaatagcgaagtgcgcggccacctgggccgcgcgtgtcaagagcgcgatgcctccggcttgatcgccgaacagctgctgcagcaggcggcgcgcgggcaggacaggcagcagcagctgcaacgcgacccgcagaaggccctgtgtgacctccatccttcctggaaggagatacaggcgctccagtgtcggcctggtcaccctcctgaacagccctgggagaccagtcaaatgccggagtcccaagttaaaggtagcagaaggcccaagttccacgcacggcctgaagactacgcagtgtcacagcccaacagagacatacaggagaaaagggaagcctccctcgaggagagcccagttgcccttggggagtcagccagtgtcccccaagtttcagagacagtccctgccagccaacctctgtccaagaaaaccagctcccagtcaaactcctcctctgaggggtcgatgtgggccaccgtgccgtcctcccctactctggacagggacacagccagtgaggtggatgacctggagcctgacagcgtgtccctggccctggaaatggggggctcggcggctcctgctgcccccaagctcaagatcttcatggctcagtataactacaacccatttgaggggcccaatgatcaccctgagggtgagctgcccctcacagctggggactacatatatatcttcggggacatggatgaggatggcttctatgagggggagcttgacgatggccggcgggggctggtgccctccaacttcgtggagcagattccggacagctacatcccaggctgcctgcctgccaaatcccctgatcttggccccagtcaactcccagcggggcaggatgaagctctggaggaagacagcttattatctgggaaagcccagggaatggtggacagagggctgtgccagatggtcagggtgggctccaagacagaagtagcaacagagatcctggataccaagacggaagcctgccagctgggcttgctgcagagcatggggaagcagggcctctccagaccccttctggggaccaaaggggtgctccgtatggctcccatgcagctacacctgcagaatgtcacagccacatcagccaacatcacctgggtctacagcagccaccgccacccccatgtggtatatcttgatgaccgagagcatgccctgaccccagcgggcgtgagctgctacaccttccagggcctgtgccccggcacgcactaccgggtgcgggtggaggtgcggctgccatgggacttgctgcaggtgtattggggaactatgtcctccaccgtcaccttcgacacactcttggcaggacctccctacccaccgctggatgtgctggtggagcgccatgcctcgccaggtgtcctggtggtcagctggctccctgtgaccattgactcagctgggtcctccaatggagtccaggtcaccggttatgctgtgtatgcagatgggcttaaggtttgtgaggtcgccgatgccactgctgggagcaccgtattggaattctcccagctacaggtgcccctcacgtggcagaaggtctcagtgagaaccatgtcactctgtggtgagtccctggattcagtgcctgctcagatccccgaggacttcttcatgtgtcaccgatggccagagactccaccctttagctacacttgtggcgacccatccacctacagagtcaccttccccgtctgcccccagaagctgtcactggctcctccgagtgccaaggccagcccccacaaccctggaagctgcggggagccccaggccaagttcctagaagcattctttgaagaacccccaaggaggcaatccccagtgtccaacctgggctcagaaggagaatgtccgagttcaggggctggcagccaagcccaggagcttgcagaggcctgggagggctgtagaaaggacctgctctttcagaagagtccccagaaccacaggccaccttcagtcagtgaccagcctggggagaaggaaaattgctaccagcacatgggcaccagcaaaagccctgctccaggattcatccatctacgcaccgagtgtgggcccaggaaagaaccgtgtcaggaaaaggctgcccttgagagggtacttcggcaaaagcaagatgcccaagggttcacacctccccagctgggcgccagccaacagtatgcatctgacttccataacgttttgaaggaggagcaggaggcactgtgcttggatctgcggggcacagagaggcgagaggagaggagggagcctgagccccacagcaggcaaggacaagctctgggggtgaagagagggtgccagctccatgagcccagctcggcactgtgtccagctccatccgccaaagtcatcaagatgcccaggggtggcccccaacagctggggacgggggccaacactccagccagggtctttgtggccctctctgattacaaccccctggtgatgtctgccaacctcaaggctgcagaggaggagctggtcttccagaaaaggcagttgctaagagtgtggggctctcaggacacccatgatttctacctcagcgagtgcaacaggcaagtgggcaatatccccgggcgcctagtggctgagatggaggtggggacagagcagactgataggaggtggcgttctccggcccaagggcacctgccttctgtggcccacctcgaggactttcaggggctcatcatcccccagggttcctccctggtgctccaggggaactccaagagactcccactgtggactccaaagatcatgatagcagctctggactatgatcctggggatgggcaaatggggggccaggggaagggcaggctggcgctgagggcaggagacgtggtcatggtttacgggcccatggatgaccaaggattctattatggagagttgggcggccacaggggcctggttcctgcccacctgctggatcacatgtccctccatggacactga

SEQ ID NO: 47695 - DNA, 258 bp, Homo Sapiens
tgttgcaggccccagtgctgccagtccctgtgctgccccagctgctgcatttctagctgctgccactcaagctgcagtgtgtccacctgctccaggcccagctgttataatccccagtactaccagccctcctgctgccacccttctgctgcatctagctgctgccaccctggctgctgtgtgtccagctgctgctgtccagtctgctaccagaccacctgctgtggtccagtctcctatgaatcctcttgctgttga

SEQ ID NO: 47696 - DNA, 501 bp, Homo Sapiens
aaaggcaagaccaccaagaagcgccctcagtgtgcaacgtccaaggtgtttgccacgtttgaccagtcacagattcaggagttcaaagaggccttcaacatgattgatcagaacagagatggtttcatcagcaaggaagatttgcatggtatgcttgcttctctagggaagaatcccactgatgcatgccttgatgccgtgatgaatgaggcaccagggcccattaacttcaccatgttgctcgccatgtttggtaagaagttaaatggcacagatcctgaagacgtcatcagaaatgcttttgcttgctttgatgaagaagcaacaggcaccattcaggaagattacctgagagagctgctgacaaccgtgggggatcagtttacggatgaggaagtggatgagctgtacacagaagcacctattgacaaaaaggggaatttcaattacatcgaattcacaagcatcctgaaacatggagtaaaagacaaagatgactga

SEQ ID NO: 47697 - DNA, 957 bp, Homo Sapiens
atggaatgggaaaaccacaccattctggtggaattttttctgaagggactttctggtcacccaagacttgagttactcttttttgtgctcatcttcataatgtatgtggtcatccttctggggaatggtactctcattttaatcagcatcttggaccctcaccttcacacccctatgtacttctttctggggaacctctccttcttggacatctgctacaccaccacctctattccctccacgctagtgagcttcctttcagaaagaaagaccatttccctttctggctgtgcagtgcagatgttcctcggcttggccatggggacaacagagtgtgtgcttctgggcatgatggcctttgaccgctatgtggctatctgcaaccctctgagatatcccatcatcatgagtaaggatgcctatgtacccatggcagctgggtcctggatcataggagctgtcaattctgcagtacaatcagtgtttgtggtacaattgcctttctgcaggaataacatcatcaatcatttcacctgtgaaattctggctgtcatgaaactggcctgtgctgacatctcagacaatgagttcatcatgcttgtggccacaacattgttcatattgacacctttgttattaatcattgtctcttacacgttaatcattgtgagcatcttcaaaattagctcttccgaggggagaagcaaagcttcctctacctgttcagcccatctgactgtggtcataatattctatgggaccatcctcttcatgtacatgaagcccaagtctaaagagacacttaattcggatgacttggatgctaccgacaaaattatatccatgttctatggggtgatgactcccatgatgaatcctttaatctacagtcttagaaacaaggatgtgaaagaggcagtaaaacacctactgaacagaaggttctttagcaagtga

SEQ ID NO: 47698 - DNA, 510 bp, Homo Sapiens
gagacgttcacctttcaggcagaaattgcccagttgatgtcattgttcatcaatactttctacttgaacaaagagatctttctgagagagctcatttcaaatttatcagatgcacaaaatcctgtaggaaagacggatcccagtaaattagactctgggaaagagccgcatattagccttataccaaacaaacaagatcgaacactcactattgtggatactggaattggaatgaccaaggctgacttgatcaacaaccttggaactatcaccaagtctgagaccaaagtgttcatggaagttttgcaggctggtgcagatatctctatgattggccagttcagtgttggtttttattctgcttattcagttgctgagaaagtaacagtgatcaccaaacataacaatgatgaacagtatgcctgggagtcctcattaaggggatcattcacagtgaggacagacacaggtgaacctataggtcatggaacaaaggttatcctaccgcta

SEQ ID NO: 47699 - DNA, 1370 bp, Homo Sapiens
aatcgtgagattcatggccacagtatggcaccctgtactgagactaagatctttgttctttgtgatgaacagatccagtgccctacctgccaattcgtctggtgttttaagtgccactctccttggcatgaaggtgttaactgcaaggagtacaaaaaaggagacaaattgttgcgtcactgggccagcgaaattgagcatgggcagaggaatgcccagaagtgtccaaagtgcaagatccacatccagcgaactgaaggatgtgaccatatgacctgctcacaatgtaacactaatttttgttaccgatgtggtgagagataccgccagctccgattttttggagaccacacatcaaacctcagtatatttggatgcaaatatcgctacctcccagagagacctcatttaaggagattagtgcgagggtcagtctgtgctggaaaattattcattgcacctctaattatggttttgggattggcactaggggccatagcggttgtaatcggtttatttgtatttcctatctattgcctttgtaaaaaacagagaaaacgatcacggacaggtatgcactggtaacatgcagatgatttcatccagctaagctggttggagtaggagcgataccaaagggtacacccatctgtgagtcacatcttgaaaaacactgagaggaaccttctaccatctcatctcccagtgattctccgtgggccacaatgcctctagctatggtgcactcccaacatggtatcctgtcctttccctaaacaaattgctgctgcttttaaaaaatggtcactttcataaactataaacatctatatcataactctgacctttgtggttcttggaagaagatattttaagaaccagttatcctaagaattctgagcacgcctcttctgagaattgcttggactgtctttgaactctgcacctccttccaggccatcttgtgagacttggtgttaatagctgaagtcctatctgtaccaacaagcaaggccacttttcagaagataagagttcactgaatgcacctattataatctgtggccccagcagtataattcttttatctttcaaatgttataattgcaaaaaatctcaatgtccaaaagggaatgagtgaaactaaattaatgagaagaatattaagttactgaagtgtatatgcgtaggggcgtgaatgtgtgtgtatataaatatgtattaaaactaggcccagtaaccttgtacttacccagttccatgccgctacactatttttccacattttcatagacctattgaaagatgatggctcctttgtggacataatttagcaatgtattaaattaaagtcaatgtagacaacaggc

SEQ ID NO: 47700 - DNA, 386 bp, Homo Sapiens
agtctcagattggtaaacacccgaactggtcaactctcaagagaccatctggttcaggttcctgactgggccagcgagtgaggatggccaggcctctggagcaggcggtagctgccatcgtgtgcaccttccaggaatacgcagggcgctgtggggacaaatacaagctctgccaggcggagctcaaggagctgctgcagaaggagctggccacctggaccccgactgagtttcgggaatgtgactacaacaaattcatgagtgttctggacaccaacaaggactgcgaggactttgtggagtatgtgcgctcacttgcctgcctctgtctctactgccacgagtacttcaaggactgcccctcagagcccccctgctcccagtag

SEQ ID NO: 47701 - DNA, 606 bp, Homo Sapiens
atggcctcccgcagcgcgggcaccctactgaccgagttcaatgccgcctacgtgccccctggactcatgcccgggtaccagggccacgtccccactgtggccttctcctttggcgctccctacggcaccaccaccctcaagtacttccaggaccaccgcaacagagccatggagaagagccacactcccttcagccaaggcggccatttccccaccatcttctccaccaaccccaacctcctgctgatggagcgcgccagcacccgggaccgctggctgcacaagcccagctacactcgcttcaacctggacagccatcgctccacagagcttacgaatttctaccagatggtccagcagcatcggaagtactatcaagacaagacgggcacagtgcctcgagtcccctactttgcgatgcccgtgagggagccggaacggtaccccctccccaccgtcctgcctcctctgtgcccaaagaagaagtggcaccttttaagactagcccccgagaacctgaagacctaccagaccttcccatcagggaagagggtctctccacaggagcggaaaaagagagactgctactttgagttcagagcatga

SEQ ID NO: 47702 - DNA, 755 bp, Homo Sapiens
gtggaactggttccctgggctgaccggagccgggagaacaacctggcctcagggagagagacgctaccgggcttacgccaccccctctcctcaacacaagcccaaactgctacccgcgaggtgcaagtaagcggcacctcagaagtgtctgcgggccctgaccgggcgcaggtggtggtgcgagtgagcagcaccaaggaggcggcagccgaggccaaaaagagcgtttgtcgccgtctagattacatcacgcagagcctccagcagcagggcgtgcaggtctgcattacatttactgaatttggaaaaatgcaaaatatttgtaactttcttgttgaaaagctagatagctctgttgtcatcagcccaccccagttctatcatactccaggttctgttgagaatcttcgacggcaagcctgtcttgttgctgttgagaatgcgtggcgcaaagctcaagaagtctgtaaccttgttggccaaaccttaggaaaacctttactaatcaaagaagaagaaacaaaagaatgggaaggccaaatagatgatcaccagtcatccagactctcaagttcattaactgtacaacaaaaaatcaaaagtgcaacaatacatgctgcttcaaaagtatttataacttttgagcaactcctggaatccttcttcaacatcccaaccaacaattactcccagatagccatgtcacctgtgaattatcatgaatcccacatcaaatgaacaaatactgcctctgg

SEQ ID NO: 47703 - DNA, 303 bp, Homo Sapiens
ggcaagactgagacgaccaaggacctgggcagagccctgggcaccatggtctacgtcttcaactgctccgagcagatggactacaagtcctgtggaaatatctacaagggcctggcccagacgggagcctggggctgctttgacgagtttaatcgcatctcagtggaagtcttgtctgtgattgccgtgcaggtaaaatgtgtccaggatgcaattcgggccaagaaaaaagcattcaatttcctgggagagatcataggcctcattcccaccgtcggtatcttcatcaccatgaaccctggg

SEQ ID NO: 47704 - DNA, 1797 bp, Homo Sapiens
atggcttcactgagaagagtcaaagtgctgttggtgttgaacttgatcgcggtagccggcttcgtgctcttcctggccaagtgccggcccatcgcggtgcgcagcggagacgccttccacgagatccggccgcgcgccgaggtggccaacctcagcgcgcacagcgccagccccatccaggatgcggtcctgaagcgcctgtcgctgctggaggacatcgtgtaccggcagctgaatggcttatccaaatcccttgggctcattgaaggttatggtgggcggggtaaagggggccttccggctactctttccccggctgaagaagaaaaggctaagggaccccatgagaagtatggctacaattcatacctcagtgaaaaaatttcactggaccgttccattccggattatcgtcccaccaagtgtaaggagctcaagtactccaaggacctgccccagatatccatcatattcatcttcgtgaacgaggccctgtcggtgatcctgcggtccgtgcacagtgccgtcaatcacacgcccacacacctgctgaaggaaatcattctggtggatgacaacagcgacgaagaggagctgaaggtccccctagaggagtatgtccacaaacgctaccccgggctggtgaaggtggtaagaaatcagaagagggaaggcctgatccgcgctcgcattgagggctggaaggtggctaccgggcaggtcactggcttctttgatgcccacgtggaattcaccgctggctgggctgagccggttctatcccgcatccaggaaaaccggaagcgtgtgatcctcccctccattgacaacatcaaacaggacaactttgaggtgcagcggtacgagaactcggcccacgggtacagctgggagctgtggtgcatgtacatcagccccccaaaagactggtgggacgccggagacccttctctccccatcaggaccccagccatgataggctgctcgttcgtggtcaacaggaagttcttcggtgaaattggtcttctggatcctggcatggatgtatacggaggagaaaatattgaactgggaatcaaggtatggctctgtgggggcagcatggaggtccttccttgctcacgggtggcccacattgagcggaagaagaagccatataatagcaacattggcttctacaccaagaggaatgctcttcgcgttgctgaggtctggatggacgattacaagtctcatgtgtacatagcgtggaacctgccgctggagaatccgggaattgacatcggtgatgtctccgaaagaagagcattaaggaaaagtttaaagtgtaagaatttccagtggtacctggaccatgtttacccagaaatgagaagatacaataataccgttgcttacggggagcttcgcaacaacaaggcaaaagacgtctgcttggaccaggggccgctggagaaccacacagcaatattgtatccgtgccatggctggggaccacagcttgcccgctacaccaaggaaggcttcctgcacttgggtgccctggggaccaccacactcctccctgacacccgctgcctggtggacaactccaagagtcggctgccccagctcctggactgcgacaaggtcaagagcagcctgtacaagcgctggaacttcatccagaatggagccatcatgaacaagggcacgggacgctgcctggaggtggagaaccggggcctggctggcatcgacctcatcctccgcagctgcacaggtcagaggtggaccattaagaactccatcaagtag

SEQ ID NO: 47705 - DNA, 2383 bp, Homo Sapiens
ctccttcaagccctcagtcagttgtgcaggagaaagggggcggttggctttctcctttcaagaacgagttattttcagctgctgactggagacggtgcacgtctggatacgagagcatttccactatgggactggatacaaacacacacccggcagacttcaagagtctcagactgaggagaaagcctttccttctgctgctactgctgctgccgctgcttttgaaagtccactcctttcatggtttttcctgccaaaccagaggcacctttgctgctgccgctgttctctttggtgtcattcagcggctggccagaggatgagactccccaaactcctcactttcttgctttggtacctggcttggctggacctggaattcatctgcactgtgttgggtgcccctgacttgggccagagaccccaggggaccaggccaggattggccaaagcagaggccaaggagaggccccccctggcccggaacgtcttcaggccagggggtcacagctatggtgggggggccaccaatgccaatgccagggcaaagggaggcaccgggcagacaggaggcctgacacagcccaagaaggatgaacccaaaaagctgccccccagaccgggcggccctgaacccaagccaggacaccctccccaaacaaggcaggctacagcccggactgtgaccccaaaaggacagcttcccggaggcaaggcacccccaaaagcaggatctgtccccagctccttcctgctgaagaaggccagggagcccgggcccccacgagagcccaaggagccgtttcgcccaccccccatcacaccccacgagtacatgctctcgctgtacaggacgctgtccgatgctgacagaaagggaggcaacagcagcgtgaagttggaggctggcctggccaacaccatcaccagctttattgacaaagggcaagatgaccgaggtcccgtggtcaggaagcagaggtacgtgtttgacattagtgccctggagaaggatgggctgctgggggccgagctgcggatcttgcggaagaagccctcggacacggccaagccagcggcccccggaggcgggcgggctgcccagctgaagctgtccagctgccccagcggccggcagccggcctccttgctggatgtgcgctccgtgccaggcctggacggatctggctgggaggtgttcgacatctggaagctcttccgaaactttaagaactcggcccagctgtgcctggagctggaggcctgggaacggggcagggccgtggacctccgtggcctgggcttcgaccgcgccgcccggcaggtccacgagaaggccctgttcctggtgtttggccgcaccaagaaacgggacctgttctttaatgagattaaggcccgctctggccaggacgataagaccgtgtatgagtacctgttcagccagcggcgaaaacggcgggccccactggccactcgccagggcaagcgacccagcaagaaccttaaggctcgctgcagtcggaaggcactgcatgtcaacttcaaggacatgggctgggacgactggatcatcgcaccccttgagtacgaggctttccactgcgaggggctgtgcgagttcccattgcgctcccacctggagcccacgaatcatgcagtcatccagaccctgatgaactccatggaccccgagtccacaccacccacctgctgtgtgcccacgcggctgagtcccatcagcatcctcttcattgactctgccaacaacgtggtgtataagcagtatgaggacatggtcgtggagtcgtgtggctgcaggtagcagcactggccctctgtcttcctgggtggcacatcccaagagccccttcctgcactcctggaatcacagaggggtcaggaagctgtggcaggagcatctacacagcttgggtgaaaggggattccaataagcttgctcgctctctgagtgtgacttgggctaaaggcccccttttatccacaagttcccctggctgaggattgctgcccgtctgctgatgtgaccagtggcaggcacaggtccagggagacagactctgaatgggactgagtcccaggaaacagtgctttccgatgagactcagcccaccatttctcctcacctgggccttctcagcctctggactctcctaagcacctctcaggagagccacaggtgccactgcctcctcaaatcacatttgtgcctggtgacttcctgtccctgggacagttgagaagctgactgggcaagagtgggagagaagaggagagggcttggatagagttgaggagtgtgaggctgttagactgttagatttaaatgtatattgatgagataaaaagcaaaactgtgcct

SEQ ID NO: 47706 - DNA, 5462 bp, Homo Sapiens
cggccatactatttttatcttgctttttcgttctgtcgcagtactgtttaatatgagtccagcgacggctctgtgactgttttcctctggtaaaatcgctcttgcgtcctcagcgtttatctcaggtgcggaaggtctcacaggtttggaaatagcgccggaaaaatcgatccgcggagtgagacggctcgtaccacactgcagggcccggaggtcaagatggtggctgtaaaactaggatccctgacgattgcttagcattaaggcccgacatggaaccggggtgtgacgagttcctgccgccaccggagtgcccggtttttgagcctagctgggctgaattccaagacccgcttggctacattgcgaaaataaggcccatagcagagaagtctggcatctgcaaaatccgcccacccgcggattggcagcctccttttgcagtagaagttgacaatttcagatttactcctcgcgtccaaaggctaaatgaactggaggcccaaactagagtgaaattgaactatttggatcagattgcaaaattctgggaaattcaaggctcctctttaaagattcccaatgtggagcggaagatcttggacctctacagccttagtaagattgtgattgaggaaggtggctatgaagccatctgcaaggatcgtcggtgggctcgagttgcccagcgtctccactacccaccaggcaaaaacattggctccctgctacgatcacattacgaacgcattatttacccctatgaaatgtttcagtctggagccaaccatgtgcaatgtaacacacacccgtttgacaatgaggtaaaagataaggaatacaagccccacagcatcccccttagacagtctgtgcagccttcaaagttcagcagctacagtcgacgggcaaaaaggctacagcctgatccagagcctacagaggaggacattgagaagcatccagagctaaagaagttacagatatatgggccaggtcccaaaatgatgggcttgggccttatggctaaggataaggataagactgtgcataagaaagtcacatgccccccaactgttacggtgaaggatgagcaaagtggaggtgggaacgtgtcatcaacattgctcaagcagcacttgagcctagagccctgcactaagacaaccatgcaacttcgaaagaatcacagcagtgcccagtttattgactcatatatttgccaagtatgctcccgtggggatgaagatgataagcttcttttctgtgatggctgtgatgacaattaccacatcttctgcttgttaccaccccttcctgaaatccccagaggcatctggaggtgcccaaaatgtatcttggcggagtgtaaacagcctcctgaagcttttggatttgaacaggctacccaggagtacagtttgcagagttttggtgaaatggctgattccttcaagtccgactacttcaacatgcctgtacatatggtgcctacagaacttgtagagaaggaattctggaggctggtgagcagcattgaggaagacgtgacagttgaatatggagctgatattcattccaaagaatttggcagtggctttcctgtcagcaatagcaaacaaaacttatctcctgaggagaaggagtatgcgaccagtggttggaacctgaatgtgatgccagtgctagatcagtctgttctctgtcacatcaatgcagacatctcaggcatgaaggtgccctggctgtacgtgggcatggttttctcagcattttgttggcatattgaggatcactggagttactctattaactatctgcattggggtgagccgaagacctggtatggtgtaccctccctggcagcagagcatttggaggaggtgatgaagatgctgacacctgagctgtttgatagccagcctgatctcctacaccagcttgtcactctcatgaatcccaacactttgatgtcccatggtgtgccagttgtccgcacaaaccagtgtgcaggggagtttgtcatcacttttcctcgtgcttaccacagtggttttaaccaaggctacaattttgctgaagctgtcaacttttgtactgctgactggctacctgctggacgccagtgcattgaacactaccgccggctccggcgctattgtgtcttctcccacgaggagctcatctgcaagatggctgccttcccagagacgttggatctcaatctagcagtagctgtgcacaaggagatgttcattatggttcaggaggagcgacgtctacgaaaggcccttttggagaagggcgtcacggaggctgagcgagaggcttttgagctgctcccagatgatgaacgccagtgcatcaagtgcaagaccacgtgcttcttgtcagccctggcctgctacgactgcccagatggccttgtatgcctttcccacatcaatgacctctgcaagtgctctagtagccgacagtacctccggtatcggtacaccttggatgagctccccaccatgctgcataaactgaagattcgggctgagtcttttgacacctgggccaacaaagtgcgagtggccttggaggtggaggatggccgtaaacgcagctttgaagagctaagggcactggagtctgaggctcgtgagaggaggtttcctaatagtgagctgcttcagcgactgaagaactgcctgagtgaggtggaggcttgtattgctcaagtcctggggctggtcagtggtcaggtggccaggatggacactccacagctgaccttgactgaactccgggtccttcttgagcagatgggcagcctgccctgtgccatgcatcagattggggatgtcaaggatgtcctggaacaggtggaggcctatcaagctgaggctcgtgaggctctggccacactgccctctagtccagggctattgcggtccctgttggagagggggcagcagctgggtgtagaggtgcctgaagcccatcagcttcagcagcaggtggagcaggcgcaatggctagatgaagtgaagcaggccctggccccttctgctcacaggggctctctggtcatcatgcaggggcttttggttatgggtgccaagatagcctccagcccttctgtggacaaggcccgggctgagctgcaagaactactgaccattgcagagcgctgggaagaaaaggctcatttctgcctggaggccaggcagaagcatccaccagccacattggaagccataattcgtgagacagaaaacatccctgttcacctgcctaacatccaggctctcaaagaagctctgactaaggcacaagcttggattgctgatgtggatgagatccaaaatggtgaccactacccctgtctagatgacttggagggcctggtggctgtgggccgggacctgcctgtggggctggaagagctgagacagctagagctgcaggtattgacagcacattcctggagagagaaggcctccaagacctttctcaagaagaattcttgctacacactgcttgaggtgctttgcccgtgtgcagacgctggctcagacagcaccaagcgtagccggtggatggagaaggcgctggggttgtaccagtgtgacacagagctgctggggctgtctgcacaggacctcagagacccaggctctgtgattgtggccttcaaggaaggggaacagaaggagaaggagggtatcctgcagctgcgtcgcaccaactcagccaagcccagtccactggcaccatccctcatggcctcttctccgacttctatctgtgtgtgtgggcaggtgccagctggggtgggagttctgcagtgtgacctgtgtcaggactggttccatgggcagtgtgtgtcagtgccccatctcctcacctctccaaagcccagtctcacttcatctccactgctagcctggtgggaatgggacacaaaattcctgtgtccactgtgtatgcgctcacgacggccacgcctagagacaatcctagccttgctggttgccctgcagaggctgcccgtgcggctgcctgagggtgaggcccttcagtgtctcacagagagggccattggctggcaagaccgtgccagaaaggctctggcctctgaagatgtgactgctctgttgcgacagctggctgagcttcgccaacagctacaggccaaacccagaccagaggaggcctcagtctacacttcagccactgcctgtgaccctatcagagaaggcagtggcaacaatatttctaaggtccaagggctgctggagaatggagacagtgtgaccagtcctgagaacatggctccaggaaagggctctgacctggagctactgtcctcactgttgccgcagttgactggccctgtgttggagctgcctgaggcaatccgggctcccctggaggagctcatgatggaaggggacctgcttgaggtgaccctggatgagaaccacagcatctggcagctgctgcaggctggacagcctccagacctggacagaattcgcacacttctggagctggaaaaatttgaacatcaagggagtcggacaaggagccgggctctggagaggcgacggcggcggcagaaggtggatcagggtagaaacgttgagaatcttgttcaacaggagcttcagtcaaaaagggctcggagctcagggattatgtctcaggtgggccgagaagaagaacattatcaggagaaagcagaccgtgaaaatatgttcctgacaccttccacagaccacagccctttcttgaaaggaaaccaaaatagcttacaacacaaggattcaggctcttcagctgcttgtccttctttaatgcctttgctacaactctcctactctgatgagcaacagttgtgacagtggcaccaaaggtcatttgtggttgtttttgtttgtttgtttcttaaatcctactatctcctggcctggacctcagaaggagctttttgcttatctataatttttcactgccaatttttgatatcctctctcctagagttactgttaaaaggttggttcgtaaagtccacaccccgatgctcagaagtgtcttgccagcaacattcctgctagcatacaggagtgatttcctaaaccagtttcattctagtctgaatagggacaaacaaatcttgaggaagcccaagtgcgtacctttatttttgcccccaccaccctctttctgtacttcaatttttgtttgttttttgtttttttgtccctgtcataaaatattttggtgcttcaaaacttgtaccttcattgtacatccttttcttttctccccttgggtcttattataaaagaagacaatgtacgttgtaattaccaaaaagaatagggaaaaacaagaatttcatgactctacctgtggtctatctttaatttcatttcttttgttaaaaataaaacaatgagtatgtttgg

SEQ ID NO: 47707 - DNA, 831 bp, Homo Sapiens
aggttagcactctacgtatatgaatatctgctccatgtaggagctcagaaatcagctcaaacatttttatcagagataagatgggaaaaaaacatcacattgggggaaccaccaggattcttacattcttggtggtgtgtattttgggatctctactgtgcagctccagagagacgtgaaacatgtgaacactcaagtgaagcaaaagccttccatgattacccttttatgtcacctcggtaccctggaggtccaaggcccccattgaggatacctaatcaggcacttggaggtgtcccaggaagtcagccattactccccagtggaatggatccaactcgacaacaaggacatccaaatatgggtgggccaatgcagagaatgactcctccaagaggaatggtgcccttaggaccacagaactatggaggtgcaatgagacccccactgaatgctttaggtggccctggaatgcctggaatgaacatgggtccaggtggtggtagaccttggccaaacccaacaaatgccaattcaataccatactcctcagcatctcctgggaattatgtaggtcctccaggaggtggagggccaccaggaacacccatcatgcctagtccagcagattcaaccaactctggtgataacatgtatactttaatgaatgcagtacctcctggacctaacagacctaattttccaatgggtcctgggtcagatggtcccatgggtggattaggaggaatggagtcacatcacatgaatggctctttaggctttctttttatattttgtttcaggctcaggagatatggacagtatttccaa

SEQ ID NO: 47708 - DNA, 1437 bp, Homo Sapiens
agtcacagccaggtaaccctggagtgaagcggtttagttagaagggagcagataaactcgtcactctagtagctttaaccctcaccctgaggcaccttagcaatcagccattgcctgcaagcctccaaagcttgtctttgcctaatatggagcccaaagaagccactgggaaagaaaacatggtcaccaagaaaaagaatctggccttcttgaggtctagactctatatgctggagagaaggaagactgacactgtggttgagagcagtgtttctggggaccactctggcaccttgaggaggagccaatctgacaggactgaatacaaccagaaattacaagaaaagatgactccacagggtgagtgttctgtagctgagaccttaaccccagaggaagagcatcatatgaagaggatgatggcaaagcgggaaaagatcattaaggagctgatacagacagaaaaggattatctcaatgatctagagctgtgtgttagggaagtggttcagcccctgagaaataaaaagactgataggctggatgtggatagcttgtttagcaacattgagtccgtgcatcagatatcagccaagctgctgtcattgttggaagaggccacaacagacgtggaaccggccatgcaagtaattggagaagtattcttgcagattaaagggccactggaagatatttataaaatctactgctatcaccatgatgaagcacatagtatactggagtcctatgaaaaggaagaagagctgaaggaacatttgagccactgtatccagtccttaaagtaaggccttttcaaatgatgattcccatctcctctcagttgcctagcagggaacattttaaatggatgtagatgaaaggtctcacataaatcctatgttttatgagacttgctgggagctctgctttgcattccctttataaaaagctgacatgccagaagccctgattgactttttttccccctgcgagaatgactaaaaataacatggaagaagatttagagctctgcagcgattgaaaaatgcaatatcaaaatataaaatgtggaagaaaagcctcttcttaaagctattgtaacttgcctggccccacgtagttcaaggattatgtgagataacacgtggccccatgaccactggagcacatgggttaatggagttaggggaatggcctacaactctgcatggccgtcttctttccccaaactcactgtggggagatgggtgaagacaagtcaggccttgttaaagttagtttcagaacaattactcatgccttcctttctcatccctaaaacattggtgggggagctacacaatgtactttttcttttctagaggaagtatctattcactgtgaaaatctgaaaaatataacaaagtatgtgtaagataaaaaccccttgctatttca

SEQ ID NO: 47709 - DNA, 1437 bp, Homo Sapiens
atggcggcagaagcagctggtgggaaatacagaagcacagtcagcaaaagcaaagacccctcggggctgctcatctctgtgatcaggactctgtctactagtgacgatgtcgaagacagggaaaatgaaaagggtcgccttgaagaagcctacgagaaatgtgaccgtgacctggatgaattgattgtacagcactacacagaattgacgacagccattcgcacataccagagcatcacagagcgcatcactaactcccgaaataaaataaagcaggtaaaagagaacctgctttcatgcaagatgctgctgcactgcaaacgggatgagcttcggaaactgtggattgaaggaattgagcataagcatgtcctgaacttgttggatgaaattgagaatatcaagcaagtgcctcaaaagctggaacagtgcatggccagcaagcactatctcagtgccactgacatgttggtgtcagcagttgagtctttggagggccccctgctccaggtggaaggactgagtgaccttcgactagagcttcacagcaagaagatgaaccttcacttggttctcatagatgaactacaccggcacctgtacatcaaatcgactagccgagttgtgcagcgtaacaaggaaaaagggaaaatcagctccctcgtgaaagatgcttctgttcctctgattgatgttacaaacctccctactcctcgaaaattccttgatacctctcactattctactgctggaagctcaagtgtgagggagataaatctgcaggacatcaaggaagatttagaattggatccagaggaaaacagcaccctgtttatgggtatcctcattaagggcttggcgaaactgaagaagatcccagaaacagttaaggcaatcatagagcgcttggagcaggagttgaagcaaattgtgaagaggtctacaacccaggtggcagacagtggctatcagcggggggagaacgttactgtggagaaccaaccaaggttgcttctagaactgctggagttactgtttgacaagtttaatgctgtagccgctgcacactctgtggtcctgggatacctgcaggacactgtagtgactccactgactcagcaggaagatatcaaactgtatgatatggcagatgtatgggtgaagatccaagatgttctacagatgctattaactgagtacttggatatgaaaaatactcgtacggcctctgaaccatcagctcaactaagctatgccagcactggacgagagtttgcagccttttttgccaagaagaaacctcaaaggccaaaaaattctcttttcaagttcgaatcgtcctcccatgccatcagtatgagcgcctatctgcgagaacagagaagggagctctatagtcggagtggagaactgcaagaaatccctagtctttttctt

SEQ ID NO: 47710 - DNA, 2361 bp, Homo Sapiens
aaagcagtgcttctctctggggccaaggccagagctgtggacaccttatcccactcatcctcatcctcttcctctgataaagcccctaccagtgctgataaagtctttctcgtgagagcctagaggccttaaaaaaaaaagtgcttgaaagagaaggggacaaaggaacaccagtattaagaggattttccagtgtttctggcagttggtccagaaggatgcctccattcctgcttctcacctgcctcttcatcacaggcacctccgtgtcacccgtggccctagatccttgttctgcttacatcagcctgaatgagccctggaggaacactgaccaccagttggatgagtctcaaggtcctcctctatgtgacaaccatgtgaatggggagtggtaccacttcacgggcatggcgggagatgccatgcctaccttctgcataccagaaaaccactgtggaacccacgcacctgtctggctcaatggcagccaccccctagaaggcgacggcattgtgcaacgccaggcttgtgccagcttcaatgggaactgctgtctctggaacaccacggtggaagtcaaggcttgccctggaggctactatgtgtatcgtctgaccaagcccagcgtctgcttccacgtctactgtggtcatttttatgacatctgcgacgaggactgccatggcagctgctcagataccagcgagtgcacatgcgctccaggaactgtgctaggccctgacaggcagacatgctttgatgaaaatgaatgtgagcaaaacaacggtggctgcagtgagatctgtgtgaacctcaaaaactcctaccgctgtgagtgtggggttggccgtgtgctaagaagtgatggcaagacttgtgaagacgttgaaggatgccacaataacaatggtggctgcagccactcttgccttggatctgagaaaggctaccagtgtgaatgtccccggggcctggtgctgtctgaggataaccacacttgccaagtccctgtgttgtgcaaatcaaatgccattgaagtgaacatccccagggagctggttggtggcctggagctcttcctgaccaacacctcctgccgaggagtgtccaacggcacccatgtcaacatcctcttctctctcaagacatgtggtacagtggtcgatgtggtgaatgacaagattgtggccagcaacctcgtgacaggtctacccaagcagaccccggggagcagcggggacttcatcatccgaaccagcaagctgctgatcccggtgacctgcgagtttccacgcctgtacaccatttctgaaggatacgttcccaaccttcgaaactccccactggaaatcatgagccgaaatcatgggatcttcccattcactctggagatcttcaaggacaatgagtttgaagagccttaccgggaagctctgcccaccctcaagcttcgtgactccctctactttggcattgagcccgtggtgcacgtgagcggcttggaaagcttggtggagagctgctttgccacccccacctccaagatcgacgaggtcctgaaatactacctcatccgggatggctgtgtttcagatgactcggtaaagcagtacacatcccgggatcacctagcaaagcacttccaggtccctgtcttcaagtttgtgggcaaagaccacaaggaagtgtttctgcactgccgggttcttgtctgtggagtgttggacgagcgttcccgctgtgcccagggttgccaccggcgaatgcgtcgtggggcaggaggagaggactcagccggtctacagggccagacgctaacaggcggcccgatccgcatcgactgggaggactagttcgtagccatacctcgagtccctgcattggacggctctgctctttggagcttctccccccaccgccctctaagaacatctgccaacagctgggttcagacttcacactgtgagttcagactcccagcaccaactcactctgattctggtccattcagtgggcacaggtcacagcactgctgaacaatgtggcctgggtggggtttcatctttctagggttgaaaactaaactgtccacccagaaagacactcaccccatttccctcatttctttcctacacttaaatacctcgtgtatggtgcaatcagaccacaaaatcagaagctgggtataatatttcaagttacaaaccctagaaaaattaaacagttactgaaattatgacttaaatacccaatgactccttaaatatgtaaattatagttataccttgaaatttcaattcaaatgcagactaattatagggaatttggaagtgtatcaataaaacagtatataatttt

SEQ ID NO: 47711 - DNA, 258 bp, Homo Sapiens
atggcgtcagtcataccagtgaaggacaagaaacttctggaggtcaaactgggggagttgccaagctggatcttgacgcgggacttcagccctagtggcattttcggagcatttcgaagaagttactaccggtactacaacaagtacatcaatgtgaagaaggggagcatctcgggggttaccatggtgctggcatgctacgtgatcttcagctactgcctctcctacaagcatctcaagcacgagcggctccgcaaa

SEQ ID NO: 47712 - DNA, 441 bp, Homo Sapiens
atgatgccaaggacaggcctccaaactgaggtcacagggtggcccaaggccctggaaatcagggcagctgcctctacagtgggtgtaattccaggcagtagctgccaagctgagtgggcccctgcaagaagagaagtgcccgtcttctggtcaacctggagatttgcatctctccatcgtgcccagtctctggcaggaagccccactccccagccgacactgcaccatgctcatggaggaagaagctgtgcagcacagcccaacagcgttttcccctttcggttttctagagtagtcttgcagaactattttttgttttttttttttgagagagtctcactctgttgcccaggctggagtgcagtggcaccacctcagctcactgcaaccaccgcctcctggattcaagcgattctcctgcctcagctccagagtagctga

SEQ ID NO: 47713 - DNA, 696 bp, Homo Sapiens
atgtgtggtaacaccatgtctgtgcccctgctcaacgatgctgccaccgtgtctggagctgagcgggaaacggccgtggttatttttttacatggacttggagacacagggcacagctgggctgacgccctctccaccattcggctccctcacgtcaagtacatctgttcccatgagcctaggatccctgtgaccctcaacatgaagatggtgatgccctcctggtttgacctgatggggctgagtccagatgccccagaggacgaggctggcatcaagaaggcagcagagaacatcaaggccttgattgagcatgaaatgaagaacgggatccctgccaatcaaatcatcctgggaggcttttcacagggccgggccctgtccctctacatggccctcacctgcccccaccctctggctggcatcctggctttgagctgctggccgcctctgcaccgggccttcccccaggcagctaatggcagtgccaaggacctggccatcctccagtgccatggggagctggaccccatggtgcccgtacggtttggggccctgatggctgagaagctccggtctgttgtcacacctgccagggtccagttccagacatacctgggtgtcatgcacagctcctgtcctcaggagatggcagctgtgaaggaatttcttgagaagctgctgcctcctgtctaa

SEQ ID NO: 47714 - DNA, 937 bp, Homo Sapiens
aaaacaccaaatggcgtgacgccggtgcagttggggggcccggaggccctggtggccctgggatggggaaccgcggtggcttccgcggaggtttcggcagtggcatccggggccagggtagcggccgtggactgggcctgggccagggccgcagagctcgcggaggcaaggccgaggataaggagtggatgcccgtcaccaagctgggccgctttgtcaaagacgtgaagatcaagtccctggaggagatctatctcttctccctgcccattaaggaatcagagatcattgactttttcctggcggcttctctcaaggatgagattttgaagattatgccagtgcagaagcagacccgtgccggccagcgcaccaggttcaaggcgtttgttgctgtcggggactacaatggccacgtcggtctgggtgttaagtgctccaaagtggtggccaccgccatccgtggggccatcatcctggccaagctctctattgtccccgtgcgcagaggctactgggggaacaagatcagcaagccccacaccgtcccttgcaaggtgacaggccgctgcggctctgtgctggtgcgcctcatccctgcacccaggggcactggcatcgtctccgcacctgtgcccaaggagctgctcatgatggctggtatcgatgactgctacacctcagaccggggctgcactgccaccctgggcaacttcaccaaggccacctttgatgcaatttctaagacctacagctacctgacccctgacctctggaaggagactgtatttaccaagtctacctatcaggaattcactgaccacctcgtcaagacccacaccagagtctccgtgcagtggacccaggctctagctgtggctacaacatagggtttttatacaagaaaaataaagtgaattaagcgtgaaaaaaaaaa

SEQ ID NO: 47715 - DNA, 535 bp, Homo Sapiens
atggctataccactgatgacattgaattttactggaatggaggagaaggggcagtcactggtgttaataaaatcgaacttcctcaattttcaattgttgactacaagatggtgtctaagaaggtggagttcacaacaggagcgtatccacgactgtcactaagttttcgtctaaagagaaacattggttacttcattttgcaaacctacatgccttctacactgattacaattctgtcctgggtgtctttttggatcaactatgatgcatctgcagccagagtcgcactaggaatcacgacagtgcttacaatgacaaccatcagcacccacctcagggagaccctgccaaagatcccttatgtcaaagcgattgatatttatctgatgggttgctttgtgtttgtgttcctggctctgctggagtatgcctttgtaaattacatcttctttgggaaaggccctcagaaaaagggagctagcaaacaagaccagagtgccaatgagaagaataaactggagatgaataaatccag

SEQ ID NO: 47716 - DNA, 1926 bp, Homo Sapiens
tttcttctggtcaatccatctagtgttaatggttctgaaacatggattttattgtgtcgtatttctgcctgagtagtcaagcattcttctttgcctacagaataaattctgcattttttttgactcattttcagactctttcaccatctagtcagaggctgtaaactagtggcctgtgggccagtataatcctacatccccttttccccccatcattttcctttatcttctagtagaaatcttctcgttccagttaagttgttcctctttattttcccgataggaaatactgtattctcctcttgaagcatgtgctctggctctttccctctattatttgtcttctgtgtaaattatcttcacttgtcctagaaacctcctcatacacactgatatttaataaagatagccctcttttgtgaatttgcttgaaaatggaagcattagaagtaggtaaagttatgagccaaggaaataagttattcattgaacaaatattgagctgtaatataatattatatcatattatgtaacaaaatattgagtacctattatgtggtggactgtgttatctgattggggctgttacaatgatcaagaaagactatgttcctccctcattgagcttatatcccattgcaatcaatatgcaaaaataagtaggttgacagcctgccttcagagtgcttttataaacatcttacttgatctgaacagcaatcctgaagtacttgagaaaacagaagctggtctcgaactcctggcctctagtgatctgcttgcctcaggctcccatagtgctgggactacaggtgtgagccaccacgcccggcctggcttcattgatttttccaattgtagtaataatcatgctcattgcttataattcaaccagtactagaaagttcaaacaaccctcatagtaatatagatttgtaaattccaaaattcgtattttattatgtctttctttgccaccttctcttttctccacttggtatatcaagaacatcatttttaaaggctaaatagacactgtatggctattccatagctgaatcaaccaaacctctgttgagaggctcttaaaatgtttcttcttgtataaaaaacaacattgttaaactttattctccatttatctttttataattatttcactcttaattccttagaaatagaattccttagtcaaattatcaggtttattcagtagtcatggtttgtgcaaaacctggtcttctgggagggataagtaagaaaaatggaccatttttctaatgaagcttaagagtttatttggggaaataacattcacttttggaatttcaaaagaaaagttaaaaattcttgacgatttaactttgttacctttgttagtaaaacaatataaaatgctgtggagctataagttaccaggatcaggtatagttatttggtccacatttcatgcagtaatggattcagaatggagaagacaaaatgcagaactgaacttaattacaaataagcattttttaaaaaatctacaatctaagcatttagatgtaaaaatattaaaaaccaagaataagcttgtggaaggaatttaattatgaagtaaactacttgtctttttttgagatggagtttcgctcttgttgcccaggctggagtgcaatggtgtgatcttggctcaccgcaacctctgccccccaggttcaagctattctgcctcagcctcccgagtagttgggattacaggcatgcaccaccacgcccggctaattttgtatttttttagtagagacgaggtttctccatgttggtcaggctgttctcaaactcccaacctcaggtgatctgcccgcctcggcctcacaaagtgctggaattataggcgtgagcaactgcacccagcaactacttgttaaattaaaaaaaaaa

SEQ ID NO: 47717 - DNA, 1391 bp, Homo Sapiens
tcaacaagcgcctggcacactcagccaggcccgcgggcatctgctgcgtgtcccgctccgggctcagtgccctcgccgccgccggcactgcctcgatgttccagctgcccatcttgaatttcagcccccagcaagtggccggggtatgtgagaccctggaagagagcggcgatgtggagcgcctgggtcgcttcctctggtcgctgcccgtggcccctgcggcctgcgaggccctcaacaagaatgagtcggtgctacgcgcacgagccatcgtggcctttcacggtggcaactaccgcgagctctatcatatcctggaaaaccacaagttcaccaaggagtcgcacgccaagctgcaggcgctgtggcttgaagcacactaccaggaggctgagaagctgcgtggaagacccctgggacctgtggacaagtaccgagtaaggaagaagttcccgctgccgcgcaccatttgggacggcgaacagaagacacactgcttcaaggagcgcacgcggcacctgctacgcgagtggtacctgcaggatccataccctaaccccagcaaaaaacgtgagctcgcccaggcaaccggactgacccctacgcaggtgggcaactggttcaaaaaccgccgacaaagggaccgagcggctgcagccaagaacagactccagcagcaggtcctgtcacagggttccgggcgggcactacgggcggagggcgacggcacgccagaggtgctgggcgtcgccaccagcccggccgccagtctatccagcaaggcggccacttcagccatctccatcacgtccagcgacagcgagtgcgacatctgagttgcccatccaggatgctcagaagcagattccagtgtaaaaacgagaaaaacaaaatgaaagaggggaagaagatgagagacctgcaaatccagcgccacagaagccaggtgaccagggacccgcgggctcgggttgccgtttcccgccccaccccgcggccggcctggcttcactggcgccctttggccgcgaccacgggaaccagcggtgaggcctgacccagcaccacgttcttcttgctttgctttttcctaaggattttgctgcaaagtctccttcggaacccgaactgcaagctgagcgcctgcccagattctcccatgggtatttcacgtcgaaaggacgctgttacatatgtataactttcgctttaaagtttttttttaacaaaacatatatatgctgtttatttacttatttaagagaccgccatggtaggtttctctgtagcttggggaacttgctgtttctaaacatgcaggctggtggtgatgggttctgtgtggagaagccaaacaataaaacaacctagtgggcaaccttcttaattaa

SEQ ID NO: 47718 - DNA, 907 bp, Homo Sapiens
cgggctgccgctgctgcctcacacgctctgcgctgccatcctcgaccaggatcgacttgcgcttggcaccgaggaggggctctttgtcatccatctgcgcagcaacgacatcttccaggtgggggagtgccggcgcgtgcagcagctgaccttgagccccagtgcaggcctgctggtcgtgctgtgtggccgcggccccagcgtgcgtctctttgccctggcggagctggagaacatagaggtagcaggtgccaagatccccgagtctcgaggctgccaggtgctggcagctggaagcatcctgcaggcccgcaccccggtgctctgtgtagccgtcaagcgccaggtgctctgctaccagctgggcccgggccctgggccctggcagcgccgcatccgtgagctgcaggcacctgccactgtgcagagcctggggctgctgggcgaccggctatgtgtgggcgccgccggtggctttgcactctacccgctgctcaacgaggctgcgccgttggcgctgggggccggtttggtgcctgaggagctgccaccatcccgcgggggcctgggtgaggcactgggtgccgtggagcttagcctcagcgagttcctgctactcttcaccactgctggcatctacgtggatggcgcaggccgcaagtctcgtggccacgagctgttgtggccagcagcgcccatgggctgggggtatgcggccccctacctgacagtgttcagcgagaactccatcgatgtgtttgacgtgaggagggcagaatgggtgcagaccgtgccgctcaagaaggtgcggcccctcaatccagagggctccctgttcctctacggcaccgagaaggtccgcctgacctacctcaggaaccagctggcagagaaggacgagttcgac

SEQ ID NO: 47719 - DNA, 2326 bp, Homo Sapiens
ctgctttctgcacgtcctcgccgccgcgccgccagtccgtttgtgctagctctggccgtgagccggccgcccgctgccgccggccgccccgcagctgcctgcgccccagccgcgcctcgcggccagcccggctagctcaggtccgctcccggagcccgcgcccctccacgctgccccctgcctgtccccggccatgctgtcccttcagtaccccgacgtgtaccgcgacgagaccgccgtacaggattatcatggtcataaaatttgtgacccttacgcctggcttgaagaccccgacagtgaacagactaaggcctttgtggaggcccagaataagattactgtgccatttcttgagcagtgtcccatcagaggtttatacaaagagagaatgactgaactatatgattatcccaagtatagttgccacttcaagaaaggaaaacggtatttttatttttacaatacaggtttgcagaaccagcgagtattatatgtacaggattccttagagggtgaggccagagtgttcctggaccccaacatactgtctgacgatggcacagtggcactccgaggttatgcgttcagcgaagatggtgaatattttgcctatggtctgagtgccagtggctcagactgggtgacaatcaagttcatgaaagttgatggtgccaaagagcttccagatgtgcttgaaagagtcaagttcagctgtatggcctggacccatgatgggaagggaatgttctacaactcataccctcaacaggatggaaaaagtgatggcacagagacatctaccaatctccaccaaaagctctactaccatgtcttgggaaccgatcagtcagaagatattttgtgtgctgagtttcctgatgaacctaaatggatgggtggagctgagttatctgatgatggccgctatgtcttgttatcaataagggaaggatgtgatccagtaaaccgactctggtactgtgacctacagcaggaatccagtggcatcgcgggaatcctgaagtgggtaaaactgattgacaactttgaaggggaatatgactacgtgaccaatgaggggacggtgttcacattcaagacgaatcgccagtctcccaactatcgcgtgatcaacattgacttcagggatcctgaagagtctaagtggaaagtacttgttcctgagcatgagaaagatgtcttagaatggatagcttgtgtcaggtccaacttcttggtcttatgctacctccatgacgtcaagaacattctgcagctccatgacctgactactggtgctctccttaagaccttcccgctcgatgtcggcagcattgtagggtacagcggtcagaagaaggacactgaaatcttctatcagtttacttcctttttatctccaggtatcatttatcactgtgatcttaccaaagaggagctggagccaagagttttccgagaggtgaccgtaaaaggaattgatgcttctgattaccagacagtccagattttctaccctagcaaggatggtacgaagattccaatgttcattgtgcataaaaaaggcataaaattggatggctctcatccagctttcttatatggctatggcggcttcaacatatccatcacacccaactacagtgtttccaggcttatttttgtgagacacatgggtggtatcctggcagtggccaacatcagaggaggtggcgaatatggagagacgtggcataaaggtggtatcttggccaacaaacaaaactgctttgatgactttcagtgtgctgctgagtatctgatcaaggaaggttacacatctcccaagaggctgactattaatggaggttcaaatggaggcctcttagtggctgcttgtgcaaatcagagacctgacctctttggttgtgttattgcccaagttggagtaatggacatgctgaagtttcataaatataccatcggccatgcttggaccactgattatgggtgctcggacagcaaacaacactttgaatggcttgtcaaatactctccattgcataatgtgaagttaccagaagcagatgacatccagtacccgtccatgctgctcctcactgctgaccatgatgaccgcgtggtcccgcttcactccctgaagttcattgccacccttcagtacatcgtgggccgcagcaggaagcaaagcaaccccctgcttatccacgtggacaccaaggcgggccacggggcggggaagcccacagccaaagtgatagaggaagtctcagacatgtttgcgttcatcgcgcggtgcctgaacgtcgactggattccataa

SEQ ID NO: 47720 - DNA, 2402 bp, Homo Sapiens
agcccaggcgctgctgctggcgccagacggcaccggccgctggtagagcgcgtgccgcgagatgcggcctcaggacagcaccggggtcgcggagctccaggagcccgggctgccgctaacggacgatgcacccccgggcgccactgaggagccggcggccgccgaggcagctggggcgccagaccgcggtaggtgctggctctgcctttcctcgccgtgttgctcccgcaccgagccggaagccaagaagaaagcaccctgtcctggacttggcttgttttacacattattgtctgccttccttttctcagtgggctctttatttgttaaaaaagtgcaagacgtccatgctgtagagattagtgcgtttcgatgtgtgttccaaatgctagttgttatcccttgcttaatatacagaaaaactgggtttataggcccaaaaggtcaacgaattttcctcattctcagaggagtccttggttctaccgccatgatgcttatatactatgcttaccagacaatgtccctcgctgatgccacagttatcacgtttagcagtccagtgtttacgtccatatttgcttggatatgtctcaaggaaaaatatagcccttgggatgctcttttcaccgtgttcacaatcactggagtgatccttatcgtgagaccaccatttttgtttggttccgacacttcggggatggaagaaagctattcaggccaccttaagggaacattcgcagcaattggaagtgccgtatttgctgcatcgactctagttatcctaagaaaaatgggaaaatctgtggactactttctgagcatttggtattatgtagtacttggcctcgttgaaagtgtcatcatcctctctgtattaggagagtggagtctgccttactgtgggttggacaggctatttctcatattcattgggctctttggtttggggggtcagatatttatcacaaaagcacttcaaatagaaaaagcagggccagtagcaataatgaagacaatggatgtggtctttgcttttatctttcagattattttctttaataatgtgccaacgtggtggacagtgggtggtgctctctgcgtagtagccagtaatgttggagcggccattcgtaaatggtaccaaagttccaaatgaagcatcattgctgaaatacatatttttttcaagtacaccatcacctaattcacatacagcatacgcacacatctggaaaatctgcattttcttcattggttgtatttaataaattgcctaaagtaccatttttgaatatagtatgtctttagttaagaatagctagtctgtttggtgtaacaattttttggtagctttggttttggttttggttttttttgttgttgttgttggggtcaagttggtgagaggagagctcattgtttgaagaaaaaccaaaacattttatggctagtaatatttatgtaatttttaaaatgtatttttggtactgatgggatatgggtggggaggctattttagatattcttttagcagtgtagagcctaagaaacttggttctactaccatgatctttataaactatgccttccagacaattgataatgctgctataattagtattatgttgataattcatttgcaaccttattctatttaggaggatgaagttgaagcttagaataggtgcctgcttaatggtgttaataatacaaatgaattggccttattttcaaggattttataaatgattatcatacttgtaactcatatttgtgccttttcattttaatgctggaatttttattatgtcacctctaaaacacttaaattgccaaatttggctagtagttttgtttcagtggcattagcaactgcagctagcatactataattttaattgtcctcacttttttttgaaactgcactaaatttttcttaacattccaagatttcagatctctaaatcacaaagagaaatcttggcatgaccagtgtgcacgtttccatcctgaagtgttttctcttcactagaaatgtgattttctataaattccccttgaatttatagtgtgatgccaaataaaattttctcaggatcttattaggttgaaccatatgtaattgccaagattttactattttaacttagaaaaaccatcgtttcatatgattcaccctaatagatacctccattattctctaaatgaaatagaagactttggagtatatgtttttaaagtaattttttaaaatatggtaatgtattaaacttatttttatagttatgaaattatgtgtaataatgctttatgttatacattaaatgtaaagacttgtgaatccatgtttgattgactttcatagtttcctgcattgaaataaaatcactatgaattct

SEQ ID NO: 47721 - DNA, 903 bp, Homo Sapiens
catgtggactctggcaagtccaccaccactgggcctctcaaatgtgagggcattgacaagagaatcattgagaagtttgaaaaggagccggcagaggtgggcgagggctccttcaagtatgcctgggtgttggacaagctgagggcagaaagagaacgcaggatcaccattgatatctccctgtggaagttcaagactagcacatactacagcattatcatcgatgctccaggccacagagacttcatcatgaccatgatcaggggcacttcccaggccgactgcgcggtgctcttcgtggcaggcggctgggcggaggccggcatcttcaagaacccgcagacccacgagctcgcgctgctggccaactggcgggacgtcacgcagctcatcgtgatcttcaacgaaattgactccaccgagcccgcctacagcggctcgcgcctccaggtgatcaccaaggaagtaagcgcctgcatcaagaagatcggctacaactggctgcctggccttcagtccatctcgagctggcacggcgacagcatgctggagcccagcactgacgcgagtgtggcgcggatgccctggttcaagtgctggaaggtagagtggaaggaggggaacgccatgggggtgactctgctggaagctttgaactccatcctcccaacaacgcgcagggtcgacaatcccctgaggctgcccctgcaagatgtgtacaagatgggaggcattggcagtgtgccagtgggccgtgtggagggtggctttttcaaattcgggatagtggtcacatttgcccccagcaatgtcaccactaaggttaaatctgtggagatgcaccatgaggtcctggcggaagccgtggttaacaatgtaggattccatgtgaagaatgcaacc

SEQ ID NO: 47722 - DNA, 942 bp, Homo Sapiens
ctaagtgatctttttctttttcacagggaaatgggggaaaatcagacaatggtcacagagttcctcctactgggatttctcctgggcccaaggattcagatgctcctctttgggctcttctccctgttctatatcttcaccctgctggggaacggggccatcctggggctcatctcactggactccagactccacacccccatgtacttcttcctctcacacctggctgtcgtcgacatcgcctacacccgcaacacggtgccccagatgctggcgaacctcctgcatccagccaagcccatctcctttgctggttgcatgacgcagacctttctctgtttgagttttggacacagcgaatgtctcctgctggtgctgatgtcctacgatcgttacgtggccatctgccaccctctccgatactccgtcatcatgacctggagagtctgcatcaccctggccgtcacttcctggacgtgtggctccctcctggctctggcccatgtggttctcatcctaagactgcccttctctgggcctcatgaaatcaaccacttcttctgtgaaatcctgtctgtcctcaggctggcctgtgctgacacctggctcaaccaggtggtcatctttgcagcctgcgtgttcttcctggtggggccacccagcctggtgcttgtctcctactcgcacatcctggcggccatcctgaggatccagtctggggagggccgcagaaaggccttctccacctgctcctcccacctctgcgtggtgggactcttctttggcagtgccatcatcatgtacatggcccccaagtcccgccatcctgaggagcagcaaaaggtcttttttctattttacagttttttcaacccaacacttaaccccctgatttacagcctgaggaacggagaggtcaagggtgccctgaggagagcactg

SEQ ID NO: 47723 - DNA, 140 bp, Homo Sapiens
actactgttttccaaagtgaagttgcagtcactctgccgaggcccggacgaggcactgctgacttgtaagcacatgctgcagatatggaaatcctgctacaacctcaccaaccccagcacaagaccccgtagggtggcag

SEQ ID NO: 47724 - DNA, 396 bp, Homo Sapiens
atgctgagtatctgtttgttggccgtttatatgtcgtctttggagaaatgtctatttgggctctttgtccatttttcaatcaggtgtgtgtttttatatgttctgggtattcacccttttcagatatatcattttaaaatactttgtcccattccgtggattgcctttcactctgttttgttctttgatgtacagaagttgtttctttcttttagttacctgtgtgtgcctctggtgtcatatctaagaaatcactgcctcacccttttcagatatatcattttaaaatactttgtcccattccgtggattgcctttcactctgttttgttctttgatgtacagaagttgtttctttcttttagttacctgtgtgtgcctctggtgtcatatctaa

SEQ ID NO: 47725 - DNA, 378 bp, Homo Sapiens
gggagtgcgagccacaggccaggcactctccttctcccattagctcagccgtggcatcggacttgcagcttcattttgggctgccttagccatgaagctccttttgctgactttgactgtgctgctgctcttatcccagctgactccaggtggcacccaaagatgctggaatctttatggcaaatgccgttacagatgctccaagaaggaaagagtctatgtttactgcataaataataaaatgtgctgcgtgaagcccaagtaccagccaaaagaaaggtggtggccattttaactgctttgaagcctgaagccatgaaaatgcagatgaagctcccagtggattcccacactctatcaataaacacctctggctga

SEQ ID NO: 47726 - DNA, 1134 bp, Homo Sapiens
atgtccccactgaaccagtcagcagaaggccttccccaggaggcctccaacagatccctgaatgccacagaaacctcagaggcttgggatcccaggaccctccaggcgctcaagatctcccttgccgtggtcctttccgtcatcacactggccacagtcctctccaatgcctttgtactcaccaccatcttactcaccaggaagctccacacccctgccaactacctgattggctccctggccaccaccgacctcttggtttccatcttggtaatgcccatcagcatcgcctataccatcacccacacctggaactttggccaaatcttgtgtgacatctggctgtcctctgacatcacgtgctgcacagcctccatcctgcatctctgtgtcattgctctggacaggtactgggcaatcacagatgccctggaatacagtaaacgcaggacggctggccacgcggccaccatgatcgccattgtctgggccatctccatctgcatctccatccccccgctcttctggcggcaggccaaggcccaggaggagatgtcggactgtctggtgaacacctctcagatctcctacaccatctactccacctgtggggccttctacattccctcggtgttgctcatcatcctatatggccggatctaccgggctgcccggaaccgcatcctgaatccaccctcactctatgggaagcgcttcaccacggcccacctcatcacaggctctgccgggtcctcgctctgctcgctcaactccagcctccatgaggggcactcgcactcggctggctcccctctctttttcaaccacgtgaaaatcaagcttgctgacagtgccctggaacgcaagaggatttctgctgctcgagaaaggaaagccactaaaatcctgggcatcattctgggggcctttatcatctgctggctgcccttcttcgtggtgtctctggtcctccccatctgccgggactcctgctggatccacccggcgctctttgacttcttcacctggctaggctatttaaactccctcatcaatccaataatctacactgtgtttaatgaagagtttcggcaagcttttcagaaaattgtccctttccggaaggcctcctag

SEQ ID NO: 47727 - DNA, 3982 bp, Homo Sapiens
gcgccgcggtgcccggcgcgccctccaagctaggagaggggagaagccgggggctgcagctgggcaagggggaggaaagtgcgtgtgcgtgcacgcctgtgtgcagggcagagagtgcggggggcgacagtctcggcttagggcggaggagagggcaggggaacggcggtgcagctcccccgctgtccccgaggatttcccgcggcagccccgggctccccagtgcccctcaccatggacttgcgcggagttgggacgggcctcggcagcagcaagcggctggctgccgggccctgggggagcgcgggcgcgcgcgcggggatggcgaggtaggatggccacccagcgcgacccccgccgccccaacccagcggcccctgggcggtgccgctgactcgccggagcgcacaggggtgtgggcggaggcggcctcgccgcgcccgcgccttcgggagtcgcctcgcctcttccacccacttgcacctgccaccccgcggataccatgtcgaaggcggccggaggcgcggcggcggctgcggcggcggcggaaagttgttccccagccccggccggctcgtccgcggccccgcccgcgccggtggaggacctgtccaaagtgtcggacgaggagctgctgcagtggagcaaggaggagctgatccgcagcctgcggcgcgccgaggcggagaaggtgagcgcgatgctggaccacagcaacctcatccgcgaggtgaaccgccgcctgcagctgcacctcggcgagatccgcggcctcaaggatatcaaccagaaactccaggaagacaaccaggaactgagggacctctgctgtttcctggatgatgaccggcagaaaggcaagagggtgtctcgggagtggcagagactgggtcgctacactgccggggtgatgcacaaggaagtggccttatacctgcagaagctgaaagacctggaggtgaagcaggaggaagtggtgaaggagaacatggagctcaaggagctctgtgtgctactagatgaggagaagggtgcaggctgcgcaggcagccgctgctccatcgacagccaggccagcctgtgccaactcacagcctccaccgcaccctacgtgcgggatgtgggtgacggcagcagcacctccagcactggcagcactgacagcccggaccaccacaagcaccacgcgagcagtggcagcccggagcacctgcagaagccccggagcgagggcagcccggagcactccaagcacaggagcgccagccccgagcatccacagaaacccagagcctgtggaaccccagatcgccccaaagcactcaaaggacctagcccggagcaccacaaacccttgtgcaagggcagccccgaacagcaaaggcacccgcatccagggagcagccccgaaacgctgcccaagcacgtgctgagtgggagcccggaacacttccagaagcaccggtcagggagcagccctgaacacgccaggcacagtggagggagcccggagcatcttcagaaacacgctcttggggggagcctagagcatctccccagagccaggggcaccagcccggagcacctcaaacaacattatggagggagccctgatcacaaacacggaggaggcagtggaggaagtggaggcagcggcggaggcagcagggagggcaccctcagacggcaggcacaggaggacgggtcaccccatcaccggaatgtctacagtggcatgaacgaatcaaccttgtcctatgttaggcagctggaggcaagagtaagacagctggaggaagaaaatcgcatgctgccccaggccagccagaatagaaggcaacctccaactagaaacagctcaaatatggagaaaggctgggggtccagagcccggcgggtcttgcagtggtggcaagggtgccgaggaataggacgatgcctgcctactctcccgggttcttttaggttgtcatcaggggctgatgggagtaacagttcacccaactctgcagctagcttcagtggacatgccacaccttcccagcagcctgaacctgtggtacattctcttaaggttgtgtggaggaaacttggagatgctgcaggttcgtgtcctggaattaggcaacatttgtcaggaaaccagtacaaaggaccaatgtgagatgcactctttttcaaacaggagatcaccactgccagaaagtgatagaagacaagaagaaaaaggaaagagtgggtttccacaaacctggactcatggaataacatggagtgattgtacattgcacatatctcccctctaaaacctgtagtacaacttctcccctcaagctgatattctgtgtctctcacctcaatgtccacaacagtcaatctcaaacaaggtagctttgaacatctcaaacagagtagctttgaaaatcaacattttggtaccagtgttttcattagaaataagtgtttttaactccccagatataatattgtaattgggaaacctgaatagttttaagagtccagtggagcctcagtgttttgaatagagatgactcattacacataatggtaggagttttctaccatatcatattgaagatatgaagaggtattttccagcttcccaagtttgagagttgggcatttacctcttacacttcagtcaacaaacaaactagtaattcctaatgcataattaatttggatgcaagataagattaagtttctggagttttgttttgacttctgaggtgctaaaaaataccatgtaaattctccctaccagctagaagggtagcaagacgttgtagagtgcttatcagagagtaccatttacttcaattgatcaatataaatatatctttttttttcatcttaatgagtttctcataaagacacatcttggggcataccaaccttcatattcattcagtgtatccattggtgttaatattaacaatttcaactaaaaacaacaaacataatttttctaagtgtttcgagctgtgagatgtcaatttctacaatttagtttctagacatgctgtatatttaataaactttatgtaaactttaaaatattgcactgcatttatgaaaaaagctttctttgcctactgcagctatctaacattttatgaaactgacgcatgtccttcattattgaggctaaaagctcttgttcagattgcttgaggtttgaaaaagaggtgtgctagctttgcttagtttatttcttatttttggtatacatatacatatatataacattagaatgtgtgtactggaaatgctatgataggtattttgtgttaatccaaatgcaatgatagtttcttgtatgaatgtgcaagaggcctgtgaccgaatgctacgtttttatggtagtttaagattataaaagtagaaatgcaacaattcccagtttttggataggttctaaatttctgagatttgattcatggcagatattctctgttgttgttgttttagatgggctcattacataacgagttaattgtcactagtaggagactgtgaaggaattttgttatactttcaaaaatgttactgtgatgaaaaatcatctattttcagaaaatatttatgaattaatttactatagaattatctctctaattatcataattgggttacaatttaagctccccttttaaatgttatattttaaaatgttattactctataaaagaaaattgcttgctatatttacaccttctttcctaggaaagctttcatccttaaattgttgtattcctaccctctgaagacatttaaaataagcttttgtgcctgcagcagagcctgcagaagctaatacaagggacactggtcttttgacaaaataaacttgtgtaaattttgatactgtattaaaactatttttttaaagttctgcataaaattgagtattaagtatatgtgttcatcttagcaatggtaataaattatttaatctcac

SEQ ID NO: 47728 - DNA, 2657 bp, Homo Sapiens
gtatcccgtgctgtttccctggcagacacacaggcgctcacgagtctctccttgccagcctgcagggcggcgacccccaaaacccagctccgggtcccaacctaggcaagaagctgcttctctgccaacagctcctcttcggcctccgtcacagccacctggaccctaccctttcgcgactgctgctgctgctgcccggacgtggaagcagcaagaggcgcttggtcaagacacactgacggtacctacagaatactggacatacggattcagaatccataaggctttatcaccttgaatcaaggatttatttgatatcatcctcggtctttacttcctatcaagtaacattgttttgaaaaatagagttaacacatttgccataagggagtttttttttttttttttaaatacttcgcatactctccaatgcccaaaaatagcaaggtggtaaaaagagaattagatgatgatgttactgagtctgtcaaagaccttctttccaatgaagacgcagctgatgatgcttttaagacaagtgaactaattgttgatggccaggaagagaaagatacagatgttgaagaaggatctgaagtcgaagatgaaagaccagcttggaacagtaaactacaatacatcctggcccaagttggattttctgtaggtttaggaaatgtgtggcgatttccatacctatgtcagaagaatgggggcggtgcatatcttttaccatatttaatactacttatggtaataggtattcccctttttttcttggaactctctgtgggtcaaagaattcggcgaggcagcattggtgtatggaattacataagccctaaactgggcgggattggatttgcaagttgtgtagtgtgctattttgtagctctctactacaacgtcatcattggctggagtttgttttatttttctcagtcttttcagcaacccctgccttgggatcagtgtcctttggtgaaaaatgcttcacacacttttgtagaaccagaatgtgaacaaagttctgccaccacctattactggtacagggaagcactgaatatttcaagttccatttctgaaagtgggggcttaaactggaagatgaccatctgcttgttggctgcctgggtcatggtttgcttggctatgatcaaaggcattcagtcttctggaaaagttagtatgttagagcccttcctcattctgctaatcaccatttctggattcatccctctctcaaattctgttacagatttctgtgggcaaatcacacataacacttcattctaggtagttaaatattagtgaaaagtgacacttcaaaagtgtgcttacatttttaaaaagacaaataaaaacagtgttttatagtgaaatctaaggttaattataatctttccttatttcaacaagatctttaaaatttttgtgaatacttaaaagtcctttctttttgccctttattcaattagtcctaatgtttcagttctctaattaccaattagttaaattatggaaattggggaaagtggtaaaatgagtaattcattcattttgtttgtttgatatcatttgtttctctctgctgtaggtgttctaaggaatagctgcataagacattttgaaataatgtaatgtgaagtgtttcttaaagctctgaacatcattaagtagttaataataattccaacaaggaattcagagtaatgtaaaagactaaatatcattccttctaaggcaaattgaaaattagaatggttgtggtttaaaaagacattaagtgaattctaggtagcttgtttgttattatttttaaaggacgctctaggaaagtaattgctattcactattttgctttcgtattactttttttttttttttttcattatcacagccattgttctaaagctctccacatctcttggctggatcatagcaagaatttactgttggctcttctctctgccgtttaactgtccagctgtgctattttccttttcaaagtataactgatttcaggctaacttattaccactcatcatcatatactagcaggaatggcaatagtagtagtagtagcagcagcaatagtagaagtagtcataataacaataataataaatgatgataaagatgtttctgacaagaattagggtaagaacagtaattgaagccaattatttattacaaatgtattttgctttgggtactgtgataactactttttatactttatcccatttaattataaaaaccactcttgagaagtaatttttattttcagaaccattttacagatttaaaataaacaggtttgaggaattagtttaacttatccaaagtttcgtggctattaagttctagtatttggagtcaaatgcaagtctgtctaaatctagagcccatgttctttaactgcaacactataatgtctcaccccgtcctagtcccaccaattagtcaactcttttagggcagaagtctgtctaattcatctttgcttcctgttactttatatttaattaaaaattttagtgactttttaacttgtaaattgtagctgattttacatttatcttcctgaaggaaactctgtatcattttgtcttttgaatttgtgaatatacttgttaacacatctaaatatc

SEQ ID NO: 47729 - DNA, 450 bp, Homo Sapiens
atgttgatgcctaagaagaaccagattgccatttatgacctttttaaggagggagtcatggtggccaaggacatccacatgcctaagcacctggagctgtcagacaagaatgtgtccaaccttcctgtcataaaggccatgcagtctctcaagtcccgaggctacgtgaaggcacagtttgcctggagacatttctactggtaccttcccaatgagggtatccagtatctccgtgattaccttcatctgcccccggagattgtgcctgccactctatgccgtagccgtccagggactggcaggcctcggcctaaaggtctgaaggccgacagagatacctacagacggagtgctgtgccccctggtgccgacaagaaagccgaggctgggactgggtcagcaactgaattccagtttagaggcgaatttggtcatggacatggtcggcca

SEQ ID NO: 47730 - DNA, 1810 bp, Homo Sapiens
ctgaacaatatgtgcctttttgactcttcagaggctgtgaatttctggtcttggaagatcacagtggagcaattggacagataggattttatccttcatatcccttgcaaaagatctctaagaacccatggagagccagccagcgcaagagtgtctgatgcagatgtttttgcccatcgagccagcctgctttgtggaatggctggggacttcaccatcacagttaggcgtggtgatggtggatgaggcacacgaaaggaccctacacacagacattctctttggattgatcaaggatgttgctcgcttccgacctgagctcaaggtcctggtggcttcagccacaatggacactgcccgtttttccaccttctttgatgacgcccctgtgtttcgaatccccggacgcaggtttcctgtggacatcttctacaccaaggctccagaggctgactacttggaagcttgtgtagtatctgtgttgcagatccatgtgacccagccccctggggatatcctggtgttcctgacaggacaggaggagattgaggctgcctgtgagatgctccaggatcgctgccgccgcctgggctccaaaatccgggagctcctggtgctgcccatttatgccaatctgccctctgacatgcaggcccgtatcttccagcccacaccacctggggcacgaaaggtggttgtggcaacgaacattgctgagacatcactcaccattgagggcatcatttatgtgctggatccagggttctgtaagcagaagagctacaacccccgcacaggcatggaatcgctcactgtcacaccctgcagcaaggcctcagccaatcagcgagctggcagggcaggtcgggtggctgcagggaagtgcttccgcctgtataccgcctgggcctatcagcacgagcttgaggaaaccacagtgcctgagatccagaggaccagcttgggcaatgtcgtgttgctgctcaagagcttagggatccatgacctaatgcactttgatttcctggaccctccaccatatgagacactgctgctggctttggagcagctgtatgctctgggagccctcaaccaccttggggagctcaccacgtctggtcgaaagatggcagagctgccggtggaccccatgctgtccaaaatgatcttagcctctgagaagtacagctgttcagaggagatcctgacagtggctgccatgctctctgtcaacaactccatcttctaccgaccaaaggacaaggtcgtccatgctgacaatgcccgtgtcaacttctttctccctggcggtgaccacctggttctgctaaatgtttacacacagtgggctgagagtggttactcttcccagtggtgctatgagaactttgtacagttcagatcgatgcgccgagcccgggatgtgcgggaacagctggaagggctcttggaacgtgtggaagttggtctcagttcctgccagggggactatatccgtgtacgcaaggccatcactgctggttacttttaccacacggcacggttgactcggagtggctaccgcacagtgaaacagcagcagacagtcttcattcatcccaactcctccctctttgagcaacagccacgctggctgctctaccacgaacttgtcttgaccaccaaagagttcatgagacaggtactggagattgagagcagttggcttctggaggtggctccccattattataaggccaaggagctagaagatccccatgctaagaaaatgcccaaaaaaataggcaaaacacgagaagagctagggtaa

SEQ ID NO: 47731 - DNA, 711 bp, Homo Sapiens
agagactgggggcattactttaagactattgaggacctgaaggctcagatctttgcaaattctatgaacaatggccacatcattctgcagattgacaaagcccatctttctgctaatgactttagagtcaaatatgagacagaactggcctttcatcagtctgtgaatagcaacattcatgggcttcacaaagtcgtcgatgacgccaatgtcactcagctgcagctggaggcagagatcaaggctctcaaggaggaattgctcttcatgaagaaccatgaagaggaagtaaaaggcctacaagcccagattgccagctttgggttgactgtgaaggtagatgcccccaaatctcaggaccttagcaagatcatggcagacatctgggcccaacaagcaggatctgaagaacctagaggagctggacaatggtcccaggagattgaggagagcaccacagtggtcaccacacagtccaccaagatcagagctgctgagatgaccgtcatggagctaagatgtacagttcagtccttggagattgacttgtacttgataagaaatctgaaggcttgcttggagaacagcctgagagaagtggaggcctgccactccatgcagatggagcagctaaactgggtcctgaggcacttggagtcagagctggcacagacctgggcagaagggcagccccaggcccacaagtacagg

SEQ ID NO: 47732 - DNA, 2352 bp, Homo Sapiens
ctcttccaggtcaatggccacaatccggggtctgatggccaagccagggagtacctcagagaagacctgcaggagttcctgggtggggaggtcctgctgtacaaactggatgacctcaccagggtgaatcctgtgacactagagacagtcctgaggtgcctgcaggcccggtacatggcagacacattctacaccaatgctggctgcaccctggtagccttgaaccccttcaagcctgttcctcagctctactcgcccgagctaatgagagagtaccatgctgcgcctcagccccagaaactgaagccccatgtgttcactgtgggtgaacagacctacaggaatgtcaagagcctgattgaaccagtcaaccagtctattgttgtcagtggagagagtggtgctggaaagacatggacgtctcgctgcctaatgaagttctatgctgtggtggccacctcacctgcatcttgggagagccacaagattgcagagaggatagaacagaggatcctgaactccaaccctgtcatggaagcttttgggaatgcgtgtacactgaggaataacaacagcagtcgctttgggaagttcatccagctccagctgaacagggctcagcaaatgactggagccgcagtccagacctacctcctagagaaaactcgagtggcctgccaggcttccagtgagaggaacttccacatcttctatcagatttgcaaaggagccagtgaggacgagaggctccagtggcaccttcctgagggagctgccttctcctggctgcccaacccagagaggagcttagaagaggattgttttgaggtgaccagagaggccatgctccatttgggcattgacacccctacccagaacaacatctttaaggtcctagctggactgctgcaccttggcaatatccagtttgctgcctccgaggatgaagcccagccctgccagccgatggatgatgccaagtgtgaggactctgtcaggacggcagcctcgctgctggggctcccagaggacgtgctgctggagatggtgcagattagaaccatcagggcaggcagacagcagcaggtgttccggaagccctgcgcccgagccgagtgtgacacccgtagagactgcctggccaaactgatctatgcgcggttgtttgactggctggtatcagtgatcaacagcagcatctgtgcagacaccgactcgtggaccactttcataggcctgctggatgtgtatggatttgaatcatttcctgacaacagtctggaacagttgtgcatcaactacgccaatgagaagctgcagcagcattttgtggctcactacctaagggcccagcagctggaggcctgtggcctcgtggagaccatccatatcagtgctgctggcttccccatccgggtctctcaccgaaactttgtagaacgatacaagttactaagaaggcttcatccttgcacatcctctggccccgacagcccatatcctgccaaagggctccctgaatggtgtccacacagcgaggaagccacgcttgaacctctcatccaggacattctccacactctgccggtcctaactcaggcagcagccataactggtgactcggctgaggccatgccagcccccatgcactgtggcaggaccaaggtgttcatgactgactctatgctggagcttctggaatgtgggcgtgcccgggtgctggagcagtgtgcccgctgcatccagggtggctggaggcgacaccggcaccgagagcaggagcggcagtggcgggccgtcatgctcatccaggcagccattcgttcctggttaactcggaaacacatccagaggctgcatgcagctgccacagtcatcaagcgtgcatggcagaagtggagaatcagaatggcctgccttgctgctaaagagctggatggtgtggaagaaaaacacttctctcaagctccctgttccctgagcacctcgccgctgcagaccaggctcctggaggcaataatccgcctctggcccctgggactggtcctggccaatacggctatgggtgtaggcagctttcagaggaaattagtggtctgggcttgcctccagctccccaggggcagccccagtagctacactgtccagacagcacaagaccaggctggtgtcacgtccatccgagcgctgcctcagggatcgataaagtttcactgcagaaagtctccactgcggtatgctgacatctgccctgaaccttcaccctacagcattacaggctttaatcagattctgctggaaagacacaggctgatccacgtgacctcttctgccttcactgggctggggtga

SEQ ID NO: 47733 - DNA, 408 bp, Homo Sapiens
atgttgttttgctgtttgggtttgcacgtctttttgagctgtaacacagcaaaggtttgcagtttcgctcctgaaatcatcgagaccacaaacccaccgggaagaacgaacaactccagacgcaccgctttaagagctgtaatactcgttaggaaggtgtgcagcttgactcctgagtcagcgagaccaaacccatcagaaggaaaaaactccgaacatcagaaggaacaagtttcagacacgccacctttaagaactgtgatactcaccgcgagggcccgcggcttcattcttgaagtccgtgagaccaagaacctaccaattccgaatacgttgggttcaagtggttctcctgcctcagactcccgaatacctgggactacaggcacccaccacgcccgggtaatt

SEQ ID NO: 47734 - DNA, 210 bp, Homo Sapiens
aaaaactacaaagcagaatacgaagaagacagaggcaaaggcttcttccctcagaccataactcaagaatatgaagcaattaagaaactagatcagtgtaaagacaaaagttacaaagcagaatatgaagaagataaaggaaaatgctatttccctcagacaataacacaagaatatgaagcaatcaagaagctggaccagtgtaaagat

SEQ ID NO: 47735 - DNA, 669 bp, Homo Sapiens
aagaaggtggctccggcccctgctgtcatgacgaagcaggaggccaagaaagtggtgaatcccctgtttgagaaaaggcctaagaattttggcattggacaggacatccagcccaaaagagacctgacctgctttgtgaaatggccccgctgtatcacgttgcagtggcagatagccatcccctataagcggctgaaagtgcctcctgcgattaaccagttcattcaggctctgaaccaccaaacagctactcagctgcttaagctggcccacaagtacaggccagagataaagcaaggagaagaagctgaggttaagactgtcacattggtggagaacaagaaagctcagctgctagtgattgcacacaacgtgacacaacgtctggttgtcttcctgcctgccctgtgttgtaaaatgggggtcccttactacattatgaagggggaagcaaaactgggacatctagtccacaggaagacctggatcattgtcaccttcacacaggttaacgtggaagacaaaggagctttggctaagctggtggaagctatcaggaccaattacaacatatatgatgagctccgccatcactgggaaggcaatgtcctgggtcccaagtctgtggctcatattgccaagcttgaaaaggcaaaggctaaagaactt

SEQ ID NO: 47736 - DNA, 1058 bp, Homo Sapiens
ggggacctgcagtcgctgtcgtggctcacggcggtggatgtgcctcggctgcagcagatggcaagtggccgcgtggacctgggtggcccctgcgtgccacatccacacccaggtgccttggctggggtggccgacctgcatgtgggagccactccaagtccccttctccatggcccagcaggcatggccccccgaggcatgccaggtctgggccccataactggccacagagacagccagatgagccagttccccgtggggggccagccctcatctggcctgcaggacccgccgcatctgtactcacctgccacccaaccacagttcccgctccccccgggtgcccagcagctgtctgatcgccatggccctgaagaacagcaagacaggcagcctgcctgtgagcgagatctacagcttcatgaaggagcacttcccctacttcaagacggcccccgacgggtggaagaactcggtgcggcacaacctgtctctgaacaagtgcttcgagaaggtggagaacaagatgagcggctcctcccgcaagggctgcctgtgggctctgaacctggcccgcatcgacaagatggaggaggagatgcacaagtggaagaggaaggacctggctgccatccaccggagtatggccaaccctgaggagttggacaagctgatctccgaccggcctgaaagctgccggcgccccggcaaaccgggggaaccagaggcccccgtgctgactcacgccaccacagtggccgtggcgcatggctgcctggctgtctcccagctcccaccccagccactgatgaccctgtccctgcagtcagtccccctgcaccaccaggtccagccccaggcacatcttgctccagactctccagcaccagcccagaccccgccactgcacgccctgccggacctcagccccagcccgctcccccaccccgccatgggaagggctcctgtagacttcatcaacatcagcaccgacatgaacactgaggtggatgccctcgacccgagcatcatggacttcgctctgcagggtgaggctg

SEQ ID NO: 47737 - DNA, 423 bp, Homo Sapiens
caagcagtgtttgtagacctggaacccatggtcattgacgaagtttgctctggcacataccgtgagctcttccaacctgagcatatcatcacgggcaaggaagatgctgccaataattatgcccgagggcactacaccattggcaaggagataattgacttcatgttgggccaaattcataaactggccaacttgtgcacaggtcttcggggcttcttgtttcacagctttggcaggggaactggttctgggttcacctccctgctcatggaatgtctctctgttgactatggtaagaaatccgagctggagttctccatttacccagctcctcaggtttccatacctgtactagagccctacaattccactctcaccacccacatcaccgagcactccgattgtgctttcatgatagacagt

SEQ ID NO: 47738 - DNA, 393 bp, Homo Sapiens
aaaaagtgccatgcagaaatttgctttattaacgagatcaagtccatgggactggacgaaacgcagtgctaccaagtcacctgttacctcacgtggagcccctgctcctcctgtgcctgggagctggttgacttcatcaaggctcacgaccatctgaacctgggcatcttcgcctcccgcctgtactaccactggtgcaagccccagcagaaggggctgcggcttctgtgtggatcccaggtcccggtggaggtcatgggcttcccaaagtttgctgactgctgggaaaactttgtggaccacgagaaaccgctttccttcaacccctataagatgttagaggagctagataaaaacagtcgagccataaagcgacggcttgagaggataaag

SEQ ID NO: 47739 - DNA, 936 bp, Homo Sapiens
atgtccaagaccagcctcgtgacagcgttcatcctcacgggccttccccatgccccagggctggacgccccactctttggaatcttcctggtggtttacgtgctcactgtgctggggaacctcctcatcctgctggtgatcagggtggattctcacctccacacccccatgtactacttcctcaccaacctgtccttcattgacatgtggttctccactgtcacggtgcccaaaatgctgatgaccttggtgtccccaagcggcagggctatctccttccacagctgcgtggctcagctctattttttccacttcctggggagcaccgagtgtttcctctacacagtcatgtcctatgatcgctacttggccatcagttacccgctcaggtacaccagcatgatgagtgggagcagatgtgccctcctggccaccagcacttggctcagtggctctctgcactctgctgtccagaccatattgactttccatttgccctactgtggacccaaccagatccagcactatttgtgtgatgcaccgcccatcctgaaactggcctgtgcagacacctcagccaacgagatggtcatctttgtggacattgggctagtggcctcgggctgctttctcctgatagtgctgtcttatgtgtccatcgtctgttccatcctgcggatccacacctcagaggggaggcacagagcctttcagacctgtgcctcccactgcatcgtggtcctttgcttttttgttccctgtgttttcatttacctgagaccaggctccagggacgtcgtggatggagttgtggccattttctacactgtgctgacaccccttctcaaccctgttgtgtacaccctgagaaacaaggaggtgaagaaagctgtgttgaaactgagagacaaagtagcacattctcagggagaataa

SEQ ID NO: 47740 - DNA, 2096 bp, Homo Sapiens
atttgaggctggatgcagtggctcacgcctacactctaggaggtagaggtgggaggactgattgaggccaggagttggagaccagcctgggcaacacagtgagaaccctctctacaaaaaatacaaaaattagccaagtgaggtggtatatgcctgtagtcccagctactcaggaggttgaagtgggaggatctctcgagccaaggaggttgaggctgcagtgagctatgatcacaccactgtactccagcctgggcaacagagcaagaccctgtctctcaaaaagagagaaaaagaaagaaaacatttgagctccatagattgacattctgatttgaacagtttcccatagagggagaattgcggcgaaagaggcaaggcctgcccacaatgcatggtctgggacttagctgatgaagtgctctgcaccacccagcttcgaggagatggggactggggtttccccttgcttgacatcttaactacttcactgcaggaaaggggaggagggacaagaggaggaccaccccaagggacacggagacccacattaggttttggaacccacgcctggtactatctgaatttaaaagccttgcttgactcaggcggggctgatcaaaggccatttgctgttttagagtgttcctatgtgtgcttggcagacagagttgtctttttattgcttccattcccactaagacctccatccccccactgcccccccaaccccttggtgagcttggtgagatgtgtttttttttctttttttaattttaagttccaggatacatgtgcaggatgtgcaggtttgttacaaggtaaatatgtgccatggtggtttgctgcacctatcaacccatcacctaggtattaagccctgcatgcattagctgtttatcatgatgctgtccctcctgatgagatggttttaagttggcaccagcacctgtttctcatgccttgcgtatgcagcaggaactgtgaactagggacaggttcatgccctttggccactgcagacgtggagctgtggacgccagtacttgtgtggagagtcggtgtctgttggctgtatctcagctttcttttcagggcagacctgatacaggtgttctaggtgggaaaagccttagcacttgttgtgaactattatattgttactctctggaagggaaggtggaaaggggaatctatgccagtgagcacaacacaggccgcatatggacacacatgaggtcgctcggcatgctcttaggcccagaggagacagaatcagatactagcctatcctctggctgctcccaggctagcagggaggtaggtgtctaaaccaggatgtgagctagaggggactatagccgtgcacaggaggggcacagaggacggagcaagcagggcaggcttcacggaggagggcttgtgagctgaatcttgagagagaggagatcctccaagttgagggaactgtgggagcagttagacagcttggattttggggggtgtagcacattgctccttatgggctggggtgtaatgtgcagaggagggcagagggaagattgatttgctcattatgcaacaaatgtctggagctccagtcctgaaccaggcccaaagctggggaatagcaactcagtccctgcccttgtggagtctgtggctggcaggggcatgttcattaaacaacttattgcatgattcactacttttctttttctttcttttttcttttttttgtgagacaagatcttgctctgtctcccaggctggagtgcagtggcacaatcaaagctcactgcagccttgaattcctgggctcaagcggttctcctgcgtcagcctcccaagtagctaggaccgcaggcacacatcactgtgcctggctagttttttaaattttttgtagaggtgggtatctcactttgttgcccaggctggttgaactcccgtgagctcaagtgatcctcttgccttggcctcccaaagtattgggactacaggcgtgagccacagtgcctggcctgattcatgattgaagtaccattaccataaatgctatacatccatgcattggatgttaaagggatcataac

SEQ ID NO: 47741 - DNA, 393 bp, Homo Sapiens
atgaatttaaactataccttggaacaaatggacttaacagatatatacagaacgtttcatccaacaaccccagaatatacattctattcaacagcgcatgcaactttctccaagatagaccatatgacaggccataaaacaagtctcaataagtttaaacaaattgaaattatatcaaacactctctcagaccacagtggaaaaaaactggaaatcaactccaaaagaaaccttcaaaaccatgcaaatacatggaaattaaataacctgctcctgaatgagcactgggacaagaatgaaatcaagatggaaattttaaaaatcttcaaactgaacgacaataatgacacaacctatcaaaacctctgggatacgggaaaggtggtgctatga

SEQ ID NO: 47742 - DNA, 939 bp, Homo Sapiens
atggaacaacacaatctaacaacggtgaatgaattcattcttacgggaatcacagatatcgctgagctgcaggcaccattatttgcattgttcctcatgatctatgtgatctcagtgatgggcaatttgggcatgattgtcctcaccaagttggactccaggttgcaaacccctatgtacttttttctcagacatctggctttcatggatcttggttattcaacaactgtgggacccaaaatgttagtaaattttgttgtggataagaatataatttcttattatttttgtgcaacacagctagctttctttcttgtgttcattggtagtgaactttttattctctcagccatgtcctacgacctctatgtggccatctgtaaccctctgctatacacagtaatcatgtcacgaagggtatgtcaggtgctggtagcaatcccttacctctattgcacattcatttctcttctagtcaccataaagatttttactttatccttctgtggctacaacgtcattagtcatttctactgtgacagtctccctttgttacctttgctttgttcaaatacacatgaaattgaattgataattctgatctttgcagctattgatttgatttcatctcttctgatagttcttttatcttacctgctcatccttgtagccattctcaggatgaattctgctggcagacaaaaggctttttctacctgtggagcccacctgacagtggtcatagtgttctatgggactttgcttttcatgtacgtgcagcccaagtccagtcattcctttgacactgataaagtggcttccatattttacaccctggttatccccatgttgaatcccttgatctatagtttacgaaacaaagatgtaaaatatgccctacgaaggacatggaataacttatgtaatatttttgtttaa

SEQ ID NO: 47743 - DNA, 930 bp, Homo Sapiens
atggaaccagagaatgacacagggatttcagaatttgttcttctgggactttctgaggaaccagaattgcagcccttcctctttgggctgtttctgtccatgtacctggtcactgtgctcgggaatctgctcatcatcctggccacaatctcagactcccacctccacacccccatgtacttcttcctctccaacctgtcctttgcagacatctgtttcatctccactacaatcccaaagatgctcattaacatccagacacagagcagagtcatcacctatgcaggctgcatcacccagatgtgcttttttgtactttttggagggttagacagcttactcctggctgtgatggcctatgatcggtttgtggccatctgtcatcctctgcactacacagtcatcatgaaccctcggctctgtggactcctggttctggcatcctggatgattgctgccctgaattccttgtcacaaagcttaatggtattgtggctgtccttctgcacagacttggaaatcccccactttttctgtgaacttaatcaggtcatccaccttgcctgttctgacacctttcttaatgacatggggatgtattttgcagcagggctgctggctggtggtccccttgtggggatcctttgctcttactctaagatagtttcctccatacgtgcaatctcatcagctcaggggaagtacaaggcattttccacctgtgcatcacacctctcagttgtctctttattttgttgtacgggcctaggtgtgtaccttacttctgctgcaacccacaactcacacacaagtgcaacagcctcagtgatgtacactgtggccacccccatgctgaacccctttatctacagtctgaggaataaagacataaagagggctctgaaaatgtccttcagaggaaagcaataa

SEQ ID NO: 47744 - DNA, 1944 bp, Homo Sapiens
accctccttgagacagccctccagtccaggccaaatctcagcctgcccttggtccgctgtggttgggcctgcacccaagccatgagcacacgcagcaattgtggcagcagaagcttcctctgggctcagactcaggctgatgctgcgtcaggacctgccgcggtctcggctgggcttcctgggactcggtggttgtgggctgattgtaaagcacggaatgactcttagaaactgggcgtcattctttgtggttttccaagcttggtctctgatgatactccaggtcttaggagacatgctgaatatttattatgcttacattcaagcaacattaacccttaaggttgatgtagctccccgtctttttttcccagaaggaggagcactgaaggaacacttttccagtatggattctttccagctccgagaagctggaggcacacggatccctcggccagctctcatctatggacgtgctgtagtcacaaggactgtgactaaggctcagtccctgaggactgccttggcatgggctgctttaggctgtaaacacccagttttatccactttatgtgaagaaagccaacaaggggcatggagtgagttccgcaggttttagcggctgcggcggctggtgctcagtggggatgatggcgggaaggcgcctccctctgtgggccccgaggtctgtgcgggaatcagctctgcagctgtgtccaggggcagccgtagaccacacacggcaggctcacagctctgttccatgagaactttatacacaaaagcagacgggctgggcttggcctctggatcataatctgctgacccctggggcaacgtcggctgcagctgagatggctgctccccggtggggtgtgtgctcggcctgcagtccccgccctccggactccattcgcctccactctcaggtttgcacctcgtcattgtcttctaattttgcatccctggactgcgtgacctacaaggctctcagcacaacaagactctatgattctgtctattggaacaaaaagccagtgaggcaagtgtatcatcctgttgatgaattcacagcattaactctgggagttggggacagtgtgtattcttcctccagacactctctgtttctcctggatggaaaggttctgctacttgtcccgtggtcaggcccagccaatggaacggaatggaagtgactctgccccttattggcagaaactttaaaagccgcacaacgttcctgcaccctcccctctgccatgagcctggcagtgctcaggatgggaaaattatctcacctgggcctgaggatacaggagctacccccagcctgcagtggaagagaagcatggacaagtgattaaactttgtgttttcaagccacagaggttttttgaagttgtttgctaccatgctttgtccctacaaacacagtcatggagaaggccagtggcagagcctgagccgttcgcgcatctgttcaccagtatccagaataacaatagatttttgaaacattcctgagaaaattctgggagttgcataccggccagtcttattctctaaagttgttccttctaaagggtgtgatgaccgaaaatttcagaaaagcaaaccaccgctgaaaggcaacgttatttctgttggcagaaggcggcctgagcaatctagattttccacggttcaccaactagtttttaaggaaatatggctgtgagaggaataaaacatgattcctacctttaaggaactcagagaagtgaattaaaggaagtcacagatcagacaaccaaccacacaaagtttctaagagcaaactgttcaggtcggcaagtcactcttatccactgttttgccttctaaggtttcagttactctcagtcagtcatggtccaaaaacattaaatgaaaaattccagaaataaacaatacacacgtgtt

SEQ ID NO: 47745 - DNA, 4197 bp, Homo Sapiens
atgctcctaaggaagcgatacaggcacagaccatgcagactccagttcctcctgctgctcctgatgctgggatgcgtcctgatgatggtggcgatgttgcaccctccccaccacaccctgcaccagactgtcacagcccaagccagcaagcacagccctgaagccaggtaccgcctggactttggggaatcccaggattgggtactggaagctgaggatgagggtgaagagtacagccctctggagggcctgccaccctttatctcactgcgggaggatcagctgctggtggccgtggccttaccccaggccagaaggaaccagagccagggcaggagaggtgggagctaccgcctcatcaagcagccaaggaggcaggataaggaagccccaaagagggactggggggctgatgaggacggggaggtgtctgaagaagaggagttgaccccgttcagcctggacccacgtggcctccaggaggcactcagtgcccgcatccccctccagagggctctgcccgaggtgcggcacccactgtgtctgcagcagcaccctcaggacagcctgcccacagccagcgtcatcctctgtttccatgatgaggcctggtccactctcctgcggactgtacacagcatcctcgacacagtgcccagggccttcctgaaggagatcatcctcgtggacgacctcagccagcaaggacaactcaagtctgctctcagcgaatatgtggccaggctggagggggtgaagttactcaggagcaacaagaggctgggtgccatcagggcccggatgctgggggccaccagagccaccggggatgtgctcgtcttcatggatgcccactgcgagtgccacccaggctggctggagcccctcctcagcagaatagctggtgacaggagccgagtggtatctccggtgatagatgtgattgactggaagactttccagtattacccctcaaaggacctgcagcgtggggtgttggactggaagctggatttccactgggaacctttgccagagcatgtgaggaaggccctccagtcccccataagccccatcaggagccctgtggtgcccggagaggtggtggccatggacagacattacttccaaaacactggagcgtatgactctcttatgtcgctgcgaggtggtgaaaacctcgaactgtctttcaaggcctggctctgtggtggctctgttgaaatccttccctgctctcgggtaggacacatctaccaaaatcaggattcccattcccccctcgaccaggaggccaccctgaggaacagggttcgcattgctgagacctggctggggtcattcaaagaaaccttctacaagcatagcccagaggccttctccttgagcaaggctgagaagccagactgcatggaacgcttgcagctgcaaaggagactgggttgtcggacattccactggtttctggctaatgtctaccctgagctgtacccatctgaacccaggcccatggaatctggaattcactcctgtgtgtgtgtccactttcagctccacaacactggacttgggctctgtgcagactgccaggcagaaggggacatcctgggctgtcccatggtgttggctccttgcagtgacagccggcagcaacagtacctgcagcacaccagcaggaaggagattcactttggcagcccacagcacctgtgctttgctgtcaggcaggagcaggtgattcttcagaactgcacggaggaaggcctggccatccaccagcagcactgggacttccaggagaatgggatgattgtccacattctttctgggaaatgcatggaagctgtggtgcaagaaaacaataaagatttgtacctgcgtccgtgtgatggaaaagcccgccagcagtggcgttttgaccagatcaatgctgtggatgaacgatgaatgtcaatgtcagaaggaaaagagaattttggccatcaaaatccagctccaagtgaacttaaagagcttatatatttcatgaagctgatccttttgtgtgtgtgctcctggtgttaggagagaaaaaagctctatgaaagaatataggaagtttctccttttcacaccttatttcattgactgctggctgctttaaaaaaaaaaaaaaaggatccattgtaccgttgtcttcatcactgggaaatgattattacatagtacagaagattctttgtttttctccactgagcacttaacaattgctttctctctggcctggacattctctggcagcacctccaggatacataaattcaatggatcaatttatttgtcttcaaatggccttaacttggattgtctgtttggccaaccatgaaaattaaagagtgaagcagatgtaatggcctgacattccaaaaactctgaattgggtttattagcacaaatgttgtgttcatttgttgagccatatctcagaagaaggaaagggagctacagaaaggaggtttaggattgcagagaagatgcaagagcactttggcccaattctccagctcaacccagcagctgaaaagcttcaagagatctaggaaaagacattttcatgttaatgagaatttccaccattgtagagaatttccttcctactgagaatctacctctattccccctgccctagctcttctctaacttggttaaccataaccataaccagattcccttgcaatcgatttctctttagtcgttggtgttagaagtaccagcacaatttgagcattcccattaacaaaggtgttcacagttgagaaactctcctgccgggcgcggtggctcatgcctgtaattccagcactttgggaggcagagttgggaggatcacctgatgtcaggggtttgagaccagcctggtcaacattgcaaaaccttgtctctactaaaaatacaaaaattagctgggcatggtggcgcatacctgtaatcccagctacttgggaggctgaggcaagagaatcgcttgaacccaggaggcagaggttgcagtgagctgagatcatgccattgcactccaacctgggtgacagagtgagactccatctcaaaaaaaaaaaaaaagagagaaactctcctgatgccctgttacagggtttgcactgactggagcagaaacagcaacctttctaaaaaagcaaacctttttcctgggaggaaaatgccagagcctgagccaaaattcttatgacaggtaacatttgggtgttaatgtccatgagagctgacagggccatctctgagcccatataactgtctggaacccccaaatgtgtccacaggttgaatgtccatgagtgtgggaagaacacggctcatctggagcacagctgaggctagtaagagctaaatgactttccttgctatgacttggcttacctgaattagctgtaagagttgccgaatgggatgggttctgctatttaataaacagcattcatattcatttttccccagatggagttacctacctttccacatggtcagcttagaaatcttcccctaaagatgctaatctcctttgggctgtctcagaacacagtatccttcaaataagaaaaactgagtgggaagtgcagtgtttccaaacaatacctatcataactacgtattcattgtctacctgctaagtcaagggttcactgcatttctccttcctcagaatacactctggacctgtgctgtctaatatggtagccactaacaaaatgtggccattttgatggaaatccattaaaatcaaagaaaatttaaaactcaattcctcaattgggctggccacatttcaaatgctcactacccacctgtggctagggtctacttctactgtattggcgagcatggatatagaacatttcatcacagttctgttggaccaatctagatagattcattatcccatctagagaagagactttagtcactgtcttcttgcttcagacccatctatatttaaaacaaatttccctaaatcctgagactgagacggagctacaaattctcagatggcgaccgtgtaaatggtattagcggctgaagaaaaaaaatttttcaagacctctgttttttaactgaactttatcattggcattgtgggtctttgaagttgctgggataaattaatataattaaataaaagactgaatttaattgcataaa

SEQ ID NO: 47746 - DNA, 120 bp, Homo Sapiens
gctaaagatgagcagagaaagatccttcaagcctttcctggcatgcgtgactccaacatcagcaagatattgggatctcactggaaagctatgacaaacctagaaaacagccatatatga

SEQ ID NO: 47747 - DNA, 4564 bp, Homo Sapiens
ccgatggagaattacttccaagcagaagcttacaacctggacaaggtgttagatgaatttgaacaaaacgaagatgaaacagtttcttctactttattggatacaaagtggaataagattctagatcccccttctcaccggctgtcatttaaccctactttggccagtgtgaatgaatctgcagtttctaatgagtcacaaccacaactgaaagtcttctccctggctcattcagctcccctgaccacagaggaagaggatcactgtgctaatggacaggactgtaatctaaatccagagattgccacaatgtggattgatgaaaatgctgttgcagaagaccagttaattaagagaaactatagttgggatgatcaatgcagtgctgttgaagtgggagagaagaaatgtggaaacctggcttgtctgccagatgagaagaatgttcttgttgtagccgtcatgcataactgtgataaaaggacattacaaaacgatttacaggattgtaataattataatagtcaatcccttatggatgcttttagctgttcactggataatgaaaacagacaaactgatcaatttagttttagtataaatgagtccactgaaaaagatatgaattcagagaaacaaatggatccattgaatagaccgaaaacagaggggagatctgttaaccatctgtgtcctacttcatctgatagtctagccagtgtctgttccccttcacaattaaaggatgacggaagtataggtagagacccctccatgtctgcgattacaagtttaacggttgattcagtaatctcatcccagggaacagatggatgtcctgctgttaaaaagcaagagaactatataccagatgaggacctcactggcaaaatcagctctcctaggacagatctagggagtccaaattccttttcccacatgagtgaggggattttgatgaaaaaagagccagcagaggagagcaccactgaagaatccctccggtctggtttacctttgcttctcaaaccagacatgcctaatgggtctggaaggaataatgactgtgaacggtgttcagattgccttgtgcctaatgaagttagggctgatgaaaatgaaggttatgaacatgaagaaactcttggcactacagaattccttaatatgacagagcatttctctgaatctcaggacatgactaattggaagttgactaaactaaatgagatgaatgatagccaagtaaacgaagaaaaggaaaagtttctacagattagtcagcctgaggacactaatggtgatagtggaggacagtgtgttggattggcagatgcaggtctagatttaaaaggaacttgcattagtgaaagtgaagaatgtgatttctccactgttatagacacaccagcagcaaattatctatctaatggttgtgattcctatggaatgcaagacccaggtgtttcttttgttccaaagactttaccctccaaagaagattcagtaacagaagaaaaagaaatagaggaaagcaagtcagaatgctactcaaatatttatgaacagagaggaaatgaggccacagaagggagtggactacttttaaacagcactggtgacctaatgaagaaaaattatttacataatttctgtagtcaagttccatcagtgcttgggcaatcttcccccaaggtagtagcaagcctgccatctatcagtgttccttttggtggtgcaagacccaagcaaccttctaatcttaaacttcaaattccaaagccattatcagaccatttacaaaatgactttcctgcaaacagtggaaataatactaaaaataaaaatgatattcttgggaaagcaaaattaggggaaaactcagcaaccaatgtatgcagtccatctttgggaaacatctctaatgtcgatacaaatggggaacatttagaaagttatgaggctgagatctccactagaccatgccttgcattagctccagatagcccagataatgatctcagagctggtcagtttggaatttctgccagaaagccattcaccactctgggtgaggtggctccagtatgggtaccggattctcaggctccaaattgcatgaaatgtgaagccaggtttacattcaccaaaaggaggcatcactgcagagcatgtgggaaggttttctgtgcttcctgctgtagcctgaaatgtaaactgttatacatggacagaaaggaagctagagtgtgtgtaatctgccattcagtgctaatgaatgtggctcagcccagagagcagaggcgagtttggtttgctgatgggatcttgcccaatggagaagttgctgatgcagccaaattaacaatgaatggaacttcctctgcaggaaccctggctgtgtcacacgacccagtcaagccagtaactaccagtcctctaccagcagagacggatatttgtctattctctgggagtataactcaggttggaagtcctgttggaagtgcaatgaatcttattcctgaagatggccttcctcccattctcatctccactggtgtaaaaggagactatgctgtggaagagaaaccatcacagatttcagtaatgcagcagttggaggatggtggccctgacccacttgtatttgttttaaatgcaaatttgttgtcaatggttaaaattgtaaattatgtgaacaggaagtgctggtgtttcacaaccaagggaatgcatgcagtgggtcagtctgagatagtcattcttctacagtgtttaccggatgaaaagtgtttgccaaaggatatctttaatcactttgtgcagctttatcgggatgctctggcagggaatgtggtgagcaacttgggacattccttcttcagtcaaagtttccttggcagtaaagaacatggtggattcttatatgtgacatctacctaccagtcactgcaagacctagtactcccaaccccaccttacttgtttgggattcttatccagaaatgggaaactccttgggctaaagtatttcctatccgtctgatgttgagacttggagctgaatatcgactttatccatgcccactattcagtgtcagatttcggaagccattgtttggagagacggggcataccatcatgaatcttcttgcagacttcagaaattaccagtataccttgccagtagttcaaggtttggtggttgatatggaagttcggaaaactagcatcaaaattcccagcaacagatacaatgagatgatgaaagccatgaacaagtccaatgagcatgtcctggcaggaggtgcctgcttcaatgaaaaggcagactctcatcttgtgtgtgtacagaatgatgatggaaactatcagacccaggctatcagtattcacaatcagcccagaaaagtgactggtgccagtttctttgtgttcagtggcgctctgaaatcctcttctggataccttgccaagtccagtattgtggaagatggtgttatggtccagattactgcagagaacatggattccttgaggcaggcaagagatgaaggacttcaccatcacctgtgggaaggcggacgcggaggaaccccaggagcacatccacatccagtgggtggatgatgacaagaacgttagcaagggtgtcgtaagtcctatagatgggaagtccatggagactataacaaatgtgaagatattccatggatcagaatataaagcaaatggaaaagtaatcagatggacagaggtgtttttcctagaaaacgatgaccagcacaattgcctcagtgatcctgcagatcacagtagattgactgagcatgttgccaaagctttttgccttgctctctgtcctcacctgaaacttctgaaggaagatggaatgaccaaactgggactacgtgtgacacttgactcagatcaggttggctatcaagcagggagcaatggccagccccttccctcgcagtacatgaatgatctggacagcgccttggtgccggtgatccatggaggggcctgccagcttagtgagggccccgttgtcatggaactcatcttttatattctggaaaacatcgtataaacagagaagacttcatttttttctgttcagacttgttgcaacagcagtcatacccaaatcatttgcactttaaaactggaagattaagcttttgttaacactattaatggggtggggaatagggtgggagtgggggtttgggagacgggtgggaaagggtggttggggggaccgatgttccataattctaagtcttctatgcattgtccaccaagaagatctgggcagcttctgttcctgcacaacagttatgctatccttgcagctaatccccttctgttactgtttagacaagaattccgctcctctctcaagatttacttatggtcatgtgctcagaaatgctcaaatgggtacaaccatcaccaagggtgggatgggagggcagaggggaaataaaatataaagcatcagttcttgcactctttgtacagaattggtataaaaaggataattccacactga

SEQ ID NO: 47748 - DNA, 603 bp, Homo Sapiens
accagggaggggagggaggactgcatgacgcgggatggggtggggcgaggcggggcactgcagcacacaacgcaggcaccgacttcagtgtgcatgttccttggacacctgcctcagtgtgcatgttcactgggcatcttcccttcgacccctttgcccacgtggtgaccgctggggagctgtgagagtgtgaggggcacgttccagccgtctggactctttctctcctactgagacgcagcctataggtccgcaggccagtcctcccaggaactgaaatagtgaaatatgagttggcgaggaagatcaacatataggcctaggccaagaagaagtttacagcctcctgagctgattggggctatgcttgagcccagtgtgccagagcctcaacaagaagaaccaccagctgaaagttgggatcctacacctggtcagaagagagaagaagatcagggtgcagctgagattcaagtgcctgacctggaagctgatctccaggagctgtctcagtcaaagactggggatgaatgcggagatggtcctgatgtccaggggaagattctgacaaagtcagagcaatttaaaatgccagaaggaggt

SEQ ID NO: 47749 - DNA, 659 bp, Homo Sapiens
cgccagcaacagacgccggccgccaagatctgcatccctaggccacgctaagaccctggggaagagcgcaggagcccgggagaagggctggaaggaggggactggacgtgcggagaattcccccctaaaaggcagaagcccccgcccccaccctcgagctccgctcgggcagagcgcctgcctgcctgccgctgctgcgggcgcccacctcgcccagccatgccaggcccggccaccgacgcggggaagatccctttctgcgacgccaaggaagaaatccgtgccgggctcgaaagctctgagggcggcggcggcccggagaggccaggcgcgcgcgggcagcggcagaacatcgtctggaggaatgtcgtcctgatgagcttgctccacttgggggccgtgtactccctggtgctcatccccaaagccaagccactcactctgctctgggcctacttctgcttcctcctggccgctctgggtgtgacagctggtgcccatcgcttgtggagccacaggtcctaccgggccaagctgcctctgaggatatttctggctgtcgccaactccatggctttccaggcagcagcagaagtggtcctgacccagatgccctgacagcttttcctggtgtgattttggaaggtgagatttgcaca

SEQ ID NO: 47750 - DNA, 1149 bp, Homo Sapiens
gttctggaggctgggttgagaggtcgccggtccgactgtcctcggcggttggtcagtgtgaatttgtgacagctgcagttgctccccgcccccgagcagccgaggtgcgtgggggaaggggaagaaggaaaaggtccgggtcgcgtttccgctcagtttttgccagggttgaggcgattccagagagcggcggaaaggataagcctcgacttagaagctaccgagttaccctaagaaaggagtctaccatggctcaagaatctcccaaaaattcagcagcagaaattccagtgactagtaatggagaagttgatgactctcgtgaacatagctttaatagggatttgaagcattcattaccatctggacttggtctctcagaaacccaaattacatctcatggctttgacaataccaaagagggtgttattgaagcaggagcatttcaagattatctctgagaagctaggccgtggctcaagaactgtggaccttgaacttgaagctcagattgatatattaagggataacaagaaaaaatatgaaaatattttaaaactggctcaaacattgtcgacccagcttttccagatggtacatacccaaaggcaacttggagatgcatttgctgacctgagtttgaagtcactagaacttcatgaagaatttggctataatgccgatacccagaaactgctggctaaaaatggagagactcttcttggggccattaattttttcattgctagtgtgaacactttggtgaataaaaccattgaagatacattaatgactgtgaaacagtatgaaagtgccaggattgaatatgatgcatatcgcactgatttggaagaactgaatcttggaccacgtgacgcaaacactctgccaaagattgagcagtcacagcatctcttccaagcacataaggaaaaatatgataaaatgcgcaatgatgtttctgtcaaattgaaatttctagaagaaaataaggttaaagtattgcacaatcagctggtccttttccacaatgccattgccgcttactttgctgggaatcagaagcagcttgaacagacacttaaacagttccatatcaaattgaaaacccctggagtggatgccccatcttggcttgaagaacagtaa

SEQ ID NO: 47751 - DNA, 1467 bp, Homo Sapiens
atgaactttaccccaacacacacccctgtctgcagaaagcgaacagttgtctccaaacgtggtgttgccgtcagtggtcccaccaagaggaggggaatggcagattcactggagtcaacccccttgccttcccccgaagatcgtctggccaaactccatccttctaaggagctcctggaatattatcaaaagaagatggctgagtgtgaggcagaaaatgaggacttgctgaagaaactggaactctacaaagaagcttgtgaaggacagcataaacttgaatgtgatttgcagcagagggaggaagagattgctgaattgcagaaagctctaagtgatatgcaggtctgcctcttccaggaacgggaacatgttttacgcctctactcagaaaatgaccgactgagaatcagggagctagaagacaagaaaaagattcagaatctcttggctcttgtgggaacagatgctggagaagtgacctatttttgtaaggagcctcctcacaaagtcaccattctccaaaagactatccaggctgtaggtgaatgtgagcagagtgaatcttcagctttcaaagcagatcctaaaataagcaaaagaagaccatcgagagagagaaaagaaagttctgagcattaccaaagagacatacagacactcatcctacaggtggaagcactgcaggctcagctgggagagcagaccaaactttctcgagaacaaattgaagggctcatcgaggacagacggattcaccttgaggaaatacaagttcagcaccagagaaatcagaacaaaatcaaagagctaaccaaaaatcttcaccacacccaagaactgctctatgagagcaccaaagattttctgcaactcagatctgaaaaccaaaataaagagaagtcatggatgcttgaaaaagataatttgatgtcaaagattaagcaatatagggtgcagtgtaagaagaaagaagataaaattggaaaagtgttgcccgttatgcatgagagtcaccatgctcaaagtgaatatattaagtccctaaaagataagttagtacaagagaaaaagctgtccaatatgtaccaagagcagtgcatttccttagaagaagaacttgcccgaattcgtgaggaagagggaatgaggagagagatcttcaaggatcgcactaacaagatggggaagcgtttacagataatgacaaaacgctatgaggcattggagcgtcgacgtatcctggaagtagaaggctttaagacagatattaaagttctccgacagaaactgaaagacttggagcaaatgttgtataaggcaacagttaatgcccgggcaaaccaggatcttgcccttctgtgtgaggtccgtgacagcaatagacgggcacataagatacaaggagaactgaagaatcttaagtcgaaagtgtttggtctggagaatgaacttagactctgttaa

SEQ ID NO: 47752 - DNA, 342 bp, Homo Sapiens
atggacggtcgggtgcagctgatgaaggccctcctggccgggcccctccggcccgcggcgcgtcgctggaggaacccgattccctttcccgagacgtttgacggagataccgaccgactcccggagttcatcgtgcagacgagctcctacatgttcgtggacgagaacacgttctccaacgacgccctgaaggtgacgttcctcatcacccgcctcacggggccagccctgcagtgggtgatcccctacatcaggaaggagagccccctgctcaatgattaccggggcttcctggccgagatgaagcgggtctttggatgggaggaggacgaggacttctag

SEQ ID NO: 47753 - DNA, 1239 bp, Homo Sapiens
gaatgtggaaaaggcttcccaggcaagcgtaatctcattgtacatcagcgaaatcatactggagagaaatcctatatatgtagtgaatgtggaaaaggcttcactgggaagagcatgcttattatacatcagcgaactcatacaggagagaagccctacatctgtagtgaatgtgggaaaggcttcaccacaaaacactatgtcatcatacatcaacgaaatcatacaggagagaaaccatatatatgcaatgaatgtgggaaaggcttcaccatgaagagccgtatgatcgaacatcaacgaactcatacaggagagaaaccctacatatgcagtgaatgtggaaaaggctttcccaggaagagtaatcttattgtacatcagagaaatcatacagtagagaagtcatatctatgtagtgaatgtggaaaaggttttactgtgaaaagcatgctcatcatacatcagcgaactcatacaggagagaagccctacacatgcagtgaatgtgggaaaggcttccccttgaagagtcggctgattgtacatcagcgaactcatactggagagaaaccttacaggtgcagtgaatgtgggaaaggtttcattgtgaatagcggactgatgttacatcagcgaactcatactggagagaaaccgtacatatgcaatgaatgtggaaaaggcttttcaatgaagcactgtctcatggtacatcaacgaactcatactggagagaaaccttataaatgcaatgagtgtggaaagggcttcgctttgaagagcccactcatcagacatcagcgaacacatactggagagaaaccctatgtatgcaccgaatgtcgaaaaggtttcaccatgaagagtgacctcattgtacatcagcgaactcatactgcagagaagccatatatatgcaatgattgtggaaaaggcttcactgtgaagagccgccttattgtgcatcagcgaactcatactggagaaaaaccctatgtatgtggtgagtgtggaaaaggctttccagcaaagatccggctaatgggacatcaacgaactcatacaggagagaaaccttatatttgcaatgagtgtggaaaaggcttcactgagaagagtcatctcaatgtacatcggcgcactcatacaggagagaaaccctatgtatgcagtgaatgtggcaaaggcttaactgggaaaagcatgctcattgcacatcagcgaactcatactggg

SEQ ID NO: 47754 - DNA, 368 bp, Homo Sapiens
ccaggatcagcatggccgtccgccagtgggtaatcgccctggccttggctgccctccttgttgtggacagggaagtgccagtggcagcaggaaagctccctttctcaagaatgcccatctgtgaacacatggtagagtctccaacctgttcccagatgtccaacctggtctgcggcactgatgggctcacatatacgaatgaatgccagctctgcttggcccggataaaaaccaaacaggacatccagatcatgaaagatggcaaatgctgatcccacaggagcacctcaagccatgaagtgtcagctggagaacagtggtgggcatggagaggatatgacatgaaataaaagatccagcccaactga

SEQ ID NO: 47755 - DNA, 1743 bp, Homo Sapiens
atgccgagtgtcccagaggacctggagagcagggaggccatggtggcatttttcaagtccgctggagctagtgcccaggagaagcaggcacagttacaagagcaggtgaaagagcagagggtgtgctgccagcgcctggctcacccggtggcctcggcccagaaggagccagaggcagcggtcccagccccagggcctgggggcgagtctgtgagtggggagacccaccgggccctgcaggaagtcatggagaagctggcccatgccggaactcacctccgccttctccatgacttgaaaatgccacctgagggcagggggcagtgccaaagatgcagcaccgggggaggacaccatcaggctggccctggacagggaggagatgaaggtgaagctgctggagctgcaggagatggtgttgcagctggtggcgactacaagggacacagcaaattcttggtgactgcccagaaccctgctcatgagcccagtccaggagccccagccccccaggagcttggggctgcccacaagcatggtgatctttgtgaggtgagcctcactgacagcgtggagcctgtgcaaggagaggccagggagggttctccccacgacaaccctactgcacagccgatcgtgcaggaccaccaggagcacccaggcttgggcagcaactgctgtgtgccattcttttgctgggcttggctgccaagaagaaggagataaacatgaccatcgtcaaagacctgctcaagaaatttttaaaaaagaaacaaagttatggggttaatctcctacacaattcatttacttcgtttgaatgttatagccacttatgattatttgtgtttctaatttatagtttaagtttatttgtaaatagttaaaagagagtgggtctctgtggctttcactgatgttcactctggcatactttcgcaattttctttttcaatttcatgattgtaggtcattagcatgcatattgagtttgcccttacgtggtgggagttcaaacacacaaagacccactatttgcacaaaactattcttgctggtttggaataggctgccatgtgtttttaatgttattgaagcatgtatattcattacagaattcagataaaatttgcctatgttctgctattgtttgatctaatcttaatcacagtgagctcttcattagcacaatatgtggtttgccccaagtgtgcactatttaatactttgtaatatgccaccaagagtactgacatttagagttgtttaaaggccgagaactggaaacagcctttccctcattttctgtgtattggtgatgggagtaataacattttgggggagctttttaaatttcacagaagaggaaagttgcctgctctggcaggtatgtgcaagatagagtgtgtttcatttgttctgttgccaagaattagtgctgtactattgtagttcctttaggatttgtatgtgctctgggctcatgaagatattgcatcatgagctgcagcagttgtactcttttttgatgacctaaaaagggcttatttctgaggaatgaaaggttcccatcattgactatggatgtggaaaacctttcctagcttagagcatttgtatctatattttaaagtcagagttcatgttacctgttttaatcacatgactgcatgtcccagtacacaaaagggcactggttggcattcttcttaatgtatttagtaaagatcagaagaaatcctt

SEQ ID NO: 47756 - DNA, 382 bp, Homo Sapiens
cagacctattccgctccatctctgaagtcaaatgggacaccttgaaaatacttcagtggttttcccacgagctattttctctctctgtgaaaaggaaaccaggaaattgactctgtgcctgttttcaagaagcagttccgccgagcatcctggggcctccaagcctccgataagctcctccagtatgacatcacgcatcttgctacgccagcaactcatgcgtgagcagatgcaggagcaggagcgcagggagcagcagcagaagctgcaggcggcccagttcatgcaacagagagtgcccgtgagtcagacaccagccataaacgtcagtgtgcccaccacccttccctctgccacgcaggtgccgatggaagtccttaag

SEQ ID NO: 47757 - DNA, 378 bp, Homo Sapiens
atcgtgatgaactatgtggagcacgacctcaagagcctgatggagaccatgaaacagcccttcctgccaggggaggtgaagaccctgatgatccagctgctgcgtggggtgaaacacctgcacgacaactggatcctgcaccgtgacctcaagacgtccaacctgctgctgagccacgccggcatcctcaagcctcccacagcttcgcgggcactggccttcctgaacacctctcctggcgtcttaggaatactccacggccgtggacatgtggtcagtgggctgcatcttcggggagctgctgactcagaagcctctgttccccgggaattcggaaatcgatcagatcaacaaagtgttcaaggtgggtctggccct

SEQ ID NO: 47758 - DNA, 1524 bp, Homo Sapiens
cgctaggacctgcggggccgggcgggagagagggctgccgggaccggccctagacactgagccgcggtgggatccccgccggctctgcgaggccctgcgagcgccagggaggcgcctcgagggagccgggcagccgccggccacttcaggggggcccgccacttcagggcggtcgaaagagccttgggggcacatctcggggtgcggtgacccgcccggcgcatttcgggggtcggggcgcatttgccaggggacatctggagcccggccctgcttctgtcgggctccagggtacccctggatggctgcgctgtgccctcgccggcggcccgggcgccacagcggctgagttcgccgggatcgccgggccgccgccgcccttgccaccggctgcatgctcggcgcccgggtcgcggcccacctggacgcactgggccccctggtcccctacgtgccgccgccgctgctgccctctatgttctacgtgggcctgttcttcgtcaatgtgctgatcctgtactacgccttcctcatggagtacatcgtcctcaacgtgggcctcgtcttcctgttcgaggacatggaccaggcgctcgtggacctcggcgtgctctccgaccccggctcgggcctttacgatgctgactcggagctcgacgtctttgatgggtacttggagtagggtctcgactgccgttcccctcttccctccacgatccgcaacccacgccctggaccagccgcccagatcatggcgccgcagcagctggttgggggcaccatctggacggggatggttccccaggaggagaccctcccctgcctccgaggcctgcctgctaccctcaaaagcttcgtgccaacagagaggttcctgtttggacccaggagagtggaagagagattgggactgagtgctgagattgggaaggcacctgctcccacagaagggggaacgcaaggggcgtcccaagacctcatctgcctgcagcgtcacaccgatggcctggcctcggcttctcattatttgcaactgccatggatgtttacaggaacccagccagagtttgcctccctgcacttcatcccagagcgcacctgcttcctccacttcaccttcggagaggacacttcaaactgcggacacacgcaaaagcaactcccagctctgtttgatgtgagttgagccttcaggccagctgggtttagcccgaggctggtcttagatgcagcgactgtttcagggagtgactcagaataaaaagaagctgaggaagctgttggggggctgaggatgagattctcgcttcttcatttcaggttactcgttcctcagcaagttggcaaaacagatatcatgctggtgagtgccacgttactcccctggctgcaaatgcttttctgaaagtatgagtgtcgtgcctacttaattctgataaacctgtttaagcaatacttaggaggctgacttctttggattaaaaaaatgtatgcaactccaaaaaaaaaaaaaaaaaaaagaaa

SEQ ID NO: 47759 - DNA, 2660 bp, Homo Sapiens
atggatgaagatgaatttgaattgcagccacaagagccaaactcattttttgatggaataggagctgatgctacacacatggatggtgatcagattgttgtggaaatacaagaagcagtttttgtttctaatattgtggattctgacataactgtgcataactttgttcctgatgacccagactcagttgtaatccaagatgttgttgaagatgttgtcatagaggaggatgttcagtgctcagatatcttagaagaggcagatgtatctgaaaatgtcatcattcctgagcaagtgctggactcagatgtaactgaagaagtttctttaccacactgcacagtcccagatgatgttttagcttctgacattacttcaacctcaatgtctatgccagaacatgttttaacgagtgaatccatgcatgtgtgtgacattggacatgttgaacatatggtgcatgatagtgtagtggaagcagaaatcattactgatcctctgacgagtgacatagtttcagaagaagtattggtagcagactgtgcccctgaagcagtcatagatgccagcgggatctcagtggaccagcaagataatgacaaagccagctgtgaggactacctaatgatttcgttggatgatgctggcaaaatagaacatgatggttccactggagtgaccatcgatgcagaatcagaaatggatccttgtaaagtggatagcacttgtcctgaagtcatcaaggtgtacatttttaaagctgaccctggagaagatgacttaggtggaactgtagacattgtggagagtgaacctgaaaatgatcatggagttgaactacttgatcagaacagcagtattcgtgttcccagggaaaagatggtttatatgactgtcaatgactctcaacaagaagatgaagatttaaatgttgctgaaattgctgatgaagtttatatggaagtgatcgtaggagaggaggatgctgctgttgcagcagcagcagctgctgtgcatgagcagcaaattgatgaggatgaaatgaaaaccttcgtaccaattgcatgggcagcagcttatggtaataattctgatggaattgaaaaccggaatggcactgcaagtgccctcttgcacatagatgagtctgctggccttggcagactggctaaacagaaaccaaagaaaaagagaagacctgattccaggcagtaccaaacagcaataattattggccctgatggtcatcctttgactgtctatccttgcatgatttgtgggaagaagtttaagtcgaggggttttttgaaaagacacatgaaaaaccatcctgaacaccttgccaagaagaagtaccactgtactgactgtgattacactaccaataagaagataagtttacataaccacctggagagccacaagctgaccagcaaggcagagaaggccattgaatgtgatgagtgtgggaagcatttttctcatgcaggggctttgtttactcacaaaatggtgcataaggaaaaaggggccaacaaaatgcacaagtgtaaattctgtgaatatgagacagctgaacaggggttattgaatcgccacctcttggcagtccacagcaagaactttcctcatatttgtgtggagtgtggtaaaggtttccgacacccgtcggaactgagaaagcacatgcgaatccataccggcgagaagccataccaatgccagtactgtgaatataggtctgcagactcttctaacttgaaaacacatataaaaacaaagcatagtaaagagatgccattcaagtgtgacatttgtcttctgactttctcagataccaaagaagtgcagcaacatactcttgtccaccaagaaagcaaaacacatcagtgtttgcattgcgaccacaagagttcaaactcaagtgatttgaaacgacatgtaatttcagttcatacgaaagactatcctcataagtgtgagatgtgcgagaaaggctttcacaggccttcagaacttaagaaacatgtggctgtccacaaaggtaaaaaaatgcaccaatgtagacattgtgactttaagattgcagacccatttgttctaagtcgccatattctctcagttcacacaaaggatcttccatttaggtgtaagagatgtagaaagggatttaggcaacaaaatgagcttaaaaagcatatgaagacacacagtggcaggaaagtatatcagtgtgagtactgtgagtatagcactacagatgcctcaggctttaaacggcacgttatttccattcatacaaaagactatcctcatcggtgtgagtactgcaagaaaggcttccgaagaccttcagaaaagaaccagcacataatgagacaccataaagaagttggtctgccctaacagtgtgtctacaagcttgtaaagatgttggccttgaagcagaaaattcattttttaaagccagtcttgttcacatccattactatacattgaattatgctgtgtaaaaatagaattattgcttctagtccacttttctttacattttattcaatacgctgtcctgaatcctattcagtttctttaatagatgaggaaaaatagcaacaagcaagttgcttataataaaataatttgtgattctatactgaatt

SEQ ID NO: 47760 - DNA, 859 bp, Homo Sapiens
ctgggagacagggacagacgtaggccaagagaggggaaccagagaggaaccagaggggagagacagagcagcaagcagtggattgctccttgacgacgccagcatgagctccttctccaccaccaccgtgagcttcctccttttactggcattccagctcctaggtcagaccagagctaatcccatgtacaatgccgtgtccaacgcagacctgatggatttcaagaatttgctggaccatttggaagaaaagatgcctttagaagatgaggtcgtgcccccacaagtgctcagtgagccgaatgaagaagcgggggctgctctcagccccctccctgaggtgcctccctggaccggggaagtcagcccagcccagagagatggaggtgccctcgggcggggcccctgggactcctctgatcgatctgccctcctaaaaagcaagctgagggcgctgctcactgcccctcggagcctgcggagatccagctgcttcgggggcaggatggacaggattggagcccagagcggactgggctgtaacagcttccggtactgaagataacagccagggaggacaagcagggctgggcctagggacagactgcaagaggctcctgtcccctggggtctctgctgcatttgtgtcatcttgttgccatggagttgtgatcatcccatctaagctgcagcttcctgtcaacacttctcacatcttatgctaactgtagataaagtggtttgatggtgacttcctcgcctctcccaccccatgcattaaattttaaggtagaacctcacctgttactgaaagtggtttgaaagtgaataaacttcagcaccatggacagaagacaaa

SEQ ID NO: 47761 - DNA, 723 bp, Homo Sapiens
atggacggggtcccctccctggagctggggttgccaaggaaacagagcgagatgcagatgaaggccggtgtgacctgtgaggtgtgcatgaacgtggtgcagaagctggaccactggctcatgtccaacagctctgagctcatgatcacccatgccctggagcgcgtgtgctcggtaatgcctgcctctatcacgaaggagtgcatcatcttggtggacacctacagcccctccttggtgcagcttgtggccaaaatcaccccagagaaggtgtgcaagttcatccgtctgtgtggcaaccggaggcgggcccgggcagtccatgatgcctatgccatcgtgccgtccccagagtgggacgcggagaaccagggcagcttctgcaatgggtgcaagaggctgctcacggtgtcctcccacaacttggagagcaagagcaccaagcgagacatcctggtggccttcaagggtggctgcagcatcctgccgctgccctatatgatccagtgcaagcacttcgtcacccagtacgagcccgtgctcattgagagtctcaaggacatgatggaccccgtggctgtgtgcaagaaggtgggggcctgccacggccccaggaccccactgctgggcaccgaccagtgtgccctgggcccaagcttctggtgcaggagccaggaggccgccaagctgtgcaacgctgtgcaacactgccagaagcatgta

SEQ ID NO: 47762 - DNA, 2121 bp, Homo Sapiens
ccccaaaggcctgaaaggcctaaaggctactttgtggcctgcacaccgtgtttttctcaaggttcatcctgccacagaaattctttctcctccttctcctcccattcctcagccactggcctgattagggccggctccaaagactgcctcatttggagcatttggagttcctttcgtccttgttccccagtgcactctgccagccccgtttttaaagaaatggcttctctggaggagggtatctacagccttaaaattaattccaaacgtagctcctataattccatgaaccctcaatttacagctggaagtgagggtcaaaatgaaactgaggaaccaaacaagttccagagcaggaagggtagacctcaagatagtggctcttcattgtctctgagtgttctccaggagatcctgggagatgacattccaaaagtaaaggaagaggctgtcattagttcacaatcagacctaggagagtgtccctactgtggagaaagaccagccaggaatgccactatctttgctcctcaaaaagagaaagagtcagccccagaaatgagcagctcctgtgacaagagggtgactgttaatcctcctgagaaattcagtgaggggcgacctaaaacacaaaatacactcatttgtgaaaaatgctctcagccttcaaattttctggatgactataacccccatgtaataatccaaaagcgacttagcaaccaaagtagagtcatttgtgaaaaaagctctccacctttaaatgttccggataactataactcccattcagtaattcaaaagcacaaagaaaagatggcaattgagcgcccctcttcagggagtgactggtctgatgtaggtggaaccacagtcatattctctgaagagaagccattctcactgtgtcttcctgtagtgtcagagcctccatactacgccactgactacaccacttttccacctcattatagtccttggcatgactacaccagctcttggttcagcagtaccaagtcttcttgctatccctccttgggcagcagcagtaacacattgcaggctgggaagagccaccagagcttcctgagtgattattccaccagttttccagtgagctccgaaaacacatccagagatctgaagatgacagaggaaggcagatccaagaattcttccttattttactactccagaaatgtggaagcagaggcgaaggaggagagagtatatcaagaggagacattaggacatccttatggaggacgtgcatctagctttccgccaaggaccatctggcagccagagcaaccgggtttcattgatacccactgtcatttagacttgctatattccaggctgcctttcaaaggcacctttaccaaattcagaaaaatttatagcaacaccttccccaaggagtttcagggctgcatttcttgcttctgcaatcctcaaaacctaagtgataacctgtgggaggatcagttgaaagatgatctggtttggggggtctttggctgtcgccctcattttgcccattattataacaactatcaagaaagaagtattttaaaagccttacgacaccccaaggctgtggcattcggcgaaatgggcttggattactccagtaagtgcaccacgcatatcccagagcagcagaaagtatttaagagactgctgcggctggccgtctctctaaagaagcccatgatgatccactgccgagaagccgatgaagacctactgcacatcttgaaaaattacgtgccctctgaccacaagatacatcgccattgcttcactgggagttactcagtcatcgagcccctgttgaaccactttcccaacctgtatgtgggcttcacggcaattctgacttactcttctgctgggcaagcccgagaaactgtgagaaagatcccgctagagagaattattgtagaaaccgatgctcccttcttcctccctcgctgggttcccaaaagctattgccagtatgcccacccaggcctggccctgcatactgtgcgagagattgccagaatcaaaggtgtgtcgctctcccacaccttgaccgtcttgcgggagaacacccatcgcctctaccatctttaa

SEQ ID NO: 47763 - DNA, 453 bp, Homo Sapiens
ctggagagagaagaatgcaggcagcattttcaagctaatcgtttattggcaatctgtgatcacaaggttgagcaccaaatcggagtcattttgggagaggagagaagctggactccaggcatgacccagacggagctgatcctcacacctccgttgaaggcagaatatctttgtgcacatcagcttcattctgcagaccagctttggctacctggaacactgttcaggattccaagacctcgggctgcagtggaacaagacattgatctgagattaattgaccagcaaggatcaacacctgtggatggagaggggaggggagggtgcaggcatctcctgtcatgctcattggtcagcttagagacttgcagacctggcactcgccctagaggaagcagtgtagtgagaagaaagccagacttaagggatgttggcttctgtttccagctctga

SEQ ID NO: 47764 - DNA, 681 bp, Homo Sapiens
aagtgcccgagggcggccgcagaacggtcaatttgagccgcgtcgagctcccctgggacctgtggccgccgcccacagaccatgctcctggggcgcctgacttcccagctgttgagggccgttccttgggcaggcggccgcccgccttggcccgtctctggagtgctgggcagccgggtctgcgggcccctttacagcacatcgccggccggcccaggtagggcggcctctctccctcgcaagggggcccagctggagctggaggagatgctggtccccaggaagatgtccgtcagccccctggagagctggctcacggcccgctgcttcctgcccagactggataccgggaccgcagggactgtggctccaccgcaatcctaccagtgtccgcccagccagataggggaaggggccgagcagggggatgaaggcgtcgcggatgcgcctcaaattcagtgcaaaaacgtgctgaagatccgccggcggaagatgaaccaccacaagtaccggaagctggtgaagaagacgcggttcctgcggaggaaggtccaggagggacgcctgagacgcaagcagatcaagttcgagaaagacctgaggcgcatctggctgaaggcggggctaaaggaagcccccgaaggctggcagacccccaagatctacctgcggggcaaatga

SEQ ID NO: 47765 - DNA, 2133 bp, Homo Sapiens
gatgctgataaattgaagaagaaaacagctgaggacagaacgcaggcatttcacctgcggcagaacctgagcgccctggataagatgcatgaggagcaagagcttttcactgagaagatgagaggggagctgcgcgcctgtcggcagaggcgggacctgatcgacaagcagcaggaggctgtggcagccgagatcgccacagaggaagaggcgggcaacatggccgctgtgggccgcctccaggccgtgtccagacgcctgtttgcagagctggagaacgagagagacctgcagtcgaggactgaggccgtgctgaaggagagcgagaacaccatgtggcacatcgagatccaggaggggcgactcgaggccttccggacagctgaccgtgaggaggtggaggccacggggcggcggctccaggtgcgcgcagccgagcagctctgcagagagcaggaggccctggggaaggtggagcggaaccgactgctgaggatcaggaagtccctgaacacccagaaggagctcgggctcaggcaccagaagctgctggaggacgcccggaagaaccacaaggttgccgtgcggttcctgaaggcctccctgggaagaatccgagagcaagagaagaaggaggagatggagtgccacgagtacatgaggcgacgcatggatgcggtggtggcgctgaagggcagcatctccgcgaaccgggacacactgcggaagttccaagcatgggaccgtgccaaggcagagctggcggagcagagggtccaggctgagaagaaggcgattctggcccagggcagggatgcattcaggcaccttgtccaccagcgccggcgccaggagctggaggcccagaagagggcctttgaggaggagcagaagctcagaaagcaggagatcatcagtcggattctgaaagaggaggctgaggaggaaaagaggaagaaacagcatccccccaccagtgccaggcaccggctgaccctgagggacaagacctggaactacatttctgacttttgcaagaagaccacagtcccaaccaacacgtacacactggactacgaggctgctgcaggccccgggccctctcggttgctggaagtcgtttccagtgagcttatccagggggaccccggggccagctcagaggaggaaacgttagctgagcccgagatctctgggctttggaatgaagactacaagccataccaggtgcccaaggaggacgtggaccgaaagcccgtgggcgggacaaagatggacaaggacatcctggagcgcacggtggagcggctgcggagcagggtggtccacaagcaggtggtgtgggggcgtgagttccaaggacgccccttcaacagcaaaccggagctcctccacttccaggactttgatattggcaaagtgtacaagaaaaagatcacgttggtaaacaccacctacacgatcaactactgcaagctggtgggcgtggaggagcacctccgggacttcatccacgttgactttgacccccctggccccctgtcagccggaatgtcctgtgaagtgcttgtcaccttcaagccgatgataaacaaggatctagaaggaaatatctcatttttggctcagacgggcgagttttcagttccactgaaatgttcaacaaagaaatgttcgctgtccctcgacaaggagctcattgacttcggcagctacgtggtaggagagaccacgtctcggaccatcacgctgaccaacgttgggggcttgggcacgactttcaagttcctgccagcttcagagccctgtgagatggacgactcccagtctgccctgaaattaagcagtctcctgacctacgaagataaaagcttgtatgacaaagccgccaccagcttctctgagcagcagctagagggcacggagtcctcccaggcggacatgcagagccggaaggagctggagaagctggacaaggagcaggaggaggagcagcccgcaggtgagccaggctgccaggccaagccagggtgggcgggcggtgagggcctcagggcagcattccagggggctgaggggcccaggggagggctggaaagtagagaattttcccaggccttcgatgttaagtga

SEQ ID NO: 47766 - DNA, 876 bp, Homo Sapiens
gaaaagagatactctcagaaaaaagtcatcggctttagaaactctccaaacgacctaagccaaacacagcagcaaataaaggaaatgaaagagatgtatgaaaatgcagaagataaagtgaataattccactggaaagtggagctgtgtagaagagaggatatgtcatctccaacatgaaaatccgtgcattgaacagcaactagatgatgttcatcagaaagaggatcataaagagatagtaactaatatccaaagaggctttattgagagtggaaagaaagacctcatgctagaagagaaaaataagaagctaatgaatgaatgtgatcatttaaaagaaagtctctttcaatatgagagagagaaagcagaaagagtagtggttgtgagacaacttcaacaagaagcggctgacagcctaaaaaaattaactatgttagagtctccactggaaggcatatcacattatcacattaatttggatgagacacaggtcccaaaaaagaaattatttcaagtggaaagtcaatttgatgatcttatggtggagaaggaagctgtatcttcaaaatgtgtcaatttggctaaagagaatcaagtttttcaacagaagttattatctatgaaaaaagtacaacaggaatgtgaaaaacttgaggaggataaaaagatgttggaagaagaaatattaaatcttaagacacatatggaaaacagtatggtagaacttagtaaactacaagaatataaatcagagctagatgaaagggcaatgcaggcagtagaaaaattagaagaaatccatttacaggaacaagcacaatataaaaaacaattagagcagttaaacaaggatataatacagcttcactaa

SEQ ID NO: 47767 - DNA, 498 bp, Homo Sapiens
ggcctcaccatctcctctttcttctcccacctctttgacaagaagcagatgcacattctgatggttggattggatgccgctggcaagacgaccattccgtatgaactgaagttaggggagatagtcaccaccattcctaccgttggctgcaatgtggaagcggtagactataaaaacattcgtttcacagtatgggatgctggtggtcaagatagaattaggcctctccggaagtattacttcccaaatacccaatatcttatatttgtggtagatagcaataatcgtgaaagaattaaggaggtagcaggtgagctgcagaaattgcttctggtagatgagttgagagaggcagtgctgctgctttttgagaatcacaggatttgccaaatgctcttcgatctcctcctaacaggacattctgttcaagccacgtgcataacacaaggaactggtctgtgtgagagacctgaccagctgtcaaaggagctttcaaaa

SEQ ID NO: 47768 - DNA, 1359 bp, Homo Sapiens
acttcatttgcttctctgtataatcttgtcaatgaaaacactctgaaggcaataaaagaaatgagttttacaaatatgacggaaattcagcataaaagtatcagaccacttctggaaagcagggatcgtctagcagctgcaaaaacaggaagtggtaaaaccctggcttttcttatccctgcagttgaactcatggttaagttaaagttcatgcccaggaatggaataggagtccttattctctcacctattggagaactagccatggaaacttttggtcttaaggagctaatgactcaccacgtgcatacctatgggttgataatgggtgggagtaacagatctgctgaagcatggaaacttgctaatgggatcaacatcattgtggccacatcaggccgtctgctggaccatatgcagaataccccagggtttatgtataaaaacctgcagtgtctggttattgatgaagctgatcgtatcttggatgttgggtttgaagaggagttaaagcaaattattaaacttttgctaactcatagacagactatgctcttttctgccacccaaactcaaaaagttgaagacctggcaaggatttctttgaaaaaggagccgtttatgttggtgatggataatgctaatgaaacagtgtatggtcttgagcaaggatatgttgtttgtccttatgaaaacagattccttctgctctttacattccttaagaacaaaaagaagcttatggtcttcttttcatcttgtatgtccatgaaataccactgtgagttgctgaactacatttatttgctcatcttggccattcatgaaaagcaaaagcaaagtaagcatacaaccacattcttccaattctccagcgcagatttgggaacactattgtgcacagatgtggcagcaagaggactggacattactgaagtggactgcattgttcagtatgaccctccggatgaccctaaggaatatattcatagtgtgggtagaacagccagaggcctaaatgggagagaattgggttttctttgctacttgaaacaatccaaggttccattaaatgaatttcacttttcctggtctaaaatttctgacattcagtctcaacttgagaaactgattaaaaagaattactttcttcataagtcagcccaggaaacatgtaagtcatacatacaaacctatgattcccattctctgaaacagatctttaatgttaataacttaaatttttctcaagttgctctgtcatttggtttcaaggtgcctccctttattgatctgaaagtcaagagcaatgaaggcaagcagaaaaagcaaggaggtggtggtggatttggctaccaa

SEQ ID NO: 47769 - DNA, 929 bp, Homo Sapiens
ggaggccgcatagaagagagggaggaattactgaacaggagagggggattggaagacctagggaggtccccttcattctgagaaaagaaggggtctcttgaagactaaaaagctcttatctcaggtggacatggactgcagggtccacatgcgacccatcggcctgacgtgggtgctgcaactgaccttggcatggatcctgctagaagcctgtggagggagccgcccactccaagccaggtcccagcaacaccatgggctggcagctgatctgggcaaaggcaagctgcacctggcaggaccttgttgtccctcagagatggacacaacagagacatcgggccctggaaaccatccagaacgctgtggagtgccgagccctgaatgcgaatccttcctggaacacctccaacgtgcccttcgcagtcgcttccgcctgcggctattgggggtacgccaggcacagccgctctgcgaggagctctgccaggcctggttcgccaactgcgaagatgatatcacctgcggcccgacttggctcccactctcagaaaaaaggggctgtgagcccagctgccttacctatggacaggctggagtgcagtggcgcgatctcagctcgatgcaacctccgcctccggggttcaagtgattctcctgccgcaacctcccgaatagctgggatttcaggcgcatgccaccatgcccagctaatttttgtatttttagtagagtcagcgtttcaccatgttggccaggctggtttcgaactcctgacctcaggtgatccgcccacctcggcctcccaaagtgttgggattacaggtgtgagccaccgcccccggcccccaccaagttctttcttaccgtgtctagaccccagagaccggattggtactccccaggtccctgctcccacccttccctag

SEQ ID NO: 47770 - DNA, 1059 bp, Homo Sapiens
gagacttttgcctttcaggcagaaattgcccaactcatatccctcatcatcaataccttctattccaacgaggagattttccttcaggagttgatctctaatgcttctgatgccttggacaagattcgctatgagagcctgacagacccttcaaagttggacagtggtaaagagctgaaaattgacatcatccccaaccctcaggaacgtaccctggctttggtagacacaggcattggcatgaccaaagctgatctcataaataatttgagaaccattgccaagtctggtactaaagcatgcatggaggctcttcaggctggtgcagacatctccatgattgggcagtttggtgttggcttttctgcctacctggtggcagagaaactggttgtgatcacaaagcacaacgatgatgaacagtatgcttgggagtcttctgctggaggttccttcactgtgcatgctgatcatggtgagcccattggcaggggtaccaaagtgatcctccatcttaaagaagatcagacagagtacttagaagagaggcgggtcaaagaagtagtgaagaagcattctcagttcataggctatcccatcaccctttatttggagaaggaacaagacaaggaaattaaactaaacaagaccaagcctatttggaccagaaaccatgatgacatcacccaagaggagtatggagaattctataagagcctcaccagtgactgggaagaccacttggcagtcaagcacttttctgtagaaggtcagttggaattcagggcattgctattcagtcctcgtcgggctccctttgacctttttgagaacaagaagaaaaagaacaacatcaaactgtatgtccgccgtgtgttcatcatggacagctgtgatgagttgataccagagtatctcaattttatccatggtgtggttgactctgaggatctgcccctgaacatctcccgagaaatgctccagcagagcaaaatcttgaaagtcattcgcaaaaacattgttaagaagtgccttgagctcttctctgagctggcagaa

SEQ ID NO: 47771 - DNA, 1500 bp, Homo Sapiens
ctctggggtctgactctgccccttttcttcttctgctgggagggtggggtctctaggagctctgcaggccccagcacccgcagagcagacactgcgatgacaacggacgacacagaagtgcccgctatgactctagcaccgggccacgccgctctggaaactcaaacgctgagcgctgagacctcttctagggcctcaaccccagccggccccattccagaagcagagaccaggggagccaagagaatttcccctgcaagagagaccaggagtttcacaaaaacatctcccaacttcatggtgctgatcgccacctccgtggagacatcagccgccagtggcagccccgagggagctggaatgaccacagttcagaccatcacaggcagtgatcccagggaagccatctttgacaccctttgcaccgatgacatctctgaagaggcaaagacactcacaatggacatattgacattggctcacacctccacagaagctaagggcctgtcctcagagagcagcgcctcttccgacggcccccatccagtcatcaccccgtcacgggcctcagagagcagcgcctcttccgacggcccccatccagtcatcaccccgtcacgggcctcagagagcagcgcctcttccgacggcccccatccagtcatcacccctccgtcacgggcctcagagagcagcgcctcttccgacggcccccatccagtcatcaccccctcatggtccccgggatctgacgtcactctcctcgctgaagccctggtgactgtcacaaacatcgaggttattaattgcagcatcacagaaatagaaacaacgacttccagcatccctggggcctcagacacagatctcatccccacggaaggggtgaaggcctcgtccacctccgatccaccagctctgcctgactccactaacacaaaaccacacatcactgaggtcacagcctctgccgagaccctgtccacagccggcaccacagagtcagctgcacctgatgccacgattgggaccccactccccaccaacagcaccatagaaagagaagtgacagcacccggggccacgaccctcagtggagctctggccacagggaatcccctggaagaaacctcagccctctctgttgagacaccaagttacgtcaaagtctcaggagcagctccggtctccatagaggctgggtcagcagtgggcaaaacaacttcctttgctgggagctctgcttcctcctacagccccttggaagccgccctcaagaacttcaccccttcagagacactgaccacggacatcgcaaccaaggggcccttccccaccagcagggcccctcttccttctgtccctccgactacaaccaacagcagcggaaacagcatcttagccaagaccacaacctcagcgaagaccacgatgaagcccccaacagccacgcccaccactgctcggacgaggccgaccacagacatgagtgcaggtaag

SEQ ID NO: 47772 - DNA, 288 bp, Homo Sapiens
atggcccagtctgtggctgttgggtctttaggttccacaatccccatggcttattatccagttggtcccatctatccacctggctccacagtgctggtggaaggcgggtatgatgcaggtgccagatttggagctggggctactgctggcaacattcttcctccacctcctggatgccctcccagtgctgctcagcttgcagtcatgcaggcagccaatgtcctcgtaactcagtggaaggggaacttcttcatgggtgaatcagatggtggctacaccatctggtga

SEQ ID NO: 47773 - DNA, 888 bp, Homo Sapiens
atggcaggtcttaacgtgtccctctccttcttctttgccaccttcgccctctgtgaggcggccaggcgggcctccaaggccctgctcccagtgggcgcctatgaagtcttcgcccgggaggcgatgaggacgctggtcgagctcgggccctgggctggggactttgggcctgacctgctgctcaccctgctcttcctgctcttcctggcgcacggggtcaccttggacggggcctcggccaaccccactgtgtccctgcaggagttcctcatggccgagcagtctctgcctggcacgctgttgaagctggcggcacaggggctgggcatgcaggccgcctgcaccctgatgcgcctctgctgggcctgggagctcagtgacctgcacctgctgcagagcctcatggcccagagctgcagctcggccctgcgcacatccgtgccccacggggcgcttgtggaggccgcctgcgccttttgtttccatctgaccctcctgcacctgcggcacagtcctcccgcctacagcgggcccgctgtggctctgttggtcaccgtcacggcctacacggccgggcccttcacgtctgccttcttcaaccctgccctggccgcctctgtgacctttgcctgctcgggacacaccttactggagtacgtgcaggtgtactggctgggccctctgacagggatggtcctggctgtgctgctgcaccagggccgccttccccaccttttccagaggaacctgttctacggccagaagaacaagtaccgagcaccccgagggaagccggccccggcctcaggggacacccagacccctgcaaaggggtccagtgtccgggagcctgggcgcagtggtgttgaggggccacattccagctga

SEQ ID NO: 47774 - DNA, 600 bp, Homo Sapiens
taggacctgcggcgtgctcgagactccgacttcggtcttgcggcgcgctcgcgcccgcgggccatgccccactgactctaagtgggcactgccccggctccgggagggcgagaccgagcgccggccatgggaagcttccagctggaagactttgcggcgggctggatcggaggtgcagccagtgtcatcgttggccaccctctggacacagtcaagactcgcctgcaggctggcgttggctacggaaacaccctcagctgcatccgcgtggtgtacaggagggagagtatgttcggcttcttcaagggcatgtccttccccctcgccagcattgccgtctacaactccgtggtgtttggggtcttcagtaacacgcagcggttcctcagccagcaccgctgcggggagccagaggccagtcctccccgcacgctgtcagacctgctcctggccagcatggtggccggcgtggtctctgtcgggctgggagggcccgtggacctcatcaagatccggttgcagatgcagacacaaccgtttcgggacggtaagaggccaggggagcggaggctggtgtctgggacttgtggccctttcctg

SEQ ID NO: 47775 - DNA, 741 bp, Homo Sapiens
ctttcaacaactcctgttgactccaacactcctttgaccacttctactgaagccagttcacctcctcccactgctgaaggtaccagcatgccaacctcaactcctagtgaaggaagcactccattaacacgtatgcctgtcagcaccacaatggtggccagttctgaaacgagcacactttcaacaactcctgctgacaccagcacacctgtgaccacttattctcaagccagttcatcttctacaactgctgacggtaccagcatgccaacctcaacttatagtgaaggaagcactccactaacaagtgtgcctgtcagcaccaggctggtggtcagttctgaggctagcaccctttccacaactcctgtcgacaccagcatacctgtcaccacttctactgaagccatcagttcatctcctacacctgctgaaggtaccagcatagcaacctcaacgcctagtgaaggaagcactgcattaacaagtatacctgtcagcaccacaacagtggccagttctgaaaccaacaccctttcaacaactcccgctgtcaccagcacacctgtgaccacttatgctcaagtcagttcatctcctacaactgctgacggtagcagcatgccaacctcaactcctagggaaggaaggcctccattaacaagtatacctgtcagcaccacaacagtggccagttctgaaatcaacaccctttcaacaactcttgctgacaccaggaca

SEQ ID NO: 47776 - DNA, 381 bp, Homo Sapiens
gtagaatcgatggtgaagagtctggagagagagaacatccggaagatgcagggtctcatgttccggtgcagcaccagctgctgtgaggacagccaggcctccctgcagcaggtgcaccagtgcatcaagcactgccatgtgcttctggctcaagcccaggctttggtcaccagtgagttggagaagttccaggaccacctggcccagtgtaccacgcaatgcaacaacaaagccaaagattcaatagctgctgggagtaaggagcttcaggtgaagcagcagctggacggttgtgtgaccaagtgtgtggatgaccacatgcacctcatcccaactatgaccaagaagatgaaggaagctctcttagccattgggaaataa

SEQ ID NO: 47777 - DNA, 345 bp, Homo Sapiens
gagtcaattccaagcttcagtttgaaatcatgccaggtgcttcatttgaattattcgagataaattctgacactggagaggtagtgacaaccaccatacttgacagagaaattcaagaagtcttcacccttcgagtactagtacgagatgggggattcccttcattgtccagcaccacaacaatcctctgcactgttgaagatgaaaacgatcacgcaccagagtttattgtttccagttatgacattgaggttctggaaaaccaggaaccagaggttgtctatacggttttagcctctgatatggatgctggcaataacagagctgttgaatatcacataattg

SEQ ID NO: 47778 - DNA, 1500 bp, Homo Sapiens
atgctgctgctgctgctgctgctgcccctgctctgggggacaaaggggatggagggagacagacaatatggggatggttacttgctgcaagtgcaggagctggtgacggtgcaggagggcctgtgtgtccatgtgccctgctccttctcctacccccaggatggctggactgactctgacccagttcatggctactggttccgggcaggagacagaccataccaagacgctccagtggccacaaacaacccagacagagaagtgcaggcagagacccagggccgattccaactccttggggacatttggagcaacgactgctccctgagcatcagagacgccaggaagagggataaggggtcatatttctttcggctagagagaggaagcatgaaatggagttacaaatcacagttgaattacaaaactaagcagctgtctgtgtttgtgacagccctgacccataggcctgacatcctcatcctagggaccctagagtctggccactccaggaacctgacctgctctgtgccctgggcctgtaagcaggggacaccccccatgatctcctggattggggcctccgtgtcctccccgggccccactactgcccgctcctcagtgctcacccttaccccaaagccccaggaccacggcaccagcctcacctgtcaggtgaccttgcctgggacaggtgtgaccacgaccagtaccgtccgcctcgatgtgtcctaccctccttggaacttgaccatgactgtcttccaaggagatgccacagcatccacagccctgggaaatggctcatctctttcagtccttgagggccagtctctgcgcctggtctgtgctgtcaacagcaatccccctgccaggctgagctggacccgggggagcctgaccctgtgcccctcacggtcctcaaaccctgggctgctggagctgcctcgagtgcacgtgagggatgaaggggaattcacctgccgagctcagaacgctcagggctcccagcacatttccctgagcctctccctgcagaatgagggcacaggcacctcaagacctgtatcacaagtgacactggcagcagtcgggggagctggagccacagccctggccttcctgtccttctgcatcatcttcatcatagtgaggtcctgcaggaagaaatcggcaaggccagcagcgggcgtgggggatacaggcatggaagatgcaaaggccatcaggggctcggcctctcagggacccctgactgaatcctggaaagatggcaaccccctgaagaagcctcccccagctgttgccccctcgtcaggggaggaaggagagctccattatgcaaccctcagcttccataaagtgaagcctcaggacccgcagggacaggaggccactgacagtgaatactcggagatcaagatccacaagcgagaaactgcagagactcaggcctgtttgaggaatcacaacccctccagcaaagaagtcagaggctga

SEQ ID NO: 47779 - DNA, 360 bp, Homo Sapiens
atgggggaagagcgggaactctgccgcggaggtggagcaagaacggtgaagggccctggtcccagagaggctggtgggtccctctcccaaaggaaggcagacagtctctgctttgccttggaccttggtgctgggggtgggaggcctgggggggacactccccactcccattccccttcctttgtcctaatcctggaattaagtacaggggtttataggttctatttcttcccaagagccctgcaaagaaccccagtttcctatttggatgcccctacactgttgtgtttcagtggaatgtattttcatttaaaaacaactttgaatggggcactttttctttcctgttttaaaaattga

SEQ ID NO: 47780 - DNA, 939 bp, Homo Sapiens
atggggctcaataagtctgcttccaccttccagcttactggcttcccaggcatggagaaggcacatcactggatattcatcccattattggcagcctacatctccatacttcttggcaatggcactcttctctttctcatcaggaatgatcataacctccatgagcccatgtactatttcttagctatgttggcagctacagacctcggagtgacattgaccacaatgcccacagtgctaggtgttctgtggttagatcacagggagattggccatggagcctgcttctctcaggcctattttatccatactctttctgtcatggagtcaggtgtcttgcttgccatggcttatgactgtttcattaccatccgcagccccttaagatatacctctatcctgaccaacacccaggtaatgaagattggtgtgcgggtattgacaagggctggtctgtccattatgccaatagttgttcgcctacactggtttccctactgtcgatcccatgtactctcccatgctttctgtctacaccaagatgtcatcaagctagcctgtgctgacatcaccttcaaccgtctctatccagttgtagttttatttgcaatggtcttgttggactttctcatcatctttttctcctacattttgattctcaagactgtcatgggcattggttctggaggagaaagggccaaggccctcaacacatgtgtctctcatatctgctgcatcctggtcttctatgtcactgtagtttgtctgacatttattcataggtttggaaagcatgttcctcatgtcgttcacatcacaatgagctacatccacttccttttcccaccttttatgaacccatttatctatagcattaaaactaagcagattcagagtggcatacttcgtttattctctctgcctcactctagagcatga

SEQ ID NO: 47781 - DNA, 674 bp, Homo Sapiens
agacgtggcgcagcgactcggaggttcgcctccagcttgcgcatcatctgcggccgggtcccgatgagcctcctgttgcctccgctggcgctgctgctgcttctcgcggcgcttgtggccccagccacagccgccactgcctaccggccggactggaaccgtctgagcggcctaacccgcgcccgggtagagctgaaccgcctaaaggaggtgaaggctttcgtcacgcaggacattccattctatcacaacctggtgatgaaacacctccctggggccgaccctgagctcgtgctgctgggccgccgctacgaggaactagagcgcatcccactcagtgaaatgacccgcgaagagatcaatgcgctagtgcaggagctcggcttctaccgcaaggcggcgcccgacgcgcaggtgccccccgagtacgtgtgggcgcccgcgaagcccccagaggaaacttcggaccacgctgacctgtaggtccgggggcgcggcggagctgggacctacctgcctgagtcctggagacagaatgaagcgctcagcatcccgggaatacttctcttgctgagagccgatgcccgtccccgggccagcagggatggggttggggaggttctcccaaccccactttcttccttccccagctccactaaattccctcctgcctt

SEQ ID NO: 47782 - DNA, 870 bp, Homo Sapiens
ctcattgccctcaactacacggtctatatgttccatgatgattctacccatggcaaattccgtggcacagtcaaggctgagaatggcaagcttgtcatcaatgaaaataccataaccattaggagcaaattcccaccaaaatcaaattgggtgatgccaccacaattacattgtggagaccactggcatcttcactaccttgtaaaggctggggctcatttaaaaggagaaaccgaaagggtcatcatctctgccccctctgctgatgcccccatgtttgtaatgggcatgaaccatgaaaagaaaacacctcgcaattcccagcaaaccttctataccactaactgcttagcaccactggccaagatcacccatgacaactttggcatcatgggaggaatcatgaccatccatgctactatcactgacatccagaagaccactgatggcccatctgggaaactgtggtgcaatggctttcagaacatcactcctgtacctactggtgctgccaaagctgtgggcaaagtcatctccaagctgagcagggagctcactggcatagccttctatgtccccacagccaatgtgtccatcatggacctgacctgccatctggagagacctgccaaatacaatgacatcatgaaggaggtgaagcaggcgtgggaggacccctcaaaggcatcctgggctactctgagtaccaggttgtctctgccaactaacagtgataacaacttttccaccttcaatgttggagctggtattgttctcaatgactactttgtcaagctcatttcctggtatgacaatgaatttggctacagcaacagggtggtagaccttatggtgcacatggcctcctgg

SEQ ID NO: 47783 - DNA, 399 bp, Homo Sapiens
atcaccatggtagatgccttcctgtgcacctggaagctctcagacagcaagaattttgatgactacatgaagttaatcggtgcaagttttgctatcaggcaggtggctagcatgacaaagcctaccacaatcatcaaaaagaatggggacattatcaccttaaaaacacagagcatgttcaagaacacagagatcagctttaagctggggatggggttcgatgagacaacagcagatgacaaaaaggtcaagtccattgtgacactggatggaagcaaactttttcacctgcagaagtgtaacgggcaagagaggacacttgtgccagagctaagtgatgggaaactcatcctgacactcacccagggcactgcggtttacactcgcacttatgagaaa

SEQ ID NO: 47784 - DNA, 687 bp, Homo Sapiens
gtggggctggagtggctggcttacctcctcgtggcttacagcctgggcgcctcagccgcctcactcctggttctgctgggcctgtggctgccacacccggtgcccctcgtggctggagaaggggtgcacctgctgctcaccttcatcctctttttctgggcccctgtgcctcaggtcctgcaacacagctggatcctctgtgtggcagccgccctttggggtgtgggcagcgccctgaacaagactggactcagcacactcctgggaatcttgtacgaagacaaggagagacaggacttcatcttcaccatctaccactggtggcaggctgtggccatcttcaccgtgtacctgggctccagcctgcacatgaaggctaagctggcggtgctgctggtgacgctggtggtggccgcggtctcctacctgcggatggagcagaagctgcggcggggcgtggccccgcgccagccccgcatcccgcggccccagcacaaggtgcgcggtgacggctacttggaggaggacaactcggacgagagcgacgcggagggcgagcatggggacggcgcggaggaggaggcgccgcccccggggcccaggcctggccccgagcccgctggactcggccgccggccctgcccgtacgaacaggcgcaggggggcgacgggccggaggagcagtga

SEQ ID NO: 47785 - DNA, 438 bp, Homo Sapiens
aagaccatcaaggacctgagggctcagatcttcacaaatactgtggacaatgcccacatcgttctgcagatcgacagtgtccatcttgctgctgatgactttagacccaagtgtgagacagagctggccatgtgccagtctgtggagagcaacatccatggctttaaagtcattgatgacaccaatgtcactcggctgcggttggagacagagatcaaggttctcagggaggagctgctctttatgaagaagaaccacaaagaggaagtaaaaggactacaagccaaggtcgacagctctgggttgaccagggaggtagttgcccccaaagctcaggaccttgccaagatcatggcagacatccaggcccaatacgacgaggtagctcagaagaaccgagaggagctggacaagtaccagtctcagcagattgaggag

SEQ ID NO: 47786 - DNA, 986 bp, Homo Sapiens
gattgcttgaggagagaagtatgtgatcagaaagcattctttgtctattaactcctgcccagcaaaagtgaaagaaaattcatgggagcatgcaagaacaaagagcacagcaaagctggacaaacacagcaatccaggcaggggatttccaactcaactctggtatataagctgcatgcaaagtcctttttctgtctctggtttctggccccttgtctgcagagatggctcccaatgcttcctgcctctgtgtgcatgtccgttccgaggaatgggatttaatgacctttgatgccaacccatatgacagcgtgaaaaaaatcaaagaacatgtccggtctaagaccaaggttcctgtgcaggaccaggttcttttgctgggctccaagatcttaaagccacggagaagcctctcatcttacggcattgacaaagagaagaccatccaccttaccctgaaagtggtgaagcccagtgatgaggagctgcccttgtttcttgtggagtcaggtgatgaggcaaagaggcacctcctccaggtgcgaaggtccagctcagtggcacaagtgaaagcaatgatcgagactaagacgggtataatccctgagacccagattgtgacttgcaatggaaagagactggaagatgggaagatgatggcagattacggcatcagaaagggcaacttactcttcctggcatcttattgtattggagggtgaccaccctgggcatggggtgttggcaggggtcaaaaagcttatttcttttaatctcttactcaacgaacacatcttctgatgatttcccaaaattaatgagaatgagatgagtagagtaagatttgggtgggatgggtaggatgaagtatattgcccaactctatgtttctttgattctaacacaattaattaagtgacatgatttttactaatgtattactgagactagtaaataaatttttaaggcaaaatagagcattcaaa

SEQ ID NO: 47787 - DNA, 375 bp, Homo Sapiens
atggccaccaaggttgacaaagaggcttgcggggaggcctacaacctggcgcgagacgatggcttggccatcatctgggtgacttttaaatatgacggctccatcatcgtccctgttgggcaaggagcagaataccagcacttcatcccccagtgcacagacgagatctggttgcttgccttcgtgtgcgtcaccacgagggatgccaccctcatcaggtggatcggcaagaacgtcaataccttggtgaaggaggtcatacaggatttcgctaaggagtttgtgatcagtgatcagaaggagctggagggagatttaatgaaaagcgaactgaagaagactgggggaatcaattacaacgcccagatggagtaa

SEQ ID NO: 47788 - DNA, 1484 bp, Homo Sapiens
aggaaatttggtaagtggcctccatttaaacgacttactagggaagctatgtgaaattatttaaaagggtaaggggatcaaatagtacttagccttcatgcaaaagttgtacagaagtcatatggaaatgaaaaaaggttttttttgccctcccccttgtgtatatcttatgggcagtggatggaagaaaaaacaaatgaaatgcgatggttgttctgaacaagggtctcaaccaagtgcatttattggcataggaaatagtgaccaagaaatgcagcagctaaacttggaaggaaagaactattgcacagccaaaacattgtacatatctgatttagacaagcaaaagcacttcatgttgtctgtaaaggtgttctatggcaacagtgatgacattggtgtgttcctcagcaagtcgtccaaaccttccaaaaagaagcagtcattgaaaaatgctgacttatgcattgcctcaggaaaaaaggtggctctgtttaatcgactactatcccagacagttagtaccagatacttgcacgtagaaagaggtaattttcatgctagttcacagcaatggggatttacattattcttggatgatgatggatcagaaggagaagaattcacagatggctacattcattatggacaaacagtcaaacttgtgtgctcagttactggcatggcactcccaagattgataattaggaaagttgataagcagaccacattattggatgcagatgatcctgtgtcacaactccataaatgtgcatttgaccttgaggatacagaaagaaagtacttatgcctttctcaagaaagaataattcaatttcaggccactccatgcccaaaagaaccaaataaagagaagataaatgatggtgcttcctgggcaatcattagcacacataaggcgaagcatacattttatgagagagtgggccctgtccttgccctggtcatgcctccgcctgtcgtagagagccttaagttgaatggcggtggggacgaaccaatgcttgaacttacaggacagaatttcactccaaatttacaagtgtggtttggggatgtagaagctgaagctatgtacaggtgtggagagagtatgcgtgttgtcccagacctgcattctgagaaggttggagataggcagcaaccaatacaggtttcagtaactttggtccgaaatgatggaatcatatattccaccagccttacctttacctacacaccagaagcagggccgcggccacattgcagtgtagcaggtgccatccttcaagccagttcaagccacgtgccccctaatgaattaaacacaaacagcgacggaagttacacaaacgccagcacaaattcaaccagtgtcacatcatctacaccaacagtggtatcctaactaccgtctttttgctaagacttaaacggacttgagtgcagcaaaaagttgacaaaaaaggagaaaaaaatgaaca

SEQ ID NO: 47789 - DNA, 696 bp, Homo Sapiens
ccctcgcccttccctgaagtagtggagctgaacgtaggcggccaggtttatgtgaccaagcactcgacgctgctcagcgtcccggacagtactttggccagcatggacagccgggcgcgcttcttcatcgaccgggacggcttccttttcaggtacgtgctggattatctgcgggacaagcaactcgcgctgccggagcacttccccgagaaggagcggctgctgcgcgaggccgagtatttccagctcaccgacttggtcaagctgctgtcgcccaaggtcaccaagcagaactctctcaacgacgagggctgccagagcgacctggaggacaacgacaagcgctcgggcttcctcacgctgggctaccggggctcctacaccaccgtgcgcgacaaccaggccgacgccaaattccggcgtgtggcgcgcatcatggtgtgcgggcgcatcgcgctggccaaggaggtcttcggggacacgctcaacgagagccgcgaccccgaccggcagccggagaagtacacgtcccgcttctacctcaagttcacctacttggagcaggcctttgatcgcctgtccgaggccggcttccacatggtggcgtgtaactcctcgggcaccgccgccttcgtcaaccagtaccgcgacgacaagatctggagcagctacaccgagtacattttcttccgtaag

SEQ ID NO: 47790 - DNA, 450 bp, Homo Sapiens
gacccacagaatctaacagatgtctctatattcctcctcctagaagtctcaggggatccagaactgcagccagtccttgctgggctgttcctgtccatgtgcctggtcacggtgctggggaacctgctcatcatcctggccatcagccctgactcccacctccacacccccatgtacttcttcctctccaacctgtccttgcctgacatcggtttcacctccaccacggtccccaagatgattgtggacatccagtctcacagcagagtcatctcctatgcaggctgcctgactcagatgtctctctttgccatttttggaggcatggaagacatgctcctgagtgtgatggcctatgactggtttgtagccatctgtcacccgctatatcataccatcatgaacccgtgtttctgtgcctttctagttttgttgtctttttttttctca

SEQ ID NO: 47791 - DNA, 1170 bp, Homo Sapiens
gaggtaaatgtatccatagaccacagtgccttgctttttcctctgccagcacatggagcacgggattagatgcacaaacctatttagggaactattttggtagatgtttgagtttatacagaaattgcagctggtattttattttgctgtacatttactcaacttgtccattagtatttaactatttccagagtttgtttaggagtaagaattgacccattcgttagtttaccatattttttcctggtataaaaaggagccagaaataagccttattgctaaataattaattatgtaagcccacctaggtcctgcataagatccccctcacatacttcacaatatatatgtgtgtgtgtgtgtgtgtgtgtgtgtgtgtgtgtgtgtgtgtatttggctaaaaaattatactgccaaaattactgattataaatacttgactacactgattgatgggacaaaatgattaaagtattttcagggatcttattccatatgtcaccaccaaagatttctacagtgttataaagtatataaatattccaaatttctgtggttaaatatttttttcttttttttccttttttagaataacacagtctgtgctttccaaaaatgcttgaacttttatgttgttaagaaatatataatgatatcttacattaagcatgagtctaatttgtattaattgggatggactaaattttcatttgattatcaggaaaattaaggagttatatatttaaaagcaattttctgtgttttcttctttgtaagttgactcatttgtgaagcaattaggcaaattttgagaagatcattgttattgtggtttgcagtatatatttcttagtaaatatcacttaagattaaatttttcagaaagaaaattatagcttttttcccaaaatatttttaagatttaatctttttgtagtatgctacagatttaattatattaactcttttttaagacattgaccatgacttaacattttgccttctaacaccttttaaatctatgtactttaatagttaagagaaaataagtttgcagatttttaataatctgtttgtaaaaggctatctctaagcctagtatgtgggtaattttacaggtgtgttttttgataactttaatataaaataaactcattttatttgtggcaa

SEQ ID NO: 47792 - DNA, 579 bp, Homo Sapiens
gcgggcagtggctgcacacgccaaactttccctatggcttcggtgaccagggccgtgtttggagagctgccctcgggaggagggacagtggagaagttccagctgcagtcagacctcttgagagtggacatcatctcctggggctgcacgatcacagccctagaggtcaaagacaggcaggggagagcctcggacgtggtgcttggcttcgccgagttggaaggatacctccaaaagcagccatactttggagcagttattgggagggtggccaaccgaatcgccaaaggaaccttcaaggtggatgggaaggagtatcacctggccattaacaaggaacccaacagtctgcatggaggagtcagagggtttgataaagtgctctggacccctcgggtgctgtcaaatggcgtccagttctcgcgcatcagtccagatggtgaagaaggctaccccggagagttaaaagtctgggtgacatacaccctggatggcggagagctcatagtcaactacagagcacaagccagtcaggccacaccagtcaacctgaccattcttacttcaacctggcaggcc

SEQ ID NO: 47793 - DNA, 687 bp, Homo Sapiens
tggctcattcctgtaatcctagcagtttgggagaggcaggcaaatcacttgaggtcaggagttcaagaccagcctggtcgacataatgaaaccccatctctactaaaaacacaaaaattagccaggcgtagtggcatggtatcccagctatttgggaggctgaggcaggagaatcccttgaacctggaaggcggaggttgcagtgagctgagatcacgccactgcactccagcctgggcaacacaggagactctgtctcaaaaacaaaaacaaaaaacaataatacagggagaaagactgattcaaaaaaataagaggcaggtgccagaaattgtgaaaagtgatgtgaatgatggaaacttcagaaacaaggaccatccatcacaaggctgccctgacatcttgacctttaacggagtgcttttttgtcgtgacaccactgaatgttcgtgtaaaagccagacgaggctccaaataaggcatgagccaccgcgcccggcccttttttttttttttttgagacagaatcttgctctgttacccatgctggagtgcagtggctcaatctgggcttgcaacctccgcctcccacattcaagtgattctcctgcctcagctgtagctgggactacaggcgtgcaccgccatgctcggctaatttttgtatttttagtagagatggggttt

SEQ ID NO: 47794 - DNA, 1348 bp, Homo Sapiens
caggaagcacctccaggagattccagacctgagtagcaacgttgccaccagcttcacgtggggatgggattccagcaagacttctgaactgctgtcaggcatgggggtctccgccctggagaaagaggagcccgacagtgagaacatcccccaggaactgctctcaaacctgggccacccggagagccccccacggaaacggctgaagagcaaagggagtgacaaagactttgtgattgtccgcaggcctaagctaaatcgagagaactttccaggtgtttcatgggactcccttccggatgagctgctcttgggaatcttttcctgtctgtgcctccctgagctgctaaaggtctctggtgtttgtaagaggtggtatcgcctagcgtctgatgagtctctatggcagaccttagacctcacaggtaaaaatctgcacccggatgtgactggtcggttgctgtctcaaggggtgattgccttccgctgcccacgatcatttatggaccaaccattggctgaacatttcagcccttttcgtgtacagcacatggacctatcgaactcagttatagaagtgtccaccctccacggcatactgtctcagtgttccaagttgcagaatctaagcctggaaggcctgcggctttcggatcccattgtcaatactctcgcaaaaaactcaaatttagtgcgacttaacctttctgggtgttctggattctctgaatttgccctgcagactttgctaagcagctgttccagactggatgagctgaacctctcctggtgttttgatttcactgaaaagcatgtacaggtggctgttgcgcatgtgtcagagaccatcacccagctgaatcttagcggctacagaaagaatctccagaaatcagatctctctactttagttagaagatgccccaatcttgtccatctagacttaagtgatagtgtcatgctaaagaatgactgctttcaggaatttttccagctcaactacctccaacacctatcactcagtcggtgctatgatataatacctgaaactttacttgcagaatggctcacaatttggctaatttggatataccagaaccagaattctcatagtaattacaacgtttcccaagtttcacatgagggattcaaagttggagctggattgctgtcatcattagtgacaagagctggggttaggatccggttggactctgacatcggatgccctcaaacatacagaacttccaaactcaagtccagccataagctattttgccaacatgtcagagtaatctgtatttttgtatgtgatttctacttttatagacttgttttaaaacaataa

SEQ ID NO: 47795 - DNA, 225 bp, Homo Sapiens
atgattaaacattcctggattcatctgtatgtaatggcttctgccatgtcctcttcacctatcttttttttttttcaaagatggagtcttactctctcacttaggctagagtgcagttccgcaatcataaagcccactgcagcttcaaactcctgcgttcaagtgaatctcccacctagtatgtgtgattataggcatgagccactgtgcctggcatttctgtaa

SEQ ID NO: 47796 - DNA, 615 bp, Homo Sapiens
atgggctcagccacagtgctcctggcaggtttacagctggaaaacaacacaaaaaatttttatcttgtgttgaaaataactactaccctgaccgtgaccccagggcttcctctgagtaaggagagacctcctagactccttagcatccagattccctcgcccagagggcagcccaaaagcacagagccccaaggcccagctcctgcccctaagtcctgcccatctcctctctccccacccccacttggttcccacgcattcttcagccatgacatcctcactccaggagctcagcagccagggccatgccctgccctgccttgcacttgctctgccctggttctacactggccctggacccgcaggccagcacagttctgtggcctctgcaccagggtttcactcaaggaggagtgggggcagagagtgtgggtgagccagcgttccctgaggaggtctagagctgactttgagcttacgggttgtgttgggataatattaaagtggctggtgggtgcgtaccgtgttgcatgctctgtgctgggggttcgtgtatatgtcttatttcatgcagtaatcctaggagacagattctgttatgtaggagaacactga

SEQ ID NO: 47797 - DNA, 957 bp, Homo Sapiens
gtggttcccacagacctgtatccccttgtgctcgacttcctgtgtgatagccaatatttcgccaaacccacaggagctacacagcaggatgccaatgcctcttccctcttggatgtctatagcttctgtctcaagtctgctaagtccccaaagcaaaagttccaggcaaatggatcagtgactatgaaagctaagaagaaggcttcatccagtgacagtagtgaggacagcagcaaggaggaggaagaagctcaagggcctccaggtaagaaggctgtggcaagtttgtctcagcctcctggaaaggctatcgccaaagcatcagagagcagcagcagtgaagcatccagtgatgatgaggaggacgacaaaaagaaaaagtctgtccagaagggagttaagccccaagccaagacagccaaagctcctcttaagaaggctaagagctctgattctgattctgattctgactcaagctctgaggatgaggcaccaaagaaacagaaaccaaagacatctgtagcagctaaagctcgggctaaagtcccagccacaccaggtactccagctcaagcagcacctaaagagcctctaatgagaaaggctgacagcaactccagtgagaaagagagcagttccagtgaggaggagaagacaaagatgactgtggccccccctaagcccaaggtaactgacaaagcagctccatatctgcctgccaagcaggctcctgagaggggtaaggacagcagctctcattcagacagctccaacagtgaggaggaggaggaggaagagaagacatctaaatccctagttaagaagaagttgcagaaggcagcaggagggacagccccttccaagccagcctccacaaagaaaggaaaggtcaagagcagcagcaattcttcctctgatgactccagtgaggaagaggaagcgaagcccaagggcaag

SEQ ID NO: 47798 - DNA, 565 bp, Homo Sapiens
cgccatctcaaaaaaaaaaaagaaaaagggttacaaaaggttcccagctccggggcatcagcctgagtgcgcttgagctgctccaaacctggcccttccccactcctctagcatcgccacccgcatggccctggaactcccgcggcggcgggggcgggcccgtgcctgctgtgccccgacttcccacaccagccgcgcccaccgcaggtgggactcaggttcgccctctgggccaggtccttcacgaggagggagctacccttcgccagaagtttgtgagaatgtggccgcccttttcctgccctctgccccatgtgggtggggggcctcgtggcccggccggcgccccgtccccttctgcatgtctgaggccaccggcaaccgccgccccactccagatttgcccccgccttgttttgaaagccccttatttataacttttatactttgtgcaggtcgcggcgcttcctgcctcatcctcggctgcatggggcgggggcgctgtttttaacgtgcccgtttgtactgatgtatgaacttgtcaataaacacaattgtttgttaa

SEQ ID NO: 47799 - DNA, 936 bp, Homo Sapiens
atgaaaggggcaaacctgagccaagggatggagtttgagctcttgggcctcaccactgacccccagctccagaggctgctcttcgtggtgttcctgggcatgtacacagccactctgctggggaacctggtcatgttcctcctgatccatgtgagtgccaccctgcacacacccatgtactccctcctgaagagcctctccttcttggatttctgctactcctccacggttgtgccccagaccctggtgaacttcttggccaagaggaaagtgatctcttattttggctgcatgactcagatgttcttctatgcgggttttgccaccagtgagtgctatctcatcgctgccatggcctatgaccgctatgccgctatttgtaaccccctgctctactcaaccatcatgtctcctgaggtctgtgcctcgctgattgtgggctcctacagtgcaggattcctcaattctcttatccacactggctgtatctttagtctgaaattctgcggtgctcatgtcgtcactcacttcttctgtgatgggccacccatcctgtccttgtcttgtgtagacacctcactgtgtgagatcctgctcttcatttttgctggtttcaaccttttgagctgcaccctcaccatcttgatctcctacttcttaattctcaacaccatcctgaaaatgagctcggcccagggcaggtttaaggcattttccacctgtgcatcccacctcactgccatctgcctcttctttggcacaacactttttatgtacctgcgccccaggtccagctactccttgacccaggaccgcacagttgctgtcatctacacagtggtgatcccagtgctgaaccccctcatgtactctttgagaaacaaggatgtgaagaaagctttaataaaggtttggggtaggaaaacaatggaatga

SEQ ID NO: 47800 - DNA, 921 bp, Homo Sapiens
atgaagctgacgctggggccgcacggcatccgcatgcagccgtgcgagcgcagcgccgccgggggttcggggggccgcaggccggcgcacgcctacctgctgccgcgcatcacctactgcacggcggacgggcgccacccgcgcgtcttcgcctgggtctaccgccaccaggcgcgccacaaggccgtggtgctgcgctgccacgctgtgctgctggcgcgggcgcacaaggcgcgcgccctggcccgcctgctccgccagaccgcgctggcggccttcagcgacttcaagcgcctgcagccagagcgacgcgcgccacgtgcgccagcagcatctccgcgctgggggcgccgccgcctcggtgccccgcgccccactgcgccgcctgctcaatgccaagtgcgcctaccggccgccgccgagcgagcgcagccgcggggcgccgcgcctcagcagcatccgcgagcggccggaggtgctcagcctggcccgggagctgaggacgtgcagcctggccggccccagggagcgggcgggccaggcgcgctgagagccgaaggacaggactcgcagccccaggcccgacccgccagactcacagcctccaaccccggccctgcccgcttcggctgccccggcccccggcccgtgccccgtggtctccgtgttgtccgccccgccgcctcattttggctcagggtgatgcctgatacgcccttggttattggggggtgttcctctctccccacacccggagtttcccgggcctgccattgtggacccgccccctatgctttacacctagtctctttgcccacagacctcctcattccctcccaaaacatcctctcaagagaagaggagaagtttcaagaaatcaggaggggtgggtttggaccctgggcagggtggaggcagtga

SEQ ID NO: 47801 - DNA, 1428 bp, Homo Sapiens
atgtcctggcgtccgcaataccgtagctccaagttccggaatgtctacgggaaggtggccaaccgggagcactgcttcgatgggatccccatcaccaagaatgtgcacgacaaccacttctgtgccgtcaacacccgcttcctggccatcgtcaccgagagcgcagggggcggctccttcctcgtcatccccctggagcagacaggcaggattgaacccaactaccccaaggtctgcggccaccagggcaatgtgctggatatcaaatggaaccccttcatcgacaacatcattgcctcgtgctcggaggacacgtcggtgcggatctgggagatccccgagggcgggctgaagcggaacatgacggaggcgctcctggagctgcacgggcacagccggcgtgtggggctggtcgagtggcaccccaccaccaacaacatcctgttcagcgctggctacgactacaaggtcctcatctggaacctggatgtgggtgagccggtgaagatgattgactgccacacggatgtgatcctctgcatgtccttcaacacggacggcagcctgctcaccaccacgtgcaaggacaagaagctgcgtgtgattgagccccgctctggccgtgttctgcaggaggccaactgcaaaaaccacagagtgaaccgggtggtgttcctggggaacatgaagcggctcctcacgacaggggtctccaggtggaacacaagacagattgccctctgggaccaggaggacctctccatgcccctgatcgaagaggaaattgatgggctctctggcctcctgttccccttctatgatgctgacacccacatgctctacctggctggaaagggtgatggaaacatccggtactacgagatcagcactgagaagccctacctgagttacctcatggagttccgctccccagccccgcagaaaggcctaggggtcatgcccaagcacgggctggatgtgtcagcctgcgaggtgttccgcttctacaagctggtgactctcaagggcctgatcgagcccatctccatgatcgtgccccggagggtaaattcctaccaggaagacatttacccaatgacaccaggcacggagccagcactgaccccggatgaatggctgggaggcatcaaccgagatcccgtgctgatgtctttgaaagaaggctataagaagtcctcaaaaatggtatttaaggctcccatcaaagaaaagaagagtgttgtggtcaacggaatagatttattagaaaatgtcccacccaggacagagaatgagctccttcgaatgttcttccggcagcaggatgagattcgacggttgaaagaggagctggcccagaaggacatccgcattcggcagctccagctggaactgaaaaacttgcgcaacagccccaagaactgttag

SEQ ID NO: 47802 - DNA, 1611 bp, Homo Sapiens
atggcgacaccggacgcggggctccctggggctgagggcgtggagccggcgccctgggcgcagctggaggcccccgcccgcctcctgctgcaggcgctgcaggcggggcctgagggggcgcggcgcggcctgggggtgctccgggcgctgggcagccgcggctgggagcccttcgactggggtcgcttgctcgaggccctgtgccgggaggagccggtcgtgcaggggcctgacggccgtctggagctgaaaccactgttgctgcgattgccccggatatgccagaggaacctgatgtccctgctgatggccgttcggccatcgctgccggaaagtgggctcctctctgtgctgcagattgcccagcaggacctagcccctgacccagatgcctggctccgtgccctgggggaattgctgcgaagggatttgggggtggggacctccatggagggagcttctccactgtctgaaagatgccagagacagctccaaagtctatgtagggggctgggcctggggggcaggaggttgaaatccccccaggctccagaccctgaagaagaggagaacagggactcccagcagcctgggaaacgcagaaaggactcagaggaagaggctgccagtcctgaggggaagagggtccccaaaagattacggtgttgggaagaggaagaagatcatgagaaggagagacccgaacataagtcactggaatccctggcagatggaggaagtgcatctcctattaaggaccagcctgtcatggcagttaagactggcgaggacggttcgaatctggatgatgctaaaggtctggctgagagtttggagttgcccaaagctatccaggaccagcttcccaggctgcagcagctgctgaagaccttggaggaggggttagagggattggaggatgcccccccagttgagctacagcttcttcacgaatgtagtcccagccagatggacttgctgtgtgcccagctgcagctccctcagctctcagacctcggtctcctgcggctctgcacctggctgctggccctttcacctgatctcagcctcagcaatgctactgtgctgaccagaagcctctttcttggacggatcctctccttgacttcctcagcctcccgcctgcttacaactgccctgacctccttctgtgccaaatatacataccctgtctgcagcgccctccttgaccctgtgctccaggccccaggcacaggtcctgctcaaacagagttactgtgttgccttgtgaagatggagtccctggagccagatgcacaggttctaatgctgggacagatcttggagctgccctggaaggaggaaactttcttggtgttgcagtcactcctagagcggcaggtggagatgacccctgagaagttcagtgtcttaatggagaagctctgtaaaaaggggctggcagccaccacctccatggcctatgccaagctcatgctgacagtgatgaccaagtatcaggctaacatcactgagacccagaggctgggcctggctatggccctagaacctaacaccaccttcctgaggaagtccctgaaggccgccttgaaacatttgggcccctga

SEQ ID NO: 47803 - DNA, 528 bp, Homo Sapiens
atgctagtaggcactttggatggcaccatgccagcacgggttgagttgatgggcaatttggatggtgctggattggtgagcgcattagaaggcactgcaccagggggctttgagctagttggcaacttggagggcactgtgctgacagatgctgggttggcaggcactttcagggccactgtgttcacaggcatcaaggtggtaggcactttggagggcagagagttggcaggtgcctctgccccactggagcagatgataggctcggcctggtcactctctgcaccctgtttaccctctgcagcccctgcagaggccaagccaggggatgaggaggagaaggaggtgccagtagatacaactgaccctgtgggtccaggcaagcggcttgccctgggggtggaacgggccaggggctggaaggagacagatggagacacaggcccacgggatggtgtgaggctggaggtcgcacctgccggtggaaaaacacaagtggaaacacagacccaaagaccattaccttga

SEQ ID NO: 47804 - DNA, 1098 bp, Homo Sapiens
atgtttgccaaagacaaaggctcgttggtgccctcggacgggcaggctggggaaaagttagctttatacgtctacgaatatttactgcaggtaggaacacagaaatctgcacagaccttcttatcggagattctctgggaaaaaaacatcacgttgggagaacagcctcggtttttgcactcgtggtggtgtgtattttgggacctttactgtgcagctcctaaaaggagagacacttgtgaacattcaagtgaagcaaaagcctttcctgattctagtgcagcagctgcccggagccccgtgcttggcaacattccccccaacgatgggatgccgggaggccgagtcccgccaggtttctttcagggtcctccgggtcagccttttatgtcaccgcgatatgcaggcggccccaggccccccgatcagaatgggaaaccagcctcctccggaggagttcctgggaaacagccattgctgcccaattccatggatcccacacgacagcaaggccacccccacatgggaggatcaatgcagagaatgaaccctccccaaggcatggggcccatgagtcccagcccacagaattacggcagtggcatgagaccaccacccaattccctcggccccgccacgcccgggattaacatgggcccgggagctggcagaccctggcccaatcctaacagtgctaactcaattccatactcctcctcatcacctggtacctatgtgccccctggtggtggcggccctccaggaacacccactatgcccagtccctcagattcaacaaattccagcgacaacatctacacaatgattaatctggtgccacctggaggcagccggtccaacttcctgatgggtcccagcttggacggtccaatgggcagcatgggtggcatggagccacaccacatgaacggattgttagggtcaggcgacataaatcttccaaaaaattctcctaacaacgtgaatagtattagcaatcttccaggcacccctcgagatgacggcgagctaggagggaacttcctccactcctttcagaatgacaattactctccaagcacgacgatgagtgtgtga

SEQ ID NO: 47805 - DNA, 1820 bp, Homo Sapiens
gccgtcccgcgccagggctcgctccgagagccgcttccttctcgccgcggccggcgcgggccccccggccatgcgcccccgagccccagcctgcgccgccgcggcgctcgggctctgcagccttctgctgctgctcgcgcccgggcacgcgtgccccgcgggctgcgcctgcaccgacccgcacaccgtggactgccgcgagggctgcccagcgtgccagaccctttccccctggacgtgcgcaagctgctggtggccggcaaccgcatccagcggatccccgaggacttcttcatcttctacggcgacctggtctacctggacttcaggaacaactcgctgcgctcgctggaggagggcacgttcagcggctcggccaagctcgtgttcctcgacctcagctacaacaacttgacccagctgggcgccggcgccttccgctcggccgggaggctggtgaagcttagcctggctaacaacaacctggtgggcgtgcacgaggacgccttcgagaccctggagtcgctgcaggtgctggagctcaacgacaacaacctgcgcagcctcagcgtggccgccctggccgcgctgcccgcgctgcgctccctgcgtctggacgggaacccctggctgtgcgactgtgacttcgcccacctcttctcctggatccaggagaacgcatccaaactgcccaaaggccttgatgaaatccagtgctccctgcccatggagagcaggaggatatccctgcgtgagctgtcggaggccagcttcagcgagtgtaggttcagcctgtcactcacagacctctgcatcatcattttctccggtgtggccgtgtccattgcggccatcatctccagcttcttcctggccactgtggtgcagtgcctccagaggtgcgcacccaacaaagatgcggaggatgaagacgaggacaaggatgactgagccacctcctccctcctgcctcttactctccagcaccgaaccagaagctctctccaagacgagagggaaatgctgaaaatggaaaagcactggccaccatctgtgaactgaacagagcctgttccgtgtcttggcccctgggtacacctgctgggaccactgatctcagagtttagaatcagcagagcacagaagcccaggaaggatggagggaattattcctggagcataacctgcctctcagatcgaggtgtgtgttgggggagaagatgaccgagtcaggcttcatagctgatgactaaaagcctcccccaggaaatgtgaagactggcagctttcaatggcaaagatgattttacgccattctttttctgacctgtactgggagatcatgaaacatctgccttcctcccaagaaacagcagctcaaacagtggagattcaaattcggatcattcaccacaagaacgagaactttgatccttatataataggcctcagcaaccttgggatgttatactgggaactaataaactcgtgtgcaatagactcaatgtttatgttcccccagattttatatgttgaaacctaatccccaatgtgatggtatttggaggtggggcttttgggaggtgattaggtttagatcatatcatgaggatggggcccaaatgatgggattagtgccctcatgaaaggtggccccagagagctccttcaccccttcaatgcttgaggatgcagcaagaaatcagctgcccatgaaccgagaagcaggccctcaccagaacccagccatgctggcacccagatctcagacttccagcctccagaactgggagaaataaataaatgtctgttgtttgtaa

SEQ ID NO: 47806 - DNA, 888 bp, Homo Sapiens
ggctggtcccaaccttgcgtgggcttcgcgtgggcccggcctcgccgctgcggtcgcccgcctggcatggccaactgggtgttctgtaatcgctgcttccagccgccccacaggacgtcgtgcttcagcctcaccaactgcgggcacgtgtactgcgacgcctgcctcggcaaaggtaaaaagaatgaatgcttgatttgtaaagctccttgtcgtacagttttgctttcaaagcataccgacgcagatatccaggcattcttcatgagcatagacagtctgtgtaagaagtactccagggaaacctcccagtatctcaggctttcccgaggctgttgccgtctcaagttatgcccagccacatcctccaaggaggtgcccagaggctcgacccatggaagccaagcagcagccagagatccccaagaacactgggtcagcacaacacgggcacccagaccaggatgccggcggtcccagagccagccagaggcccagggaaacaccatccaggacgcacctcaccccctcaccctgctccatcccagcaggaccctcattcacaccaagtccccttggggccagaagttgcttgagttcataaaacatgtctgttatcacagacatcagagccacaggccgtgcgctccagggtggttttgccaagtgctgcagaggccaggtgctgtctcaggagagaagacccagcagacccggccagcccctccagccacctgtctgctctgcctctcgtgcctctcaggcttccggcatgggccgtggaggtcacaggctctgcccagtgacctcgtggccccactgtttgtcagttacactgtggaggtgagcatcacaaacgcagggtggagttttcccgcagctgtgtga

SEQ ID NO: 47807 - DNA, 564 bp, Homo Sapiens
tgctgtcaccccagctgttgtcagaccacctgctgcagaaccacctcctgctcccacagctgctctgtgtccagctgctgcagaccccagtgctgccattccgtgtgctgccagcccacctgctgccgccccagctgctgtcagaccacctgctgcaggacgacctgctgccaccccagctgctgtgtgtccagctgctgcagaccccagtgctgccattccgtctgctgcaagccccagtgctgccagtctgtgtgctgccagcccacctgctgccaccctagctgctgcatctccagctgctgccgccccagctgctgtgtgtccagctgctgcaagccccagtgctgccagtctgtgtgctgccagcccaactgctgccgccccagctgcagcatctccagctgctgccgcccctcttgctgtgaatccagctgctgccgcccctgctgctgcctgcgtccagtctgtggccgagtctcctgccacaccacttgctatcgcccagcctgtgtcatctccacctgcccccgccccgtgtgctgcgcctcctcttgctgctga

SEQ ID NO: 47808 - DNA, 765 bp, Homo Sapiens
tctgccttttcagccagagataaatcggagcgagcatttggggtggccttcgtgaagctgatgaacccggatggcaccactctgcaggatgggaggcacgatctggtggtttataagggtgacaacaaaaaaatggaagatgctaaattctacctgaccctgcctggaaccaagatggagatggaagaaaaagagcttcaagcatccaaaaacctggtcaccttcaccccaagcaaggatagcactaaagacagctttcagattgccaccctcatctgctccacaaagctcacccagaatgttgacctgttaggcttgttaaattggcgttccaactcccagaacattaaacacaacctaaagaagttaatggaagtggatggaggagagattgttaaggtatgtttatatattcatactttgaagtaccttcctagcataattaatgatgtcaaacttgtatttgatcctgttgagctcaggaaggagacaggcagttcaggaggtggcactgctgtgtgtgagctgtctgtgttttccttctcagagtgcagagaagtgctgctgccactgctgacagaccagctcagcggccagttagatgacaactccaacaagcctgaccacgaggcaagctcgcagcttctgagcaacatcctggaggtgctggacaggaaggatgtgggtgccactgcggtgcacattcagcttataatggaacggctgctgagaaggatcaaccggacagtgattgggatgaaccgg

SEQ ID NO: 47809 - DNA, 1123 bp, Homo Sapiens
cccttccctgcccgacacccagaccgaccttgaccgcccacctggcaggagcaggacaggacggccggacgcggccatggccgagctcccggggccctttctctgcggggccctgctaggcttcctgtgcctgagtgggctggccgtggaggtgaaggtacccacagagccgctgagcacgcccctggggaagacagccgagctgacctgcacctacagcacgtcggtgggagacagcttcgccctggagtggagctttgtgcagcctgggaaacccatctctgagtcccatccaatcctgtacttcaccaatggccatctgtatccaactggttctaagtcaaagcgggtcagcctgcttcagaacccccccacagtgggggtggccacactgaaactgactgacgtccacccctcagatactggaacctacctctgccaagtcaacaacccaccagatttctacaccaatgggttggggctaatcaaccttactgtgctggttccccccagtaatcccttatgcagtcagagtggacaaacctctgtgggaggctctactgcactgagatgcagctcttccgagggggctcctaagccagtgtacaactgggtgcgtcttggaacttttcctacaccttctcctggcagcatggttcaagatgaggtgtctggccagctcattctcaccaacctctccctgacctcctcgggcacctaccgctgtgtggccaccaaccagatgggcagtgcatcctgtgagctgaccctctctgtgaccgaaccctcccaaggccgagtggccggagctctgattggggtgctcctgggcgtgctgttgctgtcagttgctgcgttctgcctggtcaggttccagaaagagagggggaagaagcccaaggagacatatgggggtagtgaccttcgggaggatgccatcgctcctgggatctctgagcacacttgtatgagggctgattctagcaaggggttcctggaaagaccctcgtctgccagcaccgtgacgaccaccaagtccaagctccctatggtcgtgtgacttctcccgatccctgagggcggtgagggggaatatcaataattaaagtctgtgggtaccata

SEQ ID NO: 47810 - DNA, 699 bp, Homo Sapiens
gggcttgggcgcccccggaggctggggctgcctgcagtgcgaccccttggtgctggaggccctgggtcacctgcgctccgccctcatccccagtcgcttccagttggagcagctgcaggcgcgcgccggggccgtgctgatgggcatggaggggcctttcttccgggactacgcgctgaacgtgtttgtggggaaagtggagacaaatcaactggaccttgtggcgtcctttgtcaagaaccaaacgcagcacttaatgggtaactctctgaaagatgagcctctgctggaagagctggtgaccctcagggcgaatgtgatcaaggaattcaagaaagttttaatttcatatgaattaaaagcctgcaaccccaaactttgccgcttgctaaaagaagaggtgttggactgtttacattgccagaggatcactcccaagtgtatccacaaaaagtactgctttgtcgaccggcaaccccgcgtggccctgcagtaccagatggacagcaaatacccgaggaaccaggcgctgttgggcatcctcatttctgtgtctctggctgtctttgtcttcgtggtcatcgtggtctcggcttgtacatacagacaaaaccgaaaactcctgctgcagtaggacggtggtttgggggtaaggagaaaggaaaataaatttaataaaattggtgacaaatccatcaa

SEQ ID NO: 47811 - DNA, 1228 bp, Homo Sapiens
gcgcgcggccggacaactcatggcggcggcggcggcggcggcagctgcttgggcgcggtgcggtggtgactgagctacgagcctggcggcgggtgtgcgccgagccccggcccggcccggccctcgcgtgcctcccaggctccgcacccctgatgctgcgcgggtgctgagcccgcttcggccgggacgatggtgaagtatttcctgggccagagcgtgctccggagttcctgggaccaagtgttcgccgccttctggcagcggtacccgaatccctatagcaaacatgtcttgacggaagacatagtacaccgggaggtgacccctgaccagaaactgctgtcccggcgactcctgaccaagaccaacaggatgccacgctgggccgagcgactatttcctgccaatgttgctcactcggtgtacgtcctggaggactctattgtggacccacagaatcagaccatgactaccttcacctggaacatcaaccacgcccggctgatggtggtggaggaacgatgtgtttactgtgtgaactctgacaacagtggctggactgaaatccgccgggaagcctgggtctcctctagcttatttggtgtctccagagctgtccaggaatttggtcttgcccggttcaaaagcaacgtgaccaagactatgaagggttttgaatatatcttggctaagctgcaaggcgaggccccttccaaaacacttgttgagacagccaaggaagccaaggagaaggcaaaggagacggcactggcagctacagagaaggccaaggacctcgccagcaaggcggccaccaagaagcagcagcagcagcaacagtttgtgtagccagtctaccaccaccacagcaccccagacagctaggcttagcccctctgccctcccttcattgtactttatcattaaaaatcaacttccagccctgtctgctgtctacgtggtgggttgtggggatgcagtttggcatctgcagtacaccaagcacatgattcatgtctgagccaggtctgcttattctcccattgggcagctgaggaccgaggcacagaggtgcggtgacttgcccggggctccaggtagcctgcaggttaactggcggtaagtgctagactgtaagcccgacaagggcagggcttttggttttgttctctgatgtgtctcagtatctagcacataatagacactcaataaatacttgttgaattca

SEQ ID NO: 47812 - DNA, 567 bp, Homo Sapiens
gaactgaagatcaagcacctgagaaagaagtttgtccagaagatgtttcgaaaggcaaggaggaagcttatctatgaaaaagcgaagcactttcacgaggaatataggcagatgtacagatctgaaattcgaatggcgaggatggcaagaaaagctggcaacttctatgtatcttcagaacccaaattggcgtttgtcatcaggaccagaggtgtcaatggtgtgagcccaaatgtccgaaaggtgttgcagcttctacgcctttatcaaatcttcaatggaatctttgtgaaactcagaaaggcttcaattaacatgctgaggattgtagacccatacattgcatgggggtactcaaatctgaagtcagtaaatgaactaatctgcaagcatggttatggcaaaatcaataagaagcgaaatgctttgacagataacgctttgattgctcgatctcttgataaatatgaccatctgcatggagatctgattcatgagatctatactgttggaaaacacttcaaagaaaataacttcctgcggccattcaaattatcttctccatga

SEQ ID NO: 47813 - DNA, 1350 bp, Homo Sapiens
catggaggaggaaggagatggcatggcttaccataaagaagcactggacgccgggtgcacgttccaggatccaggtgcccaggggtcatgaagctgggactcctctgtgctctgctctctctgctggcagggcatggctgggcagacacccgtgccatcggggccgaggaatgtcgccccaactcccagccttggcaggccggcctcttccaccttactcggctcttctgtggggcgaccctcatcagtgaccgctggctgctcacagctgcccactgccgcaagccgtatctgtgggtccgccttggagagcaccacctctggaaatgggagggtccggagcagctgttccgggttacggacttcttcccccaccctggcttcaacaaggacctcagcgccaatgaccacaatgatgacatcatgctgatccgcctgcccaggcaggcacgtctgagtcctgctcgctgtttccagtcacactgcagtgtgccaacatcagcatcctggagaacaaactctgtcactgggcataccctggacacatctcggacagcatgctctgtgcgggcctgtgggaggggggccgaggttcctgccagggtgactctgggggccccctggtttgcaatggaaccttggcaggcgtggtgtctgggggtgctgagccctgctccagaccccggcgccccgcagtctacaccagcgtatgccactaccttgactggatccaagaaatcatggagaactgagcccgcgcgccacgggggcaccttggaagaccaagagaggccgaagggcacggggtagggggttctcgtagggtcccagcctcaatggttcccgccctggacctccagctgccctgactcccctctggacactaagactccgcccctgaggctccgccccctcacgaggtcaagcaagacacagtcgcgccccctcggaacggagcagggacacgcccttcagagcccgtctctatgacgtcaccgacagccatcacctccttcttggaacagcacagcctgtggctccgccccaaggaaccacttacacaaaatagctccgcccctcggaactttgcccagtgggacttcccctcgggactccaccccttgtggccccgcctccttcaccagagatctcgcccctcgtgatgtcaggggcgcagtagctccgcccacgtggagctcgggcggtgtagagctcagccccttgtggccccgtcctgggcgtgtgctgggtttgaatcctggcggagacctggggggaaattgagggagggtctggatacctttagagccaatgcaacggatgatttttcagtaaacgcgggaaacctca

SEQ ID NO: 47814 - DNA, 237 bp, Homo Sapiens
atgggcagcgtcagtagcctcatctccggccacagcttccacagcaagcactgccgggcttcgcagtacaagctgcgcaagtcctcccacctcaagaagctcaaccggtattccgacgggctgctgaggtttggcttctcccaggactccggtcacggcaacggcaaggccatgaccagatgtcctcgggcttccagcatgagcggctcgtgtggaaggaggagaaggagaaggtga

SEQ ID NO: 47815 - DNA, 522 bp, Homo Sapiens
atgtatctggtcacggtgctgaggaacctgctcagcatcctggctgtcagctctgactcccaactccacacccccatgtacttcttcctctccaacctgtgctgggctgacatcggtttcacctcgcccatggttcccaagatgatcatggacatgcagtcgcatagcagagtcatctctcatgcgggctgcctgacacggatgtctttcttggtcctttttgcatgtatagaagacatgctcctgactgtgatggcctatgactgctttgtagccatctgtcgccctctgcactacccagtcatcatgaatcctcacctctgtgtcttcttcgttttggtgtcctttttccttagcctgttggattcccagctgcacagcattggcatgtacctgacttcagctgtgtcaccaccccccaggaatggtgtggcggcgtcagtgatgtacgctgtggtcacccccatgctgaaccttttcatctacagcctgagaaacagggacattcaaagtgccctgcag

SEQ ID NO: 47816 - DNA, 261 bp, Homo Sapiens
atgaagaccattctcagcaatcagactgtcaacattccagaaaatgtcaatattactctaaagggatgcacagttattgtgaagggccccagaggaaccctgcggagggacttcaatcacatcaacgtagaactcagtcttctcggaaagaaaaaaaagaggccccgggttgacaaatggtggggtaacagaaaggagctggccaccgttcagactatttgtagttatgcacagaacatgatcaagggtgtcacactgggc

SEQ ID NO: 47817 - DNA, 372 bp, Homo Sapiens
atacttaatattataatggttttgttatttcagaaagatccagattacctgaagctgtggttggacacttttgtttctagctatgaacaatttttagacgttgactttgaaaagctgcctaccagggtagatgatatgcctccaggaatatctctgcttcctgataatattctgcaggttctgaggatccagcttctacagtgtgttcagaaaatggcagatgggttagaggaacaacagcaagccttgtcaattttgcttgtcaagttcttcattattctttgcagaaatctatcaaatgtggaagaaattgggacttgctcgtacattaattatgtcatcaccatgacaacactctatattcagcaagta

SEQ ID NO: 47818 - DNA, 1170 bp, Homo Sapiens
agatacttccgggtcatcctcctcctcctcctggccctgactctgctcctgctggccggattcctgcactcggacttagagctggacacacccctgtttgggggccaggctgaggggccgccggtcaccaacatcatgttcctgaagacgcacaagacggccagcagcacggtgctcaacatcctctaccgcttcgccgagacccacaacctgtccgtggcgctgcccgccggctcacgcgtccacctgggctacccctggctcttcctggcgcgctacgtggaaggcgtggggtcgcagcagcgcttcaacatcatgtgcaaccacctgaggttcaacctgcctcaggtgcagaaagtcatgcccaacgacaccttctacttctccatcctgaggaaccccgtgttccagctggagtcctccttcatctactacaaaacctacgcccccgccttccggggcgccccgagcctggacgcgttcctggcctcgccgcggacgttctacaacgacagccgccacctcaggaacgtctacgccaagaacaacatgtggttcgacttcggcttcgaccccaacgcgcagtgcgaggagggctacgtgcgcgcgcgcatcgccgaggtggagcggcgcttccggctggtgctcatcgccgagcacctggacgagtccctggtgctgctgcggcgccggctgcgctgggcgctggacgacgtggtggccttcaggctcaactcccgcagcgcgcgctccgtggcccgcctgtcgcccgagacccgggagcgcgcgcggagctggtgcgcgctggactggcgcctgtacgagcatttcaaccgcaccctctgggcgcagctgcgcgccgagctggggccgcggcggctgcgcggggaggtggagcggctgcgcgcccggaggcgcgaactcgcgagcctgtgcctgcaggacggcggcgcgctcaagaaccacacgcagatcagagacccgcgcctgcgcccctaccagtccggcaaggccgacatcctgggttacaacctccggccgggcctggacaaccagacgctgggcgtgtgccagaggcttgtgatgcctgagctccagtacatggcccgcctgtacgccctgcagttcccggagaagcccctcaagaacatcccgttcctgggggcgtag

SEQ ID NO: 47819 - DNA, 762 bp, Homo Sapiens
atggaagattcgatggacatggacacgagcaccctgaggccccagaattaccttttcagttgtgaactaaaggccaacaaagatgatcaccttaaggtagataatgatgaaaatgagctcaagttatctttaaaaacagtcagtttagtggttggtgcaaaggatgaattgcacactgttgaagcagaggcaatgaattacaaaggcagtccaattaaagtaacactggtaactttgaaaatgtctgtacagatggtttcccttgggggctttgaaataacaccaccagtcgtcttatggttgaagtgtggctcaggaccagtacatattagtggacagcacttagtagctgtggaggaagaggcagagtcaggagatgaagaggaggaggatgtgaaactcttaagtatatctggaaagcaatctgccccagggggtggtagcaagtttccatggaaacaagtaaaacttgctgatactctagccaaaagtgcacaaaagtcaaatcagaatggaaaagactcaaaaccatcaacaccaagatcaaaaggacaagaatctttcaaacaggaaaaaactcctaaaacaccacaaagacctagttctgtagaagacattaaagtaaaaatgcaagcaagtatagaaaaaggtggttctcttcccaaagtggaatccaagttcatcaattacgtgaataatggcttctggataactgaccaggaggctattcaagatctctggcagtggaggaagtctctttaa

SEQ ID NO: 47820 - DNA, 1991 bp, Homo Sapiens
tggccggaagacgggggtgcaaccctttgaagtgtcccctcctacttcttgctgcctcacggttgctgttgcagacccaggagtctctgaaggcttccgcggctttggggccggttgtgagatgccaggcagaggccgctgcccggactgcggctccacggagctggtggaagactcgcactattcgcagagccagctggtgtgctccgactgcggctgcgtggtcaccgagggggtccttaccactaccttcagcgacgagggcaatctccgagaggtaacatattcccgaagcacaggggaaaacgaacaagttagtcgcagccagcaacgaggtctccggcgagtgagagacctttgtcgagttctgcagttgccaccaacatttgaggataccgcggttgcctactaccaacaggcatatcggcactctggcatccgagcggccaggctgcaaaagaaggaggtgttggttgggtgctgcgtcttaatcacctgccgacagcataactggcccctaacaatgggggccatctgcacgctgttgtatgcagatttggatgtgttttctagcacttacatgcagatagtgaagctcctgggactggatgtgccatctctgtgcttggcagaactggtgaagacctattgcagcagcttcaaactgttccaagcttcaccttctgtgccagccaaatacgtggaagacaaagagaagatgctgtctcgaacaatgcagttggtggagctggcaaatgagacgtggctggtgaccgggaggcatcccttgcccgtcatcactgctgcgactttcctggcttggcagtcgctgcagcctgcagatcggctttcatgttcccttgcccgattttgtaaattggcaaatgtggacctgccctacccggcgtcctcccgcctgcaggagctgctggctgtgctgctgcggatggctgagcagctggcctggttacgagttctgagacttgacaaacggtctgtggtgaagcacatcggtgaccttctccagcaccgccagtcactggtccgctctgcctttcgggatgggacagcagaagtggagacccgagagaaggagccaccggggtggggacaggggcaaggagaaggggaggtgggaaataattccttaggtttaccccaggggaagcggccggccagtcctgcccttctcttgccaccctgcatgttgaagtccccgaagcggatctgccctgtaccccctgtctccactgtcactggagatgagaacatttctgatagtgaaatagaacagtatttgcgtacccctcaggaagttagggactttcagagagcccaggctgctagacaggctgccacgagtgtccctaaccctccctgatggatatccactgggagcacttcatcctgttctgacagcttgataacattcctgttataaccaaggatggaagtgtacaccagtccgtaggtattgcttttcttgtttgaaggaaccaagaggggctctgccattagttggaccctgggtcctggagtaaagtcaggagtgcagggatgactataggtaggagagattcccatcccttggtgtgggagagcaagttgcctatgtccatgttctgtgagatggctttcctcatagatggatgggaaaatgtcaggctctttgctgctggtttgaattggacacactgctgcggctcctcctgcaggcctgagggggcttccctctgcttgtggagtggttggcattcccagcagtatcaaccctcagaggagcgggaactggggaattctggccctacgtgcattcacaggcaatgatgggtttgtgtgtatggtgtcatgagatcctctacctcataacaaaaggacagtgggtagactaaggcagtagctcaaagggctttgcaaaattttaatatattaaaacaagaggcatctgctagaaaacattctattgtataaaacccgagttcttaaaaaca

SEQ ID NO: 47821 - DNA, 468 bp, Homo Sapiens
atgtccggtcgcgggaaacagggcggcaaagtgcgagcaaaggccaaatcccgctcctcccgcgcgggcctgcagttcccggtgggccgagtgcacagactgctgcgcaaagggaactacgcggagcgagtgggcgccggggcgccggtgtacctggcggcggtgttggagtaccttacggcggagatcctggagctggctggcaacgccgcgcgtgacaacaagaagaccaggataattccccgccacctgcagctcgccatccgcaacgacgaggagttaaacaagctgctgggcaaagtgaccatcgctcagggcggcgtcctgcccaacatccaggccgtgctgctgcccaagaagacggagatttgtgagcactcaggaccaagttctgggaagataccgtcggatcgagctgagctcggggcaggaagtgtctgcggccatatttttcaaaaagtggagtaa

SEQ ID NO: 47822 - DNA, 1663 bp, Homo Sapiens
tttctgctgagaggcgggaggcgctgagagtctgtgcggaggtccgtggacagactgctttgctcgttgttgctcttcggaggcggcgatccccgaaggcgagctgaaatacggctgcaggctacaatttgcagccgacgattatggaagacggcaagcgggagaggtggcccaccctcatggagcgcttgtgctcggatggcttcgcatttccccaataccccattaaaccgtatcatctgaagaggatccacagagctgtcttacatggtaatctagagaaactgaagtaccttctgctcacgtattatgacgccaataagagagacaggaaggaaaggaccgccctacatttggcctgtgccactggccaaccggaaatggtacatctcctggtgtccagaagatgtgagcttaacctctgcgaccgtgaagacaggacacctctgatcaaggctgtacaactgaggcaggaggcttgtgcaactcttctgctgcaaaatggcgccaatccaaatattacggatttctttggaaggactgctctgcactacgctgtgtataatgaagatacatccatgatagaaaaacttctttcacatggtacaaatattgaagaatgcagcaagtgtgaatatcagccactgttatttgctgtgagtcgaagaaaagtgaaaatggtggaatttttattaaagaaaaaagcaaatgtaaatgccattgattatcttggcagatcagccctcatacatgctgttactcttggagaaaaagatatagtcattcttcttctgcagcacaatattgatgtgctttctcgagatgcgtttcgaaagattgcaggagattatgccattgaggctaagaatagagtagtgtcttctcagaaacaaccagctgagaaggctacaagtgacgacaaagattctgtttcaaatatagccacagaaataaaggagggaccaatatctgggacagtgtcttctcagaaacaaccagctgagaaggctacaagtgacgagaaagattctgtttcaaatatagccacagaaataaagaagggacaacaatctgggacagtgtctcctcagaaacaatcggcctggaaggttatatttaaaaagaaagtttctcttttgaatattgccacaagaataatgggtggtgggaaatctggaacagtgtcttctcagaaacaaccagcctcaaaggctacaagtgacaagacagattctgctttgaatatagctacagaaataaaggatggactacagtgtgggacagtgtcttctcagaaacaaccagccttgaaggctacaactgacgaggaagattctgtttcgaatatagccacagaaataaaggatggagaaaaatctgggacagtgtcttctcagaaacaaccagccttgaaggccacaagtgatgagaaggattctttttcgaatataaccagagaaaaaaaggatggagaaatatctaggaaagtgtcttctcagaaaccaccagccttgaagggtacaagtgacgaggaagattctgttttgggtatagccagagaaaacaaggatggagaaaaatctaggacagtgtcttctgagaaaccaccaggcttgaaggctacaagtgatgagaaagattctgttttgaatatagccagagg

SEQ ID NO: 47823 - DNA, 483 bp, Homo Sapiens
gtgacgaacacaaagagaaagaggaggggcacccgatatatgttctttaggccttttagaaaacatggagttgttcctttggccacatatatgcgaatctataagaaaggtgatattgtagacatcaagggaatgggtactgttcaaaaaggaatgccccacaagtgttaccatggcaaaactggaagagtctacaatgttacccagcatgctgttggcattgttgtaaacacacaagttaagggcaagattcttgccaagagaattaatgtgtttattgagcacattaagcactctaagagccgagacagcttcctgaaacgcatgaaggaaaatgatcagaaaaagaaagaagccaaagagaaaggtacctgggttcaactaaagcgccagcctgctccacccagagaagcacactttgtgagaaccaatgggaaggagcctgagctgctggaacctattccctatgaattcatggcataa

SEQ ID NO: 47824 - DNA, 1707 bp, Homo Sapiens
cctgcaattggtattgatcttggcaccacctactattatatgggtgttttccagcaaggaaaagtagagataattgccaatgatcagggaaaccgaaccatgccaaactatgtcacctttacggataccaaacaattgattagtgatactccaaataatcaagttccaatgaaccgtgccagcatggcttttgatgccaaatgtctgactggatgcagatttgatgatgccattgtccagtttgatatgacatattggcctttcacggtggtaaatgatgctggcaggcccaaggtccaagtagagtatgagagagacaaaaagctgctacccataggatcttctatggttctgacaaagatgaaggaaattgcaaaagtctaccttgggaagactgttaccaatgctgtggtcacagtgccagcttacttgaatgactctcagcatcagatcaaagatgctggaactattgctggtctcaatgtacttggaattatcaatgtgccaattgtcgctgctattgcttacagtttagacaaaaaaaaaaaaaaaaaaaggttggaggaaagaaatgtgctaatctttgacctgggaggtggtgtttttgatctcactatggaggatggaatctctgaggtgaaatctacagccagagacacctacttaggtggagaggactttcacaacgaaatgtcaaccattttactggtgagttatagtgcacacatggaaggacaccgtgagaacaagagagctgtctggcacctctatactgcttgtgaacttgctaaacatactcttagcactgaaaccagtactgaggtcaattctcttcatgaaggaatccacttctatatctccattaattgtgcccaatttggagaattgaatgctgagcctgttctgtggcattctggaccccatagagaaatccatgatgtcaaactagacaaaccacagattcctgatattgtcctggttggtggtcctaattgtatccccaagattagtagcttctccaaggcatcttcaatggaaaataatgagagcatcaaccctcatgaagctgttgcttatgatgcagctgtccaggcagccgtcctatctgagacatctcaaaatgttcaagattttctgtttttggatgtcactcctctttcccttgatattaaaactgctgatggagtcatggctgtcctcatcaagtgtgatgctaccattcctaccaggcagacacagaccttcactacctactctgacaagcctagcgtcattgccaaggataaaaacctacttcgcaagtttgagctcacaggcgtacctcctgcacaccatggtgctcatcagattgaagtcacctttgatattaatgccaagggcatcctcaatgtcactctcactgatgacaagggccatttgagcaaggaagacattgagcctatggtccaggaaactgagaagtacaaagctgaagatgagaagcagagggacaaggtgtcatccaagaattcacttgatccctatgtgttcaacatgaaagcaactgctgaagatgagaaacttcaagtcaagattaacaatgagcacaaacagaagattcttagcaagtgccatgaaattatcaactggctcgacaagaatcagactgcagagaaggaagaatttgaacatgcacagcaagagctggagaagtcttcaagtccatga

SEQ ID NO: 47825 - DNA, 1158 bp, Homo Sapiens
tgacaatgggtcacctctgttgaaagtgaaacagaacacagcagtactgatttttaatgactttccagaccctagttctagttccccatgattcctggtaacccaagtcctggagctgatctggcagtttcaaaacatttcttttccttaagctggttttgtgggcttttgttgcttgaatccaaacaaaaataaaactgtaccagtaaaatgaagcaaacaaaatttgccaaaaaggagccccagttctgccccagttttgccaaaaaggagctgtgaggccgtagataagttccttctctctaagctacaattctatcccttacaaaatgatgcagttgaactggatatctcaggggccttcaccctctactatgctggcttagacactggctcctctggataacctcttggcgctacagattccttatgaaggttctcctaagttactttagttctacccattgactccaggcagttaaagtaacaaaaacagaaaataaaaagcacccaattctttctaagctcttgggagctgaaaaaaataaaaatagaaagcactcaagtctccatgtctctctttccctgtcagtaaaaagtgcagttttattagagggatgctttaaataataaggcttatctgacactccaattctttttcatgttaaaattaaaccttagcatattataattatactcacttcaattaaggctgctatctatattcctaaaatgcatacagtaataggatacaattatgcttgccaaaaaattctattttttgcagtttgtttcttcagaataatgtaactcatccaaataatcaacatcaaataaaatggcaaagtattttaaagattctacacaagggaaaaaccctaaaatcgtaaaataaattgtaagaatatcctctattgagcccataaaccctgcattatttaatttcttagttgacaaagaataaaaactagtattgttttggcccttaaattcccacccaaatcgattgttctgtgatgctgaaacaaaatagttaccaaatgctttgatagacaactcattacaatgagaactgaaggctcccaaaataagacaaagattttcctgtatctcccagatgccagggaaagtaaaggaaatatttcagctttccatccc

SEQ ID NO: 47826 - DNA, 568 bp, Homo Sapiens
gcctgcgcggtagtgggacccgaccctgtctccagtgggcgtcttgggccccggctctattctgggctgcgggcctgggaagggctcgccgggtgccaaatgagctgtcctaactctgcggggctgcagcttcctgcatgatgctggggagcttggcgcctgacccaggatctagaaggcactctgggcaggccgcgctccgcccacgaaggtctggcttaccacacgctcctccccattcccagtgagccgctttttgcagcaccaggcgaacacttacaccagtgctttgtaaaggaatcttattgtccaccccgtgtcttggcaaaagaacagtgatcacacagattcctacttgggctctttcctttaatcttcggaggctgagtttgcccaactcaggtttaaccaccaaggactctgagagctggcaggtctgagtaaccctggtaacaattctcttcaccttatcaaaacctgagctaaaaccaatgcatcagctgatgatgacagcagagagtggcagggctgaggacccaaagtcatttcccaggctggcggagagtga

SEQ ID NO: 47827 - DNA, 420 bp, Homo Sapiens
atgtttcagatcatcacaccaagtctccagataggagggcaaagccaccctgatgctctgagtggtgtttcagatcatcacacgaagtctccagatgagggcaaagcctgtcaccctgatactctgagtggtcagagaccccagtccttcctggaccatccacagcatggctccttgactcctaggtcagagcaggctcctgcctcttcctggcccctcctgtcctggtgcaggaggagctgggacccactggcctcaagaaggcagggggttggcaggaggcacagagccccgggatctcaggcctgtcaggagggtcttcccctgcaaccatcaatcctgatccagaaccgtgggggcagtgccaggcctgcgctctctccttgggagcctctggctgcagttccctcccaggaaggg

SEQ ID NO: 47828 - DNA, 2744 bp, Homo Sapiens
agcaagcaggaagaggaggctttctaaggcggtcgctccgggaaatccgggccctaggattgtccactcatcccagtatcagcgagatacggggagatagagttagcgacaacgtgagccagagctggagcacgtttggtgagagaccagaaagcaatggaggccggagaggggaaggagcgcgttccgaaacaaaggcaagtcctgatattctttgttttgctgggcatagctcaggctagttgccagcctaggcactattcagtggccgaggaaacggagagtggctcctttgtggccaatttgttaaaagacctggggctggagataggagaacttgctgtgaggggggccagggtcgtttccaaaggaaaaaaaatgcatttgcagttcgataggcagaccggggatttgttgttaaatgagaaattggaccgggaggagctgtgcggccccacagagccctgtgtcctacctttccaggtgttactagaaaatcccttgcagttttttcaggcggagctacggattagggacgtaaatgatcattccccagttttcctagacaaagaaatacttttgaaaattccagaaagtatcactcctggaactactttcttaatagaacgtgcccaggacttggatgtaggaaccaacagtctccaaaattacacaatcagtcccaatttccactttcatcttaatttacaagacagtctcgatggcataatattaccacagctggtgctgaacagagccctggatcgcgaggagcagcctgagatcaggttaaccctcacagcgctagatggcgggagtccacccaggtccggcacggccctggtacggattgaagttgtggacatcaatgacaacgtcccagagtttgcaaagctgctctatgaggtgcagatcccggaggacagccccgttggatcccaggttgccatcgtctctgccagggatttagacattggaactaatggagaaatatcttatgcattttcccaagcatctgaagacattcgcaaaacgtttcgattaagtgcaaaatcgggagaactgcttttaagacagaaactggatttcgaatccatccagacatacacagtaaatattcaggcgacagatggtgggggcctatctggaacttgtgtggtatttgtccaagtgatggatttgaatgacaatcctccggaactaactatgtcgacacttatcaatcagatcccagaaaacttgcaggacaccctcattgctgtattcagcgtttcagatcctgactccggagacaacggaaggatggtgtgctccatccaagatgatcttccttttttcttgaaaccttctgttgagaacttttacactctggtgataagcacggccctggaccgggagaccagatccgaatacaacatcaccatcaccgtcaccgacttcgggacacccaggctgaaaaccgagcacaacataaccgtgctggtctccgacgtcaatgacaacgcccccgccttcacccaaacctcctacaccctgttcgtccgcgagaacaacagccccgccctgcacatcggcagcgtcagcgccacagacagagactcgggcaccaacgcccaggtcacctactcgctgctgccgccccaggacccgcacctgcccctcgcctccctggtctccatcaacgcggacaacggccacctgttcgctctccagtcgctggactacgaggccctgcaggcgttcgagttccgcgtgggcgccgcagaccgcggctccccggcgttgagcagcgaggcgctggtgcgcgtgctggtgctggacgccaacgacaactcgcccttcgtgctgtacccgctgcagaacggctccgcgccctgcaccgagctggtgccccgggcggccgagccgggctacctggtgaccaaggtggtggcggtggacggcgactcgggccagaacgcctggctgtcgtaccagctgctcaaggccacggagcccgggctgttcggcgtgtgggcgcacaatggcgaggtgcgcaccgccaggctgctgagggagcgcgacgctgccaagcagaggctggtggtgctggtcaaggacaatggcgagcctccgcgctcggccaccgccacgctgcacgtgctcctggtggacggcttctcccagccctacctgctgctcccggaggcggcaccggcccaggcccaggccgacttgctcaccgtctacctggtggtggcgttggcctcggtgtcttcgctcttcctcttctcggtgctcctgttcgtggcggtgcggctgtgcaggaggagcagggcggcctcggtgggtcgctgctcggtgcccgagggcccctttccagggcagatggtggacgtgagcggcaccgggaccctgtcccagagctaccagtacgaggtgtgtctgactggaggctccgggacaaatgagttcaagttcctgaagccaattatccccaacttcgttgctcagggtgcagagagggttagcgaggcaaatcccagtttcaggaagagctttgaattcacttaagtgttaataaggatctactgaggctagtctcgtttaatttgtggaaagtccttttttactgctttgcccattggaggtgtctccttttattagaaagtaaccatcttattccaattctatgcatgttactggtatttataaatgtatgagtttttttgcggtataataaatgtaaattttctttgtattct

SEQ ID NO: 47829 - DNA, 477 bp, Homo Sapiens
atgatgaatacaaaggcaaaaaggaaaggcactggatatatgttctctaggcctttacaaaaacatggagttgttcctttggccacatatatgctaatctataagaaaggtgatattgcagacatcaagggaaggggtactgttcaaaaaggaatgccccacaggtgttaccatggcaaaactggaagagtctacaattttacccagcatgcttttggcattgttttaaacaaacaagttaagggcaagattcttgccaagagaattaatgtgcatattgagcacattaaacactctaagagccgaggtagcttcctgaaatgcgtgaaggaaaatgatcagaaaaagaaggaagccaaagagaaaagtacctgggttcaactgaagcaccagcctgctccacccagagaagcacactgtgtgagaaccaacgggaaagagcttgagctgctggaatctattccctatgaattcatg

SEQ ID NO: 47830 - DNA, 3212 bp, Homo Sapiens
ggagatattacaggggacccagcccgcagcgacaggcacaaagtcacggggtaatgaacttcggggacccttcgccgctgcgtgcgcggctctccccggaaacccggacctggccgcctcttccctcggaagatttcccagcaatctagttttcccactctgcgcttgggttccggcagcgcggagcccgtctgcctctgagactgcggtagtgttttccttctttccttgggagaccagcggtcggcagagattgcccacactctgcatgcctatgtagagggagagatcgaagactgagtgacaggaatggggaaaaagagggatttcgctccgtaggaaggccattttcgtgtctccatctctgtctttcaacatccctctcttgctgttcttccttcttcctcagtcttcctgtccatctctccatctgtctgtccatgtgtgtgtccatatcaagcagcattcccagcagctgcggttttgcaagagccgggaagaaacttaaggatgcttaaatttccactgttggacgaattctgagcgcccagggagcagcgcagcgcgcgactgacacccacctgtcccgcccaggagccttgcaggctggagggcagctggagagcggcggcgcccggcggcgaggcgggcgctgccggccgggactcgggcagcgcccaccaaccgctccgccccgggacagccagcatgagcaagccagccggatcaacaagccgcattttagatatcccctgcaaagtgtgtggcgaccgcagctcggggaagcactacggggtctacgcctgcgacggctgctcaggttttttcaaacggagcatccgaaggaataggacctatgtctgcaaatctggaaaccagggaggctgtccggtggacaagacgcacagaaaccagtgcagggcgtgtcggctgaagaagtgtttggaagtcaacatgaacaaagacgccgtgcagcacgagcgggggcctcggacgtccaccatccgcaagcaagtggccctctacttccgtggacacaaggaggagaacggggccgccgcgcactttccctcggcggcgctccctgcgccggccttcttcaccgcggtcacgcagctggagccgcacggcctggagctggccgcggtgtccaccactccagagcggcagaccctcgtgagcctggctcagcccacgcccaagtacccccatgaagtgaatgggaccccaatgtatctctatgaagtggccacggagtcggtgtgtgaatcagctgccagacttctcttcatgagcatcaagtgggctaagagtgtgccagccttctccacgctgtctttgcaagaccagctgatgcttttggaagatgcttggagagaactgtttgttctaggaatagcacaatgggccattccggttgatgctaacactctactggctgtatctggcatgaacggtgacaacacagattcccagaagctgaacaagatcatatctgaaatacaggctttacaagaggtggtggctcgatttagacaactccggttagatgctactgaatttgcctgtctaaaatgcatcgtcactttcaaagccgttcctacacatagtggttctgaactgagaagtttccggaatgctgccgccattgcagcccttcaagatgaggctcagctaacgctcaacagctacatccataccagatatcccactcaaccctgtcgctttggaaaactcctgttgcttttgccagctttacgttctattagcccatcaactatagaagaagtgtttttcaaaaaaaccatcggcaatgtgccaattacaagactgctttcagatatgtacaaatccagtgatatctaagctcacaagatacccacttttcaggatgggacagtatcagatgaacttcaacccatggagaacaagcctcaactaacaaacccttcaggaagcatataccggggaatgtgtagccttcaggaaaaaaatgccaattgacacaaagcattccagtagctatgacctgccgccctgaccaggatagggcgggtgggaaggagaggggtgcaacaggaccgcctgcactgaaaactcactgctgccatgccctgggagggggcaaactgggggttgccacaggccgtgccattctgcctcttacctggaagatcaggctgaacgatcaaaagctgaaacataagtagtgctttctcttcctttttagcatacaaagtttggtaaccaaatatagctctgtgtataacatcgtactgcggccttcaaaactacgttatgttggagcatttattttaaaaataatggtaggttttaaattaaaagtgttatcaaaagtttcccctctattgtaatacattattaagtggccttcagaactgagttaataagtgaaaagtagcttatgccatgtgatttgctttttctctatcttcttttttcttttctttctctttcttttgttctttcttcttcttttttaataccataggccaggcaaccttgtcaaaggaattgatggacaaaatgagattctcaccaggacttcaggttggataacatgtcaaaaagagaagagctttactaaaagaacataagtcaagggaggatgaataaaaacagcaaaaccaaataaagtggagatgagtgattgagtgaggtagattgctgtcccgttaacatagtgctgaaaccaaaggcagtgggggtccaaactcgtggtgcagcaagtcacaccagacaggaaacgaatatggacgtaattgcagaaggaacttcaaggagatgaatgaatgctaaaagggttcttgactgatccattgctaacagcctgagactcttcaatgcctttccgaaaactggtttctagtaaagccttgaatgaacacacacacacacacacacacacacacacacacacacacacacacacaccgtcctacactttaagctgctcctttggtatgactctatacttatggaaatgtagaaacaaacatttttaaatagctgctgtacttttcacattttgatttattaggtactagcactgaggaaaaaaaattcagcacttggactatcataggatgagtaaaacttttcttgtacaaagtgaattaactgatttgtgaagttaaaaggttgtactcattgtatttacaaagaataaaaatatattgaatttaaatgaa

SEQ ID NO: 47831 - DNA, 457 bp, Homo Sapiens
gcgggactccggagggatcccaatgagctgagccgagagcctttgtgtgcagagggaggaggaggaggcggcggcggccgccgggctggagaccccgcccggggagcccccagcaggaacaatgctagcctgcctgacccgagggaacttactggacgtcctgcaggagggcttcaatgagcaacagctgcaggcctatgtggcctgggtgaatgcacagctgaagaagaggccagcagtgaagcctgtgcaggacctgcgacaagatctccgggatggggtgatcctggcatatctcatcgagattgttggtcagttggccctggactctgatacttacatagatcagaatctggccttctttatccttcttatgccctttagagcaggttattttttctttagaatatatggcagtagaggtagagaagacttaaaatacttgcccaaggttaat

SEQ ID NO: 47832 - DNA, 447 bp, Homo Sapiens
ttaccctgcagtgtataggatgtacaggatgaaaagatcccaagtgaggaccccaatcaggaggctgataaggaatgttaatctggattgggaagattccatggcactaggctgtaccacagtcatagaaagaggaactttaagaagactaaagagagcaacactgaacactttcctggacagtcctgtacatgttttattggtgatgcccaagcttatccctgaacactgggaaaagtgggaagatgtcaagagataaaagacagaggatgacagatctgagagggaccgagtgactaactttcctctgcaagctcaaagcaagaagttgactgctttttcatttgaactctgccccagcatcaacaaatcaccactctgggtttatgcaacttgtttcctaattgaataaaataagcctgaatatgaaaacatatcagaagaaaa

SEQ ID NO: 47833 - DNA, 1701 bp, Homo Sapiens
ggccgggcgcggtggctcacgcctgtaatcccagcactttgggaggccgaggcgggcggatcacgaggtcaggagatcgagaccatcccggctaaaacggtgaaaccccgtctctacaaaatacaaaaaccgggcatagtggcgggcgcctgtagtcccagctacttgggaggcaggcaggagaatggcacccgggaggcggagcttgcagtgagccgagatcccgccactgcactccagcctgggcgacagagcgagactcctaaaaaccctattcctgctttggaaagattctcggcagggcgcggtggctcagtatcccagcactttgggaggccgaggcaggcggatcacgaggtcaggagttcgagaccggccgaccaacgtaaccccgtctctactgaaaatacaaaaattagccaggtgtggtggcgcatgcctgtaatcccggctactcaggaggctgaggcaggagaatcgcgtgaacctgggaggcggaggttgcaggagattgcgccactgcactccagcctgggtgacagagcgagactccgtgggaaagagcagccgggagcggtggctcatgcctgcaatcccagcactttgggaggccaaggtgggaggatcacgaggtcaagagttcaagaccagactggccaacaggttgaaaccccgtctctactaaagatacaaaaattagccaggcatggtggtcctgtatcccagctacttgggaggctgaggcaggagaattgcttgaacccagcaggcagaggttgcagtgagccgagattgcaccactgcactccagtctgggcaacagagcaagattctgtcaaaaaaaaaaaaaaagaaagaaagaaaagacagaatctggctctgtcgcccaggccggagtgcagtggcacaatctcagctcactgcaacctccatctctcgagttcaagcgattctcctgcctcagcctcccaagtagctgggattacaggtgcccaccaccacaaccaactaatttttgtatttttggtagagacggcgtttcaccatatttgccaggctggtctcaaactcctgacctcatcctcccgcctcagcctcccaaaatgctgggattacaggcatgagccaccacaccaagctctttctttcttcttcttttttttttttgacggagtctcgctctgtcacccagattggaatgcagtggtgcaatctcggctcactgcaacctccgcctcctgggttcaagagattctcctgcctcagcctcccctgggattacaggtgtgcggcaccacacctggcttttgtatttttagtagacagggtttcaccactttgggcaggctggtcctcctgcctcgtgacctgcccgcctcaccctccaaagggattacaggcgtgagccaccacgcccagacttttttttctttttttgagacagggtcccactgtatcaccctggctagagtgcagtggtgcaatcttgactcactgcaacctctgcctcctgggttcaagttctcatgcctcagcctcccaagtagctggaactacaggcatgcaccaccatgcccagttaatttttgtatttttagtagagatgggagttcatcatgttggccaggctggtctcgaactcctggcctcatccacctgcctcagcctcccaaagtgctaggattacaggagagagccacc

SEQ ID NO: 47834 - DNA, 408 bp, Homo Sapiens
atggcagcagcaggtctcacaagagccggctttctcagaacacactgcctctgcccaggtgtcctgcagtggaggctcagactggccccactggtgaccccttggggagcagggacaggtccattctgctcactcctgagctgggcagttccctcttgggataaggtcgcacagcacaggccaccatcataccaccccagccagagaagtgggagagagaaggaggctccctaccccagaggcagtgctcctcaggaagggcattcactgcgttatatagatatatatatacacacacacacacacacatatatatacacatatatacacatatatgtatacacacatatatacacacacacatatatacacacacacatatgtatatacacacacatatatatatag

SEQ ID NO: 47835 - DNA, 93 bp, Homo Sapiens
atgccaggccctgtcctgggtattgtgggcactgtggagcgagatgtctttgaccctaaagagcttttattccagttcagggagagagactag

SEQ ID NO: 47836 - DNA, 1084 bp, Homo Sapiens
cagacagcagggaacatcaccctcttcagactggagtcagtgggaacagacccaagatgttggggaggaacacttggaagacctcagctttctccttcttggttgagcagatgtgggcccctctctggagtcgttcgatgaggccagggcgatggtgttctcagcgttcctgtgcatggcaaaccagcaataacactttgcacccactctggacggtcccggtctccgtgccagggggcacccggcagtctcctattaacatccagtggagggacagcgtctatgacccccagctgaagccactcagggtctcctatgaagcggcatcctgcctgtacatctggaacactggctacctcttccaggtggaatttgacgatgccaccgaggcatcaggaattagtggtgggcccttggaaaaccactacagactgaagcaatttcacttccactggggagcagtgaacgaggggggctcagagcacacagtggacggccacgcgtaccccgcagagctgcatttagttcactggaattctgtgaaataccaaaattacaaggaagctgtcgtgggagagaatggtttggctgtgataggcgtgtttttaaagctcggggcccatcatcagacgctgcagaggctggtggacatcttgccggaaataaaacataaggacgcgcgggcggccatgcgccccttcgacccctccactctgctgcccacctgctgggattactggacctacgcgggctcgctcaccaccccgccgctgaccgagtcggtcacctggatcatccagaaggagcccgttgaagtggccccaagccagctctctgcatttcgtactctcctgttttctgcacttggtgaagaggagaagatgatggtgaacaactatcgcccacttcaacccttgatgaaccggaaggtctgggcgtccttccaggccactaatgagggcacaaggtcctagagacattaggtccacatgaatagcagaactgactttgaaggaaggaagcgttgtttcccaagtttcacaatgtgattgtacatgacttctgaaattaaaaagagagcatg

SEQ ID NO: 47837 - DNA, 324 bp, Homo Sapiens
atggcgtccggagcggctcgctggctagtattggcacccgtcaggtccggggctctccggagcgggcctagcttgaggaaagatggcgatgtctccgccgcatggagcggctcaggccggagcctggtaccgtcgaggtcagtcatcgttacccgcagcggcgccattttgcccaaaccggtgaaaatgtccttcggccttctccgtgtgttctccattgtgatcccctttctctatgtcgggacactcattagcaagaactttgctgctctacttgaggaacatgacatttttgttccagaggatgatgatgatgatgactaa

SEQ ID NO: 47838 - DNA, 498 bp, Homo Sapiens
atgccaccgaagttcgaccccaacgagatcaaggtcgtatacctgaggtgcaccagaggtgaagtcggtgccacttctgccctggcccccaagatcggccccctgggtctgtctccaaaaaaggttggtgatgacattgccaaggcaacgggtgactggaagggcctgaggattacagtgaaactgaccattgagaacagacaggcccagattgaggtggtgccttctgcctctgccccgatcatcaaagccctcaagaaaccaccaagagacagaaagaaacagaaaaacattaaacacaatgggaatatcacttttgatgagatcgtcaacattgctcgacagatgcggcaccgatccttagccagagaactctctggaaccattaaagagattccggggactgcccagtctatgggctgtaatgttgatggccaccaccctcatgacatcatagatgacatcaacagtggtgctgtggaatgcccagctagttaa

SEQ ID NO: 47839 - DNA, 751 bp, Homo Sapiens
cacttccctctgtggctctgctcagaactggcggtttttcccagctccttgcccagaccaatacttccatgctgtcttcaagccctgcttcctgcacatctcccagcccagatggggagaacccatgtaagaaggtccactgggcttctgggaggagaaggacatcatccacagactcagagtccaagtcccacccggactcctccaagatacccaggtcccggagacccagccgcctgacagtgaagtatgaccggggccagctccagcgctggctggagatggagcaatgggtggatgctcaagttcaggagctcttccaggatcaagcaaccccttctgagcctgagattgacctggaagctctcatggatctatccacagaggagcagaagactcagctggaggccattcttgggaactgcccccgccccacagaggcttttatctctgagctgctcagtcaactcaagaaactccggagactcagccggcctcagaaataagcctgagagaccatctttagcagcctcagcactgccaggcctgccctgaaactccagatcctggctaagagggaaatagctccttgggacacaaacaagaaatgtggacaaggagggacatttgcatactcctactgtctgtgtggtcacagctagtttctgtcagctgggctctctgggagaaagctggctgttgtccaatgccttccttggcagccaagtggataaaacctttaggagcccca

SEQ ID NO: 47840 - DNA, 2380 bp, Homo Sapiens
agaaacgtgacacaccagccctctcggaggggtttcggaccgaagggaagaagctgcgccgtgtcgtccgtctccctgcgcgccgcgggcacttctcctgggctctccccgaactctcccgcgacctctgcgcgccctcaggccgccttccccgccctgggctcgggacaacttctggggtggggtgcaaagaaagtttgcggctcctgccgccggcctctccgcctcttggcctaggaggctcgccgcccgcgcccgctcgttcggccttgcccgggaccgcgtcctgccccgagaccgccaccatgaacaagctttacatcggcaacctcaacgagagcgtgacccccgcggacttggagaaagtgtttgcggagcacaagatctcctacagcggccagttcttggtcaaatccggctacgccttcgtggactgcccggacgagcactgggcgatgaaggccatcgaaactttctccgggaaagtagaattacaaggaaaacgcttagagattgaacattcggtgcccaaaaaacaaaggagccggaaaattcaaatccgaaatattccaccccagctccgatgggaagtactggacagcctgctggctcagtatggtacagtagagaactgtgagcaagtgaacaccgagagtgagacggcagtggtgaatgtcacctattccaaccgggagcagaccaggcaagccatcatgaagctgaatggccaccagttggagaaccatgccctgaaggtctcctacatccccgatgagcagatagcacagggacctgagaatgggcgccgagggggctttggctctcggggtcagccccgccagggctcacctgtggcagcgggggccccagccaagcagcagcaagtggacatcccccttcggctcctggtgcccacccagtatgtgggtgccattattggcaaggagggggccaccatccgcaacatcacaaaacagacccagtccaagatagacgtgcataggaaggagaacgcaggtgcagctgaaaaagccatcagtgtgcactccacccctgagggctgctcctccgcttgtaagatgatcttggagattatgcataaagaggctaaggacaccaaaacggctgacgaggttcccctgaagatcctggcccataataactttgtagggcgtctcattggcaaggaaggacggaacctgaagaaggtagagcaagataccgagacaaaaatcaccatctcctcgttgcaagaccttaccctttacaaccctgagaggaccatcactgtgaagggggccatcgagaattgttgcagggccgagcaggaaataatgaagaaagttcgggaggcctatgagaatgatgtggctgccatgagcctgcagtctcacctgatccctggcctgaacctggctgctgtaggtcttttcccagcttcatccagcgcagtcccgccgcctcccagcagcgttactggggctgctccctatagctcctttatgcaggctcccgagcaggagatggtgcaggtgtttatccccgcccaggcagtgggcgccatcatcggcaagaaggggcagcacatcaaacagctctcccggtttgccagcgcctccatcaagattgcaccacccgaaacacctgactccaaagttcgtatggttatcatcactggaccgccagaggcccaattcaaggctcagggaagaatctatggcaaactcaaggaggagaacttctttggtcccaaggaggaagtgaagctggagacccacatacgtgtgccagcatcagcagctggccgggtcattggcaaaggtggaaaaacggtgaacgagttgcagaatttgacggcagctgaggtggtagtaccaagagaccagacccctgatgagaacgaccaggtcatcgtgaaaatcatcggacatttctatgccagtcagatggctcaacggaagatccgagacatcctggcccaggttaagcagcagcatcagaagggacagagtaaccaggcccaggcacggaggaagtgaccagcccctccctgtcccttcgagtccaggacaacaacgggcagaaatcgagagtgtgctctccccggcaggcctgagaatgagtgggaatccgggacacctgggccgggctgtagatcaggtttgcccacttgattgagaaagatgttccagtgaggaaccctgatctctcagccccaaacacccacccaattggcccaacactgtctgcccctcggggtgtcagaaattctagcgcaaggcacttttaaacgtggattgtttaaagaagctctccaggccccaccaagagggtggatcacacctcagtgggaagaaaaataaaatttccttcaggtttt

SEQ ID NO: 47841 - DNA, 1981 bp, Homo Sapiens
ggccgcggaggctcgggacccggctggccgcgcggcgccgcagccgccccctcccccacaccccctcccccccgcggcggcggcgcgagcgggcggcggctgtgcggtgcggtgcagagcggaggcggaggcgggcgcgcgggcagctcgcgggcacccggccgggccggcgcgggagcgggaaagggtgcgctatgcctttaacacccgcgtacagtaggcatgtatagtggagtgtagggaaactctaggcggggttaaagttcagctcatggagcggcaatagcgctggctggctggctgcagttgagccgacttggaaatgtgaacgcaagaagcaggcttgatttttttttctccccccttctctctctctctctctctctctcttcctctctccctctttctcctctctcacccacactcacgcacacctccaaaccgcacacccagacgcacacgcataccccagcgcccggcagttatgtattctccgctctgtctcacccaggatgaatttcatcctttcatcgaagcacttctgccccacgtccgagcctttgcctacacatggttcaacctgcaggcccgaaaacgaaaatacttcaaaaaacatgaaaagcgtatgtcaaaagaagaagagagagccgtgaaggatgaattgctaagtgaaaaaccagaggtcaagcagaagtgggcatctcgacttctggcaaagttgcggaaagatatccgacccgaatatcgagaggattttgttcttacagttacagggaaaaaacctccatgttgtgttctttccaacccagaccagaaaggcaagatgcgaagaattgactgcctccgccaggcagataaagtctggaggttggaccttgttatggtgattttgtttaaaggtattccgctggaaagtactgatggcgagcgccttgtaaagtccccacaatgctctaatccagggctctgtgtccaaccccatcacataggggtttctgttaaggaactcgatttatatttggcatactttgtgcatgcagcagattcaagtcaatctgaaagtcccagccagccaagtgacgctgacattaaggaccagccagaaaatggacatttgggcttccaggacagttttgtcacatcaggtgtttttagtgtcactgagctagtaagagtgtcacagacaccaatagctgcaggaactggcccaaatttttctctctcagatttggaaagttcttcatactacagcatgagtccaggagcaatgaggaggtctttacccagcacatcctctacgagctccacaaagcgcctcaagtctgtggaggatgaaatggacagtcctggtgaggagccattttatacaggccaagggcgctccccaggaagtggcagtcagtcaagtggatggcatgaagtggagccaggaatgccatctccaaccacactgaagaagtcggagaagtctggtttcagcagcccctccccttcacagacctcctccctgggaacggcgttcacacagcatcaccgacctgtcattacaggacccagagcaagtccgcatgcaacaccatcgactcttcatttcccgacatcacccattatccagcagcctgggccttacttctcacacccagccatccgctatcaccctcaggagacgctgaaagaatttgtccaacttgtctgccctgatgctggtcagcaggctggacaggtggggttcctcaatcccaatgggagcagccaaggcaaggtgcacaacccattccttcccaccccaatgttgccaccgccaccgccaccaccgatggccaggcctgtgcctctgccggtgccagacacaaagcctccaaccacgtcaacagaaggaggtgcagcctcccccacgtcaccaatcctggtacctgggataaaagttgcagcgtcccaccatccaccagacagaccacctgaccccttctcaactctgtaa

SEQ ID NO: 47842 - DNA, 294 bp, Homo Sapiens
cagtccaatgggggcttcccctgcaccacagtccccaagattgcagcttcatcccctttccgatcttccgacaagtccatctggactcctagcaggagcatgccgcccctagaccagccaagctgcaaggtgctgtatgacttccagcctgagaaccatggggagctgggcttccatgagggtgacgtcttcacgctgatcaaccagatcaacgagaactggtaccagggcatgctggacagccagttgggcttcttcctgctcagctacatggacgtgctcatgcctctgccc

SEQ ID NO: 47843 - DNA, 435 bp, Homo Sapiens
atgactgccatccgactacgagaatttattgagcgtcgcccagtgatcccgccaagtatattcatcgctcaccaaggaagagacgttcaaggctattaccctgggcagctggcaagactccattttgatcatagtgcaaagagagctcccagaccgctcatagacttgacaattccacccaagacaaaatatcactatcagcctcaattagaccaacaaacactcattcgatatatttgtcttcgaagacattcaaagcctgccgagccatggtataaagaaaccacttaccgacgagactattctctgccattttatgagattgattggaaccagaaattagccacagtttcgctgaatcctcgaccgcttaattcactgccagagctctactgttgtgaagagagaagcagctttgaaagaaatgcttttaaa

SEQ ID NO: 47844 - DNA, 1825 bp, Homo Sapiens
aatggcgctggcccgcggcgctgcgctggcagggagcaggcgggaggcccgaggaagggagcctgctgcccgcccacccgcctgcacaggctgtgtaagggggctgggcacgcatatcccgccaacaactgcagctcccaccagcctgccaggccaggctcctggacactcccttcccgccttcctcctcccacctccctcctccctccacagtcctccagcttcggatccacagacggaatcaggagcagagtccagttcaggcgcccatctcccagcaatcaagtcttgctccctggcctgccctccggcaccctggagccccgctttccacacagccttgctcctcccggcctggcttgctgcctgcaggcctctcagggtccttcaccgtctctccagtctcggatccggacccgtggatctcagcctcagaccctcctctggccccggccttgccctcgggcacggcccctttcctcttcagccctggggtcctgctccccgagccagaatattgtcctccttggaggtccccaaagaaggtgatctcccaagatctcccaacgttggagggagtccaagcccagggggaacttgacataccaccagtacatgcccccagagccgagacagggatccagggcggacccccaagccgaggggtccgccctgggtcctcctgggccatctctgtgggaagggacagactcgcagcagccacatcctaggatgaagccctctcccctcactccctgcccaccaggagtccctagcccctcgccccccccacacaagttggaacttcagacccttaaactggaggagctgacggtctcagagctccggcagcagctgcgcctgcggggcctcccagtgtcggggaccaagtctatgctcctggagcgcatgcgcggcggcgcgccgccccgcgagcggccgaagccgcggcgcgaggacagtcccgcgggtgctccctggccgcgcctcaagcccaaggccctggcagccgcccggcgtcagggctcggtcaagcccagcgcagcatctcacaggccacctcttccacgtgccgcggataccccggggacggctccggctccaactcccactccggctcctgctgcagctccagccctgaccccttcctcagggccgggctcagcggctctgactctggaggaggagctgcaggaagcgatccggagggcgcagttgcttcctaaccggggcatcgatgacatcctggaggatcaggtggagcctgatgaccccctgccccctattcccctggacttccctggctccttcgacgtgctgtccccctccccggactctgaaggcctctcatctgttttctcctcttcactcccgtctcccacgaactcctcctccccttctcccagggaccccacggactccctggactggctggaggccctgagcgggggtcctcctctgggttctggtcccccaccccccagcatcttctccgctgacttatctgactccagcagcagccggctgtgggacctgctggaggatccatggtgatggattctaggatttacagagacagagaactgatgggggtggagagaagctccttgtgggaggagagggaactaccagcagagcccctcctaccgcagacacaggatcggagacaacctccaaccccacctgcctcctgaagtgctgctgacatgcaactgccttaactttgcctacctggcctccttatgatccccctccggcgtggtatggttggggggcttcttttgctgctggccacggcaaacaagctgcttgctgcttccttcag

SEQ ID NO: 47845 - DNA, 1257 bp, Homo Sapiens
gagctcggcgctgggaagaagccgggagcttccctgatggtgccgccgcctccgagccggggaggagctgccaggggccagctgggcaggagcctgggtccgctgctgctgctcctggcgttgggacacacgtggacctacagagaggagccggaggacggcgacagagaaatctgctcagagagcaaaatcgcgacgactaaatacccgtgtctgaagtcttcaggcgagctcaccacatgctacaggaaaaagtgctgcaaaggatataaatttgttcttggacaatgcatcccagaagattacgacgtttgtgccgaggctccctgtgaacagcagtgcacggacaactttggccgagtgctgtgtacttgttatccgggataccgatatgaccgggagagacaccggaagcgggagaagccatactgtctggatattgatgagtgtgccagcagcaatgggacgctgtgtgcccacatctgcatcaataccttgggcagctaccgctgcgagtgccgggaaggctacatccgggaagatgatgggaagacatgtaccaggggagacaaatatcccaatgacactggccatgagaagtctgagaacatggtgaaagccggaacttgctgtgccacatgcaaggagttctaccagatgaagcagaccgtgctgcagctgaagcaaaagattgctctgctccccaacaatgcagctgacctgggcaagtatatcactggtgacaaggtgctggcctcaaacacctaccttccaggacctcctggcctgcctgggggccagggccctcccggctcaccaggaccaaagggaagcccaggcttccccggtatgccaggccctcctgggcagcccggcccacggggctcaatgggacccatgggaccatctcctgatctgtcccacattaagcaaggccggaggggccctgtgggtccaccaggggcaccaggaagagatggttctaagggggagagaggagcgcctgggcccagagggtctccaggaccccctggttctttcgacttcctgctacttatgctggctgacatccgcaatgacatcactgagctgcaggaaaaggtgttcgggcaccggactcactcttcagcagaggagttccctttacctcaggaatttcccagctacccagaagccatggacctgggctctggagatgaccatccaagaagaactgagacaagagacttgagagcccccagagacttctacccatag

SEQ ID NO: 47846 - DNA, 3427 bp, Homo Sapiens
atggctggttataagcctgtagctattcagacatatcctatacttggtgaaaaaatcacccaagatacactgtactggaacaactataagacccctgttcagattaaggaatttggtgcagtttcaaaagtagacttttctcctcagcctccatataattatgctgtcacagcttcctcaagaattcacatttatggccgatactcccaagaacctataaaaaccttttctcgatttaaagacacagcatactgtgctacttttcgacaagatggtagattgcttgtggctggcagtgaagatggtggagttcaactttttgatataagtgggagggctcccctcaggcagtttgaaggccatacaaaagcagttcatacagtagattttacagctgacaaatatcacgtggtctctggggctgatgattatacagttaaattatgggatattccaaactccaaagaaattttgacatttaaagaacactctgattatgtgaggtgtggatgtgctagcaaacttaatccggatctctttataacaggatcatatgatcatactgtgaagatgtttgatgcacgaacgagtgagagtgttctctccgttgagcatgggcagccagtggagagtgtcctacttttcccctctggaggtcttctggtgtcagcaggaggtcgttatgttaaagtctgggacatgttaaaaggaggacaattgctagtatctttgaaaaatcatcacaaaaccgtgacatgtttatgtctaagcagctctggacagaggttactctctggctcactggataggaaggtgaaagtatacagcacaacttcctacaaagtagtccacagttttgattatgcagcttcaattttgagtcttgcccttgcacatgaagatgagacaatagttgtaggaatgaccaatggaatactgagtgttaaacatcggaaatctgaagcaaagaaggaatcacttcccagaagaagaaggcctgcatatcgaacctttattaaaggaaaaaattacatgaagcaacgggatgacattttgattaacaggccagcaaagaagcacctagaattgtatgacagggatctgaaacattttcggatctctaaggcactcgatagagttcttgatcccacttgtacaataaagacacccgagattacggtgtccatcataaaggagttaaatcgaagaggagtccttgcaaatgcgcttgcaggtcgggatgagaaggaaatcagtcatgttcttaattttttgataaggaatctttctcagccaagatttgcccctgttttaatcaatgctgctgaaataattattgatatatatctgcctgtaattggtcagtcccctgtagttgataaaaagtttttactacttcaaggacttgtagaaaaagagattgattaccaaagagaattgttagaaaccttggggatgatggatttttgccaccatgagaaggaaggaaggcacttctgtgttggaacacacatctgatggatttccagagaataagaagatagaatcatagtgtctgctaaataagacatataagaactctgaagttggaatagatttgactgtattaaatgttggcgagagactctctttgatacattaaaaaaactgtttgcagaagcagttctgtggaagagactggaataattatggccggaaaacaagtacccgttttaagtaagacatggttttccatgtaatattttgaattatagcatcttcacctagaagatctcaattgtcttagtcacagagtaggtttatctgggatggatattaattttaatacaggagtgttctgtatcaacatttgggttggtattcagatgggaattcaaatatgaatcctctctggagagggtccaactgggaatcctgctaaaggagcaaagccttgtattacctctggaagacaacaaaaacaattggcaacaacaaaaagcctctttcttgactttaatcagtgcctttgggatttctaggcccttgcttagcttgcttcctgtctccttgatatctacacttgtcttagatcacatgccctgcttcagctggtaatgggactgcatcggttccaagtgtggcaagtaagttttcggctctgaagaactgacactagctagatttgtattcagagtgtgagagcaagctctacagatagaccttattggactacttttttttttttcttcatgcagcctttctaccaagttttcaccttgtttcaggtcagaggaatgatagaatttgtcatttttcttacaacagcctttcagactattcttcatatgtttcaagctaatcttgtagctaagctacctaatcctctgaaaactgttttctctgatttgtatttagattcctccccccattattcacaatcatattgtatttcggaaccccaatgcagagcagtttgctttgaaaaatagttgtttttaaaagtttaatgtaaataattattttttagaagttttttttttttttttaaagacagggtctcgctttatcgcccaggctggagtacagtgatgcaatctcagtccactgcaacctctgccctcccgggtttaagcagttctcctgcctcagcctcctgagtagctgggattacaggtgtgccccaccacgcctggctaatttttgtagttttagtagagacggggtttcaccttaccgggctggtctaaaactcctgacctcaagtgatctacctgcctctgcctcccgaagtgcttggattacaggtgtgagccactgtgtccagcctgtaactattatttttttataaagagagattcttattttcttggctttttgatgtatctgttcctgatagataatcattggctagtaactcctagtacactggtttcacagttgctacctctcctgcttttctctaattattacgccaactcaagtagttaaaaatcagtaagaaaaatgtcttgagctagaagaacccatagaggaagattttgtaatgcgaatctcctctcataattttagttctgtaaattcagggtttttttttgtttttttgttttttttaagccgaaaaaatgcttaatatgttccagtaagggtattaagtaaaaattaaataaacgtattaagtttaacatattaaattaatttaacatttagactaacattaacatttaaattaatatgttaagtgaatatacttaatatattctagtacaggtatgcttggaaatagggcgtttccttttcatgaattgatttcgtacagcacagtggcttataaggaaccagcagtgtttttccctgagtaattatgaacttagtcaagatcagaagctgggttttggggttgagaagagttcatttatttaaataaagtttctatttaaaaaccttt

SEQ ID NO: 47847 - DNA, 480 bp, Homo Sapiens
gaccggccactaccggtcctgagtctggctccagcgccaccaccagtggccgtggcctcgccggccgtcgccccccgtgagcctggacccctgcgctcccgcaccagcccccgcctccgccctgcagaagcccaagatctggtccctcgcggagactgccacaagcccggacaacccgcgccgctcgcctcccggcgcgggggggtctccaccgggggcagcggtcgcgccttccgccctgcagctctctccggccgccgccgccgccgccgctcacagactggtctcagcgccgctgggcaagttcccggcttggaccaaccggccgtttccaggcccaccgcccggcccccgcctgcacccgctctccctgctgggctctgcccctccgcacctgctgggacttcccggagccgcgggccacccggctgccgccgccgccttcgctcggccagcggagcccgaaggcggaacaggtga

SEQ ID NO: 47848 - DNA, 465 bp, Homo Sapiens
cgactggagaaaggctttatcttggacggggtggctgtgagcaccgctgcccgcgcttatgggcgctctaggcccaagctgtggtcggcgattccgccctacaacgcgcagcaggactaccacgcccgcagctacttccagagtcacgtggttccgccccttttgcggaaaactgatcaggatcatggcggtacaggaagggatggctggatagtagactacatccacatcttcgggcaaggacaaagatacctcaacaggagaaattgggcagggacaggcaagcctctctctccttgtccccaagggcattctctccagcaggtgactgggcatgaccactacaatgctgatctgaaaccgatcgatgggttcaatggaaggtttggctaccgcaggaacactccagccctccgtcagagcacgtccgtcttcggagaggtcacccacttccctctgttctaa

SEQ ID NO: 47849 - DNA, 1069 bp, Homo Sapiens
atggctgctgacatttctgaatccagcggggctgactgcaaaggagacccaaggaacagtgccaagttagatgccgattacccacttcgagtcctttattgtggaggcaagttctgttcattaccaacagagtactgtgaatatatgcctgatgttgctaaatgtagacaatggttagagaagaattttccaaatgaatttgcaaaacttactgtagaaaattcacccaaacaagaagctggaattagtgagggtcaaggaacagcaggggaagaagaggagaagaaaaaacagaagagaggtggaaggggtcaaataaaacaaaaaaagaagaccgtaccacaaaaggttactatagccaaaattcccagagcaaagaagaaatatgtgacaagagtatgtggccttgcaacttttgaaattgatcttaaagaagcacaaagattttttgctcaaaaattctcctgtggtgcctcagtaacaggggaggatgaaattatcattcagggagattttacagatgacataattgatgtcattcaggaaaaatggccagaggtagatgatgacagcatcgaagatcttggagaagtaaagaagtgaatttgaaaatttgtctgtatttaatggcctgaactgagagttgatatggccaaagggagagaggccttttaaaatatatatatatatacacatatatatgtatatatacacatatatgtatgtatacacatatacacatgtatatatacatgtgtgtatgtatacatgtatatatatatacatacacatatatgtatacatatatacacatatatgtatacatatatacacatatgtatacatatatatatattctacagtaaaactgtagactgtcctcgtccttggcattttcactgttctgtacaaggctgcttgtttttttattgccaaagtcaaataaacgggagactgtcatgctcatgcatgaatagaatttagtcaaataaaaaattttggtcatttggtactgactttctctctctctctctctctcttttttttttttgacagagtctcgcactgt

SEQ ID NO: 47850 - DNA, 834 bp, Homo Sapiens
aaaatacaaaaaaaaaaaaaaaaaaaaattaactgggcatggttgcacatgcctgtaatcccagctactctggaggctgaggcaggagaattgcttgaacccaagaggtgtaggttgcaggagccgagatcatgccactgcactctagcttggaaaacagcgagacttcaccttaaaaaaaaaaaagagttaaatctagtttatactactgttatgaacaatcgcatttttaaaatgatattcagagttgcaaatgtgaagaattttgtatcacttagtaaactttgcattgcatgtgatagaaaatccagctcaaaccagcctaaaataagtgatttattatgtcacataagagagcagtccagggattggctaggctttttaaatttccaggatataattagagcccagtttgttcatgtacatttcatttccttatctgagtttcattttagggcacttctctctacctggctccaaaattctaccaagggtcccatagctaaaacttttctgtttgagtgcataagagaacagcaaaattttctttttctatgtcccaataaaagtcacagtatcttatgtagtttgattggtcacatgtacatctctaaacctctcactatactcaggaaaatgagccatgttggtttaaactatctcatcagaagaccaaggactaggagtgtgagaaaaattgatcctcaggaggaagactgcaatgcatttagcaggaaagagtttcttaagaaaaaaaacaatgaaaatccactaaaatctgtctcaaggataatattccatgactctacagggcttaatgcgtgtgacatatat

SEQ ID NO: 47851 - DNA, 498 bp, Homo Sapiens
atgctgccgaagttcgacccgaacgagatcaaagtcgtatacctgaggtgcaccggaggtgaagtcggtgccacttctgccctggcccccaagatcggccccctgggtctgtctccaaaaaaggttggtgatgacattgccaaggcaatgggtgactggaagggcctgaggattacagtgaaactaaccattcagaacagacaggcccagattgaggtggtgccttctgcctctgccatgatcatcaaagccctcaaggaaccaccaagagacagaaagaaacagaaaaacattaaacacagtgggaatatcacttttgatgagatcgtcaacattgctcgacagatgcggcaccaatccttagccagagaactctctggaaccactaaagagatcctggggactgcccagtctgtgggctgtaatgttgatggccgccaccctcatgacatcatagatgacatcaacagtggtgctgtagaatgcccagctagttaa

SEQ ID NO: 47852 - DNA, 480 bp, Homo Sapiens
gttgctctcgcagtttggactgagacatggaatggggccttaacaacaggaaacaatctgaacagactgaaccacgagcagcagaaaggcagaagagcagccgcttcagccccttaccatccgagacctgggtgtgtggtctgtcttggtcactctctctgtctctctttctctctttctttctctgtccccaaggctggagtgcagtggtgcaatcttggctcactgcaacctccacctctgggattcaagcaattctcccacctcagcctctcgagtagctggggctacagctatgcgccaccatgcccagctaattttttttttttttttgagatggagtcttgctctgtcccccatgctggagtgcagtggcatgatctcggctcgctgcaacctcctcctcctgggttcaagcgattctcctacctcagcctccccagtctgggattacaggcgcccaccaccacacctggctaa

SEQ ID NO: 47853 - DNA, 675 bp, Homo Sapiens
atggctgtggggaacatcaacgagctgcccgagaacatcctgctggagctgttcacgcacgtgcccgcccgccagctgctgctgaactgccgcctggtctgcagcctctggcgggacctcatcgacctcgtgaccctctggaaacgcaagtgcctgcgagagggcttcatcactgaggactgggaccagcccgtggccgactggaagatcttctacttcttacggagcctgcacaggaacctcctgcacaacccgtgcgctgaagaggggttcgagttctggagcctggatgtgaatggaggcgatgagtggaaggtggaggatctctctcgagaccagaggaaggaattccccaatgaccaggttcgcagccaggccagattgcgggtccaagtaccagctgtgcgttcagctcctgtcgtccgcgcacgcgcctctggggaccttccagccagacccggcgaccatccagcagaagagcgatgccaagtggagggaggtctcccacacattctccaactacccgcccggcgtccgctacatctggtttcagcacggcggcgtggacactcattactgggccggctggtacggcccgagggtcaccaacagcagcatcaccatcgggcccccgctgccctgacaccccctgagcccccatctgctgaaccctga

SEQ ID NO: 47854 - DNA, 1125 bp, Homo Sapiens
tttgcctccttcacagacaagatacggttcctagagcagcagaacaagatgctggagaccaagtggagcctcctgcagcagcagaagatggctcagagcaacatggacaacatgttcgggagctacatcaacaaccttacgcagcagctggagactctgggccaggagaagctgaagctggaggtggagcttggcaacatgcaggggctggtggaggacttcaagaacaagtatgaggatgagatccataagcttacagagatggagaatgaatttgtcctcatcaagaaggaggtggacgaagcttacatgaacaaggtagagctggggtctcgcctggaaggactgactgatgagatcaacttcctcaggcagctgtatgaagaggagatccgggagctgcagtgccagatctcagacacatctgcggtgctgtccatggacaacagctccctggacatggacagcatcatcgctgaggtcaaggtgcagtacgaggagatcaccaaccacagccaggctgaggctgagagcatgtaccagatcaagtatgaggaactgcagacgctggttgggaagcacgggaatgacctgcggcgcacaaagactgagatctccgagatgaaccggaacatcagccgactccaggctgaggctgagggtctcaagggccagaggacttccctggaggccgccatagcagatgcccagcagcgtggggagctggccgttaaggatgccaacgccgagctgtcggagctggaggccgcccaggagcgggccaagcaggacatggcgcggccgctgcgtgagtaccaggagctgatgaacgtgaagctggccctggacatccagatcgccacctacaggaagctgctggagggcgacgagagccggctggagtctgggatgctgaacatgagcatccatacgaagaccaccagcagctatgcagcctttgggggcctcacaagccccggcctcagctacagcctgggctccagctttggctctggggcgggctccagctccttcagcagcaccggctccaccagggctgtggttgtgaagaagatcaagacccgcgatgggaagctggagtcctctgatgtcctgcccaagtga

SEQ ID NO: 47855 - DNA, 617 bp, Homo Sapiens
ttttatcttgctgggcaggactctgctgggggtggtatcaggtcttattcccaataggatggtgaccatggaggaagacttgtgttgggcccaatggccctcggccagtgtccgtctgccaggtgccagcccccggtgcgctgaagctcaggccattcctgatgccctggcctcctgcactgagctgtggtgagctcttctgcccaggcaggccccctggcattgaccggcataggacagtgagcctggaggaagacttgccctggtcccactgtccctgggccagtgtccatcagccaggtgcccagaccccagtgcgctgaagctcagccctccctggcactctggtctcctgcactgagctgtgtgagctcttccgcccatgagggccccctggccttgagcagcatagatggtgaccctgaaggaggacttgtgttgggcccaatggcctggggccagtgtctgtcagccaggtgcccagcccctggcgtgctgaagtttgggcccttcctggtgccctgttctatcgggggaacccgcccccaataattcaacggtccctccgtttggggtccctgacttccctcaacactggtctcttccactgagccttg

SEQ ID NO: 47856 - DNA, 723 bp, Homo Sapiens
gaggaagtcagaaaattttcataccagcctagagttcatccttgtgtagtttatggtgatgctgatattggtcagcaaattcaggtcttagaacatggatgccacttgttagtagccacgccaggaggtctagtggatttgatggaaagaggaaagattggattagacttctgcaaatacttagtgttggatgaagctgataggatgctggatatgggatttggacctcagatacatcttatacttgaacaagatactatgccactgaagggcattcatcacatcatgatgtttagtgctacttttcctaacgaaatacagatgcttgctcgtgactttttggatgaatatatctttttggctgtaggaagagtaggctctacctctgagactatcacacaggaagtagtttgggtggaagagccagataaacggtcatttctgcttgatctcttaaatgcaccagggaaggattcactgactttagtgtttgtggagaccaaaaagggagaagattctctggagaatttcttataccatgaagtatatccttgtactagtattcatggagaccaatcacagagagatcgagaagcccttcatcagttttgcttggggaaaatcccaattctagtggctacagctgtggcagcaaagactagacatttcaaatgtgaaacatgcttcaattttgatttgccaagtgatattgaagaatatgtg

SEQ ID NO: 47857 - DNA, 600 bp, Homo Sapiens
taccgggtgggcagcacctctggcatccacgccgtcactatcttctgctcctgggactgcaaggtgaggcagaagcgggccccccgccctcagcaagacaacagacaacattcgcaccgggagaaggagctgctggcccgacagctgcggcagagccccaggagcgtgtgcgggaggctgcggcaggcggccatgctggggctcatgtggctcctgtgtctggggactgcgctgggctgcgctgtggccgtccacatcttctcggagttcatgatgcagaatccggaggctgctggccaggagcccgcgctgctggtcctgcctctggtggtcggccccctcaacctggggggcccctacccgtgccttggcctgaccgccctggagctgcatgactccccggtgctggagttgtacgtggccatctgcaggaacttcatcctcaagctggccatcctggggacactgtgctaccactggcagggccgcagggtgggcgccctgcagggccagtgctgggaggaacccgtgctgtatgggttcctggtgatggactcgtcccacgtgctggacacgcttttcggggaattgatgtggagg

SEQ ID NO: 47858 - DNA, 2818 bp, Homo Sapiens
gcaggaaacgcgaacggctccagttcaaagccacatgcaccaacgtgacatataagccattaaaatatcatcctgacggctcatttctgcttcatcatacattccctaactgcttcctgaaagctggaaaaggagaagtgaaggatgaccgcctcgctggaaccacaaaagagaggcttggaggggtttgtggtcccctctcagccaccccgaaatgatgtgcagaaatgaggcgatcctggcaacaggtggagtggggctcaaagtcagaaaatgagatacaagacatccttggtgatgaggaaacgattacggctttaccgaaacactcttaaagagtcaagtagcagctctggacaccatggcccccagctcaccgccgcctccagcccctcggtgttcccgggcctccacgaggagcctccccaggcctcccccagccgtcctttgaatggactcctgcgtctggggctccctggagacatgtacgcgcggccggagcccttcccgccagggcctgcggcccgcagcgacgccctggcagctgccgcagccctgcatggctacgggggcatgaacctgacggtgaacctcgctgcgccccacggtcctggcgctttcttccgctacatgcgccagcccatcaaacaggagctcatctgcaagtggctggcggccgacggcaccgcgaccccgagcctctgctccaaaactttcagcaccatgcacgagctggtcacgcacgtcaccgtggagcacgtcggcggcccggaacaggccaaccacatttgcttctgggaggagtgtccgcgccagggaaagcccttcaaagccaaatacaaacttgtaaatcacatccgcgtgcacacgggcgagaagcccttcccttgtcctttcccggggtgtgggaaggtctttgctagatcagaaaatctcaaaatacacaaacgaactcacacaggcgagaagcccttcagatgcgagttcgagggctgcgagcggcgcttcgccaacagcagcgaccgtaagaagcattcgcacgtgcacactagcgacaagccatacacgtgcaaggtgcggggctgcgacaagtgctacacgcaccccagctcgctgcgtaagcacatgaaggtgcacgggcgctcgccgccgcccagctctggctacgattcggctacaccgtctgccctcgtgtcgccctcgtcggactgcggccacaagtcccaggtggcctcctcggcggcggtggcggcgcgtaccgccgacttgagcgaatgatgtccaccgcgttgctcgcaaggtaatctcgctccgcgcagctgagcgccccgcatctcgcgcctgctacatcaaagggcccgcgcacaaagcagtgtttcttcgccacggtgcatcttcatggtaagttaggatttctatggcaatgtgcaagtcgcactgaaatcctgaaaggccaagcctggagcccgtccaggcttttcattaaggacataatatttacgtctaacagaccttttttcttgtgtatacaagtatatatttttgtttgacgcggactaaatcattttcatttaatttccggtaaacaaaacccacgcgaatgggcacttgtacccgatcataataaaaatggataataatgtgaaggaagaaaagagccgcttgaatcgccgctcagccccctttgtttctgctttctgcggtgatcagagggcgcgtttgggtttgatggcgagtttctaaaggcgaggaaatggtttgtaagaggggaaagaaaaggagaaaggtctaatcaagctcgggttgttcaaagagtcgggttttggggttgaaagtgtgagtttgacggtgcatcagcatgccgcgttaggctcgccatggaaatacgcgcggggagcggccgcttcaaaggcggcacacttcactacagacactctattaagatacatttgcgctgacctttgctttcacgccatttaatactgtcactgcgctctccagtatatacttcctttctagaacccgacttgcccacgtttaggggttcactctgcaccctgatgtgggaggctttggcgcaggggacactttcaggaaagggaggagcacaaggactctgtgcatcttgactgcaccccaaagaggctccaggatcaggagtgaaagattttaaagcagcctccgaagcttaacaaatgagcattccaagctcagttttgtgcaaatcgcctttctgactcttgagtaggatggaggcttaaatttaatggcgacttggggggaagggagccaccctgggggagtctgaggagttcagactgtgcccttgggaatttccactctggctttccgtgccactcttcttcctttccatcccaaaagtctcttgcggcccctgaaacttgtttctttctaaggcagggtgtgtggtacccttaggcctggactagtcctagatgcaaactcaagagcccaaggccaaggggatgtggggaagatggcaggaaagttagaagtccatgttcccttaattgtcttgttgtttattttatccaagtaccccagtgaataggggaaaaataaacacagtgaaaaaaaaaatcaaacagtggagtcttctttagtgccagtccttgtggttgaataaaaaggatggtccgctttctattgagctgagaaatctttgaagtgggagttattatctgagacattcctgcttgtcgtcctaacaacgctgatgaaacgtaaaaggttctttgtcagcgatttgttctcctctctgtcaaactccctctgccccgttagtttcaaaccgttt

SEQ ID NO: 47859 - DNA, 771 bp, Homo Sapiens
cgaagcgtcctcgacgatgccgagctggtgctgctcacctcacgccaggcctggcagggctatgtgagtgacatcgggtgcttcctcagtgcttttcgccagccgcacgcgtggctcatccaggccgcccggcagctactgtgtgatgagcaggcccccaggcagagactgctggccgacctcctgtacaacgtcagccagaacgtcgcagccgacacccgggctgaggacccgctgtggtttgaaggcttggagtcccgattttggaataagtctggctatctgagatacagctgtgaaagccggatccggagttacctgagagaggtgagctcctgctcctccatggtgggtgcagaggctcaggaggaattcctgcgggtcctccgctccatgtgccagaagctccagtctgtgcagtacgacggcagctatacaacagaggagccaagggtggcagccgtctctgcacaccggaagttctcctgccagggtcccttcgacatggacggctgcttgtcaagatactccatcaacccctacagtaacagggagagcaggctcctcttctggacctggaacctggatcacatagtggaaaaacgcaccatcattcctacactggtggaagcagttaaagaacaagatggaagagaagtggactgggaatatttttatggcctgctttctacctcagagaacctaaaattagtggtctgccataagaaaaccacccacaaaaccagctatgacctgaacagaatctacaaa

SEQ ID NO: 47860 - DNA, 709 bp, Homo Sapiens
ccagtttgttgttttacctaaaaggtgttttccacgtggagtgggactgagaggcacaggtggctgaggggacccgcctgggatgtgaggcgcaggtgtgctcggccccttcatctgtcagctgcagcaatggaatacgtgctggaagtgaagaactctccgcggcacctcctgaagcaattcacagtgtgtgacgttcctctgtatgacatttgtgactacaacgtctccagggaccgatgccaggagctcgggtgctgcttctacgaaggcgtctgctacaagaaagcggttcccatttacatccacgtgttctctgccttgattgtgatcatcgctggggccttcgtcatcaccatcatctacagagtcattcaggagagcaggaaagaaaaggccatccctgtggatgtcgcgctgccacagaagtccagcgaaaaggcggagttggcctcatccagcagcaagttagggctgaagcctgcgagtcctgggcctccaagtgctgggccctcgatgaagagtgacgaggataaggatgatgtaacagggacaataacagaagccgaagaaactgaggactgactgagacgcatgaagaagtggagattgtcagaattatccaaatgaaatggtacagcaggtgcactgttaacagtgtgatggaatgaccacccaaagagaaaaaaataaaggtattttgaaaatt

SEQ ID NO: 47861 - DNA, 966 bp, Homo Sapiens
atgacaattcttcttaatagcagcctccaaagagccactttcttcctgacgggcttccaaggtctagaaggtctccatggctggatctctattcccttctgcttcatctacctgacagttatcttggggaacctcaccattctccacgtcatttgtactgatgccactctccatggacccatgtactatttcttgggcatgctagctgtcacagacttaggcctttgcctttccacactgcccactgtgctgggcattttctggtttgataccagagagattggcatccctgcctgtttcactcagctcttcttcatccacaccttgtcttcaatggagtcatcagttctgttatccatgtccattgaccgctacgtggccgtctgcaacccactgcatgactccaccgtcctgacacctgcatgtattgtcaagatggggctaagctcagtgcttagaagtgctctcctcatcctccccttgccattcctcctgaagcgcttccaatactgccactcccatgtgctggctcatgcttattgtcttcacctggagatcatgaagctggcctgctctagcatcattgtcaatcacatctatgggctctttgttgtggcctgcaccgtgggtgtggactccctgctcatctttctctcatacgccctcatccttcgcaccgtgctcagcattgcctcccaccaggagcgactccgagccctcaacacctgtgtctctcatatctgtgctgtactgctcttctacatccccatgattggcttgtctcttgtgcatcgctttggtgaacatctgccccgcgttgtacacctcttcatgtcctatgtgtatctgctggtaccaccccttatgaaccccatcatctacagcatcaagaccaagcaaattcgccagcgcatcattaagaagtttcagtttataaagtcacttaggtgtttttggaaggattaa

SEQ ID NO: 47862 - DNA, 1437 bp, Homo Sapiens
atggcgtcggcctcctccgggccgttgtcttcggtcggtttttctgttgatcccgcggtcccttcctgtacctcgtcctcagcatctggaatcaagagtcccatggcatctgaggtgccttatgcctctggcatgcccatcaagaaaataggccatagaagtgttgattcctcaggagggacaacctcatcagccttgaaaggtgccatccagttaggcattacccacactgtggggagcctgagtaccaaaccagagagtgatgtcctcatgcaagatttccacatggtggagagtatcttctttcccagtgaagggagcaacctgacccctgctcatcactacaatgcctttcgtttcaagacctatgcacctgttgccttccgctacttctgggagctatttggtatccggcccgatgattacttgtattccctctgcagtgagccgctgattgaactctgtagctctggagctagtggttccctgttctatgtgtccagcgacgatgagttcattgttaagacagtccgacataaagaagcggagtttctgcagaagctgcttccaggatactacataaacctcaaccagaaccctcggactttgctgcctaaattctatggactgtactgtgtgcagacaggtggcaagaacattcggattgtggtgatgaacaatcttttaccaagatcggtaaaaatgcatatcaaatatgacctcaaaggctcaacctacaggcggcgggcttcccagaaagagcgagagaagcctcttcccacatttaaagacctagacttcttacaagacatccctgatggtctttttttggatgctgacgtgcacaacgctctctgtaagaccctgcagcgtgactgtttggtgctgcagagcttcaagataatggattatagcctcttgatgtcaatccataatatagatcatgcacaacgagagcccttaagcagcgaaacacaatactcagttgatactcgaagaccagccccccaaaaggctctgtattccacagccatggaatccatccagggagaggctcgacggggtggcaccatggagaccgatgaccatatgggtggcatccctgcccggaatagtaaaggggaaaggcttctgctttatattggcatcattgacattctacagtcttacaggtttgttaagaagttggagcactcttggaaagccctgatacatgacggagacactgtctcagtgcatcgcccaggcttctatgctgaatggttccagcgcttcatgtgcaacacggtatttaagaagattccctgtgttcaccttggttgtcctgatgttttacctcagactccacctttggaggaaatcagtgagggctcacctactcctgaccccagtttctcacctctagttgaagagactttgcaaatgctaactacaagt

SEQ ID NO: 47863 - DNA, 2036 bp, Homo Sapiens
agcccacactgcggagccaggcggcagcatggaccgggctggggcagacatgtgggccagcaccttcaccctggccatggccgagaggaagccccaggacgtctgggttctgctacctgagcacagcctggtcccgggatgcctggacggcggtggtgtccagtacctgctggtggggctctcgaggctccagtgcggtcactgtccggggacctgggactcggcccatgtgcacgtcctcttccacctgtggtgggacagggccagccaccgggggctggtgaagatgcgcatctggggccagcggtgcaggctgtgccccgcacccggggactgccaggtgaggcccccgggcgagcagcccttcctcagcaggctggtcttgcacatcctgcaggactgctacggggatggccccggcccagcccggcaccccagggaggcctatgagggctgctgtgaggcctgtgagctgggggtctgcttcctccagaaggccccagaccccgcctggagcgccaacgccacaaaaggcaacttccccgccacggcctggggtggcactggcaccgtctccaggggcaaaccgctgtccacccctggcgacgaccttggcaagggtggcgttgtcatcgccatccccttctcccttgtgggtaccagcaatgaccaggtgcccatcgctgagggccctgccccccctgcgggggcctctctccctgtgactggcagctgtgaggccctggtcatcggccagggctccatcttcctgtctggggattcagtggccatgcctgggggcaaaggcttcccggtggccattggagaccccctcttccacggccccggcctcctcggcagcagcatccagaccttcgagctcaagggcttcctcttcaaaggccggggctccctctgcagcccggttggcgtggcccagggctggggccccatctccctcaacaatggcctcgtccctgtggggaaacacacgccaaccgtgttctactgtgtgggcctctcggccagcggggagggctccctcaccttcccctcctccctcaccagcatcttcaccaacaccctctcggagcccaccgatggccctgtggccactaaagaggcctccatcaccttccccttcatctttactgatgtcaaggatgccgttgctgaggtggctgaaggcaacgggaaggaaggaggcggccagggcctcgtcccagtgggtcacgacgccctgccagagaccaatgctggtggcctcccctcccaggtcaagggctcccttgccctccccttccctgctgatgtccaaggcaaagatgcctttactgacatcactgaaggcaaagagaaggaaggtggcctggtcaccgcgggtcacgacgcccctctggaggccaatgccgagggccccatcacggttagtgagggctgcatcaccatccccttcgcagtcttcgatgtcataaagcgcaagggcggtggccacgttgcctacggcccccagggcaatggctgcttctcccaaggctattaccagaagaggcagctgaggtccaggttccacaaggcccgctgtgggtgccgccgggaggaagacgagcgccctggccgtgcctgccgtaggccgcacgccgagccctacgaggacttctggatctgggtgtccatgaccgtgtgcgtcttctggctgatgtgcatgtgtcggctgaaccccgggatctacccgcagcaagtgtgacgccccgaagttcaggcaaccctcgcctctgggaccccgcctcgcctctgagacaccccccaaccccgcctttgagatgcccgccccgcctccgagaccccgcctccacctccgagacccctttctctgagacccccgcctctgaggccccgccccccgcctccgagaccccgccctgcctctgagaccccgcctcacctctgagacaccccccaaccccacctttgagatgcccgccccgcctccgtggccccgcctccacctccgagaccccgcctccacctccgag

SEQ ID NO: 47864 - DNA, 2138 bp, Homo Sapiens
aagacattcatcctcccggaggcccgcgccgccctcgccctgcacgcctagcgttgtcccgcggccaggcccggccggagcggcggcgcctggatgtggacctggctgcggggagacgggcgccggccccaaagcgactttcggtcctcgacgcgccccgccccacccctgcgatgaagagggcgtctgctggaggttccaggccccgattcccttatcctgggggacgacagcatccatagcctggactttgtgtcgagccgagcctggacttccctgactatgggcccgggggcctgcacgcagcctacctgccatccccaccgctcagcgcctctgatgccttctcattgctttgtgctccctgagcctcaaggcctcaagccggcagggcggggactacgtggccctgcagcccctgtgctccgagggtgggcctcccatgccccaccgtagcatctttgcccccccatgcactgcccaaccacaatcgcagcctgtcctacaataatgtgctcaaccctggctcgcctggtggccacgcctgcctcgcccatccagcagttggcgtggccggataccactcaccctacctgcaccctggggcaacgggcgacccaccatggcccctgccccacagcttcagtcccgtgctgggcccccggccccaggagccctcgcctgtgctctacgacatcctgtccaggaccatcatggcatccatccaggagcgcaaggacagggaggagcgtgagtgcctgctgcgctcccaggccgactcactcttcggcgactcaggcgtctatgatgctcccagctcctacagcctgcagcaggccagtgtgctgtctgagggcttccgaggtcctacgctgtgctacagctctacagatgaccttgtggccaggcccggcttcggcggcgcctgcaaccctgtcctgcagacatcattgtcctcgctttccagctccgtgagccgtgcactgcggacgtcgtcctcctccctgcaggctgatcaggtggggaagctgaggcaggaagccctttagtcacttgccgaaggccacgctgttacccatgggaccggttttgggcggccgaagagcactcatggggccggattcacgccccaggcccgttccctcctgctctctggtgctcctcacgccattggccccactgcctctcactgcccgtgagtccctgtgcccgtgtcctccttcttgaacccctcagccctcagttaaccctcagaaagctggctcggagaagtccttgtgtggtatctgggaggcagagtttgccgtgagccgagattgtgccactgcacgcactccagcctgggcgacagagcgagaccccatctcaaaaaaaaaaaaaaaaaggcctcacgggactagaagcgtcttaccctgacctcacacctgctggacatcaggctggggagagaatcggggaagagggcattttccaacaggactggaaggccagtcgtggtccttggtggtgagagctagccaggccgccggccttctccctggaagcctgcagggtcccctctgatccctgcacctctggggggtcacaccaactgcgggtgtttcctcaccacgctgggcgcttggtgagcacgttctgccttgagacctggcatttctttgataacatttcttctcgtttcctgctcattctggaactcctgtcagtcagatgttgggccttttggatagattctgtgagtccttctttctacctttgcttgtagataagattttccttgaatccaaacacacacactctctctgctttttaaaaaattagttttggggctggatgtagtggcttacacctgtagtcccaggcactttgggaggccgaggcaggcagatcacttgaggtcaggagttccagaccagcctggccaacatggtgaaaccccgtctctactaaaaatacaaaaagtagctgaatgtggtggtgtgcacctgtaatcccagctactcaggaggctgaggcaggagactggcttgaacccgggtggcagaggttgcagtgagccgaaatcacaccactgtactccagcctggtgacagagccagactgttttaaaataaataaaaataaaaaattggttttgg

SEQ ID NO: 47865 - DNA, 687 bp, Homo Sapiens
atggggcgcgcgcgcgacgccatcctggatgcgctggagaacctgaccgccgaggagctcaagaagttcaagctgaagctgctgtcggtgccgctgcgcgagggctacgggcgcatcccgcggggcgcgctgctgtccatggacgccttggacctcaccgacaagctggtcagcttctacctggagacctacggcgccgagctcaccgctaacgtgctgcgcgacatgggcctgcaggagatggccgggcagctgcaggcggccacgcaccagggctctggagccgcgccagctgggatccaggcccctcctcagtcggcagccaagccaggcctgcactttatagaccagcaccgggctgcgcttatcgcgagggtcacaaacgttgagtggctgctggatgctctgtacgggaaggtcctgacggatgagcagtaccaggcagtgcgggccgagcccaccaacccaagcaagatgcggaagctcttcagtttcacaccagcctggaactggacctgcaaggacttgctcctccaggccctaagggagtcccagtcctacctggtggaggacctggagcggagctgaggctccttcccagcaacactccggtcagcccctggcaatcccaccaaatcatcctgaatctgatctttttatacacaatatacgaaaagccagcttgaa

SEQ ID NO: 47866 - DNA, 1131 bp, Homo Sapiens
atgcgcagcgcgacggcgcggccccgacggcgagcgcgccgcgagggcgagggagggcggcaccgaggcccacccccggaccccgcgcgttccagttacccgacgcgggtgcagccccgccggcctacgaaggggacacaccggcgccgcccacgcctacggccctttgacttcgcccgctatttgcgcgccaaggaccagcggcggtttccactgctcattaaccagccgcacaagtgccgcggcgacggcgcacccggtggccgcccggacctgcttattgctgtcaagtcggtggcagaggacttcgagcggcgccaagccgtgcgccagacgtggggcgcggagggtcgcgtgcagggggcgctggtgcgccgcgtgttcttgctgggcgtgcccaggggcgcaggctcgggcggggccgacgaagttggggagggcgcgcgaacccactggcgcgccctgctgcgggccgagagccttgcgtatgcggacatcctgctctgggccttcgacgacaccttttttaacctaacgctcaaggagatccactttctagcctgggcctcagctttctgccccgacgtgcgcttcgtttttaagggcgacgcagatgtgttcgtgaacgtgggaaatctcctggagttcctggcgccgcgggacccggcgcaagacctgcttgctggtgacgtaattgtgcatgcgcggcccatccgcacgcgggctagcaagtactacatccccgaggccgtgtacggcctgcccgcctatccggcctacgcgggcggcggtggctttgtgctttccggggccacgctgcaccgcctggctggcgcctgtgcgcaggtcgagctcttccccatcgacgacgtctttctgggcatgtgtctgcagcgcctgcggctcacgcccgagcctcaccctgccttccgcacctttggcatcccccagccttcagccgcgccgcatttgagcaccttcgacccctgcttttaccgtgagctggttgtagtgcacgggctctcggccgctgacatctggcttatgtggcgcctgctgcacgggccgcatgggccagcctgtgcgcatccacagcctgtcgctgcaggccccttccaatgggactcctag

SEQ ID NO: 47867 - DNA, 951 bp, Homo Sapiens
atggctcctgaaaatttcaccagagtcactgagtttattcttacaggtgtctctagctgtccagagctccagattcccctcttcctggtctttctggtgctctatgggctgaccatggcagggaacctgggcatcatcaccctcaccagtgttgactctcgacttcaaacccccatgtactttttcctgcaacatctggctctcattaatcttggtaactctactgtcattgcccctaaaatgctgattaactttttagtaaagaagaaaactacctcattctatgaatgtgccacccaactgggagggttcttgttctttattgtatcggaggtaatcatgctggctttgatggcctatgaccgctatgtggctatttgtaaccctctgctgtacatggtggtggtgtctcggcggctctgcctcctgctggtctccctcacatacctctatggcttttctacagctattgtggtttcatcttatgtattctctgtgtcttattgctcttctaatataatcaatcatttttactgtgataatgttcctctgttagcattatcttgctctgatacttacttaccagaaacagttgtctttatatctgcagcaacaaatgtggttggttccttgattatagttctagtatcttatttcaatattgttttgtctattttaaaaatatgttcatcagaaggaaggaaaaaagccttttctacctgtgcttcacatatgatggcagtcacaattttttatgggacattgctattcatgtatgtgcagccccgaagtaaccattcactggatactgatgataagatggcttctgtgttttacacgttggtaattcctatgctgaatcccttgatctacagcctgaggaataaggatgtgaagactgctctacagagattcatgacaaatctgtgctattcctttaaaacaatgtaa

SEQ ID NO: 47868 - DNA, 1293 bp, Homo Sapiens
gcctttgtcactgggctggaagagcagttgggaaaattcggtgataaatgcatagcccggggctgggaccatcaaggggacccactgcacaagatccagcaggatgtggcagaacatcacaagcagataggaaacgtcttacagattgtggagagctgcagccaactccagggtttccagtctgaggaggtctcacctgctgaaccagccagccctgggacgccccagcaggtgaaggacaagaccctgcaggagtcgagctttgaggacatcatggccaccaggtcctccgactggctccggcggcctttgggggaggacaatcagccggagacccagctgttctgggacaaggagccttggttttggcacgacactctgaccgagcaactctggcggatttttgccggcatgcggatcttggcacacggggagctcgtgctcgccacggccatcagcagcttcacgcggcacgtgttcacctgtggcagaagaggcatcaaggtgtggagcctgactggacaggtggctgaggacaggttccctgagagccacctgcctatacagacccctggggccttcctgcgcacctgcctgctgtcctcaaacagcaggagcctgctcaccggtggctacaacctggccagcgtgagcgtgtgggacctggcggcgccctccctgcatgtgaaggagcagttgccctgtgcaggtctcaactgccaggccctggatgccaacctggatgccaacctggccttcgccagcttcaccagtggtgtggtcaggatctgggacctgcgggatcagagtgtggtcagggacctcaagggttatcctgatggagtcaagagtatcgtggtcaagggctacaacatctggactgggggtccggatgcctgtctgcggtgctgggaccagaggaccatcatgaaacctctggagtaccaattcaagtctcagataatgagcctgtcccacagcccccaggaggactgggtgctgctgggcatggccaatggccagcagtggctgcaaagcaccagcgggagccagcggcacatggtggggcaaaaagacagcgtcatcctgagcgtcaagttctccccctttggccagtggtgggcaagcgttggaatggacgacttccttggcgtctacagcatgccggcggggacaaaagtgttcgaggtgcctgagatgtctccagtcacgtgctgtgacgtctcttccaacaaccgcctcgttgtcacaggctccggggagcacgcctccgtgtaccagatcacctactga

SEQ ID NO: 47869 - DNA, 2328 bp, Homo Sapiens
ttggctatctttctatttcagaggtgtggcgaaatcttgtttgagaaccccgatcagaatgccaaatgtgtttgcatgctgggagatatacgactaaggggtcagacgggggttcgtgctgaacgccgtggctcctacccattcattgacttccgcctacttaacagtacaacatactcaggggagattggcaccaagaaaaaggtgaaaagactattaagctttcaaagatacttccatgcatcaaggctgcttcgtggaattataccacaagcccctctgcacctgctggatgaagactaccttggacaagcaaggcatatgctctccaaagtgggaatgtgggattttgacattttcttgtttgatcgcttgacaaatggaaacagcctggtaacactgttgtgccacctcttcaatacccatggactcattcaccatttcaagttagatatggtgaccttacaccgatttttagtcatggttcaagaagattaccacagccaaaacccgtatcacaatgctgttcacgcagccgacgtcacccaggccatgcactgctacctgaaagagccaaagcttgccagcttcctcacgcctctggacatcatgcttggactgctggctgcagcagcacacgatgtggaccacccaggggtgaaccagccatttttgataaaaactaaccaccatcttgcaaacctatatcagaatatgtctgtgctggagaatcatcactggcgatctacaattggcatgcttcgagaatcaaggcttcttgctcatttgccaaaggaaatgacacaggatattgaacagcagctgggctccttgatcttggcaacagacatcaacaggcagaatgaatttttgaccagattgaaagctcacctccacaataaagacttaagactggaggatgcacaggacaggcactttatgcttcagatcgccttgaagtgtgctgacatttgcaatccttgtagaatctgggagatgagcaagcagtggagtgaaagggtctgtgaagaattctacaggcaaggtgaacttgaacagaaatttgaactggaaatcagtcctctttgtaatcaacagaaagattccatccctagtatacaaattggtttcatgagctacatcgtggagccgctcttccgggaatgggcccatttcacgggtaacagcaccctgtcggagaacatgctgggccacctcgcacacaacaaggcccagtggaagagcctgttgcccaggcagcacagaagcaggggcagcagtggcagcgggcctgaccacgaccacgcaggccaagggactgagagcgaggagcaggaaggcgacagcccctaggggccggcccaacttagacgcggctctcctccggcagggcccccagagggcagaagcagcgtggaggggccctcacgcagcagcccagccactttctgagtgttgtcctggggctctttggaacgccatcttcctcccacttacctgcctcccctccttttcgcaaatgtacagaagccatttgtcacctcagcattcgctgccgaaatgagcaactccattcagtaacgtgggagctgatcccacgggcaggctctccctgctccaggagaagactaggaggaagaatgaggtgctcctgccgtgtccgccttgttccgggtcgcactggaacaggcagcaattcctaagtccggagcgtttgagcgtttgctatctgactgctgatctgcgtgacagaaacaccagcatatttgcaacgccaaggatattggtcttaagtgcaagagcacaaatgagagtgtgagagaaagtaccttctattttaataataatattattataaaaataataaatctttttaacttttatattttatgcactagacaatggatctgcaactttggactaaggtcattcaatgtacccaaacttgaacagggggttcattgttttgctattgactttattatgccactttggggcagagacttggcatcttcgcagtttaagaaaccacgtttcctatccaatccgaagggaaggtgctgtacagttcattcctttgcaccattagccaatctgtcttttatggattctgtgacatgtttatattcacccatgtacattttctgtaaataccaaacgctactgattcccatgccaaaatacatgagtattatgggattgctacctgtataaacaatggcactgtgaaaatactgttagttttaatacaagagaatgcatttgtaaatatggtatagagtttattaatatactattgtttgcagataaaggccttaactttaaaca

SEQ ID NO: 47870 - DNA, 1359 bp, Homo Sapiens
gagttccacatctgatacccaggagtctccagcttccaagagaggtcgggtcacagccagcagctatgtctgacataaatcttgactgggttgacaggcgtcagttgcagcgcttggaggaaatgctgattgttgtggatgagaatgataaggttattggtgccgacaccaagaggaattgccatctgaacgaaaacattgagaaagggctgctgcaccgagccttcagcgttgtcttgtttaacaccaagaatcgaatcctgatacagcagaggtcggacacgaaagtcacgtttcctgggtattttaccgactcctgtagtagccacccattatacaacccagcagaactggaagaaaaggatgccatcggagtgaggagggcagcccagaggcgtctgcaagcagagctgggaattcctggggagcagatttctccagaggacattgtgttcatgacaatctatcaccacaaggcaaaatcagacagaatttggggagagcatgaaatttgttaccttctgcttgtgaggaaaaacgtcactctgaacccggatcccagtgaaacgaaaagcatcctctacctgtcccaggaggagctgtgggagctgctggagagggaggcgaggggtgaagtcaaagtcaccccctggctaagaaccattgccgagaggtttctgtaccggtggtggcctcacctggatgacgtgaccccgtttgtggagcttcacaaaatacacagagtgtgagaggcagggaggtcgagtcagccatgtgtaatgccctcagtgcaggcagacgcaccattgaggcaatgatacaccctctccaaaaaacagggcaaaaggggcacttgattgcccatcatgtataaatcactatttcaaccttttcatcaactttgtcatatcttcattttcccttttccttatttccatatttctcatctgcctggttgcagggaggaaatttaacatttcctttgtcccaatttccattttataagcacttgtttgattaacagcagctgatcctgaaagtcttggggagatcttgagagtcctgaagcaggcggactagcctggctggaccatgaggctgtctccccacagctttatccaagcctccaaggtcaggatgggatctctgtatcatgtttttctttttaaatcacttatttcagagtgcaacacaaggctgcatttttaaaaaaaagacacattcaatcttgcatcctaatacaagcagtacggaagatgcgtatggtctcagccaagtgactcgacgtttatccacttctgttcatttgatcgtttcagtaatatgcttacaaataaagacatacttgctttaaaacat

SEQ ID NO: 47871 - DNA, 369 bp, Homo Sapiens
atgagggtgaaaggttataaggccctgccccctttccagctgcccacctgttcctcctccacacctcttcgctttgggccaccaagaaccaatgaagtccacaccctttggatgagaaaaagagggagttggttggcctctcttctccctgttatccaatttgaggatattttgaccttgggtaaggatgaagtgttaaagccacagctcctctccacaagaagccattcatcttgggggaggcagagagggaagtctctctccaaagtctatccagcttcgcttcgtttcattgatctgcacaagagacaatgctctggaaaaggaagaggaccccagaagggtgcttggcaagacagaggatgctaa

SEQ ID NO: 47872 - DNA, 1440 bp, Homo Sapiens
ggcaaaggcagctcgagcatctcatctgacgtgagttcaagtacagatcacacgcccactaaagcccagaagaatgtggctaccagcgaagactccgacctgagcatgcgcacactgagcacgcccagcccagccctgatatgtccaccgaatctcccaggatttcagaatggaaggggctcgtccacctcctcgtcctccatcaccggggagacggtggccatggtgcactccccgcccccgacccgcctcacacacccgctcatccggctcgcctccagaccccagaaggagcaggccagcatagaccggctcccggaccactccatggtgcagatcttctccttcctgcccaccaaccagctgtgccgctgcgcgcgagtgtgccgccgctggtacaacctggcctgggacccgcggctctggaggactatccgcctgacgggcgagaccatcaacgtggaccgcgccctcaaggtgctgacccgcagactctgccaggacacccccaacgtgtgtctcatgctggaaaccgtaactgtcagtggctgcaggcggctcacagaccgagggctgtacaccatcgcccagtgctgccccgaactgaggcgactggaagtctcaggctgttacaatatctccaacgaggccgtctttgatgtggtgtccctctgccctaatctggagcacctggatgtgtcaggatgctccaaagtgacctgcatcagcttgacccgggaggcctccattaaactgtcacccttgcatggcaaacagatttccatccgctacctggacatgacggactgcttcgtgctggaggacgaaggcctgcacaccatcgcggcgcactgcacgcagctcacccacctctacctgcgccgctgcgtccgcctgaccgacgaaggcctgcgctacctggtgatctactgcgcctccatcaaggagctgagcgtcagcgactgccgcttcgtcagcgacttcggcctgcgggagatcgccaagctggagtcccgcctgcggtacctgagcatcgcgcactgcggccgggtcaccgacgtgggcatccgctacgtggccaagtactgcagcaagctgcgctacctcaacgcgaggggctgcgagggcatcacggaccacggtgtggagtacctcgccaagaactgcaccaaactcaaatccctggatatcggcaaatgccctttggtatccgacacgggcctggagtgcctggccctgaactgcttcaacctcaagcggctcagcctcaagtcctgcgagagcatcaccggccagggcttgcagatcgtggccgccaactgctttgacctccagacgctgaatgtccaggactgcgaggtctccgtggaggccctgcgctttgtcaaacgccactgcaagcgctgcgtcatcgagcacaccaacccggctttcttctga

SEQ ID NO: 47873 - DNA, 771 bp, Homo Sapiens
atgaggtcttgctgtgttgtccaggctggtctgcagctcctggcctcaagtgatcctccttcttcagcttcccaaagtgctaggattacaggcgtgaaccaccgcactccgccaagggagatcaagagcaacaagacagttctgcacttggccgtgcaggctgccaaccccactctggttcagctgctgctggagctgccccggggagacctgcggacctttgtcaacatgaaggcccacgggaacacagccctccacatggcggctgccctgccccctgggccggcccaggaggccatcgtgcggcacctgttggcagctggggcggaccccacactgcgcaacctggagaatgagcagcccgttcacctgctgcggcccgggccgggccctgaggggctccggcagctgttgaagaggagccgtgtggcgccgccaggcctgtcctcttaggactcaaacccagaccctggactgattttccagtccccaccgtcctgcgggacagccagcgtatgctaatgttgcaaacccatgataatgtatgtggaatatcctgccattggggttttacattaaaaccccagaatggctgcagaggggtgaacaggccccaatatttggggtgctgtgatacccctcttctacccacaaggagccctcttgatgatttctgtgaaatcgaggccccttgattgtttctgtgaaacaccctgcacccctagtcctttccccactgagatctttcgggttctctcccctaactcagct

SEQ ID NO: 47874 - DNA, 1727 bp, Homo Sapiens
ccagagtcctttgagaagaacattcaaatccaaagttctcgcccactatcctcagaatatagaatggaacccttttgatcaagatgcggtgaacatgttgtgcatgcctaaagggctatctttcaggacacaaacggacaataaagacccccagtttcactcatttataattaccagggaagatggttctcgcacctatggttttgttctcactttttatgaagaagttacaagtaagcaaatctgcacagcaatgcagacactttaccagatgcacaacgctgagcattacagcagtgtgtatgcttcatcttcctgcagtatggactcattggcaagtagtcttgatgaaggagatacaacttcccttttgaaactccagcgatacaactcctatgatattagcagagacaccctgtatgtttcaaaaagtatatgcttgatcacaccgttaccattcatgcaggcctgcaagaaattccttatccagctttacaaggctgttacctcacagcagccaccacccttgccacttgaaagctatatccacaatattctttatgaagtaccccttccacctccagggaggtcactgaaattttatggtgtttatgaacctgtcatctgccagaggcctgggcccagtgaactccccctctctgattacccccttcgggaggcatttgagctcctgggattagagaacctggtgcaggtgtttacctgtgttcttttagagatgcaaatccttctctactcacaagattatcaacgcctgatgactgtggcagaaggcatcaccacacttttgttcccatttcaatggcaacatgtttatgtgcccattctacctgcttctctgctacattttcttgatgctcctgtcccttatctgatgggccttcagtcaaaagaaggaactgaccgttctaaactagaacttcctcaagaggctaatttgtgttttgtggacattgacaaccattttattgagttgcctgaagaatttccacagttccccaataaagtggattttatccaagaactctctgaggttcttgttcaatttgggatccctcctgagggcagcctacattgcagtgagagtaccagcaaactgaagaatatggttctgaaagacttggtcaatgacaaaaagaacggcaatgtctgtactaataacatcagcatgtatgagttactgaagggcaatgaaaccatagcccgcttgcaggctctggccaagcgtactggtgtggctgtggaaaaaatggacctctctgcttctctgggtgaaaaagacaaggatttaaaactgcattgtgaagaggcagaactaagggactaccagctcaatgtacagctccgagaggtctttgctaaccgttttacacagatgtttgcagattacgaagcatttgtcattcagactgcccaggacatggaatcctggctgaccaaccgggaacagatgcagaactttgacaaagtaaaaagaaccatagttttccttttgtggttattagtggctttattattgattttaacatttttaaattttttattcttctgtgcctatgcttacccatatattattgattttgttaaccttttttaaatgcagactttttgtcttccagccccattaagaacttttctttaccaagtatttttacattagataaaataattttacaagcaaataaaccagctcattgaactggtca

SEQ ID NO: 47875 - DNA, 990 bp, Homo Sapiens
ggactgttgacattcagagacatagctatagaattttctctggcggaatggcaatgcctggatcatgctcagcagaatttatatagagatgtgatgttagagaactacagaaacctggtctccctgggtattgctgtctctaagccagacttgatcacctgtctggagcaaaataaagagccccagaatataaagagaaatgagatggtagccaaacacccagttacatgttctcatttcacccaagaccttcagtcagagcagggcataaaagattcactccaaaaagtgatactgagaagatatggaaaatgtggacaggaggatttacaagtaaaaaaatgctgtaaaagtgtaggtgagtgtgaggtgcacaaaggaggttataattatgttaaccaatgtttgtcagctacccaaaacaaaacatttcagactcataaatgcgtcaaagtctttggtaaattttcaaattccaatagacacaagacaagacatactggaaagaaacatttcaaatgtaaaaacgatggcaaatcattttgcatgctttcacgcctaaatcaacatcagataattcatactagggagaagtcttacaaatgtgaagaatgtggcaaatcctttaactgctcttcaacccttactagacataaaagaattcatactggagagaaaccctacagatgtgaggaatgtggcaaagcttttagctggtctgcatcccttactaaacataagagaattcatactggagagaaaccttacacatgtaacgtggcaaagtctttagccgctcaacacttactaactacaagagaattcatactggagagaaaccctacacatgtgaagaatgtggcaaagcctttagccgctcttcaacacttactaaccacaagagaattcatactggagagagaccctacaaatgtgaagaatgtggcaaagcctttagcttatcctcaacccttaagaaacataagatag

SEQ ID NO: 47876 - DNA, 1828 bp, Homo Sapiens
agagggatgcgggcggcagagctcgagaggcggctgccgggctgcggggcgccttgactctccctccaccctgcctcctcgggctccactcgtctgcccctggactcccgtctcctcctgtcctccggcttcccagagctccctccttatggcagcagcttcccgcgtctccggcgcagcttctcagcggacgaccctctcgctccggggctgagcccagtccctggatgttgctgaaactctcgagatcatgcgcgggtttggctgctgcttccccgccgggtgccactgccaccgccgccgcctctgctgccgccgtccgcgggatgctcagtagcccgctgcccggcccccgcgatcctgtgttcctcggaagccgtttgctgctgcagagttgcacgaactagtcatggtgctgtgggagtccccgcggcagtgcagcagctggacactttgcgagggcttttgctggctgctgctgctgcccgtcatgctactcatcgtagcccgcccggtgaagctcgctgctttccctacctccttaagtgactgccaaacgcccaccggctggaattgctctggttatgatgacagagaaaatgatctcttcctctgtgacaccaacacctgtaaatttgatggggaatgtttaagaattggagacactgtgacttgcgtctgtcagttcaagtgcaacaatgactatgtgcctgtgtgtggctccaatggggagagctaccagaatgagtgttacctgcgacaggctgcatgcaaacagcagagtgagatacttgtggtgtcagaaggatcatgtgccacagatgcaggatcaggatctggagatggagtccatgaaggctctggagaaactagtcaaaaggagacatccacctgtgatatttgccagtttggtgcagaatgtgacgaagatgccgaggatgtctggtgtgtgtgtaatattgactgttctcaaaccaacttcaatcccctctgcgcttctgatgggaaatcttatgataatgcatgccaaatcaaagaagcatcgtgtcagaaacaggagaaaattgaagtcatgtctttgggtcgatgtcaagataacacaactacaactactaagtctgaagatgggcattatgcaagaacagattatgcagagaatgctaacaaattagaagaaagtgccagagaacaccacataccttgtccggaacattacaatggcttctgcatgcatgggaagtgtgagcattctatcaatatgcaggagccatcttgcaggtgtgatgctggttatactggacaacactgtgaaaaaaaggactacagtgttctatacgttgttcccggtcctgtacgatttcagtatgtcttaatcgcagctgtgattggaacaattcagattgctgtcatctgtgtggtggtcctctgcatcacaaggaaatgccccagaagcaacagaattcacagacagaagcaaaatacagggcactacagttcagacaatacaacaagagcgtccacgaggttaatctaaagggagcatgtttcacagtggctggactaccgagagcttggactacacaatacagtattatagacaaaagaataagacaagagatctacacatgttgccttgcatttgtggtaatctacaccaatgaaaacatgtactacagctatatttgattatgtatggatatatttgaaatagtatacattgtcttgatgttttttctgtaatgtaaataaactatttatatcacacaatatagttttttctttcccatgtatttgttatatataataaatactcagtgatgagaaaaaa

SEQ ID NO: 47877 - DNA, 786 bp, Homo Sapiens
cacacggactgcctggtctccgcgctgcaccactgcttcgacggccccacgggggagctggcccacgccttcttccccccgcacggcggcatccacttcgacgacagcgagtactgggtcctgggccccacgcgctacagctggaagaaaggtgaccgtccaggctcctggaggcctctcctctgcagcacagtgggctgccgcggtcgggctttggggcagacggcaggagggaccttccggggtggtggctgccactggagcgtgtggctcacggacctggtgcacgtggcggcccacgagatcggccacgcgctgggcctgatgcactcacaacacggccgggcgctcatgcacctgaacgccacgctgcgcggctggaaggcgttgtcccaggacgagctgtgggggctgcaccggctctacggatgcctcgacaggctgttcgtgtgcgcgtcctgggcgcggaggggcttctgcgacgctcgccggcggctcatgaagaggctctgccccagcagctgcgacttctgctacgaattccccttccccacggtggccaccaccccaccgccccccaggaccaaaaccaggctggtgcccgagggcaggaacgtgaccttccgctgcggccagaagatcctccacaagaaagggaaagtgtactggtacaaggaccaggagcccctggagttctcctaccccggctacctggccctgggcgaggcgcacctgagcatcatcgccaacgccgtcaatgagggcacctacacctgcgtggtgcgc

SEQ ID NO: 47878 - DNA, 492 bp, Homo Sapiens
atggtcaaccccactgtgttcttcgacatcagtgtcagtggcaagcccttgggccatgtctccttcaggatatttgcagacaagctttcaaagacagcacaaaactttcgtgctctgagcactggagagaaaggacttgattataagggttcctgctttcacagaattattccagggtttatgtgtcagggtggtgacttcacgtacaataatggcactggtggcaagtccctctatggggagaaatttgatgatgagaacttcatcctgaagcgtatacgtcctggcatcttgtccatggcaaaagctggacccaacacgaatggctcccagtttttcatctgcactgccaagactgagtggttgattggcaagcatgtggtctttggcaaggtgaaagagggcatgaatattgtggaggccatggagccctttgggtccaggaatggcaagaccagcaagaagatcaccattgctgattgtggacaactc

SEQ ID NO: 47879 - DNA, 168 bp, Homo Sapiens
atgatactagctgtgggtttatctgtctgtggcttttattgtgttgaggcatgttccttctacatccagttgagtttttatcatgaagggatgctgaattttactgaatacttttttggcatctatagaaatggacatatggttatgtccttcattcttttgatgtga

SEQ ID NO: 47880 - DNA, 1170 bp, Homo Sapiens
gccgctcctgccgtgcatgttggggagccagtacatgcaggtgggctccacacggagaggggcgccgaccccgtgatagggctttacctggtacatcggggtggcgcgtgccagacaccaacggtcggaaaccgccagacaccaacgctcggaatccacgccaggccacgacggagggcgactacctcccttctgaccctgctgctggcgttcggaaaaaacgcagtccggtgtgctctgattggtccaggctctttgacgtcacggactcgacctttgacagagccactaggcgaaaaggagagacgggaagtattttttccgccccgcccggaaagggtggagcacaacgtcgaaagcagccgttgggagcccaggaggcggggcgcctgtgggagccgtggagggaactttcccagtccccgaggcggatccggtgttgcatccttggagcgagctgagagctcgagtacagaacctgctaaggccatcaaacctattgatcggaagtcagtccatcagatttgctctgggccggtggtaccgagtctaagcactgcggtgaaggagttagtagaaaacagtctggatgctggtgccactaatattgatctaaagcttaaggactatggagtggatctcattgaagtttcaggcaatggatgtggggtagaagaagaaaacttcgaaggcttaactctgaaacatcacacatctaagattcaagagtttgccgacctacctcaggttgaaacttttggctttcggggggaagctctgagctcactttgtgcactgagtgatgtcaccatttctacctgccatgtatcggcgaaggttgggactcgactggtgtttgatcactatgggaaaatcatccagaaaaccccctacccccaccccagagggatgacagtcagtgtgaagcagttattttctacgctacctgtgcaccataaagaatttcaaaggaatattaagaagaaacgtgcctgcttccccttcgccttctgccgtgattgtcagtttcctgaggcctccccagccatgcttcctgtacagcctgcagaactgactcctagaagtaccccaccccacccctgctccttggaggacaacgtgatcactgtattcagctctgtcaagaatggtccaggttcttctagatga

SEQ ID NO: 47881 - DNA, 639 bp, Homo Sapiens
atgggggacatcttcaccaacttcttaaagggcttttttggcacaaaagaagtgcccatcatcatggtgggcctggatgctgcaaggaagacgccaatcctgtacaagctgaagttgggcgagattatgaccaccgtccccaccttagacttcagcgtggagaatgcggagtacaagaacatcagcttcagcctgtgggatgggtggccaggacaaggccactacttccagtgcacacaaggcctgatcctcgtggtggactgcaatgacagagagctcatggacgaggcccaggaggggctcatgaggatgctagctggggtcaatcttgggatgcagtccccaacaagcggggcctccccaacaccaagaatgcagccgggatcacagacacgttggggctcactccctaccacaggaactggtatattcaggctacccgcaccatcagcggcgacgggctctgtgaaggactggacttgtcccagcagctcccaaaccagaagtgaacgaaccccgatcctctcactcctcctcttgccttccactttactctcatgtagcaaatgtgtagtttggtgtgagtgccagaagctgcctctgtggttgagtcaccatgtgcatctcaccgtgctgtaa

SEQ ID NO: 47882 - DNA, 939 bp, Homo Sapiens
atgatgattaaaaaaaatgcaagttcggaagacttctttattctacttggattttctaattggcctcagctggaagtagttctctttgtggttatcttgatcttctacctgatgacactgacaggaaacctgttcatcatcatcctgtcatacgtggactcccatctccacacaccaatgtacttcttcctttcaaacctctcatttctggatctctgccacaccaccagctctatccctcagttgctggtgaatctccggggcccggaaaagaccatctcgtatgctggttgcatggttcaactttactttgttcttgcactgggaatcgcagagtgtgtcctactggtggtgatgtcgtatgatcgttatgtagctgtgtgtagacctttgcattacactgtcctcatgcaccctcgtttctgccacttgttggctgcggcttcttgggtaattggttttactatctcagcacttcattcctcctttactttctgggtacccctttgtggacatcgcctagtggatcacttcttctgtgaagttccagcacttctgcgtttatcatgtgttgacacccatgcaaatgagctgaccctcatggtcatgagctccatttttgttctcatacctctcattctgattctcactgcctatggtgccattgcccgggctgtactgagcatgcaatcaaccactgggcttcagaaagtgtttaggacatgtggagcccatcttatggttgtatctctctttttcattccagtcatgtgcatgtatctccagccaccatcagaaaattctcctgatcagggcaagttcattgccctcttttatactgttgtcacaccgagtcttaatcctctaatctacactctcagaaacaagcatgtaaaaggggcagcgaagagactattggggtgggagtgggggaagtga

SEQ ID NO: 47883 - DNA, 2120 bp, Homo Sapiens
catggagttcccgttcgatgtggacgcgctgttcccggagcggatcacggtgctggaccagcacctgaggcccccagcccgccgacccggaaccacaacgccggcccgtgttgatctacagcagcaaattatgaccattatagatgaactgggcaaggcttctgccaaggcccagaatctttccgctcctatcactagtgcatcaaggatgcagagtaaccgccatgttgtttatattctcaaagacagttcagcccgaccggctggaaaaggagccattattggtttcatcaaagttggatacaagaagctctttgtactggatgatcgtgaggctcataatgaggtagaaccactttgcatcctggacttttacatccatgagtctgtgcaacgccatggccatgggcgagaactcttccagtatatgttgcagaaggagcgagtggaaccgcaccaactggcaattgaccgaccctcacagaagctgctgaaattcctgaataagcactacaatctggagaccacagtcccacaggtgaacaactttgtgatctttgaaggcttctttgcccatcaacatcggccccctgctccctctctgagggcaactcgacactctcgtgctgctgcagtcgatcccacgcccgctgctccagcaaggaagctgccacccaagagagcagagggagacatcaagccatactcctctagtgaccgagaatttctgaaggtagctgtggagcctccttggcccctaaacagggcccctcgccgcgccacacctccagcccacccacccccccgctccagcagcctgggaaactcaccagaacgaggtcccctccgcccctttgtgccagagcaggagctgctgcgttccttgcgcctctgccccccacaccctaccgcccgccttctgttggctgctgaccctgggggcagcccagctcaacgtcgtcgcaccagctcccttccccgctctgaggagagtcgatactaacagctaccctatccctgccctgggagacctggggtgggcagggaacccctccctgagaacctcagacccactcttccattgcatcctgtaggacccagtggaacctgacagagcccataggattccctcttctactttcttagacagcagggatgtcagggtctcaaactgcctaacactttgtagcttttcttaacacaaaagcaccccttctctcctaacttgggctctgaatactttcccaacaggaagtctgatctgttgccagacttcttggttagatggctcatacatttatctagagaagcacactcttgcttgctgtcaaactttagaacaccatggaaggtctaagggcatcctgtgccagggaaactttttaaggaattttatctatgggataaaccccatattccctctagtgtctactggtggctctaatactgctttgtgctgcctgccacacttgccctttgagcctgcgaatggccgctagtgagcaagctctgcttcagagcagtctagttaggtagaacagggacttaccagcttcccaaagggatctactcaccattgccaaactcttcatttccacattttgtgtaggtgtcagggaaccccaaactggtgttgctttggggtctctaaaggagattggctgacaccaccatttcccccagatccagattctctgagggaggttgtttcttgagagtagatccagagtgtcaaggatctgttagatcctggaatcccttcttgcatccatccctccctggtagctaggtcccgatatactcctgtcttgtgagattgtcgagatgagatgggggaccactcttcctctgtccttcctctctcctttcctccatagcaaggacgaccttccctgctccatgcccagagtatagctagatcccttcccctccctaccctctgaatgtgtgctagatcaggtgccccactgtgtttcctgaaatccttgggagccggatctccccatctcccctactcactcttcccttttcttctctcagtgttgtctgaataaagtgtgaaatcttttgtgttttctaaattgacattttcaatgaaaaaaagaatcacaaaaaaaaaa

SEQ ID NO: 47884 - DNA, 819 bp, Homo Sapiens
atgatgagcttccgaagcgcggacgcgttgctgggcgccctgttcctgccgttgcacggcggtggcagcctccactacgctctggccccaaagagcggcacaggcgggacgcgctcggccgctggctcctccagcggcttccactcgtggacgtggacgtccgtgagctccgtgtccgcctcgcccagccgcgcctcgagcaccgactcgctggacacgctgagcaaccagccagagggatgcgtggtggcggctgctacaacgagcagtgaggaggagcagctgcaggcgccgacggaccgctttgcgggctacatcgacaaggagcggcagctggaggtgcacaaccgcagcctggagggcgaggcagcggccctgcagcagcagcaggcgggccgcgaggtccgtgagacgcgcggtgcgatgctgcgcgggcagctgcgcctggaacaggagcacctgctcgaggacatcgcgcacgtgtgccagcgcctcgacaacgagctctggcagcgcgaggaggccgaggcggcagcccgcgcactcacgcgctgcacgcaggaggccgaggcggcgcgcgtggaactgcagaagcaggtgcaagcgctgcaggaggagtgcggctacctgtcgcgccactaccaggaggagcaggtggtcgagctgctcggccagacccagggctgcggcgccgcgcaggtgcaggctgagttgcgcaacgctctcaagggcgaagtgacatcggcgctgagcgagatcggcgcgcagcttgaaggccatgcggtgcagagcacgctgcagtccgaggagtggttctga

SEQ ID NO: 47885 - DNA, 363 bp, Homo Sapiens
atgttaaagagcctagtgaatgaggtgactgacggaagctggtccatggtaggctgtctggcaggggctagagccgccatggaaaggcttacttgctgccagaaatgctacatgagcagaaagaaaatgggagaaaaacctggtttcctccccaccttgccctacgccaaagtagacagtccaatttctcttgctggaagtcagttgacaagggagcctgtaagagtcagccctcctacaagactgagcagagtgggagaaaagcaagcaatggatttgagggcaagcagtcccccaggactggtgtatattaatatgtattgcataagatctgcagcgaggggtcccagggtgctgcagtga

SEQ ID NO: 47886 - DNA, 1200 bp, Homo Sapiens
agacgctgtcgctgcgcacacctggcctctgtgccgcctgctccctgctcgtcctcccctccccaccctcacccacctgccatggacgggcccgccgagccccagatcccgggcttgtgggacacctatgaagatgacatctcggaaatcagccagaagttgccaggtgaatacttccggtacaagggcgtccccttccccgtcggcctgtactcgctcgagagcatcagcttggcggagaacacccaagatgtgcgggacgacgacatctttatcatcacctaccccaagtcaggcacgacctggatgatcgagatcatctgcttaatcctgaaggaaggggatccatcctggatccgctccgtgcccatctgggagcgggcaccctggtgtgagaccattgtgggtgccttcagcctcccggaccagtacagcccccgcctcatgagctcccatcttcccatccagatcttcaccaaggccttcttcagctccaaggccaaggtgatctacatgggccgcaacccccgggacgttgtggtctccctctatcattactccaagatcgccgggcagttaaaggacccgggcacacccgaccagttcctgagggacttcctcaaaggcgaagtgcagtttggctcctggttcgaccacattaagggctggcttcggatgaagggcaaagacaacttcctatttatcacctacgaggagctgcagcaggacttacagggctccgtggagcgcatctgtgggttcctgggccgtccgctgggcaaggaggcactgggctccgtcgtggcacactcaaccttcagcgccatgaaggccaacaccatgtccaactacacgctgctgcctcccagcctgctggaccaccgtcgcggggccttcctccggaaaggggtctgcggcgactggaagaaccacttcacggtggcccagagcgaagccttcgatcgtgcctaccgcaagcagatgcgggggatgccgaccttcccctgggatgaagacccggaggaggacggcagcccagatcctgagcccagccctgagcctgagcccaagcccagccttgagcccaacaccagcctggagcgtgagcccagacccaactccagccccagccccagccccggccaggcctctgagaccccgcacccacgaccctcataataaacacgtcgattctgtcca

SEQ ID NO: 47887 - DNA, 351 bp, Homo Sapiens
ctggagatgcagcctgagaacctcaaggaggacctggtctacctgaagaagaaccatgaggaggagatgaacgccccgcgaggccaggtgggcggtgagatcaatgtggagatgggcgctgccccaggtgtggacctgagcctcatcctgaacgagatacgtgagcagtatgagaagatggcaaagaagaaccgcaaggatgccgaggattggttcttcagcaagacagaggagctgaaccgcgaggtggctaccaacagtgagctggtccagagcggcaagagcgagatttcggagctccggtgcaccatgcaggccttggagatcgagctgcagtcccagctcatcatg

SEQ ID NO: 47888 - DNA, 879 bp, Homo Sapiens
gacgtgttggctagttgtagtatattccaggagctacaacttgtccacgacaccggctacttctcagctttgccatccctggagacctggcagcagcttgaattggaacgctacctacagacggagcccagaaggatctcggagacctttggtgaggacttggcctgtttgctccacccttctcctccccggtgcattgaggaaagcttccgtagcttagacctcctgctgctccccgtggaagcggccatctgtcagaagagctcagcagtcttgctctctcggggcaagttgctatctgagacctgcctcagcctccagccgaactcttctctagacagctacacagctgtcaaccaggtccagctcaacacaatgacctcattaatgcccccactgtcccctgagctcagccaccatctggtcaaaacctcacaaactctctctgccgtggatggcacggtgacgttgaaactcgtggccaagaaggctgctctcatctccgtaaaggtgggaggggtcacaacagcttcagcagctgtgggtgccagggccgttaagagtggacagagcgacagtgaccaaggagggctaggggctgaagcatgtcctgaaaacaagaagagggttcactgctgtcagtttaacgggtgccaggaagtttatacaaaaagctcccccttaaaggcccatcaggagactcacacaggtgagaagccttacaggtactcatgggagggatgcgtggagttttgcagcgatgagctcacgaggcactacgggaaacacacaggtgcaaacctcttcaaatgcaaccactgcaacaggtgtttttctaggtctgaccatcttgccctccctatgaagaaacatatctaa

SEQ ID NO: 47889 - DNA, 770 bp, Homo Sapiens
gaggggagaaaatgcccctggaaagggttaagggccaggacaggaatggggcaggaggtgcacggatcctgctgggcactgggagcagggggcggccaaaggcagtgggtgggcaggtccatgcctcccctggccccccagctctgcagggcagtgttcctggttcctatcttgctgctgctgcaggtgaagcctctgaacgggagcccaggccccaaagatgggagccagacagagaaaacgccctctgcagaccagaatcaagaacagttcgaagagcactttgtggcctcctcagtgggtgagatgtggcaggtggtggacatggcccagcaggaagaagaccagtcgtccaagacggcagctgttcacaagcactctttccacctcagcttctgctttagtctggccagtgtcatggttttctcaggagggccattgaggcggacattcccaaatatccaactctgcttcatgctcactcactgaccctccctccctcctgggctccaggtcacaactcccaaaggagatgcaggcatggctctctgcctctgatcaccatcactgtatctcaaggttcagcagcagagataccagttgccatcagtgctaactgactgcctctccaggttcggagtttcatctcccagggccagagacagcagacccacatccttctctcccacacctctcctggttttgttcaggacagcagattagaggcaggaggcaatgacaataaaataacgataaaatcctgagaacaa

SEQ ID NO: 47890 - DNA, 411 bp, Homo Sapiens
atgctcttctcgctccgggagctggtgcagtggctaggcttcgccaccttcgagatcttcgtgcacctgctggccctgttggtgttctctgtgctgctggcactgcgtgtggatggcctggtcccgggcctctcctggtggaacgtgttcgtgcctttcttcgccgctgacgggctcagcacctacttcaccaccatcgtgtccgtgcgcctcttccaggatggagagaagcggctggcggtgctccgccttttctgggtacttacggtcctgagtctcaagttcgtcttcgagatgctgttgtgccagaagctggcggagcagactcgggagctctggttcggcctcattacgtccccgctcttcattctcctgcagctgctcatgatccgcgcctgtcgggtcaactag

SEQ ID NO: 47891 - DNA, 231 bp, Homo Sapiens
atgctagatgctaaggaagagacttgctgtgatccttatcaagagaggcattatctgcatcagacaattttcatatggataaaacttgtctatttcgtggaaaaaaaatgcctaaggaaaatatataaacaacaagaagaatatggctgttttaaagttcgaaggactcaaatgagtacacattcattttgtgaagatgcaaatgaattacatgagccaaaaccctcttag

SEQ ID NO: 47892 - DNA, 405 bp, Homo Sapiens
atgacaagggaccagaatggaacctgggagatggagagtaatgaaaactttgagggctacatgaaggccctggatattgattttgccacccgcaagattgcagtacgtctcactcagacgaaggttattgatcaagatggtgataacttcaagacaaaaaccactagcacattccgcaactatgatgtggatttcactgttggagtagagtttgacgagtacacaaagagcctggataaccggcatgttaaggcactggtcacctgggaaggtgatgtccttgtgtgtgtgcaaaagggggagaaggagaaccgcggctggaagcagtggattgagggggacaagctgtacctggagctgacctgtggtgaccaggtgtgccgtcaagtgttcaaaaagaaatga

SEQ ID NO: 47893 - DNA, 2094 bp, Homo Sapiens
atgtcctacccgcagtttggatacccctactcctcggctccccagttcttgatggccaccaactccctgagcacgtgctgcgagtccggaggccgcacgctggcggactccgggcccgccgcctcggcccaggcgccggtctactgcccggtctacgagagccggctgctggccaccgcgcgccacgagctcaactcggccgcggcgctgggcgtctatgggggtccctatggcggatcgcagggctatggcaactacgtgacctacggctcggaggcgtccgccttctactcgctgaacagctttgattccaaggatggttcgggatctgcgcatgggggcctggcaccagccgctgccgcctactacccttacgagccagctctgggccagtacccctatgacaggtatggaaccatggacagcggcacgcggcgcaagaacgccacgcgcgagaccaccagcacgctcaaggcctggctgcaggagcaccgcaagaacccctaccccaccaagggcgagaagatcatgctggccatcatcaccaagatgaccctcacacaggtctccacctggttcgccaacgcgcgccggcgcctcaagaaggagaacaagatgacgtggccgccgcggaacaagtgcgcagacgagaagcggccctacgcggagggcgaggaggaggaggggggcgaggaggaggcgcgggaggagcccctcaagagctccaagaacgcagagcccgtgggcaaagaggagaaggagctggagcttagtgacttggacgacttcgacccgctggaagcagagccgccggcgtgcgagctgaagccgcccttccactccctggacggcggtctggagcgcgtccccgccgcgcccgacggcccggtcaaggaggcctcaggcgcgctccggatgtctctggccgcgggtggcggagctgctctggacgaggacctggagagggcccggagctgtctccgcagcgcggcggccgggccggagccactgccgggcgcagagggcggccctcaggtctgcgaggccaagctggggtttgtgccggcgggggcgtcggcaggcctggaggctaagccgcgcatctggtccctggcccacacagccaccgccgccgccgccgccgccacctccctgagccagactgagtttccgtcgtgcatgctcaagcgccaaggtcccgcggcccctgcggctgtgtcctccgcgcccgccacgtccccgtctgtggcccttccccactctggcgccctggacaggcaccaggactccccggtaaccagtctcagaaactgggtggacggggtcttccacgaccccatcctcaggcacagcactttgaaccaggcctgggccaccgccaagggcgccctcctggaccccgggcctctgggacgctcgctgggggcgggcgcgaacgtgctgactgcacccctggcccgcgcctttccgcctgccgtgccccaggacgccccagctgcaggcgccgccagggagctgctcgccctgcccaaggccggcggcaaacccttctgcgcctgaggcgggcgggtcccgagcccaggagggaacccgcgctcaggcggacggcgccgactcttttcactgagtttccagaggaagactagcgcggccaccgcgaagccgccaacccaccggagagggggcttctgaacttggactcctgggaacatggacaagcccggcgctgccacgccggggcctccaccgcctgggcctgagcctgaccgggccattcccaaatttgggacgcggaaggagaggctctcggagcagaagaggccagataccctgaagcataaagtttacgtcaaaagtttacatggagaaggcggttccgttctgaagcgtggtctgctgtcccctgggcgtgaggcctcctgggcctgtcgggcctccgatttcatcctcagcacgtaatgctcaccaacagcacttgcactgagttgactcttgcacactcttgactccataatatgatgctttttaagatgtatgttcacaccaataattgcctgcttcagaggctaatataacaaaaccaataaaaccgag

SEQ ID NO: 47894 - DNA, 951 bp, Homo Sapiens
cagctaactgttcagataatgcaaagtcctcagattcttgcagtccttcaagaaagacttgatgttctggtagaaacaccaacaggatacactgaaagcctgcctagggtagttaaaagacgagtgaatgctctcaaaaacctgcaagttaaatgtgcacagatagaaaccaaattctatgaggaagttcacgatcttgaaaggtatgctgttctctatcagcctctatttgataagcgatttgagattattaatgaaatttatgaacccacagaagaacaatataaagaagatgagatttcagaggagttgaaagaaaaggccaagatcgaagatgagaaaaaggatgaagaaaaagaagaccccaaagaaattcctgaattttggttaactgtttctaagaatgttgacttgttcagtgatatggttcaacaacatgatgaacctattctgaaacacttgaaagatactaaagtgaagctctcagatgctgaccagcctatgaattttgtcttagaatttcactttgaacccaatgaatattttacaaatgaaatgctgtcaaagacatacaggatgaggtcagaaccagatgattctgatcccttttcttttgatggactagaaattatgggttgcacagggtgccagatagattggaaaaaaggaaagaatgtcactttgaaaaccattaagaagaagcagaaacacaagggaagtgggacagttcatactgtgactaacacagtttccaatgactttaatttgtttgcccctcctgaagttcctgagagtggagatctggatgatgatgctgaaatccttgcagacttcaaaataggtcactttttacgtgagcgtataatcccaagagcagtgtcatactttactggagaagctattgaagttgatgatgatgtttatgatgaagaaggtgaagaagcggatgag

SEQ ID NO: 47895 - DNA, 501 bp, Homo Sapiens
atggtgcccgaggagaacgcggggaccgaactcttgctgcagagtttcgagcgccgcttcctggcggcgcgcgcactgcgttccttcccctggcagagcttagaagcaaagttaagagactcatcagattctgagcttctgcgggatattttgcagaatcccagatatttcgaggctgtccacacagagcttttggacaagctgtacgaggacctggcagagaccctgatggccaaggagtccacccagggccacccgagctatttgctgacgtgctgtattgcccagaatccatcgtgtcgctggtcgcggtcctgcggaggctggctgcctaccgggagcaccagcgggctcctcaagtctacgtggcccttatcgtccgcaacccagagacgtgccagctgttcaccaccgagctatgccgggccgggatcagatgggaagtggaacctcgtcatgaccagaaactgtttccctacgaagagcacttggagatggcaa

SEQ ID NO: 47896 - DNA, 1578 bp, Homo Sapiens
aatcaatgatgatattatttccatcactcataatactaaaaaagaatttatagatattgatgagaatcttttagaagtagaagcatttacagaagaggaaatggatatgcacatatcagactatgaagaagacattgaagaatctgttggaggtttcagaagtcccagtcttgccatttgcatgatgactttaccacagcagttagaagaagagttcacagaagaggttcagtgtcaaagggaagaaccactggagacaattatggaggaaaaatcgactgaacaaaaaggtatgatcgaagccttttcacatcctgggcataccactcctcaatcaatgcaagtagatacgagttcagaaatttctagtgcacagatttctacatataaagaaaaatcttcctcagttccacttctgatatcaaatggagtcaatgttgcttcacaaccacctgctccaacacctcagaagacccagagaaatgaattcacggctcagttaccagattgttcggagtccgttaggcagatgctgcaagatgaaatgtttaaattagttcagctgcaacagatcaacttcatgagcctaatgcaaatagtaggatcatcctttgctaatctcccagatacacaacaacttgtacagcagtctcagtctgtgcatttaggggaaagccaagaatcaaacctaagaggatgtggtgatgttgaagacagcaacaaaaatcttaaggagagattttttattaaaccacagtcaatgggagagaacgccagagagcctcgcaagaacagcccacactgccatgaaggaactatcccatctggtcaaaatagtactggaaacgtacagaatgttccacatgggagtattcctttatgtcaattaaatggccagccccggaaaaaaggaccaattccatcatctcaaaacttaccatccacttcgttttatccagctcctgctggaaatactcacctctaccttttgtccacaccttctgttgttcagaaggcacctagacttatcccacatgcaaaaacatttagtcctggtgatggctttcctttgcttcaatttaagtctaaacaagaattccagccccttttcttacatacaggaagtattccacaagttcccttcaggcctttgccacaaccaagagaggcttggggattatctgactccttccaacctgctctgccacagagagcagcacaaactactccagcatcccatttgaatgtaagccagtataacactgaagccagaaaaaaagaagttgagcagaagacgtgggcagaaactgtaattacagaaattcctaatcatgtgaacttggatcaatatgttggacaagaaaatttgacacctcaacaggactcttcagtgtttataaaaccagaaaaactatttgatgttaagccagggacccttgagatatctcctcaccattcctttggacttccgttactatacctgccacttaaacctcctaatatgtttccatcaacctcaagagcatctattacagttccctcaacacctatccaacctatagcagaagaaagaaaata

SEQ ID NO: 47897 - DNA, 1385 bp, Homo Sapiens
ccatgggcagcggcacacggcggcgcgatgatggacgttaacagcagcggccgcccggacctctacgggcacctccgctctttccttctgccagaagtggggcgcgggctgcccgacttgagccccgacggtggcgccgacccggtcgcgggctcctgggcgccgcacctgctgagcgaggtgacagccagcccggcgcccacctgggacgcgcccccggacaatgcctccggctgtggggaacagatcaactacggcagagtcgagaaagttgtgatcggctccatcctgacgctcatcacgctgctgacgatcgcgggcaactgcctggtggtgatctccgtgtgcttcgtcaagaagctccgccagccctccaactacctgatcgtgtccctggcgctggccgacctctcggtggctgtggcggtcatgcccttcgtcagcgtcaccgacctcatcgggggcaagtggatctttggacactttttctgtaatgtcttcatcgccatggacgtcatgtgctgcacggcctcgatcatgaccctgtgcgtgatcagcattgacaggtaccttgggatcacaaggcccctcacataccctgtgaggcagaatgggaaatgcatggcgaagatgattctctccgtctggcttctctccgcctccatcaccttacctccactctttggatgggctcagaatgtaaatgatgataaggtgtgcttgatcagccaggactttggctatacgatttactctaccgcagtggcattttatatccccatgtccgtcatgcttttcatgtactaccagatttacaaggctgccaggaagagtgctgccaaacacaagtttcctggcttccctcgagtggagccagacagcgtcatcgccctgaatggcatagtgaagctccagaaggaggtggaagagtgtgcaaacctttcgagactcctcaagcatgaaaggaaaaacatctccatctttaagcgagaacagaaagcagccaccaccctggggatcatcgtcggggcctttaccgtgtgctggctgccatttttcctcctctcgacagccagacccttcatctgtggcacttcctgcagctgcatcccactgtgggtggagaggacatttctgtggctaggctatgcaaactctctcattaacccttttatatatgccttcttcaaccgggacctgaggaccacctatcgcagcctgctccagtgccagtaccggaatatcaaccggaagctctcagctgcaggcatgcatgaagccctgaagcttgctgagaggccagagagacctgagtttgtgctacaaaatgctgactactgtagaaaaaaaggtcatgattcatgattgaaagcagaacaatggag

SEQ ID NO: 47898 - DNA, 3013 bp, Homo Sapiens
cgggagaaagccccgcccccggcgcccgctcccactcctgattggccgggccagcccggggaggcccggcgggaccccggcccgcgtctcagctataaagatagccccggcatgacagccgcggcgaagctcttctagttcatctgctggccggctctcagtccccgtggcgccccctttcctcttgtcccagagcgctctcgactccaccatgccaaggggattcctggtgaagcgaactaaacggacaggcggcttgtaccgagttcgccttgcggagcgtgtcttccctctgctggggccccagggggcgccgcccttcttggaggaggctcccagcgcctccttgcccggcgcggagcgggcgacaccccccacccgagaggaaccaggaaaggggttgacggcggaggcggcccgggaacagtcggggtcgccatgtcgggcggctggggtgagcccggggacgggcgggcgggaaggcgcggagtggcgggcgggtggcagggaaggtcccgggcccagccccagccccagccccagtccagcgaagccggcaggcgcagagctgcgtcgggcgttcctggagcgctgcctcagctcgcccgtctccgccgagtctttccccgggggcgccgccgccgtggccgctttctcctgctccgtggcgccagcagccgcaccgaccccgggggagcagtttctgctgccgcttcgggcgccgttcccagagcccgcgcttcagccggaccctgcgcccctctcggccgcccttcagagtctgaagcgggcggccggcggcgagcgccgcggcaaggcacccacggactgcgcgtctggacccgcggccgcgggaatcaagaagccaaaggccatgaggaagttgagctttgccgatgaggtgaccacatcccctgtcctgggcctgaagatcaaggaggaggagcccggagcgccgtcccggggcttggggggcagccgcacgccactgggggagttcatctgccagctgtgcaaggagcagtacgcagaccccttcgcgctggcccagcaccgctgctcccgcatcgtgcgcgtagagtaccgctgccctgagtgcgacaaggtgttcagctgtcctgcgaacctggcctcccatcgccgctggcataagccgcgtcctgcggctgcaaacgccgccacagtctcctccgccgacgggaagccgccttcttcgtcgtcttcgtcctcccgggactccggggccattgcatcttttctggcggagggaaaggagaacagccgaatagagcggactgcggatcagcacccgcaggccagggacagctccggggcggatcagcacccggacagcgccccgaggcagggcctccaggtgctgacgcatccagagccaccgctgcctcagggcccctacacggagggggtgttggggcgccgggtacctgtgccgggcagtaccagtggtggcaggggatccgagattttcgtgtgcccatattgccacaaaaagtttcgtcgccaagcctatctgcgcaagcacctgagcactcacgaggcgggctcggcccgtgcgctagcgccgggctttggctccgaacgcggtgccccacttgccttcgcttgcccattgtgcggagcgcacttccctacagcagatatcagggagaagcaccggctgtggcatgctgtccgcgaggagctgctcctgcccgctctggcgggggctcctcccgaaacgtcgggccctagcgggccatctgacgggagtgcccagcaaattttctcgtgcaagcactgcccgtccactttttttagctctccagggctgacccggcacatcaataagtgccacccctcagaaagccggcaagtgctgctgctgcagatgccactgcggcctggctgctgagggacgagagaccaggatgatttcgaggttggccttagaggaaacagatcatgggaatttctgtggggctttcttcaacttgcaagtttactttcattccttcctatgttttaatcccctaaaattctccctgtagtcaatgttccaccagaggagcggacagtgaaatgtaatatccctctctagagcaggtatgtatatggtataaaccttgagatcaaagactgtcagctttaaatccttctcactttccccactaaaataggatttttccccttaaaactctggagaccctaacgaatcctatatgatttgtaattcctatggaaagtcgcggtgaatgcgtgcatgtctcaatgtccacaaaggattctggctaccctttggtagccaatgttttttttgtcttgtcatcacaggcgcctatacagcttctgtctcaatagggtcagatattttgcactgtatattctgtgaattaaaagttatgtgattggtgtcaaacttaaggagattcaagacctggcagaaaatgtaagaggatttttgctgcttttggggtgcatggggatctcccctgtaaactttcctttgcccaattatatgtacatgtccattcttaagttggtgtttggaggtggggaggatgctactttactggagttgagacaccccctaaaattctcaccctcagctattttgtgggcagtattcaggaagagctacttcaaacctttctttaaatggctttttggaaatacagaagtcgtttcctcaagtttgactgttttaatggggtttcacccaaattgtttaatgcttctgctgtaaatgtcatactgtgtattcattatgaaaatatgtacagcttaaggaagatgttaacacctgtaatccactaaggaactgaatggcaatttgctcaatattcagtattttcttttcagcggcaacttgtttttgatttttttaaaaaaccatttcagtgtacattgtgtactaattccctactagccagtttgggacattggctgagcactgcctgacagaaagcccgtatttgtaagatgcttaccaccaaataaatgtacatagactgtg

SEQ ID NO: 47899 - DNA, 1209 bp, Homo Sapiens
atgggactgggccaagggtggggctgggaagcatcctgttttgcatgtttgatcaggagctgctgccaagttgtgactttcactttcccttttgggttccagggtatatctcagagcctggagaacgtgtctggttattatgcagatgcacggctggaggtgggatccacacagctcagaacagctggatcttgctcacactctttcaagagaagcttccttgaaaagaaacgctttactgaagaggccaccaaatacttccgggagagagtcagcccagtgcatctgcaaatcctgctgactaacaatgaagcctggaagagattcgtgactgcggctgaattgcccagggatgaggcagatgctctctacgaagctctgaagaagcttagaacatatgcagctattgaggacgaatatgtgcagcagaaagatgagcagtttagggaatggtttttgaaagagtttccccaagtcaagaggaagatccaggagtccatagaaaagcttcgtgcccttgcaaatggtattgaagaggtccacagaggctgcaccatctccaatgtggtgtccagctccactggcgctgcctctggcatcatgtcccttgctggtcttgttttggcaccatttacagcagggacgagtctggcccttactgcagctggggtagggctgggagcagcgtctgctgtgactgggatcaccaccagcatcgtggagcactcatacacatcatcagcagaagctgaagccagcaggctgactgcaaccagcattgaccgattgaaggtatttaaggaagttatgcgtgacatcacacccaacttactttcccttcttaataattattacgaagccacacaaaccattgggagtgaaatccgtgccatcaggcaagccagagccagggcccgactccctgtgaccacctggcgaatctcagctggaagtggtggtcaagcagagagaacgattgcaggcaccacccgggcagtgagcagaggagcccggatcctgagtgcgaccacttcaggcatcttccttgcactggatgtggtcaaccttgtatacgagtcaaagcacttgcatgagggggcaaagtctgcatctgctgaggagctgaggcggcaggctcaggagctggaggagaatctaatggagctcactcagatctatcagcgtctgaatccatgccatacccactga

SEQ ID NO: 47900 - DNA, 1552 bp, Homo Sapiens
agagctagaggagaggcccctacacatgtccaccatcatccttcgggctcatttaacacttactatttctatactgtaaatggcaacaagattttccctacctcaacctgactttgagcaggagctgttgctggctaagcagcctgaacaattcacatgctcagacgcttaacagagcctactcgaccccctccctcccagagcagtcggccccagaagaaggagagacggttcaacgtgctcaaccaaatattctgcaaaaacaagaaagaagagcagagagcccatcagaaggatcccagcagggaccgatacagagaggaggacacctcagaagtcaatgacatcatcaccacctttgatagcatcgtgggtaccaactgccaagaacagcctggtgatcaggtggctatggttgaatttaagaagaaaacctcagacaattcaaaatatctcttaccagaaaagaaaccgctggcccgtaaggggcttccaccaatcagaacgcagagtctcccacccatcaccctgggcaataacttcctaacagcctcccatagggccacttcccatgcaggcctgagctctgctcctcatcatatggcccagcgatctcagaaaagtcgaagtgagcaggatttattaaataacagaactggctgccagatgttactagataacccctggaagagtgattctaatcaggtattttcctacaaagtttggactgtgtcttcttctgataagctgctggacagattgctcagtgtccggcctggtcaccaagaggtctccgtgccaccacaccttcgccatctacataatccatcatcaggacaaaattttcagcatctttccccaaacagacacaaaatcagggatcttcctttcactcggaacaacctagctcccctaccagatcaaaaatttctatctggagaacctctgcggacaaaccgagtgcttcctgcaattccaagtcaacgaagacacagcacagcagcagaagagagtgaacattctgccaaccccaccagtgatgaaaattaactgtgggccactcgctgcagaaatgtagatgaatatgtattttcaactctcaaaggacaagattactccagtttgtaagaacgaagaccaatttagtaagctgcattctataagccatcagttttataactcgaaattctttattccaaataaagatactccctaaataagcacttagaatatttgggtgtgcatattaagtctgtgaatttctgtgacttccacatgccaaaattaaaagacaaaatatgttatcagtaggaaaactgagctatgtttggtttgctttgtggcatgtgcactgtttttttgttattgttctttggttgtttttttgctgaatgattttatgttttgggaaaaaaagtacgctttgctgaataaaagcaaaaaacaaaacaaaaaaaaaaccacatcccagacaaacatgtcttcacatttattgtcattctaacttgaactaatgaaacctatttaaaaataaattcctatgatcagtcac

SEQ ID NO: 47901 - DNA, 972 bp, Homo Sapiens
atgtcggccgccgtggcgtgcctggactacttcgccgccgagtgcctggtgtccatgtccgcgggcgccgtggttcaccgccgcccgccggaccccgagggcgcgggtggagccgcaggctcggaggtgggtgcggcgcatccggagtccgctctgccgggtccggggccatcggggcccgcgtcggtcccccagctcccgcaggtccccgcccccagccccggcgcgggcggcgccgcgccccacctgctggctgcaagcgtctgggcggacttgcgcggcagctctggcgagggctcctgggagaactcgggggaagctccacgcgcctcgtccggcttctccgacccgatcccgtgctccgtccagaccccgtgctccgagctggctcccgcctccggcgccgcggcggtctgcgctcccgagagctcctccgatgcgcccgccgtcccaagcgcgcctgctgccccgggcgcaccagcagcctctggtgggttctctggaggggccctaggggcaggccccgcccccgccgcggatcaggcgccccggaggaggtctgtcacacctgctgccaagcgccaccaatgccccttcccgggctgcaccaaagcctattacaagtcgtcgcacctcaagtcccaccagcgcacccacacgggtgagcgccctttctcctgcgactggctcgactgcgacaagaagtttacgcgttccgacgagctggcccgccactacaggacgcacacgggcgagaagcgcttctcctgccccctctgccccaagcagttctcccggagcgaccacctgaccaagcatgctcgccgccacccaacctatcatccagatatgatcgagtaccggggacgtcgtcgaactccccgcatcgacccgccactcaccagcgaggtggaaagctccgcctccggctccggtcccggcccggcgcccagcttcaccacctgcctgtag

SEQ ID NO: 47902 - DNA, 330 bp, Homo Sapiens
atggcttctttccttgaagcctgtgaaaccacgaacccttcaatcaagaaaagacctttgatcaggacttctcgtctcatttctggggacacattcaggatttctccaaagcaggtgaaggtacgctcgagcgtggtcattgaggacaagtcgacgagagatcccgagtacatctacagtcagccttacgtctgcaggtgtacccaacagctccgaagagacagcgaccatcgagaacgggccatgatgacgatggcggttttgtcgaaaagaaaagggggaaatgtggggaaaagcaagagagatcagattgttactgtgtctgtgtag

SEQ ID NO: 47903 - DNA, 2458 bp, Homo Sapiens
ggcgaagaggcaggaagacaagaccatgtcgaagggccccgggcccggcggctccgcagcttcctcggcgcccccggccgctaccgctcaggtgctgcaggcacagcccgagaaaccgcagcactacacgtacctgaaagaattccgcacagagcagtgcccactctttgtgcaacacaaatgcacgcagcatcggccctacacctgcttccactggcacttcgtgaaccagcggcgccgccggtccatccgccgtcgggacggcaccttcaattacagccctgacgtctactgcaccaagtacgacgaggctacaggcctctgcccggagggcgacgagtgcccattcctgcacagaaccacaggggacactgagcgcaggtaccaccttcgttactacaaaactggaatctgcatccacgagacagactcgaaaggcaactgcaccaaaaacggcctgcactgcgcttttgcccacgggccccatgacctccgctcccctgtctacgacatcagggagcttcaggccatggaggccttgcagaatggccagaccacggtagaggggagcatagagggccagtcggctggggctgcgagccatgccatgatagaaaagatcctcagcgaggagcctcggtggcaagagactgcttatgtgctggggaactataagacggagccttgcaagaagcccccgcggctgtgccgccaaggctatgcctgtccctactaccacaacagcaaggaccggcggcggagcccccggaagcacaaatacaggtcgtctccatgtccaaacgtcaagcacggggatgagtggggagaccctggcaagtgtgagaacggagacgcctgccagtactgccacacccgcaccgagcagcagttccaccccgagatctacaagtccaccaagtgcaacgacatgcagcagtcgggcagctgtccccgaggacccttctgcgcctttgcccacgtagaacagccacccctgagtgacgacctgcagccttcctcagctgtgtccagccccacccagccaggtcctgtcctgtacatgccatctgccgccggagactcggtgcctgtgagcccctccagcccgcatgcccctgacctcagtgccctcctctgtagaaacagcagcctaggcagcccgtctaacctctgcggctccccaccgggctccatcaggaagcccccaaacctggagggcatcgtcttccctggggagtctggcctggcccctggcagctataagaaggctcccggcttcgagagggaagaccaggtgggagccgagtacctgaaaaatttcaaatgccaggccaaattaaaaccccactcattagagcccaggagtcaagagcagcctctgcttcagcccaaacaggacatgctgggcatcctccccgcaggcagccccctgacctcaagcatctcttctagtatcacctccagcctggcagctaccccccctagcccagtgggcaccagcagcgtccccggcatgaatgcaaacgctctgcccttctaccccaccagcgacacggtagagtcagtcatagagtctgctttggatgacctggacctgaatgagtttggcgtggccgccctggagaagactttcgataacagcacagtgccccacccaggaagcatcaccatcggcggcagcttgctgcagagctctgcacccgtgaacatccccggctccttgggcagctctgcctccttccactcagcatccccgtcccctcccgtcagcctctcctcgcatttcctgcagcagccccagggccacctgagtcagtcggaaaacacatttttgggaacctcagcatcacatggatctttgggtctgaacgggatgaacagcagcatctgggagcattttgcctctggaagcttctccccgggcacttcccccgctttcctatcagggccaggggctgccgagctggcccgacttcggcaagagctggatgaagccaacagcaccatcaagcagtgggaggagtcctggaagcaggccaagcaggcttgtgatgcctggaagaaagaggcggaggaggctggtgagcgggccagtgcggcgggcgccgagtgcgagctggcccgggagcagcgggatgcactggaggtgcaggtgaagaagctccaggaggagctggagcggctacacgcggggcctgagccccaggccctgcccgccttctccgacctggaggcgctctcactctccaccctctactccctccagaaacaactgcgggcccacctggaacaagtggacaaggccgtgttccacatgcagtcggtgaaatgccttaagtgtcaggaacagaagcgggcagtgctgccgtgccaacacgctgcgctgtgtgagctctgcgctgagggcagcgagtgccccatctgccagcctggccgggcccacaccctccagtcgtga

SEQ ID NO: 47904 - DNA, 657 bp, Homo Sapiens
gtgaacagaggcactgtggctgagaagctggactgggcccagaagaggctcgagcagcaggtacctgtcaaccaagtgtttgggcaagatgagatgatcaaagtcatcggggtgaccaagggcaaaggctacaaaggggtcaccagttgttggcacaccacaaagctgccccacaagacccaccgaggcttatgcaaggtggcctgtattggggcatggcatcttgcccatgtggccttctctgtgtcacacgctggtcagaaaggctaccatcatggcactgagatcaacaagaagatctataagatcggccagggctaccctatcatggacggcaaactgatcaagaacaatgcctccattgactatgacctgtctgacaagagcatcaactctctgggtggctttgtccactgtggcaaagtgaccaatgactttgtcatgctgaaaggctatgtggtgggaaccaagaagcaagtgctcaccctctgcaagtccttgctggtccagaccaaatggcaggctctggagaagactgaccttaagttcactgacaccacctccaactttggccattgccacttccagaccatgaagaagaaagcattcgtgagaccactcaagaaagaccaaattgcaaaggaagaaggtgcttaa

SEQ ID NO: 47905 - DNA, 226 bp, Homo Sapiens
gatgaagttttccttttgtcacaatctttacttccacaatgaaatgatcattcaggagtattgccttggcatcctcagacaccgggtgtctcattccactgcagtccagtggttatgggatcatgaaggtcaatcctccagccacaggcagtatacctcctacctgagcttctgcagctggttggctgaccatggctacccaggttctggaaggattgctgaagtg

SEQ ID NO: 47906 - DNA, 1014 bp, Homo Sapiens
atgcaccctcaacagactcactggggggtcacgagctcccagcaatgcaccctcaacagactcactgggggactcactggggggtcacgagctcccagcaatgcaccctcaacagactcatcgggaggtcacgagctcccagcaatgcaccctcaacagacccacgggggctcacgagctcccagcaatgaaccctcaacagacccacgggggctcacgagctcccagctatgcaccctcaacagacccacgggggctcacgagctcccagcaatgcaccctcaacagactcattgggggctcacgagctcccggtccgaggcctcctttggcagcagggactcaggagggagaagagtgagcccttggccacatggttggtcaaatcaactcctagaggttgtgacccttctctgctgtggccttcaccaaaccacgcatgttgggtggaggggaagtggcctctgtggctgccccagctggcagagtgtggtctgtcctgctctaaactgggtccccagaaggcactgctctccagatgggctggtgagactccttggtgtccagctgcttatgaccagcacagttaggggctgtcgtcagcaccgccactggtacctgcagagccgagtccactcctggggccggctggatcagggtgcagccagggtgtggggcaccagggagctctccgggacccccaaagccagatgcggccctgtccactcgtgctctgtggacggagaaggcagagtcccaggacactgtgctcaggaaagcgagctccagaggaggctgaggagatttgggagtgcccaggacagcctggccctgtgcaggtccatgggaaaaccttccactctcccctttcagggaggtctgggggcttggctgcctctcagcgggccagggcgacttctcatcatttccgcaatggatgcagctctggcctgggggggtggggaggagcctccagccctggcccctccgccccagccctcgctagcggcatga

SEQ ID NO: 47907 - DNA, 2155 bp, Homo Sapiens
agataaggaagagaggtgcccgagccgcgccgagtctgccgccgccgcagcgcctccgctccgccaactccgccggcttaaattggactcctagatccgcgagggcgcggcgcagccgagcagcggctctttcagcattggcaaccccaggggccaatatttcccacttagccacagctccagcatcctctctgtgggctgttcaccaactgtacaaccaccatttcactgtggacattactccctcttacagatatgggagacatgggagatccaccaaaaaaaaaacgtctgatttccctatgtgttggttgcggcaatcagattcacgatcagtatattctgagggtttctccggatttggaatggcatgcggcatgtttgaaatgtgcggagtgtaatcagtatttggacgagagctgtacatgctttgttagggatgggaaaacctactgtaaaagagattatatcaggttgtacgggatcaaatgcgccaagtgcagcatcggcttcagcaagaacgacttcgtgatgcgtgcccgctccaaggtgtatcacatcgagtgtttccgctgtgtggcctgcagccgccagctcatccctggggacgaatttgcgcttcgggaggacggtctcttctgccgagcagaccacgatgtggtggagagggccagtctaggcgctggcgacccgctcagtcccctgcatccagcgcggccactgcaaatggcagcggagcccatctccgccaggcagccagccctgcggccccacgtccacaagcagccggagaagaccacccgcgtgcggactgtgctgaacgagaagcagctgcacaccttgcggacctgctacgccgcaaacccgcggccagatgcgctcatgaaggagcaactggtagagatgacgggcctcagtccccgtgtgatccgggtctggtttcaaaacaagcggtgcaaggacaagaagcgaagcatcatgatgaagcaactccagcagcagcagcccaatgacaaaactaatatccaggggatgacaggaactcccatggtggctgccagtccagagagacacgacggtggcttacaggctaacccagtggaagtacaaagttaccagccaccttggaaagtactgagcgacttcgccttgcagagtgacatagatcagcctgcttttcagcaactggtcaatttttcagaaggaggaccgggctctaattccactggcagtgaagtagcatcaatgtcctctcaacttccagatacacctaacagcatggtagccagtcctattgaggcatgaggaacattcattctgtattttttttccctgttggagaaagtgggaaattataatgtcgaactctgaaacaaaagtatttaacgacccagtcaatgaaaactgaatcaagaaatgaatgctccatgaaatgcacgaagtctgttttaatgacaaggtgatatggtagcaacactgtgaagacaatcatgggattttactagaattaaacaacaaacaaaacgcaaaacccagtatatgctattcaatgatcttagaagtactgaaaaaaaaagacgtttttaaaacgtagaggatttatattcaaggatctcaaagaaagcattttcatttcactgcacatctagagaaaaacaaaaatagaaaattttctagtccatcctaatctgaatggtgctgtttctatattggtcattgccttgccaaacaggagctccagcaaaagcgcaggaagagagactggcctccttggctgaaagagtcctttcaggaaggtggagctgcattggtttgatatgtttaaagttgactttaacaaggggttaattgaaatcctgggtctcttggcctgtcctgtagctggtttattttttactttgccccctccccactttttttgagatccatcctttatcaagaagtctgaagcgactataaaggtttttgaattcagatttaaaaaccaacttataaagcattgcaacaaggttacctctattttgccacaagcgtctcgggattgtgtttgacttgtgtctgtccaagaacttttcccccaaagatgtgtatagttattggttaaaatgactgttttctctctctatggaaataaaaaggaaaaaaaaaaaggaaa

SEQ ID NO: 47908 - DNA, 502 bp, Homo Sapiens
acagcggcttccttgatccttgccacccgcgactgaacaccgacagcagcagcctcaccatgaagttgctgatggtcctcatgctggcggccctctcccagcactgctacgcaggctctggctgccccttattggagaatgtgatttccaagacaatcaatccacaagtgtctaagactgaatacaaagaacttcttcaagagttcatagacgacaatgccactacaaatgccatagatgaattgaaggaatgttttcttaaccaaacggatgaaactctgagcaatgttgaggtgtttatgcaattaatatatgacagcagtctttgtgatttattttaactttctgcaagacctttggctcacagaactgcagggtatggtgagaaaccaactacggattgctgcaaaccacaccttctctttcttatgtctttttactacaaactacaagacaattgttgaaacctgctatacatgtttattttaataaattgatggca

SEQ ID NO: 47909 - DNA, 2418 bp, Homo Sapiens
atgaatgaacatggccctctactggactctaagcagaatcaggaacttcaagatctgaagaaccattataaaaaaaaaatggaggtaatggacctacacagaaaagttaatgaagaacttgaagaagctttagaagcctgtgaaaatgccagattgaaggctcagcaaattaaagaagagattgataaggatatttaccaggatgaaaaaaccatagaggcctacaagagagagatatatcaacttaacagtctatttgatcattactcttcatcagtgataaatgttaatactaatattgaggagaaggaagaggaagtgactgaagcaataagggaaacaaagtcatcaaaaaatgaattacattctctatcaaaaatgctggaagatttgagaagagtttatgaccaactaacctggaagcaaaaaagtcatgaaaatcagtatctggaagcagttaatgatttttatgctgcaaaaaaaacatgggatattgagctttctgatgttgcaaaagatttttcagctatttctttggcatgtacaaaactgacggaagacaataaaaaacttgagattgatattaacaaaataacagtaaaaaccaatgaaagcatacggaaaaaatcaaaatacgaatctgaaataaaatatttgacaataatgaagttaaagaatgataaacatctcaagaacatctataaggaggcttatcgcattggtactcttttccacctaaccaaacacaagacagatgaaatggaagataaaatagcagaagtgagaagaaagttcaagggtagagaagaattcctgaaaaaactcactcaaggtgaagtggctgctggaatggtgcttcagaaaaaactatattccatttacgaagtccaggcacttgagcggaaagagcttataaaaaatagagcaatatgtgccatgtcactggcagaactacaggaacctctgcttcaactagaagatgaagctgaaagaatcagaagtctcgacaaagaacattctgttatgcttaataatataattgatcagaaagatcttattagaagaaaggtgggaaaagtaaagaaaaaattacgaaaaaaggggaagaaaacccttgatgcattaatagaaactgagagtaaacgctcagcaatttttaaagacctagaagcaactaaaagtaagacaatgattttttatgcaaaaataaatgaattgaatgaggaattaaaagcaaaagaagaagaaaagaaaagttttgatcagacacttgaaatattaaagaacaaatttataactatgagatttaaaagggaacatgcacaaactgtgtttgatcattatatgcaagagaaaaaagactgtgaagagagaatctttgaggaagatcagagatttagagtgctccttgctgtaagacaaaaaactcttcaagatacccaaaaaataatagctgattcacttgaagaaaatctgcgtttagctcaagagtatcaacagctacagattacattcttaaaagaaaaggacaattatttcaatatatatgataaacagctatcacttgatacttcaattagagataagaaacagctctgtcagctgcagagaaggatgcacacactgtggcaggagcacttcaaactggtggtcctcttcagccagatgaggctggccaacttccagacagactctcaggagagtattcagaaaatattagctgtgcaggaggaatcttcaaatttaatgcaacacatcttaggtttcttccagactttgacagatggcacatgcgaaaacgatggttaagcaaacaaccaatgtatcttggatgctgaaataaaagacaagaaaagtcacacagttcagataacagtgtaattggacattcacctgtttgccatttcacacttccatgaacgaaaaactcactcacctcccagcatgctttgccactcttttactcacagcaaatccataacaatgaaacaggtgactttcatgctgctgtcaggaacgatctaatttcagctctgggtgactgattgcaattggctttgcctcatctgataattaatctatgtcaccattaattggaagagagaataattactggcggtgttgacagtgactgttcgcttccccagatttccctatcgtcttggcccaaataaaggctttgccattcagtacttaaagtttgtgtaaactgtaacaatatctatgcccatgtgacactttgagacactctgtctaatgtacttttgtttttgtgtttaccagtcttttttagctcactgagagctgtctctctcaatcactcctcaatgttctatcttaattttgtggaagtttaaagttttcaatgagctggagatgaatgattaatgaataaatttaaatgcttcattttgtcca

SEQ ID NO: 47910 - DNA, 456 bp, Homo Sapiens
tccaaggtgccctacatcgtgcgccagtgcatggaggagatcgagcgccgaggcatggaggaggtgggcatctaccgcatgtctggggtggccgcagacatccaggcactgaaggcaggcttcaacgtcaataacaaggacgtgtcagtgatgatgagcgagatggacgtgaacgccatcgcaggcatgctgaagctgtacttccgtgagctgcccgagcccctcttcactgacgagttctaccccaacttcgcagagggcatcgctctttcagacccagttgcaaagaagagctgcatgctcaacctgctgtcgtccctgccggaggccaacctgctcaccttccttttccttctagaccacctggaaaggatggcagagaaggaggcagtcaataagatgtccctgcacaaccttggcacggtgtttggccccacgctgctccggccctccgag

SEQ ID NO: 47911 - DNA, 178 bp, Homo Sapiens
tgactggcgagagaagatgttgtccgagagggattcgggggcatacctggagaggggacaagaaaatggggctctggcctggctcgcggaccacgtagtagtctttgtcaagcggcagcagcttagctaggccgaagtcagcgatcttgacgtgtgcctcgctctccacgaggatgtt

SEQ ID NO: 47912 - DNA, 1002 bp, Homo Sapiens
atgggacccagaaaccaaacagctgtttcagaatttcttctcatgaaagtgacagaggacccagaactgaagttaatccctttcagcctgttcctgtccatgtacctggtcaccatcctggggaacctgctcattctcctggctgtcatctctgactcccacctccacacccccatgtacttccttctctttaatctctcctttactgacatctgtttaaccacaaccacagtcccaaagatcctagtgaacatccaagctcagaatcagagtatcacttacacaggctgcctcacccagatctgtcttgtcttggtttttgctggcttggaaagttgctttcttgcagtcatggcctacgaccgctatgtggccatttgccacccactgaggtacacagtcctcatgaatgtccatttctggggcttgctgattcttctctccatgttcatgagcactatggatgccctggttcagagtctgatggtattgcagctgtccttctgcaaaaacgttgaaatccctttgttcttctgtgaagtcgttcaggtcatcaagctcgcctgttctgacaccctcatcaacaacatcctcatatattttgcaagtagtgtatttggtgcaattcctctctctggaataattttctcttattctcaaatagtcacctctgttctgagaatgccatcagcaagaggaaagtataaagcgttttccacctgtggctgtcacctctctgttttttccttgttctatgggacagcttttggggtgtacattagttctgctgttgctgagtcttcccgaattactgctgtggcttcagtgatgtacactgtggtccctcaaatgatgaaccccttcatctacagcctgagaaataaggagatgaagaaagctttgaggaaacttattggctggagtacagtggcacgatctcggctcactgcaaactccgcctcccgggttcatgcaattctcctgcctcggcctcccgagtag

SEQ ID NO: 47913 - DNA, 1120 bp, Homo Sapiens
ggaagaggccccagcactgacctccgtgggggtggagatgaggaggatggaaagggtgtcttcctccagcatcttcctgaagctcccggataatgagcacccatgtggcaggcctgggcctggacaagatgaagctgggcaatccccagtccttcctggaccaggaggaggcagatgaccagcagctgctggaaccagaggcgtggaagacctacaccgagcgccgcaatgccctgcgtgagttcctgacctcggacctgagtccgcacctgctcaagcgccaccacgcccgcatgcagctgctgcgtaagtgctcctactacatcgaggtcctgcccaagcacctggccctgggcgaccagaacccgctggtgctgcctagcgccttgttccagctcatcgacccctggaagttccagcgcatgaagaaggtgggcacagctcagaccaagatccagctcctgctgctcggggacctgttggaacagctcgaccatggccgtgctgagctggatgccctgctccggtcgccagacccacggcccttcctggccgactgggcgctggtggagcggcggctggcggacgtgtcggccgtcatggacagcttcctgaccatgatggtgccggggcggctacacgtcaagcaccgcctggtgtctgatgtcagtgccaccaagatcccgcacatctggctcatgctgagcaccaagatgcctgtcgtgtttgaccgaaaggcgtcggcggctcaccaggactgggcccggctgcgctggttcgtcaccatccagccagccacatcggagcagtatgagttgcgcttcaggctgctggacccgcggacacagcaggagtgcgcccagtgtggcgtcatccccgtggctgcctgcaccttcgacgtccgaaacctgctgcccaaccgatcctataagttcaccatcaagagggccgagacctccacgctggtgtacgagccctggagggacagcctcaccctgcacaccaagccggagcccctggaggggcccgccctcagccactctgtctgagagatgattttctaatatttatccactaataaagaagagtgtaaatgcacatatggaattaaagaagcaaa

SEQ ID NO: 47914 - DNA, 1208 bp, Homo Sapiens
gctggcggaagaggcacgtgcgctgctgaatggagctggtcgctggttgctacgagcaggtcctctttgggttcgctgtacacccggagcccgaggcttgcggcgaccacgagcaatggactcttgtggctgacttcactcaccatgctcacactgcctccttgtcagcagtagctgtaaatagtcgttttgtggtcactgggagcaaagatgaaacaattcacatttatgacatgaaaaagaagattgagcatggggctctagtgcatcacagtggtacaataacttgcctgaaattctatggcaacaggcatttaatcagtggagcggaagatggactcatctgtatctgggatgcaaagaaatgggaatgcctgaagtcaattaaagctcacaaaggacaggtgaccttcctttctattcacccatctggcaagttggccctgtcggttggtacagataaaactttaagaacgtggaatcttgtagaaggaagatcagcattcataaaaaatataaaacaaaatgctcacatagtagaatggtccccaagaggagagcagtatgtagttatcatacagaataaaatagacatctatcagcttgacactgcatccattagtggcaccatcacaaatgaaaagagaatttcctctgttaaatttctttcagagtctgtccttgcagtggctggagatgaagaagttataaggttttttgactgtgattcactagtgtgcctctgcgaatttaaagctcatgaaaacagggtaaaggacatgttcagttttgaaattccagagcatcatgttattgtttcagcatcgagtgatggtttcatcaaaatgtggaagcttaagcaggataagaaagttcccccatctttactctgtgaaataaacactaatgccaggctgacgtgtcttggagtgtggctagacaaagtggcagacatgaaagaaagccttcctccagctgcagagccttctcctgtaagtaaagaacagtccaaaattggcaaaaaggagcctggtgacacagtgcacaaagaagaaaagcggtcaaaacctaacacaaagaaacgcggtttaacaggtgacagtaagaaagcaacaaaagaaagtggcctgatatcaaccaagaagaggaaaatggtagaaatgttggaaaagaagaggaaaaagaagaaaataaaaacaatgcagtga

SEQ ID NO: 47915 - DNA, 351 bp, Homo Sapiens
aatccctttgtgacttctgatcgaagcaagtaccacaaaaggcatttcaatgcactttcccacattctcagaaatattaggtcttcctctctttgcaaagagctgagacagaagtacaatgttcaatccatgaccatccgaaaggatgatgaagttcaggttgtacacaggcactacaaaggtcagcaaattggcaaagtagtccaggtttacaggaagaaatatgtcacctacattgcacaggtgcagcaggaaaaggctaatggcacaactgtccacataggcattcaccccagcaaggtggttagcactaggctaaaactggacaaagactgcaaaaagattcttgaa

SEQ ID NO: 47916 - DNA, 1020 bp, Homo Sapiens
atggagaaaagagagataaacagtgcttttggggtaaaatccaggtataggtatttgggcccactctatgtcatctatacatattatcatattagaatcattcttctcttcactcaggctcctgaccttgacctctttccagctgcaaacgtgtccataatgggggccatcaagctcagccacaaccttcacactcctatgtactttttcctctgtggcctgtccttttcagaaacttgtaccactgtggtagtaatccctcgcatgttggtggactttctatcagagagcaagaccatttctcttcctgagtgtgccacacagatgtttttctttctgggctttgcatccaacaactgtttcatcatggccgctatgtcctacgaccgctacacggccatccacaacccactgcagtaccacacccttatgacaagaaagatctgcttgcagatgatgatggcttcttggatggttgggttcctgttttctctgtgcatcatcgtcactgtattcaacttgtctctttgcgacttgaacactatccagcactatttctgtgatatctcaccagtggtctcccttgcttgtaattacactttctatcatgaaatggctatttttgtgctctctgcctttgtgttggtgggcagctgtattttaattatgatttcctatgtcttcattgtgttcatagtcataaagatgccctctgcaaaggggaggtctaaggccttctcaacttgctcctcccacctcactgttgtgtccatacactatggatttgcttgctttgtctatttgaggcccaagaacagcaactccttcgatgaagacatgctgacggccatgatatatacaatactgatgcctctgcttaaccccatcgtgtacagtctgagaaacaaagaaatgcagatagccctaagaaaaacactaggcagtgtatttggggttttccctcagaagacaaaaaaagagcctgaacatttaaaaaaattacacagcattgataaataa

SEQ ID NO: 47917 - DNA, 1984 bp, Homo Sapiens
cccgagagcgcccattcacccccctcacccacctccccgcgttcccacttccccgcactctgacccggccggacgcccctcccctatcttgccgcccgccccctccagggggctctgctcccaccccagggagcccatccgacctctgcttgacttcccgccgcttccttcaggggcctcggctcatcgggtgcccctccccaaacttccaacccgtttgctccaggagttcctgccccatccccgagggcgcccaaatagccacactgtgtcctcctgtagtcgctgccccctgacctagcgcgacccagcgcccccgcccatgtccccccactcacctcccccggggggcgtggtgagtcgcggtctgttctcacggacggtccccgtccagcctgcgcttcgccggggccctcatctgctttcccgccaccctatcactcccttgccgtccaccctcggtcctcatggtcccagagccgggcccaaccgccaatagcaccccggcctggggggcagggccgccgtcggccccggggggcagcggctgggtggcggccgcgctgtgcgtggtcatcgcgctgacggcggcggccaactcgctgctgatcgcgctcatctgcactcagcccgcgctgcgcaacacgtccaacttcttcctggtgtcgctcttcacgtctgacctgatggtggggctggtggtgatgccgccggccatgctgaacgcgctgtacgggcgctgggtgctggcgcgcggcctctgcctgctctggaccgccttcgacgtgatgtgctgcagcgcctccatcctcaacctctgcctcatcagcctggaccgctacctgctcatcctctcgccgctgcgctacaagctgcgcatgacgcccctgcgtgccctggccctagtcctgggcgcctggagcctcgccgctctcgcctccttcctgcccctgctgctgggctggcacgagctgggccacgcacggccacccgtccctggccagtgccgcctgctggccagcctgccttttgtccttgtggcgtcgggcctcaccttcttcctgccctcgggtgccatatgcttcacctactgcaggatcctgctagctgcccgcaagcaggccgtgcaggtggcctccctcaccaccggcatggccagtcaggcctcggagacgctgcaggtgcccaggaccccacgcccaggggtggagtctgctgacagcaggcgtctagccacgaagcacagcaggaaggccctgaaggccagcctgacgctgggcatcctgctgggcatgttctttgtgacctggttgcccttctttgtggccaacatagtccaggccgtgtgcgactgcatctccccaggcctcttcgatgtcctcacatggctgggttactgtaacagcaccatgaaccccatcatctacccactcttcatgcgggacttcaagcgggcgctgggcaggttcctgccatgtccacgctgtccccgggagcgccaggccagcctggcctcgccatcactgcgcacctctcacagcggcccccggcccggccttagcctacagcaggtgctgccgctgcccctgccgccggactcagattcggactcagacgcaggctcaggcggctcctcgggcctgcggctcacggcccagctgctgcttcctggcgaggccacccaggaccccccgctgcccaccagggccgctgccgccgtcaatttcttcaacatcgaccccgcggagcccgagctgcggccgcatccacttggcatccccacgaactgacccgggcttggggctggccaatggggagctggattgagcagaacccagaccctgagtccttgggccagctcttggctaagaccaggaggctgcaagtctcctagaagccctctgagctccagaggggtgcgcagagctgaccccctgctgccatctccaggccccttacctgcagggatcatagctgactcaga

SEQ ID NO: 47918 - DNA, 369 bp, Homo Sapiens
atggctgctttagggactgttctcttcagtgtccggaggctgcactgcagcgtagccgcttgggcgggcggccagtggcgactacagcagggactggctgccaacccctccggctacgggccccttaccgagctcccagactggtcatatgcggatggccgccctgctcccccaatgaaaggccagcttcgaagaaaagctgaaagggagacgtttgcaagacgagttgtactgctgtcacaggaaatggacgctggattacaagcatggcagctcaggcagcagaagttgcaggaagaacaaaggaagcaggaaaatgctcttaaacccaaaggggcttcactgaagagcccacttccaagtcaataa

SEQ ID NO: 47919 - DNA, 360 bp, Homo Sapiens
tacaacgtggacgtgtgtctggctgtccagatggacaacctggatggctgcgactcttgctttcaagtcattttcccccaggatgtccttcgcctccgagctgagacccgacagagggctcaggaatggatggaggctctgaagatagctgccaatgtggcgaggagttcagagcaaaacctgcaagtcacactgaggaacaaacccaaggatcaaatgggtgggcatgaactcaggaagaacaaacgccaatctgtgactaccagcttcctgagcattttgacgactttgtctttggaacgaggactcactgctcagagtttcaaatgtgcaggtatgaagcagattttcagcctatag

SEQ ID NO: 47920 - DNA, 713 bp, Homo Sapiens
tcccagctgcgcgtcgcagtcccgacgcgagaagggctggagtcggcgtccagcctagagcccccggtgggagccaggccgggacgcgtgcaccatgccctacctgctcatcagcacccagatccgcatggaggtgggccccactatggtgggcgatgaacagtcggatccagagctgatgcagcatctgggggcttcaaagagaagagccttgggaaacaacttttatgaatactacgtcgatgaccctccccgcatagtcctggacaagctggaacgcaggggcttccgtgtgctgagcatgacgggggtgggccagacgctggtgtggtgtctgcacaaggagtgaccttctcatgctgatttgcagacggggcacccctgtggaggggctgctgtgggccctgacctccaagctcctgcctcaccgtctgccttgctcctctcttcccaaatcatcaccgccatgggcccagccccaaagggcagtgaatggccttctctgaaaccctgcgtcaagcagtgggagagggcagtgcccggtgccctggtgctcccagctgccctcctgcttcgggcctgggccgagggccttgtgtaggccatgttcctcgggcagctgccccgggccggagctgggcactccagcggccctggcgcgtggctcctgcatagctagcccaagccaataaagggctgtgatgagtggctgc

SEQ ID NO: 47921 - DNA, 711 bp, Homo Sapiens
atgacgggttatgaagcccggctcattacttttgggacatggatgtactccgttaacaaagagcagcttgcaagagctggattttatgctataggtcaagaggataaagtacagtgctttcactgtggaggagggctagccaactggaagcccaaggaagatccttgggaacagcatgctaaatggtatccaggttgcaaatatctgctagaagagaagggacatgaatatataaacaacattcatttaacccgttcacttgagggagctctggtacaaactaccaagaaaacaccatcactaactaaaagaatcagtgataccatcttccctaatcctatgctacaagaagctatacgaatgggatttgatttcaaggacgttaagaaaataatggaggaaagaattcaaacatctgggagcaactataaaacgcttgaggttcttgttgcagatctagtgagcgctcagaaagacactacagaaaatgaattgaatcagacttcattgcagagagaaatcagccctgaagagccgctaaggcgtctgcaagaggagaagctttgtaaaatctgcatggacagacatatcgctgttgtttttattccttgtggacatctggtcacttgtaaacaatgtgctgaagcagttgacagatgtcccatgtgcagcgcggttattgatttcaagcaaagagtttttatgtcttaa

SEQ ID NO: 47922 - DNA, 1436 bp, Homo Sapiens
ccagtgaaacaccctcggctgggaagtcagttcgttctctcctctcctctcttcttgtttgaacatggtgcggactaaagcagacagtgttccaggcacttacagaaaagtggtggctgctcgagcccccagaaaggtgcttggttcttccacctctgccactaattcgacatcagtttcatcgaggaaagctgaaaataaatatgcaggagggaaccccgtttgcgtgcgcccaactcccaagtggcaaaaaggaattggagaattctttaggttgtcccctaaagattctgaaaaagagaatcagattcctgaagaggcaggaagcagtggcttaggaaaagcaaagagaaaagcatgtcctttgcaacctgatcacacaaatgatgaaaaagaatagaactttctcattcatctttgaataacgtctccttgtttaccctggtattctagaatgtaaatttacataaatgtgtttgttccaattagctttgttgaacaggcatttaattaaaaaatttaggtttaaatttagatgttcaaaagtagttgtgaaatttgagaatttgtaagactaattatggtaacttagcttagtattcaatataatgcattgtttggtttcttttaccaaattaagtgtctagttcttgctaaaatcaagtcattgcattgtgttctaattacaagtatgttgtatttgagatttgcttagattgttgtactgctgccatttttattggtgtttgattattggaatggtgccatattgtcactccttctacttgctttaaaaagcagagttagatttttgcacattaaaaaattcagtattaattaaacattacttattctaccctcttttttggcaaggaggacaaatacgcaatgttggaaaaccttggatggatatcttctctttaaaaaaatgtaaagataatttggtcttgagggtttaaacggttgataatgcctctacaacaacaagaaaaaagataaaatactaggatagaatcatggtgggcacagtggcttctcaggaggctgaggagggaggtttgcttgagtccaggagttggagaccagcccaggcaacatagcgtaaaccctatctctaaaacaatttttagccgggtgcggtggctcacgcctgtaatcccagcactctgggaggccgaggcgggtggatcatgaggtcaggagatcgagaccatcctgcctaacaaggtgaaaccccgtctctactaaaaatacaaaaaattagccgggcgcggtggcgggcgcctgtagtcccagctactcgggaggctgaggcaggagaatggcgtgaacccgggaagtggagcttgcagtgagccgagattgcgccactgcagtcggcagtccggcttgggcgacagagcgagactccgtctcaaaaaaaaaaaaaaaaaaaa

SEQ ID NO: 47923 - DNA, 942 bp, Homo Sapiens
atgggtgacaggggaacaagcaatcactcagaaatgactgacttcattcttgcaggcttcagggtacgcccagagctccacattctcctcttcctgctatttttgtttgtttatgccatgatccttctagggaatgttgggatgatgaccattattatgactgatcctcggctgaacacaccaatgtattttttcctaggcaatctctccttcattgatcttttctattcatctgttattgaacccaaggctatgatcaacttctggtctgaaaacaagtctatctcctttgcaggctgtgtggcccagctctttctctttgccctcctcattgtgactgagggatttctcctggcggccatggcttatgaccgctttattgccatctgcaaccctctgctctactctgttcaaatgtccacacgtctgtgtactcagttggtggctggttcctatttttgtggctgcattagctcagttattcagactagcatgacatttactttatctttttgcgcttctcgggctgttgaccacttttactgtgattctcgcccacttcagagactgtcttgttctgatctctttatccatagaatgatatctttttccttatcatgtattattatcttgcctactatcatagtcattatagtatcttacatgtatattgtgtccacagttctaaagatacattctactgagggacataagaaggccttctccacctgcagctctcacctgggagttgtgagtgtgctgtatggtgctgtcttttttatgtatctcactcctgacagatttcctgagctgagtaaagtggcatccttatgttactccctagtcactcccatgttgaatcctttgatttactctctgaggaacaaagatgtccaagaggctctaaaaaaatttctagagaagaaaaatattattctttga

SEQ ID NO: 47924 - DNA, 519 bp, Homo Sapiens
atgagggacattgctatattaaaggaaaagcaggagaaagaaatacagacattacaggaggagacaaagaaagtccaagctgagacagcttcaaagacacgggaagtacaggcccagctcctccaggagaaaagattactggagaaacaactgagcgagccagacaggaggctactgggaaagagaaaaagaagagagcttaatatgaaggcccaggccttgaagttggcagcaaagcggtttatttttgaatactcctgtggcatcaacagagagaaccagcagttcaagaaggaattactgcagctaattgagcaagcccagaaactaacggctactcaaagccacttagaaaacaggaagcagcagctgcagcaggaacagtggtatctggagtccttaatccaggcgaggcagagactgcaaggaagtcataatcagtgcctaaatagacaggatgttccaaagaccacacccagtcttccccaaggcaccaaatcaaggattaatccaaagtaa

SEQ ID NO: 47925 - DNA, 839 bp, Homo Sapiens
gcttggggtggccagattggctgggacggcacaggaaggcctccctggaaacagatgttgcgcccaggctgagttaccgcaagttacctaagcataagtttccagtgccagtaagagactgcttggtggccaccatccacttcctgaagtccctggatgcatatggagtggatccagcccgggttgtggtctgcggtgacagtttcggaggggcaatagccgcagtggtttgtcaacaacttgtggacaggccagatctgccccggatccgggctcagatcctgatctatgccattctccaagccctggatttacaaaccccttcgtttcaacagaggaaaaacatcccactgctcacctggagtttcatctgctactgtttttttcaaaacctggatttcagctcctcctggcaagaggtcatcatgaaaggtgcccatttgcctgctgaagtctgggaaaagtacagaaagtggttgggcccagaaaacatccctgagaggtttaaggagaggggttaccaactgaagccccatgagcccatgaatgaagctgcttacttggaagtaagtgttgtcctggatgtgatgtgctcgcccctgattgcagaagatgacatagtgtctcagctcccggaaacctgcatcgtgagctgtgagtatgatgctctccgggacaattcactgttgtacaagaaaaggctggaagacctgggagtgcccgtgacctggcaccatatggaggatggtttccatggagtgctcaggaccattgacatgagcttcttgcactttccctgctccatgagaattctgagtgcattagttcaatttgtaaag

SEQ ID NO: 47926 - DNA, 933 bp, Homo Sapiens
atggactgggaaaattgctcctcattaactgatttttttctcttgggaattaccaataacccagagatgaaagtgaccctatttgctgtattcttggctgtttatatcattaatttctcagcaaatcttggaatgatagttttaatcagaatggattaccaacttcacacaccaatgtatttcttcctcagtcatctgtctttctgtgatctctgctattctactgcaactgggcccaagatgctggtagatctacttgccaagaacaagtcaatacccttctatggctgtgctctgcaattcttggtcttctgtatctttgcagattctgagtgtctactgctgtcagtgatggcctttgatcggtacaaggccatcatcaaccccctgctctatacagtcaacatgtctagcagagtgtgctatctactcttgactggggtttatctggtgggaatagcagatgctttgatacatatgacactggccttccgcctatgcttctgtgggtctaatgagattaatcatttcttctgtgatatccctcctctcttattactctctcgctcagatacacaggtcaatgagttagtgttattcaccgtctttggttttattgaactgagtaccatttcaggagttttcatttcttattgttatatcatcctatcagtcttggagatacactctgctgaggggaggttcaaagctctctctacatgcacttcccacttatctgcggttgcaattttccagggaactctgctctttatgtatttccggccaagttcttcctattctctagatcaagataaaatgacctcattgttttacacccttgtggttcccatgttgaaccccctgatttatagcctgaggaacaaggatgtgaaagaggccctgaaaaaactgaaaaataaaattttattttaa

SEQ ID NO: 47927 - DNA, 960 bp, Homo Sapiens
atggatacctccaccagtgttacctatgactccagcctccagatttcccagttcatcctgatgggattaccaggcattcatgagtggcagcactggctctccctgcccctgactctgctctacctcttagctcttggtgccaatctcctcatcataatcaccattcaacatgagaccgtgctacatgaacccatgtaccatttgctgggcatattagcagtggtggacattggcctggccaccaccatcatgcccaagatcctggccatcttctggtttgatgccaaggccattagcctccccatgtgttttgctcagatctatgccatccactgcttcttctgcatagagtcaggcatctttctctgcatggcagtagacagatacatagccatctgtcgccctcttcagtacccctccatagtcactaaagcttttgtcttcaaagccacagggttcatcatgctcaggaatggcctgttgaccatcccagtgcctatactggctgcccagagacactactgttccaggaatgaaatcgagcactgcctctgctctaacttgggggttatcagcctggcttgtgatgacatcactgtgaacaaattttaccaactgatgctagcatgggtcttggttgggagtgatatggctctggtattttcttcctatgctgtaatccttcactctgtgctgaggctgaactcagcagaagcaatgtccaaggctctgagcacttgtagctcccacctcatcctcatcctcttccacacaggtatcattgtgctgtctgtcacacaccttgcagagaaaaagattccccttattcctgtgttccttaatgtgctgcacaatgtcatcccccctgcactcaaccccctggcctgtgcactcaggatgcacaaactcagactgggctttcagagactgcttggactgggtcaggacgtgtccaagtaa

SEQ ID NO: 47928 - DNA, 1953 bp, Homo Sapiens
atgggggaccagaggccgcgggaccggccgaggtccccgggcatggactgcaagccctggtactgtgacaaaccgccttccaagtacatcgcgaagcgtaagcacaggcgcctgaggttcccgccaatggacacccagaactgggtatttgtaaaggagagcatggacagcttccactatggctgtccgtctcccgaagatatgctcatttgtagacttaacgagttcttactccccaaaatctctcacagaggtccccaagctgacccgaaaagcaggcagaaaaagctgctcaagaaagtggccctgttttccaagctcttgccagcccagccagcatggaaggcatttgtagaggaagcccagctgatggccaagcatcccttggccatgtaccccaatctgggagaagatatgcctccagatctcctactacaggtgctgaaaccgctggatcctgagaggcagctggaggacgcatgggctcgtgagggctggaagaagacaaccaaggcacccaccgagcctggtaaatacccctgtggggaattctgcccgaggcctcctgagactcaggtgttccatctccacccggagcctcccaagactccggtgtccagtcacccagagcctcctgagactggagtgtcctatctctgcccagagcctcccaagactcattgggtctccagcctctgcccggagccccccgagactggagtgtcccatctccgcgcagagcctgccaagactcgtcgggtgtccggtctccgcccggagcctctcgagactggagtgtcccatctctgcccggagcctcccgggactcgcgtatctcatctctgcccggagcctcccaagactcttcaggtgtccagtctctgcccggagcctcccaagactcgtcggatgtccagtctccacccggagccttccaagactggagtgtctcatctccgcctggacctccacccggagccccccaagacggaggtgtccagtgtctgcccagagcctcctgagattggagtgtcccatctccacccggaacctcccaatactcatcgagtgtccagtctcctactacaggtgctgaaactgctgaatcctgagaggaagctggaggacgaatgggttcattgtgagggccaggagaagacaaccaaggaacccactgagcctggtaaatacccttgtggggaattctgcacgaggcctcccgagtctcaggtgtcccatctctgcctggagcctcccaagactccagtgtccagtctctgccctgggcctcccaagactggagtgtctcatctctgcccagagcctcccaagactcagattcgagcgtcctgtctaaaagaactgcttcaggaagatacaccaagcacaacagaatgtgtttctgactctcttcaacatagatacacatcgagaaaaatgcatgacttcaagtgggctcgagacatgggagttgatgaagaatccatcaggaatctgtttgactttacccccaagtggagagcaacctatgaagaccaacagattaagaagataaaagaatgggtctcagagctgcaatacagaataaagctagatgaaatggatgaggtcgaatcctcacaggaaaaagactgggacaggaaactccagatggcaccgaattcttacactgcacagtgtgtgaagatgaggtatggagtatggtaccttaagcctaagctggggaaaaagctaagaagtgatcaacctttgattgaccccaagctcttacttgaaaagccagatgaacccgatattcttgacgatctttatggaccaattgcctttaaggatttcattctaagcaagggctatgaaatgcctggcatcattgaaaggctgtgtgccaggaagggatggacttatgactctgttaagactcctgttcaacgtgcaatgagactttacaagtag

SEQ ID NO: 47929 - DNA, 1704 bp, Homo Sapiens
ggccaggttccccctgcacaaggtgaggggtgggctggcctggagagggccctggggtgggaccctgggatgggggctctcactctctgtcacccgagccagggggagggacgcctgaagaagacgtgggcgcggtggagacacatgttccgggagcagccagttgatgaaatcaggaactactttggggaaaaggtggccctgtacttcgtctggctgggctggtacacctacatgctggtgccggccgccctgacgggcctcttagtctttctgagcggattctcgctgtttgaggccagccagatcagcaaggagatctgtgaggcccacgacatcctcatgtgtcccctcggcgaccacagccgcaggtaccagcggctctcggaaacctgcacttttgccaaggtttgtcgcctccgggtccaccccagggcctgcggaagatgggaacggtgcatccacccgaagcgggggagatcaaggcctggagccctgcagagctgctcagctttccccacagggctgacggggaggcccagccccagcccacccgcccatttcctcagcccacctgcccccttccccggctttcctgcctccctccctggctcacctgcccccctccccagctcacccacctcctctccggcccacctatcacccccccagctcacccacctctttgacaatgatggcacggtggtgttcgccatcttcatggctctctggggtgagttgctgcgggacgcctctgcggggccaggggaagtgccagcccaagctccgaggtccacctggcgtagtgcagtgatgcccctccttgcccccgccgcagccacggtgttcctggagatctggaagcggcagcgcgcccgcgtggtcctgcactgggacctgtacgtgtgggacgaggaacaggaggaaatggcacttcagctcattaactgccccgactacaagctccggccataccagcactcctacctacgcagcaccgtcatcctcgtcctgaccctgctcatgatctgcctcatgatcggcatggcccacgtcctggtggtctaccgcgtcctggcctccgcgctcttcagcagctcggccgtgcccttcctggaggagcaggtgaccacggccgtggtggtgaccggggctctggtgcactatgtgaccatcatcatcatgaccaagatcaacaggtgcgtggccctgaagctttgtgacttcgagatgcccaggaccttctcggagcgagagagcaggttcaccatccgcttcttcacactgcagttcttcacccatttctcgtctctcatctacatcgccttcatcctgggcaggatcaacggccaccccgggaagtccacgcgcctggcgggcttgtggaagctggaagagtgccacgccagcggctgcatgatggacctcttcgtgcagatggccatcatcatgggcctgaagcagacgctcagcaactgcgtcgagtacctggtcccgtgggtgacccacaagtgccgctctctgcgggcctccgagtccgggcacctgccccgggaccccgagctcagggactggcggcgcaactaccttctgaacccggtcaacaccttcagcctgttcgacgagttcatggagatgagtgcgtgggcgctgcggggcgggggttcgcggagacgaatgcggggcgggggtccgcggacatga

SEQ ID NO: 47930 - DNA, 5171 bp, Homo Sapiens
atggccaccgggggccggcggggggcggcggccgcgccgctgctggtggcggtggccgcgctgctactgggcgccgcgggccacctgtaccccggagaggtgtgtcccggcatggatatccggaacaacctcactaggttgcatgagctggagaattgctctgtcatcgaaggacacttgcagatactcttgatgttcaaaacgaggcccgaagatttccgagacctcagtttccccaaactcatcatgatcactgattacttgctgctcttccgggtctatgggctcgagagcctgaaggacctgttccccaacctcacggtcatccggggatcacgactgttctttaactacgcgctggtcatcttcgagatggttcacctcaaggaactcggcctctacaacctgatgaacatcacccggggttctgtccgcatcgagaagaacaatgagctctgttacttggccactatcgactggtcccgtatcctggattccgtggaggataattacatcgtgttgaacaaagatgacaacgaggagtgtggagacatctgtccgggtaccgcgaagggcaagaccaactgccccgccaccgtcatcaacgggcagtttgtcgaacgatgttggactcatagtcactgccagaaagtttgcccgaccatctgtaagtcacacggctgcaccgccgaaggcctctgttgccacagcgagtgcctgggcaactgttctcagcccgacgaccccaccaagtgcgtggcctgccgcaacttctacctggacggcaggtgtgtggagacctgcccgcccccgtactaccacttccaggactggcgctgtgtgaacttcagcttctgccaggacctgcaccacaaatgcaagaactcgcggaggcagggctgccaccagtacgtcattcacaacaacaagtgcatccctgagtgtccctccgggtacacgatgaattccagcaacttgctgtgcaccccatgcctgggtccctgtcccaaggtgtgccacctcctagaaggcgagaagaccatcgactcggtgacgtctgcccaggagctccgaggatgcaccgtcatcaacgggagtctgatcatcaacattcgaggaggcaacaatctggcagctgagctagaagccaacctcggcctcattgaagaaatttcagggtatctaaaaatccgccgatcctacgctctggtgtcactttccttcttccggaagttacgtctgattcgaggagagaccttggaaattgggaactactccttctatgccttggacaaccagaacctaaggcagctctgggactggagcaaacacaacctcaccatcactcaggggaaactcttcttccactataaccccaaactctgcttgtcagaaatccacaagatggaagaagtttcaggaaccaaggggcgccaggagagaaacgacattgccctgaagaccaatggggaccaggcatcctgtgaaaatgagttacttaaattttcttacattcggacatcttttgacaagatcttgctgagatgggagccgtactggccccccgacttccgagacctcttggggttcatgctgttctacaaagaggccccttatcagaatgtgacggagttcgacgggcaggatgcgtgtggttccaacagttggacggtggtagacattgacccacccctgaggtccaacgaccccaaatcacagaaccacccagggtggctgatgcggggtctcaagccctggacccagtatgccatctttgtgaagaccctggtcaccttttcggatgaacgccggacctatggggccaagagtgacatcatttatgtccagacagatgccaccaacccctctgtgcccctggatccaatctcagtgtctaactcatcatcccagattattctgaagtggaaaccaccctccgaccccaatggcaacatcacccactacctggttttctgggagaggcaggcggaagacagtgagctgttcgagctggattattgcctcaaagggctgaagctgccctcgaggacctggtctccaccattcgagtctgaagattctcagaagcacaaccagagtgagtatgaggattcggccggcgaatgctgctcctgtccaaagacagactctcagatcctgaaggagctggaggagtcctcgtttaggaagacgtttgaggattacctgcacaacgtggttttcgtccccagaaaaacctcttcaggcactggtgccgaggaccctaggccatctcggaaacgcaggtcccttggcgatgttgggaatgtgacggtggccgtgcccacggtggcagctttccccaacacttcctcgaccagcgtgcccacgagtccggaggagcacaggccttttgagaaggtggtgaacaaggagtcgctggtcatctccggcttgcgacacttcacgggctatcgcatcgagctgcaggcttgcaaccaggacacccctgaggaacggtgcagtgtggcagcctacgtcagtgcgaggaccatgcctgaagccaaggctgatgacattgttggccctgtgacgcatgaaatctttgagaacaacgtcgtccacttgatgtggcaggagccgaaggagcccaatggtctgatcgtgctgtatgaagtgagttatcggcgatatggtgatgaggagctgcatctctgcgtctcccgcaagcacttcgctctggaacggggctgcaggctgcgtgggctgtcaccggggaactacagcgtgcgaatccgggccacctcccttgcgggcaacggctcttggacggaacccacctatttctacgtgacagactatttagacgtcccgtcaaatattgcaaaaattatcatcggccccctcatctttgtctttctcttcagtgttgtgattggaagtatttatctattcctgagaaagaggcagccagatgggccgctgggaccgctttacgcttcttcaaaccctgagtatctcagtgccagtgatgtagtgtttccatgctctgtgtacgtgccggacgagtgggaggtgtctcgagagaagatcaccctccttcgagagctggggcagggctccttcggcatggtgtatgagggcaatgccagggacatcatcaagggtgaggcagagacccgcgtggcggtgaagacggtcaacgagtcagccagtctccgagagcggattgagttcctcaatgaggcctcggtcatgaagggcttcacctgccatcacgtggtgcgcctcctgggagtggtgtccaagggccagcccacgctggtggtgatggagctgatggctcacggagacctgaagagctacctccgttctctgcggccagaggctgagaataatcctggccgccctccccctacccttcaagagatgattcagatggcggcagagattgctgacgggatggcctacctgaacgccaagaagtttgtgcatcgggacctggcagcgagaaactgcatggtcgcccatgattttactgtcaaaattggagactttggaatgaccagagacatctatgaaacggattactaccggaaagggggcaagggtctgctccctgtacggtggatggcaccggagtccctgaaggatggggtcttcaccacttcttctgacatgtggtcctttggcgtggtcctttgggaaatcaccagcttggcagaacagccttaccaaggcctgtctaatgaacaggtgttgaaatttgtcatggatggagggtatctggatcaacccgacaactgtccagagagagtcactgacctcatgcgcatgtgctggcaattcaaccccaagatgaggccaaccttcctggagattgtcaacctgctcaaggacgacctgcaccccagctttccagaggtgtcgttcttccacagcgaggagaacaaggctcccgagagtgaggagctggagatggagtttgaggacatggagaatgtgcccctggaccgttcctcgcactgtcagagggaggaggcggggggccgggatggagggtcctcgctgggtttcaagcggagctacgaggaacacatcccttacacacacatgaacggaggcaagaaaaacgggcggattctgaccttgcctcggtccaatccttcctaacagtgcctaccgtggcgggggcgggcaggggttcccattttcgctttcctctggtttgaaagcctctggaaaactcaggattctcacgactctaccatgtccaatggagttcagagatcgttcctatacatttctgttcatcttaaggtggactcgtttggttaccaatttaactagtcctgcagaggatttaactgtgaacctggagggcaaggggtttccacagttgctgctcctttggggcaacgacggtttcaaaccaggattttgtgttttttcgttccccccacccgcccccagcagatggaaagaaagcacctgtttttacaaattctttttttttttttttttttttgctggtgtctgagcttcagtataaaagacaaaacttcctgtttgtggaacaaaagttcgaaagaaaaaacaaaacaaaaacacccagccctgttccaggagaatttcaagttttacaggttgagcttcaagatggtttttttggttttttttttttctctcatccaggctgaaggattttttttttctttacaaaatgagttcctcaaattgaccaatagctgctgctttcatattttggataagggtctgtggtcccggcgtgtgctcacgtgtgtatgcacgtgtgtgtgtccattagacacggctgatgtgtgtgcaaagtatccatgcggagttgatgctttgggaattggctcatgaaggttcttctcaagggtgcgagctcatccccctctctccttccttcttattgactgggagactgtgctctcgacagattcttcttgtgtcagaagtctagcctcaggtttctaccctcccttcacattggtggccaagggaggagcatttcatttggagtgattatgaatcttttcaagaccaaaccaagctaggacattaaaaaaaaaaaaagaaaaagaaagaaaaaacaaaatggaaaaaggaaaaaaaaaaagaactgagatgacagagttttgagaatatatttgtaccatatttaa

SEQ ID NO: 47931 - DNA, 1111 bp, Homo Sapiens
gtgatgttctatttacatggcctgtgtaaatctccattgggaagtcatgccttctaaaaagattcttatttgggggagtgggcaaaatgttgattattttctaatgctttgtagcaaagcatatcaattgaaaagggaatatcagcaccttcctagtttgggatttgaaaagtggaattaattgcagtagggataaagtagaagaaaccacaaattatcttgtgcctgaaatccattaagaggcctgatagctttaagaattagggtgggttgtctgtctggaagtgttaagtggaatgggctttgtcctccaggaggtgggggaatgtggtaacattgaatacagttgaataaaatcgcttacaaaactcacactctcacaatgcattgttaagtatgtaaaagcaataacattgattctctgttgtacttttttgtaactaattctgtgagagttgagctcattttctagttggaagaatgtgatatttgttgtgttggtagtttacctaatgcccttacctaattagattatgataaataggtttgtcattttgcaagttacataaacatttatcaatgaagtcatcctttagacttgtaatcgccacattgtttcattattcagtttcctctgtaaagggatcttgagttgttttaattttttttttctgcatctgaatctgcatgatttccaaaccctgtaccatctgaattttgcattttagcacttgcactattactcagcagcagtaacatggtaacacttaaaatggtactcggggacctccaaagactaaactgacaagccttcaaggagcccaggggtaagttaacttgtcaacggcatggtttaatcccttctttacacttgtgtaaatttcagttactggtcatagaaggctttcaatgttgagtggccttttattaacatgtttatggtactgcatagatacgggtatttattttaccctaagaagattttgaagtttaaaagtacttaaactatttggcaaagatttgtttttaaaaatctatttggtcaatctaaatgcattcattctaaaaaattttttgaaccagataaataaaatttttttttgacaccaca

SEQ ID NO: 47932 - DNA, 2443 bp, Homo Sapiens
agtaacagttgattgttacattcagtaacactgaatgtcagtgcagtccaatttacaggctggagcagcagctgcatcctgcatttccccgaagtattacatgattttcactccttgcaaactttgccatctttgttgcagagaatcggaaatcaatatgcatagcaaagtcacaatcatatgcatcagatttctcttttggtttcttttgctctgcatgcttattgggaagtcacatactgaagatgacatcataattgcaacaaagaatggaaaagtcagagggatgaacttgacagtttttggtggcacggtaacagcctttcttggaattccctatgcacagccacctcttggtagacttcgattcaaaaagccacagtctctgaccaagtggtctgatatttggaatgccacaaaatatgcaaattcttgctgtcagaacatagatcaaagttttccaggcttccatggatcagagatgtggaacccaaacactgacctcagtgaagactgtttatatctaaatgtatggattccagcacctaaaccaaaaaatgccactgtattgatatggatttatggtggtggttttcaaactggaacatcatctttacatgtttatgatggcaagtttctggctcgggttgaaagagttattgtagtgtcaatgaactatagggtgggtgccctaggattcttagctttgccaggaaatcctgaggctccagggaacatgggtttatttgatcaacagttggctcttcagtgggttcaaaaaaatatagcagcctttggtggaaatcctaaaagtgtaactctctttggagaaagtgcaggagcagcttcagttagcctgcatttgctttctcctggaagccattcattgttcaccagagccattctgcaaagtggatcctttaatgctccttgggcggtaacatctctttatgaagctaggaacagaacgttgaacttagctaaattgactggttgctctagagagaatgagactgaaataatcaagtgtcttagaaataaagatccccaagaaattcttctgaatgaagcatttgttgtcccctatgggactcctttgtcagtaaactttggtccgaccgtggatggtgattttctcactgacatgccagacatattacttgaacttggacaatttaaaaaaacccagattttggtgggtgttaataaagatgaagggacagcttttttagtctatggtgctcctggcttcagcaaagataacaatagtatcataactagaaaagaatttcaggaaggtttaaaaatattttttccaggagtgagtgagtttggaaaggaatccatcctttttcattacacagactgggtagatgatcagagacctgaaaactaccgtgaggccttgggtgatgttgttggggattataatttcatatgccctgccttggagttcaccaagaagttctcagaatggggaaataatgcctttttctactattttgaacaccgatcctccaaacttccgtggccagaatggatgggagtgatgcatggctatgaaattgaatttgtctttggtttacctctggaaagaagagataattacacaaaagccgaggaaattttgagtagatccatagtgaaacggtgggcaaattttgcaaaatatgggaatccaaatgagactcagaacaatagcacaagctggcctgtcttcaaaagcactgaacaaaaatatctaaccttgaatacagagtcaacaagaataatgacgaaactacgtgctcaacaatgtcgattctggacatcattttttccaaaagtcttggaaatgacaggaaatattgatgaagcagaatgggagtggaaagcaggattccatcgctggaacaattacatgatggactggaaaaatcaatttaacgattacactagcaagaaagaaagttgtgtgggtctctaattaatagatttaccctttatagaacatattttcctttagatcaaggcaaaaatatcaggagcttttttacacacctactaaaaaagttattatgtagctgaaacaaaaatgccagaaggataatattgattcctcacatctttaacttagtattttacctagcatttcaaaacccaaatggctagaacgtgtttaattaaatttcacaatataaagttctacagttaattatgtgcatattaaaacaatggcctggttcaatttctttctttccttaataaatttaagtttttccccccaaaattatcagtgctctgcttttagtcacgtgtattttcattaccactcgtaaaaaggtatcttttttaaatgaattaaatattgaaacactgtacaccatagtttacaatattatgtttcctaattaaaataagaattgaatgtcaatatgagatattaaaataagcacagaaaatc

SEQ ID NO: 47933 - DNA, 544 bp, Homo Sapiens
ataaagcgggacaacacagaacttcccagttacaccaggcatcctggcccaaagtttcccaaatccaggcggctagaggcccactgcttcccaactaccagctgagggggtccgtcccgagaagggagaagaggccgaagaggaaacatgaacttctatttactcctagcgagcagcattctgtgtgccttgattgtcttctggaaatatcgccgctttcagagaaacactggcgaaatgtcatcaaattcaactgctcttgcactagtgagaccctcttcttctgggttaattaacagcaatacagacaacaatcttgcagtctacgacctctctcgggatattttaaataatttcccacactcaatagccaggcagaagcgaatattggtaaacctcagtatggtggaaaacaagctggttgaactggaacatactctacttagcaagggtttcagaggtgcatcacctcaccggaaatccacctaaaagcgtacaggatgtaatgccagtggtggaaatcattaaagacactttgagtaga

SEQ ID NO: 47934 - DNA, 726 bp, Homo Sapiens
cgtctttcaactggcaagagtcattttgaccagcagattaatcaactgtaagacagatcctcacacaaagaggcaactgaaaggatgaaatcactgacttggatcttgggcctttgggctcttgcagcgtgtttcacacctggtgagagtcaaagaggccccaggggaccatatccacctggaccgctggctcctcctcaaccttttggcccaggatttgttccaccacctcctcctccaccctatggtccagggagaatcccacctcctcctcccgcaccctatggtccagggatatttccaccaccccctcctcaaccctaaggtccaccactccatcctgatgccccaggttatccacagcctccttcccgaccaagaccctatccacctggacctccatttttccctgtaaattctccaactgatcctaccctccctactcctgcaccccaaatatgaacaactgcagcaggtgccaccaccaccacaaaagacaccactacccttgtaactactgcttctactacccaaaatatgaattccaacactgcttccaagagacatttacataaaattgcttccatttttggatgagaatgaaaaattccaaaagtgctgagctttggggagaaataatcttagaaagaaattgtagaaaaaacccatgcagacataacatttataccaatgaggcaaaaataaagaattgagcaccaatatgaa

SEQ ID NO: 47935 - DNA, 1704 bp, Homo Sapiens
atgactttctatttgtttggtattcgaagctttccgaagctttggaagagcccataccttgggctaggcccagggcactcttatgtctcgctgtttctggcagaccgctgtggcatcaggaaccagcagaggttgttttctcttaaaacaatgtctccacagaataccaaagcaacgaatctgattgccaaggccagatatctcaggaaagatgagggcagtaataagcaagtttattctgttcctcatttttttttagctggagcagctaaggagagatcacagatgaattctcaaactgaagatcatgccttggcacctgtgaggaacactattcaactcccaacacaacctttgaattcagaggagtgggataaacttaaggaagatttaaaagaaaacaccggaaagaccagtttcgaaagttggatcatttcacagatggctggctgtcatagctctatagatgtggctaaatctctgctggcatgggtagcagccaaaaataatggtattgtaagttacgatttactggtcaagtatttgtatctctgtgtctttcatatgcagacatctgaagttattgatgtctttgaaattatgaaagccagatataagactttagaacctagaggttacagtcttctcatccggggattgatccattcagacagatggagagaagcattgttgctgttagaggacatcaaaaaagttataactccttcaaaaaagaactataatgactgtatccagggagctctccttcatcaagatgtaaacacagcttggaatttatatcaggaattgctaggtcatgatattgttcctatgttggaaactttaaaagctttctttgattttggaaaagacataaaggatgataactattcaaataaactactagatattctttcatatctaagaaataatcagctgtatccaggggagtcatttgcacacagtataaaaacatggtttgagagtggccagtgttcgggctgtggaaaaaccatagagtctattcagctgagtccagaagaatatgaatgtcttaagggaaaaatcatgagggatgtgatagatggaggtgaccagtacagaaagacaacacctcaggaacttaagagatttgagaacttcataaaatctcgtcctccttttgatgttgtcattgatggtctcaatgttgccaaaatgtttcctaaagttcgtgaatctcaacttctcttgaatgtcgtctctcaactagccaaacggaatctgcgactgctggtcctaggccggaagcacatgctaagacggagttcccagtggagtcgggatgagatggaagaggtgcaaaagcaagccagctgtttttttgctgatgacatctcggaggatgatccattccttctgtatgccacactgcactccgggaatcactgcaggtttatcacaagagacctgatgcgggaccacaaggcctgtctgcctgatgccaagacccaacgcctgttttttaagtggcagcagggacatcagctggcaattgtaaataggtttccaggatcaaaactaacctttcagcgtattctcagctatgacacagtggtgcaaacaactggagactcgtggcacataccatatgatgaagacttggtagaaagatgttcctgtgaagtaccaaccaaatggctttgcctccaccaaaagacatag

SEQ ID NO: 47936 - DNA, 1431 bp, Homo Sapiens
ctccaagaggagtctagctgtcccatctgtctggagtacttgaaagacccagtgaccatcaactgtgggcacaacttctgtcgctcctgcctcagtgtatcctggaaggatctagatgatacctttccctgtcctgtctgccgtttttgctttccatacaagagcttcaggaggaacccccagctccgtaatttgactgaaattgctaaacaactccagattaggaggagcaagagaaagaggcagaaagagaatgccatgtgtgaaaaacacaaccagtttctgaccctcttctgtgttaaagatctagagatcttatgtacacagtgcagtttctccactaaacaccagaagcactacatttgccctattaagaaagctgcctcttatcacagagaaattctagaaggtagccttgagcccttgaggaataatatagaacgagttgaaaaagtgataattctgcaaggcagcaaatcagtggagctgaaaaagaaggtagaatataagagggaagaaataaattctgagtttgagcaaataagattgtttttacagaatgaacaagagatgattcttaggcagatacaagatgaagagatgaacattttagcaaaactaaatgaaaaccttgtagaactttcagattatgtttccacattaaaacatctactgagggaggtagagggcaagtctgtgcagtcaaacctggaattactgacacaagctaagagtatgcaccacaagtatcaaaacctaaaatgccctgaactcttttcatttagattaacaaaatatgacctccaaaaattaataagcactcaaagcaaaaaacccttagaactgagagagatggtggaaaaccaaaggcaggaattatcctctgaatttgagcacctcaaccaaattataaagaaatttaaagtagaaataattctagaccctgaaacagcacaccctaacctgattgtatctgaagataaaaaacgtgtgagatttacaaagagaaaacaaaaggttcctggtttcccaaaaagatttacagtcaagccagttgttctgggttttccgtattttcattctggcaggcatttctgggagattgaagtgggggataagtcagaatgggctattggcatttgcaaagattctcttcccacaaaggcgaggagaccctcatcagcccagcaggaatgttggagaattgagctgcaagatgatggctatcatgcaccaggggcttttccaacccctctgttgttagaggtgaaagccagggccattggcattttcctggactatgagatgggtgagatctcattctataacatggctgagaaatctcacatctgtactttcactgacacttttactgggcctcttcggccttatttctatgtaggaccagattcacaacctctcagaatctgt

SEQ ID NO: 47937 - DNA, 834 bp, Homo Sapiens
aatgagacaggagttggcgagttcctcttgctcagcatcaccagtgactcagagaagcagcaggccctcttctggctcttcctgtgtatgcacttagtcactgaggctggaaacacacccatcatcctgggcatcggctccaaccctcgcctgcacacccccacgtacttcttcacccatctctcctttgtcaacatctgcttcatcaccaacctgatccccaagctcctggtcaaccattgcctgactcagatgtacttcctcatctcctttgccaacgtggacacctttctgctggccatcatggcactggaccactatgtggccatctgcagcgccctgcggtactgctccatcatcacccccggctctgtcaggggctggcccctcatctccctggtccacacggtcatcatgagcagactggccttctgctcctccgcccagatttcacacttctactgtgacgcctacctgctcatgaagattgcctgctcacatacatgtcagcatgtgttcctgggggccgtggtcctgttcctggctccctgtgcgctcatcttggtctcctacatccgcattgctgcagccatcctccggattccctctcctacaagaaggcgcaaggcatgttccatatgtagctcccacctgtctctggtcaccctgttctatggaactgtcctggggatctgcatagacccagactccttctcagcccaggacaccatagcaaccatcatgtacactgtggtgacctctatgctaaaccccttcatctacagtctgatgaacaaggaggtccaggaggccgtgagaaggctcttcagtagg

SEQ ID NO: 47938 - DNA, 1053 bp, Homo Sapiens
atggctttggaacagaaccagtcaacagattattattatgaggaaaatgaaatgaatggcacttatgactacagtcaatatgaattgatctgtatcaaagaagatgtcagagaatttgcaaaagttttcctccctgtattcctcacaatagctttcgtcattggacttgcaggcaattccatggtagtggcaatttatgcctattacaagaaacagagaaccaaaacagatgtgtacatcctgaatttggctgtagcagatttactccttctattcactctgcctttttgggctgttaatgcagttcatgggtgggttttagggaaaataatgtgcaaaataacttcagccttgtacacactaaactttgtctctggaatgcagtttctggcttgcatcagcatagacagatatgtggcagtaactaatgtccccagccaatcaggagtgggaaaaccatgctggatcatctgtttctgtgtctggatggctgccatcttgctgagcataccccagctggttttttatacagtaaatgacaatgctaggtgcattcccattttcccccgctacctaggaacatcaatgaaagcattgattcaaatgctagagatctgcattggatttgtagtaccctttcttattatgggggtgtgctactttatcacggcaaggacactcatgaagatgccaaacattaaaatatctcgacccctaaaagttctgctcacagtcgttatagttttcattgtcactcaactgccttataacattgtcaagttctgccgagccatagacatcatctactccctgatcaccagctgcaacatgagcaaacgcatggacatcgccatccaagtcacagaaagcattgcactctttcacagctgcctcaacccaatcctttatgtttttatgggagcatctttcaaaaactacgttatgaaagtggccaagaaatatgggtcctggagaagacagagacaaagtgtggaggagtttccttttgattctgagggtcctacagagccaaccagtacttttagcatttaa

SEQ ID NO: 47939 - DNA, 930 bp, Homo Sapiens
atgataacttttctacccatcattttttccagtctggtagtggttacatttgttattggaaattttgctaatggcttcatagcactggtaaattccattgagtggttcaagagacaaaagatctcctttgctgaccaaattctcactgctctggcggtctccagagttggtttgctctgggtattattattaaactggtattcaactgtgttgaatccagcttttaatagtgtagaagtaagaactactgcttataatatctgggcagtgatcaaccatttcagcaactggcttgctactaccctcagcatattttatttgctcaagattgccaatttctccaactttatttttcttcacttaaagaggagagttaagagtgtcattctggtgatgttgttggggcctttgctatttttggcttgtcatctttttgtgataaacatgaatgagattgtgcggacaaaagaatttgaaggaaacatgacttggaagatcaaattgaagagtgcaatgtacttttcaaatatgactgtaaccatggtagcaaacttagtacccttcactctgaccctactatcttttatgctgttaatctgttctttgtgtaaacatctcaagaagatgcagctccatggtaaaggatctcaagatcccagcaccaaggtccacataaaagctttgcaaactgtgatctccttcctcttgttatgtgccatttactttctgtccataatgatatcagtttggagttttggaagtctggaaaacaaacctgtcttcatgttctgcaaagctattagattcagctatccttcaatccacccattcatcctgatttggggaaacaagaagctaaagcagacttttctttcagttttttggcaaatgaggtactgggtgaaaggagagaagacttcatctccatag

SEQ ID NO: 47940 - DNA, 435 bp, Homo Sapiens
atggacagtgaggaggaggaggaggtgcctcagcccatgccaagcatcccggaggatctagagagccagaaggccatggtggcatttttcaactcagctgtagctagtgccgaggaggagcaggcacggctatgtgggcagctgaaggagtgcactgccagcgcctggctcatctgttggcctcggcccagaaggaacctgaggcagcagccccagccccaagaactgggggtgatcccatgtgtggggagacccaccaggccctgcagggggccatggagaagctgtgggagagtacatcgcactgtaccagagccagagggcagtgcggaaggaggaggagtgcatcagcaggctggcccaggacaagggagaggtgaaggtgaagctgctggagctggcgtggcttgtggacgactgcaacaagtggcatag

SEQ ID NO: 47941 - DNA, 2160 bp, Homo Sapiens
agacccttccagctgccgctgtcgtctttgcttcagccgcagtcgccactggctgcctgaggtgctcttacagcctgttccaagtgtggcttaatccgtctccaccaccagatctttctccgtggattcctctgctaagaccgctgccatgccagtgacggtaacccgcaccaccatcacaaccaccacgacgtcatcttcgggcctggggtcccccatgatcgtggggtcccctcgggccctgacacagcccctgggtctccttcgcctgctgcagctggtgtctacctgcgtggccttctcgctggtggctagcgtgggcgcctggacggggtccatgggcaactggtccatgttcacctggtgcttctgcttctccgtgaccctgatcatcctcatcgtggagctgtgcgggctccaggcccgcttccccctgtcttggcgcaacttccccatcaccttcgcctgctatgcggccctcttctgcctctcggcctccatcatctaccccaccacctatgtccagttcctgtcccacggccgttcgcgggaccacgccatcgccgccaccttcttctcctgcatcgcgtgtgtggcttacgccaccgaagtggcctggacccgggcccggcccggcgagatcactggctatatggccaccgtacccgggctgctgaaggtgctggagaccttcgttgcctgcatcatcttcgcgttcatcagcgaccccaacctgtaccagcaccagccggccctggagtggtgcgtggcggtgtacgccatctgcttcatcctagcggccatcgccatcctgctgaacctgggggagtgcaccaacgtgctacccatccccttccccagcttcctgtcggggctggccttgctgtctgtcctcctctatgccaccgcccttgttctctggcccctctaccagttcgatgagaagtatggcggccagcctcggcgctcgagagatgtaagctgcagccgcagccatgcctactacgtgtgtgcctgggaccgccgactggctgtggccatcctgacggccatcaacctactggcgtatgtggctgacctggtgcactctgcccacctggtttttgtcaaggtctaagactctcccaagaggctcccgttccctctccaacctctttgttcttcttgcccgagttttctttatggagtacttctttcctccgcctttcctctgttttcctcttcctgtctcccctccctcccacctttttctttccttcccaattccttgcactctaaccagttcttggatgcatcttcttccttccctttcctcttgctgtttccttcctgtgttgttttgttgcccacatcctgttttcacccctgagctgtttctctttttcttttcttttttttttttttttttttttaagacggattctcactctgtggcccaggctggagtgcagtggtgcgatctcgactcactgcaacccccgcctcctgggttcaagcgattctcctgccccagcctcccaagtagctgggaggacaggtgtgagctgccgcacccagcctgtttctctttttccactcttcttttttctcatctcttttctgggttgcctgtcggctttcttatctgcctgttttgcaagcaccttctcctgtgtccttgggagccctgagacttctttctctccttgcctccacccacctccaaaggtgctgagctcacatccacaccccttgcagccgtccatgccacagccccccaaggggccccattgccaaagcatgcctgcccaccctcgctgtgccttagtcagtgtgtacgtgtgtgtgtgtgtgtgtgtgtgtgtgtgtgtttggggggtggggggtgggtagctggggattgggccctctttctcccagtggaggaaggtgtgcagtgtacttcccctttaaattaaaaaacatatatatatatatatttggaggtcagtaatttccaatgggcgggaggctttaagcaccgaccctgggtccctaggccccgcctggcactcagccttgccagagattggctccagaatttttgccaggcttacagaacacccactgcctagaggccatcttaaaggaagcaggggctggatgcctttcatcccaactattctctgtggtatcaaaaag

SEQ ID NO: 47942 - DNA, 138 bp, Homo Sapiens
atggggtcttgctatgttgcccaggctggtctcaaactcctgtcctcaagcaatctacctgattacaggcatgagccactgcaactagcccagtggcttaatttctgcttagaaaaatataatacctatcatacttaa

SEQ ID NO: 47943 - DNA, 3468 bp, Homo Sapiens
ctcctgcatagagggtaccattctgcgctgctgcaagttacggaatgaaaaattagaacaacagaaacatggttctcttgacacttcagtgttagggaacatcagcaagacccatcccaggagaccttgaaggaagcctttgaaagggagaatgaaggagtcatctttgcaaaatagctcctgcagcctgggaaaggagactaaaaaggaaaacatgttccttcagtcgtcaatgctgacctgcattttcctgctaatatctggttcctgtgagttatgcgccgaagaaaatttttctagaagctatccttgtgatgagaaaaagcaaaatgactcagttattgcagagtgcagcaatcgtcgactacaggaagttccccaaacggtgggcaaatatgtgacagaactagacctgtctgataatttcatcacacacataacgaatgaatcatttcaagggctgcaaaatctcactaaaataaatctaaaccacaaccccaatgtacagcaccagaacggaaatcccggtatacaatcaaatggcttgaatatcacagacggggcattcctcaacctaaaaaacctaagggagttactgcttgaagacaaccagttaccccaaataccctctggtttgccagagtctttgacagaacttagtctaattcaaaacaatatatacaacataactaaagagggcatttcaagacttataaacttgaaaaatctctatttggcctggaactgctattttaacaaagtttgcgagaaaactaacatagaagatggagtatttgaaacgctgacaaatttggagttgctatcactatctttcaattctctttcacacgtgccacccaaactgccaagctccctacgcaaactttttctgagcaacacccagatcaaatacattagtgaagaagatttcaagggattgataaatttaacattactagatttaagcgggaactgtccgaggtgcttcaatgccccatttccatgcgtgccttgtgatggtggtgcttcaattaatatagatcgttttgcttttcaaaacttgacccaacttcgatacctaaacctctctagcacttccctcaggaagattaatgctgcctggtttaaaaatatgcctcatctgaaggtgctggatcttgaattcaactatttagtgggagaaatagcctctggggcatttttaacgatgctgccccgcttagaaatacttgacttgtcttttaactatataaaggggagttatccacagcatattaatatttccagaaacttctctaaacttttgtctctacgggcattgcatttaagaggttatgtgttccaggaactcagagaagatgatttccagcccctgatgcagcttccaaacttatcgactatcaacttgggtattaattttattaagcaaatcgatttcaaacttttccaaaatttctccaatctggaaattatttacttgtcagaaaacagaatatcaccgttggtaaaagatacccggcagagttatgcaaatagttcctcttttcaacgtcatatccggaaacgacgctcaacagattttgagtttgacccacattcgaacttttatcatttcacccgtcctttaataaagccacaatgtgctgcttatggaaaagccttagatttaagcctcaacagtattttcttcattgggccaaaccaatttgaaaatcttcctgacattgcctgtttaaatctgtctgcaaatagcaatgctcaagtgttaagtggaactgaattttcagccattcctcatgtcaaatatttggatttgacaaacaatagactagactttgataatgctagtgctcttactgaattgtccgacttggaagttctagatctcagctataattcacactatttcagaatagcaggcgtaacacatcatctagaatttattcaaaatttcacaaatctaaaagttttaaacttgagccacaacaacatttatactttaacagataagtataacctggaaagcaagtccctggtagaattagttttcagtggcaatcgccttgacattttgtggaatgatgatgacaacaggtatatctccattttcaaaggtctcaagaatctgacacgtctggatttatcccttaataggctgaagcacatcccaaatgaagcattccttaatttgccagcgagtctcactgaactacatataaatgataatatgttaaagttttttaactggacattactccagcagtttcctcgtctcgagttgcttgacttacgtggaaacaaactactctttttaactgatagcctatctgactttacatcttcccttcggacactgctgctgagtcataacaggatttcccacctaccctctggctttctttctgaagtcagtagtctgaagcacctcgatttaagttccaatctgctaaaaacaatcaacaaatccgcacttgaaactaagaccaccaccaaattatctatgttggaactacacggaaacccctttgaatgcacctgtgacattggagatttccgaagatggatggatgaacatctgaatgtcaaaattcccagactggtagatgtcatttgtgccagtcctggggatcaaagagggaagagtattgtgagtctggagctaacaacttgtgtttcagatgtcactgcagtgatattatttttcttcacgttctttatcaccaccatggttatgttggctgccctggctcaccatttgttttactgggatgtttggtttatatataatgtgtgtttagctaaggtaaaaggctacaggtctctttccacatcccaaactttctatgatgcttacatttcttatgacaccaaagatgcctctgttactgactgggtgataaatgagctgcgctaccaccttgaagagagccgagacaaaaacgttctcctttgtctagaggagagggattgggatccgggattggccatcatcgacaacctcatgcagagcatcaaccaaagcaagaaaacagtatttgttttaaccaaaaaatatgcaaaaagctggaactttaaaacagctttttacttggctttgcagaggctaatggatgagaacatggatgtgattatatttatcctgctggagccagtgttacagcattctcagtatttgaggctacggcagcggatctgtaagagctccatcctccagtggcctgacaacccgaaggcagaaggcttgttttggcaaactctgagaaatgtggtcttgactgaaaatgattcacggtataacaatatgtatgtcgattccattaagcaatactaactgacgttaagtcatgatttcgcgccataataaagatgcaaaggaatgacatttctgtattagttatctattgctatgtaacaaattatcccaaaacttagtggtttaaaacaacacatttgctggcccacagtttt

SEQ ID NO: 47944 - DNA, 528 bp, Homo Sapiens
atggcatctcaactgtgggaagagtccccctgccctggtcctgcccagcaggctggtccacctgaagcaactgtcaggctctggccgttgactcttcctgctggactgaactcatggccaagagttcgttttgggggagctcctttttgtctcccccaaaatggcctcctttatttccaccctcaagctgctgggccccggctggcctcacgttggaggggcagaactgtagccacagtggcacctgccagatacctaagctggggctggataccaggtgaagctcttacacatcgtgtcaaggcatcttggcagccaccccagggccgctccttaggtagccctcgctttgcagatgaggaaacagtcacatgctcaagtcacaccgctaggaagcggtggagttatggttgggtccaggtctgtctagatcctgtgctctgccagtgcctgcaccccccttcccggccccgccgattggcatcttttcataaacttgaagggccccaagactctctgcttagctga

SEQ ID NO: 47945 - DNA, 2321 bp, Homo Sapiens
atggaaacagaggctattgatggctatataacgtgtgacaatgagctttcacccgaaagggagcactccaatatggcaattgacctcacctcaagcacacccaatggacagcatgcctcaccaagtcacatgacaagcacaaattcagtaaagctagaaatgcagagtgatgaagagtgtgacaggaaacccctgagccgtgaagatgagatcaggggccatgatgagggtagcagcctagaagaacccctaattgagagcagcgaggtggctgacaacaggaaagtccaggagcttcaaggcgagggaggaatccggcttccgaatggtaaactgaaatgtgacgtctgtggcatggtttgcattgggcccaatgtgcttatggtacataaaaggagtcacactggtgaacgccccttccactgtaaccagtgtggagcttcttttactcagaagggcaaccttctgagacacataaagttacactctggagagaagccgttcaaatgtcctttctgtagctacgcctgtagaagaagggacgccctcacaggacacctcaggacccattctgtgggtaaacctcacaagtgcaactactgtggacgaagctacaagcagcgcagttcactggaggagcacaaggaacgctgccacaactatctccagaatgtcagcatggaggctgctgggcaggtcatgagtcaccatgtacctcctatggaagattgtaaggaacaagagcctattatggacaacaatatttctctggtgccttttgagagacctgctgtcatagagaagctcacggggaatatgggaaaacgtaaaagctccactccacaaaagtttgtgggggaaaagctcatgcgattcagctacccagatattcactttgatatgaacttaacatatgagaaggaggctgagctgatgcagtctcatatgatggaccaagccatcaacaatgcaatcacctaccttggagctgaggcccttcaccctctgatgcagcacccgccaagcacaatcgctgaagtggccccagttataagctcagcttattctcaggtctatcatccaaataggatagaaagacccattagcagggaaactgctgatagtcatgaaaacaacatggatggccccatctctctcatcagaccaaagagtcgaccccaggaaagagaggcctctcccagcaatagctgcctggattccactgactcagaaagcagccatgatgaccaccagtcctaccaaggacaccctgccttaaatcccaagaggaaacaaagcccagcttacatgaaggaggatgtcaaagctttggatactaccaaggctcctaagggctctctgaaggacatctacaaggtcttcaatggagaaggagaacagattagggccttcaagtgtgagcactgccgagtccttttcctagaccatgtcatgtacaccattcacatgggttgccatggctaccgggacccactggaatgcaacatctgtggctacagaagccaggaccgttatgagttttcatcacacattgttcgaggggagcacacattccactaggccttttcattccaaaggggacccctatgaagtaaagaactgcacatgaagaaatactgcacttacaatcccacctttcctcaaatgttgacataccttttattttttttaatattattactgttgataattcttattttgtggaggcagtgtcatttgctctgcctaattacgataaggaagaaacagaagagagaaggggcgggaatattgtttctttatcacctggcttgtttattttgtgggaatttaagagcagtccatttctaccaaggcatatcatgctttgaaaaatcacttgattcataaagattcacctaagagattctgatttgccactgatattcagaattatgatggaagacaggaaagttcagagttttctgggtaggactttggtggtttaaaaatggtataagtaactttattcttgaaagaagaatgtgtttcaaactgtaaaccaattttttgttcttcagagatcatggaacacaaacacattgttattttcagtgataactcctaagaggagctgagttgttgtgggttctatgtttacttcccctatggaatttataattcagtatgttttacactgtaccatatagcaaaacttttaaactacaggtagttaagggccacctacaatacatctgaggtcctgtgatcttatttttctaaacgtaagcactgtttttccatagttttgatgactggcattttatagacaccctggcagc

SEQ ID NO: 47946 - DNA, 309 bp, Homo Sapiens
cttctgcaaagatctatttgtttagccatgtgcaaatattgccctaaaatgttcacaggttccaggataaccagatgactgaggaatgttgaagattgcagtgatggaagtgtctcagtcagcctggaagactgtatggaaggaggttgcctggccacactgtcatgtccccctctccctaaaaaagggacacatttgcctttgtgcaaggcaacacatacatttggtctgtgtatatactttggtctatgtattctgttatttaacattctaataatgttgatgaccttaaaatatgtttgacaatga

SEQ ID NO: 47947 - DNA, 477 bp, Homo Sapiens
aaggtcatgtacttattagtccctcttcttaaccgagggaatgataaacataaactcacatctgcaggcttttttgtggagcttctccggagtccagtggccaagagactgcccagcatatactctgttgcccgctttaaagactggctacaagatggaaatcatctctttagaattctcggcctgaggggactgtacaatcttgttggacaccaggagatgagagaagacatcaagagcctgttgccatacattgtagacagcttgcgtgaaaccgatgagaagatcgttctgtcagccatccagatactcctgcaacttgttagaacaatggatttcactaccctggctgccatgatgaggaccctgttctccttatttggtgatgtgagatctgatgttcatcgtttctccgtgactctctttggagccgccataaagtctgtaaaaaacccagataagaagagtatagagaac

SEQ ID NO: 47948 - DNA, 660 bp, Homo Sapiens
actataaagacagtgaaaagatcagtggttatctttgcagacgccaccatcgctgtgagccctgtactatcagccatggtcaactccgtcgtcttttttgaaatcaccagggatggcaagcccttgggccgcatctccatcaaactgtttgcagacaagattccaaagacagcagaaaactttcgtgctctgagcactggagagaaaggatttcgttataagggttcctgctttcacagaattattccagggtttatgtgtcagggtggtgacttcacacgccctaatggcaccggtgacaagtccatctatggggagaaatttgatgatgagaacctcatccgaaagcatacaggttctggcatcttgtccatggcaaatgctggacccaacacaaatggttcccagtttttcatctgtgctgccaagactgagtggttggatggcaagcatgtggcgtttggcaaggtgaaagaacgtgtgaatattgtggaagccacggagcactttgggtacaggaatagcaagaccagcaagaagatcaccattgctgactgtggacaattctaatgagtttgacttgtgttttattttcaccaccagacccattccttctgtagctcaggagagcacccctccaccacatttgcttgcaatatc

SEQ ID NO: 47949 - DNA, 575 bp, Homo Sapiens
aaacattttctcattagtcctgtttgcctagtcagtcacttgtatagacagggcaacagcacggcctgaatattgggcaggacaccgccctgcgcgatagtaactttgcccaacagcttgttgagcttctcgtcgtggatggcgagctgcaggcgtcggggggtgacgcgggtcttcttgtctcgggccgcgttgcccgccaactccaggatcttggcggtcaggtactccagcaccgcctccaggtacaccggcgcaccggcccggacccgcttggcgtagttgcccttgcggaggaggcggtgcactcggcccacagaaaactggagaccagccctggaagagtgcgttttagccttggcgcgagctttgctgccctgcattccacatccagacgcagtgaagtatttaaatacttgtttagaagaaggaaagtgattgattctagtaaaacgcaagagctaaactcttataatctatattcggcaaagtagactgtgctatctcctgaacacagatttcagccaatcgaaaagcaggtgtttaaaaaaatttaaaaaaaaaaaaaaaaaaaa

SEQ ID NO: 47950 - DNA, 198 bp, Homo Sapiens
atgaggaacattttcaagaggaaccaagagcctattgtggctcctgccaccaccaccgtcacgatgcccattggacccgtggacaactccaccgagagtgggagtgctggggagagccaggaggacatgtttgccaaactgaaggagaagttcttcaatgagattaacaagattccctgtgagtgtccctggtggctg

SEQ ID NO: 47951 - DNA, 504 bp, Homo Sapiens
atgaaaacagggccccttcagtgtggaaccgtgggagacgcggaacacaacacagggtggtggattcctgggcggagctctgcctgccccacgggcctgtggtctgctctgtctgccggggcccagtttaccgaactacttggtggccagatagccaccgtagggcgtgagcggccggcacgaaagcccagggcctctgtctcccgggagctgctggcgcggcgcggctgggacacgccgtactcggtgccacgttcttgcccagttcctcgctgtggtgagctgctggctgttaggaagcctttccctcggctgcggccctcccacacggcccccagacccctgactgcagggtgggcgggcgtaccaggggaggcactctggccggcccgcttggcagcagggccacagctcctcctcgcagggctttgtgggattttaaaggatgaatcgtcttgttctccatgctccccctgccgcccatgcgcgccatgctctgtgtga

SEQ ID NO: 47952 - DNA, 7977 bp, Homo Sapiens
ggaaacaaagaagtattttcctgcagaggaataaaattggcagtggattggtttttggaaagaggccacaaagacattacagtttttgttcctgcttggaggaaagagcaatcccgacctgatgctctcattacagatcaggaaattttacgtaaattagagaaggagaaaatcctggtgttcacgccatcccggcgagtccaggggaggagagtggtgtgctatgacgacaggttcatcgtgaagctggcttttgagtcggacggtatcattgtgtccaatgataactacagggacttggctaatgagaagccagaatggaagaagttcatagatgaacgattattaatgtattcatttgtcaatgacaagttcatgccccctgatgaccctcttggcagacatggccccagtctggataattttctgaggaagaaacctattgttcctgaacacaaaaagcagccttgtccatatggaaagaagtgtacctatggacacaagtgcaaatattaccatcccgaaaggggcagtcagccacagcggtcagtggctgatgaactccgtgccatgtctagaaatacggcagccaaaactgcaaacgaaggaggactggtgaaaagcaacagtgttccttgtagcaccaaggctgatagcacttctgatgtcaaacgaggtgctccaaagaggcaatcagatccaagcataaggacacaagtctaccaagacctagaagaaaagcttcccaccaaaaacaaattggaaaccaggtctgtaccttccttagttagcatcccagctacttctactgcaaaaccccaaagcactacatctttaagcaatggccttccatctggagttcatttcccacctcaggatcaaagaccacagggacaatatccttcaatgatgatggcaaccaaaaatcatggaacgccaatgccttatgaacagtatccaaaatgtgactcacctgtcgacatcggatattattccatgttgaatgcatactcaaatctgagtctctcaggcccacgaagccctgaaaggcgtttctccttagacacagattatagaataagttccgtagcttctgactgcagcagtgaagggagcatgagctgtgggagcagtgactcctacgtgggttacaatgaccggtcctatgtcagctcccccgacccacagctagaggagaatttgaagtgtcaacacatgcaccctcacagccgccttaatcctcaaccgttcctgcagaatttccacgaccccttaaccagagggcaaagttacagtcacgaagaaccaaagttccatcacaagcctcctcttccgcacctggctctgcacctgccgcactccgctgtgggcgcccggtccagctgtcctggcgactacccctctcctccaagttcagcacactctaaggcaccacacctagggaggtccttggtggccacgagaatagacagcatctctgactctcgactttatgacagttctccttcacgacaaagaaagccttattcccgccaggaaggcctgggaagctgggagaggccaggctatgggatcgacgcctatgggtaccggcagacttattccttgcccgataactccacacagccgtgttatgagcagttcaccttccagagcctccctgagcaacaggagccagcctggcggatcccatactgtggaatgccgcaagatcccccgaggtatcaagacaaccgagaaaagatttatatcaatttgtgcaacatcttcccccctgaccttgtgagaattgtcatgaaaaggaatcctcacatgacagacgcccagcagctcgccgcagccattttagtggagaaatcccagctgggttattgaaagatgatgcatctttgtggtgtttagtagttttttgttcagctcaaatgctgagggaggtttgctacaatagcacatgtgatctccttctcagcaaggaggttatatagtatccatttatgtgaaatactgtatcatggaatctgtatgtatagccccacatggtggaagtatcacgggattgctttacatttaaactttttttttttaacatttcctttttaaagctatatccttggctggaaatttttccagtttgatttaatagatgtatctgtgatctttgatattaatctttggtgcatcaggggtttatatgcagcactttttatccttgttttgtgttttattaacttggtgtttgtctatcaattgcaagcaattacaataccttcagaatgtgggacatttgactagacctagcaaactgttttttcgagccaagcttagttagactcttttacagctttttaagttatttttatttggggaaagtgggcttctttgtgctataatcattatttatagaaacaaagttatactacagcactgactttatattttaaacagaatgtaagttaccagttttatgttgaaatgtgttacagtatatatatattagaatgatttacaatatggcacttttcgatgtgttatttttgtttggatttttttttctgttaagaaattagttaatttaatatggtcaatttaaaagaaagcagatgcaatcaatggaaaaatgtttccattttttaaaaatgaataaggcaaaagctgtaactgttacaggttagagctttgttatccagctatgatgtgcttcttgacagtagaagtggaattgaattcctagatttccattaacctgtatttttaatatgtctgtctttttgttttggggcacaacaatactggataaaataaccctttcacagcacttgcctgtttttaatgaatctaattattcacaatgcaacttttatatttaacatactctttagctttcctgctatttatcaaggctggcctgaggtgggtttatgtgttgaggttatgcaacatttcttgatactgcactatagagaaatggtgatggaggagttgtaaatggtaacttaaaatttttgtaagatattgtatattttccattttcctgaaggtagttttcttgggggggcctgttatattattaaggccagactcttgccacaaatagtgtagttttagatacagactaaggtctgttctagtattagtaagggatatttctggtttcaaagtcatgggttttgctagtggtgaatacatttctgcggagtagaagatagattttgcagtcagtggcagacagttgtgtgattgacatcacttgactgttgcgtccaggttttgaattgtacttcacgtaacagatgcattcagatctttttctgtagtctgcttagatgccctggctattctgattatcctacatgctacagtttgaagtgaagccctgaaaaaccagaaagtaccttttactgttgatacaaattgtatctttttaactataagaactattttgatttgtagatctagttaaaacacaagtatgtaactatgattagacttttgggcaacattttatcccttatttaaatacaaatttttaaagtaaaattgaggtctagaatagattagaaaataaaaataacaatttagataaatagaaatgtctgtcttagttttatataatatattaaaacacagtaaataaatttattggcattttctttctcctaaaacttacctagtgtgaacttaaaataaaggtaaaatgctgcctgaaaataatgtccaagcacctttgactaggataacattttcactacttgtgtgacactgtgtgttgcacgaagtaggatttgggtatacagtaaatgcttctaaaaggcattgtgcatattgacataaccaataatctgaaccgtgttcagcaaacttaattcaggaaagtggtattctacacaattattgctgttgtgtttgaaatgagtgtggcactcatctgtatccagaaataatatgggtgaggccacacaacccattctgagtggtgtctgtctgaaagcaaccctactcgcatgtgaaattgttctccttgatttggtcactataaagcaagtttaaatgtagaggctaactcagtgccaaaaacagggttacaaatgtgtagtatcttttattttagtcatattctaagacttctttttagtatgaaatcacttttaaattatacatgtaggttttgcttccattttcttcattttaccattttaattatttgaacattcgccaaattttacatttatttaaatgagatcttaggtgagatgtgtgtgacactttgaatttgaccttcttgtgttattagctgactatttgtcattgcctcatggattttaaattatgggaaaatagtgtagccagctgccacctctactgaagtgagtagctctgaactacccacactaaatccttcagtgtaattaattatgagtttaaaaatagcagttttcttatgtgaagaggacagtttgtcccctttttttgaagcaccgatgttgcgttcagagctgtagaatgagataattggcagactttaggtacagcaaattcttacttatctaaagcaataagtcaaaggagtccatcattaaattaaatccatagctgatcacaagccttcattttagccaaaactttctctctaaccaaatcttttaccagacttgctaataaataaccagagagatgtgttaataagtgaagttgccagaaatggtcaactgatcggaaaaaaaaggattcagactggagtattttgcccctgaataattgacagttgactgtgctttacacagtaactagccagtctgttgtctctgtgtcttagtccagagggaatagtacccaattggccaaatactggcccttagtatctcctcctttcttgcatgggatacagacgttttcagtcttgtttttatgatctctctctatatcctgataagagtttgtcattgacttacacatttggaagaaatgcacaccagtgtaatatatttgatactggtggaaacttgaactttgtgtttttatgaaaattcatttatgagaatatgtaatataactgaagagtattttatgtatatctatatacacaaatatgtatttgttatgaggtattaaaaacaggggttggggggagtgcttctgatggctaacttttctctaattaaactatgtttctttgagttgtgaacgaccgagtctggggtctggacggccaatgataagatttagaaccacttggatggaaagcagttcttcactggttttattcttggtattttcaaagaattattttgatatttttaatagaatgtgtaattttaaaatacacaaaaaacttaaagtagtattgattatacaaataattatttaacatgtcttatggatgtatctatatgtatatagacagtaatatatttataaaacaaatatactttgcttatgttatagctcttagtttgtgacaggtgggaggatggctctgggtgtgtgtgtgtgtgtgtgtgtgtgtgtgtgtgtgtgtgtgttttgaaaactctcaagctgttttccctctgatttacaatggtatttactttaaagtatgtttggttttcattattctttttgctctccaacttccttattcaagataaaataagacatacagttttctggccattctgttggtgtgtggtgcacccattttattgtcatctaactcctggagaattcccacgtgacctgaaatcaaacagattctggctggacatatgcttatgttccaaatatattaaagatgttaattcagctaacagttaagtttccaaggtatacaccaacaaataaaatgaggtattaaaaagagatggattacacacatgcattagaataagagaaaacagtagtgttaataaaagtaaagaaacatacactatcttagccccctagggcaggggttgactttttctgtaaaggatcagatagtaaataatacaggaatcatatggacttcaaatgccattgtaaaaactactcagctctgcctttagagcataagaacagccacagataacatgtaaattagtgtggctgtgttccaataaaactttatttacagaaacgggaagccggtcagattgggcctgtgggccataatttgctgatctcaagcagtaaatcctggtatatgttaatagaagaaatcataattgcatttcagttgacattaaaagaaaatctggtagtttttgatgtccttcaaaagaggattgttagacattgatgttaaagcatcttaattcatttgagttttcttacctgtttacacccattatttattagagatatttcttgtgtttaaccacaaaaaaaagcactctgttaaaatgttttaatatgtattgaatttctttcataaacttttcatttctgttgataaatgggaatcccttaccaaccttttgttttttaaaagtctcatagaccaaaaaaaatctgttgcagcatttaattagccacagatacattttggctgcatttaccagttacatttttccattggttttggcttctaataaataacatatctgccattctttaaaaatgattttaaagaagataaatatattgtaatttcacatgctatagctttattctgtaagattaaaaattgtgactagtataattgtagctataatgtgagtggcatgttacaatgtaactctttatgagaaataaaatgtatctctgctttgtctgtccagatctttaggatttttagatgccttgggactgtccttggtgaatgatattcttcatatgatcatatgtaattttgaattcgttggaagtacacgctgctgagcatgtttattcacagtgctttataccgggtgttgcatcagtaatcattttcataagaacatttaaacagcatgaacatcatcatccacttaaatagttaaactttcttttaaaattggaatgcaactgtaggttttaacaatgtttattgttttttaagtggttactttgtttttccttaatactttctgttaacttaattattactcctgttgcagtgttactgttatgtattagaagtggcttttccccctaagatccttagtcttttaaagacaatttaaggtattggccatttggcagtagaaaatgtgcatgttttaacttggttttataaaatctgtaatgtttcacttcttgaaccatgtaccaaatttgccaattttctgtccaagtgtttcagatgaataacaaaacgctgttcattgaagctttcgccacctttcttaaagcagcgtatgttccaagggaaaaaggcattgaaaagcaatcgtttgtttttatgaagaataggtgttcagattccttcagtttttttgaaattagaaatttcttaccttatgtgaaatattcacaaacgtgcacacttctgcagagacaaagcatttcactgcacgtgtaccaggttattgattttatcttttcctttcagggttttgtcctcccaaaccagagtcatatgctgctagtagaattttttatttgatcctgcgaacttttcttataggaaaagtaaggcaaaggatgtgtagtgcaaccatctgataaactagtgtgattgtatttatcctctgttctgtgtatttctgtaatggaatctttacaattcccaaaacggtattttagacctactggaaatctgtatcgaaacagctatgtgattctgccactgagaaaaaaaaaatttttaattcgtttttcttatgctggtttgtttttctttaatgaagaaattgatctcatatggcatcatagatgctaaataaataaaagcatcatacttctctagtttgcctgcattcagtggctaacattatgagcattgtgtaagataaacacatggtcagtatcaatgtaaatgttagagccatgattaattcctatgaaaattgaaattaaatgtcaaagacaactagacat

SEQ ID NO: 47953 - DNA, 906 bp, Homo Sapiens
gatttttcaataggcatgatcttcttatctcagatcatagttggattcctggggaatttctttcttctttaccactatagtttcctttgtttcaccagaggtatgttatggtccacagatctgattctcaagcacctgaccatagccaactccaggttatactctaaaggaatcccacaaacaatggctgcttttgggtcgaaagattccctcagtgatattggatgcaaacttgtgttttatgttcacagagtgggcagggctgtgtgcgttggcaatgcctgcctcctgagtgtcttccaggtcatcaccatcagccccagcgaattcaggtgggcacagcttaaactacatgctcccagatacatcaggtccttcaacatcctggtcctgtgctggattctgaacacgctggtaaatattactgttcctctacatgtgactggcaagtggaacagcataaatagcacaaagacaaatgattataagtattgttctggaagaggtaggagcagaattctacagtcattacatattgtcttgttatcatcccttgatgttttgtgtttggggctcatggccttggccagtggctccatggtttttatcctgcacaggctcaagcagcaggtccagcacattcatgggaccaacctctcccccagatcctcccctgagtccagagtcacccaaagcatcctggtcctggtgagcaccgtgttattttactcgctctcctccatctttacacgtctttttcctaatcccagttggtggctgttgaacaccttggcactgatcactgcctgttttcccacggtcagcccctttgtgctcatgagcagccatcccagaatagccaggctgggctctgcttgctgtggaaggaatccacagttgcctaag

SEQ ID NO: 47954 - DNA, 780 bp, Homo Sapiens
ctgtgctgcaagacccataccctggacagtgagccgaagtgtatggaagagttgcctgagtggaattttgatagctctggtactttacagtctgaaagctccaacagtaacatgtgtatggtgcctgctgtcgtgttttgggaccccttccacaaggactctaacaagctggtgttctgtgaagttttcaagtacaatcgaaagcctgcagagaccaatttgaggcacatctgtaaatggataatggacatggtgagcaaccagcatctctgctttggcatagagcagaaatatacactcatggggacagatgggcagcccttcggttggccttccaattgcttttttgggccacggggtccatatcacggtgctgtgggagcagacaaagcctataagaggaatgtcttggaggctgattaccaagcctgcttgtatgctggaattaagatcgtagggactaatgttgaggtgatgcctgcccagtgggaattccaaattggatcctgtgaaggaatcagcatggaagatcatctccgtttcatcttgcatcatgtatgtgaagactttggagtgatagcagcaacctttcatcccaagcccattcctgggacctggaatgatgcaggctgccacactaacttcagcaccaaggccatgtgggaggagaaaggtgtgaagtacattgaggaggccatcgagaaaataagcaagcggcaccaataccacatccgtgcctatgattccaagaggggcctggaaaatgtctggttcctaact

SEQ ID NO: 47955 - DNA, 2482 bp, Homo Sapiens
cagcttgtcggcgccattttgtctcggcagcggtggccgtagctccatcgcattttatgtttctggcgagaagggaacggagttttcatcaggtagattggtttttgtgcggccgtcctccaccgtttcctccaggacagcacctagtcgtggccggaggagtctcagagctgtcagaaagaataagactgattttatgggaaaattaagcagatgctccagtttgagaaacctggatctgcgatctgtttgtgagtggtattcagttaagagaacaattatttcgtataagccacatcagagacgactgaagatgaaaaaactaccatccccgtatataactaatttgtgctgtgcaccaacaagaacctgctttaaatttccatggcaatttacaacccccatactgtaccaggcaaggtaccagcatcaagatgatttatggtaataaggatataaaaccaaggaaaataacctaaagtctgaaaaagaccagaatcgaagtttcctgattcatattttaatgttttgaaatttatactccaggctgggtgcagtggcttgtgcctgtaatcccagcactttgggaggccgaggcggccggattgcctgaagtcagaagttcgagaccagcctgaccaacatggtgaaaccctgtctctacttaaaaatacaaaagagctgggcatggaggtggtgcgcgcctgtaaccctagctactcgggaggctgaggcctaagaatctcttgaacccaggaggcagaggttgtagtgagccgggatcacgccactgcactctagcctgggcgacagagagagagactgtctaaaaaaggaaaagaaaaaaatttatacgccaaaaaagatattctgagataacctgtagttaccactaactttgtgacaaaattataaaaatccacagccatctatgaatctgtaggcagacctgaagtttgaacgactggtgaagacatctgattttctttatagccaagttaggataacaaaatgcaaacaagtcattaatatttactatatgcaagatacagaaagatgaaggaaggagtaagaagttatccttcgtggaactattcaaagcaaaaatgcaaaataccagggaaagctttgaagaaccaagatttgagcaggttcttagaatatagattggattggatttgatttcaagaaagatgaacgtgtaaagcagaagtgggaagccaaaaacttttttccaaattagaattaagcattctttcaatgaacatttggaaatcaaggtagaaaaatatccctagggcctagctgaggagtctgtatgttgttgggttttgatagtaaccagtccaagattttgttattagacgtgggtttctgaatagacaggcatttctgaacagacatgacaggatcaaaacaatgtttgagcaaactgcccttcatctactgtggatatgttgggggatgatggaatatagtgaaagataatgggtgctcatacagcagtctagacttaaggtgattcaactactatatattaaactagattatcttttattttttaattttgaaatctggatgctcaagctctgcctgcacaaccacatgaggaagaaggaacaatgacaacaaaaataacactaaatttaaatttaagagtactacttttaggaaatagacaaaccattatttgggtacaactaaaggcaactggcatggactcaaatattttggggaagaaaaagactaaaagttctaaggaagaaaatgcgaaccttgatagtttgaaatagttaaaaagacagtgtagaaactgcttaggcagtttgattatggactattagatgatacttgggtctgataatggtataaggagaataaagtatttagggatccaatattacgcctgcagctttttccaaatagttcatgggggagggggatgtgtaagtggttaactgaagtctaactagataggtttgttgtaagcttaggatgtttacagttcttcatgttaagttgagcgtgatgggaagggaaagaatgctgatctttaaatttttgtccttagttaagttctgtatttagtgaattaattgcatcctaaaaagtcaaacttgaaaagcacattttaaatggcaaatctattttttacatgtttgtgaagtttttattttttagtaaacagaccatcagaagagaacaatggtacagagcaggggtcagcagatggattttgtaaagcatcaacttgtaaatattttcaagtttattagctgtatggctctggtttctgttccctgttccaaatgttaaagtctactgttgtattctaaaagcagccatggactgaatgtagctgtgttccaataaaacttacacaaaagcaggcagtgggccataatttgcaacacctgattcacagcataattttgtcacaaactgaaagtgttcctcaattaaagtgatttttttttcttga

SEQ ID NO: 47956 - DNA, 470 bp, Homo Sapiens
gggtgtggtaccgaggcttcagcgggtgccgcccgcctagagggagtggagcggtgagcacgtcaggggtggggggcgcaggtcaagctttcaccagtttttaattctttgatggggtaaatttgagcaattttctcgacttgtcgacattcgttattaactgagcaggaatcaggagaggaacccggtcctctccacacagcccagcagagagcctacgactagatttgcatctttacgtcctgcgcggaggctgctacacacatgcagaagtcatgctggtggcctggacagtgaagggagagaagtggatttgggagacatttaggaggaacagtaagaggaccttgtgcatgaataatttgtttccacactacagacagaagaatcccagacttcttagagaacccagtgactttttgcaccttaaatctgtgaaatcctcatgttttcttctgccgtatccatag

SEQ ID NO: 47957 - DNA, 318 bp, Homo Sapiens
atggtgaaagtcccgaaaacccgtcggacattctgtaagaagtgtgacaagcaccaacctcacaaagtgagacagtacaaggacggcaaggattctctgtacgcccaggggaagtggcgttatgacaggaagcagagtggctatggtgggcagactaagccgattttccggaaaaaggctaaaactacaaagaagattgtgctggggcttgagtgcattcagcccaactgcagatccaagagaatgctggctaccgaaagatgcaagcattttgaactgggaggagataagaagagaaagggccaaatgatccagttc

SEQ ID NO: 47958 - DNA, 1044 bp, Homo Sapiens
aaaacaacaggaagcagcttacaaactcggtgaacaactgagggaaccaaaccagagacgcgctgaacagagagaatcaggctcaaagcaagtggaagtgggcagagattccaccaggactggtgcaaggcgcagagccagccagatttgagaagaaggcaaaaagatgctggggagcagagctgtaatgctgctgttgctgctgccctggacagctcagggcagagctgtgcctgggggcagcagccctgcctggactcagtgccagcagctttcacagaagctctgcacactggcctggagtgcacatccactagtgggacacatggatctaagagaagagggagatgaagagactacaaatgatgttccccatatccagtgtggagatggctgtgacccccaaggactcagggacaacagtcagttctgcttgcaaaggatccaccagggtctgattttttatgagaagctgctaggatcggatattttcacaggggagccttctctgctccctgatagccctgtgggccagcttcatgcctccctactgggcctcagccaactcctgcagcctgagggtcaccactgggagactcagcagattccaagcctcagtcccagccagccatggcagcgtctccttctccgcttcaaaatccttcgcagcctccaggcctttgtggctgtagccgcccgggtctttgcccatggagcagcaaccctgagtccctaaaggcagcagctcaaggatggcactcagatctccatggcccagcaaggccaagataaatctaccaccccaggcacctgtgagccaacaggttaattagtccattaattttagtgggacctgcatatgttgaaaattaccaatactgactgacatgtgatgctgacctatgataaggttgagtatttattagatgggaagggaaatttggggattatttatcctcctggggacagtttggggaggattatttattgtatttatattgaattatgtacttttttcaataaagtcttatttttgtggctata

SEQ ID NO: 47959 - DNA, 693 bp, Homo Sapiens
ccctacccgtgccccgagtgcggcgaggccttcagcctcagctcgcatctgttgagccaccggcgcgcgcacgcggcggccagcggcgcgggggcggcggcgctgcggcccttcgcctgcggggagtgcggcaagggcttcgtgcgccgttcgcacctggccaaccaccagcgcatccacacgggcgagaagccgcacggctgtggcgagtgcggcaagcgcttcagctggcgctcggacttggtgaagcaccagcgcgtgcacacgggcgagaagccctacatgtgctccgagtgcggcgagaccttcagcgtcagctcgcacctcttcacgcacaagcgcacgcactcgggtgagcggccctacgtgtgccgcgagtgcgggaagggcttcgggcgtaactcgcacctggtgaaccacctgcgcgtgcacaccggcgagaagcccttccgctgtggccagtgcgagaagcgcttcagcgacttctccacgctcacgcagcaccagcgcacgcacacgggcgagaagccctacacgtgcatcgagtgcggcaagagctttatccagagctcccacctgatccgccaccgccgcatccacacgggcaacaagccgcacaagtgtgcgggctgcggcaaaggcttccgctataaaacgcacctcgcgcagcaccagaagctgcacctgtgttag

SEQ ID NO: 47960 - DNA, 1260 bp, Homo Sapiens
cagcatagcttggaggagactgcagcctcggactctcacctgcctcttttctgcgccgatgggagttccagaacggcggcggtggccacaggtctgatagcccagccgcagtgccaaggacgtgcaggggcgaggccttcttgggcagctttgtggccagcgggatggggccctcggcctcgtcccatgggagcccagtgccactgccctctgacctgtctttccgctccccaacccctagcaacctgcccatggtgcagctgtgggccgcccacgcccatgaaggcttctcccacctgcccagtgggctgtacccatcctacctccacctgaaccacctggagccccccagcagtgggagccccctcctcagccagctgggtcagcccagcattttcgatacccagaaaggtcaggggccaggaggagacggtttctacctgcccaccgcgggggctccgggctccctgcactctcacgcgccctcggcccggacccctggcggcggccactcctcgggcgccccggccaaaggctcgtcgtcgcgggacggtccagccaaggagcgggcgggccgcggcggggagccgcctccgcttttcggcaagaaggacccgcgcgcccggggcgaggaggcctcggggccacggggcgtggtggacctgacccaggaggcgcgcgccgagggccgccaggaccgggggcccccgcgcctggctgagcgcctgtcgcccttcctggctgagtccaagaccaagaatgcggcgctgcagccgtcggtactgaccatgtgcaacggcggcgccggggacgtggggctgcccgcgctggtggccgaagcggggcgcgggggtgccaaggaggctgcccggcaggacgagggcgcgcggctgctgcggcgcacggagaccctgctccctgggccgcgcccctgcccctcaccgctgcccccgccgcccgcgccccccaaggggcctcctgcaccccccgcggccacccccgccggcgtctacaccgtcttccgcgagcagggccgtgagcaccgcgtggtggcgcccaccttcgtgccttccgtggaggccttcgacgagcgcccggggcccatccagatcgcatcccaggcgcgcgatgcccgggcccgcgagcgcgaggctggcaggccaggggtcctgcaggcgccccccggctccccgcggcctctggaccggcccgagggcctgcgcgagaagaactcggtcatccgctcgctcaagcggccgc

SEQ ID NO: 47961 - DNA, 576 bp, Homo Sapiens
atgggggccgtccttccctgggggcagggacgtagggaaccaggcggtggggagggagaaaggagcgacgaggtcagaggaaaccttgggtttccaaggctcctggggcaccaaagggcttcccgcagtcggggaattgagccctggggaggagccttttgcgagaacgtgagcgcgccccaacacgcctcagacctcgtaaacccacttggcaaagaccggggaagcggctggcggaccgactgcggtgaactcaagaaattaacctgcgctgcaattaaacgggctgccgccctttcacactcacctcgagcgaccgagatagagaaagctcccgaaccggccgcggggggacttggctccaccctcccgtcccgggagaagaggacaaaaaggggagatggacttggaatggccccgcccttcacagcgctccaatccttggaaaccaaacctcctctccaagcctccacgtctagaagggacaaaggcagcgaggagatccagagaccgacggggagatggtggctttcaggcttctggtgtgggtgcatgggggaaaggtacaatggttaa

SEQ ID NO: 47962 - DNA, 1254 bp, Homo Sapiens
atggacagtagctgccacaacgcgactaccaaaatgttagcgactgctccagctcggggcaacatgatgagcacgtccaaacccttggctttctccattgaacgaatcatggcgcgcaccccagagcccaaggccctgccagtcccccacttcctgcagggagccttacccaagggggaacccaagcactctctgcatctcaactcgtcgatcccctgcatgatccccttcgtgcctgtggcctacgacacgagccccaaggcaggagtgacgggctccgagccgcggaaggccagtctggaggccccggcggcgcccgcggcggtgccctcggctcccgcattcagctgcagcgacctgctcaactgcgcactgagtctcaagggcgacctggcccgcgacgcgctgccgctgcagcagtacaagctggtaaggccgcgtgtggtcaaccactcttcattccacgccatgggcgccttgtgctacctgaaccgaggtgacggcccatgccacccggcagccggcgtgaacatccacccggtggcctcctacttcctcagttcccctttgcacccgcagccaaaaacgtatttagccgaaaggaataaactggtggtcccggcggtggagaaatacccttctggagtagctttcaaagacctgtcccaggctcagctgcagcattacatgaaagaaagcgcccagcttctgtcggaaaaaatcgcgttcaaaacctcggatttcagccgaggctctcctaatgccaagcccaaagttttcacttgcgaagtgtgtggaaaggcaagttttaatgcgcactataacttaacccgtcacatgccagtgcacacaggagccagacccttcgtttgcaaagtgtgcggaaaaggtttcaggcaagcaagcaccctgtgcaggcacaagatcattcacacgcaggaaaaacctcacaaatgtaaccagtgtggcaaagcatttaatagaagttccactttaaacactcatacccgaatacacgcgggctacaaaccgtttgtgtgtgaattctgtggcaaagggtttcatcaaaaagggaattacaaaaaccacaagttgacccacagcggggagaagcagttcaagtgcaatatctgcaacaaggctttccaccaggtttacaacctcaccttccacatgcacacccacaacgacaagaagcctttcacctgccccacgtgcggcaagggtttctgcaggaactttgacctcaagaag

SEQ ID NO: 47963 - DNA, 1039 bp, Homo Sapiens
tgaagagtgagctaggagaacttcgtaaggtgaaactgtggggatccaatgggcaacacaaagcatcttggttaaggaggttaggggccggtctaggacttgcctcaggaggaaggacagcctcagagcatgctcagaggtgggaagggaaggaggagaaagcaggcgaagcggggccatctgctttatctgaagattttcagctgatgaagaactaggaggctcaaacactatcttacctgagtccaggacaagtgacttggagagtgtgctcttctgtggcaggatcaggtctgtctagggcaggatggcccaggatctcagcgagaaggacctgttgaagatggaggtggagcagctgaagaaagaagtgaaaaacacaagaattccgatttccaaagcgggaaaggaaatcaaggagtacgtggaggcccaagcaggaaacgatccttttctcaaaggcatccctgaggacaagaatcccttcaaggagaaaggtggctgtctgataagctgatggcatggagccctgccctgagtgtctgtccctcttcagccaagcccaagtctcctagacccccagggagccagtgaactgtcaccttctcttcatcacagaatgagtaaagatccctgaacaaatgcattgtgaacccattccccactcccaccttcaactcttttctcccattatttcctccacctgctgggtctctgctgaccttgctgggaacactctgaggacagtgtggctggccgagcggttggccccatgggtggtggggtgtgagaagcctgcaataccccaagaccccagagggcagtccttaggaagcacttacaccacctgggaacccctccgtcttttccctctactctcatcctaggaataaagcatttccacgccagagtagtttgggctgggggccagggttgggtggtcctgtccctccatatcatgtcctaccctatggtcctgttcctagtcatttagatcaccccagatggcctgatgacaacaagagtttgtgaagttatg

SEQ ID NO: 47964 - DNA, 4454 bp, Homo Sapiens
gcggccgccgcggccaccgcccactcggggctggccagcggcgggcggccggggcgcagagaacggcctggctgggcgagcgcacggccatggccccgtggctgcagctctgctccgtcttctttacggtcaacgcctgcctcaacggctcgcagctggctgtggccgctggcgggtccggccgcgcgcggggcgccgacacctgtggctggaggggagtggggccagccagcagaaacagtgggctgtacaacatcaccttcaaatatgacaattgtaccacctacttgaatccagtggggaagcatgtgattgctgacgcccagaatatcaccatcagccagtatgcttgccatgaccaagtggcagtcaccattctttggtccccaggggccctcggcatcgaattcctgaaaggatttcgggtaatactggaggagctgaagtcggagggaagacagtgccaacaactgattctaaaggatccgaagcagctcaacagtagcttcaaaagaactggaatggaatctcaacctttcctgaatatgaaatttgaaacggattatttcgtaaaggttgtcccttttccttccattaaaaacgaaagcaattaccaccctttcttctttagaacccgagcctgtgacctgttgttacagccggacaatctagcttgtaaacccttctggaagcctcggaacctgaacatcagccagcatggctcggacatgcaggtgtccttcgaccatgcaccgcacaacttcggcttccgtttcttctatcttcactacaagctcaagcacgaaggacctttcaagcgaaagacctgtaagcaggagcaaactacagagacgaccagctgcctccttcaaaatgtttctccaggggattatataattgagctggtggatgacactaacacaacaagaaaagtgatgcattatgccttaaagccagtgcactccccgtgggccgggcccatcagagccgtggccatcacagtgccactggtagtcatatcggcattcgcgacgctcttcactgtgatgtgccgcaagaagcaacaagaaaatatatattcacatttagatgaagagagctctgagtcttccacatacactgcagcactcccaagagagaggctccggccgcggccgaaggtctttctctgctattccagtaaagatggccagaatcacatgaatgtcgtccagtgtttcgcctacttcctccaggacttctgtggctgtgaggtggctctggacctgtgggaagacttcagcctctgtagagaagggcagagagaatgggtcatccagaagatccacgagtcccagttcatcattgtggtttgttccaaaggtatgaagtactttgtggacaagaagaactacaaacacaaaggaggtggccgaggctcggggaaaggagagctcttcctggtggcggtgtcagccattgccgaaaagctccgccaggccaagcagagttcgtccgcggcgctcagcaagtttatcgccgtctactttgattattcctgcgagggagacgtccccggtatcctagacctgagtaccaagtacagactcatggacaatcttcctcagctctgttcccacttgcactcccgagaccacggcctccaggagccggggcagcacacgcgacagggcagcagaaggaactacttccggagcaagtcaggccggtccctatacgtcgccatttgcaacatgcaccagtttattgacgaggagcccgactggttcgaaaagcagttcgttcccttccatcctcctccactgcgctaccgggagccagtcttggagaaatttgattcgggcttggttttaaatgatgtcatgtgcaaaccagggcctgagagtgacttctgcctaaaggtagaggcggctgttcttggggcaaccggaccagccgactcccagcacgagagtcagcatgggggcctggaccaagacggggaggcccggcctgcccttgacggtagcgccgccctgcaacccctgctgcacacggtgaaagccggcagcccctcggacatgccgcgggactcaggcatctatgactcgtctgtgccctcatccgagctgtctctgccactgatggaaggactctcgacggaccagacagaaacgtcttccctgacggagagcgtgtcctcctcttcaggcctgggtgaggaggaacctcctgcccttccttccaagctcctctcttctgggtcatgcaaagcagatcttggttgccgcagctacactgatgaactccacgcggtcgcccctttgtaacaaaacgaaagagtctaagcattgccactttagctgctgcctccctctgattccccagctcatctccctggttgcatggcccacttggagctgaggtctcatacaaggatatttggagtgaaatgctggccagtacttgttctcccttgccccaaccctttaccggatatcttgacaaactctccaattttctaaaatgatatggagctctgaaaggcatgtccataaggtctgacaacagcttgccaaatttggttagtccttggatcagagcctgttgtgggaggtagggaggaaatatgtaaagaaaaacaggaagatacctgcactaatcattcagacttcattgagctctgcaaactttgcctgtttgctattggctaccttgatttgaaatgctttgtgaaaaaaggcacttttaacatcatagccacagaaatcaagtgccagtctatctggaatccatgttgtattgcagataatgttctcatttatttttgatgtagaatttacattgccatgggtgttaaataagctttgagtcaaaagtcaagaaagtgactgaatatacagtcaccttttatgaaatgagtctctgtgttactgggtggcatgactgattgaggtgaagctcacggggccaggctgaccgtcttgaccgttccacttgagataggttggtcatcgtgcagaaggccccaggacctcagcacacacagcctcctcttggtctgagtaggcatcatgtgggggccagatctgcctgctgtttccatgggttacatttactgtgctgtatctcagatgttggtgtctggaagtttattcttaagagactgctacccagctggtctgtattattggaagttgcagttcgtgctttggttggccttctggtctaaagctgtgtcctgaatattagggatcacaattcactgaaatacagcagtgtgtggaggtgatggccagttaatctgctgaactggttttgactaatgacaaacctctttttaagatggtagaatggaggtgatagtcacaaaagtaaatgttccatttttatgaatgactttctacagagtttctatttctaaagaaaaaacaattgttcacatcccatctgatgattagcatgtgtgtaatgaatgctgtcttggtctcccctgtggaaacccttctccctgtgccttagagcaggtgtgtacatctctcactacctttctcatgggtgctgttagattttggcacccgttttctcagcattcagcccagggaatgtggttttcacttcttcgtcagataagaccaacatgaaggggtatgttgagaaacatcctgaggcaaggtgggaggtgggatggggcaggactttcccttccaagcacatgcatggcaggtggggaaaggggggcttgcacccctgctggaaagaaaaggtttgtgtatatttctgatgcaaatgtcatactcactgctctgtaaaggcagctggcagctttttgggaaaagaacgtgctcgtctgttctctggcatcaagtttcttgcagctgctctgagggagagacagtgagctgcaagactgcctccccataacaacaggcaactcagagaagagtcattttatgttgttcctatggaatctggaatgagtgcagagctcctacccacacatgactgccccgccatttcatcctaggcattctgtgaaggagattggttagtccaaacttgctaacatacgaaaattcacttggaacatgatgagagatttcttattgaggccaagagatgtttcctgtcccagaggaaccattaggagtcgcttttagggtattcagctttgttcatgaaataaggcatctctgagaaagtggccccagggagagaatggaggactgggaggagaagcattaactgagctccaagggtgtgtgggcagagagcttgctatgtgaactcactccttaagaaaatggaagagaaaaagagagtgctagttaaaaaatcgggatgttttagtttggatttagggttttgatacttatgttgaaatactaatgtttctgatcaataaaatcaaactcttaatataccgagtaatgaaaccatagtgtgattgcctcagaataaattgagaagtccaa

SEQ ID NO: 47965 - DNA, 264 bp, Homo Sapiens
atgggtcacaggttgagactaaagtctggcaagatcaaagccatggttgaaaaaccaaacaaaatgactgaaacccgcaggagagctctgagagtccagtgcctcaggacagactgcactggtggtgctctgggggctcggccgtatttgaatgcagatcctggcactgcagcagtgagaccacagagaaacaacacaggaaaaaggagaatgtgtaccatcttaaaaaagaattattataaaagtccaaatctagtcaggtag

SEQ ID NO: 47966 - DNA, 315 bp, Homo Sapiens
atgattaaggatactagtataagagatcaggttcgccctttagtgttgtgtatggctatcatttgttttgaggttagttggattagtcattgttgggtggtaattagtcggttgttgatgaggtatttggaggtggggatcaatagagggggaaatagaatgatcagtactgcggcgggcagacctaggattgtgggggcaatgaatgaagcgaacagattttcgttcactttggttctcagggtttactatagttttttatttttatgggctttggtgaggggggtagatggtaatttgtatttaatattttta

SEQ ID NO: 47967 - DNA, 393 bp, Homo Sapiens
aatagaacgttggttaagcttaagaaggcttcagttaacatactgaggattgtagaaccatatatttcatggggatatccaaacctgaagtcagcaaatgaacaaatctacaagcgtggttatggccaaatcaataagatgcaaattgccttgacagataacattttgattggtcaatctcttgccaaatatggcatcatctgcctggaggatttaattcatgagatctatacagttggaaagcacttcaaagaagcaaataacttcctgtggcccttcaaattaacttcttcaggagttggaatgaagaaaaagaccgcccattttgtaaaaggtagagatgctggcaatagggaagaccagacaaacagtcttgttaaatggatgagctaa

SEQ ID NO: 47968 - DNA, 1090 bp, Homo Sapiens
gctgtattgagttggtattctggatgatacaatttttagggctagaaagtttagagtgttggctggctcacaggctgcaaaggaaataatggtggagtccagaccacagcagtaatttcaattactaacacaaagaaacccattgtctgcaataatgaatataactgcagtgtcttgttttgttttaaattcttgtgtgcgatgaagggggcgaatctatcagacaacctatcaattgggctgatgatgtcagtgttccagtggcttctaacaggcgttaatacctgttggaaatggattatcattggctgggacgattgatccacagaccagcatggctgccactgctgctgtgagtcccagtgactacctgcagcctgccgcctccaccacccaggcgagatcccagccatctcccttagccctgcttgctgcaacatgtagcaaaattggccctccagcagttgaagctgctgtgacacctcctgctcccccacagcccacaccgcggaaacttgtccctatcaaacctgcccctctccctctcagccccggcaagaatagctttggaatcttgtcctccaaaggaaatatacttcagattcaggggtcacaactgagcgcctcctatcctggagggcagctggtgttcgctatccagaatcccaccatgatcaacaaagggacccgatcaaatgccaatatccagtaccaggcggtccctcagattcaggcaagcaattcccaaaccatccaagtacagcccaatctcaccaaccagatccagatcatccctggcaccaaccaagccatcatcaccccctcaccgtccagtcacaagcctgtccccatcaagccagcccccatccagaagtcgagtacgaccaccacccccgtgcagagcggggccaatgtggtgaagctgacaggtgggggcggcaatgtgacgctcactctgcccgtcaacaaccttgtgaacgccagtgacaccggggcccctactcagctcctcaccactgcttcctgccaaactgggatgctgaattcaacaagaatgttcttatttttggcatttattaatgtgctctaa

SEQ ID NO: 47969 - DNA, 486 bp, Homo Sapiens
atgcctgagcctcccaccccctccgttggctcctgtgctgcccgagcctcccggatgagcgccgccccctgctccagggcgcccagtcccatcgaccacccaagggctgaggagtgcgggcgcgcggcgcgggactggcaggcagctccacctgcagccccggtgagggatccactgggtgaagccagctgggctcctgagtctggtgaggacatggagaacctttatgtccagctcaagttgcagtccgtaggcacttgctttaaccgtgaagaattaccttcagtacttcagtggcctcagggtgaggaattgggagccaccagtgtgacaaataaacctggactctcagcaatgaggaaagaaacagaccaacaagttggggaaagaaagctcacatactgcggtgaccaggtaactctgttcacagaccaagccctcagtcaaatactatcttctgaggagggaagaatcaaggttatgtag

SEQ ID NO: 47970 - DNA, 2503 bp, Homo Sapiens
gccagggggcgtggggccatggtggtcttgcgggcggggaagaagacctttctcccccctctctgccgcgccttcgcctgccgcggctgtcaactcgctccggagcgcggcgccgagcgcagggatacggcgcccagcggggtctcaagattctgccctccaagaaagtcttgccatgattggataggacccccagataaatattcaaaccttcgacctgttcacttttacatacctgaaaatgaatctccattggaacaaaagcttagaaaattaagacaagaaacacaagaatggaatcaacagttctgggcaaaccagaatttgacttttagtaaggaaaaagaagaatttattcactcaagactaaaaactaaaggcctgggcctgagaactgaatcaggtcagaaagcaacattgaatgcagaagaaatggcggacttctacaaggaatttttaagtaaaaattttcagaagcacatgtattataacagagattggtacaagcgcaattttgccatcaccttcttcatgggaaaagtggccctggaaaggatttggaacaagcttaaacagaaacaaaagaagaggagcaactaggagtccactctgacccagccagagtccaggtttccacaggaagcagatggagctcctttcacaggggctctgagaaaaactggagctgatctcaagaagccccacatcttcctaaggggccccatggcctgtttgggggcagggtaggtcctggggcactgtgggccgcctgcctgctgatgtgggctctaggccagcttgttgtcacgtacgtggtgtgaaataaagcccaagcactgggtgcccgtttcctgtgtttcgaattataccaattcaaaacagaactatttaaaaatattggccaggcacggtggctcacacctgtaatcccagcactttgggaggccgaggcgggtggatcacttgagatcaggagttcaagatcagtctggacaacatggcaaaaccctgtctctacaaaaaattagctgggtgtggtggcacgcacctgtaatcccagctgctctggaggctgaggcatgcgacgcttgaacccaggaggcggaggttgcagtgatccaagatcgcaccactgcactccagcctggaagaccaaacgagactctgtatcaaaaaataataataattaataaagttttactggaaaaaagaagtctgctgacgggaatgatgtggaagctgactgccaagcgatcggtgtgctggccgtggagtcagcaccaccctcactgtgagtcgtcagctggtgggtcctcacaggctgcgtcctgaatgcagtgcggtgtgaggacatgaaagcaaatgcaattttattgcatgccaaaaagtttaacttgattcttggtgttaactatgttagtagattcttcaatgctataagcaaattaacaagaaacagcagcactattttcctcttttcttaaacacgaaggttaaatggccaggcatggtgactcatacctgtaatcccaacaatttgggaggccaaggcaagcaaatcacttgagctcaggagttcgaaccagtttgggcaacatggcgaaaccctgcctctacaaaacatgcaaaaattagctgggcatggtagcatgcgcctgtagtcccagctactcgggaggctgagcttcgaggattgattgagccagtgaggtccaggctgcactaagccaagatcctaccactaggcaacagagccagaccctgtctcaaataaaaatttaaaaaaataataaaaaaggccgggcgcactggctcacgcctgtaatctcagcactttgggtggccaaggtgggcggatcacctgaggtcagttcaagaccagcctggccaaacatggtgaaaccctgtctacaaaaattagccaggcatgatggagggtgcctttagtcccagctctttgggaagctgaggcgggagaatagcatgaaccagggaggtggagggtgcctgtaatcccagctccttgggaggctaaggcaggagaatagcatgaacccggtaggtggaggttgcagtgagccgagatcgcgccactgcactccagcctgggcgacagagcaatactcccgtctcaaaaaaaaaaaaattaaatgattgtgatatgtgttacttttggtcacaaataaattgtaattaagattattctggccaggtgcggtggctcacgcctataatcccagcactttgggaggccgaggtgggcagatcatgaggtcaggagatcgagaccatcctgcccaacatggtgaaaccccgtttctactaaaaatgcaaaaattagctgggtgtggtggcgtgtgcctgtaatgccagctactcgggaggctgaggcacgagaatcacttgaacccagcaggcagaggttgcagtgagccaagattgcgccactgcactccagcctgacgacaaagcgagactccgtctcaaaaaaaaaaaaaaaaga

SEQ ID NO: 47971 - DNA, 321 bp, Homo Sapiens
atggctcaagagttcgtgaactgcaaaatccagcctgggaagctggttgtgttcatcaagcccacctgtccatactgcaggagggcccaagagatcctcagtcaattgtccaccaaacaaaggcttctggaatttgtcgatatcacagcctccaaccacactaacaagattcaagattacttgcaacagctcacaggagcgagaatggtgcctcgagtctttatcggtaaagattgtataggcggatgcagtgatctagtctctatgcaacagattggggaactgctgacgcggctaaagcagattggagctctgcagtaa

SEQ ID NO: 47972 - DNA, 513 bp, Homo Sapiens
agttgtatcttctgccttgcagtggacggggacccccactttgtgatccaaatcccacactcagaagagaagatctgcttcacactgaatgggcaccctggggacttgctgcagctcatagaggacccaaaggcagggctgcatgtgagtgggaagctgcttggcgcaccaccaaggccgggccacaaggaccagactcgcacctacttccagatcatcacagtcactacagacaaaccccgggcctatactatcaccatcagccgcagttctatatctttgcgaggcgagggtaccttgcgcctgtcctgggaccaacctgccctgctgaagaggccccagctggagctctatgtggctgctgcagcccgccttaccctccgccttgggccctaccttgagttcctagtcctccgacaccgctacaggcatcccagtaccctgcaactaccccacctggggttctacgtggccaatggctcaggcctcagcccctcagcccgtggcctgata

SEQ ID NO: 47973 - DNA, 786 bp, Homo Sapiens
gtggagctgctgtctagacgcagatcatgggtggcgggtatgatctcaacctcttcgccagccctcctgacagcaacttcgtgtgctccgtctgccatggggttctcaagaggccagcaaggttgccatgcagccacatcttctgcaaaaagtgcatcctccggtggctagccagacaaaagacctgtccgtgctgtaggaaagaggtgaaaaggaaaaaggttgtccacatgaataaactccggaaaaccattggccgcctggaagtcaagtgcaagaacgccgacgctggctgcatagtgacatgccccctggcccatcgcaaggggcaccaggactcatgcccctttgagctaacggcctgccccaacgagggctgcacctcgcaggtgccgcgtgggaccctggcagagcaccggcagcattgccagcaagggtcccagcagcgctgccccctgggctgcggggccaccctggacccggccgagcgtgctcgccacaactgctaccgggagctgcacaacgcctggagcgtgcgccaggagcgccgtcggcccctgctgctgtccctcctgcggcgtgtgcgctggctggaccaagccaccagtgtcgttcgtagagagctggcggagctcagcaacttcctggaggaagacaccgctctgctggagggtgccccacaggaggaggccgaggctgccccagaaggcaacgttggggctgaggtggtgggggagcccagggccaacataccttgtaaataggtaaataaaagcagacccccgg

SEQ ID NO: 47974 - DNA, 3243 bp, Homo Sapiens
  misc_feature (1)...(3243): n = A,T,C or G
atacagggtgcaaaagggggcggtggaagcgcgcatactccggttgagcaacctgacgatctgctgtcggtcgcaaaattaaaaatgctcattgccgtttctgagggagaaatacagggcgacctgaccgctcagaatattttcctcaacgatacgccgctggcaaacgacagcggggaattcaacttcagcggcgtgaatgagttccgtaagggcacacaggaccagacctatatgcccnggatgcnccaggtcgataacgaactggcggttggcacaactgtcaccaccaccgcgccctggacacgccagtttaccaatctttccctggatgctatccgcatcaagctcagccttccggtccagtatctctataaagataacggcgatatggtgggcacggtcaccgagtatgcgatcgatttatcaacggacggcggcgcctggaaaacggttgtaaacggcaaatttgacggaaagaccacgacggaatatcagcgtgaccaccgtatcgatctgccaaaatccacgtccggctggtctgtcagggtcaggcgtattacggctgatgccagcggatcaaattcgaaactggttaacgccttcaaggtgttttcctatgcggaagtcatcgacagcaagcttcgttatcctttaaccgcgctcctgtatgtcgaagtggacagcagccagttcaacggcagcgcgccgaaagtgacctgtaagataaaaggcaagctgattaaggttccggataattacgatccgataacccgaacctattctggctcatggtccggcgggttcaaaatggcctggtccaataaccccgcctggatattttacgatctggttctggatgaaatttacggcatgggcacgcgcgtggatgcgtccatggtggataagtgggctctgtattcaatcgcccagtactgtgacgaaatggtttccgacggggccggtggcaccgaaccgcgtttcacctgcaacgttttcattcagagccaggaggacgcctggcaggtacttaacgatctcgccgcggtatttcgtggaataacgttctggggcaacgatcagatttatgtccaggcagacgtcccgcaggacgatgttgactgggtttataacgcctcaaatgtgatcgatgggctgtttacttatgcgggcggctcatacaagaatcgctacagctcctgcctggtgtcctggtccgatccgcagaaccattacagcgataccgttgagggggtttacgattcggcgcttgtagaacgttacgacgtccggcagacgtccctgaccgcaatcggctgcacctcgcaaagtgaagcgcaccgacgcggtcgatgggtattgctctccaatgccaaagacgggaccgtatcgtttggcgtggggctggacggttatatccctttgcccgctgaaattatcggtgtcgccgatcctttccgttccggcaaggagaacgggggacgcatcagggcggtcaatggccgccagattacgctggatcgagaaatagactacgcggcgaaagaccggctggtggttaacctgcctgacggaaaagcccagacgcgcacaatcagcgcggtgagcgcagataaaaaaacggtgacggtggccaccgcatttagtcaggcacctgtggcgggtgctgtctgggcgatagacagtgataacctcgcaatacagtatttccgggtcacttcaattgcagctaacgacgacagcacaggcggtttcactattacggccgttcagcacgatccaaacaaataccgttacatcgatgacggcgttcgggtcgagtcgcccccgatcaccgtcacgccgataagcgtcctgtcagcgccgaagaatatcgtggtgactgagagcgatcatgtttcacaggggctgacggtagcaagcctggacgtgtcatgggataaggtagagggcgcaatccggtacgttgcccagtggcgtaaggacaacggggactggataaacgttccggttaccagcgcgcagggtttctcggttcagggcatttattcgggcagctatgacgtgcgcgtccgggcgctgaatgcgcaggatacgtcgtcaccatgggggtacggtgaaacaacttatctctccggtaaaacgggaaaaccgggtactccgctcaactttctggcgaccgaagatgtggtctggcatatcgacctgacctggaaatttccggatggctctggcgacacggcctatacagagattcagcgcgccacaactgccgactacgccaatcctgaactgctggtcctggtgccgtacccggctgcagattatcagcatggccccatgccggccggcgttcgccagtggtaccgcgcacgcctgattgaccgtatcggtaacgccggggactggaccgactggatcatgggcacgtcctcgatagatgtcagcgaaataactaatgacattctggaggatatgaaagagtcggaaacgttcaaagacctgatcgagaacgcggtggacagcaacgaaaaaattgctggcatggctgacgaaatcaaaaaccatgccgacgagctggagcagcaggcgaaagatatacaggaaaacgctgacgggctggcgcaggcggcggtaaaaatcgatgagatttccgtttcaatggacgctggtgggaatatctccaactctaccgatctcactgaaactctggccgatttcacgcaggcatcggcgacaaaaattaacaccctgactgttaaatctggcgaaaacagtgccgcgataaatgtcaacgcacaggctatcgcagatgtaaacggtaacctaagtgcgatgtacaacatcaaggttggtgtctccagcaatggacagtattacgccgcggggatgggtatcggcgtggagaatacgccatccggcatgcagtcgcaggttatcttcctggctgaccgcttcgccgtcaccacggcagccggaaatagcgtagctttgccgttcgtgatccagaacgggcagacattcatccgggccagcttcatccaggacggcactatcagcaacgcaaagattggtaattttatccagtcgaacaattatgttgctggttctgctggctggaagcttgataaaggggggacgtttgagaactacggttcgactgctggtgagggagccatgaaactgacaaatcagacgatcagcgtcaaagatggcagtaatgttcttagggtgcaggttggc

SEQ ID NO: 47975 - DNA, 4850 bp, Homo Sapiens
ccagagcccggcttggtccggtccctctgcccccatcccgcacccttccacctcctccgagtcccactcctcacctaggacgccccaaactgccatgggttagggtggggatcgcgacccgcgcgaaagaccagccctgcgcttccgccgggggacgcggagcccaaacgccgctcaccgcttgcgggcgccgggcatggggagtgtggtgtgagcccgcacccggggaggacgcaggagctgcggagacgggcgcgaggaggaggagaggagtcgtggattggaaggacccgagggagggagggtggggaagcgagggaaaagtgaagctgggaggagaaggcggcggaaggtggagattgatgcttctgttttttgttgccgctgctgccctcgcgctgggagccgagccggagggaaggcggtggagagatgattgcagagttggtgagcagcgctctggggctcgccttgtatctcaacaccctgagtgcggatttctgctatgatgacagccgtgctatcaagactaatcaggaccttctcccagaaactccatggacgcacattttctacaatgatttttgggggactcttctaacccacagtggcagccacaagtcctaccggccactctgcactctttcttttcgcctgaaccatgccattggagggttgaatccctggagctaccatcttgtcaatgtcctgttgcatgcagcagtcactggtctcttcacaagcttctccaagatcctccttggtgatggatactggacattcatggctggcttgatgtttgcttctcaccccattcacacggaggcagtggcaggaatcgtgggacgagccgatgtcggggccagtctcttctttctcctctccttgctctgctacattaaacactgttctacaagaggctactcagccagaacctggggctggttcctggggtcaggactgtgcgcaggatgcagcatgttgtggaaggaacaaggagtgactgttctcgcagtttcagcagtttatgatgtctttgtctttcacaggctgaaaataaaacagatattacctaccatttacaaaaggaagaacttgtcgcttttcctaagcattagtttgttaattttctggggttcctcccttttgggtgcccggttatactggatgggaaacaaaccaccaagcttttccaactcggacaaccccgctgctgattcggacagcctcctcacccgcactctcaccttcttctacttgccaaccaagaacctctggctgttgctatgtccagataccctcagttttgattggtcaatggatgctgtgcctctgctcaaaacagtttgtgactggagaaacctacacactgtggccttctatactggactccttctccttgcctactatggtttgaagagcccgagcgtagacagagaatgcaatgggaaaactgtaacaaatggcaagcagaatgcaaatggacatagctgcctttcagatgtggagtaccagaactcagagactaagtccagctttgcatccaaagtagaaaatggcattaaaaacgatgtatcacagagaacccagcttccttctacggagaacattgttgttctgtctttatctttgttaatcataccctttgttcctgccacgaacctgtttttctatgtcggctttgtaattgcagagcgagtattatatattcctagtatgggcttctgcctactgattacagtgggtgctagagccctttatgtcaaagtccaaaagcggttcctcaagagcttgattttttatgctacagctacactaattgttttttatggactcaagactgcgatcaggaatggagactggcagaatgaggaaatgctttatagatcagggataaaagtaaacccagctaaagcatggggtaaccttggaaatgttctgaagagtcagagcaaaatttctgaagctgaaagcgcctatagaaatgctttgtactaccgcagcaacatggctgacatgctttataatttagggctacttctccaggagaacagcaggtttgcagaagcactacattattataaattggccattgggagcaggcctaccctggcttctgcatatttaaataccggtattattctaatgaaccaaggaaggacggaagaagcccgacggacattcttaaagtgttcggagatcccagatgaaaacctaaaggaccctcatgcacacaagagctctgttaccagttgtttgtacaacctaggaaagctgtatcatgagcagggacactatgaggaagcccttagtgtatacaaggaagcaattcagaaaatgccaaggcagtttgccccacagagcttgtacaacatgatgggtgaagcatatatgcgtttaagcaaactccccgaagcagagcattggtatatggaatcactgagatccaagactgaccacatccctgctcatctcacctatgggaagctgctagctctaacaggtcgtaagagtgaggctgaaaagctcttcttgaaggctattgagctggatcccaccaaaggaaactgttacatgcattatggtcagtttcttctggaagaagctcgtctcatagaagcagctgagatggcaaaaaaagcagctgaactagacagcacagagtttgatgttgtcttcaatgctgcccacatgctcagacaggctagcctcaatgaagcagctgagaagtattatgatctggcagccaggctgaggcctaattatccggctgctttgatgaacctgggagccattctgcacctcaatggcagactccagaaggccgaggccaactacctgcgggccctgcagctcaagccagacgatgtcatcacacagtccaatctccgcaaactgtggaacatcatggaaaaacaaggcttaaagacttctaagacctgacacaggaggcagaagcccatcctcctccatttttaaaagctggcttccttagcagacagaacttcccagcagtgctatgacaagagctggtgttagacttcaagaccagggcagaggtcattgaggtcactaccgcttctggaagaatccactttgctgtaggcacagctgttaacaccaaaaaggggaaagccggaaacctcctggaggatgtcattgttacccatagactgtaaaccagagcacttaaaacagaaccttttggcattcttaaaaagggaggggtgggtgtgtaagtcacagattttgttcattttctgaaagctaatttcaaaattatgttgttccttaaacactgtgagaggaagtcagagtgtccattcaggcatggcaaacaattagggttaagtgttacgagggagtgataaacacgtagtgtgagtcccagtgagccgccggttgtcctaacgctgctgtcttccctgtttgggacagcctgcttatcaatttctgaagcttagaacactttttttaatactgtgtcaagatctgtcagaatctgctatgtttcttgaccagtgcacataatgttttatgatttggatgtcagaggcttcattcttttggacatcatttgctttttatgttctgaaaaggatatggagagtagagctaaccatacttcacactcgagttgtatgagggactggggaggccttatatgtgtcaggcaggcattttttaaattttaatatcgtcaatattttcccccaaactgcccagtagaattcattgtattaattcttttgaaattacctttgaaaatagctattcctggagaatgtgcaagcttacataaggataaaggacaggggaggagtttgtaagccttgcagttccaataactaaccaacaggttattagacaaaagggaaggtgttttgtgcttctcagatgttgctggtttaggagtgtgtgatgatgcttgccagtgattttgtgttttggaaagggtaggtatcgaatgttaatcactttctaatgggtacctaaacagcaatgctgataaatgttcaaggaattattttcatcttagtttgttcttctcaaaaggcatcaaaaacaacttatttgaagctgcaatagagtgtagcattagcctgcatgtttctaggtcttctgccaagtgcttttctcagttgaaaactatttttcactagcaaaattggtattttatttcattacctgttagtaactacttcaatgatcatttcacaagaaaaagactataaattaagtagagaacaacatttttattgaacatttttggcttgcaatcaaactttgccactaaaaattaacttcataaaacactagtccgttatcaacttcttcacagagaaagtagctatactataccctacatatttatttatttattattctactatagcagaataacaaaacttgatgcattaagccagttctttgcaactgaaaattacctgtttctccttccctttcacactccatgtatatatgatcagcctctccattaaaaagaagctggacatgcaaatacatcatattatgttttctccatattttatgtttttctatgtatctgaatacagtgggataaataattgaaagtagtgttcctatggcattagtgtttttgtgagaagggtaaatgtagtgagaaaggttttttcatggcattaataagaaagcccttctgtaatatatatattattttgtaaacatttcactgaagggccaaaagttaaattataactaaatcactgtgttttcagaatgatatttaacaacaaacccgtggtcaaaccaaaatagtgggttgaagtgtattattcatcttttagtgcattggcaattgcaaaaaa

SEQ ID NO: 47976 - DNA, 1195 bp, Homo Sapiens
ccaagctctgccgtgacgtcatctccagctccagcctgctggggcctgtgctgactgtgccccagacagccttagctgctcaagctggagaactgtcttccttcccagcttcctccgtgtctggggtgggggatgggggggtctcaggcagggatactctagccccttgactgctgtttagaccctgctgtagctgctgctgctccctgcccagccccagccatgaaactgcccaaggggaccaggagctctgtgtactttgcacagcacccagaaaaggagccattgccctcaaggcaggaggtcaagcagacccctgtcatcatggccaagatcaaaggtccggggcccgccaagtacctccggccatcctgcacgggctacatagatcatgacatctccatgttcaaggcaccagcttataccctgcatagccggcactcagagaagcggatggtgtgccacagcagccctgggccttgctatctcttggatcccaaaataactcggtttggaatgtccagctgcccgcaggtccccatggaggagcgcatctccaacctgcgcctgaaccccaccctcgcatcctgccagtactactttgagaagatccacccaccgggggaacgcagggctccccagtacacgtttggctaccggcgcccatacagagtgatggacctcaacccggctcccaaccagtaccagatgccactcttgctggggcccaacacccctgtcagccgagctgctccctgctacagtctggcctccagggacaagaactggttctacaaggaggatgtggcaggaggccctggacctaccacgtacgcccgacctgagccatccatctatcagaaccgcagccctacttacagcatggccaagcgcttcgcctaccctctggacctcacgccacggcctggccccggctcccacgaggtccagcaggtcactgtgcacaagccccacatccctgctttcaccatgggcatcaagcactcactccacctgtgcccactggtcatcgacattcgtgactgaggcccctcttggggcactcactgcccctcatccccagaaattatttttctacaccaaattgagcaatttgaccaagatttctagtagcagagccggtacctgctgagtgtccggcacacagaagacattagagatacattttcatgta

SEQ ID NO: 47977 - DNA, 1524 bp, Homo Sapiens
agcagacagaggactctcattaaggaaggtgtcctgtgccctgaccctacaagatgccaagagaagatgctcacttcatctatggttaccccaagaaggggcacggccactcttacaccacggctgaagaggccgctgggatcggcatcctgacagtgatcctgggagtcttactgctcatcggctgttggtattgtagaagacgaaatggatacagagccttgatggataaaagtcttcatgttggcactcaatgtgccttaacaagaagatgcccacaagaagggtttgatcatcgggacagcaaagtgtctcttcaagagaaaaactgtgaacctgtggttcccaatgctccacctgcttatgagaaactctctgcagaacagtcaccaccaccttattcaccttaagagccagcgagacacctgagacatgctgaaattatttctctcacacttttgcttgaatttaatacagacatctaatgttctcctttggaatggtgtaggaaaaatgcaagccatctctaataataagtcagtgttaaaattttagtaggtccgctagcagtactaatcatgtgaggaaatgatgagaaatattaaattgggaaaactccatcaataaatgttgcaatgcatgatactatctgtgccagaggtaatgttagtaaatccatggtgttattttctgagagacagaattcaagtgggtattctggggccatccaatttctctttacttgaaatttggctaataacaaactagtcaggttttcgaaccttgaccgacatgaactgtacacagaattgttccagtactatggagtgctcacaaaggatacttttacaggttaagacaaagggttgactggcctatttatctgatcaagaacatgtcagcaatgtctctttgtgctctaaaattctattatactacaataatatattgtaaagatcctatagctctttttttttgagatggagtttcgcttttgttgcccaggctggagtgcaatggcgcgatcttggctcaccataacctccgcctcccaggttcaagcaattctcctgccttagcctcctgagtagctgggattacaggcgtgcgccactatgcctgactaattttgtagttttagtagagacggggtttctccatgttggtcaggctggtctcaaactcctgacctcaggtgatctgcccgcctcagcctcccaaagtgctggaattacaggcgtgagccaccacgcctggctggatcctatatcttaggtaagacatataacgcagtctaattacatttcacttcaaggctcaatgctattctaactaatgacaagtattttctactaaaccagaaattggtagaaggatttaaataagtaaaagctactatgtactgccttagtgctgatgcctgtgtactgccttaaatgtacctatggcaatttagctctcttgggttcccaaatccctctcacaagaatgtgcagaagaaatcataaaggatcagagattctg

SEQ ID NO: 47978 - DNA, 1725 bp, Homo Sapiens
atagatgagcccaccagccccagcactgacctccaagccaagcatgtccctgcctttgctgtggtctccagtgccatgaactcagccgctgtcctgggcaccagcccatcttccccgaccttcaccttcaccctcggacggcattactcgcgggactgcagcagcatcaaggctggccgccgctcctcctacctgctggccatcaccacggagcgctccaagtcctgcgatgatggactcaacaccttccgcgatgagggccaggttctgcggcacctgccaaaccgcatacccagcctgccgttgctccggagcttcttcacagacgggtccttggatagctggggcacctctgaagacgctgacgctccttctaagcgacactcaacctctgacctctcagatgcgaccttcagcaatatcaggagagaagactggttgtattataagcagattctcaccaagaaggggaagaaagcgggcagcggcctgcgccagtggaagcgggtgtatgccgcgctgctggcgcgctcgctctcgctgagcaaggagcagcggggtgaggacaaggcggcgcccgtctgcatcggctcctgcctcgtggacatctacagcgagaccaagaggaggcacgtgttccggctgaccaccgctgacttctgtgaatatctctttcaggctgaggaccgggatgacatgctggggatcagagcgatccgggagaacagcagggccgagggcgaggaccccggctgtgccaaccaagctctgatcagcaagaagcttaatgattatcgcaaagtgagccatagctctgggcccaaagctgattcctcccccaaaggctctcgcggcctggggggcctcaagtctgagttcctcaagcagagtgcggcacgtggcctcaggactcaggacctgcccgcagggagcaaagatgacagtgctgcagcccccaaaaccccctggggcatcaacatcatcaagaaaaataagaaggctgtcccaagggcatttggggtcaggctggaggactgccagccagccacggagaaccagcatgtccccttaatcgtggctgcatgctgtcacattgtggaggcacgagggctggagtccacaggcttttaccgagtgcctggcaacaatgcagtggtgtccagcctacaggagcagctcaaccgtgggcctggtgacatcaaccagcaggatgagcgctggcaagacctcaatgtgatcaacagcctgctcaagtccttcttccaaaagctgcccgagcctcttttcactgatgacaaatacaacgacttcattgaggccaactgcattgaggacgcgcgggagtggatgaggacgctgcggaagctgatccgggatctcccaggacactactatgaaacactcaaattccttgtgggccatctcaagaccatcgctgaccactctgagaaaaacaagatggaaccccggaacctggccctggtctttgggcggacactggtgaggacgtctgaggacaacatgacagacatggtgacccacatgcctgacctctacaagatcgtggagacactgatccagcactcagactggttcttcagtgacgaagaggacaagggagagagagagcccggcagcaaggagcctcaggcagtgcccaacattgagtacctcctgcccaacattggcaggacagtgccccctggtgacccggggtcaggtgag

SEQ ID NO: 47979 - DNA, 1116 bp, Homo Sapiens
atgctcaaggttcttaattacatctttaaaggccctttttccatgtacagtaacatattcaatggttctggggacttggagccattattctacctacaacaattagtattggacttcattttctatcactcttgtaatcgaaggactatttcactgggagtagcaagtcataatgtttgcgttggcatttgtgtgggggtttatcttcattcattaaataattgcatgaaattcctgtcactatttcaaatgtttcatgtagttattatagtgcttcagaatccaaagggttatgtgttacttatgatgagcagtctagggggtggagaacaggtctgcagattcttcctagctgaagtgtgttttctctggggacaaccaagtaggaatttttgcttccttttttgggaacttagacccatcttgcgatgtcctaagtctccaagcatcttatttgacctgcttatacacattatagctaaatatgaccacattgacgtggtaaagaacacttttgtccagattgaatcactccatctgctatcagttaagcagtggaaaactgttatggaaaagcaaacatgttttgatagattttgtgtaaagaaggtatccatactctggaatgctgctgatcaagctgcaagactttgttcgaaacaacactcaagcacaactgttttactttccataccaagtttggctgtgactatgaagaacatcagcattgatctttgctttgcacttgtacaagagactatttgcagagagccaaatatagcaacagaggatttaatatcttgccaaaaaatacaaaatctgttcccctttaagcatgacactctatcctttcttgtggatcttgctaaaaggaatatagctttaaactcccctattccttctgttgaaagcttaagaatctttaatgagctatgtatggttttgtggtattttatgtttccaaaagaaaatggctacatgaaaaatctgtccagtgttatcatttttcttacaaaacttctagttatggttgtattaattaatttgattgtgataatgattacacaatgtttacctatatcaaatcatcatatcgtataccttaaatatatataa

SEQ ID NO: 47980 - DNA, 366 bp, Homo Sapiens
tgttctcgataaaagcagcagccctaattttatggtcacatttaggctggaatgggtgacagcatgcgagctcgggggtgggctcggaggcagcgattcgacagacacgtgcatctgctagggcgccgggctggcttcaggcgggcctctgcggggcgtcggggccgggctgcggcagtctccggttgtttcaagttccctgaaggtgcctcggatgactcaggtttggcgtgttcaggatccatggtgggtccctagggcctggccgtctgaaccagtgccgcggcagcggctggctctcccctgggaaccagcgtcgcgtcccaacggctgttggctacctccccggcgcgtgcacccggctct

SEQ ID NO: 47981 - DNA, 655 bp, Homo Sapiens
aagttatttatgaaaaggctacctatgaattatttcctcaacacatctactataatgcatttgtggacaatggattctaattttcagcgccgttatgaacaactggagaacagcatgaaacaacttttcctaaaggcgcagaaaattgtacacaagctttttagccttagcaagaggtgtcataaacaacccctcatcagcctgccaagacaaagaacctcaacctactggcttactcgcatccagtcttttctctactgcaatgagaacggcctcctaggcagcttttcagaagagacgcactcgtgcacgtgtccgaatgaccaggtggtctgcaccgcgttcctgccctgcacagtgggagacgcctctgcctgcctgacatgcgcaccagacaaccgcacccgctgcggcacctgcaacaccggctacatgctcagccaggggctctgcaagcctgaagtcgccgagtccaccgatcactatattggctttgaaactgacctgcaagatctcgagatgaaatatctgctgcagaaaacggacagacgaatagaagtccatgccatttttatcagcaatgacatgcgcctcaatagctggtttgatccctcctggcgtaagcggatgctcctcaccttgaagagcaataagt

SEQ ID NO: 47982 - DNA, 3197 bp, Homo Sapiens
ccgtgagtctggccttaggtgtctcgtgtctggggttgatccgagctgtcgccgccgccgccgcaatgggcaaaacggccaactctccgggttcgggagcccgacccgacccggtgcggagcttcaatcgctggaagaaaaaacacagccataggcagaacaaaaagaagcagttgaggaagcaactgaagaaacccgaatggcaggtcgagcgcgagagtatcagccgcctcatgcagaactatgaaaagataaatgtaaatgaaatcacaagattttcagattttcccttgtccaaaaaaacattgaaaggtttgcaagaagctcagtaccgtttggtgactgagatacagaagcagaccattggattggctttgcaaggtaaagatgtacttggagcggccaaaactggatctggcaagactctggcttttcttgttccagtgctggaagccttatatcgtctgcaatggacttcaacagatgggctgggggttctcataatatcacctacgagagaactggcctatcagacctttgaggttctccgaaaagtaggaaagaatcatgacttctcagctggtctcatcattggtggaaaggatctaaaacacgaagctgagaggatcaacaacataaatatactcgtgtgcacaccaggtcggcttcttcaacacatggatgaaacagtatcttttcatgctaccgacctccaaatgttagttcttgatgaagcagatagaatcttggatatgggctttgctgataccatgaatgctgttattgaaaatctccccaagaaacgtcagactttacttttctcagcaacacaaactaaatctgtaaaggaccttgcacgcttgagtttgaaaaaccctgagtatgtctgggttcatgaaaaagcaaaatatagcacccctgccactttggaacagaactacatagtctgtgagctgcagcaaaaaataagtgtgctgtattcctttttgagaagccatctgaagaagaagagcattgtatttttttccagttgcaaagaggtccagtatctgtaccgagtgttttgccggctacgtcctggtgtttctatccttgcactccatggtcgacagcagcaaatgagaagaatggaagtctataatgagtttgtccgtaagagagctgcagtactctttgctactgatattgcagccaggggtctggatttcccggccgtgaattgggttcttcagtttgattgtcctgaggatgccaacacatatattcacagagcaggtagaactgccaggtacaaagaggatggtgaagctttgctaattttgctaccctcagaaaaagctatggtgcagcagcttcttcagaagaaagtacctgtgaaggaaatcaaaatcaatccagaaaaacttatagatgtccagaaaaaattggaatctattttagctcaagatcaagatttaaaagaaagagctcaaaggtgtttcgtctcctatgtacgatctgtatatctgatgaaggataaagaagtatttgatgtgagcaagttacctatacctgaatatgccctgtctcttggtcttgctgtggcaccacgcgtaagatttcttcagaaaatgcagaaacaacccaccaaagaattggtaaggagccaagccgataaagtaattgagccaagggctccctccctcaccaatgacgaagtggaagaatttagagcctacttcaatgagaaaatgtccatccttcaaaaaggtggaaaaagactcgaagggacagagcacagacaggataatgatactggtaatgaagaacaggaagaagaagaagacgatgaagaagaaatggaagagaaactggcaaaagcaaaaggatctcaagccccatctcttcctaacaccagtgaggcacagaagatcaaggaagttcctacacagttcttggacagagatgaggaggaagaagatgctgatttcttgaaggtgaagcggcataatgtgtttggattggaccttaaagacgagaaaacattacagaagaaagaaccttctaaatccagcatcaagaaaaaaatgaccaaagttgcagaagcaaaaaaagtaatgaagagaaattttaaagtgaataagaagataacatttactgatgaaggggagttggttcagcagtggccacaaatgcagaaatctgccatcaaggatgctgaggaagatgatgacacaggtggtatcaacttacataaagcaaaggaaagacttcaggaagaggacaaatttgacaaagaagaatataggaaaaaaattaaggcaaagcatcgggagaaaagactgaaagaaagggaagccagaagagaagccaacaagagacaagcaaaggccaaagatgaagaggaagcctttctggattggagtgatgatgatgatgatgatgatgatggatttgatccaagcacactcccagatccagataaatacagaagctctgaagattcagatagtgaagatatggaaaataaaataagtgataccaagaagaagcaggggatgaagaagaggagcaacagtgaagtggaagacgtgggaccaacaagtcataacagaaagaaggccaggtgggacactttagagcctttggataccggcctgtctttagcagaggatgaagagctggtgttacatctgctaagaagtcaaagctaaatacttcctgcgcctgccttctccttgaaaccttggttatgactgcgtaggcaagaagttgaaaaacagttgatttgggggcacttaggtaccatatgccccattcccaaagggcacatttctggatagaagcgatcgtatctccaagtccctctcacaggacatgctttgtgccatcactgagcatactcagatcgagggtggatgataccatttcctgaccccgttttccagcatgtgttctgttagatttttatccatgggttcctacgccttgtcattggaaacactgcctttgtcttactggcaagttctggagctcttgtgtcattgttagaaatccctgtcttgcttactgtacagaagtttctgttgctgttaaaattgctcatgatttcgacgtatttaatattttcaaagagactatgatggaccagccctgagaaagaatgagtatttttgaattgagatgatcaataataaacatatttcctataaaagaaa

SEQ ID NO: 47983 - DNA, 1581 bp, Homo Sapiens
atggtggtcttcattaatgcaaagattaagtctttaattaaactttttaagaagaaaacggtttccaacctagatgaggaaagccgatggacagtccactacactgccccgtggcaccagcaggagaatgtgttccttcccaccacaagacccccctgtgttgaggacctgcaccgccaagccaagctcaacctcaaatcagtactgagggaatgcgataagttgcggcatgatggctaccgcagttctcagtactactctcagggacccacctttgcggccaacgccagcccattctgtgatgattaccaagatgaagatgaagaaacagatcaaaagtgttctctgtcttcatcagaagaagaaagatttatttccatcaggagacctaaaacaccagcctcaagtgacttctccgaccttaatactcagacgaactggaccaagtcgcttccactgccaacaccagaagagaagatgcgacagcaagcccaaacagtccaggctgacgtggtgcctattaacataactggggagaatttcgatcgccaggccagccttcggcggtctctaatttacacagacactctggtaagacgaccgaagaaagtcaaaaggagaaagactattacaggagtccctgacaacatacagaaggagctagcatcaggcactggccaagatgatgctgatggccactcagtgtacacccctgatcactactctacactaggaaggttcaatagctgtcggtctgctgggcagcgctcagaaaccagggactccagctgtcagacggaggatgtgaaggtcgtaccaccttccatgaggagaatcagggcacagaaggggcaaggcattgctgcccagatgggccacttctcaggttcctctggcaacatgtctgtgctgagcgattctgcagggatcgtattcccttcccgccttgacagtgatgctggcttccatagtcttccgcgttctggagcaagggcaaacattcagtcccttgagccgaggctgggtgccctcggccctgcaggagacatgaatggcactttcctctaccagagaggtcacccacaagcagatgaaaacttaggccatttaggaggtgcctcagggactggaacacttttgagacccaaatcccaggagttgagacacttcgagagtgaaaatataatgagcccagcgtgtgtggtttctcctcatgcaacctactccaccagcatcatcccaaatgccacactgtcttcctcttccgaggtcatcgctattcccactgctcagagtgcgggacagcgggaaagtaaaagttctggctcatcacatgcaaggataaaatccagagaccacctcatctccaggcatgctgtgaaaggtgatcctcagtctcccggtcgccactggaatgagggccatgccaccattctttcacaggacttagaccctcattcccctggtgaacccgcactgttgtccctctgtgactcagccgtccctctaaatgctccagcaaatagggagaatgggtcccaagctatgccgtataattgtagaaacaacctggccttccca

SEQ ID NO: 47984 - DNA, 4185 bp, Homo Sapiens
gcgagcggagctggcggggctgccggggccgggactgggggagccgggcccgcgggccgcctgctgcctccgcccgcgccggggtccccagccgcccccgctgccgtgtcccctgcggccggccagccgcgtcccccagccccggcctcccgcggacccatgcccgcccgtatcggctactacgagatcgaccgcaccatcggcaagggcaacttcgcggtggtcaagcgggccacgcacctcgtcaccaaggccaaggttgctatcaagatcatagataagacccagctggatgaagaaaacttgaagaagattttccgggaagttcaaattatgaagatgctttgccacccccatatcatcaggctctaccaggttatggagacagaacggatgatttatctggtgacagaatatgctagtggaggggaaatatttgaccacctggtggcccatggtagaatggcagaaaaggaggcacgtcggaagttcaaacagatcgtcacagctgtctatttttgtcactgtcggaacattgttcatcgtgatttaaaagctgaaaatttacttctggatgccaatctgaatatcaaaatagcagattttggtttcagtaacctcttcactcctgggcagctgctgaagacctggtgtggcagccctccctatgctgcacctgaactctttgaaggaaaagaatatgatgggcccaaagtggacatctggagccttggagttgtcctctacgtgcttgtgtgcggtgccctgccatttgatggaagcacactgcagaatctgcgggcccgcgtgctgagtggaaagttccgcatcccattttttatgtccacagaatgtgagcatttgatccgccatatgttggtgttagatcccaataagcgcctctccatggagcagatctgcaagcacaagtggatgaagctaggggacgccgatcccaactttgacaggttaatagctgaatgccaacaactaaaggaagaaagacaggtggaccccctgaatgaggatgtcctcttggccatggaggacatgggactggacaaagaacagacactgcagtcattaagatcagatgcctatgatcactatagtgcaatctacagcctgctgtgtgatcgacataagagacataaaaccctgcgtctcggagcacttcctagcatgccccgagccctggcctttcaagcaccagtcaatatccaggcggagcaggcaggtactgctatgaacatcagcgttccccaggtgcagctgatcaacccagagaaccaaattgtggaggcaaccgatgggacactgaatttggacagtgatgagggtgaagagccttcccctgaagcattggtgcgctatttgtcaatgaggaggcacacagtgggtgtggctgacccacgcacggaagttatggaagatctgcagaagctcctacctggctttcctggagtcaacccccaggctccattcctgcaggtggcccctaatgtgaacttcatgcacaacctgttgcctatgcaaaacttgcaaccaaccgggcaacttgagtacaaggagcagtctctcctacagccgcccacgctacagctgttgaatggaatgggcccccttggccggagggcatcagatggaggagccaacatccaactgcatgcccagcagctgctgaagcgcccacggggaccctctccgcttgtcaccatgacaccagcagtgccagcagttacccctgtggacgaggagagctcagacggggagccagaccaggaagctgtgcagagctctacctacaaggactccaacactctgcacctccctacggagcgtttctcccctgtgcgccggttctcagatggggctgcgagcatccaggccttcaaagctcacctggaaaaaatgggcaacaacagcagcatcaaacagctgcagcaggagtgtgagcagctgcagaagatgtacggggggcagattgatgaaagaaccctggagaagacccagcagcagcatatgttataccagcaggagcagcaccatcaaattctccagcaacaaattcaagactctatctgtcctcctcagccatctccacctcttcaggctgcatgtgaaaatcagccagccctccttacccatcagctccagaggttaaggattcagccttcaagcccaccccccaaccaccccaacaaccatctcttcaggcagcccagtaatagtcctccccccatgagcagtgccatgatccagcctcacggggctgcatcttcttcccagtttcaaggcttaccttcccgcagtgcaatctttcagcagcaacctgagaactgttcctctcctcccaacgtggcactaacctgcttgggtatgcagcagcctgctcagtcacagcaggtcaccatccaagtccaagagcctgttgacatgctcagcaacatgccaggcacagctgcaggctccagtgggcgcggcatctccatcagccccagtgctggtcagatgcagatgcagcaccgtaccaacctgatggccaccctcagctatgggcaccgtcccttgtccaagcagctgagtgctgacagtgcagaggctcacagcttgaacgtgaatcggttctcccctgctaactacgaccaggcgcatttacacccccatctgttttcggaccagtcccggggttcccccagcagctacagcccttcaacaggagtggggttctctccaacccaagccctgaaagtccctccacttgaccaattccccaccttccctcccagtgcacatcagcagccgccacactataccacgtcggcactacagcaggccctgctgtctcccacgccgccagactatacaagacaccagcaggtaccccacatccttcaaggactgctttctccccggcattcgctcaccggccactcggacatccggctgcccccaacagagtttgcacagctcattaaaaggcagcagcaacaacggcagcagcagcagcaacagcagcaacagcaagaataccaggaactgttcaggcacatgaaccaaggggatgcggggagtctggctcccagccttgggggacagagcatgacagagcgccaggctttatcttatcaaaatgctgactcttatcaccatcacaccagcccccagcatctgctacaaatcagggcacaagaatgtgtctcacaggcttcctcacccaccccgccccacgggtatgctcaccagccggcactgatgcattcagagagcatggaggaggactgctcgtgtgagggggccaaggatggcttccaagacagtaagagttcaagtacattgaccaaaggttgccatgacagccctctgctcttgagtaccggtggacctggggaccctgaatctttgctaggaactgtgagtcatgcccaagaattggggatacatccctatggtcatcagccaactgctgcattcagtaaaaataaggtgcccagcagagagcctgtcatagggaactgcatggatagaagttctccaggacaagcagtggagctgccggatcacaatgggctcgggtacccagcacgcccctccgtccatgagcaccacaggccccgggccctccagagacaccacacgatccagaacagcgacgatgcttatgtacagctggataacttgccaggaatgagtctcgtggctgggaaagcacttagctctgcccggatgtcggatgcagttctcagtcagtcttcgctcatgggcagccagcagtttcaggatggggaaaatgaggaatgtggggcaagcctgggaggtcatgagcacccagacctgagtgatggcagccagcatttaaactcctcttgctatccatctacgtgtattacagacattctgctcagctacaagcaccccgaagtctccttcagcatggagcaggcaggcgtgtaacaagaaacagagagttttgtgtacagcttgggaatgaaaaggttgattgtaaacccacagtatctagcagcgttgtgccaaattgcccttgtgtttctctccacccaaaatatcacagctgctttcctcacatttggttcatccgtgtgctgttcttttgggttctgagagggttttgccatgtttgcttgtatgaccaagtcaccaaggaaataaacaggaaggaaatcc

SEQ ID NO: 47985 - DNA, 4123 bp, Homo Sapiens
gcctagagcggtgggtcatggctggctgcacccgcaaactcactcacctccgtaaacggatccatcgccccaggcgtcggactacgagacgatggaaacggtggttcaaattcaggaagagaaaaggagagaaaaggccaagacctaatcataaggcagtggcaagaagagctaaactcaagttctctacctcagaaaagcttcactggcctgagcaagaacttgctaagaagtctattctaaatgcagaagattcattgatcattgacaacaaaagaagcatttcacatttgtcctcgggagtgctaaaagacattttcacaactggaaccagtagttacaatgtcctactacagagcaaggaggaaaaaaagtatcattcacaaaaacagtcttcctccacctactccaaaagatgtagaaaacccagcaaatctcctaacacttctcgtagcaaagatcctcgcaggatgaaagccctggtgcctgtgacaagcagtggtacttggtactgcctggagaggcggcctgctgtttttgtcactagttcagtgtcaagtcctgtaaagtttacacatgatatctctgttacagggaatggcatagtactgccacctaaacccaaaagcaaggtcaagtggtgccatttctccactcttccaaagccaaagcctcagctgtctagaagctttgaaaagggagatgacttttctgggaagaaattttgtatattgactgctataaaacccaccaacttagagaaagaaaaactgagattcttcaaatctgactatacctacaatcctcagtttgagtatgccaatcctgctctgccaagcgtattagctaagcatagccacgcatctgaccgatttcttaagcagattgtagttcatctcactgaggacctgctttcccgagcgtcaatgacagtagtaaatggatgtccgactctgactatcaatgtgtccactgcacgtgagcattggctggagggaatgctgaggcatgaaataggtacacattattttcgaggtattaacaacctccagcagccatggaacagttggactggacgtaaaaaacatgagctaaagccaaataatcccacagaggaaggactagcaagcattcacagtgttctgtttagaaaagacccttttttatggagggctgccctcctctactacactgtttatcaagccagccaaatgtctttttgtgaactctttaaagatattggcaggtttgtcaaggaccccaatacaagatgggattattgtgtacgggccaagaggggatggactgatacttcccaaccagggtgttttagtaaagaccaggtatacttggatggaattcttcaaatcctccgatacagagataccatagacttccatctgctgactgctctcgggaaggtttcttatgaagatgtggatcgcttaaaaggattggcagttaccgaaaacatgagggtccctcatttcctgcaggaccatggccgatatatggaacacttagagaagatcatggaagtgaatgaactgactgacagggaactgaaagatcttatatagtaattagcgttctggcaaacatagctaagctatgcctccatgtatattaccagttaggtgcagttagcaccagaagatttataaaagaagaaagactacttgtgttttctgaagaagggtcttcagtattcagcggaatttttaggttaagtacagatcttaaactatttccctaaaatgtttctataggttgcagggggaagttattcctattttctgaatctcgacagagtcagatgaaaatactactgctgagcatttttgaagactcttggtcaaattgcatgataaatttctgcctgagcagtaagcactggcctagtgcttctgcctaaatatggaggtcagctccaactggagactggctgaattccattgctgttcagactccaaagttatattttatttgataaataatggtaattattctcctttgaaaaattagttttgtgttgctccaaaaagctagctatatatctcagctttcttatttcttttatatgttgagggattttaaagggagaggaaaagcaatttgaaaatttttcattaagtgttttattttaacattattgtttcaccttatcagcttataggaactaaattagagaatcacctctttttgtccggttatctcttaactatgttttcatttgctgaaacatattgtacccttttaaattttttacagagttttaacgtcttttccactgcatcctttataaaaataagtacaaattccagagaggttttcctacacaaatacaaaataattggggaagggctactcaccttttttatgaaacagaatatgtaacaagcagaggacaaatagactgacctggttaaacgtaggttctggatgttgatgggtagcacctgcagtaaacttgaccatgctctgaaaaaagaaatttctgggtattgatggtttataaagccagctttgtgctattggttcagtatattttatcaaatctttgacttcatcaacccagtaatgacatagtttaaattttaaaatgagagttctgttttgctgtatttctcctgctagcctagctttgtattttatcatcagcttcagtatatacttgtatatatatacctggattcaaatggttcttcatacaacttaatgatcagaaagaatgctgctgtaaacaccccactcaagattgctgctggaatttctacccaaagctgtctgagagtttatctttacctcagtgcaggcttaaataatggtgctaatactggtagatatatactgtgaagcctggttcacattcatgctagaaaatgattttgggaaatcttttataggagaggttacatgatttttctctttcacatatctagaaggacttgcctcaaagaagaatgttgcagcaaacaggatatactctagctggtgcccaaaggttcttgcaaaaccatgaatcttgcttttagcagtaaagggccagacactttggagcattgaaaggccttagcccctgctccccaactacgtgccatgctgggtagtgtgtatcctgtacatctgtgtgccaggctggggcagactgtgccaatgctcaccgaacactagaatctgctcttacacctctagcatgtatctcgttgtagcagagttgtgcactttctcagcattgtgtagtgttttctaattgcatctaaaaacttatcaaaagtgattgtgaaaacagtgtcttagaagtataaacagaaatggcaatatttatgtcctgtgattcaagcccaaaggttataaattcaactttcacagggaatagcactgctaatcttactttatgatttaaatataaaggaaaatcacagcagccttaatttcctgttggtcggatcatttgcagcagttctagttcctgacttttaaaatggatgaaattttctctttgtctgatttggaaaaggaactgcttttttgccttactgctttggtataaggatgaaaaacatgagcactctgcagacaaaatgaccttaaatcacattgattaagatattttaaaagttagcagtgaaccaaaagtagtttcagattagcagaaataaagagctttaagttttaaaagttgagattgaatatttaatgaaagtttattaattctttttccaggaatagcagtaaggtcagtttttttccctaaaataaaaagttttaataaacagaaaattatagcaacagtacttaggagaatagttgaagattgtattaattttaattataatagttatttgtcataggctattgatgattagaatttcattagttttgtccactataattttaaaaatagttgtgtcaaatacaaattctggtaaactgttaggttttaacaccagacagtattcaaaggaaattaatgtttgcaaacataaatccatagtcttcatttctttatattgtcacctttgtaaaagtgtttaaaatttgtattgtttgttttgtatatctttgggcatcttgtgtctagctataataaaaagaaacggtgccaaggttctcagatgaa

SEQ ID NO: 47986 - DNA, 2553 bp, Homo Sapiens
tttttgatgcattttagatagctgatacagtactcaatgatgatgatattggtgacagctgtcatgaaggctttcttctcaatgccatcagctcacacttgcaaacctgtggctgttccgttgtagtaggtagcagtgcagagaaagtaaataagatagtcagaacattatgcctttttctgactccagcagagagaaaatgctccaggttatgtgaagcagaatcatcatttaaatatgagtcagggctctttgtacaaggcctgctaaaggattcaactggaagctttgtgctgcctttccggcaagtcatgtatgctccatatcccaccacacacatagatgtggatgtcaatactgtgaagcagatgccaccctgtcatgaacatatttataatcagcgtagatacatgagatccgagctgacagccttctggagagccacttcagaagaagacatggctcaggatacgatcatctacactgacgaaagctttactcctgatttgaatatttttcaagatgtcttacacagagacactctagtgaaagccttcctggatcaggtctttcagctgaaacctggcttatctctcagaagtactttccttgcacagtttctacttgtccttcacagaaaagccttgacactaataaaatatatagaagacgatacgcagaagggaaaaaagccctttaaatctcttcggaacctgaagatagaccttgatttaacagcagagggcgatcttaacataataatggctctggctgagaaaattaaaccaggcctacactcttttatctttggaagacctttctacactagtgtgcaagaacgagatgttctaatgactttttaaatgtgtaacttaataagcctattccatcacaatcatgatcgctggtaaagtagctcagtggtgtggggaaacgttcccctggatcatactccagaattctgctctcagcaattgcagttaagtaagttacactacagttctcacaagagcctgtgaggggatgtcaggtgcatcattacattgggtgtctcttttcctagatttatgcttttgggatacagacctatgtttacaatataataaatattattgctatcttttaaagatataataataggatgtaaacttgaccacaactactgtttttttgaaatacatgattcatggtttacatgtgtcaaggtgaaatctgagttggcttttacagatagttgactttctatcttttggcattctttggtgtgtagaattactgtaatacttctgcaatcaactgaaaactagagcctttaaatgatttcaattccacagaaagaaagtgagcttgaacataggatgagctttagaaagaaaattgatcaagcagatgtttaattggaattgattattagatcctactttgtggatttagtccctgggattcagtctgtagaaatgtctaatagttctctatagtccttgttcctggtgaaccacagttagggtgttttgtttattttattgttcttgctattgttgatattctatgtagttgagctctgtaaaaggaaattgtattttatgttttagtaattgttgccaactttttaaattaattttcattatttttgagccaaattgaaatgtgcacctcctgtgccttttttctccttagaaaatctaattacttggaacaagttcagatttcactggtcagtcattttcatcttgttttcttcttgctaagtcttaccatgtacctgctttggcaatcattgcaactctgagattataaaatgccttagagaatatactaactaataagatctttttttcagaaacagaaaatagttccttgagtacttccttcttgcatttctgcctatgtttttgaagttgttgctgtttgcctgcaataggctataaggaatagcaggagaaattttactgaagtgctgttttcctaggtgctactttggcagagctaagttatcttttgttttcttaatgcgtttggaccattttgctggctataaaataactgattaatataattctaacacaatgttgacattgtagttacacaaacacaaataaatattttatttaaaattctggaagtaatataaaagggaaaatatatttataagaaagggataaaggtaatagagcccttctgccccccacccaccaaatttacacaacaaaatgacatgttcgaatgtgaaaggtcataatagctttcccatcatgaatcagaaagatgtggacagcttgatgttttagacaaccactgaactagatgactgttgtactgtagctcagtcatttaaaaaatatataaatactaccttgtagtgtcccatactgtgttttttacatggtagattcttatttaagtgctaactggttattttctttggctggtttattgtactgttatacagaatgtaagttgtacagtgaaataagttattaaagcatgtgtaaacattgttatatatcttttctcctaaatggagaattttgaataaaatatatttgaaatttt

SEQ ID NO: 47987 - DNA, 1083 bp, Homo Sapiens
cccccatggcccccgctccttttcctcctcctcctacctggagggagcggtggcagctgccctgctgtgtgtgactgcacctcccagccccaggctgtgctctgtggccacaggcaactggaggctgtacctggaggactcccactggacactgagctcctggacctgagtgggaaccgcctgtgggggctccagcagggaatgctctcccgcctgagcctgctccaggaattggacctcagctacaaccagctctcaacccttgagcctggggccttccatggcctacaaagcctactcaccctgaggctgcagggcaatcggctcagaatcatggggcctggggtcttctcaggcctctctgctctgaccctgctggacctccgcctcaaccagattgttctcttcctagatggagcttttggggagctaggcagcctccagaaggtcctggatctgtcccagaatcccatctcagccatcccagcccgaaggctcagccccctggtgcggctccaggagctacgcctgtcaggggcatgcctcacctccattgctgcccatgccttccatggcttgactgccttccacctcctggatgtggcagataacgcccttcagacactagaggaaacagctttcccttctccagacaaactggtcaccttgaggctgtctggcaaccccctaacctgtgactgccgcctcctctggctgctccggctccgccgccacctggactttggcatgtccccccctgcctgtgctggcccccatcatgtccaggggaagagcctgaaggagttttcagacatcctgcctccagggcacttcacctgcaaaccagccctgatccgaaagtcggggcctcgatgggtcattgcagaggagggcgggcatgcggttttctcctgctctggagatggagacccagcccccactgtctcctggatgaggcctcatggggcttggctgggcagggctgggagagtaagggtcctagaggatgggacactggagatccgctcagtgcagctacgggacagaggggcctatgtctgtgtggttagcaatgtcgctggg

SEQ ID NO: 47988 - DNA, 798 bp, Homo Sapiens
tacaatgccattggaggcaagtatcaccggggtttgacagtgctagtagcgttctgggagctggtggagccaaggaaacatgatgctgagagtctccagcgggccctgactgtgggctggtgtgtggaactgctgcaagctttgttcctggtggcaaatgacatcacggattcattgctcaccgctggtcagatctgctggtttcagaagccgggcgtgggtttggatgccatcagtgatgctatccttgtggaagcatgtatctactgcctgctgaagctctattgctgggagcagccctattgccagaacctgatccagctcttccggcagagtttctatcagactgagattgggcagaccctggacctcatcacagccccccagggcaatgcggatcttggcagattcactgaaaagaggtacaaatctactgtcaagtacaagagtttctacttctacattcctgtagctgcagccatgtacatggcaggcattgatggcgagaaggagcacgacaatgccaagaagatcctgctggagatgggagagggagagttcttccagatcaggatgattaccttcacctcttttggggaccccagtgtgaccagcaaagttggcactgacatccaggacaataaatgcagctggctgctggttcagtgtctgcaacgggccactccggaacactaccagatcctgaaggagaattacagacagaaggaggccaagaaggtggcccaggtgaaggcagtatatgaggagctggatctgccggccgtgttcttgcaataa

SEQ ID NO: 47989 - DNA, 1185 bp, Homo Sapiens
atagctctggcgatgcttcaggactggtgcaggaggatgggtgtgaacgcagagcgctctctgctcatcctggatatccctgacgactgcgaggaacatgagttccaggaggccgtgcgggctgccctgtcgcccctgggcaggtaccgagtgctcatcaaggtcttcagaaaggagctcggggccagggcagccttggtggaattcgctgagggtttaaaccaaagcttgattccccgccaaatagcaggcaaagggggaccctggaaagtgatctccctgccccaggcccttgatgctgagtttcaggatatacccagtttccctgcacagccccaggggcaagcagtggccagaggtgcaggtgaagcaggagctgcaggctggacccagtcatggcgccagaccctgcggcctctggtgaaaactatggcctaccgggaactgagacccttttccgggagggagcagccaggctgcgtggaagagtcctttgagagctggttggaggacgccaaggatatgctgcagctgtggtgccacgcgtcggaaagggagagaaggaggcggctgctggacagcttggatggcctggccctggatatcgtgagcggcctcctggaggaagatccagacttctctgcgcaggactgcctgacggcgctggggcaggtgtttaggagccgggatacatggatgacctcgcggatgaagttcctgacctgcacgcaggggccccaggaggggctgtttgccttcgtggtgcgcctggaaggcctgctgcagaaggccgtggagaagggggcggtccacccagccatggccaaccacctgcgactgcggcaggtgctgtctcgggcccgccccagcgaggcactccaggataccctgaggaggatgcagctggagaggaggccacctgacttcctgaggctgctgcggctcatccgggacatggaggcgtgggcagcctccctagcaaggagccagcagggccttgaaggcctaggtcagggaaggtcccccgacgcccctgggggcctcccagccaggatgggcagtgcagtcgacatggccccaggaggtcccagctgggagccagagggccttgtccaggttggaggccaggaggctgaggagcctccccaggaggggctcaagcccatcttagaggagtcagaaaac

SEQ ID NO: 47990 - DNA, 3235 bp, Homo Sapiens
tagcgggcgcctccttttcatccctcatccttcatccctggctttcgcgctctagcggagtgggatctgcgaacacgtgaggcgggggcgcggtccccaggctgccgagatggccctgagcgacgaaccggccgcgggcggccccgaggaggaggcggaggacgagacactggcctttggcgcggcgctggaagcgttcggcgagagcgcggagacccgggcgctgctgggccgcctgcgggaggtgcacggcggcggcgcggagcgcgaggtggccctggagcggttccgcgtaataatggacaaataccaggagcagcctcatctgttggacccgcaccttgaatggatgatgaacttgttgttggacatagtgcaagatcagacatctccagcttcccttgtacatctggcttttaaatttctttacatcatcaccaaggttcgaggctataaaacatttcttcgtttatttcctcatgaagttgccgatgtagagcctgttttagatttggtcacaattcagaatcccaaggaccatgaagcttgggaaacccgctacatgcttttgctctggctctccgtgacctgcctgatcccttttgatttttctcgccttgacgggaacctcctcacccagcctgggcaagcacgaatgtccataatggaccgtattctccaaatagcagagtcctacttgattgtcagtgacaaggcccgagatgcagctgctgtccttgtgtccagatttatcacacgtcctgatgtcaagcaaagcaagatggctgagttcctggactggagcctgtgcaatctggcccgttcctccttccagaccatgcagggggtcatcaccatggatgggacgctgcaggccctggcacaaatatttaaacatggaaaacgtgaagactgtttgccctatgctgccactgtcctcaggtgcctcgatggctgcagactccctgagagcaaccagaccctgctgcggaagctgggggtgaagcttgtgcagcgactggggctgacattcctgaagccgaaggtggcagcatggaggtaccagcgtggctgccgatctttggctgcaaatctgcagctcctcactcagggtcagagtgagcagaagccactcatcctgaccgaagatgacgacgaagatgacgacgtcccagagggggtggagcgtgtgatagagcagctgctggtcgggctgaaggacaaggacacggtcgtgcggtggtctgcagccaagggcatcggtaggatggctggcaggcttcccagagccctggcggatgatgtggtcgggtctgtgctggactgcttcagtttccaggagactgacaaggcgtggcatgggggatgtctggcgctggcagagctgggcaggagaggcctgttgctgccgtctcgactcgtggatgttgtcgccgtgatcctgaaggcgctgacctacgacgagaagcggggtgcctgcagcgtgggcaccaacgtcagggacgccgcctgctacgtgtgctgggccttcgcgcgtgcctatgagcctcaggagctgaagccctttgtgactgcaatctcgagtgcactggtgattgctgcggtgtttgaccgagacataaactgcagaagagcagcctctgccgccttccaggagaatgtggggagacagggcactttccctcatggtattgatattttgaccacagctgactattttgccgtcggtaacagatccaactgtttcctggttataagtgtgtttattgccggctttcctgagtacacgcagccaatgatagaccacctggttaccatgaagatcagccactgggatggggtcatccgagagttggctgcgagggcgctgcacaacctggcccagcaggcacccgagttcagcgccacgcaagtcttcccgaggctgctgtccatgacactgagtccagatcttcacatgaggcatgggtcgattctcgcctgcgcagaagttgcttacgccttgtacaaacttgcagcccaagagaacaggcccgtcacggaccatctggacgagcaggcagtgcagggcctgaagcagattcaccagcagctctatgatcgtcagttatacaggggtctgggaggacagctcatgagacaagcagtgtgtgttttaatagaaaagttgtcactttccaaaatgccctttagaggtgacaccgtaattgatggttggcaatggctgataaatgacactttgagacatctccatctcatctcaagtcactcccgccagcagatgaaggatgcagcagtctcggccctggctgctctatgcagtgaatattacatgaaggagccgggggaggcagatcccgcaattcaggaggagctgatcacgcagtacctggctgagcttcggaaccccgaggagatgactcgctgtggcttctcgttggccttgggcgcccttccaggcttccttctgaaaggccggctccagcaggttctcacaggtttaagagcagttacccacacttcccccgaggacgtaagttttgctgagtccaggagagacggcttgaaggccattgcgaggatttgccagactgttggtgtgaaagcaggagccccagacgaagctgtgtgcggagagaatgtttcccagatttactgtgcgctgctgggctgcatggacgactacaccacggacagcagaggggacgtgggcacctgggtccgcaaggccgccatgaccagtctgatggatctgacacttctgctggctcggagccagcctgagctgatcgaggcccatacctgtgagcgcatcatgtgctgtgtggcccagcaggccagtgagaagattgaccgtttccgtgctcacgccgccagcgtgttcctgacgctcctgcactttgacagccctcccatcccccacgtgccccaccgaggagaactggaaaagctgtttcccaggtccgatgtggcctccgtgaactggagtgcaccttcccaggccttcccacgcatcacccagctccttgggctgcccacctaccgctaccacgtcctgctggggctagtcgtgtccctgggcggcttgacggagtcgacggtgaggaggcgtcgggctggctggggcaggaggtggctccaggagtgcctggtgcttccctgtctcttgggagcatgtatggagctgggccttttcttccattgctttctatctctctcgggcatatttggttag

SEQ ID NO: 47991 - DNA, 1373 bp, Homo Sapiens
aggcggaacacaccaggagccccagcgcaaccctcccctccaatgtgccttcatgccggtccctgtcatccagcgaagacggccccagtggcccttccagcctcgcagatggaggcctagcccacaacttacaggatagtgtcaggcaccgcatcctctacctctcagagcagctgagagtggagaaggccagtcgggatggcaacactgtgagctacctcaagctggtatccaaagcagaccggcaccaggtgccgcacatccagcaggcctttgagaaggtgaaccagcgcgcctctgccaccatcgcccagatcgagcacaggctccaccagtgtcaccagcagctccaggagctggaggaaggctgcaggcccgagggcttactgctgatggcagaaagcgacccagccaactgcgagccacccagtgagaaggccctgctttcagagccccccgagccaggtggggaagacgggccggtcaacctgcctcatgccagcaggcccttcatcttggagagtcgcttccagagcttacagcaggggacgtgcttagagacagaggatgtggcccagcaacaaaacctgctgttgcagaaggtaaaggcagagctggaagaagccaagaggttccacatcagcctccaggagtcctatcacagcctaaaggagaggtctctgactgacctgcagctgttgctggagtcccttcaggaggagaagtgtaggcaagcattgatggaagaacaggtgaatggtcgcctgcagggacagctgaatgagatttacaacctcaaacacaatctggcctgcagcgaagagagaatggcctatctatcctatgagagagccaaggaaatatgggagatcacggagaccttcaagagccgaatatccaagctggagatgctacagcaagtcacccaactggaggcagcggagcacctccaaagccgtcccccgcagatgttgttcaagttcctgagtccgcgcctctcactggcaaccgtcctcttggtctttgtctccaccttgtgtgcctgcccctcgtcactgatcagctcacgcctgtgcacctgcaccatgctgatgctgatcgggcttggggtcctggcctggcagaggtggcgcgccatccctgccacagactggcaggaatgggtcccctccaggtgtagactgtactccaaggactctgggcctccagcagatggaccttaaggggccaggagggccacctgccttagcttgctagctccctccctcctcctgggtgctgagggcatccagcaagcccctccacagctcttgcttgccgattatgtaaccaccagcctggtgaaatggatatagacgcccacctgcctcaca

SEQ ID NO: 47992 - DNA, 939 bp, Homo Sapiens
atggccgctggcgtggactgcggggacggggttggcgcccggcagcacgtgttcctggtttcagaatatttaaaagatgcttcaaagaagatgaaaaatgggctaatgtttgtaaaactggttaacccctgttcaggagaaggagccatttacttgttcaatatgtgtctacagcagctgtttgaagtaaaagttttcaaggaaaaacaccattcttggtttataaatcaatcagttcaatcaggaggtcttctccattttgccacacctgtggatcctctatttctgcttctccactacctcataaaggctgataaggaggggaagtttcagccccttgatcaagttgtggtggataacgtgtttccaaattgcatcttgttgctgaaacttcctggacttgagaagttacttcatcatgtgacagaggaaaaaggtaatccagaaatagacaacaagaaatattacaagtacagcaaagagaagacattaaagtggctggaaaaaaaggttaatcaaactgtggcagcattaaaaaccaataatgtgaatgtcagttcccgggtacagtcaactgcatttttctctggtgaccaagcttccactgacaaggaagaggattatattcgttatgcccatggtctgatatctgactacatccctaaagaattaagtgatgacttatctaaatacttaaagcttccagaaccttcagcctcattgccaaatcctccatcaaagaaaataaagttatcagatgagcctgtagaagcaaaagaagattacactaagtttaatactaaagatttgaagactgaaaagaaaaatagcaaaatgactgcagctcagaaggctttggctaaagttgacaagagtggaatgaaaagtattgataccttttttggggtaaaaaataaaaaaaaaattggaaaggtttga

SEQ ID NO: 47993 - DNA, 162 bp, Homo Sapiens
atggcggacggaggagcagcgagtcaagatgagagttcagccgcggcggcagcagcagcagactggaaaagtaagaagagctttcctgcctttttaattaccaaactactctcagttttcaatgaatcagttcaaagaaagaatgcagtctttctatacctg

SEQ ID NO: 47994 - DNA, 930 bp, Homo Sapiens
atgacactaggaaacagcactgaagtcactgaattctatcttctgggatttggtgcccagcatgagttttggtgtatcctcttcattgtattccttctcatctatgtgacctccataatgggtaatagtggaataatcttactcatcaacacagattccagatttcaaacactcacgtacttttttctacaacatttggcttttgttgatatctgttacacttctgctatcactcccaagatgctccaaagcttcacagaagaaaagaatttgatgttatttcagggctgtgtgatacaattcttagtttatgcaacatttgcaaccagtgactgttatctcctggctatgatggcagtggatccttatgttgccatctgtaagccccttcactatactgtaatcatgtcccgaacagtctgcatccgtttggtagctggttcatacatcatgggctcaataaatgcctctgtacaaacaggttttacatgttcactgtccttctgcaagtccaatagcatcaatcactttttctgtgatgttccccctattcttgctctttcatgctccaatgttgacatcaacatcatgctacttgttgtctttgtgggatctaacttgatattcactgggttggtcgtcatcttttcctacatctacatcatggccaccatcctgaaaatgtcttctagtgcaggaaggaaaaaatccttctcaacatgtgcttcccacctgaccgcagtcaccattttctatgggacactctcttacatgtatttgcagtctcattctaataattcccaggaaaatatgaaagtggcctttatattttatggcacagttattcccatgttaaatcctttaatctatagcttgagaaataaggaagtaaaagaagctttaaaagtgatagggaaaaagttattttaa

SEQ ID NO: 47995 - DNA, 2643 bp, Homo Sapiens
atgctccaaggccacagctctgtgttccaggccttgctggggaccttcttcacctgggggatgacagcagctggggcagctctcgtgttcgtattctctagtggacagaggcggatcttagatggaagtcttggctttgctgcaggggtcatgttggcagcttcctattggtctcttctggccccagcagttgagatggccacgtcctctgggggcttcggtgcctttgccttcttccctgtggctgttggcttcacccttggagcggcttttgtctacttggctgacctcctgatgcctcacttgggtgcagcagaagacccccagacgaccctggcactgaacttcggctctacgttgatgaagaagaagtctgatcctgagggtcccgcgctgctcttccctgagagtgaactttccatccggatagacaagagtgagaatggtgaggcatatcagagaaagaaggcggcagccactggccttccagagggtcctgctgtccctgtgccttctcgagggaatctggcacagcccggcggcagcagctggaggaggatcgcactgctcatcttggccatcactatacacaacgttccagagggtctcgctgttggagttggatttggggctatagaaaagacggcatctgctacctttgagagtgccaggaatttggccattggaatcgggatccagaatttccccgagggcctggctgtcagccttcccttgcgaggggcaggcttctccacctggagagctttctggtatgggcagctgagcggcatggtggagcccctggccggggtctttggtgcctttgccgtggtgctggctgagcccatcctgccctacgctctggcctttgctgccggtgccatggtctacgtggtcatggacgacatcatccccgaagcccagatcagtggtaatgggaaactggcatcctgggcctccatcctgggatttgtagtgatgatgtcactggacgttggcctgggctagggctgagacgcttcggaccccgggaaaggccatacgaagaaacagcagtggttggcttctatgggacaacaagcttctttcttcacattaaaacttttttccttcctctcttcttcatctcattatcctgattgactctgattataatagaaccatttttactttgctttgagggagatttttgatttaatggggaattttaaggtgtcatggaaatacagattctttgttttggccactgaatggactctctcttcagtgggattatcaaggaacttcagatcagggaaatctccacttcgggaccttctatctgcctcccaactcctcaaggtcacctatagaagcgagctaccaaaagacgtctcctaagcattttggtggcctagtgactcagggcagagtggccagcacacctctcatccgcccctcctgctccatcactgctgagcctctccccatctagaatgttggaactggagcatcataaagatagcaagctaccttccaaggccgagccagcccagagaggagcatgtcttcctttacctccccctaaggagatactacatgggagggggacacagaaaaagggaaggaaattggctagtctggctttttttttttttttttttaaaggcaaagattgacattattgaaggaaaggggatgaggacaactgtgaactcacagtgagccctgtggaaagaagagacagacagagtgtgggtttgttcggaggcctctgctgtcaatggattccaggagcaaggccatttgtcgcgctttccaaatttcttaggcatttattttgataagtttatagccatcatgtttctaagagacttggagacaccagcaaactgctagaactcaaactcttcaattactcaaagaaggagccatttcagttaactcaagtgaatgaaagagttttggaatctgctgtgggtccttccctgttgaccatttggtaacttataatctgacaaaaactcttgagctgcaacaggccttgccagagggctcaggatgggaaaggaagaaggggataggaaaagaagaggtaattttacatttcccctttaaagtaaattttagccaactcatcattctgaaatgtccctataaagaatgagtcgaactagaccagaagccagcctactccttcttacatagcttctccaacaggggtagcaatgacctgtccacttcaaacacagataaggcctgccatcctcattggttaaaggcacacgtgagactttcagtgggctctgctgagaaggaaggcagcccaggagtcaggtatgcaggcattgcattgtcagtgtctgctctcagagtttacacattcaattgcttccaagggtgaatctcctgctctgtgaatgctatcagaccccaaaggccaaccttgggctgggtctatgtacgttcttccgaagcactgatgatcaaaattgaagacacattcagaggtttgattggttgagattaactggtgtggtggttggtgtatgtatgttttatttttatgtctttgtatgtagttctacataatgcaaattgtgctttctgatggacaagacctcataactgtgattaatatcaataaaaaggggatgttgtgga

SEQ ID NO: 47996 - DNA, 2102 bp, Homo Sapiens
atttttcatgtcacataattttggagtatgtcatggacatttgaatattttgttacaaaactggatgctgttaaaatcctctggaaaatatttttggttttttggtttcactttagcgggcagttaacctggttaggttcagactgcctctgtgggctgtggatccagtttgaacttacttttcaaaaccttcgtattgctgttcaggtcccaggtgtgccatccatgccattgtgcagttctcagcgcctttcctctgccgccttgggtcagttcacacatgggcatgttggtggtaaacttgagattgtatacacaaatttagaggacgtttcttctctccgtgacttcccttgtacacaagctcccaagagtttcttttcgtggttctttggtgagaaaactggaattttagcttctttgtgcttttcatacgttttctgtagaggggctcatttcctgaacaaaatggagagagagaaaagttagagaaaaaaataaaatgaattccctcttccatactcttccgatcatcgtctttttcctagttcttttgtcagaagaactctcttttagagtttaggagacagctaccagccacaggtgtgcagactcaggattggggcttgctttgaggcagagctgagagagaagaaaaattaccagatatccacccctccccattgtccctctcccattcatcatcttttctagttctctagccagaaggagtttctcttggaacttttctctgtcttcactcactgcacagttaatgagatttgggctgtcctcaagtctaagctgacatatgtgggagaaaaaaaccaggaaactcactactgttttgagttttgatttctctcgccagtctgcttgcttcaaattacttttcagagtccttgtatatttgctttatgtattctttccaggatttttagtaataatcaatggacaagatagggtggagtgtgctttctccatcttagctagaactgggaccccgtcccccactcgtaaaatataaataatgacttagcatggcacattaggtgggcattagagacaccagggaagcgattacaaatataaatgcccaggttgtatctccagataattaaaaatctttcaggagtaggatccagaaaactatatttaaaagttctctaggttcttgatatactatgtaggttgtggtctgaggaccactacatggggatcatttggaaacttgttagaaatgtagactcaggttccattccagacctgctgaattggaacaagatccccagatggtgcctacgcacagtaaaatttgagcagcactgccctagcatgattctagtgtgcagtcaatgttgaggaccactgtcttagaggattgcgtaaaagcaaatgacgtgtatataaatttagattgtaatattctctgagtataaactcattaggtgcaagctgagctcaccctccatgttttctgtgttcctggttaaagtaagttacctttgatgaaaaccacaggttcatctttgacttcaaatcagatttgttgctattgaagctaattggatcccagctcagctttgtggcttggattcacaccatataaaatcttcaacagacattcattcctttgttcagaacacacaaccttctaacgtgaacctccaattttctaaattcattctttttctacttcacctgaaaccacagatccatggcacttagtttctctgtaacagcagctctaccatggtgtccagaaattttagcccctactatcaagaacaaaacatccttgtacatgtttatacatctttttgagtaggagttttccaccagttgcagggattccctgagtctagagtaatgccacaatgctgctcccttttactcctttctaagcatttctgtcagggagaagacttagattcagttgttcactttaacattttccttagatactctcttagaaaagttgtattctgcgcacttctgttatgaagggagtaagggattgctgagatttgttaagttaccaaactagtcttgatagatgtataattattacatatccaccatcacttcatttagctgggcaa

SEQ ID NO: 47997 - DNA, 2829 bp, Homo Sapiens
gtcactgtcccggaacctggggcagcggagtcccgtgcgccctgtggtgacagctcaggagggtgtgtgcgctcagcaggggccagcatggaccagtctgtggcaatccaggagacgctggctgagggggaatactgcccgcaggcggtgcaaggtgtgctgtgtgagggggacagccggcagagccgcctcctgggactcgtgcgctaccgcctggagcacggcggccaggaacacgctctcttcctctatacgcaccggaggatggccattaccggggacgatgtctctctggaccagatagtgccagtctcgcgggattttacgctggaagaagtgtccccagatggtgaactctacatccttggctcagatgtgaccgtccagctggacacagcagagcttagcctcgtattccaactgccctttggttcacaaaccaggatgttcctccacgaagttgccagggcctgtccaggcttcgattctgcgacccgggatcctgaattcctgtggctgtctcggtataggtgcgcagagctggagctggagatgccaacgccgcgcggttgtaactcggccctagttacctggccagggtacgcgacaattggcggaggcaggggttctaactttgatggtttgagaccaaatgggaagggagtgcctatggaccaaagctccaggggtcaagataaaccagaaagcttgcaaccaagacagaataaatccaagtccgaaattactgacatggttcgctcctccactatcacagtgtcggacaaggctcatattttatccatgcagaagtttggactgcgagatacaattgtgaaatcacatctactacagaaagaagaggattacacctatatccagaacttcaggttttttgcgggaacatacaatgtaaatgggcagtcccccaaagaatgcctccggctgtggctgagcaatggtatccaggccccagatgtctattgtgtagggttccaggagcttgatctgagtaaggaagcttttttctttcacgataccccaaaggaggaagagtggttcaaagctgtgtcagagggtcttcatccagatgccaaatatgcaaaggtgaagcttatccgactggttgggattatgctgctgttatatgtcaaacaggagcatgcagcttatatctcagaagtggaagccgagactgtggggacaggaatcatggggaggatgggcaacaagggaggcgtggcgatcaggttccagttccacaacaccagcatctgcgttgtgaattctcacttggcagcccacattgaagagtatgagaggaggaaccaggactataaggacatttgttctcgaatgcagttttgtcagcctgacccaagccttccccctctcaccatcagcaaccatgatgtgatcttgtggctgggggacctcaactacaggatagaagagctggatgtggaaaaagtgaaaaagctcatcgaagagaaggactttcaaatgctgtatgcatatgatcagctgaaaattcaggtggccgcaaagactgtctttgaaggcttcacagagggtgagctcacattccagcctacttacaagtatgatacgggctctgacgactgggataccagtgagaagtgccgtgctcctgcctggtgtgatcggattctctggaaagggaagaacatcactcagctgagttaccagagccacatggccctgaagaccagtgaccacaagcctgtcagctcagtgtttgacatcggggtgagggtcgtaaatgacgagctttaccggaagacactggaggaaattgttcgctccctggataagatggaaaatgccaacattccttctgtgtccctgtccaagcgagagttctgttttcagaatgtgaagtacatgcaattgaaagtagaatcctttacaattcataatggacaagtaccctgtcattttgaattcatcaacaagcctgatgaagagtcttactgtaagcagtggctgaatgccaaccccagaggcttcctcctgccagattctgatgttgagattgacttggagctcttcgtaaataagatgacagctacaaagctcaactcgggtgaagacaaaattgaggacattctggttctgcacttggacaggggaaaggattactttttgtctgtgtctgggaactacctgcccagctgttttgggtctcccattcatacactgtgttacatgagagagccaatcttggacctaccacttgaaaccattagtgagctgactctgatgccagtatggactggagatgatgggagccagttggatagccccatggaaatccccaaagagctctggatgatggttgattacctgtaccgaaatgctgtccagcaggaagatctgtttcagcaaccaggcctgaggtcagaatttgaacatatcagggactgcttggatactggaatgattgataacctctctgccagcaatcattctgtagccgaagccctgctgcttttcctggagagccttccagagcctgtcatctgttacagcacctaccataactgcttggagtgttctggcaactacacagcaagcaaacaggtcatttctactctccccatattccacaaaaatgtcttccactacttgatggcgtttttgcgagaactgctgaaaaattcagcaaaaaatcatttggatgagaatattctagctagcatatttggcagcttattgcttcgaaacccagctggtcaccaaaagcttgatatgacagagaagaagaaggctcaagaatttattcaccagttcctctgcaacccactctga

SEQ ID NO: 47998 - DNA, 1803 bp, Homo Sapiens
agagtttctggaagaaaggaatcccttaaacatggctgtggcaaacacttcagaatgagttcacaccactatgactacaagaaatatgggaaggggctcagacacatgattgggggcttcagcctacatcagagaattcatagtggactgaaagggaacaaaaaggacgttgactgtggaaggactttcagtcatagctcccatcttgcgtatcatcagagacttcacactcaagagaaagcatttaaatgtagggtgtgtgggaaagccttccggtggagttccaactgtgcgcggcatgagaaaattcacactggagtgaagccttataaatgcgatttatgtgagaaagctttccgacgcctgtcagcctaccgtctgcaccgagaaacccatgctaagaagaaatttcttgaattgaatcagtatagggcagctctcacctacagctcagggtttgatcatcatttgggagaccaaagtggggagaaactctttgactgcagccagtgcaggaaatccttccactgtaagtcatatgttcttgaacatcaaaggattcacacccaggagaagccctataaatgtaccaaatgtaggaaaacctttagatggagatcaaactttactcgtcatatgaggttgcatgaggaggaaaaattctacaaacaagatgaatgtcgtgaaggcttcaggcaatctcctgactgcagtcagccccagggtgctcccgctgtggagaaaacatttctgtgtcagcagtgtgggaaaacttttactagaaagaaaactctcgttgaccaccagagaattcacacaggtgagaaaccttaccagtgtagcgattgtgggaaggactttgcctataggtcagcctttattgttcataagaagaagcatgccatgaaaagaaaacctgagggcgggccatcttttagtcaggacacagtgttccaggttcctcagagcagtcactccaaagaggagccctacaaatgcagccagtgtggcaaggccttccgcaatcactcattcctcctcatccatcagagagttcacactggagagaagccatataagtgcagggagtgtgggaaagccttcagatggagttccaatctctaccgacatcagaggattcactctcttcaaaaacagtatgattgccatgaaagtgaaaagactccaaatgtggagccaaaaatcctcactggtgagaaacgtttttggtgtcaagaatgtgggaaaacctttacacgtaaaagaacccttttagatcataagggaatacacagtggagagaagcgctataaatgtaatctatgtgggaaatcttatgatagaaactatcgccttgttaaccatcagaggatccactctacagagagacctttcaaatgtcagtggtgtgggaaagagttcattgggagacataccctttccagtcaccagaggaaacacaccagagcagcacaggctgaacgtagcccgcctgcacggtcttcctctcaggacacaaagttgagattacagaagctaaaaccaagtgaagagatgcccctcgaagactgcaaagaagcttgcagccagagctccaggctcactggactccaggacataagcattgggaaaaagtgccacaaatgcagcatatgtgggaaaacttttaacaagagttcacaactcattagccacaagagatttcatactcgagagaggcccttcaaatgcagcaagtgtggaaagaccttcaggtggtcttcgaacctggctcggcatatgaaaaaccatattagagattag

SEQ ID NO: 47999 - DNA, 1167 bp, Homo Sapiens
atggagccctctccagccgctgggggcttggagaccactcgcctggtgagcccccgggaccgcggtggcgccggaggcagcctgcgtttgaagagtctcttcacagagccctcagagcccctccctgaggagtccaaacctgtggagatgcccttccaccactgccacagggacccccttccgccgccgggccttacccctgagaggctgcatgcacggaggcagctatatgctgcctgtgccgtttgctttgtcttcatggctggggaggtggtcggcgggtatctggcacacagcctggccatcatgaccgatgcagcccacttgctggcggatgtgggcagcatgatgggcagcctcttctccctctggctctccacccgtccagccacccgcaccatgacctttggctggcaccgttcagagactctgggggctttggcctctgtggtctccctctggatggtcactggcatcctcctgtacctggccttcgtccgcctgctgcacagcgactaccacatcgaggggggtgccatgctgctgaccgccagcatcgcagtctgtgccaacctgttaatggcctttgtgctgcaccaggctgggcccccccacagccacgggtctaggggagcagagtatgcaccgctggaggaggggcctgaagagcccctgcccctggggaacaccagcgtccgggcggcatttgtgcacgtgctgggggacctcctgcagagctttggggtactggctgcctccatcctcatctacttcaagcctcaatacaaggcagccgaccccatcagcaccttcctcttctccatctgtgcccttggatccaccgctcccaccctccgagacgttcttcgaatcctcatggaaggtaccccccgcaatgtggggttcgaacctgtgcgggatacgctgttgtcggtgccaggagtccgggcaacccatgagctgcacctgtgggcccttacgctcacttaccatgttgcctctgcacacctggccatcgactccaccgctgaccctgaagccgtcctggctgaagcctcatcccggctctactcccggtttggattctccagctgcaccctgcaggtcgagcagtatcagccggagatggcccagtgcctgcgctgccaggaacccccccaagcctga

SEQ ID NO: 48000 - DNA, 831 bp, Homo Sapiens
atggcaccaagcagatccatggaagtgagtgggaaccacacctctgtggccatgtttgttctcctaggactctcagatgaaaaagagctgcagctcatcctctttccagtcttcctggtgatctaccttgtgaccctgatttggaacatgggtcttatcatcctcatcagaatagactctcatctgaacacacccatgtacttttttctcagtttcctctcatttacagacatctgctattcttctaccatcagcccaaggatgctttcagacttcttaaaagataagaagacaatttccttccttgcctgtgccactcagtattttcttggggcctggatgagtctggctgagtgctgcctcttggtcatcatggcctgtgacagatatgtggccattggcagccccctgcagtactcagcaatcatggtccctagtatctgttggaagatggtagctggagtctgtgggggtggattccttagtagcttagttcatacagtcccttgctttaatctctactactgtgggccaaatatcattcaacatttcttctgtaacacacttcagattatttccttgtcttgctccaacccctttatcagccaaatgattctttttctggaagctatttttgttgggttgggctctttgcttgttatccttttgtcttatggtttcattgtagcttccatactgaaaatatcatcaaccaaatgttgtgccaaggccttcaatacctgtgcctcccacctggcagctgtggctctcttctatggcacagccctttctgtgtacatgcatcctagctctagccactccatgaagtag

SEQ ID NO: 48001 - DNA, 1113 bp, Homo Sapiens
atggcctcatcgaccactcggggccccagggtttctgacttattttctgggctgccgccggcggtcacaactcccgccaaccagagcgcagaggcctcggcgggcaacgggtcggtggctggcgcggacgctccagccgtcacgcccttccagagcctgcagctggtgcatcagctgaaggggctgatcgtgctgctctacagcgtcgtggtggtcgtggggctggtgggcaactgcctgctggtgctggtgatcgcgcgggtgcgccggctgcacaacgtgacgaacttcctcatcggcaacctggccttgtccgacgtgctcatgtgcaccgcctgcgtgccgctcacgctggcctatgccttcgagccacgcggctgggtgttcggcggcggcctgtgccacctggtcttcttcctgcagccggtcaccgtctatgtgtcggtgttcacgctcaccaccatcgcagtggaccgctacgtcgtgctggtgcacccgctgaggcggcgcatctcgctgcgcctcagcgcctacgctgtgctggccatctgggcgctgtccgcggtgctggcgctgcccgccgccgtgcacacctatcacgtggagctcaagccgcacgacgtgcgcctctgcgaggagttctggggctcccaggagcgccagcgccagctctacgcctgggggctgctgctggtcacctacctgctccctctgctggtcatcctcctgtcttacgtccgggtgtcagtgaagctccgcaaccgcgtggtgccgggctgcgtgacccagagccaggccgactgggaccgcgctcggcgccggcgcaccttctgcttgctggtggtgatcgtggtggtgttcgccgtctgctggctgccgctgcacgtcttcaacctgctgcgggacctcgacccccacgccatcgacccttacgcctttgggctggtgcagctgctctgccactggctcgccatgagttcggcctgctacaaccccttcatctacgcctggctgcacgacagcttccgcgaggagctgcgcaaactgttggtcgcttggccccgcaagatagccccccatggccagaatatgaccgtcagcgtggtcatctga

SEQ ID NO: 48002 - DNA, 1005 bp, Homo Sapiens
gatgataatatcaccttgcttgtcatagacaacacctctggcatgtgcaaggccagcttcaccgacgacgatgccccctgggccgtcttcccctccatcgtggggtgccccagacaccagggcatgacggtgggcatggctgagaagatctggcaccacaccttctacaacgagctgcgggagcacccggtgctgctgaccgaggcctccagccccaaagccaatagaaagaagatgacccagatcatgtttgagaccttcaacacctcggccatgtacgtggccatccaggccgtgctgtccaagtacactcctggccataccactggcatcatgatgaactccagcgacggggtcacctgcacagtgtccatctatgagggctacaccctcccccatgccatcctgtgtctggacccggctggccgggaccagactgactacctcacaaagatcactgcgcatggctacggcttcaccaccacggccgagcgggcgatcacgtgtgacattaaggagaagctgtgctatgttgccctggacttcaagcaggaggtggccacggcgaccaccagctcctccctggagaagagctatgagctgcctgacagccaggtcatccccactggcaacgaacggttccgctgccccgaggagcccttcccgccttccttccggggcatgaaatcctgtggcatccacgaaactatcttcaactccatcatgaagtgtgacatggacatcctcgaagaccagtacaccaacacagtgctgtctggagggaccagcatgcaccccagcatcacccacagggtgcagaaagagatcaccgccctggcgcctggcacgatgaagatcaacgtcattgctcctcccgagcgcaaatactctgcgtggatcagcggctccatcccggcctcgccatccaccttccagcagatgtggatcagcaagcaggcgtatgacgagcctggcccctccatcctccaccgcaaatgcttctag

SEQ ID NO: 48003 - DNA, 519 bp, Homo Sapiens
atgcctgacaccttcaactcaaggtctccctctgtggagggttctctgtgggcagtgggcacagagagtcagggtcgagattggaggcacctgccgaccatcacaagtgagctctctggggctccccgctgccacactgtaccctgtgctgggagcacagctctccaagagcctggggagccccaggggccaccagccagcccttcgtgcccagaggaggccttggctgccacatgggagcagccatgggcttcggaggtattcgggcctgagagaatgcccccctctggagctgctcgaagcttccaagaagtaacagagccagctgtagtggcagtggaccggcaggccatcttcccagatacctggtctcacggaggaacatggcctacagcaggagaggccaaggccagagccagggaggctgggaagcagctcccctgcctcagttaccacggagcagctaggtgcaaagatgaccgagaggggaagtgtggccaggccaacccagggacctga

SEQ ID NO: 48004 - DNA, 804 bp, Homo Sapiens
acggtgcccccagcagtggacctggtgctgggtgcttctgcctgctgcctggcctgtgtcttcaccaaccccctggaggtggtgaagacgcggctgcagctgcagggggagctgcaggcccggggcacctacccacggccctaccatggcttcatagcctctgtcgctgctgtggcccgagcagacgggctgtggggcctgcagaaggggctggctgccggccttctgtaccaaggcctcatgaatggcgttcgtttctactgctacagcctggcgtgccaggctggcctcacgcagcaaccaggtggcaccgtggttgcgggagccgtggcgggggcactgggagccttcgtggggagccctgcttacctgactgtcctgggtgccttggagaccatctggcggcagcaagggctcttggggctgtggcagggcgttggtggggctgtgccccgagtcatggtgggctcagctgcccagctggccaccttcgcctctgccaaggcctgggtacagaagcaacagtggctccctgaggacagctggctggtggccctggctgggggcatgatcagcagcatagccgtggttgtcgtcatgactcccttcgatgtggtcagcacgcggctatacaatcagccggtggacacagctggcaggctctatgggggcctcaccgactgcatggtgaagatctggcggcaggagggccccctggcactctacaagggcctgggccccgcctacctgcgcctgggcccccacaccatcctcagcatgctcttctgggacgagcttcggaaa

SEQ ID NO: 48005 - DNA, 517 bp, Homo Sapiens
tgctcagcccccggggcacagcaggacgtttgggggccttctttcagcaggggacagcccgattgggggacaatggcgtctcttggccacatcttggttttctgtgtgggtctcctcaccatggccaaggcagaaagtccaaaggaacacgacccgttcacttacgactaccagtccctgcagatcggaggcctcgtcatcgccgggatcctcttcatcctgggcatcctcatcgtgctgagcagaagatgccggtgcaagttcaaccagcagcagaggactggggaacccgatgaagaggagggaactttccgcagctccatccgccgtctgtccacccgcaggcggtagaaacacctggagcgatggaatccggccagggactcccctggcacctgacatctcccacgctccacctgcgcgcccaccgccccctccgccgccccttccccagccctgcccccgcagactccccctgccgccaagacttccaataaaacgtgcgttcctctcgaca

SEQ ID NO: 48006 - DNA, 900 bp, Homo Sapiens
ccggcaacggctgcggcctcgcccacgttatggcgcccgaggagaacgcggggaccgaactcttgctgcagggttttgagcgccgcttcctggcggtgcgcacactgcgctccttcccctggcagagcttagaggcaaagttaagagactcatcagattctgagctgctgcgggatattttgcagaagactgtgaggcatcctgtgtgtgtgaagcacccgccgtcagtcaagtatgcctggtgctttctctcagaactcatcaaaaagtcctcaggaggctcagtcacactctccaagagcacagccatcatctcccacggtaccacaggcctggtcacatgggatgccgccctctaccttgcagaatgggccatcgagaacccggcagccttcattaacagacgtgctgtattgcccagaagccatcgtgtcgctggtcggggtcctgcagaggctggctgcctgccgggagcacaagcgggctcctgaggtctacgtggcctttaccgtccgcaacccagagacatgccagctgttcaccaccgagctaggccgggatgggatcagatgggaagcggaagctcatcatgaccagaaactgtttccctatggagagcacttggagatggcaatgctgaacctcacactgtaggactcacacatgactccaaagggattgtgagaatcaagtcactctcgtgggaagaatttttatatgggaaagtggataaaactttcattggactggaatgtttggagattattaaactccaaatcaggaatcaaaactgccctctaataagacattagctgtctaggcgtgtgggtgccccctttctgccagcagttctggttctcaagaaaatcatcataaatcagacatgaaaattctagctcc

SEQ ID NO: 48007 - DNA, 2008 bp, Homo Sapiens
atgagctggctggccagttatctagcggatgctgactgccttcccagtgctgcccagatccgcttgagccctgttggctctcccgtcagtgaaatcgctttcgagaaacctaaccttccctccgccgcggattggtcagaattcctgagtgcatctaccagtgagaaggtagagaatgagtttgctcagctcactctgtctgatcatgaacagagagaactctatgaggctgccaggcttgtccagacagctttccggaaatacaagggccgacccttgcgggaacagcaagaagtagctgctgctgttattcagcgttgttacagaaaatataaacagtacgcactttataaaaagatgacacaggctgccatccttatccagagcaaattccgaagttactatgaacaaaaaaaattccagcagagccgacgggctgctgtgctcatccaaaagtactaccgaagttataagaaatgtggcaaaagacggcaggctcgccggacggctgtgattgtacaacagaaactcaggagcagtttgctaaccaaaaagcaggatcaagctgctcgaaaaataatgaggtttcttcgccgctgtcgccacagagtgaaagaattgaaaaaggccaaggaacttgaagacatacagcagcatcccttagcaatgtgacattgcttttcagactgttttcatttctgtttttagcagagacatgcaacaacaacacacacgcacacacgcacacacacacacgtacacacacatacaaaatccctctgcagttttggggagatcagctgcaggattttaacaggaatgttttggtcattgcatttgcactttcatggacaacttttaatttgatcagcaagacatcttggaactcaatcttctgttggatcacgggaaatcaagacacccaggaggaattgaaagaggcttcctcttctcaggaagaagccatttccttctcatatagggctgtattcaaacatcgtgtggaactgtacaaatatttataccaaaaatatagataagaaaaggtggggctatactagcaacaaaaaaagaatgctgttcctgcacctgccggttatttccaagaagctgaatctttgggactgattctcagtggagggcttagatcatacaaaaatctttattgggtccgtgtgttctcatttccttcactgtttatttttgtttgtttgtttgtttgttttaatctctacagcacatttaatgcaacttttgaaatctgcaggtttttaatgtcttgtggaaatttgcagaggggcaggtgtgtggtaaacgggtaatgcatgggaaataatgagaagcagctcacagagtttaaactattttcttgtccccaccaccttccaagaacctgcgagggtagtaatcatcttgtcccctttttcatgttcagcactttaatttttttgccttactttcatgtgcaatgagaattacttaagaattggtaacgcatgtagccttttttagtaaccttggaagctgtagtaattctaaggaatcatgaaccttgcctggacatttgccacctaaacgatcagtgtggtgctgcgttctggccagtaaattccatgtttttggctatatctcatccaaactgagcagtttctgtgtatatatagaaggtagaaatgaaaagtgagaaaatatttgaaagggattatattaattgctaaatattttattcacaaaggtcaataacatggcaagataaaattatttgtatagttttgtctgaatgagcgagaaaaatgtggatgtactgtttgtatatattgtatatattaaaacagagatatgtgcatgaaatcaagaaaaaagaaatgaacaaaagcaaagcattagtggctatggtctgtaaaatgaaacaaaaaaactttatttcactataagagtactttattttaaatgttctttaggagaacattttgctaaagcatgactaaactgcaaaaaaaaaaaaaga

SEQ ID NO: 48008 - DNA, 1824 bp, Homo Sapiens
atgtggatgacgcccaaaagaagcaagatggaagtcgacgaggctctagttttccggcccgagtggacccagcgttatttggtggtggagcctccggagggcgatggggccctgtgcctggtctgtcgccgcctcatcgtagctacccgcgaacgcgacgtcaggcgccactacgaggctgagcacgaatactacgagcggtatgtggcggacggcgagcgcgcggccctggtggagcgtctgcgtcagggcgacttgcccgtggcctccttcactcctgaagagagagctgctcgtgcaggcctcgggctctgccgcctcttggccttgaagggtcgcggctggggtgagggggactttgtataccagtgcatggaggtgttgctgagagaggtactgcccgagcatgtaagcgtcctgcaaggcgttgacttatctccagatatcacaaggcagaggatcctgagcattgacaggaatctacgcaaccagctttttaaccgagccagggactttaaagcctattctcttgccttggacgaccaggcttttgtggcctatgagaactacctcctggtctttatccgcggtgtaggccctgagttggaggtgcaagaagatcttctgaccataatcaacctgactcatcatttcagtgttggtgcgctcatgtcggcaatcctagagtccctgcagacagcagggcttagcttgcagagaatggttggactgaccacgacccatactttgaggatgattggtgagaactcaggactcgtctcatacatgagagaaaaggccgtaagccccaactgttggaatgtcattcattattcaggatttcttcacttggaactgttgagctcctatgatgtagatgttaatcagatcataaataccatatccgaatggatagttttgattaagaccagaggcgttaggcgacctgaatttcagactttactaacggaatctgaatcagagcatggtgaaagggttaatggacgatgtctgaacaattggcttaggagagggaaaactttaaaactaatattctctctaagaaaagaaatggaagcgttcttggtttcagtaggggcaacaacagtccacttctcagacaaacaatggctttgtgactttggcttcttggtggacattatggaacaccttcgagaactcagtgaagaattacgagttagtaaagtctttgctgctgctgcctttgaccatatttgtactttcgaagttaagctgaatttatttcaaagacatattgaggaaaaaaatctaacagactttcctgccctcagagaagttgttgatgagctaaaacagcaaaataaggaagatgaaaaaatatttgatcctgataggtatcaaatggtgatctgtcgtctccaaaaagaatttgagagacattttaaggacctcaggttcattaaaaaggacttagaacttttttcaaatccatttaactttaaacctgaatatgcacctatttcagtgagggtggagctaacaaaacttcaggcaaacactaatctttggaatgaatacagaatcaaagacttggggcagttttatgctggattgtctgctgaatcctacccaattatcaaaggggttgcctgtaaggtggcatccttgtttgatagtaaccaaatctgtgaaaaggctttttcatatttgactcgaaaccaacacactttgagtcagccattaacagatgagcatctccaagccctgtttcgggttgccacaactgaaatggagcccggttgggatgaccttgtgagagaaagaaatgaatctaatccataa

SEQ ID NO: 48009 - DNA, 514 bp, Homo Sapiens
gcaaggcgtggggcgctatgggactgcgcagtgacgacccagtgaagtagatgccttgacgattcccatttcacggatgagacgactccggcacagagaagtcagagggcctgtcctgggtcacacagccacaggcggcccccagaacgggacttcagggtgcaccactgcaccccagcagagacctccgcctggcacacagggaatgctggagcaatacttaaataggggaggtcagaaatctcacgggctctgctggcttctgtgcttcgtctctcaaggccaaaatcaagatgtcatcagtgctgagctctggtgcaggatccacgtccaggctcactggggctgctggcagaattcagctgtgtggggttgtaggaatgaagtccttgtttccttgctggctgttggccaggggctgccctcagcttctggaggccgcctgccctccctggttcatggcccatctcatcctgacagccagcacccgcgggaagtccctcttgcactgtga

SEQ ID NO: 48010 - DNA, 540 bp, Homo Sapiens
gagtggcctcagactcatgaaacttctatcttgtatacaggacctacagagagacctgccaatgaaccagaggagacccctgtacgaaggccttctttgtacaggagaatattacggaggcttgcatcttactgggcacaaccacaggatgccctttcccaagaggtgagccgagaggtctggaaagatgtgcagttgtccaccattgaactgtccatcacaacacggaacaatcagcttgaccgaacatgcaaagattttatgaacatctgcattgaagccgacaccgtcagcaaaggaggctttataactataggaagcctaaaggtgagaaaagccaagctggacactgagggcatggagtgtctccaagccagccagtacactttgcttgtccccaagggagcagggagctcttttagcattgacagtgaggagtatgaagcgatgcctgtggaagtgaaactgctccccaggaagctgcagttcttctgtgatcctaggaagaaagaacagatgctggcaagctccacccagtga

SEQ ID NO: 48011 - DNA, 981 bp, Homo Sapiens
atgtatgtgtcaaattgcaatccttgtgctattcacagaaaaatcaattatccaaataccaaactggatttcgagcaagtgaacaacataacggaattcatcttgcttggcctgacacagaacgcagaggcacagaaactcttgtttgctgtgtttacactcatctactttctcaccatggtagacaacctaatcattgtggtgacaatcaccaccagcccagccctggactcccccgtgtatttttttctgtctttcttttccttcatagatggctgctcctcttctaccatggcccccaaaatgatatttgacttactcactgaaaagaaaactatttccttcagtgggtgcatgacccagctctttgtagaacatttctttgggggagttgagatcattctgctcgtggtgatggcctatgactgctatgtggccatctgcaagcccctgtactacctgatcacaatgaacaggcaggtatgtggcctcctggtggccatggcatgggtcgggggatttcttcacgctctgattcaaatgcttttaatagtctggctgcccttctgtggccccaatgtcattgaccatttcatctgtgaccttttccctctgctaaaactctcctgcactgacactcacgtctttggactctttgttgccgccaacagtgggctgatgtgtatgctcattttttctattcttattacctcttacgtcctaatcctctgctcacagcggaaggctctctctacctgcgccttccatatcactgtagtcgtcctattctttgttccctgtatattggtgtaccttcgacccatgatcaccttccctattgataaagctgtgtctgtgttttatactgtggtaacacccatgttaaaccctttaatctacaccctcagaaacacagaggtgaaaaatgccatgaagcagctctggagccaaataatctggggtaacaatttgtgtgattag

SEQ ID NO: 48012 - DNA, 249 bp, Homo Sapiens
tcccaacactttgggaggccgagggaaacagatcacttgaggtcaggagttcaagatgagcctggccaacatggggaaaccccgcttctaccaaaaatacaaaaattagccaggcatggtggtgtgcctgtatctcagctacttggactgaggtgggagaatcacttgaacttgggaggcagaggttgcagtgagccaagattgcgccattgcactccagcctgggtgacagagcgagacgctgtctca

SEQ ID NO: 48013 - DNA, 1539 bp, Homo Sapiens
atgctctttgagggcttggatctggtgtcggcgctggccaccctcgccgcgtgcctggtgtccgtgacgctgctgctggccgtgtcgcagcagctgtggcagctgcgctgggccgccactcgcgacaagagctgcaagctgcccatccccaagggatccatgggcttcccgctcatcggagagaccggccactggctgctgcagggttctggcttccagtcgtcgcggagggagaagtatggcaacgtgttcaagacgcatttgttggggcggccgctgatacgcgtgaccggcgcggagaacgtgcgcaagatcctcatgggcgagcaccacctcgtgagcaccgagtggcctcgcagcacccgcatgttgctgggccccaacacggtgtccaattccattggcgacatccaccgcaacaagcgcaaggtcttctccaagatcttcagccacgaggccctggagagttacctgcccaagatccagctggtgatccaggacacactgcgcgcctggagcagccaccccgaggccatcaacgtgtaccaggaggcgcagaagctgaccttccgcatggccatccgggtgctgctgggcttcagcatccctgaggaggaccttgggcacctctttgaggtctaccagcagtttgtggacaatgtcttctccctgcctgtcgacctgcccttcagtggctaccggcggggcattcaggctcggcagatcctgcagaaggggctggagaaggccatccgggagaagctgcagtgcacacagggcaaggactacttggacgccctggacctcctcattgagagcagcaaggagcacgggaaggagatgaccatgcaggagctgaaggacgggaccctggagctgatctttgcggcctatgccaccacggccagcgccagcacctcactcatcatgcagctgctgaagcaccccactgtgctggagaagctgcgggatgagctgcgggctcatggcatcctgcacagtggcggctgcccctgcgagggcacactgcgcctggacacgctcagtgggctgcgctacctggactgcgtcatcaaggaggtcatgcgcctgttcacgcccatttccggcggctaccgcactgtgctgcagaccttcgagcttgatggtttccagatccccaaaggctggagtgtcatgtatagcatccgggacacccatgacacagcgcccgtgttcaaagacgtgaacgtgttcgaccccgatcgcttcagccaggcgcggagcgaggacaaggatggccgcttccattacctcccgttcggtggcggtgtccggacctgcctgggcaagcacctggccaagctgttcctgaaggtgctggcggtggagctggctagcaccagccgctttgagctggccacacggaccttcccccgcatcaccttggtccccgtcctgcaccccgtggatggcctcagcgtcaagttctttggcctggactccaaccagaacgagatcctgccggagacggaggccatgctgagcgccacagtctaa

SEQ ID NO: 48014 - DNA, 4389 bp, Homo Sapiens
atggcacctgtgcacggcgacgactctctgtcagattcagggagttttgtatcttctcgagcccggcgagaaaaaaaatcaaagaaggggcgccaagaagccctagaaagactgaaaaaggctaaagctggtgagaagtataaatatgaagtcgaggacttcacaggtgtttatgaagaagttgatgaagaacagtattcgaagctggttcaggcacgccaggatgatgactggattgtggatgatgatggtattggctatgtggaagatggccgagagatttttgatgatgaccttgaagatgatgcccttgatgctgatgagaaaggaaaagatggtaaagcacgcaataaagacaagaggaatgtaaagaagctcgcagtgacaaaaccgaacaacattaagtcaatgttcattgcttgtgctggaaagaaaactgcagataaagctgtagacttgtccaaggatggtctgctaggtgacattctacaggatcttaacactgagacacctcaaataactccaccacctgtaatgatactgaagaagaaaagatccattggagcttcaccgaatcctttctctgtgcacaccgccacggcagttccttcaggaaaaattgcttcccctgtctccagaaaggagcctccattaactcctgttcctcttaaacgtgctgaatttgctggcgatgatgtacaggtcgagagtacagaagaagagcaggagtcaggggcaatggagtttgaagatggtgactttgatgagcccatggaagttgaagaggtggacctggagcctatggctgccaaggcttgggacaaagagagtgagccagcagaggaagtgaaacaagaggcggattctgggaaagggaccgtgtcctacttaggaagttttctcccggatgtctcttgttgggacattgatcaagaaggtgatagcagtttctcagtgcaagaagttcaagtggattccagtcacctcccattggtaaaaggggcagatgaggaacaagtattccacttttattggttggatgcttatgaggatcagtacaaccaaccaggtgtggtatttctgtttgggaaagtttggattgaatcagccgagacccatgtgagctgttgtgtcatggtgaaaaatatcgagcgaacgctttacttccttccccgtgaaatgaaaattgatctaaatacggggaaagaaacaggaactccaatttcaatgaaggatgtttatgaggaatttgatgagaaaatagcaacaaaatataaaattatgaagttcaagtctaagccagtggaaaagaactatgcttttgagatacctgatgttccagaaaaatctgagtacttggaagttaaatactcggctgaaatgccacagcttcctcaagatttgaaaggagaaactttttctcatgtatttgggaccaacacatctagcctggaactgttcttgatgaacagaaagatcaaaggaccttgttggcttgaagtaaaaagtccacagctcttgaatcagccagtcagttggtgtaaagttgaggcaatggctttgaaaccagacctggtgaatgtaattaaggatgtcagtccaccaccgcttgtcgtgatggctttcagcatgaagacaatgcagaatgcaaagaaccatcaaaatgagattattgctatggcagctttggtccatcacagttttgcattggataaagcagccccaaagcctccctttcagtcacacttctgtgttgtgtctaaaccaaaggactgtatttttccatatgctttcaaagaagtcattgagaaaaagaatgtgaaggttgaggttgctgcaacagaaagaacactgctaggttttttccttgcaaaagttcacaaaattgatcctgatatcattgtgggtcataatatttatgggtttgaactggaagtactactgcagagaattaatgtgtgcaaagctcctcactggtccaagataggtcgactgaagcgatccaacatgccaaagcttgggggccggagtggatttggtgaaagaaatgctacctgtggtcgaatgatctgtgatgtggaaatttcagcaaaggaattgattcgttgtaaaagctaccatctgtctgaacttgttcagcagattctaaaaactgaaagggttgtaatcccaatggaaaatatacaaaatatgtacagtgaatcttctcaactgttatacctgttggaacacacctggaaagatgccaagttcattttgcagatcatgtgtgagctaaatgttcttccattagcattgcagatcactaacatcgctgggaacattatgtccaggacgctgatgggtggacgatccgagcgtaacgagttcttgttgcttcatgcattttacgaaaacaactatattgtgcctgacaagcagattttcagaaagcctcagcaaaaactgggagatgaagatgaagaaattgatggagataccaataaatacaagaaaggacgtaagaaagcagcttatgctggaggcttggttttggaccccaaagttggtttttatgataagttcattttgcttctggacttcaacagtctatatccttccatcattcaggaatttaacatttgttttacaacagtacaaagagttgcttcagaggcacagaaagttacagaggatggagaacaagaacagatccctgagttgccagatccaagcttagaaatgggcattttgcccagagagatccggaaactggtagaacggagaaaacaagtcaaacagctaatgaaacagcaagacttaaatccagaccttattcttcagtatgacattcgacagaaggctttgaagctcacagcgaacagtatgtatggttgcctgggattttcctatagcagattttacgccaaaccactggctgccttggtgacatacaaaggaagggagattttgatgcatacgaaagagatggtacaaaagatgaatcttgaagttatttatggagatacagattcaattatgataaacaccaatagcaccaatctggaagaagtatttaagttgggaaacaaggtaaaaagtgaagtgaataagttgtacaaactgcttgaaatagacattgatggggttttcaagtctctgctactgctgaaaaaaaagaagtacgctgctctggttgttgagccaacgtcggatgggaattatgtcaccaaacaggagctcaaaggattagatatagttagaagagattggtgtgatcttgctaaagacactggaaactttgtgattggccagattctttctgatcaaagccgggacactatagtggaaaacattcagaagaggctgatagaaattggagaaaatgtgctaaatggcagtgtcccagtgagccagtttgaaattaacaaggcattgacaaaggatccccaggattaccctgataaaaaaagcctacctcatgtacatgttgccctctggataaattctcaaggaggcagaaaggtgaaagctggagatactgtgtcatatgtcatctgtcaggatggatcaaacctcactgcaagtcagagggcctatgcgcctgagcagctgcagaaacaggataatctaaccattgacacccagtactacctggcccagcagatccacccagtcgtggctcggatctgtgaaccaatagacggaattgatgctgtcctcattgcaacgtggttgggacttgaccccacccaatttagagttcatcattatcataaagatgaagagaatgatgctctacttggtggcccagcacagctcactgatgaagagaaatacagggactgtgaaagattcaaatgtccatgccctacatgtggaactgagaatatttatgataatgtctttgatggttcgggaacagatatggagcccagcttgtatcgttgcagtaacatcgattgtaaggcttcacctctgacctttacagtacaactgagcaacaaattgatcatggacattagacgtttcattaaaaagtactatgatggctggttgatatgtgaagagccaacctgtcgcaatcgaactcgtcaccttccccttcaattctcccgaactgggcctctttgcccagcctgcatgaaagctacacttcaaccagagtattctgacaagtccctgtacacccagctgtgcttttaccggtacatttttgatgcggagtgtgcactggagaaacttactaccgatcatgagaaagataaattgaagaagcaattttttacccccaaagttctgcaggactacagaaaactcaagaacacagcagagcaattcttgtcccgaagtggctactccgaagtgaatctgagcaaactcttcgctggttgtgccgtgaaatcctaa

SEQ ID NO: 48015 - DNA, 3108 bp, Homo Sapiens
ggggctatgtctctcatctcatggcttcggtggaacgaggccccatcccggctgtccaccaggagccctgctgagatggtgctggagacgcttatgatggagctgacggggcagatgcgagaggctgagaggcagcagcgggagcgcagcaatgcggtcagaaaggtctgcaccggtgtggactacagctggctggccagcacaccccggtccacctatgacctcagccccattgagcggttgcagctggaagatgtctgcgttaagatccacccatcctattgtgggcctgctatcctcaggttccggcagctgctggcggagcaggagcccgaggtgcaggaggtgtcccagctcttccgctcggtgctgcaggaggtcctggagaggatgaagcaggaagaggaggcccacaagctgacgcgccagtggagcctgcggccccgcggcagcctggccaccttcaagacccgcgcgcgcatctcgcccttcgccagcgacatcaggaccatctccgaggacgtggagcgggacacaccgccgccactgcggtcctggagcatgcccgaattccgggcgcccaaagccgactgaccccggccgcttccctgcccagaagcggagccttctgcagggggaatgataggccggtgaccggagcgccgggccctggaacctccccacctaggcctgacgaggagacccaagaggcggccccatcccaagacgctgctataaaatgaagcgactccctgccccatcctcttcctctggccacaaagctgagttaggtcgtagagcggcaccgccctctccctctcctgcgctagtctgcaggagcagccccttccctaactggcagattcaaggttttggaagacagaccattgccccatcctcatctcctggttctgtctaaaaggggacagttgccctgccttttggcaagacctaggttctcaccccaatttcagggatgtcccattcacccccctacccccatccccaatgagaagggacctgttggctggtatgccttcttgctagtgactggctgagctcaccactgcaggtgggtcacacacagcctcataggcaggcacagctggaagggaccagagagacatttagatccactctcttcagctagtaaatgtggaacttgaggctcagagagggacacttcttctgcctttaactgcagccagctcctcatgaacagtgagattgttcctgcatgaatagtgtctgttcctgagtttggaatcctgggctatgaagggacaggtccaaaggctacatctctacctacctgtggcctgatccatctcttaccttggcagtgggatgagaatctaagctgctctccaagaagtgtagctaggggtggaggtaggttactcattaccccacgccacaatgtcatcgcatgggctgtggccagtccctaacagcttcttccagaggctcagctccaaggacttcagatgctgccctaaagagcccaggtttctcaattccagggttccgctttctgcagctggtcacacctgctctctggctttctccagaaagtgatgcccaaacccctgactgaccttgaggcagctgagtgaaatgttctagaagagcttcctgcagcttcattgtccttcccttttctaacatggttaggccttgatgatgggcatgtggattacccaatgtgtggatcacccatggaaaatctggaaggccaggaggccttcccacacactctggggttgaagtggggtgtaagggggatgggtggggaagtgtctaccctcaactaccagcacacatgcagaaaatgcaagtggaccttaatagtagcctaaataaaatacccggaggagatataatcaacaggggggaaaagtgtgtattccctcagtggaaaaaagtttttttgaatgatttggttttgaacttcccttttgaagtttttttggattttcacttgaatctggacagagaatcataggatggtggaaaacctctgatccaacactatcaagatgaaagagttgattggcttattaatgtaattggtagaagttgagaatcacttaaaatatacatcttaaacatcttacgtattttatttgaagacataaaaagttcacttggttgccaaacttttttttttttttttgagactgagtctcactctgttacccaggctgcagtgcagtggcgtgatctcggctcaccacaacctttgcctcccgggttcaagtgattcttctgcctcagcctcctaagtagctgggactacaggcacgtgccatcaccccagctaatttttgtatttttattagagatggggtttcactatgttgcccagaatggtcttgaactcctgacctcgtgatccactcgccttggcctcccaaagtgctgggattacagacatgagccactgtgcctggctgccaaacttttgatgtgggtccaagctgtgcttttttgtgacctatatgttttgtctggtgggagttctacacttaagttttcttggtttgcactttaatcataacaataagaacaactggcgtaaaagagttttggaacaagcagaagtgacccttggtaagcagactgctcagctggtaggggcaaaagtgttgggggaggattagaaaaaggcctccacattgtgggctttccgggtgccctggatgtgggtcagcaaatgttttagaggaagtagttaacctggagggagattcaaaggaggctggataagagaatgtctatttttctccttccctatcaccttacatgtacctattctccccaaagagaaggaagaccttaggctttcaatgtggtgttctttcttaagtttaagtaactggctgccaatgaaaaccttcccttcgagccgcaggcatgtggacagaatccaccaccctccttagacactcctcagactactacaggctatccccagctggtggctctcaaattcatgagggtccagaagttgttcctctggattcaggttgttaaagggactaatgaggtctgcttccattactattattgaaacctcaataaccacaaataaaagaacaaaaagtt

SEQ ID NO: 48016 - DNA, 939 bp, Homo Sapiens
atgagtgcaaacacctccatggtgactgagtttcttcttctcggcttctcccacctggccgacctccagggcttgctcttctctgtctttctcactatctacctgctgaccgtggcaggcaatttcctcattgtggtgctggtctccactgatgctgccctccagtcccctatgtacttcttcctgcgcaccctctcggccttggagattggctatacgtctgtcacggtccccctgctacttcaccacctccttactggccggcgccacatctctcgctctggatgtgctctccagatgttcttcttcctcttctttggcgccacggagtgctgcctcctggcagccatggcctatgaccgctatgcagccatctgtgaacccctccgctacccactgctgctgagccaccgggtgtgtctacagctagctgggtcggcgtgggcctgtggggtgctggtggggctgggccacacccctttcatcttctctttgcccttctgcggccccaataccatcccgcagttcttctgtgagatccagcctgtcctgcagctggtatgtggagacacctcgcttaatgaactgcagattatcctggcaacagccctcctcatcctctgcccctttggcctcatcctgggctcctacgggcgtatcctcgttaccatcttccggatcccatctgttgcgggccgccgcaaggccttctccacctgctcctcccacctgatcgtggtctccctcttctatggcaccgcactctttatctatattcgccctaaggccagctacgatccggccactgaccctctggtgtccctcttctatgctgtggtcacccccatcctcaaccccatcatctacagcctgcggaacacagaggtcaaagctgccctaaagagaaccatccagaaaacggtgcctatggagatttga

SEQ ID NO: 48017 - DNA, 426 bp, Homo Sapiens
atgatctcagctcactgcagcaacctccacttcctgggttcaagcgagtctcctacattggcctcccaagtaggtgagattacaggcactcaccaccacacgcggctaatttttgtatttttggtagagacggggtttcaccatgttggccacgctggtcttgaactcctgacctcaagtgatccacccaccttggcctcccgaagtgctgggattacaggcatgagccaccgtgcccggcctcatggaatttctaggggtgagcaggtgaccctggggctgccacttgagctcctggagtgtgtgtcttggcccctgtgtggttctccattaagaaaagctcagatagtctcaaccccaccctctccccttgctgcactcagagtaccagtgggagctgaaggatggggaggaacagagcagtga

SEQ ID NO: 48018 - DNA, 3470 bp, Homo Sapiens
agccaacaccgcctttctcagcatggagacctttgagcccatcagccaagagcccctcagccaagccagctatgacaaagccccagacccagttcctgagctccaagactcgttctatgcagaactgcaacgtgcagagagcctccaagagaagagcataaaagaggccaagaccaaatgcaggacaattgcatccctgctcactgcagcccccaacccccactccaaaggggtacttatgtttaagaaacggcggcagagagccaagaagtacaccctggtgagcttcggggctgctgctgggacaggcgctgaggaggaggacggcgttccccccacgagtgagtccgagctggacgaagaagccttctctgacgcccgcagcctcaccaatcaatctgactgggacagtccctatctggacatggagcttgccagggcgggctcaagagcatcagagggccagggctctgggctgggagggcagctgagtgaggtctctgggcgaggggtgcagctctttgaacagcagcgccagcgcgcagactccagcacccaggaactggcacgggtcgaaccagcagccatgctcaacggggaaggcctgcagtcaccacctcgggcccagagtgctcccccagaggcagctgtgctcccacccagccccttgccggcgcctgtagccagccccagacccttccaaccaggtggtggagccccgaccccagctccaagcatctttaaccggtcagccaggccctttaccccgggcctacaagggcagcggccaactaccacctcggttattttccggcctttagcccccaaaagggcgaacgacagcctggggggcctcagccccgccccaccccccttcttgtcttcgcaggggcccacccctctgcccagcttcacttcaggggttcccagccacgcgccagtctctggttcccccagcaccccacgctcctcgggccctgtgacagccaccagctccctgtacatcccagcccctagtcggcctgtcaccccaggtggagctccagagccccccgctcctcctagcgcagctgccatgacctccaccgcttctatcttcctatctgcgcctttgcgaccctctgcgcgcccagaggcgcctgccccaggcccaggggctcctgagccccccagcgctcgcgagcagcgcatctctgtgccagctgcccgcacgggtatcctgcaggaggcccggcgccgggggacccggaagcagatgttccggccgggaaaggaggagacgaagaactcgcccaaccccgagctgctatcgctggtacagaacctggatgaaaagcctcgggccgggggtgcagaatctggtcctgaagaagatgctctgagcctcggggctgaagcctgcaacttcatgcagccagtaggggccaggagttacaagaccctgcctcacgtgacacctaagaccccccctccaatggctcccaagaccccgccccctatgactcctaagactccacccccagtggctcctaagcccccatctcgagggctccttgatgggctcgtgaatggggcagcctcttcggctggaatccctgagccaccaaggctgcagggcaggggtggggagctgtttgctaagcggcagagccgtgcggacaggtatgtggtggaaggtacacctggtcctggtcttggccctcggcctagaagtccttctcctaccccgtctctgcccccttcctggaaatattcacccaacatccgtgccccgcctcctattgcttacaacccactgctctctccctttttcccccaggcggcccgaactctccctaaggcccaatcccaggggcctcgggcaacacccaagcagggcatcaaggctctagattttatgcggcatcagccctatcaacttaaaactgccatgttctgttttgatgaggttcccccgactcctggccctatcgcctcagggtcccccaaaactgcccgagtccaggagattcgccggttttccactccggcaccccagcccactgcagaacccctggctcccactgtgcttgccccccgagcagccactacactggatgagcccatctggagaacagaactggcctcagcccctgttcctagcccagcccctcctccagaggctcccaggggccttggggcttctcccagctcctgcggtttccaggtagccaggccccgattttcagccaccagaacaggattgcaagctcatgtgtggaggcctggggcagggcaccagtgaacaggcacaggtcccaggaccaaggagaggtggaacatccagttcctaaagttgcttctcctaccctatcccatcccctgtcacgcatctggaagctaaattgcctcctgccagagatggtttccaagttgatgtccccttcccccaccttcctcctcactctctacctccctgccgctttccaaccaagtatgtctgctttggtatctttgcctctctttgtctctgcatttcctttcctggatctctgtctttatttccaggcttctccacccatattcctccacagatctctcttccttgacatttgtgcttttctccctgggcctcattttaatgttcagtgagaagtaaacagagcagaagtgaccactgggacttcaggcaagaagctcaccaccaggcacacagcaaagggactgaactgacccctgtttgcactaagccacccccaccccccactctgctttcccaagcttgactggcatatacctaggcctgtgtgtgtgtgtgtgtgtgtgtgtgtgtgtgtgtgtgtgctcttccgtctaaggcatgaataagaggggaggtcaaaataaagacccaatctgaggccgggcacggtggctcacgccggtaatcccagcactttgggaggccgaggcgggcggatcacgaggtcaggagatcgagaccatcctggctaacacggtgaaaccccatttccactaaaaatacaaaaaattagctgggcgtggtggcgagcgcctgtagtcccagctactcgggaggctgaggcaggagaatggcatgaacctggaaggcggagcttgcagtgagctgagattgcgccactgcactccagcctgggcgacggagcgagactctgtctcaaaacaaacaaacaaacaaaagacccaatctgagtcttatcgttgtactgatagaagggtcagatatccccacatggagttgagtgggagaaagagattcactagagaataactccttagagaccaatgtctgtagcaggtgtacagcatcttgtgaaagttatggagcatgaaaagactgaagggccaggacagtttgcatgggctgagttataccagctagaccaggaatagaacaaagaattctatacctcaggatttcaaaaagttagcaacttgagaggccagtgctgagcaacccagtacccagg

SEQ ID NO: 48019 - DNA, 270 bp, Homo Sapiens
gccagcggcttccggctccccgaggacccctcccatcctcgtgtcctcatcgggcctggcacaggcatcgctcccttcctcagtttctggcagcagcggctccatgactcccagcaaaagggagtgcagggaggccgcatgaccccggtgttcgagtgccgcagcccaaatgaggaccacatctaccaggaggagatgctggagatggctcggaagggggtgctgcctgcggtgcccacagcctattcctgcctgcctggcaagcccaag

SEQ ID NO: 48020 - DNA, 273 bp, Homo Sapiens
atgcattctggcactttggaagcccttcaggttttacactgcacccaaaatccaaccccaagtgaccacagcagtgagctacaaacagggtcccagtgccccagggctgtagcctgcagcttagaagtgcactgctggtggctatgctcatcacttgaacaaggaaggagactacactctctgcagtcttggagagctggggcacacaaatgcacgggcttgtgtaggttcctccacagggttgtttcagtgaaggtgtggcctgttgtccta

SEQ ID NO: 48021 - DNA, 801 bp, Homo Sapiens
gtctgggcccaggtgtcggccacggcctcgccctcggggtccctgggcgccccggactgccccgaggtgtgcacgtgcgtgccgggaggcctggccagctgctcggcactctcgctgcccgccgtgcccccgggcctgagcctgcgcctgcgcgcgctgctgctggaccacaaccgcgtccgtgcgctgccgccaggtgccttcgcgggagcgggcgcgctacagcgcctggacctgcgcgagaacgggctgcactcggtgcatgtgcgagccttctggggcctgggcgcgctgcagctgctggacctgagcgccaaccagctggaagcactggcaccagggactttcgcgccgctgcgcgcgctgcgcaacctctcattggccggcaaccggctggcgcgcctggagcccgcggcgctaggcgcgctcccgctgctgcgctcactcagcctgcaggacaacgagctggcggcactcgcgccggggctgctgggccgcctgcccgctctagacgcgctgcacctgcgcggcaacccttggggctgcgggtgcgcgctgcgcccgctctgcgcctggctgcgccggcacccgctgcccgcgtcagaggccgagacggtgctctgcgtgtggccgggacgcctgacgctcagccccctgactgccttttccgacgccgcctttagccattgcgcgcagccgctcgccctgcgggacctggccgtggtttacacgctcgggccggcctccttcctcgtcagcctggcttcctgcctggcgctgggctctgggctcaccgcctgc

SEQ ID NO: 48022 - DNA, 862 bp, Homo Sapiens
caggaaatcgagactcatgactcccagagaggatggcatctagaaggtagacgatcaagggtggaatctacagtccgtgagccctgacttcttgccttcgtctcaaatagactctgcagccagccatctatgcagcgccccagtggctttgaaatgcaacagaaaccatcacccccggaccgtgggctccatgccagtgggcaaagcacagcctgggaagaattggtttgcagccaggcagtcctccatccagtcttgactttggcacttgtgatatgacttgcacagaccaaaaaagtcactctcaaagagctctcggcacacagaccccagctttacaaggaccccagctccttaacacagatcccagctccgaggaaactcgtcccccccacgttaatcctgaccgactttgccacatggagccagcaaaccatttctggcatgcaggggacctccaagcaatgatatccaaggaattccatctggcagccacccaggatgactgcagaaaaggaaggacacaggaggatatcctggttccctcttcccacccagagctgtttgcatcagtcctgccaatggctccggaagaagctgccaggctccagcaacctcagccccttcctcctccctcaggaatccacctatccgcctctaggaccttggctccaactctattgtactcgtctcctccctcccattctccttttggtctcagctccttgatctaagcctcccagagagacccctagaacgtttccctcaaggacctttctgcctggaagtctgttagcctttcagaagtaacatgtccaaaataaaatttgattcctcccaggttgttccctgcctggtccgc

SEQ ID NO: 48023 - DNA, 315 bp, Homo Sapiens
catgcatatgcgctagaacttctatttgatcagttgcatgaaggagctaaagctcttgatgtaggatctggaagtggaatccttactgcatgttttgcacgtatggttggatgtactggaaaagtcataggaattgatcacattaaagagctagtagatgactcaataaataatgtcaggaaggacgatccaacacttctgtcttcagggagagtacagcttgttgtgggggatggaagaatgggatatgctgaagaagccccttatgatgccattcatgtgggagctgcagcccctgttgtaccccaggcggtg

SEQ ID NO: 48024 - DNA, 2119 bp, Homo Sapiens
ctgggaagctctgaagtttccataattcctgggctccagaaagaagaaaaggcggccgtggagagacgaagacttcatgtgctgaaagctctgaagaagctaaggattgaggctgatgaggccccagttgttgctgtgctgggctcaggcggaggactgcgggctcacattgcctgccttggggtcctgagtgagatgaaagaacagggcctgttggatgccgtcacgtacctcgcaggggtctctggatccacttgggcaatatcttctctctacaccaatgatggtgacatggaagctctcgaggctgacctgaaacatcgatttacccgacaggagtgggacttggctaagagcctacagaaaaccatccaagcagcgaggtctgagaattactctctgaccgacttctgggcctacatggttatctctaagcaaaccagagaactgccggagtctcatttgtccaatatgaagaagcccgtggaagaagggacactaccctacccaatatttgcagccattgacaatgacctgcaaccttcctggcaggaggcaagagcaccagagacctggttcgagttcacccctcaccacgctggcttctctgcactgggggcctttgtttccataacccacttcggaagcaaattcaagaagggaagactggtcagaactcaccctgagagagacctgactttcctgagaggtttatggggaagtgctcttggtaacactgaagtcattagggaatacatttttgaccagttaaggaatctgaccctgaaaggtttatggagaagggctgttgctaatgctaaaagcattggacaccttatttttgcccgattactgaggctgcaagaaagttcacaaggggaacatcctcccccagaagatgaaggcggtgagcctgaacacacctggctgactgagatgctcgagaattggaccaggacctccctggaaaagcaggagcagccccatgaggaccccgaaaggaaaggctcactcagtaacttgatggattttgtgaagaaaacaggcatttgcgcttcaaagtgggaatgggggaccactcacaacttcctgtacaaacacggtggcatccgggacaagataatgagcagccggaagcacctccacctggtggatgctggtttagccatcaacactcccttcccactcgtgctgcccccgacgcgggaggttcacctcatcctctccttcgacttcagtgccggagatcctttcgagaccatccgggctaccactgactactgccgccgccacaagatcccctttccccaagtagaagaggctgagctggatttgtggtccaaggcccccgccagctgctacatcctgaaaggagaaactggaccagtggtgatgcattttcccctgttcaacatagatgcctgtggaggtgatattgaggcatggagtgacacatacgacacattcaagcttgctgacacctacactctagatgtggtggtgctactcttggcattagccaagaagaatgtcagggaaaacaagaagaagatccttagagagttgatgaacgtggccgggctctactacccgaaggatagtgcccgaagttgctgcttggcatagatgagcctcagcttccagggcactgtgggcctgttggtctactagggccctgatgtccacctggccttcctgttcttcactcccttcagccacacgcttcatggccttgagttcaccttggctgtcctaacagggccaatcaccagtgaccagctagactgtgattttgatagcgtcattcagaagaaggcgtccaaggagctgaaggtggtgaaatttgtcctgcaggtccctcgggagatcctggagctggagcatgagtgtctgacaatcagaagcatcatgtccaatgtccagatggccagaatgaatgtgatagttcagaccaatgccttccactgctcctttatgactgcacttctagccagtagctctgcacaagttagctctgtagaagtaagaacttgggcttaaatcatgggctatctctccacagccaagtggagctctgagaatacaacaagtgctcaataaatgcttgctgattgactga

SEQ ID NO: 48025 - DNA, 3933 bp, Homo Sapiens
gccgctccgggtacctgagggacgcgcggccgcccgcggcaggcggtgcagcccccccaccccttggagccaggcgccggggtctgaggatagcatttctcaagacctgacttatggagcacttgtaacctgagatatttcagttgaaggaagaaatagctcttctcctaagatggaatctgtggtttgggaatgtggttgatcaacttgatatgttggccaaatgtgccccatgtaataaaatgaaaagaagagacaagatgatgtcattttcccatattgtgaaaccaaaaacaaacgccttttgtgagaccaagctaacaaacctctgacggtgcgaagagtatttaactgtttgaagaatttaacagtaagatacagaagaagtaccttcgagctgagacctgcaggtgtataaatatctaaaatacatattgaataggcctgatcatctgaatctccttcagacccaggaaggatggctatgacttggattgtcttctctctttggcccttgactgtgttcatggggcatataggtgggcacagtttgttttcttgtgaacctattaccttgaggatgtgccaagatttgccttataatactaccttcatgcctaatcttctgaatcattatgaccaacagacagcagctttggcaatggagccattccaccctatggtgaatctggattgttctcgggatttccggccttttctttgtgcactctacgctcctatttgtatggaatatggacgtgtcacacttccctgtcgtaggctgtgtcagcgggcttacagtgagtgttcgaagctcatggagatgtttggtgttccttggcctgaagatatggaatgcagtaggttcccagattgtgatgagccatatcctcgacttgtggatctgaatttagctggagaaccaactgaaggagccccagtggcagtgcagagagactatggtttttggtgtccccgagagttaaaaattgatcctgatctgggttattcttttctgcatgtgcgtgattgttcacctccttgtccaaatatgtacttcagaagagaagaactgtcatttgctcgctatttcataggattgatttcaatcatttgcctctcggccacattgtttacttttttaacttttttgattgatgtcacaagattccgttatcctgaaaggcctattatattttatgcagtctgctacatgatggtatccttaattttcttcattggatttttgcttgaagatcgagtagcctgcaatgcatccatccctgcacaatataaggcttccacagtgacacaaggatctcataataaagcctgtaccatgctttttatgatactctatttttttactatggctggcagtgtatggtgggtaattcttaccatcacatggtttttagcagctgtgccaaagtggggtagtgaagctattgagaagaaagcattgctgtttcacgccagtgcatggggcatccccggaactctaaccatcatccttttagcgatgaataaaattgaaggtgacaatattagtggcgtgtgttttgttggcctctacgatgttgatgcattgagatattttgttcttgctcccctctgcctgtatgtggtagttggggtttctctcctcttagctggcattatatccctaaacagagttcgaattgagattccattagaaaaggagaaccaagataaattagtgaagtttatgatccggatcggtgttttcagcattctttatctcgtaccactcttggttgtaattggatgctacttttatgagcaagcttaccggggcatctgggaaacaacgtggatacaagaacgctgcagagaatatcacattccatgtccatatcaggttactcaaatgagtcgtccagacttgattctctttctgatgaaatacctgatggctctcatagttggcattccctctgtattttgggttggaagcaaaaagacatgctttgaatgggccagtttttttcatggtcgtaggaaaaaagagatagtgaatgagagccgacaggtactccaggaacctgattttgctcagtctctcctgagggatccaaatactcctatcataagaaagtcaaggggaacttccactcaaggaacatccacccatgcttcttcaactcagctggctatggtggatgatcaaagaagcaaagcaggaagcatccacagcaaagtgagcagctaccacggcagcctccacagatcacgtgatggcaggtacacgccctgcagttacagaggaatggaggagagactacctcatggcagcatgtcacgactaacagatcactccaggcatagtagttctcatcggctcaatgaacagtcacgacatagcagcatcagagatctcagtaataatcccatgactcatatcacacatggcaccagcatgaatcgggttattgaagaagatggaaccagtgcttaatttgtcttgtctaaggtggaaatcttgtgctgtttaaaaagcagattttattctttgccttttgcatgactgatagctgtaactcacagttaacatgctttcagtcaagtacagattgtgtccactggaaaggtaaatgattgcttttttatattgcatcaaacttggaacatcaaggcatccaaaacactaagaattctatcatcacaaaaataattcgtctttctaggttatgaagagataattatttgtctggtaagcatttttataaacccactcattttatatttagaaaaatcctaaatgtgtggtgactgctttgtagtgaactttcatatactataaactagttgtgagataacattctggtagctcagttaataaaacaatttcagaattaaagaaattttctatgcaaggtttacttctcagatgaacagtaggactttgtagttttatttccactaagtgaaaaaagaactgtgtttttaaactgtaggagaatttaataaatcagcaagggtattttagctaatagaataaaagtgcaacagaagaatttgattagtctatgaaaggttctcttaaaattctatcgaaataatcttcatgcagagatattcagggtttggattagcagtggaataaagagatgggcattgtttcccctataattgtgctgtttttataacttttgtaaatattactttttctggctgtgtttttataacttatccatatgcatgatggaaaaattttaatttgtagccatcttttcccatgtaatagtattgattcatagagaacttaatgttcaaaatttgctttgtggaggcatgtaataagataaacatcatacattataaggtaaccacaattacaaaatggcaaaacattttctctgtattcattgttgtatttttctacagtgagatgtgatcttgccaaagccaccagaccttggcttccaggccctcctgtagtgagttgattgtctgcacttgccttgcccaatagccagtaggctacagcttttgccccacacccttattttcagattctggatcattcttgtttacaactgaaatatatataacctcagtccaaagtggtgattgatttgagtatttgaaaattgttgtagctaaatgaagcatgattagtcttagtatgaatatcatttaatctttaaaaaatcaagtaaaaatgtttatctgataatgtttaaataatttacaatataaactgtaaaacttattaggcatgaaatcaatcagaagagaaagaaaaatgctggaacatgcttgatgtattatgtaaaaagcatatttaaacaagggtcctcaaccctgactgcagataagaatcacttgggttacttcagatgcctaacaccttcctctcatacaaataagaattggtagctttcttaaaaaaaaaaaaaaaaaaaaaaa

SEQ ID NO: 48026 - DNA, 2108 bp, Homo Sapiens
ggaagaggaacaagtgtgggaaaagggagaggaagccggagctaaatgacaggatgcaggcgacttgagacacaaaaagagaagcgttcctctcggatccaggcattgcctcgctgctttcttttctccaagacgggctgaggattgtacagctctaggcggagttggggctcttcggatcgcttagattctcctctttgctgcatttccccccacgtcctcgttctcccgcgtctgcctgcggacccggagaagggagaatggagagggggctgccgctcctctgcgccgtgctcgccctcgtcctcgccccggccggcgcttttcgcaacgataaatgtggcgatactataaaaattgaaagccccgggtaccttacatctcctggttatcctcattcttatcacccaagtgaaaaatgcgaatggctgattcaggctccggacccataccagagaattatgatcaacttcaaccctcacttcgatttggaggacagagactgcaagtatgactacgtggaagtcttcgatggagaaaatgaaaatggacattttaggggaaagttctgtggaaagatagcccctcctcctgttgtgtcttcagggccatttctttttatcaaatttgtctctgactacgaaacacatggtgcaggattttccatacgttatgaaattttcaagagaggtcctgaatgttcccagaactacacaacacctagtggagtgataaagtcccccggattccctgaaaaatatcccaacagccttgaatgcacttatattgtctttgtgccaaagatgtcagagattatcctggaatttgaaagctttgacctggagcctgactcaaatcctccaggggggatgttctgtcgctacgaccggctagaaatctgggatggattccctgatgttggccctcacattgggcgttactgtggacagaaaacaccaggtcgaatccgatcctcatcgggcattctctccatggttttttacaccgacagcgcgatagcaaaagaaggtttctcagcaaactacagtgtcttgcagagcagtgtctcagaagatttcaaatgtatggaagctctgggcatggaatcaggagaaattcattctgaccagatcacagcttcttcccagtatagcaccaactggtctgcagagcgctcccgcctgaactaccctgagaatgggtggactcccggagaggattcctaccgagagtggatacaggtagacttgggccttctgcgctttgtcacggctgtcgggacacagggcgccatttcaaaagaaaccaagaagaaatattatgtcaagacttacaagatcgacgttagctccaacggggaagactggatcaccataaaagaaggaaacaaacctgttctctttcagggaaacaccaaccccacagatgttgtggttgcagtattccccaaaccactgataactcgatttgtccgaatcaagcctgcaacttgggaaactggcatatctatgagatttgaagtatacggttgcaagataacagattatccttgctctggaatgttgggtatggtgtctggacttatttctgactcccagatcacatcatccaaccaaggggacagaaactggatgcctgaaaacatccgcctggtaaccagtcgctctggctgggcacttccacccgcacctcattcctacatcaatgagtggctccaaatagacctgggggaggagaagatcgtgaggggcatcatcattcagggtgggaagcaccgagagaacaaggtgttcatgaggaagttcaagatcgggtacagcaacaacggctcggactggaagatgatcatggatgacagcaaacgcaaggcgaagtcttttgagggcaacaacaactatgatacacctgagctgcggacttttccagctctctccacgcgattcatcaggatctaccccgagagagccactcatggcggactggggctcagaatggagctgctgggctgtgaagtggaaggtggcaccactgtgctggccacagaaaagcccacggtcatagacagcaccatacaatcaggtatcaaataaaatacgaaatgtgacaga

SEQ ID NO: 48027 - DNA, 700 bp, Homo Sapiens
aggagctctatggtgactttgaagacttggaaacaggggacgtgcacaagggaaaatcgggccccgatactcaggaatgaagatatagagaaacaagaaagaaattgaccctgatgaagaagaaagtgccaagaaaaagcatttggataagaagagaaaattgaaggagatgtttgatgtggaatatgatgaaggagaaagcacatattttgatgatcttaaaggagaaatgcagaaacaagcacagttgaatcatgcagaatttgaagatcaagatgatgaagccagagttcagtatgagggttttcgacctgggatgtacgtccgcgttgagattgaaaatgttccctgtgaatttgtgcagaacattgacccccattaccccattatcctgggtggcttgggcaacagcgagggaaatgttggatacgtgcagatgcgtctgaagaaacatcgctggtataagaaaatcctcaagtcccgagatccaatcatattttctgtagggtggaggaggtttcagaccatcccgctctattatatcgaagaccacaatggaagacaaaggcttctaaagtataccccacagcacatgcattgtggagcagccttttgggaccctatcactccacagggaactggtttcttggcaatacagtctgtcagtggcataatgcctgattttcggatagctgccaca

SEQ ID NO: 48028 - DNA, 732 bp, Homo Sapiens
ctccctggaggctcctgcatgacagcgctgacagtgacactgatggtgctgagctccccactggctttgtctggggacacccgaccacgtttcctgtggcagcctaagagggagtgtcatttcttcaatgggacggagcgggtgcggttcctggacagatacttctataaccaggaggagtccgtgcgcttcgacagcgacgtgggggagttccgggcggtgacggagctggggcggcctgacgctgagtactggaacagccagaaggacatcctggagcaggcgcgggccgcggtggacacctactgcagacacaactacggggttgtggagagcttcacagtgcagcggcgagtccaacctaaggtgactgtatatccttcaaagacccagcccctgcagcaccacaacctcctggtctgctctgtgagtggtttctatccaggcagcattgaagtcaggtggttcctgaacggccaggaagagaaggctgggatggtgtccacaggcctgatccagaatggagactggaccttccagaccctggtgatgctggaaacagttcctcgaagtggagaggtttacacctgccaagtggagcacccaagcgtgacaagccctctcacagtggaatggagagcacagtctgaatctgcacagagcaagatgctgagtggagtcgggggctttgtgctgggcctgctcttccttggggccgggctattcatctac

SEQ ID NO: 48029 - DNA, 486 bp, Homo Sapiens
ggcaacgcaggcaccatgatcccggctctgccttccggcgacccggagctcattgctctcatcctggagtggctcaagagcggcccgtttggcagcttctgtcgatgctgcctggcccctgtggacaccaagccagcttaccaaaaccagaggcagaaagctgagggttcggtgtccacacacctggatgagcagaactggaatcttatgatgcgcaaaagcctattgcgaaatggtcagaggcagagtgagattcagtcagggacattggaagctggagtagacagggttatttctcaggcagaggatccaaaattaaaccacatcctcaggccaccaacggaaggagcaagtcatgagttcctgggtgcccagaagacagcaatggtgccagcaccccctttagagcccgcaccaggaccctccagctccagcctagggcggttctcaggaacatgcccaacgccttttgaaagctctatttaa

SEQ ID NO: 48030 - DNA, 939 bp, Homo Sapiens
atggcaagggagaattcgaccttcaactccgacttcatcctcctgggaatcttcaatcacagccccacccacaccttcctcttctttctggtcctggccatcttttcagtggccttcatgggaaactctgtcatggttctcctcatctacctggacacccagctccacacccccatgtacctcctcctcagccaactgtccctcatggacctcatgctcatctgcaccaccgtacccaagatggccttcaactacctgtctggcagcaagtccatttctatggctggttgtgccacacaaattttcttctatacatcactgcttggctctgagtgctttcttttggctgttatggcttatgaccgctacactgccatttgccaccctctaagatacaccaatctcatgagccctaaaatttgtggacttatgactgccttttcctggatcctgggctctacggatggaattattgatgttgtagcaacattttccttctcctactgtgggtctcgggaaatagcccacttcttctgtgacttcccctccctactaatcctctcatgcagtgacacatcaatatttgaaaagattcttttcatctgctgtatagtaatgattgttttccctgttgcaatcatcattgcttcctatgctcgagttatcctggctgtcattcacatgggatctggagagggtcgtcgcaaagcttttactacttgttcctctcacctcttggtggtgggaatgtactatggagcagctttgttcatgtacatacggcccacatctgatcgctccccaacacaggacaagatggtgtctgtattctacaccatcctcactcccatgttgaatcccctcatctacagcctccgcaacaaggaggtgaccagagcattcatgaagatcttaggaaagggcaagtctggagagtga

SEQ ID NO: 48031 - DNA, 738 bp, Homo Sapiens
atggccacccagatggggcagtcttctggaggagaagggctgtttaccggcaatggcaacattggaatggccttgcctaacggcatgtatgacttgcatgatctctctaaagctgaactggcctcacctcatcctgtcttgctggcaaatgcggccttcagtgggaaagtaaatggcagctgctgtgattacctggtcggtgaagaaagacagatggcaaaattgatgcctgttggggatgacagcttttcagatagtgaagaaggagaaggcctcgaaagtgctgaaatgaaaggtgaacctcatgggctgagacgtttggaactcagcgttgtagaacttcagcctgcatttgaagcatcagctgctccagagatttacagctcaaataaagatcttcctcctgaaacacctggaacagaggacagaggcaagaactcgaagaccaaatcctttcgctgtaagtcatgccaatatgaagcagaatctgaagaacagtttgtgcatcacatcagagtgcacagtgccaagaaattttttgtggaagaatctggctcttccactgcagaagagggagatttctccaaggtctgtattcgctgtgaccactgtggctacaataccaatcgatatggtccctatactgcacacctgaaacaccacaccagagctggggataatgagcgagtctacaagtgtatcatctgcacatacacaacagtaaacgatatttggaaa

SEQ ID NO: 48032 - DNA, 783 bp, Homo Sapiens
tgcatgcccattccccaagccatggccctatgccacgacattggctaccagatgcgtctgcccaacttgctggaccacatcacagcagctgaggccatccagcagttggtcagctggctgctcctgcttgcctgggagtgccaccccgatgcccgcctcttcctctgctttacccctgtatgccttgacagggtcatctacccctcctacagcctgtgcgaggccatgcaggccagctgcgagcccatcatggcctgctacagctacccctggccagccatcctgcattgtggacgcttccccttgggccatgatctctgtatcactgctgtggccaacaacggctcccgcctggaccgcccatcgctgcatgccagctgcagggactgcgagttgcaggatgcaggctcctccaaggaggttctggacactctctgcaccagtgactttgatgagtcctgggcctcagtgaaggtcaggttctccaggaccaacagtacttcctctggcccctgggactgcaacctgtactccagactagaggtgctgaagacaggaccactgccccctgcagagctggagcccaccctgcaacgctggctgcagctggatgtcacatgtgtgtacaatctttttcgaggaaggcacacagggacctatgtgttgagtgggaagatggaggcctgctggctgttggtaaccacggcctatgcctggagccagggccaccaaaattttcgactggctgtgcgccattggcaccctcaccagtgccaagaatag

SEQ ID NO: 48033 - DNA, 918 bp, Homo Sapiens
atgtatctggtcacggtgctgaggaacctgctcagcatcctggctgtcagctctgactcccacccccacacacccatgtacttcttcctctccaacctgtgctgggctgacatcggtttcaccttggccacggttcccaagatgattgtggacatggggtcgcatagcagagtcatctcttatgggggctgcctgacacagatgtctttcttggtactttttgcatgtatagtagacatgttcctgactgtgatggcttatgactgctttgtagccatctgtcgccctctgcactacccagtcatcgtgaatcctcacctctgtgtcttcttcgttttggtgtcctttttccttagcctgttggattcccagctgcacagttggattgtgttacaattcaccttcttcaagaatgtggaaatctctaattttgtctgtgagccatctcaacttctcaagcttgcctcttatgacagcgtcatcaatagcatattcatatattttgataatactatgtttggttttcttcccatttcagggatccttttgtcttactataaaattgtcccctccattctaaggatttcatcatcagatgggaagtacaaagccttctcagcctgtggctgtcacctggcagttgtttgcttattttatggaacaggcattggcgtgtacctgacttcagctgtggcaccacccctcaggaatggtatggtggcgtcagtgatgtacgctgtggtcacccccatgctgaaccctttcatctacagcctgagaaacagggacattcaaagtgccctgtggagggtgtgcagcagaacagtcgaatctcatgatctgttccatcctttttcttgtgtggttgagaaagggcaaccacattcaatccctacatctgcaaatcctgccccttag

SEQ ID NO: 48034 - DNA, 1391 bp, Homo Sapiens
ggagcgcccgagcggagaggcggcccgggagcaggggggcggcccccactccggccgggtgcccggcccctggcccctgcctgccctctagatcgccgccgcagccgccgctactgggagtctgcctgttgcaggacgcactagccctccctccatggagttcggcctgctcagcgaggcagaggcccggagccctgccctgtcgctgtcagacgctggcactccgcacccccagctcccagagcacggctgcaagggccaggagcacagcgactcagaaaaggcctcggcttcgctgcccggcggctccccagaggacggttcgctgaaaaagaagcagcggcggcagcgcacgcacttcaccagccagcagctacaggagctagaggcgaccttccagaggaaccgctaccccgacatgagcacgcgcgaggagatcgccgtgtggaccaacctcaccgaggcccgcgtgcgggtgtggttcaagaaccggcgcgccaaatggcggaagcgcgagcgcagccagcaggccgagctatgcaaaggcagcttcgcggcgccgctcggggggctggtgccgccctacgaggaggtgtaccccggctactcgtacggcaactggccgcccaaggctcttgccccgccgctcgccgccaagacctttccattcgccttcaactcggtcaacgtggggcctctggcttcgcagcccgtcttctcgccacccagctccatcgccgcctccatggtgccctccgccgcggctgccccgggcaccgtgccagggcctggggccctgcagggcctgggcgggggcccccccgggctggctccggccgccgtgtcctccggggccgtgtcctgcccttatgcctcggccgccgccgccgccgcggctgccgcctcttccccctacgtctatcgggacccgtgtaactcgagcctggccagcctgcggctcaaagccaaacagcacgcctccttcagctaccccgctgtgcacgggccgcccccggcagccaaccttagtccgtgccagtacgccgtggaaaggcccgtatgagcggccccgcccgtagatcatccccgagggcgggggcaacgattcacagcctccgcggactggggtcattttgactggcttgctcccgccccagggtctgaaaggggtgtttgggcagctggggggcaccggctcaggagagggccttcccctcccagccctgaggggtggactaggccctacacacagaccgcgcccctgggactaaagccaggaacagggaccagctccccgggggccaactcacccttggcccatcccgccttctccaggcttcccctccctcgttttcaaagataaatgaaataaacgtgcgcggactgtcgaa

SEQ ID NO: 48035 - DNA, 396 bp, Homo Sapiens
atgaggtgggttttcagatgtcgtgcctttctggctctccacttctggatcaatgattctgttgccatcttaaaaagaggcagaggttgcagtgagccgagatccacccacctcggcctcccaaaatgttgggattacaggaatgagccactgtacctggccattcttatgttagtttgctcaactgtcatcagaaagtaccacagactgggcagcttcaacaacggagatttattttctcccggtactggaggctggaagtccaacatcaaggtgtcagcagggctggtttcttctgaggcctctctatttggcttgcaaatgccatctgttgcctgtgtcctcacatggtcatccctctgtgtgtgtctgtgtcttaatctcctcctcttataa

SEQ ID NO: 48036 - DNA, 670 bp, Homo Sapiens
accccaaattttgtttttacagcatgatagtagtattgttactttgaaaggattgttcttgatttctttttggggtgtttgtgcgtatttcagtacttccagcggcaatgtaagcaacagaaaggatgagacaaatgctcgagatacttatgtttcatcctttcctcgggcaccaagcacttctgattctgtgcggttgaagtgtagggagatgcttgctgcagctcttcgaacagggggaaaaaaaagtgatcttacttttgtaattttgccttttttccttaacggcctggtacctatatatcaagaaataaggaatacagacatgaaatacaaaaatagagtacgaagtaggatatcaaatcttaaagatgcaaaaaatccaaatttaaggaaaaatgtcctctgtgggaatattcctcctgacttatttgctagaatgacagcagaggaaatggctagtgatgagctgaaagagatgcggaaaaacttgaccaaagaagccatcagagagcatcagatggccaagactggtgggacccagactgacttgttcacatgtggcaaatgtaaaaagaagaattgcacttacacacaggtacaaacccgtagtgctgatgaaccaatgacaacatttgttgtctgtaatgaatgtggaaatcgatggaag

SEQ ID NO: 48037 - DNA, 321 bp, Homo Sapiens
atgatgacgcttgtccccagagccaggacacgtgcaggacaggatcattactctcatccctgccccagattttcacaggtgctgcttacagagggcatcatgacatattgcttgacaaagaacctaagtgatgttaatattctgcataggttgctaaaaaatgggaatgtgagaaataccttgcttcagtccaaagtgggcttgctgacatattatgtgaaactgtacccgggtgaagtgactcttctgactaggcccagcatacaaatgagattatgctgtatcactggctcagtgtcgaggcccagatcacagaagtaa

SEQ ID NO: 48038 - DNA, 1029 bp, Homo Sapiens
atggcgcaggtgctgatcgtgggcgccgggatgacaggaagcttgtgcgctgcgctgctgaggaggcagacgtccggtcccttgtaccttgctgtgtgggacaaggctgaggactcagggggaagaatgactacagcctgcagtcctcataatcctcagtgcacagctgacttgggtgctcagtacatcacctgcactcctcattatgccaaaaaacaccaacgtttttatgatgaactgttagcctatggcgttttgaggcctctaagctcgcctattgaaggaatggtgatgaaagaaggagactgtaactttgtggcacctcaaggaatttcttcaattattaagcattacttgaaagaatcaggtgcagaagtctacttcagacatcgtgtgacacagatcaacctaagagatgacaaatgggaagtatccaaacaaacaggctcccctgagcagtttgatcttattgttctcacaatgccagttcctgagattctgcagcttcaaggtgacatcaccaccttaattagtgaatgccaaaggcagcaactggaggctgtgagctactcctctcgatatgctctgggcctcttttatgaagctggtacgaagattgatgtcccttgggctgggcagtacatcaccagtaatccctgcatacgcttcgtctccattgataataagaagcgcaatatagagtcatcagaaattgggccttccctcgtgattcacaccactgtcccatttggagttacatacttggaacacagcattgaggatgtgcaagagttagtcttccagcagctggaaaacattttgccgggtttgcctcagccaattgctaccaaatgccaaaaatggagacattcacaggttacaaatgctgctgccaactgtcctggccaaatgactctgcatcacaaacctttccttgcatgtggaggggatggatttactcagtccaactttgatggctgcatcacttctgccctatgtgttctggaagctttaaagaattatatttag

SEQ ID NO: 48039 - DNA, 297 bp, Homo Sapiens
aaaccaaacggcaagatgtctgcttatgccttcttcgtgcagacgtgcagagaagaacataagaagaaaaacccagaggtccctgtcaattttgcagaattttccaagaagcgctctgagaggtggaagataatgtccgggaaagagaaatctaaatttgatgaaatggcaaaggtgattaaagtgcgctatgatcgggaaatgaaggattatgaaccagctaagggaggcaagaagaaggatcctaatgcccctaaaaggccaccgtctggattcttcctgttctgttcagaattc

SEQ ID NO: 48040 - DNA, 951 bp, Homo Sapiens
atgagacttatgaaagaggttcgaggcagaaatcaaacagaagtaacagaatttctcctcttaggactttccgacaatccagatctacaaggagtcctctttgcattgtttctgttgatctatatggcaaacatggtgggcaatttggggatgattgtattgattaagattgatctctgtctccacacccccatgtatttctttctcagtagcctctcttttgtagatgcctcttactcttcttccgtcactcccaagatgctggtgaacctcatggctgagaataaggccatttcttttcatggatgtgctgcccagttctacttctttggctccttcctggggactgagtgcttcctgttggccatgatggcatatgaccgctatgcagccatttggaaccccctgctctacccagttctcgtgtctgggagaatttgctttttgctaatagctacctccttcttagcaggttgtggaaatgcagccatacatacagggatgacttttaggttgtccttttgtggttctaataggatcaaccatttctactgtgacaccccgccactgctcaaactctcttgctctgatacccacttcaatggcattgtgatcatggcattctcaagttttattgtcatcagctgtgttatgattgtcctcatttcctacctgtgtatcttcattgccgtcttgaagatgccttcgttagagggcaggcacaaagccttctccacctgtgcctcttacctcatggctgtcaccatattctttggaacaatcctcttcatgtacttgcgccctacatctagctactcaatggagcaagacaaggttgtctctgtcttttatacagtaataatccctgtgctaaatcccctcatctatagtttaaaaaataaggatgtaaaaaaggccctaaagaagatcttatggaaacacatcttgtag

SEQ ID NO: 48041 - DNA, 1509 bp, Homo Sapiens
ccgagcggtgccaggccaggtgtgtgcgtccgtcggtctttccgtgcccacgccggagaccagccccggaggccgcctgggcctatccctgtgccaggcaccatgaagcaggagtctgcagccccgaacaccccgcccacctcgcagtcccctacgccgtccgctcagttcccccgaaacgacggcgaccctcaagcgctgtggattttcgggtacggctccctggtgtggaggcccgacttcgcctacagcgacagccgtgtgggcttcgtgcgcggctacagccgccgtttctggcagggagacaccttccatcggggcagcgacaagatgcctggccgtgtggtgacgctccttgaagatcatgagggctgcacttggggcgtggcataccaagtgcaaggggagcaggtaagcaaggccctgaagtacctgaatgtgcgagaggcagtgcttggtggctacgataccaaggaggtcaccttctatccccaagatgctcctgaccaaccactgaaggcattggcctatgtggccaccccacagaaccctggttacctgggccctgcgcctgaagaggccattgccacgcagatcctggcctgccggggcttctccggccacaaccttgaatacttgctgcgtctggcagacttcatgcagctctgtgggcctcaggcgcaggacgagcacctggcagccatcgtggacgctgtgggcaccatgttgccctgcttctgccccaccgagcaggctctggcgctggtgtgaggggctgagcccctgcggggagtgctcatgtggacatcagggccagacacccactccagtgcacaagacagacttgcgaccgcttgagcccactgagcagatatggtgggtggctggaggcttctctttctcagtccctgcctgtctgccagcctgcagctctcctgcttgacactgacttactacttgaaactttatttattgcaccatgttggtgtggtgggcaggtggagggcctgccctggacacaggggccctgctgagcagtggccccatcctggaacttgaccagattccccccagtgctgctgctaaccccacaccacccaggcctccacctccccagggagtctccaagagcctcgatcctctgctcactcagcccagccatccatagccctgggaattccacctgccaaggatcccagcaggctggatgagggatagtagggcatgaggagaaggagccctgtaaggactgaggccccggccagcccttctcctccaccagttccccagagcagagctggagctgatgcctggacacagctgctgagcctggcctgggcctcttacccacttggttgttttcttgtccctctgtctgtctgtctatctacttgtctgtctgggccactcctgcctgtgtgttggtctattcctgggaagctcatcactacaggccctggcaaccttcccagtctgtcccatactgttacccataaaactatctcttta

SEQ ID NO: 48042 - DNA, 786 bp, Homo Sapiens
cggtgtcttgccttccatcctcccttcatcctgctcaacaccccgaagctggtgaaaacagcagagctgcccccggatcggaactacgtgctgggcgcccaccctcatgggatcatgtgtacaggcttcctctgtaatttctccaccgagagcaatggcttctcccagctcttcccggggctccggccctggttagccgtgctggctggcctcttctacctcccggtctatcgcgactacatcatgtcctttggactctgtccggtgagccgccagagcctggacttcatcctgtcccagccccagctcgggcaggccgtggtcatcatggtggggggtgcgcacgaggccctgtattcagtccccggggagcactgccttacgctccagaagcgcaaaggcttcgtgcgcctggcgctgaggcacggggcgtccctggtgcccgtgtactcctttggggagaatgacatctttagacttaaggcttttgccacaggctcctggcagcattggtgccagctcaccttcaagaagctcatgggcttctctccttgcatcttctggggtcgcggtctcttctcagccacctcctggggcctgctgccctttgctgtgcccatcaccactgtggtgggccgccccatccccgtcccccagcgcctccaccccaccgaggaggaagtcaatcactatcacgccctctacatgacggccctggagcagctcttcgaggagcacaaggaaagctgtggggtccccgcttccacctgcctcaccttcatctag

SEQ ID NO: 48043 - DNA, 966 bp, Homo Sapiens
atgcctcgaggtcagaagagtaagctccgtgcccgtgagaaacgccaccaggctcgttgtgagaatcaggatctgggagctacgcaggccactgtggcagaaggagagtcaccctcccctgcctatcttctctttggtgacagaccccagaatttgcctgctgctgagacacctagcatccctgaagcgcttcagggagccccatccaccaccaatgctattgcacctgtttcatgcagttcaaatgaagatgtttcaggctcaaaatctgatgtggctgccaagggtcaagatgaggaaagtttaagctcctccaagagagctgcgttctttacaaccacagacggagatcctataaaaaggaaggcaaacaagatggtgcaattcctgcagaagaagtttgagaagaaagagcccattttgaaggcagacatgctgaagcgtctccgcagacagtacaagccatgcttccctgagatcctcaagagaacctccgaacatttgacggtgttctttggcgttgaattgaaagaaacggattccagcggcgagtcctacacccttgtcagcaagctgggtctctccaatgaaggaagtctgagtggtgataatgcgctgccgaagtcgggtctcctgatgtcgatcctgggtttgatcttcatgagaggcaaccgtgccactgaagaggaggtctggaagttcctgggtctgttggggatatatgatgggatcctgcattcaatctatggggatgctcggaagatcattactgaagatttggtgcaagataagtacgtggtttaccggcaggtgtgcaacagtgatcctccatgctatgagttcctgtggggtccacgagcctatgctgaaaccaccaagatgagagtcctgcgtgttttggccgagatcaataacaccagtcccggtttatacccacatctgtatgaagacgctttgacagatgag

SEQ ID NO: 48044 - DNA, 588 bp, Homo Sapiens
ctgtatttgccaggccctccaaactctgcagagccagctgtggctcctgctatggcaatagcaggcccctgttgcactcttctttgccagggagcaccactcatagtgggaacgcatataaccctggagggtgactgttgccacagagcatgcctgttggagaaagaggttttgctcggggtgttttttaaaactgttgacttgtataactggaaatcccatagtaagggcttatgggtgagcccacgagagttcgtaactctcatatggagaatattctccacacataaccctacctggccaggtgtgcagaccgtaacagcaaccctgctcacagcagaagataaatctgccaccatggccaaaactaaggaggaggcagacaatatgtgtgctgataacctggtgacctggcccgttgaggtgtcagtcccaatagccaacccaaactgggaccccagtgataacaagaatcaagagtggcttcatcattataggaatatgcttctcagaggtatgagggaagcaagccagtccctggtcaattggggaaatctcagagaaatagaacaaggccctaatgaaaat

SEQ ID NO: 48045 - DNA, 171 bp, Homo Sapiens
atgggccagagcttctcatgcagcctgcaccagcgccgggtcggagagtcagaggccaccctgagatggaccgagatcttcagttggggaggcgcctccggtgagcttgcggccagatgccccctcagtagtcctccgcaacaggtgccgcgcagccgagtggcgggctag

SEQ ID NO: 48046 - DNA, 741 bp, Homo Sapiens
atgtaccaggtgagcggccagcgcccctctggctgcgacgcgccctatggagcccccagcgcagccccgggcccagcccagaccctatccctccttcctgggctggaggtagtaacaggatccactcaccctgcggaggcagcaccagaggagggctccctggaggaggcggcaacccccatgccccaaggcaatggccctggcatcccccagggcctggacagcactgacctcgacgtccccacagaagctgtgacatgccagcctcaggggaaccccttgggctgcaccccacttctgccgaatgactctggccacccctcagagctgggcggcaccagacgggcggggaatggtgccctgggtggccccaaggcccaccggaagttgcagacacacccatctctcgccagccagggcagcaagaagagtaagagcagcagcaaatccaccacctcccagatccccctccaggcacaggaagactgctgtgtccactgcatcctgtcctgcctgttctgcgagttcctgacgctgtgcaacatcgtcctggactgcgccacctgtggctcctgcagctcggaggactcgtgcctctgctgctgctgctgtggctctggcgagtgtgccgactgcgacctgccctgcgacctggactgcggcatcctggatgcctgctgcgagtccgcggactgcctggagatctgcatggagtgctgtgggctctgcttctcctcctga

SEQ ID NO: 48047 - DNA, 951 bp, Homo Sapiens
atggaggctgccaatgagtcttcagagggaatctcattcgttttattgggactgacaacaagtcctggacagcagcggcctctctttgtgctgttcttgctcttgtatgtggccagcctcctgggtaatggactcattgtggctgccatccaggccagtccagcccttcatgcacccatgtacttcctgctggcccacctgtcctttgctgacctctgcttcgcctccgtcactgtgcccaagatgttggccaacttgttggcccatgaccactccatctcgctggctggctgcctgacccaaatgtacttcttctttgccctgggggtaactgatagctgtcttctggcggccatggcctatgactgctacgtggccatccggcaccccctcccctatgccacgaggatgtcccgggccatgtgcgcagccctggtgggaatggcatggctggtgtcccacgtccactccctcctgtatatcctgctcatggctcgcttgtccttctgtgcttcccaccaagtgccccacttcttctgtgaccaccagcctctcttaaggctctcgtgctctgacacccaccacatccagctgctcatcttcaccgagggcgccgcagtggtggtcactcccttcctgctcatcctcgcctcctatggggccatcgcagctgccgtgctccagctgccctcagcctctgggaggctccgggctgtgtccacctgtggctcccacctggctgtggtgagcctcttctatgggacagtcattgcagtctacttccaggccacatcccgacgcgaggcagagtggggccgtgtggccactgtcatgtacactgtagtcacccccatgctgaaccccatcatctacagcctctggaatcgcgatgtacagggggcactccgagcccttctcattgggcgaaggatctcagctagtgactcctga

SEQ ID NO: 48048 - DNA, 399 bp, Homo Sapiens
atggaaaggaacaccttcacgccaggagagaaggtcgtcttcacaacagagatcaacaaccagaccagcaaatgcatcaagacggtcgtattcgccctgtatgcccacatacagtacgagggcttcacgcccagtgcagagcggcggtctcggctggacagcagcgagcttctgaggcaggaggccaacacccccgtgacccgcttcaacaccaccaaggttgtcagcaccttcaacctgccgttgctgctgtccgtgagcagcagcacgcaggacggtgagatcatgcacactcgctacgagctggtcaccaccgtgcacctgccctggtccctgaccagcctcaaggccaaagttcccatcatcatcaccagcgcctcagtggactctgccatctgc

SEQ ID NO: 48049 - DNA, 1723 bp, Homo Sapiens
ggtcaggaaaagaggccaaaaatgttaacatcaaatttaaagataactaatgaagatacaaattatatttcactaacacaaaaattccagtttgcctttccttctgataaatatgaacaggatgatctaaatttagaaggggtaggtaataatgacttatcacatattgctggcaagctgacatatgcttctcagaaatataaaaatcacattggcactgagatagcacctgagaagagtgttcctgatgatacaaaattagttaattttgcagaagataaaggagagagcacatcagtattccggaaaaggttgaaaattgtacaaacagaaatgaacaaagggaaatcaaggaactatagcaatagtaagcaaaaatttcagtattctgcaaatgtgtttacagcaaataatgctttttctgcttctgaaatcggagaaggcatgttcaaagcaccatctttttcagttgctttccaacctcatgatattcaagaggtaacagaaaatggtttaggttccttgaaggctgtcacagaaattccggcaaaatttagaagtattttcaaagaatttccatatttcaactatatacagtccaaggcctttgatgatcttctttacacagataggaattttgtgatttgtgctccaactggttctggaaaaactgtagtgtttgaactagctataacaagattgttaatggaagtaccattgccatggttgaatattaaaattgtttacatggcaccaataaaagccttgtgcagtcagcgttttgatgactggaaagaaaaatttggaccaataggattgaattgtaaagaacttactggagatacagtaatggatgatctatttgagattcagcatgcccatattattatgacaactccagtaggaaaaatgggatagcatgactaggaaatggagagacaactctttggttcagctggttcgactgtttctcattgatgaggtacatattgtaaaagatgaaaatcgtggtccaactcttgaagttgtagttagcagaatgaaaactgtacagtctgtttctcagactttaaaaaataccagcactgctattccaatgcgatttgtagctgtatctgcaacaattccaaatgctgaggatgtgagttacaattttaactgagctcttaggttttttatgacttgtgaaatatttagtcatcttgatcatagagaaaagtgaatttttttgtcctttcctttaataggaaagtatgttgtagaaagttgtggctagatctcataaatataacagtattaaggccataaaatttggttaatcaggtttaataaaacattttttgtggacatgtggacatctcgtttgctagtatctaacagtcttagtttcctgggtttcaggtgcctcatagtaacttcactaacaatatgtgatggttgttgtaactagctgactctaattgtatagcaaagtatggtggagaataaaaataattgcttagatgattaccacttgctcctcaattctgtatgcttggcattgtggtaagcactaaatatagatgcaaaagtgaaaatatatggactccgtccttgaggaggatctcatggttaatggggtacatggacatgtaaagaaataatcatgtgcactattatactttccataatgaatatatgacttaattttttcttcaatttttaagtaaacgtcttgaaaaat

SEQ ID NO: 48050 - DNA, 1594 bp, Homo Sapiens
ggctaacctgttgtaagcccgcagctttgggcctggtctctgctgctcccaggcggcccctttgggtactgcctgagcaagaagtgctggagaggaggaccagtcatcaataggaggatgagattgggagagacactcggtgcaggaggctgagtgagcaggggagcactaagacccaggggtagtggaggactgcagcaacgagctggaggaggagaagtaagcggtggggggtgggagccatctggtactttgacagcattcaaaacagcatcggccataacaacagaaatggccagtcagtcccaaggtatccagcagcttctgcaagctgagaagcgggcagctgagaaggtggcagatgccagaaagaggaaggcccggcgactgaagcaggcaaaggaggaggcacagatggaggtggagcaataccgcagagagcgagagcacgaattccagagcaagcagcaggcggccatgggctcccaggggaacctgtctgctgaggtggagcaggctacaaggcgccaggtgcagggcatgcagagctcccagcagagaaaccgagagcgtgtcctggcccagcttcttggcatggtctgcgacgtcaggccccaggtccaccccaactaccggatttctgcctagggccaccgtagggcctgactccttctgccagttccctccctcaaagaaatcctccaatcaaaatcacctcccaccataatccctgtcttctttccatcccctagaaatcctgggaggcaggatccaataattttcctgtgacacttataaatatcctgctcacatctgaatctccttgttgttctttaaccctcactgggactttgtaaacttccaagtcattctcacctaaaccctctgtgaaatttgtaatatggggaagtaggaatgtggaaaacatcctgacttcagtgtctggccgatgtgggtccctctcttgaccctgtcacttgctggctgtgaaaccaggacaagctacttaacttggtagcctcgatgtcctcctctgtgaaactgggatgataataatgcctaccttgtgagggttgcttcaatgattaggaatcattctgtaaagtctagcagagttccttgcatgttgtagcagtgattcagtaagtagcaaccctgtgatactattaccaccacctgctcactggtcaaaacctacacagctgtttcctcacgtccatcactggctctctaattccacttgttcattctgtgaccctagttattttctgaaaaattggttcttctcttttcccagagaccttctgatctccaaaaagaggagatgactacatttagcccctctcttataattccaggtagataactgcattttgtagcctctctttgtttttcttttgctgatctttgtctttattagattttcctcctttcctatttccccaaagacttatcagatgctcattgctttctaagatctaaaatgatactgtgttccctcatatgcatgcccttcctttctatatccttgacaccttactttcccattgtaacaataaaaaaagtatcaataaaataattattggcaaataaa

SEQ ID NO: 48051 - DNA, 4119 bp, Homo Sapiens
cagctgcagtgctctaaagatcaaggattttgccttctattttctatgaccagagattcctgtgcaaagagagagtgtcaatgaagacctcaaagtctggagaaaaatgacctttcatggaataagaagtatacctccttctacatgtttttgtcttactgacctctgataactggaacacatgactctgggtctgtagaaagtcaactgatcaaactcatcctcaccatgcatcaactgttcagactggttttgggacaaaaagatctttcacgagctggggacctcttctccttagatgactctgagattgaagacagccttacagaagctttggagcaaattaagataattagctcatcttcagattaccaaaccaataacaatgaccaggcagtagttgaaatctgtatcacaagaatcacaacagccatcagagagaccgagtccattgaaaagcatgcaaaggcccttgtggggctctgggactcctgcttggaacataacctgagaccctttgggaaagacgaagacactcctcatgcaaaaatcgcatctgatatcatgagttgcattttacagaattacaaccgacccccagtgatggcattagccatccccattgcagtgaaattcctccacagaggcaacaaggaactgtgcaggaatatgtctaactacctgtctctggctgcaattaccaaggcagatctcctggctgatcacacggaagttatagtaaagagcatactccaaggtaacaccatgttgttgagagtgttacctgctgtgtatgaaaagcagcctcagccaattaatagacacctgacagaactcctggccttgatgtctcagctggaacagccagaacagtaccatctactacggcttttgcatgtagcagcaaagaaaaaacaactcgaggtagttcagaagtgtattcctttcctaattgggcatttgaaggattcaacccataatgacatcatcctaaacatcctcatagagatagcagtctatgagccagtggctttgaacagttttcttccaatgctgaaagagattggtgagagattcccctacctcactggacagatggcaaggatttatggagctgttgggcatgtggatgaagagagagccaggagctgcctgacatacctggtgagccaactggccaacatggagcattcgtttcaccatattctcctgctggagattaaaagcatcaccgacaccttctcctcaatcttgggccctcagagcagagacatcttccgcatgagcaacagcttcaccgccattgctaaactccttacccgacaactggaaaataccaaggctggaagtggcaggagaaaaatcagcactgaaattgaattccctgagaaactggaagaaaccaagctcatagtaactgaaaatgaagaccatgaaaaactccaagttaaaatccaggcttttgaagacaagataaatgcagggagcaatacccctggctctatcagaagatatagtctgggccaagtttctaaagaagaaagaaaaaacattagatttaacaggtcaaaaagtttggctttccacactatgctcacaaagggtgtgggttcagatgacggcgaagatgaaaacaggggagacataccagccagcatctctctttcagaaatagacccacttggccaaggaaatgacaagctgccgtttaagacagacactgagagatcacagctgggggagtcttcagtttcatacccaaatattatacatatagactcagagaatttgtcagaaactgttaaagaaaactcccaggaagaaactccagagacaactgcaagtcctatagaataccaagataagctctacttgcacttaaaaaaaaacctcagcaaagtgaaagcatatgccatggaaattggaaagaagattccagtccctgatcagtgtaccattgaagacactgtgagaagttgtgtagcaaagttgttcttcacctgctccctgaagggtcattactgcctatacagtaagtccagttttattctcatcagccaagaacctcagccatggatccagatcatgtttctatttcagcagagcctgtttcctgaacccctgtccattcagagtcattctgtgcaattcctcagagctctgtgggagaagacccaggcagggggtgctcacagctttgaaactgccatgatggagtccacgtttccacagcagaaggatctggaccaggtacagctccatctggaagaagtgaggttctttgacgtgtttggcttcagtgaaacagcaggagcatggcaatgcttcatgtgcaacaatcctgagaaagcaactgttgtaaatcaagatggccagcctctcatagaaggaaaacttaaagagaagcaagtcagatggaagttcatcaaaaggtggaaaacacgctattttacactggctggaaatcaacttctgtttcaaaaaggaaagtctaaagatgaccctgacgactgcccaatagaactcagcaaagtacagagtgtgaaggctgtggccaagaaacgcagggaccgctctctcccccgggctttcgaaatcttcacagacaataaaacctatgtctttaaggccaaggatgagaagaatgcagaagaatggctccagtgcatcaacgtggcagttgcccaagccaaagaaagggaaagtagagaagtaaccacatatctgtagggatttataagtcagccatgacaattatacaccacaggcattgtattatcattgccaatgtcaagaaaaagagctaaatttaccaagccatgttgttttttactaaataccaatggaattgttgtcctttaagaagaagggcctaaaatggcaggattcttagtaaatgtcatactctaacagctttagtattgacttcagaatatatctgatgcccacaaaaataaaataaaataaaaggagctacagagtatgccctcagatagtgtggggccaggaagggaaaagtcactgataaaagaacttctgtagatatgtcatttaaaactgtgagaaaacaacatgaaaagatgcctgaactctccatcctgaggaaagattagcacttctgatgaaaatcacagtctgtcaaaggtattaaaagaaaactttaaaaaaaaaaacctttagaaacgttgaactaatgtacactgagaaaaaccatataacttacttatagacatataattacatgatcctctcttactacaactgaggctaacacatggtaaaatggttcccaaatcaagccagttatgtcattaaatacttgtctttcagaattacttatttaattattccatttaagttcatataatataatctacagtttagatacttggacatatatcctgcccaaggcactaagtgtaatataggaaaaggatagaaagccattttctctatcttcaaaataatgtgccatctccgttaaaattaagactttaaagttctataattttttctttgtattcaactttttaatacctccaaattacaaacatctatttttttcactacatagatatataattacactatgatagacagaattctagagtgattctcaataatccatgccttggtataatcctctcccccattgagtgtgggtgggacatgtaacctgcttctaaccaacagaatatggcaaaagtgatgggatcatctctcccatattatgttatgttatataacaaaagtgaagagaagttgcagatatacataaggtttctaatcagctgactttgagttaatcaaagagatcccctgggtgggcctgacctaatcagactagtcctttaaaagagagtgaaccagtcagagactctctctcctattagccttaaataagcaagctgccatgagctctacggctgcaaggaaataagttttgtgaacaaccatgtgatcttggaagaagcatctgaacctcagataaaagcccagccccagccaacgccttgcttgcagctttgtgaaactctgagcagaggacccagctaaatcacgtttggactcctgacccacagaaactttcagataataaatgtatgctgttttaaatct

SEQ ID NO: 48052 - DNA, 414 bp, Homo Sapiens
atgtatgtacacaaatcagcagctcttctatacaccaacagcaaccaagctgagaatcacatcaagaactcaaccccctttacaatagctgaaaaaaatttaggaatatacctaaatgaggtgaaagacgtctacaaggaaaactataaaacactgctgaaagaaataatagatgacacaaacaaatggaaacacatcccatgctcatggatgggtcgaatacatattgtgaaaatgacaatactgctaaaagcaatctacaaattcaacacaattcccatcaaaatatcaccatcattcttaacagaattagaaaaaacaattctaaaattcacatggaacaaaaaaaaaaaaccgcatagccaaagccagagtaagcaaaaagaacaaatctggaagcatcacattacctga

SEQ ID NO: 48053 - DNA, 3778 bp, Homo Sapiens
ggcggcggcggcggcggcggcagctgcggcgggagaagatggtggcgctggaggcagcagcggctggagcggagctttattcccaggcttggcaccagcgctgtcactagcgccgcctgctcccgcgggcccgcggacccagctgtcaggcaagcccagtggagcaaaatgagagcgcagtgagccgggcccagcttctctcctagccgttccgactcccaccatgaaccacttggaggggtctgcggaggtggaggtgaccgacgaggcggcaggtggggaggtgaacgagtcggtggaggccgacctggagcaccccgaggtggaagaggaacagcagcagccgccgcagcagcagcactatgtgggccgccaccagcgcgggcgagccctcgaggacctccgcgcccagctcggccaggaggaagaggagcgcggggaatgcctggcgcgctcagccagcacggagagcggcttccacaaccacacggacaccgccgagggcgacgtgatcgccgcggcccgcgacggctacgatgcggagcgcgcgcaggaccccgaggacgagagcgcctatgctgtgcagtaccggcccgaggccgaggagtacacggagcaggcagaggccgagcacgccgaggccacgcaccgccgcgcgctgcccaaccacctgcacttccactcgctggagcacgaggaagccatgaatgcggcctactcaggctacgtctacacgcaccggctcttccaccgcggtgaggacgagccctactccgagccctatgccgactacggcggcctccaggagcacgtgtacgaggagataggggacgcgcccgagctggacgcacgcgacggcctgcggctctacgagcaggagcgcgacgaggcggccgcgtaccgccaggaggccctgggcgcgcggctgcaccattacgacgagcgctccgacggcgagtccgacagccccgagaaggaggccgagttcgcgccctacccgcgcatggacagctacgagcaggaggaggacatcgaccagatagtggccgaggtgaagcagagcatgagctcgcagagcctcgacaaggcagccgaggacatgcctgaggccgagcaggacctggagcgtccccctaccccggccgggggtcgccccgacagccccgggctgcaggcgccggcggggcagcagcgggcggtgggccccgcgggcggcggcgaggcggggcagcggtacagcaaggagaagcgcgatgccatctcgctggccatcaaggacatcaaggaggccatcgaggaggtgaaaaccaggaccatccgttcgccttacacccccgacgagcccaaagagcccatctgggtcatgcgccaggacattagccccaccagggactgtgacgaccagaggccgatggacggagattctccgtctcctggcagctcctcccccttgggtgcagagtcatcaagcacatctcttcaccccagtgaccctgtggaagcgtccactaataaagagtcaagaaaaagcttggcttcattcccaacctacgttgaagttccgggaccctgcgaccccgaagacttgatcgatggaatcatttttgccgccaattaccttggctccactcagctgctctcagacaaaactccttccaaaaacgtgcgcatgatgcaggcccaggaagccgtaagcaggatcaagatggcccagaaattagccaaaagcaggaagaaggctcctgaaggcgaatctcagccaatgactgaagtggatctcttcatttctacccagagaatcaaagtgctgaacgccgacacacaggagacaatgatggaccaccctctgaggaccatttcctacattgcggacattgggaacatcgttgtgctgatggcccgccggcggatgcctcgctccaactcccaggagaacgtggaagcgtcccacccatcccaggatgggaaaaggcagtacaagatgatctgccacgtcttcgagtctgaggatgctcagctgattgcacagtccatcggacaggcatttagcgtggcataccaggaattcctcagggccaatgggattaaccccgaagatctcagccagaaggagtatagtgacctgctcaatacccaggacatgtacaacgatgacctgatccacttctccaagtcggaaaactgtaaagatgttttcatagagaagcagaaaggagaaatcctaggtgtggtgattgtggagtctggctggggatccatcctccccaccgtgatcattgccaacatgatgcatggtggccctgcggagaaatctgggaagctgaatatcggtgaccagatcatgtccattaatggcaccagcctggtgggcctgcctctgtccacctgccagagcattattaagggcttaaagaatcagtcccgagtcaagctgaatatcgtgagatgtcctccggtgaccaccgtgttaatcagaagaccagaccttcgctaccagctcggtttcagcgtccagaatggaattatctgcagcctcatgcgagggggaatagctgagagaggaggcgtccgtgtggggcaccggatcattgaaatcaatggacagagcgtcgtggccaccccccacgagaagatcgtccacattctctccaatgctgttggggagattcatatgaagacaatgccagccgcgatgtacaggctgctgacggcccaggagcagcctgtttacatctgaccgcggccacacgcggtggcatgcatggaggactctcctcttcgtggttgtgtttctcgtgctgcatccctgtgtccactgagactttcccctctcgcgcccagcatttggttttacacaggaagagaagaatccacaaggacctctttactctctccgatttgcttttttttttttttttttttcaataccagggaagtttcgtatgcactcccttgaggatggagagcagccagcacccacctggtactgacccaggaccatcctggagggctttctgggtgtgtccagggggtgggctgtcactgcttgagggagaatcctcccttcccaggaggtgcagacttcttaaaaggagctcgcggggcagcaaagcagctgattcagcagtgcctaaaacccagttgctgatccctgctctctgagtttatctgtgggaatgtggtagtacccagggccagcccacgtcattaaggttatgcactgcctgccatgtagttggggcaccatacattatttcttcccagaatctctgagccaaccttaaacctcttctattgctagttctaatttcaacgtatgtgtgttttctaatacgagccttctcaccccaggataaaaggggaaataactgccttgggcaaggacaccatagtgtcacagagagcttggcaattcatggggcatctgaagctttaccaggttgtcctcaagttatcaaccattagataaacacaggcaggtactgtctgcttctctctctctcacacacacacacacacacacagtcccatttgcatatcacccttccctgctcccaccaccagtgagacaagctgaagattaggcacacagatcccctggaaacccacctctctggaaggccccttccctggcaggtggccaggcaggcgggggctgctcagcctcatcctgagagacctgccctctctgcgctgaggcccagcccctccagcaccactttggcttaaagcatcctcctcctggactcccctccctgccgaacacacatcccaggag

SEQ ID NO: 48054 - DNA, 836 bp, Homo Sapiens
gctggtgtttggaatgctttatcctgcatattattcatacaaagctgtgaaaacaaaaaacgtgaaggaatatgttcgatggatgatgtactggattgtttttgctctctatactgtgattgaaacagtagccgatcaaacagttgcttggtttcccctgtactatgagctgaagattgcttttgtcatatggctgctttctccctataccaaaggagcaagtttaatatatagaaaattccttcatccacttctttcttcaaaggaaagggagattgatgattatattgtacaagcaaaggaacgaggctatgaaaccatggtaaactttggacggcaaggtttaaaccttgcagctactgctgctgttactgcagcagtaaagagccaaggagcaataactgaacgtttaagaagcttcagtatgcatgatttaacaactatccaaggtgatgagcctgtgggacaaagaccataccaacctctaccagaagcaaaaaagaaaagtaaaccagcccccagtgaatcagcaggttatggaattccactgaaagacggagatgagaaaacagatgaagaagcagaggggccatattcagataatgagatgttaacacacaaagggcttcgaagatcgcaaagcatgaaatctgtgaaaaccaccaaaggccgcaaagaggtgcggtacgggtcactaaaatacaaagtgaagaaacgaccacaagtgtatttttagtcatctacacgtcaaatatcccaagacagattatgctaaatacatcgacttcatcttctaacatgatatattcaggatttacacattaaaatgattattt

SEQ ID NO: 48055 - DNA, 225 bp, Homo Sapiens
aaggtgaagcctggagtcaatggatttggccatattctcctggtcacaagggctgctctgaactctggtaaagtggatattgtggccatcaatgaccccttcattgaccttaacttcatgccctacatgttccagtataattccacccatggcaaattccatggcactcccaaggctgagaacgggaagcttgtcatcaatggaaattccatcaccatcttctag

SEQ ID NO: 48056 - DNA, 852 bp, Homo Sapiens
ctctttttccggctggaaccatggtgggtgtagaagagaagaagaaggttcctgctgtgccagaaacccttaagaaaaagcgaaggaatttctcagagctgaagatgaagcgcctgagaaagaagtttgcccaaaagatgcttcgaaaggcaaggaggaagcttatctatgaaaaagcaaagcactatcacagggaatataggcagatgtacagaactgaaattcgaatggcgaggatggcaagaaaagctggcaactactttgtacctgcagaacccaaactggcatttgtcatcagaatcagaggtatcagtggcgtgagcccaaaggtccgaaaggtgttgcagcttcttcgccttcgtcaaatctacaatggaacctttgtgaagctcaacaaggcttcgactaacatgctgaggattgtagagccatatattgcatgggggtaccccaatctgaagtcagtaaatgaactaatctacaagagtggttatggcaaaatcaataagaagcgaattgctttgacagataacgctttgattgctcgatctcttggtaaatatggcatcatctgcatggaggatctgattcatgagatctatactgttggaaaacgcttcaaagaggcaaataacttcctgtggcccttcaaattgtcttctccacgaggtggaatgaagaaaaagaccacccattttgtagaaggtggagatgctggcaacagggaggaccagatcaacaggcttattagaagaatgaactaaggtgtctaccatgactatttctctaagctggttggttaataaacagtacctgctctcaaattggaaaaaaaaaaaaaaaaaaagaaaa

SEQ ID NO: 48057 - DNA, 255 bp, Homo Sapiens
ttattttttatagagacaaagtctcactatgttgctcaggctggtcttgaactcctggcctcaagcgatcctcccacctcagcctcccaaagtgttgggattatagacatgagccactgcacctggccgaccttgggcaagttcttaaacccttcaaagcctcatttttctccaatcacaaaagggaaagatggtaatattttccccaccaaattcttgtcggatgccctcacagaattgagattatgtacgtaa

SEQ ID NO: 48058 - DNA, 3869 bp, Homo Sapiens
gcttcctccagagggcgggaaccttggacgtggcggggctgggtcagtcagggcgctgggcccagcctctctgcaggctggccttccgcgctgccgtgaagcccccgacaggtcccacgcctgcctaggtagaccggcgccagcccgagtgacgcctggcgtgtggccgcgggcaggcggctccgtgcggcggggcgggcgggtgccacacctgtgcgggcaagggcggggcgggaaggtgcgcaggcgcgctcggggctggtgggcggtggctcctgggaagttgcgcagccgaactggccggctgggcgcgcgctcttgcggtggcgtaatctctcagcctttctgtgtctcctttcctccgcctcagtttggggcgggtcgggggaatggctgaggagatggagtcgtcgctcgaggcaagcttttcgtccagcggggcagtgtcaggggcctcagggtttttgcctcctgcccgctcccgcatcttcaagataatcgtgatcggcgactccaatgtgggcaagacatgcctgacctaccgcttctgcgctggccgcttccccgaccgcaccgaggccacgataggggtggatttccgagaacgagcggtggagattgatggggagcgcatcaagatccagctatgggacacagcaggacaagaacgattcagaaagagcatggttcagcactactacagaaatgtacatgctgttgtcttcgtgtatgatatgaccaacatggctagttttcatagcctaccatcttggatagaagaatgcaaacaacatttgctagccaatgatataccacggattcttgttggaaataaatgtgacttgagaagtgccatacaggtacccacagacttggcacaaaaatttgctgacacacacagtatgcctttgtttgaaacgtctgctaaaaaccccaatgataatgaccatgtggaagctatatttatgaccttggctcataagcttaagagccacaaaccattaatgcttagtcagccccctgataatggaattatcctgaagcctgaaccaaagcctgcaatgacgtgctggtgctaaataacagtctttattatattatctaattttgactaaagaaatacttttgaagtatgacagtattaagtcataagatttaatctcaactataatgggtcatcttgacactttgctgtttgtcattgtcacgcttttgtattttgtatctacttaagtttgtcactgtgacaacacaggaaaagttggttttcaggtgagattgaaaatgaagcaaagataggatgaatctgaacatctctccatctagagcccaatgaaggaagcttcaaatgagaacatgatggaatcagtaaccattcaatcttttgtcctaggattggaaaaaaatgttaaaggtttaggacacacctaatagtatgtcctttgaatgggaagtgttcttaataggataaaaactggtatttgcctctccccagagtactttttttgttttttcatagagacggggtcttgctatgttgtccaggctggccttgagctcctgggctcaagcaatcctcccacctcagcctccccagtactgggactgtaggtactcaccactgcatctggcctttctttgttttattaacatatttagttttgttattattggtatgttttagagccaagactttagttccagtgggataagaaggcatagaatgttttctggttcccagtccataaagaatgacttttccaagagttctagatgtttgattttctaattaatacttatcagatctacaaaaatcattattattttaaaagagttatttgagtttctttctttctttttttttttttttttttttgagatggagtctcgctctgtctccaggctggagtgcagtggcgtcatctcggctcactgcaacctccgcctcccaggttcaagtgattctcctgcctcagcctcccgagtagctgggattacaggcgtgcactaccacacccagctgatttttgtatttttagtatagatggggtttcaccatgttggccaggatggtctcgatctcttgacctcatgatccacccgcctcagcttcccaaagtgctgggattacaggtgtgagtcactgcacccagccgagttgctttcttactaaatcctattaaaatatgcaaaaataagtcagattttaaggcaaataaagtgacataaggtgctttatattttattttggtatatttaaacagtgaaaaactaactgaaagcacatgaagagttgtaacttgggggaaaataggtaaacatagcttctagctaacacaggagacctattcttagcctttactaatttcaagcagtgtatcccatatggtatctcttgctcttccttcaactccaataaatttaatgactaaatgccaagttaacaaatcaacttccatttggattgtaggtgtgaaggcacaactctaattgctattagtctacatgtatttctgtaatagtattgtgtcatatcaatttttaagatgtctaaattttatggtcacaagttatccctcctcagtatgaaaaataaattagatattgaaaaatgtctaaacttcagtgatggaaagaatatttcaagaagttttttaacctaaatacttttattttgaatttaagtctttgcacataaaatatagcaagcttacatattaaactatttacgtaaatggaatgtaagccatgactttaactgaagtgttcacattcactaattttgatagattgctgtccttaataattttggaggaaattaagccaaatgattattgtactacagtattttcagaatatgggaaatcaattaaaaatgtaatctaatctagtttaagatttttgtttaatcatcatggtggtcctacctggataatttaactataaagacaaagtaattctattaaatgaactaactgaaaataataattataggaagtgattattccattttaagtattagagctcaaattggctttatttgcatttagggagatcatgttttcttaatcatgctggaatttaaaaattgttttacttgtatcgaaattaaccttgatttataactatttttgtaataaaacaatgacagctgtagtaactatgatgggtgtaacaacatttttttaaagaagggaatctgtttatcgcttttcaaaatattttctaaagtgggggaagaaagtttatagactttccaagcacatttatggttttttattactattattatggttttaaaaagagtaactttatttctttttgtaaggaattaagtaatatcctttacagttctgtgaaaggacttattttttaactgtaatatttattagttttaaaatatttgtatctcatttgtaacaatttgttttaattttttatatatatgtttttatttttaaaaaacataccagttgaatggggttaaagctttcaatatcttaaaatatttataaaacatttcactgttgcaaaatcacttccaaaatgatagctatctaacaactaattactaatttttaaagaacaaatcacacatttaaaaaatctgtagaatttattttaactatgacctttaattgaaaataaataattaaaatatcagacatgttttggaaaagtcttaatttgagaacaccaaaggaaactaccccagaatctaatgtagttcgctattaataacaatgcattattgaaagtatattgcaaatacatgtttcctcatgaaatctaagtaattttgttgtggaatagtgtcactgttacatttcccccatgaagttcaataaaccagcttagccacaaagaaa

SEQ ID NO: 48059 - DNA, 468 bp, Homo Sapiens
atgtcttcacctagggactttagagcagagcctgtaaacgattatgagggaaatgactctgaagcagaagacttgaatttcagggagactttgccttcatcaagtcaggaaaacacacctagatcaaaggtttttgaaaataaagttaattcagagaaggtaaaactttctcttcggaatttcccacataatgattatgaggatgtttttgaagagccttcagaaagtggcagtgatcccagcatgtggacagccagaggccccttcagaagagacaggtggagcagtgaggatgaggaggctgcagggccatcacaggctctctcccctctactttctgatacgcgcaaaattgtttctgaaggagaactagatcagttggctcagattcggccattaatattcaattttcatgagcagacagccatcaaggattgtttgaaaatccttgaggaaaaaacagcagcg

SEQ ID NO: 48060 - DNA, 1935 bp, Homo Sapiens
atggccgcggctcatggacctgtggccccctcttccccagaacagaatggtgctgtgcccagcgaggccaccaagagggaccagaacctcaaacggggcaactggggcaaccagatcgagtttgtactgacgagcgtgggctatgccgtgggcctgggcaatgtctggcgcttcccatacctctgctatcgcaacgggggaggcgccttcatgttcccctacttcatcatgctcatcttctgcgggatccccctcttcttcatggagctctccttcggccagtttgcaagccaggggtgcctgggggtctggaggatcagccccatgttcaaaggagtgggctatggtatgatggtggtgtccacctacatcggcatctactacaatgtggtcatctgcatcgccttctactacttcttctcgtccatgacgcacgtgctgccctgggcctactgcaataacccctggaacacgcatgactgcgccggtgtactggacgcctccaacctcaccaatggctctcggccagccgccttgcccagcaacctctcccacctgctcaaccacagcctccagaggaccagccccagcgaggagtactggaggctgtacgtgctgaagctgtcagatgacattgggaactttggggaggtgcggctgcccctccttggctgcctcggtgtctcctggttggtcgtcttcctctgcctcatccgaggggtcaagtcttcagggaaagcaaccctcttgtgccaggtggtgtacttcacggccacgttcccctacgtggtgctgaccattctgtttgtccgcggagtgaccctggagggagcctttgacggcatcatgtactacctaaccccgcagtgggacaagatcctggaggccaaggtgtggggtgatgctgcctcccagatcttctactcactgggctgcgcgtggggaggcctcatcaccatggcttcctacaacaagttccacaataactgttaccgggacagtgtcatcatcagcatcaccaactgtgccaccagcgtctatgctggcttcgtcatcttctccatcctcggcttcatggccaatcacctgggcgtggatgtgtcccgtgtggcagaccacggccctggcctggccttcgtggcttaccccgaggccctcacactacttcccatctccccgctgtggtctctgctcttcttcttcatgcttatcctgctggggctgggcactcagttctgcctcctggagacgctggtcacagccattgtggatgaggtggggaatgagtggatcctgcagaaaaagacctatgtgaccttgggcgtggctgtggctggcttcctgctgggcatccccctcaccagccaggcaggcatctattggctgctgctgatggacaactatgcggccagcttctccttggtggtcatctcctgcatcatgtgtgtggccatcatgtacatctacgggcaccggaactacttccaggacatccagatgatgctgggattcccaccacccctcttctttcagatctgctggcgcttcgtctctcccgccatcatcttctttattctagttttcactgtgatccagtaccagccgatcacctacaaccactaccagtacccaggctgggccgtggccattggcttcctcatggctctgtcctccgtcctctgcatccccctctacgccatgttccggctctgccgcacagacggggacaccctcctccagcgtttgaaaaatgccacaaagccaagcagagactggggccctgccctcctggagcaccggacagggcgctacgcccccaccatagccccctctcctgaggacggcttcgaggtccagccactgcacccggacaaggcgcagatccccattgtgggcagtaatggctccagccgcctccaggactcccggatatga

SEQ ID NO: 48061 - DNA, 867 bp, Homo Sapiens
atggatgctgcggtgacagatgattttcaacaaattctgcctattgaacagctgcgctctactcatgctagcaatgactacgtggaacggcctccagccccctgtaaacaggccctctccagcccttcccttattgtgcaaacccacaagtctgattggtctctggctaccatgcctacttctctcccccgcagtctcagccagtgccatcaactgcagcccttgcctcagcatctgagccaatctagcattgccagctcaatgtcccatagcaccactgcctctgatcaaaggctcttggccagcattacaccctcaccttcaggccaatccatcatccgaacccaacctggagcaggggtccacccaaaggctgatggtgctctgaagggagaagctgagcaatctgcagggcaccctagtgagcacctcttcatctgtgaggaatgtgggcgctgcaagtgcgtcccctgcacagcagctcgccctctcccctcctgctggctgtgcaaccagcgctgcctttgctctgctgagagcctcctcgattatggcacttgtctctgctgtgtcaagggcctcttctaccactgctccactgatgatgaagacaactgtgctgatgagccctgctcttgtgggcctagttcttgctttgtccgctgggcagccatgagcctcatctccctcttcctaccctgcctgtgctgctacctgcctacccgtggatgcctccatctgtgccaacagggctatgatagcctccggcgaccaggctgccgctgcaagaggcacaccaacactgtgtgcagaaagatctcttctggtagtgcacccttccccaaggcccaggaaaagtctgtatga

SEQ ID NO: 48062 - DNA, 207 bp, Homo Sapiens
caacgactttctttagtcatcaaatataaccttcccaccaacaggcaaaactatatccacagaatcagtcgaggtagatggtttgaccttaaggatgcggatattaacatggtgacagaagaagacaagaggactcttcgagacatcaggaccttctacaacacctccattgaggaaatgcccctcgatgttgctgacctcatctga

SEQ ID NO: 48063 - DNA, 2127 bp, Homo Sapiens
gtgcggccccgtcccgccgcccgcccgccagccatgagctccacgcagttcaacaagggcccctcgtacgggctgtcggccgaggtcaagaaccggctcctgtccaaatatgacccccagaaggaggcagagctccgcacctggatcgagggactcaccggcctctccatcggccccgacttccagaagggcctgaaggatggaactatcttatgcacactcatgaacaagctacagccgggctccgtccccaagatcaaccgctccatgcagaactggcaccagctagaaaacctgtccaacttcatcaaggccatggtcagctacggcatgaaccctgtggacctgttcgaggccaacgacctgtttgagagtgggaacatgacgcaggtgcaggtgtctcttctcgccctggcggggaaggccaagactaaggggctgcagagcggggtggacattggcgtcaagtactcggagaagcaggagcggaatttcgacgatgccaccatgaaggctggccagtgcgtcatcgggctgcagatgggcaccaacaaatgcgccagccagtcgggcatgactgcctacggcacgagaaggcatctctatgaccccaagaaccatatcctgccccccatggaccactcgaccatcagcctccagatgggcacgaacaagtgtgccagccaggtgggcatgacggctcccgggacccggcggcacatctatgataccaagctgggaaccgacaagtgtgacaactcctccatgtccctgcagatgggctacacgcagggcgccaaccagagcggccaggtcttcggcctgggccggcagatatatgaccccaagtactgcccgcaaggcacagtggccgatggggctccctcgggcaccggcgactgcccggacccgggggaggtccctgaatatcccccttactaccaggaggaggccggctactgaggctcccagcacgctctctccccacatcgtctgcccatctgggtttttgggtttttctgtgttttcatcttttttttttttttcttaacccgttcagtgctgccagtcaaccaagggtctgtgagtgtcagcgtgggatcaggcagcagagcttttttcccctttgccttgatccttcgcaaggctgagccactgggctgtgggggaaggggtcaaggccatatcccaatacgtgtagggcgagggtccctgctggcacattcaggctgtgctgggaagaagagacctgggcttggaaggaaccggtccccgacggtttctgcttgcctcgcctcttcccccttttgtcagctgagcagtttgtggtttctatgcccgcaagtttcaggaagtattcacaaaagaaaaatacattttttcccccaggggtggggcaaggacagtggagagagtgctaggaaatgagtcccctgggaaaggggaccgggccgtgatgttaaatatctccggctcccaagtgactggatttgcctaggaccttcagaccaacagacttcagaccctcagacctgccccggggccaggtggagaaagtgagggccgtacaaggaagtgaaattctgagttgttggggctaagcctgaccccctctccatgctccccgccccaacccactctggcctcagtagatttttttttcagttgtggttgttgcccaggctggagtgcagtggcgccatcttggctcactgcacctccaccttccgggctcaagcgattctccagcctcagcctcctgagtagctaggactgcaggtgctccaccacgcccggctaatttttgtatttttagtagagatggggtttccccatgttggccaggctggtctcgaactcctggcctcaggtgtgatccgcccgcctccgcctccccaagcgctgagattacaggtgtgagccaccgtgcccagcccctcagtaggttttaaggagcccccagccctcctcccttctgggcccgaccagcttatactgctccatcttccccggccacatgccccgccaagtactgcacagggaccccccacccaggggacctgctccgtgagataatgtgaaatacgactgtggaccaaacgcaataaaacctctgtttgtacgaag

SEQ ID NO: 48064 - DNA, 663 bp, Homo Sapiens
atgggctccgggcgcggagaaactccctcaacatccatctccatcttcccattcactggagggcaagacaaaagcggagtggagacttggcagcggcgcccggcagctactcagctgcccgtggcacgcatggctcgccgaggaggggccgcctcccgcgcgccctcccttctgccacccttcgcccccgctccccgcagctccgctcgcctgcttggctccggccctggcggcgtctgggccggggtgcgcgaggagcgggtggccgcgtgtccttggagcgctggccttcaggcgcccccggcagtcccgctaagcagagcgcatcccggcggcggcggcggcggcggcggcggcgcctcccagccgcgctcccagcctcagggccgcttgggtacttgctctccagcccggcccacgctcctagccgctttccagcgtctcttggggccccttggcgtttctcctccctaccaaccttctgaacaaagttgctggaagaaccaacctggtcgccgggctttgcccggcgaagctggcaagaatagggactctcagggtcgatggggtaggaggaaggagaagcgagaagtcgctgccaggcatttactgcaatgtgcccggggcgggcgccagctgggcgccgtctctttttggtggtga

SEQ ID NO: 48065 - DNA, 931 bp, Homo Sapiens
agcggtcatgtccggcagaggaaagggcggaaaaggcttaggcaaagggggcgctaagcgccaccgcaaggtcttgagagacaacattcagggcatcaccaagcctgccattcggcgtctagctcggcgtggcggcgttaagcggatctctggcctcatttacgaggagacccgcggtgtgctgaaggtgttcctggagaatgtgattcgggacgcagtcacctacaccgagcacgccaagcgcaagaccgtcacagccatggatgtggtgtacgcgctcaagcgccaggggcgcaccctgtacggcttcggaggctaggccgccgctccagctttgcacgtttcgatcccaaaggccctttttagggccgaccacttgctcatctgaggagttggacacttgactgcgtaaagtgcaacagtaacgatgttggaaggcttatgattttactgtgtatgtatttgggagaagaaattctgtcagctcccaaaggataaaccagcagttgctttattggtcttcagatgtggctgcaaacacttgagactgaactaagcttaaaacacggtacttagcaatcgggttgccagcaaagcactggatgcaagccttgccttccagaagcttaccagtcgggttgccagcaaagcagtggatgcaagacttgccctccaggagcttaccatcacaacgaagaagacaaataaatgcataatatatagacgacataaatccatactgtacacatttaagaataaacagtccagtagtaagaggcagtacatattcaatctgctgagaaatgtagacaataactactataagaatcctaatgctacagaagtcactggctgctgggaaaccggggaaaacttggctatggacgtgggggcttgtgtcggactctgaataaagagcagaatgattggc

SEQ ID NO: 48066 - DNA, 258 bp, Homo Sapiens
tgcgaccaaaaggccgtgatcaaaaatacggacatgtcggaagagatgcaacaggactcagtggagtgcgctgctcaggcgctggagaaatacaacatagaggacactgcggctcatatcaagaaagaatttgacaagaagtacaatcccacctggagttgcatcatggggaggaacttcggtagttacctgacacatgaaaccaaacacttcatctacttctacctgggccaagtggccattcttctgttcaaatct

SEQ ID NO: 48067 - DNA, 813 bp, Homo Sapiens
atgggcaataccagcagtgagcgcgccgcgctggagcggcatggtggccataagacgccccggagggacagctcggggggcaccaaggacggggacaggcccaagatcctgatggacagccccgaagacgccgacctcttccactccgaggaaatcaaggcaccagagaaggaggaattcctggcctggcagcatgatctggaagtgaatgataaagctcccgcccaggctcggccaacggtgtttcgatggacggggggcggaaaggaagtttacttatctgggtccttcaacaactggagtaaacttcccctcaccagaagccacaataactttgtagccatcctggatctgccggaaggagagcatcagtacaagttctttgtggatggtcagtggacgcacgacccttccgagcccatagtaaccagccagcttggcacagttaacaacatcattcaagtgaagaaaactgactttgaagtatttgatgctttaatggtggattcccaaaagtgctccgatgtgtctgagctgtccagttctcccccaggaccctaccatcaggagccctacgtctgcaaacccgaagagcgctttcgggcaccccctattctccccccacatctcctccaggtcatcctgaacaaggacacggggatttcctgtgatccagctttgcttcctgagcccaatcacgtcatgctgaaccacctatacgcgctgtctatcaaggatggagtgatggtgctcagcgcaacccaccggtacaagaagaagtacgtcaccaccttgttatacaagcccatatga

SEQ ID NO: 48068 - DNA, 744 bp, Homo Sapiens
tttagggccattaattctgaccacgtgcctgagaggcaaggtggatggccctgggacagaaactgttcatcactatgtcccggggagcaggacgtctgcagggcacgctgtgggctctcgtcttcctaggcatcctagtgggcatggtggtgccctcgcctgcaggcacccgtgccaacaacacgctgctggactcgaggggctggggcaccctgctgtccaggtctcgcgccgggctagctggagagattgccggggtgaactgggaaagtggctatttggtggggatcaagcggcagcggaggctctactgcaacgtgggcatcggctttcacctccaggtgctccccgacggccggatcagcgggacccacgaggagaacccctacagcctgctggaaatttccactgtggagcgaggcgtggtgagtctctttggagtgagaagtgccctcttcgttgccatgaacagtaaaggaagattgtacgcaacgcccagcttccaagaagaatgcaagttcagagaaaccctcctgcccaacaattacaatgcctacgagtcagacttgtaccaagggacctacattgccctgagcaaatacggacgggtaaagcggggcagcaaggtgtccccgatcatgactgtcactcatttccttcccaggatctaaggacccacaaaagaaggctcacagatttaaagcatcatctgttcgattgaaattttgcaccagcgaagaattc

SEQ ID NO: 48069 - DNA, 939 bp, Homo Sapiens
atgtcgtccagcggcagctcccatcccttcctattgactggttttccaggcttggaggaagctcatcactggatttccgtatttttcttgttcatgtatatatccatcctttttggcaatggcaccctccttcttctcattaaggaagatcacaatcttcatgagcccatgtacttctttctggccatgctggctgccacagacctggggctggccctgaccacaatgcccacggtgctgggagtcctctggctggatcacagggagattggaagtgcggcctgcttttcccaggcctactttatacactcactttcctttctcgagtctggcattctgcttgccatggcctatgaccgttttattgccatctgcaaccctcttagatatacctctgtacttactaatactcgagtagtgaagattgggctgggagttctgatgaggggatttgtatccgttgttcccccaatcaggcccctctatttttttctgtattgtcactcccatgttctttcacatgcattctgccttcaccaggatgtcattaaactcgcctgtgctgataccaccttcaaccgactgtacccagctgtgcttgtagtctttatatttgtgctggattatctgattatcttcatctcctatgtgttgatactcaagactgtcctgagcattgcctccagagaggagagggccaaggctctcattacctgtgtctcccatatctgctgtgtcctggttttttatgtcacagtgattggattgtctctgattcatcgttttggaaagcaggttccacatattgttcacctcattatgagctatgcctattttctgttccctccactaatgaatcctataacatatagtgtcaagaccaagcagattcagaatgccattcttcacctttttactacccatagaattggaacctga

SEQ ID NO: 48070 - DNA, 2065 bp, Homo Sapiens
catgaaggaccgaacccaggagctccgcacggccaaggacagcgatgatgatgatgatgtcgctgtcaccgtggaccgagaccgcttcatggatgagttctttgagcaggtggaggagattcgaggcttcattgacaagatcgcagagaacgtggaggaggtgaagcggaagcacagtgccatcctggcatcccccaaccccgatgagaagacgaaggaggagctggaagaactcatgtccgacataaagaagacagcaaacaaagttcgttccaagttaaagagcatcgagcagtccatcgagcaagaggaaggcctgaaccgctcctccgctgacctgaggatccggaagacacagcactccacgctgtccagaaagtttgtggaggtcatgtcggagtacaacgccacgcagtccgactaccgcgagcgctgcaaaggccgcatccagaggcagctggagatcaccggcaggaccacgaccagtgaggagctggaggacatgctggagagtgggaaccccgccatctttgcctctgggatcatcatggactccagcatctcgaagcaggctctgagcgagattgagacgcggcacagtgagatcatcaagctggagaacagcatccgtgagctacacgacatgttcatggacatggccatgctcgtggagagccagggagagatgattgacaggatcgagtacaatgtggaacacgcggtagactatgtggagagggccgtgtctgacaccaagaaggccgtcaagtaccagagcaaggcgcgccggaagaaaatcatgatcatcatctgctgtgtgatcctgggcatcgtcatcgcctccactgttgggggcatcttcgcctagaagccacccaaactgccactccactccaggtgggccactccaaggaggccctggctgctgccacctggctgggctgccctcccaacccccgcctctggctcagagcaccctccctcccggcccccatgctcccttctctgccatgggccctccgtccccgccccgtgtcgtgtgcatgatctctgtgagtgtgcgtctgtacgggaagaggcagagggaggcagccagcggggcgtgatgcagtgtgcacagcgaggagcagacccaggcagggccgccagggtgacacaggccacccttccttgccttcagtaactcggtgggcccaggttctgctcttccctggggaccctaacctcgcctccagctgacctgccctgtcctctccagctgtccccacaagcagagccctgaggggtggggaccagctggccacatggtgctgcttttcaggttaggggagaggtggccctgagggacagcccagctctgagtctcagtcgctgatcactgccagggaggctcaggctgccatggctccaggctccctcccctgcctaggggcaaagtccatcgggtcctgggcctcagcttcccttcccacattcctccggccccaggagcaaccccttgggctaggtctgaccccaggtgtccctctggaaggggctggctggtgccctatttccagccaccccagcagctagggaggcaaagcaggctgcagtcagtccctcaagccagcgttgcatgtttgggatggtggctcctgttgtcttgcgctctgggaagtcagatgtcatttcaggcctgcagtctcatcctgcccttgccatcctcccatcgatgtgccacgtgggtgtcacgtgtcccagatgcagtattcggcagccagccggggagggctacctcctcctcctcaccaccttggggcttctcatgggaaatgtgcccccgccccaggaccctctcccttgtggacaggcagggagatgcatgcgagtgcatgcagcaggggatggggccgtgtccgtgtgccccaccctccctcggctttactcctgcccagtgactgtgaccactgtccgtgttgccttcttgaacagcgattccccccaaccccttcaccaaaggtcttggtacaaccagctgcccattttgtgaaatttttatgtagaataaacatttgtatctgta

SEQ ID NO: 48071 - DNA, 5109 bp, Homo Sapiens
aaaagttccaaactgggactcggaccaagaaaagttcaaagaaaaaaatgaacgagactatattttgcttggtttctatcccagtgaaatcagaatcacatctgccagatagagatatggacaacaatgacttaaagcccagtgctgatcaaaagaatgggtctgataagagcccggctctgcaagaacagagtctgctgagcatgtcttccaccgacctggagctgcaggccctcacaggaagcatgggtgggagaacggagttccaaaaacaagatctaggggaaccagaagaagacagacaaacaaatgacctcagtttcatccaccttacaaagcacagagaactcaagcattctggctcttggccagggcaccggtacagagatcagcaaacacaaaccagtttctccgaggagccccaaagttcgcagctgctccctggtgcaaagctgggagggccgagtcgtgcagcattgagtccaaaatgttcagaccctgctgcctccgaagctcagacgcacacagcattccctaccggtgatcacaaacagaggccaagtgcccgtaacctgaaaggtcacaggtccctcagcccatccagcaacagtgcgttctcaaggacttccttgtccgtggaccaggcaccgacgccaaaagcaggccgaagtcagccctgcgtggatgtccacgggcttggagcccaccctgggcctaagcgggaggtggtgaagggggagcccacgggcccttgcaacagtaaacaactctttgggcagtttctcctgaaaccggtcagccgtcgtccctgggatttgatcagtcagttagaaagttttaacaaggagctccaggaagaggaagaaagcagcagtagcagcagcagcagcagcagcagcagtgaggagagtgaggcggagccgcagcaggagaaccgtgctcactgcagacaggaggatgtgggcttccgcggaaacagcccggaaatgagggttgagccacagccgaggatgtgggtgccggagagccctgtgtgtaggtcgggaagaggtgagagtaagtctgagagctggagtgaggagctgcagcctggccacccacgtgcctggcctccatccccgggccgctttcgcgtggaagaaggtggcggtgcacctttctgctcagcagatggaagcacgagtgcagagaagagacacctggaggttagcaacggaatggacgagctggcaggtagcccatttcctgtgacgagaatgtcttcaagatcaagtgacgcaaaaccactgcccgcgtcctatccagctgaacctagggagccccaggaaagtccgaaaatcaccagtgctttcagctctgtgaaaccaagtgaagcggtccctcggaagtttgacagtggtggagagaggggggcagggctcccactgtccctgtctaacaagaaccgagggctctcagctccagacttacggtctgtggggctcacccctgggcaagaacagggtgccagtgagctagaggggtctttgggtgaagcaagcacaatagaaatccccccaggtgagtccttgcaagccagggctgcaaggatcctgggcattgaggtggcggtggagtccctcctgccgggcatccggagagcgggacagaaccagcctgctgagcccgatgcaagtgcctgcaccccagagtccccccaggaagagttgctatctcgcccagcaccggcagatgtccccagggtgtccactgatgccttttatggcaggaggaagtgcggctggaccaagagccctctctttgtaggggacagggacagtgccaggcgggctcctcaggcttttgagcactcagatgtggacggggttgtcaccagcacagaccctgtccctgagcctgagcccagccccttggagtccaagttcttcgaacaaaaggatgtggaaacaaaaccacccttcaggtccactttattccattttgtagaaagaaccccaagtgtggcaggctctgaaaagagacttagaagcccttccaaagtgattgaaagtttacaagagaaactggcctccccgcctaggagagcagaccctgaccgcctgatgagaatgaaagaggtgagctcagtgtcacggatgagagtcctgagcttcaggaatgccgactcccaggaggacgccgaggaattgaaggccaccacaaggggccaggccgggctcccgggaggccttgtgtctcctggcagtggggaccgtgcccagagattgggccactcactctctgtgtccaaggacagcatctccagggaagagaaggagcatccggcagcacaaaaggagaagagcatggatcaagacttctggtgcccagattcctatgaccctagcagagtggagagggtgtgatgaaatgccggtggagcttgcattccgttgcgaattgagtattctcaagtagctggtagatttagtctatcagccccacttccccatgtagaagctggaagctgctgagtttttagcatcctgataacattctttaccactgccactaggaaacttgccatcctctcagaattgctttgtggcgataaagcaatcgtccgttgaaaccatctgtttttatagcatgaagatttaatgcctataattaggaaggagttttcacagaaaccctccctcatgacagatttgactaagctggtaaatagtttggtgttgctctcattctgggtgaagatttcaatgtggaagatctagcaaatgctttggaaaggcctgtgaatggtgtgctcccctctgtgtctccatggcctgcagtccatgctcttgtgaaggagtttgggacactggctgttgcccggtgtttcagcactttcagtttaggggaaatgtgaatcaataggtatgatccatttctaatcaatttggccttctgctgctggaagtaactttacttataagtaacttgccatcagagaataaaagcaatatcttttaagttcctgaaaaattaaaacttgtactgtaatatactaagagtattatttatctggcagtgaaatattttgatcatttgcaaacacgccattgtctgctttgcactcagtattatctatttttattttctgtatgggtatttagaaattctttatatgaaaaataattgctggtttaaaatagaccattttaacaaagtgactatatttctttttacgaaaatgctatttttctatgatgtaaacaattgttaggcggcagatttttaaggaagtattattttatttaagagtctgtatccctttgtgtgagaggaacccaaagagggttcacttttgctttaaagctctgtcccttacccactgacaactctgctacttttattttatcttagaaaatgtcaatatagacatatcacagggttaataaaagaaacttttcacaaagatttttgtacaagtgtagctatcaggttatatttgaaaataaccctctgaaaaccagccaacattgtcatgacaatttttgctgccgtatcaactagaattaccaaaaaacatagttttatctttgtatgtgtgtggggatctaccctgagaccatgcttttcttcccaccctgccaccccacccctttaaagaaatacgtatttttatctagaatgatcttgaattagtctctgcatatttttagaaagtgcttggggacattatatatatgccattacaaaagcattatgaggcctatgtattctactgtgtttaatactgcattaacctgcacaaagtttatgcattttttcatgcatttttttccttctttctaagtaaggtattcctgacaactaacattccctaaatcatttcccctccctccctccctccctcccttcctttcttccttccttctgtcctccctcccttgctacctcttgccctccttccttcaccctgtcctccttttcccttttattttttccccttctctttcattttattttcttttagagaaaccaccttatctatttttagacatttcgaattcctaaaatgtgaaccgttgggtgatctgtcctttggccctaaaacggctggccgggctgtcccggcctgttctcatctgtaccgtatgattttatttcataataactttatgtatttggactgtaacaaacaaaacagaacctaagtcgccccgaaaaatctttccaagccttttcaaaacacttatctgcagtccagaattcagctcttatgaaaagtgagagtgcactccagttttcacagcagcaataagtgcgggaaacaaaaagatcctcttcccaggaaaagttgagtggggaagagttcagacactgttgtagctggtgaatcattgaagtcacctggtagtaccaaataagggctgaggcgcctggaggtctttgtggggtcttccctctttaaatgcaaacgtaagaaggtatatgtgtatatacatttatatacgtgcacatgtatactcgtacatgtatgcacacatacccatacatgtatatgaactccgttctgatttcctctgaaattttgttgataccatctaaatacctctttgaatcaaaataacttaattttagctcattcctcaagagaaagagaaggatccccaaggaagaaaaactgttgtaccttctgtgattctcaaaccaaaatgtgatgcgcttctgttttgttatcttaaattgttgtatcatatctttctgaaaccattctgaattaagttgaaattttcaacatttatactttaactgttctaaatttaagcctacatgtaaatcttttttggggggaaggtaacttgaaaagtttaacttgaaaatttgacctttaaactttcatattctaaggtaaataatagcctataaccaacaacagctttcccagaggtcttgaatttaacactaattgtttagttattgtttctatttctcatacatacataacttcgttttttgtggctggaagaaaaagtttctatattttgtatttgtctttgttcttctcatgcacacaatttactgttggtgtttaataatttggagctcataaaattaaaagttgtaattttgacc

SEQ ID NO: 48072 - DNA, 327 bp, Homo Sapiens
gtctggttatgcttcatgacctgcattgtggtcagtgccattttgcagactttgatcacagtgaaacgttccatgggaacttgggccatgagaaacatccttcctaaccacgtgactgcagaaacatccttatcacatcctcctgggcaaaggcccaacagcctgactgcagggacatccttgccatatcctgctgggcagcaagctctaccacccagatccctccctcccagtcccatgattaccccagcctgtgagtggcagttggttctggcactaagctggtttcctcctccccagggttttgctggcaataaagatgttgct

SEQ ID NO: 48073 - DNA, 1029 bp, Homo Sapiens
agcaaggcggctgcagcagctgtagaagaggtcagctcagccggccagtttgaggagctgctgcgcctcaaagccaagtccctccttgtgccacaatgtgcacagatgaacgaagttatggcagagttagctaaagaacaccctcaagtttcatttgtgaagttggaagctgaaggtgttcctgaagtatctgaaaaatatgaaattggctctgttcccacttttctgtttttcaataattctcagaaaattgaccgattagatggtgcacacatcccagagttgaccaaaaaagctcagcgacatctagtggctccttcccacccagcactgatgaacatcttaaagaccaaaaaagctcagcgacatgcatctagtggctccttcccacccagcactgacgaacatcttaaagaagatctcaaccttcgcttacagaaactgactcatgctgccccctgcatgctgtttatgaaaggaactcctcaagaaccactctgtggtttcagcaagcagatggtggaaattgttcacaaacataatattagtttagcagttttgatgtctttagatcaagaggttcgacaggggctcaaagcctattccaattggcctacctatcctcagctctacgtttctggagagctcataggaggacttgatataattaaggagatacacgcatctgaagaactagatataatttgtcccaaagctcccaaattagaggaaaggctcaaagtgctgacaaatgaagcttctatgatgctctttatgaaaggaaacaaacaggaagcaaaatgtggattcagcaaacaaattctggaaatactaaatagtactggtggtgaatatgaaacattcgatatattggaggatgaaggagatcggcaaggattaaaagcttactcaaattggccaacataccctcagctgtatgtgaaaggggagctggtgggaggattggatattgtgaaagagctgaaagaaaatggtgaattgctgcctatactgagaggagaaaattaa

SEQ ID NO: 48074 - DNA, 1590 bp, Homo Sapiens
atgagatcggagaaatcccttacgctggcggcgccgggggaggtccgtgggccggagggagagcaacaggatgcgggagacttcccggaggccggcgggggcgggggctgctgtagtagcgagcggctggtgatcaatatctccgggctgcgctttgagacacaattgcgcaccctgtcgctgtttccggacacgctgctcggagaccctggccggcgagtccgcttcttcgaccccctgaggaacgagtacttcttcgaccgcaaccggcccagcttcgacgccatcctctactactaccagtctgggggccgcctgcggaggccggtcaacgtgcccctggacattttcctggaggagatccgcttctaccagctgggggacgaggccctggcggccttccgggaggacgagggctgcctgcccgaaggtggcgaggacgagaagccgctgccctcccagcccttccagcgccaggtgtggctgctctttgagtacccagagagctctgggccggccaggggcatcgccatcgtctccgtgttggtcattctcatctccatagtcatcttttgcctggagaccttaccccagttccgtgtagatggtcgaggtggaaacaatggtggtgtgagtcgagtctccccagtttccagggggagtcaggaggaagaggaggatgaagacgattcctacacatttcatcatggcatcacccctggggaaatggggaccgggggctcctcctcactcagtactcttgggggctccttctttacagaccccttctttctggtggagacgctgtgcattgtctggttcacttttgagctcctggtgcgcttctccgcctgccctagcaagccggccttcttccggaacatcatgaacatcattgacttggtggctatcttcccctacttcatcaccctgggcactgagctggtgcagcagcaggagcagcaaccagccagtggaggaggcggccagaatgggcagcaggccatgtccctggccatcctccgagtcatccgcctggtccgggtgttccgcatcttcaagctctcccgccactccaaggggctgcagatcctgggcaagaccttgcaggcctccatgagggagctggggctgctcatcttcttcctcttcatcggggtcatcctcttctccagtgccgtctacttcgcagaggctgacgatgacgattcgctttttcccagcatcccggatgccttctggtgggcagtggttacaatgaccacggtaggttacggggacatgtaccccatgactgtggggggaaagatcgtgggctcgctgtgtgccatcgctggggtcctcaccattgccctgcctgtgcccgtcatcgtctccaacttcaactacttctaccaccgggagacggagcaggaggagcaaggccagtatacccacgtcacttgtgggcagcctgcgccggacctgagggcaactgacaacggacttggcaagcctgacttccccgaggctaaccgggaacggagacccagctaccttcctacaccacatcgggcctatgcagagaaaagaatgctcacggaggtctga

SEQ ID NO: 48075 - DNA, 2441 bp, Homo Sapiens
gtgattccacttcagtgttcatttttatttttctgaaagtaaagatactcctgtaaaatgccattgtccatagaaaaaatattaactcattaagtttaaagacagatgataccttaatattaacttacttacacgattttaaagacgcctactgagagaactcaaatttataaactctgttgcctaataattatggtttaattctatatcctcttgcttgttacagttatacttaatttgcagtagatttttaaatgaaattatttgaatgtattccagactattttatttaaaatcatcatacatcatatactttgaacctttattttctaatgcaatcataaacattttaagttttattaactcactagcatccccactgactatattctgttttgctttatctgctcaagcactttcgaccatattttattttaggatttttatttttatcttccacagctggatattgctatttcacttttatttcacatgcagctttaagacgtatgagcatcagcacagcaaaatggttccagcctacagaatgcagtctcccagggccctgccaagaacatatctgtatgtctggccctacaaatgacaaatggtaattcccttctattttagctcttaattagttgctttcactatttccgaatatacctgtggctaagtttttattgaaacactcaaaaataccacttctcagtatgaacacaattgctaagagcctaatttggttctggactatggtcaacctgtgtgccttgttagttctctccagcagctggtgagtaaggaaatgacccttcaatttcctcttctttttcctctgacctctgtgacttaatttttcttaatgtctccaagtcatcaagggcttaataatttatgaattttacaaaaagcatttaaggaataagaaagaggttctgtgatttttcagactctgaaaattcattttgattctacatattccagaaatatactgggttggatgctagagtgaagaaagccgtccagacaattctcccagtccattcatttcttcattcatttgttcattcagtagttattgagtgcttatttcctgggtgcctggctctaggctatgtcctgagacatacagtggacagggtctctaccctcctcacaacaccctcttcaccctccacgccaccccctactactcactctcaccctagcaaggagcttcgtgctaataagagagagtcttacctgaatggcaatcgcccagattaacagtggagacagtaatgcaatgcaggaagttaagtttttaaaggtgattctgtgcagtaaggtataaaacagatatataataaatagcctagcttagtctaacatctctttagaattacacagctaaaaaggaaaaaaaacaccaaaataagataaaataaaacaaatttaaacaccaaaataagatataataaaacatttgtttttgcaaaataaggcccaatgttatggcctaatgaaagctatatacttgtgctatctaaagcactactttgtaaagatgactacccaagattgtaaatacaaaatttaaaaaggtacttaaattttctggaatatccatgtttcagaggtaatatttactttctatttcagtggcttaaattataacgttttggcttaagtgtcttttatcaatacaatgataagacaccttaatcctgagagagaaaattaagtactgtatataggtgtactttgcttctcacaatgattgtgcaaaaagtcacgtgtaaattgaacttttgtaaatcaaattgtattttaaatgcattaggggagctgccatttagaggaaacttgtgaattctttcataaagcagaaaaccattttataatacaaataaccattctctgatttatctcttttgtatgtttggattttcaatatcgactttgcttaaaacagagcccacctgcatagtaactgtgttttgccaaggctgcttgtgctaccagtttgctggtggctaacggcttgtgcttgaaagtcttctgaagtctgatgtgaattgagctatcaagcaatgctatcatagcacagtagcagtcctgaacagtctgagcagccaacccatttcaacaaaattgaacacaggactcttctgctcagcagcatctcttttctcagatgtggccatgttacagtagagggtattccataagcacatattccataaagtgctcagagtcacaggttttataataaattatgttattatgtaaacgaattgcatgcatgttgaaattttttagcagtactttagcttgaaagtactcgtacaaatactgttagatttagttgcaaataattgttctcaagttattgcaataaatgtcaaatgaaacaagctcttgtgtaaatagacttctgtgcctaatagtgacattgtttc

SEQ ID NO: 48076 - DNA, 3571 bp, Homo Sapiens
ggggactacgggtcggcgttgggctcagtgggctcgaaacaaagggctgtccggtggggattcgtcgcggcgccttctgagtggtcgggtcgaggcttctcggcctagcagtgccctcgctgcgcgatctcaggcgggttctcctcggctccgcgcagcccgcgccgcggtgggggacccggcgcagcggcacctgctgccgagggaccccgcggcccgccccggtgctcgtgatggggctgatcttcgccaaactgtggagcctcttctgtaaccaagaacacaaagtaattatagtgggactggataatgcagggaaaaccaccattctttaccaattcttaatgaatgaagtggttcatacttctccaaccataggaagcaatgttgaagaaatagttgtgaagaacactcattttcttatgtgggatattggtggtcaggagtctctgcgatcatcctggaacacatattactcaaatacagagttcatcattcttgttgttgatagcattgacagggaacgactagctattacaaaagaagaattatacagaatgttggctcatgaggatttacggaaggctgcagtccttatctttgcaaataaacaggatatgaaagggtgtatgacagcagctgaaatctcgaaatacctcacccttagttcaattaaggatcatccatggcacattcaatcctgctgtgctctcacaggagaagggttatgccaaggtctagagtggatgacctcccggattggtgtgagataacttttttgcttgaaagagactgctctatttattctgtgacatgaacattttttcctagtacctttggctgctaaggcagcagcatgtttaatttataacaacacaaacctctgagagcaacacttgaatcaagtgcagctgaactggaacataaaagattttttcttaactttttttttttaacacactaatcttcagttggatgaatgtaatgtataactatgttttcagcaacaattcttctgtttattctaattaatcagtgactgccttgtaagaaatgtttgtcatatgcgtgatgtcttctgaaatattcttataaccttaatgaccaattgctttcaattcttgaccagcactccctcccaaccagagaattactggtttgatagagtagtcttggaaaccatcaggtactgcctgcagacttctccagcactaaatatatttgttccctctataaaccattcatctttcggacagaacttactgtaaagaaagaaatctgcctagaggatatatgtaaggaagattccacatcatgagtacttgccttttaactttcccccacattactgttgagtcatggaataatgtttaagttgttatttgcatggaaattaagtaggctgtttatttatctaaaggaatcaagtccactcttctgcctgcaacatttgttcaaaaactaaccaaggtaaaatatttatttgaaagcccaactttgatgttaaatattcttgaataaatctgttattttaagaatatcacattattcaatgcatataaaactatcagaagttagtaaatcataccagcactaaaaataagacaattggaatatattttagcatcagtttacaaacaactttattatcaacagaaattttagctcttttctttgcaagatatatcacagctgctttgggcagtagctgaagccgaagtatgaacagtccattttgtttcttaaaatttgaagtcgtgtctgtcatagcatttttactaccagcagtatgttacttaaaaaactacatggctttccttgaatttatttgacggtattatgtaatagacttgaaacaattgccatctttgtagttatgccttgggttctaaaatgttataggaaactgctgaattgaatcctagcttttagaatattaataggagactcaaagttaatattcttaacaacttaaaattaaaaaaagtcataatctatcaaaagtttatttattggatggcattaaaacatttttgaggcagttgtctaatatgaacaataatctaaacaatatattccttaaattaagaggaaagacaagtgtcgtatttcgatcctgtttattcaaatgtgtgattttgctgaaatgaaagggataaaatgaatacttagagaataatacttcatttttgcagtactttttaattttgataaaaaagatacaaagttcataatatcaaaatatgtgttcaaaattggtattttaattttaatatttttgtaagttgatttaaattttgctcttttttcaggtgtgcttggtttattatatttagtcaagttaatttagtcgaatgtggtaacatttttctgatttatctttagttggagcacacccttgaactgaacagtggccaaaggaaagctttctgggctttggaaagtagttgtttaactttgttttaagccgttttcttagtgattctgtatcaagtagaggataagtgtagtttaacttagtttttaatataacccataatcaagaacatgagcgaaaagcagacataaatcgatatggatggtttgtggtgtgtgtgggatgtgggggaattaagaaaatgccatttacctaagcacagtttgcctgaatttctgcttggttgtgttgtttaccgtaagtactgagggtagtttccctaagtctgtcctgagaaaaagcatacttagtactcctgtatttgttcttatgaaatgactatctgccttcttgtatctagtaagattggctggctcaattttcttctgtcaaattatatggttattttttatattaccacatcagcattatattaaaagtgtttttaatagttgattgtattttgccaactactagtatagactcaaatttgctatttaatttttaaaatacaatttattttgtaaatcctttaaaaaatatttggttagttttggattagaaatgatttatgttagccatgtgttgaagatgaaattggcatcagtgtagacggtgctgattgggaaaagttcatgattaggaaattcatgtaagactttttaagagtattttttaggttttcactcaatctttcctgtcacagtaacgtgaaaactgattattctttactccaagagaatgttttaacccaagcaagtatctaatactagagcattggttctgacattcattgtaaatcagtgaactgtaagatactgtctaaaaaatgtacatttgtaattagtgcctttattcatattttgaaataagttcttagttttatattatacctgttctttagaagtcatgttagcagctaattatttcagtgatgaaataatttgtgttttatatcccccttcacctccatgtattggttagcacagtttatagtaagtgaaaagcaagggacccacctacattaccttcaggagactgttctaccttttaatttgaaaacaaggaaattaaattttaacagaaatcttttaagtatgttataaccaaagtgttcaattatccttgcaagttcaaatacagcatttttcttaa
